United States Patent Application Publication US 2005/0228172 A9 - sequence listing, part 88

SEQ ID NO: 397836 - DNA, 587 bp, Homo sapiens
gaaaataaatatgaaattatatgacatacaattatattgttgaaagactgaataaataaatgaactaagctgtaagaaaaaaagatgatgatattaaatgatatagaagtaaaaacctgggctggtatagcataattaatgtatcagtaaagtatgtaccttttagaagtggcaggaagacagcatagagagtgagacctgaccaaaagctttaaggaaaattctatacccttaaatgagattaaagtggactcaggaaaacatgcgccacaagaatggarggacaaatgttccagacgggccaaatctcagagcatctctaccttctccaggaggaaaggggaggcaaagcagcaggcagaagacagcacggccaggtcagcacagggcacgccaggccaagccaggtggtctccatcgtacaggtagtgatgagccactgccaggtgggctttattcattagtttgttttgtttcctttactaacgaagacacatgatcaaagttgaccttagtaagtgttgctgcagctgaacaaaaagatagataaaaccagcgttttaaaaattatgttgtatacagcacta

SEQ ID NO: 397837 - DNA, 536 bp, Homo sapiens
agtgatgagccactgccaggtgggctttattcattagtttgttttgtttcctttactaacgaagacacatgatcaaagttgaccttagtaagtgttgctgcagctgaacaaaaagatagataaaaccagcgttttaaaaattatgttgtayacagcactagcctcagtaagatattagtagaacacacaggcacacacaggcacacacactcacactgaggccaaattattctggcaaatgctgggttaagcaaactaaaagaaacatctttagtgctggacttctcagaacctggaatatggctatatgactcatgaaacagcaaggttaagacagagcatgtcattttttcccagaaatgttgaaacactttccttcccttggcttcagtgtcactttctttctcctggttctccatcaacctctttggctgctcctccttgatttcctttttgacaatctgctgctgctcagccattctcttttaattccccaaggatttctcaagtgtgttactattcctgcattttaaact

SEQ ID NO: 397838 - DNA, 536 bp, Homo sapiens
agtgatgagccactgccaggtgggctttattcattagtttgttttgtttcctttactaacgaagacacatgatcaaagttgaccttagtaagtgttgctgcagctgaacaaaaagatagataaaaccagcgttttaaaaattatgttgtatacagcactagcctcagtaagatattagtagaacacacaggcacacacaggcacacacactcacactgaggccaaattattctggcaaatgctgggttaagcaaactaaaagaaayatctttagtgctggacttctcagaacctggaatatggctatatgactcatgaaacagcaaggttaagacagagcatgtcattttttcccagaaatgttgaaacactttccttcccttggcttcagtgtcactttctttctcctggttctccatcaacctctttggctgctcctccttgatttcctttttgacaatctgctgctgctcagccattctcttttaattccccaaggatttctcaagtgtgttactattcctgcattttaaact

SEQ ID NO: 397839 - DNA, 414 bp, Homo sapiens
acgccaggccaagccaggtggtctccatcgtacaggtagtgatgagccactgccaggtgggctttattcattagtttgttttgtttcctttactaacgaagacacatgatcaaagttgaccttagtaagtgttgctgcagctgaacaaaaagatagataaaaccagcgttttaaaaattatgttgtatacagcactagcctcagtaagatattagtagaacacacaggcacacacaggcacacacactcacactgaggccaaattattctggcaaatgctgggttaagcaaactaaaagaaacatctttagwgctggacttctcagaacctggaatatggctatatgactcatgaaacagcaaggttaagacagagcatgtcattttttcccagaaatgttgaaacactttcct

SEQ ID NO: 397840 - DNA, 553 bp, Homo sapiens
tcatgtgaaataatcaagaccatgtgttattgtaaatatttctagcttacaacacaacaacctgatttttactgtttgaaataaccrtaatataaatcagttaattaaaaattgcataaataatcctttcaaataaaattctgcctaaattttacattactcatatgttcaaatgataatgagctcataggattttccaatacctcagtcaaaacattgtactgattccagctgtgggaatagtacctgaaagttatcttacagatggggaaaaggtacctatgtgacattggcctttgcactactgtacccttttgggtcaggaaaaagctgttcccttaaagtcctaaaatctcttctgtcaggtctaaagggtgggtgggaaacatagtttttaaattttagccacagatgttttattccttgcttaaagcagtgactagataaaggccactagaagagtctccaacgttcctttagaagcatgtgtctgagaacatcttcctgaaacactcccttgtctctgcccaaaatcaccttaggtaggaaaatc

SEQ ID NO: 397841 - DNA, 553 bp, Homo sapiens
tcatgtgaaataatcaagaccatgtgttattgtaaatatttctagcttacaacacaacaacctgatttttactgtttgaaataaccataatataaatcagttaattaaaaattgcataaataatcctttcaaataaaattctgcctaaattttacattactcatawgttcaaatgataatgagctcataggattttccaatacctcagtcaaaacattgtactgattccagctgtgggaatagtacctgaaagttatcttacagatggggaaaaggtacctatgtgacattggcctttgcactactgtacccttttgggtcaggaaaaagctgttcccttaaagtcctaaaatctcttctgtcaggtctaaagggtgggtgggaaacatagtttttaaattttagccacagatgttttattccttgcttaaagcagtgactagataaaggccactagaagagtctccaacgttcctttagaagcatgtgtctgagaacatcttcctgaaacactcccttgtctctgcccaaaatcaccttaggtaggaaaatc

SEQ ID NO: 397842 - DNA, 570 bp, Homo sapiens
gtcattattaagcaaaatgaaacagaaactgtcacagaattccctaagataaattattttgctttaatcttcaattcatcatgtgaaataatcaagaccatgtgttattgtaaatatttctagcttacaacacaacaacctgatttttactgtttgaaataaccataatataaatcagttaattaaaaattgcataaataatcctttcaaataaaattctgcctaaattttacattactcatatgttcaaatgataatgagctcataggattttccaatacctcagtcaaaacattgtactgattccagctgtgggaatagtacctgaaagttatcttacagatggggaaaaggtacctatgtgacattggcctttgcactactgtacccttttgggtcaggaaaaagctgttcccttaaartcctaaaatctcttctgtcaggtctaaagggtgggtgggaaacatagtttttaaattttagccacagatgttttattccttgcttaaagcagtgactagataaaggccactagaagagtctccaacgttcctttagaagcatgtgtct

SEQ ID NO: 397843 - DNA, 561 bp, Homo sapiens
ggcctccagttccatccatgtgtctgcaaaaattatgattctattgttttttacgcctgaatagtatttcattgtgtatattttctacattttctttctccaattatttgttgatggacattaggttgattttatatctgtgctactgtgaatagtgttgcaacaaatataaaagtacagttatatttctgatacattgatttttttttcctttgcaaaaatactcagcggtgggattgctgaatcagacagagccaattgatgatcagtaatggtggccaataatcagctggaaacaaagtacttagcagggcttgaaaacaccaaaactctgagaccactgaccttcaaaaacttcaacagccctgagtgaaaagtccaaacacatttatctaccattcaaagaccctttattgtctgtcctctgcgcatctcagtagtctctttttaccacactgtctatatactgcatgagycatttatatgaaactatctgacactccaaggcatcttatactatatattcaatcatgtatccctagtaattagcacagtcctggc

SEQ ID NO: 397844 - DNA, 384 bp, Homo sapiens
tagtctctttttaccacactgtctatatactgcatgagccatttatatgaaactatctgacactccaaggcatcttatactatatattcaatcatgtatccctagtaattagcacagtcctggcatatagtttgctactaaacttttgcagaatgaaggaattatcttgtatccaggttccaagttttaaggtgattcttcacaaaaaaaaagtattacagctcacaaataatctacttcyttttttagaaatgggattgattttaatcttataccctaataacattactttcatttactcctatctaaatatactgtcctaagagagcaataagaaagagagttgaagctggagcttgaagaattgtacatggtcctgtgata

SEQ ID NO: 397845 - DNA, 568 bp, Homo sapiens
tctggcacacagtaggtgcatcacaaacatctgccgacttcacactctgttgccttctcaagccttcttgtcaagtcttcagtgaaaaggaattgctgattgagcaagaattaaacttctagagactcctggatccactgaagtttgagacaaggtgagatttgtttactgccatattcctagctcatagcatactgtagtcaattaaaaaagtttgttgaatcagtgagtgaattgattcatacgtcatacttagctatatattttccgagtaaaatttataaatttaatggtttacttctagtataattttactttacttattcaacgaacctgacaattcaactaggtgccaggcacaccgctgctgaagaaaaagaggtataagatacaatttctgtctacaagaaagccacggtctaaaaagtagaaacatatgaacaaatcataacaataaacaggctaaattcaaaatcagaggggtttgtttctattttaaacagctcttgtcaggaagtgcgagaaagttctaaacaagaaatgatcmaacacaccatccaagcatgaa

SEQ ID NO: 397846 - DNA, 486 bp, Homo sapiens
ctaggctaaagagcctagatgggtcactcacatggctggcagtgcatgttggctgctgagtgtgatgcgtatctggcctctccatgttatctggagtgctcacaacgtggtagttggtcccaagagrcacaggcaaatactacaaagcttcttaggacctagccttggaggtcctagaatacaacttctgctccatcctgttggtaaagcaagtcattgtgatcagcacagattcaagaaatgggagattcgactctaactctccatgtaaagagcagcatgttcatgcagggaggaaagaaattgagggcataatcttgaagactatcatattacaccattattccaactaatgaacattatgttttagatgggtagtactagctactcatctctcccccagaaacccaagctaagcatggacatattgaagagaatgtcaacaccattaaaaaaactctagaaaaatcacatgtgatgactgag

SEQ ID NO: 397847 - DNA, 486 bp, Homo sapiens
ctaggctaaagagcctagatgggtcactcacatggctggcagtgcatgttggctgctgagtgtgatgcgtatctggcctctccatgttatctggagtgctcacaacgtggtagttggtcccaagagacacaggcaaatactacaaagcttcttaggacctagccttggaggtcctagaatacaacttctgctccatcctrttggtaaagcaagtcattgtgatcagcacagattcaagaaatgggagattcgactctaactctccatgtaaagagcagcatgttcatgcagggaggaaagaaattgagggcataatcttgaagactatcatattacaccattattccaactaatgaacattatgttttagatgggtagtactagctactcatctctcccccagaaacccaagctaagcatggacatattgaagagaatgtcaacaccattaaaaaaactctagaaaaatcacatgtgatgactgag

SEQ ID NO: 397848 - DNA, 534 bp, Homo sapiens
gcattggtgcgatcttggctcactgcaagctctgcctccckgtttcacaccattctcctgcctcagcctcccgagaagctgggactacaggcacccaccaccacacctggctaattttttgtattttttgtagagacagggtttcaccgtattaaccaggatggtctcgatctcctgaccttttggtccgcccactccggcctccaaaagtgctgggattacaggcgtgatccactgtgcccggctcctcttgttttgagaagtgtctgtttatgttccttgtcaatgttttaatgaggttgttttcttaatgttcaacatcactaatcatcagataaatgtaaatcaatgtgagataccatctcatattagtcagaatggctactattaaaaagtaaaaaaataacaaattctggttagacttcagagaaaatgaaatgcttatacactgttggtgagaatgtaaattagttcagccactgtgaaaagcagttgggagatttttcaaagaatttaaaacagaagtaccattca

SEQ ID NO: 397849 - DNA, 610 bp, Homo sapiens
gtcaatcactacaattaaggtgatttttcaaatggtttattttgtatttgcaaaggaaaggcagcttattgcgatagaataagaatcccacttctatatctttttttttttttttttttttgagacggagtcttgctctgtggcgcaggctggagtgcattggtgcgatcttggctcactgcaagctctgcctcccggtttcacaccattctcctgcctcagcctcccgagaagctgggactacaggcacccaccaccacacctggctaattttttgtattttttgtagagacagggtttcaccgtattaaccaggatggtctcgatctcctgaccttttggtccgcccacyccggcctccaaaagtgctgggattacaggcgtgatccactgtgcccggctcctcttgttttgagaagtgtctgtttatgttccttgtcaatgttttaatgaggttgttttcttaatgttcaacatcactaatcatcagataaatgtaaatcaatgtgagataccatctcatattagtcagaatggctactattaaaaagtaaaaaaataacaaattctggttagacttcagagaaaatgaaatgcttatacactgttg

SEQ ID NO: 397850 - DNA, 534 bp, Homo sapiens
gcattggtgcgatcttggctcactgcaagctctgcctcccggtttcacaccattctcctgcctcagcctcccgagaagctgggactacaggcacccaccaccacacctggctaattttttgtattttttgtagagacagggtttcaccgtattaaccaggatggtctcgatctcctgaccttttggtccgcccactccggcctccaaaagtgctgggattacaggcgtgatccactgtgcccggctcctcttgttttgagaagtgtctgtttaygttccttgtcaatgttttaatgaggttgttttcttaatgttcaacatcactaatcatcagataaatgtaaatcaatgtgagataccatctcatattagtcagaatggctactattaaaaagtaaaaaaataacaaattctggttagacttcagagaaaatgaaatgcttatacactgttggtgagaatgtaaattagttcagccactgtgaaaagcagttgggagatttttcaaagaatttaaaacagaagtaccattca

SEQ ID NO: 397851 - DNA, 534 bp, Homo sapiens
gcattggtgcgatcttggctcactgcaagctctgcctcccggtttcacaccattctcctgcctcagcctcccgagaagctgggactacaggcacccaccaccacacctggctaattttttgtattttttgtagagacagggtttcaccgtattaaccaggatggtctcgatctcctgaccttttggtccgcccactccggcctccaaaagtgctgggattacaggcgtgatccactgtgcccggctcctcttgttttgagaagtgtctgtttatgttccttgtcaatgttttaatgrggttgttttcttaatgttcaacatcactaatcatcagataaatgtaaatcaatgtgagataccatctcatattagtcagaatggctactattaaaaagtaaaaaaataacaaattctggttagacttcagagaaaatgaaatgcttatacactgttggtgagaatgtaaattagttcagccactgtgaaaagcagttgggagatttttcaaagaatttaaaacagaagtaccattca

SEQ ID NO: 397852 - DNA, 642 bp, Homo sapiens
acaaccaggtaatacaccatgggcattgggctctgagaagcgctaacttcaggggtgacccagtacatttccagctgtggtagctgtggtgaaagacttctgtttgagaaaagcaggggggaaagtaaagggacctctgcgttgcacatgatatgccagctcaaccgcagtggggtagagcaccaagcggattcttagagtccctgagtccaggcctagggtcttcttggtcagcatttctgcacttgccctgggccaaaggtcgagtcccaggcattgcagaatttatctcaagataattaaagagtccttgggctttaagtgagaaagtgatgatgatttggtggaaaccccccatgggccagtagtgttggcagtcatagaagaggctcttctgcctgaagacaggggaaggaagagtagaaaatactttgtcttattccctaagtgcaaggttagctacaataaaatagaagagcaggtaaattttgaagatcctatgctttaatctgtggctcccaggtagcatctgtggacccactcatggctaggggaayttgccaccctataggcagagacacaatcctggctgactttgctatctattaatcacagagtcctagggctttgaataaacttata

SEQ ID NO: 397853 - DNA, 590 bp, Homo sapiens
ctggctgactttgctatctattaatcacagagtcctagggctttgaataaacttatatggtagccaagtagtggttgcagtgggccttgcgtgagaccaagttctgtgcctacttcaggtgtgaaccagcacagtctcagtggtggtggccacaggagtgcttatgttacccmaaccccagctccacatgtctcagcacagaaagagagactgctgatttgagataaagtaaggaaagagaacatgagtctctacttgataaatcaagagaatttttcttgatattaatccaaggccaccaaggcagtacctctacgtgtttgcataaactacagtgctattgggtttgggacccaagtttctttgaatacctggaaagtgttcccaaaattaatgagcactaacaagcccagactgtgaagactacaataaagactgaactcttcaatgcccagatacagatgaacatctacatgtatcaaggccatccaggaaaacatgacctcaccaaacaagctaaataaactgccagggaaaaatcctggaaaaacagagatatgtgacttttcatacaggaaatccaaaatagc

SEQ ID NO: 397854 - DNA, 618 bp, Homo sapiens
acttatatggtagccaagtagtggttgcagtgggccttgcgtgagaccaagttctgtgcctacttcaggtgtgaaccagcacagtctcagtggtggtggccacaggagtgcttatgttacccaaaccccagctccacatgtctcagcacagaaagagagactgctgatttgagataaagtaaggaaagagaacatgagtctctacttgataaatcaagagaatttttcttgatattaatccaaggccaccaaggcagtacctctacgtgtttgcataaactacagtgctattgggtttgggacccaagtttctttgaatacctggaaagtgttcccaaarttaatgagcactaacaagcccagactgtgaagactacaataaagactgaactcttcaatgcccagatacagatgaacatctacatgtatcaaggccatccaggaaaacatgacctcaccaaacaagctaaataaactgccagggaaaaatcctggaaaaacagagatatgtgacttttcatacaggaaatccaaaatagcaggttgaggtaattcaaagaaatgtacaatataacacagagaaggaattcaaaattatatcagataaattttaacaat

SEQ ID NO: 397855 - DNA, 618 bp, Homo sapiens
acttatatggtagccaagtagtggttgcagtgggccttgcgtgagaccaagttctgtgcctacttcaggtgtgaaccagcacagtctcagtggtggtggccacaggagtgcttatgttacccaaaccccagctccacatgtctcagcacagaaagagagactgctgatttgagataaagtaaggaaagagaacatgagtctctacttgataaatcaagagaatttttcttgatattaatccaaggccaccaaggcagtacctctacgtgtttgcataaactacagtgctattgggtttgggacccaagtttctttgaatacctggaaagtgttcccaaaattaatgrgcactaacaagcccagactgtgaagactacaataaagactgaactcttcaatgcccagatacagatgaacatctacatgtatcaaggccatccaggaaaacatgacctcaccaaacaagctaaataaactgccagggaaaaatcctggaaaaacagagatatgtgacttttcatacaggaaatccaaaatagcaggttgaggtaattcaaagaaatgtacaatataacacagagaaggaattcaaaattatatcagataaattttaacaat

SEQ ID NO: 397856 - DNA, 593 bp, Homo sapiens
aataacattcagtggaactccaatacatctgacagcagaattttcagggaaaaatttacaggctgggagactggcatgacatatttaaaaagctgaagaaaaaaaaaagacttttactttagaataatgtatctggcaaaaaagtctcttaaacttgacagaaaaataagaactttttccgacaaagaaaaactgagggatttcattaacaccagacctgtcctacaagaaatgctaaagggatatcttaacctaaaagaaaaaaagtgagcaagaagaaatcatctgaaggtacaggactcactagcaatagcacaaggaaaaacacagaatattataatatggcaattatggggtgcaaaaatctsaaatacaaagagtaaacatatgaactttaaagtagattttcccaattctatgaagaaagtcattggtagcttgatgggaatggtattgaatctataaattaccttgggcagtatggtcattttcacgatattgattcttcctacccatgagcatggaatgttcttccatttgtttgtaccctcttttatttccttgagcagtggtttgtagctctccctgaagag

SEQ ID NO: 397857 - DNA, 593 bp, Homo sapiens
aataacattcagtggaactccaatacatctgacagcagaattttcagggaaaaatttacaggctgggagactggcatgacatatttaaaaagctgaagaaaaaaaaaagacttttactttagaataatgtatctggcaaaaaagtctcttaaacttgacagaaaaataagaactttttccgacaaagaaaaactgagggatttcattaacaccagacctgtcctacaagaaatgctaaagggatatcttaacctaaaagaaaaaaagtgagcaagaagaaatcatctgaaggtacaggactcactagcaatagcacaaggaaaaacacagaatattataatatggcaattatggggtgcaaaaatctcaaatacaaagagtaaacatatgaactttaaagtagattttcccaattctatgaagaaagtcattggtagcttgatgggaatggyattgaatctataaattaccttgggcagtatggtcattttcacgatattgattcttcctacccatgagcatggaatgttcttccatttgtttgtaccctcttttatttccttgagcagtggtttgtagctctccctgaagag

SEQ ID NO: 397858 - DNA, 536 bp, Homo sapiens
tgggtgagttgatgtctcacccttcttctgctcatgctcagtgcactgcacccactgtgctgcaccctcagtctgacactccccagtgagatgaacctggtacctcatttggaaatgcagaaatcacccatcttctgtgtcactcattctgggagctgtagacttgagctgttgctattcggccatcttggctccaatmtctgttttgcttgtttctttgtttatgcaatcagtgttaaattgtccagtctaaaatcatgtattatattattttcaagcctcatggtaatttcaaatcaaaaagtgtaccacagatatacaaaaagtaaaaagcaagaaattagattataattcaagagaaatcaccttcactaaaaggaagacagaaagaaaggaaagaaggaagagaggaaaaaaatcaatcagaaaacaaaaaatagcagaagtaagtgcttatgactgataacattgaatttaaatgaactaaatactccagtcaaaagaaaaatagtggatgagtggatagagaagcagaa

SEQ ID NO: 397859 - DNA, 531 bp, Homo sapiens
gtgatgtttgcattcatctcacagagttcaacctttcctttgattgagcagttttgaaacactctttttgtaaaatctgctagtggatatttggaacgctgtgaggcctatggtggaaaaaacataccttcacataagaactgtgaagcaggtttcctaaaaacagccttgtgatgtgtgcaytcatctcgcagaggtaagcatttcttttctctgatcagtctggaaactctgttcttgtacaatctgaaaaggagtatttttgatcactttgaggcttatgttgacaaaggaaatatcttcacatacaaagtataaggaaagattctgagatacctctttgtgatatgtgcattcatctcacagatttgaacctctcttttgcttcagcagtttggaaacagtatttttgcagaatctgcaaacggatatttgtgagcactttgaggcctatgcagaaaaagaagtatcttcatagaaaactataaagaagttttctgagaaactgttttgtgatgtctgctttcatct

SEQ ID NO: 397860 - DNA, 531 bp, Homo sapiens
gtgatgtttgcattcatctcacagagttcaacctttcctttgattgagcagttttgaaacactctttttgtaaaatctgctagtggatatttggaacgctgtgaggcctatggtggaaaaaacataccttcacataagaactgtgaagcaggtttcctaaaaacagccttgtgatgtgtgcactcatctcrcagaggtaagcatttcttttctctgatcagtctggaaactctgttcttgtacaatctgaaaaggagtatttttgatcactttgaggcttatgttgacaaaggaaatatcttcacatacaaagtataaggaaagattctgagatacctctttgtgatatgtgcattcatctcacagatttgaacctctcttttgcttcagcagtttggaaacagtatttttgcagaatctgcaaacggatatttgtgagcactttgaggcctatgcagaaaaagaagtatcttcatagaaaactataaagaagttttctgagaaactgttttgtgatgtctgctttcatct

SEQ ID NO: 397861 - DNA, 531 bp, Homo sapiens
gtgatgtttgcattcatctcacagagttcaacctttcctttgattgagcagttttgaaacactctttttgtaaaatctgctagtggatatttggaacgctgtgaggcctatggtggaaaaaacataccttcacataagaactgtgaagcaggtttcctaaaaacagccttgtgatgtgtgcactcatctcgcagaggtaagcatttcttttctctgatcagtctggaaactctgttcttgtacaatctgaaaaggagtatttttgatcactttgaggcytatgttgacaaaggaaatatcttcacatacaaagtataaggaaagattctgagatacctctttgtgatatgtgcattcatctcacagatttgaacctctcttttgcttcagcagtttggaaacagtatttttgcagaatctgcaaacggatatttgtgagcactttgaggcctatgcagaaaaagaagtatcttcatagaaaactataaagaagttttctgagaaactgttttgtgatgtctgctttcatct

SEQ ID NO: 397862 - DNA, 531 bp, Homo sapiens
gtgatgtttgcattcatctcacagagttcaacctttcctttgattgagcagttttgaaacactctttttgtaaaatctgctagtggatatttggaacgctgtgaggcctatggtggaaaaaacataccttcacataagaactgtgaagcaggtttcctaaaaacagccttgtgatgtgtgcactcatctcgcagaggtaagcatttcttttctctgatcagtctggaaactctgttcttgtacaatctgaaaaggagtatttttgatcactttgaggcttatgttgacaaaggaaatatcttcacatacaaagtataaggaaagattctgagatacctctttgtgatatgtgcattcatctcacagatttgaacctctcttttgcttcagcagtttggaaacagtatttttgcagaatctgcaaacggatatttktgagcactttgaggcctatgcagaaaaagaagtatcttcatagaaaactataaagaagttttctgagaaactgttttgtgatgtctgctttcatct

SEQ ID NO: 397863 - DNA, 544 bp, Homo sapiens
aagatccaacagacttatggaccaggagcaattcacagagaaggagacccaaagggctgggaaacacaaggcacacgttcagctgcactgcaaattccaggaacaatatcaaaaagtgcgataacaaatattgatgaaaatgagtgaagatggatgtgagcactgctggcgaggggcattgtgaggactccagccccaaggtcatctggctgtgcttcctgggaagkgctgacaacagacctgtcccaagaccccaagtctcaccaggctacgtgcaggctttggaccagaacatcagcatcatcttggggtggtggttgcagggggaggcacgcatcctctgctcaccagaaatgcagaattctggattcatctggaagatattgttaaagggaaaagcaactttcaggagagtatgtatggactgctatttgtataaaattgcaaaaacagaccaaaaaaatactatccattcttcatggacatgcacactaggtattaaacatggatgggaagacacacattgacttcagaatagtgggag

SEQ ID NO: 397864 - DNA, 607 bp, Homo sapiens
attgtgagttctgtcatgttttygggtaggctggattgtcttcagggctttattttgtagagcaggcactagggcaggttctgctatatgctgggcctaatagcagatgtgtgggtgagtgtggctcccactgagtacctagcaggttttccccaggttatctacaaacagtgacttttgaactgttttgtgtcagtcacgagtatgatgtccccagctttttttttattcctcatgattggcttggccattcagcctacattgtaggattgcattttctattactataaaaggtggcacagggattttgatagggatttgagttaacttacagattgctttggataatatgacaccttattaaccaaagggcctgccttctcaaaatgactcttttcgatcttgggttttagcaaggtttcataatgccctgtatcccaaagctcactatattgcccaggctgttcttgaacgcctggcctgaagcagtcctcccacctcaggctcctgaatggaggagattactgtcatgagccactgtgcctggatctctcataaagttactttggttgatggatggctgactagtttttattgctgcaggaga

SEQ ID NO: 397865 - DNA, 607 bp, Homo sapiens
attgtgagttctgtcatgtttttgggtaggctggattgtcttcagggctttattttgtagagcaggcactagggcaggttctgctatatgctgggcctaatagcagatgtgtgggtgagtgtggctcccactgagtacctagcaggttttccccaggttatctacaaacagtgacttttgaactgttttgtgtcagtcacgagtatgatgtccccagctttttttttattcctcatgattggcttggccattcagcctacattgtaggattgcattttctattactataaaargtggcacagggattttgatagggatttgagttaacttacagattgctttggataatatgacaccttattaaccaaagggcctgccttctcaaaatgactcttttcgatcttgggttttagcaaggtttcataatgccctgtatcccaaagctcactatattgcccaggctgttcttgaacgcctggcctgaagcagtcctcccacctcaggctcctgaatggaggagattactgtcatgagccactgtgcctggatctctcataaagttactttggttgatggatggctgactagtttttattgctgcaggaga

SEQ ID NO: 397866 - DNA, 529 bp, Homo sapiens
ttttatagaagtcactccactatcctctggtttgcattgtttcttttcttttttttttttttaagagaaggtctcactctgtcacccaggctgcagtgcagtggcatgatttcagctcactgaaacatttatctcctgggttcaagcaatcctcccaccccagcttcccaagtasctgggactacaggcatgcaacatcacactcagctgatttttgcattttatgtagagtccacgttttgccatgttgcccaggctggtctagaactcctgggctcaactgatcatcctgccttgacctcacaaagtgctgggataacaggcatgtgccaccacgcctgaccttgcgttctttctaaacagatgtctgccatcttttcttttcttttttttttttttttttttttgagacagagtctcactctgtcgcccaggctggagtgcaatggcgccatctcagctcactgcaatctccgcctcccaggttcaagcgattctccctgcctcagcctcctgagtagctggggtt

SEQ ID NO: 397867 - DNA, 580 bp, Homo sapiens
tatctcctgggttcaagcaatcctcccaccccagcttcccaagtagctgggactacaggcatgcaacatcacactcagctgatttttgcattttatgtagagkccacgttttgccatgttgcccaggctggtctagaactcctgggctcaactgatcatcctgccttgacctcacaaagtgctgggataacaggcatgtgccaccacgcctgaccttgcgttctttctaaacagatgtctgccatcttttcttttcttttttttttttttttttttttgagacagagtctcactctgtcgcccaggctggagtgcaatggcgccatctcagctcactgcaatctccgcctcccaggttcaagcgattctccctgcctcagcctcctgagtagctggggttacagatgcgtgccaccatgccctgctaatatttgtatttttagtagagacggggttttgtcatgttgcccaggctggtcttgaactcctggtctcaagtgatcaccctgcctcagcctcccaaagtgctgggattacaggtgtgagccactacgctcagcctattttcatctttgttcct

SEQ ID NO: 397868 - DNA, 580 bp, Homo sapiens
tatctcctgggttcaagcaatcctcccaccccagcttcccaagtagctgggactacaggcatgcaacatcacactcagctgatttttgcattttatgtagagtccacgttttgccatgttgcccaggctggtctagaactcctgggctcaactgatcatcctgccttgacctcacaaagtgctgggataacaggcatgtgccaccacgcctgaccttgcgttctttctaaacagatgtctgccatcttttcttttcttttttttttttttttttttttgagacagagtctcactctgtcgcccaggctggagtgcaatggcgccatctcagctcactgcaatctccrcctcccaggttcaagcgattctccctgcctcagcctcctgagtagctggggttacagatgcgtgccaccatgccctgctaatatttgtatttttagtagagacggggttttgtcatgttgcccaggctggtcttgaactcctggtctcaagtgatcaccctgcctcagcctcccaaagtgctgggattacaggtgtgagccactacgctcagcctattttcatctttgttcct

SEQ ID NO: 397869 - DNA, 580 bp, Homo sapiens
tatctcctgggttcaagcaatcctcccaccccagcttcccaagtagctgggactacaggcatgcaacatcacactcagctgatttttgcattttatgtagagtccacgttttgccatgttgcccaggctggtctagaactcctgggctcaactgatcatcctgccttgacctcacaaagtgctgggataacaggcatgtgccaccacgcctgaccttgcgttctttctaaacagatgtctgccatcttttcttttcttttttttttttttttttttttgagacagagtctcactctgtcgcccaggctggagtgcaatggcgccatctcagctcactgcaatctccgcctcccaggttcaagcgattctccctgcctcagcctcctgagtagctggggttacagatgygtgccaccatgccctgctaatatttgtatttttagtagagacggggttttgtcatgttgcccaggctggtcttgaactcctggtctcaagtgatcaccctgcctcagcctcccaaagtgctgggattacaggtgtgagccactacgctcagcctattttcatctttgttcct

SEQ ID NO: 397870 - DNA, 580 bp, Homo sapiens
tatctcctgggttcaagcaatcctcccaccccagcttcccaagtagctgggactacaggcatgcaacatcacactcagctgatttttgcattttatgtagagtccacgttttgccatgttgcccaggctggtctagaactcctgggctcaactgatcatcctgccttgacctcacaaagtgctgggataacaggcatgtgccaccacgcctgaccttgcgttctttctaaacagatgtctgccatcttttcttttcttttttttttttttttttttttgagacagagtctcactctgtcgcccaggctggagtgcaatggcgccatctcagctcactgcaatctccgcctcccaggttcaagcgattctccctgcctcagcctcctgagtagctggggttacagatgcgtgccaccatgccctgctaatatwtgtatttttagtagagacggggttttgtcatgttgcccaggctggtcttgaactcctggtctcaagtgatcaccctgcctcagcctcccaaagtgctgggattacaggtgtgagccactacgctcagcctattttcatctttgttcct

SEQ ID NO: 397871 - DNA, 598 bp, Homo sapiens
agacaaagtgaaatttatcttattgtgcattggatattgttgggttcctayaaatattattgagctatgttctaggatgcagttaaattatctggaaagattttggttctttgatggttttctttgaggtcttgttaagtaggaccttagcagcctcagcctagatctaatcttccacactactgaggcaactcttttctgagtgttccatcaaatggtccgggaagtataagatttgtccactgttgctggtgggaagcaacaaatatgctggttctgtgggaggttcaagcattgttctttctgttaccttcaggtattttttcccccagacttgtagtttacacacatacacgtgctgatcagtatttagctgaagactctggaggttttttgttttgtgtctttgtccttttcattcccgaaatactctgccctgcagagtttacctgagcttctttagtctccctggactcccagcttcatctcctcaactcagaaccaacaccaggctcagcctgggttctccctccttgagctgtggcctagaaatggtttgccttctggtcaccacacctgggcagtccagagtcacaag

SEQ ID NO: 397872 - DNA, 598 bp, Homo sapiens
agacaaagtgaaatttatcttattgtgcattggatattgttgggttcctataaatattattgagctatgttctaggatgcagttaaattatctggaaagattttggttctttgatggttttctttgaggtcttgttaagtaggaccttagcagcctcagcctagatctaatcttccacaytactgaggcaactcttttctgagtgttccatcaaatggtccgggaagtataagatttgtccactgttgctggtgggaagcaacaaatatgctggttctgtgggaggttcaagcattgttctttctgttaccttcaggtattttttcccccagacttgtagtttacacacatacacgtgctgatcagtatttagctgaagactctggaggttttttgttttgtgtctttgtccttttcattcccgaaatactctgccctgcagagtttacctgagcttctttagtctccctggactcccagcttcatctcctcaactcagaaccaacaccaggctcagcctgggttctccctccttgagctgtggcctagaaatggtttgccttctggtcaccacacctgggcagtccagagtcacaag

SEQ ID NO: 397873 - DNA, 555 bp, Homo sapiens
tgcctactaattccatcttatttgccatttctgtatctattgatcaagttttcttctcattattgagacatttcctttttctatatatgactggtaattttcagctgaatggcagacaaagtgaaatttatcttattgtgcattggatattgttgggttcctataaatattattgagctatgttctaggatgcagttaaattatctggaaagattttggttctttgatggttttctttgaggtcttgttaagtaggaccttagcagcctcagcctagatctaatcttccacactactgaggcaactcttttctgagtgttccatcaaatggtccgggaagtataagatttgtccactgttgctggtgggaagcaacaaatatgctggttctgtgggagrttcaagcattgttctttctgttaccttcaggtattttttcccccagacttgtagtttacacacatacacgtgctgatcagtatttagctgaagactctggaggttttttgttttgtgtctttgtccttttcattcccgaaatactctgccctgcag

SEQ ID NO: 397874 - DNA, 556 bp, Homo sapiens
tttctgagtgttccatcaaatggtccgggaagtataagatttgtccactgttgctggtgggaagcaacaaatatgctggttctgtgggaggttcaagcattgttctttctgttaccttcaggtattttttccccyagacttgtagtttacacacatacacgtgctgatcagtatttagctgaagactctggaggttttttgttttgtgtctttgtccttttcattcccgaaatactctgccctgcagagtttacctgagcttctttagtctccctggactcccagcttcatctcctcaactcagaaccaacaccaggctcagcctgggttctccctccttgagctgtggcctagaaatggtttgccttctggtcaccacacctgggcagtccagagtcacaagaaactctaggccatgtggcagaatgcccactgtccccacttcaccacactgtactctctccatccagtgctagctgtagccacgctgcctcacagtccagaatgctagccagagaccaagctttctgcagcaccttggctggggctcacagat

SEQ ID NO: 397875 - DNA, 556 bp, Homo sapiens
tttctgagtgttccatcaaatggtccgggaagtataagatttgtccactgttgctggtgggaagcaacaaatatgctggttctgtgggaggttcaagcattgttctttctgttaccttcaggtattttttcccccagacttgtagtttacacacatacacgtgctgatcagtatttagctgaagactctggaggttttytgttttgtgtctttgtccttttcattcccgaaatactctgccctgcagagtttacctgagcttctttagtctccctggactcccagcttcatctcctcaactcagaaccaacaccaggctcagcctgggttctccctccttgagctgtggcctagaaatggtttgccttctggtcaccacacctgggcagtccagagtcacaagaaactctaggccatgtggcagaatgcccactgtccccacttcaccacactgtactctctccatccagtgctagctgtagccacgctgcctcacagtccagaatgctagccagagaccaagctttctgcagcaccttggctggggctcacagat

SEQ ID NO: 397876 - DNA, 556 bp, Homo sapiens
tttctgagtgttccatcaaatggtccgggaagtataagatttgtccactgttgctggtgggaagcaacaaatatgctggttctgtgggaggttcaagcattgttctttctgttaccttcaggtattttttcccccagacttgtagtttacacacatacacgtgctgatcagtatttagctgaagactctggaggttttttgttttgtgtctttgtccttttcattcccgraatactctgccctgcagagtttacctgagcttctttagtctccctggactcccagcttcatctcctcaactcagaaccaacaccaggctcagcctgggttctccctccttgagctgtggcctagaaatggtttgccttctggtcaccacacctgggcagtccagagtcacaagaaactctaggccatgtggcagaatgcccactgtccccacttcaccacactgtactctctccatccagtgctagctgtagccacgctgcctcacagtccagaatgctagccagagaccaagctttctgcagcaccttggctggggctcacagat

SEQ ID NO: 397877 - DNA, 589 bp, Homo sapiens
accactgggtgctgggatgagaatggcacttggcatgtgagctaggattgagagcccatcrctctcttccccagggaggtggtggccagttaccatctctggcttctgtccccttaccagcctcctctgctacaattgcatttctggcaggcagtggatcagggaagcactggcagttgaggaccatgtggagaaccactactggccaagcattaccaacctgacagcagaacaggagtgcagcagtgctgaggtgaacttgacatagaactttgagaccatgaaggcagccaacacttccaacttatcacaacctgtctctcacatagatttattgtagaagaactcaaccatctccgtgtcaacaagaaatggtcctctaaaccgtcactcttggatttagatcatgaggctgtcctgtctttagtatggaactgaaaagctttaatttccacaaaaatgtaaggttttgggctacagccttattaaaacaaacaaatatgagcatagtggtctacagatggaatatctggggctctaaacaaactgctccttgaaagtgtaatcactgtctttttgtttgtttatt

SEQ ID NO: 397878 - DNA, 589 bp, Homo sapiens
accactgggtgctgggatgagaatggcacttggcatgtgagctaggattgagagcccatcactctcttccccagggaggtggtggccagttaccatctctggcttctgtccccttaccagcctcctctgctacaattgcatttctggcaggcagtggatcagggaagcactggcagttgaggaccatgtggagaaccactactggcmaagcattaccaacctgacagcagaacaggagtgcagcagtgctgaggtgaacttgacatagaactttgagaccatgaaggcagccaacacttccaacttatcacaacctgtctctcacatagatttattgtagaagaactcaaccatctccgtgtcaacaagaaatggtcctctaaaccgtcactcttggatttagatcatgaggctgtcctgtctttagtatggaactgaaaagctttaatttccacaaaaatgtaaggttttgggctacagccttattaaaacaaacaaatatgagcatagtggtctacagatggaatatctggggctctaaacaaactgctccttgaaagtgtaatcactgtctttttgtttgtttatt

SEQ ID NO: 397879 - DNA, 589 bp, Homo sapiens
accactgggtgctgggatgagaatggcacttggcatgtgagctaggattgagagcccatcactctcttccccagggaggtggtggccagttaccatctctggcttctgtccccttaccagcctcctctgctacaattgcatttctggcaggcagtggatcagggaagcactggcagttgaggaccatgtggagaaccactactggccaagcattaccaacctgacagcagaacaggagtgcagcagtgctgaggtgaacttgacatagaactttgagaccatgaaggcagccaacacttccaacttatcacaacctgtctctcacatagatttattgtagaagaactcaaccatctccgtgtcaacaagaaatggtcctctaaaccgtcacycttggatttagatcatgaggctgtcctgtctttagtatggaactgaaaagctttaatttccacaaaaatgtaaggttttgggctacagccttattaaaacaaacaaatatgagcatagtggtctacagatggaatatctggggctctaaacaaactgctccttgaaagtgtaatcactgtctttttgtttgtttatt

SEQ ID NO: 397880 - DNA, 571 bp, Homo sapiens
atggaatatctggggctctaaacaaactgctccttgaaagtgtaatcactgtctttttgtttgtttatttagcctggtaggacaatgtcagaaatttccttggtcatagggaatataaaacatagtgtgaacaaaagcagcaataaagctacaaactattttttggtgtatttgcttaagtataagatagctgattggggctttatcatgtaacgttagtttgcttagttttcattatgtttgttaaacttgaattgtgaataaatatatggctgattcacattgtaattaaactgcacattgacataaactgtacattaaaagttgctgcacacagtcatccaaaataatacttaggtaaaaccaaaaatactataaaccaatctcaaggaacctaccytaaaataaaaatacagttaaaatggaattgcaaaactagaatgggagaaatatttacccataaaatcttgtttggaacattgatataacactagaaaagaatttttctaaataaccacaatgttcaacagtgactgtgcatctgtgaagaccaggcattttgaatcattgc

SEQ ID NO: 397881 - DNA, 512 bp, Homo sapiens
ttatgtttgttaaacttgaattgtgaataaatatatggctgattcacattgtaattaaactgcacattgacataaactgtacattaaaagttgctgcacacagtcatccaaaataatacttaggtaaaaccaaaaatactataaaccaatctcaaggaacctaccctaaaataaaaatacagttaaaatggaattgcaaaactagaatgggagaaatatttacccataaaatcttgtttggaacattgatataacactagaaaagaatttttctaaataaccacaatgttcaacagtgactgtgcatctgtgaagaccaggcatttkgaatcattgccctgtggtgtgtggcagtacaattttacagaaatgaactacaataattaataaaattctctaatgggaagattttaatgagtaagtatttacacaataaatatttataatgttggtgctattatttcacaaaataaaaaaagctgtatcacagcctttaaaagcaaataatagcc

SEQ ID NO: 397882 - DNA, 169 bp, Homo sapiens
gaaaaataacaatacaggactcttttgaggycctgtaattggaatgagtccactttaaatcctttaatgaggatccattggagggcaaatctagtgccagcagccgcagtaattccagctccaatagcgtatattaaagttgctgcagttaaaaagctcgtagttggat

SEQ ID NO: 397883 - DNA, 169 bp, Homo sapiens
gaaaaataacaatacaggactcttttgaggtcctgtaattggaatgagtccactttaaatcctttaatgaggatccattggagggcaaatctrgtgccagcagccgcagtaattccagctccaatagcgtatattaaagttgctgcagttaaaaagctcgtagttggat

SEQ ID NO: 397884 - DNA, 169 bp, Homo sapiens
gaaaaataacaatacaggactcttttgaggtcctgtaattggaatgagtccactttaaatcctttaatgaggatccattggagggcaaatctagtgccagcagccgcrgtaattccagctccaatagcgtatattaaagttgctgcagttaaaaagctcgtagttggat

SEQ ID NO: 397885 - DNA, 235 bp, Homo sapiens
gagtgtcctgcagcccgaagcgtttactttgaaaaaattagagtgttcaaagcaggyccgagccgcctggatacctcagctaggaataatggaataggaccgcggttctattctgttggttttcggaactgaggccatgattaagagggacgggcgggggcattcgtattgcgccgctagaggtgaaattcttgggccggcgcagttcggaccagagtgaaagcatttgccaaga

SEQ ID NO: 397886 - DNA, 235 bp, Homo sapiens
gagtgtcctgcagcccgaagcgtttactttgaaaaaattagagtgttcaaagcaggtccgagccgcctggatacctcagctaggaataatggaataggaccgcggttctattctgttggttttcggaactgaggccatgattaagagggacggscgggggcattcgtattgcgccgctagaggtgaaattcttgggccggcgcagttcggaccagagtgaaagcatttgccaaga

SEQ ID NO: 397887 - DNA, 227 bp, Homo sapiens
gagtgtcctgcagcccgaagcgtttactttgaaaaaattagagtgttcaaagcaggtccgagccgcctggatacctcagctaggaataatggaataggaccgcggttctattctgttggttttcggaactgaggccatgattaagagggacgggcgggggcattcgtattgcgccgctagaggtgaaattcttggrccggcgcagttcggaccagagtgaaagcatt

SEQ ID NO: 397888 - DNA, 310 bp, Homo sapiens
actttgaaaaaattagagtgttcaaagcaggtccgagccgcctggatacctcagctaggaataatggaataggaccgcggttctattctgttggttttcggaactgaggccatgattaagagggacgggcgggggcattcgtattgcgccgctagaggtgaaattcttgggccggcgcagttcggaccagagygaaagcatttgccaagaatgttttcattaatcaagaacgaaagtcggaggttcgaagacgatcagatacagtcgtagttccgaccataaacgatgccaactggcgatgtggcggcgt

SEQ ID NO: 397889 - DNA, 371 bp, Homo sapiens
ttgaaaaaattagagtgttcaaagcaggtccgagccgcctggatacctcagctaggaataatggaataggaccgcggttctattctgttggttttcggaactgaggccatgattaagagggacgggcgggggcattcgtattgcgccgctagaggtgaaattcttgggccggcgcagttcggaccagagtgaaagcatttgccaagaatgttttcattaatcaagaacgaaagtcggaggttcgaagacgatcagatacagtcgtagttccgaccataaacgatgccaacyggcgatgtggcggcgttattcccatgacccgctgggcagcttccaagaaaccaaagtctttgggtttttaggttccgggg

SEQ ID NO: 397890 - DNA, 371 bp, Homo sapiens
ttgaaaaaattagagtgttcaaagcaggtccgagccgcctggatacctcagctaggaataatggaataggaccgcggttctattctgttggttttcggaactgaggccatgattaagagggacgggcgggggcattcgtattgcgccgctagaggtgaaattcttgggccggcgcagttcggaccagagtgaaagcatttgccaagaatgttttcattaatcaagaacgaaagtcggaggttcgaagacgatcagatacagtcgtagttccgaccataaacgatgccaactggcgatgyggcggcgttattcccatgacccgctgggcagcttccaagaaaccaaagtctttgggtttttaggttccgggg

SEQ ID NO: 397891 - DNA, 582 bp, Homo sapiens
tacagacttccaaagaatggatcattctaattatgtcccaaacaactgtagctagaaatattaatgcttgatttttcaaaagcctcatttcctaaaatctgtaggttcaaaggtagattggcatgtgttkgaaatcctcaaatgttgtgcagttccttggagttttagcattaaaaaagaaaggccttgcctgcattaactttgaattttgtaagagttaccagttaatagagatactgtatgcatttatatacactctgattttataggaatggaggcatattacacacatgcctctgcacccaggttttttactttgtaacatatcttggacatcagttttgagcatctttttaaaatttattttttaaaaatagctgcatagtattctatcatatgaataaccataatttcaataaacagtaaggtgataatcattaatgtgatcgacaaacattaaggtgatttctagacttttgttaattaaaaaggtggtataatactttctcccattcatacataattccaggcttcatgagtatgtctgtagggtaaatttctggaaatgaaattgctgaatca

SEQ ID NO: 397892 - DNA, 619 bp, Homo sapiens
acttcaaaatccgcaacttcactggcagtgcttgaagtcatgatgcctattgccagcctcctttcaagtaaagttctattaaccctacaaaattttataaatggcagacattacatttccagatagctttgtgataaccaaaaaagaattgatttattagcaatttttatcacattgaaacaaaatatyatttttgataaatatcattattgttatgtatttaaaacatctcatgtaataagaaatcatactttagatggggccaagctggccgattataagcagctgtggactgtggctctcatggagagcaatgaaaactgcaagtgaattctgcacattcaattgaggtattcaggttcttgcattgggactgactaggcagagagctcctcccacagagagtcaggaaaagcaagtagggcaatggcccacctaggtgtggcacagagctagccgagcccccactcgcaagcaaggtaggccatgagtgattgtccgactctgcccgggaaaccatgcttctcctgtggatctttgcaacctgcagatcaggaagtcccctcatgagctcagccaccacggccttgggtctgaagcacagagctgtgtggagtgt

SEQ ID NO: 397893 - DNA, 619 bp, Homo sapiens
acttcaaaatccgcaacttcactggcagtgcttgaagtcatgatgcctattgccagcctcctttcaagtaaagttctattaaccctacaaaattttataaatggcagacattacatttccagatagctttgtgataaccaaaaaagaattgatttattagcaatttttatcacattgaaacaaaatatcatttttgataaatatcattattgttatgtatttaaaacatctcatgtaataagaaatcatactttagatggggccaagctggccgattataagcagctgtggmctgtggctctcatggagagcaatgaaaactgcaagtgaattctgcacattcaattgaggtattcaggttcttgcattgggactgactaggcagagagctcctcccacagagagtcaggaaaagcaagtagggcaatggcccacctaggtgtggcacagagctagccgagcccccactcgcaagcaaggtaggccatgagtgattgtccgactctgcccgggaaaccatgcttctcctgtggatctttgcaacctgcagatcaggaagtcccctcatgagctcagccaccacggccttgggtctgaagcacagagctgtgtggagtgt

SEQ ID NO: 397894 - DNA, 619 bp, Homo sapiens
acttcaaaatccgcaacttcactggcagtgcttgaagtcatgatgcctattgccagcctcctttcaagtaaagttctattaaccctacaaaattttataaatggcagacattacatttccagatagctttgtgataaccaaaaaagaattgatttattagcaatttttatcacattgaaacaaaatatcatttttgataaatatcattattgttatgtatttaaaacatctcatgtaataagaaatcatactttagatggggccaagctggccgattataagcagctgtggactgtggctctcatggagagcaatgaaaactgcaagtgaattctgcacattcaattgaggtattcaggttcttgcattgggactgrctaggcagagagctcctcccacagagagtcaggaaaagcaagtagggcaatggcccacctaggtgtggcacagagctagccgagcccccactcgcaagcaaggtaggccatgagtgattgtccgactctgcccgggaaaccatgcttctcctgtggatctttgcaacctgcagatcaggaagtcccctcatgagctcagccaccacggccttgggtctgaagcacagagctgtgtggagtgt

SEQ ID NO: 397895 - DNA, 568 bp, Homo sapiens
cccacagcacctcacaagacccattggcttggaattccagctggccagcagcagcaggctggagacagccagaggtggactgagttcccagggggaggggtagcagctctatgtgtggtttgagttggctgctctagactgctggyaccagggaccaggaggagtcccccataacacagcacagctgttgtgactgatcgtggccaggctgcttctttaagtgagaccaaattccatccctcctcactggacagggcctctccattagaattttagcaactgcagccagagttctatggacagaactctgatttctccctgggaggaagtccccagggaggggggtagctgctgtctccccagttcagccaactgagcctttccagcctcttggctttggagactcctgggggtcagcacaacacacctgctctgccaaagggcagccagactgcttctttaaacagtccctgatcctgttcctcctgactgggtgagacctcacaacaggagtctccagaaaccccctacaggagtgttccagctggcatcaagtcaataccacctt

SEQ ID NO: 397896 - DNA, 378 bp, Homo sapiens
gctcctcaacctcagaagagacaatacattttaaggcaagaagcatgaggggaaattcaaccccttattgcctaattcttgccatatgagttattaaggccatgagagtctcgttacaatamtcgcatgttaccagataaaaagcctaatggcaagtacagatttgtcagaacgcttagagcattaagaaatgcagttgtctccatagacctcattgtccccaatacttaccaagtcccaggggatgcaagctggtttacattcttatacctgaaagatgcacttttctggatctcaatgcatccagattcataatatatttgcctttgaatggactgatccagatatgcattctgcctcaaaactaacctggacagt

SEQ ID NO: 397897 - DNA, 378 bp, Homo sapiens
gctcctcaacctcagaagagacaatacattttaaggcaagaagcatgaggggaaattcaaccccttattgcctaattcttgccatatgagttattaaggccatgagagtctcgttacaatactcgyatgttaccagataaaaagcctaatggcaagtacagatttgtcagaacgcttagagcattaagaaatgcagttgtctccatagacctcattgtccccaatacttaccaagtcccaggggatgcaagctggtttacattcttatacctgaaagatgcacttttctggatctcaatgcatccagattcataatatatttgcctttgaatggactgatccagatatgcattctgcctcaaaactaacctggacagt

SEQ ID NO: 397898 - DNA, 378 bp, Homo sapiens
gctcctcaacctcagaagagacaatacattttaaggcaagaagcatgaggggaaattcaaccccttattgcctaattcttgccatatgagttattaaggccatgagagtctcgttacaatactcgcatgttaccagataaaaagcctaatggcaartacagatttgtcagaacgcttagagcattaagaaatgcagttgtctccatagacctcattgtccccaatacttaccaagtcccaggggatgcaagctggtttacattcttatacctgaaagatgcacttttctggatctcaatgcatccagattcataatatatttgcctttgaatggactgatccagatatgcattctgcctcaaaactaacctggacagt

SEQ ID NO: 397899 - DNA, 378 bp, Homo sapiens
gctcctcaacctcagaagagacaatacattttaaggcaagaagcatgaggggaaattcaaccccttattgcctaattcttgccatatgagttattaaggccatgagagtctcgttacaatactcgcatgttaccagataaaaagcctaatggcaagtacagatttgtcagaacgcttagagcattaagaaatgcagttgtctccatagacctcattgtccccaatacttaccaagtcccaggggatgcaagctggtttacattcttatayctgaaagatgcacttttctggatctcaatgcatccagattcataatatatttgcctttgaatggactgatccagatatgcattctgcctcaaaactaacctggacagt

SEQ ID NO: 397900 - DNA, 539 bp, Homo sapiens
tgtcagaacgcttagagcattaagaaatgcagttgtctccatagacctcattgtccccaatacttaccaagtcccaggggatgcaagctggtttacattcttatacctgaaagatgcacttttctggatctcaatgcatccagattcataatatatttgcctttgaatggactgatccagatatgcattctgcctcaaaactaacctggacagttatctctgaagggttctgggatagcccccacttatwtgaaaatgccctagctaaggacttaacaaatctacaattggaaagggacacaattattcagtatgtaggtgacttgctcattgctagcccaactaaagaagactcataataatactgttaagttggtaacagatatagggcatcaccacacagggctcagattttgactgaaagacttaaatatttggaatctgtcttaacctctggaactgatcaacatccctagaagataaaaaagttattttagtcacccaagggtccctgtccaaaaattgactgtgtgcttttt

SEQ ID NO: 397901 - DNA, 532 bp, Homo sapiens
tgtgtagggaaactcccctttataaaaccatcagctgtaatcccagcactttgggaggccaaggcagtggatgacctgaggtgaggagatcgaggccagcctggccaacatggtgaaaccccgtccatactaaaagtacaaaaattagacaggyatggtggtaggtgcctgtaatcccagctactcgggaggctgagacaggagaatcgcttgaacccaggagtcagaggttgcagtgagccaaggtaatgataatgcactccagcctgagcaacagagcaagactatgtctcaaaaataaataaataaataaataaaccatcagatctcatgaggcttattcactgtcacaagaacagcttgggaaagacccatcccccgattcgattacctcccactggatccctcccacgatatataggaattatgggagctacaattcaagataagatttgactggggacacagccaaagcatgtcacaggttatgaaacaaatttattctagcagaccagacgtaagaaggatgaga

SEQ ID NO: 397902 - DNA, 532 bp, Homo sapiens
tgtgtagggaaactcccctttataaaaccatcagctgtaatcccagcactttgggaggccaaggcagtggatgacctgaggtgaggagatcgaggccagcctggccaacatggtgaaaccccgtccatactaaaagtacaaaaattagacaggtatggtggtaggygcctgtaatcccagctactcgggaggctgagacaggagaatcgcttgaacccaggagtcagaggttgcagtgagccaaggtaatgataatgcactccagcctgagcaacagagcaagactatgtctcaaaaataaataaataaataaataaaccatcagatctcatgaggcttattcactgtcacaagaacagcttgggaaagacccatcccccgattcgattacctcccactggatccctcccacgatatataggaattatgggagctacaattcaagataagatttgactggggacacagccaaagcatgtcacaggttatgaaacaaatttattctagcagaccagacgtaagaaggatgaga

SEQ ID NO: 397903 - DNA, 532 bp, Homo sapiens
tgtgtagggaaactcccctttataaaaccatcagctgtaatcccagcactttgggaggccaaggcagtggatgacctgaggtgaggagatcgaggccagcctggccaacatggtgaaaccccgtccatactaaaagtacaaaaattagacaggtatggtggtaggtgcctgtaatcccagctactcgggaggctgagacaggagaatcgcttgaacccaggagtcagaggttgcagtgagccaaggtaatgataatgcactccagcctgagcaacagagcaagactatgtctcaaaaataaataaataaataaataaaccatcagatctcatgaggcttattcactgtcacaagaacagcttgggaaagacccatcccccgattcgattacctcccactggatccctcccacgatatrtaggaattatgggagctacaattcaagataagatttgactggggacacagccaaagcatgtcacaggttatgaaacaaatttattctagcagaccagacgtaagaaggatgaga

SEQ ID NO: 397904 - DNA, 532 bp, Homo sapiens
tgtgtagggaaactcccctttataaaaccatcagctgtaatcccagcactttgggaggccaaggcagtggatgacctgaggtgaggagatcgaggccagcctggccaacatggtgaaaccccgtccatactaaaagtacaaaaattagacaggtatggtggtaggtgcctgtaatcccagctactcgggaggctgagacaggagaatcgcttgaacccaggagtcagaggttgcagtgagccaaggtaatgataatgcactccagcctgagcaacagagcaagactatgtctcaaaaataaataaataaataaataaaccatcagatctcatgaggcttattcactgtcacaagaacagcttgggaaagacccatcccccgattcgattacctcccactggatccctcccacgatatataggaattatgggarctacaattcaagataagatttgactggggacacagccaaagcatgtcacaggttatgaaacaaatttattctagcagaccagacgtaagaaggatgaga

SEQ ID NO: 397905 - DNA, 582 bp, Homo sapiens
ctcaaaaataaataaataaataaataaaccatcagatctcatgaggcttattcactgtcacaagaacagcttgggaaagacccatcccccgattcgattacctcccactggatccctcccacgatatataggaattatgggagctacaattcaagataagatttgactggggacacagccaaagcatgtcacaggttatgaaacaaatttattctagcagaccagaygtaagaaggatgagacccttgaccatcccaaggaagagtggttaacagatgtaagttgttttatgcatcaggaaaacaggagggctagatatgctattagtagtcagcacaagagaatcaaggcacaagtcttgctggcctcgacctcagctcaaaatgctgagttaattgaacttactcagcccctccagttggcaaaggatttaaaagttaacatttacactgattccaagtatgactttttagtgcttcatgcttatgctgcaatttggaatgagtagggactcctgatccccaaggacttttccatacaacatcattgagattttgagcttgttagaatgctgctttgctg

SEQ ID NO: 397906 - DNA, 546 bp, Homo sapiens
gttttttccttatgttaatgtgatattatgctgattttcatgagttggaacatacttttatttcaggagtcaattatactcattcatagtktataatccttttaatgtactgctaagtttgagttgctggtattttgttgaggatttttgcatcagcatttataagggatgtttgtttgtagttttcttatggtgcctttgtctggcttggtgtcagggtaatactgtactcatagaataagttagaaaaaattaccttgtcttcaatgttttgaaaaagtttgagaaaaagtggtgttaattctgctttaaacattgggtagaattcaacagtgaagccatctggtccaggcttttcattgttgctgggttttcgattactgatgcaatcttcctgttgaatctccttgctgaataggtttattcaacttttctgattcagtcttagtaggttttttgtttctaggaatttgttcattttatttaggctcttcaattttttagtgtataattccttatggtactctcctacatccttttttactc

SEQ ID NO: 397907 - DNA, 546 bp, Homo sapiens
gttttttccttatgttaatgtgatattatgctgattttcatgagttggaacatacttttatttcaggagtcaattatactcattcatagtgtataatccttttaatgtactgctaagtttgagttgctggtattttgttgaggatttttgcatcagcatttataagggatgtttgtttgtagttttcttatggtgcctttgtctggcttggtgtcagggtaatactgtactcatagaataagttagaaaaaattaccttgtcttcaatgttttgaaaaagtttgagaaaaagtggtgttaattctgctttaaacattgggtagaattcaacagtgaagccatctggtccaggcttttcattgttgctgggttttcgattactgatgcaatcttcctgttgaatctccttgctgaataggtttattcaacttttctgattcagtcttagtaggytttttgtttctaggaatttgttcattttatttaggctcttcaattttttagtgtataattccttatggtactctcctacatccttttttactc

SEQ ID NO: 397908 - DNA, 546 bp, Homo sapiens
gttttttccttatgttaatgtgatattatgctgattttcatgagttggaacatacttttatttcaggagtcaattatactcattcatagtgtataatccttttaatgtactgctaagtttgagttgctggtattttgttgaggatttttgcatcagcatttataagggatgtttgtttgtagttttcttatggtgcctttgtctggcttggtgtcagggtaatactgtactcatagaataagttagaaaaaattaccttgtcttcaatgttttgaaaaagtttgagaaaaagtggtgttaattctgctttaaacattgggtagaattcaacagtgaagccatctggtccaggcttttcattgttgctgggttttcgattactgatgcaatcttcctgttgaatctccttgctgaataggtttattcaacttttctgattcagtcttagtaggttttttgtttctaggaatttgttcattttatttaggctcttcaattttttmgtgtataattccttatggtactctcctacatccttttttactc

SEQ ID NO: 397909 - DNA, 537 bp, Homo sapiens
taatcatcaataaatactaaggaaactcagagagtggtgccggcgctggtcctccctatgctgagcgctggtcccctgggcccactttttctctttactttgtctctgcgtctcttttcacaagtctctcgttccayctgatgagaaacgcccacaggtgtggagggacaggccaccccttcaatatggtgttcctattatcatctgtcacttcccagagagggcaaacattcaactttgccagctgataagaggccccactgcatgttgttctggtgaagctcgggtgttttgagagtggggtatgtacgtaagacaggactcgaagggcagggagaagatgatgaccggtcactagataaccctggaaaactagaagaaattaataacatgttgcacacctcactagaactggaaggagtctgtgttcttatggggcgcttggactggtaggtggatttcagacccagctaagaaaagcctaacattaagaggcacttgcattaaaatggtaatcaattacgtgccgaccctatt

SEQ ID NO: 397910 - DNA, 537 bp, Homo sapiens
taatcatcaataaatactaaggaaactcagagagtggtgccggcgctggtcctccctatgctgagcgctggtcccctgggcccactttttctctttactttgtctctgcgtctcttttcacaagtctctcgttccacctgatgagaaacgcccacaggtgtggagggacaggccaccccttcaatatggtgttcctattatcatctgtcacttcccagagagggcaaacattcaactttgccagctgataagaggccccactgcatgttgttctggtgaagctcgggtgttttgagagtggggtatgtacgtaagacaggactcraagggcagggagaagatgatgaccggtcactagataaccctggaaaactagaagaaattaataacatgttgcacacctcactagaactggaaggagtctgtgttcttatggggcgcttggactggtaggtggatttcagacccagctaagaaaagcctaacattaagaggcacttgcattaaaatggtaatcaattacgtgccgaccctatt

SEQ ID NO: 397911 - DNA, 537 bp, Homo sapiens
taatcatcaataaatactaaggaaactcagagagtggtgccggcgctggtcctccctatgctgagcgctggtcccctgggcccactttttctctttactttgtctctgcgtctcttttcacaagtctctcgttccacctgatgagaaacgcccacaggtgtggagggacaggccaccccttcaatatggtgttcctattatcatctgtcacttcccagagagggcaaacattcaactttgccagctgataagaggccccactgcatgttgttctggtgaagctcgggtgttttgagagtggggtatgtacgtaagacaggactcgaagggcagggagaagatgatgaccggtcactagataaccctggaaaactagaagaaattaataacatkttgcacacctcactagaactggaaggagtctgtgttcttatggggcgcttggactggtaggtggatttcagacccagctaagaaaagcctaacattaagaggcacttgcattaaaatggtaatcaattacgtgccgaccctatt

SEQ ID NO: 397912 - DNA, 543 bp, Homo sapiens
aatgggaaggatgtaacttgtatattgtaatgtattagtccattttcacactgctatgacaaaactgacaaaactctctcaggaaaaaagtgacatgctgggtttagaaagtagagtccagctgccctataccagcttatcaaagatggcgttatggctaagaaatgagagaaaactgttaagaaaaagtctcatgttctcaatcttgagggtaattgtttgcagagkgttgtcataaaagaggctgtcactaaacaggcatgtctgatcttatcatgtagagctcttaaataccacatttccacttctagtcataatgatggcgaggttactgctgatcttttcgaataattaaggtacaaaaatactaggttccaagacaattctttttttcagtgtcacttggaccagtggcaaattaaacaggcattcagttaagagtcagaggatcgctgaggaaagtaaaagctaaactgcttggggcctctgtcctggggcagcctccaggctactacaaaacagaggcggtgagcagaaaggtga

SEQ ID NO: 397913 - DNA, 552 bp, Homo sapiens
ttaagaaaaagtctcatgttctcaatcttgagggtaattgtttgcagagtgttgtcataaaagaggctgtcactaaacaggcatgtctgatcttatcatgtagagctcttaaataccacatttccacttctagtcataatgatggcgaggttactgctgatcttttcgaataattaaggtacaaaaatactaggttccaagacaattctttttttcagtgtcacttggaccagtggcaaattaaacaggcattcagttaagagtcagaggatcgctgaggaaagtaaaagctaaactgcttggggcctctgtcctggggcagcctccaggctactacaaaacagaggcggtgagcagaaaggtgacaagatgtagagcactcaggtgagggacagagagcacaagrtggacagtccaaaaagagaaagtggcaaacatctgtttagccaaatccattcttctcaatattccccagggcctctaactctgtgggcttggcctctaatctgagtatgataatagtggataatcattcttgcccaccagaatggc

SEQ ID NO: 397914 - DNA, 538 bp, Homo sapiens
ctgcactcctaggacatttatacattttttcaggctttgtggaagatgtcttgtatgaccacaaatattctgcaattgtaatttgtggccakttaaaaaatgtgactattttcagaccatgaacattaaccttctagatgccttgtgagtacctagctactcatattaagatagaatattctagtcatgtttattaaactagaagctaggtaaccatgagttcctctaacacaacaagtctactcctcaaggagaaaatgtatttctagggaattttgtgcattttgtttgatggcatttggtatgtttaccaaaatggcagaaaagagtgaaattagtcctcaaagatttctcaagattggatataaagtaaacaaaatgattatagttaatatgcaagttgatacagttgatattcaaaagaaattttgtttgaaacacaatgagatttttatttttacttatttattattattattattattattactattattttgagacagagtcttgttctgttgaacaggctggagttcag

SEQ ID NO: 397915 - DNA, 538 bp, Homo sapiens
ctgcactcctaggacatttatacattttttcaggctttgtggaagatgtcttgtatgaccacaaatattctgcaattgtaatttgtggccatktaaaaaatgtgactattttcagaccatgaacattaaccttctagatgccttgtgagtacctagctactcatattaagatagaatattctagtcatgtttattaaactagaagctaggtaaccatgagttcctctaacacaacaagtctactcctcaaggagaaaatgtatttctagggaattttgtgcattttgtttgatggcatttggtatgtttaccaaaatggcagaaaagagtgaaattagtcctcaaagatttctcaagattggatataaagtaaacaaaatgattatagttaatatgcaagttgatacagttgatattcaaaagaaattttgtttgaaacacaatgagatttttatttttacttatttattattattattattattattactattattttgagacagagtcttgttctgttgaacaggctggagttcag

SEQ ID NO: 397916 - DNA, 540 bp, Homo sapiens
ttctgcactcctaggacatttatacattttttcaggctttgtggaagatgtcttgtatgaccacaaatattctgcaattgtaatttgtggccatttaaaaaatgtgactattttcagaccatgaacattaaccttctagatgccttgtgagtacctagctactcatattaagatagaatattctagtcatgtttattaaactagaagctaggtaaccatgagttcctctaacacarcaagtctactcctcaaggagaaaatgtatttctagggaattttgtgcattttgtttgatggcatttggtatgtttaccaaaatggcagaaaagagtgaaattagtcctcaaagatttctcaagattggatataaagtaaacaaaatgattatagttaatatgcaagttgatacagttgatattcaaaagaaattttgtttgaaacacaatgagatttttatttttacttatttattattattattattattattactattattttgagacagagtcttgttctgttgaacaggctggagttcag

SEQ ID NO: 397917 - DNA, 592 bp, Homo sapiens
tattaaactagaagctaggtaaccatgagttcctctaacacaacaagtctactcctcaaggagaaaatgtatttctagggaattttgtgcattttgtttgatggcatttggtatgtttaccaaaatggcagaaaagagtgaaattagtcctcaaagatttctcaagattggatataaagtaaacaaaatgattatagttaatatgcaagttgatacagttgatattcaaaagaaattttgtttgaaacacaatgagatttttatttttacttatttwttattattattattattattactattattttgagacagagtcttgttctgttgaacaggctggagttcagtgcaccatcttggctcactgaaacctgcccctcccgggttcaagcaattctcctgcctcagtctcccaagtagccgggattacaggcgtgaatcaccacacccagctaatatttgtatctttagtagagatggtgtttcactgtcggccaggctggtctcaaacccctgacaacaagtgatctgcccaccttggcctcccaaattgctgggattacaggcatgagccatcactcccagacacaat

SEQ ID NO: 397918 - DNA, 592 bp, Homo sapiens
tattaaactagaagctaggtaaccatgagttcctctaacacaacaagtctactcctcaaggagaaaatgtatttctagggaattttgtgcattttgtttgatggcatttggtatgtttaccaaaatggcagaaaagagtgaaattagtcctcaaagatttctcaagattggatataaagtaaacaaaatgattatagttaatatgcaagttgatacagttgatattcaaaagaaattttgtttgaaacacaatgagatttttatttttacttatttattwttattattattattattactattattttgagacagagtcttgttctgttgaacaggctggagttcagtgcaccatcttggctcactgaaacctgcccctcccgggttcaagcaattctcctgcctcagtctcccaagtagccgggattacaggcgtgaatcaccacacccagctaatatttgtatctttagtagagatggtgtttcactgtcggccaggctggtctcaaacccctgacaacaagtgatctgcccaccttggcctcccaaattgctgggattacaggcatgagccatcactcccagacacaat

SEQ ID NO: 397919 - DNA, 530 bp, Homo sapiens
aaacaaaatgattatagttaatatgcaagttgatacagttgatattcaaaagaaattttgtttgaaacacaatgagatttttatttttacttatttattattattattattattattactattattttgagacagagtcttgttctgttgaacaggctggagttcagtgcaccatcttggctcactgaaacctgcccctcccgggttcaagcaattctcctgcctcagtctcccaagtagccgggattacaggcgtgaatcaccacacccagctaatatttgtatctttagtagagatggtgtttcactgtcggccaggctggtctcaaacccctgacaacaagtgatctgcccaccttggcctcccaaattgctgggattacaggcatgagccatcactcccagmcacaatgatgattttaaatgattctgatttcctgctgttgagcagggagctgagcaaattcaacagatcatgggcctaaactaggggaagactgaggacaaactctagaacacatgtgattaaa

SEQ ID NO: 397920 - DNA, 588 bp, Homo sapiens
atgagtaatacataataaaaaacggagtatctctccccacaagcakttatagcttgtgttataaacaatccaattatactcttttagtttttttacatgtggaattatttttgactataatcaccctgttgtgctatcaaatgctgtcttattcattctttctaacaatttttttttacccatttagcatccccactattctcttgtttcctccctgtccttgccagcctctggtaaccatccttatactctctttttctatgacaccaattgttttgaattttagcacccacaaataagtgagaacatgtgacatttgtctttctgtgcctgacatttcacttaacataaagactttcatttccatttatgttattgcaaatggcaggctctcattctttcttacagctgaatagtactccattgtgtatatgtaccatattttctctatccagtcatctgttgatggacatttaggttccttccaaatcttggctattataaaccctgctgtagcaaacatgagagtgccaataggtctttgattaaccaattttatttcttgtaggcatatactgagcagtggaa

SEQ ID NO: 397921 - DNA, 588 bp, Homo sapiens
atgagtaatacataataaaaaacggagtatctctccccacaagcagttatagcttgtgttataaacaatccaattatactcttttagtttttttacatgtggaattatttttgactataatcaccctgttgtgctatcaaatgctgtcttattcattctttctaacaatttttttttacccatttagcatccccactattctcttgtttcctccctgyccttgccagcctctggtaaccatccttatactctctttttctatgacaccaattgttttgaattttagcacccacaaataagtgagaacatgtgacatttgtctttctgtgcctgacatttcacttaacataaagactttcatttccatttatgttattgcaaatggcaggctctcattctttcttacagctgaatagtactccattgtgtatatgtaccatattttctctatccagtcatctgttgatggacatttaggttccttccaaatcttggctattataaaccctgctgtagcaaacatgagagtgccaataggtctttgattaaccaattttatttcttgtaggcatatactgagcagtggaa

SEQ ID NO: 397922 - DNA, 588 bp, Homo sapiens
atgagtaatacataataaaaaacggagtatctctccccacaagcagttatagcttgtgttataaacaatccaattatactcttttagtttttttacatgtggaattatttttgactataatcaccctgttgtgctatcaaatgctgtcttattcattctttctaacaatttttttttacccatttagcatccccactattctcttgtttcctccctgtccttsccagcctctggtaaccatccttatactctctttttctatgacaccaattgttttgaattttagcacccacaaataagtgagaacatgtgacatttgtctttctgtgcctgacatttcacttaacataaagactttcatttccatttatgttattgcaaatggcaggctctcattctttcttacagctgaatagtactccattgtgtatatgtaccatattttctctatccagtcatctgttgatggacatttaggttccttccaaatcttggctattataaaccctgctgtagcaaacatgagagtgccaataggtctttgattaaccaattttatttcttgtaggcatatactgagcagtggaa

SEQ ID NO: 397923 - DNA, 601 bp, Homo sapiens
ttacatgacagcaggcgagagagcctgtatgtgaagcaaaggaggaagagtcccttataaaaccatcagatctcatgagaaatcactcattatcagaagaacagcatgggggaaaccacccccatgatccaatcgccttctaccaagtctctccctcaacatctggggattacaattcaatatgagatttaggtggrgacacaaatcctaaccatatcatgcagctattaattgttttcagatggataatttaaaatattttctcccattgtgtggattttctcttcacttgtttcttgtttccttcacttcaaaaaggctttctgactttctgtaatcccatttgtccatgtttgttttggttgtctgtgcttctggggcattatttaaggaatttttacccaaaccaatgccctaaagagtttccccaatgctttcttgtaaaagtttgatggtttgaggcattaggtttaagtctttaattcattttaatttgatttttgtaagtggcaagaaatagggttctagttttattcttctgccaatggcttgccagttttcccagccctatttattacaaaaactgtctcatttttattgt

SEQ ID NO: 397924 - DNA, 601 bp, Homo sapiens
ttacatgacagcaggcgagagagcctgtatgtgaagcaaaggaggaagagtcccttataaaaccatcagatctcatgagaaatcactcattatcagaagaacagcatgggggaaaccacccccatgatccaatcgccttctaccaagtctctccctcaacatctggggattacaattcaatatgagatttaggtggagacacaaatcctaaccatatcatgcagctattaattgttttcagatggataatttaaaatattttctcccattgtgtggattttctcttcacttgtttcttgtttccttcacttyaaaaaggctttctgactttctgtaatcccatttgtccatgtttgttttggttgtctgtgcttctggggcattatttaaggaatttttacccaaaccaatgccctaaagagtttccccaatgctttcttgtaaaagtttgatggtttgaggcattaggtttaagtctttaattcattttaatttgatttttgtaagtggcaagaaatagggttctagttttattcttctgccaatggcttgccagttttcccagccctatttattacaaaaactgtctcatttttattgt

SEQ ID NO: 397925 - DNA, 601 bp, Homo sapiens
ttacatgacagcaggcgagagagcctgtatgtgaagcaaaggaggaagagtcccttataaaaccatcagatctcatgagaaatcactcattatcagaagaacagcatgggggaaaccacccccatgatccaatcgccttctaccaagtctctccctcaacatctggggattacaattcaatatgagatttaggtggagacacaaatcctaaccatatcatgcagctattaattgttttcagatggataatttaaaatattttctcccattgtgtggattttctcttcacttgtttcttgtttccttcacttcaaaaaggctttctgactttctgtaatcccatttgtccatgtttgttttggttgtctgtgcttctgsggcattatttaaggaatttttacccaaaccaatgccctaaagagtttccccaatgctttcttgtaaaagtttgatggtttgaggcattaggtttaagtctttaattcattttaatttgatttttgtaagtggcaagaaatagggttctagttttattcttctgccaatggcttgccagttttcccagccctatttattacaaaaactgtctcatttttattgt

SEQ ID NO: 397926 - DNA, 601 bp, Homo sapiens
ttacatgacagcaggcgagagagcctgtatgtgaagcaaaggaggaagagtcccttataaaaccatcagatctcatgagaaatcactcattatcagaagaacagcatgggggaaaccacccccatgatccaatcgccttctaccaagtctctccctcaacatctggggattacaattcaatatgagatttaggtggagacacaaatcctaaccatatcatgcagctattaattgttttcagatggataatttaaaatattttctcccattgtgtggattttctcttcacttgtttcttgtttccttcacttcaaaaaggctttctgactttctgtaatcccatttgtccatgtttgttttggttgtctgtgcttctggggcattatttaaggaatttttrcccaaaccaatgccctaaagagtttccccaatgctttcttgtaaaagtttgatggtttgaggcattaggtttaagtctttaattcattttaatttgatttttgtaagtggcaagaaatagggttctagttttattcttctgccaatggcttgccagttttcccagccctatttattacaaaaactgtctcatttttattgt

SEQ ID NO: 397927 - DNA, 570 bp, Homo sapiens
ttttattcttctgccaatggcttgccagttttcccagccctatttattacaaaaactgtctcatttttattgtgtgttcttggcacttttgttgaaaattaatttagctgtccctcccataggattccagaacgctgctgggttctaaatgtttgtcacataggattccagaacactgctacgagggtctgaatgtttgttcctcacaggggattccagaacactcctgctgtggtctgaatgtttgtccctcacataggattccagtacactgctgtgaggatctgaatgtttgtccctcatacagaatgccagttttcccagccctatttattacaaaaactgtcttattttttattgtatgttcttgacacttttgttgaaaattgatttagcagtatgagtttgtttctaaggtmtctatttcgttccatctctctttatgtctgtttttatgctagtgtcatgctgttttaattactataacttagtagtataatttaaaaccaggtaatggaattcctccagttttgttttatatactcagcatagtttggctattatggtgtg

SEQ ID NO: 397928 - DNA, 608 bp, Homo sapiens
gctgggattacaggcatgagccattgcccctggcctgttattttgatagagatggcatgaaatgtatagattgctatggattgtatggacattttaaaaatactgattcttccaatctgtgaacataaacatatctttccaattttggggtcctttttcatgtcttttatcagtgttttacagttttaattgttgagaacttttatttctttggtaaattcccacacattttatttgtggctactgcaaatagtattacatttttkaattctttttcagtttgttgactgttggcatatagaaatcctactgatttgtatatgttgatttgtattctgcaaatttactcaagttattacttctaatagtttttggtggatgtattaggccattctcatattgctataaaaagtaattagtgactggttaatttataaagaaaataggtttaattggttcatggttctacacgctatacagaaagcatagcactggcttctgcttctggggaagcctctgacaactgacaaggcgaaaaataaatctggtgctcgcacatcacatggtaagtgcgagggcaggtgggaagtgtgacacacacttgtaga

SEQ ID NO: 397929 - DNA, 608 bp, Homo sapiens
gctgggattacaggcatgagccattgcccctggcctgttattttgatagagatggcatgaaatgtatagattgctatggattgtatggacattttaaaaatactgattcttccaatctgtgaacataaacatatctttccaattttggggtcctttttcatgtcttttatcagtgttttacagttttaattgttgagaacttttatttctttggtaaattcccacacattttatttgtggctactgcaaatagtattacatttttgaattctttttcagtttgttgactgttggcatatagaaatcctactgatttgtatatgttgatttgtattctgcaaatttactcaagttattacttctaatagtttttggtggatgtattaggccattctcatattgctataaaaagtaattagtgactggttaatttataaagaaaataggtttaattggttcatggttctacacgcwatacagaaagcatagcactggcttctgcttctggggaagcctctgacaactgacaaggcgaaaaataaatctggtgctcgcacatcacatggtaagtgcgagggcaggtgggaagtgtgacacacacttgtaga

SEQ ID NO: 397930 - DNA, 549 bp, Homo sapiens
ttgttgactgttggcatatagaaatcctactgatttgtatatgttgatttgtattctgcaaatttactcaagttattacttctaatagtttttggtggatgtattaggccattctcatattgctataaaaagtaattagtgactggttaatttataaagaaaataggtttaattggttcatggttctacacgctrtacagaaagcatagcactggcttctgcttctggggaagcctctgacaactgacaaggcgaaaaataaatctggtgctcgcacatcacatggtaagtgcgagggcaggtgggaagtgtgacacacacttgtagataaccagctctgataaaaacttactattgtgggaatggcaccaaaggaaatgatgccaaactgttcatggaaatcttgccctcatgattcaatcacctcccctctaggcccacttccaacattgagaattatatttcaatataagattttggtgggaatacacatccaaactgtatcattttgctcctggccattccaaatttcatatccttctcatattt

SEQ ID NO: 397931 - DNA, 549 bp, Homo sapiens
ttgttgactgttggcatatagaaatcctactgatttgtatatgttgatttgtattctgcaaatttactcaagttattacttctaatagtttttggtggatgtattaggccattctcatattgctataaaaagtaattagtgactggttaatttataaagaaaataggtttaattggttcatggttctacacgctatacagaaagcatagcactggcttctgcttctggggamgcctctgacaactgacaaggcgaaaaataaatctggtgctcgcacatcacatggtaagtgcgagggcaggtgggaagtgtgacacacacttgtagataaccagctctgataaaaacttactattgtgggaatggcaccaaaggaaatgatgccaaactgttcatggaaatcttgccctcatgattcaatcacctcccctctaggcccacttccaacattgagaattatatttcaatataagattttggtgggaatacacatccaaactgtatcattttgctcctggccattccaaatttcatatccttctcatattt

SEQ ID NO: 397932 - DNA, 549 bp, Homo sapiens
ttgttgactgttggcatatagaaatcctactgatttgtatatgttgatttgtattctgcaaatttactcaagttattacttctaatagtttttggtggatgtattaggccattctcatattgctataaaaagtaattagtgactggttaatttataaagaaaataggtttaattggttcatggttctacacgctatacagaaagcatagcactggcttctgcttctggggaagcctctgacaactgacaaggcgaaaaataaatctggtgctcgcacatcacatggtaagtgcgagggcaggtgggaagtgtgacacacacttgtagataaccagctctgataaaaacttactattgtgggaatggcaccaaaggaaatgatgccaaactgttcatggaaatcttgccctcatgattcaatcacctcccctctaggcccacttccaacattgagaattatatttcaatataagattttggtgggaatacacatccaaactgtatcattttgctccyggccattccaaatttcatatccttctcatattt

SEQ ID NO: 397933 - DNA, 535 bp, Homo sapiens
atttaaatatgagatttgggaggggacacacattcaaaccctatcagaggagtctttatgctttttccaatataagattatatcgttggcaaaaaaaaaaaaaaaaaaaaggtgatttgacttcttttccagttgggatgcggtttattgctttcttctgtctgattgctccagataggactttcagcattatgttgaataacagtggtaaaagtggacattcttgtcatcttccagatttaagaggaaaggcttttagtttttccccacttagtgtgatactagctgtgggtctgtcatataagacttttattatgtgggtctgtcatatatgacttttattatattgaggtatgttcattacatacccagttttcaaagggttttttattattaaagaatattaaattttatcaaaaattttttagyataattgaaattattatatggattttgtccttgttttttttttttgttttgttttgtttttttgtttttttttgagatgaagtctccctctgtcacccaggctgga

SEQ ID NO: 397934 - DNA, 535 bp, Homo sapiens
atttaaatatgagatttgggaggggacacacattcaaaccctatcagaggagtctttatgctttttccaatataagattatatcgttggcaaaaaaaaaaaaaaaaaaaaggtgatttgacttcttttccagttgggatgcggtttattgctttcttctgtctgattgctccagataggactttcagcattatgttgaataacagtggtaaaagtggacattcttgtcatcttccagatttaagaggaaaggcttttagtttttccccacttagtgtgatactagctgtgggtctgtcatataagacttttattatgtgggtctgtcatatatgacttttattatattgaggtatgttcattacatacccagttttcaaagggttttttattattaaagaatattaaattttatcaaaaattttttagcataattgaawttattatatggattttgtccttgttttttttttttgttttgttttgtttttttgtttttttttgagatgaagtctccctctgtcacccaggctgga

SEQ ID NO: 397935 - DNA, 555 bp, Homo sapiens
tgtcacccaggctggagtgcaatggcatggtctcagctcaatgcaaactctgcctcctgggttcaagtgattctccttcttcagcctcctgagtatctgggatcacagrtgcccaccaccatgcctgacaaatttttgtaattttagtagagacggggctttgccatgttgatcagactggtttcatactcctgactgcaggtgatccacccagcttggcttcccaaattgctgggattacaggtgtaagccactgtgcctggtcccttcattctctttatgtgatgtatcacattgattgatttgcatgttgaactatccttgcatccctgggataaatcccacttggtcattattaattatctatttatgtattgtttaattcactttgctaggtgttttgcaaatttttgcaccaatattctcagatatgggcctgtagtttgctttttttaatatgtctttgtctggttttgatatcagggtaatactagcctcaaagaatgagtttggaaatgttctttccttctctagttttcagtctggtctaaacag

SEQ ID NO: 397936 - DNA, 556 bp, Homo sapiens
ggttttgatatcagggtaatactagcctcaaagaatgagtttggaaatgttctttccttctctagttttcagtctggtctaaacagacttttttattaaggctttaattttgttaattgttatttgtctgttcaggttttagatttattcctagttcaawcttggtaagttgtgtgtgtctaagaatttcgtctaggttttctaatttgttggcataaaattgcagatagtattcactaatgatcctttgcttttctgaagcgttacttgtaatgtctcctttatcacctctgattttactaatttgtatcttttctgtttttcagttaccctgtttaaatatttgtcaatagttttacttttcaaaaaatcaactttgtctttcattaattctttacattattttcattattttaactttatctacttatgctctaatctttattatttattttcttctaattttgggttaggtttggtcttttcattctagttaattaagatgtattgttcaaagaaattcaggaagaggagccaagatggctgaataggaaga

SEQ ID NO: 397937 - DNA, 568 bp, Homo sapiens
ttttctgtttttcagttaccctgtttaaatatttgtcaatagttttacttttcaaaaaatcaactttgtctttcattaattctttacattattttcattattttaactttatctacttatgctctaatctttattatttattttcttctaattttgggttaggtttggtcttttcattctagttaattaagatgtattgttcaaagaaattcaggaagaggagccaagatggctgaataggaagagctccagtctacagctcccagcgtgagcgatgcagaagatgggtgatttctgcatttccatctgaggtaccgggttcatcgcactagggagtgccagacagtgggcacaggtcagtgggtgcacacaccrtgtgcgggccaaagcagggtgaggcattgcctcactcgggaagtgcaaggggtcagggagttccctttcctagtcaaagaaatgggtgaaagaaggcaccgagaaaatcgggtcactcccacccaaatactgcacttttccgacgggcttaaaaaacggtgcaccgggagattatatcctacacatggctcac

SEQ ID NO: 397938 - DNA, 568 bp, Homo sapiens
ttttctgtttttcagttaccctgtttaaatatttgtcaatagttttacttttcaaaaaatcaactttgtctttcattaattctttacattattttcattattttaactttatctacttatgctctaatctttattatttattttcttctaattttgggttaggtttggtcttttcattctagttaattaagatgtattgttcaaagaaattcaggaagaggagccaagatggctgaataggaagagctccagtctacagctcccagcgtgagcgatgcagaagatgggtgatttctgcatttccatctgaggtaccgggttcatcgcactagggagtgccagacagtgggcacaggtcagtgggtgcacacaccatgtgcgrgccaaagcagggtgaggcattgcctcactcgggaagtgcaaggggtcagggagttccctttcctagtcaaagaaatgggtgaaagaaggcaccgagaaaatcgggtcactcccacccaaatactgcacttttccgacgggcttaaaaaacggtgcaccgggagattatatcctacacatggctcac

SEQ ID NO: 397939 - DNA, 526 bp, Homo sapiens
aagaaagagacacatcttggagatgaatgcacatatcacaaagcagtttctgagaaacattctgtctagtttttatgtgaaggtatctcctttttcaccacaggatgcaaagcactcaaaattgttgctttgcagattctacaaaaagtttgtttccacagtgctcatcaaaagaaaggttcacctctgtgagatgaatgcacgtgtcaaaaagaagtttctcagaaagcttctattaagttttcatgtgaatgtttsctttttcaccatgagcctcaaagtgctcacaaatatccagttgaggaatatttacaaagactatttccaaaccgctcaaccaaaagaaaggttgaactgtgtgagatgaatgcacacatcacaaaggagtttctcagaaaccttctttatagtttttctgtgaagatatttcctttttcatcataggcctcaaagccctcacaaatatctctttgcagattctacaaaaacactgtttccaaaccactcaataaaaataattattgaa

SEQ ID NO: 397940 - DNA, 552 bp, Homo sapiens
atgacctcacacatggaaaacgttggagcccatctgtttccaatctgcttttttccaaaaattagggaagttcagttttccctttgatactctctgttactaccaataccaatgccagggctgtcctgcttctacaagtgacaatgacaaatataggcctgaagaaagatgagctgatggcattcccagattattacctctccttgggggccttatctcacatacatggattcaactcatagactcagctgggtgaggatctattattcagctacattagaagtgactgcttaagactcaggtgtgtggtgaaatgaggcagaattttctcaatggagtgttaggagaattttctcctcataattaccatcttactatcactaaatcatagctaaactgaggaaattattcaagaagaaatagaaatgtaatcttaggaaracataaatttagacatttgtggagagcccttcataattttatggtgttctctttgagctgggattatagttgacttttcattataatatattagctgttctagactttatg

SEQ ID NO: 397941 - DNA, 481 bp, Homo sapiens
tccaatttttatgaaacctcataactgaaatttccctgtgacactaaagagaaacagtaactgtgtgatttaattaaagttttgatttctactctgcatcttcttagttatcataaacccataatacctacttatatgtgagtgctctgggcaagaccttggaggttagactcaatctcatttgaatgatctcagaccaatttcttattaaaggtgttccagaaacccagtggcagatatctacccatattttctatgagcaatagcagcatcaaataagcaaggagatttttcaattttgaatttaaaatrtgccttatatttgatggtatttcatgctttcaattattgttaattattgaaaataggaaacgtttattagcaagtaagcttacctcttacaaaatttcatgtttgcccctgaaacatttctattcattgctataaattatatcctgttgttctttcattacttaaagca

SEQ ID NO: 397942 - DNA, 484 bp, Homo sapiens
gaaacccagtggcagatatctacccatattttctatgagcaatagcagcatcaaataagcaaggagatttttcaattttgaatttaaaatatgccttatatttgatggtatttcatgctttcaattattgttaattattgaaaataggaaacgtttattagcaagtaagctyacctcttacaaaatttcatgtttgcccctgaaacatttctattcattgctataaattatatcctgttgttctttcattacttaaagcaggggaaatccatgactttttatcctttctgttgtgaactaaacatggttttaaacaatttattagaactctctgtttaaaaattcaaacattcttagtttgttggtggatcataacttaaggctgaaataagtaaatagtaggcaaaataagacctctcaatgtaacattaaagtgagatattttactaaaagtaaaatcagctcagatattagaacaaattac

SEQ ID NO: 397943 - DNA, 579 bp, Homo sapiens
ctaggctacacagagcagggcagccctagtctttgtcgataaaaccatttttctttctaaacctctgggcctgtgatgggagtggctgccacaaaggtctctgacatgctctggagaaatttccccattgtcttggtgatgcactttcaggtcctccttacttatgcaaatttctacagtcagcttgaatttcccctcagaaaatgggattgattttctttactatcacgttgtcaggctgcaaattttcaaaacttttatgctctgtttctcttttaaaactgaatgtctttaaccacattcaggtcaccttttgaatattttgctacttagtaattttttttttctgccagataccctaaatcatctctctcaattacaaagttccacaaatctctagggcagaggaaaaatgctgttcagtctccttgctaaaacataggaagagtcacttttgttccagttcccaagttcctaatctccatcagagaccacctgcctagatttcrttgtccatatcattatcaacattttggtcaaagccattcaacaatctctagaaagttccaaactttccca

SEQ ID NO: 397944 - DNA, 646 bp, Homo sapiens
ggactctgataaagaatagagaagattttaatgagaaacactggttattataaaacacagaagagtgatttagtctagaaaatatttaataggtgattttccaggtattcatgataaatgcacagattctgggattatttaccatattggcagtttcagcttcacatagactatacaattctgagcttttcattcctcaaactgttcatgttcatcaatttactcacagctcctcaacaattcactcacatgatttgatcctgtagtttctaattaaaaataactgtagtacatctacaactttgaattcaattttaaacatcaactcttaatgattaccctctcycaactttattttttccaaaaggtatacctgactgctttctcaagattttttttaccttaatagaatcctctaataaatgtatctcaccgttttttgactgtttaacacccttactatgacctcactacctactttattctcagatgttcattgttattttcacctccttatctttatcctcaatttcctgtgtatttactttatttacttaggaaacaacctccaaatctagctaaacttacttaaaaaaaaatgaaactctctcgaataaattcttttgaaatgaaagcaaaccatagt

SEQ ID NO: 397945 - DNA, 646 bp, Homo sapiens
ggactctgataaagaatagagaagattttaatgagaaacactggttattataaaacacagaagagtgatttagtctagaaaatatttaataggtgattttccaggtattcatgataaatgcacagattctgggattatttaccatattggcagtttcagcttcacatagactatacaattctgagcttttcattcctcaaactgttcatgttcatcaatttactcacagctcctcaacaattcactcacatgatttgatcctgtagtttctaattaaaaataactgtagtacatctacaactttgaattcaattttaaacatcaactcttaatgattaccctctctcaactttattttttccaaaaggtatacctgactgctttctcaagattttttttaccttaatagaatcctctaataaatgtatctcaccgttttttgactgtttaacacccttactatgacctcactacctactttattctcagatgttcattgttatyttcacctccttatctttatcctcaatttcctgtgtatttactttatttacttaggaaacaacctccaaatctagctaaacttacttaaaaaaaaatgaaactctctcgaataaattcttttgaaatgaaagcaaaccatagt

SEQ ID NO: 397946 - DNA, 521 bp, Homo sapiens
ggcataatttaaaatagctaagaagtaaataaatgtcatgatattaaaaaaaatgagatatgcaaaatatattaaaagcactattttaataatggaataataaattttacttttcacttgagatgatgaagtataaaaaatgagatttgatcagctgtaaaattttagaaacatggctatgcaatgctaatttttgtctgacagtctgttgcaatgcctgtgcctagttgytgctctagaatgatgagggtgatgtaaaatgggttctgctaaagattccttcaataaacttccaaatttctctttaacatcttccaaaatgacacacaatattgtacacactgcatccggaggatttttgttttctttttttcttttttttttgagacagagtctggctctatcgcccaggctggagggcagtggcgccatcttggctcactgcaacctccgcctcccgggttcacgccattctcctgcctcagcatcccgagtagctgggactgcaggcgcccgccacc

SEQ ID NO: 397947 - DNA, 614 bp, Homo sapiens
actattttaataatggaataataaattttacttttcacttgagatgatgaagtataaaaaatgagatttgatcagctgtaaaattttagaaacatggctatgcaatgctaatttttgtctgacagtctgttgcaatgcctgtgcctagttgctgctctagaatgatgagggtgatgtaaaatgggttctgctaaagattccttcaataaacttccaaatttctctttaacatcttccaaaatgacacacaatattgtacacactgcatccggaggatttttgttttctttttttcttttttttttgagacagagtctggctctatcgcccaggytggagggcagtggcgccatcttggctcactgcaacctccgcctcccgggttcacgccattctcctgcctcagcatcccgagtagctgggactgcaggcgcccgccaccacgctgggctaaatttttgtatttttagtagagacgcggtttcaccatgttagctaggatggtctcgatctcctgacctcgtgatccacccgcttcggcctcccaaagtgctgggattacaagagtgagccactgcacccggccaggaggaatttttaatggtgggtaggtt

SEQ ID NO: 397948 - DNA, 614 bp, Homo sapiens
actattttaataatggaataataaattttacttttcacttgagatgatgaagtataaaaaatgagatttgatcagctgtaaaattttagaaacatggctatgcaatgctaatttttgtctgacagtctgttgcaatgcctgtgcctagttgctgctctagaatgatgagggtgatgtaaaatgggttctgctaaagattccttcaataaacttccaaatttctctttaacatcttccaaaatgacacacaatattgtacacactgcatccggaggatttttgttttctttttttcttttttttttgagacagagtctggctctatcgcccaggctggagggcagtggcgccatcttggctcactgcaacctcygcctcccgggttcacgccattctcctgcctcagcatcccgagtagctgggactgcaggcgcccgccaccacgctgggctaaatttttgtatttttagtagagacgcggtttcaccatgttagctaggatggtctcgatctcctgacctcgtgatccacccgcttcggcctcccaaagtgctgggattacaagagtgagccactgcacccggccaggaggaatttttaatggtgggtaggtt

SEQ ID NO: 397949 - DNA, 521 bp, Homo sapiens
ggcataatttaaaatagctaagaagtaaataaatgtcatgatattaaaaaaaatgagatatgcaaaatatattaaaagcactattttaataatggaataataaattttacttttcacttgagatgatgaagtataaaaaatgagatttgatcagctgtaaaattttagaaacatggctatgcaatgctaatttttgtctgacagtctgttgcaatgcctgtgcctagttgctgctctagaatgatgagggtgatgtaaaatgggttctgctaaagattccttcaataaacttccaaatttctctttaacatcttccaaaatgacacacaatattgtacacactgcatccggaggatttttgttttctttttttcttttttttttgagacagagtctggctctatcgcccaggctggagggcagtggcgccatcttggctcactgcaacctccgcctcycgggttcacgccattctcctgcctcagcatcccgagtagctgggactgcaggcgcccgccacc

SEQ ID NO: 397950 - DNA, 614 bp, Homo sapiens
actattttaataatggaataataaattttacttttcacttgagatgatgaagtataaaaaatgagatttgatcagctgtaaaattttagaaacatggctatgcaatgctaatttttgtctgacagtctgttgcaatgcctgtgcctagttgctgctctagaatgatgagggtgatgtaaaatgggttctgctaaagattccttcaataaacttccaaatttctctttaacatcttccaaaatgacacacaatattgtacacactgcatccggaggatttttgttttctttttttcttttttttttgagacagagtctggctctatcgcccaggctggagggcagtggcgccatcttggctcactgcaacctccgcctcccgggttcacgccattctcctgcctcagcatcccgagtagctgggactgcaggcrcccgccaccacgctgggctaaatttttgtatttttagtagagacgcggtttcaccatgttagctaggatggtctcgatctcctgacctcgtgatccacccgcttcggcctcccaaagtgctgggattacaagagtgagccactgcacccggccaggaggaatttttaatggtgggtaggtt

SEQ ID NO: 397951 - DNA, 614 bp, Homo sapiens
actattttaataatggaataataaattttacttttcacttgagatgatgaagtataaaaaatgagatttgatcagctgtaaaattttagaaacatggctatgcaatgctaatttttgtctgacagtctgttgcaatgcctgtgcctagttgctgctctagaatgatgagggtgatgtaaaatgggttctgctaaagattccttcaataaacttccaaatttctctttaacatcttccaaaatgacacacaatattgtacacactgcatccggaggatttttgttttctttttttcttttttttttgagacagagtctggctctatcgcccaggctggagggcagtggcgccatcttggctcactgcaacctccgcctcccgggttcacgccattctcctgcctcagcatcccgagtagctgggactgcaggcgcccgccaccacgctgggctaaatttttgtatttttagtagagacgcggtttcaccatgttagctaggatggtctcgatctcctgacctcgtgatccacccgcttcggcctcccaaagtgctgggattacaagagtgagccactgcrcccggccaggaggaatttttaatggtgggtaggtt

SEQ ID NO: 397952 - DNA, 596 bp, Homo sapiens
accctcctctcctactatatatcgctcatttataactctcctactttatgtcacagaatatttcacttttctaggcttccttcacaacataatcttatggttattataggatttatcaaattgaattgaatttgtgtttctttttatgtgtccactgtaatgtggtgaatggaagaaattgaatgaatattcatatttttacttttgttcattcctgtgtttctgctcctaggacaagtcaattagattaaatttaccatttacctactaatgtacttaagcattaacatagattttgactttgccttacaattcacttttttttaaaattgttccacactcaaatgaatttcataattctctcaacaattctcacatttaagtactactcatcctaggcttcagtagatcggcatgcatttcagatgaaatacatgtaatatgattctttttcctatgcataagatgattgaatcttgcaatcacttttgaaaaaggaaaaaaataagttaagtgaataaaagtatgttatttgaatattaataagcagaaataaytttctcttttagtctcttttctttataagattttattgc

SEQ ID NO: 397953 - DNA, 498 bp, Homo sapiens
atcttgcaatcacttttgaaaaaggaaaaaaataagttaagtgaataaaagtatgttatttgaatattaataagcagaaataactttctcttttagtctcttttctttataagattttattgcattgaatattaaaaatcattkttacagtcaaaatttaaatacaaatcaattgtgtcttaagaaaaatgtttataacacacatattcaacagacgtttttacataaaactcttcctgtaaagtattgattaattgaaactatgctcttagattttttacaatattatacactataaattcaagcacacctaactggttttaaggtgtacaatggtcattcaatttaaaatgccatatctacagttttcattatccttgtagtagcagaagttttgtttcggctccatgccaattctttagattctgccaatcgaatttatcacagtagatcacaaagcataatctcctcaattattgtctctatttctgaggctaa

SEQ ID NO: 397954 - DNA, 498 bp, Homo sapiens
atcttgcaatcacttttgaaaaaggaaaaaaataagttaagtgaataaaagtatgttatttgaatattaataagcagaaataactttctcttttagtctcttttctttataagattttattgcattgaatattaaaaatcatttttacagtcaaaatttaaatacaaatcaattgtgtcttaagaaaaatgtttataacacacatattcaacagaygtttttacataaaactcttcctgtaaagtattgattaattgaaactatgctcttagattttttacaatattatacactataaattcaagcacacctaactggttttaaggtgtacaatggtcattcaatttaaaatgccatatctacagttttcattatccttgtagtagcagaagttttgtttcggctccatgccaattctttagattctgccaatcgaatttatcacagtagatcacaaagcataatctcctcaattattgtctctatttctgaggctaa

SEQ ID NO: 397955 - DNA, 552 bp, Homo sapiens
acattataaataggcggtcagcacaagatataatcataaagaccctggtgataaaacagaatgcaatcaagaagctaatcaaaacccaccaaaaccaagatggtgatgaaagtgacctctgctcatcactctcaccgctcattgtttactagttataatacattaatatgctaaaagacagtgcctccagtgacatgacagtttacaaatgccctggcaatgtccagaagttatgctatatggtctaatatggggaagaatcctcagttctgggaattgcccacgccttttccagaaaactcataaataatctaccacttgttcagcacataattaagaaacaaccattaaaaatagccaaccagcagccgtcattgctgctctatgtagtagccattctttgggttttttactttataaacttkccctcacttcatactttggactgggcccaatttctttgttgtgccaaatccaagaaccctctcttgggatctggatctggaccccttttgggtaataaggttacaggcatgagccaccacgcctggc

SEQ ID NO: 397956 - DNA, 589 bp, Homo sapiens
ttttttaataggaaataagcttctccttgttcctctgtggatttcaatgatactttttaatacattaaaagctgaattagtgtccgtggggagaaaaattaagtaaatatctgaaygacaaaggatgtgattaaatgactctcccatttctgggaataagccagtccaattaaacaattgtgtctcatcaggaaataaaatggcagataagatctcaaaagtaggaccctatatataacccagaaaaacagatttttaataaaaagcatttctatggaaatagaagaaaaacaaagctaatgtttggagtagtctataaatcggttttttgggggagtctttgaggcatcttcacttagagtgagcaggaagtggtaatctgacagacttctggattctggttcaaatcaggtattctggcgcactttctaagtagttcatacatcaacaggctcttcatatagaagttgctatagtgatttctctccatatttatatcaagttttctagcttcagtttgtagaatcttaagaaaagcacatttaatttctaataattttaaatgaaaagagtgggaaaaataattgga

SEQ ID NO: 397957 - DNA, 570 bp, Homo sapiens
ttctgggaataagccagtccaattaaacaattgtgtctcatcaggaaataaaatggcagataagatctcaaaagtaggaccctatatataacccagaaaaacagatttttaataaaaagcatttctatggaaatagaagaaaaacaaagctaatgtttggagtagtctataaatcggttttttgggggagtctttgaggcatcttcacttagagtgagcaggaagtggtaatctgacagacttctggattctggttcaaatcaggtattctggcgcactttctaagtagttcatacatcaacaggctcttcatatagaagttgctatagtgatttctctccatrtttatatcaagttttctagcttcagtttgtagaatcttaagaaaagcacatttaatttctaataattttaaatgaaaagagtgggaaaaataattggagatgtgagtctggagagtcatagtcatatattttagggaattaaaagtttaagattcagtccagataataaaaaaatctcaaaaacaaatgggcagtgccagaatctagtaacagtcatactacaggt

SEQ ID NO: 397958 - DNA, 563 bp, Homo sapiens
gcttcctgagttcaagtgatccacccacctcagcctcccaagtatctgggactacaggcacatgctaccatgcccagttaatttttgtgttttttttagagatagagttttgctatattgccagggtgttctcaaactcctggactgaagtgatcagtctacctcagactcccaaagtgctgggatcacaggcatgagccaccgtgcccagttcaaaatgtgattcttaaagaagaaattgaaataaccctactgtgactaagatgggaggcaatctgtaagaatagtaatamatttgctagaatatctcctttcagctgtgttcagtacaacaattggctactttagaaaacgtaaagtttctagtctttgtagacccccagtccagttttcctaagatgtttgcttcacatggaaagtatgaatcttgttttttacttttgttttatttttacttagtttgtttttactttgatagctctataggtaactgggagcatttaaaaatgtctttctcaaggagataaaagcctttcgtcccatcggaacaccttaatttgtga

SEQ ID NO: 397959 - DNA, 626 bp, Homo sapiens
gaaatacaggaattaatgttaagcttttgtacaaatctatatagtggtcaaccatctttatcaaatttatattcctcagatgtaaaaaagggcagcatatttataaataaatgttcaacatcactaattatcaagaaaatgcaaataaaactcacaatgaagtattacctcacacttagtggttattaaaaagacaagagataacaaatattgctgagggtatggacaaaagggaactcttgtgcactattcatgggaatgtaaattagaacaacaattatgamaatcaggtttagagtttcctcaaaaacttaaaaacagaattaccatatgatttagtaatttcactattgagtatccaaaggaaattaaatcagtgtcttaaagcgagatatatgagatatgagatatatgaatcctcatatttgttgtgatgttatttacaataggcaagatatggaaattatctaagtgttgctgaatgaataaatggattaaaaatatcatatttattatacacaatggaatatattcagtagtgaaaaataagaaaatcctgtcatttgcaatgacatggataaacctagaggacattatgctaagtgaactaagctaaacacagaaag

SEQ ID NO: 397960 - DNA, 626 bp, Homo sapiens
gaaatacaggaattaatgttaagcttttgtacaaatctatatagtggtcaaccatctttatcaaatttatattcctcagatgtaaaaaagggcagcatatttataaataaatgttcaacatcactaattatcaagaaaatgcaaataaaactcacaatgaagtattacctcacacttagtggttattaaaaagacaagagataacaaatattgctgagggtatggacaaaagggaactcttgtgcactattcatgggaatgtaaattagaacaacaattatgaaaatcaggtttagagtttcctcaaaaacttaaaaacagaattaccatatgatttagtaatttcactattgagtatccaaaggaaattaaatcagtgtcttaaagcgagatatatgagatatgmgatatatgaatcctcatatttgttgtgatgttatttacaataggcaagatatggaaattatctaagtgttgctgaatgaataaatggattaaaaatatcatatttattatacacaatggaatatattcagtagtgaaaaataagaaaatcctgtcatttgcaatgacatggataaacctagaggacattatgctaagtgaactaagctaaacacagaaag

SEQ ID NO: 397961 - DNA, 626 bp, Homo sapiens
gaaatacaggaattaatgttaagcttttgtacaaatctatatagtggtcaaccatctttatcaaatttatattcctcagatgtaaaaaagggcagcatatttataaataaatgttcaacatcactaattatcaagaaaatgcaaataaaactcacaatgaagtattacctcacacttagtggttattaaaaagacaagagataacaaatattgctgagggtatggacaaaagggaactcttgtgcactattcatgggaatgtaaattagaacaacaattatgaaaatcaggtttagagtttcctcaaaaacttaaaaacagaattaccatatgatttagtaatttcactattgagtatccaaaggaaattaaatcagtgtcttaaagcgagatatatgagatatgagatatatgaatcctcatatttgttgtgatgttatttasaataggcaagatatggaaattatctaagtgttgctgaatgaataaatggattaaaaatatcatatttattatacacaatggaatatattcagtagtgaaaaataagaaaatcctgtcatttgcaatgacatggataaacctagaggacattatgctaagtgaactaagctaaacacagaaag

SEQ ID NO: 397962 - DNA, 458 bp, Homo sapiens
ctctggtaaccacctttccactctgattctatgaggctgactcttgtagattccaaatataagtgacattatacagtatttgtgtttctgtccctggcttatttcacttagcacaatgtcctccaggtccatccatgttgttttacaggatagaatttctttcttttttaaggcactatagtatttccttgtgaaaatataccaaattttctttattcactcatctgtccacgagcacttaggttgtttctatttcttggctgtcatgaataatrctgaaataaacatggatgttcagatatcccttcaacataccaatttcaattcctttgaatctatacccagtagtgggattgctggatagtatcataattttatttttagctttttgatgaatatccatattattttccaaaatggacatgccaatttacatttccaccaacagtgtgaacatg

SEQ ID NO: 397963 - DNA, 458 bp, Homo sapiens
ctctggtaaccacctttccactctgattctatgaggctgactcttgtagattccaaatataagtgacattatacagtatttgtgtttctgtccctggcttatttcacttagcacaatgtcctccaggtccatccatgttgttttacaggatagaatttctttcttttttaaggcactatagtatttccttgtgaaaatataccaaattttctttattcactcatctgtccacgagcacttaggttgtttctatttcttggctgtcatgaataatactgaaataaacatggatgttcagatatcccttcaacataccaatttcaattcctttgaatctatacccagtagtgggattgytggatagtatcataattttatttttagctttttgatgaatatccatattattttccaaaatggacatgccaatttacatttccaccaacagtgtgaacatg

SEQ ID NO: 397964 - DNA, 571 bp, Homo sapiens
aaattgtagctgacatctctattcctttatctaattcattttcctccatggtatgtatcactgttttacattctattttagtaattaatttttttgttaatttaataaaatgaggaaagacatttcagtttatttttgctccacrttctattctcagtgcaaaaaaagaaacacaatgtagttgttgtgcattcatgataaatacatgtttaatgaatcaatatgaatgacatctaaaaggatcaatgaaggaatgtatgcctagactatatcaagcttttaaaatatagtatcatacaagtcatatgcagtttttgcattttttctaacactgaaatttatgaaatatatatacataaattcttcttaagcaccagttgatatatcaatgttttttcaccaacaacatgattaatcacataaaatccagaaatttcccccatgatgtgatattttttatttgcaattgagaagacactttcctgaagaaagctcctgcttaagaaataagtgtttattaagtattaaaccacaatctatattcatttctgtgatatgttttatggcaacg

SEQ ID NO: 397965 - DNA, 552 bp, Homo sapiens
cactgaaaaaaataactgtttatctcaacacatagggcctattttcttgtattcttgatatggtttgactgcgtcccaacccaaatctcatctttaattgtaactcccayaattcccatgagtcatgggaggaaccatgtgggaggtgactgaattatgggagcaggtctttcctgtgctgtttttgtgatagtgagtgagtctcacaaaacctgatgtttttaaaaatgggagtttcagtgcatattctctccttttgcctgctgccatccatgtagcacgtgatttcctactttttgccttctgccatgattgtgaggcctcctcagctatgtattattgtaagtttgttaaacatgtttttcttcccagtctttggtgtgtctttatcagcagcatgaaaacagactaatacagtaaacaggtagcagtagagtgggatgctgctgaaaagatacctgaaaatgtggaagtgactctggaactgggtaacaggcagaggttggaacagttcggatgactcagaagaagaaagaaaaatgtgggaaagtg

SEQ ID NO: 397966 - DNA, 390 bp, Homo sapiens
accaggagatgtgttaatttgctcaagcaatgaaaccacatctggtacagcagctgcaattggagtcaccacttggttaagcttatgatagtacactatcattctccaagatccatctgtcttctgcatggggcaaataggaaagttraatgaggatgtggagggaatcactgcccctgcctctttcaagtccttcatggtggaactaatctattcagtccctctagggatgtaatattgtatttggtttactatttttctagttagaggcagctctgatggctcccatttggcctttaacaaaataatagccctcaccttaccagtcaaggagccaatgcagggtttctgccagctgctaagtatgtctatgccaattatggatcctga

SEQ ID NO: 397967 - DNA, 542 bp, Homo sapiens
tcacagaggtaagcaagttaaagtcattagggtgggcatccaatatgaatgatgtcttttataaaaagagaaaatgtggacacagagggtttcatagaggggagactatgtccagggacacagggagaagacagcactytaaaagccgagaagaaagagacctgggacacattcttgcctcacagtcctcagaagaaagagaccttagtgacaccctgatcttgaacttctatcctacagaattgtgggaaaaaaaaaaaaacccataaatacatttctgttgtttaagccactcagtctgcagtactttgtcatggcagccctagcagagtaatacatcttatatatttattttgttatgcacactattatcaataaactatacattttactgctttgcatattttaaactctattaaaagggtatcataatgccacttgatgttctgttcttatttgatactgtaattgaggaaaataccttcaaatattgtttaggttaatatatttttgatgttgtgcagagttttagttcattttca

SEQ ID NO: 397968 - DNA, 453 bp, Homo sapiens
tgggcagtaaattacagttaatttctgtcaatatcatctcttagctcagagacaattaccattctcactctccagccctgtagcagacagcaaggtatttgttcctggagcagctatcacacagcttgcaggaaccagagtgggcaataaagagcctgtcttcaaaatattgttgacctgtgttctgattgttgattgctctttctgaccacagaggtgcaagcacagtggcaagcagccatttttgcactccctcctcagttcttgcaagcccctgtctcttgttctgaaacaaattccaggggatcctaaacagccagcacctttatcctcccttacatttttctstccttttattttctttttgagagcaatactttaaacactaaggcattcaaaagtaactgcatatacaggagaattagaaatttaccacaaatgcacagggaatgg

SEQ ID NO: 397969 - DNA, 453 bp, Homo sapiens
tgggcagtaaattacagttaatttctgtcaatatcatctcttagctcagagacaattaccattctcactctccagccctgtagcagacagcaaggtatttgttcctggagcagctatcacacagcttgcaggaaccagagtgggcaataaagagcctgtcttcaaaatattgttgacctgtgttctgattgttgattgctctttctgaccacagaggtgcaagcacagtggcaagcagccatttttgcactccctcctcagttcttgcaagcccctgtctcttgttctgaaacaaattccaggggatcctaaacagccagcacctttatcctcccttacatttttctctccttttattttctttttgagakcaatactttaaacactaaggcattcaaaagtaactgcatatacaggagaattagaaatttaccacaaatgcacagggaatgg

SEQ ID NO: 397970 - DNA, 542 bp, Homo sapiens
tcacagaggtaagcaagttaaagtcattagggtgggcatccaatatgaatgatgtcttttataaaaagagaaaatgtggacacagagggtttcatagaggggagactatgtccagggacacagggagaagacagcactctaaaagccgagaagaaagagacctgggacacattcttgcctcacagtcctcagaagaaagagaccttagtgacaccctgatcttgaacttctatcctacagaattgtgggaaaaaaaaaaaaacccataaatacatttctgttgtttaagccactcagtctgcrgtactttgtcatggcagccctagcagagtaatacatcttatatatttattttgttatgcacactattatcaataaactatacattttactgctttgcatattttaaactctattaaaagggtatcataatgccacttgatgttctgttcttatttgatactgtaattgaggaaaataccttcaaatattgtttaggttaatatatttttgatgttgtgcagagttttagttcattttca

SEQ ID NO: 397971 - DNA, 586 bp, Homo sapiens
cttatctttatttggaaataaggtcttcacagaggtaagcaagttaaagtcattagggtgggcatccaatatgaatgatgtcttttataaaaagagaaaatgtggacacagagggtttcatagaggggagactatgtccagggacacagggagaagacagcactctaaaagccgagaagaaagagacctgggacacattcttgcctcacagtcctcagaagaaagagaccttagtgacaccctgatcttgaacttctatcctacagaattgtgggaaaaaaaaaaaaacccataaatacatttctgttgtttaagccactcagtctgcagtactttgtcatggcagccctagcagagtaatacatcttatatatttattttgttatgcacactattatcaataaactatacattttactgctttgcatattttaaaytctattaaaagggtatcataatgccacttgatgttctgttcttatttgatactgtaattgaggaaaataccttcaaatattgtttaggttaatatatttttgatgttgtgcagagttttagttcattttcactgcattttctcatctcc

SEQ ID NO: 397972 - DNA, 500 bp, Homo sapiens
aggaaaattattctattatttgaattttcttattcgctaattcccaatgcatgttgaacattgtctttcttccattactaacttttatatttatttcattactcttctcacaagtgtgtcttcagtgtcccatattgttatgtttgctttttttttttttttttttttttttgagacggagttttcctgtgtcccaggctggagtgcaatgacgtgatctcagctcactgcaacctccgcctcccgggttctagtagctattctcctgcttcagcctccctgttgcaggattcaggaagatgagatagagacctcggawtaaaacaggagaatcttttattgagtacactcaggcccagctgactcaatgtccaaaagactgggcccggaacaaagacagcacttgacttttatacacacttcacaaaatggggtgcgcccgttgaagcaagcttacagtggcgtgaaagcacggatacagaggcaggacaaagacagtt

SEQ ID NO: 397973 - DNA, 595 bp, Homo sapiens
cctgtctcatggaaaaaaaaattaaatcaaagttatatactatttatgcttgtctttacttctatgtatatatgtgtacatgtctttgtattttgtgtttgtggtaacaaattaacttataaataaatgagtactcataaattgaataactaacccaaatgcttttcaagttcacatgactttagtaatatttgataaataaastagttttaaaattgttggtaaaataaattaaaaatgtcttcagaattttagacatttttgcctaggtatactggtcagacaaaatttatactatctctactctatgtttttctgtcataaaactgttccttctctgatatttttgatacttccttgacctatctttgaggatatgtcttattttgagcctgtagattctgatttctagacatgtggccatgacaaggcctccacacatacatgtgtttatagtatctgcaccaagagatgcagggcaggcccaagctcaacatttaccaatcctccctggtccagctctgcctcctggccatgctgggaggtgttgattcttcaggcattgtcttcaagttctttcctctatctttggctc

SEQ ID NO: 397974 - DNA, 566 bp, Homo sapiens
ttgaataactaacccaaatgcttttcaagttcacatgactttagtaatatttgataaataaagtagttttaaaattgttggtaaaataaattaaaaatgtcttcagaattttagacatttttgcctaggtatactggtcagacaaaatttatactatctctactctatgtttttctgtcataaaactgttccttctctgatatttttgatacttccttgacytatctttgaggatatgtcttattttgagcctgtagattctgatttctagacatgtggccatgacaaggcctccacacatacatgtgtttatagtatctgcaccaagagatgcagggcaggcccaagctcaacatttaccaatcctccctggtccagctctgcctcctggccatgctgggaggtgttgattcttcaggcattgtcttcaagttctttcctctatctttggctctgcatctagtatgtaacaattaaaactgattacttcctaggtttttcaccgaaaattatgattaaaatagagttaaaattataatcaacagatgttattaaaactaatagat

SEQ ID NO: 397975 - DNA, 695 bp, Homo sapiens
cttataaataaatgagtactcataaattgaataactaacccaaatgcttttcaagttcacatgactttagtaatatttgataaataaagtagttttaaaattgttggtaaaataaattaaaaatgtcttcagaattttagacatttttgcctaggtatactggtcagacaaaatttatactatctctactctatgtttttctgtcataaaactgttccttctctgatatttttgatacttccttgacctatctttgaggatatgtcttattttgagcctgtagattctgatttctagacatgtggccatgacaaggcctccacacatacatgtgtttatagtatctgcaccaagagatgcagggcaggcccaagctcaacatttaccaatcctccctggtccagctctgcctcctggccatgctgggaggtgttgattcttcaggcattgtcttcaagttctttcctctatctttggctctgcatctagtaygtaacaattaaaactgattacttcctaggtttttcaccgaaaattatgattaaaatagagttaaaattataatcaacagatgttattaaaactaatagatataaacaaacaattttgtatacagggtatattaaaaaggatatattttttataaggaaggttatacaaaagatataaagttttggcttttgttaaaggaaaat

SEQ ID NO: 397976 - DNA, 695 bp, Homo sapiens
cttataaataaatgagtactcataaattgaataactaacccaaatgcttttcaagttcacatgactttagtaatatttgataaataaagtagttttaaaattgttggtaaaataaattaaaaatgtcttcagaattttagacatttttgcctaggtatactggtcagacaaaatttatactatctctactctatgtttttctgtcataaaactgttccttctctgatatttttgatacttccttgacctatctttgaggatatgtcttattttgagcctgtagattctgatttctagacatgtggccatgacaaggcctccacacatacatgtgtttatagtatctgcaccaagagatgcagggcaggcccaagctcaacatttaccaatcctccctggtccagctctgcctcctggccatgctgggaggtgttgattcttcaggcattgtcttcaagttctttcctctatctttggctctgcatctagtatgtaacaattaaaactgattacttcctaggtttttcaccgaaaattatgattaaaatagagttaaaattataatcaacagatgttattaaaactaatagatataaacaaacaattwtgtatacagggtatattaaaaaggatatattttttataaggaaggttatacaaaagatataaagttttggcttttgttaaaggaaaat

SEQ ID NO: 397977 - DNA, 519 bp, Homo sapiens
agattatgtcaaatttacttccagaaggcttgtatcaktttgcattcttagcaacagtgtctcatattgtctgcttctctatagtcttggctagagaacatgttgtcatgaatatatatttaacttatatatttatgcatgtatattatatatttaattttcaccactatgttatgggagatactgacaatgccctggattttgttattgtcctgaggccatttttaactttgaaattatttggctagatgaacataatccatgtgtcttctatagttcctctaaaatctatttagaaacaaaaatatttgctttttagttcactctttctgtgtataccttactacaggtggctaaaataagtaaacaacttttcaactctcagtctgagaatctccttagcaacattaacaaatttattgggtacattttcagtcttccacaaggtaacagtagacttcacaatttcatatgatatggcatcttttctccagcctccattagcaatttatttggcag

SEQ ID NO: 397978 - DNA, 585 bp, Homo sapiens
acttgcactttcttacacttcaaaacatgccattcccatgccttgcattgctctttatctacctctttaactatcaggctttttggttttttgtagttcatgagccagtttttcaaaaaacgagtttgtaatgttcccagtgtggtttggctgtccctagatcattaaactatattaactttatactgttatctgtgtgtgtgtgatccttcaaatgttttaatccacatatttcttttctacattatatagctagggccaaaatgaattattctattaattattattgatggtatttaatctatgccccaatgtatctcaagtatcaaagttaatcagtgtgtatttttcattttttaaacattgacaaatcttgaatttgaattccagtatattgtcacaagtatttgtgtaagtttatttatgccatctttttagtattctttacagatttttaactctgtttcaatgttccttttccattatctaatgtagacarcttgctttttcccttttttttctaattattgctagggtggtccactaatttcttcacaaagctgaatctgttgggttttttttttt

SEQ ID NO: 397979 - DNA, 623 bp, Homo sapiens
tttattgtgttttataagatttccttttctaaaaatggcaacttactacaatttacaagaccgcatcaaaaatgttgcttcttttgttcataagattatctcattggtcagattgttttatgattttctattattattccagctcaaaatatttctacatggaaggtataagacagtttacaaaagaaaagactgaaaagaagcaaatcagtatttaccttatatcactaatatctcattcaaaatagctrtttaattcttacccaatccagaggagagtgatcactggttacattatgctaattcttttctgggaaaacataaattaattaatttgcctggataacacctggaatctagattagactaaagtaatagaaaagcaaacatgaaatcttgataaagtcccacattgatattgtaaacaagtgggtaaagttagattatttttattatttccaggttaaataattttttaggtagcatgtgaaaacttgagttaaacaagttattgaatgtgttctgtatctttctgaaaaggtaaagtaatacatttttatagatttacacataatattgtacattgagtacaaagaccatacaatttcacctctatctactca

SEQ ID NO: 397980 - DNA, 548 bp, Homo sapiens
gatcaacagatgaagttaataaactagatgataasataaggaagctatcaaaatggtagcataaatttgatgagtcatcaaatagaacatataaaaaagatcaaaatattttatgatataataaataaaatgttcaggaatcaatcataaaaatgacaagcaaggcaaataaaggcaaaacaaatgcacacatattataaatattggttttaaactgaagaatctcaaagaaaacatgaccatttcatatccactagataagaaaaagttcactgatgagagaggaataatactaacttcaaatttctccctaggtgacattcaaaagcaggtaaatatattgatagttttttaaattgttgaacataatatttcatatataagtagaattataatttgagtatcttggccaattcaataggctctccgaaacaagttttaggaaagtttattatcccatgatattttttcaaaacattcacagaaatgcttcagcaagaatataaataactataagcagaaaactataatatagaaaatgatggtga

SEQ ID NO: 397981 - DNA, 548 bp, Homo sapiens
gatcaacagatgaagttaataaactagatgataagataaggaagctatcaaaatggtagcataaatttgatgagtcatcaaatagaacatataaaaaagatcaaaatattttatgatataataaataraatgttcaggaatcaatcataaaaatgacaagcaaggcaaataaaggcaaaacaaatgcacacatattataaatattggttttaaactgaagaatctcaaagaaaacatgaccatttcatatccactagataagaaaaagttcactgatgagagaggaataatactaacttcaaatttctccctaggtgacattcaaaagcaggtaaatatattgatagttttttaaattgttgaacataatatttcatatataagtagaattataatttgagtatcttggccaattcaataggctctccgaaacaagttttaggaaagtttattatcccatgatattttttcaaaacattcacagaaatgcttcagcaagaatataaataactataagcagaaaactataatatagaaaatgatggtga

SEQ ID NO: 397982 - DNA, 548 bp, Homo sapiens
gatcaacagatgaagttaataaactagatgataagataaggaagctatcaaaatggtagcataaatttgatgagtcatcaaatagaacatataaaaaagatcaaaatattttatgatataataaataaaatgttcaggaatcaatcataaaaatgacaagcaaggcaaataaaggcaaaacaaatgcacacatattataaatattggttttaaactgaagaatctcaaagaaaacatgaccatttcatatccactagataagaaaaagttcactgatgagagaggaataatactaacttcaaatttctccctaggtgacattcaaaagcaggtaaatatattratagttttttaaattgttgaacataatatttcatatataagtagaattataatttgagtatcttggccaattcaataggctctccgaaacaagttttaggaaagtttattatcccatgatattttttcaaaacattcacagaaatgcttcagcaagaatataaataactataagcagaaaactataatatagaaaatgatggtga

SEQ ID NO: 397983 - DNA, 519 bp, Homo sapiens
tgtccatttatttcaatgctcagtgttactaccttgttcaggtaatcagcatttcttgggcacaaagcttcccaagtcttgggaatctattatatgttatctgtcctgaattcagagtgaattcctacaatacaaatttaattatgtcatccccttgcttaaaactctctgacacctacctgttgctaggatactctccaaactcattaaaaaggccaaatccttaatgagatgctcccattataaatgcctttaggacaaggactgtcattcgaccagtgttrtatctagtgtctagcaaggtgtctggtaatcctaagtacatgcttaggatgcagtgaacatttgtggaataactgttgaatgagtcatgatagtaaggtcatttcatttcctaaatttataagtatactgtcttccattattaaaaaaaaaaaacctctggcaacttaattatatctgtctcttcaaatctacattttttccaatgaaggtttttctttgctttcttatatacta

SEQ ID NO: 397984 - DNA, 536 bp, Homo sapiens
tttcttttctgccaagaggaggaattaggatggtaaagatcatcatggttcctacattgcttattcttcacaatatttcaattggctctaaaagaaatcatatctatcatgtggttggtagaacaatgctcacttaccgtacaattttgttaacaaacagctttgaaacatctsctcattcacagtcaggccactaattagttactagctgaatttggctgagattgatcttttgtctatattcattgctcggattacaaagaaaatgatgatttgaaatgcagtatttagaacttggaatcaaatactaactgaaaaattccttttgtgtattttcaactaaccatgatgttgaatccattgatctcttgtttttaatgtaattgtttacacagcatatttatagtcacaatcatttctactttcaatttattttttaaattatgaaaaaaatacatatattttggttaggaattcatgctgagggcttgctaatcctttactactacctataagtacagtcaaagatatgcttg

SEQ ID NO: 397985 - DNA, 586 bp, Homo sapiens
ttactaatatcttagtacattacactgattctagcccttaagagaaaaaaaacacatgacatagaaactatacaagcttaaataacattattttcttctgcatttctcaaaattggtaaaataagttttgtttaccaaaatccctctgagatagcataaaaacaattacatggaaaacatttttgtccaggaagattataatcaatcaatgacagcagcataactttataaaaatagaaatgagctagttctcagcagaactggttttggccattaaacttaactcatgtaacctttctgggtttcagttttctcatatgtaaataggcacagttacattcactttcatttcccttcttgagtgtgctgagaataaaatgattagcataacacctatraaagtttttgagaaaattcaaaatttgatgataaaagttaagataatgctgcacagtcaagacatgatggaaatgtcaacagaggctgagcttctttcccattcatgaagaggacacagaaagatggtcataccgaggatgcacaacaggaaattttgatgaaaagcccttaaaaatacccattctcc

SEQ ID NO: 397986 - DNA, 551 bp, Homo sapiens
accatgaggaaactttcttaccaagtaaggaaaatgaataaagatacataatttataaaaatgaatgaaacaaattctggagacaaaaactacaaaactgaaatgtaaaaggaaaaacactagagagtttcactggccaatctgagtaggcggaagaaagaataaagcaaacctaaagataggttaattgagattatttgatctgagaatataaataaaaaaatgagacaaaataaatagacactaagagtcctgggacactatgatgtgttaccaatatctacataatagagttccagcagaaaagaagaggaaaagggggacagaaagagtatttgaataaataatagctgacagcttcctaaatttaatgaaaaacattaatctatacagctgaaaagcacaatgaattccaaatagaawaaactcaaagagatccacaccagacatgttataatcaaacttttggaggacaaagaaaaaaagaaaatcttagaagcattgagagagaatcaacttgccacatacaagagattctcaatgataataat

SEQ ID NO: 397987 - DNA, 551 bp, Homo sapiens
accatgaggaaactttcttaccaagtaaggaaaatgaataaagatacataatttataaaaatgaatgaaacaaattctggagacaaaaactacaaaactgaaatgtaaaaggaaaaacactagagagtttcactggccaatctgagtaggcggaagaaagaataaagcaaacctaaagataggttaattgagattatttgatctgagaatataaataaaaaaatgagacaaaataaatagacactaagagtcctgggacactatgatgtgttaccaatatctacataatagagttccagcagaaaagaagaggaaaagggggacagaaagagtatttgaataaataatagctgacagcttcctaaatttaatgaaaaacattaatctatacagctgaaaagcacaatgaattccaaatagaataaactcaaagagatccacaccagacatgttataatcaaacttttggaggacaaagaaaaaaagaaaatcttagaagcattgagagakaatcaacttgccacatacaagagattctcaatgataataat

SEQ ID NO: 397988 - DNA, 622 bp, Homo sapiens
tatctatttgacacaaaagaagtcagtaatagagaatctgaggaatgacaaagaatataagacatatagaaaacaaattactaaatggtagaagtcatttgtttccagtaactatattaaacaataatacattatacaattaaaaagaagagattgaaaggaaggaacacacatacacatacacacacacacacacacacacacacacacacacacaccaacctaatccaactatatgccatcaacaagagactcatttcagattcaaagatgcaaataagttgaaagtaaaagtataaaaaaagatattccatgtaaacagtaacacaaaacaatttggaaaggctatgctaatgtctagcaatataaaccttaagacaaaactgatgacagacaaaagaagacagtaaataataataaaagtgtgtatccattaagacagtaaaaaattataggaatataygcacatttcaatggagccccaaaatacatgaaacaaaacgtaactgaattgaatggagaaatatatatttaaataaagattgttgaagactttaacatcccacttttattagtgaataaaacaacaagataaatcaccaaggaaatagaaagcataaaa

SEQ ID NO: 397989 - DNA, 541 bp, Homo sapiens
aggcaagagaaagaaataaaggacaaccaaattggaaaaagggaagtcaaactatctctgtttgccaatgatataatgatatatatagaaaatcctaaagacttctctaacggaatcctatatttgataaatgaattcagtcaagcctcaggttataaaaccaatgtttgttttcagttgagtttagatcagttgttctctcatgtaaggggtagaatgattttcattgaatctcagaccttaagtatggaattttgtaatctctgggtgatttttttttcctcttacctagagagttcacctatatctttgctggaaagatggaaccactactaatcaccttaatctaatttggcatcatcatgactaaaagttagattacattttgaattaagtctctactcttyggttcaccatggctctagagcatagacttcaagaggttccagctgcgaacctgggttggtctgtaactctgatctgcatccaagctgcactgtgattcaagggccttgagtatctatggtctttggtcttaaca

SEQ ID NO: 397990 - DNA, 529 bp, Homo sapiens
ctactcacatcaaaatattttcttagggaaagtttggtctctgatgataaatttaacttgaaactacttggagatttttcagagtagatccttttcccttgaatggaaagagaactactcacatagagaacattttcattaattttatgattcgccatattgtaagtattttgataatctgttataaacgctctcttgggtcatgccaaaagaattctatgagataggtgatatttatttacatttatttttctcactgggaaactaccacagtgaggaaagaaaatgacaacaacttgtctatattccataggtagatttcaatatatgataacatatggtaaaatattaatgacaatacttaggtggtggatatatggatattaagttacttttctgctacaatattttatttaaatgttggggaaaatattgcatagataatacctagaaaacttggaatytctatcacccctgactgcttctgaaaataactgctctaccctacctgtgctcaccagttttgaag

SEQ ID NO: 397991 - DNA, 368 bp, Homo sapiens
acaacttgtctatattccataggtagatttcaatatatgataacatatggtaaaatattaatgacaatacttaggtggtggatatatggatattaagttacttttctgctacaatattttatttaaatgttggggaaaatattgcatagataatacctagaaaacttggaatttctatcacccctgactgcttctgaaaataactgctctaccctacctgtgctcaccagttttgaagacatatcaccagaatatawcttttatcttcttatggaaagagaatacctattgggaacagaagatctgagtccaagtctctgctctttctaccttttatcttttttaatcttgattactaatcaaaaaaa

SEQ ID NO: 397992 - DNA, 658 bp, Homo sapiens
cctgagtcaaacagaaacagtatagaaattataaaaagtacatgcatttatcaagagccagaatttatagccatatttaactattattattattattattattattgtagagagagaatctctctatgttgcccaggctggtctcaaactcttggactcaagggatcctcccaacttagcctcccaaagtgctgggattacaagcctgagtcactgagcctagccaggtttaattcaaaaattgtaaaaatttctaccctcatttcctggagttyctgaataaatagaaatttataaaatgataatcaatgtaatttggggaaagattggtcaaatgatttgagcctcatgtaatgatgaagatgataacagtagttgtagagcatcaacaacatcaataacattcagtaaattttaaatagaggttggattagattgtattttttttatcaagtatgtttcctttctttagtcatggtaacaatgacaatgaaatttccacaagaggtagcatttatttaggttttaaaatttggttcctggtagcattaggaccaaggttctgtgattttgaaatgaccacaagagtgtaattgggtactatagtagattagttgagtaagaatattgtcataaaaactaaatatgtattaaaaca

SEQ ID NO: 397993 - DNA, 658 bp, Homo sapiens
cctgagtcaaacagaaacagtatagaaattataaaaagtacatgcatttatcaagagccagaatttatagccatatttaactattattattattattattattattgtagagagagaatctctctatgttgcccaggctggtctcaaactcttggactcaagggatcctcccaacttagcctcccaaagtgctgggattacaagcctgagtcactgagcctagccaggtttaattcaaaaattgtaaaaatttctaccctcatttcctggagttcctgaataaatagaaatttataaaatgataatcaatgtaatttggggaaagattggtcaaatgatttgagcctcatgtaatgatgaagatgmtaacagtagttgtagagcatcaacaacatcaataacattcagtaaattttaaatagaggttggattagattgtattttttttatcaagtatgtttcctttctttagtcatggtaacaatgacaatgaaatttccacaagaggtagcatttatttaggttttaaaatttggttcctggtagcattaggaccaaggttctgtgattttgaaatgaccacaagagtgtaattgggtactatagtagattagttgagtaagaatattgtcataaaaactaaatatgtattaaaaca

SEQ ID NO: 397994 - DNA, 421 bp, Homo sapiens
atgttttcaatttaatctcctactgcttaatattttcagataaaatgctcmctggctttagaaatcattcattaaatacaggggacaagaagtggcattagagggcagattgtgttgtgattgttttacttttgatttcttcttttagcctcctaagaaagactctgtagcccatggcttctgttaatactatatagcaggagtcagtttttgcattattggtgttagtgatgagtgatacatctgacaaaggttaggatgcttttagaaccatttgacagcaatgaccgctgaagatagaagtggttttccactaatttttctggaaatagagcagtgatatctttgttcaggagtttacatttgacttagaaggcctttatcccatttgcgtctgtcaatagtttacttattttctgaa

SEQ ID NO: 397995 - DNA, 421 bp, Homo sapiens
atgttttcaatttaatctcctactgcttaatattttcagataaaatgctcactggctttagaaatcattcattaaatacaggggacaagaagtggcattagagggcagattgtgttgtgattgttttacttttgatttcttcttttagcctcctaagaaagactctgtagcccatggcttctgttaatactatatagcaggagtcagtttttgcatyattggtgttagtgatgagtgatacatctgacaaaggttaggatgcttttagaaccatttgacagcaatgaccgctgaagatagaagtggttttccactaatttttctggaaatagagcagtgatatctttgttcaggagtttacatttgacttagaaggcctttatcccatttgcgtctgtcaatagtttacttattttctgaa

SEQ ID NO: 397996 - DNA, 583 bp, Homo sapiens
agtaaagcagattgccctccataatatgggtgggccttatacaatcaactaaaggcctaaatagagcaaaaggctgacttcccatcagcaagagagaattccctagaagtctgccttcatacttcatctgcaccttgttctctagcagactgcttatagattttaactgaaactctctcccgaatctttaatctgccaccctcccccatcaaattttgcagtcaaaagcttccacagtcatgagtcaagttcttaaaatctctctctctttctgtctctgcagaaccctgacatacatatatttatatatgtgtgtgtgtgtatataggcatacatacatacacacaaatcacgaaattggtgtggatttttttgttttgttattttatcagaaagatacagctattttgatagtggaacacatgtcactgaatttaatctaaaccatgctaaattatgacacacacaaacaaacattaatttggctacaacctaacgttcyatagtttcctgtttttatcaattctcatcaaattattttatatgcactttgtcatactagggagagatacagttagagata

SEQ ID NO: 397997 - DNA, 565 bp, Homo sapiens
ccttcaccctccaaaatagaggtcagtaactttctcaagcagaactgtgaagggagtaaaggctgctttacaagcagggataaagatggaatatgagcatctccattgaaattggaataaaatgagattgsctactcattttaaaagcccacccaagtaaacccaggctgacctgggaaagtatcctggtccccagagatccgaatgaaagagaccattgcaaagagagaagagtggttggaaagctccctccttaaaacctgtatcctaggaaatgactgcctctaccagctcagtaaaaaggaggccaggaaagtaacctgctgtgtaccctttgagaactaccttctgctgcctgcagtgaacttgcctacaggcaaagagaattctgtggctattttaactgtatctagtttactttcaggagtatttagtgcctggaacaaaaatgagtagaacaaaggaataccctaggagtgtgatcacaacagcaagctgccggccacatcctgggccatacacttattagccttggcataataaatgatgtagtgtgacagagggg

SEQ ID NO: 397998 - DNA, 600 bp, Homo sapiens
aaatgctagaaatccatctttctaattaaagttaatggcaaaaaatgcagcaatcactttaaacgtgcaggtcatgtacattactgaaaatttttaaggagctcaggagccaaagtttatgtggaatgctttttttctcatttggttcttgaacgtacttggtttctgacagtattttaaaattaattaattaattttagatgagtacgtcattactcaargaaagaatagaaatcacgggatttgcgctggaacatacactacagggaacacattaatttgtaaattgctatgaaatccaaatacatgacacactattttggactcatagtacattcgtttggaaaagaacttagaaatataatccaaccctcttctttagtggtcaagaaaactgaggctgatagagaagtcagctacccatagtcacaggtactgttggtcgcagagttgggacttcagctctggatttctgactaattttcttctttccactccaccaaacttcccctctttatacagaaagtttattatccactttaaaaattgcaggttaagaattcaataaatggatatgcaaaactagtggagagctgcacc

SEQ ID NO: 397999 - DNA, 524 bp, Homo sapiens
tcggggatttatgcagcatttaattctaaatggcccattcagaagcagaaaaaacaaatgagcatcaatttaactgagaaatttaacccgaataactgaaaaatcaccaagtggcagctctgaaattctgtaattctaatattcgatctaaggagaagaatatagaagtgtaccaataagatgaaagtaatctgggaacacagggttaggtaaaaaatgtagatatggacrtttatattagagttaaaatatcaagcatcaatagagaattacagtttttgtagaaagtaaatttcaagattaatgtgaaaaaatctgattttgatatgtaacaggctttgtacaattgctgtaaggggcagatggttctacagtttttatttagcaatgatgctcacaaatcaaaatgcagataaaactccaacgccatttttgacaccctattcttctaaatcttaattagacataaaatcagtggttataacttgtggattaatttgtagatgttgtgatcatcctttggg

SEQ ID NO: 398000 - DNA, 645 bp, Homo sapiens
caatttcctgcttttataaagttcctactagctatattttcccaaaagtgctcaacaatagagtctggtgctaaaaagcagagtaggctaaatttagatcaatgtgaaatgccctacttatttcctatgaacttaattgattgagctcattttgggggtgtctttctgatcgaccagaaacttggctcattagagcaactcacaaagtgaccttttaaaagaaagagttttcaatatatttgttcatgttccattccactgagaatggtgctatttaaaactaaatacaataattttagatattgtacagcagatataattttaaacataatacatgggatttcgattttaggtactgtttataaggcatttctccttatattattctagacttaaatataacaaatttcatgcagaggtttctttcaaaagtaaattcagccacatttagactcaaatattccctaattttttagtgtagctgaagtcctaataatatacttgtgtttcttttaaattaagtcccacatgttaactttacarcagaaagtccatgtatcgtattattagtctaaatcttcattttactgtttagttaacacagacattcatttaacacactatgtttaatttcccactcagttt

SEQ ID NO: 398001 - DNA, 614 bp, Homo sapiens
gtctttgctactaagccactacagattccattccctttcttcttgagtatgcacacaccgcttgttcacagactccagattagttattaagctacatctgtatgcagtttgcactctcctgccttcgacctgcttgtcccagaagttattcaccatattctaccttgatcatattttctacttgtcaatgcgcatgtcaattaagaacttttaacatttattgaccatttattatatactagccagtcttttaattgmtttatgaacaattaacttaatcatcatataagcatagtagggtacaattagttccccaactttatatatgaacaaatggactttcagaaaggtaaggtaaaatatccacggtaagaaagcctgcatatgtggaactgggaattgaacccctatgtctgacccgagggtccatacacttaagcattatgctatcaagttttccacagcctgcttttcggcttctctctctttctttctttcctgatctctgttgcaattcctacctttcaactcccttctgaccatggatagtttgcaaaatgccagaggtacgtctcaaagaagcttcaaataggagcgtgtactaccattaagtc

SEQ ID NO: 398002 - DNA, 614 bp, Homo sapiens
gtctttgctactaagccactacagattccattccctttcttcttgagtatgcacacaccgcttgttcacagactccagattagttattaagctacatctgtatgcagtttgcactctcctgccttcgacctgcttgtcccagaagttattcaccatattctaccttgatcatattttctacttgtcaatgcgcatgtcaattaagaacttttaacatttattgaccatttattatatactagccagtcttttaattgatttatgaacaattaacttaatcatcatataagcatagtagggtacaattagttccccaactttatatatgaacaaatggactttcagaaaggtaaggtaaaatatccacggtaagaaagcctgcatatgtggaactgggaattgaacccctatgtctgacccgagggtccatacacttaagcattatgctatcaagttttccacagcctgcttttcggcttctctctctttctttctttcctgatctctgttgcaattcctacctttcaactcccttctgaccatggayagtttgcaaaatgccagaggtacgtctcaaagaagcttcaaataggagcgtgtactaccattaagtc

SEQ ID NO: 398003 - DNA, 544 bp, Homo sapiens
taaatagttcatacagaagttaaaaaaatgagaactgaggtataacaaatgagcataagacaaacaagaagagatgtaagtacacaatgctgaccttcagatcaagaaaatttgaggagttttagctctagaggtttcaattcagagagcttaatgccatctgttctgggatgtttaaacattcaagctactggaagcaagggaacgtrcacctgaattccctttgaaaaatacgctttacaatttaggctttatatgtttctcaataaagcacagtgaaagaaaaaaatgtctacattcaaaatgcctatttcatttttagaaaatgtgtctaaaactagatcagtcttgttaactgatttatgaatacataattaatgtgcaacaaattgcatgcatttcaagtgtacaatttacaagttttaaaatatataaatatatatgaaacaattacacaataaagataaggaaaaagattcctcttgcctattctttttatttaaaaaaattcaccaataaaaaattctatatatttttggtagac

SEQ ID NO: 398004 - DNA, 588 bp, Homo sapiens
taaacttttctgattttcagttttgctccaaaaataggtaaagaggtgttgtagcagctgtggcaatttagctcaagtggatcatttatattggcaaacatatgtaccataagctataaaggcagcagcttgtgaacccattaaatggtgaaattctgcttcagcatttgctaaaactttagagacaataatcctttgagctgagcattgaaggatgaattgcaacttccagggttaggagaggaggtacagcattatgtattacagctataatgataatgctgtgttatcaagacaacaacgatctagtttggtrccatatgagacaagtagagtgactgtagttaaaaatagagtttattgtatatttcagaagaggtagaagattggagacatactcaacacaaagaaattataaatgtttgagatgatgaataacctaaataccttgattggatcgttacaaattctatatgtgtacagaacatcctgtgtgctctataaaaaagtaaaattattaggtatcaatgaaaactaataaattaattaataattgtgtgtatatttgtaatagagataagttaaaag

SEQ ID NO: 398005 - DNA, 570 bp, Homo sapiens
ttatttaacaatgcttttctgattataaacattacgtatttgttgcagcaacactggaatatggaaacctaaaaaatacgctaaaaataaaatgttatgaaaacattcagattcaaaaccataaacatttagcactagcgaactattcaaattaaaatttttttttcctttatttttttgagacagaatcttgccctatcccccaggctggagttcagtggcacaatttccactcactgcaacctccacctcccaggttcaagtgattctcctgcctcagcctcccgagtagcygggattacaagcgcgcgccaccacacccggctaagttttttaaatgtatgtaaaatacataagtgtttaataaaactgaggcaatacaatttgactcttctttatttttcttttttaacactgaaagaagttttccaaatattccttaccatatattactcatcatctttaatgattacaaacttttatatgtcatatgacatggatacaatacttctaaattccactttatttctctcagaccttcatgatgttttcagtttttttcttaacaac

SEQ ID NO: 398006 - DNA, 570 bp, Homo sapiens
ttatttaacaatgcttttctgattataaacattacgtatttgttgcagcaacactggaatatggaaacctaaaaaatacgctaaaaataaaatgttatgaaaacattcagattcaaaaccataaacatttagcactagcgaactattcaaattaaaatttttttttcctttatttttttgagacagaatcttgccctatcccccaggctggagttcagtggcacaatttccactcactgcaacctccacctcccaggttcaagtgattctcctgcctcagcctcccgagtagctgggattacaagcgcgcgccaccacacccggctaagttttttaaatgtatgtaaaatacataagtgtttaataaaactgaggcaatacaatttgactcttctttatttttcttttttaacactgaaagaagttttccaaatattcctyaccatatattactcatcatctttaatgattacaaacttttatatgtcatatgacatggatacaatacttctaaattccactttatttctctcagaccttcatgatgttttcagtttttttcttaacaac

SEQ ID NO: 398007 - DNA, 570 bp, Homo sapiens
ttatttaacaatgcttttctgattataaacattacgtatttgttgcagcaacactggaatatggaaacctaaaaaatacgctaaaaataaaatgttatgaaaacattcagattcaaaaccataaacatttagcactagcgaactattcaaattaaaatttttttttcctttatttttttgagacagaatcttgccctatcccccaggctggagttcagtggcacaatttccactcactgcaacctccacctcccaggttcaagtgattctcctgcctcagcctcccgagtagctgggattacaagcgcgcgccaccacacccggctaagttttttaaatgtatgtaaaatacataagtgtttaataaaactgaggcaatacaatttgactcttctttatttttcttttttaacactgaaagaagttttccaaatattccttaccatatattactcatcatctttaatgattacaaacttttatatgtcatatgacatggatacaatacttytaaattccactttatttctctcagaccttcatgatgttttcagtttttttcttaacaac

SEQ ID NO: 398008 - DNA, 581 bp, Homo sapiens
ggaaatcttgtattacaaatgaaaaaagctatgtaaagcaacaggggttatctaaaacaaaatcaaaacatccttgatattcaattatttctttgatttactgtgtaaattttctaaattggtattttaagtgacgtaatcagcaatgtagcccaaacattgataaattatggtgatgataatagatctactacttttttatttatttttcattaaaatgtgcctaaggtttatatatgacatagttttataaaaagtaatcagaaatggctaattgatagttgctacatatagtaacctgatatatataaatggaaatttcatttaaagcacttaaaactttataaatctygcctttcattgaaagatatatacattggccatgatgctatatctctcaggtgttaccaatgagaaattttagacactttggaatatacacacatatttataaatcaacaagtttttatttaatgccctgatggtgaaatttacctgcatttctaatttaaaatacctctctggatatgtacaactaatgcaatagaatacgagaaagaactgacacttagagtaagtaa

SEQ ID NO: 398009 - DNA, 526 bp, Homo sapiens
aggtgcaatttttcaaccaycctttcttaggggagttggacggagagggatttcgtctctccacgtcaatatatgtcaatacgcccagaatcttgccattcagggaagctcaccaagaatttgtgttcaagagttttatagggaagaaggaaacgggtagtcacgtagacatggctaactaactatgtggctagtcttcagtctgcaacccctccagaggtcactagaggtcacactgctactgcacggcccaaagttcccactagaaatcatatggtttagtgtagactacctgggaagacccaaggctctcaggtaagtatagacagtcttaccaagcagaacattccaagggctaaggggttacctccaggagctggacagaggctaaagttttcttgagcaaagtctgtcctttactgcacaacagtgcagtgtattcagagaggacaggctctgcctacccacccactatctagtggctttgtttacacaacttctttctttaaatttatataaatttatg

SEQ ID NO: 398010 - DNA, 561 bp, Homo sapiens
taaggaacacataatatttaatataatcactatgttkggtattgcttcctcatttaaatttgtgaggagtgcctctatcttgttgccacaatcaatgctaatggagtgtaaagagtttatattcctagctataattcacacaggcagccagcctggctatttgggtaagcttgggctcctctcatcttccgatcttgagcaatgtgtgtacacgtatggcactgtgtgtatatgtgtgtgctaccgtgtgtgtgcctgtgtgtgcgattacatttatatgatcaaagcttttgtgaaacgggatataaaataggaaatctaggagatgctccatgttttcggtccaaaaacacatgcacaattcaaagaagagttaagtttatatatatacacagacatactagcacacttttttttttaactgaacagaaaaaaatcaacaatgattacacataagagggcattcatgggaaggaatacagaattatccaaggactaatttctactacaattcttgcccaggaaaactctcctaacacctacaaatacattttctaaata

SEQ ID NO: 398011 - DNA, 581 bp, Homo sapiens
gtgataaattaaaagcagcatgttagcagaccttgtcttaaaaatcattgtgcaaaaacttcttcagaatatatggagagtgaatataaaataatctcatccaaagtaagtgggtttcctcccacaaaagatttaaaaacttaattttagacttaaaactacttaaatgaaagagaatgctataagcagaagttaaaattcttaataatttctacccttcacagcaatgaaaaccattgattactaaayactctgcttacagcaactagctatataaaatgactacatttcaggagtcagggtcctgatgctttaatcagtgtttgattactcttaatcagtgtttgaattactcccaaggtagtgtgcctgtgtcagtaagatagattatatgatcagcagctgctttaccaaggtagagaaattgaaaatctgggattctaggcatcaggatatgaatatttggagacaccttagtacttcaagttgctgatttaaaaaatcttaggtgaaaaatttaaagtattatgtctacttcatccaaatgtgggctttggtaccaagcaacagaagttgaaggg

SEQ ID NO: 398012 - DNA, 641 bp, Homo sapiens
ttagttctggaagttgttttattgttgtgtcttctcttcttagagtcaatggattttaaagtagaaaaaaatgttttttcctcttgaaaacaacaacagcagctatattttggattatgcaaaataagtattcatcaaggattattcaattcgattcatacattcactatgcttggctctgatgtgaagcctatacacgtgcaaaatgtttgaaatgtgagcactgctcaatggctgtttcacaacacatgtgaagaagtagttaatttctatagacaaatgttaaagattagaagcttaagtaattattattctttattttactaatgctagtgaaaagtttatctttgtccactcccyatatcaaatttgaataaatcatgttaaagcgccatggaaataaaaagtctttcagtatccattgttacttatttttaaaaaacattgggtcccacagaactgagcaatcaaaaattatttctaacttttctcatgttctgagccatgcattcttggtaaaaggaatgaaagcagtccctttacttatcatttaccatatcttaaaattaactctgaaactgagagaagaatgattcattctttttaaggttattcctacttacttcaaaccaaataaaatc

SEQ ID NO: 398013 - DNA, 641 bp, Homo sapiens
ttagttctggaagttgttttattgttgtgtcttctcttcttagagtcaatggattttaaagtagaaaaaaatgttttttcctcttgaaaacaacaacagcagctatattttggattatgcaaaataagtattcatcaaggattattcaattcgattcatacattcactatgcttggctctgatgtgaagcctatacacgtgcaaaatgtttgaaatgtgagcactgctcaatggctgtttcacaacacatgtgaagaagtagttaatttctatagacaaatgttaaagattagaagcttaagtaattattattctttattttactaatgctagtgaaaagtttatctttgtccactccccrtatcaaatttgaataaatcatgttaaagcgccatggaaataaaaagtctttcagtatccattgttacttatttttaaaaaacattgggtcccacagaactgagcaatcaaaaattatttctaacttttctcatgttctgagccatgcattcttggtaaaaggaatgaaagcagtccctttacttatcatttaccatatcttaaaattaactctgaaactgagagaagaatgattcattctttttaaggttattcctacttacttcaaaccaaataaaatc

SEQ ID NO: 398014 - DNA, 448 bp, Homo sapiens
ctaggtttgatgatgaactatgtagtactggggaaatataattggataaaaaacaaaaaacatgttcaaggataataaatgataggaaaccaagcaaggcctgtttgttgaaattcttctctgttcctttcctttgggtataggcagggcacttcccaaatgaaggtcttatgacttccttcaggagaatgtcagagaattcttcctgggttttatgacctgcttcagggaagaaaggcagggagaaagtcagagagaacttgctgcttctgtggttttctcaaatgtgaaggtgccatattttggggtagcatrtcttgaatccaatcaaatcaatatttaaagtcagctctgttaaatattgatgtgtttcctttctttttccctcctaaggtatattgacaagtaggtatataaataggtaaattttacttaatagatatcttag

SEQ ID NO: 398015 - DNA, 523 bp, Homo sapiens
gcctacaacctgttgtatctctgaataaactgatgttttttgattttataggcccacagttgggaggaacttgccttgtgttagatgagactttggaatttgaaatgttgagttaatgatgcaatgagttaagactttaarggacgattgggaagacattattgcattttgcaatgcaagaagtacatgagatttgggggtctggagagcaatgaagtcccaccaaaatctcatgttgaaatgtaatccccaatgttggaggtggggcctgatggaaggtgattagatcatgggggtagatttcttatgattggtgtagcatcatctccttgttattgtccctgcaagagtgagtgtgttctcatgagatgtgattatttaaaactgtgtagcaccttccttctgtctctctcttgttcctgctctggccatttaatgtgcttgctgaaccttcaccttccatcatgattgtaaggttcctgaggcctccccagaagcagagcagatgccagcatcatgcttc

SEQ ID NO: 398016 - DNA, 523 bp, Homo sapiens
gcctacaacctgttgtatctctgaataaactgatgttttttgattttataggcccacagttgggaggaacttgccttgtgttagatgagactttggaatttgaaatgttgagttaatgatgcaatgagttaagactttaagggacgattgggaagacattattgcattttgcaatgcaagaagtacatgagatttgggggtctggagagcaatgaagtcccaccaaaatctcatgttgaaatgtaatccccaatgttggargtggggcctgatggaaggtgattagatcatgggggtagatttcttatgattggtgtagcatcatctccttgttattgtccctgcaagagtgagtgtgttctcatgagatgtgattatttaaaactgtgtagcaccttccttctgtctctctcttgttcctgctctggccatttaatgtgcttgctgaaccttcaccttccatcatgattgtaaggttcctgaggcctccccagaagcagagcagatgccagcatcatgcttc

SEQ ID NO: 398017 - DNA, 523 bp, Homo sapiens
gcctacaacctgttgtatctctgaataaactgatgttttttgattttataggcccacagttgggaggaacttgccttgtgttagatgagactttggaatttgaaatgttgagttaatgatgcaatgagttaagactttaagggacgattgggaagacattattgcattttgcaatgcaagaagtacatgagatttgggggtctggagagcaatgaagtcccaccaaaatctcatgttgaaatgtaatccccaatgttggaggtggggcctgatggaargtgattagatcatgggggtagatttcttatgattggtgtagcatcatctccttgttattgtccctgcaagagtgagtgtgttctcatgagatgtgattatttaaaactgtgtagcaccttccttctgtctctctcttgttcctgctctggccatttaatgtgcttgctgaaccttcaccttccatcatgattgtaaggttcctgaggcctccccagaagcagagcagatgccagcatcatgcttc

SEQ ID NO: 398018 - DNA, 537 bp, Homo sapiens
  misc_feature (1)...(537): n = A,T,C or G
gtttacaatccctgagctagacacaaaggttcttcacctccccactagattagctagatacacagtgtggacacaaaggttctccaagtccccaccagagtagctagatacagagagtcgattgatgcattcacaaaccctgagctagacacagggtgctgattggtgtatttatttacaaaccttgagctagatacagagtgctggttggtgtatttacaatccccgagctagacacaaaggttctccacatacccaccagactcaggagcccagctggcttcacccagtggatcctgcaccggggctgcaggtggagctgcctgccagtcccgtgccctgtgcccgcactcctcagnccttcggtggtcgatgggactgggcgccgtggagctgggggcggcgctcttcgggaaggctcgggcagcacaggaacccatggcgggctgcaggtcccgagcgctgccccatggggaggcagctaaggcccggcaagaaatcgagtgcagtgccrgtgggctggcagtgctgggctgg

SEQ ID NO: 398019 - DNA, 564 bp, Homo sapiens
aaactacacttttagctaaaatagcaataataatttagtgatttcttaacaaatgacaatcagtgtgctgtaaactttgtatgcatgtccttatttaacctgcaacactccatgaggaaattaatattattttccacaactcaaaaatgagaaatcaggtttataaaggttaagtaaatttgccaaaggtcacccattcaatatttcaaattatgtctgactttcccacaaagctagagaacttcttgtttctcatcatatttcaccttataataaattcctgtgttctatgtactcttcttccttaattatataccccaagattgtatttctttattctgttgtcctttcagacacctcacacagtacatctctttctagataatcgattcacatcctacctcccctgtcttgagatgtagtttgttttggaaaactatgtagtattaktggttcatttatttaaaataacagttggcccattgttgtatatttttgaattgtttgcattattctgccttaagtattaatgatctgtccactatagtttaatttcactttcac

SEQ ID NO: 398020 - DNA, 579 bp, Homo sapiens
gggctggcattgagtgtctgttgcttttccaggagcatggtgcaaggtgttggtggatctgccatcctggggtctgaaggatgacggtcctcttctcacagctactctaggtggtgccccagtggggactctgtgtgtgggatccaaccccacgtttcccttctgtcataccctagcagaggttcttcaggagggctcccaccatgtagaaaacttctgcctggacatcctggtatttccgtacattctctgaaatctaggtgggagttctgaatcctcagttcttgaattctgtgcacccacaggcccatcatcacttttaagttaccaaggtttggggcttgcacccrctgaaacaatggcctgagctgtatgttgagcccttttagccaaagctggtatgcagggcaccaagtcactgcataccagactgcacaaagcaccaaggccctgggcccaacccatgaaaccatttttttcctcctcagcttctgggcctgtaatgagaggggctgccatgaagatctttgagatgcctggagacattttccccattgtcttggttccttgttacttttg

SEQ ID NO: 398021 - DNA, 638 bp, Homo sapiens
ttcatcacatgtggcattgattaagattcctcccagatggatcagtagttctgtaagtttagatatgattttcattaagtattcatgtaaaaagcaataattaaatgcctactgtgtgaccagcattgttcatatgctggagctatagaacaacrcaaggcaagaaaattctcaggagaaaaacaatttgatagaagaaccaacaagagaatgtaagaccaataagagaatataagaccaaggtatagaatgttacaatagagccagatccagacagtaggcaagagcaggtgcaaaatggtggggagggctgcttgtatcacatgaatgaacgccgcctggacggcttctgtgtttcctcctccctggcttctgcacaagtagcagttttacctctgctgaagcaaagtgttggcaattccaggtcctaaatttaactattatgaggtcacagaaaaatagcaatcacttaacaaaaaatctggagccagtattttacatggagtaagatatctgctttggaaatttccaaatatagatcaccaaagttgtcaattctactaaatcaagggaaagcctatgaaacttaaaattctaggctacagtacacatttagaattgagagaatatccttatat

SEQ ID NO: 398022 - DNA, 638 bp, Homo sapiens
ttcatcacatgtggcattgattaagattcctcccagatggatcagtagttctgtaagtttagatatgattttcattaagtattcatgtaaaaagcaataattaaatgcctactgtgtgaccagcattgttcatatgctggagctatagaacaacgcaaggcaagaaaattctcaggagaaaaacaatttgatagaagaaccaacaagagaatgtaagaccaataagagaatataagaccaaggtatagaatgttacaatagagccagatccagacagtaggcaagagcaggtgcaaaatggtggggagggctgcttgtatcacatgaatgaacgccgcctggacggcttctgtgtttcctcctccctggcttctgcacaagtagcagttttacctctgctgaagcaaagtgttggcaattccaggtcctaaatttaactattatgaggtcacagaaaaatagcaatcacttaacaaaaaatctggagccagtattttacatggagtargatatctgctttggaaatttccaaatatagatcaccaaagttgtcaattctactaaatcaagggaaagcctatgaaacttaaaattctaggctacagtacacatttagaattgagagaatatccttatat

SEQ ID NO: 398023 - DNA, 615 bp, Homo sapiens
tataaaaaaatgccattactctcctctgaaaccatgccttgaggcattttaaatattccagaaaagtaactacgaaagtaccataataaatgtgacaatcatatttaatgatagccagaataattactctcatcacctaaataaaacacatggcagtagaagaaaaatagccttactatgcaggagatcattagggcatatgtattgatggagtcatggtggcacattgcttattttgcagacatagtagttckgcatgagttcatttctatgaaaagttaaagctccacattttctgctgcatatttatttgcaacattttaataattcaaatgaaatattattcatgttattagattttgaaagaatcaatgttacctataaaatttttacttgtcaataaatagttacatctatgacaggtggcaaacacacctttatcaggacaggcattaaattctagtgtcaggcaaaggagaatgtaagaaaatatcagacaatgtgtctatggaagcaaagtgtttatagaaatcactggataagcggtctttcatccaagtttcactccaattcaaccttatattagcttctcaggccaaccaacagctgctcaat

SEQ ID NO: 398024 - DNA, 619 bp, Homo sapiens
tatatgaagacagtacatggggtaatctttacttcaggaagagtgaacaaagggatcttcagggagagtgagcagtatcactcatttaaagctttttgaatgccttgagactcccactttgtgattggagaaaagygttcagcctccttgagctaatttaaagacaaatggtagagggataggctttcagatattatccttgttttgaacattttacaacatgtcctgttttctttggcctttctaaatttagagcttctctgagattctggaaggaggcccaagtcacatgtgcacagttttcccaatggcacttccctttacccatgtagcttctctaccacttctgcatcagttcttcatctcctatagtattttttaaacatttcttgtctcctaatgaccctccatcctttgtgctctctctctctctctgtgtgtatgtgtgtgtcctttgtcaccatttattagtgttttaggggaagaagagatacccttaattaatgttcaatatggcaccttaattctgcttgacctataaatctggaattatttttcttaaattgatattctattttttcaatgatttttttcttattgttggtgcagttttagaatt

SEQ ID NO: 398025 - DNA, 619 bp, Homo sapiens
tatatgaagacagtacatggggtaatctttacttcaggaagagtgaacaaagggatcttcagggagagtgagcagtatcactcatttaaagctttttgaatgccttgagactcccactttgtgattggagaaaagtgttcagcctccttgagctaatttaaagacaaatggtagagggataggctttcagatattatcctygttttgaacattttacaacatgtcctgttttctttggcctttctaaatttagagcttctctgagattctggaaggaggcccaagtcacatgtgcacagttttcccaatggcacttccctttacccatgtagcttctctaccacttctgcatcagttcttcatctcctatagtattttttaaacatttcttgtctcctaatgaccctccatcctttgtgctctctctctctctctgtgtgtatgtgtgtgtcctttgtcaccatttattagtgttttaggggaagaagagatacccttaattaatgttcaatatggcaccttaattctgcttgacctataaatctggaattatttttcttaaattgatattctattttttcaatgatttttttcttattgttggtgcagttttagaatt

SEQ ID NO: 398026 - DNA, 619 bp, Homo sapiens
tatatgaagacagtacatggggtaatctttacttcaggaagagtgaacaaagggatcttcagggagagtgagcagtatcactcatttaaagctttttgaatgccttgagactcccactttgtgattggagaaaagtgttcagcctccttgagctaatttaaagacaaatggtagagggataggctttcagatattatccttgttttgaacattttacaacatgtcctgttttctttggcctttctaaatttagagcttctctgagrttctggaaggaggcccaagtcacatgtgcacagttttcccaatggcacttccctttacccatgtagcttctctaccacttctgcatcagttcttcatctcctatagtattttttaaacatttcttgtctcctaatgaccctccatcctttgtgctctctctctctctctgtgtgtatgtgtgtgtcctttgtcaccatttattagtgttttaggggaagaagagatacccttaattaatgttcaatatggcaccttaattctgcttgacctataaatctggaattatttttcttaaattgatattctattttttcaatgatttttttcttattgttggtgcagttttagaatt

SEQ ID NO: 398027 - DNA, 619 bp, Homo sapiens
tatatgaagacagtacatggggtaatctttacttcaggaagagtgaacaaagggatcttcagggagagtgagcagtatcactcatttaaagctttttgaatgccttgagactcccactttgtgattggagaaaagtgttcagcctccttgagctaatttaaagacaaatggtagagggataggctttcagatattatccttgttttgaacattttacaacatgtcctgttttctttggcctttctaaatttagagcttctctgagattctggaaggaggcccaagtcacatgtgcrcagttttcccaatggcacttccctttacccatgtagcttctctaccacttctgcatcagttcttcatctcctatagtattttttaaacatttcttgtctcctaatgaccctccatcctttgtgctctctctctctctctgtgtgtatgtgtgtgtcctttgtcaccatttattagtgttttaggggaagaagagatacccttaattaatgttcaatatggcaccttaattctgcttgacctataaatctggaattatttttcttaaattgatattctattttttcaatgatttttttcttattgttggtgcagttttagaatt

SEQ ID NO: 398028 - DNA, 624 bp, Homo sapiens
tgtcttgaatccatatttttttcccaaaacttcaaagttgtcaatgaaagccagcctattctacagttattaatattatcactgtcaccataccttctgagcattaccaatccaatatacctcaacactttatattccagttactttatatcccaatatacaatactccacatatatctcctggcgtatactatctcacagcacaaatttctgatgactgtgatgctggtattatcactaagccacttatctctagcaatgggctcccacttgcaacagaatgataaataaccaaatccccaaatcccatcttgaggctctgctttctaaatcaaatcctggtaccaactcaattagcccgttttctcagaaagcacaaaagtttatttgctactaatatattgtggaataaaatacagggractagaaatgacagaaaagatgagtgatacagagaatgaggaagagaaaatataaggtataatatgagctgagcactgcttgacagcaagaataactaattgctacattttgtgggacagtcttaggagagaccttatggacttttgcatctcaggacagttagtatggtgggaagagatgaggaaaatgtttatttgctgt

SEQ ID NO: 398029 - DNA, 535 bp, Homo sapiens
ttattatttctatttctttgttagtattagttgttttattcatgtattattttcttgattttatttacttgtctttctgtgttctcttataattcactgagtttctttaagacttttaaaaaattatttgtcaggtaattcatgttcttcatttcttttgggtcatttaatgaaaatatattttgtactttttattgtattttgattttctcattcttgttccttatagccttgttttggtaattgagcctttgcagaaatagcctcctttctagtctttaagaactaattttgactgggaaaaaccttcatctgtcaacatggctacagatgctgggcctttattcctagccaccccaggcattcagttccctgttccccatccgcacaagagtctgtaatgttatgctgtctttagtgtctrgctatgtttgttccatcagcactccatgtcaggtaagataaaaaccagccctttgacaatgcactgaaactcctgagatactgggagcatactctgcctatcacctccctg

SEQ ID NO: 398030 - DNA, 469 bp, Homo sapiens
aaatgactcaagtgaagtccacagttggtcagaggaaagacctgaccagcaagaaatttaactttggttaaagataaatagtttataattccttttccacaagcaattaaagtaagattagtttgcatgtttttagcaaaggaattaacttattctaaaatgctaagcatatttctttaatgcctaatagaagtcactgtaatggttaattatatgtattaacatggctatggcattcaaatatttggtcaaacacaagccygaatgtttctgtgaatcctttttgctgttgttgttgttttttttaatttttagattttttctctccctttctatagaaacacacaccctgttagttctgtttctctgtgtaaccctgactcatgcagccaccactccctgaattagaagagaagtagctaaaaatgttggaggcatgtttcagatgtgggaagacaactgctatccc

SEQ ID NO: 398031 - DNA, 615 bp, Homo sapiens
tataaaaaaatgccattactctcctctgaaaccatgccttgaggcattttaaatattccagaaaagtaactacgaaagtaccataataaatgtgacaatcatatttaatgatagccagaataattactctcatcacctaaataaaacacatggcagtagaagaaaaatagccttactatgcaggagatcattagggcatatgtattgatggagtcatggtggcacattgcttattttgcagacatagtagttcggcatgagttcatttctatgaaaagttaaagctccacattttctgctgcatatttatttgcaacattttaataattcaaatgaaatattattcatgttattagattttgaaagaatcaatgttacctataaaatttttacttgtcaataaatagttacatctatgacaggtggcaaacacacctttatcaggacaggcattaaattctagtgtcaggcaaaggagaatgtaagaaaatatcagacaatrtgtctatggaagcaaagtgtttatagaaatcactggataagcggtctttcatccaagtttcactccaattcaaccttatattagcttctcaggccaaccaacagctgctcaat

SEQ ID NO: 398032 - DNA, 625 bp, Homo sapiens
ggaaagtgtgttatgtagcttcctcagatgcagtcttcaggctgataggggcctaatattgtctccagtgatcaacctctgtctttccagtagagaggggaggaaggatagttttgtaaatttatgccctgctttagtcaaatggggagggcagagagctttccttcttgtatctgcatcttctctattgccttcagctcaaagtaagccttatgccaaagtggcttattttgacatgaggcttattttgtggtggcatattctgccacctttcaggggycagacagacttggtattaaattccagctcatctactctgtatctactgtgagtgctgtcagtgtgggcatgttattttgtatctctaatgcctcagttcctttttccatgtacaacgctgggttgtataaaatggaataaaatcaatggaagttccaaaatttctatatagcaagagtttaagaaaaactacatgcttcacaacttgatgcgacgtctgtgtctgtgtgtgtgtgtgtgtgtgtgtgtgtgtgtgtgtgtgcgggcgcgcatgaactcatgcaaatacatgcatgtatttagggagtttgttgagatgagtgaaaattggagagaccgtgggctc

SEQ ID NO: 398033 - DNA, 615 bp, Homo sapiens
tataaaaaaatgccattactctcctctgaaaccatgccttgaggcattttaaatattccagaaaagtaactacgaaagtaccataataaatgtgacaatcatatttaatgatagccagaataattactctcatcacctaaataaaacacatggcagtagaagaaaaatagccttactatgcaggagatcattagggcatatgtattgatggagtcatggtggcacattgcttattttgcagacatagtagttcggcatgagttcatttctatgaaaagttaaagctccacattttctgctgcatatttatttgcaacattttaataattcaaatgaaatattattcatgttattagattttgaaagaatcaatgttacctataaaatttttacttgtcaataaatagttacatctatgacaggtggcaaacacacctttatcaggacaggcattaaattctagtgtcaggcaaaggagaatgtaagaaaatatcagacaatgtgtctatggaagcaaagtgtttatagaaatcactggayaagcggtctttcatccaagtttcactccaattcaaccttatattagcttctcaggccaaccaacagctgctcaat

SEQ ID NO: 398034 - DNA, 586 bp, Homo sapiens
aagtactctgaattgacaacacatattaagcaggttttaagtatgtccttgatattgtgaaattatatgagtttgacaggtctgaggattcgaagccttccaccgactagctttcagctttgtgcatttcacatttacccacatacttcttgggccaagcaccacagtatgcattgcagtcccaatatgcaatcttccctttaacgtgccttgagtcggcacaatgaaccttagtactcttcttggaagtctttcttacagtaggatagttaataataacttcacatatgggcaagcaaaatgtaattgcaagcaacaaaaatatattgcacgaaacctggactactgtaccccaacttagccccttagttataactcaacagctgccaccttccaagagcacatatttgggggtgaagcatagyacaaggcaaattgcagtggaacacccagagggcttaactgatggtagttgacatatcttacttttacaaattgtacaaaaacacattgctagggtctcccccaggccttgaaaggaaactgcctgtgagaggccctaaaacttaagttttgttcccttcct

SEQ ID NO: 398035 - DNA, 612 bp, Homo sapiens
tttgttcccttcctgctaactttgccgctgctcattactaatttagaagtaatattctaaagcaacttagctttatctgttctttctaaggtgttataatttgttttcatagaagaagaaattattttgtaaatttcatctgtgtttgcaatacttagtgaaattgcctacaaataataatacatattaaaggcacaacatattgatttgatgacaaatacaatcaattctctgtgtaggtatggaaacgaattgtggtatatacacacaatggaatatttactactcaaaagtaaaactaaatacattgttgatacatgcaacaacatggataattcctaaaataattatgctgagtgaaagaagccagacagaaaaagagtatacaagtatgattctacttgtgtaacamtttagaacataggggctataatcacagaaatccgatgagtgatggcctgaggactgggagaggggtagtaggagagattacaaatgtgcaagaaaatacttctggttgtgatagatatatttactatctagactgtgtgatggtttctgagcttacatgtgtgtcaagacttattaaatggtctactttaaatatattca

SEQ ID NO: 398036 - DNA, 596 bp, Homo sapiens
agcctgggcaacatagcaaaagcctgtccctacaaaaatacaaaaatcagccaagtgcggtggcacatgcttgtagtcccagctacataggagactgagatgggaggagtacttgagcccaggaggttgagcctacagtgagctgtgatcatgccaytgcactccagcctgggcaacagagtgacaccctgtctcaaaataaacaaataaataaataagaaagtggatcaaaccaatgcaaatattggactgtagtagttgctgttggtgctctactcagatatgctgtgagcattggctgcggacaactttgagatgcccatttgccagaattgcttaagtggggatataaaggttccttgtcccaaggttggagtaattctgtggtaccattcataggatcagatggaaactcacctgcagctgagagcatgtccccacttaactttcttctttctatcctgctttctcactccccttctccaaacatcacattctcaagaatctccatcttaggctctatttctagaaaacgtgacatatatgacaatgggtttctgcgttttagttgtggttaagctctgccagttgtttta

SEQ ID NO: 398037 - DNA, 586 bp, Homo sapiens
aaagtcaggtaaataagaaatttaaaagtatttttttaaagagtggtatggttaaaagtcagcttaattaaaagtggatattcaagctctaacagcctgggactccttagggaaaacagaggaggtgccacagaccccrttttggaaaaaaaaactgttttcctcattccccaggaattggaaatggattgatccctctaaaaatctatggctttgttcttttttgcattgtattatctgactttttttatttttgagagtaatcaaaaaatactttgcattatgagagagctttggtgtgtaaactaagtaggaaagtaggaaatatacttttagtgaaggctaatggcatttatcaagggatacttggctatttgcacatttggataaagaagcatgctcttggccacctagaaagtaaggaaatgtccccatccccttccccccacaaaactgagagagaagacttctttggaagatgggctgattccctctttttcagatccaggatctgatataaaagtggaatccttaattttagggatcttttttgccttccagctgtgcctacttattaggccataga

SEQ ID NO: 398038 - DNA, 559 bp, Homo sapiens
aattaaaagtggatattcaagctctaacagcctgggactccttagggaaaacagaggaggtgccacagaccccgttttggaaaaaaaaactgttttcctcattccccaggaattggaaatggattgatccctctaaaaatctatggctttgttcttttttgcattgtattatctsactttttttatttttgagagtaatcaaaaaatactttgcattatgagagagctttggtgtgtaaactaagtaggaaagtaggaaatatacttttagtgaaggctaatggcatttatcaagggatacttggctatttgcacatttggataaagaagcatgctcttggccacctagaaagtaaggaaatgtccccatccccttccccccacaaaactgagagagaagacttctttggaagatgggctgattccctctttttcagatccaggatctgatataaaagtggaatccttaattttagggatcttttttgccttccagctgtgcctacttattaggccatagaaactgcatgcttttctagccctattcctccaagggctc

SEQ ID NO: 398039 - DNA, 559 bp, Homo sapiens
aattaaaagtggatattcaagctctaacagcctgggactccttagggaaaacagaggaggtgccacagaccccgttttggaaaaaaaaactgttttcctcattccccaggaattggaaatggattgatccctctaaaaatctatggctttgttcttttttgcattgtattatctgactttttttatttttgagagtaatcaaaaaatactttgcattatgagagagctttggtgtgtaaactaagtaggaaagtaggaaatatacttttagtgaaggctaatggcatttatcaagggatacttggctatttgcacatttggataaagaagcatgctcttggccacctagaaagtawggaaatgtccccatccccttccccccacaaaactgagagagaagacttctttggaagatgggctgattccctctttttcagatccaggatctgatataaaagtggaatccttaattttagggatcttttttgccttccagctgtgcctacttattaggccatagaaactgcatgcttttctagccctattcctccaagggctc

SEQ ID NO: 398040 - DNA, 408 bp, Homo sapiens
aaattcaataacaaagcctgaaggctagaaaaggttatgaaatagcccatgataagcacaggtggaaaattgacacaaagagttttctgctatgccaaataaattttgttgtctttgtgtgtgtgtatgctgcgtatcttaaaaccataacattttcactgacattgaatcatcctcctcagtaactgagggaaactyccttgggaacccaccttaaattttaccatctttggcagcttttgaaatgactctatcttcaaattcttgaatttccacattctcttctctgactttacctttgattattttgctctcagtaaatctgcatctcagtcttcctcttctcagttctatcctagtgtaccagcccattaacccctgtttgattttatttggctctcttcctcc

SEQ ID NO: 398041 - DNA, 423 bp, Homo sapiens
agtagattttggtgaggttatatatatattctaggaaaaatgaaatgatgtttaacttaaaatataaatattagaacatcttaagaattgaaatatcaaacagacattcactggaagaaataatcttaaraagcagttatattacttaaaaaacaaaacttgacctctcctacaaattggagagtaaacttacaacatttagggtaatgcaaatctcatgtagtttcagtttgcacaggcctaggctctgtttcatggattagtgaactcacaaagcattggtaagaccatggtaaaaattctgaatgagaagacacaagaggtccagggatccacaacaaaagagagagaatatgaaacataaatgaaattttaaaacaacaacaacaatgtaattgtatattgaccagtaaaatacatatc

SEQ ID NO: 398042 - DNA, 423 bp, Homo sapiens
agtagattttggtgaggttatatatatattctaggaaaaatgaaatgatgtttaacttaaaatataaatattagaacatcttaagaattgaaatatcaaacagacattcactggaagaaataatcttaaaaagcagttatattacttaaaaaacaaaacttgacctctcctacaaattggagagtaaacttacaacatttagggtaatgcaaatctcatgtagtttcagtttgcacaggcctaggctctgtttcatggattagtgaactcacaaagcattggtaagaccatggtaaaaattctgaatgagaagacacaagaggtccagggatccacaacaaaagagagagaatatgaaacataartgaaattttaaaacaacaacaacaatgtaattgtatattgaccagtaaaatacatatc

SEQ ID NO: 398043 - DNA, 582 bp, Homo sapiens
tatagcatatattagaaaagaatatcatatatatctatatctatatatatacaatcattaggttgtacacttttttttttttgaggcagagtcttgctctattacccaggctggagtgcagtggcacaatctcagctcaatgcaaccttcgccagtcaggctgaagcaatccyctgaccgtggcctcccaagtagctgagactacaggcatgtgccaccattccaggctaagttttgtactttttataggatgggatttcaccatgttgcccaggctggactcaaactcctgaactcaggtaatccacccactttggcctcccaaagtgctgggattacaggtataagccaccaggcctggcccactttttcaaaatatataatctttatttgtcagttaaatatttaaaatataaaagtagagagaaatttctaaaattaatcatttaagcttctatggtaggaaattagaggaagaagagcaacttaaacctaaagcatgcagaagaaagaaaataataaaatttagaaataaaaccactgaaataaaaaacaggaaagcaatagagataatcaacacaa

SEQ ID NO: 398044 - DNA, 540 bp, Homo sapiens
attttgagtctgacgtagaagcttggaaatcatcattcctgtcctcacaacagaaaaagctgagcaaactacaaattatcaacttttcttaggtccatcatagaattgaggtcacaagagagactaytgcccccacgattggagcaacaggtgattacagagaacctcagctcactggagcagaagccagatgctggagacagtacaaaggaaggaaaatttaaagtataattaatgaattgctaaaggcaattcaggtggacaagcctgagggttcaaacctccagaggtgccagtcttaaggagattccttaaactctctttcctgagttttatctccaagagccctaccagattctcacagtgcagactggagaaaaatacctttgtgaagataagagtgggattggggatagccatttttaaatatgccaagagcattcagttcttaccatggcctgctatcaaaagaaactatttcaccaaagcctaatagactggggttttaccagagcctaactaacctaggaagaaagaaat

SEQ ID NO: 398045 - DNA, 540 bp, Homo sapiens
attttgagtctgacgtagaagcttggaaatcatcattcctgtcctcacaacagaaaaagctgagcaaactacaaattatcaacttttcttaggtccatcatagaattgaggtcacaagagagactattgcccccacgattggagcracaggtgattacagagaacctcagctcactggagcagaagccagatgctggagacagtacaaaggaaggaaaatttaaagtataattaatgaattgctaaaggcaattcaggtggacaagcctgagggttcaaacctccagaggtgccagtcttaaggagattccttaaactctctttcctgagttttatctccaagagccctaccagattctcacagtgcagactggagaaaaatacctttgtgaagataagagtgggattggggatagccatttttaaatatgccaagagcattcagttcttaccatggcctgctatcaaaagaaactatttcaccaaagcctaatagactggggttttaccagagcctaactaacctaggaagaaagaaat

SEQ ID NO: 398046 - DNA, 540 bp, Homo sapiens
attttgagtctgacgtagaagcttggaaatcatcattcctgtcctcacaacagaaaaagctgagcaaactacaaattatcaacttttcttaggtccatcatagaattgaggtcacaagagagactattgcccccacgattggagcaacaggtgattacagagaacctcagctcactggagcagaagccagatgctggagacagtacaaaggaaggaaaatttaaagtataattaatgaattgctaaaggcaattcaggtggacaagcctgagggttcaaacctccagaggtgccagtcttaaggagattccttaaactctctttcctgarttttatctccaagagccctaccagattctcacagtgcagactggagaaaaatacctttgtgaagataagagtgggattggggatagccatttttaaatatgccaagagcattcagttcttaccatggcctgctatcaaaagaaactatttcaccaaagcctaatagactggggttttaccagagcctaactaacctaggaagaaagaaat

SEQ ID NO: 398047 - DNA, 466 bp, Homo sapiens
cccctctctgcaggagagataacctttctctgtctttcatctgttaaatctctactcttaacctcactccttgtgtgtccatgtccttgatttccttgatgtgagacaatgaacctcaggtactactccagatgaacgacatcacttcagaagtgtctagggaaactcaaagacaagagggaagaaaaaacaaggmcaccagaagaattttagcctctgatatccacagcaacagcaaacagtaaacactgtctaactcgtggcccaagaaacataaaatctcatgttaaagacctttttacctgtttccattacccattacaacatgtctgtctttcaacacaaaaatcacgaggcatacaataggaaaacacaatttgaagagacgcagcaaggataagaaccagacttagatatggcagagatactacaattattagaccaataatttaaaataatttcaatt

SEQ ID NO: 398048 - DNA, 633 bp, Homo sapiens
gaagacccactcaggagcccctctctgcaggagagataacctttctctgtctttcatctgttaaatctctactcttaacctcactccttgtgtgtccatgtccttgatttccttgatgtgagacaatgaacctcaggtactactccagatgaacgacatcacttcagaagtgtctagggaaactcaaagacaagagggaagaaaaaacaaggacaccagaagaattttagcctctgatatccacagcwacagcaaacagtaaacactgtctaactcgtggcccaagaaacataaaatctcatgttaaagacctttttacctgtttccattacccattacaacatgtctgtctttcaacacaaaaatcacgaggcatacaataggaaaacacaatttgaagagacgcagcaaggataagaaccagacttagatatggcagagatactacaattattagaccaataatttaaaataatttcaatttaaatatgactaatatgctaacgcccagaatgggaaaagtggatgacatgcaaaagcatatcattaatataaacagagagatgaaaactctaagaaagaatcaaaaggaaatcctactaataaaaaacactgtatcacaggcatgacaaa

SEQ ID NO: 398049 - DNA, 578 bp, Homo sapiens
acgtattccaatattttgtaaaaattctttctcttgtcatccactttgcccatattttcccctaatttctctatcatagtaatcattgcaagtccgtgtctattacttcaacatctggattaactatggatttgcctttattgccttgtttttctttttattcttagttatgtttttgtacctaaggctgcaaaaccgtggaatagaagtgtattagttttctaatgctgctgaacaagttacccaaaatttagcagcttaacaccacaamactttctattgtacaattctataggtctaaaatctggcagtgtgttctgcttctctcctcacgactgtgtcataacaaagtcaagatgctgcctggcctgagaataattcactttcaagctcatggaagttatcagcaggattcagctctatgtggttgtggacgaaggtcttcttgctggctgttgactggggttgctctgagctcccaggcgacacccatgttccctggctcatggtcccctttctccattctcaaagccagcagtagcggaatgagtccttctcataactcaaatctctcaaac

SEQ ID NO: 398050 - DNA, 578 bp, Homo sapiens
acgtattccaatattttgtaaaaattctttctcttgtcatccactttgcccatattttcccctaatttctctatcatagtaatcattgcaagtccgtgtctattacttcaacatctggattaactatggatttgcctttattgccttgtttttctttttattcttagttatgtttttgtacctaaggctgcaaaaccgtggaatagaagtgtattagttttctaatgctgctgaacaagttacccaaaatttagcagcttaacaccacaacactttctattgtacaattctataggtctaaaatctggcagtgtgttctgcttctctcctcacgactgtgtcataacaaagtcaagatgctgcctggcctgagaataattcactttcaagctcatggaagttatcagcaggattcagctctatgtggttgtggacraaggtcttcttgctggctgttgactggggttgctctgagctcccaggcgacacccatgttccctggctcatggtcccctttctccattctcaaagccagcagtagcggaatgagtccttctcataactcaaatctctcaaac

SEQ ID NO: 398051 - DNA, 572 bp, Homo sapiens
acatacctcaacaatataggtaaaaatcccttgtagaaaatggaaggatcttccagtaatggcaccagagtagacatggaaaatctcctgcagacaacaatgagaaaacattgctgaaatatgaacaattgactaaaaatgttagaagtaggaaaaaaatgtggaggaatggttacttgaaaaactgcaactgtaatgaataagaataataaagttgtatacgtcttgcctgagggtattccacaatccctgtgactatggttgtgaaaaaccacaccattatgagcttggggtagcagaggataggttccagcctgggraaaaaaaattataaatttaatagaaagtcttagaaataacatgatcacagaagttgtgaagttcaaaatgagggtataagctctactcaaatccccgtctggctgtaaaaatatgcaagcatagaaaaaccccaggagaccaaatggaaaagcaggaagagacaatggagatatctgtgtttaaagtacagatttttggccaggcgcagtggctcacgcctgtaaccccagaactttgggaggcggcggtgg

SEQ ID NO: 398052 - DNA, 536 bp, Homo sapiens
  misc_feature (1)...(536): n = A,T,C or G
nnnnnnnnnnnnnnnnnnnnnaatttggcaaaaaaaaaaaaaaggaaattaacttcttcctttttgttccattagttaagtataactgagatctagataacctcagaaagcgaggacagtattttcatctgcatagcattcctttaagtctgttattactctcgatccttcagttgattattgtttatttctgccaagtcaacagattccactgtaayagtgcttcagtatgttttcaaaatttgaatgtatgtctatttctcttttctactgtaggagattctaaacattatttgtgtaacaaatcaaagttttccaatgcccacagaatactagagatgtcttacgttagaatcatgagatcaaaagtttagaacatgaggattcttggagataatcgcattcccacattttaccatcagaaaagcaatgaggtgcattggtatgcagagtactgggatttatctggccacacctccaaaggctaatccagtcccccatctttccacgtctgcgtctgctcccacagctgattc

SEQ ID NO: 398053 - DNA, 421 bp, Homo sapiens
cgcacaccacatacacatcacgcacacacaccatgtgcatggcaacccactcacatgtacaccccatacccacccacatgygcagcacacacaccacatgcacagcatacacaccaccacatactcacatgtacaccacatacatacccacgtgcacatcacacccacatcatgtgcatagcacacatgtacacatgcaccgcacacacaccccacatgtgcagcacacacacccacatgcataccacacacacccacatgcacaccacacacacccacatgcacaccacacacacccacatgcatagcacacacaccgcaagctttctcatctacagggataggccctaaacacgggcaattttctcttgtcagtcagatactttgctgattgacctcacttttgattatatttactctg

SEQ ID NO: 398054 - DNA, 421 bp, Homo sapiens
cgcacaccacatacacatcacgcacacacaccatgtgcatggcaacccactcacatgtacaccccatacccacccacatgtgcagcayacacaccacatgcacagcatacacaccaccacatactcacatgtacaccacatacatacccacgtgcacatcacacccacatcatgtgcatagcacacatgtacacatgcaccgcacacacaccccacatgtgcagcacacacacccacatgcataccacacacacccacatgcacaccacacacacccacatgcacaccacacacacccacatgcatagcacacacaccgcaagctttctcatctacagggataggccctaaacacgggcaattttctcttgtcagtcagatactttgctgattgacctcacttttgattatatttactctg

SEQ ID NO: 398055 - DNA, 565 bp, Homo sapiens
tgcaactagatggtcccatctaggggggatgggagacagtgacagatcattagggattagattctcataagargtatgcaacatagatccttcatatgtgcagttcacatgagattctcctataagaatctaatgccactgctggtctgacaaaaggcagagctcagctttacttggctgcttgccactcaccttgtgctgtgtggcctggttcataacaggtcacaaactggttggggacccatgctctagactgcaggctggctagtttggaggagagaacagaataaaacagcttggaagggccctccgggagtcacaacaaacatcaaagagaccttaaaagttatttctttaaagaagtcatgggccagacacagtggctcatgcctgtgatcgcagtgcttcaggaagctgaggcaggaaaatcacttgaggccaggagtttgacaccagtttgggcaacacagtcagcccccatctattcaaaagcacaaaaaaaaaaaaactggacactgtgatatgtgcctgcagtcacagctaattgaaaggccaagacgggaca

SEQ ID NO: 398056 - DNA, 565 bp, Homo sapiens
tgcaactagatggtcccatctaggggggatgggagacagtgacagatcattagggattagattctcataagaggtatgcaacatagatccttcatatgtgcagttcacatgagattctcctataagaatctaatgccactgctggtctgacaaaaggcagagctcagctttacttggctgcttgccactcaccttgtgctgtgtggcctggttcataacaggtcacaaactggttggggacccatgctctagactgcaggctggctagtttggaggagagaacagaataaaacagctyggaagggccctccgggagtcacaacaaacatcaaagagaccttaaaagttatttctttaaagaagtcatgggccagacacagtggctcatgcctgtgatcgcagtgcttcaggaagctgaggcaggaaaatcacttgaggccaggagtttgacaccagtttgggcaacacagtcagcccccatctattcaaaagcacaaaaaaaaaaaaactggacactgtgatatgtgcctgcagtcacagctaattgaaaggccaagacgggaca

SEQ ID NO: 398057 - DNA, 613 bp, Homo sapiens
accactcacatacattcatttacataggttgtgtatgcaggtgcacgtgtgtgtgtgtgtgtgtgtgcatgcctttttgctctttggctctcaaattggtataacaaacattgttgtggtggttctttatactccaatctcctgaaagacaggaactgttgcaaacctctcctatctccatctccagtacagagttgtgcacttattgcactggccacccttttcatagctacacaatacatttctacagactgacttgtttaccagaattctcagtacatgtttcagatatcctgtctgttctggttcccaaatccatcacttacttgatctgtgacttctgtttgagatgggtgagacaaaatgtgccaccctgtttcctttttcctctaaatccggtccatggcaatggaaaggttcaaggtttgtgctctgaatmcaaaaaaaaaaaaaaacctaccagaggtttgctatccacatttttgtcttgttgtttgcacttttaaaggaataaatgcaggtataataaataaaactctaaaataagtgaaaaaatattctatgtcagagaattgtctttatcctggtctgggacatagaaagactaggttct

SEQ ID NO: 398058 - DNA, 475 bp, Homo sapiens
gtttgatttttcctgaggtcccactccacagcctgtagacagctgccttctctctgtgtcctcacgtggcctttcttctgtgcctgcacatccttggtgtctcttcctcttcttataaggacaccagtcctrtggaattaggggcccacccttagggccttatttggccttaattacctccatatagggtctgtttcaaaatacagtcacattggtgtttagggtttctgcatatgcattgggggagagggggggtttcagctcataatggactgtaaataatccaaaaaaagtcttttaattgtttggtctaaattttaaggggatgtgaagacgttataaaattgctatcaaaagtttgaagctttgctgcttgaagctttctttctgtctagcaatcttttttatatccctgtgtagtagacattgcgtgcatattatatattcagagatattcagtcatctgagtgatacc

SEQ ID NO: 398059 - DNA, 475 bp, Homo sapiens
gtttgatttttcctgaggtcccactccacagcctgtagacagctgccttctctctgtgtcctcacgtggcctttcttctgtgcctgcacatccttggtgtctcttcctcttcttataaggacaccagtcctgtggaattaggggcccacccttagggccttatttrgccttaattacctccatatagggtctgtttcaaaatacagtcacattggtgtttagggtttctgcatatgcattgggggagagggggggtttcagctcataatggactgtaaataatccaaaaaaagtcttttaattgtttggtctaaattttaaggggatgtgaagacgttataaaattgctatcaaaagtttgaagctttgctgcttgaagctttctttctgtctagcaatcttttttatatccctgtgtagtagacattgcgtgcatattatatattcagagatattcagtcatctgagtgatacc

SEQ ID NO: 398060 - DNA, 475 bp, Homo sapiens
gtttgatttttcctgaggtcccactccacagcctgtagacagctgccttctctctgtgtcctcacgtggcctttcttctgtgcctgcacatccttggtgtctcttcctcttcttataaggacaccagtcctgtggaattaggggcccacccttagggccttatttggccttaattacctccatatagggtctgtttcaaaatacagtcacattggtgtttagggtttctgcatatgcattgggggagagggggggtttcagctcataatggactgtaaataatccaaaaaaagtcttttaattgtttggtctaaattttaaggggatgtgaagacgttataaaattgctatcaaaagtttgaagctttgctgcttgaagctttctttctgtctagyaatcttttttatatccctgtgtagtagacattgcgtgcatattatatattcagagatattcagtcatctgagtgatacc

SEQ ID NO: 398061 - DNA, 615 bp, Homo sapiens
tgtcttcaatccaatccagtgattcctcagtcaattcaaacctacaatttagacatatgactgaagaaaggaaggaagggaaagaggaaaggagaaggaaaaagtaaagaaagaaaagaaaagaaatatcccattcattccctcctccctggggtggtccctagacttctggtaattgatgtggcccctgtctcatcaaggctatggagaaagaaagtctgcctttttatttggcttctctgcaggtctccttgcctaagccctgctccagtcttggtagtaagcacagacaacagaccttctctttctagcagggcttgacaggcttctgaacccccaccagccccactttgttttcctggtgtcacttatatatcaagttgcaatggatttttctcttrtcccctgacaggcagttcatagaacatccttttggtgcattttctcttgttccttcctgctgacctcctgaggaggtatgtgccccctctcagccgacttcaggaccctgctggggccccatggtaatttacagatcttcttttattccaaaaaattgccaggtgaagttctggagctctggtggctacttactctgtaccttagtggcgtggg

SEQ ID NO: 398062 - DNA, 601 bp, Homo sapiens
aggtgtccttaatacctaagaaraagttacatagcaaggaaaacttttggaactaggttaatagtgcccctaaatttattttactagtcagtgctcagagacctgctctagttagcttaaacagaagtaaagggattgcatttctgtgtaggacaacaccgctttctgcaaactttaggaaaaagccagataacttacagaactaatataattttaaaagcatcagatagttatagaataaatgaaatcaatcacataagcctgccaaaactacaattccagagagaggagaacccttcctaggtgagctgtgagtgaattgttgctagctgtttgcctatccagggacatttgccaatcatgtgcataagctgagaattgggcatgaccctgaaaaaccccagggtgggggaaagaaaaacacaaaaaatttaacggtcaaatggactgaaaaaagtgggggagggaacatgatcaacctcaaatatttgttctgttttattcacaaggcatttggtgaattctgtggctgcaacggaggctagaaagataaggtaaggacttttcacagtaggcagattccaaagatcccctcggcatg

SEQ ID NO: 398063 - DNA, 612 bp, Homo sapiens
gttgtaaggctgaaagcaacaacttctaaccactttacatgttgaagctgacaaaaaagtagattttctcttaaatttcaatcaaaacttcagcaagttgttttccacatattgacaaactgatgctaaattttctatgctgaggcaaaagattcagaatagccaacacaaacttaaaggagaagaacaaagtcaaaagtctgacactacccaatttcaagacttattataaagctatagtaattcaggcagtgtagtattacagaaggaataaacaaatagttcaatggaagggaatagaaagtctagaaatagacagacataaatagtawcaattgatctttgacaaaagatcatgggcaatacaatggagaaaatataatctcttcaataagtggtgctggaacaactgaagtttcacatgcaaatatatttttctagacacagacctcacatcttttacaaaaattagctcgaattagatcattgactcaaatgtaaactgcaaatctacaaaactcttagaagataatataggagaaaatctggataatcttgggtatggtgatgtctttctatacacatcaccaaaggatccatgtgtcaatgcaa

SEQ ID NO: 398064 - DNA, 595 bp, Homo sapiens
agacactattcagagggttgttggggttttagagggacagtcaataggattcctttcctcttcttctaaacttggaattgccagtcagaattcaatcaggaaaaaaagaaacactctagcaatttcaaaaaaagataatttaatataacaattaggttacagaggtgctggagaaatgaaaagcccatgatgaaagaatcaaatggtttattatgtaagaaaaccactattatactatgattcattgagttaatgttctcaactattttccctccttgtgtttacaaccttcttaaggcctcatcataagtagggtgcatacctcaccctttgttttaggcttagctgtttcacttatgttggccaataacatgtaaatagaagtaaaactttgccagttttgagcctagatcctaagaggcctcacaagactcagttttgaatctgatgtgtaaaaagcttgaaaatagatactccagttttaccataagaaaaagctggacaaactgaaaatcaattacttttctaggactaattagaaaaaaatgatttttcaaagcaaastaccacccaaaatttgtagacacaagtacac

SEQ ID NO: 398065 - DNA, 674 bp, Homo sapiens
gactgtactaggttctggatgggttgtgcaactcagacaaaatggatggccccatttaaaacgacttcagaagtatcaaaggaggtctctgtagttaccgtatgtgccttcagactcgaacattattttcgaatcctgctggtgctactattgcagagtgagaaggaaatatgaaaaaggctttctcttcattcagatttcttccacagatgctttttccaaaaagaaatgcaaactttatatgtgagttttggaatgaggctgagatagtgtacccccattcacagaaatgtttgtgggatgcaagaaaataggcatgctgtgcccagcaggttttcaccaaaaaaaatttcagacaatttttccattactcrtcagggaagttgtgtcccattactctacccctaccccccagagaaatggtaatctttgttctaggattatttgtcaactcgttttattatgtaatggaaatacaagtagctctctacacatatatttgactttcataagagtcaaaatgaaaccaaaatttatcccaacattttatagggcaaatgttgctttgttttgttttttaagtattagtgtttttaactaatattataaaaattcaaacagtgcaagggacatcaattttgtctccttctcactctaaatttccagtttcctca

SEQ ID NO: 398066 - DNA, 628 bp, Homo sapiens
ttctattatcattctcttttttgagccattatggttggtattgggttaggtaaagtaagaaacatacagctgcggtttcataggtacagagagctcagaattctgtgagaattgagtgatgagccactcattcctgccatagcttgaggtagtcataagaatattttataagccaaccttcaccagcatctttcttggtaactacctgcatcayataacagctgggaagtgtgtgagggtgggggaaagatacggaagagactgactcaagaagattctgatcctatcttttcagatctcgaatctttttaatattttaaatatgccatagctaaatgtctctatgccccatatcaaacattaaattcagaatgatcagaatgagccacataggacaaataagccttcttcactttcttatttcacctacactcatgtgtggctctaagtaatactgaagcaggagaacattctcagggacatgctcatgctgtcagctgtgactgaaaaatctatagaactggcaattatagaaattttcctttacaaaacttcagttcctggaggaagacatacttgtatttttctgcctgtttgtgttatttaccactttctaattaatataaat

SEQ ID NO: 398067 - DNA, 620 bp, Homo sapiens
ttctattttctctttatttttctctctttttccccatttatctccgcctttagcatgccaactacactttttttcccaaaagtaatgattgccttagagtttacaatatacattttcaactaatctgtttctacctgcaaataacactatactgcttcacttacagtgcagatggattccttatactcaagtattctctcctcccttctttccctgccacattgctgtccttcattcctcatatcctataatcacccaataccttgttacaattttgctttaaacaaatggttatattttagattaagaataggaagaaagataatttcattttgccatcatttatttcttttctaatgctcttcctttgtttatgaagatttgagtatctgacttgcatmattttctctctttttttgaagaattttttctaacatttttttctggtcagatttgttgcgatgaattctctcatttgttgtttgcctgagaaagactttatttctccttcccatttgaaggataattctgttgaattttcaacattttgtatattttacccctctttccatgctttcatggttcctgatgagaagtcagcttgtaattcttattattct

SEQ ID NO: 398068 - DNA, 645 bp, Homo sapiens
aaatatagccattctaaatgggagacattacccaaaataaaggggctataggctccatgaaagtctgaaatccaggaggacagtcaaaccttaaagctccaaaatgatctcttttgaccccatgtctcacttccatgtcatgttgatgcaagaggtackttcctatggtcttgggcagcttcaccctggtggctctgcaaggttcagactctcacctggctgctttcatgggctggtgttgtttctgtagcttttccaggcacatagtgcaagctgtcagtggatctgccattctgggatctggaagacggtgatcctcttctcacagctccactaggtggtgccccagtagggactctgtatgggggctctgactccacatttcccttctgcactgccctagcagaggttctccatgacagctccactcctgcagcaaacttctgcatggacatccaggcatttccatacatcctctgaaatctaggcagaggttaccaaacctcagttcttcacttctgtgcaccaacaggcttaacatcacatggaaggattggggcttgcaccctctaaagccatggcctgagctgtaccttggccccttttagtcaagctggaatggctggaacacaggccaccaagtcc

SEQ ID NO: 398069 - DNA, 559 bp, Homo sapiens
gtcagcaatagaatggaacaagcaaagaaaaaaacacagagctcgaagacagggctttgaaattaatccaacccatcaaagacaaagaataaataatttaaaaaatgaacaaagcctccaaggagtttgggactacattaaatgtccaaacctaagaataattggtgttcccaaggaaggtgagaaatgtaaaagtttggaaaacatatttgagggaataatagaggaaaacttccctgtccttgctagaaatctagacatccaaatacatgaagctcaaagaacacctgggaaattcattgtaaaaagattatcgcctaggcacacggtcatcaggttatctaatgtcaagacaaaggaaagaatcttaggagctgtgaggcaaaagcatcaggtaacctataaagaaaaaactatcagattaattgcagatttctcaacagaaackctacaagctagaagaaattggggtaatatttttagcctctttaagcaaaacaattatcagccaagaatcttatatccagtgaaactaaatttcataaatgaaggaaagata

SEQ ID NO: 398070 - DNA, 530 bp, Homo sapiens
agaattcaccaaccaagtttctgctgtcttcagaagactcacctgacacataaagactcacatgaacttaaggtaaaggggtggaaaaatatactccatgcaaacgggaatcaaaagtgaacaggagtagctattcttatatcagacaaaacaagcaacagcagttataaaagacaaagaggaacattatataataatataacgaaaatatcacaactccatatatatatgcacctaacactggagctcccacatttataaaacaattactactaggtctaagaaatgagacagatggcaacacaataatggtggaggaatttaatactccactgacagcactagacaggtcttcaagacagaaagtcaacaaagaagcaatggacttaaactgtatcctacaacaaatggacttaacagatatttacagaacattctacccaacarctgcagaatatacattctattcatcagcacatggaacactctccaagatagaccatatgataggccttaaaacaaatcacagt

SEQ ID NO: 398071 - DNA, 563 bp, Homo sapiens
gtacaggcaaccatctataatcctctctctttcaaaacgtcaagtaaaatgggtaaaacccttgctcagtatctttcagatcacatgccactcttctgagaactttcctatttcaaactttattttaacttgtttycacccatattataaaattgggatcaaggaggagaaccataacaaagagaatggttaaggaaactagtattgacaaagcacccactgtgtgcccagcactgggcttggtactgtcctcctaagaatactgcacatttgatgttgtaaattccatttgactgatcatgaaactcagattcaaaaaggttaagtgacattttttttgttttgctttcataagtgcacttatcaatacgttaaatcctttttaaaaaaaatcaattgctggtttgctttgctgcctatttgccctactccgacatagtttcacatgagatgagatcctattttcttccatattttatacccagtgcctaaacagtacttggcaacataaataattgttgagtgcatgaatttttaattaatgagtgaatgagtgaatgaaa

SEQ ID NO: 398072 - DNA, 563 bp, Homo sapiens
gtacaggcaaccatctataatcctctctctttcaaaacgtcaagtaaaatgggtaaaacccttgctcagtatctttcagatcacatgccactcttctgagaactttcctatttcaaactttattttaacttgttttcacccatattataaaattgggatcaaggaggagaaccataacaaagagaatggttaaggaaactagtattgacaaagcacccactgtgtgcccagcactgggcttggtactgtcctcctaagaatactgcacatttgatgttgtaaattccatttgactgatcatgaaactcagattcaaaaaggttaagtgacattttttttgttttgctttcataagtgcacttatcaatacgttaaatcctttttwaaaaaaatcaattgctggtttgctttgctgcctatttgccctactccgacatagtttcacatgagatgagatcctattttcttccatattttatacccagtgcctaaacagtacttggcaacataaataattgttgagtgcatgaatttttaattaatgagtgaatgagtgaatgaaa

SEQ ID NO: 398073 - DNA, 538 bp, Homo sapiens
tgcattgggattcacaatgatagagacaataaaaatgctatttattcatccatgtatcattataatactattaaaattaatgatgataagttatgtattgaatgaccactgtaatgtagccactccatgggcccttcaaagtgttatagcatttcactgtcagtgatgttaggtcccactttgcaggtcacaaaataagagctcaacaaaaagttatcagcagaggtagagctcagacacttgaattatatttttaatgagccatgcaaaatcttggcctctacatttattccacacaaatgtaatgaagtcttaatatgttctgggttcccaggtaaatataaggatgcagagccaagcagtttggtatgggggagatarcacagccattagtgtcatggagacctggcactttaattcctaagcctgtgaccagaatcaaatttagtagcatttctcaacctctattttctcatttgcaaaataggaacactgatacctgctgtctaccttgccatgagacttaaaacagataatg

SEQ ID NO: 398074 - DNA, 531 bp, Homo sapiens
ttcccacactaccatagatatcattatcacatctttcaacccttactatcagaccttaaaagtaaataaacagataagtacatcatttatgcagctacagaagataaggatttaagtgcaacaccactcactgatacagaaagtgaaaaataagactacccgacactggagagggataacmaaaggacatctttaagacagttgtcaaagatgaatttttaaacccatcaaatttgtcaaagatagattttcagaggggatgagtaaccattttgaaacccaagatgagaccaagaaggattaacattttaactctagtaaatgaagttcagggtggatagttattgaatatttactatgtgccaggcttggttattgtcttagtccatttggctgctataacaggttaccataagctaggtagcttataaacaagagaattttattttctacactctggaggctgggaagttcaagattaaggtgccagcagattaggtgtcttgtcagggccctcttcttgcttcatag

SEQ ID NO: 398075 - DNA, 565 bp, Homo sapiens
gttgtttggcgtgattttctaggaacaaagggtccccccacccaccaccaccacagtgagcatctctctctgcccttggtctggagaacacatggcacttccaggtcactctctgcccttggtctggagaacacatcgcatgtcaaggtcactctgcccttggtctgaagagcacatggcacgtcaaggtcactctctgcccttggtctggagagcacttagcacttccaggtcactctctgcccttggtctggagaccacatggcatgtcaaggtcactctgcccccagtctggagagcacatggcattttaaggtctacagcgccacctagtggaatagggktcctttccatgaggcacattgttggtcctttactgaaacagtctagcttcccaattctcctccctttttgtgcctctctagtatagaaactagtcttcatgcttcttctgtaaatgggaaaactctgccttctacaactaggagtaaaatatcctccaaagccaaattttagtcttgatactgtccccttagcaggaagatggccatttggtccgtatgtt

SEQ ID NO: 398076 - DNA, 598 bp, Homo sapiens
caacattatttttttgagtagggaaactgaaatacagaatgtttagaagaaatgctccaaaccactcacaatgaacagatttctatagcatgcttactgtatttagtataattctcaaaaaacctttccatattgagattattttctcaatttcacagatgtataaattgaggctcatagaaagaagcaatcttcccatgatggtttagatagtaagtagcttatttgtggttcagatataaaaatggtcaaaactgcttctcttctaaattctcaggcaattgacaacaggtgtcaacaaatgaagattttcatcaaccatattttgctggaggatatgccttagtcctcctaytacgtacataatctagagcacaggaacttctagagaaaagcaaaatctacagagcaaaatctgggcatattcactgagccatctgcagggctacttgcacctgcatcaaaccccattgagagaacagattcaagagaggtgtaaagtgtcaagcctcaggactgcacccagagcatgctaacttcctagaagcaggagtagggagagattcagtaagtaaatctgagaaaaaaaataaaaata

SEQ ID NO: 398077 - DNA, 567 bp, Homo sapiens
agctgaacctttcgaattatgaaattttgcctggtctacgagacagaagccattccattttgattagtgcctcccaagaatcccacatatagctgaaattttatcaagaaagggtgaacattagcaacattatttttttgagtagggaaactgaaatacagaatgtttagaagaaatgctccaaaccactcacaatgaacagatttctatagcatgcttactgtatttagtataattctcaaaaaacctttccatattgagattattttctcaatttcacagatgtataaattgaggctcatagaaagaagcaatcttcccatgatggtttagatagtaagtagcttatttgtggttcagatataaaaatggtcaaaactgcttctcttctaaattctcaggcaattgacaacaggtgtcaacaaatgaagattttcatcaaccatattttgctggaggatatgccttagtcctcctactacgtacataatctagagcacaggaacttctrgagaaaagcaaaatctacagagcaaaatctgggcatattcactgagccatctgcag

SEQ ID NO: 398078 - DNA, 540 bp, Homo sapiens
ttgcacctgcatcaaaccccattgagagaacagattcaagagaggtgtaaagtgtcaagcctcaggactgcacccagagcatgctaacttcctagaagcaggagtagggagagattcagtaagtaaatctgagaaaaaaaataaaaataggctagagctagggctacccacaggtaatgatgtttaccccaactccaccaattatttaccacccctttcccatatgggcagaggaaaggattggggtggagagagagactgggaatattccttcattattgtgttggcaaagacattgaagttttctcccctttctagaaacaggataaaagactatcaacacctatgtaagaaagacctactgttttcagagtcagtgagtcatscaatgccctataactgccaccctcacccactcagtggaagaaaaaataactaaaacattaagctcttgcctttaatttccactcttcaccactgattaaaaccagccattaaaaacggctggaggagagaaagtctgactctttttttgttgtt

SEQ ID NO: 398079 - DNA, 574 bp, Homo sapiens
ctacaaaggctctgtcttcaaatacagttacattctaaggtattgggagttaagatttcaacatatgaatttggagggcacaattcagccatatcaggtttcagtgaaatttagaatgtagagaaatggttcttcctttttccttctctctccatgatacagacgggcatttgaagtcaagtgtttggtaacttctctggcccccccaacggacacccatcactgagaattcctatgcacctctgaaagctaggcatgggttactcctgtgttggttgtggcttcctctttccagagacacccacagacgccacactaaatgctgtttgtggagccattatattcagcacacatatgcagacacacaagaaccctccacaatggagacatttggacttaaaatgaatcattggtaaccrtgtcacagtgatggtgctcaggggacattgaagactgtgagctctgcagccacacttgatgagtgcacatcctgactctgcctaacttcttagctgtgtggccttgggtgaactacttaacttctctgtaccttacttcccttgtctccaacata

SEQ ID NO: 398080 - DNA, 644 bp, Homo sapiens
gcatgtttcagagaggaagaaaatggtaggaacatcagtcttgggaatgggaattctttttattgttggaggatgtttcatgcctgggcttcctgctgtcctccctctattcrcattagcctgcatatctgcatagtagtttatggtagattcaaagccctttaatagacgaccagacaatgagttttaaggtgcttcctagaagatgacaacaatgatgttgttacttactgttacttgtttggctcacaagttcagtagttaagaatctgcttatgtctttccaggtacttttggtaaaaacagggaatgatccacaagatacagaaatttctttgtgaccttttagcttatagttaaaaacgtaagttttggagtgatacagtcctatttggttttccacaaaacaaagatgctactacttactatgtagaattgttatgaggggtcaatgaaaaaaaaatgttggttgaatacttaatatacagtttggaacataatacatgctaccaaatgcaacaatcattacttattttttttcttctctctcatctcaggttctgcccctcaccctcaccagtgctaggctgctacttgtcaatcctcattttgggatattagcttagcttgagatttctcagcct

SEQ ID NO: 398081 - DNA, 644 bp, Homo sapiens
gcatgtttcagagaggaagaaaatggtaggaacatcagtcttgggaatgggaattctttttattgttggaggatgtttcatgcctgggcttcctgctgtcctccctctattcacattagcctgcatatctgcatagtagtttatggtagattcaaagccctttaatagacgaccagacaatgagttttaaggtgcttcctagaagatgacaacaatgatgttgttacttactgttacttgtktggctcacaagttcagtagttaagaatctgcttatgtctttccaggtacttttggtaaaaacagggaatgatccacaagatacagaaatttctttgtgaccttttagcttatagttaaaaacgtaagttttggagtgatacagtcctatttggttttccacaaaacaaagatgctactacttactatgtagaattgttatgaggggtcaatgaaaaaaaaatgttggttgaatacttaatatacagtttggaacataatacatgctaccaaatgcaacaatcattacttattttttttcttctctctcatctcaggttctgcccctcaccctcaccagtgctaggctgctacttgtcaatcctcattttgggatattagcttagcttgagatttctcagcct

SEQ ID NO: 398082 - DNA, 611 bp, Homo sapiens
ggtgggggagtagccaaaatctctcaaagaactaagcaatgtcttggtttatattcaggcacaaccttcttatcctgcagargtctggtagcaaactggacaacactttgaggagcacaggtcagaacagtccactcatgactatccacagtagtagaggggaatgtaaatatgacaaatacaaaaaagtgatgggtagactgctttgaaacaaaatggaagaagtaaagcaagagaatagggtctggtggcagggaacctaaggctgttttactccgatttcccagaactaaattcaaaggaaaaccctaactttccacacctaagtaacaaaagcaccgggggctactgcctttgcaaacccctcaccttttctgcatgcagatgggaaatttgctgtccacaaccaatcagactaattgcaggccaagtcttcgtttgcatagaagtataactttgtaacttcaccctagcctctcactggttgctttttgcaaccaatcagatgtttgcacaggagcgtgacctttgtaacttcacttcagcctctggttggctgctttctccaaccaatcagactgactgcaggataccacttcatttacataagg

SEQ ID NO: 398083 - DNA, 366 bp, Homo sapiens
tcctcttgcatctatgtatttgagccccttttcctagagtccaccaaccatgtggaagaaagccaggcagacagtccattaarataatccaaaggctgagaatcacttgaacccaggaggtaaaggttgcagtgagccacgatcatgccactgcactccagcctgagcaaatgagcgagactctgcctcaaaaaaaaaaaaaaaaaaaaaaaaaaaaaaaaaaaacctaacaaccttgtccacatctgtacttcccctctgccttctgattacaatgaaggatgtgctcgtgcatcttcgataaggctcattccagaacctgtgcttggagtcacagtgcttcctactttcttggcatctccctat

SEQ ID NO: 398084 - DNA, 611 bp, Homo sapiens
ctgtttatagttctaattacccttttttgtgtaaaatgagatcttcaaaatgtggattatcttgaatgagaaacatttgtactttttttatttcttgttaaactgcaattttagaaatactgcatgttcactatattcctctgtagatgaatattatcttgattacaatacttttttctctaccttctattctgaacgcactaaataaactgtcaaatggaacctgtttcctatttctgttctgaattccttcctcccaggacatcagatttcatcatagtgctatttttgtagaccattgattatcaaacttaggtggggagccctttcttcaacaaaggatggtgcagatgcttaataaatacaactgcccagttgggaggggaggaacagaaagagtacaagggttcttgcccccyaaactgccaagtatcgcaactccaggtgactcttgaaatacttggtttggagtacctagggctacagagagctcaacctgaaaattagctctgagctatatttcaactttcttctaaactcaaattttgaaaaagtcagaaatatgtaaaatctcacattttaaaaatttttcaataagtttaatatatcca

SEQ ID NO: 398085 - DNA, 579 bp, Homo sapiens
atattcaacaattgaattttagcctaatggtcttatctgtcattcagcatacgatgtagcctttgataaactaatttggcttcttcccccattaatctgccaaacaagtctttccaaagtcaccaaagacctctgatatgttttggatctgtgtccccacccaaatcttatattgaaatataatccacagtgttggaggtggggtctggtgggaggtgattggatcatgggggtggatttctcaygaatggtttagcaccatccctcctggtactgtctttgagatagtgagttctcatgagatatggttgtttaaaagtgtgtagcatgtcccacctcactctcttgttcctgctttcaccatgtgaagcacctgctcctgttctcccctccaccatgagtaaaaagcttcctggggccttcccagaagcaaataccactatactttctatacagcctgcagaactatgagctaattaaacctcttttcttataaattacccagtcttgggtatttgtttatagcaatgcaagaacagactaatacaaccaccatgaggctaaatccaatacatttta

SEQ ID NO: 398086 - DNA, 589 bp, Homo sapiens
gatgtccaattgctccagcatcatttgttaaaaaggctacctttccttcattgaattgcttttgcacctttgtcaaagatcacttgaacatatttatatgggtctacttctggatttttttgttctgttccattgatttaagtgtctgtctctytgccaatactacacagtcctgtttactgtagctatataaccagtcttgaaaccagattactttattcttctttttcaaaattgttgtagctatttttgtttcttgcctttccgtatacattttagaataatcttgtctgtatctgtaaaaagtcttgctgaggttttcataggaatttgattaaagctgtgtatcaatttgaggtaaattgatacctttactacacttaatttttcaatacattaacaattttctacatttatttagatctctctttatttcttcattagcattctatagcttttggcatataagttctgtacatgttatattaaatttacacctaaatatttcttcactttttttttttaatttttttttgagatggagtctcactctggctagagtacaatggcacaatcttggctcactgca

SEQ ID NO: 398087 - DNA, 589 bp, Homo sapiens
gatgtccaattgctccagcatcatttgttaaaaaggctacctttccttcattgaattgcttttgcacctttgtcaaagatcacttgaacatatttatatgggtctacttctggatttttttgttctgttccattgatttaagtgtctgtctctttgccaatactacacagtcctgtytactgtagctatataaccagtcttgaaaccagattactttattcttctttttcaaaattgttgtagctatttttgtttcttgcctttccgtatacattttagaataatcttgtctgtatctgtaaaaagtcttgctgaggttttcataggaatttgattaaagctgtgtatcaatttgaggtaaattgatacctttactacacttaatttttcaatacattaacaattttctacatttatttagatctctctttatttcttcattagcattctatagcttttggcatataagttctgtacatgttatattaaatttacacctaaatatttcttcactttttttttttaatttttttttgagatggagtctcactctggctagagtacaatggcacaatcttggctcactgca

SEQ ID NO: 398088 - DNA, 589 bp, Homo sapiens
gatgtccaattgctccagcatcatttgttaaaaaggctacctttccttcattgaattgcttttgcacctttgtcaaagatcacttgaacatatttatatgggtctacttctggatttttttgttctgttccattgatttaagtgtctgtctctttgccaatactacacagtcctgtttrctgtagctatataaccagtcttgaaaccagattactttattcttctttttcaaaattgttgtagctatttttgtttcttgcctttccgtatacattttagaataatcttgtctgtatctgtaaaaagtcttgctgaggttttcataggaatttgattaaagctgtgtatcaatttgaggtaaattgatacctttactacacttaatttttcaatacattaacaattttctacatttatttagatctctctttatttcttcattagcattctatagcttttggcatataagttctgtacatgttatattaaatttacacctaaatatttcttcactttttttttttaatttttttttgagatggagtctcactctggctagagtacaatggcacaatcttggctcactgca

SEQ ID NO: 398089 - DNA, 589 bp, Homo sapiens
gatgtccaattgctccagcatcatttgttaaaaaggctacctttccttcattgaattgcttttgcacctttgtcaaagatcacttgaacatatttatatgggtctacttctggatttttttgttctgttccattgatttaagtgtctgtctctttgccaatactacacagtcctgtttactgtagctatataaccagtcttgaaaccagattactttattcttctttttcaaaattgttgtagctatttttgtttcttgcctttccgtatacattttagaataatcttgtctgtatctgtaaaaagtcttgctgaggttttcataggaatttgattaaagctgtgtatcaatttgaggtaaattgatacctttactacacttaatttttcaatacattaacaattttctacatttatttagatctctytttatttcttcattagcattctatagcttttggcatataagttctgtacatgttatattaaatttacacctaaatatttcttcactttttttttttaatttttttttgagatggagtctcactctggctagagtacaatggcacaatcttggctcactgca

SEQ ID NO: 398090 - DNA, 249 bp, Homo sapiens
caccttcaaaatgaaataatcccaaatcgtcaacacactctcaatggctttttatttakcaatctaaaataaagtggcaaagtggaggggatacgggattcatccaatcagcccttctctacccacattcccacaccaaaaaatggggatgtggggtgtaatccctgttcactgctgccatctccgtaagaatatggaacactcaagttttcctacccacctagaatttcgcccacccaccaccctccc

SEQ ID NO: 398091 - DNA, 572 bp, Homo sapiens
gctcaggccagtgctgacatgccagccccctgccaccttagccctcttgggactttgggtactgacaatcatgggaaggaggttgggggtgctgagggaagcttggcgtgggcctgcaggcaccattgggcactaacagcctgggcactgtggatagcatgttgatggcagaaggcagacaggttcctgggtggaaaggggcaggtccctggtgaagctccaccgtcaagccaggggccccttgaagcatgagggctgggctgtcagttccaggtagagtctgcagcctggagtgagaacttatggtgcattttctggtcccacccatggctgcccayggaccaatcagcatgcacttcctcccttctgaagctcataaaaaccccaggactcagccagactctcagagacaggatgacctgtctgcgagtaggagctacccactctgggtctcatctctgctaagggctgcagattcaatgggacaacctgcctgcagaaaggagttacccacttcaggtctcctgagagcttaatgttgctcaataaagcacctctttgccttgctcacc

SEQ ID NO: 398092 - DNA, 561 bp, Homo sapiens
caaatccatgaatgagttcacactgttcagcaatgaaatgactaacgttgatatttactcaagcatcttggagagcatgtacagccagctaactaaagcagaacatatccaaattgttgatagacgatcggcattttctcatttaatttctggcttaaataattgaaataaaaagaaaccttgtatctagtagagattcctttctacctttyaaaattagtaaatacataatttaataataaacaaaaataggatatatgtgtacatgtagatgtatttctggccaaaatctctgaaaggcaaacacaagattataacctgtattaggccccagtgacaggcaaactgtgatcttcatctaaaagtacagcaagcaattaaaaatatcaatagaaatttttaaatggtagttgttaaaagtacagaaacctacataatcaattaaatatttttccatgtaacagactgaagatctcacacatattgtagaagatgtatgagatgtactggataatattatttcaattgatgtttatattactataaatttaataggttaaa

SEQ ID NO: 398093 - DNA, 561 bp, Homo sapiens
caaatccatgaatgagttcacactgttcagcaatgaaatgactaacgttgatatttactcaagcatcttggagagcatgtacagccagctaactaaagcagaacatatccaaattgttgatagacgatcggcattttctcatttaatttctggcttaaataattgaaataaaaagaaaccttgtatctagtagagattcctttctacctttcwaaattagtaaatacataatttaataataaacaaaaataggatatatgtgtacatgtagatgtatttctggccaaaatctctgaaaggcaaacacaagattataacctgtattaggccccagtgacaggcaaactgtgatcttcatctaaaagtacagcaagcaattaaaaatatcaatagaaatttttaaatggtagttgttaaaagtacagaaacctacataatcaattaaatatttttccatgtaacagactgaagatctcacacatattgtagaagatgtatgagatgtactggataatattatttcaattgatgtttatattactataaatttaataggttaaa

SEQ ID NO: 398094 - DNA, 570 bp, Homo sapiens
cactaatctaaagctatgatgatttgcctctaagcctatgtgttctcttcattatgctctgagaaatttctacaagactttattctctttccagcatatttaaaaatttttgtcctgaaaagcaacataaggacacaacagactaaagaagactggaaagaaaatatttttatagtattattttttcattgatcattccaaagaggaaaacaatgtcgcctgagtaacttactttattatrcaggggaattccattgcatacttgtattagaaagcaaagaaaattatatctttcaaatgattgtcatttatggagaaatatcctgaatcctcttaagtcaaatttgggattaaaaataaagtacaattcttatatgaactgatgcagttgatctcaccctgattagtccattagttcaatgattaattgcgcctttcatttctctgttaagtagtgaatgtttaatttttggctgtatgtgaagtgtaagtacatttgcagcatttgctaatgtaggattagcccttatttcttttcagctatggtaatattttaagtgtaatacatga

SEQ ID NO: 398095 - DNA, 570 bp, Homo sapiens
cactaatctaaagctatgatgatttgcctctaagcctatgtgttctcttcattatgctctgagaaatttctacaagactttattctctttccagcatatttaaaaatttttgtcctgaaaagcaacataaggacacaacagactaaagaagactggaaagaaaatatttttatagtattattttttcattgatcattccaaagaggaaaacaatgtcgcctgagtaacttactttattatacaggggaattccattgcrtacttgtattagaaagcaaagaaaattatatctttcaaatgattgtcatttatggagaaatatcctgaatcctcttaagtcaaatttgggattaaaaataaagtacaattcttatatgaactgatgcagttgatctcaccctgattagtccattagttcaatgattaattgcgcctttcatttctctgttaagtagtgaatgtttaatttttggctgtatgtgaagtgtaagtacatttgcagcatttgctaatgtaggattagcccttatttcttttcagctatggtaatattttaagtgtaatacatga

SEQ ID NO: 398096 - DNA, 527 bp, Homo sapiens
ggatgggctaaagagctttcattgtggctcaatttctctcaggacctaactttttgattcctttctttcttactctgtccttccacgggtattgatcccaagaacattttctaataagcctcctgctggctgcttcccagggagcacatcctggataaactaccattaacaaaataaagactaagagcacttccaattcagygtctgaggatcaactctcaaatcgttaattcaacagcgcctagttagtaaagatacactacctttcataaatgtcagcttttcctgtttctttgttgaaaggtttcattagttgttggtggagctcattttctgatgtgagctaatggtacaattattggagctaattccttcagaagataaattctagaatgctgcaaattgtggaaaatctttctaccttttatactggtaaacaagagagacatcttggccccttttaaccaccatgttgctaacagcacagtgattaatgaaaactgagaacagatcattgtaatggtgga

SEQ ID NO: 398097 - DNA, 257 bp, Homo sapiens
gaaattcagaggaaatatatgaatttggaaattcatataggaataaaaaatatatgaatttggaagtatattaatttggaaattttcatttagacaaatagttatcactctgattttacactttgtcaccattcattgagaaaatagctttgtgatgaccmtaagtgtaaatgggaaacactcctcacctaatagcaagctcataagaagatacaaaagcaaaaacaaaattacgaagtatttattttgcaaagaaa

SEQ ID NO: 398098 - DNA, 257 bp, Homo sapiens
gaaattcagaggaaatatatgaatttggaaattcatataggaataaaaaatatatgaatttggaagtatattaatttggaaattttcatttagacaaatagttatcactctgattttacactttgtcaccattcattgagaaaatagctttgtgatgaccctaagtgtaaatgggaaacactcytcacctaatagcaagctcataagaagatacaaaagcaaaaacaaaattacgaagtatttattttgcaaagaaa

SEQ ID NO: 398099 - DNA, 521 bp, Homo sapiens
aatggtgtattactcaacaataaaaaatgaaatactgatatattctacaacatggatttgccttgaaaacagctcacgatgtcaaaaaaaaaaaaaaaaaaagkcagttgtgaaggactacatattgtatttcacttatacaggaaatttagaacaggtaaatttaaaaaaatagattagtgattgcctgtggtctagagggaggcaggaatgaggagtaacagcaatggggcatggagtatattttggcataatgaaaatgttcaaaaaattattatggttatgaatgcacaaatttgtggaaaaaccattgaatggcttgcttgaattgtgtgatttatatcgtatgtgaatgatatttcaataaagttaactttttgaaagagttgaagtaaattcctttttagtttaagtagttatggttggggtttcaacactgaggacaatgtggagttatttaattgaagctggaaaaggatccctggagaccaactcaccctctcataagttttctctataac

SEQ ID NO: 398100 - DNA, 585 bp, Homo sapiens
aacatgctggcagggttgtgaggaaagggaacagtytgtgtactactggtgggaatgtaaattagatcagccattgtggaaagcagtttggagattttttcaaagaattcaaagtagaattactatttgacctagcaatcccattattgggtatatatcctaatgaatatagatcattctaccacaaagacacatgcatgtgtatgctcattacagcactattcacagtagcaaagatatggaattaacttaagtgcccatcaacagtagactgaataaagaaaatgtaatacatatacaccatggaatactatgcagccatgaagaagagttagatcgcatattttgcaggaaaatgaatggagctggaggccattatcctaagcaaactgacacagaaacaggcagaacagaaaaacaaatatcaaatgttctctcttataagtgggagataaacattgagaatatagggacataaagtagggaacaacaaacaccagggcctactcaaagatggaaagtgggatgagggtgaggattgaaaaactacttattaggtactatgcttatcaccaaggtgatgaa

SEQ ID NO: 398101 - DNA, 598 bp, Homo sapiens
aaactattaaaagtaatttataaagcataaaccattgctgacattttaatgaaagtttttaaagtaataaatgaaaggcaaggaaggaaagtacagaacaacatgtaagtataaagttctacaattttgtaaagaaaagtaataaaaagcaagaagaaaatctaaatatatggaacatttaatcttacatataataatacagtagtcaatatttatgtagtatttcctatacacagatagtctgctaatcactctacttatttaatctttgcacaaaccctataaaatagatcctatatttctcccattatacagataaaataagtcagcaaccggcaaacagataagacagggtttgatttttttgcagtctgcttttgagtctgaattcttcccgtcctagtcctcactaaaagatacttgtgtattcttgattttgattgagaactatctatggaaacataytttaagcatgaagataatttatactcatcagatggacaacgttagaatgaatgtgtgagaagaaaggcatttgcatgcactcacagtggcagtgtttattggtggaactattctggagagtaagttggcaaag

SEQ ID NO: 398102 - DNA, 626 bp, Homo sapiens
cgatccagcataagccacagtgctggggtggagtcagctctaccgaaaggacgtaaagaatggcggagggaggagagatgagaaatgactgaacaacataaattagtcagtcactttagtatatctgctaaatatgcaatcataagcaaaacaaagtagcttatgtaatatgtattattccagagtacataatggtggttgagaattgcaaggactgtgctccacatatcctctattccaggactcaggctgagaggattgagacatcatttttgtgcaaagaaaaagagaggtaaagggctggcagagcaccacaatgtctcttaaagcttctgctcccacatagcattggtgaactccactcacattccaatggtcaaagcagkttacaaacctagcccaaagtcaaagtaatggggggtatatttctgtgcattgaagtcacatggcagcatgcaaagatgtataatcaatattcttacaggcaagtggaaggaaagggggcttattaattgtgaacataatctacaccacttttgtatttctcaatataattctaagtttgggatcgttaaaacgtaaaatttaactaggatgagaaatttaatttttttgttggtatctac

SEQ ID NO: 398103 - DNA, 626 bp, Homo sapiens
cgatccagcataagccacagtgctggggtggagtcagctctaccgaaaggacgtaaagaatggcggagggaggagagatgagaaatgactgaacaacataaattagtcagtcactttagtatatctgctaaatatgcaatcataagcaaaacaaagtagcttatgtaatatgtattattccagagtacataatggtggttgagaattgcaaggactgtgctccacatatcctctattccaggactcaggctgagaggattgagacatcatttttgtgcaaagaaaaagagaggtaaagggctggcagagcaccacaatgtctcttaaagcttctgctcccacatagcattggtgaactccactcacattccaatggtcaaagcaggttacaaacctagcccaaagtcaaagtaatggggggtatatttctgtgcattgaagtcacatggcagcrtgcaaagatgtataatcaatattcttacaggcaagtggaaggaaagggggcttattaattgtgaacataatctacaccacttttgtatttctcaatataattctaagtttgggatcgttaaaacgtaaaatttaactaggatgagaaatttaatttttttgttggtatctac

SEQ ID NO: 398104 - DNA, 626 bp, Homo sapiens
cgatccagcataagccacagtgctggggtggagtcagctctaccgaaaggacgtaaagaatggcggagggaggagagatgagaaatgactgaacaacataaattagtcagtcactttagtatatctgctaaatatgcaatcataagcaaaacaaagtagcttatgtaatatgtattattccagagtacataatggtggttgagaattgcaaggactgtgctccacatatcctctattccaggactcaggctgagaggattgagacatcatttttgtgcaaagaaaaagagaggtaaagggctggcagagcaccacaatgtctcttaaagcttctgctcccacatagcattggtgaactccactcacattccaatggtcaaagcaggttacaaacctagcccaaagtcaaagtaatggggggtatatttctgtgcattgaagtcacatggcagcatgcaaagatgtataatcaatattcttayaggcaagtggaaggaaagggggcttattaattgtgaacataatctacaccacttttgtatttctcaatataattctaagtttgggatcgttaaaacgtaaaatttaactaggatgagaaatttaatttttttgttggtatctac

SEQ ID NO: 398105 - DNA, 558 bp, Homo sapiens
  misc_feature (1)...(558): n = A,T,C or G
caaatcaatttatgaaattattttgaaattcaatggcccatatgaaagtaatgattgggcccttaagttatataaacaaaagtagggcaagtagaaatatcaaatatccacaaacacaaattaggacatggaatataaatgttataatcctttttatttaactccaataaggtatgaaaaagcatatatagaaaaactggaagattaaacaatcagattgatagagttaatttcaaatatttggattgttaaaattaaacttcataagaaaamtatctttcaaaagtaaaaagaaaaaataatttaaaaataaatattctgaagccaaccatgagaatatgacttattttggtgaacattaaaaagcaagacagtgagagagtgaacaatcttcaccatccatttattatctccacnaaagttgcatttttagatgtcccatactcatttaaccatccctggttgatggataattttgcacatattcaatattgtattaaaattgaagggcatatattgatattatatcttgaaaaatatatctgatgatgctatgtt

SEQ ID NO: 398106 - DNA, 563 bp, Homo sapiens
gaaaacattcaaatgatgaaaaaagatagtagagttagactcaaacatgctttgttatctgcctttatggtaccacacatccaaaattttaattaattgaacttaaattttctttcaagaaaggagaggccaggcacagtggctcacactgtaatcctagcactttgggagactgaggtgggtggagcacttgaggccaggagttagagacaagcctggtcaacatggggaaatccattctctactaaaaaatacaaaaaaaaattatccgggggtgrtggctcacgcacccgcaatcccagctgctcaggaggctgaggtgggagaatcacttgaaccctggaggtggagattgcagtgagcaaagatcactcagcctgggcgacagggctagatactgtctcaaaataataataataatacaaaaaaaaagagaattttagaccaatatccctgatgaacatcgatgcaaaaatccacaataaaatactggcaaactgaatacagcagcacatcaagaagcttatccaccatgatcaagtgggcttcatccatccctggga

SEQ ID NO: 398107 - DNA, 485 bp, Homo sapiens
taattaggtcctgtggaatatgtttttttcagtttctatccaaacatatcaattccaaatatatcaaatataaagagtaagagaaaaatacataattaatttgattaatttcaattagttattttacaagaaaagaggtcaagatgtttagaagatgcaataggcataaatatgttcatgcaaaccttttcttcccaaagagttgagagaaaaaaataatacctacgtgatgatattttastgttgttggcataaatggggaatatagatttgtttgttctatttaataattaactagggagtaaataaccacagaaatcaattcaaacataaaataataaggcctactagggactaaaggaaacactggcagattcagtctagtttttgtttgtttgtctgtttatgtatgtgtttatatcttaagattccctatagagaagtagggaactcaattaacacacttaaaaaaactacacagtaga

SEQ ID NO: 398108 - DNA, 570 bp, Homo sapiens
agttgaaaatactacatggaaactacactactgcatctacccagaaacaaagccaatgtactccaccaaactaccacccaagatccattcacacaaataagtctttccctgtgaaacctactccataaaattagaaaaggtaacttttctaccagatgtatagaaatcagtgtagcaacacatcaaacaaggacacgtagcatctccaaagagacacaataattctccataacagaccccaatcataaggaaatatacgaaatactagaaaaataattcataataataatcttaaggatactcagtgagatacaacatamtacaaatattttgtatttcaatgaaataaggagaacaatttatgttgttgcatccagcaactgatgaatggataaagaaaacgttgtgcaggtacacaagggaatgctatttagcaataaaaaagaatgaaattctgtcctttgcaacaatatgaaagggaatggaggatattataagtgaaataagccaggaacataaagttaaacaccacatgttctcagtcataggcagaagttaagaaaatgttga

SEQ ID NO: 398109 - DNA, 621 bp, Homo sapiens
ctactatgtttattcctggaaaataattcttttctgtcttctgaacacatttcaaagcaagctctctcttttagrttctttaattcagggcactcttttttcttctttttttttaatgttacctctttgatgttatctttgaaatcgtagcacttgtcgaaatacctggctttcagtaagcttcataaatgcttgtggattgagggagtgattcagtcttgcactgctgatctagctcatgcaggtctggaagatttttctctgattttcctcattcttgctagctcctattagcacttgcttgtctgaggtttttatatgtccttgttcactgcgttcattatagttcacaagaaaatctttaacaacactgttcaaaccctagcaatccatagaccaactcaggcactgcttacacactgctttatactatcctcagtttgaaagtctttaattggattattcacgttcagttttatcacagtcgttacaatttctcattgttttatataggccccatccacatggctttgttatctgcctggttgtggtggacaatgagatcttgactccaatctaatttatgtctgctaagaactaattataatgtgcagggaacag

SEQ ID NO: 398110 - DNA, 556 bp, Homo sapiens
gtatagcctgctacataccaggctatgtgatatagcctattactctcaggctacaaacctgtatagcatgttaatgtgctgaaaactataggcaactgtaactcaaaggcaaatatttgtgtatataaatatggctaaacatagaaaaggcatagtaaaaatatggtattataatcttatgagaccactgtcatatatgcagtccatcgctcactgaaatgtcattatgtggcccatgactgtcttcagattctacatccattctcacaaaattctaagtaaacttattctcacaaatattctaagtaaactcttgcatatatatgtatatatatttatgttcatatatatgcaagagtttatttagatatggacakaaatatatatatatatatggatattatatatatggatatatatgcaagagtgtacttagactatttgccataaaatgaaatgatagtttagattagttattacttcagctttgtttaactcttcccaaattgctatccaagctttgaacaaatttactttttaccagtaagagtttctg

SEQ ID NO: 398111 - DNA, 602 bp, Homo sapiens
attcaattacacataagttaaagtttacaaatgttcctaccattatcacaaaaatgaagactttarttcttacttgcctcctatgttaaacatatctttagtaatactttaaactctcctccaaataattttatttttaaatgtctgtgcttattcaggtttatccatgcttattaattgttttgtctaactttgctatttgcctctcatgctttgtcaggcattgtttatatgtgacccatccaatatccttcttatcctctgtacttagaatggtgcacagcagagtagtccacatgatgtaattttggccaatgagatacaaacagaggatatttgttaaggattctaggaaatgcattttcctgataaaaagggacaaccttattggtatttgatgattctccttcacaacttccctctttcttcctgactaaaaatgtggatgcaatatctggagatacaagagctaactggaaagcataaggaagacagtcagttgttagaaaaagaaaaaagagagaaagaggataatagaaaaatgctgtaatttggatgacattttgtagttgcaaatctctgaaaatctctgaacttcctac

SEQ ID NO: 398112 - DNA, 528 bp, Homo sapiens
taaaattataaaacttctagaaaaagacataggagacagcctttgttatattgtgttaggcagaaagaattcttggataagacatcaaaagcacaatcaataaaaaaagaaaaaatctgataaacctatcaaaataaacaattttgctccataaaatatactgtgaaagaaaaaaaaacataagccatgtattaggagaaaatattttcaaatcatatacctgctaaaggatatatatcagaatatataggaaattttgaaagtcaacaatgagaaatcaaacaacctccatcccctgagaaatgggccataaatttgagtaggcattccatcaagaaagcatagagttggcaagaaarcatatgtaaaagtgcacaaaactattagttcttatgaaaataaaaattaaactcagaatgatataccattacacaaatattagaacatcaaaaacaaaaacaaaaaaattaacttacaatatggaatgctcattgcaatgtggagtattggaactctcatactttacct

SEQ ID NO: 398113 - DNA, 421 bp, Homo sapiens
taggtaagacagcagatggttggtcgactttctacccattctgccaatctgtgttttttaagtggagcatttagactatttacattcaactttagtattgagatgtgatgtcctattctattaatcatgttaattgttgcctaagtgccttgtatttctcattgtgttattgttttataggccctgtgaacagaacctttaaggagattctattttgatgtatttygaggttttgtttcaagatttagaaccccttttgcatttcttgtagtacttgtttggtagtagtaaattctctcagcattcatgtgtctgaaaaagactttatctcgccttcatttgtgaatctttgttttgctggatacaaaatccttggctgacaattatttcgtttatggaggctaaagataggatcccagtc

SEQ ID NO: 398114 - DNA, 629 bp, Homo sapiens
ggtgcttttaagaaagtactagctgtagtattagcagtgggatttgagcttgccctaagttggtcaggggaagtattctggtttcccaggtgatgggtggagccataaaactcccaatagtttttgtcttttgtgttgggagattttcgcctgtctcactgagttttcagggcatgctgttttccttcaaaggatccgtgaattccttcagttttcctggtacagtcctgcagtagttcttggaacaaaagtttgcagtgtgaatytctacaaactgctctatccatccaaatgggagacacatgttaaccctgcttcttatctgccatcttctccaggaagtctactgtaatttatattcttggtcttttagagggaagttttatattttttcctttctcttgtttctgtcaagacttttgctttgtctttgataattttcagtttagatgtgatatgtctaagtgtagatattttggaatttatcatgtttgctcttctctgcttcttgaatctgtggtttgatatcatttattaattttggaaaatcatagccattactatctcaaatatttcttctactccactcatattctctttctctcattgtcttactgatgttccaatta

SEQ ID NO: 398115 - DNA, 629 bp, Homo sapiens
ggtgcttttaagaaagtactagctgtagtattagcagtgggatttgagcttgccctaagttggtcaggggaagtattctggtttcccaggtgatgggtggagccataaaactcccaatagtttttgtcttttgtgttgggagattttcgcctgtctcactgagttttcagggcatgctgttttccttcaaaggatccgtgaattccttcagttttcctggtacagtcctgcagtagttcttggaacaaaagtttgcagtgtgaatttctacaaactgctctatccatccaaatgggagacacatgttaaccctgcttcttatctgccatcttctccaggaagtctactgtaatttatattcttggtcttttagagggaagttttatattttttcctttctcttgtttctgtcaagactkttgctttgtctttgataattttcagtttagatgtgatatgtctaagtgtagatattttggaatttatcatgtttgctcttctctgcttcttgaatctgtggtttgatatcatttattaattttggaaaatcatagccattactatctcaaatatttcttctactccactcatattctctttctctcattgtcttactgatgttccaatta

SEQ ID NO: 398116 - DNA, 531 bp, Homo sapiens
ctttgcctaatatattagataataggaactgaggtaaatatgtctttagtgtgaggttatgtgttaatctggcaagaattagaactgtgtttaatattttgtaaagctgtaggtgtcagaggcttcaaatcttaatactgctttctttttccttctctttttttttttttctgatgtctttgaactttcctaagtccttatgtagagtctttttctttcagctccttcatctattatccattgttwttatactagagtcctgctggtgcagggctaacatgtggagaagagtgattgttttataatctgactaaaactcagatttgtagtgagcctatgtccctgaaacttggccttcacaaatgtgaagcttttttccctttctttaggtgagaccggaaggctagagaaggatgaagtctgagaatacccttctctcaggtgggataagactgtggtaaattattttcctctggggagtaggcttgtgttatggggaatgctctggtcatatttcacaatgattattct

SEQ ID NO: 398117 - DNA, 613 bp, Homo sapiens
tactaaaataaaaacaaaatatcaaaggaaactatttcgtaagatgtaaagctatattttcattttgcacaagagtgtattttctaattttccgttggtgctgaggaacatgacttattttttatctaatattcatttactgattgtaatgataggtgggggtcatgttgagagatggtggtactgaggggagatgagacactttacaaagaacgatgaggaattttgtgaaacttggcaaaataaaaattcatggttctacacaaattgtcactgcatattttatacctttattttcctaccatgaatgaatggaacactctgattaatttcacattactttacatgttgtaacattaagagragaatcacagaaaatttgcctattgaaagcacaagaataaaatttttatcttgattattttttagagtcttaaaagtggaagaagacagagatgataggtattgaagccaatgctgctgattggttctaaccttttcccaaccttctcacacaatgaagggttctttgagagacagactagagaggattctttataaagtgtacaaaatggacttgtataaatagttctttcaaagcaacaaaaaggaa

SEQ ID NO: 398118 - DNA, 598 bp, Homo sapiens
aggtgggctccaggcaccactgacatcttaattctaatatttttataattacaaatacaagagtaagtcaagatagtgaaatagtgaacacacatgcttgcttcctcttcccggcctcaacttctggaaattatagaaaacatttaagtatttaaaaggctcaaactcattaacaacctggaaaatagaaagaagtgtgtggataggtgaaaggtgttgttatgtgtctttgctgaccaaaaattacaaataattttagaaaataaaggctgatgctctaataatattttccatattwaaaacaataacaatcagcacaaccaaaatcaaaccaaaccaaaacaaaacaaagtaccaaaatctctttgatcctacagtcttctccacttagtccatttttcagagtataacttctcagaatagttgtctataattgctgtttcacttcatagtctaccattctgtctccttgccctacccagtcttttatctacagaatttctctaaaactattttgctcaaggttttcagtgaccatcatcaagtaatgaactgtcacttggctgtcttcattttatccaatttctcagcaacgttt

SEQ ID NO: 398119 - DNA, 571 bp, Homo sapiens
gctcctccttacctctcacctacttttttggcacaaacatagtctagctaatacattacaatgcctctcattacaatgactgtgagtatttggtctggccacctaygcaatctggttaaaccagtttaatctgaaatagaaaaatgacttttaaaaattataactttgaatatagtattccgtataggttgaatgtctcctccaaaactcattttcagacataattcccaatatggtactatggataggtgggatctttaacaggtgactggatcacgagggctctgcactcatgaatgaactaatccattaatggattaatggtttaaagggttaatggatagatgggttatcataggagaggaactggtgactttataagaagagagagacctgagcatagcatattagcacactcaaccccattgccatgtgatacccagtgccccagatacttcagaatacccaaaagaatgaaggctgtcaccagatatgccccttcaggtttggtcttcttagcctctgtagctgtaagaaatattttttttctttataaattacccagttttag

SEQ ID NO: 398120 - DNA, 571 bp, Homo sapiens
gctcctccttacctctcacctacttttttggcacaaacatagtctagctaatacattacaatgcctctcattacaatgactgtgagtatttggtctggccacctatgcaatctggttaaaccagtttaatctgaaatagaaaaatgacttttaamaattataactttgaatatagtattccgtataggttgaatgtctcctccaaaactcattttcagacataattcccaatatggtactatggataggtgggatctttaacaggtgactggatcacgagggctctgcactcatgaatgaactaatccattaatggattaatggtttaaagggttaatggatagatgggttatcataggagaggaactggtgactttataagaagagagagacctgagcatagcatattagcacactcaaccccattgccatgtgatacccagtgccccagatacttcagaatacccaaaagaatgaaggctgtcaccagatatgccccttcaggtttggtcttcttagcctctgtagctgtaagaaatattttttttctttataaattacccagttttag

SEQ ID NO: 398121 - DNA, 571 bp, Homo sapiens
gctcctccttacctctcacctacttttttggcacaaacatagtctagctaatacattacaatgcctctcattacaatgactgtgagtatttggtctggccacctatgcaatctggttaaaccagtttaatctgaaatagaaaaatgacttttaaaaattataactttgaatatagtattcygtataggttgaatgtctcctccaaaactcattttcagacataattcccaatatggtactatggataggtgggatctttaacaggtgactggatcacgagggctctgcactcatgaatgaactaatccattaatggattaatggtttaaagggttaatggatagatgggttatcataggagaggaactggtgactttataagaagagagagacctgagcatagcatattagcacactcaaccccattgccatgtgatacccagtgccccagatacttcagaatacccaaaagaatgaaggctgtcaccagatatgccccttcaggtttggtcttcttagcctctgtagctgtaagaaatattttttttctttataaattacccagttttag

SEQ ID NO: 398122 - DNA, 571 bp, Homo sapiens
gctcctccttacctctcacctacttttttggcacaaacatagtctagctaatacattacaatgcctctcattacaatgactgtgagtatttggtctggccacctatgcaatctggttaaaccagtttaatctgaaatagaaaaatgacttttaaaaattataactttgaatatagtattccgtataggttgaatgtctcctccaaaactcattttcagacataattcccaatatggtactatggataggtgggatctttaacaggtgactggatcacgagggctctgcactcatgaatgaactaatccattaatggattaatggtttaaagggttaatggatagatgggttatcataggagaggaactggtgactttataagaagagagagacctgagcatagcatattagcacactcaaccccattgccatgtgatacccagtgccccagatacttcagaatacccaaaagaatgaaggctstcaccagatatgccccttcaggtttggtcttcttagcctctgtagctgtaagaaatattttttttctttataaattacccagttttag

SEQ ID NO: 398123 - DNA, 659 bp, Homo sapiens
tccccaatatgcatattgcggaatatttgcagagtaggtataagattatatcwtttcataaaacagctataattaacagaattttattcaacgctaaggaattagacagacttttaaagtagagctatacatattacaattttgtagtacaaaaaaattggtgatttttatttcccagtttaaattacagattcccttttcttgaaccacagatattgtagcagtaagtggaatctacatatttttctatgtgttatacctaatgtgaatgtgtctgtactacacagcactcagtaccatgttacaagcaacatggtgataataggtgtagagggaaagtatggacttttagttcagacacacatgagttaatttgagaactacttctgtctttcaagctctctgactctgagctagcatcttaaccttgctgagcctgtttccgtttgtaaaatggggatcgtaataccattgcaaatgattcctgtgagaaataaatggtaaaagtaacatgcactgtgcttagaacagtaattgttctacaaaagaaaatcaagttagtcctctttttccaccatgagcagcatattgccataaactagtatgaatttgcgtgtcaggaaagcacttaatttatgggttaaaacgggtattttcat

SEQ ID NO: 398124 - DNA, 589 bp, Homo sapiens
tgtgtatgtaatatttattatgcagaacatgagaggtcactccaatttgggggtagtggtttgccctgtaacctcasttatcttgcagatataaaaacagttgttaatttttcagtttgttcagctttttacttattcttaggatgaactgtcaacttcatgctgaaccagaactggaaattcaagttcggtttttaaaatagtgaaagtaaaatagcaaatgaagagtggtataatcacacccccacataaacccacacacacatacacatgtgcacacatatgcacacacacacaaagctgttaaacgtatcctgtttggagctaagagtataataatgaaatatgcaataacgagtatgttggcttgcttcaacaaaaatatattgagtatcttctacttataatgctggatgctttatggaataaagggagaattactcagaaactatcctcttgccattgcttggaagagctcttgcaaaggcaggctaactctcagcaactgcgtttgtggaacagagagaaatctgagcaatcccagggttgggaaccttgataagctgaatggatggcctctgtagaaaaa

SEQ ID NO: 398125 - DNA, 648 bp, Homo sapiens
tttcatttagttatttgagcgtcttgaagacagttttttttaaagtcttcgtctagtaggtgaactctctggtctttctaagtaacagtttcctttggtttatttttatttccttgagtagatgatacttttctgtttctttgtatgccctaaaagtttttttcctcagtactggaaatttaaatgtaataacgtggtaactctggaaattagatgctcccctttccctatggttttggttcggtttggctttcattgttgtaggctttctctatgccaaaggcacttctgaggtgtaaatttagggtcctctcagatttttttatgcgcctgtttctttccctgggtatacacagtggctttctaacttcccctgtaaatgcagtggcttttaaatatcatagtctttaatgtttagctcacaaatggggcaaaacagagagagagagagagaagacggttaaaaaaaaggcactagccatttaaatcctmtggaagctgctttattagatcccctggaagctgctttagcgagagggcgtgcgagttgcaacagtgtgtgtgtcaggggcgggggcatgcaacaatggctacctgcctctgtttatgcacctccataataagaagcagcaatcagtgattagagta

SEQ ID NO: 398126 - DNA, 515 bp, Homo sapiens
ctgtttcttatctcagtgtggttctgatgaaattgttttctttctccagagtgtgtttttacttcccttttgggacttgtaaatgttgttgaaagccagatatattgcattaggctacaatttcccttccctccctgggtcacctggaagatgtctcttcgattgtcactgtgagaagctggtggaaattctggaaatctcactgtgagaagctggtggaaacaaagtaaatatgtccttagtgtgaggatttatgttaatctgactaacagttagcctgtgtttagtgtcgattacagcmgtagatacccaagcgttattgtatttttccctgttatctttgggcttccctatgtactctttttcagaaagcctgttttgcatctcattcggctgtaatgcactatctttacactggatccctgttggcataatactcaaatataaagggaaggggataattttgtaatcttctcattaatctgctatttagtgggcctgtatctccaaggtat

SEQ ID NO: 398127 - DNA, 515 bp, Homo sapiens
ctgtttcttatctcagtgtggttctgatgaaattgttttctttctccagagtgtgtttttacttcccttttgggacttgtaaatgttgttgaaagccagatatattgcattaggctacaatttcccttccctccctgggtcacctggaagatgtctcttcgattgtcactgtgagaagctggtggaaattctggaaatctcactgtgagaagctggtggaaacaaagtaaatatgtccttagtgtgaggatttatgttaatctgactaacagttagcctgtgtttagtgtcgattacagcagtagatacccaagcgttattgtatttttccctgttatctttgggcttccctatgtactctttttcagaaagcctgttttgcatctcattcggctgtaatgcactatctttacactggatccctgttggcataatactcaaatataaagggaaggggataattttgtaatcttctcattaatctgctrtttagtgggcctgtatctccaaggtat

SEQ ID NO: 398128 - DNA, 621 bp, Homo sapiens
ttggtatttgttttacatttgttctgtctattctttgtttctctgttcttcctttcctgactccttttcagagtcaggcattttttagcatttcattttatcatagggaatccccaagataacagggaaaaatacaataatactggggtacctactgctatatctctctattggattattagctatagttttctattttatgttttagtaatttttataaagtattaactgtctatgtcatcataatctacctttaaataatattatgtggcttcatggcaaatgtataagcctttcaatagtattgtttcatttaccctttcctccctttttgctcctgtcacatattacaccattctatatgcagaaacctcacaattcattttattattttgttttaaatggttattagtcttttaaaatgtatrtatttatgtatgtgggctcccagctttctgtagctgttgatttacccttttatagaaatttctctcagatattttgtcccaactccattcttcagtcaggtgttgctttgtcctaggggaaggccccatctgcctcaaggaggtcctctcagtttctttacctttttaactcagtctttggccaactactcct

SEQ ID NO: 398129 - DNA, 515 bp, Homo sapiens
gttctaaacctattgaaaataagatttaaatacagtctttttttccatccaacttgcatgttactttttttttctcgatgcaggtaagtgaggttcgattaggtccttatatcttaatcgcttatatcttctatggttacatatacactttagtaaacgtcatttctttttccttttaatgttgtctatttacrtgtgacacttgctattcccttatttattttacaataaataaattattaagctattcaaacttattttctgtattttatattgttgcacctattcttattcctatttatcttaaacttattagtaacctatttcaaaggaaagtaaatggaaaatagcattcacttatttgaataacaaatggagcaatgaagaattccaggtataataacattatggatattcagtttttggaaaaacattaatgtataagaattcaagttgtggcaaaatttaaggttacattctcagtaaaccacagagatagatagagaagtggaatc

SEQ ID NO: 398130 - DNA, 532 bp, Homo sapiens
gtactgttttacaggaagttctaacatgagaagataacttaattaaggcaaataacacagtaaaattgcttaaaagaggaggaaaattttcatatgaaatcatgaaaaaaattggatttttacattttgaaattgacaataaatttatttcatcttatatttaataaaatatctcataattgtcattaagttctgtcttttcaaagaataatgaattaaatgctattttctataaaaatgtatgataatggtatgacataatggaattctttactttatttggactttgtcaatgtgactgtaagagattcatttttataaaagtatttgaggttaatttatttttttcaaggtcttgtcttgatcttttaatgtcttaatactttccatttagaatgttttgtgttattatccccgttgacytcatctttttctctttatcacttttaatttatctaactgctgtatcttcatctccgataccatgttcaaacatttcatgaaatccttcgtttatttttattgtattact

SEQ ID NO: 398131 - DNA, 555 bp, Homo sapiens
caaaatacagtgttttacaatttttgatcttagccaatgtgacaastaaaaatatgaaacatcactgaagcttcagtttgcatttatgtgtttagtgtgattgagattgttttatgttcactcatgcttaaatgccatagtattttctcttctggaagctgtgtgttcacatcctatactgattgtaaatattgaaagcttaaaaatggatttgtgcatctgcaaaattggtgaattatttacaagcatctatttcccactaggtccgcatttccattattcacatatctttcatagttggttaagtacccttttgttgcttactgaagcaaataataaaatcagttttgagtttggaaagataacttatggaaaatatatttcaccacagcagtatctgattccagtggctgagaaaaagataatttaatagcaaatacataattacatattaaaattcaaaaaataggaaaaaggtaccattctaatggcaattaaataatttctatagttccagaatacaacacatacatatgacgttacacttgttttaat

SEQ ID NO: 398132 - DNA, 666 bp, Homo sapiens
tcggggtccctgacttcccgcaacaattcttttttatggctgcattgtattttattgtgtatatgtactgcattttctttatccattcacctgttaagtgatgcttatcttgcatccaaatcttggctattgtgaatagtgctgcaataaacatgagtgtgctgatatctccttgatatactgatttcctcttttgggtatatagccaaaagtgggattactggctcatatggtagctttatttttacttcttaactccaaactgttctccatagtggttgtactaatttacattcccaccaacagtgtacaaagattgcctttycttcacatccttgccagcatttgtttttgactgtcttttggatataaaccattttacctggggtgagttgatatctcattgtagttttgacttacatttctctgatgagcaataattttgagcaccttttgatatatctgtttgctgtttgtatgtcttcttttgagaaatgtctattcagatttttgcctatttttaaatcagattattagattttttttcctatagaattatctgagctccttagatattttggttattaatcccttgtcaaatggatactttgcaaatattttcttctatagtgagggttgtaatttcactttgttgattatttactg

SEQ ID NO: 398133 - DNA, 617 bp, Homo sapiens
gttcactttgggcatatagaaatgctaaggattttttgtatgtttttttatgctgtaaacttgaatttgtttatcagttccaatatatttttgatggagtctttacatttttttcaaacgtaacattgtattatctgcaaacaaggattatttgacatcttcctttccaatttggatgccctttccttttttctcttgtctgattgccttagctaggacttmcaggactatgttgagtaacaacagtgttgaaagttggcagttggcatttatgtcacattccagatcttagagcaacagcattctgtttttctccattcagtaagatactctacatgaatctgttgaacatggatttcattgtattaatgtatgtttcttctataccgagtttttgagagcttttgtcataaagggatgttgaattttatcaaatgcttgttcagcatcaattgaaatgatcatatggcttttctccttcattctgttgatataatgttcacattacttgatttacatatgttgaatcattcttgcacccctgggataaatcccacttggtcatgataagtgatccttttaatgtattattgaattcagtttggtagtattttgtt

SEQ ID NO: 398134 - DNA, 506 bp, Homo sapiens
ttttgtatgtttttttatgctgtaaacttgaatttgtttatcagttccaatatatttttgatggagtctttacatttttttcaaacgtaacattgtattatctgcaaacaaggattatttgacatcttcctttccaatttggatgccctttccttttttctcttgtctgattgccttagctaggacttccaggactatgttgagtaacaacagtgttgawagttggcagttggcatttatgtcacattccagatcttagagcaacagcattctgtttttctccattcagtaagatactctacatgaatctgttgaacatggatttcattgtattaatgtatgtttcttctataccgagtttttgagagcttttgtcataaagggatgttgaattttatcaaatgcttgttcagcatcaattgaaatgatcatatggcttttctccttcattctgttgatataatgttcacattacttgatttacatatgttgaatcattcttgcac

SEQ ID NO: 398135 - DNA, 610 bp, Homo sapiens
gcgagggtcagtggtgtcgtagcctgctgccgccacacagagggatttgcagggaagggccttagccaggcatgatgtgggagcgttggccctggcattcccgggtcttcatgagcttaattcagcaggggctccttccttcagtgatggaatctggagtttctgactgattcttaaccaactcaaaattttaggcagaaagctagctccaaggctgaggcagccctgaatgtgcctaggccaacagccagcgagctcctggccgggagcctggtaatggggatggctggtaaaggctgtgcgaccctgcctccctcccagaagggcgaccctccagccccatgtccaggctctcccatcttcccagctcsggccacacataggcagcagctgcccccatgctctgtcccagagacggaacacactggtcactgggagattagcctccctcattcattttcccgatagaatatgatagctgaggtagctggaagagtatggtcaaggagctcaaggcagctctttcactcaggagcctgccagcgtagggcaggggaagtcagtgccctcccagatggaaaaggtacctgcggtggtggggggaggggga

SEQ ID NO: 398136 - DNA, 576 bp, Homo sapiens
tgtcacttttagccaggttaattccatttgacatagtaaatccacttcctggaatctaccctactagtaaggagacagttccctcattctcactccaaaatcaaatcctctcctgattatttagtgttccaggacagtttgccaatacttaaggacgacacacgtcgtgggaatgtcagcctcctcgtattctggacagttcttwttttttagtgcaaatatataaattggcattcttgtccataggtcagtatcctcgggtaagtccatctgaagcagtcctgaagatagatttgaactgggtttactgacaagtcagtttctaataacccatcatcacaaaagcaagacccagggccttggaagagttttctaaaataataatactcagagcaaagccatggcaaccagcccctctcatggggactgctcaacatccctgcaggcaatgtattggcaccttctgcagtaactattcaattttacaggtgaatctttcatacagagaaacttgatagccatagatatcatctcagagtctggattttttaaaacggaaaatcttctttcttgaga

SEQ ID NO: 398137 - DNA, 543 bp, Homo sapiens
aaggggacaagtctaagatttcagaacattagttttccttgcattttacagaagcaaattctctctcaatgaaaattcaccaaggtctgaaaaaaaatggaaagcatataaatcttgtcttaaaaagtttgatttgtgacttcagggtttagcaacaaatctatcgtaaaaagatttcatgttgtcattgtttaaagtccctcatattaaatatgtcatctctaatggtaagacaggtaaatttaaaattgaytttgaattgaagaaaattggaaaggaatttagtgaaattattatactgtcaagaattcttcacattctcaataattcagaggctaattattctgttccgaaattgttcagacttggtgttctgcatcctcctgtggcttttctcatttgaccacctcattagtgtctcctttgaaaaatgtacagggcaatgaaaaggacactctcctctggcatgatgggcaaagaggatgggggcactgacctccatgagatttgaacattttccaggattctagctagctgcaaatt

SEQ ID NO: 398138 - DNA, 543 bp, Homo sapiens
aaggggacaagtctaagatttcagaacattagttttccttgcattttacagaagcaaattctctctcaatgaaaattcaccaaggtctgaaaaaaaatggaaagcatataaatcttgtcttaaaaagtttgatttgtgacttcagggtttagcaacaaatctatcgtaaaaagatttcatgttgtcattgtttaaagtccctcatattaaatatgtcatctctaatggtaagacaggtaaatttaaaattgattttgaattgaagaaaattggaaaggaatttagtgraattattatactgtcaagaattcttcacattctcaataattcagaggctaattattctgttccgaaattgttcagacttggtgttctgcatcctcctgtggcttttctcatttgaccacctcattagtgtctcctttgaaaaatgtacagggcaatgaaaaggacactctcctctggcatgatgggcaaagaggatgggggcactgacctccatgagatttgaacattttccaggattctagctagctgcaaatt

SEQ ID NO: 398139 - DNA, 594 bp, Homo sapiens
gagtcagacctctgaattcaatgactgatgttcttgtaaagaaagagagatttgaagacaacagacgagacacacaggagaccatgtgaagatggaagcaaagattatagtcatgttgccgcagccaaggaacaccaaggattgacagtaaccaccagaagctggaagaggcatggcaaattcttccttagagtctttgaatggaacatggtcctgctgaccacctgatgttgaacttttagcctcaatgactgtgagaaaactcatttatgttgttttaagacacgtagttgtggaattttgttgcagtggccttggaaaactaacacagattatatctagagatgtkcctcctagcacaagagttttggaggacacgaaagtgctgtctccactacttttggaaaaggtaagatgtaaaaaaattgataaacaaaaggaggaaggctctcatttttgattggatggacatagttccatgtgtatatctgtatttccacctctctaagcacaaatctctttcacactctagttgtttttttatcttgactcttttttacactctaaactctaaagaggcagtataaaggtttg

SEQ ID NO: 398140 - DNA, 389 bp, Homo sapiens
atattctagtttcatagaagagaaattaattcattatgtagatagactcctgagggaattaggaattaattttcatagaacatctagttgagaaggcagagcaagaccatggtcagaccaaacaccacacaacttccgttctgttttttggtgccctgattttaaacagcaatcaccaggaatcaccagtcctgagaaatgcattcaatatgaaatgaagacaaaaccaactggtraaaacttagtaacttagagaaaactgaaactatgactcctttcagggcaaagaaaacatttaaaaaatgaagttattatcaccagagaaaatttgtttaaatgctgtattcatgaaacagtggtaggttgttcttaaaagaaacttttagaga

SEQ ID NO: 398141 - DNA, 662 bp, Homo sapiens
tttctggcccttttccaggtgatatatcttcagatatttgcagacaattatcatatcacatgatctgacctacatgaagtgtaaatttcttagaacatggtctgcttcactttagatatttagttgtactgccagattaacaatcttgcctgaattaacaaacaaattcaaataactgatctacatttctgtaaatgactatttcatcaaattgaaaatttactactgcagtaaagccaaatatctggacaaataagttttgcctgaattgcatggagagtttgggattgttgttatataaacagtatctagaccatatatgttacaaaactataagcaattctatatttttattgtttttacctttcttcataaaaagtattgtctaaatcaagttattgcatcaatccatatacaattcaawtatgaaattctcattcattgatttttatattatttgtacacaaacagaatgtaacaaaatgtatgatacttatttctgtatttccaagatattagtattcaaatatcgttctaccagtacattctcagattctctttgaaattgaagttgaatagaatgccagatttatctcaggtgcaaaaatatggttgtcaaataaacaaacaaaaagaactaacacaaaacagagaattaagaa

SEQ ID NO: 398142 - DNA, 475 bp, Homo sapiens
tgtagaaacctattgaaatgatagcatagagagcaaactttagtgcatgtcaactaaaaaaaaaaaaagaaaatgaaggatttaaggatggaatgcaaactttgacaaaataacccaactgtagtttaaatgtatgaaataaccactctgaagagggtgagagaaatctgtaagactaaaggcaaaaaataactgtataaaagctatgtattctagttgaaaagttgtttcccccaggagtacargttaacaattctgacaccattgtacatttatgctggaattgaataattaagtaaatggatggaagacagagcaagccatgtttctcactgcttcagggagaggttaagacaagcaggaggagaatgttaagctgatctatgtggtaatggagtagagttgccaacatcagtaagaactcctgtttagataaatataaatggttacatataaaaataaagatatgtgtgta

SEQ ID NO: 398143 - DNA, 617 bp, Homo sapiens
aataaacaagcagatgaaaattacgtgacaaattttaatttcaacctatttaaaaacggatattgtgagatccttyattttaaatgttctatttatgtaagtgattttatgacaagtgtgataaatgcacaagtctttgaaaagctctatataagcatgagagatttttatattgaaaggaaaaatatttaacttgaaccacactatcgatacggtttaaccttgtgaaaattgcacagctgtctataagtcattaaatttctatctataagtcattaaaataatcactgaagtataattattctatttttttggcttgatcttcagaaaatcagaacatattgtggagatttacatattttagaaaagtcattatggtaagtttctcatatttaccactgatggtattccaaaaggactcctcttcagaggttttcttcacctatgttttaagttctgaataattatttttccattgtaaccatattctattaacattttcttatgatacaataaaaagaaaaacattcaatagctctaacccaaaaggatagcatgggtccatactgacaggctacaaatgagcatttcttttagtattttagtttgttttacat

SEQ ID NO: 398144 - DNA, 508 bp, Homo sapiens
aatactgtttatatgtgaatttgatcttgtcattatgatgttagctgattattttgcagacttgtttatgtagttgcctcatagtgtcattggcctgtgtacttcagtgtatttttgtagtggctggtaatggtttttccttttcatatgtagtgcttccttcaggagatcttgcaaggcaggcctaggggtgatgaattycctcaccatttgcttgtctaaaaaagattttatttcgggctcagcacagtggctcatgcctgtaatcccagcactttggaaggccgaggtgggtgtcacctgaggtcaggagttcgagaccaacctggccaacatggtgaaaccttgtctctactagaaatacaaaaattagctgagcatagtggtgagcacctgtaatcccagctacttgggaggctgaggcaggagaatcacttgaacctgggaggcagaggttgcagtgagccgagatcatgccattgcactccagcctggtcaacaagagaga

SEQ ID NO: 398145 - DNA, 513 bp, Homo sapiens
caactcaccttgcctctcagcatgctatgtcatccagaacactgtcagaattaagtagttaatacaggtaactgtgatatggtttagctctgtgttcccatctaaatctcacatcaatttgtaatccccacacattgagggtgagacctggtkggaggtgattggattatggggtcggttttcaccatgttgttcttgtgataatgagggcgttctcaggaggtctgatggttttaaaagtggcagtttcccctgctctctctttctcttctgtcaccttgtgaagaaggtgcctgcttccccttcaccttccactatgattgtaagtttcctgaggcctccccagccatgttgaactgtgagtcaattacatctactttctttataaattatccagtctcaggtagtatctttatagcaatgtgagaacagactattacaacatgttacgtaacttatgtgagttttagttttcttgtttacattaaagggaaaataatgactattctcctg

SEQ ID NO: 398146 - DNA, 600 bp, Homo sapiens
attccattgtgataatatttttatttgctctattttagggttgtccttaatcacttgctcagacaaaaacaagtctcctgaaaaactaaagattcaaatgggtaggtatggccttctgaaaattaccaagaaaataaaattttacaagctatctacaccactaaggacgaattacatctgttaatacctgtttaaaaatagactgtttgaaactgactttctttttacgaaatagtcattgaaagtcaagagagatatagttttaccaggtaagattttgaaataaaaatkgtgacacatgaaaaatggattaaggagtttaaagagtttatgtggcaaaaatgcaaatatttaaatttaagaaaattaagatgaggagaagacattgtgatcaagtagtgtaggaaataagaaattaagtctatagctggatactagatttaaaacaatgttaaataaatacaaacctcactaatttgtctatgatattaaaaaaaggaattatctttaatttcagtagaaataacataccaatatgaattacagatagtctaataagataaaaggaagaaatctgatacacagtgctggagtaattcc

SEQ ID NO: 398147 - DNA, 605 bp, Homo sapiens
cacaaaccactgtatgtggccatgactttttttaattgacaaataaaaattattgaatatatttatggtgcataacatgatgttttgaaatatgtatacattgtagaatgtctaattcaacctgattaacttggtatacttgcattatctcccatacttatcatttttgtgtgttgagaacacttaaaatctactctcagcagttctcaagtatacaataaattaactatagttaccatgttgaacttttccctcctaactggaactttataatactcatgagcctggttttttgtttctcttccctttgttgcaatgtcacacttgcttttggttagaggatacaaatgtcttctcctcatcattgtgacaaggggaattaaaaaaaaaattcagaaaacactccatttattattattttttaatcctctagggggcagaaataatcaaaggagaastgctgctcagcagaatcacatcgaatgaaatcataattctcatggcttctattaacatgtaaataaataattcttaaatctagagctccagctcacattatattgctggacttgtgactcataaatcttattaaatacaggtatgtg

SEQ ID NO: 398148 - DNA, 524 bp, Homo sapiens
gccttattgctgataggacaaacattttagtggtctggatggaatatcaaagcagccacaacattcccttaagtcaaagcctaatccacagcaagaccttagttattttcaattccatgaaggctgagagaggtgaagcagctgcagaagacaagttrgaagctagcagaagttggttcatgatgtttaaggaaagaaatcatcttcataacataagagtgcaaggtgaagtagcaagtgctaatgtagaagctgcagcaagttatccagaagatctagctaagatcattgatgaaggtggctacactaaacaacagattgtcggtgtagacgaaacagccttctgttgtataaatatgccatctaggactttcatagctagagaggaaatgtcagtgcctggcttcagagtcccaaaggacaggctgactctcttgttagtagctaatgtagctgatgactttaagttgaaggcagtgctcatttaccatacaaaaatttctactgcccttaagaattatgct

SEQ ID NO: 398149 - DNA, 585 bp, Homo sapiens
agtggcttttggaacaagaggaaacatgtttgtgggacacctaggtgacctctgccacatttgtcaaaaaacaaactaaaatgcttagtctattgaagaaaaataattagaacttttcagtaagtcttttagtctgacacagctcattattctcctctgtgcctgtctaatctctcctcttagaaaggaacatactggatgaaattcagctgggaarctttggggccctgcctgtcatggtggtgaggaaattcatgcaaaggctgaagactgcaggactcagggtgttttagaactattacaagaattttttaaaattaaaattggctgggtgaagtggttcacacctttaatcgcagcactttgggaggccgaggcgggcagatcacgagatccagagttggaggccaacctggccccaacatagtaaaaccctgtctttactaaaaatacaaaaaaaaaaaaaaaattagccaggcacggcggcaggtgcctgtaatcccagctactcaggaggctgaggcgagagaattgcttgaacctgggaagtggagatctcaccactgcactccagccagaagccag

SEQ ID NO: 398150 - DNA, 585 bp, Homo sapiens
agtggcttttggaacaagaggaaacatgtttgtgggacacctaggtgacctctgccacatttgtcaaaaaacaaactaaaatgcttagtctattgaagaaaaataattagaacttttcagtaagtcttttagtctgacacagctcattattctcctctgtgcctgtctaatctctcctcttagaaaggaacatactggatgaaattcagctgggaaactttggggccctgcctgtcatggtggtgaggaaattcatgcaaaggctgaagactgcaggactcagggtgttttagaactattacaagaattttttaaaattaaaattggctgggtgaagtggttcacacctttaatcgcagcactttgggaggccgaggcgggcagatcacgagatccagagttggaggccaacctggccccaacatagtaaaaccctgtctttactaaaaatacaaaaaaaaaaaaaaaattagccaggcacggcggcaggtgcctgtaatcccagctactcaggaggctgaggcgagagaatygcttgaacctgggaagtggagatctcaccactgcactccagccagaagccag

SEQ ID NO: 398151 - DNA, 469 bp, Homo sapiens
gagattgtgctgatactttaaaataatggaacttagacatacctggatagaaagaagagaaaatgctctgaacttggagaaaattgattttatttttttatttacagagctacagtttgaagagagaagcaaaattgaaaaattaatgttaaaactgacattaaaaacttctatttttaaaggtgaattaaagtcttaaaggaatctgaaagtacagtgaaaagagattgaaataatatggtagtgtaaactcaaaatatcaatatactgtgatagaaaggacaaagratttggagttactgagactgtaagttaaagcctgctcttatctgttaactgggacatgatacttgagtcttagtgccctcatttgtactgataacagtttattatcttttcatttttttcagatttgaataagagaccataagtaaatttcctgagacaggatctcaaatcaattttttaa

SEQ ID NO: 398152 - DNA, 581 bp, Homo sapiens
atagatttgaatatgattctaggaaaagcaaagtcattatatggtaacttaaagcaaaaaaaaaaaaataaaaataaaaaggtaaaagatctaaagttaaataatttaatgccagaaagggatggtttgataattttgaaacagatttcagcaaaaaaaaagtcaagataacaaacaaaacagtttatgctgaccaagagacagcagacaagttcccagatgttattaagaaaaccattraggaggaaggatgttggtctgaacaggtttttttatgaggatgaaattgctcaacctggaaaaaaaattggcacaaaggacatttattagtaaggaagagaaatgggcactaagatttaaagcaggaagggataactgacctctaatatgttgtgcaaatgccgctgggtttctgatgaggactgctcttatctgtaaagctgctaacccctgagtcttgaagaacaaagataaacaccagccgccagtcttctgactgtacaacaagttggcctggacaatcaaaactccttcttaactggttccattgatgctttgtccctaaagtcaggaagtacctt

SEQ ID NO: 398153 - DNA, 581 bp, Homo sapiens
atagatttgaatatgattctaggaaaagcaaagtcattatatggtaacttaaagcaaaaaaaaaaaaataaaaataaaaaggtaaaagatctaaagttaaataatttaatgccagaaagggatggtttgataattttgaaacagatttcagcaaaaaaaaagtcaagataacaaacaaaacagtttatgctgaccaagagacagcagacaagttcccagatgttattaagaaaaccattgaggaggaaggatgttggtctgaacaggtttttttatgaggatgaaattgctcaacctggaaaaaaawttggcacaaaggacatttattagtaaggaagagaaatgggcactaagatttaaagcaggaagggataactgacctctaatatgttgtgcaaatgccgctgggtttctgatgaggactgctcttatctgtaaagctgctaacccctgagtcttgaagaacaaagataaacaccagccgccagtcttctgactgtacaacaagttggcctggacaatcaaaactccttcttaactggttccattgatgctttgtccctaaagtcaggaagtacctt

SEQ ID NO: 398154 - DNA, 502 bp, Homo sapiens
ttctgattattcaagactactttgaaatgcttttacagcatagatagacccttgtaggatatgggcactgagactacaacaaatggtgggggaagaattggtaccatatagaaatatttgtagataaattaaaaagcaaaaatgttgacagaaattatgatgtatttccataaagttacaccacgtgcctstctctcctgtctcttccttctacctcttcagcctctaccagttctaagacagcaagaccaaaacctctcttcctttttctcagcctagtcaacgtgaagatgagaatatagactttcatgatgatccactttcacttaataaatagtaaatatattttctcttccttataattttcttaataacattttcttttctctagctaactttactgtaagactatagtacgtaatacatctaacatacaaaatacatggtaataaagtgtttatgttttcggtacggcttcttgtcagcagtagtctattagtag

SEQ ID NO: 398155 - DNA, 523 bp, Homo sapiens
tgaacatttaaaataggtacagttttgtatatagaaattataccccaatttaaagcagtgaaaaagagctaacacactacatattgggataattaatatattaaatttgctaacaggtwcccctttatgtagtacgtgtgtaattgcttcaaaggcatctcattgcgaaggacataatggtgtaagttaggaattcaatttaaagccctgtttgctatatgaagatactgggctcagaaatgcaactaacttcctcactttatgcctctactaagcagtatcactagaaagagaattgtattctttcagcttcaatctcaagaggctaccctcccccccactgtgggatgtgcaccatgtgatattttctggatatatctgtatctttgtgtgactttgagagttgatgagtgaagggcgtgaattctttctacagacactagtagttaagtctcttcactgactagccagcaagcacgagcatcaaaaagctaatggagtcttagagtatgatgtaatgatt

SEQ ID NO: 398156 - DNA, 501 bp, Homo sapiens
tatagccactatggaaagcagtatgaggttcctcaaaaaactaaaaataaaactgccatatgatccagcaatcccactgctgagtatatattaaaaataaaggaaattggcatatagaagctatayttatacttccatgtctataacagcactattcacaatagccaaaattcaacctaggtgtccacaaatgaatgcatggataacgaaaatatagtacatacacaatagaaaattattcagccatagaaagaatgaaattctgtcattttcagcaacatagttgcaattggagtcattatttaagtgaaatacaccagtcacagaatgacaaatatcacatgttatcactcacttgtaggagctcaaaaagtaaatctcatggaggtaggcagtaaaatggtggctaccaaagactgtgaagggtatgaggcaagtggggcaatgaagagagggtacaaaaatgcagttaaattgaaagaataagttctagtgtttgat

SEQ ID NO: 398157 - DNA, 501 bp, Homo sapiens
tatagccactatggaaagcagtatgaggttcctcaaaaaactaaaaataaaactgccatatgatccagcaatcccactgctgagtatatattaaaaataaaggaaattggcatatagaagctatacttatacttccatgtctataacagcactattcacaatagccaaaattcaacctaggtgtccacaaatgaatgcatggataacgaaaatatagtacatacacaatagaaaattattcagccatagaaagaatgaaattctgtcattttcagcaacatagttgcaattggagkcattatttaagtgaaatacaccagtcacagaatgacaaatatcacatgttatcactcacttgtaggagctcaaaaagtaaatctcatggaggtaggcagtaaaatggtggctaccaaagactgtgaagggtatgaggcaagtggggcaatgaagagagggtacaaaaatgcagttaaattgaaagaataagttctagtgtttgat

SEQ ID NO: 398158 - DNA, 231 bp, Homo sapiens
ttgttttttattttgtggttttttttatcgagatggagtctcgctttgtcgcccaggctggagtgcaatggtgccaccacgcctgggtaattttwttttttatttttttatttttagtagagaaaggggtttcttcatgtttatcaggctggtctcaaactcctgacagtttttctctgaaaccgaaatgaaagtggatatgtgaacaggagtatccttgggtgtcaagtc

SEQ ID NO: 398159 - DNA, 528 bp, Homo sapiens
tttctttaatatcttttgtgatgatatttttatatgaaaatgctaaaataaaaatatgatttgagtataaatttaacaatataattgaatgggcaaatattgagaagtctctataaatatatgagttgttaaaatcctggctgacataagagtacacacagagagggcatctgaactctcgtgatttgaaagggtatgaatctcatgtgctctagtttttataagtttatatatttttctatatttttatatttatattttaatatatttttataagcaacatcataactttcttaattatcacattttttaatttaagaatttctgggttcattcatttgacgaacattaatgaattagaacttgctaactgaattaggacatastaagtgtcagataataacagaacaaaaggagaaaaagccatagtatctaccgtaacgaagctcaactatgttacttaatatgtatcttaattaatattaatgagcaaaatgaaccattttcttccatggaacggatcacagt

SEQ ID NO: 398160 - DNA, 591 bp, Homo sapiens
ataagaagatgaggaaggagtggaaggagcatgtagactaatggagccagcagaaaaggcccaggtctcagaattgaaagcttatattcattttaaccaggtttcaagaggcatagaccaccagctcatatgtagattgcattattactaytcatataaaaaagtgaggatttcaaatgagtaaagatgacaaatatatatatatatatataaaagattgctaatattttcttctgtagggagatcaagtagccactaagttaaacatcaaagttggattggcatttaacactgttttgatctaaggtagatataggtggaaaagagaatagataaccgattcagataatttttgtatctggtgatgacttttgccatacaatattctcctctatatattgtaactctgttaacattctacataatttaataggatagttagtatttgtctggttggcattttgatatattccagaacctcatctaaagtgctcaactgttgctgaaagactatacaagatcagaaaaataatcattaatgcctaaaggtatatcttctagactacatcctgtacaattaaaaatagaata

SEQ ID NO: 398161 - DNA, 587 bp, Homo sapiens
ctaactctattacaaatgtatgaagygatatcactgaagagggtgaaggaaaaggtgcaaacgtagctttggagataaatctgtctgtaaaactaaaggcaaaacgaactgcgcataaaaactatagtctagttaatgattatttccctcaggcatataagttaacaattcagatactgttatacatgtatactggaatcaaatgaagtaaatggatgatggatggtgggagacatgcttatactatctgaattatatagttcaggtaatataaattccacgaagaaaatgaaacagggtaatagtgtagactggactaggatgttttagatatggtgataagaaacaatctgtaaaaaattgatgtttgagagagaatgtagatgatcagaagttagctttatgaagagtttgaggaagggcatcccaggcaaaggaaatagaaacgtgtaaaacttgtgaaaaataggagctaactttgtcagctccaagagtcataaggagactgatgtgattaaaatgttttacatgttacaagacagtccgagttgacaagctcagtgtgatagctaattgtgtaaggcttt

SEQ ID NO: 398162 - DNA, 632 bp, Homo sapiens
actctgttttcaattaactcaacaatttatctgtgatgatttcatctaatctcttattcaacaaataatgtttgagtgtcaattaagtgccagggaatcttttaggaacagtgaatgcattgctttccttacagagctttcttcccagtggtgataaaaagataaacaaatgagtatgaattatgttgaataatgataagagctaagaaaagggagtgttaaataagagaatcacagttgtatacaggattttccagaggattgactgagaagttaacatttgaacaaagaaatgaagctggtgaatcagcaagccgtgtgatgactggagaagagcactccacacagagagaagaacaaatgccctagtgtgctctaggagactctctagtataytctacaaatggtcaagattccaagtgactaaagctgaatgagcacaaaacagtagagagtgccacacaggaataacagggtccactttacatagggccttggaaatcattatgtagaacttgatatttgttctgatttagatgagaagccactgaaatgaaaagagaagcaacataaccaaccttacttttgaacagggtcactctggctactgttgagaatatactgaatgtaca

SEQ ID NO: 398163 - DNA, 521 bp, Homo sapiens
aattatttgtttgatgttaatgtttcacctagagaatttgaaacaacattcaaaaagcttttttaactttatttctttgtgataagacttttatcacagtcaatagttctttaaaaatgcattataatagactttacattatttatagtaaaaacctagaaatactgaagataattaaaaatatggcttaataatttgaaaataatatttgtattttaaatatattgttatgctaaaaaggtagcattttttattaggttggtacaaaagtaattgtggtttctgtcactgaaagtaatggcagaaacctcaatttmttttgcaccaacctcatagtttctagtacattccttgctgaattaaagaaaattatttaaatgaatgaatatttagaacatatttgtgtctgaaactctagaaatttacactcatttaaacaagtaatgaggaataaaacataacatttcctgtttttatctacagaattatttattttttcttctcacctccttcctagatta

SEQ ID NO: 398164 - DNA, 426 bp, Homo sapiens
agttattttaagatattatttaatggaatttacataaaggctatgtagtcacatattattaagtttgtgagtctctgtgcctgtctgtttctatggacatatgtatgtatgtatgcatgtatttacttttgcctttgtcttcttagatattcctctatctgagaatttgactataacaagtactaacatttactcttttgtttttgctagctattcatgatactcagcagcaataggctgtatatgtattcttaactggataagcatatgtctgcttactgtatgagtatatatgtaagaacctttaaccaataaatagcatacaaactggtttctgaaccagattttgaaccatttcaaatgacaaaagtattgagtkctaccttagagccagtgacgcttagtaaaaccatttggtgacttcca

SEQ ID NO: 398165 - DNA, 607 bp, Homo sapiens
tgcctcatagttgtaacactctattttaagctgataactttagtttaattgcatacagaaactctaaatgtttatacccaccacrcagatgttttgttatttttttcaaaattttttcaaaatttttcttattttgtcttcttgcatttttgagttttatactctcttttattctcatgtactattctataccattgggagagtatactgaaattttcacagactttgtagaggtcgaatatttatgaaaatttctgtctttatgcattttaattccaagcatgccgttcttcttatatatcattatttaataatagctccaacagtttacctcaaaagttatatactattactgccttatgttagtatttgtttttttacacaaaaacttaccaattcccttactgttctattatttcttgtatttattaacctccttcatatcccaggaacccatgttttagaatttcacctaatgaagttgtgttagtagtgaaatatctagattttccttgatctgaaaatatctgtatttaatccctattattattattattgttgttgttgttgttattattatttgggatggtatgttactatgtgactc

SEQ ID NO: 398166 - DNA, 555 bp, Homo sapiens
aagtgagaacctactgtgtgtgtatatgtgtgtgtgtaaaactcatgaggcaaacaacatagtttgtccaataaattgaaaattattgtataagtagaattaaagtataagtagaaaatatttctacttttttctaacacttgctatggaccttgaaatctcctttcccactgtgtaactgattactgtaactgcttctaatttgagcccatgaatttgaatcgctttaaatgtcttcacatatttaattcaaagtttttctccttcccaaattgagtctagctttgcagtcctttccaccaggttgggtggggtagactcaagatctactctttcctctggatctcttcttttacctrtttctctacttgaaaatatacaggggaagaaaaggtaaaaatagccatacagagaggtcgttgtccctatcatgtggcatgacaccagttccccagctaatgagaactggtttttgtttacctctctatggtaatgctgggccttttaggagaaagatgtgtgattgtacaaagggtactataagatttgcacaga

SEQ ID NO: 398167 - DNA, 610 bp, Homo sapiens
tgtagtgcagtcttgacaaagccttggccaaccccatagggagctctggggtgaaaactgcccatcagaatgtattgccttgggaaggggtcgaccttggttgcaggcagcagaccctgaaggtgctaagagctggaggctatctgctaaggaactgggacaagtatcccagtgtcccctaaaaagtctacatgactattgaggtctgccctgtggaaccttaacactgtaaacttttgagatgagagaaaccttgctgaaagactatttctccctctcaattaagtatcaagcataattaagkgcaaaggtctattgctggtaagagcaacacctctccagtctcattgcctttgagcatcacagaaggaagcaggtcaaggtaaaaaacatgggagctgaagcccagcctcagagtagctggaagcttggcaaaacttgcaagcttatcagcagccaaagtaagtactgacaggatacattcatggatggacatgagcatttctagaaattttcaaaattatttagaaaagataaatctgtaaaaaaattagacatcctgactttggatcacaaagatatgaatattatgtataggcaagtcaaatat

SEQ ID NO: 398168 - DNA, 519 bp, Homo sapiens
ttaaaataagttgtttgaaggaatgcaaaaaaagtatcatacaatctattttatcagttttaagattcatttttcatattctaacattgaagaattatcttgttttttaatcgatggctttattaacactttctaccacctgctgtttgtagttgtaattaagttatatgaaagttttcctttgacatattatactaacatgaaaaaagtgtcagcattaaaacttcatataatttgatgaaatatgataacagagataagaagcataacatgaacataaggatagatataacagcaaaatgctgaaaacgaatttttaagaaattcaatgactattcatcacaaagcaatcaatcaaatgggaatatataaatgtgagtayaacatgagtaatgtgtctatctcagttgaaccatagcattgtgtgactatggagaaagaacaaaaccactttgactaagttcataaagaaaagaaaaatggccattattccctctattatttaaaactgtgccacag

SEQ ID NO: 398169 - DNA, 465 bp, Homo sapiens
ctatcattggagtaactccttttctgatttctcataagtaaaccaaaatttatcaaatgataataatcccattattcyttcagtgagaagtacctagtttaaatttacatggtcagaaatggtaaggtaaaaaacatggcttatttcaaattattttccaaaataattcttttaggtagaaaaaagctttttatattgtcatatcttgttatcaaaacgttggacctgttgatttgctttatttatggaaaatatttgttatataacctatatggcaaaacaagtccttatgctgaaatctatcaaaatgactttctataagaaaaaatatgactttatttttcatttaaaataagtgtgctaatttatgttcccatgaaaacaacctgtcttttaaactctaatcctctgagagagagagaaatcaaggaggccctggctgcacggctgcaataaagccctcta

SEQ ID NO: 398170 - DNA, 596 bp, Homo sapiens
tgtatgctggaaccttttggctatgtgaatagtctggaatgaagaggaagttgaaacaggagcccacttctaagtcagctgcatgaggccagttgggtgatgaagggaggctggacgaagagagtggaaaaaggatggaaagaaatgggccaacgttaaagaaatttaggaagtagacatacagaaagtgataatgtgggaagtcagagagagtgcagtttaggaaacatttgcattccaggcatggacaaatgggtagatagakagtagcacaccttccttggaacaggtaactcaggaagaaaaggagcttagaagggttggagcagatgaagtcagaatgagaattatctagttggaggtatctgtaagatctccaaatggatttgagagtctagggctcaagatgggaagtctcagccagagtcataatatttttcagagtggcagagaaacactaaagggaaagatttttcttaattccacggattgcctacctggttcaaagattagctatgaaagccacaggaaaatagatgctatggaattagaatatatttggcccagttgtgtctgaatgggaattatccccagat

SEQ ID NO: 398171 - DNA, 541 bp, Homo sapiens
tatatttgtgattccatgaggcaaaatagaaattctgtcaattcttactgtgttaagacggggcaggggtgctgatgaagttgatacattgtaaggtgggaggcagcrccaaaaactagaggaactctttgacatttctccctacaaaatatgtccagtcaaggcttttatgagaggataactctgtagtcaactctaacaaaaaagagaaagccaagaaaatagtgaaaatgtagtcatgatttgcggtttctgtttcttagtaagatcaggcacacataagaatttggcaattttcattagaaaaatgtagtgaaagtgccatgtagtgtatgttggactccttacatgagcaaccctttttcctggatcatggggcataattaaatgctccagagtaagccaaacctagattgcccactgaactctgtaaagaaatgtagacaagctctgtcaatacatgtagatatccaacaagttttatttctctgattgataacataatagaagtgtttgtttttatctgtgtttctgataatca

SEQ ID NO: 398172 - DNA, 558 bp, Homo sapiens
gatggtgtcatttagcaaatgattgctgaaatccaacactcaatgatgatctcatggcatgaagagtatgtactcttcttatcatacttaactattcattttttaatctattatctaagaacttttgatttttaaagtgaatgtgaaaggaaccgccttacaaataagctttcaatctaygcggtaaagattgttcatggagatttaaaagtactgaacaaatcgatagcaagaaaacaagtaatctgacctaaaagtggtcaaagaatctgaacagatatttctcaaaaaaagacatacaggttgccaacaggtgtatgaaaacatgctcaacatcagtaatcaccaggaaaatacaaattaaaatcacagtgagatatcacctcacacctgttacaatggctattatctcaaggaggaaagataataatctttggcaagaatgtggagaaagggaaacccttgtacattattggcaggaatataaattagtacatctattatggaaaatagggtggaagttcctaaaaaatgaaaaacagaattactgtatgattc

SEQ ID NO: 398173 - DNA, 558 bp, Homo sapiens
gatggtgtcatttagcaaatgattgctgaaatccaacactcaatgatgatctcatggcatgaagagtatgtactcttcttatcatacttaactattcattttttaatctattatctaagaacttttgatttttaaagtgaatgtgaaaggaaccgccttacaaataagctttcaatctatgcggtaaagattgttcatggagatttaaaagtactgaacaaatcgatagcaagaaarcaagtaatctgacctaaaagtggtcaaagaatctgaacagatatttctcaaaaaaagacatacaggttgccaacaggtgtatgaaaacatgctcaacatcagtaatcaccaggaaaatacaaattaaaatcacagtgagatatcacctcacacctgttacaatggctattatctcaaggaggaaagataataatctttggcaagaatgtggagaaagggaaacccttgtacattattggcaggaatataaattagtacatctattatggaaaatagggtggaagttcctaaaaaatgaaaaacagaattactgtatgattc

SEQ ID NO: 398174 - DNA, 582 bp, Homo sapiens
ttgtgcatactacttgtattataaatcatgtatctgaaataaacccaattgtttgcatttcrgtgtgttttcagagacatgaatctaatgaaaacatttgtaaaatttaaaatcaaaagttaaggccaggcgtgctggctcacgctggtaatcccagtactttaggaggctgaggtgggcagttcactagagatcaggagttcgagactaacctgtccaatgctgtgaaatcccatctctaccaaaattacaaaaaaaaactagccaggtgtggtggcaggtgcctgtaatcccagtacttgggaggctgaagcaggagaatcacttgaacccaggaagcagagccaaggttgcaccactgcactccaacctgggcaagagtgagactctgtatcaaataaataaataaataaataaataaataaataaataaataaataaactttaaaaaccttacctttgcagctctccaaaattataaagaggcagggaataggaagtttaattaaaattatttataatagttaaaaactgaatcagcccatacctaactttccatactcttgaatcacagaaatctca

SEQ ID NO: 398175 - DNA, 592 bp, Homo sapiens
atgaggggcttctgccccttacctgctggagtcttgttacagcccaaaggggttcttcttgcccactgcaagatgaagccagaacattgagacagcagtgttgctgtagagaaagggtttaattatcacaaggtaactaaacaaaaggatgggagatgtttttcaaatctgcctccccaagaattcagaagytagggtttttaagtgtacttgaaaacagcaggcagagggctgggaaactgaaacaattgattggctggggacaaaatcacaggggtctctaaactgtctttgaacagctgagtcagttcctgggaggggatttcaggatcatgtggcatctcttgatctcctgaaatgctaaatctgaaaaacatctcaaagaccagtcttttaggtttcacaatagtgaagttatccataggagcagttggggaagttacaaatatcacgacctccagttatgtgactctggggcagtaagcaacatatagaaaagcaaactaaacaagcaatggatggttatagttcaacctattctttagcgaagttgtaggcctctagcatcattctaaccttgttaccttttgtt

SEQ ID NO: 398176 - DNA, 637 bp, Homo sapiens
caccctttcgacgtgtacaatgcagtgatttttagtatattcacaaagttgtacaaccatcaccattatctaagtctagaacactttatttatttctaaaaatcaaccattagcagtaactccccatttccttcctccctggcaaacactagtcttactttctgactcaatacatttgccggttctgggcatttcgtatgaatggaatcatacagtttgaggccttttgtgtctgtctcctttcattgcacatatgttatcaagattcatatgtgtagtagcaggtatcagtgcttcattccttttttgtagccaaagaataatccatagtttggatatgccacattttgtttgtccatgcatcaaatgatgaacatttaggacaagcaacacattctatccgcaactgsttaagactcctagctcattctactcacacttcccctcatgacaggtggcatttggggagagttgacttggtgatacatttagtttgagatcagagcatatatggatgtggttcaccacctcttccatatataggttattattattctggctcctatggtttgaatatttgtcccctccaaaacttgtagtaaaacttaatccctaatgtggcaatattaaaaagtag

SEQ ID NO: 398177 - DNA, 619 bp, Homo sapiens
tggtgctatttaactcctccagggctggcgttttcatttaatacccgtggaataattaacagtgctgcatctgctctgtcattagtggcattyactgccatttggagaaagggctcttatcttcctcagtcattagtctcggggaggctattatgggggaaatggaggaggagaggaggaagtggggcgtgcaacttccctccccttgcctggagaactggcgcgtggtgcggggagcagccgatcatcctatccaatggtccaaacctcttggctgtatgaactgagcatgcaaagccaagaggggaaagaacctgcccacggtcccccacaggcttgaggcccagcagaaggcggctctcccacttctttctcaggtctgcaagcccaggcctcggagccctgcagctttggatctgattcccagctctgccctgtgtcagtggtatgaccttgggcaacttcttgagctccctgagcctcagtttccttattgaggatcctgggacaatgcttgtgaagtactggctcagtgcctaggtcacaggcagagcccaagactgagagatgtacatatcagatcattctgtgtcattatgctgaaccaacctgctaaaaa

SEQ ID NO: 398178 - DNA, 619 bp, Homo sapiens
tggtgctatttaactcctccagggctggcgttttcatttaatacccgtggaataattaacagtgctgcatctgctctgtcattagtggcatttactgccatttggagaaagggctcttatcttcctcagtcattagtctcggggaggctattatgggggaaatggaggaggagaggaggaagtggggcgtgcaacttccctccccttgcctggagaactggcgcstggtgcggggagcagccgatcatcctatccaatggtccaaacctcttggctgtatgaactgagcatgcaaagccaagaggggaaagaacctgcccacggtcccccacaggcttgaggcccagcagaaggcggctctcccacttctttctcaggtctgcaagcccaggcctcggagccctgcagctttggatctgattcccagctctgccctgtgtcagtggtatgaccttgggcaacttcttgagctccctgagcctcagtttccttattgaggatcctgggacaatgcttgtgaagtactggctcagtgcctaggtcacaggcagagcccaagactgagagatgtacatatcagatcattctgtgtcattatgctgaaccaacctgctaaaaa

SEQ ID NO: 398179 - DNA, 577 bp, Homo sapiens
tggttcatctttcattcctgattttagtcacttgaacattctctcttctttttctggtcatctaaccaaaggtttgtcaattttgttgatcttttcaaagaaacaactttgattttcgttaattttctctattgtttttctatactttatttcatttatttttactgtaatctttattatttctttgcttctgcttgctttcacttcaacttgcttttctttttgtagtttcttaaggtatagagttagggtttggatttacaatctttctcctctttcatgggcatttatagctctaaatttccctctgagcactgctttgctgcagttgtcgcataagtttggtgtgatgtgcgtgcatttccgtttatttcaaaatgtcttctaatttcccttgtgattctgctttgaccatttgaccatttyggggggagtgtattgtttaatttccacatttgttaattctctaaattttcttctgttagtggtttctgattttattccattctgttcagaaagcatgttttatgtgattttaatcctttaaagtttatcaagatttgttttaagccttaat

SEQ ID NO: 398180 - DNA, 458 bp, Homo sapiens
actaaaacctataccttacaggaggggcagtaaatcatctccagctgatgacctgacactgacaccacgcagaggtttggtcaagtagccagataccatgggaggaggtggaagtgmtgagaaaggcccacccctgagactcaggcacacagggcctacataagactcaggctagactgagataacagtgaaacacaggctgtttcccaccatcagcctagcaacaagcaataagcaggagcaggaaatggctgagggagagacacagacatggtgaagatatgcccctatttggtgcaggaaagcaagcatggctgaaaggaaaatgggagcaaaatcaatgagaaaaacctctggcaatccagccccaacactaagcagaagtcaaagcagccacctgactagagtaacttgaagtggatgcactgaaggtcacattagtcactaggaaactccaa

SEQ ID NO: 398181 - DNA, 557 bp, Homo sapiens
gtaaataatagcccaatggaacaaaacaatgtccaggcctacacatgtacaattagctgattctcagccaagacttctggcaattcagtgggagaagggatggcatttcaatragtggtgctgcatcaattggttattcatatggaaagaaaacaagacaatcttgtcctctacctcacaacatatgctaaaatcaattccagataaaccgtacatcaaaatttaggagcaagaacaataaagttttaaaagaaaacaagagaagatccacatgatcttgaagtaggctaaggcaaagcactgatcaaaaggaaaaatgtaatgaattggactattttaggaacttctactcttcaatgatgccattaagagagtgaaaaggtgaaattggaaatgtacatacatccagcaaaagatttttatccaggaaatttcaattactcccacaaataagaataaaaataggcccacagaacagaagaattagacatagatttaaacaggtatttcactacagaggacatccagatggccaacaagcatataaaatttataag

SEQ ID NO: 398182 - DNA, 557 bp, Homo sapiens
gtaaataatagcccaatggaacaaaacaatgtccaggcctacacatgtacaattagctgattctcagccaagacttctggcaattcagtgggagaagggatggcatttcaataagtggtgctgcatcaattggttattcatatggaaagaaaacaagacaatcttgtcctctacctcacaacatatgctaaaatcaattccagataaaccgtacatcaaaatttaggagcaagaacaataaagttttaaaagaaaacaagagaagatccacatgatcttgaagtaggctaaggcaaagcactgatcaaaaggaaaaatgtaatgaattggactattttaggaacttctactcttcaatgatgccattaagagagtgaaaaggtgaaattrgaaatgtacatacatccagcaaaagatttttatccaggaaatttcaattactcccacaaataagaataaaaataggcccacagaacagaagaattagacatagatttaaacaggtatttcactacagaggacatccagatggccaacaagcatataaaatttataag

SEQ ID NO: 398183 - DNA, 557 bp, Homo sapiens
gtaaataatagcccaatggaacaaaacaatgtccaggcctacacatgtacaattagctgattctcagccaagacttctggcaattcagtgggagaagggatggcatttcaataagtggtgctgcatcaattggttattcatatggaaagaaaacaagacaatcttgtcctctacctcacaacatatgctaaaatcaattccagataaaccgtacatcaaaatttaggagcaagaacaataaagttttaaaagaaaacaagagaagatccacatgatcttgaagtaggctaaggcaaagcactgatcaaaaggaaaaatgtaatgaattggactattttaggaacttctactcttcaatgatgccattaagagagtgaaaaggtgaaattggaaatgtacatacatccagcaaaagatttttatccaggaaatttcaattactcccacaaataagaataaaaataggcccacagaacagaagaattrgacatagatttaaacaggtatttcactacagaggacatccagatggccaacaagcatataaaatttataag

SEQ ID NO: 398184 - DNA, 589 bp, Homo sapiens
tcaaagactcaagaaggtaaacttgagacccaaagaaatttccagcataggccatttctttggtttaaggcattgaagggccagccaaatgggaaggtaatggtaatcgttttctcttgctggtgaaacaaatttccacaaacttagctacttaacacaacacaagtttattatctcaccgttctgtagctcagaagtccaggttgactcagggggttttttgcttagagtcttatcaggctgagctcttattggaagattctcggaaaaatctgcttcttcatgaatggtggctgtggcagaatcaaattccttgcagttgtaggactgaggtttyctggctagctgcccgcaagggatgccctctgctcctcaggcctctccggtctctgtgcctgggcccaaacatctcagagccagggagggtacaacgcatcataaccttctgattttcccttctggtgcccccgctcttctggctccagccagagaaagttatcattttttaaaggcccacgtgattagatagggaccgctagataatccaggataatctccatcttttaaaattgttacaggttgaactcta

SEQ ID NO: 398185 - DNA, 525 bp, Homo sapiens
tttcctttgatcctacacaggagttgtttccagggggccacccttactgagctgctgaccccaagttctgttttagtcacagggcttcttttgtttgttttgtcatttggctctggatgtgtgtgaaatcctaattcaggccccaratagctgaccgactaaaacctaatgaaacaaaaagatggaggaaatgtgccctaaaacagttgttgagtaaccccaggtagcttcagtgcatgccagctttaagcctataaatacatcgatgggcgcctctttctcttctgaaacagcaagccccgaggattggagccagccagtgatattccgttatactacattttcagtttcagggaatcttttgagcaaaactggaccttttgggaccaacctgtcatactcgagaccatggcgaaacctatctgttcatgccaagagctcagcgtcctacctgagtcctgctgaattgcctgttctcatctcctgccttctaaatcactcactggtgcttcctgtcatggtaac

SEQ ID NO: 398186 - DNA, 577 bp, Homo sapiens
ttgaagtaacaagcccgaagatacacagctaataaatcatggaaccaggattatgaacccaagaatttaagaattctggacccagaggccacatcccaaaccactttgcaataatgccactctccccgcacaccatttgtttaacgctcaccctcctgggaagtagctgatcttaaccctgcaggatagacaaagaggatgagtttcacagaggctaaataacttacccattttacagacaaggaaactgaaattcacaaaagtgagtttagttctacaaacatttgcacagcaccttgtacatgccaggcactgtgcaaggaacgtgggatacagagacctcagtgctccttccacactcagcttctgkatgtttatatgggtaaaacctttctgaaggcaataaggtacactgtcaaaagcattaaaaatgagcatactttcgactctaaaattcccactgcagaaactgatcctaagaaagtaacagcgaatgtgacaaagaagctcacggcagtgttatttataagagtaaaataacagaaataaactaagtgctcaacaataagagattaaa

SEQ ID NO: 398187 - DNA, 577 bp, Homo sapiens
ttgaagtaacaagcccgaagatacacagctaataaatcatggaaccaggattatgaacccaagaatttaagaattctggacccagaggccacatcccaaaccactttgcaataatgccactctccccgcacaccatttgtttaacgctcaccctcctgggaagtagctgatcttaaccctgcaggatagacaaagaggatgagtttcacagaggctaaataacttacccattttacagacaaggaaactgaaattcacaaaagtgagtttagttctacaaacatttgcacagcaccttgtacatgccaggcactgtgcaaggaacgtgggatacagagacctcagtgctccttccacactcagcttctggatgtttatatgggtaaaacctttctgaaggcaataaggtacactgtcaaaagcattaaaaatgagcatactttygactctaaaattcccactgcagaaactgatcctaagaaagtaacagcgaatgtgacaaagaagctcacggcagtgttatttataagagtaaaataacagaaataaactaagtgctcaacaataagagattaaa

SEQ ID NO: 398188 - DNA, 587 bp, Homo sapiens
cctttcaaactgccttaattattcttggacttaggtcaagctaactttggaagacgtttaggttacaggctaaatgataatagcccttcccccaaaatcaaccatctttgtaaagctaatgagagaccagggtagcgggaggagaggagcctcaatttggtaaaatgtagactggtcacaagatatgcaccttcctcagttactcctgcagacaacatcactaatgtagattggccttttgagatatcttttcagggttttcgtatgtctgacacggatggatccactagacccaccaactggtggtttcactgctcctataacttcacccggaagcaactcagcacaaaaggacagcttagaccccttatcatttcatttccactccaaccagtcagcagcaagcacccatttcctagccaccccaccattacctccaaactgcctttgaaaagcctctaccctacaagccttcaatgagattgatttaactgtctcccgcatggcatggctagcctcatatcaattaaactctttatttactgcagtgctgtggtttttatytgtgcagtgggcaggaataatct

SEQ ID NO: 398189 - DNA, 550 bp, Homo sapiens
atagacacttaagggacatttgtttagaatgggagccctcaagaaagaaaaatcctttggatgtacaagtccaaatcttcaaagtatacctattccaattgtgaatcaaattcaagcccaattaaccctttaaagaatgtttaccttttgccaactttgttaaagtttccagatttcttttcttttcttttctttttgagttttgctctgtgtcacccaggctggagtgcagtggtgtgatctctgctcactgcagcctctgcctcctgggttcaagtgattctcctgtcttagccttccgagtagcttggactacaggcatgtaccccacacccagctaattttgtgtttttagtagagctggggtttcaccatgttggtcaagctgttcttgaactcctgacctcaggtgatcctcctgcctccacctcccaaagtgctgggattgtaggygtgagccacggcgcctgggcaagtttccagatttcagctgcagcttctggactgagaaagatgtcctggacaatggtatctcatccttattaccaga

SEQ ID NO: 398190 - DNA, 550 bp, Homo sapiens
atagacacttaagggacatttgtttagaatgggagccctcaagaaagaaaaatcctttggatgtacaagtccaaatcttcaaagtatacctattccaattgtgaatcaaattcaagcccaattaaccctttaaagaatgtttaccttttgccaactttgttaaagtttccagatttcttttcttttcttttctttttgagttttgctctgtgtcacccaggctggagtgcagtggtgtgatctctgctcactgcagcctctgcctcctgggttcaagtgattctcctgtcttagccttccgagtagcttggactacaggcatgtaccccacacccagctaattttgtgtttttagtagagctggggtttcaccatgttggtcaagctgttcttgaactcctgacctcaggtgatcctcctgcctccacctcccaaagtgctgggattgtaggtgtgagccacggcgcctgggcaagtttccagatttcarctgcagcttctggactgagaaagatgtcctggacaatggtatctcatccttattaccaga

SEQ ID NO: 398191 - DNA, 526 bp, Homo sapiens
ccactgagttgtctaacacctaagctgttgtggatggcaaaactaaaagagcactgtaacacatgccctctgggggctttgaggattgtggatactccctgctagacactgccayaggccttacatggaatttttgcacctgccgtgcccaaaggcacttgccctggatcctgcaccctctcacctaaatgctccctcctgcaaggagttgaacacaatggattcaagtaagtggagtttgaccctgctggcaccaaagcagtgggctagccccattgccctcactccagttcccatctgtgaaggagtcaggggaaatttcctgctttattaaaaaaatggaacctacaatgaataaattttgttttattcatcaaacacagaactcggaagaaaaatagaagtcaacgaattcagtgattaacaaaatgaatttagaagaatctcccttttggtgccattgttgggaaagagagacaagctgaatcagtaggggtcctggcttcttgaattttttttttttcac

SEQ ID NO: 398192 - DNA, 552 bp, Homo sapiens
taaaagacaaacaggtacaacaaggagggggcagaaatccccttgaattttaatgcaggaataatgaacaaataaagagggagtgtatgggttatcttgcaagtttgttcttcaaggacaaacaaggcatcagagaaaaatgacctcatagcagattgaaatagagacgataatggaggaggaaaatgtccagaatcaaaccgaagactttgtccttcttttcacctactgtttgcacattccttttttttttttttttttttttttgagatagagtcttgctctgtcaccaggctggagtgcagggacatgatctcggctcactgcaacctccgcctcccgggttcaagcgattctcctgcctcagcctcctgagtagctgggactacaggcacacaccaccatgcccagctaatttttgtatttttagcagagacagggtttcaycatgttggccaggatggtcttgatttcctgacctcatgatctgcccgcctcagcctcccaaggtgcttgggattatgggcatgagttactgtgcccagcccactc

SEQ ID NO: 398193 - DNA, 529 bp, Homo sapiens
cacacacagttcaacagaattacttcagggcagtgaacccagtctacctctcagatctatgctgctatcctcctaattgtggtccatcatagccacaggccatgggttctagaatctgtttcctcactgtagtttaaattataatttccatatttatctcatttgttataactttcaaatcgatgatccactctccctttctcttatggataaattagccaacctattttacactctgttaattttaccctgtttttttttagatggagtcttgctctgtcaccaggctggagtgcagtggcacgatctcagctcactgcgacctcctcctcctgggttcaagtgaccctgctgcctcagcctcccaagtagccaggattacaggcacgcgccaccacacccagctaattttttgtattttagtagagatgcggtttcaccatgttggccaagatggtctggatctcctgacctygtgatctgcccgccttggcctcccaaagtgctgggattacaggcgtgagccacc

SEQ ID NO: 398194 - DNA, 535 bp, Homo sapiens
ggaggtcctgaataaccatggtggttgctgtttgtcatcaaacaatagaattgtctttacaataaaggactcccaaaatggcagatgagaaactatacattaaacgcctttaataaatattatgaaaaaaatgaaatatagaaaatttagatggacacttgtattttctaatttatgtatcttggtcaacttctccacaagcttacctaattgtttatatactttatacttattaaagtatacatttctaaatgttagcctattaatttactcttgattatcaaacattaccagtgttgaactattaaaagcacacaatgtatagtaawctatcataggattcccataatttcacttttctttctgtttagacatggaaaaatttatcagtcagaattgctgttttagggatatgattttcctgaaattgggtgaggatcagtgaaataatgactctattacttgctcttaattctctgttctctaatgttttttcattcacaagtttaccggagtataactggcttagtaagta

SEQ ID NO: 398195 - DNA, 535 bp, Homo sapiens
ggaggtcctgaataaccatggtggttgctgtttgtcatcaaacaatagaattgtctttacaataaaggactcccaaaatggcagatgagaaactatacattaaacgcctttaataaatattatgaaaaaaatgaaatatagaaaatttagatggacacttgtattttctaatttatgtatcttggtcaacttctccacaagcttacctaattgtttatatactttatacttattaaagtatacatttctaaatgttagcctattaatttactcttgattatcaaacattaccagtgttgaactattaaaagcacacaatgtatagtaatctatcataggattcccataatttcacttttctttctgtttagacatggaaaaatttatcagtcagaattgctgttttagggatatgattttcctgaaattgggtgaggatcagtgaaataatgactctattactygctcttaattctctgttctctaatgttttttcattcacaagtttaccggagtataactggcttagtaagta

SEQ ID NO: 398196 - DNA, 566 bp, Homo sapiens
aataagtctggagtggtaagctggggttgcatcatggaagttcctttctatcaagttaaagaatttgacctttctcctaagaggattggaattctacagaaatgttttaaataagaaagcagcctggttaggttcacatttcagaaaaatcatttcattacgaataaaggatcatagacaaatgagagctgcaaagacagaggctgagaaactcatttggagccagctatagtggttccaggtgagagatgctattggcctcaactagaatacctctwagtggggatggagacaagtagctgcaatcatcatatttttagaagattaaattgagagggcttcagattggatgtaaaggagggttaggatcaagggttaaggaagctaactagatttgtgagacctgtaacagtggtgattgattcctcaaccaaactaggaaacataacgaaattggcaagcgaaggtaatgcgatcatttggtggcatagtaagattttctttctgtaagacttcaagtgagatggctagcagaaatttgtacctatggattatgaacaaagtcc

SEQ ID NO: 398197 - DNA, 612 bp, Homo sapiens
tcccgtcatatttttaatttaaaaagtcaaggaaatacatgaaatgcctggtgaaattgttgaaagtaagtatgcataggcatattttaagataagccccttatttttttcttaaacacctgggtaactacctaaatttcatcatgcgtatcagtgatgacaaattttcaactaagtttaatgaagaacataaaataataataataaatagtatattattgcattaactaagtagctcagaattgattgtcattaaagagccaccctatccaactaatttaaaccttacaaaatatggttgcaattataacatcagggagaaacataggaaactgaaatgcttcctctaaatgtttatagttatggtgtctgaccagaataattgtgtcacaaatgttattaaaataatgagataytgttttgttcagttttactgcagaaacaaactacaggattttctttcatttcagataattatttttcactaattactaagtgttttgagaacctacagtgctaattccacttcctcattcaatctttaaaataacgctttcggataattattcttaatgtctccattttacacaatgtatctctagttcagatctt

SEQ ID NO: 398198 - DNA, 612 bp, Homo sapiens
tcccgtcatatttttaatttaaaaagtcaaggaaatacatgaaatgcctggtgaaattgttgaaagtaagtatgcataggcatattttaagataagccccttatttttttcttaaacacctgggtaactacctaaatttcatcatgcgtatcagtgatgacaaattttcaactaagtttaatgaagaacataaaataataataataaatagtatattattgcattaactaagtagctcagaattgattgtcattaaagagccaccctatccaactaatttaaaccttacaaaatatggttgcaattataacatcagggagaaacataggaaactgaaatgcttcctctaaatgtttatagttatggtgtctgaccagaataattgtgtcacaaatgttattaaaataatgagatactgttttgttcagtwttactgcagaaacaaactacaggattttctttcatttcagataattatttttcactaattactaagtgttttgagaacctacagtgctaattccacttcctcattcaatctttaaaataacgctttcggataattattcttaatgtctccattttacacaatgtatctctagttcagatctt

SEQ ID NO: 398199 - DNA, 550 bp, Homo sapiens
gcatgttattgtgctgaatactgtaggcaattgtaatacaatgataagtatttttgtgttcaaacaaatctaaacatgggaaaggtacagtgaaaatataatataaaaaataaaaaacagtacacttgtgtggggcacttaacataaatggagtttcaggattggaagttgctctgggtgagtcagtgagtgagtggtgagtgaatgtgaaggcctaggatgttactatacaccactgtagactttataaatattgtacacttaggctacactaaatttatgaaaattatgttttcttcactaataagtttaacttagcttrcagtaacttttttattttataaacttttaactcttttaactttttgacttttgtgtgataacacttatcttaaaacacagacatattgtacagctatgtacagctctgtcaacatttctcaaattacttggtaaaactgttgatacttcacccaatcgactggtggtgaccacatcttcagcacattattattagaacatggagcaacaaaaatctttctaaattaca

SEQ ID NO: 398200 - DNA, 546 bp, Homo sapiens
aatcatgacaacctttgtattttagtatatttcagttattatgaaataaggtaagctttgcccagctgaatgaaatggaaactcattatatctcaaatgaggtgataaaagatagaatagtattttaataacgtagacaacatggctttttgtattttaatattcactgttctattggtaatggagccttaacaaagtgattttgtttccaatcaatcaaatatttcctcatcagcactctaagcaaaaatactgtggcagcttctcttgtttttattatcgccaaaataagaagcaccatctctaataagtgtcatttgcattaggccatgctgtcagcattcartttggaagcttgctagtttcttacggagcctgtgacacagggccctcatcagtatgttgtgatgatagcctcacttttcctagctctgctttagattgacagtcaacctgggtttccacacatccctgcatgtgccattgcagagggccattttatagttaggctagagtcctttggttgccaaataagagattaattct

SEQ ID NO: 398201 - DNA, 578 bp, Homo sapiens
acggtagcagtgtggaagaatgactgtkctgtacattgggattgaagcatgagcatatgaagactagggttttaggcttcagacaatgtcagttttcctttgtcctttcataatttaagacagttgtttccaaacatcacatgcagtctgtagaagttaacagcaatgttcatatgaactgggtaaattggtcttggctttcagaaacttattgaaaataataactgcaaaaggctgaagatctggtcgtgggtggtgcattggatttaatgtcacgttgtctagtgcaatttgtaactgtgaattaataatttgggaaagatctttaggtgggaccatgaaattgtttatttcaactcagtcaaccgagtaacatagacttctgatggtgccagggaacagagtctgccttcaagggctggccttaattcagaagcacataattcattcagaaccatacaccaagtgtgattattaggctgtgccatttttgtttaatactcttatataatgtttccttttgatattgctttccaataataagaatcactgatttcaatgtttctctgagatggcaa

SEQ ID NO: 398202 - DNA, 671 bp, Homo sapiens
attttcctgtcactcccataagaaattatcacaaaatgaatggcttaaaacaacaagagtgtactgtctcacagatctggaggctggaagtctgaaatcaagtgttggtagggctagattccacctaaaagctagagtgaagaatcctttgccacttccatctactggtagctccaggccatcattggcttgtggctctatcacttctayctctgcctctgcgttcatgtgagtttctcatcttctccctgttatcatcctcttttgtctcttatgagagcatctgtgattggattaagatcccaaccagatcattcaaaatgatctcatatttagctgcttaatttaattacacctgaataaaaccttttttccaaataaaagcatattcacagaagattaggacaaggatatattttagagaggccacaactcaaccttctataggcttccattaggctgtatgatagatagacagagaccagtttttgaagacagacctaccctggtttgtaaaatcaattctgctacttattgggcatagaacaaatgtgcccaatggtgataataaatattttgtagggttgatgtgaggattacaatactgtctataccttgctaagatagtacgtgtctggtgcataatgcggtctcaataaacctgagtaata

SEQ ID NO: 398203 - DNA, 671 bp, Homo sapiens
attttcctgtcactcccataagaaattatcacaaaatgaatggcttaaaacaacaagagtgtactgtctcacagatctggaggctggaagtctgaaatcaagtgttggtagggctagattccacctaaaagctagagtgaagaatcctttgccacttccatctactggtagctccaggccatcattggcttgtggctctatcacttctacctctgcctctgcgttcatgtgagtttctcatcttctccctgttatcatcctcttttgtctcttatgagagcatctgtgattggattaagatcccaaccagatcattcaaaatgatctcatatttagctgcttaatttaattacacctgaataaaaccttttttccaaataaaagcatattcacagaagattaggacaaggatatattttagagaggccacaactcaacctwctataggcttccattaggctgtatgatagatagacagagaccagtttttgaagacagacctaccctggtttgtaaaatcaattctgctacttattgggcatagaacaaatgtgcccaatggtgataataaatattttgtagggttgatgtgaggattacaatactgtctataccttgctaagatagtacgtgtctggtgcataatgcggtctcaataaacctgagtaata

SEQ ID NO: 398204 - DNA, 606 bp, Homo sapiens
tctcttttccctgtgaccaccataatcccatacaattaagtgcttagtagttattttaccaggtggtgatgtagtttctatttttaattactgaagagaaaaatcaattacaaaaaaaatgtgtctgtattggctgaattgggccttaaaatgataagagtattttgctttcccttcgtgtcagtgagtaccagagttatctaccactagctgtaaacaagaaataataaagttatgtaaaagtgtgtttgatttttacaggcttagaggtcactgggaccagctttatattcattttttttgwtaacaccatttttctttcatgcactgtggatttgtgagggtctttttcctttcaggcagtcaggaatatgaatttgttttatattgttctgcttatggtagttggtgtaacagcatcttgtagtagacatgctgctggtcatatctcattttaccttttataaaaatcttagtgtttcttgtcagtggcagaaaacatcaatgtttctccttgaacaatgctgaacaagtcatttgatgttttctggcttggctcttaaatcttgtgtggtgtggattacaaaaaaaagagacattagggat

SEQ ID NO: 398205 - DNA, 606 bp, Homo sapiens
tctcttttccctgtgaccaccataatcccatacaattaagtgcttagtagttattttaccaggtggtgatgtagtttctatttttaattactgaagagaaaaatcaattacaaaaaaaatgtgtctgtattggctgaattgggccttaaaatgataagagtattttgctttcccttcgtgtcagtgagtaccagagttatctaccactagctgtaaacaagaaataataaagttatgtaaaagtgtgtttgatttttacaggcttagaggtcactgggaccagctttatattcattttttttgataacaccatttttctttcatgcactgtggayttgtgagggtctttttcctttcaggcagtcaggaatatgaatttgttttatattgttctgcttatggtagttggtgtaacagcatcttgtagtagacatgctgctggtcatatctcattttaccttttataaaaatcttagtgtttcttgtcagtggcagaaaacatcaatgtttctccttgaacaatgctgaacaagtcatttgatgttttctggcttggctcttaaatcttgtgtggtgtggattacaaaaaaaagagacattagggat

SEQ ID NO: 398206 - DNA, 577 bp, Homo sapiens
tcatcactagattgatgcaacatccactttgtatgtgatgtaggtgccaccagtagcggtagaaagggctttggatttcgatccatgaggttgtgaaagcagctccactactcacttactatgtgactttggccaagccatacaaactctctggacctcagtgtgttcatctgtaaaatggagataattgtctcatctcaatggggagaggatatgcagagaaagcccagggttcaagggcaaggagtgtccattccctggtagcttcactttcaaaagcaaggtggcagaaagggggctttagggcagtgatgaycaccaggatgttcctctcctccctgtccactctccccatccccctccaatccccatctcctccttgttgagggggactgtcaccatgaacagttggtactattgtcctagcctgagggagtgttggtgggttggtggtggactgcaagcttgagacccacggatcgaggaagaaacttttgaatgccttcctgtttggggaaacaccagggctgagctgtcatagctgaccttttttgtggctctgaagaatctaccaaga

SEQ ID NO: 398207 - DNA, 562 bp, Homo sapiens
taaccactgatctggtgtgtgtcactgtagacagtttttttctagactttcctataaatgacatcatatagtatgtactctttgccttcttttattcagcataatgtttttgaggttcatctgcattgttgtgtatcaraagttaattcctttctattcctttgtaatattccattgcatgactgtatcacaatttgcttatctgttctcctgttgaccgacatttttaattttctggttttggaaataccatgaatgaggctgccaagaatattttatgaaagtctctttgtgaatgtaagctttaattttctttagaaaatacctaagagtgaaacaactgggttctatgacaagagtatttttagcttttttttttttttttttaggaaactgtgaaattttattccaaagtggatatatcattttacactcccaccagcagtgtacgagagtttcagttgctccatatctttgtctgcacttgatattggcagtctttgaactttttgccattctaacaagtatataatagtatttctgtgtgttttagtttgttttc

SEQ ID NO: 398208 - DNA, 577 bp, Homo sapiens
acctgaatgactgcaactataggcattttggatttttttcactgccttatctggccctgtgagcttcctgaagaaaaagcttgggcaagtcatttcttgtagatatcarcatggaagagaagcaagatgtgtccttggcagggtccccctggaaaggctaggacaccctggggctgcctatctctggaccaagaagtgatgctgggagagtgaccaggacacacacagctaaataatgcactgtgctcccctgatgctgtttaaggacccaggagccagcaggggccaccacagtttgcaccccaaagcagaacatatgaaaatggttaggggtcagcaggtcacactcagctatgcacacaagtcattgccttgcccatctcttctcctaccaccctatcttcagtagccctcactcagagttttattgacatcaccctgtttatatccctcctacattgattatatgtgatcaacttgtttatttatttgtttcctgtttatagtgaggttcacccaaggggctgcagctgacttgttcatggctgtgtccccagtgcccggaacgtggtgggta

SEQ ID NO: 398209 - DNA, 577 bp, Homo sapiens
aatctctcaaagaagtagaagcagcttagttcctggagctgggatggtagttgatgggttcatcaacaggctgcacagagtttagggtggtatcaaggatatattttaaaaagagagagagaactgtaggtatacctgggggatggggcaagtaggagtcagttaaaagagcaaccattccatttgagaattcccaagtaacagctctcacagcatgtggctgccttcacagggaagctcccagctcctgaatgctgagagccagggctgctgcctaacagacctggccccttctgctccggctggagctgaawgcctcccaggatcagctgtgcttgttattgtaattaaacagtttacaaaaactgatgaaataagagtgccaaaagaaaaagggttgttttcataaaaactaagtttagttcttcagaaaggctctttctataaagggaagtcagtaaaaataattgcaattaaattaggtgtgggcgagataactttaaaagcttggggagaattgtacgcatctagaaatgcctgcgtttgcttaagttctcacttattttaaagaaaacaa

SEQ ID NO: 398210 - DNA, 560 bp, Homo sapiens
tttgcatgttccagagagatatcagtattctgtcctatgagcacttatttatttcctggaataaaacagttaaaagtgtctcccacttttttcctctcctttaaggactccaattacatgtgtattcagtttcttgaagttgtcccatagctcaatgatgctctgtttatttaaaaattcttggccgggcacggtggctcatgcctgtaatcccagcactttgggaggctggggcgggtggatcacaaggtcaagagatcgagaccatcctggccaacatggkgaagccctgtctctactaaaaatataaaaattagctgggagtggtgttgcgtacctgtagtcccagctccttgggaggctgaggcaggagaatcacttgaacccgggaggcggaggttgcagtgagccgagatcatgccactgcactccagcttggtgacagagtgagactctgtgtcaaaaaagaaaaaaaaatttttatctctgtgtgtttcacttagggtagtttctactgctatgttttcaagatcacagtattttcttctccagtgcctaat

SEQ ID NO: 398211 - DNA, 616 bp, Homo sapiens
tgagtttagcaagatcatagggtacaaagttgttatacaaagtcagcagtatttctccatactaaccacaaataattggaaattggagttaaataatatttaatccattaatgagggtggagaccttataacctaaacacctcccatcacttttgcattggggattaggtttccaacacgtgctttttaaaggacacattcaaacatttaaaataacacccaaattatgaatatctaggaataaatttaacaaaagatatacaacacatgtatactacaaagctgttttgagagaaattaaagaagatctaagtaaatagagatataccatgctcatggataagaatctcattaattctaagatataaattttcctaaattggcctatagttaaaatattatcataatcaaaatctcagcagggtcctttgtagacattaacaaaacaatttaaaatttgtataaaaatacaaaggatgtcgactagccaaaacaattctgaaaatgaacaaaattggaggatttgtactaactgatttcaaggcttactaaaaagcttcagtagtcaagccagtgtggattttggctatatatataygtgtgtgtatatatatgt

SEQ ID NO: 398212 - DNA, 581 bp, Homo sapiens
acactcccaccgtggctgacttcagctaccgacatgatgccccagatcatgaaattgggaaggattgtgccccattggcttccccaagcagatatgagcccatctctgacagcaactgcaagatgccaaggcctccttggaagctacacctgtctccattctagtctccatggtaactttgaaactagacaagactaagccaggtgaattgttttctaactgaggagctaagagttaataagacgtcttttcaaataaagatgcagatacttctctgcctttaaaaattgggactgcctagaagtaaaaaccaatagactcttcacttccttcccgttggaccacatccttccttctatacctccaaagttaggatgtaaagagctggaaggagagaatgagccatctgattccattgctccccgtgcttcccaccctggaggaatcacttagagtggaggattgaaaaataactgctctgagtattcacaagtyaatttgaaatggtagacaaagaagagatggccagaaagcaggggtggctctccttggtttttattaaatcaagtcaggactgctaa

SEQ ID NO: 398213 - DNA, 621 bp, Homo sapiens
gccatgtttcaagtgccctgtagccacctgttgctggtggcccccrtgctggacagcacagctctagacctggctcatgctgtcccttctccctggacagttgccctgaacagccaggcccacttcacaaggcttgtccgtgaagccccagctgtgagagctcattcctgccccagaacctgtggagcctgggcctttcccatgacacagtgctccatctgggttagaggactacaagatcaatgtccccagcagaggggaactcccggggtcgcaccaacccatgcctccgctggagggattcttttatgctccacagaaaaggtgctctagagatgtgctggcctggaatgtgggtgtgtgctcattttaggaggtgttcttaggatggcacctccacacacatgagaaagccaaggcaggagcagccggggtggtggcagtggggcccggcggggttctgccagacatattttgtactcatgaggtttcctgggcattgcttctctcccgggtaaggtgctgctcatccccatggaggatgaactgttctgtgaatgtttttaaaacccaagatgcatcaaatccatttggagggagcatattgagttgtaatccatc

SEQ ID NO: 398214 - DNA, 508 bp, Homo sapiens
ctcctgggtcctacaggctctcagcaccgaatggccctgagaggctcactgcctgagactggtggtgcctggggcagcccctgagctagctctgtacttgctcatttgtagggaggaagagtttagtgctgtcaagatagaagctggtggactggctgtcagggtctcttgaggactggtcatcccctacctgtgttgtccctcccacatgcttggcggggatcaacccctcagagaaggacaagtttgtattcactaaaggggcagtgctatcaggtctgccactattccatgacctcagggagcattagtccagggagcctgttggcactggccgatggcaaccccggccccagaagtcttttctctctccaaygagactgggcctggagggtcccagggcactgggagcaggggctcttcaaagcagcccggggctaggaagagatcaaggtcctcccagaggaatggaggggaaatcgaaggcaagcagagtagctgcctccac

SEQ ID NO: 398215 - DNA, 508 bp, Homo sapiens
ctcctgggtcctacaggctctcagcaccgaatggccctgagaggctcactgcctgagactggtggtgcctggggcagcccctgagctagctctgtacttgctcatttgtagggaggaagagtttagtgctgtcaagatagaagctggtggactggctgtcagggtctcttgaggactggtcatcccctacctgtgttgtccctcccacatgcttggcggggatcaacccctcagagaaggacaagtttgtattcactaaaggggcagtgctatcaggtctgccactattccatgacctcagggagcattagtccagggagcctgttggcactggccgatggcaaccccggccccagaagtcttttctctctccaatgagactgggcctggagggtcccagggcactgggagcaggggctcttcaaagcagcccggggctaggaagagatcaaggtcctcccagaggaatggaggggaaatcgarggcaagcagagtagctgcctccac

SEQ ID NO: 398216 - DNA, 561 bp, Homo sapiens
cttcatagtgtatatacgtcattcctaccaaaaaaatacgatgattgttagaaattcaaggcaacttccttgcttctcttgagtctggctgcttcacctgatgggaagctgtttcagcatattcataagctgccaggctgtgcgccgaggtcccagagcrtgtcactgcaggcagcactcctcagtgtccctctttctctggaacgtgtcagaggacccctggaaaatattggtgcacgtgcaaacctgcacagcaagaaggggcttagacagcacaacagtaactgccaacatctggggagaactggactgcaatggggtgggacagagggagcttcctgcctttctttccctgcttctcatgtttaatcttcactacaaatcagtaaagatgggttctgccatcacccatctcacagagagtccaagggtaagcaacttgctcaagtgctgaggtcacatggctgtcctccatctgcacaggtgtgaggagaaggaatttctgtgtcttatttccacagtgaaaaggaaccagagccagtaggaagggttttggatgct

SEQ ID NO: 398217 - DNA, 561 bp, Homo sapiens
cttcatagtgtatatacgtcattcctaccaaaaaaatacgatgattgttagaaattcaaggcaacttccttgcttctcttgagtctggctgcttcacctgatgggaagctgtttcagcatattcataagctgccaggctgtgcgccgaggtcccagagcatgtcactgcaggcagcactcctcagtgtccctctttctctggaacgtgtcagaggacccctggaaaatattggtgcacgtgcaaacctgcacagcaagaaggggcttagacagcacaacagtaactgccaacatctggggagaactggactgcaatggggtgggrcagagggagcttcctgcctttctttccctgcttctcatgtttaatcttcactacaaatcagtaaagatgggttctgccatcacccatctcacagagagtccaagggtaagcaacttgctcaagtgctgaggtcacatggctgtcctccatctgcacaggtgtgaggagaaggaatttctgtgtcttatttccacagtgaaaaggaaccagagccagtaggaagggttttggatgct

SEQ ID NO: 398218 - DNA, 512 bp, Homo sapiens
agtgggagcaggcatgtcacatggcaagagtgaaagccagaaagagaagggggaggtcccaggcttttaaacaccatatctctcatggactgagaagtcattcaggatggtgcyaacccattcatgagggctctgcccccattatccaatcgccttcgcctcccaccagggcccacctccaacattggggattatgtttcaacatgagatttggaggggacaaacatccaaactttattaaatgctcatgaaatgaggtgtcaggagggcagaaacaagattccctctcttctctgtgtgtccacagatgacactcattgacagttatctgagtgactgacagctgcagacagtggagttctgaagccagctcacaccagctcaaaagggcccattatgggcatctctctccatctctgcttcagtgacagcatgttggttgcttaaaatccaccacaatgagtttttgcattatagaaatcagcaaactccatagatcagggcttctccca

SEQ ID NO: 398219 - DNA, 631 bp, Homo sapiens
gctttattaattgcaggaggctctgtaaccaatttaccaattaagtgataaccaattaagtcatctctacactgctctttggtttcctataagtgaatggaattttttgcattttcactagggatcaccttattggtgggatttctctgaaccttctcatgttcagaggtctgtctcatccgtgaatcagtttcgctttgctttgttttatttttctttgctcagattaaagtttaaacttcctaagggatttccctttaacagagttttcaaaaatgcaaattaaagactgattaaagcactttagcactttttgtttatctttagaagtgaaatgcaaagagtgaggtccttcagagcaagcaattcaaatgtttyaggttctcaaaaagcatgtgttcaattactgtttttttttttgttgttgttgtttttttcatttttactgagcacacagaaagtagtttcagtgctaggcagtgaaggtacaacagtaaatgagacacagttcctgctctcatgggacttacagtctggttcagagagagacacctaaaaattcattaaattcttacaaaatctatgctagaaatttcttcagtgtaaagtgatagcaaagaggacagggtgt

SEQ ID NO: 398220 - DNA, 575 bp, Homo sapiens
ggaaaaacagtatagagtttcctcaaaaattaaaaacagaactaccatataatccagcaatccaactactgggtatatatacaaagaaaatgaaatcagtgtgttgaaaaggtatctgcactgccatgtttattgaagcattattcacaataataaagacataaaatcaaacttattgtccatcaatggataaatggatgaagaaaatgtgatatattcaatgaaatactattcagccataaaaagaaagaaatcctgtcattggcaagaacataattgaagctggaggacattatgttaaatgaaataagccrtaggcacagaaagactagcacatcatgagcttgctcacatgtagaatctaaaaatgtttatcccataaaagtagagagtagaatggtgcttaccagtggctgcagtggttggtcggtaggtgggggatttagggagatgctgatcaaaggatacaggatttcagctagaggaagaataaactcaagagatctattgtacaacatggtgaccataattaataatatattttattcttgaaaaatggtaagacagtgaatgca

SEQ ID NO: 398221 - DNA, 506 bp, Homo sapiens
tgtcttacgaattctgataaggcctttccatttgaaaaacctgggaaccaagtttctcttttttttttttttttttaacttaaaagaattttgttattttttagtttttgacactctacaattcacaaacttctatagttcgtcactgcagccagctcacctagatagggccatggtagataggttttgagataaactgaggctggattyttcagagatctgttttctcccattcaaaaaagatgtacacccttgaccttgagttgtcttaaactgtgaataaaatgcagctgttctcaaatatttcctagtgccaccccttcatgagtgtgaagagttttctgacattaaaacaaacaaaaagtaagatacagcatttgggtgcttagaagagtctcaacatttaaagacttgaaaataaaaatggagtacattgagaaagtcttaaaagaaaaatgatattcatttgtatcctcttttaaatctcctactctcattcatcaggt

SEQ ID NO: 398222 - DNA, 516 bp, Homo sapiens
agtgctgggattataggcatgagccatggcatcyggcctacttcttttctgaacttctttcttaaagtactagtttatgaatattttcccttgggggtcccagggcacccctatatttgtatgttcaaataaaacctcattatctcttctgaaatctccttctcccactattcttgtccaaatgaatgtcattattcatctcacagtaatgcaagaaattttaagataaccgtttgtaatcatgcattcatccactcaattatttctaagtatgatgctgatgctaaccttaaggacctcttaacattgtagctgacacataatttctacattactatgattaattctataatagaggtatgttcaaagtattactactatatagcagaagtgccaaattttggcttaatgggccagggctagcttctcaaaagaggtggcatcttcatatttttaaatgaattcatcaggtagacaaggcccaaggctgaggtagatagaagctaattctacctc

SEQ ID NO: 398223 - DNA, 533 bp, Homo sapiens
aaccaggcagaaattcttgttctcttcccttattttctcccaaacaaatggagtctctctctctctgtgctgagctgcttgcagctggatgagggttgacacaagcacccctgtagcccccaccactgggcctgtgctaggtcagacctgaagcacagattactgtgtctcgcccaaggcgcacagtaaccactgcctggctaccacctttgtttgctcaagtccccctagggctcagcaatcagcaggtagcaaaacccgccaggcttatgtatttccgttcagtgcagcaagttctgcctggcccgagcaggtccagatatgccatccaggagccagggcctagagtcagaaaccttaggaatcaacctggtgctgtgttctactgtggttgagctgacacccaaaccacaasacaaagtccttaccactcttccctcccctttctatagtcataggagtctcttcctgtggccaccaccaccccaggcctatggtgagtactgcctggctactgtcagtgttcactcaag

SEQ ID NO: 398224 - DNA, 634 bp, Homo sapiens
cttacagcatgcctgtgcatgttctaagcattttatatgtatcagctcatttaataatcacaaaaattctatgatacaggtactctcattatccttgttttatagatgagaaattggaattttgaaatagtaaccttatccagggacatcaggtactgagggtaaagctcagatttgaacttgcagtctgatttcagagccaacactcttgaacattttagattgtcaaaattacttatgattccagaaatgttctaaactgtctctgcccatttttggtggttttattgaaacatatttactgtacttttttttcatctaggtttatgttccagatgaaaataatactattttggggagaaatacaaataaacaagtttttgaaggcttgacaactggacttctcaaagtcagtgctgtggttttgggctgcctgattgccaatcgaccagatggaaactgccagccagctaccccaaaaataccaacacaggaaatgaaaaacaaamcctcacaaggtgatccttttaacaatcgagttcaggaccttatcaggtaaaattgctagagttcttaaaactttgttctttgttaagaaactatattaaaataatttaaatctcaaggcccatgt

SEQ ID NO: 398225 - DNA, 630 bp, Homo sapiens
gtttcccccacccccaggaggagtggaatgtagtgatgtcacagtccccctaggaactgtcattactgctgcaagaccagcctttgatcttatgacccaatcccctaagcattctccccccatttctggttcctctggttgcagcacaaatttccagctggaaggggaatggggactatgggacctaagagcaagaggtttcaggctgctttattcccttcacatagacatygacagtgtgaaaagcctacacttcccccgtgagctcaaaatgttgacagtatctctgggtgacaatggaaaatgggtttggttttgttttctcccaggcttctactctccagagagacttcaacatttttttctgagttctccacctcatattctaattctccatggttctgggaccagactgcccttcagtcagtggtctctgaagtgagattagctcatcttctatggaatagatcttggaaaactaaacttgacagcttgaatcttcctcatatcatctcaacttggggtacattgagtgccacaggataaatgcgggagatctttctgaagcatcagtttcctttgattctcttgagacagaaaaaacattaatatacttagggatgaccctca

SEQ ID NO: 398226 - DNA, 530 bp, Homo sapiens
ctccattctttcaaagcctctagtaaggcaaagttttactgtattacttcttgctatcaatggctataaagcagagtcctggtaggcacattttgtatgcctgcaaagatgcagaacttaacagttccatctgttcaatattaccgcaaaagtcctttaaacctcggatggtgagtgtaatacttcagcactagcaccaaagcctcaaatataaaaagataccaagaacaccactagcaaacaaaatgagctcttggctgggagcagtagttcacacctgtaattccagcactttgacaagccaaggtgggaggattacttgaagtcagaagttcaagaacagcctgggtagcatagcgaattcacatctctataaaaaaatttwaaaaattagctgggcatggtggcacacacctgtagtcctagctacttgggagggtgaggtaggaaaattgcttcagctcaggagtatgagactgcagtagctatgatcatgccactgcactccagcctgggtgacagagcaagat

SEQ ID NO: 398227 - DNA, 405 bp, Homo sapiens
tcagttccttggtcttaaatttcctaaacagaaatgttcctggccaatttgtttttgttattgttgttgttgttttttgctttttgttttagacggagttttgytcttgtcacccaggctgtaatgcaatggcaaatccgagatttcaccactgcactccagcctgggtgacagaatgggactctgtctcaagaaaaaaaaagaaaaactatatatatatatatatatatatatatatatacacacacacacacacacacacacacacacatacatatacatatatatagattatgagattttgctctgctcagatttaatgattcttcataaccccctggaataattctcttgtccaaaccccagtccatgaatccaaactataaaatagcttccaacactctc

SEQ ID NO: 398228 - DNA, 405 bp, Homo sapiens
tcagttccttggtcttaaatttcctaaacagaaatgttcctggccaatttgtttttgttattgttgttgttgttttttgctttttgttttagacggagttttgctcttgtcacccaggctgtaatgcaatggcaaatccgagatttcaccactgcactccagcctgggtgacagaatgggactctgtctcaagaaaaaaaaagaaaaactatatatatatatatatatatatatatatatayacacacacacacacacacacacacacacatacatatacatatatatagattatgagattttgctctgctcagatttaatgattcttcataaccccctggaataattctcttgtccaaaccccagtccatgaatccaaactataaaatagcttccaacactctc

SEQ ID NO: 398229 - DNA, 512 bp, Homo sapiens
agataacatattattacatatttcagtggtaggaaagaatgcagagtttatggcaaactctgacaggagaatcacaatgtacacccctagagttctggtccaagatcatgccacctcactggagaattatactatataccaaaagcagttattaggagatatgtgtcagccaaccacgagatatcaagtgattttgtaaccagatatttccatcatgaatttctgagagtctcatccagccataaggtggggtaggtgcagaagaaatccatcaaaagatggaattgcacacctgggattgagcaagagcagaaatagagggcacaactatgatgtgtaatcaggtagcccagactccatgtcatccatcactattacatcaaaatccctcccacagcacatacctgtggctgcgtgatgagkacaaatatgactggtgggccgagcaggaaagtgactgagcttggttcacaggggagttggctcagcatgtgggtaaaaactaaaagtga

SEQ ID NO: 398230 - DNA, 582 bp, Homo sapiens
ttatagggcgttagatgaaaatgaattcgtgacaacttgactgatttctactatttttagatgaagagtctattttcacaaaagacttagagtcttgtttgatatgttcatggtttaatattctctttccagaagtttggtgcccaggaatgatttacttaraaattctttgcatacgggaacaggtgatattatttagttgaaatttaagaaaagttagttgagtgcataatcaaaatcgactttacatttgggaatgttctccagccaagctatgtattatctaactttaatattattgtaattcgtcatgcttactggttttctcaggtcaagacaaaataactatgtatcagattataaaagatagcaaatgaagaaaagggaggataaaagctatttttattattcttatccccactctctttttgatatgtaaatgaagattcagtttcttattccatctgagaaagtctgctctgaaaacagaaatgtgacaaatctgtattacgtaatcaagaacttgagtggcaggctgccctgtgatttattttcaaataatggaccagagagaccacttga

SEQ ID NO: 398231 - DNA, 549 bp, Homo sapiens
attaagggaactttgattttcttcctcaaaatgatgcctactgttaagtatgaaaggttaaccttactccaggaaaggaagagtaaatctatggggtcaggaaggctgttgtggtgaatggataacttaatgaaatgatcaaatagtcctgaatgatgttaattagggcaattttgtattactataattgctttgtatttattgaattattgcaatgggtgagttactagacagaaagaaatctatgcagtacgctgaccaaacactgaaaggatgacagaattggaatgctcttggctgttcaattcactgcttaagcagtctccaaatacattaggctattttttttctttttctctttttcttcttgctcattatctgctcattgtccttggatgggacagttccttatttgagagtatatcacatgttcagatctttttcatatawactttcctggcagacactgattctacaagtgttgtacattgtttaatgattttgtaaaacagatatttactgagagactgcagtaagacagactcatta

SEQ ID NO: 398232 - DNA, 597 bp, Homo sapiens
catattttgccttttggataggcaaaatatgttttagtaggttttagacagcagtaatatcttcctgaaactgagaatgtttgacttttttttaacttgattacagcttaaacctgaggaaaggtgttcaagtcaaaggatatctttttgagattaagatagtgtcatctaaaataaaaaataaatgcttcagagctgagtacccttgtcatcactacttaatagttagagctagccaaaatccaacatcatgccagtttacttactttctgatctgagaactsatctgttgtctacacacaaagccaatttcaaaagagtttcagagtaagcacgtcagagccaagcacaagggtcaagtattaggtgtaaaaaagaattatgaatatttttatagctttgtacatttgctcctaaatgtacacttccagataatttgaaacgatgatgttggcactgctcttaatcaagtttcatgtccagaaagccattttgaactccccagaagggcaggacgtcctgccactgtggttgcagagccacccacaaccttgtccatttctccaacaccataacagcctcaaggatagagttttc

SEQ ID NO: 398233 - DNA, 605 bp, Homo sapiens
ctttttaattttcctgaggtagaaaaattacttcactagttagatgaagctgtaaataggatagggtagtagtttgggagcatatcacccttagttctgatcaatttagctcagttcagtatgacacactcagcatctccctctccaatctgttcatgctgacctaaggaatggaggcaaatcatagaaaaaattaaaaaagaagcacgtatgccattatctaacatcttcccatctcagtagcactttcacttgtataaagctcatctccagtggagatgtgagaaaagtgccragcatctattgaaattacacactgtcaacaacctgggaaaaaataaggttggagagggaaaaacatagtaagaccagactcaagccaacactcttccttgtacttaaaatccactcattcttgcagaaaacattgtcttggacacggcagttgaattcttgtcatttttcagttgtccttaagctggtaagcaggtcttattccccaccttctacaccttccttattcatctcttccttggttagttaccatagagagctgactgttttctaaacttgagttggccatatattgaaatttcctttatgcc

SEQ ID NO: 398234 - DNA, 621 bp, Homo sapiens
ccaattttgtatttactactgtcagtaggtgtaagctcgtatattagttcaagatggatgactttgttttgcgcttggttcccaagacactgaacgttagtaaaaggatacagagaaagctgttaaacagggcaactttggtgcatattaaagtcagaaaagtgcattagtaaagtcagaaaagaacaagcctaaaacattgcttccataaataggcagaagtaatggaaagagaaaaaagaaaaaaaaagtaaacacagaatatatactaaaaatgcctcacctagaagacatttttatacctttattttacattctttaagtaataaatagccctgccataaaatatgtggtattctgggatcaaagtggtaaagtaaacttacataaaagtcattaagaatttaaaagaaatgggaaratatacacaggcacacaactaccaaccagatccattttgtgaacctcagactttgcaagcatttcctgggctctgcaaataaagaatcaggggaaatgtatttctgagaccactgtttatgcaaattatgttaggagaaaggaagagcctataataccacctaaatcatcattcatccattcgttcataagtgcttatgt

SEQ ID NO: 398235 - DNA, 602 bp, Homo sapiens
tctccccaggcactcgtggcttctgattcgctcaaaagacattaataccctcttagagtaaattaggcaggttggaaaatgacattaactctttacactccccagagaggtcatttggtaaatccttgcatcagagcactaattttcttcctggtgtgtggygaatgccctggcggaaaaggcacctgtcagtgtgagggtgaggtcagggaccacattattgggactttattgctaaggagatgagccgaagcctgctacatgtaaatcaaagagttaacaatgggccaggtggccactctggctttgtcatctcagggtcacaactggacaggctacaatctgtcatctttcagacacttggttttggcagccactgtattttgcaaaccatcatttgtgtttctgtaaagcccgcaacatggtattacacagcctgaaatcactcaattttcaggactcattctactcctaccatctaatcttctctgggattaagaagccaaggtgagcttggaaatctctgcggtcatcatttcttcaagttttttcaatttcctattttgagtcagacacaattgtggactccgaacttgacattc

SEQ ID NO: 398236 - DNA, 602 bp, Homo sapiens
tctccccaggcactcgtggcttctgattcgctcaaaagacattaataccctcttagagtaaattaggcaggttggaaaatgacattaactctttacactccccagagaggtcatttggtaaatccttgcatcagagcactaattttcttcctggtgtgtggcgaatgccctggcggaaaaggcrcctgtcagtgtgagggtgaggtcagggaccacattattgggactttattgctaaggagatgagccgaagcctgctacatgtaaatcaaagagttaacaatgggccaggtggccactctggctttgtcatctcagggtcacaactggacaggctacaatctgtcatctttcagacacttggttttggcagccactgtattttgcaaaccatcatttgtgtttctgtaaagcccgcaacatggtattacacagcctgaaatcactcaattttcaggactcattctactcctaccatctaatcttctctgggattaagaagccaaggtgagcttggaaatctctgcggtcatcatttcttcaagttttttcaatttcctattttgagtcagacacaattgtggactccgaacttgacattc

SEQ ID NO: 398237 - DNA, 602 bp, Homo sapiens
tctccccaggcactcgtggcttctgattcgctcaaaagacattaataccctcttagagtaaattaggcaggttggaaaatgacattaactctttacactccccagagaggtcatttggtaaatccttgcatcagagcactaattttcttcctggtgtgtggcgaatgccctggcggaaaaggcacctgtcagtgtgagggtgaggtcagggaccacattattgggactttattgctaaggagatgagccgaagcctgctacatgtaaatcaaagagttaacaatgggccaggtggccactctggctttgtcatctcagggtcacaactggacagsctacaatctgtcatctttcagacacttggttttggcagccactgtattttgcaaaccatcatttgtgtttctgtaaagcccgcaacatggtattacacagcctgaaatcactcaattttcaggactcattctactcctaccatctaatcttctctgggattaagaagccaaggtgagcttggaaatctctgcggtcatcatttcttcaagttttttcaatttcctattttgagtcagacacaattgtggactccgaacttgacattc

SEQ ID NO: 398238 - DNA, 534 bp, Homo sapiens
actaaccctctccacaaactccacatctaatcttcccccatgacccacgtttctgccatccctgtaaatcccagcatatctgcctgtcaaacagctgtctgggtattcacatctttgcttatatcccagagagrctaatctttggaatttttataacccacggggatgagagaagggtaagccgactgatgaaatcccttctgcgttaatgggtgataaagtaaaatccaatccccagggaccatgattcggaaagcctctggtgctacttttatgtgggtcatatatcttaatagattttcaagcaatttagaagacaagacaaagcagctagtaagggccaatttacaaagcctcagttccagagcaacacaccctgtggcctctaacaaaagcccaattggcaaaacaagcctttttcccctaggagcatactcgcacgtctcagaaattccactttaccaaacactcatttgatctactttataaaaacatagctatcttacatattctctggcccactacatgtgttca

SEQ ID NO: 398239 - DNA, 534 bp, Homo sapiens
actaaccctctccacaaactccacatctaatcttcccccatgacccacgtttctgccatccctgtaaatcccagcatatctgcctgtcaaacagctgtctgggtattcacatctttgcttatatcccagagaggctaatctttggaatttttataacccacggggrtgagagaagggtaagccgactgatgaaatcccttctgcgttaatgggtgataaagtaaaatccaatccccagggaccatgattcggaaagcctctggtgctacttttatgtgggtcatatatcttaatagattttcaagcaatttagaagacaagacaaagcagctagtaagggccaatttacaaagcctcagttccagagcaacacaccctgtggcctctaacaaaagcccaattggcaaaacaagcctttttcccctaggagcatactcgcacgtctcagaaattccactttaccaaacactcatttgatctactttataaaaacatagctatcttacatattctctggcccactacatgtgttca

SEQ ID NO: 398240 - DNA, 644 bp, Homo sapiens
catagttctgtttacttttggattaaagggtctcttgcatcattctgtgaatgtgagtgaaagtatagggtggaatgtccccacgttggcacattaatgtgccatcagaggttttgagtttctaatctgacttatactttatcctcaaacagcacattttggccttagaaagccatcgctgctttaactcgaagtgcttttactggagtatgtaactaaggatgcctagggcagttctcagccgataaaagttcttccacttctcagtggaacacaagagggatcaaasaattactcaagtcatgctctcacaacagagagagtcatgggtagatttattttttctgaccaaatgttgtatcaaagtctgtattaattcaattacatggtttgttcatcagcggtgtttactgagtgtctatgtaccctgcagggtctcattgaaaaagaagcccatagtcaaccaataagctccaaatcccttagcttgccatacaatgacatcaattacctgacctctgcttctcattttagttttagctccacacactgccacctccagaacccagtcttctaatcactggaactaaatctgcaacctgagtatgccatggctgcttcaggattggaggacttgaaaattc

SEQ ID NO: 398241 - DNA, 596 bp, Homo sapiens
ttgctaatcaaataaacttgatataatgtatttgagggtaaaaatcatttgaagttatatttaatgttttgctgggtatatctcagtttctagcgtgttagttccctaagatgtgactcctaggcatgagaatctgtattttgaattgaaagaagatgcacagtttctggatacaactagataatagcaggctgacttttctagcacatacacgaggcacagtacttaaggccyacggtactgttaagggcctaaaaaagtgttttatttttaatcagagaaaataaatgaacttttaggccaaagaaaataatacataatattaatatattcacctttaagacaatgtattcataaaatataactttaaaccttttttggaggaaggggaccaggaggataaaagtacctgtgcccgtcgaagtcataacacggctctctataaaagggaaagagggaattctgttttattttaatatgttaaaaacaacccaacaacctcattttattattgccttgatggtactccttacttttcagccttcttaggaactatctgtcggagattttaaatatatccagattatattgtacct

SEQ ID NO: 398242 - DNA, 633 bp, Homo sapiens
tatgagatttttaggtgatttttttaaagctcatcagctatcactagtgttagtgtattttatgtgtggcccaagacaattctttatccagtgtggcccagggaagccaaaagagtagacatctctgctttacggtgaccagccaaataggaaatatgggcttttatgcaaaacacattgtcccaatgatttttttttttaagagaccagttgctcaaaagaacagcagggcaactaccatcaacattatcaggaaggaactcttcccagggatttatataagcaagactttacatgatgcaatgaatgayaagacaggcaaaatctttccacaaatgctagctgatcaatcaaaacaatgtgatttgatggaaaacgacttggttggcagtgattagccagaccatttagctatctcggaaaggctgaagcaaaagttgattggacagcagcaatgatgtaggagctatttcagttaggaagacaagctaatgacatccaagtccccttctgcctctcctatgttgagtcctgctcaatggctcctcccaacataaaaaattacaaattgatgtaagcattcataaacctaaatgtttacagggatggaatggactgaattgtgacccacga

SEQ ID NO: 398243 - DNA, 531 bp, Homo sapiens
cacagccttgcagaaaatctgtgctcctcgagcataaatgctagttgaagctaacagggacagagttgattaatgaactaaaggtacactgctgctcctgttaatacatgcaaagtttacatgttcccarcatcaatgggcttttgcataactgtgatatcttctctgagctaataatctaggttgaggtacttgaggggttcagagtataccaccctgaaatagactactctggcataagaattgttttgagctaaaggcaactgagggaaaaacagacacaggacacactctctgtccttcctttctctaccaggaagactagaacaattcttaatcacctgagacaatgctagactcttatcagcccagagatggcaccagaggaacctacataactttactaaaagaaattgtatcttctattagtttcagcctctatatatagccctccacaagttatagcccttggaaggctaacagtcttttgtcttatgtcttgccacttttctacacatttattattatttg

SEQ ID NO: 398244 - DNA, 423 bp, Homo sapiens
cttctattagtttcagcctctatatatagccctccacaagttatagcccttggaaggctaacagtcttttgtcttatgtcttgccacttttctacamatttattattatttgctaaggtactatatatgcacaagttctttttttttattttttatttttcctgagataagatcttgctctgtcacccaggctgcaatgcagtgatgtgatcatagtttactgcagcctccaactcctggcccaagggatcctctagccttagcctcccaagtagctaggactacaggtgcactccaccaaacctagctaattttgtactttttgtagagatgtgatcttgctatgctgcccagtctggtatgctcaagtttaatcacccctttgagtcacttgtcactgaggtttctcccaagtgatgtgca

SEQ ID NO: 398245 - DNA, 423 bp, Homo sapiens
cttctattagtttcagcctctatatatagccctccacaagttatagcccttggaaggctaacagtcttttgtcttatgtcttgccacttttctacacatttattattatttgctaargtactatatatgcacaagttctttttttttattttttatttttcctgagataagatcttgctctgtcacccaggctgcaatgcagtgatgtgatcatagtttactgcagcctccaactcctggcccaagggatcctctagccttagcctcccaagtagctaggactacaggtgcactccaccaaacctagctaattttgtactttttgtagagatgtgatcttgctatgctgcccagtctggtatgctcaagtttaatcacccctttgagtcacttgtcactgaggtttctcccaagtgatgtgca

SEQ ID NO: 398246 - DNA, 368 bp, Homo sapiens
agactttgcaagtcctgttttcttggaaacagatgattkctcacctttgaggtttgtcttgagaatgtgctctctgatcttcttagagtttagtgcataatcagtttttcttcttttttttcctggctcagcaaattttccaagctaggtttttctagttttggagtatttggaaaaaagcaagtgactttctagtcagggagtccgaaggtcacatccggagccaaccgcatgtcaagtttaatctcctggcctttacaactattaatatttactcatgatgtcttctggacatctacaaaattttagtccacactgtacaattaggaaacaaattatatactgcttttttaatctattttttttaa

SEQ ID NO: 398247 - DNA, 368 bp, Homo sapiens
agactttgcaagtcctgttttcttggaaacagatgattgctcacctttgaggtttgtcttgagaatgtgytctctgatcttcttagagtttagtgcataatcagtttttcttcttttttttcctggctcagcaaattttccaagctaggtttttctagttttggagtatttggaaaaaagcaagtgactttctagtcagggagtccgaaggtcacatccggagccaaccgcatgtcaagtttaatctcctggcctttacaactattaatatttactcatgatgtcttctggacatctacaaaattttagtccacactgtacaattaggaaacaaattatatactgcttttttaatctattttttttaa

SEQ ID NO: 398248 - DNA, 368 bp, Homo sapiens
agactttgcaagtcctgttttcttggaaacagatgattgctcacctttgaggtttgtcttgagaatgtgctctctgatcttcttagagtttagtgcataatcagtttttcttcttttttttcctggctcagcaaattttccaagctagstttttctagttttggagtatttggaaaaaagcaagtgactttctagtcagggagtccgaaggtcacatccggagccaaccgcatgtcaagtttaatctcctggcctttacaactattaatatttactcatgatgtcttctggacatctacaaaattttagtccacactgtacaattaggaaacaaattatatactgcttttttaatctattttttttaa

SEQ ID NO: 398249 - DNA, 368 bp, Homo sapiens
agactttgcaagtcctgttttcttggaaacagatgattgctcacctttgaggtttgtcttgagaatgtgctctctgatcttcttagagtttagtgcataatcagtttttcttcttttttttcctggctcagcaaattttccaagctaggtttttctagttttggagtatttggaaaaaagcaagtgactttctagtcagggagtccgaaggtcacatcyggagccaaccgcatgtcaagtttaatctcctggcctttacaactattaatatttactcatgatgtcttctggacatctacaaaattttagtccacactgtacaattaggaaacaaattatatactgcttttttaatctattttttttaa

SEQ ID NO: 398250 - DNA, 537 bp, Homo sapiens
tgtatgattttgtgtttatccagtcatagctacttctactgtaggtattactgagtccacatgggactgtgggcttgtgacacattgactgcagttcttcaagagccaggaaattttctctaactcaaattcactcttctactttaagaacagaaaggccaatgataaattatataagaagatataacaacaaatttggatagcatgttgattgcaaaacattctgagtgaggttcagtgtcgctgataaggtgcagagaaagttgtggagagactcatggctgcttcactacttcatgggcaacttgcctggcttttcttccctttgttccagatttacttcagcyttactcactttatgtcacttctcttcagccaattccgtttattaaacagatattgagcaaccatcagatgccagacataaccatatgttctagacagcagctaatatactatctggtaaatagtagtagtacactataaatagttgagattaacaactgtgtgaaaagtgaataaacaaatgtatagttt

SEQ ID NO: 398251 - DNA, 622 bp, Homo sapiens
aaggaactgttaagcagaaagaaatgatgatttaataattttggaaatttacaacctatcaggattaaaaagaaacctaactaatattgagactaaggatcaccgttagaaaaaagaaatgctcttgagagaaagccaaagttgtggctggacaggaatttaataattgcagatgtgtgacttctgaactcactcaaccgtctcaacagaagctaagaagagttgggtttatccaggaaaggcctacggagtatgctgttgtttaattatatgagtccctgtgacaaacatgggagacccacaaggttttggggaatattgtatcagcagaaacactgccagactggcctgaaagggacatacatgggacataatgaaggcagactgtcagacttctgggattttataggcagaaaatgggctgatagaactagttggctacaaacatgtattatcattcaaaaaaaagagaagaatgactctgagtgcagagccttgggtacagagggcaaagctcsagacccagagatcatagcttcaagcaacagaaaataattgtcaggtcttgaaacctaaggaaattttccttgctggattttgaactggcttggcatcagtgacc

SEQ ID NO: 398252 - DNA, 573 bp, Homo sapiens
cttgggtacagagggcaaagctccagacccagagatcatagcttcaagcaacagaaaataattgtcaggtcttgaaacctaaggaaattttccttgctggattttgaactggcttggcatcagtgaccactttgtatcttccattgtctcccttaaaatggcagtgtttataactattaactacacttgcccatcattgtattttggaggcagataactttttttttcgaggttctcatgtccacagatggagagggattttggtgtcctatctattgrccctgtcaagttaatatataaaactaacaatcacacatgtatccttcaaagcgaaaggaaaagggagtcagagatagacacaaaacggaggacatacacagagaaggcaatatgaagagagcagcaaagattggaatgatgcaactacaagccaaggaatgctgagggttgatggtgcctaccagaagttaaaagataggcatgcagcagattctcccttacagttttggaggaagtgtgaccttgccaacactttgagtttggacttctggccttcataattatgagaaaata

SEQ ID NO: 398253 - DNA, 573 bp, Homo sapiens
cttgggtacagagggcaaagctccagacccagagatcatagcttcaagcaacagaaaataattgtcaggtcttgaaacctaaggaaattttccttgctggattttgaactggcttggcatcagtgaccactttgtatcttccattgtctcccttaaaatggcagtgtttataactattaactacacttgcccatcattgtattttggaggcagataactttttttttcgaggttctcatgtccacagatggagagggattttggtgtcctatctattggccctgtcaagttaatatayaaaactaacaatcacacatgtatccttcaaagcgaaaggaaaagggagtcagagatagacacaaaacggaggacatacacagagaaggcaatatgaagagagcagcaaagattggaatgatgcaactacaagccaaggaatgctgagggttgatggtgcctaccagaagttaaaagataggcatgcagcagattctcccttacagttttggaggaagtgtgaccttgccaacactttgagtttggacttctggccttcataattatgagaaaata

SEQ ID NO: 398254 - DNA, 566 bp, Homo sapiens
ttaaaatatatagaaaatactgtagtattatgaaggccataytaccaaatttttaggaaatattctatgctaggtattacattaaatattttgttaatctctaacatccctacaagatgaagtcagataaagatagaaattaagactgaaagattaaaggacttgtttcacatcatacagttcataattgctggagcaaagataagaattcaggtctacatctttccattagatcatgctactctttagtcaaactctctaaactactcttcaccaacaattaacgttttctctgtaatatcatcagtaggcgaatgagacttgttaccagcactctattcaaatgtatgtggggtgaaataataaagcacttgaattaagggagattttattcaatgttttaggagagattctctcagcatctagtatccctagttacccccttcagcttcctgaggaggattatttctccttgtctctacaggcctaaagaaaggtaaatcagatgtattaaaagtgccttttcaacttatgagaatctgcagtatgcttagttctttgctggg

SEQ ID NO: 398255 - DNA, 543 bp, Homo sapiens
agattttattcaatgttttaggagagattctctcagcatctagtatccctagttacccccttcagcttcctgaggaggattatttctccttgtctctacaggcctaaagaaaggtaaatcagatgtattaaaagtgccttttcaacttatgagaatctgcagtatgcttagttctttgctgggacactgttacaaaaggaataaatgaattactgaagtcyctgctctcaggaatttatcatgaagagggacagagtggaacttcacaaaattattaggaagtgcaacacaaaagtcagtttaggtcagagccttccctcattctgattccacattctattgctttgaacatgttcatttgtccgatctggagactaactgtttcttatactctgatggtccccttgggtttacaccggtttccactttttctgctctagtagtaacgtctccttgttaggcattagggcttttgcagaatcctttacaatatgacagaataacatgagtcaattatttatagttaaggtgcattgaaaacat

SEQ ID NO: 398256 - DNA, 543 bp, Homo sapiens
agattttattcaatgttttaggagagattctctcagcatctagtatccctagttacccccttcagcttcctgaggaggattatttctccttgtctctacaggcctaaagaaaggtaaatcagatgtattaaaagtgccttttcaacttatgagaatctgcagtatgcttagttctttgctgggacactgttacaaaaggaataaatgaattactgaagtctctgctctcaggaatttatcatgaagagggacagagtggaacttcacaaaattattaggaagtgcaacasaaaagtcagtttaggtcagagccttccctcattctgattccacattctattgctttgaacatgttcatttgtccgatctggagactaactgtttcttatactctgatggtccccttgggtttacaccggtttccactttttctgctctagtagtaacgtctccttgttaggcattagggcttttgcagaatcctttacaatatgacagaataacatgagtcaattatttatagttaaggtgcattgaaaacat

SEQ ID NO: 398257 - DNA, 572 bp, Homo sapiens
tatctcactaaactgtgtgacaatttagtacagtaagtatgtgaagtgcctgatagagcatgacaaatggtggtatctgaattgagagtagtcatgttcattaatactaaaagttttacaggacatttttaaactgtgtattcatctattatgtttcaagtgatgtttaatttaagacttttcagtttgacgttattgcaacagagacatgtttcccatatgaccacatatattcctccctaagtgttatatgttgcagactattcttgtaaaaatatgagacagttaatttaaattcatatcattgattatgtatatggagacaaggtttattaaaattggctggttgacttgattatatcaatttgtatttagggatctatggtcgataaattagatctgcsatttcttcctttcctgagtttcacaggctttgatcaataatttagaagcagctttcttttaaaagacatacgctcaacataagcttaactgaacgacatggatgttaataaaacttttctggctttccaagccgtgattttatttaaaactgaatggacataaatccc

SEQ ID NO: 398258 - DNA, 588 bp, Homo sapiens
aactgcatcttctatgtcatgatctttcacaggctgcaatgaaattgttagccaaaatgggagtcttagatttcaaaggggaaggatctgcttccaagctcatgtgtttgttgacaaaattcagttccttgcagcctgttggacagaggaccttagtctcttgtgggctattgactaaaggccaccatgctgtcccctctgcaggacatctcacaacatggcagcttgcttctttaatgccagtaagggagcctgtctcccagcaagacagattttgcaatcctatatagcatagccacagaagaaacatctcatcacctttgctggattctttgggttagtggtcaccagtcccacacacactaaagaaagagaagaatatgtggggtttgaagaaagcagtacttggtttcatgtaagagatatcttaaaataattaaaactgttcaaagaaggaatgggccatactacgaggaagtgttcacattggctaaatacttctgtcaaaratgttagggattaagtggggcatgatggacaatgaaggcagctcatttctgaattaccttcctagtatgatatggtatc

SEQ ID NO: 398259 - DNA, 588 bp, Homo sapiens
aactgcatcttctatgtcatgatctttcacaggctgcaatgaaattgttagccaaaatgggagtcttagatttcaaaggggaaggatctgcttccaagctcatgtgtttgttgacaaaattcagttccttgcagcctgttggacagaggaccttagtctcttgtgggctattgactaaaggccaccatgctgtcccctctgcaggacatctcacaacatggcagcttgcttctttaatgccagtaagggagcctgtctcccagcaagacagattttgcaatcctatatagcatagccacagaagaaacatctcatcacctttgctggattctttgggttagtggtcaccagtcccacacacactaaagaaagagaagaatatgtggggtttgaagaaagcagtacttggtttcatgtaagagatatcttaaaataattaaaactgttcaaagaaggaatgggccatactacgaggaagtgttcacattggctaaatacttctgtcaaaaatgttagggattaartggggcatgatggacaatgaaggcagctcatttctgaattaccttcctagtatgatatggtatc

SEQ ID NO: 398260 - DNA, 660 bp, Homo sapiens
ctatctccctcttttctttcgtaaaatttggttgcctgggataacgtgtattgcatacaagctgacttccttactgtccctagtaagctatgtgtggctattatttcttcatttatatgcaatgycagaagcttagaagaatgttatctccctttcagttaaaaactcatagttaagaactggccatcttcttgttttgggtattgtggcttggtactgtctaatatatttggagggtatttgattttttaaaaagctactggccatgcctattgagtttcctactgagcccagcacccagaccagtgattgattaaatagtagctgctcaataaatatttgttttgtaaataatgattctattgtcaagaaacaaatcaccaagaaagaaggagctatatatttaagagtactctgttcatctggccaaaatggagttccgagtcccttgctcagctgatgtttgttcacccagaagatggtaaactcctgagaccaacttcgctttgttgttctcttgtggttccttgaccttggaaatgtttttctacaggcagagtatttccccctgttggaattttatttaatattctatctttgtttctactttagaaaacatgccacgtgaataatgatgcctcaggcaaaagaaatcactcc

SEQ ID NO: 398261 - DNA, 660 bp, Homo sapiens
ctatctccctcttttctttcgtaaaatttggttgcctgggataacgtgtattgcatacaagctgacttccttactgtccctagtaagctatgtgtggctattatttcttcatttatatgcaatgccagaagcttagaagaatgttatctccctttcagttaaaarctcatagttaagaactggccatcttcttgttttgggtattgtggcttggtactgtctaatatatttggagggtatttgattttttaaaaagctactggccatgcctattgagtttcctactgagcccagcacccagaccagtgattgattaaatagtagctgctcaataaatatttgttttgtaaataatgattctattgtcaagaaacaaatcaccaagaaagaaggagctatatatttaagagtactctgttcatctggccaaaatggagttccgagtcccttgctcagctgatgtttgttcacccagaagatggtaaactcctgagaccaacttcgctttgttgttctcttgtggttccttgaccttggaaatgtttttctacaggcagagtatttccccctgttggaattttatttaatattctatctttgtttctactttagaaaacatgccacgtgaataatgatgcctcaggcaaaagaaatcactcc

SEQ ID NO: 398262 - DNA, 660 bp, Homo sapiens
ctatctccctcttttctttcgtaaaatttggttgcctgggataacgtgtattgcatacaagctgacttccttactgtccctagtaagctatgtgtggctattatttcttcatttatatgcaatgccagaagcttagaagaatgttatctccctttcagttaaaaactcatagttaagaactggccatcttcttgttttgggtattgtggcttggtactgtctaatatatttggagggtatttgattttttaaaaagctactggccatgcctattgagtttcctactgagcccagcacccagaccagtgattgattaaatagtagctgctcaataaatatttgttttgtaaataatgattctattgtcaagaaacaaatcaccaagaaagaaggagctatatatttaagagtactctgttcatctggccaaaatggagttcygagtcccttgctcagctgatgtttgttcacccagaagatggtaaactcctgagaccaacttcgctttgttgttctcttgtggttccttgaccttggaaatgtttttctacaggcagagtatttccccctgttggaattttatttaatattctatctttgtttctactttagaaaacatgccacgtgaataatgatgcctcaggcaaaagaaatcactcc

SEQ ID NO: 398263 - DNA, 588 bp, Homo sapiens
ctttatgtttatttgtacatatacatttatatatacatgcatttatatattatatatagtgtatatatcacaatataatacatatataattgatacacatacatttatgcatatatgtaaatttaagtatacatcatataagaagaatatggctggcctttgcccctggttcctgaaggcgagactctgaatccttgaaatttcccaagtgataggagtttctttgttattcatgtgtgccttggatcacacttgagtttatgcaaagcagatgattcaggttagggactggttaccaaaaaaaggcaaccatgtgattagagaggctttgagcttgggaagctagaagtggctagagatttggttcaatccacttgcctatgtaatgaaaacccagtaaaaaccctggacaccaaagcttactggaacttcatggctgatgaacacactgacgtcctgagtgggtgatgtgctctgatcccatgagaaaagtgcataraagttctgaatatttgacactcgaagacctcatctatgtgtctctccctctagctagtcctacattgtatcctttaaaataaaactgta

SEQ ID NO: 398264 - DNA, 620 bp, Homo sapiens
gaagcttgatacacaagctgtgaataaggatagaaatatacatgctgcttaaactctctccagctatctttagaaatgcacaacctgttcctgtctttgacattctgtcctttcacaagcactttgtgcacagagagctcagctcagagataaaagctatgggagggtgcactgatgtctgagtgatgtttaaccatgccggtccaggtacagtgcctgtctccggaatgatgcagggatcccaaagtggagagaattagacytatcgcatttgtgattagagtgggcaagtaagtatcaatgatctcctctcttcaaatgtggacagaataagaaaagtgctgtttcttcagaagcaggggtcagccaggtaatttactaacagacaaagaaaatgcaaacattgtctttgtatatcctttgaccatcttgtatcggcctacttaaaaaaaaaaaaaacctttttgttctaataacaaggatttttgttggttcatgtaaatgcaaggtgttctgtggtggtggtggttgtcatgaaaaaatattgtacttctgaaacaattagaacagctaattaaacagtgtagatctgaacagttagagactttacaaatgctgaa

SEQ ID NO: 398265 - DNA, 620 bp, Homo sapiens
gaagcttgatacacaagctgtgaataaggatagaaatatacatgctgcttaaactctctccagctatctttagaaatgcacaacctgttcctgtctttgacattctgtcctttcacaagcactttgtgcacagagagctcagctcagagataaaagctatgggagggtgcactgatgtctgagtgatgtttaaccatgccggtccaggtacagtgcctgtctccggaatgatgcagggatcccaaagtggagagaattagacctatcgcatttgtgattagagtgggcaagtaagtatcaatgatctcctctcttcaaatgtggacagaataagaaaagtgctrtttcttcagaagcaggggtcagccaggtaatttactaacagacaaagaaaatgcaaacattgtctttgtatatcctttgaccatcttgtatcggcctacttaaaaaaaaaaaaaacctttttgttctaataacaaggatttttgttggttcatgtaaatgcaaggtgttctgtggtggtggtggttgtcatgaaaaaatattgtacttctgaaacaattagaacagctaattaaacagtgtagatctgaacagttagagactttacaaatgctgaa

SEQ ID NO: 398266 - DNA, 620 bp, Homo sapiens
gaagcttgatacacaagctgtgaataaggatagaaatatacatgctgcttaaactctctccagctatctttagaaatgcacaacctgttcctgtctttgacattctgtcctttcacaagcactttgtgcacagagagctcagctcagagataaaagctatgggagggtgcactgatgtctgagtgatgtttaaccatgccggtccaggtacagtgcctgtctccggaatgatgcagggatcccaaagtggagagaattagacctatcgcatttgtgattagagtgggcaagtaagtatcaatgatctcctctcttcaaatgtggacagaataagaaaagtgctgtttcttcagaagcaggggtcagccaggtaatttactaacagacaaagaaaatgcaaacattgtctttgtatatcctttgaccatcttgtatcggcctacttaaaaaaaaaaaaaacctttttgttctaataacaaggatttttgttggttcatgtaaatgcaaggtgttctgtggtggtggtggttgtsatgaaaaaatattgtacttctgaaacaattagaacagctaattaaacagtgtagatctgaacagttagagactttacaaatgctgaa

SEQ ID NO: 398267 - DNA, 563 bp, Homo sapiens
gggaacaatttgcaaggactgaaaggatcatttcattaatgctaaccatctctccactttataaataattcgaacaaattcagatctaatatatgtacatcttttaaaaccttggatcgtttatggatttaaaagcattatactgcaatagggaagctttaacatctctacaagatgacaaaaagaataaacagttttacaccagctgccttgacaactactttctctgaaaagattattttagacccccagacaaaatattaagctttaatcagtgctggcctaacactgaatattttgttgttttgtttcctccatctgtttgttattatatgcactatattttgctgaaattgagactataaaacgacaaaaagaaaatctttgtttttrtggttaaagaattcttcaaaaaaatgtcttacagttcaaaatgacaattcactatacaggaaggacttacttgccctagtaaagccaatttttagacatgactctaatctttctttcatctcatcttgccatttctgaaacatgcctggaataaaactgaaaatgtgatt

SEQ ID NO: 398268 - DNA, 563 bp, Homo sapiens
gggaacaatttgcaaggactgaaaggatcatttcattaatgctaaccatctctccactttataaataattcgaacaaattcagatctaatatatgtacatcttttaaaaccttggatcgtttatggatttaaaagcattatactgcaatagggaagctttaacatctctacaagatgacaaaaagaataaacagttttacaccagctgccttgacaactactttctctgaaaagattattttagacccccagacaaaatattaagctttaatcagtgctggcctaacactgaatattttgttgttttgtttcctccatctgtttgttattatatgcactatattttgctgaaattgagactataaaacgacaaaaagaaaatctttgtttttgtggttaaagaattcttcaaaaaaatgtcttacagttcaaaatgasaattcactatacaggaaggacttacttgccctagtaaagccaatttttagacatgactctaatctttctttcatctcatcttgccatttctgaaacatgcctggaataaaactgaaaatgtgatt

SEQ ID NO: 398269 - DNA, 530 bp, Homo sapiens
tttactcaagtggtggtcaatgtgattcaccagttgaattctggctctaattgccattactcaaactatgcctatttatccccagacagggcaaaatgactgcctttgtagcccagctttacagcagcacatttgggacaaccaacacttgcaattgttttctattcatgcttctgagaatacaaattacactaaattgtgagaaatagtaggatgaataatgctaaaattttaagccagtcgtagtatgcatccatccatccatccatccatgcatccatgaatccatccgtccatccatccaacatatatgtgctagatatkgtgctacatgctgggaataaatgatgaagaaaagaaggcatggctcttacttccaagaattttacagtctagtttgggtgggggggcggagctggtgacaggaagaggtagcatcagttcagtcatcacccaagtgtattaaaaaactgtaactgtgacatatgcagggagaggtgcaggtatggctagagcctacaataggggag

SEQ ID NO: 398270 - DNA, 619 bp, Homo sapiens
tgaaatttatatgttaaaaatataaagctcatatgtatcttagtgcttagtaaatgcccattgttaactttattgtcagtgcttttatttttaaaaagttaaagagaacagttacatggtttattcaccaaggataacaacaataatcattttcttatttttaattttatggaaagctcttaaaagatggggataaagcatttataaaattacatctttgtagaaattattgccttgtaaaaatcttctatttaaatcaagagcataaaccttggagaattttgggggtggtgcataacaaatctatatagtttaagataagagtccatggatacctttaaaactataagagaagctggtaggaattaacaggtactgtagatttaagtgaggcragggagctggactaatgagtcccatgaagtcccattaacatattttattagaatttatgttcattctgtttgaatcttgccaaagcaagtttcccacaatggaaagtaagatgtttaactgagattacagtttaatcaccaaagccactggagctttcgcaggtaacattctataagaacttcctgaattcatgttgtgtttcctcataacattaaccacagtc

SEQ ID NO: 398271 - DNA, 518 bp, Homo sapiens
attaacagacaggacacttgtttctaagctttccccgtatgttggtgttaaaatacgacaaaaaaaaataccaattgaagattcactatggttgtttctgtttacaacatatagaacaacaatatcctggratctaacaaaaatgtgaccaaaggctccagcaaatttagaccctgaagggacatactttgtccttatcgatggcagatggtgtctcatattcttgtgggggcattccattttatatagtgtgattaatctacacttttacctttattaatgcacccactcggttcattttcttttgttgcactcctacctttctaaagttactttatacttatgttatttttaaattttttctcttatctgtgtttgctcttaacattataaatgtttttcttgatgcaaccttggcttctttctacaaggggtgttgtagtgctcttaatactttacatttccaaataattagaaacttcgtttatataaacacacacacacacatataaatgtgt

SEQ ID NO: 398272 - DNA, 518 bp, Homo sapiens
attaacagacaggacacttgtttctaagctttccccgtatgttggtgttaaaatacgacaaaaaaaaataccaattgaagattcactatggttgtttctgtttacaacatatagaacaacaatatcctgggatctaacaaaaatgtgaccaaaggctccagcaaatttagaccctgaagggacatactttgtccttatcgatggcagatggtgtctcatattcttgtgggggcattccattttatatagtgtgattaatctacacttttacctttattaatgcacccactcggttcattttcttttgttgcactccyacctttctaaagttactttatacttatgttatttttaaattttttctcttatctgtgtttgctcttaacattataaatgtttttcttgatgcaaccttggcttctttctacaaggggtgttgtagtgctcttaatactttacatttccaaataattagaaacttcgtttatataaacacacacacacacatataaatgtgt

SEQ ID NO: 398273 - DNA, 599 bp, Homo sapiens
gtactggaccttggtaccatgcttcctattttacaaaacagtccatatgtgcaatcacatttgattctcagcgtgcgtctcacagggaggcaggcaggatcgatggttttacttctattttacagattcaaaaactacgccttattcaagttcacatagctggcaagtggattagattaggctcttttaacttcaaacccactgctctttctattccagcctactatatcctttaaagggggggatggattaatttacttccacttgagaaattatcaggacaatgagctacaagatgacaaacaatgagggtttgctatttattatgtgtgaagcagggcattttacccastgaacagcaggatctcaattgttgctcattccaataccatggtaactatatatttttctttttaaaaacaatattaaataatacattgtgcctttgtgtacatataagtgcagtatggtattttggcagtttattgcaaagtatcaaggcttcccgatgacatgctaaggaatcaaattgaaaacactgggtctatgttttcgcataaaaatcaagagccaagaactctcaagtggataccaatgta

SEQ ID NO: 398274 - DNA, 607 bp, Homo sapiens
ccagagtgagcaacccaaaacagaggtagacaatttctcttatgacctagcgttagaagtcatgcattgtaatttccatactatcacattggttagaggtcagccttaaaggactgactaccccagaacatgaagagcagaaggagaggatcactgggccatttggagcctggctcccatgacggctaagatctcattgatatttacaatgaattggtttttaggattaatactagagataaagttccttcttttattgaccttatattctggtgaagaagacagaaaataaactaatataaataataaaataataaattgttacatacaaatatttgccattaaaagggaaaccatgataaagactcactgggtggtgaaactgggatagtttttataagatcattaagcaaattcctcctcaagagacgtttaaaactgagagttcagtgacaagaaggattgaagcatttgatgctctctggaaatgtactaaggcaaacagagagcttgtgctaaagccttaaatggacacaagcctggcttgtttgagacatagraaggaggccagtgtggttggagggctgtgtaaagggaaagcttggaa

SEQ ID NO: 398275 - DNA, 607 bp, Homo sapiens
ccagagtgagcaacccaaaacagaggtagacaatttctcttatgacctagcgttagaagtcatgcattgtaatttccatactatcacattggttagaggtcagccttaaaggactgactaccccagaacatgaagagcagaaggagaggatcactgggccatttggagcctggctcccatgacggctaagatctcattgatatttacaatgaattggtttttaggattaatactagagataaagttccttcttttattgaccttatattctggtgaagaagacagaaaataaactaatataaataataaaataataaattgttacatacaaatatttgccattaaaagggaaaccatgataaagactcactgggtggtgaaactgggatagtttttataagatcattaagcaaattcctcctcaagagacgtttaaaactgagagttcagtgacaagaaggattgaagcatttgatgctctctggaaatgtactaaggcaaacagagagcttgtgctaaagccttaaatggacacaagcctggcttgtttgagacataggaaggaggccastgtggttggagggctgtgtaaagggaaagcttggaa

SEQ ID NO: 398276 - DNA, 583 bp, Homo sapiens
tacttcctccatggctccctcaaccaggcagagttttcgagatatgctgataaatgacatatttccataaaatcagtacatatgcctatatcattctttagtttatcagtcgccatgatgtctctcttccacctttcttcaccctacactctctttaaaaggacagatgatatacacgtcttctgtatattttaagcaacaaatacagttacarcacataatacaatgcttgggaaaccttttttgaatgaataaataaatgcctgattaaagaaatgcatagtagagcagagcaacttttccaaagaagaataaggtatcgttacgcaaaatggcagaaatgtagaccacaatgaaacaaaagtaacatcaactgtttaaaatatgagaaacaattaaatctacaatatctacactgcatgtgcaatctctaagaaacaagttataaatgtgaatccaagaatattcctaaatataaaatatagatatcaaaatggactgctgtggtaagcagccaagatatactctgtccttgaggctacaggctttccaaatcttagaatattttgtaaaagaaattatt

SEQ ID NO: 398277 - DNA, 524 bp, Homo sapiens
tccctgactgattataatgagtataaagtataatgagtataatggtcgcaatttaaagtcacattggtctgatatcaaaccttagctttttttttcttttaacaaggcagagtctcactctgtcactcagactgaagtgcaatggcacaagaagatgggaccacaggtgtgcaccatcctgcctgctaatgtttttgtttttttagaarcaagttctccctatgttgcccaagctggtctcgaacatctgggctcaagtgattctcccacctcagtctctcaaagtgctgacattacaggtgtgaggcctcccaaacctaaactcttaaccaataggctatatcttcttaacatggtattagatgattttaaattatattacatttattatattttgtatatattatatccatgtatatttatatatgtatatagataatatgatatactatatcagataatatgatataacataaataatacattatacagtgcgctggatctggcttgtactgcttacaata

SEQ ID NO: 398278 - DNA, 497 bp, Homo sapiens
atattgatcatagtgggagtatttatttacaccatgacgatagcaaatgagacaaatactgcttttttttcctaaggagctggatrtaaaacatttacctacactgctgattgtattatactattttagagttgcttatgtaacagcccatatccaataatttgcccctcaggtgaaggggttgtattttaatgtcaccttttttcgagctggtgtgtagcacagtgcctcacacatagtgggtacttggtaaattatccttgcacaaatgagtgaatattttccagtgactttcacagcttttacaacatttacttccattagtctaacaggttcaatgtttgtaatatcactacagtgggttgccaaggaataaaacgcctgaagtctgaagtgcagttctttgcttctcagctgaattgattcacagagaagaaacacaccgcatatcaagtacctcactcttatatttacctgcaaggtctggaaggatgcta

SEQ ID NO: 398279 - DNA, 553 bp, Homo sapiens
atttacctgcaaggtctggaaggatgctagctctatagggaactaaatgaagtctatagccctcaaaacaaagtgattacaaatgcacaagtaaaatgcaaacatttgagttacgtatgcatgtttgcctttattttatcttacttcttttgttttctttctttctttccccttgtcctgttctctgtcttagcctggctttgaagtgatctagccattaaaatcctaggttcctgttgyaaagtagaatcctttccaaaatataaaaacaaaatctcactcacttcttacaaatgatgatgaggatggtaatcatgatgatcgtgatgataattgagtccagaaacttactgttttcctacaatttctagataaaaaaattccagaaataatttttatccaagattaacacagactttagaatctgaaagactgtttacacatcccagctctgcactgaccaagtatgtgatcttgggactcagttttcttttctgtaaaaagatacaatgcacttacctcaaagagagaaattaaacaatgtattgaaagc

SEQ ID NO: 398280 - DNA, 621 bp, Homo sapiens
ccaattttgtatttactactgtcagtaggtgtaagctcgtatattagttcaagatggatgactttgttttgcgcttggttcccaagacactgaacgttagtaaaaggatacagagaaagctgttaaacagggcaactttggtgcatattaaagtcagaaaagtgcattagtaaagtcagaaaagaacaagcctaaaacattgcttccataaataggcagaagtaatggaaagagaaaaaagaaaaaaaaagtaaacacagaatatatactaaaaatgcctcacctagaagacatttttatacctttattttacattctttmagtaataaatagccctgccataaaatatgtggtattctgggatcaaagtggtaaagtaaacttacataaaagtcattaagaatttaaaagaaatgggaagatatacacaggcacacaactaccaaccagatccattttgtgaacctcagactttgcaagcatttcctgggctctgcaaataaagaatcaggggaaatgtatttctgagaccactgtttatgcaaattatgttaggagaaaggaagagcctataataccacctaaatcatcattcatccattcgttcataagtgcttatgt

SEQ ID NO: 398281 - DNA, 484 bp, Homo sapiens
gtcctattggcctggagcaaggcaggatagaagttacaagaagagtagagtttaccaagttgtatgaaagtgtaagattttctgttatatttcaagtaatgaaatttcaacttatatgtatgtctacatatagctagcatactctatcaaatagcatcagtgcaatgccttagataggcatcttcattaatgaatgtttttggagtatcctctaacatgctgttttgtcaaaggaaaaagaagcaaaataagtgctactgattagcttccataaagcatatacctctgctttaaattctggccattaaatgtcagtcttcccatatcctaatttgttggccatccmcaatatctaagaaaattcatatcacttttgtgcacccgaagatgaatactaacttgatcaatcaagttgaatattctgcacaaaatctccgttcaagaaatttaccaattcttaagttctgtatgagaggtgagggat

SEQ ID NO: 398282 - DNA, 613 bp, Homo sapiens
gtgtgaaattgcgagccttaaatgggtcttatactgggcccctatgacttaaacagatgaatcctgtcatactagtaaatgtaattactttcacgttttttagcaattgagattggaagatcaaactggaagtcaaagtaattgtatcaaatgactgtgatagtatttttcctgaaggtatacaattgtggctaggattattaattcagaaaatgcttgccatggtgaaagcaccagcaacttgcagttctgaagtatgttcctcttttttccttttcattaaattctgtctttggggagctccttataggggtgagtttctaccagttgtgtgtgggtccagagaactgatagaactcttgccccactgaggggatggttatgccaaaacacaaagagacgaaccaacaattgtctttggttgaagactcaaaccaataatatatgcttattgtaattgatattttttcattttattccaagaatttagttaaataaaccatatctaaagttttataccagttggaataatctagaaattccaggaatttattagtcaaaaccagagattaaacaaataatrttcttctaatatttgttttataattgaaat

SEQ ID NO: 398283 - DNA, 493 bp, Homo sapiens
ccttcccctcccttgtgtgctctcacctttgctccatctgcaagatgcacccttctatagaagtraaattgccttgctgagaaaattcacgtttgagtgctatttcttttgcagcaccgaaaatttatttctaacacctgtaaagccaactacttggtaggcagagatgggagagtgcagtgagccatgattgacccctgaactccagtctgggagacagagtgagaccctatttctaaaaaaaaaagaaagaaaaagaaaaagaataaaacataaatctctatattttggagcacttgtctatttccaagaagttgcaaggacaaagggcatatatactatggaggtgtccatcttggtcgtagtaaccgataagcattttttgtatagcaggagtgccaacctattgtctgccaagcacatgctgcaaactcctctagtttagctttggttatatacttttttacacatagaattttaaaaatttgatgta

SEQ ID NO: 398284 - DNA, 493 bp, Homo sapiens
ccttcccctcccttgtgtgctctcacctttgctccatctgcaagatgcacccttctatagaagtaaaattgccttgctgagaaaattcacgtttgagtgctatttcttttgcagcaccgaaaatttatttctaacacctgtaaagccaactacttggtaggcagagatgggagagtgcagtgagccatgattgacccctgaactccagtctgggagacagagtgagaccctatttctaaaaaaaaaagaaagaaaaagaaaaagaataaaacataaatctctatattttggagcacttgtctatttccaagaagttgcaaggacaaagggcatatatactatggaggtgtccatcttggtcgtagtaacygataagcattttttgtatagcaggagtgccaacctattgtctgccaagcacatgctgcaaactcctctagtttagctttggttatatacttttttacacatagaattttaaaaatttgatgta

SEQ ID NO: 398285 - DNA, 491 bp, Homo sapiens
gtgacctaaactggcagtagttattccgggtgatgtattaagctgccaacacactctgactccagggtcccttgacctcctagctgaaggtccagagctgcttggccatgggcaggtctgtccctctgtcctgagtatcttcactgwgttgccctctggtctcttcccatccctcccgctttcccccaggtgcttcaacccctcctttctccaggcctcttcaccagggccctgataagggagcagatgggagacccacatcctctggaccacactggccagctggccaagcccctggaagtagagaagacccccgcaaggtgtgccttgatccttcatttccatctgtcggccctggcctcccgacatgttcgggacatgggcccagtctcggctccatgcccctgatctccactcaccctgacccccagcaggaacatagcttcagtgtccatccagccatctgtgcagccatccgcccacacagggat

SEQ ID NO: 398286 - DNA, 491 bp, Homo sapiens
gtgacctaaactggcagtagttattccgggtgatgtattaagctgccaacacactctgactccagggtcccttgacctcctagctgaaggtccagagctgcttggccatgggcaggtctgtccctctgtcctgagtatcttcactgagttgccctctggtctcttcccatccctcccgctttcccccaggtgcttcaacccctcctttctccaggcctcttcaccagggccctgataagggagcagatgggagacccacatcctctggaccacactggccagctggccaagcccctggaagtagagaagacccccrcaaggtgtgccttgatccttcatttccatctgtcggccctggcctcccgacatgttcgggacatgggcccagtctcggctccatgcccctgatctccactcaccctgacccccagcaggaacatagcttcagtgtccatccagccatctgtgcagccatccgcccacacagggat

SEQ ID NO: 398287 - DNA, 592 bp, Homo sapiens
tggtaaatttgtgatcatatagacatgacctcaaatactggttatgcaacggggattcagggactctaaaaataaatgaagatttataaaacctggccactcctggcaaacttgtgaggctgaaccatcttctggctcagacgttccccttttctctgatcctctctccagccacaatttactttggagacgagggtctgatrcactatctcagcagagaacccccctgccccatgctaaaatatctcctacctttccccaaatctggataacttagctcttgctctcagccaaaggtatcagtccccaaaattaacacagcaaaatgttgatgatttgtaactgtttactgtgcgtatgtgccattccaagagaagatgctcattaaagcagaagcaatgaattgctttattgattgaaatctaagcaaattaatatctaatagtaaagttttagaaagtatactctacttcaaggaactcatttttgaatcccggacctttcccgggacttttacagcatgtagatgaatgtggtcactctcgataatagcaacacccccctccctccatgcagttgctagtgcattaaa

SEQ ID NO: 398288 - DNA, 592 bp, Homo sapiens
tggtaaatttgtgatcatatagacatgacctcaaatactggttatgcaacggggattcagggactctaaaaataaatgaagatttataaaacctggccactcctggcaaacttgtgaggctgaaccatcttctggctcagacgttccccttttctctgatcctctctccagccacaatttactttggagacgagggtctgatgcactatctcagcagagaacccccctgccccatgctaaaatatctcctacctttccccaaatctggataacttagctcttgctctcagccaaaggtatcagtycccaaaattaacacagcaaaatgttgatgatttgtaactgtttactgtgcgtatgtgccattccaagagaagatgctcattaaagcagaagcaatgaattgctttattgattgaaatctaagcaaattaatatctaatagtaaagttttagaaagtatactctacttcaaggaactcatttttgaatcccggacctttcccgggacttttacagcatgtagatgaatgtggtcactctcgataatagcaacacccccctccctccatgcagttgctagtgcattaaa

SEQ ID NO: 398289 - DNA, 538 bp, Homo sapiens
atactcaatacatattcattgaaccattagaatgaattttatacacacacacagacacatacacacacacacacacacacacacacatatatgtatatatagtgtttgctgtataccttatttaaaataatttatgtgaggagtctaaacttatgcaatggatatattatgaccctctccactataaaagtcttagatactgacattgtctattacagagaagtatgtgtagtttctgacgctgccagagagagacaaacagccagtgaaacttcatgttcaaacattagtaggaactactcactgtcagtagtacaaataagacagtgagaaatcaggtcttgatttatatacaaccctttaaatctaacttttcatagtctgargttgcataatattctgtatgtaacttaaatctctcatattgactgttcatcaaggatctactctttggttaaaccaaaaaaggtaaaatgaatgctcttaaaaaggccactgttttgttttgtgtttcttcagagcagactctgagaaaaga

SEQ ID NO: 398290 - DNA, 579 bp, Homo sapiens
gaaactcatagaactgtataacaaagtaaaggtcaattttataatatgttaatttaaaggtaaaaataaatatttgagaaatatcatagatggaagctgcaatgataaatttattctcataaacatattgacaattcattaatcccaagtttgaccttgaagaaacttcaatatcaattgaaataagagttctacatgcagaaatgcctgaaagtaggacattatgtaaaagtggcagccttggcatggggcagcagatgcaatggggagatgtgtgtaacaggatgagaggtaacaggcagcataacctarccaaggggccagaggatcagagagcaattgttcccaggtagacataaaggccagggtcaagtacaagggtctgagaacagaaaccaaaagcagaagttcaggcatggagccaagaacacgtgctggcgatgaaaaatcagactacagtttagctgcctcacagagctcaaggcaagagaccatccagctcttggtgtaggggtactaaggagtgaggcagaacaaggataaagcagatagaggcatcctgtagggttcagggcgcag

SEQ ID NO: 398291 - DNA, 559 bp, Homo sapiens
gactttttgttataaagagttacagccggcaaagtggctgtccctcaggctgggaaatgtagccttaagcaaagacaagagccaggcacttccagggaggtaggaataagacaagaatttatgctgaatgggttggctaaatataktcaacagggtataggagaatctgtgaatattcatgaaagggggtcttgcacatttattataagcaaacatgcatgttacatgtgatccatgttcactttggggtggaaacaacatttaaatgcattaaaattagggtctatacatcaaaaggtgaagcagggacacaaaagcactcaaatgtgcagcctctgtagactggccagaaagagttcatggttggtggtcttcatattaggagaaagttcctcatatcagtctcttgtccaatcaaggctgcagttatagcatgtggaaccaaggtcagttagcacctgataatagatgtgctgcaattattttaacattccttatcttgaggtcagtgcttgtttagctgctagagagaaagaaaacccttgcggcagtaagaaca

SEQ ID NO: 398292 - DNA, 559 bp, Homo sapiens
gactttttgttataaagagttacagccggcaaagtggctgtccctcaggctgggaaatgtagccttaagcaaagacaagagccaggcacttccagggaggtaggaataagacaagaatttatgctgaatgggttggctaaatatagtcaacagggtataggagaatctgtgaatattcatgaaagggggtcttgcacatttattataagcaaacatgcatgttacatgtgatccatgttcactttggggtggaaacaacatttaaatgcattaaaattagggtctatacatcaaaaggtgaagcagggacacaaaagcactcaaatgtgcagcctctgtagactggccagaaagagttcatgkttggtggtcttcatattaggagaaagttcctcatatcagtctcttgtccaatcaaggctgcagttatagcatgtggaaccaaggtcagttagcacctgataatagatgtgctgcaattattttaacattccttatcttgaggtcagtgcttgtttagctgctagagagaaagaaaacccttgcggcagtaagaaca

SEQ ID NO: 398293 - DNA, 559 bp, Homo sapiens
gactttttgttataaagagttacagccggcaaagtggctgtccctcaggctgggaaatgtagccttaagcaaagacaagagccaggcacttccagggaggtaggaataagacaagaatttatgctgaatgggttggctaaatatagtcaacagggtataggagaatctgtgaatattcatgaaagggggtcttgcacatttattataagcaaacatgcatgttacatgtgatccatgttcactttggggtggaaacaacatttaaatgcattaaaattagggtctatacatcaaaaggtgaagcagggacacaaaagcactcaaatgtgcagcctctgtagactggccagaaagagttcatggttggtggtcttcatattaggagaaagttcctcatatcagtctcttgtccaatcaaggctgcagttatagcatgtggaaccaaggtcarttagcacctgataatagatgtgctgcaattattttaacattccttatcttgaggtcagtgcttgtttagctgctagagagaaagaaaacccttgcggcagtaagaaca

SEQ ID NO: 398294 - DNA, 506 bp, Homo sapiens
ttctgtcagatcctcctttgtcaattactttgyatgtgattagagaaattctccatcatccttttcatcttggcaaaactctgcctattttccaagatacacagtttccttttgcaatcaaattacgatgtatttgagctgtgttatcagatgtttgacagcaacctgcaaagatactgatgctgtggatatagagagaagagcatggaatgaagagggacccttgcatggggactaattttaataagtgatgagtttattggtacaggctgtcatcagtgatgtcttttgtcccactctccatatctttgtaacttcggggatggtgataaataatacttggtaagagtattctctatagtagaaaaataataattcttaagtcgtgcagagctcttcacaatctaatcttgtatccaactctttgtgtcccctaacagcatcccttagagagaggtgacacatgcatttcccagatgagggagctgaaacttagcaggctgtac

SEQ ID NO: 398295 - DNA, 537 bp, Homo sapiens
aaaagcgttcctatttctctacatcctctccagcacctgttctttcctgactttttatctccattctaacttgtgtgagatggtatctcrctgtggttttgatttgcatttctctgatggccagtgatgatgagcattttttcatgtgtctgttggctgtgtatttgtattggtagtaggaaatgcacaacgtctgtttttcttttgtctgtagaaaatatttcattcatcttttttgttttaacttgattgtaggacatgtgacatgcctatatgaagaagaaattctgaatgtaatatattcaggaccaaaaaatggaatcttactgaaatacagtcaggttaaaatattttgcttatagattgctctgtactgcacaaggcttttccaaaaaattagctaactcccttagttcatcatatcgcataagagttcctttgaaaatataggagctatgtgtatttttttaaaggagctctgtgtattttaaagacaggcacaatcctgtatctttctaccacacactcacattaaca

SEQ ID NO: 398296 - DNA, 555 bp, Homo sapiens
tgacttaaaacttacagattgcttcatggggtccttcaagaaataataaaatataacacagactagcaaagcttgtttagaagaggggcctattttcttctcattccacactttgagggtcttggccaattgagaatcaagaaagcctgtcaaatttacttaattaaaatgaaaagaaagaaaatccactttaacatttctaatcaacaggagtctaatgagtcatgttggttcctggagttgagacacrgtagggcatttttggagctaatttgcttcattaatattcaaaggatgtagatcatccagcattttctaggatacttaagagccagaaacatcagagggaaagttttattttgcaagtcatattaaacagatgtcccacatcgaaacaactgtagcatttaatctacagagttgtcagtttgaataattatcttatttcctgtctcagtctcactgtcaaagtggacctgcaaatctcacacctaagataatcctcttctccaatttttagacttgacactgatgctactaaggccaccacggcca

SEQ ID NO: 398297 - DNA, 621 bp, Homo sapiens
tactatatgtgtgtatgtgtgtgtgtgtgtgtaactggtcctgtttctttggagtaccctgaataatacactatatttatatttttattatctggagaaattattcactatggagataatatatatactattattttatttttaattttttttcctggagttcctcatttttatccatttcctacttgcttttatcatatgtctgttactctcttgggctctctattacatcaaatttttctattgacttcctgggacttccagctcctgctctgaattatttactgtgcaactaccattttgggacttccctttaagctgttcctgttctggactcactgtttttcaaatcttatgctctcctttttttggtactggttctgtgttggtcagaatagactcctttatgctgaagtaacaacaacctacaacctcaatggctcaaaaycccaagtttcattgcctactcagagtgcacgtccacttcagattggcgtggctctgcctgactctcccattctcagaaccaggctgacagagcagcatgctgcctggcaaaggaaaagaaaacttggcccattttgcattggctgtaagacattccacttgaaactgatacat

SEQ ID NO: 398298 - DNA, 608 bp, Homo sapiens
gctaattcactgagatgggatttattaattgctaacaaactataaaataatgtgtgtctcttttcctggacccccattaagcaccgtcatttagccagcatgacatatgtgctgtcatttcaaaagccaatcctaccatttagaatcctcctcaattattagtcttccttttaaatctggcagctctccatagcccaatgaaacgttggccatccctccactctgtgatagcgtcagtaagaaatgaaatgaatcaaagctccagctgtggcccggcaagtctgctgcaagtacagccagtcttaattgatgaagccatttactgggtctstaaattaaaatattggatttgagccacatgacttcctaggatcagcctgacctctctctggagctcagaggtggtgacatcagaatacagcaggaagtggatgagtgcattgcttctgtaattaaagtccttcagcctccaggaaatggtgacaaagctgtgacttaagacatagggcagataaaatgttaattgcaaacttgtaggagggggcataaggtatgctgcactgctcacctcgctgagactttaacaagatggcatctgagggttgatg

SEQ ID NO: 398299 - DNA, 571 bp, Homo sapiens
tgctgtactagttatttattactgtttaataaattactctctccaaattagtgacttaaactaacccatagtcattatctcacagtttctgtgcatcaagaatctaggcatggcttagctgagttctctggtccctaacaaggcctaatcaaggtgctggctgggctgcagtctcatcttcaggcttgactggggatggatcttmttctaagtttactcaagagatttttgtcgggattccattcttcatgggcttttaacagagtgcctgagctcttcactggctgctggccagaggcctcctttagttctctgccacatgggcctccccataggatcatctgcaacatgtagctggcatcgtcagagagggcaatcaagatgacaagatagggaatgtaagcaagatgaaagacagtcttttgatacttaatcttggaaagggcatcccagtacttttgccacactctgtttgtttgaatcaagtcactagatccatccacgcacacagggagggaattacccaaggacgtgactaccaggatccagggctcattgacagctatctgac

SEQ ID NO: 398300 - DNA, 571 bp, Homo sapiens
tgctgtactagttatttattactgtttaataaattactctctccaaattagtgacttaaactaacccatagtcattatctcacagtttctgtgcatcaagaatctaggcatggcttagctgagttctctggtccctaacaaggcctaatcaaggtgctggctgggctgcagtctcatcttcaggcttgactggggatggatcttattctaagtttactcaagagatttttgtcgggattccattcttcatgggcttttaacagagtgcctgagytcttcactggctgctggccagaggcctcctttagttctctgccacatgggcctccccataggatcatctgcaacatgtagctggcatcgtcagagagggcaatcaagatgacaagatagggaatgtaagcaagatgaaagacagtcttttgatacttaatcttggaaagggcatcccagtacttttgccacactctgtttgtttgaatcaagtcactagatccatccacgcacacagggagggaattacccaaggacgtgactaccaggatccagggctcattgacagctatctgac

SEQ ID NO: 398301 - DNA, 410 bp, Homo sapiens
taattataaaaggaaggcaatgaatccacagagtactacatggactaactctgaacagtacttacatagccataccactgaatattgatttaaccaagaaatgcgatgttactattccagaatgatacagacagtgacagtgtgcatgcgtgtattttgtgggaaccatgtaaaaaagtcaaatcttcaaatcttcattatyctttctttctttctttttttttttttttgaaacagagtcttactctgttgcccaggctgggctgcagtggcacaatctgggctcactgcaacctccacctcccaggttcaagtgattctcgcacctcagtctctcaagtagctgggaccagaggtgtgcagcaccacacccagcaaatttttgtatttttagtacagacagttttcac

SEQ ID NO: 398302 - DNA, 440 bp, Homo sapiens
tttgtatttttagtacagacagktttcaccatattgaccaaactggtctcgaactcccaacctcagttgatccacctgcctcagcctcccacaatgctgggattacagccatgaggcaccatgcctggactcatttttcataataaaaaataatagaagaaaactgtaaaatcaataaatagcagataagtttttatattaaaatgtggaagtaacttctagaacttccaagtggttttctctagggaatggatatcagaggtaggaagggtcgggtaaagaaaatttctttaaattttgtgctactttaatttttaaacattttttaagcattacttttgtaaaaaattaaattaaattaggaagtaaacatagatatttaaaacattttcaaaagaagattaaaccatgatcccatctttcaaacataacaatttcat

SEQ ID NO: 398303 - DNA, 440 bp, Homo sapiens
tttgtatttttagtacagacagttttcaccatattgaccaaactggtctcgaactcccaacctcagttgatccacctgcctcagcctcccacaatgctgggattacagccatgaggcaccatrcctggactcatttttcataataaaaaataatagaagaaaactgtaaaatcaataaatagcagataagtttttatattaaaatgtggaagtaacttctagaacttccaagtggttttctctagggaatggatatcagaggtaggaagggtcgggtaaagaaaatttctttaaattttgtgctactttaatttttaaacattttttaagcattacttttgtaaaaaattaaattaaattaggaagtaaacatagatatttaaaacattttcaaaagaagattaaaccatgatcccatctttcaaacataacaatttcat

SEQ ID NO: 398304 - DNA, 505 bp, Homo sapiens
actggtctcgaactcccaacctcagttgatccacctgcctcagcctcccacaatgctgggattacagccatgaggcaccatgcctggactcatttttcataataaaaaataatagaagaaaactgtaaaatcaataaatagcagataagtttttatattaaaatgtggaagtaacttctagaacttccaagtggttttctctagggaatggatatcagaggtaggaagggtcgggtaaagraaatttctttaaattttgtgctactttaatttttaaacattttttaagcattacttttgtaaaaaattaaattaaattaggaagtaaacatagatatttaaaacattttcaaaagaagattaaaccatgatcccatctttcaaacataacaatttcattttgcaaattactttccaaactttcttcacatatctttgtattattacatatttgcagtcatatcatttgttattctgattttatagttttcattaatcaattcag

SEQ ID NO: 398305 - DNA, 505 bp, Homo sapiens
actggtctcgaactcccaacctcagttgatccacctgcctcagcctcccacaatgctgggattacagccatgaggcaccatgcctggactcatttttcataataaaaaataatagaagaaaactgtaaaatcaataaatagcagataagtttttatattaaaatgtggaagtaacttctagaacttccaagtggttttctctagggaatggatatcagaggtaggaagggtcgggtaaagaaaatttctttaaattttgtgctactttaatttttaaacattttttaagcattacttttgtaaaaaattaaattaaattaggaagtaaacatagatatttaaaacattytcaaaagaagattaaaccatgatcccatctttcaaacataacaatttcattttgcaaattactttccaaactttcttcacatatctttgtattattacatatttgcagtcatatcatttgttattctgattttatagttttcattaatcaattcag

SEQ ID NO: 398306 - DNA, 505 bp, Homo sapiens
actggtctcgaactcccaacctcagttgatccacctgcctcagcctcccacaatgctgggattacagccatgaggcaccatgcctggactcatttttcataataaaaaataatagaagaaaactgtaaaatcaataaatagcagataagtttttatattaaaatgtggaagtaacttctagaacttccaagtggttttctctagggaatggatatcagaggtaggaagggtcgggtaaagaaaatttctttaaattttgtgctactttaatttttaaacattttttaagcattacttttgtaaaaaattaaattaaattaggaagtaaacatagatatttaaaacattttcaaaagaagattaaaccatgatcccatctttcaaacataacaatttcattttgcaaattactttccaaactttcttcacatatctttgtattattacatatttgcagtcatatsatttgttattctgattttatagttttcattaatcaattcag

SEQ ID NO: 398307 - DNA, 556 bp, Homo sapiens
ttcattgacacatcttacccacagagtaaaatatataaaataagcattgyagctgcatcctctccatgaggaaagaagtcatgaagctttgtacaaatagatgtagcaagggaatacagttggaaaattaactgttttatttattcatttcttgtacgcttctcttgaaagaataagagccatgctttctttcttcttcccaagagcttcccaggggaaagttaaattaaatattcttttgcctgagaaagtggcggctaaaagtagttttaaagcctcattttaggagtcactcttatgagctattgacttgagctcaatttggtttccagggtgtggtttgtacgtatgatgtacagcctgcaagaaacatagggctagttttgttttaggaaatgaagattaataaccaccagctgggccattaataactttggttgtgtgggacaaaaacaaattcttagataaatttgttatcccataaatattggtgaagcagtaaacttctgagtccaaattagttaagtttctaaggccataaaacactttcacttct

SEQ ID NO: 398308 - DNA, 556 bp, Homo sapiens
ttcattgacacatcttacccacagagtaaaatatataaaataagcattgtagctgcatcctctccatgaggaaagaagtcatgaagctttgtacaaatagatgtagcaagggaatacagttggaaaattaactgttttatttattcatttcttgtacgcttctcttgaaagaataagagccatgctttctttcttcttcccaagagcttcccaggggaaagttaaattaaatattcttttgcctgagaaagtggsggctaaaagtagttttaaagcctcattttaggagtcactcttatgagctattgacttgagctcaatttggtttccagggtgtggtttgtacgtatgatgtacagcctgcaagaaacatagggctagttttgttttaggaaatgaagattaataaccaccagctgggccattaataactttggttgtgtgggacaaaaacaaattcttagataaatttgttatcccataaatattggtgaagcagtaaacttctgagtccaaattagttaagtttctaaggccataaaacactttcacttct

SEQ ID NO: 398309 - DNA, 595 bp, Homo sapiens
tatctgggagatgatttcaggtatcatacagaaagaaaaagacagaagagagaggaaggacaatgagtgagttaatgctgacaatcaggactccattccatcaggtatgctctgtgaaacccacctcagaatggccccactgaaggaaagccaactyttacccctcagtggctaaagtttgtttctggggacattaactatccattctgggatgtgtatgggatgaatatgctcctatggccagagaatgttcccagatatgtgggcagttgagatagaaagacatcagcaggtatgattactgtcccctcaagctgcagttctcacgcctgccaggagagcagagagagaatgttggaagggtgcaccaatagtgtgtgatatatccatttatttttattgtgaattcaagccattggatcacctctttttcaagacatttggaatcctctctcaaatctgttgattgtaagtgacagaaaatcaaacccaaactgggtcttaaccacaaaaaggaatttactggatcaggtagaagaaaagtccagaaaaaattttggctttaggggctgagctacgcaggggctgtggcaag

SEQ ID NO: 398310 - DNA, 501 bp, Homo sapiens
attctcaactctcaccaagggggtatcatggcccttttctgtggtccttgtgttaccatcaccactcataatactttgttctcactattggctgattttattccccactataagctctttaaggaaaggaaccatgtcttctttaattctgattgcgtgatttaagaactggcaaatgttcagcatttmgtaaatctttattgaataaagtaagatcagtatgtttctgatcagccaagggtttttggtgtatttaatgtccataatggcagcctagttagaacatgacttgaaaaataaatgttatagaaaagacaggcacaatttagttctcatgctttctggaaaggtgtgaagctctgaaaccactatacccatctatttagataaatatgataagatagaaggagtgctctattttagaaatagagacgctttttctttctcttggataagacacagtggaatccatttctaattatgaaaataagaaaaagacaa

SEQ ID NO: 398311 - DNA, 501 bp, Homo sapiens
attctcaactctcaccaagggggtatcatggcccttttctgtggtccttgtgttaccatcaccactcataatactttgttctcactattggctgattttattccccactataagctctttaaggaaaggaaccatgtcttctttaattctgattgcgtgatttaagaactggcaaatgttcagcatttcgtaaatctttattgaataaagtaagatcagtatgyttctgatcagccaagggtttttggtgtatttaatgtccataatggcagcctagttagaacatgacttgaaaaataaatgttatagaaaagacaggcacaatttagttctcatgctttctggaaaggtgtgaagctctgaaaccactatacccatctatttagataaatatgataagatagaaggagtgctctattttagaaatagagacgctttttctttctcttggataagacacagtggaatccatttctaattatgaaaataagaaaaagacaa

SEQ ID NO: 398312 - DNA, 501 bp, Homo sapiens
attctcaactctcaccaagggggtatcatggcccttttctgtggtccttgtgttaccatcaccactcataatactttgttctcactattggctgattttattccccactataagctctttaaggaaaggaaccatgtcttctttaattctgattgcgtgatttaagaactggcaaatgttcagcatttcgtaaatctttattgaataaagtaagatcagtatgtttctgatcagccaagggtttttggtgtatttaatgtccataatggcagcctagttagaacatgacttgaaaaataaatgttatagaaaagacaggcacaatttagttctcatgctttctggaaaggtgtgaagctctgaaaccactatacccatctatttagataaatatgataagatagaaggagtgctctattttagaaatagagacsctttttctttctcttggataagacacagtggaatccatttctaattatgaaaataagaaaaagacaa

SEQ ID NO: 398313 - DNA, 575 bp, Homo sapiens
ggatttcaaagcctgcaagcaaaatatgttggcttttttttctctatttctctttacctacccaaataatttgtaaaggatttatctaagatataatcatctctgctatctcagggactattaagagatggtggaccttgacacaatgaagaatggaaggcccagatttaaggacattgcaaattacatgggactaattccaattccttcagaggacaaatttctttggggtctgagtcatatagtttggctgcacagctcttttcccaatcacctgaatgaccagcgtttggatctgggttcatttagctgcaaggggacttcattaaatgctgtgtacacaaaagttcaacaattcttcacattgaaaaaagggaaaagaggagcscttccagcaaaacaactgaatagacactgtaaatgttactaaacaggaaagtacagagaagtgcctgctggaaggagatccatggcagaacaaaaatagcacaaagagagattctctgtcatccatcaagatccaaaagcagttctccaggctaaccaatgatttgattaattagagatttatcacg

SEQ ID NO: 398314 - DNA, 494 bp, Homo sapiens
catagtaggtgctcaataaatacttgtgaaatacatgaatattagatggttattcatattattttaagtagttaatatttctttacttattcatggccttcaagttcatatacaacatgattaaaatcaatcaatcaatttgctactagrtaattgcccctaaaaggatcagtggttatctgcagggcttttaaataaactccatttgctactttatgcggctaaaggagtgtaccaagagaactttttgcctttcattagaatttcatctcagtattatttatttgcatctgaagcagatcctttcctgtctgtcttccaggcatgcaaacacttttgttttatccaagtgaagcatgaaaatttgcaggttgcacccaaaaccaaaatccactttttaaccccgccaatttaaagtattttttttttccaaacctactttatatatgagcaatccaagattcacatcagggttgttagaaaaatgatcatac

SEQ ID NO: 398315 - DNA, 571 bp, Homo sapiens
tggttgacaaactttttatgtaaagataaagacagtacatattttaggcctgtggtccatatggtctctaattacttaactgtgcctttgtagcatgaaaacagcagtagacattgcatcgataaatgagcgcggctatgttctaataagactttacttataacaacagagaccccactgtgatagtttgccaactctaactttagaagttggatctagaaraattttttttctttttgtagaaagctgcttgcaatataataagaaaaaccaaacaacacaataaaaaaatgggcaaaagacttgaatagacaattctctaaagcagaaatacaaatggccaataaggacaggaaaagatgttcaacattactaatcattaaggaaatgccaaccaaaaccacaagaagacactgcttcacatgcattaggatggctgttatgaaaaacaaagcaaaacaaatatggttaactataatctactgtaaatttcagaatagctagaagaggataattctatgtttctagcataaacacaagataaatattgaaagtgatagatatcccaatt

SEQ ID NO: 398316 - DNA, 579 bp, Homo sapiens
atatttgtatatcaatgttcttagcagcattaatcacaatagccaataggtggagacagccaaaatgcccattaatggatgaatggataagtatataatatgtggtgtaaacacacatatgcacgcatacacaaaacgaaatattgctccatcttaaaaaggaatgaaattctggtacatgttacaatatgaatgaaccttgaaaacattatgctaagttgaataaaacaatcacaaaatgacatatattgtgtgattctactcatgtgagataagcagaatagtcatagagacagaaagtagaatagacattaccaggggtcagggaaagtgaggaagggagagttggtatttaatgagtacagagttgcagcctgggaagatgaaaaagttccggcgttggatggtggtgtcactgcacaacaatgtgaatgtacccaataccaatgaactgtacacctaaaaatggttaagayggtagattttatgttacatatattttaccacaataaaggttagctacttgcagaagtttacctaattataaactagtctaagacagctagtcagccacacaag

SEQ ID NO: 398317 - DNA, 478 bp, Homo sapiens
ctataaggcttacgagttgcttttccttccatgcactcattcagatctgttcacagccctgacaagtcatcatgattcccatttcatagagaaaaagactaaggccgaggaagggtaaataacttgcccrgggtcacacagcttaacaatcataaaatccactggctctaaatcccatgtctttctcatgctactgttgtgagatgttcacctaagctgttctaaccccttttcaccagactgcagaccccacccagtcaaagtgaggcccttcctcaccagaaggcactcaagacacaagggactgtcagtaaatggcaaactgaatcccctggcccacctaaccccagactggccactcaatccttgttgcctaccctccctcctctcactaagaggctttttctgcttccaggggtgtaccaggcaagaagtgtgggaccatattgctgactgcagaagagcttagcaattgtcg

SEQ ID NO: 398318 - DNA, 609 bp, Homo sapiens
actactctagagtaaacataatattccattttaagtaattagacaaagaagactaagaccaaagcaagcaggaggaaggaaacagtaaaggccagagcagaaacaaatgaaatagagaagagaaaaacaatagaatcaataaaaccaaaagtaggttctttcaaaatatctacaaaattgacaaacctttagctagactgactaagaaaagagagaagactcaaattactaaaattaggaataaaagaggtgacaccaccactaaccttacagaaataaaagggattataagggaacactgtgaacatgaaaacaaattagataacctggataaaacggacaaattcctagaaacacacaaactwccaaaacagaataaaaagaaataaaaaatctgaacagaagtataacaagggattgaatcaataatcaaaaaatttcccacaaacaaaagcccagggcagatggcttcctttgtgaattttaccaaatgttaaaaaagaattaacattaatccttcacaaactatgcaagaaaatagaggatggacttcccaactcattctacgaggccagtattaccctaacaccgaaaccatgcaaagacatc

SEQ ID NO: 398319 - DNA, 571 bp, Homo sapiens
ggaactaaacttaaaaaggagtgtcagctggccaggtgcagtggctcatgcctgtaatcccagcactttgggaggccaaggcgggcagattatgaggtcaggagttggagaccagcctaaccaacatggtgaaaccccatctctactaaaaatacaaaaaaattagctgggcgtggtggtgtgcgcctgtaatcccagctagtcggaaggctgaggcaggagaattgcttgaacccaggaggaggaggttgcagggagctgagatcatgccactacactctagcctgggcaacagagcaagactccatctcaaaaaaaaaaaaaaacagtgtcagcacatttggctaagccaaccaaagcagatggcccagagaaatgactgttggtttatacagaattttataaacaaatggcagctcaggaatgagatcctttttcctgggtatgtggtatttwatttatgggtacccattattagcgattcagtcaggacttagttcagcaaccagggggtgaagttgatccttacctgggcccttacccacagtcttaagagatgaccctgaaggga

SEQ ID NO: 398320 - DNA, 443 bp, Homo sapiens
cctgttgcagaatatgttttggcaactctcaggcctacctttcataggaagcctcagcaggggatcgggcaaacctcatccctgcccagccatcagctgcacagaacaytctgtgccggcagcaggcctggccatgtgacctcttctccttcttggctgttcccactggcaagctgtgaatagccagagacaccctccataatgctgagaccttttcccaaggagcccagcgggaaaaatgttctgtgtctttgcaaagcctgaccctcttctggggccaattctgctaggagatacagagaacctaattgtttcatgtacttcacgtctctctgttggtggccacttaaacccttctttaccataatgaatgaaatgcttcaaagaatcaggataccagcaatctcaatggccccaggagcaccaagacgttcaggttgaca

SEQ ID NO: 398321 - DNA, 584 bp, Homo sapiens
ttctgtctctgcctgttgtaaacctgtgattctaggatcaatatcaaaatctaccttgtgccatgaagcaatttccagactccttaacccttccaacccacacgtatctgtgatcagatacaactcaatttcatgtattgagttcggtacttgtgtacaaagtgattactgtatgccaggcagaaatgctagatactggttacaaagaaaactgagataggctctgccttccagagtcttccttctrtcataggaaagaaactgaaagagaagatgctaaggctctaataaagtaatgagcaaagggctaatgggaacatggagaaaggagtgaccaatcatctagaagaactggtgaatgcctatggaaaagaagacatttggttgggttttgagaagtgaataggagtttacatggtggataggagtggaagagctttctagccatagggaccttggtgtatgtgcacaggcctgaggcctaaaagtatttgaggaatataaatgtgtgtttggagatcactgtgggagatggggctggctagggagggttagttgataaagagctgatgggccaagctaag

SEQ ID NO: 398322 - DNA, 566 bp, Homo sapiens
ttgggttacttatcagtccctcttgtttaagtgttcctttatctgcctccttcacacacctgcagcagcgtgtaagcaccaagagatcgttgttgtgtgtgtcttactctttgctctaaatcgagtactgggataatgcccagaacagtgcaaggcacctaagtggaaactcaataaagatttaataaaattagatgaatacatgccacggatggaagaagsctgacagattgtataaaaggatagtagccctgcactgtggctaacatcctgggctttggagtcaaatacacattggtcactaatgcctttgcccaagagctatagcggtttggacaagctttctcacttctttaggccttaattttctcaaaagtaaaatggggataatagcacctgccttgtgggagtgttgggagagttagagacaggatgcttagtgtaaaactcagcacagcctaaatgttcactgtcatcaacagtaacctcctctttcaggtgagaaaagtgagactcagaaaggggcagggcattgcccagatgaaacattgcattatgagcagagt

SEQ ID NO: 398323 - DNA, 622 bp, Homo sapiens
tatttggttaaaaaaaaaagattgatggctcctgttatatatggtgaacttggcaaatactgcagatatcaagccattgaccaacaggttttctgattgataacagcaatttttactgctgaacatatagtacgttggwaattctcaacagagatcagcaggcaaccactacgaagcagagctggtaaaggaaaagagacttgcctgccacattggttcctgggatcatcattcactctctttaggagagtgcacaggatctttttcatgtgatcttagcctactactccagtctgacatcagtttctttcccttgactctatgacaccacagtacatcttgatatgctctaagtcgactcttcaagacatcacaacctttctcatgtttctgcctttatccttcttggattgtttctattcctagaataataaacgccatagcacaaattccactggttaacatttgatggacagcaggcatcactgtgttttatctagcctttagacaatctgaacagaagcatataatataggaaaccaaattaaatgtggatcaatttaccacttagttttggcaaagctaaccctttctagggccatgctaataattactttcattg

SEQ ID NO: 398324 - DNA, 622 bp, Homo sapiens
tatttggttaaaaaaaaaagattgatggctcctgttatatatggtgaacttggcaaatactgcagatatcaagccattgaccaacaggttttctgattgataacagcaatttttactgctgaacatatagtacgttggtaattctcaacagagatcagcaggcaaccactacgaagcagagctggtaaaggaaaagagacttgcctgccacattggttcctgggatcatcattcactctctttaggagagtgcacaggatctttttcatgtgatcttagcctactactccagtctgacatcagtttctttcccttgactctatgacaccacagtacatcttgatatgctctaagtcgactcttcaagacatcacaacctttctcatgtttctgcctttatccttcttggattgtttctattcctagaataataaacrccatagcacaaattccactggttaacatttgatggacagcaggcatcactgtgttttatctagcctttagacaatctgaacagaagcatataatataggaaaccaaattaaatgtggatcaatttaccacttagttttggcaaagctaaccctttctagggccatgctaataattactttcattg

SEQ ID NO: 398325 - DNA, 622 bp, Homo sapiens
tatttggttaaaaaaaaaagattgatggctcctgttatatatggtgaacttggcaaatactgcagatatcaagccattgaccaacaggttttctgattgataacagcaatttttactgctgaacatatagtacgttggtaattctcaacagagatcagcaggcaaccactacgaagcagagctggtaaaggaaaagagacttgcctgccacattggttcctgggatcatcattcactctctttaggagagtgcacaggatctttttcatgtgatcttagcctactactccagtctgacatcagtttctttcccttgactctatgacaccacagtacatcttgatatgctctaagtcgactcttcaagacatcacaacctttctcatgtttctgcctttatccttcttggattgtttctattcctagaataataaacgccatagcacaaattccactggttaacatttgatggacagcaggcatcactgtgttttatctagcctttagayaatctgaacagaagcatataatataggaaaccaaattaaatgtggatcaatttaccacttagttttggcaaagctaaccctttctagggccatgctaataattactttcattg

SEQ ID NO: 398326 - DNA, 622 bp, Homo sapiens
tatttggttaaaaaaaaaagattgatggctcctgttatatatggtgaacttggcaaatactgcagatatcaagccattgaccaacaggttttctgattgataacagcaatttttactgctgaacatatagtacgttggtaattctcaacagagatcagcaggcaaccactacgaagcagagctggtaaaggaaaagagacttgcctgccacattggttcctgggatcatcattcactctctttaggagagtgcacaggatctttttcatgtgatcttagcctactactccagtctgacatcagtttctttcccttgactctatgacaccacagtacatcttgatatgctctaagtcgactcttcaagacatcacaacctttctcatgtttctgcctttatccttcttggattgtttctattcctagaataataaacgccatagcacaaattccactggttaacatttgatggacagcaggcatcactgtgttttatctagcctttagacaatctgaasagaagcatataatataggaaaccaaattaaatgtggatcaatttaccacttagttttggcaaagctaaccctttctagggccatgctaataattactttcattg

SEQ ID NO: 398327 - DNA, 588 bp, Homo sapiens
ctgtgccacatgtcacaggagcacatggtcacagcacagatcgtgaggactcctggggcatgtgaaggagcccaggggcagctttattaaccttctccaaatatctgatttttttttgttggttgcactcagagttgcctaaattaaaatattatgtcacatactcctccagaaatagttccaatccgccaaatggtacagatcagcaagaaacttctggctaaacattcttctatccggggagacaatgcaaatatattttccccccattaagattttcccaggatttagaactattttagcctttattatagacattaattgacatgttatgggaatgtaaagaaaatcagtgactgtttaagcaagtactcatcgatgtgtatgtttgtagctgagtatacagataccacatatgagaatttaatctatattgctctttaatctagaaacccctacggatggagacctagctttatcaattatgcagtagtaagtcrctgtctcgggtccatgtagacaaatgcaagtcaagtcaaaggcaaggggaatgctgaaaattgacaaaattgttgcaaaaaaccacat

SEQ ID NO: 398328 - DNA, 598 bp, Homo sapiens
gggtagctgctagctagagtttcaatagggatatacagacacaacatttagattcaagtgaataggccatattatataaaaaacatatttggcagaaaaatctttatttgaaccataaagaatggatgagtttatgagataaatcaaagcaactatataataggtgatttgcatagacacagaagtcataacaaatggcctatgtttctttcaagatctagttcaaagaccttcccttgatctcctgatcaaaattaatcatccttcctcttcactctcactgttctctattgtaacaattatttcatgttccctttattattatatacatgctttatccttgaagacaagaactatgtctatcagagttttgtttgrccactatacacacacatgcatctttcccctagcatatggggtataatattgtgcaggtattggcagcatgaactctaatcacagagcaacacaaaattttgaacatggctcaccatgtaaatgttagattagattaactatacaaatctgagataacttacttagccttttaaattttgtttcttgttttgcgaatttggataattcctattgaaccagt

SEQ ID NO: 398329 - DNA, 557 bp, Homo sapiens
ttggagatatctttgatttcccaatctctctcacatccttagtcttcacctccaattctaagatacaataaaatattggtcttccattaaaatatgtacaaaatctgacttcctttaaccacctccactgttaacaccttaatcaaagccacactatttcctgcctggaccattgcaatgcctcctaattggtttacttgcttcaccctgattattatgcagtccattcatatagatcattatgtgatgagawcttgtcaatattctgtccaaaaccttgtggtggcttcactcaaaaaatcttaacttctcaccatggactacaacatcctcctataagatctggccttggctacctctctaaccttcttacttcctgtactttgcccactttgatttatcctttctggcctcctgcttttccatgacattcaaatacgtttgaaattatgatccccttggcttttttgctctttcttcacatacttcatggcttgctttctctcttcatttgggtcccctctaaaatgccacttaacattagagactattcctta

SEQ ID NO: 398330 - DNA, 527 bp, Homo sapiens
catatccacgcagggctgcaagttggaatgcacagttctcatgacatccttatactctataccttatactctagtcatacctcaaatcttatagactgtatttaatagaagcctccagtttctccttatcatctccttgtctttgtcattgccctcagtaatctctttatttagtcaccygaatttagacaatacttccttccccctgttagttaacttaaatttatttaatacctatgctatactcagtgtttcaaatgtcctgtctcctgtaatcctcaacataatccagtgagtagagtactatttttactattgaagcacatcactgtctggggtaaatacctggggttcctcatagcaccatgaaaattaatgacacgggcacacatgaggagtgagtttaggagcagaggtttaataggcagaagaaggagaaaggagaacagctctctccctttttagagagaggagcttctgaaaggagaatctggcctgggtagactgcactagattttataggcagg

SEQ ID NO: 398331 - DNA, 470 bp, Homo sapiens
cagtataaacatttctctggatgtaaacagtacagattttactttcaggctttcctaataaagtttctaacagacctggaaaggagaaggaagagtaacatctgttgcaaaaccccagttacgtgtaggacaaataagaatctgggagagaggtgacttgcccaagtgacacaccgatttgggatatattagggagaaccattaattcttgtccataaggcttgatttagaattgttttttattttaatggaagttctgtagaaagaaaggaatacttggaaaaattgagccacttgtaaatacttggaagatgagaaaagagaatggtttaaaatcttcttaccatatccctattctcctcctcttcctcctcatcatcagaatcacartcagtcagtcaaggttggcactttattagtgtgaacaaggtcagtatgaaaacacaaagtatagggaagttgtgacaccc

SEQ ID NO: 398332 - DNA, 575 bp, Homo sapiens
gaggtggctcatgcctgtaatcccagcactttggaaggtcaaggcaggtggatcacctgaagtcaggagttcgagaccatcctggccaatgtggtgaaatcctgtctctactaaaaaataaaataaaatagaataacatattagccaggtgcaattgcaggcacctgtaatctcagctactcaggaggcaggggcacaagaattgcttgaacccgggaagcagaggttgcagtgaaccaacatcacactactgmactccagcctgggtgacggagcggaattctgtctaaaaaaaaaaaaaaaaaaaaaagtcacaacctctgacattactgttgtcatggcatttatattgatgaaaaaaagtcacaaaaaactttagcatgagagaacaaatcttgaaaaatattatgtaaactcctgtgttatattcatacagcatataatgaatccaatgccatttattattgaaggtacatattatgttctaaatcttaatttgaaaatgaaattaatacatcttttatttaaaatgtaataattatattcatttatgctactaaaatattgatatgatt

SEQ ID NO: 398333 - DNA, 573 bp, Homo sapiens
ctagaccaccgtcactgccatttattcaatgaccaaatgtcttagaaaatgaaattatgtcccagaaattccactcctagatatttacccagtgaaaatgaaagaataacatccacacaaatacttgtagacaaatatttgcaacagctttatttacaaaagacaagcctgaaaatttctcaaatgtccatcagcaggtgaacagataaataaattgtagtacaccctcacagargattactattcagcaacaaaaaagtaaataatttatcaattagtcaaccaataagaagagtaaactattgataacacaaaatagcacagatgtatctcaaaccattatgctgagtaaaataaaccagactcttccaaaaaaaaaaaagcctgataccatttttataaaattctaggaaatgtaaactaatatatagagagtaacaaagattgcataggggcacaagaaaactttgggggtggtaaatttgatgttttgattacgatgatggctagtgggtatatatatatacacacacacacacacacatatatacacataatgaaatagtgtgtgta

SEQ ID NO: 398334 - DNA, 543 bp, Homo sapiens
atggtgtctctcctggaatacaaattagggattttcaatgtattttatatgcatacccaccctcacacakagtctctgcatcgtatacctaagatacataagatgtttgaatgaagggggtatgtctgtttccatttagcccacatttgtaactgaggactttgtactctacgggctcagcaaaaacttattacataaaatttagtgcagttaaatttaatcaagaggaacctataggtaatcaacaaatatttattgatcattgacttaataacaagctctgtgctgggacccagggaaccaaagaggaggaagacacagtccctttcctcaagaagtttacagtctaccaattctaccaagagtagagggcatgtcacacaaattcacgtgtaaaagaaaatggatagtctatctattaggccctgaggaatgttgactttggagatcaagtcacagagcttgacctcttaattactgactttctgttatagattaatttcctaccttatttccttattcctggctcagaggagatggccc

SEQ ID NO: 398335 - DNA, 543 bp, Homo sapiens
atggtgtctctcctggaatacaaattagggattttcaatgtattttatatgcatacccaccctcacacagagtctctgcatcgtatacctaagatacataagatgtttgaatgaagggggtatgtctgtttccatttagcccacatttgtaactgaggactttgtactctacgggctcagcaaaaacttattacataaaatttagtgcagttaaatttaatcaagaggaacctataggtaatcaacaaatatttattgatcattgacttaataacaagctctgtgctgggacccagggaaccaaagaggaggaagacacagtccctttcctcaagaagtttacagtctmccaattctaccaagagtagagggcatgtcacacaaattcacgtgtaaaagaaaatggatagtctatctattaggccctgaggaatgttgactttggagatcaagtcacagagcttgacctcttaattactgactttctgttatagattaatttcctaccttatttccttattcctggctcagaggagatggccc

SEQ ID NO: 398336 - DNA, 540 bp, Homo sapiens
accaccgtttctttccccagctatctctccaacgctcccaagagccaaaccatcctccttctcatctaaacaaaagtacgaccaaagtggagaggttgccctttctacgttcagtcataatttcacagtttcctggagactatctgttttaagcccttctggggtgaactgctgttgtttttaactccccagtgacaccctccgttycccactgacattaaactgcccaatcacagaatgcctgcaggcagtactttcatgttatatgcaccgcagctcctcaactaatattcatgagcctttgcacctgtctctttggcagctaaagtaccctacttctgtctttctctaaatgtttcaggtttgtaatttggcacatagtgaatgcgtcaatatatatactaggaagcgtgaaagggagtaatctgaaagctactcaagcaaaacttggagaacatatttctaacaggtccactaaatttgagtttggtgtgcttttctttctggtgtgaaactattttaattatttttcacattgtt

SEQ ID NO: 398337 - DNA, 613 bp, Homo sapiens
aaacaaaaagtaaaatgtttggcttatagtaaaactttcacaacaaaatattaactatttaactagataagtctcttcagggtatttcagggacttgagaaattacagaaataaatgtgaaaatgaaagaaagttaataattacagtgaatttttgttgttctcatttaatagcaaaaataataaaaaatacacttcaagcaacacaactakccttccctactcccaggaaataaatagaaaactactggttgtgttagaagccataaaaagattaagtgaaatataaccaaccttgtctgggtaatgactatctcaaatgaaaaccaaccattctttatcaaacctttgggatcttgacacgaaaagcatcctgaagtaggatctgagcagttgttaacattttctaaaagggaattcaggagttggcccttgtcagttaatatgcttctactctgggcaaaatatccagcacataatagagatatttataaatattccatagataattaccaaaatgtgtgaaatatactttcccaacatagagaaatcagtatgctatcaacatagcaaacgttaaagggttaaaaaaaaaaccaagaaaatgtatgcat

SEQ ID NO: 398338 - DNA, 613 bp, Homo sapiens
aaacaaaaagtaaaatgtttggcttatagtaaaactttcacaacaaaatattaactatttaactagataagtctcttcagggtatttcagggacttgagaaattacagaaataaatgtgaaaatgaaagaaagttaataattacagtgaatttttgttgttctcatttaatagcaaaaataataaaaaatacacttcaagcaacacaactagccttccctactcccaggaaataaatagaaaactactggttgtgttagaagccataaaaasattaagtgaaatataaccaaccttgtctgggtaatgactatctcaaatgaaaaccaaccattctttatcaaacctttgggatcttgacacgaaaagcatcctgaagtaggatctgagcagttgttaacattttctaaaagggaattcaggagttggcccttgtcagttaatatgcttctactctgggcaaaatatccagcacataatagagatatttataaatattccatagataattaccaaaatgtgtgaaatatactttcccaacatagagaaatcagtatgctatcaacatagcaaacgttaaagggttaaaaaaaaaaccaagaaaatgtatgcat

SEQ ID NO: 398339 - DNA, 539 bp, Homo sapiens
tgagaaaacagattcagagttaaggaccttcccagagacacacaggtaataggagaagtcaaaatttcaacctccacaatctggttctagagaccagtatttcatttgctatgcttattttgaatggtcaggcaaattcctagggctcccgagatcatttcattaagactgaatgcagcatctacatggtaaagatccacctgattatgtagagccccagaggaaatcctcaaaggcataaagagaaaataaaatacaggggaatccttaaaagcatcaggagaaaaaaaaagacagatagaatcagaactttttttctgtttttgtgtctcttagaagattgataygctcatctatgtaaagaccaaagtctttgactgttatatctttaaaaaagaaaatttttcttgtcatttcttaaacaaatacagaggttatcctctcctgcaggccctggggtgtcagcagggttgcagggctggctagggggattgggtaattctaataaaagctattcagctattgagcttaatggtgtt

SEQ ID NO: 398340 - DNA, 420 bp, Homo sapiens
tgcagcatcatattgaaatgatctgacaaagtgattgttttctcctgccatgtatatactttaggacaacaaagattatgctctgttcgtcttctctataacwtcccttccccacaacccccaatatccctctgctggtgtctatcacaaaacctgttacagaataaactgaggaggacatcaaactgacatcagatgttggaactgatataaaatgtttaagaaaaaacaaacagcaatttggaaaccaattcctttgaaaaagtattttgagttctatatacttggtctgaaaaaggtgaggcttgggggtagggtgtgtaatgtaaatcttcaatactgaaaaggtgctgtgcataagaggggtttacttggttctggaggctccagtgacagaaatagggctggctggaagatgtt

SEQ ID NO: 398341 - DNA, 569 bp, Homo sapiens
gcaacctctgcctcctgagttcaagcaattctcttgcctcgcctcctaagtagctgggattacaggcatctgccaccatgcccagctaatttttgtacttttggtagagacggggctttgttatgtttgccaggctgatctcgaactcctgacctaaagtgatccacctaaagtcctgaaaytacaggtgcgagccaccgcacctggccaatgttgttcaattcttgactgtcctttatgatttctgggaatgtaaagaagtatagaacacagactctgctttagagaaactctagatctataagtacacactgacataagatagaactcactgttattcaacaaatacttactaatttcctactttgtgctgagcactgtgctagacattgtcagctacagcagaacaaaacagctgtgtttggctttaaaagtgggaatggtaggagcaaggaactatgggagtttttagacaagatggcttctgatgggcagggggaaagacttggcagatgaacggggttatgaaaggtagacattaaagagagaggattccagaaacaggcaaa

SEQ ID NO: 398342 - DNA, 322 bp, Homo sapiens
agaagacatatgatcttagtttttgggcatmatgaaaaaatacacacagacacaaacacacacgcccctacctcacaggatatgactgggttttcataaagaatatatgtgaaacagtgaaccggtaagaatttttatgtatgtgctggagataggcaaggattgctctgtgaccttacagaagccctggattcgtattgtggtgtataggagagaggaggtgggggaaactggggccagagcactacatgaaaaatgtagatctcttatatcagctgctctactgctaattctagagtggatttcagagagtttgctccat

SEQ ID NO: 398343 - DNA, 322 bp, Homo sapiens
agaagacatatgatcttagtttttgggcataatgaaaaaatacacacagacacaaacacacacgcccctacctcacaggatatgactgggttttcataaagaatatatgtgaaacagtgaaccggtaagaatttttatgtatgtgctggagataggcaaggattgctctgtgaccttacagaagccctggattcgtattgtggtgtataggagagaggaggtgggggaaactggggccagagcactacatgaaaaatgtagrtctcttatatcagctgctctactgctaattctagagtggatttcagagagtttgctccat

SEQ ID NO: 398344 - DNA, 594 bp, Homo sapiens
cagcagaggatagcatggtcaaactttgcatgtgctcagagcacaggacttagaagttggggtactacagctttagtgaaaygtgaaagcagagaccatcaagagaaaagggtgtaacacacatagacacacagacacacacacaaatagtaaccatgtagaggtgatgaatatgttcattagcttgattgtggtgatcattgtataatgtatgcacaaaagcaacatcaaacaattttatatgttaattatatctcaataaaactgtttattgagaagaaggaaaagagaaaaaggaaaaagggcatagagatttggagctgaggaatgattgcagtaaccgggaaactatatcctggaggagatggggtgtgtgtcgggggtagggttgggtggagtgggtgacgtggtcactgcctttaaacatttgctgtgatctctcatactgttagaagcactgggcttactttgctttttaatccaaaaagcaggagttataaggaggtagatttggattaatgtaagggttaaatattgctagaagggcatctcattatcaggctgcatgcatcatgcatgttgctagcttcccct

SEQ ID NO: 398345 - DNA, 560 bp, Homo sapiens
aaaacatacagaagaaaatggaacgtacttgtcaatctaccaccaaagagaattagtattagtaaattactgttactgttatttcctttattcctctgtatttttacatgtataaaactggtatccaactttatattgagattttcattatgtttatatacactgcaatccaagcacctatccatgtcatgattcttcaaaaacataatttttaatggatgcatagtttttcatcctatagttattacataattcatgtaatcattggrctacaattatgtgtgtagaccgttaatgaagtttgtcaaatatgctgtgagaaacaattttgaatataaagaattgcacacatctccggttatgaaatatatttctagaagaggaaatagtgagtcttctaacgtgttttgccaaaagtgtctacccatttgcagtcctgccaacagtgtacagaaagcctgcctcactgtatccgagccaggactgagcaccaccatgttttccaatctttgacaatttgctaacatcatattcatttatacatctgactcttgctcatc

SEQ ID NO: 398346 - DNA, 550 bp, Homo sapiens
gaaaacggctgattaagatggggaattaagcacctcattgaagatattagcatgtcctgttttgtgtttatttaattttcagaacattcagtgaactgaaattcaaaacagatatatagggggcatttcaacagaacacatgtgcactttttcagtttaatgtaaaaakgtacctttgtagctaaaatgacagctgtacttttaccccttgatcatccaagcaaagaaaaggaaccagttgggtggggagttacctcatctgttgactttctagggcaagagaaaagccatgcagtcctacagacttaatgtgggcctgcttcgtaagacatacagctcttttcctatcattggcatttgatgaagtttccttgctatctcatgggcctggcatttggaggggccaaattctatccagagctattttacttcattctgataaaccaaccatgcaaagatggcctgaggaatcctagaaaatggaagatacagcataggaaataaagcagaaaggtaatctgcaaacagggtcactttacactgggaatat

SEQ ID NO: 398347 - DNA, 550 bp, Homo sapiens
gaaaacggctgattaagatggggaattaagcacctcattgaagatattagcatgtcctgttttgtgtttatttaattttcagaacattcagtgaactgaaattcaaaacagatatatagggggcatttcaacagaacacatgtgcactttttcagtttaatgtaaaaatgtacctttgtagctaaaatgacagctgtacttttaccccttgatcatccaagyaaagaaaaggaaccagttgggtggggagttacctcatctgttgactttctagggcaagagaaaagccatgcagtcctacagacttaatgtgggcctgcttcgtaagacatacagctcttttcctatcattggcatttgatgaagtttccttgctatctcatgggcctggcatttggaggggccaaattctatccagagctattttacttcattctgataaaccaaccatgcaaagatggcctgaggaatcctagaaaatggaagatacagcataggaaataaagcagaaaggtaatctgcaaacagggtcactttacactgggaatat

SEQ ID NO: 398348 - DNA, 620 bp, Homo sapiens
catcaaatacttatcaattttatgtgcaagatttgcataaaaaataagatcattttccttgtaacagaagcaagtcaaggaaatgcacaagttatgaatggcagaaaaagatagctcattggtcatcctctgaactgcttttacagaaggtggataggtctatgacagacatcaaacttgccctgctacaaccaaagcagttggataaattcatgcaacactcacagaaaataaagtgattttcctggacttaggacttggtggctgatttgcctggcatgttaaacmgaaagttctcaagcagaacactgcacagcaagcttgtcagctgggggtcccagtgacactgagcacatctgcctacttaggcccttactttgctgtgcttgactgattctgctcctttcccttctgaggagcttgtgaaacgactatccctgaagatctttcagaaaaaatagcaagcatctgtcctagatggctgggtcatttacctgatggaaggcagcaagctggcccagaggatctcttgagatccactatggctcaatgcctttctctctccagttcacttcaccacaactaatccctttacatggccccaaatacagaagagggaa

SEQ ID NO: 398349 - DNA, 582 bp, Homo sapiens
ctccaactacgtccacatctaggcagtcctcaaattaacagtactagtaarcatgttgtagagttgattaatctttgaatactcagacctagcatgctgactggtacattgcagctgcttaatagagtggtttaaatactttgtctatatgacgtatttttcagaatcctaatatatgggctagttcaaagtagagctgcaaaggctgaatcttggatgaaaattctgttattttctttctctggtgatctttaagccaattccatgtgccctggaattctgtttgaaaaacactggtgaggtttgaaggatgaataatgaatatgtttgataaatgaacaaatggataaatgagcatgtaaagtaaattctaaaataatatccactatactaatactgccgtcctttaacttgaatacaatgtcctttaccctctgcctatttgaaaattacttatctcagttcatatcccatttcttctgagaaccctacctgatgactccagtctctcctaaactatgacatatatatttgttttttacataatattagatagtagttgttaaagtttttcattatcaa

SEQ ID NO: 398350 - DNA, 582 bp, Homo sapiens
ctccaactacgtccacatctaggcagtcctcaaattaacagtactagtaagcatgttgtagagttgattaatctttgaatactcagacctagcatgctgmctggtacattgcagctgcttaatagagtggtttaaatactttgtctatatgacgtatttttcagaatcctaatatatgggctagttcaaagtagagctgcaaaggctgaatcttggatgaaaattctgttattttctttctctggtgatctttaagccaattccatgtgccctggaattctgtttgaaaaacactggtgaggtttgaaggatgaataatgaatatgtttgataaatgaacaaatggataaatgagcatgtaaagtaaattctaaaataatatccactatactaatactgccgtcctttaacttgaatacaatgtcctttaccctctgcctatttgaaaattacttatctcagttcatatcccatttcttctgagaaccctacctgatgactccagtctctcctaaactatgacatatatatttgttttttacataatattagatagtagttgttaaagtttttcattatcaa

SEQ ID NO: 398351 - DNA, 547 bp, Homo sapiens
tcacttgtttgtacacctagagctcaaacgagaaggcagagtgtcactttgttcaacctcagctgggaaaataagtgttgggtgacttaaatattttgctgctcttcacaagtccacaaatgaccacaaagactccaaaaggattgatgtgagggttaycgataaatttcagggatgggcacttggtgggcactggatacatgttactggtaaatatagtgtcttagcccatgcttcaggcataaaaatgattatgaaaaagatgataatgatggtaacaataataatttaaaatgataataatggcaagaacaaaattagaagtagttgtaataataatagtagcagcaactagaccaataatgatatgtttccttacatttttatagtacttatttttagcaaatagagaaaactccaacatttttactaataactcatttgattaagaaaacatctcagtaagcagacatggatggcattaagtataaactttaattgtagaaaatatttgaaactcagaaaagttaagaggtttgcttagaat

SEQ ID NO: 398352 - DNA, 547 bp, Homo sapiens
tcacttgtttgtacacctagagctcaaacgagaaggcagagtgtcactttgttcaacctcagctgggaaaataagtgttgggtgacttaaatattttgctgctcttcacaagtccacaaatgaccacaaagactccaaaaggattgatgtgagggttatcgataaatttcagggatgggcacttggtgggcactggatacatgttactggtaaatatagtgtcttagcccatgcttcaggcataaaaatgattatgaaaaagatgataatgatggtaacaataataatttmaaatgataataatggcaagaacaaaattagaagtagttgtaataataatagtagcagcaactagaccaataatgatatgtttccttacatttttatagtacttatttttagcaaatagagaaaactccaacatttttactaataactcatttgattaagaaaacatctcagtaagcagacatggatggcattaagtataaactttaattgtagaaaatatttgaaactcagaaaagttaagaggtttgcttagaat

SEQ ID NO: 398353 - DNA, 547 bp, Homo sapiens
tcacttgtttgtacacctagagctcaaacgagaaggcagagtgtcactttgttcaacctcagctgggaaaataagtgttgggtgacttaaatattttgctgctcttcacaagtccacaaatgaccacaaagactccaaaaggattgatgtgagggttatcgataaatttcagggatgggcacttggtgggcactggatacatgttactggtaaatatagtgtcttagcccatgcttcaggcataaaaatgattatgaaaaagatgataatgatggtaacaataataatttaaaatgataataatggcaagaacaaaattagaagtagtkgtaataataatagtagcagcaactagaccaataatgatatgtttccttacatttttatagtacttatttttagcaaatagagaaaactccaacatttttactaataactcatttgattaagaaaacatctcagtaagcagacatggatggcattaagtataaactttaattgtagaaaatatttgaaactcagaaaagttaagaggtttgcttagaat

SEQ ID NO: 398354 - DNA, 455 bp, Homo sapiens
tgaatgggtgacatttaataaagtatgtgaatacttaggaatggaaggttgcgaattaaaaaataaaattattctcctctttattcagtttygtatatcacttaccaaagcccaccctgcctattctatggtgtttgagttcatgcatccagacttgtgttaagaagaagggtgacaaatttagaattcacagtgtgtgttgccatgggaaatacaacaagctattaagaaattgtcttttcaataactttttagtgtaattaaggagatcatgcatatgctcctggaaagagagcctatagtattgagtactagctaagtgctgtgggctgtgtagacaatgtctgtggtatgcctgcccagtgactgtttctcctgcttttgcaatagcattttaatttttctttggagaactatacctgtcctattttcagcagtccatttgtttttttctg

SEQ ID NO: 398355 - DNA, 455 bp, Homo sapiens
tgaatgggtgacatttaataaagtatgtgaatacttaggaatggaaggttgcgaattaaaaaataaaattattctcctctttattcagttttgtatatcacttaccaaagcccaccctgcctattctatggtgtttgagttcatgcatccagacttgtgttaagaagaagggtgacaaatttagaattcacagtgtgtgttgccatgggaaatacaacaagctattaagaaattgtcttttcaataactttttagtgtaattaaggagatcatgcatatgctcctggaaagagagcctrtagtattgagtactagctaagtgctgtgggctgtgtagacaatgtctgtggtatgcctgcccagtgactgtttctcctgcttttgcaatagcattttaatttttctttggagaactatacctgtcctattttcagcagtccatttgtttttttctg

SEQ ID NO: 398356 - DNA, 586 bp, Homo sapiens
gagaaagcagctggtgagaggccaaaggcagaaggagacttctcatctgtaggtgacatttagaatttagactttaaaaagttataacctgcctgaggccacactactgcagaaccaggacaaaacctcagcaytttggctttaattcctgatgaagttatcataaataccattgtctagaagagttacctatgaccacaccattaccaagtcccagtggatggaccagagaaacaggactttcttactgtgactacagctaataacatgcaagagcgttctctggtcttcccattcactcatctaacaactatttactgcacactcattatgtgccaagcactgcacttaacaagagcacatagggttcttgtccttcacagagcctagagtctagtgaagcagacagatggtagtgaaataatcccacacacataaatacaaaatcacaactgagattgatgctgcaaagatgggggccatattttcataagcaaatatagcaaaaggatttgactttggtggaaagatctctgatggcttctccaggaagcatggggtggacgagaacaaaaagaactgggaa

SEQ ID NO: 398357 - DNA, 465 bp, Homo sapiens
acccctgaaaatattttttaaattcttgtgtgtttgtgtacatacacgtatttcttgtgtcaaataatactttccatcagcctcttaaaggggcttgtatcagtttcctagtaccaccgtaacaatcactraaaatttaacggcttaaaacaacataagttttttctcctacagttctggaggacagaagtctaaaatcaaagctttgggagggcttcactccttctggaggcttccgtttctttgcctttcccagcttccggataccaccagcatttgtcggcctgtggtcacctccttgcactagtccagccctcgcttatgtcgttacattgcctactcactctgacctcctgtctctctctgataaagacccttgtgattacattggccccactcaggtaatccaggatagtctccccatcttgagatccctaacatttgcaaagtcccctttgccacata

SEQ ID NO: 398358 - DNA, 547 bp, Homo sapiens
tccagaccaacctgggcaacatggcgaaaccctgttctctgccaaaaatacaaaaattagccaggcatggtggtatgcacctatggtcccagctacttgggaggctgaggtgggaggattgctggagcctgggaagttgaggctgaagtgagtgtgattgtgccactgcactgcaggctcagcaataaagcgagatcccgtctcaataagtaagtaagtaartaaataaataaataaataaataaataaataaataaagtgagattatttagcctatggtacagatggaaagtgctgtttattaatagtgagctggaaatacactccatctgtcttttccgcttcccatcaattggggatgggcttggcaaacatgcctcaacaacttctcatgagtttctctttagaatcctggggaaagtctgtgattaataataggatccttctaccctcaccttctccatttgcttctccctttggccccaattgcaaattgtcttattgtctctcttctgagaaccgaatttcttttgtgactctattttca

SEQ ID NO: 398359 - DNA, 627 bp, Homo sapiens
agaaaaaaaacatagcattaaagcaaaaaaaaaaaaaaaaactgcataaataaatgactgcagccttattgcacatctgggaggagaatgacaatgaccagtcaacagtacaactcaatacatgaccagggtgctgtgagatatggyccagcagaattagcagtagagttcaactgtagcagccaggttttccagtgcaatcgtgttcccgatgtccctgtatattgtggatgtttctaaggtgggcaaaagcatcgtaactcagtagctctgggttcaaatcttattcccactacaaatctgtagagtgactcagggcaagttcaattaacttgtctgagccttggtttcacccactgtaaattatttcccagggggctttctactggagccctgtcatgtgcatttaagaaaaatgtgaaacttgcataggtctgctatcctctgcaatacatctttattttatgttccttttcctcccaactattcttctaagaagcagcttgaatttctcttttaatcaggaagccattttttatcatcaatgaaagtgtaaaaactctatcagttagaactgtatatttatggcaggttcatatgattggaacttaactctatttcattaat

SEQ ID NO: 398360 - DNA, 603 bp, Homo sapiens
agcagatcttctttactcagtctattgaktcaaatgtaaatctcttctggaaacaccctcacaggcacacccagaaattatgttttgcccactgagcatcccttagtccagtcaaggtggcacataaataaaattgagcatcatggtagatctgaattgaaatttgaggcaagttcaggaaaaggtaatattttgacattgaaattggtgaaaatagagcacatagataagaatgtcaggggtcagcagaggtgacctttattggaagacaatttgtagatgggaccagaaaccagtgtgtatcccattctattgcccagaaacttataaaataaatgtaaatgtgtgttctggtcaatagacaggtgtgttgttaggtagactatactgtgaataaactaaaacagctttaattaactgaggattcattgacattgaacaaggcactgtagggataagaacgtatagaatgccttgatgccatttgatgatccttgctctgattccaaaataaagaaacaaacttcaagttaattattctgcaagtaagataccctaatacagaaaatgggaaactatggagaactggcacagggttttggc

SEQ ID NO: 398361 - DNA, 603 bp, Homo sapiens
agcagatcttctttactcagtctattgattcaaatgtaaatctcttctggaaacaccctcacaggcacacccagaaattakgttttgcccactgagcatcccttagtccagtcaaggtggcacataaataaaattgagcatcatggtagatctgaattgaaatttgaggcaagttcaggaaaaggtaatattttgacattgaaattggtgaaaatagagcacatagataagaatgtcaggggtcagcagaggtgacctttattggaagacaatttgtagatgggaccagaaaccagtgtgtatcccattctattgcccagaaacttataaaataaatgtaaatgtgtgttctggtcaatagacaggtgtgttgttaggtagactatactgtgaataaactaaaacagctttaattaactgaggattcattgacattgaacaaggcactgtagggataagaacgtatagaatgccttgatgccatttgatgatccttgctctgattccaaaataaagaaacaaacttcaagttaattattctgcaagtaagataccctaatacagaaaatgggaaactatggagaactggcacagggttttggc

SEQ ID NO: 398362 - DNA, 490 bp, Homo sapiens
aatgcccaggtccaagctttgccctaccgcagaagcacctggtagggacagagataggtattgaactacataagtcaaaacagataggatacactatagctgccatccccagaatgctgtcagactactaaggatgaggaggcatttggatatgtgccaggccactcacacttagtcctagatattggaaatgaacgtctctatataaggaaacatgtgtatgtgtatcatagttatacaaggaagcaggctactgttttcacgccagtgcacttttgtgtctaccaatcmccctgatagaagtcctaagtatttgagctaaggcagagatttaagtagagggttgtgcacagatacattaagggggcaagatctaccagactgggtgactgactgggtggaggtacaatggagagaaacgtgtctatactattaattataaaatgtcttgagtgtgcttctattgaatcaaataagtgtttaaaaatac

SEQ ID NO: 398363 - DNA, 490 bp, Homo sapiens
aatgcccaggtccaagctttgccctaccgcagaagcacctggtagggacagagataggtattgaactacataagtcaaaacagataggatacactatagctgccatccccagaatgctgtcagactactaaggatgaggaggcatttggatatgtgccaggccactcacacttagtcctagatattggaaatgaacgtctctatataaggaaacatgtgtatgtgtatcatagttatacaaggaagcaggctactgttttcacgccagtgcacttttgtgtctaccaatcccccygatagaagtcctaagtatttgagctaaggcagagatttaagtagagggttgtgcacagatacattaagggggcaagatctaccagactgggtgactgactgggtggaggtacaatggagagaaacgtgtctatactattaattataaaatgtcttgagtgtgcttctattgaatcaaataagtgtttaaaaatac

SEQ ID NO: 398364 - DNA, 559 bp, Homo sapiens
ttaaaccaagttttctagccaaatagccgagtgttttattaacatttgattcaccaatggaaatatttttacatcatgactgcagttgcaactacagatgcrtgagagaagataaaacgatctcttgctttttaaatagtaattttccctgagctaaaagtaatctgcgatcttatacatttttcaggtagtctaaaataaacaaatgcaacttttgtaatcagaaaaagtaattttgttgggattatttatgaatatgaataatgaatattcatttgttagaaaggaaaagttacaatccattaggaatatggaagtacattctcctgggaaaaatttaactcaaagagtactgaaattacaagaaaaacacagcaatctaaggaaaatagtctggatgctgcttgctttttttttcttcttgaatattctccttctaactctaccaaagtaaaatctgaaattactagtatttacacactgcagcagctgttttttgtgttttcatgcttccactgatcttcatgagttcgtgttgataaagtactcaaaaatgaaa

SEQ ID NO: 398365 - DNA, 625 bp, Homo sapiens
aggtgttctcaggaaagagcatattacagctaaagccagcagttaggagaagcatttggtggagagtttgagaacacaggggagtttgtgtgcaacttaagagaaagcctagaacaytcagtgggaagttttggagagaagtggatcagtgggagtttagtgcaacagagggagcacagagcagcccaggggtgagagtctagggggagcttgatgaacagaaagtgaattttaggcaataaggggtgagaaatggttgatttaggggatttttagattcatacagctgctgtaacaaatcaccataaacctacaggcttaaaacagcacaaatttattatcttacagttctagaggtcagaagtccaaaactgggacttaggaggctaacatcaatgtgctgagaggactgcatctttttcctgaaagctataggggacagtcagcttcatgccttttccagattctagaggctgccctcattttgggatttgtagcccccttctgacaatggatcactccaaattctgcttccatcatcacatctccttctctgaccttcttgcctcccactttcctttataaagacacctgtgcttactacattggccccagctggttaatc

SEQ ID NO: 398366 - DNA, 625 bp, Homo sapiens
aggtgttctcaggaaagagcatattacagctaaagccagcagttaggagaagcatttggtggagagtttgagaacacaggggagtttgtgtgcaacttaagagaaagcctagaacactcagtgggaagttttggagagaagtggatcagtgggagtttagtgcaacagagggagcacagagcagcccaggggtgagagtctagggggagcttgatgaacagaaagtgaattttaggcaataaggggtgagaaatggttgatttaggggatttttagattcatacagctgctgtaacaaatcaccataaacctacaggcttaaaacagcacaaatttattatcttacagttctagaggtcagaagtccaaaactgggacttaggaggctaacatcaatgtgctgagaggactgcatctttttcctgaaagctataggggacagtcagcttcatgccttttccagattctagaggctgccctcattttgggatttgtagcccccttctgacaatgsatcactccaaattctgcttccatcatcacatctccttctctgaccttcttgcctcccactttcctttataaagacacctgtgcttactacattggccccagctggttaatc

SEQ ID NO: 398367 - DNA, 492 bp, Homo sapiens
cctttcacaagtccgggtttgttgttgactggtcagtagttyatcagtcagagggtcctaggtttggggctacataagcaaccctctctccagcagtatgactctctgttaattggaatgagaagttaatctctctcatactgaacccagctgagtctctgagagcaatgatgtatttaaaagatctctggcagtccagggcatgtggcactaaccggatttagctcattagcaaatccgcaaggccctgctgacactgcacccagaataaaatacatgaggccagcccataccctgtgggcacctacagcatgactacataataaaaaagcatttattaataatctcattggtcacacaatacaaaggaaggctacaagaagtcaaatgctgtcatttgttgtgactagaaaggcataattaaaataagtgccatgtgattaacctctgaaaaattaatctggtataaaaaaaaggcacaaaaacaaggaa

SEQ ID NO: 398368 - DNA, 492 bp, Homo sapiens
cctttcacaagtccgggtttgttgttgactggtcagtagttcatcagtcagagggtcctaggtttggggctacataagcaaccctctctccagcagtatgactctctgttaattggaatgagaagttaatctctctcatactgaacccagctgagtctctgagagcaatgatgtatttaaaagatctctggcagtccagggcatgtggcactaaccggatttagctcattagcaaatccgcaaggccctgctgacactgcacccagaataaaatacatgaggccagcccataccctgtgggcacctacagcatgactacataataaaaaagcatttattaataatctcattggtcacacaatacaaaggaaggctacaagaagtcaaatgctgtcatttgtygtgactagaaaggcataattaaaataagtgccatgtgattaacctctgaaaaattaatctggtataaaaaaaaggcacaaaaacaaggaa

SEQ ID NO: 398369 - DNA, 501 bp, Homo sapiens
cagcattcatagtgggaagaagcataggtttttggagtcatccatctggggtttgagttcagattcctctgcctattgcctatatgtccttgggcaattttcttaaccttctagtaattcagtttctggacctataaaatggggatattactgcatctcatgctattcttataataattaaataataccatatatgtaaagctttcagcgcagagttaggcatgttgtaagcactcaaaaaatcttagggataataaaagtagcttaagtcctwaaaatgaaaaaataacacttttgcttggcatgaacaacatgttacatgcaacctcagtactgcagttgatgatggttcaatgccggtcaatggtgttttccctagggtctttctggcagtgagcttatcttctgatttaatgtcaagggtggcacattggtaatcctgaaagaatgttacaggctatggctgaacaagttttatgaaggttagagatgaacatttat

SEQ ID NO: 398370 - DNA, 501 bp, Homo sapiens
cagcattcatagtgggaagaagcataggtttttggagtcatccatctggggtttgagttcagattcctctgcctattgcctatatgtccttgggcaattttcttaaccttctagtaattcagtttctggacctataaaatggggatattactgcatctcatgctattcttataataattaaataataccatatatgtaaagctttcagcgcagagttaggcatgttgtaagcactcaaaaaatcttagggataataaaagtagcttaagtccttaaaatgaaaaaataacacttttgcttggcatgaacaacatgttacatgcamcctcagtactgcagttgatgatggttcaatgccggtcaatggtgttttccctagggtctttctggcagtgagcttatcttctgatttaatgtcaagggtggcacattggtaatcctgaaagaatgttacaggctatggctgaacaagttttatgaaggttagagatgaacatttat

SEQ ID NO: 398371 - DNA, 483 bp, Homo sapiens
ctctggaaatcatgcaacattatgagtgtgttctgtttctcaccttttattagattcttgtaagggtccgggacctgcggaagatcagaaatttttgcaatgcagcatccagaggagaaaatgggctttggagccagmcatacctgggtctgaatccttgatgaaggaccttggataagtcaattaatctcttccttagttttcttatctataaaattggactaccttacaggctttttgtagagaccaaagttgatgatacattacgttatctcttattctttctttggaacagacacttggtatatggcagttattattattatgcagcatattcattgcaaaccatcccctgccaacatttaaaaaaatacatggttatatttaaataacttaaatatgtcatttatttatgctattaatttgcttagttcatcttttctttttttttccttttattattatactttaagttttagggta

SEQ ID NO: 398372 - DNA, 483 bp, Homo sapiens
ctctggaaatcatgcaacattatgagtgtgttctgtttctcaccttttattagattcttgtaagggtccgggacctgcggaagatcagaaatttttgcaatgcagcatccagaggagaaaatgggctttggagccagacatacctgggtctgaatccttgatgaaggaccttggataagtcaattaatctcttccttagttttcttatctataaaattggactaccttacaggctttttgtagagaccaaagttgatgatacattacgttwtctcttattctttctttggaacagacacttggtatatggcagttattattattatgcagcatattcattgcaaaccatcccctgccaacatttaaaaaaatacatggttatatttaaataacttaaatatgtcatttatttatgctattaatttgcttagttcatcttttctttttttttccttttattattatactttaagttttagggta

SEQ ID NO: 398373 - DNA, 541 bp, Homo sapiens
ggagggatttggaaggtacacataatgttttgtttcttaatccatgtactggttacatgagtgtgtctggtttgtgaaagtttcttaaactctagttattttatttatttatatatacatatatatttgataaaagtgttcactttcaattttcatatacatttaataaaagttatgcacacacacrcatatcaaaagtctacatatgtccttgtttagtcttacttctactttttaaaaagatgcattctctttctttcaagttcaaaggcatcttttgaggaaatacatttgtattttccttgaacttggtacgtacacacctacatatatttcttcaagaaatctctagcatgtccaacttagtttttgagtaattattcttacaagtgaaaacttgttctcatggcagcaccaggctctgagctccctgaggcaggggtcatgtcatgtttgtgccctaggaagctggcctatggtaggtaatcaataattattgaataagatgcaaaagatcaggtagtacaagagtcctgatagt

SEQ ID NO: 398374 - DNA, 561 bp, Homo sapiens
atgtcttccccttctttcaaaagccacattctaagtcaaarttttgcttctaattatttcttttattccagaattttttccattcctctgtatcgctcattttttttttttttttttacaaatgtctattatgtgttatctcttactcgttacttatttttaaattttatatctgaatttatcttggcttcacattttggtccacagtgggaagattccaatgacagagtaatgcttttattcaagaaactttattctaactgaaaccacatcttttctatgctagtctatcagaaatgcagcataatgggagtctttgctgaatatgaagcagattcctagaaaacaagtgggcattgatttatttttattgatgtgcttttactaactgataggaagtgttctttgaacacctctcttcctaccattccactccaataagccactgagtttgatcatttctaacacatggtccatgatgctgtctagagggctgagagcctctccagccacagtgctaagtgagccaacagccacccaggtctcctcaattcagatgtg

SEQ ID NO: 398375 - DNA, 320 bp, Homo sapiens
gtctcatagtagtggatgcaattaycaccctattcctgaagaagtaaaggaaggagcggttttcaagatccactgagggtccttgtatggaaaggaggactgtctggagtggggtcattggtagaggaacccagccagcccactatgatattgcagggaaggaactgaggaaaacgtttcttcattttcctcccagcctctgtcacttactagcacctcctatgggcagagtcaactggaagccagcaggcaagggcacctattggtgctgtccacatgccctgacacacacagagcatgggatagggtggagagtaaat

SEQ ID NO: 398376 - DNA, 320 bp, Homo sapiens
gtctcatagtagtggatgcaattaccaccctattcctgaagaagtaaaggaaggagcggttttcaagatccactgagggtccttgtatggaaaggaggactgtctggagtggggtcattggtagaggaacccagccagcccactatgatattgcagggaaggaamtgaggaaaacgtttcttcattttcctcccagcctctgtcacttactagcacctcctatgggcagagtcaactggaagccagcaggcaagggcacctattggtgctgtccacatgccctgacacacacagagcatgggatagggtggagagtaaat

SEQ ID NO: 398377 - DNA, 582 bp, Homo sapiens
gagtaaatatggagaggcaagtggaaagtatctagcactgtcctttcccatagcacaaatccaggtacccatttattatctgttatacctgtagcctggaatggacctctctgcagagtctctgtaattgactaagtcttgtagttgattctaaaataggattaaaagcagtcattgttttcaaagaagttttatcttctgattatagaaaccaaaaaaaargtatcaacaataagtattttcatggcaatcatatttgggtccatttgagaaagggttttataacggaagattttctgatactcctgtttcccaaaaagctttaccagaattgaatggctccttctcccaaagaagccacaagcttcttattgtctctttctcccacagccatgttgtactgtctttcatgtgaaatctgtgctatactttctaattttattataaatgctcatatttgataaaacattgcattgcttttaaaataaaaacatttcattttattagataggattgcatgtaaggaagacagtttcagtattggtggcagagcctataacaagttgccaatagaaaatgcat

SEQ ID NO: 398378 - DNA, 552 bp, Homo sapiens
gatcttcacacatcatcatacccagtctccagctccaaaaccttataagtcaagatgcttcagcacctcgttatggctgatggatggggcagtgagcacatgctgcagaggaccatgtccattagcagaaaagaatccctgttctttaaaaatcacgcacgtccaaaaggttaagctcatctccatgctctctttggggaaagaggacgggtttccactcctaatgtgctgcctgaatggaccttgttgttctgctcctctagactcaggaggatgagaggcagcagaacagaatgtgtgagtgtggaccctgaagcccattaacacatgttcaaaacttggtcttgcacataatagctgtgtgatcttggagaaagtaccttactctctgtgcctcaatttcttatctgtaaaatgcagatgrtaacctgctttgtaggttatcatctgcattttaaaataggattaaacgtattggcaatataagacaccctgaactgtgcctgccacataattagtactgcagaagcttttgctactttgtaaagcaca

SEQ ID NO: 398379 - DNA, 613 bp, Homo sapiens
caatatacttgcaaagggtaaaggagtatggaatgggtaatagaagaaggtagttataaataccacatataattatgtgacaagttgcagaaataaagactgtaatagttatcagcatttcttccatattttgacctaaatatcttacatatatatcagccaattctgtcttcctctttcccattccataatgtaagatgtgttaatagttgttagacctaaagctcagtatgcaaattgtgagctatccaaaatggagtatgacttaaaaacaaaaatcacatcagcccaatatgtgtaaaatgatgttgtgttctcttttgtggagagggatagtgtattttgattggatggaggattgatgcattatgtttgttgtaaatgagattttgcttttgtctttattcggaagttaagtatggttaaaagaagtgcatatggaagccatgtgacctgggtgggttgckatggctttgtattttgtcaactttgctaagctggaactgtgtttcccagaattccctttcccatacgactcttgactgggtttggccacaaaagatatttgtataagacttgggaaatgggagttaaacaccagccttttcctgct

SEQ ID NO: 398380 - DNA, 503 bp, Homo sapiens
caattatatagcaagacgatgcaaaagttgctgcaggacaagataccataaatgccaaatgagtgctctcatctctaagtgtgggatgagcggagtgagagtctgcaggctgggtggtcaggacacactttacarcagtgattgaagcttgtcctaagaggagagtaagaattagataagattcaagtttgccatgatgctacaacatcacattctctacttatcgaatgtgtgtcaaggtcatctcctcagctagacttcaactttttgaacacggaaaccctgtctcaagttctttttgaatcaacgtcttcttggggtgtatgccctctggcatgcactgaattgattcaaattgaattgaattaagtcacaccctgaggcatttgtgctgggcttgtccacataggagagaatttgaggtctgacgtcagctcaagtaaaatgccatctttgggcagcaaaagacacccagcctctcacaggaaatgcaaactttcctt

SEQ ID NO: 398381 - DNA, 503 bp, Homo sapiens
caattatatagcaagacgatgcaaaagttgctgcaggacaagataccataaatgccaaatgagtgctctcatctctaagtgtgggatgagcggagtgagagtctgcaggctgggtggtcaggacacactttacaacagtgattgaagcttgtcctaagaggagagtaagaattagataagattcaagtttgccatgatgctacaacatcacattctctacttatcgaatgtgtgtcaaggtcatctcctcagctagacttcaactttttgaacacggaaaccctgtctcaagttctttttgaatcaacgtcttcttggggtgtatgccctctggcatgcactgaattgattcaaattgaattgaattaagtcacaccctgaggcatttgtgctgggcttgtccacataggagagaatttgaggtctgasgtcagctcaagtaaaatgccatctttgggcagcaaaagacacccagcctctcacaggaaatgcaaactttcctt

SEQ ID NO: 398382 - DNA, 608 bp, Homo sapiens
gcagagatgagatattcttataaattatccaagattatacattggagccttttcatttcttctccagacagtgaatatgagaacacaccactgagtaatatcatgtcctttcaaagctaccttctrcctgtaaggtgagaagcctggggttgctgtcctaagttagcagggctggaggcagagcagacaccaaatggaatcatgtggctattttgctgatgcttaaaatctactgcattctccaaatcaaactgcggcatcaaagcgttggagaaactgacttaattcaaaaacatgtctagggcatctaaacttattgtctctgagtttcacttgttttttgtcttttttgttcctgggaagtcaattatgtctcatgggttgggactttgaacaggaaagtggtgtgtcagcgtgcagtcatttgtgaatacttactcgcccactcatcaaacacttagtgagcatctcctttgggatatgccctgtggattctgcatcctgtcccccatggggactttgctaggggctgccacacagagtctctttaggcaattatatctgtttctgcaaatctttaggccatcagagggtcaggaacaaggggt

SEQ ID NO: 398383 - DNA, 605 bp, Homo sapiens
tttgtgatcacgattcctgctaggttacaggaataatctaagatgcagaaggatgtaaggaaacaaaacatccacaaaatgagtaaattttgagccagsatttcccaaactgagtcctgaagaatttttggaaattatataaggaaggaagagtctcataatcaaaatgtttggaaaaccttaaatttagcagcttagccttcccaattactaccatcctattccagattttaaatcatttgacgtggattattgctgtaaccatctggttggactctgcctctcatttctttcttcctctggtccaaactttctatttattctagaaggattgttctaaaacatagacatgatcataccattccctcgtttgaaatcattgatagttctcattgcctatggcctagaatccaatttcttagtatgacttacaaaacccttcaggacctgggccacaaactgtgtttccaatcacccctctaatcttcctacgcaaacacaccctgtattttgttcacaccagaggtttgctcttctttgacattccagggacatccatcacctctgtgcatactattccctctggaatgacctttccatgcgca

SEQ ID NO: 398384 - DNA, 492 bp, Homo sapiens
gatatattggtcacttttcacggacataggtgtccttggtatgcagtagctcttccacaggtctttcaatatcagaatcaatcccaaagcctgggtctggctcccactcaggggttcgtgtcatgtgaagagctctccagcaggccagagggcacaattcacccatgcgcctgccagccattgagctcctcttatgcaccggctctgtgctcaggctggagatgcagacaaggacaagacatagcctctgtgctaacaaagttcacagtcttatagaaggcagacaagcaagtcaatattatggtgtgtcacgtgtggaggcctggtacaggctgcctggaaaacagaagagagcctccaaccctttgaggastggggggccttcaaaatagctttgtaggggaggtgatgcttggactgagccttcaaggaagtaggaattagtcagaaagacaaaacctcaattgcattgttaattccacttccatatat

SEQ ID NO: 398385 - DNA, 587 bp, Homo sapiens
actctctgtatcatctttgcagcttttctataaataaaaaattattccaaaacaaaatgtttatttaaaagaaaaaggcattctggatccaacacttaccagctgtgtaacctcagatgagttatttaatctttcagtgcctcaatcttgtgttttgtaaaatgaggggttaatagtaaaacttcccatagggttgttgtaaggattaaatgagttaacatatgaattgcttagaatagtgcttggcaaaaggtaagttgttaataagtgttggctctgattrtaatagtttcttcttttaaacacaacttgttttcatggctatttgctcagtgtgtgataagtcaccccatagaccagtgttctccaaagtggggtacagctggggttgcataagacccattgaagggtaaaaggaaaaagtagaacttctgtttttatactgtatttatttcatcctctctgttttcgtgtatgtgctgaaatgcatatcttgatcaagtagaagaggatatgatatataaatacatatataaggtggggtgcaccaccatttttattgatagggtaaagcctgggcacacagg

SEQ ID NO: 398386 - DNA, 587 bp, Homo sapiens
actctctgtatcatctttgcagcttttctataaataaaaaattattccaaaacaaaatgtttatttaaaagaaaaaggcattctggatccaacacttaccagctgtgtaacctcagatgagttatttaatctttcagtgcctcaatcttgtgttttgtaaaatgaggggttaatagtaaaacttcccatagggttgttgtaaggattaaatgagttaacatatgaattgcttagaatagtgcttggcaaaaggtaagttgttaataagtgttggctctgattgtaatagtttcttcttttaaacacaacttgttttcatggctatttgctcagtgtgtgataagtcaccccatagaccagtgttctccaaagtggggtacagctggggttgcatragacccattgaagggtaaaaggaaaaagtagaacttctgtttttatactgtatttatttcatcctctctgttttcgtgtatgtgctgaaatgcatatcttgatcaagtagaagaggatatgatatataaatacatatataaggtggggtgcaccaccatttttattgatagggtaaagcctgggcacacagg

SEQ ID NO: 398387 - DNA, 515 bp, Homo sapiens
tgtctatgaatagtaactttcactcctactggcaaaaactatggtttagttaaaccagtactgtatactaactgtgtgtgtgtgtgtattaatgtataattttgcattctttaaaaaatatgttgatgcttgaattttgcttttgggtaaattttaagaatgtcatattgttaaaaacaactcgaagaaagtgcttatatcttcctactggaattgctcttaattcttctagattttttttagcgctaaccataagaagtgtgttctcaatggccatgatttgatcgctgctcacacattccacatttttctgcttcatgcatcatcatcagccatctccaacactccagtcctgaatctgtcctactttctgttacctgatttttgctggtgattcatgagccagaatagaaaaagaaaaaaaaaaaactccaccttggcttttcacartatagtatcccctggaaactctgtgagaaatctagttttggtcatcagactcatgcaaatgtaat

SEQ ID NO: 398388 - DNA, 598 bp, Homo sapiens
taagactactcaaaattagtagtaaaagaggttctccactctaaacttagtgttctttgtacttttcccgtggtaaataacatttggtttttagtacatctgtccacatccctcatttcaggtccttccctcatgctctgtatttacctaagtgttttttctttgattgttctggcttctagccttccttagtaaagtgatgttttggactttgttttggcttgctgtctcctgccctgctctgacaggaaggtgcctctgggacaaggtttcctgactgctggagccacaggtgtgtactggacttgcagcacactcccaaaccaagcgcttaatgtgtttctccccacctatatctgaccctgggcaatcagtgttcccatagcagccagtccaattactctgtattcattttgggcttaccttggttgcacatctgagcagacattgacttgaaactcacagagagaggggagggaggttctgatctcagagatattctaaaggcatgctrtacaacaggcactttttccattggaacagagacattcaaggtgcctttggacattcagggacacatatttggaagtggattaat

SEQ ID NO: 398389 - DNA, 567 bp, Homo sapiens
tgttagaatatataatagtattttattttaaaatgttagcttattctatgtttttataatctgctcatagtggttaccatagaagatatatatatatccayataagatattaaatatccatataagatattaaaattactattttgtacaatcagtattcatttagatttacccacaggtttatcctttttagtgttcttcagtttttcccatatattcatgttttcctctgggaccatttttcttctaccaaaagaattccctttaatagtttctttttctttttaattagagttattgatatataattttatgcaataaacttttacaaagtttaagcgtgttttttcaaaatgataaatgctctcaattttttgttttgcaaaaacatctttattcacatttatgtttgaaggatattttcatcggctatataattttaggttggcagttaccttcagaactataaacttttttcttgcttccatgatttattttgaaaagtcaagtatcagttttattgttgctcctttgaaagtaatgtcattttctttttctctgtcagct

SEQ ID NO: 398390 - DNA, 567 bp, Homo sapiens
tgttagaatatataatagtattttattttaaaatgttagcttattctatgtttttataatctgctcatagtggttaccatagaagatatatatatatccacataagatattaaatatccatataagatattaaaattactattttgtrcaatcagtattcatttagatttacccacaggtttatcctttttagtgttcttcagtttttcccatatattcatgttttcctctgggaccatttttcttctaccaaaagaattccctttaatagtttctttttctttttaattagagttattgatatataattttatgcaataaacttttacaaagtttaagcgtgttttttcaaaatgataaatgctctcaattttttgttttgcaaaaacatctttattcacatttatgtttgaaggatattttcatcggctatataattttaggttggcagttaccttcagaactataaacttttttcttgcttccatgatttattttgaaaagtcaagtatcagttttattgttgctcctttgaaagtaatgtcattttctttttctctgtcagct

SEQ ID NO: 398391 - DNA, 602 bp, Homo sapiens
aaagagtgaatgactaaacatttcaatccctgtagacacaaatggacttcacttcactattgactcttttgaacaagtggtctaagtgtggaggccacaagagaagatatttctatttcaaatcaaagactgtgaagggtggtagttgagcctaggggatcatcaatcctctctgtctcaccatgtgcatagggatatttattaaaactctcaaagtggccagaaatatctctgcttattgacctttaaacaagcttctagcacccaagcatactgtggtgtaaccaatagcacacctatttggtcagcttatggcaggactaacattgtcaactcaaaagactcttcttcccttactgtgtcccaagaaggctgctggttatcttggtcagggcagtggaaggaaggctatatttttcagtatctctaagttcttcctctatgatcaggacttatacagcagatcagaatgggcatgtgtatmaaatggatcttccagttcatcagctatgcccacctccattcaatgtatggatgaaaaactatgccctcatgtcctcagcttttttactttccactttcatcaataaatcaaacaggca

SEQ ID NO: 398392 - DNA, 528 bp, Homo sapiens
ttgatctcttttggatatatcccaagcacctagaactatgtccagcacatagtcacactctctgtttctgcaatggttgaataattagtcctcccaccatttctgactggctttccaacccctctataatttgactatgcccaatctttccagtcttctttttcctctacaaccagctcaggaatgtaggtaccagtcatacaactggttggatttttattgttgttgttgcaagtcttgccttttttttttttttttttttggctccagccatttcttgtacttctggaagtttccttarctccccttcataaatgccatctcttaacaaaggtgactgtgcaccacatacatgcgtgcacacacacacacacacacacacacacacacacacacacagtgagagagagagaaagagagagagagagtactaagacacacaatcccaaaggttctttgagagataggaagtaaaattttcatggttctcccatctcagactcttagagtcctccccatactgaaagt

SEQ ID NO: 398393 - DNA, 601 bp, Homo sapiens
ctttttcctttaacaataaaaaaatgagtaaaaattgctaagaagcaaggatgaccactattgtgtgttttttttttctaaatattgtttcgataggcctaactggatgtcctggcctccccatgtgtggagctgcatacctgtcactgtattaacactctcattacctttatctaagtggccagtctatctgagaaaggctcctcctctactccattcatttaaatggacacatgggtatctttgtacaggacaggcttctgatgactgcgacagttttctccatttaagaatwgagtcactggcattttaaatgtaaaacacaatctccgttatggtatagcctggagcataggaatgagcataggtgtgggaaatggaatttaaattcctgattagttactacttcatgaaccttaaatatgactcaagtacgctgagcctcagttccctgatttatgaaatacaggtgaaaaacatctttgaggactccattatatatgtgacaatgcattctaaagcccagagttctacagaaaggaagtattataattttattacaattagcataattgatgttcctgggggattatagtcttcc

SEQ ID NO: 398394 - DNA, 601 bp, Homo sapiens
ctttttcctttaacaataaaaaaatgagtaaaaattgctaagaagcaaggatgaccactattgtgtgttttttttttctaaatattgtttcgataggcctaactggatgtcctggcctccccatgtgtggagctgcatacctgtcactgtattaacactctcattacctttatctaagtggccagtctatctgagaaaggctcctcctctactccattcatttaaatggacacatgggtatctttgtacaggacaggcttctgatgactgcgacagttttctccatttaagaatagagtcaytggcattttaaatgtaaaacacaatctccgttatggtatagcctggagcataggaatgagcataggtgtgggaaatggaatttaaattcctgattagttactacttcatgaaccttaaatatgactcaagtacgctgagcctcagttccctgatttatgaaatacaggtgaaaaacatctttgaggactccattatatatgtgacaatgcattctaaagcccagagttctacagaaaggaagtattataattttattacaattagcataattgatgttcctgggggattatagtcttcc

SEQ ID NO: 398395 - DNA, 601 bp, Homo sapiens
ctttttcctttaacaataaaaaaatgagtaaaaattgctaagaagcaaggatgaccactattgtgtgttttttttttctaaatattgtttcgataggcctaactggatgtcctggcctccccatgtgtggagctgcatacctgtcactgtattaacactctcattacctttatctaagtggccagtctatctgagaaaggctcctcctctactccattcatttaaatggacacatgggtatctttgtacaggacaggcttctgatgactgcgacagttttctccatttaagaatagagtcactggcattttaaatgtaaaacacaatctccgttatggtatagcctggagcataggaatgagcataggtktgggaaatggaatttaaattcctgattagttactacttcatgaaccttaaatatgactcaagtacgctgagcctcagttccctgatttatgaaatacaggtgaaaaacatctttgaggactccattatatatgtgacaatgcattctaaagcccagagttctacagaaaggaagtattataattttattacaattagcataattgatgttcctgggggattatagtcttcc

SEQ ID NO: 398396 - DNA, 601 bp, Homo sapiens
ctttttcctttaacaataaaaaaatgagtaaaaattgctaagaagcaaggatgaccactattgtgtgttttttttttctaaatattgtttcgataggcctaactggatgtcctggcctccccatgtgtggagctgcatacctgtcactgtattaacactctcattacctttatctaagtggccagtctatctgagaaaggctcctcctctactccattcatttaaatggacacatgggtatctttgtacaggacaggcttctgatgactgcgacagttttctccatttaagaatagagtcactggcattttaaatgtaaaacacaatctccgttatggtatagcctggagcataggaatgagcataggtgtgggaaatggaatttaaattcctgattagttactacttcatgaaccttaaatatgactcaagtackctgagcctcagttccctgatttatgaaatacaggtgaaaaacatctttgaggactccattatatatgtgacaatgcattctaaagcccagagttctacagaaaggaagtattataattttattacaattagcataattgatgttcctgggggattatagtcttcc

SEQ ID NO: 398397 - DNA, 585 bp, Homo sapiens
gaggctggcaaactgtaacccagcagctgcctggtttttaaataaagttttatcagaacacagacatttgtttacatattgtttatgactgctttctctctaaagggcagagttgagtagttgcaacagaaaccctatgggctgcaaagctgaaaatatttactatctagttmtttacagaaagtgtgaaagtgttccaactcctcacataaaggaaagctcctagaatttgaaatcaagaggcctgaagttgaaatcaagttctgacttgatgtaatggttgtgtatacttggggcattgtatttaacctctcagaattcagtttccctctgaaaagtagaaatcatgtttaattcaagaagttttgagaattacataagcttatgtagatgacagtagtttgtaattgaaaagtggtggccagtacatatgagcaggaagaatagcttttgtcaagtctcagagaagaggaaaatctcatttctttgctatattgaggttttcataacattagagcaaaaaatccaggctgtagccaaaccaaagtgagaagaatagggatattttgctgcttgaggtagcac

SEQ ID NO: 398398 - DNA, 585 bp, Homo sapiens
gaggctggcaaactgtaacccagcagctgcctggtttttaaataaagttttatcagaacacagacatttgtttacatattgtttatgactgctttctctctaaagggcagagttgagtagttgcaacagaaaccctatgggctgcaaagctgaaaatatttactatctagttatttacagaaagtgtgaaagtgttccaactcctcacataaaggaaagctcctagaatttgaaatcaagaggcctgaagttgaaatcaagttctgacttgatgtaatggttgtgtatacttggggcattgtatttaacctctcagaattcagtttccctctgaaaagtagaaatcatgtttaattcaagaagttttgagaattayataagcttatgtagatgacagtagtttgtaattgaaaagtggtggccagtacatatgagcaggaagaatagcttttgtcaagtctcagagaagaggaaaatctcatttctttgctatattgaggttttcataacattagagcaaaaaatccaggctgtagccaaaccaaagtgagaagaatagggatattttgctgcttgaggtagcac

SEQ ID NO: 398399 - DNA, 568 bp, Homo sapiens
tacagcataagcgggagtaccgcgcctggcccaccagttaaaatttttctaagggaagattgcggtgaaacccttcttccttcagtggattggttgtcgactaggggagctctactgctcttgctctggaatctatgatcctgagtattctctctcctgattactcaattctgtgcctcgcccaacatcgcytcccccttatattttaatgtttatgaagccagttgtagtagtccatttttacgctgctgataaagacatacccgagactgggaagaaaggaaatttaatttgacttagttccacatggctggggaggtctcataatcatggcatcagcaggagaaaatgagcaagaagcaaaagtggaaactcctgataaacccaccagatctcgtgagacttattcactatcacaagaattgcatgggaaacacgggcccccgtgattcaattacctcccccttggtccctcccacaacacacgggaattctgggagatacaattcaacttgagattttggtgaggacacagccaaaccatatcaatgattttgattttttgtgg

SEQ ID NO: 398400 - DNA, 568 bp, Homo sapiens
tacagcataagcgggagtaccgcgcctggcccaccagttaaaatttttctaagggaagattgcggtgaaacccttcttccttcagtggattggttgtcgactaggggagctctactgctcttgctctggaatctatgatcctgagtattctctctcctgattactcaattctgtgcctcgcccaacatcgcttcccccttatattttaatgtttatgaagccagttgtagtagtccatttttacgctgctgataaagacatacccgagactgggaagaaaggaaatttaatttgacttagttccacatggytggggaggtctcataatcatggcatcagcaggagaaaatgagcaagaagcaaaagtggaaactcctgataaacccaccagatctcgtgagacttattcactatcacaagaattgcatgggaaacacgggcccccgtgattcaattacctcccccttggtccctcccacaacacacgggaattctgggagatacaattcaacttgagattttggtgaggacacagccaaaccatatcaatgattttgattttttgtgg

SEQ ID NO: 398401 - DNA, 584 bp, Homo sapiens
agaatctctgttagcatagctagatatttgtcttccagactcacccagtcctaaagagattatctaagatctgaatgggaaacatttgtcatctattgtctctaagggcagccactataagatttcaaaagaactttggtctccacaatcttcatcttaacctgaacattccctttctgtcaatcccaggtctttagacagactcaatcaattgtcaaccagaaaatgtttaaattcacctgtagcctggaagccgcacccgctccccccgcacccgtccctgcccccgcccagccctgtttgagttgtcctgcctttctggaccataccaatgtatttcttaaatgtatttggttgatgtctcatgcctctctaaaatatataaaaccaagctgcacccaccttggcacatgttctcaggacctcctgagggctgtgtcacaggccatggtcacycatatttggctcagaataaatctcttcaaatattctacagagtttgaatcttttcatcgatacatgttaaataaatattatatgctgttttgtgctacgagtctgctttctgtttatttttggcaaac

SEQ ID NO: 398402 - DNA, 522 bp, Homo sapiens
tcacactgtggagacaatgtctgaaccatgtcttgaagtatgaataggattttgatagttagacaaacaggtgatggtctccctaggcrtaataaatagtattctggagggatctaagcctggaaaagttgacatcatatatcatggagaaccttgtttgaaagaatcaaaaactcgggctttgtcctatacatgctgaggatcctaagttttaaacactggagtgacaagatcagatttcattttggaccaattacactggcaatattccagaaattagggtgtttaagatcagcaggagtacaaaaagaaaatattaatagctctatttattcgtacctcaattttttttcagttattgggtatgttttataatgtactactggaatagtacattatataatttatgaaatattcatgtattagggcagtactgttttttgaaactaagaattataaaacaacatatgtttggagaccactggctaaaggatagactggagggtaaggacaggaagcaga

SEQ ID NO: 398403 - DNA, 522 bp, Homo sapiens
tcacactgtggagacaatgtctgaaccatgtcttgaagtatgaataggattttgatagttagacaaacaggtgatggtctccctaggcgtaataaatagtattctggagggatctaagcctggaaaagttgacatcatatatcatggagaaccttgtttgaaagaatcaaaaactcgggctttgtcctatacatgctgaggatcctaagttttaaacactggagtgacaagatcagatttcattttggaccaattacactggcaatattccagaaattagggtgtttaagatcagcaggagtacaaaargaaaatattaatagctctatttattcgtacctcaattttttttcagttattgggtatgttttataatgtactactggaatagtacattatataatttatgaaatattcatgtattagggcagtactgttttttgaaactaagaattataaaacaacatatgtttggagaccactggctaaaggatagactggagggtaaggacaggaagcaga

SEQ ID NO: 398404 - DNA, 522 bp, Homo sapiens
tcacactgtggagacaatgtctgaaccatgtcttgaagtatgaataggattttgatagttagacaaacaggtgatggtctccctaggcgtaataaatagtattctggagggatctaagcctggaaaagttgacatcatatatcatggagaaccttgtttgaaagaatcaaaaactcgggctttgtcctatacatgctgaggatcctaagttttaaacactggagtgacaagatcagatttcattttggaccaattacactggcaatattccagaaattagggtgtttaagatcagcaggagtacaaaaagaaaatattaatagctctatttattcgtacctcaattttttttcagttattgggtatgttttataakgtactactggaatagtacattatataatttatgaaatattcatgtattagggcagtactgttttttgaaactaagaattataaaacaacatatgtttggagaccactggctaaaggatagactggagggtaaggacaggaagcaga

SEQ ID NO: 398405 - DNA, 586 bp, Homo sapiens
atttcactattaatctaatgagggttactttatatgtgacttgatgctttctctgtctgctatgattttattaattatgctatcctcatcttttccyttcttttctgcttcccaaaacaccgaaaatataaatatttgttcacttagtagtgtcccataagtcctgtaggctttatttatttatcttttttctttttttttctgcttatattatttcaaaagccctgtcttcaacttcagaaattcttttttcttcttggtctagtctgttgttgaagctctcaatggtaatttttttattttagtcattggattcttcagctttaaggtttctgtcttgttctttttaatgatacccatctctttgtcgaatttctcattcaaatcatgaattgtctttctgaattcattgaattgcctatattctcttgtatctcagttttcttaagtttattgttttgaattctttttctgggatttcacacattttcttatcattgaggtctgttacttgagaattgctgtttttcattgacagtgtcttgtttccttgctttctcatgtttgatgtgtccctacactgatt

SEQ ID NO: 398406 - DNA, 586 bp, Homo sapiens
atttcactattaatctaatgagggttactttatatgtgacttgatgctttctctgtctgctatgattttattaattatgctatcctcatcttttcccttcttttctgcttcccaaaacaccgaaaatataaatatttgttcacttagtagtgtcccataagtcctgtaggctttatttatttwtcttttttctttttttttctgcttatattatttcaaaagccctgtcttcaacttcagaaattcttttttcttcttggtctagtctgttgttgaagctctcaatggtaatttttttattttagtcattggattcttcagctttaaggtttctgtcttgttctttttaatgatacccatctctttgtcgaatttctcattcaaatcatgaattgtctttctgaattcattgaattgcctatattctcttgtatctcagttttcttaagtttattgttttgaattctttttctgggatttcacacattttcttatcattgaggtctgttacttgagaattgctgtttttcattgacagtgtcttgtttccttgctttctcatgtttgatgtgtccctacactgatt

SEQ ID NO: 398407 - DNA, 648 bp, Homo sapiens
tatcaatgtttttgttgacaattcataaataggctgagctggaaattgtctcctttatcattgaaagcctattgaaatgttaagaagttacaaggttatatttaacccatttcagagaaaaaactcttttaaaacacttagcactctttgcatataagcagccactctgccaatcataaatgatccttatctctttattaaaaccaatatgacagaacatygacttctcagcactttaatagttcttagttcaggtgttgaagtgtaacgatcttgcatttcttcaaattttttcagaaatatgtctttccttgtgagtaaatagagctggtttaatttgttttatatcataaatttcccacagggcaaaaccaaaacgatattttgtgaaattccatgcttggtaaactccatctaaaaatgatatggctgacagaattgttcactggtttagtcacgtcataactaaaaacaaaggaaaagtgattctctttctctccatttccccattaaccccactgcttctcccagccaattaacagaaatctattctttaattaaccctataaatatatacacctactatatacccacaaaaatttcaaaagttaaaaaaaaccttttaattagccaaaatctactggacac

SEQ ID NO: 398408 - DNA, 648 bp, Homo sapiens
tatcaatgtttttgttgacaattcataaataggctgagctggaaattgtctcctttatcattgaaagcctattgaaatgttaagaagttacaaggttatatttaacccatttcagagaaaaaactcttttaaaacacttagcactctttgcatataagcagccactctgccaatcataaatgatccttatctctttattaaaaccaatatgacagaacatcgacttctcagcactttaatagttcttagttcaggtgttgaagtgtaacgatcttgcatttcttcaaattttttcagaaatatgtctttccttgtgagtaaatagagctggtttaatttgttttatatcataaatttcccacagggcaaaaccaaaacgatattttgtgaaattccatgcttggtaaactccatctaaaaatgatatggctgacagaattgttcactggtttagtcacgtcataactaaaaacaaaggaaaagtgattctctttctctccatttccccattaaccccactrcttctcccagccaattaacagaaatctattctttaattaaccctataaatatatacacctactatatacccacaaaaatttcaaaagttaaaaaaaaccttttaattagccaaaatctactggacac

SEQ ID NO: 398409 - DNA, 511 bp, Homo sapiens
tttctgcctctatttcatcagtaaattggagaaaataatggtacctactaatggataaaatgagttaaaatgtataaaatgctctgaatmgtacctattatatagtaatcattcaacaaatgttagtttattattgctattgttgttatcatagcattttctagtttgcttggcacttatgcctatcttttctcattttagcctcatgataaccctgtaagttaagtaaggcaaatgtcataaataaggaaattaaggattttttttaaagtgacttgttcatggtcccaaagctagaagtgttgctaagtggggctagatcccacatcttttgactgataatctatctctcaccatatcatgatgtctccttctcagcatgctgaataaataggtgccattatttctggcacattgtctctttaatagccacatattcttagggttccagttaaggttgagaagctgagatcatgttggcttctgagatcaaagataattttactgacct

SEQ ID NO: 398410 - DNA, 528 bp, Homo sapiens
gcacttatgcctatcttttctcattttagcctcatgataaccctgtaagttaagtaaggcaaatgtcataaataaggaaattaaggattttttttaaagtgacttgttcatggtcccaaagctagaagtgttgctaagtggggctagatcccacatcttttgactgataatctatctctcaccatatcatgatgtctccttctcagcatgctgaataaataggtgccattatttctggcacattgtctctttaatagccacatattcttagggttccagttaaggttgagaagctgagatcatgttggcttctgagatcaaagataattttactgacctcaaattgtataccaatatgatgatagggtgttgagatgcccagggtaaaggagtcacatttgataaaacyttgtgtggattatcatcttttcataatggctaaatcttttatgataccgttcaagctcagtgacttcccaaatcatactaataagtacaagaagtgttagcaaaagagatgaaaaaatt

SEQ ID NO: 398411 - DNA, 523 bp, Homo sapiens
cctctttccgtaggatgtagacttgcctccccaaacacggccatcttctcaaacctcagctaagttcttttacctgtttagatgctatttaaatcagatttcaaagggtccccagttgagaaaaaggaaaattttaatctttaatcatctttttaagtccagatgttcataaattctaaagcatattcctattacgtgaatgcttaagttacacaggaaacattctataactgtagtatttcaatttcagaaatatttaggrtccatagcaatttaaaagagggaggaaaccactggagcattctaattttgtatcacaaacttcctaaaggacctatatgaataaagagaaaacaacaaatcctaccagctgtacagagagcaacagggaaatttggcctctgtatcactgtccagcattatttaaagctaggatttaggaaggcagcaggaattatttggcagatttggaaggatagtttcgttaagtgaactttctacttttttggtggttatgtcaaag

SEQ ID NO: 398412 - DNA, 523 bp, Homo sapiens
cctctttccgtaggatgtagacttgcctccccaaacacggccatcttctcaaacctcagctaagttcttttacctgtttagatgctatttaaatcagatttcaaagggtccccagttgagaaaaaggaaaattttaatctttaatcatctttttaagtccagatgttcataaattctaaagcatattcctattacgtgaatgcttaagttacacaggaaacattctataactgtagtatttcaatttcagaaatatttagggtccatagcaatttaaaagagggaggaaaccactggagcattctaattttgtatcacaaacttcctaaaggacctatatgaataaagagaaaacaacaaatcctaccagctgtacagagagcaacagggaaatttggcctctgtatcactgtccagcattatttaaagctaggatttaggaaggmagcaggaattatttggcagatttggaaggatagtttcgttaagtgaactttctacttttttggtggttatgtcaaag

SEQ ID NO: 398413 - DNA, 612 bp, Homo sapiens
ttgcagtaaatgcatcttttaccacacactttagcggaaagttcacgttttaccacaatctgatgtattatggcatgcatgaattcactattttgtagtcaaacattactgagttttaaagaatgttccttgttgtgttttaaaatggatctcaagagcacacaaatttaagcccctataggacaaagaaagaagccacacagctcctcccctgctatctccttatggggggaggcaaaaaggaataagcattttaaatcctaatttcactttaaagtcaaacagttcaagaagttggaagtcaacaatgttcttcccacaacattttaaattttcaagatgtttatttcaactcctgtttgttatcacacctcaaagtaagcatgtttgcataaagatattgaaaaggaagggaatatcattttcaaatctttaaatgaaagtgaaaagtgctcagcyaaattagaaataataatataaatagaaataaactgggcaagggggtgctatttcatccatctagaaactgtatcaagccaagaaccccttctgtaaggagatggacttgtaaaaggaaaaaacaaaccacctctcaggcgggctcgccccaac

SEQ ID NO: 398414 - DNA, 612 bp, Homo sapiens
ttgcagtaaatgcatcttttaccacacactttagcggaaagttcacgttttaccacaatctgatgtattatggcatgcatgaattcactattttgtagtcaaacattactgagttttaaagaatgttccttgttgtgttttaaaatggatctcaagagcacacaaatttaagcccctataggacaaagaaagaagccacacagctcctcccctgctatctccttatggggggaggcaaaaaggaataagcattttaaatcctaatttcactttaaagtcaaacagttcaagaagttggaagtcaacaatgttcttcccacaacattttaaattttcaagatgtttatttcaactcctgtttgttatcacacctcaaagtaagcatgtttgcataaagatattgaaaaggaagggaatatcattttcaaatctttaaatgaaagtgaaaagtgctcagccaaattagaaataataayataaatagaaataaactgggcaagggggtgctatttcatccatctagaaactgtatcaagccaagaaccccttctgtaaggagatggacttgtaaaaggaaaaaacaaaccacctctcaggcgggctcgccccaac

SEQ ID NO: 398415 - DNA, 540 bp, Homo sapiens
aactgtttataagtaactgagtttcaaaataaagttcaagaatatttatagaaataccatctaacaaagcacaaaattaagataaagggtcaaactatttgcaagtaattttaagtgtgttcyagaacaaagttcaaaagtatttatagaaatacaaaaggatccaaaaactgtccacaaaaatatgacccataatgaagagaaaaatcagtcatttgaaactaacccagaaatgacaaagatgatagaatcggcaaagacattagaagaactgtaattgtacttcgcatgttcaagaagccagaggaaagactgaacatggtaagcagaaacatggaagatataaaaagactaaaaatcaaactttagagatgaaaacattatgtgagatgaaaaacacactgagtagaattaaaggcaaattggaaatttcagaagactagtgactttaagaattgagagataaaaagtacacaaaatgagaaacagaagtgtgtcagtgagttatgggacaacttcaaactaatgcgtaaattgcag

SEQ ID NO: 398416 - DNA, 522 bp, Homo sapiens
acttcaactctttcttaagttcttaagtgagagagcaatctcatcagcatattttttgaaagccactgctcagatcaaaagcaggcctgggaatgattcaggaagaaacacttggctcttgtaccatgagacctgaacctggaatttctcttgaggtcttccttgatggacggaacgcttttattcttcttattcaagaaaacgagttcacataggtcatggtactagtaaccttagcataacaagaaggaaggatggaattataaaatgctcttgggtatgttttttcttctccttcatcctgaataaccctagggctatgtggggagagaggagactacattctcaacagtgagacctagttcctgkcaaggtaagtttgtgttttgaaactagctgcttgttagcatatgcgtaaattatagataaaaggaaaatgttcacaggagtcaaacttgttctcctcttcctcttcttcgtaagttctagagctgacaaacactggggtatactgcaataaac

SEQ ID NO: 398417 - DNA, 614 bp, Homo sapiens
gtattcagtttgtatgtgaattctatatagaaagtggtttttgttctttgagtttgttttatttcttgaagattacaataaatatctaagagactatattcctgaatttcttagccttagtctgattaatgtttttcatctcctttcaattcatattatttttcatcctaggatgcttatttccatttcttctcccacttctataatcttaggtacaacactgagtttgaactgaagatraagagtgaacacatttagggctttgagtatctcacacatgaatttggacttaggcacaggaatgaattctaatacttgtaatctttcaaggtcgataactttctaactgacccaactgactgggttccagagttacaaagcttagctgtaggatcaagaatagctgctaagggagataaaggtcttcaggtctgcaacttgaagaccatgtgtccctaaatgaaaagtctaaggtttgatgatcacttagcaccctactggcatagccgaggcaagggcggtcaacagagaaaacatgtggatgggatgtgtgaatggaatgggtgtcatttaatgcacagtgcttggtgcagtgatgattaggatgccgtgca

SEQ ID NO: 398418 - DNA, 635 bp, Homo sapiens
ccagtgacaggaagacctaaattgctccacttgtccttgcataactagtatcccacttctcagcaaggcaaccagcttcaagccctgcattctaaatgggagctcatccttatacagtgagagaataaatttctgtgaacttgtgttctacacctctatttatacacccacatgttttctgcttccttttaagataaccaaaatctgtagcagaaaacacaaattgcctaaatgacctcatttttaatctatttatttcttcctattctttaaggttgtatttaaagagttaaacaatgggaggacaggagaagatgcaggtggaaatttcagagttgtggtcttaaatgcaaaacaataaaaaatatctgggcaaataactaactggtaataacaaatgayggctaaatgcccaaggatatcttatgaatcattttacatagacttatgtttttgaattcttgcttaaaagcaaagaagaatttgagcaaatttattttaaaaagaactataaaaaactggaattactttaactttttcatatcaccctggtgaattatttaaactgtaatcccttgctattcaaagtgtggtctgtggaccagcagcttcagattaatgtgggagcctgctgc

SEQ ID NO: 398419 - DNA, 634 bp, Homo sapiens
agagtcaaagcagagatggagtgggagtgaccaaggccttatgacctactgggctcaaaatcaggcttgttatttccatgagccatttaagttgttggcttaagtcactttgagttgtgtttctgtcattgtgagctgaactagtcttatctggtgcaaatagtttttattcattcatagctacctgtgatatggaagattaaggggagaattgaaacctgttgaaatctccatgtgggttttattatataggaacactaggaaagtctggttttactttgattgtatagacttggacacagttaagtacagtggtaattgcaagagctttgggaacaaaaaatacctgttttcaagttctacacctacagctctgtggccttgggcacattacttaacctctctgactcttgctttctttacatgtaaatatagttgtaagaatcaagtgtgatgccgtgtaaagggcttggcatgtgaayaagccaagggttggcggcgggggagatagggtggtgacattctaggaatgtattagagaaaacagtgtcccaactgttgggaaggaatttgtagcctcctgagacaggaggaaccacagtggtgacctcaatgtagagaacaatttacaacc

SEQ ID NO: 398420 - DNA, 564 bp, Homo sapiens
ggtaagacacttcagtctgatgatgatgactgttctgggcttggggtgacagttgaagatgctggaaggtgagagttgaaaggagtcagcaaaaacaaagcctgtaaatcaaaaattacggctaggttttaagatgtaagtgctaaatcaacctgaggagtaaacaaggaaatcagattctttctcagcattttagatttggtaaggagaagagagggaccatgaaggttatgcctgagcagggcggtggggggtgatgttggcgcagtggggcagagacatggkcttgggatgagggcaagcacatcctccatccttggcctggggcgcttggctcttgcctcaccctaaagagaacacacacattttgcctgaaatgaacccaggcaggctgtaggtgctgtgccacttagagattggcagtgccctccctgccccagccccaggccctgcaattctaaaggaacacacagtgggtcaggctcccagagtgtccacagtccccacagctccctccattttgtccccacttagaaatgcacagttgtggttacatttataaag

SEQ ID NO: 398421 - DNA, 564 bp, Homo sapiens
ggtaagacacttcagtctgatgatgatgactgttctgggcttggggtgacagttgaagatgctggaaggtgagagttgaaaggagtcagcaaaaacaaagcctgtaaatcaaaaattacggctaggttttaagatgtaagtgctaaatcaacctgaggagtaaacaaggaaatcagattctttctcagcattttagatttggtaaggagaagagagggaccatgaaggttatgcctgagcagggcggtggggggtgatgttggcgcagtggggcagagacatggtcttgggatgagggcaagcacatcctccatccttggcctggggcgcttggctcttgcctcaccctaaagagaacacacacattttgcctgaaatgaacccaggcaggctgtaggtgctgtgccacttagagattggcagtgccctccctgccccagccccaggccctgcaattctaaargaacacacagtgggtcaggctcccagagtgtccacagtccccacagctccctccattttgtccccacttagaaatgcacagttgtggttacatttataaag

SEQ ID NO: 398422 - DNA, 299 bp, Homo sapiens
caaactggggtcacctgcccttaccctcagaaattccactataatttatctgtggtgcagcctaggctaggtgtttttaaaaacagtcascggctgactatcctgaacacctagggttgagcgccattgcatagtatcagctgtcagctactgtttgatagaagatggaatggcgggacagcagtgcttatgtgagagatgaaggcagactggagggggaatatagtgggcttgcaattgaccctcaacatctatttcactctaaatgcttggtccaagccacccaggggactcttgga

SEQ ID NO: 398423 - DNA, 506 bp, Homo sapiens
aagctctggtcaatggaatgagagcagaatagataggtactacctttgtcttactaccctcaaaggcaagtgtttgccctggactgcctctgtgccctagccttgtagctaaggctacaagccagctttcrccatgcagatgatgttaatatcccagtgaagacttcagtagcaagctggaaagaacttgtgtccctgaatgatcttgtggacaatctcctagcttagtccagttgtcctatgaagtgaaatagaaggcaatgtcttgtgtcatttagccttgtattgtagggtctttttattattgtagcttagactttaaatcacctaattcaggattcttatctaaacctgtgtgaattcagtacatacccttatgtgatctcacctattgctatatttcacacctagagcaatcctccgtacagattcttagcccatcaaaaaaggctagaaaatactttttagacccatctcttagtagatgatgaaatcaagccattaat

SEQ ID NO: 398424 - DNA, 604 bp, Homo sapiens
tgattttccctgcccttcaccctccacgtgtggcagctgacaggcagcacaaagctatacctggatgccctgatgcgcgcgccacaggcagcacagaagcacagcgtttctattatacttacagagacaaaggcatggcagggatttgcttaaacattaaaaaacacccatcttcaggggtggagaaaataagcrtttcctagtgggagggaagtactagcctatagaattaatagcttaaaaacactgattatagtttcctgttctataaagaacaaaattgctaatgacaccactagcttactgtgagcgtttccctcctgcctgcctaaatcactttccaaaaaaagatctggctgttgtcagcaatttataaaattcaaaaactaaatgtagggtgcaaacaaagagagaaatgaggctgcttctcataaccaccaaagaatgagtttgctttatgactagttatattgactgaagacatttaaataagaatctggctcaaatgccaaagaattgtattaggtagcaacataaggtgtaaaaatttaaacttccaaacaccactcgctgggaagtctaggcagcttagttgaaattcatg

SEQ ID NO: 398425 - DNA, 630 bp, Homo sapiens
gattttaaagagacccaaggaagtgtatttcctccatgtggttttggtttaggaaaatgtaaagtacaactctgactcaacttgtgggtggtcaaatggggggaaagtaaacacaggctagttctgtaatatgttagggcattgcaactttgtgtttgtagaagcagcctgagaaaagataaacaaacaaatgctcaaatcaagtgaaaaaagaaagctttttgttagatccagctataaacacttggaatacactgcttcataaaatggagaaagctaagatgtcagtctgattattttaccattctcctccactcccatcacccaaacaaatatacacacaaagaatccacctaaaaattatctttgcagcattaataatctgcaatttaatgtcaagtaaaccaaaatcccattttacaaagttcttggtcacggtttttaatatgtattttatcctaacatttttaaactatatgttatttttatatgatagaatgtaacagagagtggcagaggcccacatagaacctacatgtttattcaaaaggagtcacattattamgacattgaagcttgtctggagaaaatgtaatggaaaatttgagggatatattgcgaaagttttcc

SEQ ID NO: 398426 - DNA, 593 bp, Homo sapiens
cagaatccccacattggctccatgactggtagggtgagggctattgtgcgtgggaaaggccaaatggaagccattagagctgcctctacctaaaaaaatgagtaaatccaaaacaatattgcattcctgaagggattgtggggattagtgccaccatcaaggactcgaaagacacataggtggtgattcccaccacatctcagtttaactctcccatttggcctgtgcggaagacagatgtatcttggagactgacagtggattatcgtaagcttaaccaagtgatgctgtatcagatgtggtttcattgcttgagcaaattaacacatttccttgtacctggtaggcagccattgacttggcaaatgcatttttctccatttctgtccataaggcccaccagaagcaatttgccttcagctggcaaggcggcaatatacctttactgtccaacctcaggggtatatcaactttccagctttgtgtcataatcttatttggagakaatttgattgcttttcgcttctgcaagatatcacactggtccattatattgatgacattatgctgattggatccagtgagcaagaagt

SEQ ID NO: 398427 - DNA, 584 bp, Homo sapiens
ctggctgtctgcccttttccttttcccttacttccttacttgtcatctttttccttacttttagacaaactgaaatcttttttttactaaaaacatttcaaagttactaatcctagattttaagcatatattagcaagtacaaatattacaaacaaacagagctagagagattagattggattgcaagagctgaaatgtttacaatctcagaagttggtggccayttttttttaaagaagattttgtgtttacttgttctggatagatcaaaaacatagacctgggtgtgtgtcaaattataatgcttgaaaagttgctactgtaattgtagcgggaagagaaatggacatgtaggaagaagacttgtattccaggcctgattcttccacttaatgtgatgtgattttggaaaaggcactttaccacttggaatctggggttttgactcagtactcagtaaaacagagataataacacatcctgaggttggtgtgagagtccaatggaacatcatatgtgattaaaatctgtgtgtttaaaataaaagtaaatgttattggtattattcttctcttcccctgaa

SEQ ID NO: 398428 - DNA, 584 bp, Homo sapiens
ctggctgtctgcccttttccttttcccttacttccttacttgtcatctttttccttacttttagacaaactgaaatcttttttttactaaaaacatttcaaagttactaatcctagattttaagcatatattagcaagtacaaatattacaaacaaacagagctagagagattagattggattgcaagagctgaaatgtttacaatctcagaagttggtggccatttttttttaaagaagattttgtgtttacttgttctggatagatcaaaaacatagacctgggtgtgtgtcaaattataatgcttgaaaagttgctactgtaattgtagcgggaagagaaatggacatgtaggaagaagacttgtattccaggcctgattcttccacttaatgtgatgtgattttggaaaaggcactttaccacttggaatctggggttttgactcagtactcagtaaarcagagataataacacatcctgaggttggtgtgagagtccaatggaacatcatatgtgattaaaatctgtgtgtttaaaataaaagtaaatgttattggtattattcttctcttcccctgaa

SEQ ID NO: 398429 - DNA, 590 bp, Homo sapiens
cataaattgcaaagttactaccatatgcttggacaattctgcatgtttgagactaagcagagatgctcaaggtacttcctgatactgcagggttcatgttagtgaatttgggcaaagctcatattatcccttgccaggtaagttaagacctcttggtgaaatgatattgaagaaagatgtataaaattattttactaatatttctgtagaattatgattagtagacatagcaaaaattcaaatcaagtttgtaggtaagacaaggtgacacgttgcatgatagccttaagattaaaagaaaaaaactttttgttkttctattagactaataaagttgtacaagagataaatgcaaaatcgttggtagaaaagttgattgcacaagaatatggtgaagagaaatatggctgcacagtattagttgatataaaaaaattagatgggtttcagatcagtttttctatgagataaagtaagaaataggatagataaaggcactgtaaaaggtagactagtttttcttttttatgtacagatcataatcctagtacccttaaaatattcaaagttagagcaagcacatctacaaa

SEQ ID NO: 398430 - DNA, 590 bp, Homo sapiens
cataaattgcaaagttactaccatatgcttggacaattctgcatgtttgagactaagcagagatgctcaaggtacttcctgatactgcagggttcatgttagtgaatttgggcaaagctcatattatcccttgccaggtaagttaagacctcttggtgaaatgatattgaagaaagatgtataaaattattttactaatatttctgtagaattatgattagtagacatagcaaaaattcaaatcaagtttgtaggtaagacaaggtgacacgttgcatgatagccttaagattaaaagaaaaaaactttttgttgttctattagactaataaagttgtacaagagataaatgcaaaatcrttggtagaaaagttgattgcacaagaatatggtgaagagaaatatggctgcacagtattagttgatataaaaaaattagatgggtttcagatcagtttttctatgagataaagtaagaaataggatagataaaggcactgtaaaaggtagactagtttttcttttttatgtacagatcataatcctagtacccttaaaatattcaaagttagagcaagcacatctacaaa

SEQ ID NO: 398431 - DNA, 614 bp, Homo sapiens
accacaacattcacagcatcttttattctgtttgttattttggagagtcaaatacctaacatgacttaaaaagttttttatttttgtttaaagcacatgtatccttctctttcaaccaatatgcttatcaagaatccaaatcaagagctaaatcaagctgaatcaagaagctaaatatttgtgtttggttttgactaataattaaaataaatataaattttaaagttaatgatatagtggaattcttactaactccagaaaataaaacaaaagttattgatacagtggaattcttactaactccagaaaataaaacaaaacatgaaaacacacagaaaaacaaaaaacttggattgttacatgacagaatcattctctgtgagatcaatagttcccacagcttctaccaggcagggtaaatggttttaaaggaggatcgtgcttaaataaatatattctcagccacccaayggtttgctgatttctgaagggccagaaacacaggcgaatgtttggcatctctggtttctgacctggattgaactggacatgctgaaataatgtgagaaaagactgttttctggctagaactggaagtatatctgccagcattc

SEQ ID NO: 398432 - DNA, 614 bp, Homo sapiens
accacaacattcacagcatcttttattctgtttgttattttggagagtcaaatacctaacatgacttaaaaagttttttatttttgtttaaagcacatgtatccttctctttcaaccaatatgcttatcaagaatccaaatcaagagctaaatcaagctgaatcaagaagctaaatatttgtgtttggttttgactaataattaaaataaatataaattttaaagttaatgatatagtggaattcttactaactccagaaaataaaacaaaagttattgatacagtggaattcttactaactccagaaaataaaacaaaacatgaaaacacacagaaaaacaaaaaacttggattgttacatgacagaatcattctctgtgagatcaatagttcccacagcttctaccaggcagggtaaatggttttaaaggaggatcgtgcttaaataaatatattctcagccacccaatggtttgctgatttctgaagggccagaaacacaggcgaatgtttggcatctctggtttctgacctggattgaactggacaygctgaaataatgtgagaaaagactgttttctggctagaactggaagtatatctgccagcattc

SEQ ID NO: 398433 - DNA, 570 bp, Homo sapiens
gaaactgcgggaaacatgcataagtgccaatcctttgaatgttccacggaaacactggtggacagattctagtgctgagaagaaacacgtttggtttggagagtccatggatggtggttttcaggtaggaaaggatatacctttttttaaataagtcacctctatatcctttgtattcttcctatatgttcatcacaaagcaaagttactaggttggtacaaacataattgcagtttttgctactgaaagtgatggcatgcaataaaaatattttcacacataaaatactcgtacataaaatatataaacagcccatattacaatatgcatacacatactacatgaatccctcgcgtgcagttacaactgaaatgtttgatctgttttatttgttccctattacagtttagctacggcaatcctgaacttcctgaagatgtccttgatgtgcakctggcattccttcgacttctctccagccgagcttcccagaacatcacatatcactgcaaaaatagcattgcatacatggatcaggccagtggaaatgtaaagaaggccctgaagct

SEQ ID NO: 398434 - DNA, 502 bp, Homo sapiens
tttaactttgtaagcttgtatgtggttgttgatcttttttttccttacagacacccataataaaatatcatattaaaattctcctgttttttgtcacttttcaaagatttaaaaaatgcacgtctacattaaggaactccagtaatcttgaaaaagtatattgaattctaactstatagattaataatgcaataatttttaagaatataaaataatataacatatattcagagtagagataatgctcaatgaggaatcctgcagatttttagatcatatttgcaggaacccctgtgggacatactggacactgagggcattctgtttgaaagggtcaatccttggaaatggtaacacagtaaatcaaggtattcccaaactgggaataataagggaggaagatgttgatagtttatcagaaagtaattgtaatacgggtctattgaaatatattaatattaagaaaaattgacaagtaccacatgatctcacttctatgtgg

SEQ ID NO: 398435 - DNA, 594 bp, Homo sapiens
cctgaacaccaagtcatgaagattttctcttatttttcttctagaagttctatggatttgcattttacatttatatctttgatccattttcacttaattttgtgtgaggtatgagatttatgtgtaggcttggatatccaattatttcaatggcatttcttgaaaagactgtcctgtttccattgaataaccttcgcaccttgtcaaaatcagatggctatacctatatgtgtttacctttgggctctccattttgttccatgaattaatgtatctaatttttttgtgaatacaagactgttttgattatagtaattttataataaattttgaaatccagtaatgagattactccaattgtttgttttcagaattgcctttgtttttcyagtctctctgcctttccatataaattttagaatattttttatatttacaaaaaaaggttgctgggattgtgattggtattatatttaatctatagatcagactgagaagaactgacatcttaacactatggagtctcctaatccagaggcatatcttttttcctatttagatattgtttgatttatttccatagtaatttgcagc

SEQ ID NO: 398436 - DNA, 535 bp, Homo sapiens
gaattttaagtaaagttgcaatttgatagatgtgactgatttttcrtggtaaagcaactaaagaggcgagtttactaatttattataattaaaacattttatttaggtagccacacaacaaattgcattcctgcattaatgtgttgtcacttgaatctaagttcagattttgaattctaacaagaatattttaaattatttttgaaacaaactgatccattttttttaaaaaatgaccttaataaaaactaaatgatctgaaaatcaccagtcttatctcgtattttgaaactcaaatgagaagtggaagctgtgtttatgattaggggatatggaaagatgactatgagaaatgtctcatagatttggagcatcagaatatatatggctattttcagcaaaaaaaaaaagaaaaaagtgaattatggaagtctcttgggtgtaaactgtataaaggtatcttttattcagcattcccagggattagatagtacacatattgataagccaagcactactcattatataatggttt

SEQ ID NO: 398437 - DNA, 535 bp, Homo sapiens
gaattttaagtaaagttgcaatttgatagatgtgactgatttttcgtggtaaagcaactaaagaggcgagtttactaatttattataattaaaacattttatttaggtagccacacaacaaattgcattcctgcattaatgtgttgtcacttgaatctaagttcagattttgaattctaacaagaatattttaaattatttttgaaacaaactgatccattttttttaaaaaatgaccttaataaaaactaaatgatctgaaaatcaccagtcttatctcgtattttgaaactcaaatgagaagtggaagctgtgtttatgattaggggatatggaaagatgactatgagaaatgtctcatagatttggagcatcagaatatatatggctattttcagcaaaaaaaaaaagaaaaaagtgaattatggaagtctcttgggtgtaaactgtataaaggtatcttttattcagcattcccagggattagatagtacacawattgataagccaagcactactcattatataatggttt

SEQ ID NO: 398438 - DNA, 572 bp, Homo sapiens
ggttctatagactcttgccagaagattatgagaagacagtaaaggagcttgataattattgccagggatgagtgcattgcatgctagttgattggctttttctcaccaaaagtgaaagttacccatgttcagcttgtaggcccagactagtcaaagagtagttgtttcttaaatatccgtgtagggccttcaatcttatgtaaaattcatctgtaatttttccttatgtgttttttctacattgaattataacatattttatggttttgattatgtttccatttgttgagcatattctactctctttctgtgttactttcatccagtcagcrttttacagattatactatgttagcatttaaagatttagctgtctatttttgaatagtattatttctcagtgctgtgttgctaatgggcaataaaaggatgtttagcttttgaaagaaaatagccaacctctaaatggctgactcaatgttgttctctgtgcatgtgatctcttgattttgtagatgataagtttatagtaaagctcatttaaacactagatcttcaatcagattttagat

SEQ ID NO: 398439 - DNA, 586 bp, Homo sapiens
ctctctaaactggttattctagttagcagctcctctaaccttttttcaagtttcttagcttctttgcattgggttagtacatgctcctttagctaagcagagtttttttattactcatcttctgaagcctgcttctgtcaatttgtccatctcatcctccatccaggcagtgcaatcatttggaggagaagaggcactctgccatttggggttttcagcattttttgttgattctttttcatcttcatgagtttgtttagttttgatctttaaggctgttgatgctcggatcgggttttcgtggggactttttgttgttgttaatgctgttgttgttgtctgtttgtttttctttcagtggtcaggtccctttaccgtagagctgctgcagtttgctgggggttcacttcaggccctgttcatctggttcacacctacacctggagatgtcactcaagggggctggagaacagcaaagatgggtgcttgctccttcttttgggatctctggccttgaggggcaccaacctgawgccagtaggatcgctcctgtatagggtgtctgacaaccccgttggtctcactc

SEQ ID NO: 398440 - DNA, 599 bp, Homo sapiens
gtgtctgacaaccccgttggtctcactcagctgggtggcacagagaagaggatccatttaacaaagcactttgactgtccctgggtggagggggtgtacttcactggggggaactcactcatctggattgcctggattcctcagaactaccagcaggaaagtctaagtcagctggcccagagagactgtagccacccctccccctaagcgctcagcgcagcggcagatcagggttctgtccttgagctactggctgcagttgctggagttcatgcaaggaggccccactcagtgaagaggaatgggttagggtcaggcctgaagagacaatctggctgcagtctgccacagccagcatcgtcggggctgtggcgcgacaccttcttgggaccamgccatgcagcctccctcgaattcaacagcgggaaaagcacagcctcggagctgtcagagatggctgccaccctttcctggaccaggtcgcttagggtcttaggcagctctctgttccagaactgcctgctgctcctccctcaaggagctcaaagggcttagacagcaggcagtcacatctatggtgctggtcactcctcccaccc

SEQ ID NO: 398441 - DNA, 575 bp, Homo sapiens
ctttttggttggttcctaaggatattttatatacaagataatgtcatctgtgaatagaaatagttctgcttcttcttttgcaatctggatgccttttgtttctttatcttgcctaattgctctagaatctgcagtacaatgttaaatagaagtgatatgaacagaaatccttgtttctgatcttatagtgaaagcattcagtcttttatcatcagggtgatgttagttgtgggtttttgatagacgccctttatcagattgaggaagtttctctctattccatgttgttgagtgtttatatcataaaagggtattgcattttgtcaaacgttttttctccatctgttgagatgatcatgtgatttttgttttttatttcatagataggattatattaattgrtttttggatattaaaccaaccttgaattcctgggatagattccacttaattatggtgtataattcttttcatatgttgctggattcagtttgagagtattttgtaaaggacttttcttcatcactattaattatagatactggtttttagttttctttttctatgatgttttt

SEQ ID NO: 398442 - DNA, 609 bp, Homo sapiens
ttacattttatttttatataaaaatatctggtccactacaaaaaatcagtagagatgtgaatgtggaagaaaatatgatctatggtaaaaaagaatcaagcaagaaaatagttaagaaagatgacagagactgcccagatattggaatatcagtcagatactttaagataacaatgaacttataagtgaaaccaaatttaggggttagaagataacttttatggtatgctaaaactcagagtatgaatcatgaagggtctccttagtgaaactttattttttaatttttttgagaatgactttgtatattttctaagcacatttgtttgtccaaagcttatcttagattatctgacatttttaaatgaaattttagatgtctacaacttcataaccttatctaactccctgatggtatatatttctgtttttgtcataataaatttgttaaaattttaagcacaggtgcaactaaatcctgagaattaaactttgaagaatttttggaagttaaatggaactctgaggtaatttggctaatagtagrcatctcatatactgctatgttgccctacccattatataggccagtacaaattgctgtttgta

SEQ ID NO: 398443 - DNA, 539 bp, Homo sapiens
taagataaaatgcgcttgtgcttgtcatacatcatttggtagagagcccatatggaaaaggcaccagatgaagaacaccttggttgaacgtgatatggtctggctgtgtccccacccaaatctccccttgaattgtgataatccccaagtgtcaagggcagggccaagggaaaaaaaaatgaattatgggggtggtttcccccatactgttctcatggtagtgartaagagtcatgaggtctaatggtttcacaaatgggagttcccctgcacaagctttcttatctgtcaccatgtaagacgtccctttgcccttccttcatcttccaccatgattgtgaggcctccccagccatgtggaaccatgagtccattaaaccattttcctttataaattactcagtcttggatatgtctttgttagcagcatgagaatgaactaatacagaaccattgctttggaaaattaaatatatatatttaaatacttgtattcgctatataaatatatatagttaatactgagtgtcaacttaatt

SEQ ID NO: 398444 - DNA, 614 bp, Homo sapiens
actgaactgacaatcagtgagttaacagtaagttgcagctgcctctggcaaaataggcatatactatcccatttgcatgaatcttcaccattccctattacattactattaatgtgtatgaatgtctattattgtatccaaatactgaatagtatgccattaaatcactagagtataccagtgatttaatacccagtctaattagcttatttaagttacatgcatagcgtcatttatatgcatgtgaaaacacctaaatattaaaacaaatgtgggagaagaacccagagttgaaaaactaaacaaatttaaatgaagttttcacttatttactgttacgttaatggatgtggtgagaatctctctttagtcgtgaagagagatatatctatgattttcagtctgttggataaataactgtgcccaaattaacattcatgtaaatggtgargcaaatgtatcaaggacatgacatgatttatacaccaaaacatgtgacacataggcagtgtttttgccacaacatccagatggaatacatgacatgatctaaaagatggaaatctttccattcaaaaaaatgtgatcacagagccaacatgctctttctcctc

SEQ ID NO: 398445 - DNA, 614 bp, Homo sapiens
actgaactgacaatcagtgagttaacagtaagttgcagctgcctctggcaaaataggcatatactatcccatttgcatgaatcttcaccattccctattacattactattaatgtgtatgaatgtctattattgtatccaaatactgaatagtatgccattaaatcactagagtataccagtgatttaatacccagtctaattagcttatttaagttacatgcatagcgtcatttatatgcatgtgaaaacacctaaatattaaaacaaatgtgggagaagaacccagagttgaaaaactaaacaaatttaaatgaagttttcacttatttactgttacgttaatggatgtggtgagaatctctctttagtcgtgaagagagatatatctatgattttcagtctgttggataaataactgtgcccaaattaacattcatgtaaatggtgaggcaaatgtatcaaggacatgacatgatttatacaccaaaamatgtgacacataggcagtgtttttgccacaacatccagatggaatacatgacatgatctaaaagatggaaatctttccattcaaaaaaatgtgatcacagagccaacatgctctttctcctc

SEQ ID NO: 398446 - DNA, 546 bp, Homo sapiens
tgtctcattaacacactgtttttcagaaaatatagttactaaatgattcatgttaatatacatctaagttcatcagaagttttcactgaatgaaactggaacgttgtgaacatgctatgcaactccaaagagtayttctgtgattttaatttacttgagaaatgcagtctctgtcatcctccacacaaaatactatagaaaaacagtttcagaaaaatatatgccattttactgaagcagtactttcttaatactagaattcaagggaagtttaacttttaataatttctggatcttttctctttgatgtttacatcttttgggcattttgactcgtcctctttcaacgtttcattttgttcattaagactacattttaaacagcagtgcttgacctcagtcatggaaaaaaacaagggttttattagttaatctgaaaggaatccacttctgctgtgttttcattagacacagactgaaactctggtggttaatgtaactcccccaactgcagttcacaaatgatttatgtaagaatagctatct

SEQ ID NO: 398447 - DNA, 574 bp, Homo sapiens
cagagcactgattggtgcatttamaaaccttgagctagacacagggtgctgattggtatgtttacaaaccttgagctagacacggagtgctgattggtgtatttactatcctttagctagacataaaggttctccaagtccccaccagattagctagatacagagtgctgattagtgcatccacgaaccccaaactagacacagagtgctgattagtgcatatacaatcctctagctagacataaaagttctccaagtccccacctgactcaggagcccagctgcctttgcctagtggatcccgtgccagggccatgggcggagctgcccgccagtcccgtgccacgtgcctgcactcctcaggccttgaggggttgatgggactgggtgccacggagcagggtgcagcggagcagggtgcggcgcccgttggggaggcttgggatgggcgggagcccactgaggcagggctcggggcatggcaggctgcactaccatgctagataatttttctggctttctagacatgatctctcacataggaaggaaaaaagatgactcaactaaagccaga

SEQ ID NO: 398448 - DNA, 574 bp, Homo sapiens
cagagcactgattggtgcatttacaaaccttgagctagacacagggtgctgattggtatgtttacaaaccttgagctagacacggagtgctgattggtgtatttactatcctttagctagacataaaggttctccaagtccccaccagattagctagatacagagtgctgattagtgcatccacgaaccccaaactagacacagagtgctgattagtgcatatacaatcctctagctagacataaaagttctccaagtccccacctgactcaggagcccagctgcctttgcctagtggatcccgtgccagggccatgggcggagctgcccgccagtcccgtgccacgtgcctgcactcctcaggccttgaggggttgatgggactgggtgccacggagcagggtgcagcggagcagggtgcggygcccgttggggaggcttgggatgggcgggagcccactgaggcagggctcggggcatggcaggctgcactaccatgctagataatttttctggctttctagacatgatctctcacataggaaggaaaaaagatgactcaactaaagccaga

SEQ ID NO: 398449 - DNA, 596 bp, Homo sapiens
atatccttactacagttaaggggaaaaacacaagattgaagatatatatagggagtaagaaatctattaaagtgatataaccatatttgaaaaggaaccaaattgaaattatgtagaagccacaatagaaatttttttttttttttgagacagagtctcgcttttttgccgaggctggactgcagtggcctatctcagctcactgcaagctcygcctcctgggttcacaccattctcctgcctcagcctcccgagtagctggggctcaggagccgccactgtgctcggctaattttttgtgtttttagtagagacagggtttcaccgcccaatagatattttaaaaagaaaatttaaaaagttaaagatagagttcatgatatggaatataggattagaagacattatctaaattacagcatataataatcaaaagatgaaaaaatgctatttatgactagaagagagtaaattgtgaaaaggtttaacatatgtataagtgcaagagagaacgagacaaaaggaaaacaaagacatagtgattctgaattttccagaactgacaaaagatactgcattactcagaaacttgcatc

SEQ ID NO: 398450 - DNA, 596 bp, Homo sapiens
atatccttactacagttaaggggaaaaacacaagattgaagatatatatagggagtaagaaatctattaaagtgatataaccatatttgaaaaggaaccaaattgaaattatgtagaagccacaatagaaatttttttttttttttgagacagagtctcgcttttttgccgaggctggactgcagtggcctatctcagctcactgcaagctctgcctcctgggttcacaccattctcctgcctcagcctcccgagtagctggggctcaggagccgccactgtgctcggctaattttttgtrtttttagtagagacagggtttcaccgcccaatagatattttaaaaagaaaatttaaaaagttaaagatagagttcatgatatggaatataggattagaagacattatctaaattacagcatataataatcaaaagatgaaaaaatgctatttatgactagaagagagtaaattgtgaaaaggtttaacatatgtataagtgcaagagagaacgagacaaaaggaaaacaaagacatagtgattctgaattttccagaactgacaaaagatactgcattactcagaaacttgcatc

SEQ ID NO: 398451 - DNA, 596 bp, Homo sapiens
atatccttactacagttaaggggaaaaacacaagattgaagatatatatagggagtaagaaatctattaaagtgatataaccatatttgaaaaggaaccaaattgaaattatgtagaagccacaatagaaatttttttttttttttgagacagagtctcgcttttttgccgaggctggactgcagtggcctatctcagctcactgcaagctctgcctcctgggttcacaccattctcctgcctcagcctcccgagtagctggggctcaggagccgccactgtgctcggctaattttttgtgtttttagtagagacrgggtttcaccgcccaatagatattttaaaaagaaaatttaaaaagttaaagatagagttcatgatatggaatataggattagaagacattatctaaattacagcatataataatcaaaagatgaaaaaatgctatttatgactagaagagagtaaattgtgaaaaggtttaacatatgtataagtgcaagagagaacgagacaaaaggaaaacaaagacatagtgattctgaattttccagaactgacaaaagatactgcattactcagaaacttgcatc

SEQ ID NO: 398452 - DNA, 596 bp, Homo sapiens
atatccttactacagttaaggggaaaaacacaagattgaagatatatatagggagtaagaaatctattaaagtgatataaccatatttgaaaaggaaccaaattgaaattatgtagaagccacaatagaaatttttttttttttttgagacagagtctcgcttttttgccgaggctggactgcagtggcctatctcagctcactgcaagctctgcctcctgggttcacaccattctcctgcctcagcctcccgagtagctggggctcaggagccgccactgtgctcggctaattttttgtgtttttagtagagacagggtttcaccgcccaatagatattttaaaaagaaaayttaaaaagttaaagatagagttcatgatatggaatataggattagaagacattatctaaattacagcatataataatcaaaagatgaaaaaatgctatttatgactagaagagagtaaattgtgaaaaggtttaacatatgtataagtgcaagagagaacgagacaaaaggaaaacaaagacatagtgattctgaattttccagaactgacaaaagatactgcattactcagaaacttgcatc

SEQ ID NO: 398453 - DNA, 566 bp, Homo sapiens
caggtttatcaccagaaacgtagttgaacttaagtcagctttccccaggtttacacagcccctccctcctctttgcttttcaggcctggagggttaagagctttgctcttgcacgtctctgggggccatgccatcccttttgggttcctgttcacggatctaagagtatccccttcataaaattcttctccagtacctccgtttgagggttctgcctgttttctaacttgtcactgatagaaaaggaagcatttcaggggtgacacactagcatctggctatacaagcacagctaacaaccatctagccatgggctgggactcaaactcgaactgktcaactttttactagtccacttccccttgactcaccagggctgaatctggaagcagaagaaaagaatgtcaaaacaaagagagagaggtggctgtccctctagtccccctggagcccagttattgttcaaatacttctctgctctctctctacaaataaagtcgtacaattccccactcttagagagctgaccatcacctgcagcccgctaaagcacaaaagcctttaga

SEQ ID NO: 398454 - DNA, 571 bp, Homo sapiens
cagtgttttctcataagtggtttaacaccagcaccttcagtgctgttcttatgatagtgtgtgagttcttgtgagatctggttgtttaaaagtgtttagcacctccccactgttactcttcctcctgttccagccctgtgaactgctctcccctctttgccttctgccrtggctgtaagtttcctgaggctttcccagaagccgagcagatgccagatcatgtttcctgtacagcctgtggagccatgagccaattagtcctcttttctttataaatcacccagtctcaggtatttccttatagtggtgcgaggatggactaatacagaatgttctgagtgatcaagattagaatgaagttcctggaggaatgctctccttgtaatggaaatgccctgtttgccttatgttgacctcagaattaatcatcatttatttgaaataaattcagtgaaatataatactttttcaaatacatatttatatgcttgagtaacttattcttttagtgttctcaaaagtactctaaattctatgtatcccagttaataatgtcaaggttcccataggc

SEQ ID NO: 398455 - DNA, 532 bp, Homo sapiens
aactccagtgctcaacttacctggcttcactttcttcaggcctattattggactatagattgccatctagaaaaattattggtttcaacagtaacctcaccttcgattggcttacaaatcccgctatttcccyagttagtgcccttagttacctgaccttcgattggcttacaaatcctgccatttccctagttagtgcccttagtaacctgaccttcgattggcttacaaatcctgccatttccctagttagtgcccttagtaacctgaccttcgattggcttacaaatcctgccatttccctagttagtgcccttagtaacctgaccttcgattggcttaccaatcctgccatttccctagttagtgctcttattttctaaagttactattcccatccttctccattctttcaaacctttcctttcaagcttattcttgttggtataaaaataaataaataaaaataaaatctcctttcctagcacttttctccttactattattttaatttctaattcacagaagaaat

SEQ ID NO: 398456 - DNA, 569 bp, Homo sapiens
aaaaaaatagtgtcatttattatgcaataagatcaggactaactctgggctaaaattacaagtgtggtaggatttatccattygataattaattctgattcatcattaaggtcagatttctgctgcgtaagttttcccttgtccattcagtacttgcttctctgtagttctccccattaggctgaaatatcccagcattccttaatgtcacatcttaaggttcacatgtgagataccttggtactaacccatggagcctctctctctctctctctctcagtttgactaacttctttaaaagccttccttatatcatggtgttcttagtttcacttttggtatttggctttcaaagggaatttctcaagggtaaaggtgaatgctacagaaatcttaaggcctattttgtaagttaaacactatctctttagccacattatgtgtcacaaggtaggaacgcatatactacttgacagaaggagagacaagaaatttttggttctctttaattcactgtacagaggcatagggaaagatgggtagaatttcaatgatacataacagaaagt

SEQ ID NO: 398457 - DNA, 602 bp, Homo sapiens
ttttcctttttacttttcacagatacacagactaatgtatttatctgtttctccctacgtgctctctctgctttatggttgttgatactgtagcatgatggacatatatattcatttgtgcaatgtgatttgtaacaataaaaatacccttcttcaattgtctgatgttttgtgatctaaattattctttacctataaaaattgatttcaaccctggattgccaccacatccggctaactttttgtatttttagtagagacggggtttcaccrtgttagccaggttggtcttgatctcctgacctcctgatctgcccacctcggcctcccaaagtgttgggattacaggcatgagccaccgtgcccgacctgttttcatattttctttcattttttatggaactttcacagctcagttttcagatctctctcaactggtttgccatatcttccctgagctcttgcctggcattcttaattaattgaagcaaatactctttttaattcatggtgaaaatatattgtcagaatatttatctgctccccagcaacatcttttctgtggggaattttgcattttccgtgtatttttccctattttt

SEQ ID NO: 398458 - DNA, 605 bp, Homo sapiens
agagctttgcttcaaaacatgttccttaaagcaagaaaagatttaaaatttatcaacacatttatttaaggcattgcattcatgactcctattaaacccagttcaaatgagaaatatataartaaaaatagaattcctatattctatggaattagaaactacattctccttacttttgagggaatacagtatcatgttcaaatgatccctacatttagatctactattggatattcattattattaagcattaatacctgtcttgtatttacagttataaaataacatgtgtttaagtttagtacctggaatggttgaagcatattaatttctattaatttgatttcattaatttgaaaaaactacaagatttgtttaagactgagtttctgcttaatatcttgttgtgagatggccaaacacatgtcctttccgtgtttacctccagataatgcttggtgtattattaagggtaagatataggagactttgttgtcaaattctatcatcaaatactattagctatcatgagagttcttagatgctcaggaatttttgaagcaaagcttttccttaaagatgatccattactatgatttcatatt

SEQ ID NO: 398459 - DNA, 605 bp, Homo sapiens
agagctttgcttcaaaacatgttccttaaagcaagaaaagatttaaaatttatcaacacatttatttaaggcattgcattcatgactcctattaaacccagttcaaatgagaaatatataagtaaaaatagaattcctatattctatggaattagaaactacattctccttacttttgagggaatacagtatcatgttcaaatgatccctacatttagatctactattggatattcattattattaagcattaatacctgycttgtatttacagttataaaataacatgtgtttaagtttagtacctggaatggttgaagcatattaatttctattaatttgatttcattaatttgaaaaaactacaagatttgtttaagactgagtttctgcttaatatcttgttgtgagatggccaaacacatgtcctttccgtgtttacctccagataatgcttggtgtattattaagggtaagatataggagactttgttgtcaaattctatcatcaaatactattagctatcatgagagttcttagatgctcaggaatttttgaagcaaagcttttccttaaagatgatccattactatgatttcatatt

SEQ ID NO: 398460 - DNA, 650 bp, Homo sapiens
ctgatacttccttcaatcatcactgcctccgctcttatacatcaccatcttctgttcagaacacttctgtggcctgcaaacttggcttcccgtattgactttcccttcttccaattcatctgcctgggtataatcaaggtgatactacagtcttattttcttctttgcctagatctgatttaggcattctatccagttttcagtctgaaacctcactttctcagagatgtaatgcccaaatacaaacttggcttggtttttcctatattatacttacacactgccttgaatatttgatggaaggggggttggtaacagtgataacactttttataaagtggtgacttccaatttgtttcactaaattataagctccttaaggacagggtctgagtctgcatttgtttacaactatagaaccggtacctgatttagctatgataaaaatgcttggaagttatttatttcgtccgtgcyattgcttctgctgctccggcagggtggaattttatatccctcttttccatctatacctccccacctgccccaaaataaatttctatccttcaagattcagatcaaaggtatttcctcagtgaattctgttattgtgaatgccccaacaagttcagaattaatcagtcacaaaa

SEQ ID NO: 398461 - DNA, 641 bp, Homo sapiens
tattgtaaacattgttttgatatgcattgaaaaaaacaataatttcttgtgattcgctttattgcaatattcactttattatagtcgtctgaaaccaaacctgcaatatttctgatgaatgcctatatatatgtatatacatataattcaaatatattcatatacaatataacattatataaatataatatataatacacagttatatattgtatatacaatatatgtcaattgcatatgcaaatatccatataaaatactatcatattaatttcaataccacgttataataacattttgtcactgttaagtaggcttacaataagaattaaggtattctcagtattagaaaatctccattatataaataagttaaaattctctaacctaacaaatataatcttttggaacaagtagttagtattatattgattgatgaaaaacwagaggattcatcataaaatttgaaggtagaatatggtgggccctgctcaccatattctttaatagtttcaatattagatttcctaggcaaagttatcagatgcaacaaacaatgataaacatgataaaacaattattattttcacttgttatgatccttcatgaagaaagactcgaaatgttttagactaatggga

SEQ ID NO: 398462 - DNA, 622 bp, Homo sapiens
gtggaaaatgaaagtaaaaacgttatttctcagcataagctctatcaagttcaaaacacttttgtaagtaatgataccagccaccctagttctttagtccatccctaaagaaataggaattgagcctttgaaataggaatgtagtctgtgggagattgttaactaaagaaaaatggtggcctttaaagaatttttaagattaagaaacaaaaaagatgtcagaaggatctaagtcaggactgtraggtagatgcctcatgattttccatcaaaactcttacaaaattgcctgtacttgatgaaaggaatgagccaggaacgttgttgtggtggagaaagattccctggtaaagctttccaaggtgtttttctgtaaagctttggctaactttcttaaaacactctcataataagcaaatgttattttttggctctgcagaaagtcaacaagcaaaatggcttgagcatcgcaaaaaaacattggtacggcctttgctcttgatcagttctcttcactttggctgggttactttcgtctctcggtagccattgcttttctcttgttactcttcaaagaaatgcttcagaacttgattccacttgtttaaaatatccattgaaa

SEQ ID NO: 398463 - DNA, 660 bp, Homo sapiens
tattacagcaggggagagtttttagtattttctagtgtatacagagctgttattttctatgtcacttgagtttctgctgctcatctcactgataatttgcagtgggccaagggagctttgattagggaagatgaacaattttggccatgaaaatgacaaatgtttaataatgaaagatcaacttttacagcttgaaaatcagacaggatcccactagaaggaaaaatgtgtctctgttgctcagtttttaaatggataactgtaatcaaacttgctggacacaattttatctttttttctctacaaagccccagaaaatagagattgtgggttttttttaaatrcccaataacatttttcagaatctattttaaaaattcataactgcaaacattaattttgggaattagaatcatattttacctaattgacaattaaatatatacttaaagtagttcataaaacaaaatcttattagatatccagcttcctgttaaatgctcttacgaaaaaatctttcgaatgtatttatatgatatatttatagatggataatgtatttatgtttttatatgatgattattttaaaataaattagccattaactctcaaaatggcctaaaataaacaatgccacagaccagaggatgacttaaatgt

SEQ ID NO: 398464 - DNA, 584 bp, Homo sapiens
atgatgatgatacttaataataacaaagacagaaatggatgagttgatcaggaaaggttttgtcccctctcttgagttcagtaaaagacgtaatcaagtstttggaaaatggatcatttgaggaaaggctatggaactgaatttatttacaacagagaacagaaggctcacaaagtacatagttgaggttctggagtctgggggatttacaattttcaactatataaagcaatagcatatgggaggtgttaagcagctgttctatttctgctcaggaaattgatatgtttaggagccccagccagcagaaataggaccaatggatcaaagctatagcctggcaaatattagctcatcatataaaaagagcattcttaaaattagagctttggaaattgaaatagaccgcccaaggagacagcatgccctggtggctctggtgcctcactgagcagccagccttggcatatctctattatatgtatcccattttagaggggaaagaaaaaacaagggacaggaagagagaggtggggaaagagagagagataaagatttccatatgagcattataggaaactagc

SEQ ID NO: 398465 - DNA, 584 bp, Homo sapiens
atgatgatgatacttaataataacaaagacagaaatggatgagttgatcaggaaaggttttgtcccctctcttgagttcagtaaaagacgtaatcaagtgtttggaaaatggatcatttgaggaaaggctatggaactgaatttatttacaacagagaacagaaggctcacaaagtacatagttgaggttctggagtctgggggatttacaattttcarctatataaagcaatagcatatgggaggtgttaagcagctgttctatttctgctcaggaaattgatatgtttaggagccccagccagcagaaataggaccaatggatcaaagctatagcctggcaaatattagctcatcatataaaaagagcattcttaaaattagagctttggaaattgaaatagaccgcccaaggagacagcatgccctggtggctctggtgcctcactgagcagccagccttggcatatctctattatatgtatcccattttagaggggaaagaaaaaacaagggacaggaagagagaggtggggaaagagagagagataaagatttccatatgagcattataggaaactagc

SEQ ID NO: 398466 - DNA, 584 bp, Homo sapiens
atgatgatgatacttaataataacaaagacagaaatggatgagttgatcaggaaaggttttgtcccctctcttgagttcagtaaaagacgtaatcaagtgtttggaaaatggatcatttgaggaaaggctatggaactgaatttatttacaacagagaacagaaggctcacaaagtacatagttgaggttctggagtctgggggatttacaattttcaactatataaagcaatagcatatgggaggtgttaagcagctgttctatttctgctcaggaaattgataygtttaggagccccagccagcagaaataggaccaatggatcaaagctatagcctggcaaatattagctcatcatataaaaagagcattcttaaaattagagctttggaaattgaaatagaccgcccaaggagacagcatgccctggtggctctggtgcctcactgagcagccagccttggcatatctctattatatgtatcccattttagaggggaaagaaaaaacaagggacaggaagagagaggtggggaaagagagagagataaagatttccatatgagcattataggaaactagc

SEQ ID NO: 398467 - DNA, 456 bp, Homo sapiens
taaacccaatggatacacaagaacactaaaactcagaacatttaaatttattttcaagctgtctacgacgtcagatgacaaagtgtaaacttatttgttccattacagtgatttttaaaagtgaattgtttcagtaccaaacaaaaagtcagatacctattttaagctttatgttacagattttttttggtaaataatattgccttgtagtaaaataaacatttgtaagtgtaatgcaagtttttaatactcgtgaagtaatatttcctcttcagcacacgcaaaattcatctctggaatttgtcatatggtaaatatattttttgttgttcaraagaaaaaattgtaaagtgctatttagatgtccttacaaaatgggaattgcgcatagttgctctgaaaaaggaaatttgaagtcatgagacctgagttctattcttggctcagctactgaca

SEQ ID NO: 398468 - DNA, 626 bp, Homo sapiens
accagcccaccacttgtcctgctaataaaacgccaaacaagaacatgatccatggatactgcastggatgaaaatggaacaaatagggaagcactcatgcatcagtgactgcttcaatgtttatgtgcatagcacagctcatctctactcccctgaaataaaaataaaaggcaaatctgcatttacattttggacatcttcacaatattttccacatatatcgcgttatgcttcacttggcaatgttctgtctcacttgaatgaagcccttcgactgtttcataattcataaaatggagaagaaaagagaaaaagagaggagagagcaatataatgcctagacttgtaggtattttctgcaaaaatataaattgtttaaaagcaaggaggatatcttaccacacatgaaatgaatataaaactgtaggaaacgcggattgatgaacatgatacagatttattgaatcaactatttaataatactgcttatctaaatcatgtaccttgtagacagaactttatttcagtgctttatcccaccacaaaggatgttgcttggcatgaaaaaataacctgatcaacatttgttgaatttattaaatggatcataggtgcagacagactgg

SEQ ID NO: 398469 - DNA, 626 bp, Homo sapiens
accagcccaccacttgtcctgctaataaaacgccaaacaagaacatgatccatggatactgcagtggatgaaaatggaacaaatagggaagcactcatgcatcagtgactgcttcaatgtttatgtgcatagcacagctcatctctactcccctgaaataaaaataaaaggcaaatctgcatttacattttggacatcttcacaatattttccacatatatcgcgttatgcttcacttggcaatgttctgtctcacttgaatgaagcccttcgactgtttcataattcataaaatggagaagaaaagagaaaaagagaggagagagcaatataatgcctagacttgtaggtattttctgcaaaaatataaattgtttaaaagcaaggaggatatcttaccacacatgaaatgaatataaaactgtaggaaacgcggattgatgaacatgatacagatttattgaatcaactatttaataatactgcttatctaaatcatgtaccttgtagacagaactttatttcagtgctttatcccascacaaaggatgttgcttggcatgaaaaaataacctgatcaacatttgttgaatttattaaatggatcataggtgcagacagactgg

SEQ ID NO: 398470 - DNA, 522 bp, Homo sapiens
actttaatatatacctcctttatagtactccttctctgcagtcttcctaaccattctttatggcctgcattaaagcatttattatgtgtattgtaactgtctgtaagtcaggtcttgctggggccttctttttcttcatgttttcctttgagcacgagtaggtggtgaggaattttattctgattgcctctctcrgtggaccttcccatttatagacctctgtgctgctgccagtaaactaaagaagattccaagccacaactaccccaaaatccctctaattcccttacctttcaagctttgcttaagccctttccagtttcccaagatccatgcgcccgactcagtaaaagagaagaataacaaaaactggggctgtgcaggattcaaattctagctctgctgggtaatcacgatgtgacattggctaagtagcaatatgtagagtatgaataataaatgactcatctcacaagttcatgaaaataaagaaaacctctaaagcacttaaaacctcacata

SEQ ID NO: 398471 - DNA, 616 bp, Homo sapiens
tttagcaaatccccagttacaatttaagtagtggaagcagaatttaatatcagatcagtctacaattttttttaatactttaagttttagggtayatggaggaaattcccttaactaatgagagcacctgtttcctcacctgccccaaaagtaagtaaaacttgcatagaaatagcaagcaggatgcctagtccagagcaggccctttgcaaaggctaatttttctcttctttggacggtgacaaagacctcggtctttcctatgaagtggctatgcctttcccagtcataaaactctgtggctatttctaatccacagaatgagaaatttggacaggaatcttagcagctcgaaggttgtatgattctcatatttccctagatgaaaaccccaggcagaaatattttctatttaatcagatattagttcataattaagtacatacaattgaatgttaattacatcttgttctttaaaaacctactttctgggcattctgcaggagacaaatcggaagaatgaagtttaacattttcaatacatactttgttatgcatattcctaaattagaaatggtttttacctaataattcccacctgtaaatgacttccaga

SEQ ID NO: 398472 - DNA, 587 bp, Homo sapiens
ttgacatttatttttaatgtattacctgtgatctttttacaaagggacacttcttcggtactattgggttaatggcactgttcacatagaaaaacaggacaaatatttccctttatctgccagtttttcggayatctttaatatggcattttcaatcatccaattcagattttttatctgtgttctcaatcaagtgtgacttttcaagctgtgaatcatgacactgaaataaccacaatatatatttgtccagaaagtagaaattcaaccaaaaagtcaacagttgctgaaaagaaaatcagtatgttggtgtcattacccttaaaatacatatttgtctgcctggaaaatatgtctatttgttttaaaataaaattgagaagatggttaaacatcataatatttccagaatgtttgaagactagttgcaatttagtggcgtaatttactttcagtggtcataattgctgattctctttttatatataatagaaagcagagtacattgaaaaaatgtaatcaaatatactcaaatctcaattcctccgctactccccaataataatccaatctggaactggctcagc

SEQ ID NO: 398473 - DNA, 603 bp, Homo sapiens
ttttcatagtctattttgctgatttgcattctcacggttctctgcatatctggcagattggaacctggatccatcaacaggatcagattgaggttcagtctcttttctgagaatatagttggcgttgtgttctttcatcagtaggcacataatgttaaattgtctttcttttagtgatatcgaagccatcaatatttaggcctattttttattagttcattggggattgcaaaacagcaacattctaattttgacatttatttttaatgtattacctgtgatctttttacaaagggacacttcttcggtactattgggttaatggcactgttcacatagaaaaacaggacaaatatttccctttatctgccagtttttcggatatctttaatatggcattttcaatcatccaattcagattttttatctgtgttctcaatcaagygtgacttttcaagctgtgaatcatgacactgaaataaccacaatatatatttgtccagaaagtagaaattcaaccaaaaagtcaacagttgctgaaaagaaaatcagtatgttggtgtcattacccttaaaatacatatttgtctgcctggaaaatat

SEQ ID NO: 398474 - DNA, 616 bp, Homo sapiens
tttagcaaatccccagttacaatttaagtagtggaagcagaatttaatatcagatcagtctacaattttttttaatactttaagttttagggtacatggaggaaattcccttaactaatgagagcacctgtttcctcacctgccccaaaagtaagtaaaacttgcatagaaatagcaagcaggatgcctagtccagagcaggccctttgcaaaggctaatttttctcttctttggacggtgacaaagacctcggtctttcctatgaagtggctatgcctttcccagtcataaaactctgtggctatttctaatccacagaatgagaaatttggacaggaatcttagcagctcgaaggttgtatgattctcatatttccctagatgaaaaccccaggcagaaatattttctatttaatcagatattagttcataattaagtacatacaattgaatgttaattacatcttgttctttaaaaacctactttctgggcattctgcaggagacaaatyggaagaatgaagtttaacattttcaatacatactttgttatgcatattcctaaattagaaatggtttttacctaataattcccacctgtaaatgacttccaga

SEQ ID NO: 398475 - DNA, 540 bp, Homo sapiens
atctaccacaggaattgcatgactgctttgattttaaaaataaatgaagaaattcttgaataaaagtgtacagtagacaatgcttttttttttaagccacagctgtatgacaaggtcattttcaccaagtcaaaatgcactaaaattactacttttgaaagccagcttgtagctgcagataatggtcatctcaacaaggaaagtggtgggcaatgagagtttcttgaaagccatggaactcttttcaggaaaatgtaygtacattcaatatttcgtgtctaattttaggaaagccccaggacccagctgaagttcatccatattccacaagttaaaaccctgacaatgaaaacgtgactactcttcagtttggggtagctgaactgtgaagtaaattaactgcaaatatgacaataaacaagaccacctatggaattgttgattatcttttgcataatctaagaatctccaacatgcacatgaattttaaaagtccaattgtgtctaaaacctataattaattcacatagggatgtataa

SEQ ID NO: 398476 - DNA, 499 bp, Homo sapiens
atatcttaataaaaattcttcaggataagtctgccatttgggaactgacagtaaaataaaggcaaaaatgtaatgaatttatctcatttgtkttgtgaatcttgtaggagtgttctgtctccttaaagatcattacctgttcttcagctggtacactatattttctaaaggtcagaatcagtgtaatattagttcattttccccttcaattaaacaaattatttgtgatatatgaggaaatttgttatcagatttaacttgtcagaaatgctaccataacaatattagactaactactgtaaggaaaaaaagaataaacacaaaacttcaaatctcagagacttacctgctcacatcaccttctaaaggtctctttcctgcagcgatacaggttccttggtctctttcctgcagtgatacaggttccttttctctaatgcctctgctgtcccctactacgggtccaatccagcccacagcttgtttcgtatggcccaga

SEQ ID NO: 398477 - DNA, 499 bp, Homo sapiens
atatcttaataaaaattcttcaggataagtctgccatttgggaactgacagtaaaataaaggcaaaaatgtaatgaatttatctcatttgttttgtgaatcttgtaggagtgttctgtctccttaaagatcattacctgttcttcagctggtacactatattttctaaaggtcagaatcagtgtaatattagttcattttccccttcaattaaacaaattatttgtgatatatgaggaaatttgttrtcagatttaacttgtcagaaatgctaccataacaatattagactaactactgtaaggaaaaaaagaataaacacaaaacttcaaatctcagagacttacctgctcacatcaccttctaaaggtctctttcctgcagcgatacaggttccttggtctctttcctgcagtgatacaggttccttttctctaatgcctctgctgtcccctactacgggtccaatccagcccacagcttgtttcgtatggcccaga

SEQ ID NO: 398478 - DNA, 561 bp, Homo sapiens
gtttgaaagggcactccaggcagatttaagacacttctttgattatccagttggctgatggtaagcaacctgtgtatttactgtgagccacagttttctcatcaataaagtgggaagaagaaatgaaccagaggaacagcagaatcttgaagatactttctaaggtatcttctagaaagaaaatttatgttttttgaatttcttctagcagcatacatcatatagtcgatcacatgctaccttctcaggaactgttcaagttttaaaragaatggattatgcaccttaattttagatagtactacagggaatcattaagtgcaccttttaaaagttaggaaatcaatgaaaataaataatctatataaactccttgaaaacaaagacacaaatttatacacatttgtatatctcagtgcttagcaatactagataggcaatcaatattcacaatttccattaaggcaggttattattcttctgatcacttaaggattccacaatttttacattgcattacacttatattttatttatcataattatattttataagacatt

SEQ ID NO: 398479 - DNA, 635 bp, Homo sapiens
acaaaaataaaataataaaaattgagtagcaaaataataattagartacattgaaatatgttgagtttgtaataaaccatgtatctatgatacttaaatttaagttttaggattctttttggtaatgttaatttcaaaataagtaaatgtaatgaacatattcaacattttataaatgttactatatattgcttataatttttaataattaaggaatcaatattaattatcttattaattttaataagtaaagggtgtgtgtgcatacgcatattttgtttcttatattacaatctttatttataaagtgtaactatgtctttatttatcttcatataattagcaaaaacagtttcagagattactgttttacacctttaatcttgtgaaccattcagcaacccccaactctactcaaagtacttaagtttgcagcctacaatagctggttccataacatatatgctcagtaacataacaatacactgagacagcaggttttgcagcagagaaaaattgtaatgattgcaaagcagccaagacaggaaatgggaaggaccctcaatgcgtctccctgaggagttttgggctggagtattatggggcattagaaaattggggtcattggtcagggg

SEQ ID NO: 398480 - DNA, 652 bp, Homo sapiens
tttcttatacttaaatattaatagtgttattgcagcaaacatttatgtatagaaaatacaaacacatattttarttatgcatatatacacatacatcagataaatatatggatatattatatatatatatcttatatatgcatgtggtgtgtgtacgagagagagagaataggatgaccattgcaagctcactttttttggggaaatttcctgaaagtccctatgtaattagatagataaactttaggtaagattttttttaaaaagagcttgtgtaggtctcttactcagatataactttcatgtttattttaggctttaatttaatttattgcaccatgttctgaaaatataactccaagtgattctacataccaacatctttactcaaactttcttactgaaacatgtctccagtttgtctttggcattgaatattctaccactatggcaagcgaaaagttacattttggtcatattagttataataggtcttagaaataatcttatatagttatcaattgagtaaaggccaatttatagagattaggagatgcctgagaattactgttcacactttaatgtgttctttatgacccacctatatttaatttaaatatgagaatatattcatttgtattaaaccctaatg

SEQ ID NO: 398481 - DNA, 536 bp, Homo sapiens
atttcatactatttttcaattgctttctcaaaaatattatttgatcatcagcttctgtgagtaaaacaatcctgaaaactcttgatcattttaaatttggctaccaagtttaattttatccagaggcctgacctttggatgtttgattcttcatttgattcttcacctgattccaagtcatcatatgcattgacattttccccacrttcaaactggcagatttttccacctgctgcgatggtgttgtggtggtagaactaaatttttgtgagggtcttaaactctttcaagccacatcagatcacaatccaatctcattggtgaaactgacctttttgttttcccactgctcttttcaaaggcttttagcaaaccttttctgtgctgcaaccctatccattccatcatgctttctgcccacttatgctgggagaagtatttgagttcggaggcaagtctgaaaggaacaaccaagtttaatgagaaattattttgactgctgtgggacgagaagaacttttcttgttcaccataat

SEQ ID NO: 398482 - DNA, 584 bp, Homo sapiens
tctttattctcttcctttactgtttaatgaggactcaaaaattattcaagatttgctgagtagctattatattctggacacttaggtaggcactgcaggtacaaaaatggataatatgtaaacacttctcctaagtagttcacagttcatagaagccataagcaggtaaagcaatacttattatgtaaaaagatatgtgaatwaatgaacagatggaattgccacttcccattcagagtgtgctgtagtgcagagttagaaacaaccattggaaaaggaggaacaagcttccataaaagcaatgatatttgtcaaagtagatgtttttgcttggcagagacaggatgtagaaaactatatagatgaaacagcatcattcaaggattgaaaacatgaagtagaatggtgtggtcaatgaactgcatagagttagtgggggtctagtgcaaaactcttgtgggaaactgatacagtggtgtaagaatagtgttggcagagatgcttttcctatcaattgtgtagaagatgcataatcattgaagaatgataaaaaaagagggacaatattaattttcatttttcag

SEQ ID NO: 398483 - DNA, 473 bp, Homo sapiens
atatgtaaacacttctcctaagtagttcacagttcatagaagccataagcaggtaaagcaatacttattatgtaaaaagatatgtgaattaatgaacagatggaattgccacttcccattcagagtgtgctgtagtgcagagttagaaacaaccattggaaaaggaggaacaagcttccataaaagcaatgatatttgtcaaagtagatgtttttgcttggcagagacaggatgtagaaaactatatagatgaaacagcatcattcaaggattgaaaacatgaagtagaatggtgtggtcaatgaactgcatagagttagtgggggtctagtgcaaaactcttgtgggaaactgatacagtggtgtaagaatagtgttggcagagatgcttttcctatcaattgtgtakaagatgcataatcattgaagaatgataaaaaaagagggacaatattaattttcatttttcagca

SEQ ID NO: 398484 - DNA, 619 bp, Homo sapiens
ctcattaattaactacacatctcttaaaacacaatagccacattattttygtttacattacctggtttatgaaaagggaaggctgaggagatatgaggcatgaaggcacacatcttctgtagcagaatgtgagccatcagaatgaatggggtgtatttcttcctactcttcagttagttcagaggcaattgtctgacatactggttatgtgggattttatatgggctgatctcaactacaagaatccatgttttctaatgttatggagaaaatgcagacagctctccttttacagataaggaaattaaagctgcaaacaaccacatactttcaagtcactttgcctctctgaaactggatttcctcatcagtctaaagaagagttaacacacctacttggagaagctgccaatcttacattatcttttgaaaaatgcctcccattgccatgtcacacttatactagaagactccatttccctggtcatctctgagtaaaacgagagtgaggcattatttggccacttaaatgttaattgttatcatgtagaaattcctcattgtataattatgttttagcagagtttctcatgcctaaaaccatacccatgtttcacag

SEQ ID NO: 398485 - DNA, 485 bp, Homo sapiens
gtcacccaggctgcagtgcagtggcacaatcacagctcactgcatccctgacttcctgagctcaaggaatccttcagcctcagcctccctagcagctgggactacaagtgtacatcaacatgcctggacattttttattattatttttcatttttatcagagaggaggtctcactttgttgcccaggctaatcttgaactcctgacttcaagggatcctcctaccttcatccctcaaagtgctggggttacaggcgtgaaccactgcacctggctcagggtaagtctttttcatataatagcaactcataccatatgatacaaatatctataagaaagtatctgaaatatttgctaactacastacatattcaaaaagcttagtgtggtttttttttaattgtgtccttttataagatctactactgattcattttattgttgttgatctcaacctaaataacgtgggaaagtgattaatactat

SEQ ID NO: 398486 - DNA, 539 bp, Homo sapiens
agttttagaatagcttatcaattgaatcagtagactgagtaaaaagtatctgccctcaacaatgttggtgggcatcatccaatccattacgagcccaaagagaacataaytgtggagaaagggtaaattttctccatcttcttgagctgggacagctatctcctcctacccttgaagttaccagttcttggagacttagacaccaacgcctctgcctcatatcctcttaagtttctcaggcctttagcttttaagtaggaattatgccattaactctctcggttttcagatcttcagactgaattacacaactgtctttcctggttctccaccttgcagatgttatatcaatccaatattcagaaaactcattctcaaaattttcttctagaacccctcttggtaccaaaaatctgtgctattgagggttccccaaataaacagtaccaataagatatatgtagatatgtaataagagacttattagaaaatggctcatgtagttgagttttctgaactgaatttggagcttctggatg

SEQ ID NO: 398487 - DNA, 551 bp, Homo sapiens
tgtttcacttttatttttttatgagattagaacagttttccagagtcaacataatttgcaatattgcagcaaattaaattcagaagccagtatgagcatccagctgctttcttttaagccagacataaaagagatttgcaaaaatgtataacaacatcactcttctcacaattttttattttataaaaagataattacttttcrgccaggcacggtggctcatgcctgtaatcccagcattctgggaggccaaggcaggtgcatcacatgaggtcaggagttacaaatcagcttgaccgacatggtgaaaccctgtctttactaaaaatacaaaaaattagccggtcgcggtatgcccctgtaattccagtcactcaggaggctgaggcaggagaatcgcttgaatccgggaggcagagtttgcagtgagctgaaatcgcaccaccacactccagcctgggcaacagaatgagacttgatctcaaaaaaaaaaaaagttattgtttataaatatgtgatttatgttaacatataatgggtttattaaataa

SEQ ID NO: 398488 - DNA, 596 bp, Homo sapiens
ctgttgtttctctcctaacttcattctattgaaatctcacctgtcctacatagttcagctcaaacattacctcttccacgaattttctgaccactaagctagaattagtataatatgttcttttgaagtctcttataacacaagccacctttctctttgaattgtatttgtttctatgtcccctagattgtcttctttgaggaaagggtgtgttatctgatgaattctccactgaattaagtaagtcacttgcacataacagacacataagagatatatagtaaattaattcaattattaagaatcttactaataaagtgttattttcaaatatgtgaggagatgtcaaataaatggacttgagttttttctattgttctcccaggggataatgaaaacaaattgacagaagttgcatcgggcatggaggttaaaaaggaagcttttcctgcrttttttaggctgtatatcagctgagtatttgttacttttctctttacttctttattttctttacttattttattctttacttatttattcatctttttttaattaattagtcaattgacaatattgacttatgttaagaacga

SEQ ID NO: 398489 - DNA, 497 bp, Homo sapiens
ccaaaggtgcagctctaggcagataagtctcgccaaagtttatttggccattctgatgtgtgaaacagaaaaccaactattggtgcaatgtttctgccaggcaaattcacaatcattgttttgcgtaactggagacgatttatcaatggtgcactttacaagatcaccactgtaagagttccttcctttgtctaccctggctcctgattatccagcaacaggcatccayacaatgtcaatttccttcataaccaaagttagaattttaaatgaacttttgcttttcacactctgtttcttttatgtggtagagttgaatgtacttttttacttatttgtggctagtttcactgaaaattcttctggttttagtgtgctgctaatctcttggtttaaagataaagagatttgtacattctaaaaaaaccaaaacatatggaaaacattcatcttagcaacttctaataaaaataaatcctgattttaacttaccactg

SEQ ID NO: 398490 - DNA, 557 bp, Homo sapiens
ggtatatagtcaaaaaaagttctgacatatcggttgtttgagactgtatgaaacttgtctacgtgaatcagaattttgtatcgggaaaatgacaataatcatacctattttacaaggtacttgtgagaagttaaaaaaaaaaaaagattgttccttgcctcatagtttctaggcagatggtgaatttctaagggaatataaagggcaaaagaatatttaggcaaatatatcatggtaagtggagaaaataattacatctataacaggtacagaacactaggggacatataaaacaggtgcttgacccattcaatctgagtaactggcttcacgttcaacactgcgcactgtagcacagacttaccygcctctccaccatcaagataaaacaaaaatcatcctcttaatggaaattcgaggctgttcatttgctatgttaagaaatgttcttttctttcttccccattaaattctcccattctctgatttcacaatttccttgagattgtgtcctcttctttgtattttttttaaatggactctgttcaaacacattc

SEQ ID NO: 398491 - DNA, 611 bp, Homo sapiens
ccccagcacagcaaagatgctctaccaaaatgtgggcagactgcttttttaagtggtcccaaccttattccctctcactgggagggacctctcaaccagggcctccagctacttcctacaggtacctctgggtcagcaacaggtccgtgtttccctgggacaaagcttgcagaaggaggaacaggctgccatctttgctgtttcacagccttcactagtgacacctccaggtcctggaaaatccagggtgactagggacttgagcaggtcgcaagcatattgcagcagccctgcagaaaagtggccagactattacatgggtgccctttgccatatctcatccgcaggcaagtcctacagttctgggcctccagccaccccatgtcagaactattgagccactaacaactcagcagttccctgaacagagcctctagggacaactgaaagcctctctaccacggcctctgcaatggaactrcctttgccactctcagattaaggaaaaagcaaagatcctaagtgtcttctccataactccaagctgcaagttgacccaaggaaaggaggctagtctgtctcccataggtctcaccccaccccccccgaca

SEQ ID NO: 398492 - DNA, 575 bp, Homo sapiens
aattgatttatctgttctcgagtgtctagccatctaatcagacctgtccatttgctcactcctcaaacgtgataaatgcttgagaaacaaaaataaatagatcacagttcctggcttgagaggttaaagggggaagacagacaaatacactccaatgatttgtaggaatttgatacataaattttaaaaacaaaaaagaactcatctaatattctttgagaacactgaggagagtatgcttaacactgaaaggaaaaattaagaaaagctaattaggaaaatgtgagttgagttgatttttgaaagataactcaatacaactaatacttactgagttctatgacaagccagatatgtgttcagcctctactgttttaattcctttaatactcgcaataaccatctgaattaagyaccattagtatcctacaacctcacttaatcctcattttaagcgtggggaaattgtagagtcattaaaacattgtgactgtgacacttggtcaggtaacacaggaaattagaatgacatgtttcctatctcatttttgactgaggggctgataaaataacat

SEQ ID NO: 398493 - DNA, 618 bp, Homo sapiens
gactaggcatcatagggacatatctcaaaataacaatagccatctatcataaacccacagccaacatcatactgaattggcacaaggttgaataattccccctgagaactggaataagacaaggaagcctactctcactactcctattcagcataatactagaagtcctagccagagaaatcaggcaagagaaagacataaaagacctccagataggaaaagaagatgtcaaagtatctctggtcactgacaatatgattttgcacttagaaaaccataaagactttggcaaaaggctcctacaattggtaaatgactttcataaagtttcaggatcaatgtacaaaaatcagtagcatttccatacaccarcaatatccaagctgagagtgaaatcagcagcacgatcccacttacaatagccacaaagaaaacaaaatactttggaatacagctaacaaaggaggtgaaatatctctacaagaaggcctacaaaagatttctgaaagaaatcagagataaaaacaaataatggaaaaacagtccatgctcatggattgaaacaaacaatattattaaaatggccatactgcctaaagtaatttatggattcaatga

SEQ ID NO: 398494 - DNA, 528 bp, Homo sapiens
aggttccatattgtatttgtccctaagtacttgactaatccctagttgggaaaatggcatgaactaattttatgaagctcctgtaatgtggtaggcactaaactaggcaatttatgtctgttatctaatttcattccaatcacttgaaaagtagagattttgattttcattgtagatgggggacctaacactgaaaaagctaagtcaatatcattaaaggcacaacatttataaacggctgtgttaggtaatayattccagcttaaaatcacctggtggaccttttctatgatttcaatgattatccaggttgatttctcgttttgaggaataacgcaaatattagctaaggaataatacagaattaggattaaattaatccaacaagtcattcaacaaatgtatactgaaaactactgtgtgctgggcactgttcaaggaaatgtggatacagcaatgagtaaaatgacatagttcttgcccttaaagtgtttccattctaattaagagagcaaataataagcaaat

SEQ ID NO: 398495 - DNA, 413 bp, Homo sapiens
gtttaaaactatgttatgggaaaaagagtgttagaaagttatcacaacttacggtagaagagattaggaatggggaagatttagccatataataatattttatttaaaagagaactttgaatcaaaaaaagcaaaatgttaaaaattgttaaatctgagagaggaacccatatatgtgtctcttacacattatgttttacacttttctatagtttaaaacattccaragttaaaaaaattacaaagaaagcaaattgaaaaacatctgaaatttattgaaacaatatgtttcagaagttgatggttactgaaacgcaactgctcatgtttaatagactaaattcagttgctcgactctttgagatgaatctctatgtccagacatcataaaagattcatcagagtccagactg

SEQ ID NO: 398496 - DNA, 558 bp, Homo sapiens
taacatttttttcacttttcttctttttgttttagtcttagtgactcaaaggctcttatattttcctatgtcttaggcaattaatacattaattacttacatctaaacaggagaaaaaataatatgctatcaaggtggcaaaaaggaaaggccaaatgtcactacttttcctttacacatgatctgattacctgcccatgcccctctatcttttatttaaacatcacttttctgagtgtggcattgtttcaaatggtaaaaggtattcacagaaaatcaaaagtaattacaacacaatctctgtttctctgtcttctgcctatttactttgtgccaccttgaattatttytgaacaagctgtcatcaaccaggctgtcagtcacaatctcattcattcaccccttaatgctgttactttatagttcccataacatgagcttttcattcactttctcaaatctatatctcgaacttacacttctcttttgacctttggttctaaacacacacacacacacacacccctatccttagacacttcctaatgcagttggctc

SEQ ID NO: 398497 - DNA, 588 bp, Homo sapiens
aatagttatatgcatctatttctattaatatgaatacatttatgcatatatcaactagtttttcattttctcctctcccacttctctatcatctgacataaaatatgttaatagattttaactttgtatctcagtatttaaattataaaatatcaaagggagaatatgactcagaagaagaataaatatcactcaaaaatagataaaaggactttgcatcctctgttgaggagaaggttgtctatttcagtattcaagaagaataattgcattatgtttggcaaaggcctaatttttctgttgcctttatttggaaattaatttaacaatatttgaaaaaaatatgcatgtggatgccaaataggcaaggagtagcctatggaggatttgtattgggtcatctttactaagctggagttatatttcccagaatttctcattctrtattgttctggctcaatgtgggtcacaagagactatttgcctgagttttggaaagcaaaagagccatggaagccatattattttatgctccaatggtcaagacaataaaagcagacactgctgcagctctcacacattgtcatg

SEQ ID NO: 398498 - DNA, 350 bp, Homo sapiens
tgtagaaactgccaagacgtggggcttgcaacctctgaagccatggcccaagctgtaccttgaccccttttagccacagtgagagcagttgggatgcaaggcaccaagtccctaggctgcacacagcagaggggccatgggcccagccstcaaaaccattttttcctcctaggcttctgggctcatgatgggaggagctgtcacaaaagtctctgacatgccctagagacattttcccattgtcttggtgattaacattcagctcctcattacttatgcaaatttctgcagcaggcttgggcttgatttttccccagaaaatggtttctatttgctactgcattgcaggc

SEQ ID NO: 398499 - DNA, 585 bp, Homo sapiens
caccaaatagaaatgatatgtaagatggggttaaataagccttacggataaatggcagagattgccattggtcatactcatgccactttccctcttgcctcttaactgacatctatagcctcaaggagaatttcttatgaccaatgactaaagaaaaagaaatgtgggtctggcagcttatccagcattacattcctaccagagtgtctctgaaggacagttctagtggaaaatttttccagtaggcctaatttttttaattaatcaattttcattattgtagcagttttaggtttacagaaaattgagacaatagttcagagagttcccatagacttctctctcccaacttctcatttcccactatggtttaccctattattaacaccttggattagtgtagtacatttgttacagttgataaaccaatattgatacattattactaactaaagtctatagtttacatgagggttcaccatttgtgttatatatttctatggttttgrcaaatgtataatattatgtatccatcattatagtattttacggaagagtttcagtgtcctaaaaattccccaagat

SEQ ID NO: 398500 - DNA, 613 bp, Homo sapiens
ggaaagcacagacactactgatactgtttacagccaaagaaatcatgcagaggctacactactgcacacacccagaatcagagccaaaatttcctattctatcaattctatagagaaatcttcagggaaaagtcctctcctgtgaaagcaaattcaaaaactttgaagtgactgttaaaccaaatgtgtacatagaatgcaagggcacaggaaacatgaaaaagcaaaggaatatgacaaaaaaggaagacaacaattctccagcaatggatcccaataaaaaaaaagaattcatgaaatcctccccaaaagaattcaagttattgattcaaaggaagctcagtgtgatataacagaattctgaaaacaatgcaaataattttttaaatgtctggtatgaatgagaaatgtamcaagaaggtaaatatcattaaaaagaatcaaacaattctggaacagaggaattaattgaatgaagcacaaaatgcattcaaaagcttcaataatagactgcatcaagcagaagaaataattgcagaatgtgaagataggtttttttaaataacctagttagacaaaaataaggaaaaaagaatttaaaaaatgagcatag

SEQ ID NO: 398501 - DNA, 569 bp, Homo sapiens
agagaaacattcattctaaaattcacatgagatctgaagcaacccccaatagccaaaacaattctgtaaaagaagattaaactgggagaacttacttgctgatttcaaaatatactacaaagctacagtaatcaaaactgtggtatggacataacaacaggcatataggccaatcatatataatacagagtccagaaataaacccctgaatgtatggtcaaatgatttttggcaaggatgtctggatcattcaattgagaaaagaacagtcttttcaacaaagggtgctggaaaaattagatatctacatatagagaatgaagctgtgacattacctgacaccatatgtaaaaattaaaccagaaaaattccctaattgtaagacctgatamaactctttaaaaacagcataggccaaaagttttacaacattgtatttggcaatgatttgttgaatataacaccaaagagacaggcaatgaaagaaaatcaaatggacaaaaatacactaacaagatccaaggagaggttacagcacctgagtgtaacacaggagcaagaacagaggc

SEQ ID NO: 398502 - DNA, 510 bp, Homo sapiens
acttacttgctgatttcaaaatatactacaaagctacagtaatcaaaactgtggtatggacataacaacaggcatataggccaatcatatataatacagagtccagaaataaacccctgaatgtatggtcaaatgatttttggcaaggatgtctggatcattcaattgagaaaagaacagtcttttcaacaaagggtgctggaaaaattagatatctacatatagagaatgaagctgtgacattacctgacaccatatgtaaaaattaaaccagaaaaattccctaattgtaagacctgataaaactctttaaaaacagcataggccaaaagttttacaacattgtatttggcaatgatttgttgaatataacaccaaagagacaggcaaygaaagaaaatcaaatggacaaaaatacactaacaagatccaaggagaggttacagcacctgagtgtaacacaggagcaagaacagaggcatggagcgtataggaaggatagttttacat

SEQ ID NO: 398503 - DNA, 703 bp, Homo sapiens
actaacaagatccaaggagaggttacagcacctgagtgtaacacaggagcaagaacagaggcatggagcgtataggaaggatagttttacattatctacatcatccttaccccaatcctgggcagcatagcagaaagagaggtaccctctgtatggggaargaagagggaagtaaacactgaattttgccatggacgaataacagggcagatcacagtaaaaaccagggctaagcaaaacccatagccccagactccagactgagcctccaggcctgccccagtaacaaactgaattattcagcctatgttggtgactcgttctctgggccatcccactgccagcttgacttcattggcccctttctcagaacagcccccaccatccaagagaccagagcagccccaggctgtggacaatccctagaaccaggatgaagcccagagcaacaggtttaaattccaggaatgcctgttgaacttagtctctggacgtgaccccaaatcaggctgacaccagtgccctcagaccctagaccaaccccagtgttagacaggccccagtttccataaatgccagaaccaccacagcaccatgccagcctcaagaatcaggttccaggcccacttcagcaccaggccagccccagtggccctagtcttcagaacttccttagcactggtgcaactcatacagccctagc

SEQ ID NO: 398504 - DNA, 613 bp, Homo sapiens
caacagttcagttagttctcagcaggtacttgtttggtgctaactagggtcttcaagtgggtcctgccccaaattctaatattagaaagtatgtcatgacactcaacatgttgacatcactctagttaacatcaaggactaaagcataatttactcttatcacttgagacatcaacaaaggttaagaagtgaagaaaaaatggttcatcaactagtatatcacatgtaatactgtcataattattttccagttgtttttccctaccaaatatgtgaaggtgtgggcactttgccgagatgatctgatttcaaatttcacaagcatatccaaattttcagtggcttaacacaataacagtgcatttcttactccaataatattctaatgctggcagggagagcrttgggaaatctcttctctatctttatttagggacttagactcatttcatttattaattttttccatcccttaggtctttgagttctccactgaatgctttccaataagccaggagatgagggatgagaaagagtacacaaagaatctcatgagaatagtttcaggaactttaggccagacctagaagtggatatatgacttccacatatg

SEQ ID NO: 398505 - DNA, 536 bp, Homo sapiens
tggaaaattagagcagccaatctctcaagttttttatagtcctgaaattctagattatgtggctaagttttaaactgtgcttgctcactgtgaatgttaacctaagaaccttgctgcractatcttctgttccctcttaaatctgaaaaatatttaaatgcatatgatcccctatcttatgccatttatttaacctcaccataaaaagttccaattttatttgaaatgatttaatttttaaatgtcagccaaattattgacctttctttaattttgtatctggaataaaagaagaaagaatttggcttcctataataatctttctctgtttcattttgagaggaaatttatcagtgggctggtggtcagtagtctgcagctttatatttagtgtctacagtattatgggagaggctgaggaacccagaatgacctggcaatgttgggggtgatcagctgtttcagtgaagttctccttaatccagtagctgtctctaaaaatctttttagtggttttacttttcaaggtttgattc

SEQ ID NO: 398506 - DNA, 599 bp, Homo sapiens
actaatattatagaagattattctgtatattaaaccaaatcctacttataattttgtatacaacctaatagatttcttaggaattagaaggttgtaatcaatgtagaatataacattttatttgaaatggttactatattatgaattatgactaccctatttaatttttttgcagaaattgaacttgaaaacatatttacagcctagatgttggggttggaccttctgtaaactctaaaggcagtttataaattaaatgcaygagtgatgtgactctgctatatttatgctgaggaattaaatagcaaaatctaggtatgactctctatgtaagatggtttatttttcttttatttttgaatacatcttctttattactttacaaatttaatgttctttctctgtctctctctttcatcctacttctttcctttcttctttccattcttccttcttcctttttctttcttttcttttttctatgtttgactgaactaataagaaccagaaattttgcctctgatttactctacattctgaatcaataaatgtgtggatcaattacacgaatttcatgaaagttctgaacatcagcttta

SEQ ID NO: 398507 - DNA, 535 bp, Homo sapiens
ctattcaagaatattcctgagcaaaaagatgtaggtataggaatacctgtcaacttttaagtttttaattgtatgtaagatcttctttatgatttatcaaatctatcaaagattaagtggctctcccatctgaaatgcaatttaaaactgctgraagtctttccattttgacaaataagcacaggcattcttaagatcaaaaatgtatcattcataataatatcaatgttctttttataggttttataaaaaatgttttgtaacttttattatcaaattgattctttagcatttgttattagtaaaagttaggcagaattatatgagaattccatatattcataagccagatcataaattatcacctcctggccaatcttgctttatcactagcccatttttcaactgctccattcacaatggcctctcactctgccaatttgattattttgaagtaagtcccttcaggtggtcttttacttttgaatccttggtggtggtggttttatatgtttttgcttttgattttttggta

SEQ ID NO: 398508 - DNA, 599 bp, Homo sapiens
gcttgactgccagctcagctgcagtaaaataaagcaccaggtagagtcctaaagtgcccaattacaggtcctgactccctgatggcatctctggacccacctgaggcagggggaacttgtcactctgaagggaaaatrcaagcctggctggatttgctatctgctgattgtagagcccttgggccttgcataaacataggtaatagccaggcagtgatcaccatggactttgggcaagtcccagtgctgtgctggctttggatctgacccagtacagttctagtggtggtggacatagggtggcttgtgtgacctctcccccagctccaggaagctcagttcagagagacagagagactctgtttgtttgagagaacataagggaaaagaagtatctgcctggtaatccagggaattctccttcatcttaaccaagaccaccaaagcaatacctctatgagtctgccataggcacagtgttgatgggcttggggtgcccccaaatggagatatggcagcagtgacaaaaaacatggcttgcaatacccaagtccttggaatacttggaaagtcttccaaagaaagatgggtacaaacaa

SEQ ID NO: 398509 - DNA, 599 bp, Homo sapiens
gcttgactgccagctcagctgcagtaaaataaagcaccaggtagagtcctaaagtgcccaattacaggtcctgactccctgatggcatctctggacccacctgaggcagggggaacttgtcactctgaagggaaaatgcaagcctggctggatttgctatctgctgattgtagagcccttgggccttgcataaacataggtaatagccaggcagtgatcaccatggactttgggcaagtcccagtgctgtgctggctttggatctgacccagtacagttctagtggtggtggacatagggtggcttgtgtgacctctcccccagctccaggaagctcagttcagagagacagagagactctgtttgtttgagagaacataagggaaaagaagtatctgcctggtaatccagggaattctccttcatcttaaccaagaccaccaaagcaatacytctatgagtctgccataggcacagtgttgatgggcttggggtgcccccaaatggagatatggcagcagtgacaaaaaacatggcttgcaatacccaagtccttggaatacttggaaagtcttccaaagaaagatgggtacaaacaa

SEQ ID NO: 398510 - DNA, 533 bp, Homo sapiens
tatatatatatgaaccacattttactgtatatatttatatagtgaaatatataccacattttactgtgtgtgtatayatatatatatatatatatacagtgaactattattcagctttagaaagaaaattctgacatatgctgtagcatggatggatcttgaggacattatgctaattgaaatgagtcggtcagcaaaagacaaatactgcatgattccacttatatgtggtatctagagcactcaaattcatggaagcaaacctccaatacttaaaatgtgtgatcttggttggaactagggccactgtaggtatagttgagatgaggtactagtgaagttaaggtgggccccatataaaaggagaagagacacagagatacagacacagggaatctgccatgtgacaatggaaaagaggtcaaagtgcttcagctgcaagccaaggaatgcccatgactgtgggtaagccaccagaagctagaaaggggaaaagcagattcctcccctacaggtttcagggaaataataac

SEQ ID NO: 398511 - DNA, 553 bp, Homo sapiens
ggattgctgtatcttttggggcaattgatcctgactaccaaagggagattgggttgctgctacacagtgagggtaaggaggaacatawctggcatgcaagtaatcccctacatttcttcttattactcatatgaccttgtgactaaagtcagtggaaaactgcaacaacccaatataggaggaaatattaatggaatattccagagtttctaggaatgaaggttttgtcactccataggcaaggaactaagactagccaatatgcttgctagaagcaaatggtatataacacagatagtagaaaaaggtatcagcttataactggccatgtgatgagctgtaggcacagagactataatagttatatgcatctatttctattaatatgaatacatttatgcatatatcaactagtttttcattttctcctctcccacttctctatcatctgacataaaatatgttaatagattttaactttgtatctcagtatttaaattataaaatatcaaagggagaatatgactcagaagaagaataaatatcactcaaa

SEQ ID NO: 398512 - DNA, 608 bp, Homo sapiens
gtaataaaaagcctcccaataaagaaatgcccaggacaggagatggcttcactgctgaattctaccaaacatttaaagaagtaacaccaatcctactcaaactactccaaaaaatacagtaggaggaaatatttccaaactcatgctatgagaccagcattaccctaataccaaaatcaaagacatatcaaaattagaaaactagaggccaatatctctgttgaatatggaygcaaaaatcctcaacaaaatactagcaaaccaaattcaacaatacattagaaagttcatttatcatgaccaaacagaatttatctatgtgatgcaaggattgttcaacatacacaaatcaatcaacatgatacttatatcaacagaattaaggattaaaatcatatgattatttcaataaatgctgaaaaagcatttgagaaaattaacatctctctatgataaaaatcctcaaaaaccaggggatggaagaaacatacctcaatataacaaaagctttataggacagatcaacagctagtattatactgaatggggaaaaactgaaagcttttcctctaagatctggaacatgactaggatgcccaccgttacca

SEQ ID NO: 398513 - DNA, 428 bp, Homo sapiens
tgaatatggatgcaaaaatcctcaacaaaatactagcaaaccaaattcarcaatacattagaaagttcatttatcatgaccaaacagaatttatctatgtgatgcaaggattgttcaacatacacaaatcaatcaacatgatacttatatcaacagaattaaggattaaaatcatatgattatttcaataaatgctgaaaaagcatttgagaaaattaacatctctctatgataaaaatcctcaaaaaccaggggatggaagaaacatacctcaatataacaaaagctttataggacagatcaacagctagtattatactgaatggggaaaaactgaaagcttttcctctaagatctggaacatgactaggatgcccaccgttaccactgtcacttaacatagtactggaagtcctagctagagcaat

SEQ ID NO: 398514 - DNA, 428 bp, Homo sapiens
tgaatatggatgcaaaaatcctcaacaaaatactagcaaaccaaattcaacaatacattagaaagttcatttatcatgaccaaacagaatttatctatgtgatgcaaggattgttcaacatacacaaatcaatcaacatgatacttatatcaacagaattaaggattaaaatcatatgattatttcaataaatgctgaaaaagcatttgagaaaattaacatctctctatgataaaaatcctcaaaaaccaggggatggaagaaacatacctcmatataacaaaagctttataggacagatcaacagctagtattatactgaatggggaaaaactgaaagcttttcctctaagatctggaacatgactaggatgcccaccgttaccactgtcacttaacatagtactggaagtcctagctagagcaat

SEQ ID NO: 398515 - DNA, 605 bp, Homo sapiens
agaaagttcatttatcatgaccaaacagaatttatctatgtgatgcaaggattgttcaacatacacaaatcaatcaacatgatacttatatcaacagaattaaggattaaaatcatatgattatttcaataaatgctgaaaaagcatttgagaaaattaacatctctctatgataaaaatcctcaaaaaccaggggatggaagaaacatacctcaatataacaaaagctttataggacagatcaacagctagtattatactgaatggggaaaaactgaaagcttttcctctaagatctggaacatgactaggatgcccacygttaccactgtcacttaacatagtactggaagtcctagctagagcaatcagacaaaagaaatgtataaagggcatccaaattagaaaggaagaagtcaaattatccatgtttgctaatgatttaatcatatatttagaaaaacctaaagactccacaagaaaactattagaactgataaattcagcaaaggtggaggatagaaaatcaacgtacaaaaatcagtagcatttctataaaccaacagtgaacaatgtgaaagagaaacaaagaaggtaatctcatt

SEQ ID NO: 398516 - DNA, 591 bp, Homo sapiens
tgtgttcagtgcagtttgaaattaacttagtacataaaaattcagacaaattgtcagagaagacagaataacattgccctggcatgctttaacctttcttacttaaaacaacaagtagctgggcatacaatcacctttttgcattaacttacgttattaattgagaatcattattagagcttaaactgaataccagcgttggaaaatgtgattcaagcttgacttgacatttttttaagtcatcctgcctgtgaggggcaggatggagctttccctttgctctgctctttaaggtgaggtgagatccttcaacagggtgatgaacacctctctggtttcctagagaagcctaagaccacgccatggccagggcgcatcagaaaatgtaggtcaagctgtgctgagtaaaagagtgttttcactgggctacacaagaaagactggcctgctttctgtgtcatcttcagaaggccctgcccaagtgytttcatgaaaatggcattaaaagactcataaagatactgtggtgaagtgatctctagcactttcactgaaattctgttacttgaagatttccaggtaatcaaaaga

SEQ ID NO: 398517 - DNA, 460 bp, Homo sapiens
cagtccaataaataaatttctaatatttataattcccagtccaatagtattttgttatagcagcaagaacagactaagacatatatacaaggaatactattcagcctttaaaaagcagaaatcttgtcatttgcaacaacatggatgaacctggagaacattatgttaagtggaataagccaggcacagaaagacaaacacctcataatatcatttatatgtggaatctaaaaaagttgaactcatggaaataaaaaatgaaatgatggctaccagaggctgaaggaagggagcagctgggaaaagggaggatgttcatcaaaggagagaaataatcawtgtttttttctttttccttgggtggatttgccttacaaatgtagattgttatttttaacactcagttataactaccttgaaaatgtgtgcagcagtaattaataagaatatagaggcaaaa

SEQ ID NO: 398518 - DNA, 610 bp, Homo sapiens
gagctgctgtgtattggagtagctaattaaagaaacgagccaaaattaaagtaataattaagctttaatcagtaattgcgattttataagtaagagttcaaaacccagagaaagcaccaactcactctggtttcattatcctccagggacaggcacactgattgaaggtcaggtaaatcagcacagatgtggaagcagtctcactgttgaaggaaccccaaacaaaagatctagcagatttatgggcactcgtgtctaggaaggacaagggggaagggcyagcgtgaaaagtactgagtactcagtcagagtggggaaaggtgtcctcaaggtttctctttcctcctttcctcctctcataaggaatcctcagcagaggcacttaaaaaagacctctgctaaagtcttcaggtaaagagatgcaggaatgaaggtgccagggctagaaatgtaaacatgtgatgaaaatgactaactggggggcctaagtccttgactgcaactcccttcagagactgccaaggattgtctgtacaccgtttggtgtgcagaggacaggttttgccccctgaggtggctgaagtaaagcatttgtaactgtgtacagttg

SEQ ID NO: 398519 - DNA, 632 bp, Homo sapiens
ggctagaaatgtaaacatgtgatgaaaatgactaactggggggcctaagtccttgactgcaactcccttcagagactgccaaggattgtctgtacaccgtttggtgtgcagaggacaggttttgccccctgaggtggctgaagtaaagcatttgtaactgtgtacagttgggactgaaaaatcacaagatttgtagctgggagccagacttcacagttaatgtgacattatgtagacattccatccraggattgagaaccatgtacagttgatcttcattatttacagattctgtatttgtgaatccatctacttgctaaaatttatttgtaactcccaaataaatacttatgatattttcatggtctttcatggacatctacacagcagccaaaattttgagttatttaatgtgcacgtacccaactttgatctaacaatccaatattccgcattcttgttttgacactccgactatagacaagtgtccttctcatgttctacttagtgacatgttttttgagattttgtgtttttggttattttgctgtttaaaatgaccctcaagtgtacttactgactagtgtttctaaacacaagagggatgtgttgtacctgatggagaaaataca

SEQ ID NO: 398520 - DNA, 337 bp, Homo sapiens
aacacaccaatgaaactgagacctccactttggatttccttttactcatctctaaaataaggaagttaatattagttagtcattcaaatatttaaaaaattctacaataaatatttgatatgtttccaatgataaataggaaatatttttaaaggcaacattaaactcagctttttgtaatagatatttaataaagacataactcttaaagatattaacttgtacagcagacaaatatttgagcaacaaataaaaatttttaagtaatataataagataggatttaacaaaattaatgagagtgccartgagaatcctcactaaaataactggaaaa

SEQ ID NO: 398521 - DNA, 574 bp, Homo sapiens
atagttatatgcatctatttctattaatatgaatacatttatgcatatatcaactagtttttcattttctcctctcccacttctctatcatctgacataaaatatgttaatagawtttaactttgtatctcagtatttaaattataaaatatcaaagggagaatatgactcagaagaagaataaatatcactcaaaaatagataaaaggactttgcatcctctgttgaggagaaggttgtctatttcagtattcaagaagaataattgcattatgtttggcaaaggcctaatttttctgttgcctttatttggaaattaatttaacaatatttgaaaaaaatatgcatgtggatgccaaataggcaaggagtagcctatggaggatttgtattgggtcatctttactaagctggagttatatttcccagaatttctcattctgtattgttctggctcaatgtgggtcacaagagactatttgcctgagttttggaaagcaaaagagccatggaagccatattattttatgctccaatggtcaagacaataaaagcagacactgctgcagctctc

SEQ ID NO: 398522 - DNA, 644 bp, Homo sapiens
tttttaagtctgggctttgttatatcaacacaatggaattaggtactctgtcctatttcgcctcaaagtttccatattgctttttacagcatctacaactgtttctgttactaatttccttgtaatttttaaaatgtaactgaggtttctattctttacttatttagaaaaaaatacaatttcttggrttacattaatagattaatgtaggatatgacacagcaatggtaagcttgctagtttatttattaggacaccccccaaaataaatatctttttaagttctcatattattttcatctggaagtctagaactttttatttgaatctcaattataatatattttaacttatatttctaaatagttaataggtttcccttgatgtgaacttttcaagccatttctttttgatagctattacttagattttattcttaatatattatattgttagtatgtccaatatatcagtggtatctacaaaataattcctgtatttaattttcttttatatttttgttgccatttttatttctccatatatttcaaatactctaatattctttaaagttctccttattggtattgcattatttaaataaaccacaagcataattctcctccaacaaaatgatttgtacc

SEQ ID NO: 398523 - DNA, 644 bp, Homo sapiens
tttttaagtctgggctttgttatatcaacacaatggaattaggtactctgtcctatttcgcctcaaagtttccatattgctttttacagcatctacaactgtttctgttactaatttccttgtaatttttaaaatgtaactgaggtttctattctttacttatttagaaaaaaatacaatttcttggattacattaatagattaatgtaggatatgacacagcaatggtaagcttgctagtttatttattaggacaccccccaaaataaatatctttttaagttctcatattattttcatctggaagtctagaactttttatttgaatctcaattataatatattttaacttatatttctaaatagttaataggtttcccttgatgtgaacttttcaagccatttctttttgatagctattacttagattttattcttaatatattatattgttagtatgtccaatatatcagtggtatctacaaaataattcctgtatttaattttcttttatatttttgttgccatttttatttctccatatatttcaaatactctaatattctttaaagttctccttattggtattrcattatttaaataaaccacaagcataattctcctccaacaaaatgatttgtacc

SEQ ID NO: 398524 - DNA, 524 bp, Homo sapiens
cagtagctacaagcaatctgattacaacagccttgcagcgttcctgagcagtttctgtggtttatactgagttcctcctctactgtagtctgtgccgcaaatctaccacagatttggctaaacagatgattttcttaaaaagaattatctctggtggttttgccatattccgggcaatactatactaaacagtcataatggaaatactagcacaagacctgttttttctaagctcagtgcaatatctgctgccacttgaatttgatcatttaaagtcactcatsatgcaggcgtatgttacgatcaaagactaaaaaggaactgcaaagcaggagaggacagatgaccatgcttttataaactacagtttatgcaaaaaccagtttttcacggggctttaaaaaaggggagttgtattttcgtgagactacagtagactttttcaagaaagtagtgtattaaaaataaaaacaggataaaaatagaaaagaaatttatgaaggaaattcagagatgtgattata

SEQ ID NO: 398525 - DNA, 578 bp, Homo sapiens
taatcttaaaaaagaaaaaaaaaggcagggaagggagacacatcaaagaacttatgtattgcaactggcataggaatcacagcgagctgtgaatttggagagagtaacatcagaaacaccaacaaagagttacatgtttacaggaagaaatgagttgcagagggagtataagacactatggccccattttacataggaatccagtaaccatttgtaaaatatatatatatatatgtatacayatatttttaagaggcagcatgtaaactatgcttgtggtgcagtttgaaaatgagaattttttaaagtaaaattcttgaaaatattctttttaaccacaccattcaaagcttcagtgaatatttgattcaggccccaaacactgtatgttgccagtttttctcagcttaaactctagtgccaagctgattttaacaacctctacctttataagcagccttttcatgtatatttacttgaaaatggcatctcagcctcttgtcacctcatgttctcttccagaccattcacccaggtcagtttcctggcaggtcctcaacaagcagttgggggttctt

SEQ ID NO: 398526 - DNA, 577 bp, Homo sapiens
ttactcttttggatataaaacagtatacctattgttaaatgtaagatgcaatttaactcgtacatttgcagtaaataacaatattctgtctctgtttttacatggattatttttggttttayattgatttgacatattgcatgattgctattcactccctcttcattaccttgcttatagtcacataaataagtacatagatgtattatcatgcacatttttacctgggaaggatttgaaaataatttaaaaatattaatttgttttgaaaaactcttgtgcatttgttcggagtgacgttaaaagagtgataaaaatttagacaattcagataatgagccctggaatgctcagtaattagcacctttgagaaggctagagtcctgaaaataagcaacgcactccccgcttccctaccatgctgttattattattgttccagtgtacattaacctgttgttttctacagccaccacacaataaatagaaagccattggcattttttgaagaaaagttttatgtttcattcaagaataaattctgtcagcaaccgctgctgcaagcgttacctatgaa

SEQ ID NO: 398527 - DNA, 607 bp, Homo sapiens
gcatggttgcttaatatctgtaaatcagaatcagggtcaatatctaagaatgtcccattaactctaaagagaaatgctcacttttatttggaaaaaaaaggcttggcagacaagctgggaactaccagatggaggaggctgtgccacatagattataastttttccctctcttcttattgatgtcttaagttgaacatgttccatctgtccactctcagtaatgaatagcgactttttctacttgtaaaggtaacacattccatatagggcaaacttaacctcaagcatataatgaaatgtgcaagactcaatgctctgctactgcgtagaatttgaggcattatgccagggaagtgtggaaatcaatactatttctataacagagcatatttttacttggagagggcattagaaacattctctcctaagacctctcagttttgttctccactagggtctaaaagtctgagtgataggttgtagaaattgtttgaatctgatgaattttttaaaaaaattattagttctataaaaatgattatttaaaactaattaattttctaccacccacagtaaagtactttgctagcacactagtaaacaatt

SEQ ID NO: 398528 - DNA, 532 bp, Homo sapiens
cctcagtcttgacctcactagacaaaagtgcagacctttgtatccagttgcctacttgacatctaaatctggatgtttaatagctatctcaaatttagtttccttagtacggaactaaaaaagtaccctcctccctgcacactcctcaccaacacactcttttctcagttgcctctatccccaaaatggctccacctgccatctgttttcccatgccaaacatctgagtgttattcttgattttttcattttctctatctgcattcaatctatcagaaagytttcaggggattctttctactctcatggggcttgagaaatataccttggggccttggacatgatctgaatggtaagattgattagaatatatctaggaactacccacattttttctctctctccttccactacacttctcaaaatgatcgcttaatgcagcagcatctccaggaataccccacaactgcttctctcacaacagccagagtgatcattagacaacataaatcagatcatgccatcccctgtt

SEQ ID NO: 398529 - DNA, 586 bp, Homo sapiens
tctggtccctaacaccaatcaggaagagcctgaacacactctctgagggagcttagatgaggaccactgctgtggaacctgtcaagaattgccccagccatgcgagtgtagaggtggatacagagctgtgggttctgctggaacctcrcagccagaaaagtgcttcaccctggaaactgaaaactgacccatgtgtggaaaaccaacttttccaggagagagtcatctcagagggtactgtaagcctatcctataatcatcttccgggactgcacttgacactacaggctttggaatggaagtatctcaggtctcaatacctctagtgagtgtccttcccatctttcctattggaacaacagaagaggcagagattgatttctttttaatcaacagtttataagggagcagcatatccaactaagaaatgttataaggtttgggctgatgaaggtggttggaactagatggagtgtggctggccaagacccacagactgcaattaaaactgttccagaggaaggagattcatggaattcatttcaaaatactctaatctcaattcacttcaccatctgggtgtagg

SEQ ID NO: 398530 - DNA, 595 bp, Homo sapiens
tcctcagccagcttaggagtctgacagagatcgtgttgaatctgtagatcaacacaagttgatctacacaagttgatcaacacaagttttggaagtgttgccatcttaatattaagtttatgtatcagaagactcagatcatttgcaaaggctcttcaactgccttaggtcaaatccacccacaataggtcttacaaggtccrtcttgatccagcccctagttaagtaaccagttgcctctttggcagcaccccctcccattgccaccacaaaatacactatccgccataaacctgcctttggttctttaaatatgtgatgctctcttttatctccaggtctgtcctcacccccatacactgcacattctctgtgtcaggggctttctcccttgtgccccatccctgattcacttcttttccttcatgtctcaggtcccttttcactttctctgagactcacatcctgagatatgcagctccccatggcctacatgatttgcctgcctttattctttcatggtggactttagtttatttgatggaaaacatcgttcaagacttcaaattggttgaaatgtcttgattgaaatgaa

SEQ ID NO: 398531 - DNA, 595 bp, Homo sapiens
tcctcagccagcttaggagtctgacagagatcgtgttgaatctgtagatcaacacaagttgatctacacaagttgatcaacacaagttttggaagtgttgccatcttaatattaagtttatgtatcagaagactcagatcatttgcaaaggctcttcaactgccttaggtcaaatccacccacaataggtcttacaaggtccatcttgatccagcccctagttaagtaaccagttgcctctttggcagcaccccctcccattgccaccacaaaatacactatccgccataaacctgcctttggttctttaaatatgtgatgctctcttttatctccaggtctgtcctcacccccatacactgcacattctctgtgtcaggggctttctcccttgtgccccatccctgattcacttcttttccttcatgtctcaggtcccttttcactttctctgagactcacatcctgagatatgcagctccccatggcctacatgatttgcctgcctttattctttcatggtggactttagtttatttgatggaaaacatcgttcaagacttcaaattgsttgaaatgtcttgattgaaatgaa

SEQ ID NO: 398532 - DNA, 584 bp, Homo sapiens
aaataatctaagcacatggaaagctatgtttatggttttatgaaccaccacatatcattcccttaaaatccaagatgtgtaactcaacattttattgcagattgcctcattttccaattattttacttagttttactgattctcaccatctaagtgatcatttctaggcaagaactttgtcttatggcacataaatatagtagtagaggttattatatagtatttatagtacatacaaaagctataaaaatgggaaccagtgattagaaatactcattttcaaccaatttacaagatggaaatgttctcaaaaacattgtggaacaaatagtacaggagaagctggatgcatataaattagaaattaagaaatcatagaatccactcaggctcttaaaaactccagatcctttccttgtattttcttatcgttcctttcattgcttaagtttcttttattgatytttctcctttattattataaaaacaatgaagcctttggctcactgaagatgaaataaacaaataaaaagaagcttaagtttcttttattgatctttctcctttattattataaaaacaat

SEQ ID NO: 398533 - DNA, 566 bp, Homo sapiens
cagggccaatggctgtactgtccacagtgtgggagttggagacccctcacacagacagttatttggataaacatagaaaactgaccctctggtcttaaagcttacgtttgttttatctgagttscttcctcaagaaaggaccccccaggcttctcaaaaagtatcaaagaactgaaactcaccagatcactgcatccaatgagatgccagacccctcattttgtttccttacacttctctagttcctgttttccaatacattgttatatttcttccctgctatataaagccctaattttagtcggtcagggagatggatttgagactgatctcccatctcctcgactgcagcacccaataaagccttcttccttggcaatacttgtctcagtcattggcttgctgtgcagccagcagcaggacctagaccaaaccactgatattcagtaacattaacaacaggggtacattgtaagaaatgtgtcattaggcaattttgttattgtgtgaatctcacagagtatacttacacaaacctagatggtattgcctactgtacacttagg

SEQ ID NO: 398534 - DNA, 543 bp, Homo sapiens
tttctttcattaataatctaatgatagcatttcttgtgatagttataatagatttcaaatccatttaaactttttgaaatgaagaatttcaaataatggtaaatctttcatttgtagaacacacataacattgctagggctatgacgcagctactagcttggatgactctaaaatgcacctgaattgtaaaatggacagaaccctcagatatacgtgcagacagttttgcccttgactttgatctgcacrccatactctttgggcacatggaacatccacagtggctactatatggatgtccagttgataagagtatttctttccttatagtagagcagtaagtgctggatgtttctccagttcactgcttgcagagactttggacacactgtcaagtggcactcaaaagtgccactgtctgacgcactgaggaagaaagagctgaggctctagagactattccagaccccaccctgaggatttaagtgatttgtgtagtgtgtcacatcttgaaccctcttatagcagatcactatgtgctg

SEQ ID NO: 398535 - DNA, 469 bp, Homo sapiens
aggatgcagtgagccgagatcacaccattgcactccagtctggggtaacacagtgagactcsgtctccaaaaaaaaaaaaaaaaaagaaccatatgggagtggcagtgtgggctccaaaatccaacagaaacataagtctctccatcttttaggagttatgtaaatttgttgcttactttcttcaaacttcattttcctaatctttaaaattgatgtaatagtattcatctcatagactatatgggaatctaatggaataatgtacttagcatagtaagtactagataaatatcagctattgcactgaaatagtgttattataatctgaaatttagactccctatataaatagttgatcatctgaagatagttctcagagttacatagaagaaagttttataagacttaccaaagtacaatccatagcaaattaatggtaagttaaaggatagcctaaaaccaggattt

SEQ ID NO: 398536 - DNA, 618 bp, Homo sapiens
gaggttgactttttgaaaatttgcttatagagattattggaaactgtggcaagaatttggagtggataaaaagaaactgaagcaatagaaaacagaatcaaagtcattatttactcaaggaaaaggaaaaaccaggaagggaaatataatcatagtgcactacaattctcggctttgaagaacactttcacaggcataataatggaaacgtcaaatactgattttacccaaaattatgagataattaattagacatacacmctgggtacaagaaagaggagaaatggagatgttgttgatgtaagaaaattaaatccttgtttgtcataaaaggtactcggtggctaatatgtaaaattaatagcagtctgcacacatttcacttgagagacacaaatgcaaaagaaacatttagaaggtcaaatttggttggctcaggggaggcaaagtaggagaagttgggagtcataggacagggaaccatcctatataataatactatttgcctttgtgtgtatgtatcatgttataaaaataaataatttttaagtaaaaataaaagggtatcacgtgcaagttcacagtcctgggaccaaatcagtgaatacagtatttatg

SEQ ID NO: 398537 - DNA, 570 bp, Homo sapiens
aatgcttacacttcaaaccttgcaatataactttggtaactaataaacaggttaatgactttctaatgtctacaattataagtagataataggggaactcttatttgtagttttttgtaatatgaatgtattttttcctttgaatttctcacatttatattacatattttatatatatatatatatatatatatatatatacatwttttttttttttttaagatagagcctcactctgtcgcccaggctggagtgcagtggtgcgatctaggctcactgcaacctccgcctagcatgtgtgtgtaacttagggaactcatcataaaattttcaagtttcttctatcattgttccttaaacttataaattcatcaagcctagctacttcaagggttttgtcttctagctgtaaagcatcaagttgctgaatatagtcaactacgtcagctcatgcttcatgaaaatctaaaacgtttttgccaaatatataagtgttttctaaaaaattaactagtgaagcctagcatttacttagtcctcttcaagctcacaaatttaagtccaattgat

SEQ ID NO: 398538 - DNA, 645 bp, Homo sapiens
tttcaagtttcttctatcattgttccttaaacttataaattcatcaagcctagctacttcaagggttttgtcttctagctgtaaagcatcaagttgctgaatatagtcaactacgtcagctcatgcttcatgaaaatctaaaacgtttttgccaaatatataagtgttttctaaaaaattaactagtgaagmctagcatttacttagtcctcttcaagctcacaaatttaagtccaattgattgagggttgtacctttttttgtacacaattcatggagtttcattactgaaaaattgaattaaaaacttctcacagattcaataaatttctactgttcctatactcagtctatgctatctcttagttgtatttaaattccaaaaatgtggttagtgtcactttctattttaaaagaggtttgaagaggcaaatttttccccatgtgtaataaccagaccaaattgcaaccagcttggaatttattgaactcagaacatgaatggtgaatgtacacaatttgactttctgatgatcatgtaatagtctacaaaatgcattgtgatatttacctgctgaaacaatgtttccactttgaaagccttttttttttgtttttttaagcctaaataaaatcttactccat

SEQ ID NO: 398539 - DNA, 645 bp, Homo sapiens
tttcaagtttcttctatcattgttccttaaacttataaattcatcaagcctagctacttcaagggttttgtcttctagctgtaaagcatcaagttgctgaatatagtcaactacgtcagctcatgcttcatgaaaatctaaaacgtttttgccaaatatataagtgttttctaaaaaattaactagtgaagcctagcatttacttagtcctcttcaagctcacaaatttaagtccaattgattgagggttgtacctttttttgtacacaattcatggagtttcattactgaaaaattgaattaaaaacttctcacagattcaataaatttctactgttcctatactcagtctatgctatctcttagttgtatttaaattccaaaaatgtggttagtgtcactttctattttaaaagaggtttgaagaggcaaatttttccccatgtgtaataaccagaccaaattgcaaccagcttggaatttattgaactcagaacatgaatggtgaatgtacacaatttgactttctkatgatcatgtaatagtctacaaaatgcattgtgatatttacctgctgaaacaatgtttccactttgaaagccttttttttttgtttttttaagcctaaataaaatcttactccat

SEQ ID NO: 398540 - DNA, 582 bp, Homo sapiens
ttacataagttaacatcaataacattattgcatggactttgtgagtggttttggaaaagaccttttctacttcctcattttcaattctgttcagcataaagtggtcccaaactaaatttcaatgaaatgggggaccacttgtgtccctttagataaatcacatacgtgggaaacagactttctcacagttaagggcagctttgatgactgacaaaggccagttcgcagggagggagtattgtcctgaacctggtaaggccaccttctggataatgggcttctgycagcagccagcactcttcttttctgaatagagcttagataatataggaagagattttgtactgcaattttctttatggaaaaaaagcactgggtaaggagaagtccttagtgttcttcagggacttgacttttatcctaactctacgtggtgaattgagcatgaaataaagacggctatctttaagttacaaaagataaagatggctatctttaaaatatgaaattgtaatgtttaaacccaaatcccacacaggcagaaatcttgattgttccaaaattggaaccattagaatgtta

SEQ ID NO: 398541 - DNA, 624 bp, Homo sapiens
ttaatttggaggctttcaatatatcccagtagagttgagcaggcagttggaaattctggtttggagctcagaggagaaatctggactggagacagacatctgtgactcatcaagggtagatagtaataaaaactggtgcaaatgagactgtctaaggacatagaataggaagcaaaaagagcatgggatataaccttagaactgtaatagttacttggcaaagaggaggatattgcaaaggaaactgaaaaggaaagagcaataaaagaagtaagattcagactaggggatgtgaagtgatgcaacacaggaaagaatttttcgaaatcagagaagagcaattaattgtagtaagtatggaaaaagctcaattcagttgaggtctggaaaatatccattggaattaaagatgcagatatcactgacaaagctttggcaaagcaatgcagctgacagtaatggcaaaataatagtcatgagttaattaagttaaggactaagaggctgatggcagcagtgagtggcaccttttcctttttagatgagagagataaaggaagtgttgaattcaaatgacattcaacrcttcaactattatatgtcccaaatttaaaataacaatca

SEQ ID NO: 398542 - DNA, 580 bp, Homo sapiens
taccaaaagcatattgatgaaaaattaaaatgacaaagttttcttggattattggtctgttcttagtaacagattgttaaaggctttttttggggggtggtgcggaattgctgtgctttatgtcttatgacgtctttttttttttttttttttttttttgagacagtcttgctctgttgcccaggcttgagtgcagtggctggatctcggctcactgcaacctccgcctcccaggttcaaacaattctcgtgcctcagcctcccaggtagccragtagctaggacgtgcaccatcatgcctgactaatttttgtatttttattagagacgggatttccctatgttggtcaggctggtgtcaagctcctggcctcatgtgatctgctcgcctctgcctccctaagtgctggaattacagatgtgagccgctttgcttggccattatcatgttttctttgttttttaatttaatttaattctaagttctggaatacacttgcaggacatgcaggtttgttacataggtaaacgtgtaccatggtggtttgctgcacttatcaacccatcacccaggtgttaa

SEQ ID NO: 398543 - DNA, 542 bp, Homo sapiens
ctgtttagtacaaaagcagtgaatcattaattgaatatccgcacactagctcaccatatagactcagtaaaacaggtcatttattgaaatattgatgggccaggcgcacagtggcccacgcctgtaatcccagcactttgggaggccgaggctggcagattgcctgagctcaggagttcgagaccaccctgggcaacatggtgaaacctcgtctccactaaagtacaaaaaattagccaggcatggtggcgggcaccagtagtcccagctacttrgaaggctgaggcaggagaatcgcttgaacccagaaggtggaggttgcagtgagccaagattgtgccactgcactccagcctggttgacagagggagaccctgtctccaaaaaagaaaaaaaaaagaattattgataaaacaacaacaacaaaaatattcttacttatatcattattcactggacttggcagttctggcagttcttatagatataaacacattagtgggtgtaaaaatttaacaatataaatagtaatgctatgaatg

SEQ ID NO: 398544 - DNA, 323 bp, Homo sapiens
gcacattttggtaatatttggcatggtatcaaacagcaatattttaaatatattgaatatgtgatatcaaatagcaatattttmaaatatattcatttcattacatgatgagcttgtgtttgttggtgtttgtttgatgcctcttctgtgacataataaacactggctttggggaaaatgtgataacaatctgctttggctaggaaactcatatctagatgatgagggaccaggcggtactgatcctcccaacagacattcacagcaggaagcacaggaaagtacatgcatttgctgcttactgattatctattagcaatttc

SEQ ID NO: 398545 - DNA, 385 bp, Homo sapiens
acaggaaagtacatgcatttgctgcttactgattatctattagcaatttcactctccycccttttccacaggtccatgggagaattctccgggtgtatatctgaccccctcctctccctttcattttaatggtctaggagaagcgggagagataggacattatcctgaaaaggatcattggttcacttatttggtggctctcaaaaattttgagaaacttttattgggcctggacccaataaaaagatataatctaaaagaatctacaaaagatagaatctaagagaagtggagagagttgatttgctctggaaatgtactgggctccaaagagagctctccatcctctcttttactttttctccataagtaggaatataaataa

SEQ ID NO: 398546 - DNA, 592 bp, Homo sapiens
tactgattatctattagcaatttcactctcctcccttttccacaggtccatgggagaattctccgggtgtatatctgaccccctcctctccctttcattttaatggtctaggagaagcgggagagataggacattatcctgaaaaggatcattggttcacttatttggtggctctcaaaaattttgagaaacttttattgggcctggacccaataaaaagatataatctaaaagaatctacaaaagatagaatctaagagaagtggagagagttgatttgctctggaaatgtactgggctccaaagagagctctccatcctcycttttactttttctccataagtaggaatataaataatacatttcaaaaattgaaaattatgattacactcagagaagaaattagaaaggctcaatatgtaaggaataagtttagccctttttaagagatgtcgtaagtgtttggtaatacctcacattcattcaaactaatcctgagtataagcttgaagatgcaaaactgtaaagtgatggtaaatgaggaagctcttatgtaggtaattttttttctctgtctaaagtaaaaaatgt

SEQ ID NO: 398547 - DNA, 592 bp, Homo sapiens
tactgattatctattagcaatttcactctcctcccttttccacaggtccatgggagaattctccgggtgtatatctgaccccctcctctccctttcattttaatggtctaggagaagcgggagagataggacattatcctgaaaaggatcattggttcacttatttggtggctctcaaaaattttgagaaacttttattgggcctggacccaataaaaagatataatctaaaagaatctacaaaagatagaatctaagagaagtggagagagttgatttgctctggaaatgtactgggctccaaagagagctctccatcctctcttttactttttctccataagtaggaatataaataatacatttcaaaaattgaaaattatgattacactcagagaagaaattagaaaggctcaatatgtaaggaataagtttagccctttttaagagatgtcgtaagtgtttggtaatacctcayattcattcaaactaatcctgagtataagcttgaagatgcaaaactgtaaagtgatggtaaatgaggaagctcttatgtaggtaattttttttctctgtctaaagtaaaaaatgt

SEQ ID NO: 398548 - DNA, 505 bp, Homo sapiens
tcagtcctatcagattagggcccgacccttgacctcatttaaacttaattactccctaaagatgttgtgtccagatatagacacattgtggggtaaggcttagacatatgagttttgtggtgacacaattcagtccatagtcactgacaatccaaattagaattgtcagtgtcttttgatgaataggcagcatgctttcagagtactcaactgagcagaagtacaggaataataatacattcagcatgctcttttctttaatgagatcagtgagatccttatattagcatgagaaaacattctcctgcatagactaagataactcgttttcaagctrtaagaagaaacagacagaaggagggggctacctgttatgttgtaatgtttaacattaaggatctatttaatatttaaaactttatatagaaagtttttcaaccccaggccacatttgtttacaaatactatccaccaaaatgaattaaatatatctcattatagaagg

SEQ ID NO: 398549 - DNA, 586 bp, Homo sapiens
gggacaaggggtgatatgaagtgaggagcatgggtcttggagtcagacctgaccgggcttgagtttcttcctttcccagttgctaactgtgtgaccctggaaaagttgcttaacctcctagagccttggttttctcacttgcaaaatgaggttagtggtacctgtcacacagggttatcatatggatccaacgagaaagggtacataaagtgatgctgagtgctgtggttaatggcatcatagccaactggccactctttcctctcctccactctgcactttctgcaccccagcccagcagttctcaggtctagttacacattagaatcacctaggagcctttaaaaaaggtgcaaacrtccctaggcctcactctagaccaattaaatcagaatctgggagtgtatacttgtggcatctttacttttaaaattttctctaggtgagtctgatggatgctagggttgagaacaactctaagtccccagggttgcctaaagtccaaaaacacttttcttttaagatcagaggaatcttattttagtgcttgtgggcagatctctcattagtgatggaatgggattta

SEQ ID NO: 398550 - DNA, 548 bp, Homo sapiens
gaccaccttgtttttttccaaatgcaggagagaggaaagtagtattagcagcagttcaatccagtgcacgaaatatttgttgcctkttgggatgcaatactacaactcatttacacttcacacatttatcacttttcttacttttgatagattatcttcccagccattctagccaaactgatcatctgcttctgaattcccaaggtgtttaatatctttcctactgatatttccatttaaccatatggaaatggttaaatggtctgatatggttgtttgtctatctgttgggcatttattttgtctctccatcagaaaaaatacattccttaaaggagagaatcatattttatatttctgttttgtcctctatagcacctatcaggtggccagagtcatagtagggtctgagaaaattcttttccatttgcttaaatgcaaatgacattgggtaaacttgtactaagtgacacagattgtcacaaaggtctacaacagagcatgctgattatatacatatcatcagaggacagacttgagaaactcag

SEQ ID NO: 398551 - DNA, 548 bp, Homo sapiens
gaccaccttgtttttttccaaatgcaggagagaggaaagtagtattagcagcagttcaatccagtgcacgaaatatttgttgcctgttgggatgcaatactacaactcatttacacttcacacatttatcacttttcttacttytgatagattatcttcccagccattctagccaaactgatcatctgcttctgaattcccaaggtgtttaatatctttcctactgatatttccatttaaccatatggaaatggttaaatggtctgatatggttgtttgtctatctgttgggcatttattttgtctctccatcagaaaaaatacattccttaaaggagagaatcatattttatatttctgttttgtcctctatagcacctatcaggtggccagagtcatagtagggtctgagaaaattcttttccatttgcttaaatgcaaatgacattgggtaaacttgtactaagtgacacagattgtcacaaaggtctacaacagagcatgctgattatatacatatcatcagaggacagacttgagaaactcag

SEQ ID NO: 398552 - DNA, 491 bp, Homo sapiens
cctatcaggtggccagagtcatagtagggtctgagaaaattcttttccatttgcttaaatgcaaatgacattgggtaaacttgtactaagtgacacagattgtcacaaaggtctacaacagagcatgctgattatatacatatcatcagaggacagacttgagaaactcagcatgctcatttttggatttgagctgcatgaacagctcttggtattgattaatggaaagatacaagcctttagttgtttggatggaaagaaaacatctctagcattcttttttctttgaactcttagaaactgaaaagtcccaacagyccatgtccaaaggcgtaactgcagacttcccaggcagctttggagatcatccttctccaattgtggtacttggggtcaagtgtagaagcagggagaccacttaggaggttattgtaataatctggtgaaagaccatgacactttgcatccaggttggggcagtgggagtggtg

SEQ ID NO: 398553 - DNA, 446 bp, Homo sapiens
tgacacattcgaaccccatgtgagttagagttcagtatgggatcagaggctggtttactcttttcaccgggaagcgatcttgagaagcctgcggatgccacttcccatgacctgaggggctgtgttttatggactgcttttgatctgaaatctagagatccctgttttcatccttgtaagcctccagtaactcaatcacagtagagcagtccccatcatctccagcaatttattaatcatgttcaatgccagacaaggccttaaaaaaacaacacttactcatcagcagaccactrgcagcatggaaatgctactggcttctctcggagaatctcctatactctgcgaacagcatgagtgtctgtgtgtgtgtgttttagtgtgtgtgtgcctgtgtgtaggcacagaactatggaggttttagacattgtcgttcgcctgctggt

SEQ ID NO: 398554 - DNA, 549 bp, Homo sapiens
gaaaatgacatagattgctaacagagagaatggaatatgtcaattctttataaatttctcaataaaacacacacagatcatttgctttcaagaaactcaggtggcgagaacccttttgtttgttatgaagttcttttaaattttatctaacaagacttcaatattatatctgaactaagagtctcctttcccatcttcattccatatttcttatccacgatagacctagataggtatagcaaaagcaaaatacgggcattacaagttgacctcaaaagtggttggcagctaggtagttttagaattcaatggaagagctaaagttccagccctatcacctcctagctataggatcttaagcaaataatttgacctcttcaagtctttgttttctcttctgtaaactggggataakgttacgaattcccaacgttgttctaagactgaatcagatgactcagcactcaaaagtgatagtaatttccaaaactaaggtaataataatagtgataatagtaactgtttgtagaaaatgcccccaaaaggcaa

SEQ ID NO: 398555 - DNA, 569 bp, Homo sapiens
tataatattaccattgactaccgttgggtgggtcccaaaggtcatttctgtggaggataatagagcttttcatatgagacactttcagctgcctagcagaggcagcacactatgacaagtggccaaaaaaaagtagtgaatatttttatcgtgagttttcatggcatgaatcaactcattcttcagaagtctgtatttttttctttctattatggcatgtctgtcatttcctttgactctctggctggtcttcatctcagcaaagtggaaaaaacatattttagatgggaaaaaatgggaagaaactgaaagagggaaaatatccctaatacaaggagaaacacaactcyagattccctattgccatatggaacatttaggatttcccaggaggaaacacgttcaaccagttgcttctgttacctccggactaagagggatcctgatagtagctgtggctggtgaaggaacacctctattatctggctctgggtgctgcagaaccaggcagttaacaggacaagaaaaccaaatgatccatgggtgcaaatgtgcttttgccaaagcca

SEQ ID NO: 398556 - DNA, 566 bp, Homo sapiens
catgtcacaggtcattctaaaagggaaacccaactgagaatgaagagtgtctcagggcagaaaaaggaaggagcaaagacatccaccttggcactagacaatttgggtcctgatttgacagtctttrgtaattagcataaccatcagtacatcatggaagcttaccccatgtaccatttcttagctctcctcactgttgtgattgcaaaggtgcttggaaggttacttgatgagcctctttctgctgctccagacccagactgtgagttccatcaaggcagggatctttctcagctctctgttttatccccagaatgggacagagcactgcacgcatgggagatactcagtaaatagccactgagtgaacaatggaatgaatgacaaatgataagggttcccaagttccattctatagaataagggtcagcaaaattcttccataaagggcctgatagtcaatgtttttggcttcaggggctgtatgatctccaccaccaccattcaactctgcctctgtggcatgaaagcagccataggcaataggtaaaagagtggacatagct

SEQ ID NO: 398557 - DNA, 587 bp, Homo sapiens
  misc_feature (1)...(587): n = A,T,C or G
ggaatgggggccaccaagagtgccaatatttagtatctttaactgagctcaaagtaataactacttaactagaatcagtgtgcttcttgatatctaggaaaaaaaggcaaaggaaggaaagaacaggatttggggatgtaatttgagattaataaatgattcactcaatagatacatatggatcatagcactctgcttgttgtgcatggtatactgtgaaatgtaagacacaatttcagcctagagtagcttaatctagttatagatatgggaattccaaataccttttctacaacaagagttcaaagtctttcataagtcaatataccaaaacatgaataaatagttaaataataccacagaagagtaaacatgagaagacatgcatttaaatgtatgcagagcacttattgctttggatagaattcacatgttatccatgcgttgaytacaagatacatgcacatctctaaacacactcataactgaattcagcttaatagaaantaataaatgatggaacctagtgtgcctgacttttctcagatgaaatatctggctggtgcaatgcagtaactactattaaa

SEQ ID NO: 398558 - DNA, 590 bp, Homo sapiens
cttaatcttagtgagaatgaactaagacccgcccccccctccctccctgcctccctttattccttcctttggctctccatttatttatttacttgtttagcaaagtttattgagtacttaktctgtgtcaggcacttgtgtaggttttggtgaaacagtgaacaaaacacacatgttttctgcttttatgggccttgcattccagtggagatggccaaaaacttggacagttgaagaaacagaaagaagatgagtatggttagagctcagtgggaaagagagagagtaatacgggtggtaggagacttacgtagaggcaagaggtccagttcccagttagacgaaaaaccaagagcagatagaagtttggcgcatgactttacatttgacaacaggtaacagttaatgagcccttaatcagtgccagtgactgtctaagcccttgtcctgttttaactcatttaaactccacaacaccactcaatgaattcttaaacatatctactaaatagaaaaacaatgaatccaacgtcaggttgacacatttttttcaaactcttttattgatttaacagtgagttagaacacaa

SEQ ID NO: 398559 - DNA, 607 bp, Homo sapiens
caagtaagtacatcctcagcatttagatgcctctacagaggaaaatgagactcacccaaagtgggaaatgtttctctttcctcatctacttagtcatagaattttcaaaaagactcttgagcaggatgatccaacagaccttcccaaagactgacttaagaacttatcttttcagagcacaaggcaagtgagggctacccaggttttttttcagagggcaggagctctmagcacaaaatctcactgctagcagttgttcctctgggcatcttcctcatctccaagagggaaggatcacccgctcctcacagcctctaaacttccctgggtttcctgcagtctgttttcccacctccctgagtctggctgccgaaccctgtgaagctacttctccagggtagtggttctcaaactttggcatgcagttggagggcttgttaaaatcttgctgggctccatccccagtttctgatttagaaggtttgaggtgggggccctagattttgcatttcttacagtttcccagataatggggatgctgcttatctgggaacaccgctttgagacctgccactcccaaaaaacctttcttgcaactacacactaa

SEQ ID NO: 398560 - DNA, 607 bp, Homo sapiens
caagtaagtacatcctcagcatttagatgcctctacagaggaaaatgagactcacccaaagtgggaaatgtttctctttcctcatctacttagtcatagaattttcaaaaagactcttgagcaggatgatccaacagaccttcccaaagactgacttaagaacttatcttttcagagcacaaggcaagtgagggctacccaggttttttttcagagggcaggagctctcagcacaaaatctcactgctagcagttgttcctctgggcatcttcctcatctccaagagggaaggatcacccsctcctcacagcctctaaacttccctgggtttcctgcagtctgttttcccacctccctgagtctggctgccgaaccctgtgaagctacttctccagggtagtggttctcaaactttggcatgcagttggagggcttgttaaaatcttgctgggctccatccccagtttctgatttagaaggtttgaggtgggggccctagattttgcatttcttacagtttcccagataatggggatgctgcttatctgggaacaccgctttgagacctgccactcccaaaaaacctttcttgcaactacacactaa

SEQ ID NO: 398561 - DNA, 544 bp, Homo sapiens
ttggagggtggaaagcagtccacctgtaagttcatttattccacgtgtatttgttgatttcttactatatgctgggcaccattcccagcacaggggctatcacagagaacacatgacaaagaccccttattcagatgatattctagtggggaaggcaccacttctagaaattagttatgaaaaagcaggcacccttttatgtttacgtgtacatacatggaaaggaggcattcatgtttttgttttctactgcccttctcttgagcctggaaggttttcctttgtactgatggctagcattcctcttagctttgtggagatttgccttgcaaacaaagagttccctctcttccctcttgccactgtttaccatggggatgcagttaaggatcatgacaagccataaaagatttctcctaactctttcaagtatgactatcctgattatagcctccagrtatggccagccagaatcacacactatttataggcttaacccacaggcagaattagtcatgtatcacacatgactaaaatgcaagac

SEQ ID NO: 398562 - DNA, 544 bp, Homo sapiens
ttggagggtggaaagcagtccacctgtaagttcatttattccacgtgtatttgttgatttcttactatatgctgggcaccattcccagcacaggggctatcacagagaacacatgacaaagaccccttattcagatgatattctagtggggaaggcaccacttctagaaattagttatgaaaaagcaggcacccttttatgtttacgtgtacatacatggaaaggaggcattcatgtttttgttttctactgcccttctcttgagcctggaaggttttcctttgtactgatggctagcattcctcttagctttgtggagatttgccttgcaaacaaagagttccctctcttccctcttgccactgtttaccatggggatgcagttaaggatcatgacaagccataaaagatttctcctaactctttcaagtatgactatcctgattatagcctccagatatggccagccagaatcacacactatttataggcttaacccayaggcagaattagtcatgtatcacacatgactaaaatgcaagac

SEQ ID NO: 398563 - DNA, 538 bp, Homo sapiens
gatgctactgagaaacgaagccattttccttgttaagaatgtgcttgccaccctatccatttatctatttccttggcagtgctcactgttaatttattgcccaataaagcacagacactagcagagctgctgaaccatgcctagtggaagccccactatttcatcccagcaaaggcaactgacaagcccaaagcacaaacacaaacacattggatgccacaaagccgggctggctaaccccgactccatttgtcatcccagagacacagaagggagggcggtttacagccttctggagaatgtaggtgattaataaytatcgattgtcagaggaaatggagtaagtttggtcggttagccaactgccatgggttttctttctattggatggtaaacctcactgccgcagaagccatctcatggtgagttttgtggggagagaaactgagaagggaagtgatgaagaccgagatggggcagccttggctggccatggtgtccaccattcgggcagattgcctcctgttgcctcctgcag

SEQ ID NO: 398564 - DNA, 562 bp, Homo sapiens
tgcttgctaatttcttcatgtcttccatccagttcctcttcccctcaccatcctcctctctcctcacccagtctctttattcctgaagagccaaaaggaaatttctggaaatgaccttctaatcactcaagctttttctctaaaaaaatttaaygaatcttcccaagaccctaattagcttaacctgggatccaaggactgccctaggcctaaataatccatagatgcgcttcagggaccccatgagctagctgaaattatatgcaaaattgtgggggtgggtgcaaaaaaaatcagaaagaatgaataagacctactatttgatagcacaagagggtgactatagtcaatagtaacttaattgtaccttttaaaattaactgcaagagtgtaattggattgtttgcaacacaaacgataagtgctctaggggatggataccccattctccatgatgtgattattacataataagtgcctgtatcaaaacaggtcatgtatgccacagatatatacacttgctatatacccgcaaaaattaaaaattaaaaacaaacaaaaa

SEQ ID NO: 398565 - DNA, 577 bp, Homo sapiens
ggccactccagggtcaggtagatatggcttccttcccagctctgccaattcccagctgaaaacattcttaaacttttccagtgtcctgtaaaatgggaaaaccagacctgtcccattgtatcctagtgagaattacatgatgtcatgccattaaagtacccagtaccaagcctggtacattataaacatccaagagcctaggtcttagcttcttcacctagcatgacacctctcccacccagctyactataccactgtgagatgataaaagcacacaagccctgtcaatgctaaaatatttatgaagctatagagaatatttttttaaattttcaacctgaatgtctgatttttttcttctgtatagagacagggtatcactatgctgcccagactggactcaaactcccataattctccaaccttagcctccagagtagctgggtgccaccatgcccagcttgtgtaagagcttttttttctcgttctcagcattcctagatgcatgcatcaggacttcaattcatgcttcttcttgcctacaagtgggttctgttggtagctggaaagccaggct

SEQ ID NO: 398566 - DNA, 576 bp, Homo sapiens
atcagctttgtagatcaggccctttgccaaatttcttttcaaaggctttcctttgcagattttccttttctggtccttctaactttgaagcatctgactgtttttgtgccctgtgtgaaggagtcaagatgagctgagtcatagctgagctgtttatacttcttttatcttactaccatgtaaatcactcttcaattgtattctgcaagaacaaamcctgagaaaggttggaagctctgagctggatttgtgtgcctccttccctgcaggacagcttttcagttataagcttagaacttggagttaaacctgttgttccctctctgcttgctagagtctaagagcacgtttgcattcagtgtgtccacaataaaagttgtcttagtcctttacatggttttccatatctagaggatggtaaaacagaggtaatacattttgtgcctataggaaatggaatttaacaatatgcacctacacagaatgaaaatgaaaacctgacccagaagtaatactctcataaaatataaaactaaatctatttgctgacaagcaccacctggtgtgggtatttcc

SEQ ID NO: 398567 - DNA, 576 bp, Homo sapiens
atcagctttgtagatcaggccctttgccaaatttcttttcaaaggctttcctttgcagattttccttttctggtccttctaactttgaagcatctgactgtttttgtgccctgtgtgaaggagtcaagatgagctgagtcatagctgagctgtttatacttcttttatcttactaccatgtaaatcactcttcaattgtattctgcaagaacaaaccctgagaaaggttggaagctctgagctggatttgtgtgcctccttccctgcaggacagcttttcagttataagcttagaacttggagttaaacctgttgttccctctctgcttgctagagtctaagagcacgtttgcattcagtgtgtccacaataaaagttgtcktagtcctttacatggttttccatatctagaggatggtaaaacagaggtaatacattttgtgcctataggaaatggaatttaacaatatgcacctacacagaatgaaaatgaaaacctgacccagaagtaatactctcataaaatataaaactaaatctatttgctgacaagcaccacctggtgtgggtatttcc

SEQ ID NO: 398568 - DNA, 611 bp, Homo sapiens
ctgctcattgtccctgtatcaattagaacaggtgagagtaggttgtgatcaagaacatccccaaatatcagtgacttaaatcgactagggtttattcttgattatttaacttgtcccttccagactgtgggtagagaatgggaactctgctcattgcagtcactcagaaacacaagctgttggccaaccacatttttaagtattgccagatgcaatgacagaaagagaatttgagggtctcacatgggcacgtacttgctcatgccaggaaggcactgctacttacaattcaatgactaaaattagycccataacctcatacagtcacaaggagaacaagaagtaaaatctcactatgtgcccagaaggcagaaagccataaagatttggtgaacaggaagaatgttcaaaagacacagtatatgaatggtctacttcctttgaacagccctcagccaagtgaaggagatggacaaagaccatgcaatgagtatagtaaggggcgacttcatgaactaagggacacacatagtggaccaattcattcatgcaagaaacatttattgagtacctgcattgtaccaggtaccaggatcccaagaaaccaatcc

SEQ ID NO: 398569 - DNA, 611 bp, Homo sapiens
ctgctcattgtccctgtatcaattagaacaggtgagagtaggttgtgatcaagaacatccccaaatatcagtgacttaaatcgactagggtttattcttgattatttaacttgtcccttccagactgtgggtagagaatgggaactctgctcattgcagtcactcagaaacacaagctgttggccaaccacatttttaagtattgccagatgcaatgacagaaagagaatttgagggtctcacatgggcacgtacttgctcatgccaggaaggcactgctacttacaattcaatgactaaaattagtcccataacctcatacagtcacaaggagaacaagaagtaaaatctcactatgtgcccagaaggcagaaagccataaagatttggtgaacaggaagaatgttcaaaagacacagtatatgaatggtctacttcctttgaacagccctcagccaagtgaaggagatggacaaagaccatgcaatragtatagtaaggggcgacttcatgaactaagggacacacatagtggaccaattcattcatgcaagaaacatttattgagtacctgcattgtaccaggtaccaggatcccaagaaaccaatcc

SEQ ID NO: 398570 - DNA, 571 bp, Homo sapiens
gtagccagcaccccatttcccatgccaatggcccacagctctttctgtgatagcattcaacagttctccaggtagacaggacactagctatgagttgaatgtaggagctaaattttccattatccctgatgtgcagaagatgccttgataatctgcccaagcctaaatctaaagcccttagaccaactgtaactatattaggactaggratattggttagaaacaagtaaacaaacatattttggacctccagtcctttaaagaggacaaaagcttatcactgtattgtcaggaatgaaaactcccgttttgtgaattgtaagttttcctcactcagctgcctttgcaatcacatgctcatctatttacttactctcagatatgtagagtgccaggagagcacttcttagaatgattattatatgtcatatcaaaacgaagtctcttagcaaatagactttagactcaaccaaccaaaacaaatctctctgtttgccctgaccaccaacaaaactgatttcttttctggaggcatctgtgagattactttaggctcttgcaattctggtgg

SEQ ID NO: 398571 - DNA, 576 bp, Homo sapiens
tacttctcattctctgaaattaagctagcaaagatataattagctgcctctaattcagtttaatatgtaataaatacctgcttagtggaccacatcttttccctgagctctcttagcaaagtatgtcttaaaaataagaaacaggacttaacattcaatgggcacctgctgtgtgccaaaaactgtgccaaacgctttgtagatagcaatttatttaaagccttcagcaaacaaactattagttttactttacagatgaacaaattaaggctttgatggtggatatgcagccagtaggaaagagaaatgggactctaaagttaatgctttgtctgctcttcctttttgcctcccttctttggattccagagctgtcaactgccttctcttcgaagtcyagtctgcaggaaactagatgttgcaataaccatgataacaactaataattaagttggtctcttagcaatacctacacccagacaatatctgattcatttaagtcatttgctgtccaaagcagtattatttttcccaggacttacatgcaaaaacaataaaaaagaactgaggggaaat

SEQ ID NO: 398572 - DNA, 541 bp, Homo sapiens
caggtggctagctttgatcttgggaaccatctgcaatccagaccactttgatgtttcacacaatggaagcataaatattttctatgtataccacgattggactttcagaaatctaattaagatgaaggtcaattaagagaaaatgaaaccttaactccaaaagtcagggaagagatggaagatgatggcatggttgtgtgtacataaaagaagctaacctaattataaacttacacaaacagccagagaagttgcctttcatgtgacaaaaaggtcctaaagcattctataacattgcgatcattaatgtgtctttgaaacacacccaacactagaaaataatagtaataactggcatttcaaaactctattactaaraaattggaagatagctagggatagaagcacttcagaactcatgaaatgcaaccccttgcttcttggaaatgagtgccataaactatagcagagtcatttgtttctattagattcctctaggtttgatgtgaaagagattttgctgcttgtttcagaggtctgc

SEQ ID NO: 398573 - DNA, 541 bp, Homo sapiens
caggtggctagctttgatcttgggaaccatctgcaatccagaccactttgatgtttcacacaatggaagcataaatattttctatgtataccacgattggactttcagaaatctaattaagatgaaggtcaattaagagaaaatgaaaccttaactccaaaagtcagggaagagatggaagatgatggcatggttgtgtgtacataaaagaagctaacctaattataaacttacacaaacagccagagaagttgcctttcatgtgacaaaaaggtcctaaagcattctataacattgcgatcattaatgtgtctttgaaacacacccaacactagaaaataatagtaataactggcatttcaaaactctattactaaaaaattkgaagatagctagggatagaagcacttcagaactcatgaaatgcaaccccttgcttcttggaaatgagtgccataaactatagcagagtcatttgtttctattagattcctctaggtttgatgtgaaagagattttgctgcttgtttcagaggtctgc

SEQ ID NO: 398574 - DNA, 499 bp, Homo sapiens
ttggttctgaagttctgcacattatctttatctagcacatgcttctactgagaatgttttagaattagtctatagcatatagttaaatattattattattattattattattattattwttttttttttttttttttgagatggagtcccgctctttagcctaggccggattgcagtggcacaatctcggctcactgcaagctccgcctcccaggttcacgccattctcctgcctcagcctcccgagtagctgggactacaggcgcccgccactgcgcccggctaattttttgtatttttagtagagacggggtttcaccgtgttagccaagatggtctcgatctcctaaatattatttttaagaggttaattttttcctgtctacatttttctcttctcctttgccaacatttaaagcaagtacttagatctgattttacatgttatagaagtagaatgtagtagagaagaaaacagtaatctcagaaagggtaactg

SEQ ID NO: 398575 - DNA, 605 bp, Homo sapiens
ccttctctccttgaaggcccataacctgcacaaacacagcatcatccagttcaggagcttgagtctataatcctaacaaagtcaagtggacatgcaaacactctttccatcctcatatgaatgtttgaatgagtcatggaaaattagagcgtcaaatgtgtttcccagctgatttcaagcctgtgatagttttgtaggcccattcctgggcataaaaatcaagggcccaactgccagagagaatagaaggctgatataccagtaagtcttctatgcaccaggatagactttaaaccgtacccccacacataaaagctaaatttacctgggttgtggtkataagggaacacataaaataaaagaaggtagtcacctaatcctagttttgtttgtttgtttgtttctgaatcctgcaacaatatcagaccaaacttgggttggaaaggctttagctggctattattttcatcagactcctcaaggccatctcaaactataatgacaagaagaaaaagaaaaatggtcaaattatatgttgagattcctaaatcctttggtatcattgcttcatttataaaaagaaaaaactatacaaatatttataa

SEQ ID NO: 398576 - DNA, 644 bp, Homo sapiens
agtgcaccaaaggggatgtgacgccccatcatcttgatcagctttttcattccagatgctctcttcgagatgcagtgccttattgtggcttgtgtatatgtcacatgcagattgagtttgtggttgaattgctgcatttgtttccgtggcagggattaccatataaataactggggtctgtcatgtccccggggatcagtcaatgatctgtaaaggaaacctgaaagaggagaatcatgtagagggaggctccctggacccaaccagcccaaaacttgcctaaggtgagcccacaggaggaagctgggggagtaaccacttcaacctcctccttccctccaatctttttccagagatcccctgttggccaaacccaactggaagccacagtgcaagggaacacaatgatgtaattcatacagattggcccactggcagaagaagcaggggagggatggagagtggacctggaacagcaagaagaagaaaactgacacacgagagagaggtgtgactcaaaataggaaggtgaagggagtcctcactaagaagaagttattcgagmaaagatctgaaggagtgcagtaacccatctgctatggcctgaatgtgtcacccaaaattagtgtgttggaaacttaatc

SEQ ID NO: 398577 - DNA, 571 bp, Homo sapiens
  misc_feature (1)...(571): n = A,T,C or G
gcagaatattgagcagtcctgtgtatcccccaggacttgatttgtactctggatataggtccttccttgctttctgtttggaaagaataccacctgcatatgagccctcatgataacccaagacctgtgggcacagcagtgttcccagtcccagcctctagtgcttttgacagacattctgngtattcagtacatagatttcaccattttatgcagattttcctcctattataggtagaatctacaatccacaggggctcagrtatcctgaagggaattgccacagggacagccaaggttctcactggcgaggttatcatgaactcaggtcatgcgggataaccacatagctttgcactctttttggccagccaggagagtagctagcttcactggacaatatcctctgctgtttctggatgaatacctttggctaagtccagaagcccaaagctaccacgggaacatgcctcatggctccaggctactcctctgtctgagccttgggctctttcctcagacttcacatggtctccatgtccaggtgcctcaggcctccatggtgggtttg

SEQ ID NO: 398578 - DNA, 571 bp, Homo sapiens
  misc_feature (1)...(571): n = A,T,C or G
gcagaatattgagcagtcctgtgtatcccccaggacttgatttgtactctggatataggtccttccttgctttctgtttggaaagaataccacctgcatatgagccctcatgataacccaagacctgtgggcacagcagtgttcccagtcccagcctctagtgcttttgacagacattctgngtattcagtacatagatttcaccattttatgcagattttcctcctattataggtagaatctacaatccacaggggctcaggtatcctgaagggaattgccacagggacagccaaggttctcactggcgaggttatcatgaactcaggtcatgcgggataaccacatagctttgcactctttttggccagccaggagagtagctagcttcactggacaatatcctctgctgtttctggatgaatacctttggctaagtccagaagcccaaagctaccaygggaacatgcctcatggctccaggctactcctctgtctgagccttgggctctttcctcagacttcacatggtctccatgtccaggtgcctcaggcctccatggtgggtttg

SEQ ID NO: 398579 - DNA, 503 bp, Homo sapiens
cctttttgctgagtgagctgaagtaaggactaaggttcttgctctcccccgactccctgattactggttctgcccaggtcaagtggagagaggaatctatgatctacttttctctctggcccttcaggaggggacatctctgtgtgtgtggcacatacatccccagccctggcctgatataggatgggacggtgggagaaatgagggcactgggtaaggggaagaggccaccagaggagtcactggggaagaacaggggtctggagccacagagtgagaggaagagaaggaaggagggactcctgctgcttttctcacctcctgggccagagcccagagtcctcatcatcttatttattcartttgattcatttatttattctgcaaatatgtctagtgcctactatgtgctgggcaccacgctggtgctggggagacacggtaaatatcagacacaattccaggtctccagcggccaccactatcacggtggtgagacaaga

SEQ ID NO: 398580 - DNA, 501 bp, Homo sapiens
caagacataattcctatttactttacctcctttgctaccaagcttgcatcttagygtgatttctttctcatgaacttaaatccaactagctaaaagtggcaatctgtttgatcactgaagccagtctctatatttcagctcacgtgctccataaattacatgcaatatttgaccctgttaataacttcttgccattcctttggcttccttgactttgaactctactggttctcttcttcctcctcctcctttttttctactctcccactgactgcttctaaaagtagacattttcaaaaaatagggtacaatatatggatacttcctcaggttctctcctcaggtccctcctcttacttctgactctcctcatcaagaaataacctctatccccacaggctggaatccctcatttgttacctagggcaccaggcaatcaccttttacccactaagtgaaccaaccagaccaaaatagcaatgcaaaggctttgaaaactat

SEQ ID NO: 398581 - DNA, 501 bp, Homo sapiens
caagacataattcctatttactttacctcctttgctaccaagcttgcatcttagtgtgatttctttctcatgaacttaaatccaactagctaaaagtggcaatctgtttgatcactgaagccagtctctatatttcagctcacgtgctccataaattacatgcaatatttgaccctgttaataacttcttgccattcctttggcttccttgactttgaactctactggttctcttcttcctcctcctcctttttttctactctcccactgactgcttctaaaagtagacattttcaaaaaatagggtacaatatatggatacttcctcaggttctctcctcaggtccctcctcttacttctgactctcctcatcaagaaataacctctatccccacaggctggaatccctcatttgttacctagggcaccaggmaatcaccttttacccactaagtgaaccaaccagaccaaaatagcaatgcaaaggctttgaaaactat

SEQ ID NO: 398582 - DNA, 472 bp, Homo sapiens
gtttttatgtaaatgttagttctgattttgaatccactgagaaacaatgtaagatgtccctcaaaaggcaagttttatagaaatcatcactaattggagtttcaagatatggaccgagttctctgctgtgtcgttgcttcttggttcttccatcatctgccctcatctctttttacagaaacatgaagggaaaagagttaccactctaaattgtagcaaatgcaagaattacctttctctctaccattcttrgcaggggtcagtcatctgggttgattggaacattcccactgagcttgctgccccaggtggaattccattctgctagaaaattctgtgttggtgaaatatggacagataatgttgagaagataaatgagtaacatttgtgaaattatttgaactcttctaaagaaaagacccacactgattccagggatttttgttaagataattggaatttaaaatatga

SEQ ID NO: 398583 - DNA, 401 bp, Homo sapiens
cttgctttgttttggtttggttagtctgtttttakttttttgttatccttgaatatcattttcctgaactattttttagttttcctccacgttttcctgagttatgacagtggtaactgggaaatttttatttttttcataaacttggaagacatgtatgtaaatgactaaggcttatagattggaatcaagtcactgcattttagaattgaaaaggatgttggatatttactaatcaaatgacccccttctaaaacttatgacattaaggtccagggattagatgacttttctaaagccaatttatgagttaggcaaaactatgaccttgatcttttgattcctcattcatgattccttctacttccaccctattccttaacaattcaactgggatagta

SEQ ID NO: 398584 - DNA, 577 bp, Homo sapiens
taaaaatacaaaaaaaattagccaggcatggtggcgtgcacctgtaatcccagctactggggaggctgaggcaggggaattgcttaaaccaggcaggcggagtttgcagtgagccaagatcatgccactgcactccagcctgggtgacagagcaagactccgtctcaaaaacataaaaataaaaataaatttcccagtaagtagatgaagaaaaacactaaataaatatggaaacaataggaaaacaagagactcataaatgaaatttatttttaaattgtgctggattaggcttaccaataaggaaagggaattcattaaatgttaagtctttcatttcagtaaagcacatgtaacaacatctaatataattgtgtgtacgaccatgtgagctaattttgccacaaaaaaacagccacctgggtaataaactgtctgaaaaaataatgataatttataaamatgccaattggggaaaagcacttaatattatgctgtctagccaaagaaaatgagatccactccaattatttcaatactctgacatgaagcattttgtgttactttgatagtcata

SEQ ID NO: 398585 - DNA, 462 bp, Homo sapiens
ttagttgtaaataagttcacttagaatacattatttgtgaaatagattatttaagctctctaaaataatataagaagtatatttgatccacaagtctatttgatgctgttcggctgttctttcacaacattttggaaaatactagtctgtgaaasagtatgtttatttagagtctatattcatctcaggagacaaatttacctgctacttgtcttaagcaaaaaaatgtgttcttctcaaaccactgatgcttcacaataagactaattagtagaaaggaaagagactgacagcaagttctttttgcgaatctatacatataagggagagaagaaagaaggttgattccaaataaggacaggccaggacacgggagggtcagtacagagcctgaaacaaatgttatcatctggagtcttgttggcatgttttttctaggattagaaatagaaaccccagtgg

SEQ ID NO: 398586 - DNA, 628 bp, Homo sapiens
aacgtttattgccagttatatgccaggcattcagaatacaaaaatgaataattcaacagtttctagccctcaaagagttcacagtctagttggggtggcagctatgtacacggctaatttataattcagagtagtaaggatttagggatctacttgacgcaaatctaaaatgtcttagcagatatgkctgttacattatgagttaaacaagcttgtgtggactttcctgagaaaaataactgcaattattcatggcattgtttctaagggaaaatgtgttctgcattccaaacagtcaatttaaaattgaatttttggaatacagcccattttcccctgggggctatttctccattatctaagaatccctctctgtcttaggacagttttcatacacaactcccacctgttctacatagcatatggtactacctgcaggttgcatagtttcatggtcatcaccttcctcacctgggctctgcactacatgtttaagatagtcctctgatcaagcaggttgagttaagcaggtaggactgaagtagccccaaatctgactgttttaacatttcactattagagaaggtagtgaggaagagtccatcaagtaagtgatgaaagtttggaa

SEQ ID NO: 398587 - DNA, 524 bp, Homo sapiens
atttcccacaagcacgccacacctgttcaatgaggaaagaataatctcttcaacaaacggtgctggaataactggatttccacatgcaaaagaatgaagttgcactcctatccaatacatataaaattaactcgaaattaaaagctaaatgtaagggctaaaaccgtaatactctcaggaaaaaaacaacaggaacataccttcacaaccttgaatttaaattcttatatacgacaacaaaagcacatgcaacagaagaaaaaatacagaaatcagatttaatcaaaactaaaaacttttcagccaggtgcagtggttcacacctgtaatcccagcactttgggaggccaaggtgggcagatcactggaagtcaggagttcgagaccagcctggccaacatggcgaaaccccgtctctaytaaaaatacaaaaattagcccagcatggtggcacatgcctgtaatcccagctatttgggatgctgaggtgagagaatggcttgaaactcggggcacagagattg

SEQ ID NO: 398588 - DNA, 610 bp, Homo sapiens
ggctgttaagtaggcaagggcttctttcaggctcggcagccaacctgctttgtggattacccaccagaaggtgtgagtagatagatgtagcttacagccctcctcaggacgcagtgggggtaatcctttccccctgcctcggccttcattggtctgatgtgttgagccccagcttactgctcaacttgtatctggttccttgccacgttgcccattttggatccacagtgtgactcaccgcggtgctgcttcagtcgcaattattaaacacctgccgcyttatgccaaaccataggcgtatttataccaatacctactgcagttcgactatcagatatcagcagatacattgcaggcgtattatcattgccgggccttggattgttctaaagaagtcatttctaagtaaacataagaagcaaatttattttcagaatgtttttgatttaaaaaaaaaagctattttaaagttatttcttaattacaaatgtttgctaaagctttttttatggttgccccattaaatccttcatttccagacctaagacatgctctttctttatacgtcagccaactcacaacctaatttttcttatttgggccaccaaac

SEQ ID NO: 398589 - DNA, 610 bp, Homo sapiens
ggctgttaagtaggcaagggcttctttcaggctcggcagccaacctgctttgtggattacccaccagaaggtgtgagtagatagatgtagcttacagccctcctcaggacgcagtgggggtaatcctttccccctgcctcggccttcattggtctgatgtgttgagccccagcttactgctcaacttgtatctggttccttgccacgttgcccattttggatccacagtgtgactcaccgcggtgctgcttcagtcgcaattattaaacacctgccgctttatgccaaaccataggcgtatttataccaatacctactgcagttcractatcagatatcagcagatacattgcaggcgtattatcattgccgggccttggattgttctaaagaagtcatttctaagtaaacataagaagcaaatttattttcagaatgtttttgatttaaaaaaaaaagctattttaaagttatttcttaattacaaatgtttgctaaagctttttttatggttgccccattaaatccttcatttccagacctaagacatgctctttctttatacgtcagccaactcacaacctaatttttcttatttgggccaccaaac

SEQ ID NO: 398590 - DNA, 634 bp, Homo sapiens
ctaatttattctagtttaaggttagatctttccaggggtgttgcattaaaataagggatcctaaaaataaaaatttcttaaccactgaggagaagtgacaacaatagaatgtgaagcactgagggaggtctggagcagggatgtttttgaataaaggcaattacttaagtaaaactcaactttggtggtggtgttgctatttgaaaatgagttgaaaatgatcctctccctactctcaaactatacacttctctgtgattattaattacgtttgtcaaggtatttattttttaagtgatttttttcatttagcccttttttgtgtgagtcacatttacataaaccatctcctaaaccaagtcaggacagccctgaaagatgaaaaaatagagtgtaaagtgacttaaacagagctagtgagtggctttaacctgagtccaactgaggccaagtttagttttctctcctaggggaaactaaaacaaactttttaattcagtaaggaaatctaacagggaytcctgctatggtgcttgcatcatagcttcatttcagaagcagccctggagaattttgaatcattgtaagacattgacttcagagggaagtcgatggagggaagtatttatggagt

SEQ ID NO: 398591 - DNA, 538 bp, Homo sapiens
tggtaaggtttatttataactcttgagtttcaacaaaaggagatactggaagattaataagtgtttaagaaaacattcagtaagcttgtcctgtattccttgtcctgtattcctatacaaagagtatatcagcaatatattccacaagaggaaagtaaaataagtaaagttatttcaagtaaactaaattagaaggcttttttatgaactgggcaactattggaactaagctgacatggggttgttagctgattgtaatgcgcccagaatgagaatactgatcagatttctacattacccatccctcttgtctcttctgagtaacagtcagagatcactggttggttcacaggaataagcagggttagcctagattgcagaaataaacttaaaaacaactgatgagactasaatctaataacaagtgtaccatagtttttgaaacataatatttctctttctggtttcccatttttattaaagacaaatcatggtaagactgatttgctttattatacttgggatgattacttgtata

SEQ ID NO: 398592 - DNA, 598 bp, Homo sapiens
aatttttaaaagttaaagaggcagtttatgaccttaaagcatttagcaaacttaatatttgacttgcataatttagactaaatgtttttattttatcaataatttttaaagctgtttttatttctcaaagattactaaagttacatgaaccaaaaggcattacagtttttatgttgcttttaaaatatctgatttaagcacttatttttatttaagccaattaactagagctcttttatatgagcactacacacaacacatatatagctacacagaaaggcagaagattacaatagttgtaagatgttttatttgccagtttttaaattttttagttggatgactggcttcagggtggagccgttggaggaacagggccagcatgcatttctagggccaaataagcagcaaataagcaaataagcagctgaaggcaaagacacatccccaaaattaagggtgctgttttacactgattcctggattcccaaaaggagggaaacactacgggagaagacagggctgtgatcctaccctgtatttcatygcaaggcagcccaaagccaatcagcccattttgtcatcagcctatccttca

SEQ ID NO: 398593 - DNA, 633 bp, Homo sapiens
cagcctatccttcatgggagtctcatctccagcgtggggtggagatggttccttatcttccaggtagccaagaacatgcttctctgatccaagtgtgcaaagagtcaagtatccctctatcactactattagccatcccttaaagtatatttcctacctagttattatacaccaaagctctcttataatgctaagtaatttctgatacccccaaaactcaaaaacgtcagataacacaatgcaaaacagaacagaacctttgattwtgagagggaactacctgcctttaattcctgggatttcatgaggaaaacagaggttttttcccaaaacggagtctgtggtgcctcctctgtttttctcaaggagtcccaggctaccagaagttatcttagggcctctcgtgtgcattaagagtgacaagacaaaaaaaaaatggagaaaaataattcagtcgactaagaaaaaaaaaccatttttcagaaaaacaagttccaagaagagaaaaacataaaggccttttaaatatatttatagcttgtttatccacttctaattaagctgacttttaaccatagtgctctttaaaaaagaaatcctttcagatttcttattacccaactttagccatgc

SEQ ID NO: 398594 - DNA, 605 bp, Homo sapiens
ttctacagtgacaaagaaatcagtttacttgagaaagtaattggttgcgtgggtagctccttccaaaggcccatattggagaagaaccactgagaatgtagtattctatctagtttggaatctttgactttgaaaaactaatgaagaaagtatatgctatactagaaaaattctaaaatcaaagaaacaacctaaagaccattaagatagcttctaaagacaatgacggaggactgccattccatccttgatacttatgcagatctctttgcataaatataaagaaaaatgtgagtgaatgacttttcaaatcatcttgattttcttttcaaatgaccccaattagcaccatacttttattagaagttaaaatcaaattgggactaatctagtcattaatataaaatagttgcatgtatttcagaatatttaaactgtatcacaatatttattgcaatgtctttatatttttagggcccagatcatttcctttarctaatactgtataaaaacctcttattattccattatccagcctgataaggatttttaaatttgatgtgattctgaacctacagttaatactttgacgagtataatttaaa

SEQ ID NO: 398595 - DNA, 614 bp, Homo sapiens
ttgttttatgttaaatttacctatatactaggatatatttctgaagtttttgtctattccatgaatctacttgtctttatttatgccaatatcatatagacatgattacagcagcttcatcatacttttgaaaatacataktaactccattttgtcctcactatttgacttttaaatatggtttcggctatttccagaaatttgaaaatacgaattttatgatcacttgaattttaagataaatttgaagatcactcacgccaattaaaattaactctaacccaccggaattctatttgatatccttaacttctatgcattaatttggggagaattaatattcttatggtatcatcttcccatccaaaaacattgattatttatttaggtcctgttttacgttttttaaataatattttataggtaccctcacattaggtcacatagcatgcttgcaaaatttattccaaagaattttatagtgtctgttgcctttgtgataggatttttttttctgacttccaagcagtagatattaataacaggtatcaggcattattctaaacagtttacatatattaactcattttatcctcaacaaactacagcacaat

SEQ ID NO: 398596 - DNA, 614 bp, Homo sapiens
ttgttttatgttaaatttacctatatactaggatatatttctgaagtttttgtctattccatgaatctacttgtctttatttatgccaatatcatatagacatgattacagcagcttcatcatacttttgaaaatacatattaastccattttgtcctcactatttgacttttaaatatggtttcggctatttccagaaatttgaaaatacgaattttatgatcacttgaattttaagataaatttgaagatcactcacgccaattaaaattaactctaacccaccggaattctatttgatatccttaacttctatgcattaatttggggagaattaatattcttatggtatcatcttcccatccaaaaacattgattatttatttaggtcctgttttacgttttttaaataatattttataggtaccctcacattaggtcacatagcatgcttgcaaaatttattccaaagaattttatagtgtctgttgcctttgtgataggatttttttttctgacttccaagcagtagatattaataacaggtatcaggcattattctaaacagtttacatatattaactcattttatcctcaacaaactacagcacaat

SEQ ID NO: 398597 - DNA, 614 bp, Homo sapiens
ttgttttatgttaaatttacctatatactaggatatatttctgaagtttttgtctattccatgaatctacttgtctttatttatgccaatatcatatagacatgattacagcagcttcatcatacttttgaaaatacatattaactccattttgtcctcactatttgacttttaaatatggtttcggctatttccagmaatttgaaaatacgaattttatgatcacttgaattttaagataaatttgaagatcactcacgccaattaaaattaactctaacccaccggaattctatttgatatccttaacttctatgcattaatttggggagaattaatattcttatggtatcatcttcccatccaaaaacattgattatttatttaggtcctgttttacgttttttaaataatattttataggtaccctcacattaggtcacatagcatgcttgcaaaatttattccaaagaattttatagtgtctgttgcctttgtgataggatttttttttctgacttccaagcagtagatattaataacaggtatcaggcattattctaaacagtttacatatattaactcattttatcctcaacaaactacagcacaat

SEQ ID NO: 398598 - DNA, 614 bp, Homo sapiens
ttgttttatgttaaatttacctatatactaggatatatttctgaagtttttgtctattccatgaatctacttgtctttatttatgccaatatcatatagacatgattacagcagcttcatcatacttttgaaaatacatattaactccattttgtcctcactatttgacttttaaatatggtttcggctatttccagaaatttgaaaatacgaattttatgatcacttgaattttaagataaatttgaagatcactcacgccaattaaaattaactctaacccaccggaattctatttgatatccttaacttctatgcattaatttggggagaattaatattcttatggtatcatcttcccatccaaaaacattgattatttatttaggtcctgttttaygttttttaaataatattttataggtaccctcacattaggtcacatagcatgcttgcaaaatttattccaaagaattttatagtgtctgttgcctttgtgataggatttttttttctgacttccaagcagtagatattaataacaggtatcaggcattattctaaacagtttacatatattaactcattttatcctcaacaaactacagcacaat

SEQ ID NO: 398599 - DNA, 607 bp, Homo sapiens
gattttttttcattcatttagccatttgcacagagagagagagaagccagaaatctgactggtaaagaattcttaccctttgccggcaagccaggcttctgggttccctttccctgagcggccctagtgatccggcttgcggcaccatcgccctgggggccaagccgcatcataaaggaaaattatttttttttcgttctggccagagcaaaatacaagtgataaaacacagacattagccactctgcttagcacccaatatcaaattggcaaagcttaaatttgcccccagatgggtgagccccgtcatctttaatccaacctctgacttaagagtttcgacacgtggtctctgagcaacatggttgccctgagtaacagagagataagaaagggaaaggagcgaataaaaagcactgtccgtggcagggtgggcaaggcgaaatgctcagggaggccagaggaagacctaccattgcaggaacactgaaaagtttaggcggctgagggtgctgtcktgaaggtagggggggaattgcccatgtccctcaatcctgtacatgcctaatcccgttacccacagccattaataaagagtgcaacgcag

SEQ ID NO: 398600 - DNA, 567 bp, Homo sapiens
gttggctaaataggctcatttcatttatttccaagtactgttgatattgtaaagctagcatattacatttaacattaaagttatttttaagatataacatctttgtggatgagaaaaataaaatccagaagatggataaacttgaaacaatttagcagtctaacaaagtataataaatagcaaaatcatggatttgaaatgaatctttaaaaaattcacaatgcaagcatatttttaaagctctgtttttctaattaagggagctccaagagctttcttatttattctcactaktgttatttcgttactgaaaagttttttttccactataaaatcactgcttcctctgagagatgcttacttagaagggattatgtaggaatatcctgttatttctatttatcaggttaaccgtggattcatgttatactatgggggtagaaagcaaggcaaggcattgccagcttcaagatttgacttttgataaatataaatgtggagcaaccccgtgctgctggtgcgtagtggatgtgatccatgacgggcagatggctgtagcgatggaga

SEQ ID NO: 398601 - DNA, 601 bp, Homo sapiens
atgaaactcactcatgcttccatttttatctgttttctgtacaaattacaaagccttgaatgttaccttggatatctctatatagtgtcctcctatctttattatagtctggaaaagctcacccccacaataaccagacttcaaagcaacactaatttacaccaacacattttagattaaaggtctaaattaagttctttgtacagagtaccaaaaaatttttgccttttgttactcacaatttgtattttcactaatgttagtatttatgatttattgccagttatatcaattgaacagtaaatacaactttgcataccataagaatttcaaagcatttcctttrttgaatagctaaaataattgaggaaatcaattgcttttgttcattttagagaaaattatgtttcctgaggcaaatgtataaatccaaaaattgaaataattaagtacaaaaataaaatcatatatatatatatatttttgggagtgctaaattcaagcataactagaatttgagcttatagtttcaaatagtagaacacaagagaatctaactatcatgttagcggtaaaaagttaaaacacaaggccaggcatg

SEQ ID NO: 398602 - DNA, 532 bp, Homo sapiens
cctaataattccatagatttaattatgtttaatttcatttaaggaaaaacgcagatactgtccaaattcttactttatttggtgtcttataaatataataggtataacaaaaaatattttacaatgtgttttcataagcttgattgcatctaatctgtatttttattatggaagatgagctttaaatattaaccacaacaaaatacaatataatcattttaaagacgctgtgttgataaagcttttattatcattyttcctacttatctaccctataaccatagcacagacctaccctgggtttctgtttagtgtcatagtcctcactgtcaacacaaattaactcaaggaggtaagcagtttgtttctcccttatgactttctcaggcaataaataaaaacctaggataaataaaatctgaaatacttatcgtggcaggtctattgtcatgatttgtagttgatgtggattatgcccttatagtaaacttctatgtcagaaatgttttgtcaataacaatattacacaaaa

SEQ ID NO: 398603 - DNA, 536 bp, Homo sapiens
ttttttctagaacttcctaacttattcacagctccctgcattcatctttctttgtctatacaaagagagacacatttatgtacagactacagattgatacatagttattaaaagaaatattatatttatataaatttacaaaaagatgcattctcttttaatggaaaggcatatacctaatattacactataatatggaaagataaatacataatattacatattcatatataccaaaaatcaggaactatattctcattgatatttcatcatgtaatgaaagaaaaatcaataaaacacagtcttagtarcacactcactggtagatttaacaaataatgtgatttgaaatctcagtgttcagcattgtcctttctagtcaatagcatgaaagggcattggaagtctgaagtgcgttatctgcttaatgcatttatcctccattgtacacgtggtttacctgcaacatatgtaatattttaaacaatgtttactttctaaataatgtgttatttctctctatttttttttcctgg

SEQ ID NO: 398604 - DNA, 536 bp, Homo sapiens
ttttttctagaacttcctaacttattcacagctccctgcattcatctttctttgtctatacaaagagagacacatttatgtacagactacagattgatacatagttattaaaagaaatattatatttatataaatttacaaaaagatgcattctcttttaatggaaaggcatatacctaatattacactataatatggaaagataaatacataatattacatattcatatataccaaaaatcaggaactatattctcattgatatttcatcatgtaatgaaagaaaaatcaataaaacacagtcttagtagcacactcactggtagatttaacaaataatgtgatttgaaatctcagtgttcagcattgtcctttctagtcaatagcatgaaagggcattggaagyctgaagtgcgttatctgcttaatgcatttatcctccattgtacacgtggtttacctgcaacatatgtaatattttaaacaatgtttactttctaaataatgtgttatttctctctatttttttttcctgg

SEQ ID NO: 398605 - DNA, 536 bp, Homo sapiens
ttttttctagaacttcctaacttattcacagctccctgcattcatctttctttgtctatacaaagagagacacatttatgtacagactacagattgatacatagttattaaaagaaatattatatttatataaatttacaaaaagatgcattctcttttaatggaaaggcatatacctaatattacactataatatggaaagataaatacataatattacatattcatatataccaaaaatcaggaactatattctcattgatatttcatcatgtaatgaaagaaaaatcaataaaacacagtcttagtagcacactcactggtagatttaacaaataatgtgatttgaaatctcagtgttcagcattgtcctttctagtcaatagcatgaaagggcattggaagtctgaagtgcgttatctgcttaatkcatttatcctccattgtacacgtggtttacctgcaacatatgtaatattttaaacaatgtttactttctaaataatgtgttatttctctctatttttttttcctgg

SEQ ID NO: 398606 - DNA, 431 bp, Homo sapiens
tgaaaaccgaagtgtcactttatggtattayttttagattgacttagaacagctgcatagtctttcttcttcatgtactgttttctggaactgtgttcacttgaaggattgaggctgaaacattcaagacatctggatgacatggctggcacttgttgctggctgtagcctgggggtctgctgagactggacagcatgactttgctcttctcatatggctctttctccagtttatttggatttttcagagcatggtggttctgaaaagaaatatttcaagatgtgaaggtagaacctgcaaattttttaggacactgcctcagaattaatcacagcatctcttctgctgtattctatcagtcaaacccaatcacaggaccaggaagatctgagagtagatgaatagttcatgtttctcagtagagatatgg

SEQ ID NO: 398607 - DNA, 579 bp, Homo sapiens
gtcattgtatagcattgttaaaaaaataactttagaaaaattaaactagtttgagcaaagaatgattcagaaattattgttagatacagttagtttccctcttcaaatggtttatccagtttccccgttctctatcctataattccaaatacctccttatcttagctgcaccccaacttgtctgaatatgcctaggcatgtctgaacttgctacaaccccaatccacattcctatccttattagagaataggttaccttcctagtccccacataaatgaccccccttctctstcttctcacttatgtgcctaccttatctaagaaagtttaaatgtttagccattcaggactagtttagacagtgcagtccaaccatagccaataagggaaagacacaggagcagaagctgcattagagatcataaaaacccctgcttttctttgttatgtgtgctcttgccattgctccatacacgagacacacccttctgcagaaataaatttgccttgctgagacgttctctgtctaagtgctcattttctttgagactccgagctcttattcccaacaattttgt

SEQ ID NO: 398608 - DNA, 621 bp, Homo sapiens
gtaatatgtgtctaggcatttatccatttcctttaggttttccaatttattggtatatagctgcccataacagcctctaacaatcccttgaatttctgaagcastggttttaatgtctctttttcattgctgattttatttatttgggacttctcttttttttattagtttgactaacaatttgtcgattttatcttttcaaaaagccaacttttcattttgttgatcttttgggttgttttcttcatttcaatttcatttatttctgttctgctctttattattttttctctctactaattttgggttctgtgtgctcttgcttttctaattctttaaaatgcattgttaggttgtttatttgaagtttatatactttttaaattggaggcactttatagctggaaactttgctcttagttgtgcttttgctgtatcctgtaaattttgatatgttgtgtttctattttcatactatcaagaagaatttaaattttattcttacttttttcattgactcactggtcattcaagaacataatgattaatatccatgtgtttgcataatttccaaaattctttgttactaatttctaattttattccagtgtggtacaagaa

SEQ ID NO: 398609 - DNA, 621 bp, Homo sapiens
gtaatatgtgtctaggcatttatccatttcctttaggttttccaatttattggtatatagctgcccataacagcctctaacaatcccttgaatttctgaagcagyggttttaatgtctctttttcattgctgattttatttatttgggacttctcttttttttattagtttgactaacaatttgtcgattttatcttttcaaaaagccaacttttcattttgttgatcttttgggttgttttcttcatttcaatttcatttatttctgttctgctctttattattttttctctctactaattttgggttctgtgtgctcttgcttttctaattctttaaaatgcattgttaggttgtttatttgaagtttatatactttttaaattggaggcactttatagctggaaactttgctcttagttgtgcttttgctgtatcctgtaaattttgatatgttgtgtttctattttcatactatcaagaagaatttaaattttattcttacttttttcattgactcactggtcattcaagaacataatgattaatatccatgtgtttgcataatttccaaaattctttgttactaatttctaattttattccagtgtggtacaagaa

SEQ ID NO: 398610 - DNA, 422 bp, Homo sapiens
gacataagtgtattttgaaaatagactgtactttgtattattaataaaaggtaagaactacattatttttttgtaaaatgttaaatatatgacgtttcccttgtgatatatttgttctgctgtatgcttatttcattcatattcataaacaaacacacwcatacacacatatgtatatgcaaagtctgtctatttgaaaataacagaactaattaatgcttacatagtttatacccaacttccaaaaatgacttaatagtcttaagtcttaatgatctaagataatttgcctgtaacccattcaccactcttcagagtccctggttctgtaccaccagaaagcctcaggagtattcaggagacattgcactatttaaatcttaatgacttagatgacttagtaatattctaatcatgaaatt

SEQ ID NO: 398611 - DNA, 567 bp, Homo sapiens
aatagcacttatactgcatctcacccccaaaagcatcatctactgaatttcttaatcttgatgaatcaattaatttatttaatcacatacattatgatagacatagtgcttgatmttgcagtaaaggagagagattcatagttttcctcacagaccataacatgattttaattaaggatgttaaacttcaattgtttggtcaattctcccctctaattagccttacaaagcatatatttcatttttttctcagccattaagctttaatgattctttaaaatgctttctaaaatcactctttttcttgtgttatcacttggattgcctcattttttatcttatgttctgcagcaacactaacaacaaagaaatcctcttatagctgcttcatatgagaacttccttgcttccattctcatttgtctcttaaaacttgcattctgttacaaaattctacattggttacatgtattaactatcctaattcttacaactccagtatggcaattaagtagatatcactacttttccaatgatgccattgtcatacgtttatacagctaagaa

SEQ ID NO: 398612 - DNA, 597 bp, Homo sapiens
aaaatactacttttctgattgtatgatcttggtcctggttttcttttcctttcttttttctaaaaaaaaatgtaagttattggagccaccatgactttcagaagtataattcaacaaatayatgttttaaaattaatatacttcttcatagagtagtttaggtttacagggatactatttcttcttagaaaaaattatgttaacagggtaaagttaagccatagctgttgttctatacaagatgattataatagcaggatgactctttacaaagctcactttatcataaaatcttttatcttttgaaatactttccagttacacacaacttttggtatgctgtactatgtgtaacatcagtatgagtagaaagttattttgagatacatctgaaatttaagcatataatgagttgagcttctcgaaacataaggtttattttttcatttaactataacttcattcaaagaagattcaaatttgcatgaaatataagattgatagtagtagaagcaagagaaaattaaaactgcaaattaaattagaagcaagagtaaattaataaaaccaaatgagtcataaaaatatgtccaagaa

SEQ ID NO: 398613 - DNA, 597 bp, Homo sapiens
aaaatactacttttctgattgtatgatcttggtcctggttttcttttcctttcttttttctaaaaaaaaatgtaagttattggagccaccatgactttcagaagtataattcaacaaatatatgttttaaaattaatatacttcttcatagagtagtttaggtttacagggatactatttcttcttagaaaaaattatgttaacagggtaaagttaagccatagctgttgttctatacaagatgattataatagcaggatgactctttacaaagctcactttatcataaaatcttttatcttttgaaatactttcyagttacacacaacttttggtatgctgtactatgtgtaacatcagtatgagtagaaagttattttgagatacatctgaaatttaagcatataatgagttgagcttctcgaaacataaggtttattttttcatttaactataacttcattcaaagaagattcaaatttgcatgaaatataagattgatagtagtagaagcaagagaaaattaaaactgcaaattaaattagaagcaagagtaaattaataaaaccaaatgagtcataaaaatatgtccaagaa

SEQ ID NO: 398614 - DNA, 565 bp, Homo sapiens
ataagtacagccaaaataaggatgtggattcaactcaatgggcctcaatggcaacacctcaaagggtgtgtagaagagcagccaagggtggtggtgaaatgcatctaagagcagtgtctagaatcatggaggcccctactgtcagttgaagtaattcgtatgtgaagtgaggaggcctgaagtagcattgtgatggagggacagagggaagaaaaatcatcaggacttgttctctctctctctctctgtctgcttctttctccatatattatatgtatatacamcatgtatagatatatatttagagggatatgtatctatatcacatatagatacctatatattaatcaaaataactgcaagatttaaatctggcttatggcaaatatgacaatttaatacacaaagaaataaggcagaagaggagagtgggaagagtttctgagatgttgaagtcaagactggtgatggcaagtcatccatgggaaaacaccgactgagcttttggtgatatggacctggggatgtagatgtatccagattttgagattaagtatgatggtga

SEQ ID NO: 398615 - DNA, 553 bp, Homo sapiens
acaaaactccttatcagctataaaagaaaactaaatattaacagctttgttggtgggtggagttcctaagagctatatcaatggttcattcaggcattaactgggagtgatgtaaaatatgacccatgctctttttatgtttttttttaagccagagtgtgtgagagtctaccattattcttctcctagccagttaaggtcacccttgggagcataaagtgtggatcaaactatttttgtttaggttgagtgtatagacaattagcatcaactagaaaagagacctcccctttaygattatccctccagttttacggccacttgacctcaaatccatatatgtagtcagctttctgaccgaagcagccctcacatgaggccctttgaatgttatagtacccatggaaacttgtataggtagatactactagaaaagcagtcattcatttattaacatatatcaggcacctcctctgatccagagcagtatcacccacactcaaaaaataacaagtatagaaaagggtggtcaatgaataaaggagcagagaaa

SEQ ID NO: 398616 - DNA, 583 bp, Homo sapiens
ctgattatcctatctaaaatagcatcctgctattccctattttctttccctgctttatttttctccacagcatttattgctgcttggcattatatatttatcatctgtttgttgcctgtctctttctattaaagtctgaactccatgattttgtctattttttttcaacacttcattcttggtacatagagmagtaccctgcacatcaataaatatttgtgaatgaatgaagaaaaagcaatcaggagaaacaagaaagtcacagagatgatattatttagagaagccatatgtccctgagaaaattcaaaaaagcagttattttctaaattgctttggctctcaccagattttcaggctcgattatagttcaagtatatccttagaatagctaccccctcaccccatttgtctctgttccttgcaaccaaaggaacttaactaaacctgaaattgataccaggaatagggtgttacataataggtccaattaaaatgtggcactgggtgtgtcctgttagcaggatgaagggcagtagcatctcattctagtatgagaatacagtagtgtagagtatgtgga

SEQ ID NO: 398617 - DNA, 644 bp, Homo sapiens
cttaactaaacctgaaattgataccaggaatagggtgttacataataggtccaattaaaatgtggcactgggtgtgtcctgttagcaggatgaagggcagtagcatctcattctagtatgagaatacagtagtgtagagtatgtggagctaaggctggaaagatgaaaaaccaggggctgggatatcttgggcccttgaaagacaagtatttcaggaatcttgtggccactgccttaaagcatttcygagcaatgaaagtaaagaattgtggtttattactttttattttctaaggtaaagtgcaagaagaaaagaacaatctttgcttccaggttgcccagctagcagcagatagagaaacacagggccattttacagccttgtaggtaatcctttttgcatctgtcctgtgtcttacaaatcaacctggcatggtatgcccatgctgagtgtaaagaaaaaaaaaagacaaattatgctgcccagaagtgggttaatgagcaggaaaggattgttctgtagggcctcccctcatagggaactcctacagcagtgtgaaaactcaggcagtgtgattggtgaccaacagcaagttcctctccaaagaatcaagaatgtaaactgttacctatgggaactactg

SEQ ID NO: 398618 - DNA, 622 bp, Homo sapiens
tttttttctgcactgaataatacatctttcaaaatgattattgtgactcacagaaatagcttaaaatatattcttgatacggtttacagagtgagaaatatttctttaaagaaattaaatatctttgtatatgtgaggatgatggggaaggagtaattctacttactagagagcaaggtaagcaatcaattccttaggctctagaaggctatatattctgaaactgttgaaatacaattctccytggcagatacgaaccattaagccattattggtaacagcaggggttaatcacagatacaagttgagtgcaggtagcaggagagtgatgggagccagatagatgctcctgaagaccgggaagaggctcgcagaagtgaaaaggtgcaaaacacttgctcagttcaccatactgtccagagccatacctaaggtaagcaacgcttcccgcatcctcagactccaggcgtccaaattcgcacgcttgcaggcattctattgattcacacttgagtccttcaacaggtagcgccaattacatcccccagagcacgacccccagcatactggccaataccgctgtcaatcaaatacctcacctacttctctaaattcccccctc

SEQ ID NO: 398619 - DNA, 565 bp, Homo sapiens
catagtgagaacctatctgtacaagaaattttaaaaataaaattttctggaagctacattaaaaacttraaaaacaaaattaaattaaaaatatattttatttaatccaacatgcacacaatattcccattacaacatgaaataaatatgaaaacattaaagaggtatttacattcttagaaatccactttgtatttcccacttacagaatatctcaacttggactagccacattttaagaactcaatagccacacatgactaatggctactatattggacaaagaagttctaggtcatgtatctggcttcatgtatcttgcaaggaaaggcaagagcaaagcaacaaaggctgggccattgggatggagtcgagactcctcttaggggcctgcttttcccctacccccgcacgccctccccagggagccaggaaataaaagaaaatcttgagttccttcaagggaaattcccaggtacttagctagtcctgaaaagtaaataagcaacttgataagcaagaggtaatagtagcttaaaacaatagccagggaagttagagccct

SEQ ID NO: 398620 - DNA, 582 bp, Homo sapiens
gactaatggctactatattggacaaagaagttctaggtcatgtatctggcttcatgtatcttgcaaggaaaggcaagagcaaagcaacaaaggctgggccattgggatggagtcgagactcctcttaggggcctgcttttcccctacccccgcacgccctccccagggagccaggaaataaaagaaaatcttgagttccttcaagggaaattcccaggtacttagctagtcctgaaaagtaaataagcaacttgataagcaagaggtaatagtagcttaaaacaatagccagggaagttagagccctgagatgtttggttccatatagaaactagcgataacatcttaacatatgtccctgagttgttttttagagacctggacccctgtcaaacaaatccactggcacatagacctcmgctagggagaaactgaggactgaactctgacagtcattctttgttctaaagtttttcctgaggggcgcaaacttgtccaacccaccttattttgttgttgttgttctgttttgttttgtattaggcttttagcagcctgaagcgaccgttttcagtttctgtc

SEQ ID NO: 398621 - DNA, 546 bp, Homo sapiens
taaccttctgataaattattttacttatttattattgtgtttactgttcattgtttgtcttcctaccctatagaatgtgagggaggaggagggcaggcatgtgtgtctgtttcagtagctaaggcatcccaagtaactagaccattgccttgcatgtagtaggtatgtagtaggtactgcaacaatagccratgaatgttagaggagtgagtagaattttaaagctcagaatttacagataaaaaacactggagcccagataagtaaagtgacttaccaaacaagctggtcaacagcagagccagtcggaagacttaagcttttgaaccattcatctgaagctttttacactattggatgtataaaaagaaagaaaggtagagaaataattccattattagatattaaatataaattatgatattgaaaatacaacatatttgtgttggattataaattcctttgggatagagattgtgtcttattcatcattaaactttctccccacctcccataattagaaagaatgttttatacacagtaggt

SEQ ID NO: 398622 - DNA, 571 bp, Homo sapiens
ttactgggaaggcagtggaaagaagttactgtgaccatcacagatgattagcttttcatcgtggcttggagagtttgaaatcaggttgacgtatcttctgctactattagcaaccagcctctggaaccaaaacactaaaatcttagaaaagtgtagaagattccagaggcaaattttgacaactgtctagtttctaattctacctaaagattttcaaggccatgagtgctgtcagcttaaatcaaatttaatatttatstttctgagaatctggctttttggactgaaatcaatgtggtgatgacaagcaatgaggctgactaatgagtaacaaaagctgttcattgtatggacctgtaataaaactcagctattgccatgatgtgattatatttatgagtgttacatttaattaaatataacctctcttttaataatgttcaccaacatccttaatcctttgatacccctgggagaatggaaagaagccattgttgccttcctttattagagaaggaaactgagatggagaaaagacatttgttggttattcagcaagttaccagccaga

SEQ ID NO: 398623 - DNA, 571 bp, Homo sapiens
ttactgggaaggcagtggaaagaagttactgtgaccatcacagatgattagcttttcatcgtggcttggagagtttgaaatcaggttgacgtatcttctgctactattagcaaccagcctctggaaccaaaacactaaaatcttagaaaagtgtagaagattccagaggcaaattttgacaactgtctagtttctaattctacctaaagattttcaaggccatgagtgctgtcagcttaaatcaaatttaatatttatctttctgagaatctggctttttggactgaaatcaatgtggtgatgacaarcaatgaggctgactaatgagtaacaaaagctgttcattgtatggacctgtaataaaactcagctattgccatgatgtgattatatttatgagtgttacatttaattaaatataacctctcttttaataatgttcaccaacatccttaatcctttgatacccctgggagaatggaaagaagccattgttgccttcctttattagagaaggaaactgagatggagaaaagacatttgttggttattcagcaagttaccagccaga

SEQ ID NO: 398624 - DNA, 518 bp, Homo sapiens
atcctggaaatagaaaaatgaatgaattttcagaaagaaaagagggaagagaaaatgagtgggagggagagagaaagagagacagagacagaaagatcacatactagaataatctctatgtgaataaagagcctaagattttcacacttcattgaccttcctcaactagaagaaagtctgctgctgctgattttcactaaaattaattatggcatggataggagagaacaaggagaaataagtattcaaaatttactaaacttctatatttyttttatttataagaaattattggatttttttaccttacctctttgctaaaggattgcaaaaaaatatggtttcagattgcatatttaaggcaaatgaaattagctatatgttctaaatctattatttgtttctttcttgctacagaagcctgatgactggtatgccaattatgacacctttcctttcctattcttttcagcttggggtagccacatgatccagttctctccaatgagacctaaggt

SEQ ID NO: 398625 - DNA, 599 bp, Homo sapiens
agaaaacccagtatctgtaaaacatttactcctaattctccctttcccccaacccttggcaaccaccagtcttctttctgtctctgtggatttacttttaatgaatattccatataaatggggtcatatggtatgtgatcttttatgtctggctttttcacttaacatgtttttaaggtttttacatgttgcagcatgtatcagtattttgttcctttttatggctaagtagtatcccattatatgtatataccacaatttgtttatccattcagctattgatgaatttaggttgtttctatattttggctattgtggatagcgctgctatgaatgtttctataagtatttgtttgagtacctgttttcaattttggggagtatatacctaggaattgctgggtcatatrttctgtgtttctgtgctatttctttttgaagtaatacttcttcctgtactatctgcagtaattactgttatccaatggagagtagtacaagatgtctcttgtgggatgtgggagtcaacagagaataccagaactctagggtctgtgatcagagatttcctggcaataactacaaaggagagattaata

SEQ ID NO: 398626 - DNA, 543 bp, Homo sapiens
caaacattcaaagacatcccagctttgaatttagggatgaggcacagaaatcaacacacagtggataggattatttgaaaacaacttcacaaaaggagatccactttaaatataatttaaaaaggttggtggtaactttaaagtgtttttttttcctaacatctcatcaaatttaagccaatctaaaatatgatgatagagaataaactctaaccttggaaagtatatttaggttgtaatgactgaagcayttggtaggccaatagcaaatattaaaaatgaagagaggcaaagtaaagaaattgtaagtatttagctagcagcatccatggaaaaaaggcactgtgtatctgacccctagataaaacacaggaatttcagccactagcaaggtgttctctggacagagtaggtataaatcatttggcttctatataaattattcaagtaccttctttctcactttaagcttaagaagaatcttataattattattttgggaaaagtatgtcttagctaagagacatgagaacaagtaatcct

SEQ ID NO: 398627 - DNA, 634 bp, Homo sapiens
cccaactctaccctttggctgtaaatctccgcctgcccatgctgaatctggaatggagcccagttctgcaccgatatcattgccccctcttgtagtagttcctgaataaaatctgtctttactgctttaacgccagtgcagctctggttttctttacactataataaaagctctattagtttttattagttgttgatgatgatggctgggtagttccctttcttttaattgtttttactcctcctaactcaatttttattgtttctttttaaaagaaatctatcctcctctccccagtaaaaatcccactcagacaatttgtgatctagttgaagtttgcttgcctaaagcaagctttcagaacaactgggmtcccagaataatgagagaaggttgtatttatagttcaagttattatatagcagttgacagtttcattttgatttaaagtcctgtctctgataataggaaaaaggatcacagcttatctctggctgtaaggctttagaatggcctgtaattcaaggcttatctctgggaatgcacggcttttaaaaatgtaaatctttcctgggctctggtagttgccgtcttgtatcagatggggctaagctaaggatgagaatgtcagttt

SEQ ID NO: 398628 - DNA, 534 bp, Homo sapiens
gagcttatattctagctgaaagagagagacagaaagcagaaaatgtaataaataaataaaccaattgtatggtatgctaggaggtgaagggcgcaatggagtgaagaaaacaaatagagtaggacatgggagatcaggagctccggggattgggtgtgagtcagtttttagtaggtctggggtaggtctcattgaaagcataacatttgaaccaagatttgaaggaggttctctacaacttccacaggtgactgctgctttctctgccttatatgcctgtcttaatttactgttattgccagggaatctctgmtggcccagaatgcatgttgtttcaccacagatctttggacaggaaggctgatttagatgcttgcaagaggtgggcagaaccaggtctggtctttgtctaagtgaagcacttgttgtttccccacccagacctttagattttcaaactattctttcttcaaatggctcacttttgctggtttgatatattcttaaccatattattattataaataataatag

SEQ ID NO: 398629 - DNA, 427 bp, Homo sapiens
tgctacttaaatctcttggttcactggagaaaaagttttttkttttttttttttttttttttgcggggggagagagggatgttgtttttaatctcagtagctagagtggccttcatggggaacaaaaataagctaaacggaggagaaaggcacagctgttctttgctttctgaagagttctccaaatctcttattttattatgtgttgatgcagctgcccagccagaggaacacggcttacctctgtgccaaatgcaggtagagaacaaggtggtgtgagatgcagcctatgctgccccatctctcttctgtgttatggcccctggccctgctcccctccacagcatgtctctcctctaggttggcaagctttatattaataacataaaacctttgtcacacatgagatggaatgcaaatcatctta

SEQ ID NO: 398630 - DNA, 631 bp, Homo sapiens
atacatggtccactcataagtgattacacctaactgtgctggaaaaaaagactactatggaaaatgtttcatatgtaagattgaaaatttttcctgactaattttaaattagcaaggaaagtcaatttcggtgtaaatttttacattataggtaaacatttagtgatcacagaagatagtaaaggaaattgaagattggaaatggataatttttgcccaattaacaaaaatggcagggtagaagagagagtagctctctatgactaggaactatggacaaataagtataaaattgcatcttgccaaaggtctgaaacagatttatttacaatggtttgtaatcacatggaatctgaagcggtgaacatcagaagccagcataggatgcaaagaaagaaaaacatcatttcccttaataagattagagatatactaaayagaaggaattccaaagacaaatcatgatttcagtaaatctcttagaatgtcacagacaggatgatttggtgtgagctaggatgatggtttagatagccgacatttcttaagaatatgtcactctctcccactagactgtgagctcaatgacagaaaaaaaaaaaaagcatgttttacatttctttgtctctat

SEQ ID NO: 398631 - DNA, 408 bp, Homo sapiens
tgctacttaaatctcttggttcactggaggaaaaaagttgtttgttttttttttttttttttttgcggggggagagagggatgttgtttttaatctcagtagctagagtggccttcatggggaacaaaaataagctaaacggaggagaaaggcacagctgttctttgctttctgaaaagttctccaaatctcttattttattatgkgtggatgcagctgcccagccagaggaacacggcttacctctgtgccaaatgcaggtagagaacaggggggggtgagatgcagcctatgctgccccatctctcttctgtgttatggcccctggccctgctcccctccacagcatgtctctcctctaggttggcaagctttatattaataacataaaacctttgtcacacatga

SEQ ID NO: 398632 - DNA, 485 bp, Homo sapiens
tcaaaacttatgattacaacccaatttttaaaatgggcaaagctggcgtggtggctcatgcctgtaatcccagcactttaagaggctgaggcaggcagaattgcttgagctgaggagtttgagaacagcctgggcaacgtggcaaaatcccatctctacaaaaaatacaaaaattagctgggtgtgttgctgtgtgcctgtagtcccagctactcagggggctgaggtgggaggatcacttgagttgtgaggtcaaagctgcagtgagctgaaatcatgccactatactctgagcttgagcaacagagtgagactttgtctcaaaaaagagggggtgagaggcaaaaakaatttgaactgacctttgttataggctgaatgtttcccccaaaatttgtatgttgaagtcctagccccctgtactcagaatgtgactgtatttggatacacggtctctgaagaggtaattaaggttaaatgagacc

SEQ ID NO: 398633 - DNA, 555 bp, Homo sapiens
gatcctagagccctagtggtccaagccctgcttttactcttcaactttaagtgactcttccccattcctgctacactctcacttctgcaacatgaagggcagtggaggtatccattaagagcatagctctcctttccaaccccacgttagtatttttcaaccaatagttaatttcctttttatatttaagaatcamaacattctatcccggctgggtgcagtggctcacgcctgtaatcccagcactttgggaggctgaggcgggagtatcacttgaggtcaggagttggagaccagcctggcaaacatggtgaaactctgtctctactaaaaatacaaaaattagctgggcatggtggtgcatgcctataatcccatctacttgggaggctgaggcaagagaataacttgaacctggaaggtgaagttttcagtgagctgagatcacgccactaaactccagcctagatgacagagtgagactccgtcaaaaaaaaaaaaaattctatccttactctttcacataaatttatacctccatttttttttctacat

SEQ ID NO: 398634 - DNA, 418 bp, Homo sapiens
tttgagattcagataagttttgccatatttactagtaaccttagaaccgaaaacatatgctatactttaaagattagataattgcaaagtctttatactctcccttatatatttccccatttcattaaattatagagtcaccttattttttttaagaaaattgttgtttttctaccttgtatagtgtaatttcttaattacagctcttaattttggagtatrtctccctgccatacatggtccactcataagtgattacacctaactgtgctggaaaaaaagactactatggaaaatgtttcatatgtaagattgaaaatttttcctgactaattttaaattagcaaggaaagtcaatttcggtgtaaatttttacattataggtaaacatttagtgatcacagaagatagtaaagga

SEQ ID NO: 398635 - DNA, 600 bp, Homo sapiens
caatgacagttttttaattagagataaccatcaaaggcagaaattgattattgaaaagactaataactgataaacctttgccaagaagaaccaaaaaaagaaacacaaattatcaatatacgaaggtaaaaaagggacatcatgatagatcctacagaaagtacacatggcatacgtgcgtattacaagcagtgttatgccaataaattgaaaatttaggttaaatggacaaattcctgaaaaatcatggcacacaaaactaacagaagaaattgaaattgtaagtagacatgtatgtaacgaagatactgaatctgatattaaaacctcctataatgaaatgtccagactcagaatgctttaacagcaaactttgtcagacatttaactaaaatataacaccaattttactcatattccttcaaagagaaaacggaaatgctttcaaacagaagtaatgaggcttgcstaatcttaacaacaaaagctacaagtttatgacaaagaagtaaatttatagatcaatataattcataacaggcaaaattctaacaaatagtagcaaagcctagtaagcaatatatttaaaagacaatacat

SEQ ID NO: 398636 - DNA, 530 bp, Homo sapiens
caataaatatttcttagacacagaataagtaaatgaaaatttaaatcatgttgcaaagtgggtaattatgcttatcactctgttctgaacagtggtagatcttagttaagtcccctttctatgtgttaattctaacacggtttgaatggaaaaaatacaattttttccaatatgctccaaatatttgcaattgcttttcagcagttgtatagctttgctctgtcctacattgaaaccaggttgaaatagacacagctgtagggctatcccttatgcttgctattgttgtgactgataagtatggcataatgggatataagaacaaacgcatgtatatgtacaatagaaattgcctgtgcatctatttttacctatatcctgtccccactgccyataccatccccatcaggaaattagtttggaaatgaggcataaaattccatacctaaatgaatgcaaacaattttttttcctgaaaaaaaaagaaaaaaatgtttgtatggagggagtagagtggggtggcataacca

SEQ ID NO: 398637 - DNA, 557 bp, Homo sapiens
ttggtcaattactgggctgctgaggataatttcaaatatcatacatttgtatgttgctacctgtgtcataaagtgaaagatttttcacagcttattttaaatgatgtaatatgctccctcttgtagaaattataaacaatgcattttcaaaaacaattttagaaaagctrtttctccaaaatatatttcttggcattctctctcacagttcttgataaaatgaatgacatgcaaaatattttttcaaaaaaaatcacatatttttgaaagctgtcaaagaacagttcgatttttattcatatgttaatgattgtatacatttttttctaacccaagtttctaattacagattaatactgagcatggcagttattttaaattgactgtcacttgccttatttccaatggccttattgtttctggaaaagggatagaaggccccaaattgcatccaatgcaggcaaagttcataagttgtctcttcattaaacccacatatatcagctcctacctggggaaaaatttatcgacttcaaaatatatcagtcattaatttt

SEQ ID NO: 398638 - DNA, 557 bp, Homo sapiens
ttggtcaattactgggctgctgaggataatttcaaatatcatacatttgtatgttgctacctgtgtcataaagtgaaagatttttcacagcttattttaaatgatgtaatatgctccctcttgtagaaattataaacaatgcattttcaaaaacaattttagaaaagctatttctccaaaatatatttcttggcattctctctcacagttcttgataaaatgaatgacatgcaaaatattttttcaaaaaaaatcacatatttttgaaagctgtcaaagaacagttcgatttttattcatatkttaatgattgtatacatttttttctaacccaagtttctaattacagattaatactgagcatggcagttattttaaattgactgtcacttgccttatttccaatggccttattgtttctggaaaagggatagaaggccccaaattgcatccaatgcaggcaaagttcataagttgtctcttcattaaacccacatatatcagctcctacctggggaaaaatttatcgacttcaaaatatatcagtcattaatttt

SEQ ID NO: 398639 - DNA, 557 bp, Homo sapiens
ttggtcaattactgggctgctgaggataatttcaaatatcatacatttgtatgttgctacctgtgtcataaagtgaaagatttttcacagcttattttaaatgatgtaatatgctccctcttgtagaaattataaacaatgcattttcaaaaacaattttagaaaagctatttctccaaaatatatttcttggcattctctctcacagttcttgataaaatgaatgacatgcaaaatattttttcaaaaaaaatcacatatttttgaaagctgtcaaagaacagttcgatttttattcatatgttaatgaytgtatacatttttttctaacccaagtttctaattacagattaatactgagcatggcagttattttaaattgactgtcacttgccttatttccaatggccttattgtttctggaaaagggatagaaggccccaaattgcatccaatgcaggcaaagttcataagttgtctcttcattaaacccacatatatcagctcctacctggggaaaaatttatcgacttcaaaatatatcagtcattaatttt

SEQ ID NO: 398640 - DNA, 587 bp, Homo sapiens
tttttgtcagttgtcagaattcttgaggtagtcattgggaaaaaggcattgcaattgtgggtattaaaaattcctggggctcatttgacaagtgggtgggacacttcctttcccttaatctttacccaaaactcttaatctcccttttgggaattcctttcttggttgacaggatttcttacctatttayaaatattaagggtggaagttataaatattaaatgtagagcatgacttgccccaagttttcgttcctattatacctttgagcactgtaaatatcttaaggagagcttggcttgtttttcacaacataatgaaatatttcaaattgtttaaattatggttttaaaatttatatatgaagaccttagcaagtacttattattttatgtgccaagctcaattcatactaagttctaaagatctggcataacagtttgttttctgcttctttaaatcaatttttagtcatatgatgatttactagccttttttttttgcaagggtaagtctaggaattaggcatttaattttgatgtagcttttgaacagctgaaaaataaattgtatacattcacatatga

SEQ ID NO: 398641 - DNA, 587 bp, Homo sapiens
tttttgtcagttgtcagaattcttgaggtagtcattgggaaaaaggcattgcaattgtgggtattaaaaattcctggggctcatttgacaagtgggtgggacacttcctttcccttaatctttacccaaaactcttaatctcccttttgggaattcctttcttggttgacaggatttcttacctatttataaatattaagggtggaagttataaatattaaatgtagagcatgacttgccccaagttttcgttcctattatacctttgagcactgtaaatatcttaaggagagcttggcttgtttttcacaacataatgaaatatttcaaattgtttaaattatggttttaaaatttatatatgaagaccttagcaagtacttattattttatgtgccaagctcaattcatactaagttctaaagatctggcataacagtttgttttctgcttmtttaaatcaatttttagtcatatgatgatttactagccttttttttttgcaagggtaagtctaggaattaggcatttaattttgatgtagcttttgaacagctgaaaaataaattgtatacattcacatatga

SEQ ID NO: 398642 - DNA, 557 bp, Homo sapiens
ttggtcaattactgggctgctgaggataatttcaaatatcatacatttgtatgttgctacctgtgtcataaagtgaaagatttttcacagcttattttaaatgatgtaatatgctccctcttgtagaaattataaacaatgcattttcaaaaacaattttagaaaagctatttctccaaaatatatttcttggcattctctctcacagttcttgataaaatgaatgacatgcaaaatattttttcaaaaaaaatcacatatttttgaaagctgtcaaagaacagttcgatttttattcatatgttaatgattgtatacatttttttctaacccaagtttctaattacagattaatactgagcatggcagttattttaaattgactgtcacttgccttatttccaatggccttattgtttctggaaaagggatagaaggccccaaattgcatccaatgcaggcaaarttcataagttgtctcttcattaaacccacatatatcagctcctacctggggaaaaatttatcgacttcaaaatatatcagtcattaatttt

SEQ ID NO: 398643 - DNA, 581 bp, Homo sapiens
ctattaaatgatgactagggtattgaggagcagtcatgaagtaggaggaaaccaagagaaagtaagggtccaagaaccaagtgaagaaagtctttcatgaagtaagacctctcagtgaaatgctatgggtaggtcaagtaaataggcactgagaagtgaccatcaggttgatcaaagggagtgttgttaatgaacatggtaagaggggataaggtgaactggagaaggtctaagagagaatggggaaaaggagtgactagagaacactctttagtggaacttagctgtaaggggcaacagagattgggcagttgttggaggaaatgtgggtatrgagttaaagtttgctttgtttttgtttttaagatgagagattttacagcatggctggtatgaaaaataagatggataaatacagataaaaactgatgaaagggatgagaggtaaaaacttcagggaaaaacttaaatttctttccttaaagaaagtgtgagtggaaggaatttaatgtacaaataaagatttagcattagataaaagcacagagaattcattcatcccaatgggatagaaaatagat

SEQ ID NO: 398644 - DNA, 581 bp, Homo sapiens
ctattaaatgatgactagggtattgaggagcagtcatgaagtaggaggaaaccaagagaaagtaagggtccaagaaccaagtgaagaaagtctttcatgaagtaagacctctcagtgaaatgctatgggtaggtcaagtaaataggcactgagaagtgaccatcaggttgatcaaagggagtgttgttaatgaacatggtaagaggggataaggtgaactggagaaggtctaagagagaatggggaaaaggagtgactagagaacactctttagtggaacttagctgtaaggggcaacagagattgggcagttgttggaggaaatgtgggtatggagttaaagtttgctttgtttttgtttttaagatgagagattttacagcatggctggtatgaaaaataagatggataaatacagataaaaactgatgaaagggatgagaggtaaaaacttcagggaaaaacttaaatttctttccttaaagaaagtgtgagtggaaggaatttaatgyacaaataaagatttagcattagataaaagcacagagaattcattcatcccaatgggatagaaaatagat

SEQ ID NO: 398645 - DNA, 489 bp, Homo sapiens
atacctaaactggtcattctgccagtagggcccatgtttaatgcagccccttttttgatgcatgttttctgtgagtgtgctgggcatactgaagtcaattggcttaaggcaatttgtttcagtttgctgcctcagaacctgcaaatcccttgttccagctttttttcataacattgctttgacattttgtttttaatttttaagatttctaacaggaaaaaaaaatcctgaaagagaacctgaatacttagtgtcaagcatctctgccaggggcactagtgcttagtctattgtttgagttgcttctgactcagcttactatttacgrtaagtttgaggtaaaaagcatcttttgggcaaagagaaacataattaaatacccaagttagtgcctttggaataggtttgggaatagttcctgaaaaggtgggttaaatttatttttaatacattaaaattcaaagataaaaatatttgagtattgttgga

SEQ ID NO: 398646 - DNA, 582 bp, Homo sapiens
agggcaggggaccagaggagagagagctgccctacatttctgttaaagcagccccaaattgctagagtgaaagaaatcaaatactatagaaattgagttcttactaatctactaatctaatccactgatcaattctaatctaattataaaatgctttcaattttcaattaccattgaaaggtacaatttctaatccacaatagctctttctaaaatctaattctgtcaccctctgcagctgaacttgtaaggtaccttcaattctcctccaacttcccaaaccccatgaagaaactagagcggccccggtctttgctctgttgcctcccccactgctcacatctctagactttccctaycagttctccatatttccatcacaaaagcccaaggactaatacctaaaactctccttaaggaagaggaagctgagtgggctgagaaagattcttctaagcagtgttggtggaagaggaaagcgggaagacgagacatctacatgtgcgtaaacttgctctttttatagacagataaaagctcatagatattttgcattctccttttgcaaagagttaaataatc

SEQ ID NO: 398647 - DNA, 603 bp, Homo sapiens
ttctaaatattgacggataatttggccaggcgcagtggctcatgcctataatcgcagcactttgcgaggcygaggtgggtggattatttgaggttgggaggttgaaatcagcctggacaacagggtaaaaccccatctctactaaaaaatacaaaaatttgtcaggtatggtggtgggtgcccataatcccagctacttgggagggcgaggaggcaggagattctcttcaacccaggaggcagtggttgcagtgagccgaaactatgccactgcactctgggttgggtgacagagtgagactctttctctctctctcaaaaaaaatattttatatatatacatatatatatatgtatatatataaataaaaatgttgacagataattcgcttaatctgggcatgaatactacccaaaaaaaggagacaatttgcatgtgtgatatcctatataaaatacctaagtagaaaaataagtgaacatactcttttactcaaggaagacttttgtcttggggaaaaatatgtcttaaagtacttggtgaactaataaagtgcagcagcacgtgatggtttcacttgggtataattagggtaagaagag

SEQ ID NO: 398648 - DNA, 552 bp, Homo sapiens
ttcagcctcatctctttctctctatgtcccaccaccctccccttctccacttttgcctctaaactctttcctaaactctaagtcacttcagacacctgtgtttcctgagaaaaccatgatgttcacactgtggttctctctggtaggaacagtttggcctcacgttgttatctcacctgatggactctgccgatagttcaagcatcactcatactatgaagacttytcctgatccttcagattgacttgcccacccctccctttctctaatttgtaatgaatttattatacatattccacatttcactgcacatatttgtttataaatctgtctccttaatggaatataaataatctagggcctggagcccaatgtgttcatatcatggtctccaacactaaatcctttatctggcacttaataacctagtgctggttgaatcaacatttgaatgagtgtcagacagctattaaactgtaaattctcataggataagaatcatgtcttattcagctttgcatcccacttagcttctagtccagtgtattgca

SEQ ID NO: 398649 - DNA, 553 bp, Homo sapiens
agaatgcaagggcaagctggtggtgttaaacaacaacttttattaaagtgtcagtctacagcaacagcagagttactgctctttgcaagcagggctacaccataggcaatgtgccaaagtagcagctcaaaggtgcttctgcagtcatatttatactcacttttaactacatgcaaattaaggagcagtgtatgcagaaatttataggaaaagagtggtaatttctaggtcattaggttgttgtcatggaaaggggcaattaattccaggtattgtcacagcaatggtaaactgacatggcacattggtagacatcttatgaaaagctgcttccacaccasccctgtttttgctagtcctcaatttggtctagtgtctaagcctcacctctggagttgagtcccaacttccacctcagttacactatgagcaaatgagattttttttcctgtgatacaaggatgattgaaaaaaagcaaatcaattagtgcaatacacaataaaacagattaaaagataaaataccatgaccatctcaatagacacagaaaaa

SEQ ID NO: 398650 - DNA, 544 bp, Homo sapiens
cacaaagaatatatattaaaatactatcaatgtttctcttagggtgggagatttcaggttaatttttcattattctttgagtttgccatatttctatgatgtaaatgttaatacatagacttccttttccaaaaaaaaaagcctagcagctttacaataaactgaattttcattcagtgaatgttgttttacatttaattagtcataaagtgaacataagtacaatgtggatagtacacatttaaggcataatcaataactcttactgattttgtggaatcaagtagaaggaatcatttaattgttcctaacaatttctctttcattctactacatgaaatgctccctctaactaaggacataacatgaatcatgttctagttttccaaatcaactgtgttttcatgtttgttctagggttagtgccgagggcaagggatgcaagatgaaataagttttggtaatgatcaatgaaccaaaagggaacaaatttaaatgttactgagtttctcrgaacttctaaaatgttagtgttcactgagaa

SEQ ID NO: 398651 - DNA, 616 bp, Homo sapiens
tcccctcctgcattttggcctaaaatctctatgaatgcgataagctggggcagtcataggactcattttgtttgtttcccatctctcaggggaaaactgatccttaatgatctaatttcttaaaaatttgtttcatgtatttgtttgcttattgttttgctttttgttttgttttgtttttgagcgtttcaggtaagaaggtaaatccagcccytattactctaatttagctagaatagggaatacaaaaggatgcaaaattgaattaatagtaccatatgactttctttcctatattagtttgttaccaacatcctcgtggttaaaatgaaactttaggtttccctgtggatttttctaatgtagtcatgaagcaaaattccaacgacaatggatagttgactgcacaatacaacaactgttcttaatgaaataaagaagattcacattcctacattatattagtgagggcaatatgagctggtgtaacaacagttctctatattttagtgactgaacgtgaagaaaagtttcatttcttgttcacattggagtagaacatgatgtttccaatgtgctgcagactttttttgatgaaataacttggggacccaga

SEQ ID NO: 398652 - DNA, 600 bp, Homo sapiens
tttaataatgattcaccaattcatgatttgtttgaccaaaaaacattcatgtcattatcagtaaagatttcttgcatggtgatggccacaaagcattatcacaggtagtattgggaggaggaggcaatgtttatgacattaagaaaagacagctagctctcttggacctctgcaattaatagaagaaatactagtatcataaaaataaagcttcaaggtctacctttgtaactggacacttatatacttattcccggcctgagagtaatatattacagattcaaaggtgtctgaayagtaaataaattaaaacatcacacgaaagagaagtaataggaagtgagagttggaatggatctagaagttataaggtttaaaattctcatttcatgtatgataaaactaaagagcacacagagtacagacaattttccacatcttggtaggtctttcccacttcggagcatgcaatcatggcttctctttgttgatgtaagagttggttttggtggtgaaggcttggtgagtcagggcttgctgggttggacatgacgtttgaatacacagttaaagaactcatctaataacatgcagctgcaa

SEQ ID NO: 398653 - DNA, 631 bp, Homo sapiens
tcaatctttaaaataacgctttcggataattattcttaatgtctccattttacacaatgtatctctagttcagatctttcttcggacctacagacttctggaaccttctgtctccaaaactgatccttaacccctaaccctgttccaccccaattgaatcttttcaatttcagatgataataatctcaactttccagttgcccaggcccaaaatcttgggttaaggggtcttgatcctgttctttctttcacatcccacattctatctgcctggaaatcctgtttcaaccttcaaaacgtatcccttcttagaagctcaagccaccaaaccatcgatcttacctggaaatgcctcttctctgttctcccagatactactctttgcccttaccctcaataccacagagcattgtccttttagaacaagagacagctcatctcatacctctgctaaaatcctaccactggctgccaacatttagagtaaatgacaaaatgcctgcgatggccttgcatgaactagccccgtcacatctctgacctcaagacctcctgctgtyccttcctcctcattgactctactcagccacaatggcctctacaatattcttctaacatgccaggcccattt

SEQ ID NO: 398654 - DNA, 548 bp, Homo sapiens
gtctgccaaaaatgtttgtttttttccccacctgcattgggtgaaccatatatttaggtctaaaatgagtgcctttataatttagtaagagctaaactcagaggcactctaatacattattaagattaaaaaaatcaaacactaagacaccaaaaaattataaaggcttagttcttataattaattggaaatgtgttgcctacactacatattgagaacctatttggatataatttgatgtgttataatcataggatatagacacgcaatcgtttgaccwcttgcctactctatgttcttccagtaagttttatcgaacattgtttcactttaggatggtctatgtcagatataatatttttcctgaattatagaaacagctaccgcttttactgtctttttaatatcagtactatgcttggcttttcacatatattatctctaatactacattaacccagcaaggactgaccctatttccacctacagacaaggcaactgcagttcagagaatataaagaacttgttcaatttactgaactaagtca

SEQ ID NO: 398655 - DNA, 548 bp, Homo sapiens
gtctgccaaaaatgtttgtttttttccccacctgcattgggtgaaccatatatttaggtctaaaatgagtgcctttataatttagtaagagctaaactcagaggcactctaatacattattaagattaaaaaaatcaaacactaagacaccaaaaaattataaaggcttagttcttataattaattggaaatgtgttgcctacactacatattgagaacctatttggatataatttgatgtgttataatcataggatatagacacgcaatcgtttgaccacttgcctactctatgttcttccagtaagttttatcgaacattgtttcactttaggatggtctatgtcagatataayatttttcctgaattatagaaacagctaccgcttttactgtctttttaatatcagtactatgcttggcttttcacatatattatctctaatactacattaacccagcaaggactgaccctatttccacctacagacaaggcaactgcagttcagagaatataaagaacttgttcaatttactgaactaagtca

SEQ ID NO: 398656 - DNA, 481 bp, Homo sapiens
acagcaggcagtctgctactgtatcatcttcatgaacacggtaccaccttataactattcaattttagttcccatacctttcactagtttctggattctgagttmattttgggcacctcagtgctgtctccagtagatattccaaagcaagtcctgaaatgagcagctgctaagaggggagaggcagttgggaaggcatggaggtctaaacagaatagtcatggggacaaggagcaggggtggatgctctgtgtgttattaaaaaatgaatatgcgccctcttgccagctagaggaaccatctttataaaactgaaatactcctttctcacacctccgtcaactactcagaatgctttgactgtgattttttactgacaacttggcttgtgttataataccaatatcacactgaatggaacagattgaaagtcttacagatattactgtccttttccattatttatcagctttccaagcag

SEQ ID NO: 398657 - DNA, 507 bp, Homo sapiens
ctaagctgttgtggatggcaaaactaaaagagcactgtaacacatgccctctgggggctttgaggattgtggatactccctgctagacactgccataggcyttacatggaatttttgcacctgccgtgcccaaaggcacttgccctggatcctgcaccctctcacctaaatgctccctcctgcaaggagttgaacacaatggattcaagtaagtggagtttgaccctgctggcaccaaagcagtgggctagccccattgccctcactccagttcccatctgtgaaggagtcaggggaaatttcctgctttattaaaaaaatggaacctacaatgaataaattttgttttattcatcaaacacagaactcggaagaaaaatagaagtcaacgaattcagtgattaacaaaatgaatttagaagaatctcccttttggtgccattgttgggaaagagagacaagctgaatcagtaggggtcctggcttcttgaattttttttttttcac

SEQ ID NO: 398658 - DNA, 489 bp, Homo sapiens
ccttttggtgccattgttgggaaagagagacaagctgaatcagtaggggtcctggcttcttgaattttttttttttcacctttgtgtttctgtaggtttctttttacattttgtttttctttattacatgaaaaagtacttaaaataatgatttaatctaaatattttatattaaacaagtagaaatcatgtttctaaggaagtaaattattttacgaagtcataactctaatacaagacataattggaactagtaccagggtttcttgagttttagtgcaccatgttttttatttcacttttatattctgttgaagatctaagagctcaactggaatgccataaagaacatgaaggcttgacaaaaatagaaaaaatgaaagaaatgagctataaagaaggctgagatcattaatggttattattttctactkcatgttgccttcatgtaattattcatccacctatttgaatatattgtgcatgttg

SEQ ID NO: 398659 - DNA, 642 bp, Homo sapiens
agtgggtttgtaattaagagacataaacattttcagatctgggttttttttggtggtggttttagtaaattgtgccttttaataaatttgttcatttcatttagttatccattttttggacatgaaattgcttatatcattttcttatttatttagagacagarccttgctgtcgcccaggctggtgtgcggtgttgtgatctcagctcactgcaacctccacctcccaggttcaggtgaacctcccacctcagcccaccaaatagctgggactgcaggcatgcaccactatgcctggctgatttttgtatttttagcagagacggggttttgccatgtttcccaggctgttctcgaactcctggcctcatttgatctgctcgcctcagccccctcaaagtgctgagagtacaggcatgagccaccacacccgccttcttatctttttaataagtatagggtctagagtgatgtccactcattttatatcggtcatttctgtcttctctcttttcttaatatgtccagctatacattgtcacttttactagtcttttcaaataacagctttggtattattgatttttttctcaatttttacacgttttctcttattgagttatgctttttattatttatttt

SEQ ID NO: 398660 - DNA, 642 bp, Homo sapiens
agtgggtttgtaattaagagacataaacattttcagatctgggttttttttggtggtggttttagtaaattgtgccttttaataaatttgttcatttcatttagttatccattttttggacatgaaattgcttatatcattttcttatttatttagagacagaaccttgctgtcgcccaggctggtgtgcggtgttgtgatctcagctcactgcaacctccacctcccaggttcaggtgaacctcccacctcagcccaccaaatagctgggactgcaggcatgcaccactatgcctggctgatttttgtatttttagcagagacggggttttgccatgtttcccaggctgttctcgaactcctggcctcatttgatctgctygcctcagccccctcaaagtgctgagagtacaggcatgagccaccacacccgccttcttatctttttaataagtatagggtctagagtgatgtccactcattttatatcggtcatttctgtcttctctcttttcttaatatgtccagctatacattgtcacttttactagtcttttcaaataacagctttggtattattgatttttttctcaatttttacacgttttctcttattgagttatgctttttattatttatttt

SEQ ID NO: 398661 - DNA, 599 bp, Homo sapiens
cattgtcacttttactagtcttttcaaataacagctttggtattattgatttttttctcaatttttacacgttttctcttattgagttatgctttttattatttatttttcctactttgggttaaattcattatatttttctagttcwtaatgcacaggttagatcattaaatttaaatatgtttttctaatataaggattgaagctttcaatatcttcccaagacctacattagactacacactacaaatttcaacaggttgcttttgttgtcagtcatttcaaatatttcctagtatttttttaataaataaattttttgtttaaacggtatgttatttgaaagtgtactgtttaatgtttaaatgcaaggtgattttcagacatttcgttatttttaatttaatgttctcatgtcaaaataagttcaatatattttaatgtattcagacttattttatggaatactatggagtctattttgatcagtgctccatgtgtcttcaagttctttgatgttttcttttgcagtgtgcaactgctattacatacaggcaatgaatttcagatattttatttcccatattgtatttttcagc

SEQ ID NO: 398662 - DNA, 537 bp, Homo sapiens
cacacacagttcaacagaattacttcagggcagtgaacccagtctacctctcagatctatgctgctatcctcctaattgtggtccatcatagccacaggccatgggttctagaatctgtttcctcactgtagtttaaattataatttccatatttatctcatttgttataactttcaaatcgatgatccactctccctttctcttatggataaattagccaacctattttacactctgttaattttaccctgtttttttttagatggagtcttgctctgtcaccaggctggagtgcagtggcacsatctcagctcactgcgacctcctcctcctgggttcaagtgaccctcctgcctcagcctcccaagtagccaggattacaggcacgcgccaccacacccagctaattttttgtattttagtagagatgcggtttcaccatgttggccaagatggtctggatctcctgaccgtgtgatctgcccgccttggcctcccaaagtgctgggattacaggcgtgagccaccacgcccgg

SEQ ID NO: 398663 - DNA, 571 bp, Homo sapiens
gcaaaaactgccaccaggtgcaccagatgcatctctggaaataggtaggagggagtcttacacctgtcagtgctagaaagtgcgctctgcggagttctcagttgttccctctctgcaacgaagtaaaaagaagggatgcgtccgaggtttttgacacagacatgctggggaaacgcgtcagttcaaggagctctgactctagtgactactgaagaccagtgatgcactcccatgcctagcatctcctcttgacttctgtttccctgcagccaagctcagctcctggccctggaaacccctttgggtaaagcgtctttaagtcaagaatcaggctcctgtgtgcacgtgtggctttcttagcaaaaaactagcacaggcggctcaggagtagagtctagctagggtcttcccgcgcccctccctcactggtttctctgcccctgcctcgctttctcccagagctaagagcctaggctccggacctagggtttgggagcagtcagcacgacgtcctcgccccatcccgcggctgatgacaccsgtgcccagaacgtgggtgtgggtagggagg

SEQ ID NO: 398664 - DNA, 499 bp, Homo sapiens
gttatggctggggagtaaaaccattcagagaaaacactgtcattttcctctaatttgcaaattgcagctattcatgttggattgaatagctgagggaaaaagagcccctagttttcacctgcgtttatggagaagaggctggtagtctgaggaatgcaccaacttgtagcttgggatgcatgcaagctagataaaacagttggyttgtatgtgtcctggttaatcactgcccatgttggaatatgtgtttcatataccaacaatctcttccagtagccctttttgcgtgtgatcttagacgctcctgtcatgtaattccagtccccaggtttccagtgtctataagcctgcaaaatgagtagagagaataatggtatacacacccattgttcaaaggcacacttagagggagagaaaaaggatatagtgaatcttgtcggggatttctaggttcagttcaattaagattgtcctacataaaagaaactcctccaaatga

SEQ ID NO: 398665 - DNA, 589 bp, Homo sapiens
taaaatatattttcacacagctatcttggtcattactagtcaagttaatttcctgtattcagactgcttttktattatcttacaatttacttctcaatcatatatatcaaggctactggtagggaaaatgatctctcaggtcagcttactgaatgatcataagacacaaggcagggagtgagaactgtggaatttacagtggcagcaagctatagctttcgtatctccatgtagtattcccattcatcttgcaaaaatatcagacttttctctcccaaaactgagaaatgatgacatcctgcctattttcctggccccagggatgaggtacgtggccaggtcaaatgaagcaggtgattggttcctttgtaatcatttgacctcatccaggccaattagaatcttccccaagatgtttctctcagagataaatgggaacactatctcctctctctggaatttttaagctagggagatgtgattctggggctcccagtggccatccaacacaaggagagactttctgtagcatatagtcaagtagatgtgagtagggctgagtggtgggagagaggggagccctgctgat

SEQ ID NO: 398666 - DNA, 589 bp, Homo sapiens
taaaatatattttcacacagctatcttggtcattactagtcaagttaatttcctgtattcagactgcttttgtattatcttacaatttacttctcaatcatatatatcaaggctactggtagggaaaatgatctctcaggtcagcttactgaatgatcataagacacaaggcagggagtgagaactgtggaatttacagtggcagcaagctatagctttcgtatctccatgtagtattcccattcatcttgcaaaaatatcagacttttctctcccaaaactgagaaatgatgacatcctgcctatyttcctggccccagggatgaggtacgtggccaggtcaaatgaagcaggtgattggttcctttgtaatcatttgacctcatccaggccaattagaatcttccccaagatgtttctctcagagataaatgggaacactatctcctctctctggaatttttaagctagggagatgtgattctggggctcccagtggccatccaacacaaggagagactttctgtagcatatagtcaagtagatgtgagtagggctgagtggtgggagagaggggagccctgctgat

SEQ ID NO: 398667 - DNA, 589 bp, Homo sapiens
taactgagctggagttttctcatatctaaaaaaaggttgcattaaatatttattgagttctgttgaacatcttgtgattttgctatcctgtataacttgtgcagaaaaaawcaaaatgaaacatataaaactctagcagttggtattctgcttatacatttaagcaagagatcgagaggggttagtttatgcactgaattaatttgattttctgccacaatgcctactaagaaataaacagcaagtgccttaacaggcattttataataagaaggaatatcaatggatttcccaagttttggggttcagatgtgagcttgaccttcccttgttgataagacacaacttcatgattttctacctgtctacctccattacaaccagtctccttcatttttttgtcaggctttttaagctctgaacaaaaccttcatggtccagaatttcccagaagtggctcacctttaaaaagcaaaattccaattaagaaatgtgagaatgggccctgctaacacgtccctctcctcacctccctcctttcttcactgccttaagattgaagtgattttgtcaatggtgtcaatgcctg

SEQ ID NO: 398668 - DNA, 633 bp, Homo sapiens
taagacaccaacattccaagatggaagagacatgggttcctgattgactacttgaaggtgatctgttaagaaataattgcctgaactacatttgcctccaccatgtgaaataaacatttattaagtcataccacctggatttaaggagggtttgttacagtatctagcattgaataccctaattcattgctacattggcacactggtgatacctatggattagtgatgagtctactcaatgtgagacctctccatttctcattgtccatttaccctatctactaaatattaattttcacatactacttattgatgatgatgccagwttttaattatcccatgtacctcttgatttttttccttcagcccaactccccaatgaggaagctgacatcatgtatcttatatagataaaatcctatataaggatttaatatagaatttttatatatggaggatcagtccattgaggaatcatatctagaaaggctctcaattagacataaatttgccccctaaagtctgtattaggtcagttcttgaaaactactttttctattctataaatctaaatttttacataaaaatttactattttccttaatttatatatcatggatagaaaacaagatt

SEQ ID NO: 398669 - DNA, 633 bp, Homo sapiens
taagacaccaacattccaagatggaagagacatgggttcctgattgactacttgaaggtgatctgttaagaaataattgcctgaactacatttgcctccaccatgtgaaataaacatttattaagtcataccacctggatttaaggagggtttgttacagtatctagcattgaataccctaattcattgctacattggcacactggtgatacctatggattagtgatgagtctactcaatgtgagacctctccatttctcattgtccatttaccctatctactaaatattaattttcacatactacttattgatgatgatgccagtttttaattatcccatgtacctcttgatttttttccttcagcccaactccccaatgaggaagctgacatcatgtatcttatakagataaaatcctatataaggatttaatatagaatttttatatatggaggatcagtccattgaggaatcatatctagaaaggctctcaattagacataaatttgccccctaaagtctgtattaggtcagttcttgaaaactactttttctattctataaatctaaatttttacataaaaatttactattttccttaatttatatatcatggatagaaaacaagatt

SEQ ID NO: 398670 - DNA, 612 bp, Homo sapiens
gtacagtatatgtaatcttctttcctactggctaatagtaagggagtaagggagggaaagcagagagggaaagagagatcaatacattaagaataaccccacatggctaaaagaaactgacttctaaagacaaagcaattttataatctaaaatactatgtaatacaaataaacttaaaagtgtgcttgccctgaagaaggttgaatgaagaggactgttgtggttttctaaataatgtcctatatttccctacttcaatgagacatttgtttctaaaagaacttatctctcagaaatgataaaatcaataatttttctctctccgtggttccttaaaacaaaaatggccttatttcttttcattcttctttctacctccactctttatcatggccaaactaggggaaagtagcattgtgtaattacttagaaataagtagagatcacttcatgatttatgattttcaggttcctgataygaaaaatgtgaatttggacccaataatctctagctttttctttagttttaactatagttctttgattttagaccttgctgttaaagcaccgcttcttgccaataattttgaactagagatcagactgttact

SEQ ID NO: 398671 - DNA, 571 bp, Homo sapiens
ttgaatgaaggtgctcaggctgttgtcattggagtcagacaacctaacttgtgcactggctgaacagatgggtaattgtgtcatcayagccaatttcttaacttttccccactcagcatctttatctgtaaaatgaggatgtcatcagtatttacttattaagagacttgtgaggattaactaaataaatcatagacaagaggcatgtagtctacatagtaagtgctcaataagtggcagtgtgttattgatgataatgatcatgaccacaacaacaagcttgccacgtgcctgtttttatgattacattgtgataacagataatagaaattacacctccttgttctgagattagcacagcatttcttgcaaatcttccagtggctgactaaagactggtgtttctacaagctcattcagaaaacccctgtaagcaaatcacagacataaatgttgaattaagatgaccactttcaggaagagtgtctgaggctgtttggttccttccctgtgggagagaattttcaatggttaccaatcaggatcattccttcatttgttcaaattaacc

SEQ ID NO: 398672 - DNA, 575 bp, Homo sapiens
aagtagacactgcttggatgacactccaaattatcttaatagtctgcagatctggctagacaattatgttttgctttcagaaataatatatttttgttttcttataaaagtctttgaaagactaaatcttagaagcatttgtaattaatagactacaggacacaatagtaatttaagagataatagaacaagtttattcaggtgtctggggcaagttgactcttagttstaaacgttaaacttatttaacttggattttctgtaactcaaatttttatctataaaatggaggaatatacttcaataacattaaaaatctataaatttgggctttgggttccaaattctttctccaaatgataaaaaggtttaacccagacattgtggttgcctaaaatttttcattttctgtattcatacacaatcttccagcttgcaatttggatagctgtcattttaaaaaattgtgcaaaaagctaatgcttttttgccagaagacaaaacaaatttctgtggacctgaagtaatacaaggcaatgccatgtattagaagtatgtgcttcacggtagacatt

SEQ ID NO: 398673 - DNA, 614 bp, Homo sapiens
tgccttcatttctggaaaactgccaaagggcccatgtatagttcatttctctgcagtgtgtaattgcagcttttataaataagattaaaaaagagccttggtggtctatggtaacccttattttctttggagatgttttccaggtggccagtgttctgcaaagtgggtataactgctgcttcagcataaacacaaagstctgcaattttgccaggagagaagtaaattatttgccaaaatagaaccatgtggaaaactcagaagttttaggttctgaagaacttttatgggctgacattttgcattctttagctcagcaaccccaaatatctactatataattaagaacaacatccgagtaatactactgtcagcatctggatgtttatggagctctatcatgcacaaagatgtatagattactgcataaaaaatatatctctgctcatgatgtaaaccaacactaactgaagaagagaatgcactaataacctgggcatggcggtgcaatctgtagtcccagcaactttgggggctgaaacaggagaattgcttgagcccaggagtttcaggttacagtgagccctccagcctgggtgacagagccagagctt

SEQ ID NO: 398674 - DNA, 614 bp, Homo sapiens
tgccttcatttctggaaaactgccaaagggcccatgtatagttcatttctctgcagtgtgtaattgcagcttttataaataagattaaaaaagagccttggtggtctatggtaacccttattttctttggagatgttttccaggtggccagtgttctgcaaagtgggtataactgctgcttcagcataaacacaaagctctgcaattttgccaggagagaagtaaattatttgccaaaatagaaccatgtggaaaactcagaagttttaggttctgaagaacttttatgggctgacattttgcattctttagctcagcaaccccaaatatctactatataattaaraacaacatccgagtaatactactgtcagcatctggatgtttatggagctctatcatgcacaaagatgtatagattactgcataaaaaatatatctctgctcatgatgtaaaccaacactaactgaagaagagaatgcactaataacctgggcatggcggtgcaatctgtagtcccagcaactttgggggctgaaacaggagaattgcttgagcccaggagtttcaggttacagtgagccctccagcctgggtgacagagccagagctt

SEQ ID NO: 398675 - DNA, 372 bp, Homo sapiens
cacaaatgtaaaatataaaataaatatgtgatgccataaaagcaagtgaaaggagaaccaacattatcaggagttccaagaaagacttttctaagtgctatttgaactgagaccagaggaatgcattaagcaagtagtggcagtatagggggagtcactgaaatgagcaataaagggatacctttgactaagtaatttataaacaacagaaattcatttcttagagttctagaggctgggaagtccacaatcaaggtgccagcagattcagtgtctggtgagggctctcggcatcttgggcaccttctatgtgtcctcacatggtggaagrggggaacaagctgcctcagtcctcttataaggacactaatc

SEQ ID NO: 398676 - DNA, 544 bp, Homo sapiens
cacaaagaatatatattaaaatactatcaatgtttctcttagggtgggagatttcaggttaatttttcattattctttgagtttgccatatttctatgatgtaaatgttaatacatagacttccttttcmaaaaaaaaaagcctagcagctttacaataaactgaattttcattcagtgaatgttgttttacatttaattagtcataaagtgaacataagtacaatgtggatagtacacatttaaggcataatcaataactcttactgattttgtggaatcaagtagaaggaatcatttaattgttcctaacaatttctctttcattctactacatgaaatgctccctctaactaaggacataacatgaatcatgttctagttttccaaatcaactgtgttttcatgtttgttctagggttagtgccgagggcaagggatgcaagatgaaataagttttggtaatgatcaatgaaccaaaagggaacaaatttaaatgttactgagtttctcagaacttctaaaatgttagtgttcactgagaa

SEQ ID NO: 398677 - DNA, 607 bp, Homo sapiens
tcgacagaatcaaaagagccatatgatcatttcagtagattgtgaaagagcatttgataaaattcaacatcccttcatgataaaattctcaagaaattggatatagaaagaacatacctcaatgcaataaaggccataagtgacaagcacatagctaataccatacggaatggggaaaaacggaaagccctttccactaaggtctgaaacaagataatgatgccactttcaccactgttattcaacatagtactagaaatcctagccagagcaattaggcaagagaaagaaataaagggcatccaaattggaaaggaagaagtcaaattagccttggamacacatgacatgatcttatttttagaaaaacctaccccaccaaaaaattcttagaactaatcaacaaatttagtttaattgcaggatacaaaatctacatacaaaaatcagtagtgtttctatatgctaacaataatcaatctgaaaaagaaaccaagaaagcaatctcctttacaatagctacaaaaaaaaaaacctaggacaaaattaattagaagatctccacaaggaaaactataaaatactaatgaaagaaactgaagagtac

SEQ ID NO: 398678 - DNA, 607 bp, Homo sapiens
tcgacagaatcaaaagagccatatgatcatttcagtagattgtgaaagagcatttgataaaattcaacatcccttcatgataaaattctcaagaaattggatatagaaagaacatacctcaatgcaataaaggccataagtgacaagcacatagctaataccatacggaatggggaaaaacggaaagccctttccactaaggtctgaaacaagataatgatgccactttcaccactgttattcaacatagtactagaaatcctagccagagcaattaggcaagagaaagaaataaagggcatccaaattggaaaggaagaagtcaaattagccttggacacacatgacatgatcttatttttagaaaaacctaccccaccaaaaaattcttagaactaatcaacaaatttagtttaattgcaggatacaaaatctacatacaaaaatcagtagtgtttctatatgctaacaataatcaatctgaaaaagaaaccaakaaagcaatctcctttacaatagctacaaaaaaaaaaacctaggacaaaattaattagaagatctccacaaggaaaactataaaatactaatgaaagaaactgaagagtac

SEQ ID NO: 398679 - DNA, 556 bp, Homo sapiens
gcccttcatgctctgagagtagaggttcactttggttcaagactcatagctctcagctgtaaagtcacaatttccatatggcttgtagctrgggcactgaagatatttccctagaatatgatcacttttgtgggttgaatgccctttgatttggagcaggtgaaagaatttaataatgattatcttggtgccacctacatgcaaatcccactgaggtcagtgacaaaatacagaaagaaactcaggtttggcatgtcatgccgaggagatatcaataatgattgcctttacacacactgatgcattacatggataggttggtccctgcagagaggtcatttgcagtatatgttggaagaatctagaatgggagagatgaataaattcagaccagagctgacatacagaaaattttcagttaaagttttatatatctaattagtatgaaaggtaaacctgggcaaggaaattagaaagaattcagaattcaaaaatcttttagaaataatccaatttattttctcagaataactttggcatgatttttcatagagca

SEQ ID NO: 398680 - DNA, 556 bp, Homo sapiens
gcccttcatgctctgagagtagaggttcactttggttcaagactcatagctctcagctgtaaagtcacaatttccatatggcttgtagctggggcactgaagatatttccctagaatatgatcacttttgtgggttgaatgccctttgatttggagcaggtgaaagaatttaataatgattatcttggtgccacctacatgcaaatcccactgargtcagtgacaaaatacagaaagaaactcaggtttggcatgtcatgccgaggagatatcaataatgattgcctttacacacactgatgcattacatggataggttggtccctgcagagaggtcatttgcagtatatgttggaagaatctagaatgggagagatgaataaattcagaccagagctgacatacagaaaattttcagttaaagttttatatatctaattagtatgaaaggtaaacctgggcaaggaaattagaaagaattcagaattcaaaaatcttttagaaataatccaatttattttctcagaataactttggcatgatttttcatagagca

SEQ ID NO: 398681 - DNA, 556 bp, Homo sapiens
gcccttcatgctctgagagtagaggttcactttggttcaagactcatagctctcagctgtaaagtcacaatttccatatggcttgtagctggggcactgaagatatttccctagaatatgatcacttttgtgggttgaatgccctttgatttggagcaggtgaaagaatttaataatgattatcttggtgccacctacatgcaaatcccactgaggtcagtgacaaaatacagaaagaaactcagktttggcatgtcatgccgaggagatatcaataatgattgcctttacacacactgatgcattacatggataggttggtccctgcagagaggtcatttgcagtatatgttggaagaatctagaatgggagagatgaataaattcagaccagagctgacatacagaaaattttcagttaaagttttatatatctaattagtatgaaaggtaaacctgggcaaggaaattagaaagaattcagaattcaaaaatcttttagaaataatccaatttattttctcagaataactttggcatgatttttcatagagca

SEQ ID NO: 398682 - DNA, 556 bp, Homo sapiens
gcccttcatgctctgagagtagaggttcactttggttcaagactcatagctctcagctgtaaagtcacaatttccatatggcttgtagctggggcactgaagatatttccctagaatatgatcacttttgtgggttgaatgccctttgatttggagcaggtgaaagaatttaataatgattatcttggtgccacctacatgcaaatcccactgaggtcagtgacaaaatacagaaagaaactcaggtttggcatgtcatgccgaggagatatcaataatgattgcctttacayacactgatgcattacatggataggttggtccctgcagagaggtcatttgcagtatatgttggaagaatctagaatgggagagatgaataaattcagaccagagctgacatacagaaaattttcagttaaagttttatatatctaattagtatgaaaggtaaacctgggcaaggaaattagaaagaattcagaattcaaaaatcttttagaaataatccaatttattttctcagaataactttggcatgatttttcatagagca

SEQ ID NO: 398683 - DNA, 574 bp, Homo sapiens
tgtttctgttgcctccacagccactgaagacaaagggctcacataaaaatgtcaaagtgttgtagtagaatctggtcaaatatgaattacaggtgcccttcttcggaggatagttgcagtattctgtgaatgagaattccagagtcaggttttctttactactcttttggcattcttgttctcacaggctcagactactaaaacttccaacccacataaatctaactaattttacccctggggaacaagacagagttccctaagcatatggggaaattgttccagactacagactgggtccatgacacagagagaaatagagaagcacaatgaggtwcttatactattttagagctgagaacaagaaagacctgaggtttccttcatctttcgcagtaaagatatcccatttcttgactccacatgcttcccatgtcactggaagtgaacaactcatcagcttcctcaaggacacagttcagagcccttactttcactctctcctctctgcctgccagagtctgtgcaaatacacaagctaaaaagacctctcacccactacacctactctgaa

SEQ ID NO: 398684 - DNA, 574 bp, Homo sapiens
tgtttctgttgcctccacagccactgaagacaaagggctcacataaaaatgtcaaagtgttgtagtagaatctggtcaaatatgaattacaggtgcccttcttcggaggatagttgcagtattctgtgaatgagaattccagagtcaggttttctttactactcttttggcattcttgttctcacaggctcagactactaaaacttccaacccacataaatctaactaattttacccctggggaacaagacagagttccctaagcatatggggaaattgttccagactacagactgggtccatgacacagagagaaatagagaagcacaatgaggtacttatactattttagagctgagaacaagaaagacctgaggtttccttcatctttcgcagtaaagatatcccatttcttgactccacatgcttcccatgtcactggaagtgaacaactcatcagcttcctcaaggacayagttcagagcccttactttcactctctcctctctgcctgccagagtctgtgcaaatacacaagctaaaaagacctctcacccactacacctactctgaa

SEQ ID NO: 398685 - DNA, 574 bp, Homo sapiens
tgtttctgttgcctccacagccactgaagacaaagggctcacataaaaatgtcaaagtgttgtagtagaatctggtcaaatatgaattacaggtgcccttcttcggaggatagttgcagtattctgtgaatgagaattccagagtcaggttttctttactactcttttggcattcttgttctcacaggctcagactactaaaacttccaacccacataaatctaactaattttacccctggggaacaagacagagttccctaagcatatggggaaattgttccagactacagactgggtccatgacacagagagaaatagagaagcacaatgaggtacttatactattttagagctgagaacaagaaagacctgaggtttccttcatctttcgcagtaaagatatcccatttcttgactccacatgcttcccatgtcactggaagtgaacaactcatcagcttcctcaaggacacagttcagagcccttactttcactctctcctctctgccygccagagtctgtgcaaatacacaagctaaaaagacctctcacccactacacctactctgaa

SEQ ID NO: 398686 - DNA, 565 bp, Homo sapiens
gtgcttcctgcaatcttgctaccctccatgattttagcaagcgaacgggatataaattccgaattctcacaaaacctgcaattaccttctcatttggaatccagggactctctttctcccaagggctgctaccaacttctcttctctgaaagaatccttcgtaatctctgcttgaaagcctttaaaaaaggtaatgttggtctctctcatgcaggatgggaaaaagacgctgaaacagtcagattttctctttgaaaaaacattttaaagaaaatatttttaaaatatatgtttcaaaacatattcaaaacctaagaaataattttcttagtgaattttgctacgggatagttgtgaggtgagtttaggggctttgctaagggataaatgaaaagcctaccagggtacacttcttgaaataaaaaasaacattagggttttttaattgttgttggttggttggttggttggttttaagagacagggtctccctgtgtcacctaaacctgactacaatggcctgttgatgactccctgcagcctcaaacttcagctcaagcaatcc

SEQ ID NO: 398687 - DNA, 547 bp, Homo sapiens
tgtaagcagagccttgataagcactagcatactggggcttgtccactcagaatacttcctcttggaaaccagccgccatgctataaagcagcttgaactacgctatgggatgatgagatgccccatggagacagaacctagaagagaggtcatcctggacgttgtggctccagttgagctccctgctaagctcccagatgaatgcagctaaatgaatgaccacagctacatcatgtgggtatatgaactgcccagccaagctcaggcaacctacacaactgtgagaaagagtaactatattgctttaagtcatgaagtttggagatggtttcttatgcagcaatagatactggataccaagtttattctgagaggcaacaggtccagctaaaatgatttgtttccccatactctcttgcaacwaggggtgaccacaaactaggacataaactgggaaacttttgtattcctgacacagggaatacccctttcaaactgctccctcacttctttcttcttccagtccaaagatagacattacacagag

SEQ ID NO: 398688 - DNA, 473 bp, Homo sapiens
tgtcaggccacagatcaggcactggaaccacaaagaagagataaaagacacatcatcccgcccctcagagaactggcagagtcggaggcygtcagcttccttcttaggattcagtcattggagaaaaggcccctcatggggggccgaatgtgatggaggccttgacatgaaagtgagatttctgcaggggtttccacgtcatatccaagccaggccatctgggtcagaggctttggattgaggctggcagtgaggacagggtgaggcttccaaggagctcttcagccggctggccaccagtgctcctccttctccccctccttcctctcctcctctttccctatgccaggagggcaggctatttttagtcaggcatgggcaacagcagctggcctctgggatctagttactccttgaagtgaagtggggagggggatctcagaccaaaacaacagctccaaatcagaagccct

SEQ ID NO: 398689 - DNA, 473 bp, Homo sapiens
tgtcaggccacagatcaggcactggaaccacaaagaagagataaaagacacatcatcccgcccctcagagaactggcagagtcggaggccgtcagcttccttcttaggattcagtcattggagaaaaggcccctcatggggggccgaatgtgatggaggccttgacatgaaagtgagatttctgcaggggtttccacgtcatatccaagccaggccatctgggtcagaggctttggattgaggctggcagtgaggacagggtgaggcttccaaggagctcttcagccrgctggccaccagtgctcctccttctccccctccttcctctcctcctctttccctatgccaggagggcaggctatttttagtcaggcatgggcaacagcagctggcctctgggatctagttactccttgaagtgaagtggggagggggatctcagaccaaaacaacagctccaaatcagaagccct

SEQ ID NO: 398690 - DNA, 578 bp, Homo sapiens
cagttatacctctcatcacatttcatgaactcaatgcaccagaaccctctttgtgccaggcctgtgctggaggcttcagttgcacaggcaaatcagacactacccctgcccccagaagctgctaagtgaatggggaagggattgtgctaagtgttatgatataaacagggctgcagctttgtggcagctctcaggaagaggtgcttctctcagccccatgaagcaggctgggcccagagagcagtaaggacttgcccacatttaatgacaaagtggggaccatgacctagaccttctggatcttggcctcagacccaccctccagttcagtttgcctttcacagtcttcttcccacagtgccatccctgcagactctgtgccgcctagtgatacaaaggagcatggtgcaccggctggccattgatgggctccacctgcccaaagaacttaaggatttctgcaagtatgagtgaagacccacagtgcaccagagcacagctgcatcctggrgccccagacctgtggctggctggtccgaagttggccacattgctgccagccaagaccagaaataaac

SEQ ID NO: 398691 - DNA, 616 bp, Homo sapiens
gtgtttcctactccccaaaattacccagtgtgagagtttcataaaattaaagtattttggacattatcacattcatttccaacacatagtaaacaaaggagaggttattatgcaatattccagtgttataataataagaaagtaaattgttttcatgaaaacatagtgtcattgaattactttttctttcaaagataatactttaaactaattctaggaacctagaaatactaaccttggacagagaccttgtttttaaaatcaaatgtcatcaaatgcaatcaaatatatggttcattcagcgccacttcagggtccagaaaatatcaagtaatgttatttgctcaacaggggactccctaaacatttttgtatcaaagtctgatacttagggagctcttgctttatagaattcaatttcaagttttgttatgcagattcagatttgttctgaagcagcagctgaagattctgcttttgtagatayctaaactagacagacctgactttggaagtagctattgactttctgtatcctaggcagtttcatattgatcttgaggcaactcaattacccgcacctggaagaggcaatgaatttgaatagtgttcatgg

SEQ ID NO: 398692 - DNA, 626 bp, Homo sapiens
gcacacatgaaagtctaaaaagaatcttttggtaacaatgccttggctggaagacttaattttggttaaataaaatacagcaatctaacctcgcccaataattgccacatgaaaattatttctgccaagtctatactgatatctatcttcctaaaatatagttgaatagacataactttctctggcttttattttaactattgtcatatttcttaaaccattcaggctcctgtaccaaaataccacaaactatgtgatgataaacaacagtaatttgtttcttacaattctgaaggctggaatgtccaagatcatgatgccagcagattcagtgtctggtaagaatctgcttcctcttagacagctatattcttatcctaacctcatacagtggaaggggtgaggggtatcttttgaccctctcctataagagcaatgattttatttgtgcagattccactcctatacataatcacctcccaaaagccccacgacctaatacaatcattttgggagtgaagattacaacataygtattttggagggacataaacatttataccatagagccatacatatacaggttgagcacccttaagctgaaaatataaaattcaaaatgcccc

SEQ ID NO: 398693 - DNA, 630 bp, Homo sapiens
ttgaatgtgtttttcttttaaattatttttatttatatgtatgatacagtcatttttggttgtcactaattgatactcttgaagtatacgtctctttactagtagtctatcatctttccactgatggatcactctctgttatcttattagaaaaattaaattcacttctctgccacacaatkatttatttaaaataattcttgtttgaaatacttttattcagagttcatatttctttaatgaatttttcactgcatcaaatcatgatgtaatggattttatgtacctcggggctaaagtacatcagagtaaatgggcagtgaaatttgagggcatctttcttaggacattaagaaaaaggagactatagtttgaaacgtagtttcttattggttaaaaaagattcagaaaatttatacctcaaaaatgagtaatttattaaagatgtctgttatgtctaattattagaaagcatggcaaattatttgagatcaattaagaggagaacatttctttctaacttgtatataaataaaacatttgaaagagattatatttaattttgtggataagcactgcgataataaatatattgtctttttttgaatttatgaattattggtaaaaagt

SEQ ID NO: 398694 - DNA, 506 bp, Homo sapiens
gatgaagtggctttcatatgagtttaaactaaatcatctagtcataatgtgacttaggcttaactttttcaagagtccaaaggctatttaaagtcaagaaaagtgttgaagaggacagtatgttctccaagttttataatattaraaattcaatgcatgctttcacgattaaaatgcattttgaaggcacattactaaaagtgtctttatgagtggtgcagttattattatcccaaggggaggtatctatagaaagtattgataagatcatatgaaagtatggctgatattttcctcactgtatataaaatatatataaagatattttatatatatgtaaagatattttatatatatgtaaagatattttatatatatataaagatattttatatatatataaagatattatatatatatatatatatataaaagagtctggttattgaagaacttatcattgatctgctaaggtcatttttatggtgggagatacacacataaaa

SEQ ID NO: 398695 - DNA, 640 bp, Homo sapiens
aaatactgagagagtaggaggacatatcatgaatgttctaataacatttttgtataaaaataatggtgcctcctagacaagatttggcttagccttatatgtatcatttcaatgcacaatgaaattatgttgtttgagtctaattttatggtgtggtggatcagataatactcacttagggtaaccactttgtgtccttcacttaggtatgcaatttttccaagagactagtagacggtgtagaattgctttgcaataaatgcagtttgtcatagaatttgaaatggcwtgaatccaaaattccagttcttcacaatggaatattattttggggtcttgacaaaggcaacactgaacatccctatctgtaacatgttatatatctgaaaacactggatctattatatcacatagcacatgtggcagaataattagtactcaaggtcagcaggcgaaaacatttcttctttttctttctccctccgaacacctttttaaagttgcaacctttcaggctatttcaaatgtgatatatattgccatcaaaatacaaaaagagcctctttcttcatagtgaacactgtaagatttatcaacctccctcttaccttagaagtaatattataacattctacaaaac

SEQ ID NO: 398696 - DNA, 640 bp, Homo sapiens
aaatactgagagagtaggaggacatatcatgaatgttctaataacatttttgtataaaaataatggtgcctcctagacaagatttggcttagccttatatgtatcatttcaatgcacaatgaaattatgttgtttgagtctaattttatggtgtggtggatcagataatactcacttagggtaaccactttgtgtccttcacttaggtatgcaatttttccaagagactagtagacggtgtagaattgctttgcaataaatgcagtttgtcatagaatttgaaatggcatgaatccaaaattccagttcttcacaatggaatattattttggggtcttgacaaaggcaacactgaacatccctatctgtaacatgttatatatctgaaaacactggatctattatatcacatagcacatgtggcagaataattagtactcaaggtcagcaggcgaaaacatttcttctttttctttctccctccraacacctttttaaagttgcaacctttcaggctatttcaaatgtgatatatattgccatcaaaatacaaaaagagcctctttcttcatagtgaacactgtaagatttatcaacctccctcttaccttagaagtaatattataacattctacaaaac

SEQ ID NO: 398697 - DNA, 640 bp, Homo sapiens
aaatactgagagagtaggaggacatatcatgaatgttctaataacatttttgtataaaaataatggtgcctcctagacaagatttggcttagccttatatgtatcatttcaatgcacaatgaaattatgttgtttgagtctaattttatggtgtggtggatcagataatactcacttagggtaaccactttgtgtccttcacttaggtatgcaatttttccaagagactagtagacggtgtagaattgctttgcaataaatgcagtttgtcatagaatttgaaatggcatgaatccaaaattccagttcttcacaatggaatattattttggggtcttgacaaaggcaacactgaacatccctatctgtaacatgttatatatctgaaaacactggatctattatatcacatagcacatgtggcagaataattagtactcaaggtcagcaggcgaaaacatttcttctttttctttctccctccgaacacctttttaaagttgcaacctttcaggctatttcaaatgtgatatatattgccatcaaaatacaaaaagagcctctttcttcatagtgaacastgtaagatttatcaacctccctcttaccttagaagtaatattataacattctacaaaac

SEQ ID NO: 398698 - DNA, 590 bp, Homo sapiens
tgaatctccactatgtgaataacagtatgatatggtttggctgtgtccctacccaaatctcatcttgaattgtagttcccataatccccacatgtcatgggagggacctggtgggacgtaattgaatcatgggggttgttaccttcatgtttttcttgtgatcatgaattctcatgagatctgatgattgtgtaagggcttttcccccttttgctcagcacttctccttcctgccatcataagaagaaggatgcatttgcctcactttctgcggtaagtgtaaatttcctgaggcttccccagccatgtggaactgtgagtcaattagacatctttgctttatagattacccagtctcaggcagtcctttatagcaatgtgagaataaactaatatagtaaattggtactggaagtggggcactgtgataaagataacagaaaatgcagaggtaactttggaactgggcaacaggcagaggctggaacagttygcggggctcaaaagaagacagaatgatatgtgcaagtttggaacttcctagagacttgttgaatggctttgagcaaaatgctaatagtgatatggac

SEQ ID NO: 398699 - DNA, 453 bp, Homo sapiens
agggcccccctgctgtgtgcagcctctggattgctttcctgccactccagccaagtaaaggggctcagaatgttacttcagaggtgcaagcctccagccttggcagcttccacatggtgttggtcctgcatgtgtgcagaagacaagaattaaggtttgggaatctctgcctagatttcagagaatgtatggaaacacctggatgtcgaggcagaagtctattgcagaggcagagctctcatggagaacttctgctagggcggggrgaagggaaatggggtcagggccccctcacagagtccccactggggcactgcctggtggatccatgagaagagggcaacctttctctaggccccataatggtagatccaccaacagcttgtattgtgcacctggaaaacccaaagacactcaatgccagcctgcaaaagcagctaagaggggagctgt

SEQ ID NO: 398700 - DNA, 608 bp, Homo sapiens
ggttacacatgcgtatttatgggagggagtcaaattggtccgataggccgccaacatcaggaacaaatcagattctttttaaaaagacaaattcctgggaacttttccagaargaataaaccaaatctatatgtaagggttcaggaatgtacattttaacgaatttcttaggtgatgtttggtactttaaaaatttccgccctagtttttactttcaattttcaattgaaaattctttcaattttagaacagtgtgtactggcatagggatatgtggggtttcatttacataaaagcaatttaagttatgatcctgttcattaatcagaaataattagagctgttagtatgcatttggtgtctaactgagctcagtgctctgcatgtattatcttaaatgtccatagaaaatttgaagtgcttagaggggttaagtaaaaaagttcaaggaaacaaaaaaaagatggtggggacccagggtcaaaatcagatctatgggactcctaagcccttgctttttccactatttcacactgatttgaattactagggaaaggagatttaaacatttagatattgtgctgaatgttttatctttgctctccaca

SEQ ID NO: 398701 - DNA, 555 bp, Homo sapiens
ttttcataaattttacctaggaactttagtttcaagtcttacattgatagttttgagagtttaattcatcttaacttaatttttatatgatgagagatggggtccagttttatgcttctgcatatagctacctgattttccaagcatcttttattgaatagagtgtcctttctctagtgtatatttttgtaaactttatcaaagatcagttggttgtaggtatttcacttttgttctgggttttttattctgttcaattgatctttgggtctatttttataccagtactatgttgtgtgggttactacatagccttaaagtacaatctgaagtcaggtaatgtgatatatccagctttattctttttgcttactattgctttggctatttgatctcttttttttaaattccatatgaatttcagtactgtttttctgaattctgttcaaaatgacattggtaatttsataagaattgtgttgaatctgttgagtgctttgggcaatatttagatgtacaaaaactggtactgatcctgctaaaattgtcccaaaa

SEQ ID NO: 398702 - DNA, 556 bp, Homo sapiens
caaaaaaaaaaaatagaaaagaaaaacagaaagaaagaaaagaaaatttgactaataggatgggctagtacaacaaagcaagggcttggctcgacttttaaagaacaacagtaaaacatcatggacctcagaatgaaatcctgatacaccaagggaagagaagagccagtagtaactctggctcagaaataaactaggagtctactttaaaaggacatgcaataaaagaaaaaactgtccagaaatcagtgaagcctttgcaagcagatgatgacaaaggataaccacctaacagaccatagcaaatcaagcccagtggattttccagttttttcaaatacaataatcttaacagcttyttacacatttgacctttttaaaaaaaattcattggaatattatacgattttatatttatggcaaaattctctggacctagaaaatagatatcaagctatatccttctttggaatttgtagtagctgtattacaaaaacagcaaatcccaagaaaatcctcatgggattttaacatacatgttccatttaaaattatc

SEQ ID NO: 398703 - DNA, 508 bp, Homo sapiens
tttagcaattacaaaccacttacattttctaccttccttagcrtatttatcttttccgtgtaatttgtcacctacgatgttacatatttatttgtgaatttgtttattattgtctttttcactagagtttaagctccagtttggtggaggctttttgttttaatcttatctctatgggcaacacatggagcaggagccaaataaatgtgtgttgaatgaaatgaatacatatctgttgaactgactgggagagaataaacagttatttaaggattattatttaacatttgtttttcgtctctggatagctatctctgtaacaattgagagtcttgtagttgtgttttgcttaccattgcttaatcagagcatataaaagacttaaaaacattacagatacttgttgaatgaatgaataagtgttggaaaatctgacgtgtttctacaaacctgttaggaccaaaagaagctgatatattaattaaatattatgagattctggattcag

SEQ ID NO: 398704 - DNA, 508 bp, Homo sapiens
tttagcaattacaaaccacttacattttctaccttccttagcgtatttatcttttccgtgtaatttgtcacctacgatgttacatatttatttgtgaatttgtttattattgtctttttcactagagtttaagctccagtttggtggaggctttttgttttaatcttatctctatgggcaacacatggagcaggagccaaataaatgtgtgttgaatgaaatgaatacatatctgttgaacwgactgggagagaataaacagttatttaaggattattatttaacatttgtttttcgtctctggatagctatctctgtaacaattgagagtcttgtagttgtgttttgcttaccattgcttaatcagagcatataaaagacttaaaaacattacagatacttgttgaatgaatgaataagtgttggaaaatctgacgtgtttctacaaacctgttaggaccaaaagaagctgatatattaattaaatattatgagattctggattcag

SEQ ID NO: 398705 - DNA, 594 bp, Homo sapiens
ggattacaggcgtgagccactgcgcccaaccacaaatgtacccttttaaagtgtaattcagtggtctttagtatattcacaaaattgtgcaaccatcaccactacctaattccagaacattttcatcacctccaaaacaaaccccacacccattagcaattatttcctgttattcctctccctggcccctgcaaccacaactctacttactatctccgtgtatttgcctactcaggatatttcatataaatggaatcatgaaatatgtgaccttttgtgattggcttatttcacttagcataatgtcttcaaggctcatctatgttataacatgtgtcagaatttccttccttcttaaagctaaataatattccattgtatggacataccacactgtgtttatccattcctctgttggtggacacttgagttgtttctcccttttgrccactgtgaataatgctgctatgaaaactggcatacagtgatctgcttgagcgtctgttttcagttctttggggtaccctagtagtggaagtgcaatacagcaattctatatttagctttttgagaaaataccacattgttttccac

SEQ ID NO: 398706 - DNA, 633 bp, Homo sapiens
gcaatgctatatctttttttttttaatgtgtcttctccagtgatcaattaaaattccaacaatgctttaaggttarcctccaaaactatctcatccacttgcctccttacaggaatatcttcctctaccctcatttccaaaagaacttggcacattagggtcacattcttctttatatgataatgccttggacattttattcagaatgttcagaacagaaggtataaaaacatgtctttttcaaactcttaactcccacagttttggtacaatctaacatatttaataaaagcattctcttgattaaagatcattaatatttaattcaaaagaagattatatttttgtatatagagctgaacacacacaatacaaaaaagagagggcatgcgtactggtactgataaaaaaatgctggaagtgattacattgaacatgttttcgaaatttaataataattatttaaaggaagcagaattctatacataaatacataagaaaaaattaaaactaacattattaaatgtacttagaaataaacattcagaaagatatagtttaaacaactctgcaaactagagattgtatctccttttagaataataaacatttgataaatacatatctgattta

SEQ ID NO: 398707 - DNA, 633 bp, Homo sapiens
gcaatgctatatctttttttttttaatgtgtcttctccagtgatcaattaaaattccaacaatgctttaaggttaacctccaaaactatctcatccacttgcctccttacaggaatatcttcctctaccctcatttccaaaagaacttggcacattagggtcacattcttctttatatgataatgccttggacattttattcagaatgttcagaacagaaggtataaaaacatgtctttttcaaactcttaactcccacagttttggtacaatctaacatakttaataaaagcattctcttgattaaagatcattaatatttaattcaaaagaagattatatttttgtatatagagctgaacacacacaatacaaaaaagagagggcatgcgtactggtactgataaaaaaatgctggaagtgattacattgaacatgttttcgaaatttaataataattatttaaaggaagcagaattctatacataaatacataagaaaaaattaaaactaacattattaaatgtacttagaaataaacattcagaaagatatagtttaaacaactctgcaaactagagattgtatctccttttagaataataaacatttgataaatacatatctgattta

SEQ ID NO: 398708 - DNA, 586 bp, Homo sapiens
agaaagactgtttatagcaaaatttagatttcttttacaaatgcctacttgtttattttggtcaattgtttgtttgtatgtttgctttacaggattgttcacagattgcatttctcctaaaatgactataattttagatgttcaacaaattcctaacaccatcaccatccatatttctgctgagcatcttattctttgagattctagcatctcagcartcactcaaatgttgcaacattccattaaagataaattatgtctaaaaggaacaagcattctctcaggatttgacctctaaacaagtgccattgaatagaattttctgcaactgtggggatgttctataatctgagctgcccagtatattagcttctaaccacatgtcgctgttgttcatttgaaatgtggctagtgagactgaaaaaataatgtctttaattttaaatttaataaatacaaccaattaaaaattttacaactctcttatttattttaatatttgaggtttacaatgttatgataagatgatacatatacattgtgtaatgattatcataatcattacacaatcataatcaaattaaaa

SEQ ID NO: 398709 - DNA, 552 bp, Homo sapiens
ggagctgaaaccattgtctgctatcttagttagcrgtcaggtgtgacgatgaattcaatatttagcctgagttaaatgtactcacagcagcttggaaaggcagcctagggagttcttttttagaaggagtagcgagttttcaggagcaggtcagaaataaaaagatcattaatatccagccctctacccctgctcaggtgctgggattttagtttatttggttgttattgctgtctcatttagtcatcacaactttacatttaaaaaaattgctgcctactttaatccagaccttttgtctgaaagggttgtatgcaagagtgatgtgtgtagcatatgactaagtcctagccagcaaaatgtagattgaaatattgcacatcattgtcagggcttgttcattaaaagaaggaaaggtgagaaggggagagcaggggaaaggcggagagaaaaagggagggagagcatatgtaatgtactttccccaactgcgagtttaatgttaaggactctgacaaagtcaaatcctagaagagacaagcagataagcac

SEQ ID NO: 398710 - DNA, 552 bp, Homo sapiens
ggagctgaaaccattgtctgctatcttagttagcggtcaggtgtgacgatgaattcaatatttagcctgagttaaatgtactcacagcagcttggaaaggcagcctagggagttcttttttagaaggagtagcgagttttcaggagcaggtcagaaataaaaagatcattaatatccagccctctacccctgctcaggtgctgggattttagtttatttggttgttattgctgtctcatttagtcatcacaactttacatttaaaaaaattgctgcctactttaatccagaccttttgtctgaaagggttgtatgcaagagtgatgtgtgtagcatatgactaagtcctagccagcaaaatgtagattgaaatattgcacatcaytgtcagggcttgttcattaaaagaaggaaaggtgagaaggggagagcaggggaaaggcggagagaaaaagggagggagagcatatgtaatgtactttccccaactgcgagtttaatgttaaggactctgacaaagtcaaatcctagaagagacaagcagataagcac

SEQ ID NO: 398711 - DNA, 586 bp, Homo sapiens
agaaagactgtttatagcaaaatttagatttcttttacaaatgcctacttgtttattttggtcaattgtttgtttgtatgtttgctttacaggattgttcacagattgcatttctcctaaaatgactataattttagatgttcaacaaattcctaacaccatcaccatccatatttctgctgagcatcttattctttgagattctagcatctcagcagtcactcaaatgttgcaacattccattaaagataaattatgtctaaaaggaacaagcattctctcaggatttgacctctaaacaagtgccattgaatagaattttctgcaactgtggggatgttctataatctgagctgcccagtatattagcttctaaccacatgtcgctgttgttcatttgaaatgtggctagtgagactgaaaaaataatgtctytaattttaaatttaataaatacaaccaattaaaaattttacaactctcttatttattttaatatttgaggtttacaatgttatgataagatgatacatatacattgtgtaatgattatcataatcattacacaatcataatcaaattaaaa

SEQ ID NO: 398712 - DNA, 637 bp, Homo sapiens
tgtatattacgggaaaaagaaaataaataaacttattgaggatattgggaagtagtttttatagtacaaaagtattgaataaaataaattaataaaactttattgctaaatttgaatagaatacaatagtaattatagtttaaaatatttattttatatatattgaatatatatttcagcatattttttagtatmtatttcagtattttcagtatattttttgttctgaaataatctagacacaatgacctcccaggaactacatgtccacatagcacccagatcttggttttaaaaaccactctccaatataataaaaaagttgataattggagaaatagctgtttctttggctgataacggacaatacaaaaagtgcaaactgcacacaatattctgatcaaataataatgtgtttgtatcaaaaattgtaagaataaggttattgacttgtgtggaaaaagggcttttatcaatataaaatataatttttgtcctttgaatactatacaccttgaaatcttcatttgttttacaatacaaataataaatcaaccttaattttggtgatatacatttggtatatctttctactacatttatttttaagtttttttgtatcatttagttttaaagc

SEQ ID NO: 398713 - DNA, 575 bp, Homo sapiens
tgatctacactaaatctagaggaaatttcttcctttaaaatacttagcacccttcttttaccacccagattaatggaggaaaaatttacctttttatttttctcaatatcacaattcttgtatacatgtttccccaatccagaaaatttaattttattgaaactcattagtataccttctagagatttaatatcactatcaatttgtgtgtgtggtgagaaaatttaagatctaccctcttaagaatctttaattatatactatgttattattattaacagtctgtcccyatgctgtgcagtagatctccagaaatttttctcctttctaattgaaactttgtaccctttggccaacatcttctgataccagtgggctgggggaggtctccaaataccagtgggacctcaaccccaactggtgtccagactcttgacaccatcatgagaaggaagtcaggatgagtcagaaaatgtgaaattatggagatttattgcagtgaaaaccacacactcaaggaagggagtacaagcctacttaaaacagtcatggccaagggattttggggcctttat

SEQ ID NO: 398714 - DNA, 575 bp, Homo sapiens
tgatctacactaaatctagaggaaatttcttcctttaaaatacttagcacccttcttttaccacccagattaatggaggaaaaatttacctttttatttttctcaatatcacaattcttgtatacatgtttccccaatccagaaaatttaattttattgaaactcattagtataccttctagagatttaatatcactatcaatttgtgtgtgtggtgagaaaatttaagatctaccctcttaagaatctttaattatatactatgttattattattaacagtctgtccctatgctgtgcagtagatctccagaaatttttctcctttctaattgaaactttgtaccctttggccaacatcttctgataccagtgggctgggggaggtctccaaataccagtgggacctcaaccccaactggtgtccagactyttgacaccatcatgagaaggaagtcaggatgagtcagaaaatgtgaaattatggagatttattgcagtgaaaaccacacactcaaggaagggagtacaagcctacttaaaacagtcatggccaagggattttggggcctttat

SEQ ID NO: 398715 - DNA, 347 bp, Homo sapiens
atttattccactgtatatattccactatatatatatatatatatatatatatacacatagtggaaacaactttgtaactgagtaatggacagagattggaacggattggagggctcagagaagacaggaaaatgtggaaaagtttggggctttctggaracttgttgaatggttttgaccaaaatgccggtagtgatatggacaatgaagtccagactgaggtggcctcagatgtagaagagaaacttttgtttaaaagtgaagcagaatataaaagtttggaaaatttccagcctaaacatgtggtagaaaagaaaatctttttcttggaagaaattcagccagct

SEQ ID NO: 398716 - DNA, 580 bp, Homo sapiens
atttttttttaataaattacctagtctccggcagttctttatagcagtgtgaaaatggactaatgcactgaactctggcaaaaataacataacaaagagatttgtttaatattcctaaattggtcctggaacaaaatcctaatctgattctggcaatttgcaaagaagagtaataaattttaagtgatacagaaacagaaccctggagattatgagacratattagtaaaaaaatgatttataggccggatgcagtggctcacacctgtaatcccagcactttgggaggatgaggcaggtggatcaccaggtcaggagttcgagaccagcctcccctgaaaccctgtctctactaaaaatacaaaaattggcaggacatggtgttgagtgcctataatcccagctactcgggaggctgaggaaagagaagtacttgaaaccataaggcggaggttgcagtgagccaagatcatgccactgcactccagcctggtcaacaaaagcaaaactctgtctcaaaaaaaaaaaaaaagatttataatagtatgagaaaagctaaataactcacaatgaaggaaag

SEQ ID NO: 398717 - DNA, 580 bp, Homo sapiens
atttttttttaataaattacctagtctccggcagttctttatagcagtgtgaaaatggactaatgcactgaactctggcaaaaataacataacaaagagatttgtttaatattcctaaattggtcctggaacaaaatcctaatctgattctggcaatttgcaaagaagagtaataaattttaagtgatacagaaacagaaccctggagattatgagacgatattagtaaaaaaatgatttataggccggatgcrgtggctcacacctgtaatcccagcactttgggaggatgaggcaggtggatcaccaggtcaggagttcgagaccagcctcccctgaaaccctgtctctactaaaaatacaaaaattggcaggacatggtgttgagtgcctataatcccagctactcgggaggctgaggaaagagaagtacttgaaaccataaggcggaggttgcagtgagccaagatcatgccactgcactccagcctggtcaacaaaagcaaaactctgtctcaaaaaaaaaaaaaaagatttataatagtatgagaaaagctaaataactcacaatgaaggaaag

SEQ ID NO: 398718 - DNA, 580 bp, Homo sapiens
atttttttttaataaattacctagtctccggcagttctttatagcagtgtgaaaatggactaatgcactgaactctggcaaaaataacataacaaagagatttgtttaatattcctaaattggtcctggaacaaaatcctaatctgattctggcaatttgcaaagaagagtaataaattttaagtgatacagaaacagaaccctggagattatgagacgatattagtaaaaaaatgatttataggccggatgcagtggctcacacctgtaatcccagcactttgggaggatgaggcaggtggatcaccrggtcaggagttcgagaccagcctcccctgaaaccctgtctctactaaaaatacaaaaattggcaggacatggtgttgagtgcctataatcccagctactcgggaggctgaggaaagagaagtacttgaaaccataaggcggaggttgcagtgagccaagatcatgccactgcactccagcctggtcaacaaaagcaaaactctgtctcaaaaaaaaaaaaaaagatttataatagtatgagaaaagctaaataactcacaatgaaggaaag

SEQ ID NO: 398719 - DNA, 580 bp, Homo sapiens
atttttttttaataaattacctagtctccggcagttctttatagcagtgtgaaaatggactaatgcactgaactctggcaaaaataacataacaaagagatttgtttaatattcctaaattggtcctggaacaaaatcctaatctgattctggcaatttgcaaagaagagtaataaattttaagtgatacagaaacagaaccctggagattatgagacgatattagtaaaaaaatgatttataggccggatgcagtggctcacacctgtaatcccagcactttgggaggatgaggcaggtggatcaccaggtcaggagttcgagaccagcctcccytgaaaccctgtctctactaaaaatacaaaaattggcaggacatggtgttgagtgcctataatcccagctactcgggaggctgaggaaagagaagtacttgaaaccataaggcggaggttgcagtgagccaagatcatgccactgcactccagcctggtcaacaaaagcaaaactctgtctcaaaaaaaaaaaaaaagatttataatagtatgagaaaagctaaataactcacaatgaaggaaag

SEQ ID NO: 398720 - DNA, 584 bp, Homo sapiens
tatattcagtattcagaattaagtgttaacagtatttagtaraaataaaggggctgttataatacacataacattagtttataaattataagtcctcctaatactaatactaatgttgcattgtctgtgtgaatcaaattaaattaacaatcatattctataattcatgttccaacataaacatttttggcaaaagccaaatttttccaaaaataaaaattttaaatattatttaaactaaagtttcagtgaattaaaaacatatttacatatattataaaatgtgaaaatatcattttgtgagataaattggacagcttttcattttttacatttagtcaataatagctatgtagttataatttttcatataaaatttaacaagtaagaattttgtttgagagcataattggcaaaaatgagtataagcataagaataagcctagatatatttgtgtagttaattccagaatattacttttcaagttattttgttagggtacattcattatttattccacagattaaatattaaattaaaactgtaaaaacatttaaattttaagattcagtgtgaagtgtac

SEQ ID NO: 398721 - DNA, 584 bp, Homo sapiens
tatattcagtattcagaattaagtgttaacagtatttagtaaaaataaaggggctgttataatacacataacattagtttataaattataagtcctcctaatactaatactaatgttgcaytgtctgtgtgaatcaaattaaattaacaatcatattctataattcatgttccaacataaacatttttggcaaaagccaaatttttccaaaaataaaaattttaaatattatttaaactaaagtttcagtgaattaaaaacatatttacatatattataaaatgtgaaaatatcattttgtgagataaattggacagcttttcattttttacatttagtcaataatagctatgtagttataatttttcatataaaatttaacaagtaagaattttgtttgagagcataattggcaaaaatgagtataagcataagaataagcctagatatatttgtgtagttaattccagaatattacttttcaagttattttgttagggtacattcattatttattccacagattaaatattaaattaaaactgtaaaaacatttaaattttaagattcagtgtgaagtgtac

SEQ ID NO: 398722 - DNA, 352 bp, Homo sapiens
agttgtgagaagagagccactatcctccagatcccagaatagtacatacaccaacagcttgtaccctgcacctggaaaagccacaggcactcaatgacagcctgtgaaaacagccaggaggggtgctgtaccctggaaagccacaggggcagagctgccagaggccatgggaacctacctcttgcatcagcaaggcctggatatgagacatgcagtcaaaggagatcatattggaactttaataactgccccattagatttcagatttgcattgggcctgtagccccttcattgtggccaatttctccaatttggartgggtgtatttacttaatgcttatactcccattgt

SEQ ID NO: 398723 - DNA, 549 bp, Homo sapiens
tcctggcctcaagtgattcacctgtcttggcctcccaaagtgctgggattacaggcatgagcctccatgcctggtcccagtttcatctaatcctttagagaagaaggaatacatctattattagcagagatggatatttttctgtagttattaatgaatctacaatgtagaagttggtaacacagaaatgtctgactataaccaaacaactaaaactgtaactaaaacagctgcctgactatacctaaaactattagcaattaagaaacattatttttgcttattttttattgttactccatgaattgattcaattcagatattcctatggtgttcttgsaaagtactggtgaaagatttatcctaatcataggcattctagcaatgttagagaataattaaagtcataattagattctagtgtcagtgagtttttgaaagcaagtaatgcacatataacaataaaagttaggatatcatgaacccagttattgaattaagcatttatttatttgaactcagaatacggtgctataataaattgattat

SEQ ID NO: 398724 - DNA, 556 bp, Homo sapiens
agcatgaaaatccgtcctttgggattccagaaactcttcgaaagtattttctgcatcctgatgattgtggaagcattttctctgcaaaaaggtgtctagttgcttgaagaagtggtagtcggttggggagaagtcaagtgactatggcaaatgaagcaaaatttcttagcccaattaattcaacttttgaattgttggttgtatgacatgccatcgggtgttgttgtggagaattaggtcctttctgttgatcaatgttggctgcatgagtttcagttttgcgtgcatctcatcaatttgctgagcatacatctcatgtgtcatggtttagctggaatgcggaaagctgtagtggatcaggctggcagcaaaacacccaacaatgaccatgacctttttttggtgcaagtttgactttgggaagtgctttaaagyttcttctgggtccaaccactgagttggttttcaccagttgtcacataaaagccacttttcatcacacatcacacatcacaatcagatcgagaaatggttcattgttgcatagagtaataga

SEQ ID NO: 398725 - DNA, 556 bp, Homo sapiens
tacctaggcttcaataatcattataagatattgttatctctcaatttaacaagtggcagaacggagttactcagaaacaaacaggaagtcattcctctctgcctagatagagtacttcttatttttcaaaatcatatttcagcacacagtaatgtaatcatcatgctgagactgttggtaatagccctcactactcaagtggcttcttcgaacagctgctctgacacaattcgaaatcccattcctctgaaggataacaaataatgactatgactatagaaacatttgaaatattaatgtgataccttatgaagacatttacatggcaccagcagtgtgtcaacacagattgcccatttccttacaacaggcactgtctttgaatctgatggaagcatyaaagacatcatgtatactttctatataaaacaaaaaaatctgaaattttgaacatatagagttagaaaaattcagaacatttctctatgcaatatatttgatattaacaaaatccaactttgtgtctaaaaattaaattctacatgccacagtgttt

SEQ ID NO: 398726 - DNA, 583 bp, Homo sapiens
gtgttagctataggtttgtcatacatggcttttgctcactctggctgggggtttatcaactttatttatatttcataaagacagcaactggttttattgcttttctatattggttttattgctttttctctgttgttttctgtttttaattaaatagagtcctccccatattgttatcattttgtttgttctgcttgcattgagtttacattttaggatttttttctttaattttaaccatgttattttaagatcttttcatttttgattgtaagttttgatgctgtaaattttcctctaygtcctgttttagttaattttttttgattttttattttattcattttaaaacattttaaatgcatcctgagactgcctctttggcccattggttattttgaattttattgcctcttttctgaaaccaaattatttttaaaatatctttctgtattaatttataatttaattcaattatgggataaaaaatactgcatattatttatatgcttttaactatattaaattttttagaccataaaaaacattctcaatgaatgttaatatacacttaaaaatagca

SEQ ID NO: 398727 - DNA, 502 bp, Homo sapiens
ggtatgaacaataatttcttaatttggccacaaaagcacaggcaacaaaagcaaaaatagacaaataggattacatcaaatcaaaaagcttcaycacagcaaaggaaataatcaacagtgtgaagagacaacctattgagtgacagaaattggaggcatacctcaaagagattataaatcaagctccaaataaccacaatacagtaaatattgcaataaagcaagtcacataaacttttgggtttcctggtatacctaaaagttatgtttaaactatactgtagtctattaagtgtgcaatagcattatgtctaaaaacataatatacacaccttaactaaaaatactttattgtgggccaggcacaatggttcatgcctgtaaacccagcactttgggaggctgaggcaggaggattgcttgaggtcaagagttagagaccagcctggcaaacatggagaaacccagtctttactaaaaatacagaaattagctgggtgtg

SEQ ID NO: 398728 - DNA, 502 bp, Homo sapiens
ggtatgaacaataatttcttaatttggccacaaaagcacaggcaacaaaagcaaaaatagacaaataggattacatcaaatcaaaaagcttcatcacagcaaaggaaataatcaacagtgtgaagagacaacctatkgagtgacagaaattggaggcatacctcaaagagattataaatcaagctccaaataaccacaatacagtaaatattgcaataaagcaagtcacataaacttttgggtttcctggtatacctaaaagttatgtttaaactatactgtagtctattaagtgtgcaatagcattatgtctaaaaacataatatacacaccttaactaaaaatactttattgtgggccaggcacaatggttcatgcctgtaaacccagcactttgggaggctgaggcaggaggattgcttgaggtcaagagttagagaccagcctggcaaacatggagaaacccagtctttactaaaaatacagaaattagctgggtgtg

SEQ ID NO: 398729 - DNA, 502 bp, Homo sapiens
ggtatgaacaataatttcttaatttggccacaaaagcacaggcaacaaaagcaaaaatagacaaataggattacatcaaatcaaaaagcttcatcacagcaaaggaaataatcaacagtgtgaagagacaacctattgagtgacagaaattggaggcatacctcaaagagattataaatcaagctccaaataaccacaatacagtaaatattgcaataaagcaagtcacataaacttttgggtttcctggtatacctaaaagttatgtttaaactatactgtagtctattaagtgtgcaatagcattatgtctaaaaacatartatacacaccttaactaaaaatactttattgtgggccaggcacaatggttcatgcctgtaaacccagcactttgggaggctgaggcaggaggattgcttgaggtcaagagttagagaccagcctggcaaacatggagaaacccagtctttactaaaaatacagaaattagctgggtgtg

SEQ ID NO: 398730 - DNA, 593 bp, Homo sapiens
ttatgggaaaagatttagtgatgcctcaaagaattcaaaatagaactaccatgtgatccagcaatgccattgctggttatatataacgaagaaataaaatcagtacatttaagagatatctgaacttccatgtttattgcagcactgtcaacaatagccaagatatggaatcaacctaagtgtccatcagtggatgaatgggtaaagaacatatggcatatatatatatatatatatatatatatatatatatatayaggcaccagccatcacacccggctaattttttgtatttttagtagagaggaaatttaaccatgttagtcaggatggtctcgatctcctgacctcgtgatccacctgcctcgggctcccaaagtgctgggattacaggcgtgagccaccgcgcccggccactttctcaccaatagtttattggtttatataatagtttatataatagtatatatatatatatatatatatatatgccatagatatatgccagtggatgaacgggtaaagaagatatggcaaatatatatatatatatttgccatatgtatatagatatgcacacagtggaatattat

SEQ ID NO: 398731 - DNA, 593 bp, Homo sapiens
ttatgggaaaagatttagtgatgcctcaaagaattcaaaatagaactaccatgtgatccagcaatgccattgctggttatatataacgaagaaataaaatcagtacatttaagagatatctgaacttccatgtttattgcagcactgtcaacaatagccaagatatggaatcaacctaagtgtccatcagtggatgaatgggtaaagaacatatggcatatatatatatatatatatatatatatatatatatatataggcaccagccatcacacccggctaattttttgtatttttagtagagaggaaatttaaccatgttagtcaggatggtctcgatctcctgacctcgtgatccacctgcctcggsctcccaaagtgctgggattacaggcgtgagccaccgcgcccggccactttctcaccaatagtttattggtttatataatagtttatataatagtatatatatatatatatatatatatatgccatagatatatgccagtggatgaacgggtaaagaagatatggcaaatatatatatatatatttgccatatgtatatagatatgcacacagtggaatattat

SEQ ID NO: 398732 - DNA, 593 bp, Homo sapiens
ttatgggaaaagatttagtgatgcctcaaagaattcaaaatagaactaccatgtgatccagcaatgccattgctggttatatataacgaagaaataaaatcagtacatttaagagatatctgaacttccatgtttattgcagcactgtcaacaatagccaagatatggaatcaacctaagtgtccatcagtggatgaatgggtaaagaacatatggcatatatatatatatatatatatatatatatatatatatataggcaccagccatcacacccggctaattttttgtatttttagtagagaggaaatttaaccatgttagtcaggatggtctcgatctcctgacctcgtgatccacctgcctcgggctcccaaagtgctgggattacaggygtgagccaccgcgcccggccactttctcaccaatagtttattggtttatataatagtttatataatagtatatatatatatatatatatatatatgccatagatatatgccagtggatgaacgggtaaagaagatatggcaaatatatatatatatatttgccatatgtatatagatatgcacacagtggaatattat

SEQ ID NO: 398733 - DNA, 573 bp, Homo sapiens
tgacattttcatgtgagtgttttccagtgtccattgaagattaacttgtggtaatatgagtcagaattgttcatggattagttataaaagattaccacatttcaataggacaatacaaatgggaaatagtaccttatctattctgagtaggtccatacacttgagaagattttaccttgtccttagttttgtatttctcatctcacaactatcacagctgtcactccaactgtcttttatatgtggaaggtgtgaggttctattagatatgattagtgtaagtgcactgcctatttctatgtccaagcaatgtactcatttgaataatttaagtaatatacctcagttaacttaatttatacttaattatgaaacaatgtttttgactaaaacaatattacgtaacatagcctaagaaattcaatagttaattgtttcctgggattgtgagggaaagagtgtaaattactatttttgtgtattccaaagttatttttaacagccacatgsattatattcttatattctactagccatatattactcattcatgtattcatttgttaattacta

SEQ ID NO: 398734 - DNA, 549 bp, Homo sapiens
agacaaagagagacagaaatagaaagatagacaggaattggctcgtgcaattgcagaagcttggagattctaaaatctgaaaatctgatagcattggcctgcagcctggagactcctggaagagctgcmctggaagtcaaagcagtttcctggaagaatcccttcttgcttgtgggaggtcagtctttgttctaataaggccttcaactgattgaatgaagcccacacattatggagggcactctgttttactcaaactctgccaatttaaatgttaatcttatccaaaaacactaccatagaaccatccaggataatgtttactaaatatctgggcactgtggctcagccaggttgacaataaaattaaccattccaaagagtatataaaactaatcatatatttgtctatgttcttttaacttattatctccaaattagttcaaattgcaggtttcctttatgtagtaattcaaaattacagtttatatatatcttctaacctccatgaaatttaggtaatgaaatttaagcagaacatataaacct

SEQ ID NO: 398735 - DNA, 518 bp, Homo sapiens
atttctttcttctttacttttgaaattctgataacatgaatattagatcttttgtgataaacaggtctgtaatgctctgcttatttttttcagtctaacttttatttataatgtgtatttttaattgtcctctttcaattcattaattctttcctttttccatacatcttagcaatattgtgccccttcactgagattttattttagatattgtatactattgcagttataaattttccattttattctccttttttgttgttgttgttgttgagaaattctatttctttgttaagcctttatcttttttcattttgtttcaagtatgttcaaaattgttcattgaagcatttttaccatcactgatttaaaatgctagttgggtaattctggtgtttgtgtcatctcagtgttggcatctgttatctttttttyaaatttagtttgaaatcttcctggttcttggtatggtaaatgatttgctattaaatcatgaatattttcatattatgttatga

SEQ ID NO: 398736 - DNA, 450 bp, Homo sapiens
tgaaggagaaacatgttgctatttacatggcaataatacaaaatctttaaaaatattttatatctgacccaaaataccagacaattcaacagcctcaagtcatatagaatataagaataattcaaacacttcccatgtttgaattgagagtggcaggtgggctaattgaaaaggatttgtsacaaaatctgtactccagtcagagccccgccacactgtgctgtgtaaccttcacaggttatttacttctcagtttatctttaaaatgaaagaagacagatgtacagtatccaaaccatctttataattctaaaattgtataatttgacaagaattcatgtttttcaatgacagaaggatataatcacaatatataaagatccctttgatatgccaaactaatattaagctttaaaacattagaaaaattatagcttttatttttatgtg

SEQ ID NO: 398737 - DNA, 595 bp, Homo sapiens
accacactattttgattactgtagctttgtagtgacttttgaaaagtcctctagctttgttttcctttcttaagaagcttttgactactggtattcctgatgtcctataagaattttaagacaggtttttgatttctgcaaaaaatatttttgggattttaataggtattacaytgaatctgtaggtcactttaggaagtttgtacaacttaacaatattaattataccaatccaccaacatgaagtatgtgtctagttatttacattgcttttaatttctttcaacaatattttgtggttttcattgtacaagtttttacctctttgattaatttctaagtattttctagtttttgaaactattttacataaaattgtttgcataatttccttttgagattgttcatgattagtgtatagagatgcaactgagttttctgttttgagttcctaccctgctgctttgctaaactcatgttgttagttctaacaggttttactgtgtgatttttttttgtgaaatccccaaggtttttaatatacaagatcacatcatttgcaaacacagattactttcttctttccagtttgaat

SEQ ID NO: 398738 - DNA, 595 bp, Homo sapiens
accacactattttgattactgtagctttgtagtgacttttgaaaagtcctctagctttgttttcctttcttaagaagcttttgactactggtattcctgatgtcctataagaattttaagacaggtttttgatttctgcaaaaaatatttttgggattttaataggtattacactgaatctgtaggtcactttaggaagtttgtacaacttaacaatattaattataccaatccaccaacatgaagtatgtgtctagttatttacattgcttttaatttctttcaacaatattttgtggttttcattgtacaagtttttacctctttgattaatttctaagtattttctagtttttgaaactattttacataaaattgtttgcataatttccttttgagattgttcatgattagtgtatagagatgcaactgagttttctgttttgagttcctaccctgctgctttgctaaactcatgttgttagttctaacagkttttactgtgtgatttttttttgtgaaatccccaaggtttttaatatacaagatcacatcatttgcaaacacagattactttcttctttccagtttgaat

SEQ ID NO: 398739 - DNA, 571 bp, Homo sapiens
cagtgacctgtggggcaataaaaatagtcatcctacacgaaattcaagttcaagaaagtttgagtttgaaacatattttaaaaatatgtacaattttttttttcaattttgataaaaatgtaaggaatctttaaaaaacccaagcaggaaaaatgtataaaattgtatgacacctgataatttagttgctggaaattattgttaacttgaattaaatttgacctaaagctgcctccatacacctccatacatagtgaactgtaacctaacttaatgtgtaaacaacttgtaatcttacctaagagtatactcgtgaaacaagtagccaaggcccagccaattataacaagtgaacctcaagccaattactgaagtctgtcaaaagatgtccaaataagacaaacactaaacagcaaccaataagmttatttctgaatatcattactatttctgtggctataaacatagcctgcacacttaggggaaggagctctctgtatcatttttgatactgagtactacttggtctatgaacctgtctttttcccctactcaattaacctctgttaaa

SEQ ID NO: 398740 - DNA, 490 bp, Homo sapiens
gctcaaaactagaatattgatctagacttttacattacccatcccctctgttccttctgaatgcccttaaaaattactggatggttcacaggcacaagcagggttagtctaaaatgtaggcaagaacctaaaacaactgagtctagaatttaatgatgaatgtatgataagttttcaaacataatttttctctctcccatcctcatttttgttaaaaactaataataataggactgagttgtttgcaaaatagactttcatcttatacttggcccgattatttgcataaagtgcagcaagaataattatctttacataggccttttagatgggctttcatggaactctgttccacaaggaatctcagataggactttctaaggctgagcttagccatgggtttgtctcctcaratacctgtgagttgggtcatcctttcctcttaaggtcacaagataaacttggaacccttgggcctgtcagaaagtga

SEQ ID NO: 398741 - DNA, 376 bp, Homo sapiens
aaagggtaaaagatcttttggtccgcatatcactcmccttttctcatgccccatgtttgggcaccaaaatgatgcagaactttgctccttcattcagctaaaatcaggttcttatcacatgaccaggaaagataaggcacacggacacactgaagggtgactagagtggaatatattgggtgaaaaggaaaaaagttaaaaaaaaaaaaaaaaaaaaaaaaaaaccctcagcaaagtgagaggggatgctgacagcaggcttccatctcatagaatgatttacaggccaccacacaggagctgatgaggccaggcttctcactccctgtacaaggcacgaacttcccatggcttcaccccattcttccagtgcaca

SEQ ID NO: 398742 - DNA, 376 bp, Homo sapiens
aaagggtaaaagatcttttggtccgcatatcactcaccttttytcatgccccatgtttgggcaccaaaatgatgcagaactttgctccttcattcagctaaaatcaggttcttatcacatgaccaggaaagataaggcacacggacacactgaagggtgactagagtggaatatattgggtgaaaaggaaaaaagttaaaaaaaaaaaaaaaaaaaaaaaaaaaccctcagcaaagtgagaggggatgctgacagcaggcttccatctcatagaatgatttacaggccaccacacaggagctgatgaggccaggcttctcactccctgtacaaggcacgaacttcccatggcttcaccccattcttccagtgcaca

SEQ ID NO: 398743 - DNA, 376 bp, Homo sapiens
aaagggtaaaagatcttttggtccgcatatcactcaccttttctcatgccccatgtttgggcmccaaaatgatgcagaactttgctccttcattcagctaaaatcaggttcttatcacatgaccaggaaagataaggcacacggacacactgaagggtgactagagtggaatatattgggtgaaaaggaaaaaagttaaaaaaaaaaaaaaaaaaaaaaaaaaaccctcagcaaagtgagaggggatgctgacagcaggcttccatctcatagaatgatttacaggccaccacacaggagctgatgaggccaggcttctcactccctgtacaaggcacgaacttcccatggcttcaccccattcttccagtgcaca

SEQ ID NO: 398744 - DNA, 573 bp, Homo sapiens
atatagatgggcccagtgagttgcatctcagttaagggatcacaggcttaaggaactacatgcttgtataacaggcmctgggcctgtttgacctctggccctgaggaagacatgatttttacattggatagtaaacaaatctgaaggggaatctatcttccagaactgttcaccatacatatgtacaaataagagagtttgaaacaatggctgtcagtgtttttgctggtaagaaatacataaatatgagaaactcaaggagaattctgttagacactactatggaatatcgttcagtttctttttaatataaatttaaacgtgaaactactctatgatccagcaattccaactatgtatttatctaagagaaataaaaatatgtgttcacaaaaagactttcatcagaatgttcactgcaaaataataaatatttatagctcaatataataatatattattacaaattgacttgacttttattttgtgaagtgatagaaaagaaaccaatgcagtaataaattgttgcgaaacagtacatatttgtagctcaataataaattgaacaaccta

SEQ ID NO: 398745 - DNA, 573 bp, Homo sapiens
atatagatgggcccagtgagttgcatctcagttaagggatcacaggcttaaggaactacatgcttgtataacaggccctgggcctgtttgacctctggccctgaggaagacatgatttttacattggatagtaaacaaatctgaaggggaatctatcttccagaactgttcaccatacatatgtacaaataagagagtttgaaacaatggctgtcagtgtttttgctggtaagaaatacataaatatgagaaactcaaggagaattctgttagacactactatggaatatcgttcagtttctttttaatataaatttaaacgtgaaactactctatgatccagcaattccaactatgtatttatctaagagaaataaaaatatgtgttcacaaaaagactttcatcagaatgttcactgcaaaataataaatatttatagctcaatataataatatattattacaaattgacttgacttttattttgtgaagtgatagaaaagaaaccaatgcagtaataaattgttgcraaacagtacatatttgtagctcaataataaattgaacaaccta

SEQ ID NO: 398746 - DNA, 617 bp, Homo sapiens
gtctagttattgaatttatgtatatggatgggaatttaaatatgttgtatttgtttcctttattgtcccaaatgtaatccacatttacctgtttttggtaccacaccatctgtattcattagatagctaatctctgtttacactattttgctaatcctactgtgtctgtttttaaacattggctatttgctatattattactgaaaaaagaaaaattaaaaaaatcacactataatgctaataaaaaaaaagatggcagctgcttttctgtacwtgcctatactgaatgtaaaataatggaaactctccttatcttatttgttttgtgaccaatatttgaaattcattatcaaattttaaaataaatgtatttaatttttttctatgtaatattttcttcattgatgtgatttaactacataaaataattgaccatctaaattatttttctcatggaatttatctttcattgtgtttaaaaatagtctgcttattcatcagaatcaaaggaggttttttttttttacaaataatagtttgtgtgtagattacagcagaaactttaaaaaaaaaagatgtactcaatgaaataaaaagtcacagtgagaaagaaaacc

SEQ ID NO: 398747 - DNA, 527 bp, Homo sapiens
tatgcaatgaaagtaaattctgattttatttgtggttgaaatcactgacctttaaagtctacctccttttccactttatcctattctggctttctcttgttagtacaaaacatgtgaatarcaatacaaggtggaggtaagcatatttttggcagaaaagataatgtcttactaattttctccccaaaatgatatgtgctgcaacatgtatctattttatgttttgaaattagaatatttattttagggaaaaataaattgcttcttcatactgtatattgtaatagaattgttttagtccaaaagcaatttaagtcagcaacatattgaactataattaaagatttatggttccattaaaaggtaatgttgtagttaatgcctaataataaaacacttcataaaagttcagtgttatacacaaaggagaatataaatgataagctctcccaaatatttactgggcttatgattccatagcaaatattaacacttgaatttttaataatatatcagactgattttag

SEQ ID NO: 398748 - DNA, 527 bp, Homo sapiens
tatgcaatgaaagtaaattctgattttatttgtggttgaaatcactgacctttaaagtctacctccttttccactttatcctattctggctttctcttgttagtacaaaacatgtgaatagcaatacaaggtggaggtaagcatatttttggcagaaaagataatgtcttactaattttctccccaaaatgatatgtgctgcaacatgtatctattttatgttttgaaattagaatatttattttagggaaaaataaattgcttcttcatactgtatattgtaatagaattgttttagtccaaaagcaatttaagtcagcaacatattgaactataattaaagatttatggttccattaaaaggtaatgttgtagttaatgcctaataataaaacacttcataaaagttcagtgttatacacaaaggagaatataaatgataagytctcccaaatatttactgggcttatgattccatagcaaatattaacacttgaatttttaataatatatcagactgattttag

SEQ ID NO: 398749 - DNA, 540 bp, Homo sapiens
ctgcacacattcccagtctccagtgtggactgaggaaagccatttctgattctactcacaggtgaccttgtggaagtctgcaaactaacttaggcagcagttgcagattgaaataaactcccaactaaaatgtaaaatataaacttcaggaaggacagactcccttggccagaactggggggcaagtgggaagtgggctgcagtcatggcacaggwgctgggtacctgggctttgcggggaaggggaagggtatggcctgaaagccacactttctgtctctaaagggaaggcttattgcctgggacacttttgagttctgagcgttgatggcttggcttggaattcagctagctgccgttagtgaacactgtgggtgagagtcctgccttgccaagtgcatggaagctgggtgaagcttacggccaccagctactccccactccctatgtgaactctcctgtgcagcagatgcaggtacactccttcctgcaacattatcccagtggccagagaagcacccccatctcccaaaagggcct

SEQ ID NO: 398750 - DNA, 550 bp, Homo sapiens
gcctcacatatctatatgtgaagagccagaatatggacctgcctgacccaggctttacctggatttgtcccttcacccaccctcatagcttaatataaaggacagaaacttttgagagaaatcagagtatatccctgggtaatataaggcaagcacaaatcgcactgcttctatggcagctggtgctsttttgcaagaaccaactcttggctagaggccaaccaacatagtctaatacagcatctacaggtaggataactgcactcaggaaggataaaacttgtgcatgacctcagctatcattgccttcatcaccctagctaaccagaaggtcttgagtctgtccatgtgacaagttcattattactacaattaacatctgagaaagcctacacagtatggctatctacaaccaaagaatctcacagagtctatgtcactcccctgtcacccccatcagaaccgatcatattactggacacctggcagacattcctcaataccagcctgcagtgtcagccccattgagaggctagacctcaaggagcag

SEQ ID NO: 398751 - DNA, 621 bp, Homo sapiens
agtatgatttctgaaagcaatcagaatgatgaaataatatttttttaaaattattaagtttagcaaatactaaacaaaatcctcattacatataaagtacaaagaacatctagttgcattgtatagtttttcagtattcctactcaaaactatggaaaaaaatggaaatttacatttktgaacttgagtaggcttaattaagtattgagattcttttactccatttcgactgtaattggaaaatagacataacagctaattaacaataatattctaatatttctgggaaagtaatcatgacttgatatttcttttgtgattagaagttttctgtggcattacaaataggtatataaaatgagacatttttaaacaatattttaacaaaaaattaaatatttaagattaatttcttaaataaactaatgaatttatatttgtagcttataattggaaaactagttaatttattctattatggtgctgtacatgtttatttgtggagacaagtaaactattaaaatgacttgataaaacaaacaaaaaggacaaagtgtatgaaacaataacttacaaataacttcatcagacagtgaaagaaagcaattcctgagagaagag

SEQ ID NO: 398752 - DNA, 616 bp, Homo sapiens
ggaagagaaagagaggtgcagagatggcaatggcgtcaatgtttccctccgttttaagcaaaagtgccgaagcaagagtctagacctggggcacaggagggtgccttatcatgtagcttttatctgccccartgctgcccttcaccagccattaacttcccagcactgtgctcatggcagcctgcagttgcagtccccgccctttcatcacagtaaatagaaaccagcagcgtgatataagcaaggtggcagactgcaaggttctaggcctcaaccacccccacatccccaataaaaacaatgagttaacaactgtttgtgcaccaaagtagctctgggagtgctccagagtgcaattaaaaagctgcagccacccaggaaaataaggaactgagaacagccacttagaaaagtgtagaagagattttacccacattaccccgtctgccagactgacacagctcaatgccaaagagaatcccctcagccatgacttcctccatgggagaaaacgagagcagaaaaccctcagcagctcttgcaaccactgtagacccacacagccactgcggcagagcatcccataattttggccactgcaaaccctagctagtag

SEQ ID NO: 398753 - DNA, 616 bp, Homo sapiens
ggaagagaaagagaggtgcagagatggcaatggcgtcaatgtttccctccgttttaagcaaaagtgccgaagcaagagtctagacctggggcacaggagggtgccttatcatgtagcttttatctgccccagtgctgcccttcaccagccattaacttcccagcactgtgctcatggcagcctgcagttgcagtccccgccctttcatcacagtaaatagaaaccagcagcgtgatataagcaaggtggcagactgcaaggttctaggcctcaaccacccccacatccccaataaaaacaatgagttaacaactgtttgtgcaccaaagtagctctgggagtgctccagagtgcaattaaaaagctgcagcmacccaggaaaataaggaactgagaacagccacttagaaaagtgtagaagagattttacccacattaccccgtctgccagactgacacagctcaatgccaaagagaatcccctcagccatgacttcctccatgggagaaaacgagagcagaaaaccctcagcagctcttgcaaccactgtagacccacacagccactgcggcagagcatcccataattttggccactgcaaaccctagctagtag

SEQ ID NO: 398754 - DNA, 616 bp, Homo sapiens
ggaagagaaagagaggtgcagagatggcaatggcgtcaatgtttccctccgttttaagcaaaagtgccgaagcaagagtctagacctggggcacaggagggtgccttatcatgtagcttttatctgccccagtgctgcccttcaccagccattaacttcccagcactgtgctcatggcagcctgcagttgcagtccccgccctttcatcacagtaaatagaaaccagcagcgtgatataagcaaggtggcagactgcaaggttctaggcctcaaccacccccacatccccaataaaaacaatgagttaacaactgtttgtgcaccaaagtagctctgggagtgctccagagtgcaattaaaaagctgcagccacccasgaaaataaggaactgagaacagccacttagaaaagtgtagaagagattttacccacattaccccgtctgccagactgacacagctcaatgccaaagagaatcccctcagccatgacttcctccatgggagaaaacgagagcagaaaaccctcagcagctcttgcaaccactgtagacccacacagccactgcggcagagcatcccataattttggccactgcaaaccctagctagtag

SEQ ID NO: 398755 - DNA, 575 bp, Homo sapiens
cataaatcattaacagaaaataatatttggaaatcaaatctccaaatatttgaaaattaactaccacatttctaaagaatttatgagtcaaaggaaaatcacaagggacgatagaaagtcatttgaattgaattaaaatgaaaacagcacagcaaactgtggcatgccactaaagcaatatttagtggggaaatttgtaacactgaaccccgaaatttgaaaaaaaactctcaaatcgggaayctcaagttgtaatgtaagaaagaagagcatattagttgcaaaatgggggtacaagaaataaagtggaaaaaatcaaagtagaaatgaatgaaatggaaagcagaaaaacagcacaacagagaaaatcaatgaaacttaagccggtttgttgaaaaaacaaaatagtaaaatcagtgtacctaaaatgaaacaaagtaagaaaaaatatagagaaaacaagttatcaagatcagaaatgaaagagatcccattcctaggctctatacatattaaaattatagaaatattaataactttatgctaataaataatttaggaaaaatgaaaaaact

SEQ ID NO: 398756 - DNA, 575 bp, Homo sapiens
cataaatcattaacagaaaataatatttggaaatcaaatctccaaatatttgaaaattaactaccacatttctaaagaatttatgagtcaaaggaaaatcacaagggacgatagaaagtcatttgaattgaattaaaatgaaaacagcacagcaaactgtggcatgccactaaagcaatatttagtggggaaatttgtaacactgaaccccgaaatttgaaaaaaaactctcaaatcgggaacctcaagttgtaatgtaagaaagaagagcatattagttgcaaaatgggggtacaagaaataaagtggaaaaaatcaaagtagaaatgaatgaaatggaaarcagaaaaacagcacaacagagaaaatcaatgaaacttaagccggtttgttgaaaaaacaaaatagtaaaatcagtgtacctaaaatgaaacaaagtaagaaaaaatatagagaaaacaagttatcaagatcagaaatgaaagagatcccattcctaggctctatacatattaaaattatagaaatattaataactttatgctaataaataatttaggaaaaatgaaaaaact

SEQ ID NO: 398757 - DNA, 570 bp, Homo sapiens
ataaattttttataattttcattttagagacatttcacttttttgattaggtttacttctagatattttatttattttctgaccatataatgatcctattgggattttagaacccgtattgcccatgcttattcagtaaaatattgaactcgcagagagtaggtcattcaggcagcattccaacagagaagagaggwgagaaactgttggtaattcagagtctcttacctgacttgtgtggctagagacagaccttcagctagtctcctcaattcagggactacctgatatcatgacagaattgttggtgaaatgtaattaaaaacaaaatcttctctcaacccataaagactctgcccaagggtagaagagaaagaaaaacaattgtgttgttgaataagcactaaagcagaatattatatgcatcacaggcaatccactaatgaaattgcaaaaacagaatgaaagctcgccctttgatataacaaagcagatacaacccactgcacacaagttctcaaaataaacagtaaccactccacaagagagtgaaatcgataacaccattaa

SEQ ID NO: 398758 - DNA, 575 bp, Homo sapiens
gaaattaacttttatctttaattgactaatataggtcataaatacaactataagctattttkaatgctatcatgaaaatattaaattttaaaaagcatatttataactttatcaaaactcaaatcaaaattgaactgtactttaacatgtaaaacaacttcataatgaaatcacttgttttactctttgccattttattttccaaagtttcttggcaatatattttggtagctatatgggtcattttttaaattcacattcttcctttgtagcataataatataacattattttgcaataaatttaataaatttatgaatttttaaaggacatttcctgtaggattatcgtttcaagtctcttatatttatttcctcaagcacttgtcatgctgagggatgtctgtctcagctgaagggcagagagcaggcctcttcccaaggagagatcaaaaccattgaggatagggagttttgcttttttgattccagctttattattagaaactagaacatttgggaaacagtgagcattggttcaccatgtgttaactgaacaaattaattaatgaacgt

SEQ ID NO: 398759 - DNA, 597 bp, Homo sapiens
attattaaaagtataattcaaagttcatcattgacttttcttaagaaaagtattttgctaaattaaaatggatattgtttattaaaaaaatgcactagaaattcaatttactacagactatgaatgtttacaaatcatcatttattccaaaaaagttatagcaatggaacatgattctaaatttatttttcagctgtacttgaacttccaattgaagattaatatattcatttttacttggattaattcaaacaatccaagcctgatactgagccagmaacagctgcaagcattagagatacaagatgaaagtaatctactctcaaggagtgtgcaattgatggaaaacaatacaattttttaaaaatatagcaccccaaagtgaaggtttcgatgaggataaaaaaagagttataaatgtatttcagtagaaacctgagaattttcaacttctgtgttaaactcacaattgtttcaaaatttctcacatatattgtttggtagtgtattcattatcttactccagatgtccagaggttgccagagaacctgctaaattttgaggctgagcattaaacacaaaaccacagataattt

SEQ ID NO: 398760 - DNA, 597 bp, Homo sapiens
attattaaaagtataattcaaagttcatcattgacttttcttaagaaaagtattttgctaaattaaaatggatattgtttattaaaaaaatgcactagaaattcaatttactacagactatgaatgtttacaaatcatcatttattccaaaaaagttatagcaatggaacatgattctaaatttatttttcagctgtacttgaacttccaattgaagattaatatattcatttttacttggattaattcaaacaatccaagcctgatactgagccagcaacagctgcaagcattagagatacaagatgaaagtaatctactctcaaggagtgtgcaattgatggaaaacaatacaattttttaaaaatatagcaccccaaagtgaaggtttcgatgaggataaaaaaagagttataaatgtatttcagtagaaacctgagaattttcaacttctgtgttaaactcacaattgtttcaaaatttctcacatatattgtttggtagtgtattcrttatcttactccagatgtccagaggttgccagagaacctgctaaattttgaggctgagcattaaacacaaaaccacagataattt

SEQ ID NO: 398761 - DNA, 589 bp, Homo sapiens
tataaatgtatttcagtagaaacctgagaattttcaacttctgtgttaaactcacaattgtttcaaaatttctcacatatattgtttggtagtgtattcattatcttactccagatgtccagaggttgccagagaacctgctaaattttgaggctgagcattaaacacaaaaccacagataatttagatttgtatctgtttaataaaaggatacttgaatgtttttgttgagagtatatgaatcaatgctgtcaacataaatgctgaacatatttggagtcaattaagaaaaacatattctattttatttcaagwtgcaagtcattatatatttagcaacaataatggtttctactactgagtacctggcataggtctatgtgtcaggcattctgctaggattcgtattacaagcacacacatacacacacataaatacatgaaatcacataaacacagatatatgaggaaatattaattacagcaaaaataaaaattagacattattatccctatttctgtgttgaagacattgacatttggaaagactgagttatctgcctaaggtaacacagctcttaagaggata

SEQ ID NO: 398762 - DNA, 589 bp, Homo sapiens
tataaatgtatttcagtagaaacctgagaattttcaacttctgtgttaaactcacaattgtttcaaaatttctcacatatattgtttggtagtgtattcattatcttactccagatgtccagaggttgccagagaacctgctaaattttgaggctgagcattaaacacaaaaccacagataatttagatttgtatctgtttaataaaaggatacttgaatgtttttgttgagagtatatgaatcaatgctgtcaacataaatgctgaacatatttggagtcaattaagaaaaacatattctattttatttcaagttscaagtcattatatatttagcaacaataatggtttctactactgagtacctggcataggtctatgtgtcaggcattctgctaggattcgtattacaagcacacacatacacacacataaatacatgaaatcacataaacacagatatatgaggaaatattaattacagcaaaaataaaaattagacattattatccctatttctgtgttgaagacattgacatttggaaagactgagttatctgcctaaggtaacacagctcttaagaggata

SEQ ID NO: 398763 - DNA, 320 bp, Homo sapiens
cattcgatgatgatcacactggatttcattccatwattctattcgattccattcgatgatgattccattcatttccatccgatgatgattccattcgattccgttcaatgattattccattcgagtccattcgatgattccattcgattccattcgatgatgattgcattcgagtccatagattattccattctattccattagatgattccattcgggtccattcgatgattctcttcgattccattcgataattccgtttttttccgtttgatgttgattccattcgattccattcgatgataattccattcgattct

SEQ ID NO: 398764 - DNA, 392 bp, Homo sapiens
atgatgattccatgcaattccattagatgatgactcctttcatttccattcgatgatgattccattcgtttccatccgatgatgattccattcgattccgttcaatgattattccattcgagtccattcgatgattccattcgattccattcgatgatgattgcmttccagtccatggattattgcattccattccattagatgattccgttcgggtccgttcgaagattctcttcgattccattcgataattccgtttttttccgtttggtgttgataccattcgattccattcgatgataattccattcgattatatgcgatgattccattcctttccattagaagatgattccattcgagaccattcgatgattgcattcaattcattc

SEQ ID NO: 398765 - DNA, 392 bp, Homo sapiens
atgatgattccatgcaattccattagatgatgactcctttcatttccattcgatgatgattccattcgtttccatccgatgatgattccattcgattccgttcaatgattattccattcgagtccattcgatgattccattcgattccattcgatgatgattgccttcsagtccatggattattgcattccattccattagatgattccgttcgggtccgttcgaagattctcttcgattccattcgataattccgtttttttccgtttggtgttgataccattcgattccattcgatgataattccattcgattatatgcgatgattccattcctttccattagaagatgattccattcgagaccattcgatgattgcattcaattcattc

SEQ ID NO: 398766 - DNA, 392 bp, Homo sapiens
atgatgattccatgcaattccattagatgatgactcctttcatttccattcgatgatgattccattcgtttccatccgatgatgattccattcgattccgttcaatgattattccattcgagtccattcgatgattccattcgattccattcgatgatgattgccttccagtccatggattattgcattccattccattagatgattccrttcgggtccgttcgaagattctcttcgattccattcgataattccgtttttttccgtttggtgttgataccattcgattccattcgatgataattccattcgattatatgcgatgattccattcctttccattagaagatgattccattcgagaccattcgatgattgcattcaattcattc

SEQ ID NO: 398767 - DNA, 392 bp, Homo sapiens
atgatgattccatgcaattccattagatgatgactcctttcatttccattcgatgatgattccattcgtttccatccgatgatgattccattcgattccgttcaatgattattccattcgagtccattcgatgattccattcgattccattcgatgatgattgccttccagtccatggattattgcattccattccattagatgattccgttcgggtccgttcgaagattctcttcgattccattcgataattccgtttttttccgtttggtgttgataccattcgattccattcgatgataattccattcgattmtatgcgatgattccattcctttccattagaagatgattccattcgagaccattcgatgattgcattcaattcattc

SEQ ID NO: 398768 - DNA, 539 bp, Homo sapiens
cttcagtcaaggaacctgttcaacatagaccaatacaatgctgcccacactcattttgaccaaataactttcttctttaacccaaaatatctgccagtgtccaagggcagccccactgaaaagtgatgcagtgaggagagacggcagaatttagaggaatgggtctcaaactttagtgtgcatcagagtcaccaggaaggcttattaaaataagaaacyaccccagcccagagtttccaattcagtaggcttaggttggagcataagaatttacatgccttacatgtttctcagctgacgctaatgctgatggctaggggaaccccgttttgagaaacactgatctgcagaataaatgatttcaaggcttcggtcctctagctggagtttgctcctccatccaaggatcttattcccaggtgaactccaacttgtccactttctcacactggcagtagcagctctgacccatctttctagtcttaggcacctgtaatgggttgcagtgtttttttccaaaagatttgtttcaatagtaa

SEQ ID NO: 398769 - DNA, 560 bp, Homo sapiens
gaggctggccctgctgacatcttgatttaagccttccagccttctgaactgtgagacaataaattaacattgttttaagtcaaccccgttgttatggcatcactaagaaacattctagtccaaggacagataaagctctggccaaggccttattcttggtaggtgtccacatgaactctgaaggaggaagccacgatgtcagctgtctgwtccctttgtcatcactgctagacagtgggtgtctgcgctggggtctgtttttggaaattagattatctaattaatgtgatgttttgttggatccatgccttagggctggatttggcaaaaagcatgtgattattttttactcttaaaaaaatgtcactaaataagataaggagacttggctttgccctatcttgggctccacatgtcctgtttctcactgagagaccctggcaaggagtttctcagtgacaaagaaatggtttcttctcctctagttctgagctataaacaccttctctaatcgacatagaaacggctaagcagtagatattttcagtcagagtacccca

SEQ ID NO: 398770 - DNA, 290 bp, Homo sapiens
actaggggtggaaacaagacccaggaaagggagactaaatgttcttctcaactagccaccagctctcrggctgccaggaatgctgggctgtggtaaatgaatatatagatatatagatatatgggtctggtgccagaaatgtgcaggtctgcagggatgagtatgaaaggcctcacctctcctgccttctagagaataatatacagttcaagagccaaagatgcctgagggtgaactggtatgccaagttcggaagggtcaccaaaccacctaatcccccaagtgttaga

SEQ ID NO: 398771 - DNA, 599 bp, Homo sapiens
atgcacctgctaatctactataagtacaactcccatgagaatcactaaagctgattcgtctttgtatcaatgcaatacatctttgtattgtggcgagcacagagtgggcctccattaagttaggtggaaggaataaactgttaggcaacacatgctaaggacttgtccatcaacatgccttgattataattcacagatcgtcaccaacacaataaagcctccccaatcctctctgtcctcttcatgattttcttgggaaatatwctaccctggcctctccaggctgcagggaactactccttttaggatggcagctccccgcttccctgacacatctactgtcatctcttcacttgcgccagttcagaaagataaaagatcaatttccagctcagatcagccagcccaatgtccctcctgaagacagtacatcaagggaccagtttcctatcattctaggtagaaaacatgcagtgactggtcattcagtctcttgatggtctctcttgccaaaagcaggcactggagaggccatagattggctcccattctcagattgcaaacaatagaactaatattgacagagaaactggatggta

SEQ ID NO: 398772 - DNA, 623 bp, Homo sapiens
gcccactcaaccacactccttgttgcacacctttctttagagctgtgtcctctggccattcaaaggtgagctgagtattggtcaatgccctgaacacgattccttctgtgtgaattgttaatattaagttcttagagccagcaaagcctaagacatatgcccagcaagaaactgctatttttaggaaattagctggtccttcagacccggttaaatgtgctaggtggtctcagtcatgttctttataaactgagaagaatgcctcacaaatttgggtgtcattagggtctgtggatcccgggcactgccacacaaaatcacccggttcaaataccctgcaggtacatgataccctctgccgttaattctatgccattttgttgaagtctattccacttccttcctttaccacttctcaggacaatgcattctctgagtttattatgagctttatgctctatgaattcttrccatttttctaatatttaccctgcttgcgttttaaaggggacctctctcttagcatgtcaggatgtggcaaagagtctgtactggcttagttgctctgctcacacttttataaaagtctattatgtctgtgttaattcccaacagagctgagc

SEQ ID NO: 398773 - DNA, 555 bp, Homo sapiens
cagccagcgcagatcttggaacacagagcagctccacacagaactgaaccagcaacttctccaggagcaaatgttttctgagcactggcctataccaggtgcatgcgaagggtgcataaggccactgagatgaatttgacatatccaggggcttcagaggatcacagtctcttgggtctgacagatgtttaagaaatccccatcatgtagagtacccacagcccacccccctactccgccccgccacagccaccctcctcccatccttcctgggtcttggccacacttgctcttccttctgcctgcaacatggccctttcctgaaatctgctccaaactccccttaacaaagagctttctctccatgcaccctccatagcactattttttcccattccctgtttcatttrtgcttgtgcacttatggccacctggcttctcctgtttccctatttgtcctgtctgtggtctgtctccactactagacctaacccaatgagggcagggcctgcatctgcttcgttttctgcagtatgcccggtgcagaggacagcg

SEQ ID NO: 398774 - DNA, 553 bp, Homo sapiens
cctgcactgtatgaatgcacgcttggagaagactgtctccctgctgcccagcacccactgtccacgcatggttactattagaaagttaatcatggaaaatgctgaggtctctttccccagccctgcacctctcagctccacactacaatttcatcttccatatagtgttaccagacagtgccattggctccgtccactcmcttgtcccaggcctttatgacctttccattcaagccacacaccacgtctgctccacagagctgtaagacacactggcttcagcccgcctggcctgggccagcacgctgacattttccatgagtccacatcagccagtgaaatgctcagaggggattaaggcaaccttctccatcacccccgagttgctttaggaaagagaataacagcactgacccctccattggcagctggtgatatccacacaccatctctatccagagatgaaaggctccttctccatccttgacttgcaaaacagggattatttcccacctcacgctttctgaaatatcaccaaagatgcagctgtgtt

SEQ ID NO: 398775 - DNA, 535 bp, Homo sapiens
atttaagagtctctatgactacattgagtcacttagataatccaggataatcttcttatttttacatcagctgattagcaaacttaatttcttctacaaccctgactgccccttgccatgtaacataacgcattcacaggtttgggggattaggatgtggacatctttaaggggttacccttctgcctaacacacagtaaaatctcctgtctgatgatgtcttctaggagcagagcagggtatagagctgagatgtttcaatattttgtgggaatttcacacattccctgttttctgtgggggctcacttccatttctctgaygtgtgttgtttccccaagtgtggattctctatggtttaatttatctagaaaatgaatttggctctttccagagataaaaagaaatccagccagaagcttgaaatctgctttagaaggtgatctgatagttcccaagggttggcatgaggggtactcatgctgtatgggtagttgctgggctgggtagtgtgggataagaggatgctggaggc

SEQ ID NO: 398776 - DNA, 535 bp, Homo sapiens
atttaagagtctctatgactacattgagtcacttagataatccaggataatcttcttatttttacatcagctgattagcaaacttaatttcttctacaaccctgactgccccttgccatgtaacataacgcattcacaggtttgggggattaggatgtggacatctttaaggggttacccttctgcctaacacacagtaaaatctcctgtctgatgatgtcttctaggagcagagcagggtatagagctgagatgtttcaatattttgtgggaatttcacacattccctgttttctgtgggggctcacttccatttctctgacgtgtgttgtttccccaagtgtggattctctatggtttaatttatctagaaaatgaatttggctctttccagagataaaaagaaatccagccagaagcttgaaatctgctttagaaggtgatctgatagttcccaagggttggcatgaggggtactcatgctgtatgggtagttgctgggctgggtrgtgtgggataagaggatgctggaggc

SEQ ID NO: 398777 - DNA, 538 bp, Homo sapiens
tgacctgcatttatcttcttttcaagccgttattcaattaaaacacatgctttgtatttgattatgtcacttaagtcagttttaccccagatcagaccctctctcccttttcttttcttctgtgacagtgttgttgaagaggaatcagttgtcttgttgactataatttatacctaatgggttaattaactcrggttaagtatttggggcaaaaatcatctagaagtgatggtgcagactttatattacatcgcataaagaggtgggtaatttctggttttcctagctggtcacaaaaagtttgatacaaggttaaggtcgagagccaacccctgtggatgtggcatgctttctccaatttgccacagaccccaccactccttatttgttttacaatagcctaatgaactcactttaccttgcctgcgaggcatatgtgaaatctgaccgaacatatatcacatactacagtccgggtgtgtgataaaagcatatactccttgtattagttcgttttcatactagtgtaaagaactgc

SEQ ID NO: 398778 - DNA, 538 bp, Homo sapiens
tgacctgcatttatcttcttttcaagccgttattcaattaaaacacatgctttgtatttgattatgtcacttaagtcagttttaccccagatcagaccctctctcccttttcttttcttctgtgacagtgttgttgaagaggaatcagttgtcttgttgactataatttatacctaatgggttaattaactcgggttaagtatttggggcaaaaatcatctagaagtgatggtgcagactttatattacatcgcataaagaggtgggtaatttctggttttcctagctggtcacaaaaagtttgatacaaggttaaggtcgagagccaacccctgtggatgtggcatgctttctccaatttgccacagaccccaccactccttatttgttttacaatagcctaatgaactcactttaccttgcctgsgaggcatatgtgaaatctgaccgaacatatatcacatactacagtccgggtgtgtgataaaagcatatactccttgtattagttcgttttcatactagtgtaaagaactgc

SEQ ID NO: 398779 - DNA, 353 bp, Homo sapiens
taattatggtacctcactgtcttcatgcatcttacaattacagctaggttctttatttccatgctttgattctaatccttaggaaacttggccttggggtactgcttrttattgtgagatagaaaaaataatgttttaattcctagtccataaaagacagtttaaaaaatgaacatagagccactaaaaagataaagttagctctatgtgttctaagaaggataattttccaagatatatatttctggggggagaaaaggatatgagcataacagtatgtatagtatgtaccatttgtgcttaaaaataaattgcatgtctctcaaaaaagagattaaaaaaatttttttaat

SEQ ID NO: 398780 - DNA, 571 bp, Homo sapiens
ggccactgtctgtcttttgttgctcattgctccccactctgtctatcactccctaacctagccatgctggccttcttcctgccactcagatattttcgctagttctctctaagggcatctgcattcattgattgctttaccccaggttttctcctggacacctccttttcattcagatccctgagatgccttccctggtcttctarctaaaggtgttccattcccatcccaggtattatatagcctcctacatttctccatatcactgattactcacggaaattatctgtttattggttcaattttgtatttgttgacttattttccaattgagagtattgcttccatgagttggaatcaggtaaacttactgagaattctttaatgccatgattccagtcaaaaatcattgttttcatattactactgcatgctgtgtaccttgcagaagtaatgctttcttagactccacttccccactgccttggttctttgaaatacctgaggaaaatgtgttgacttcatttaacaggaagcatccagtcaaacaccctgctggaaattattatgt

SEQ ID NO: 398781 - DNA, 522 bp, Homo sapiens
gaacatatagcttagatagagtctaaccagtgtggagacagaaggatgtctccttcccacattccaggactacatttccgtaaataggctccagcctattagcctattggcagcatcatcagatggctacctaaaaccacaagatcttcttttaaggagctgttgccatatgtctccattctaaactggtacaattaattttggaacctgtattttcccagactgtctgtcttagcagagaattttgtatgcctggtaaatgtaagtagttaataagtatttataggatttgtgtcaatattttgctaccttatggctacttactagcttaatgcctctgaacctcagttttttttcactggaaaatgggaaaatagtatattccctggtagtgctacaggaggttcatatgagataatrcatgcagtgtaaggtgatgttattatcacagagaatctaggtttgaattccacactagaaaggtaattataactactaaacccataatcacagaaaccacag

SEQ ID NO: 398782 - DNA, 592 bp, Homo sapiens
atttttgagatgtcagacacaatatcttataaatattcttcaagtttggttaggttacacacattcctgtcagctggaaacctttaaataatcagcctatagggacagtacctaacattgtgtcctgcgcaatayaggtgtatactgcccatgcattgttggccatgcatttattttactagatctttactcagaatctactgacttaaaatagtaatctagcttcattcattcattatatatttataagatatattatatgtcaggtaaacaagacaagcattgtcctggcttacaatagagtaaggaaaatggagtactaaacatgtctttaaaaattaacatggtaagtgctgtcataggaagagtatgggatatacaaagcacattaagaggggtacctaacttggaggtgcttctgtgtgtttttggaaggtgaagtgggaatggcaagagaaggcatttagagaatataacaatctaagatttgaaggatgaatagaatagaagagttattcagaagaaggtggggtggggaaagttttcaggagaggatacaatgtcagatatagttacatgacagagaaaagac

SEQ ID NO: 398783 - DNA, 243 bp, Homo sapiens
atgagagtgaactagagtcttcattcctctgattttttctttttcaattcctcatgccttttgacttattttgccagaagaagggatcattatggggaaactggaatgatttcagtggagaaataatgggaagaggtatgaaatgcaagaaagcaccttttgcagtgtggttttgaccccctgacrtacccaagaagccatttttcttgtctgacagcaagaattccttccatgtaattttca

SEQ ID NO: 398784 - DNA, 486 bp, Homo sapiens
atgctatgctgagagaagtaattcacaaagcaaataattctggccatgttttcctgtgtaattaaagtgtgatctccttcagcaaaccttccatagacccccatctagaaattatttctttctatcccaggccctcataacaatttttatgtatctcttttattattctacatttcgtttcaaatatctatgtctctatatttatgtcttatttcttcctctagattagaaattctatgaggaccaagtcggtcataataatcttcatctataacacaatacttgacaaatgtttatgctcgataaacatttgaatggctattaagagcttgcaattttttatttrtttattatttattaatttattatatatattatttatttatatttatttatctcccttatttattaatatggtccaggaatttgcatttattatcccatttaatcctcacaaaaaccacaatgtaagtactaccattatac

SEQ ID NO: 398785 - DNA, 597 bp, Homo sapiens
agaaatgaaggaaaaaggattcaggaagactagctgtagacttcccatatgacttccacgggtaatagaccctttttgggttgtcgttatactagatctgggccttccatctacagtctctggaactcagtttttgtcagtgtatccaggagtaatcaagcttatatgctgtaataccatgtttttaatatatgatgcaaaatgtaactactcaagataccagaatgtgctataactagcacattgctctcaataggaaaaacactaggataaattatatttttaatgagctggaggcttggtgagcctggactctgagagggaaattagccacccaagtgaccctaatgactactgtcattgagctaggatggccagatgagcccatctcatacgttacccctaccaccaggacagcacatttatgttagccacctgcagctggagctggagatcacctcgacctcacagckctggagatctattgcgaagatctttcttctacgactcaggtggactctccctcctttattctcccaatttattcagttttatcaattctgtttgcaagtgtaacttatttgacattcaaacatg

SEQ ID NO: 398786 - DNA, 563 bp, Homo sapiens
tcccctgcctgtctcaaggttgccataagaataaaaattttaaattgctccataaatcaaaagtactattcagaaacaaccaattattatcaatgctatcagccacattattagaatgacgatacctaagcatttcatatgtaacaaggtaaactatggttcaggctgaaaagtccagaccttggtacctgctttcagagtgatttgtctcatcttttatggctttcagggcaagaraatggatgtttcaaatgaaaatattccctggagatagttgttcctggggcagaaaatactgtgggcctgacaactgaggaagggaatatttccttttttactgattcactgatgagcaagtgagccccgacatttgaaaagcacagcaaatatgtagtataggaacagctttttccagtgaaaaatgctacccctgggatcctatctactgatccatatttagttattctctggtaagttattcatccaggatttctctcttccaaccaaccgacacttaaactggaaaaccaggcaataggttggctcatagatgtcacagacaa

SEQ ID NO: 398787 - DNA, 340 bp, Homo sapiens
aacaaataagagtcacagccatacagccaaagtgttttccacttcttccacttaatatacatgtatatgaattgctaaataaatcaccaatttccttctctctactgaatcatttccrtcaacatataaacactgttacaaaaaacaaactctaccctcaagttcccattctattgcattcctctctagagcaaactcaaaggagataactcttctccttgtcattaaaagagggaatttggatggaaaggcaggaggaacttgtcgaaagatattaagtggaggagtaacatgatcaaagttgatagaatctatggagttggtgtgaaagatgaaaaaa

SEQ ID NO: 398788 - DNA, 430 bp, Homo sapiens
taggcaacacagtcaagtccacccagactcctgacctacagaactgaaagagaataatggctgtggttttaacctgctagatttgtggtaacttgttattcagcaatagaaaactaaaacagtgacttcattgtttaccattctcctttcctcattcactcagttcagccacagtggcctcctagttcttctttgacaacaccaggcacccttccatattaggatctctgtttggctgttcctttcctctggccagaatgttcttcctttttatagcgacatgactagtttcctcacctcttcaattttttctaaaatgtcaccttctcaatccatcctacccaggccctcctcaccacaacctatccctcctacactgctctgcytttttttctctccaaaatactttttgccttctaacgtgctatat

SEQ ID NO: 398789 - DNA, 224 bp, Homo sapiens
tttaaatgaataatcagtttctttaacatagacttttctttttgcatgacttttacaattaggcctggtttttgacagattcttcttaattaacatcagtatatgtttttaaaaggcattgaaatayagagaaaacatcactgaatcaatataaagtcacaaaatctattcttaatacaggtacaagtgtagtgtaaatgtatgttttattaggctagctgtaa

SEQ ID NO: 398790 - DNA, 508 bp, Homo sapiens
gaaatattacggtacatggtttgagaaacaaatggaaacaatgagatgagatagttgcaaatgaggtcatcagaaattacacttagaatattaattttatttgagcagaagttttgttttatttatcattttattccctgtgccaaaaatcgtacctggcatatagtactaatagtaacaatgacaatacagatgatgatgatggcaactatgaggataatgattacaacaatcactgtttatcatcttgttacctacccagcagaactttatacaaattaactcattaatctccacagcaacccagggaggtatgtgttattattatcccattttgcaggtgatgaaacagttagctaacctttctaaggtagaatttgaacctaactaggctggtactagagtctgtgtttttaaatgtgcttaataaatattgactgaatattatagtagtaattcttcaagtattgaattctgcttcagagraaagtacaccccattaaacaat

SEQ ID NO: 398791 - DNA, 587 bp, Homo sapiens
tctattatgcaagtctcttacctatgaagaacaattgagaccaaagacatatcctccagatcccttccctggggattctacttcctttctctgaaactactacattattgttaacatgacttatttgcaaattaatcttacatgacctattaatatgtattgaattttatttagctttttttttttttttttttgacagagtctcactctgttgcccaggctggggtgcagtggtgtgatcttggctcactgcagcctctgcctcctgggttcaaccgattctcctgactcagcctcccaagtagctgggactacaggtgcacaccacgatgcctggctaatttttgtatttttagtaaagacagggtttcaccatgttggcctggctggtctcaaactcctgacctcaggtgatctgcccgcctcagcctcccaaagtgctgggattataggcatgagccactgtgcccagctagctcttgattgttatttagagtttttgctttgcattttccaggaaggttgcttgcccctgtatgtccagtgcaagttatasatgaaaatattttatcttccatattccatta

SEQ ID NO: 398792 - DNA, 578 bp, Homo sapiens
ccttatgggaaaaaaataactagatgctaacataggttcagagatggttgggtacaaagattggactaaacagtttagtccaacctctatattttccagatgaggaaactgtcactcagaccccaaacaggcattaaattcatattataaggttagcacttctgaggatatgcaatccagatgtggctgacccctgttctcagaagatttagggaccactggacctagagagtttcttttgtggatatagtcaacagccacctgtaatgtaaaaaargagaaataagaaaataaaaggtctagaaatttattatggatagaatatttcaaatatgtatgaattttaatcagcttctgccttatttattttggatccagcctgatttttttccatagctatatatagatttgtatttattgaatgctgggtattcagagactctgcatgggaaacctgaaggtcagatagtagccccgttttcctttctatctgaccagttacttggtaagttcttactattctcaccatcagtgaaatagtacagggcctatggtacctgtagaccctaagctacact

SEQ ID NO: 398793 - DNA, 485 bp, Homo sapiens
ctgatcatgggtatgggatttctttgggagattatgaaaatgttttaaaagttgaccrtcatgatggttgcacaattctgtaaatatactaaaagccactgaacaatgcactttaaataagtgattttactgtaggtaaattatatctcaataaagcttacttaaaattcttacttaaaagttaaataatttatatagccacagtgacattaatactatgtccttataatgtcaaatattcagataaaaataataaaaaataattttaaaaagttttaatttgtctatgaaaggttattcaaataaattattcagaagaaggttttcagatttttacatttttaacatggctatagttctcatttactaactactttttgtttggtgttttgcaaaaataatcactaatcctaataataaatctatacagtaggtatttttatttctatttcactgataaagatgatagctaccagagctgagat

SEQ ID NO: 398794 - DNA, 485 bp, Homo sapiens
ctgatcatgggtatgggatttctttgggagattatgaaaatgttttaaaagttgaccatcatgatggttgcacaattctgtaaatatactaaaagccactgaacaatgcactttaaatargtgattttactgtaggtaaattatatctcaataaagcttacttaaaattcttacttaaaagttaaataatttatatagccacagtgacattaatactatgtccttataatgtcaaatattcagataaaaataataaaaaataattttaaaaagttttaatttgtctatgaaaggttattcaaataaattattcagaagaaggttttcagatttttacatttttaacatggctatagttctcatttactaactactttttgtttggtgttttgcaaaaataatcactaatcctaataataaatctatacagtaggtatttttatttctatttcactgataaagatgatagctaccagagctgagat

SEQ ID NO: 398795 - DNA, 579 bp, Homo sapiens
ccatttcacataactgccacgtcattcctgctggaaccagatctgtgagttcccaatccccaaaagaacacaattagctggactcgttatatttttgaacacctgccccaaatragtactgactggctttctctgagcttccttgggaccttgattttggaaagtacggtagatttaaggattgtaactgcaactgtgtttatacagttttcatgagaatttgctttgaaaagcactcagccttatacaaggctgtggattttaaaattccttatgacccatctgaaagtcacacacataatagaatgtcttcgtaccatggacagatctattacatagctttgttttactctgcgtttattttggtaagaaatactgaaaacctgccaactagtcagtcccaggagtttgagcaacacctgatgtaagaactgcctgtggcctgccttctggtaaaaccagttctgagtcactatttatagcccctttggcaaagcatcctagaaagctggcttaaagtagactggcaggaattagcctctgtgctccttcttatccaacttaaggaggtgaaaactg

SEQ ID NO: 398796 - DNA, 568 bp, Homo sapiens
ggggacacagccaaaccatataatagatccaaattttagcttcttcatggtatctatatggagcatcagatatagatgctgcatatagagatgaacagggtgaatgggtgagcagatgcatccactgatgatgctcaagctttgttgtaatcatttttagccacatatcatccagcatttatcaaaactgccattttctgaaaggacacttaaaatttattttaatttccctgcctcagtttacctatcaggaagcagactgttggaagcagtaggtgatggaagtagagaaaaagaaggcttagaagtccgtgttgttctgcctcatagtaaatgatcatggtattaattcattttaagtagcaatcctgcttaaaagtcacagctgcragagaagcagcctttccttttgtcttttgccccaaggcatttgtgcgaggtgcctctggattaactgcatttctccattggctgagttgcaggaatcaaatgcctctttgagagaagggcttttgttcacaatgctgaatgcttggtatagctatactaagcataaaggttcagtagg

SEQ ID NO: 398797 - DNA, 568 bp, Homo sapiens
ggggacacagccaaaccatataatagatccaaattttagcttcttcatggtatctatatggagcatcagatatagatgctgcatatagagatgaacagggtgaatgggtgagcagatgcatccactgatgatgctcaagctttgttgtaatcatttttagccacatatcatccagcatttatcaaaactgccattttctgaaaggacacttaaaatttattttaatttccctgcctcagtttacctatcaggaagcagactgttggaagcagtaggtgatggaagtagagaaaaagaaggcttagaagtccgtgttgttctgcctcatagtaaatgatcatggtattaattcattttaagtagcaatcctgcttaaaagtcacagctgcgagagaagcagcctttccttttgtcttttgccccaaggcatttgtgcgaggtgcctctggattaactgcatttctccattggctgagttgcaggaatcaaatgcctctttgagagaarggcttttgttcacaatgctgaatgcttggtatagctatactaagcataaaggttcagtagg

SEQ ID NO: 398798 - DNA, 544 bp, Homo sapiens
taatttactctaagggttgagtttagctgcacacacagcctcgtcatgagctaagtcctcataatgcattcatttttatccacatttatatttatcttgctccatcctctcccyggcccttcagagagccaccgcttgcctcattttgctgctcaatggcacccccatcagagactgagcagaaaggaaagactggaaagcctcgaaatgctcctggtttggcagttccagttctgtgtgtgcatgtctttgtgagacgtgtagtgtgtatgtgtgttggggggcagaggggatttcctgggttaaagtgatgcttaaattttatttacccattcttctatactgctaacagtgtagaatctacacacatattctcattgtctctctctctgtctcccctgtgtggtcagcaaagcactcagacccacaatgtgtaataggaaaatcttaaaattagatgaagagtctaatttccatgtttaatttcttcatacagcactcctttgtgctgtaattctgccagtgagaatcccattctttaagc

SEQ ID NO: 398799 - DNA, 563 bp, Homo sapiens
gtttaattgcatcgtattttctatttgttctatctgtaatttgttctccttttcttctttttcttcatttaaaaatattatttttatatttttaatattaatatttttatgattctatgtttaatatttttatgattcttattttttattctttgtttggcttattagccatagctctttttctgttcttttagtggttgctttaggattcacagtgtacatatttaacttatcacagtgtaccttcaagtgatttataccatttcacatrtattccattttctccttcagatatttttggctactgttgtcaaatattttactttaatgtatcttaaaataccattgctacactgttgttatttttgttcagtcagtaatcttttacaaagagatttatataaccaggaaaaacacatgtttatgcattatagttaccatttctagtggtcttcattttttggtctttatattttatctgacatcattctccttcttcctgaagaacttttttaaaaatcatttcttctagtgtggatctgctggtatggtattcagctcct

SEQ ID NO: 398800 - DNA, 549 bp, Homo sapiens
gttttgttgtttttagcagaagagttctgtaygtgctttgttagatttatacctaagtatttcaccatttggagtgattgtaaatggtattgtatttttaatttcaatgtctatgtgtttattgcttcatatgtagaaatacaataatttgtatcttgcaaccttgataaaataacttatttgttccaaggagacttttttatagattccttggaattttcttttttttctttttctttttttgagatggagtctcactctgtcacccaggttggagtacagtggtgcaatctcagctcactgcaacctccgcctccagggctcaagcgattcttgtgcctcagcctctggagtagctgggattacaggcgcatgccaccaccatgcctggctaatttttttgtatttttgatagaggtggggtttcaccattttggccaggctggtgttgaactcctgacttcaggtgatccacccacctcagcctgccaaagtgctaggattacaggcatgagccactgtgcctagccttccttggaattttctatg

SEQ ID NO: 398801 - DNA, 577 bp, Homo sapiens
tgaaagctggcccagcttgtcatgttgggaggcacatcgatgtttccactattaaggtctactgttgtgttccgaggaggggcacgccctatccagccaaacgaagaacattgagagaataaaaatccacaaaaccaagattgttaaatttagatctttgagactaagattasttacgttttctacattcaaaaccattaaccccataatgcctggaacgttaggtctctatgaccacttaaaacttttgtacatgtgagtcaaacttaatggaactggaaaaaccttcactgtctaaacagttcattgtcctttttgttaaaatgtatgaggctatataatgagataactgataccaatttaacattatacagagatgactgggataatcactcattttttctttcaaacagagagcttaaaaaccaaaatgaagactaacatcactgttaaactatacaagttataaatcccaacatctgatgacactgatgttaatttcaaatgttctatcctatattttcccctagacattaaggaaaaatgacatcttaagaaaagacaaaagccaggcctg

SEQ ID NO: 398802 - DNA, 577 bp, Homo sapiens
tgaaagctggcccagcttgtcatgttgggaggcacatcgatgtttccactattaaggtctactgttgtgttccgaggaggggcacgccctatccagccaaacgaagaacattgagagaataaaaatccacaaaaccaagattgttaaatttagatctttgagactaagattacttacgttttctacattcaaaaccattaaccccataatgcctggaacgttaggtctctatgaccacttaaaacttttgtacatgtgagtcaaacttaatggaactggaaaaaccttcactgtctaaacagttcattgtcctttttgttaaaatgtatgaggctatataatgagataactgataccaatttaacattatacagagatgactgggataatcactcattttttctttcaaacagagagcttaaaaaccaaaatgaagactaacatcactgttaaactatacaagttataaatcccaacatctgatgacactgatgttaatttcaaatgttctatcctwtattttcccctagacattaaggaaaaatgacatcttaagaaaagacaaaagccaggcctg

SEQ ID NO: 398803 - DNA, 576 bp, Homo sapiens
aaaaccccaaaagtactgtattttcctttgagaaggttagcatccatcggagtggaattttaaatttctttttttttttgaatgcctagagagagtcggctkggtttataggccaggtggttttcattcaatgtaaatatgaaacaaaacagaggaaatatgtctctccctaagagtgtaataggaacaagaatattaaaatgaaaataatcatgtttgggtagttcactcacatctgtgtatgaatttactttgagacaacttcatcttatacagtacaccttcttttgaaatacttacagatgatatttcaattgctctttgctttaaacattttcatatgttggtttttactttaattacagattgctccaattgtgtcagcgaactatggctcttcctgtaggacgaggaatgtttaccttgttttcgtaccatcctgttccaacagagccattgcctattcctaaattgaatctgactggtatgttaaattctgggctcaatgagaaaggaaaatgattaagtacatgcattaagtgtagttctttaaattagttaaaacaaaagaaatgc

SEQ ID NO: 398804 - DNA, 576 bp, Homo sapiens
aaaaccccaaaagtactgtattttcctttgagaaggttagcatccatcggagtggaattttaaatttctttttttttttgaatgcctagagagagtcggctgggtttataggccaggtggttttcattcaatgtaaatatgaaacaaaacagaggaaatatgtctctccctaagagtgtaataggaacaagaatattaaaatgaaaataatcatgtttgggtagttcactcacatctgtgtatgaatttactttgagacaacttcatcttatacagtacaccttcttttgaaatacttacagatgatatttcaattgctctttgctttaaacattttcayatgttggtttttactttaattacagattgctccaattgtgtcagcgaactatggctcttcctgtaggacgaggaatgtttaccttgttttcgtaccatcctgttccaacagagccattgcctattcctaaattgaatctgactggtatgttaaattctgggctcaatgagaaaggaaaatgattaagtacatgcattaagtgtagttctttaaattagttaaaacaaaagaaatgc

SEQ ID NO: 398805 - DNA, 576 bp, Homo sapiens
gtctgcctccttagaagaggagacagaggcccctgcaccagcccaggtcccagctcctcttggatcatctcgtcccccttatccaggcccccttttgaacctcatcctgttagaagagttcgacctggatgcgctccagcatcacttcttcctttacaggaaatgcatagtgaatatggtcctatcaaagtacaagtccccttttctttacaagatttgaggcagataaaaagaaatctaggacaattgtgtcgacctkgataggtatattgaagcctttcagaaccttaatcaaatgtctgagctttcatggaagggtatcatgttacttctcaactagactcttagagcttcagagaagcaggcagctttacaggtcactgagacatttggagatgaaatgtttatcttattatggcacctaccaaaagggggaagaaattagggagccctttctgacagccaagcaggcagcatccaccaataatcctcaatgagactcagacactgctctaggaaagtggccgagaaaacatttttagggatgcacagtggaagatctgaaaactagaggca

SEQ ID NO: 398806 - DNA, 576 bp, Homo sapiens
gtctgcctccttagaagaggagacagaggcccctgcaccagcccaggtcccagctcctcttggatcatctcgtcccccttatccaggcccccttttgaacctcatcctgttagaagagttcgacctggatgcgctccagcatcacttcttcctttacaggaaatgcatagtgaatatggtcctatcaaagtacaagtccccttttctttacaagatttgaggcagataaaaagaaatctaggacaattgtgtcgaccttgataggtatattgaagcctttcagaaccttaatcaaatgtctgagctttcatggaagggtatcatgttacttctcaactagactcttagagcttcagagaagcaggcrgctttacaggtcactgagacatttggagatgaaatgtttatcttattatggcacctaccaaaagggggaagaaattagggagccctttctgacagccaagcaggcagcatccaccaataatcctcaatgagactcagacactgctctaggaaagtggccgagaaaacatttttagggatgcacagtggaagatctgaaaactagaggca

SEQ ID NO: 398807 - DNA, 576 bp, Homo sapiens
gtctgcctccttagaagaggagacagaggcccctgcaccagcccaggtcccagctcctcttggatcatctcgtcccccttatccaggcccccttttgaacctcatcctgttagaagagttcgacctggatgcgctccagcatcacttcttcctttacaggaaatgcatagtgaatatggtcctatcaaagtacaagtccccttttctttacaagatttgaggcagataaaaagaaatctaggacaattgtgtcgaccttgataggtatattgaagcctttcagaaccttaatcaaatgtctgagctttcatggaagggtatcatgttacttctcaactagactcttagagcttcagagaagcaggcagctttacaggtcactgagacatttggagatgaaatgtttatcttattatggcacctaccaaaagggggaagaaattagggagccctttctgacagccaagcaggcagcatccaccaataatcctcaatgrgactcagacactgctctaggaaagtggccgagaaaacatttttagggatgcacagtggaagatctgaaaactagaggca

SEQ ID NO: 398808 - DNA, 623 bp, Homo sapiens
tgtgtgcaatttatttttaaacagtcagcattcccattccraaaatcccatatgtacacaaatgcacacacacaaacaaatatggcaaaattttcatgattgttggatataggtgaaatatgtttgctgcattatttcaacttttcttactgaaaatttttataacaaaaagttggaggaagaactaatgcatttattgtagttgaattagggttgacgaggttttggaggctttgactaatgttaagtttcatttttgtaaatgctgaaatctttgtatctggatactgcttcctcccactcctcccgcctaccgttaactatttcctgatgagtactgtattctatttattggaaaggataaactgaatcattattccaacatttgagggcatatgtgaaagcatttgtgtcctggagtgttgaagccagtgatctttttgatggtaaattttttcccatataattcatatagttagtatagatgtgaaaagtgcatttgatgatatccaagtagttctttgcttctatatcttcatcttaatttctccaagaacagttgcctatttactagattctatggaagtgcagttagatatattatctcctttatcttaagatca

SEQ ID NO: 398809 - DNA, 623 bp, Homo sapiens
tgtgtgcaatttatttttaaacagtcagcattcccattccgaaaatcccatatgtacacaaatgcacacacacaaacaaatatggcaaaattttcatgattgttggatataggtgaaatatgtttgctgcattatttcaacttttcttactgaaaatttttataacaaaaagttggaggaagaactaatgcatttattgtagttgaattagggttgacgaggttttggaggctttgactaatgttaagtttmatttttgtaaatgctgaaatctttgtatctggatactgcttcctcccactcctcccgcctaccgttaactatttcctgatgagtactgtattctatttattggaaaggataaactgaatcattattccaacatttgagggcatatgtgaaagcatttgtgtcctggagtgttgaagccagtgatctttttgatggtaaattttttcccatataattcatatagttagtatagatgtgaaaagtgcatttgatgatatccaagtagttctttgcttctatatcttcatcttaatttctccaagaacagttgcctatttactagattctatggaagtgcagttagatatattatctcctttatcttaagatca

SEQ ID NO: 398810 - DNA, 623 bp, Homo sapiens
tgtgtgcaatttatttttaaacagtcagcattcccattccgaaaatcccatatgtacacaaatgcacacacacaaacaaatatggcaaaattttcatgattgttggatataggtgaaatatgtttgctgcattatttcaacttttcttactgaaaatttttataacaaaaagttggaggaagaactaatgcatttattgtagttgaattagggttgacgaggttttggaggctttgactaatgttaagtttcatttttgtaaatgctgaaatctttgtatctggatactgcttcctcccactcctcccgcctaccrttaactatttcctgatgagtactgtattctatttattggaaaggataaactgaatcattattccaacatttgagggcatatgtgaaagcatttgtgtcctggagtgttgaagccagtgatctttttgatggtaaattttttcccatataattcatatagttagtatagatgtgaaaagtgcatttgatgatatccaagtagttctttgcttctatatcttcatcttaatttctccaagaacagttgcctatttactagattctatggaagtgcagttagatatattatctcctttatcttaagatca

SEQ ID NO: 398811 - DNA, 590 bp, Homo sapiens
gactgggggaggtacacttctgcctctcaggagcaaccgcatcttgcaatcaaatctcagttaattgaaacttggggaagaaagatggaaataataggagctcatggacatttaagtacgaatcccatgtactctggaaagactaagggagatttggcatcatgcacaagagtgtccctgaaagatttttaaactacttggtcttggctcgtgtgtgtgtgtgtgtgtgtgtgtgtgtgtgtgtgtgtgtgtgtgtgtttaaattattttaatagtaatgtatgtattttgtcaaaaacttggaaaataccaaacrtacaaagaaagaaacaatggcttataattgcaactctgagaaaaattttccaattatatataaataaattaaatgttcttgaaattaatcttttattgcatagatgattatatatcctgtttcattcagtttatattatgaatatttctgtatattattaaaagtcttcaaaaaaatttttttgttttttgagacagagtcttgctctgtcacccaggctggagtgcagtggcgtaatctcagctcattggaacctccacctcccgggtttaag

SEQ ID NO: 398812 - DNA, 522 bp, Homo sapiens
gcaggcagactggctaggaacctcaggactcaagaacaaatsggtttccttttgccccatatgtcctagactaggagctaaagacaaggaaaggggcagcccagccagacagaaaacttttagacaataaactgctctactccaggcaagcaacccaaaacacatcacggccccgtccccatccacaccagcaaaagtcaagtgagaaatctagacttccaccctcaccaagctatagagaagtactacaagtggccctccagggtggcgtcagaaagggcctagaggaagtagagaactaagatgtctagccccactgactggtgtgaggaccatgtgggagccaggccttccatccccacccagcattaatgaagcaatgaagcatctctcctcctccctactggggcagtatctggggcctgcagaaagtcagggctttcactgccaaccagaaaggaggccatccttccccctactctagtgtttggggaggccaggtggggaagaattggaacagaa

SEQ ID NO: 398813 - DNA, 522 bp, Homo sapiens
gcaggcagactggctaggaacctcaggactcaagaacaaatcggtttccttttgccccatatgtcctagactaggagctaaagacaaggaaaggggcagcccagccagacagaaaacttttagacaataaactgctctactccaggcaagcaacccaaaacacatcacggccccgtccccatccacaccagcaaaagtcaagtgagaaatctagacttccaccctcaccaagctatagagaagtactacaagtggccctccagggtggygtcagaaagggcctagaggaagtagagaactaagatgtctagccccactgactggtgtgaggaccatgtgggagccaggccttccatccccacccagcattaatgaagcaatgaagcatctctcctcctccctactggggcagtatctggggcctgcagaaagtcagggctttcactgccaaccagaaaggaggccatccttccccctactctagtgtttggggaggccaggtggggaagaattggaacagaa

SEQ ID NO: 398814 - DNA, 557 bp, Homo sapiens
ggtcacaatcatattacggttttatctatcttttcataatatgtatcactatctgtatttgtggtgtttgtttactggcttgttattatccctacaactataatttaagatgcataatgtcgcttgttcattaccacagtctgagctcttagaacagtatctgacatgtagagggaactcaatgaaaatttatagacaggaagaaaaagaagggagtgaaggagtgctgtgtatgactaaaaaattcggggaaagaacccacagtgggaatcactagctcctagacctcattaaattcaggacccataaccacatttttaatatctttagaaaatccacatttaactggaaattgtcccatgcacwcaactcattttccaaacccatcccagacagagggatcaaacagatggactctgcattgtacctgggagtgcagccaaatctagctgggctggttgcattggaaaatcttacagaaatggagtagaatttacaaatttgaaaggggagtgaggtcctgcatcccacttccaattttggatcacccaggttat

SEQ ID NO: 398815 - DNA, 377 bp, Homo sapiens
ggtaccagcctagataccacatgcttcattcagaaagtttttctcagctcccaggccttggcagattgcccccttgagttttcacagcatcttgcctttgcttgtcacrgcactagtcttgctatgttcaaattgcctgttgtgtgtttggattcatgtgactgtggattcaaaatggacatagagggtgaatgaataaataaataagtgatgttgcctactttgctcaaggccaactgagcatgagttcctccccataactctgatttcgaagaaagcacagatctgccttcagcacaaattttcacttattcccaatgaatatcctttcaccgggcttactctggtttcctccagcccatgaaatatgacttatt

SEQ ID NO: 398816 - DNA, 480 bp, Homo sapiens
ggccacagagatcctgtctaaaacataaaacaacaacaacaacaamaaaaaaaaaaccttgcagagttcctatgtatctcaaatattccaatgacccaatttctccttcttaaggaaccatgacctctcactttttaccaagacattatcaggtttagaggggaccctgtgcactgaaaattgagttggccatatggtacctgattcattcactaattattttaactaattactggaaacctatgtgacaaggattgtgctgggccctggggacaccagatcaaattcgcttgatccttatcttcacggacctaacaatttagttgtagagacattatgttctgacacgcagagttttaacaagacaatatcacattcagactttcccagaatatccctaagccctgtattggtacatagaaatgttctgagatgggtgttaaaatgcaacccccaggcttcaccttcacagagttcatt

SEQ ID NO: 398817 - DNA, 578 bp, Homo sapiens
atggccttgcttccttccaggtgattccatagtgtcccktctccctcctaacattctcatattcatttggagaattcctcttccattgcatcttgtcttggcataagaatttccagtttcccctctccctctcaactatggtagcatgatattgcttctaactgctatctggtcctctaggggcagtcaggagacccaagtatggccagtcagagggcttctccctggaccttgaatcttgaatcttgaactactaccagcagcagaggcagcagcaacaatggcagacctttcctgaataggcttttctggctattcttggtcctccaggacttcgtttcttgttctaacaggtccaaggagatgtgcttaccctgaggcccctcatcctattctggatactgagggccctagaattatctgcccaactggtcccagcctacattcagtgggtcaccatatttataatcctgagggtagaccaccctgccctaggtgtgcaaactcctaggacctagggttggccaaagtgtggctcattgcaagcaggcaggagagtgtggctaaaacttggtctg

SEQ ID NO: 398818 - DNA, 517 bp, Homo sapiens
gtgggcaaccagatttgggagcctctcatctaaatgttctgyacctcgctgcatccctctgtaagatgtggttcgatacctatcccccatgtgagtactaaaggacaaacatgacatgaaacatctatttcattgtcctgcactcaatatgtgttagatatgctctttcaattaatacatttgaggtggtttcttccagaatatttcagtgtggttttaggacgcaacctattgatcataactgccatgtatctattagttcttcaccacagggagaggttatagccgtattgtggctaaaggaaaccaatgacaaaaccaacacataacaagcaaaacatcttctgtgagagaggcataaggataaagtcagagaaacatttttcttctttttaaccaaacacttaactctgcaaaatcagtaaaaataaaaatcagggtaacgtgtccttcccccattttctttcatctggaagcaaatgaagaagtaagaaccactttgcagcaggtgatcatg

SEQ ID NO: 398819 - DNA, 517 bp, Homo sapiens
gtgggcaaccagatttgggagcctctcatctaaatgttctgtacctcgctgcatccmtctgtaagatgtggttcgatacctatcccccatgtgagtactaaaggacaaacatgacatgaaacatctatttcattgtcctgcactcaatatgtgttagatatgctctttcaattaatacatttgaggtggtttcttccagaatatttcagtgtggttttaggacgcaacctattgatcataactgccatgtatctattagttcttcaccacagggagaggttatagccgtattgtggctaaaggaaaccaatgacaaaaccaacacataacaagcaaaacatcttctgtgagagaggcataaggataaagtcagagaaacatttttcttctttttaaccaaacacttaactctgcaaaatcagtaaaaataaaaatcagggtaacgtgtccttcccccattttctttcatctggaagcaaatgaagaagtaagaaccactttgcagcaggtgatcatg

SEQ ID NO: 398820 - DNA, 517 bp, Homo sapiens
gtgggcaaccagatttgggagcctctcatctaaatgttctgtacctcgctgcatccctctgtaagatgtggttcgatacctatcccccatgtgagtactaaaggacaaacatgacatgaaacatctatttcattgtcctgcactcaatatgtgttagatatgctctttcaattaatacatttgaggtggtttcttccagaatatttcagtgtggttttaggacgcaacctattgatcataactgccatgtatctattagttcttcaccacagggagaggttatagccgtattgtggctaaaggaaaccaatgacaaaaccaacacataacaagcaaaacatcttctgtgagagaggcataaggataaagtcagagaaacatttttcttctttttaaccaaacacttaactctgcaaaatcagtaaaaataaaaatcagggtaaygtgtccttcccccattttctttcatctggaagcaaatgaagaagtaagaaccactttgcagcaggtgatcatg

SEQ ID NO: 398821 - DNA, 512 bp, Homo sapiens
tttctttacatcttgtgagaaaatttcaaactgttgctcargttctctctgctgagaataagggtagatgctgcatcatcctgaggaaagcttgcgaccttgaggtactggtgcaacatggccaaatctctagcaccaaagacagaggcaacttggtttgtattgaagccatttcatgcagcagctaagcagagaccccatctcctgatacctggtcttcatatttctacagatttttaatcaagcaccagaaaacaggtactcttcatttttttcatagcagggccaaagtcccaagttctggctctaattaacccaggtgctctctcaaaatcaattgtgtggccacagcagggctggtggagacatgggttagccacccaccagctaagagcagcacacaggtggcctctcgggtgcctgagctagttaggccagtcctgccagaagccaagggaggagggtggagatgcagggcttggaataggagcctagagtggataaggagggtg

SEQ ID NO: 398822 - DNA, 512 bp, Homo sapiens
tttctttacatcttgtgagaaaatttcaaactgttgctcaggttctctctgctgagaataagggtagatgctgcatcatcctgaggaaagcttgcgaccttgaggtactggtgcaacatggccaaatctctagcaccaaagacagaggcaacttggtttgtattgaagccatttcatgcagcagctaagcagagaycccatctcctgatacctggtcttcatatttctacagatttttaatcaagcaccagaaaacaggtactcttcatttttttcatagcagggccaaagtcccaagttctggctctaattaacccaggtgctctctcaaaatcaattgtgtggccacagcagggctggtggagacatgggttagccacccaccagctaagagcagcacacaggtggcctctcgggtgcctgagctagttaggccagtcctgccagaagccaagggaggagggtggagatgcagggcttggaataggagcctagagtggataaggagggtg

SEQ ID NO: 398823 - DNA, 550 bp, Homo sapiens
gtttgattaattgttccttgcatatttctttgtcacatacaaaggagtttttttgttgttgttttgttttgttacacttaccaaaccagacctcacatttacatgttcctggtccactcagttttggtgaagamctcactggctataggtccaacagcacttgatagaagacaaagtctctcacgtgtgtcctttgcttcatagaagtccacatccaagggcagtgtcactttgatccccttcaaaactctgtgagtggtgcagggtaactggatgacgaaatggaagctcaaaatgtaaagagtggttttagaatattagagttggaagggaattgtctcagctcatgacatagtttatcttaggattggaatcacatattcagccaaaaaacatcttctaaacacctatcctgtgctgggtatcaggttctatctggtagaaatagataaataaaacaaatttgatgtcttgaaggagtctgtaatctagaacagagttaaggaaaaaaaaaaaaactgtggactgtgggccaaatttgacccagtac

SEQ ID NO: 398824 - DNA, 578 bp, Homo sapiens
tttctttgtctgaccccccataaaatcataggccacttaaggtgagcaggtgccatatctgttacatccaccattcattccccagagcctcgcaccgtacctggcacatagtagatatttgattaatatttaagatagtgaactaaatttagatcactacctaaagcagagggcggtgggtaggaaataaggaagttagggtcagaacttggaggacataaaggctagcagaagcttagatttgatgagaggacagaaggagtgttgatggtgagaataagggaataataagcatcaaactgtatagcctgctamcctctcagcagaggaatgaagatggatggaataaaattagcaaaatcattatcatgatgataaccacaatctcctcatgctgggagctaggacctaaccagggatgttctctgctttcagcctccatgcctttcagatcaccattgtgttcctgctgagggcagagtaagtgatcctcaaacctggctgaccccagggtcctcttggagatgagatatctgtagaagagaaggaggaagcaaaaaagtaagaaatgtcagttg

SEQ ID NO: 398825 - DNA, 626 bp, Homo sapiens
aaatgctctgtggctctgatcctttgatgactctgtaaagctactcccagtgcagacaaaatgtgtttggacctgtgagagcgtgtacaccaaggcctgctggaagtgcctctttctgtgctctagggatgctgagctggggactgcatgggggaggcttcaagctctggtatctgcaacctgctcagtctcaccacatcgagaactgggagaggcttctttaaagcccatcttggcaacttagaaacttctagtcagcagaccaggttccagtcttgggtctgayctaagcaagctatacatagccctaagcacgtttctgggcatcagcttctctgtctataagctatcatggtttgagtggatcatctctaagactccttcctttttagtctgtcacatggctagtaataaatagccattcactgttgttgttaacagttaatattatcattagtttttaaggcaaagtagttgctgacatttctcttctaaatccagtgctggcatccacagatcctcctagcaggttctcacgtgcacccgttcaaacacaggtaggctcatcctctgtgcccatcctaattgttgattacaaacttccaaggcttacacagaggacccct

SEQ ID NO: 398826 - DNA, 626 bp, Homo sapiens
aaatgctctgtggctctgatcctttgatgactctgtaaagctactcccagtgcagacaaaatgtgtttggacctgtgagagcgtgtacaccaaggcctgctggaagtgcctctttctgtgctctagggatgctgagctggggactgcatgggggaggcttcaagctctggtatctgcaacctgctcagtctcaccacatcgagaactgggagaggcttctttaaagcccatcttggcaacttagaaacttctagtcagcagaccaggttccagtcttgggtctgatctaagcaagctatacatagccctaagcacgtttctgggcatcagcttctctgtctataagctatcatggtttgagtggatcatctctaagactccttcctttttagtctgtcacatggctagtaataaatagccattcactgttgttgttaacagttaatattatcattagtttttaaggcaaagtagttgctgacatttctcttctaaatccagtgctggcatccacagatcctcctagcaggttctcacgtgcacccgttcaaacacaggtaggctcatcctctgtgcccatcctaattgytgattacaaacttccaaggcttacacagaggacccct

SEQ ID NO: 398827 - DNA, 627 bp, Homo sapiens
agcccagtgttcagaacaaaacaggcattctaactacttttaatttaatgaatgaatccttagctactggagatacactgagaaacaaagcagacataactctttacttgaactgattcaaaatcaagtggggaagtgtaagaaactttaaagtttctcttaacactgtatcaagagcaaacaatgacagattttaaaggtaggtataaatggaagttccaaacccagaagaagaagaaaagaggtagtggaggtggaggagatgcagaaatcttaggtagaatgtggctttggtgtgaagttsgcaatatttgcaaagcattccccagacagaggtccttctcagtttggcttgtggtgactcttagggaagaaatcccccattctgagctgagaacggagttttgcttcagatgtgttttgatttgcacctttgatattttcctacaacttcagagcaatcacattgtgttgctcctggaagagatgaggcgccacctgctagtcagaaagaaccgagattataagacttaaaaaaaaaaaaaaaaaaaaaaaaaacttttttaccccccaaaaggatttatacttttcaaagagggttcttgtttttttttcaatgacatgagt

SEQ ID NO: 398828 - DNA, 627 bp, Homo sapiens
agcccagtgttcagaacaaaacaggcattctaactacttttaatttaatgaatgaatccttagctactggagatacactgagaaacaaagcagacataactctttacttgaactgattcaaaatcaagtggggaagtgtaagaaactttaaagtttctcttaacactgtatcaagagcaaacaatgacagattttaaaggtaggtataaatggaagttccaaacccagaagaagaagaaaagaggtagtggaggtggaggagatgcagaaatcttaggtagaatgtggctttggtgtgaagttcgcaatatttgcaaagcattccccagacagaggtccttctcartttggcttgtggtgactcttagggaagaaatcccccattctgagctgagaacggagttttgcttcagatgtgttttgatttgcacctttgatattttcctacaacttcagagcaatcacattgtgttgctcctggaagagatgaggcgccacctgctagtcagaaagaaccgagattataagacttaaaaaaaaaaaaaaaaaaaaaaaaaacttttttaccccccaaaaggatttatacttttcaaagagggttcttgtttttttttcaatgacatgagt

SEQ ID NO: 398829 - DNA, 627 bp, Homo sapiens
agcccagtgttcagaacaaaacaggcattctaactacttttaatttaatgaatgaatccttagctactggagatacactgagaaacaaagcagacataactctttacttgaactgattcaaaatcaagtggggaagtgtaagaaactttaaagtttctcttaacactgtatcaagagcaaacaatgacagattttaaaggtaggtataaatggaagttccaaacccagaagaagaagaaaagaggtagtggaggtggaggagatgcagaaatcttaggtagaatgtggctttggtgtgaagttcgcaatatttgcaaagcattccccagacagaggtccttctcagtttggcttgtggtgactcttagggaagaaatcccccattctgagctgagaacggagttttgcttcagatgtgttttgatttgcacctttgatattttcctacaacttcagagcaatcacattgtgttgytcctggaagagatgaggcgccacctgctagtcagaaagaaccgagattataagacttaaaaaaaaaaaaaaaaaaaaaaaaaacttttttaccccccaaaaggatttatacttttcaaagagggttcttgtttttttttcaatgacatgagt

SEQ ID NO: 398830 - DNA, 609 bp, Homo sapiens
aattaaggccttttaatgcagtggccctatccattaatattcatrgtgcaattaattcttgatctctgaccaattattccagcagttttcccctctctcttttaaaggagacctgggaaggggatggataaaaagaggttaaaatgcctttcccctacacagagttatgtctgtacgtttgtttgtttttagagtcagagtcttgctctgttgtccaggttgtagtgcagtggtgtgatcataactcactgtaacctcgagctcctgggctctccagcatagctagaactacaggtacatgccatcatgctaggctaattaaaaacaaaataatttggagacagagtcttgctatgttgcccagggtggtctcaaattcctgacctcaagccatcctcctggatcacttgtattataggcatgagtcactgtgcccagccctagagttgtatttaaactctccagaaagcctcaagaaagtgagtccacatttcgagactttctctcaatgacagatgacaattcataagcaaagtttggctttcttttcagcatagggatgtgttccatgcaaattaaaagcttctcagcagtcacccattagtgatg

SEQ ID NO: 398831 - DNA, 609 bp, Homo sapiens
aattaaggccttttaatgcagtggccctatccattaatattcatggtgcaattaattcttgatctctgaccaattattccagcagttttcccctctctcttttaaaggagacctgggaaggggatggataaaaagaggttaaaatgcctttcccctacacagagttatgtctgtacgtttgtttgtttttagagtcagagtcttgctctgttgtccaggttgtagtgcagtggtgtgatcataactcactgtaacctcgagctcctgggctctccagcatagctagaactacaggtacatgccatcatgctaggctaattaaaaacaaaataatttggagacagagtcttgctatgttgcccagggtggtctcaaattcctgacctcaagccatcctcctggatcacttgtattataggcatgagtcactgtgcccagccctagagttgtwtttaaactctccagaaagcctcaagaaagtgagtccacatttcgagactttctctcaatgacagatgacaattcataagcaaagtttggctttcttttcagcatagggatgtgttccatgcaaattaaaagcttctcagcagtcacccattagtgatg

SEQ ID NO: 398832 - DNA, 599 bp, Homo sapiens
tctcacatcccaaagcagtaggagaaagtggtgctgtaaacaattagcaatgctggctttgggtttaagaaagycacatgtgtctcaatcttggctgctttgagttagagatttttagagactaagagaataactttagaaattaagattagcttaacaaactaataagaaggcaaagcactgtatattttatatgccttcttttccctggattgttaccttggctggtgtcctactttagcaaggaacaaagcaagggaggaatgggtgaaaggatctggttgaagctgcacggttaatatgagaaacagcaaaatttcccaggttgacagcaactttggtttatcattaagcaactgcatgtgacacactgaaggtcaggcactcacagagcagtgctttaagggtgtggaatcttccatgggtgaacaaaaacctattttcttcatcctgatctattatttctcaccatgtgaactatttatcagaaaattggctctctaactatcaaatatatgatggttattgataagacaagaagacaagactaaaagaaaaaaatcaggcatccagaaaagcgctcctcccctaatctcttc

SEQ ID NO: 398833 - DNA, 620 bp, Homo sapiens
tactggccatggggaagtcatagttagttatacggtataaatgggaccaaaaaatggaggcggagggttggaactattggagctttaaggagctgaactcttctgtaatcatgtaaaacattttttgtgttgtacacaaaaatgcatatcttcagactctctttacttcagtgataattttactaagtacaggtttagatttaaatgtaactaaaattggtggcttgctctaaggtattgtgtactttttatttgaatagtagctcacagaaatcagaggttgtaacatggaagacttcaggaacattctgtgagcatgctggcaggactgtacaactgaaaaaccaagatcctattgggtctacctccccaacatatcacagaaccacatcatctccactcttacaaacatagttggaacgcctttcatcttctgcctggaccactcctgcctggtattgctgccatctctcttgcctcctgtcagttgtttctccacatagccaccaagaaaacttttaaaaacaaaatcatttagcattaggtatatctcctaatgctatccctccccsctccccccgagttaatgggtgcagcacaccagcatggcacatgtatac

SEQ ID NO: 398834 - DNA, 617 bp, Homo sapiens
ggcttcagaagcagatactgagtctcaaatctgctaagattgctctgaatgagagtcttctgtagagaaagagctgaaattgtggaaaaacagacataagctcttatcatgtgagtggctgacctgcaatgaaaggtgcatgcacagacttgccaggtgtctactgttaaagtgagggcattgattggaaaagaatgggaccctgaaacttggaatggggacataagggagggctctgatgaagctggaaacactgagtttgtaaacgctgatgaaccttattattattattattattatttccagaataaacagcttccccatcctcagcagtagcaacatcctctccctgactcatgctgcaawcagcctttccacttttgcctgaggagataaaccctgagctgcctgaggtaacaatgatggcctcccatgaggcagttgccaggcaagataatgttgattctcctcaggacaagccaccaacacccctgtttgcttctagacctataactaaagtcctggtgggcctctaaaggtgaagttgagagggtgacccataaggaggtgtgctacacttgaaaagaactgcttgacttttctaatttataaaaaca

SEQ ID NO: 398835 - DNA, 454 bp, Homo sapiens
ggtccccttgaggaaggactccactacattgccgacaattgtagtgaatctttctcccatccttccccaaggagacctccagcgttttagcaggagggaaagggaaatgatcagacattttggggactactggacactgagctgatgtttattccaggggacccaaaaacgtcattgtggtcctccagttaatgtaggggcttatggaagtcagataattattggagttttagctcaggtccgacttacagygggtccagtaggtccctggattcatcctgtggtcatttccccgtgccagaatgcatattggcatagacatacttaacagctggcagaatactcacattggctccctgactggtagggtgagggctactatggtgggaagggccaaatggaagctattacggctgcctctacctagaaaaatagtaaatccaaaacagtgtca

SEQ ID NO: 398836 - DNA, 600 bp, Homo sapiens
agaccttctatctcagtaaaatttctacgggtcaagtggcatggggcctgtcgagatattccttctaaggtgaaggataagttgctgcaattgttccctcctacaaccaagaaagaggcacgacacccaatgggcctatttggattttggaggcaacacattcctcatttgggtgtgttactctggcccatttatcgagtgacccaaaaggctgccagttttgggtggggtccagaacaggagaaggctctgcaacaggtccagactgctgtgcaagctgctctgccacttgggccatatgacccaacagatccaatggtgcttgaggtgtcagcggcagatagggatgctgtttggagtctttggcagactcccataggtgaatcacagcagaggcctctaggattttgaagcaatgccctgccatcttctgtagataactactctctttttgagagacagctcttggcctgttaytgggctttggtggacactgaatgtttgactatgagttatcaagtcaccatgtgacctgaattgcctgtcatgaactgggtgctttctgacccatccagccataaagtgggtcatgcacagcag

SEQ ID NO: 398837 - DNA, 447 bp, Homo sapiens
ttttaatcttgatactagtaaaattatatattttgtatgacattttagagggagtaaggaagagactaaaatttgtttatagattgctgtggggtactggacagtatcttatgatagtatttggattcagctatggaacttgattacatttataaatagtgttccacaaaatgtcagagaagagatttggcaaatcttctcccccaaaaggcaatgataaacctgaataagatagttaaaaacaaccattctaggactctggaaattgaccaaagkcatacaataaacttggaaatattcattcaagaaaaactactaaattcctataaagacatgggagtctgcaactttttaggctgttcccatcctctcttctagctccatggcatggaagttgtactatgatttggcacagtgtgagaacaaacagctctgccaccagagaga

SEQ ID NO: 398838 - DNA, 391 bp, Homo sapiens
ctcatcttagctggaatgagagatcttgcacagacagaaagtaaaagctgcagaatatttgataactgcctcaactttgaaggcattctgcaatttacacacagagccataagcaaaaaataaaactttccaggtgtttaaacacaacttttgaccaacytttgtctcatcattaagctgtgctgacgcaggagtaaaacaagcaaacaaacaaaaagacaaacttaaaatttgaaaaaagaaataagaaaaaaaaacctgaatgaagacatcagtgtttacaagacacaaggcagaaatgttcgacagaaatagtccagtcaagtcactaaacaaactaaagcaataacaaaaacatcccctgggaatgaaaaatcagatttcagagtat

SEQ ID NO: 398839 - DNA, 391 bp, Homo sapiens
ctcatcttagctggaatgagagatcttgcacagacagaaagtaaaagctgcagaatatttgataactgcctcaactttgaaggcattctgcaatttacacacagagccataagcaaaaaataaaactttccaggtgtttaaacacaacttttgaccaacctttgwctcatcattaagctgtgctgacgcaggagtaaaacaagcaaacaaacaaaaagacaaacttaaaatttgaaaaaagaaataagaaaaaaaaacctgaatgaagacatcagtgtttacaagacacaaggcagaaatgttcgacagaaatagtccagtcaagtcactaaacaaactaaagcaataacaaaaacatcccctgggaatgaaaaatcagatttcagagtat

SEQ ID NO: 398840 - DNA, 559 bp, Homo sapiens
atcataagtcaagaatctaagcttcaaacttaagaaattagaaaaaaaatacctaaactctaaagccaaagcaaaatatggaaggtagtaataaatattagagcaaaaatcaataaaatagaaattttaaaaaataaaatcaatttaacaaaatattggcttgttgaaaatatcaacaaaattaacaaaatatttgctaattktctttcattacttagactgacaaatagtaaataaggtaaaagatagagatttctaaaattaaaaatgagagtgggcagtatcaccaaatttattaaaataattttcagaaatactataatttcctatcagtaaattatacaacttttatgaaaaagaaaaaattcatagtgtgagtgggaaaaaaaaattgtttttcctctgttttcacacctcaacaatcaacacagaggaattttgtgaccaaatgtgtagagatttctccccatcaacaagcgagcaataagttctgcaatagacaccagttgggtgtcctccaactcaattctgacactatccacctggagacagctaaaga

SEQ ID NO: 398841 - DNA, 614 bp, Homo sapiens
agagccaagaactcgtaaaatctttgattatgctaaagataatgcttcacccactctccaaattgaaatggggttgagttagcaacttgggagatttgaactactctgtataattgtgggtgaaattatgatgaggatgctaaggggaaggtaaactagaagacagagaccagcaaaataagacacttgcatggactgagatggcagatttgagaagcttcagggcactaagytgctcaacagagacttgatagacaaacaattcctgcattcttgggtgggagtgggtgtgtgtgttaaaatacgtgctatgggccctgatagcacctctctccctctttgtcactctttgtgtctttaatagagactacattactcactcatgtttttctgtagaagtcagttattttgggtaaacttgaagggaggctggattttatgtgtcgcagatgcaaggcaaggccagattatgtaggatggctggcattaaaaacaaaagtgattaagtgattttgagagtctgaagattgtgtgtgcacacatgaaataaaaacatgaaatccgcaggcttggagatgacatctcttcccattttcatgtagcactcaggtctg

SEQ ID NO: 398842 - DNA, 614 bp, Homo sapiens
agagccaagaactcgtaaaatctttgattatgctaaagataatgcttcacccactctccaaattgaaatggggttgagttagcaacttgggagatttgaactactctgtataattgtgggtgaaattatgatgaggatgctaaggggaaggtaaactagaagacagagaccagcaaaataagacacttgcatggactgagatggcagatttgagaagcttcagggcactaagttgctcaacagagacttgatagacaaacaattcctgcattcttgggtgggagtgggtgtgtgtgttaaaatacgtgctatgggccctgatagcacctctctccctctttgtcactctttgtgtctttaatagagactacattactcactcatgtttttctgtagaagtcagttattttgggtaaacttgaagggaggctggattttatgtgtcgcwgatgcaaggcaaggccagattatgtaggatggctggcattaaaaacaaaagtgattaagtgattttgagagtctgaagattgtgtgtgcacacatgaaataaaaacatgaaatccgcaggcttggagatgacatctcttcccattttcatgtagcactcaggtctg

SEQ ID NO: 398843 - DNA, 618 bp, Homo sapiens
ttcctaaaggtacagtgtttctagggtcatcttggactccttattagcccactgaagccaaagtggcaaaaggcaccaaatgttttctcactgccatccacatcaactgagataaaaatattgaatggccacatgtaggagttactgatgaagaagttttcaaagaggtaggagtcatcaaagaaagggacaaggttttgtgggaggtcctcaagagtagcatgatgacagaagtccctcagccacccgatacaccactgctggtcttcatgcctacaggaggaaccaggcagaggcaacgcggcccatcctggccctgtcgtaatgttgtgggaaaggggtcctgatccagaccccaagagagagttcttggatctcgtgcaagaaagaattcatgacaactccgtaaagtgaaggcaagtttattaggaaagtagaagaataaatgaattgctactccatagacagagcagccccaagggctgctggttgtccatttttatggttatttcttaatgatatgctaaacraggagtggattattcatgtctcccctttttagaccatataaggtaacttcctgacttgccatggcatttgtaaactgtcatgttggta

SEQ ID NO: 398844 - DNA, 599 bp, Homo sapiens
aatggctcaatcaaaagataggctcaactctgtgtgttgaatgcacacataataaaggagtttctcagaataattctgtgtagtttttatattaagatatatcttttcccaaaatagacctcaaagccctccaaatagctactttgagtttctacaaaaagagtgtaccaaaactgctcagtcaaaagaaactttaaactctttgtgatcaatgcactcatcaccaaggtgtttctctgaatgcttctgtgtagtttttatttgaagatatttccttttccacaataggccacaaaggtctccaaatattcactagcagattctacaaaagagagattccaaatgrctcaatcaaaagataggctcaactctgtgtgttgaatgcacacataataaaggagtttctcagaataattctgtgtagtttttatattaagatatatcttttcccaaaataggcctcaaagccctccaaatagctactttgagtttctacaaaaagagtgtaccaaaactgctcagtcaaaagaaactttaaactctttgtgatcaatgcactcatcaccaagacgtttctctgaatgcttctgtgtagtttt

SEQ ID NO: 398845 - DNA, 599 bp, Homo sapiens
aatggctcaatcaaaagataggctcaactctgtgtgttgaatgcacacataataaaggagtttctcagaataattctgtgtagtttttatattaagatatatcttttcccaaaatagacctcaaagccctccaaatagctactttgagtttctacaaaaagagtgtaccaaaactgctcagtcaaaagaaactttaaactctttgtgatcaatgcactcatcaccaaggtgtttctctgaatgcttctgtgtagtttttatttgaagatatttccttttccacaataggccacaaaggtctccaaatattcactagcagattctacaaaagagagattccaaatgactcaatcaaaagataggctcaactctgtgtgttgaatgcacacataataaaggagtttctcagaataattctgtgtagtttttatattaagatatatcttttcccaaaataggcctcaaagccctccaaatagctactttgagtttctacaaaaagagtgtaccaaaactgctcagtcaaaagaaactttaaactctttgtgatcaatgcactcatcaccaagrcgtttctctgaatgcttctgtgtagtttt

SEQ ID NO: 398846 - DNA, 599 bp, Homo sapiens
aatggctcaatcaaaagataggctcaactctgtgtgttgaatgcacacataataaaggagtttctcagaataattctgtgtagtttttatattaagatatatcttttcccaaaatagacctcaaagccctccaaatagctactttgagtttctacaaaaagagtgtaccaaaactgctcagtcaaaagaaactttaaactctttgtgatcaatgcactcatcaccaaggtgtttctctgaatgcttctgtgtagtttttatttgaagatatttccttttccacaataggccacaaaggtctccaaatattcactagcagattctacaaaagagagattccaaatgactcaatcaaaagataggctcaactctgtgtgttgaatgcacacataataaaggagtttctcagaataattctgtgtagtttttatattaagatatatcttttcccaaaataggcctcaaagccctccaaatagctactttgagtttctacaaaaagagtgtaccaaaactgctcagtcaaaagaaactttaaactctttgtgatcaatgcactcatcaccaagaygtttctctgaatgcttctgtgtagtttt

SEQ ID NO: 398847 - DNA, 505 bp, Homo sapiens
ccggtttgatgggaaccgagggagaaaagtacaggttttaggaaagaacggaggggtgggggctgggaagtaaaagaggcatctaattttatctggctcctgtccaacaayaaaatctaatccatcattttctctgggtaaaggctcttaatgaaaatttagagagtgtgactgaaatttagaattccccagggatcctgcaaggaagatgtctagcagccgtgcaaacctccctccagcccaggctgccagagggcacggccgcgtggaggcagcgggttctcatctggctctcggcccaccgtgcccctcgccgcacggggaacctgtccctgaaccgaggccgcgtgcttgagcttggcagtccgccctccccctgggctgggcgggcccggagtctggctctgggatccacggccgtttgtggctcacagcacgaagccacgtgggaaggggtgggggccacgcgtcctcctctcagcctctcaaagcaacacatttgccc

SEQ ID NO: 398848 - DNA, 505 bp, Homo sapiens
ccggtttgatgggaaccgagggagaaaagtacaggttttaggaaagaacggaggggtgggggctgggaagtaaaagaggcatctaattttatctggctcctgtccaacaataaaatctaatccatcattttctctgggtraaggctcttaatgaaaatttagagagtgtgactgaaatttagaattccccagggatcctgcaaggaagatgtctagcagccgtgcaaacctccctccagcccaggctgccagagggcacggccgcgtggaggcagcgggttctcatctggctctcggcccaccgtgcccctcgccgcacggggaacctgtccctgaaccgaggccgcgtgcttgagcttggcagtccgccctccccctgggctgggcgggcccggagtctggctctgggatccacggccgtttgtggctcacagcacgaagccacgtgggaaggggtgggggccacgcgtcctcctctcagcctctcaaagcaacacatttgccc

SEQ ID NO: 398849 - DNA, 505 bp, Homo sapiens
ccggtttgatgggaaccgagggagaaaagtacaggttttaggaaagaacggaggggtgggggctgggaagtaaaagaggcatctaattttatctggctcctgtccaacaataaaatctaatccatcattttctctgggtaaaggctcttaatgaaaatttagagagtgtgactgaaatttagaattccccagggatcctgcaaggaagatgtctagcagccgtgcaaacctccctccagcccaggctgccagagggcacggccgcgtggaggcagcgggttctcatctggctctcggcccaccgtgcccctcgccgcacggggaacctgtccctgaaccgaggccgcgtgcttgagcttggcagtccgccctccccctgggctgggcgggcccggagtctggctctgggatccacggccgtttgtggctcacagcacgaagccacrtgggaaggggtgggggccacgcgtcctcctctcagcctctcaaagcaacacatttgccc

SEQ ID NO: 398850 - DNA, 555 bp, Homo sapiens
gttttaccctgggaaatagttcataaaaggagaaatggtttttataagacaagttgctgcttcctaacttggatcatttatagcaggctcatacacgaagttcagtagaaataggaatgagggagcagtgttttatctcagaaaaacaatccttaaaattctaatgagtacatatactatctctccttcggttgttcaaagcatctatttatcctcaggcatgtggttgttctctgtgattttatcagtaactctycaatttaatttttttttcattcactacttttcaaaccctagctaagattctccacctattttaataaaaagataaatgttgactttactctttggtcgaaagttctacttagattcaaagttagctaaatcattttcttaaattgtatttttattcttaatctcatgaccacaccacctcacgaaatgtcattttcccctccattctcctttaatatgtttgcagttatagtatctgtcttagtctgatcaggctgccttaacaaaataccacagactgggtgtcttataaaccatgga

SEQ ID NO: 398851 - DNA, 564 bp, Homo sapiens
atgggaggaggagctaaaagttccaagcttctaattaaagtttggtctttctggcaatcagctcctatcctgaagctctctagggacctgccagtatttgcctttttagaacaaaagatgttcttatcacctttatcactcagcaaattacaagccttttaggagctttgtactagggatgaaaaacaaatatcttttttattataccataaattcttccaaaacaggatattgggtatagagaaccacctatctccactgtaaaagtaaatctttctgagatttacacattgtccagatgcaaatgtttcaatgttgacaatgcagaaaaaagacagaactaagttgattgtattgaaatctcctggaaaagagcctcaagtgtaccatctgtatgttaatacgtcataaggcactgcatattaaaattatttacttcatagtttatagtgcagatttcatattrtaatcattttatgtaattgacagaaatctcaaaatctcatcacaacataatttttctattaaaattctacattttgctactatgttatagtttaataa

SEQ ID NO: 398852 - DNA, 481 bp, Homo sapiens
gctggcatctgaagccaggaagtctctgaggctcacccatggctctcaacataatacctagctatcactgctggtattcagggcctcaaatctcttcagttagaagatgatgaatgctgccaggactgggtcctttcattcaagaaagtgagttcctttctggccacaggtttgtctrgaaatgtcacctgataactaggacctggaacaaggaactcatgactctgacccactgccctatcctgctatggatgtgctggtacccaacatgaaagacaaaatcctccccactcttccctctcctctcctcagacagaaggaagtggtctcttttgaagttgtgaactgtgcagcctaaggttaggggagaagtgatgctagcactcccttagccatcccagctgttgtctcattatgtcacatgccacccccagtccactgtctttcagcctagctcatcactagagaacacagagcactt

SEQ ID NO: 398853 - DNA, 481 bp, Homo sapiens
gctggcatctgaagccaggaagtctctgaggctcacccatggctctcaacataatacctagctatcactgctggtattcagggcctcaaatctcttcagttagaagatgatgaatgctgccaggactgggtcctttcattcaagaaagtgagttcctttctggccacaggtttgtctagaaatgtcacckgataactaggacctggaacaaggaactcatgactctgacccactgccctatcctgctatggatgtgctggtacccaacatgaaagacaaaatcctccccactcttccctctcctctcctcagacagaaggaagtggtctcttttgaagttgtgaactgtgcagcctaaggttaggggagaagtgatgctagcactcccttagccatcccagctgttgtctcattatgtcacatgccacccccagtccactgtctttcagcctagctcatcactagagaacacagagcactt

SEQ ID NO: 398854 - DNA, 518 bp, Homo sapiens
tcttttctcttttgcaataacatcatatttttgcttcatatattttgtacttctgttattatctgaactaatattyaggattttattgtcttcttgaagaattagtcctgttagcattataaaataattttctttatccctagggttattctctgctccaaagtcaactttgtctgatattaatatatagccaccccaggtttatttacattagctttcaaatggtatatagtcatttctctgtatccacaggttccacatctgtggattcaaccaatctgggataaaaaatgttttcttaaaaacaataaaaataacaatgcaacaatacaaactagtacacataaaaacaataaactatttacatagcatttatattggattaactattataagcaatttaaagatgatttaaagtataggggaggatgtgcaaatactatcccattttatatcagatacttgatacttgtggtctttggtattagaagggtagtcctggaaccattctcctgtgg

SEQ ID NO: 398855 - DNA, 518 bp, Homo sapiens
tcttttctcttttgcaataacatcatatttttgcttcatatattttgtacttctgttattatctgaactaatatttaggattttawtgtcttcttgaagaattagtcctgttagcattataaaataattttctttatccctagggttattctctgctccaaagtcaactttgtctgatattaatatatagccaccccaggtttatttacattagctttcaaatggtatatagtcatttctctgtatccacaggttccacatctgtggattcaaccaatctgggataaaaaatgttttcttaaaaacaataaaaataacaatgcaacaatacaaactagtacacataaaaacaataaactatttacatagcatttatattggattaactattataagcaatttaaagatgatttaaagtataggggaggatgtgcaaatactatcccattttatatcagatacttgatacttgtggtctttggtattagaagggtagtcctggaaccattctcctgtgg

SEQ ID NO: 398856 - DNA, 518 bp, Homo sapiens
tcttttctcttttgcaataacatcatatttttgcttcatatattttgtacttctgttattatctgaactaatatttaggattttattgtcttcttgaagwattagtcctgttagcattataaaataattttctttatccctagggttattctctgctccaaagtcaactttgtctgatattaatatatagccaccccaggtttatttacattagctttcaaatggtatatagtcatttctctgtatccacaggttccacatctgtggattcaaccaatctgggataaaaaatgttttcttaaaaacaataaaaataacaatgcaacaatacaaactagtacacataaaaacaataaactatttacatagcatttatattggattaactattataagcaatttaaagatgatttaaagtataggggaggatgtgcaaatactatcccattttatatcagatacttgatacttgtggtctttggtattagaagggtagtcctggaaccattctcctgtgg

SEQ ID NO: 398857 - DNA, 518 bp, Homo sapiens
tcttttctcttttgcaataacatcatatttttgcttcatatattttgtacttctgttattatctgaactaatatttaggattttattgtcttcttgaagaattagtcctgttagcattataaaataattttctttatccctagggttattctctgctccaaagtcaactttgtctgatattaatatatagccaccccaggtttrtttacattagctttcaaatggtatatagtcatttctctgtatccacaggttccacatctgtggattcaaccaatctgggataaaaaatgttttcttaaaaacaataaaaataacaatgcaacaatacaaactagtacacataaaaacaataaactatttacatagcatttatattggattaactattataagcaatttaaagatgatttaaagtataggggaggatgtgcaaatactatcccattttatatcagatacttgatacttgtggtctttggtattagaagggtagtcctggaaccattctcctgtgg

SEQ ID NO: 398858 - DNA, 626 bp, Homo sapiens
atacatgtcttaggcaggctgctgtcagcagttgtgtacactggaaaggttagaggatgtgattgccccaggtatttgaactgcatttctctgaatcctgagatgattatcctatggccattttgtacttttaaaatatttttagtttgattctgaagctctcagctttctttgaaaggaacttagctctggtgtttaggttacgattctctcttatatttctgttatctcaagaaatctagtcctcttttattcttagcttagataattttttccacatttaatcccctaataacaactttatattttttctagaagtgccttgtgttcaccgtttttattctgttttctgactatttttcacatttgttgagtccagcaccttgaactagaatgcttatggttttcttgtttattataattttaaggggctccatatctgcctttgaataaactgaataagcacacttaacaattacagagtataaagatctatgctttaaattgcagataaaataytagtaataacattgaaattactccagtaaatttaagagtgtctataagaataaacattaagataagtattttaagatcgaaaaatatttataagataaattggaaaa

SEQ ID NO: 398859 - DNA, 562 bp, Homo sapiens
agaaatgcctttaagttttgctcaaatttatttttaaaaaattaactgatgaaataggaatatacacaaatagttaaaatcattataaaacaaataatgattttagcytattgaaataaaacctaaaaataaatgcctgatacattgtttggtgtaagaattcacatatagaatttatttatggtactttgactttgtctacctaaaaacctccaaatgatttcaaagtcaaagaaaaatggtaatcaggttgcaagaaaaaggagagaagtagcagaatatttgtgcattttaagaagagttcctaggaattctacttctagccataatggaataatagaaatctgatttaccctcttgtctttaaaaaatcagaaaactgaacaaaattcatgaaataagttgtcaaccactgaatttgagctaatccaagatgctaatgtgtgagaaaagggaaacaaatcagctgagccctcagatttcttcagattatagagtggagccacaatcagagaggaacaattcaaacagaggctggcaggctggctatgttgaagagaca

SEQ ID NO: 398860 - DNA, 493 bp, Homo sapiens
cagctggttataagctctgtatggatggacactactgtactggacactgccaaatgtcactgcaaagctggccctgtctcctctccatgtgctggacctggagacaatagcccttgattagtccctccttcatgcatcaaagatttccaacaaacacttaaggaaataaatgaagacaaatcaaatgagaactaacagaggctatttattcagaagttgctgtacaaaggggttcggccaccatcacttgcatttggcagagacttacaggcaagcaacgragtgggaaaacctaatagtgaaaaaagagaaggctcaggtgtacgctctcagagccagaggtcatggggaacctggaggaaggctaaataaaaacagagcatctcatataattaattggggaaacatatttggcttctggttggttctgagttggggtgggtgtgaaaaaacaaaacaaaacaaaacagggagaataacatccattggccaa

SEQ ID NO: 398861 - DNA, 622 bp, Homo sapiens
tgttaatgttgatattttgaacccctcccatgaatcatgaatatttttaatagtatctagaatggtgaacactttccagaaggttttcaatttattttgcacacatccatcagaggaatcattattcatggcagctatagacttaataaatgtatttcttaactaataagactttaaagtcaaaatattccttgatccctgagctgcagagtggatgctgtgttagtaggcatctccttgttcatctccatcagagcacttgggtgaacatgtgcattgtcaayggacagtaatattttgaaaggaatctttttttctgcacagtgggtctctattgtgggcttaaaatagtcaataaaatgtcatccaggttacagagcatgggtggagtagatttaaaataattcttaaggaccttaggattttcagtattgtaaataagcattggcttccacgtcaggtcactggctgcattagtcccaaacaagagagtcagtctgtcctttgaaactgtgatgccagatattgacttctcctctctagcaaaggaagtcctagatggcatcttcttccaatagaaagctgtttcatctacattgaaaatctgttgtttagtgtagac

SEQ ID NO: 398862 - DNA, 622 bp, Homo sapiens
tgttaatgttgatattttgaacccctcccatgaatcatgaatatttttaatagtatctagaatggtgaacactttccagaaggttttcaatttattttgcacacatccatcagaggaatcattattcatggcagctatagacttaataaatgtatttcttaactaataagactttaaagtcaaaatattccttgatccctgagctgcagagtggatgctgtgttagtaggcatctccttgttcatctccatcagagcacttgggtgaacatgtgcattgtcaatggacagtaatattttgaaaggaatctttttttctgcacagtgggtctctattgtgggcttaaaatagtcaataaaatgtcatccaggttacagagcatgggtggagtagatttaaaataattcttaaggaccttaggattttcagtattgtaaataagcattggcttccacgtcaggtcactggctgcattagtcccaaacaagagagtcagtctgtcctttgaaactgtgatgccagatattgacttctcctctctagcaaagraagtcctagatggcatcttcttccaatagaaagctgtttcatctacattgaaaatctgttgtttagtgtagac

SEQ ID NO: 398863 - DNA, 454 bp, Homo sapiens
ccttactttctccccaacaaatagattctttctscacgctgagctgcctggaggtggttgggaagtgacacaaacacccctatggctaccatcactgggactgcgttgggtcagacttaaagccagcacagcactggatctcgctcaaggcctgctgtaaccactacctggctactgtctatgttcacttaaggcctcaggactctacaatcagcaggtagtgaagccagccaggtttatctctttctcttcaaggtgacaaattcctcacaggcccagattgttccatagatgtcatctgggagccagtgactgaagtcaaaatctttagaaatctagctggtgttctcttctactgtggctgaggtgacactccaaccacgagaagcagtccttcctactcctccttccctctttccacagacagaggaacctcaccccattgccaccatca

SEQ ID NO: 398864 - DNA, 606 bp, Homo sapiens
tacatgtaaatttacatctacaggtaaaggtcagctaaaggatttttcaactgcaaagagtaaccctatcttctactttgaaaattatcgtggtttgcagcatcctcagtctgaaggatctacataacattacaaggaaattgtacttttaacatggtcaaagtgaaaaaacgtaagcttctcaacacatctggattgcaaacgtttcatgaaaacattgttcagatacaaatagatcccattctgtgcttttaaatgtagtatgtactttcctccaatgggtggaagattatgtataatagcgagagttgtggtccttaaaataaattgaaagcattgttccagagctgccttcactaatactacccctattatcttcaattagactagcccaccaaatgaggcagtacaaacaccctatagacatcaaactgttctaaaagccaggtacacttgatcactgattacacaattacttaagagggggaatccaagaasaaaacataagtaataaagaatagaagatttgtgtttttaattgtaaacaaactaaattaagtaaaacacagaattatcactgtgaacagaagaatataacagaaattg

SEQ ID NO: 398865 - DNA, 551 bp, Homo sapiens
tttctgattctttagagcaagaaaaggatgtgggtttttacatcaatggttgcagttaaagagagtttagtgtcaaaaagtactcatgggctgggcatgatggctcacacctgttatcctaccactttgggaggctgagatgggaggatcacttgagamcaggagttcaaaatgagtctgggcaatgtagtgacaccctatctctacaagaaataataattagctgggtgtggtggtgtgtgcctgtggccccagctactccagaggctgaggtgaaaggattgcttgagcccagaaggatgagtctggatgagactgcagtgagccatgatcaacccagtataacaaagctgacaaatttattttgttacaacaaaaggatacaatatagaaaatgcattaaggtaaggatatgcattatagctaaagtctgccacaacagcaaagggtccaaattctggagacatcagatgggaattacaattatcctctgtagagacagaaaggggtgatccttttcctccctaacataagggtaatcactgacacca

SEQ ID NO: 398866 - DNA, 551 bp, Homo sapiens
tttctgattctttagagcaagaaaaggatgtgggtttttacatcaatggttgcagttaaagagagtttagtgtcaaaaagtactcatgggctgggcatgatggctcacacctgttatcctaccactttgggaggctgagatgggaggatcacttgagaccaggagttcaaaatgagtctgggcaatgtagtgacaccctatctctacaagaaataataattagctgggtgtggtggtgtgtgcctgtggccccagctactccagaggctgaggtgaaaggattgcttgagcccagaaggatgagtctggatgagactgcagtgagccatgatcaacccagtataacaaagctgacaaatttattttgttacaacaaaaggatacaatatagaaaatgcattaaggtaaggatatgcattatagctaaagtctgccwcaacagcaaagggtccaaattctggagacatcagatgggaattacaattatcctctgtagagacagaaaggggtgatccttttcctccctaacataagggtaatcactgacacca

SEQ ID NO: 398867 - DNA, 565 bp, Homo sapiens
cccagtgagagatcattgaatcatgggggtgggttttctcatgctgttctcacgataacagtaattatcacaagacctgatggttttataaagggcagttcccctgcacgtgtcttcttgcttgctgccatgtaaaatatacttttgctcttccgttactttcyaccatgattatgaggcctccccagccatgtggaactgtgagtccatgaaacttctttttctttataaattacccagtcttgtgtatttcttcatagcagtataaaaatggactaacacaaatgtcctattgaatcctcaaatattctatgaaaatatatctttattattcatcttttatagacaagaaaaccaaagtaatataggttaagtaacttttctgataactatcctctgccatagagcagatcagcaaatggatcccaaagattgggaattgattactgttgggactcagatcatgatactaaaatgtatggcactttggcatgcagagtactttgaactgaagggtattgaaagtcctcaggagcaagaaattctctctgaaattcttcacctc

SEQ ID NO: 398868 - DNA, 562 bp, Homo sapiens
gccaggaagaatctgaacaaacaggccttaataactttccaccaatttattgccattagatcattcccttcatgttcaatcccatttctacatggctgtccatttttcattgagtctcagtgtaaaaatacagttttcccggggtttgggggttttcatttatgaaagctcccatatctcataaaactttgttgaataaatatattatatttttctcttgttaatctgtctttttttataagcgtgtcagccatagatgaccttgagatgggtaaggaagtagtatcagaccttttcacccctacactacaggagaaaacaattattatcttctgcaattagcatttctctttactaacaaatcatgataggaagaaatgtccatttcccactgaggacatttcaaagtatttatgttcacagtaatgttacggaaggtaaatastaagctggcaacaacacttaacaaccatgggtaatgggagacaggcagaagtacagtatataattcctacaacatacagttgactggatgctacatattaaaggacaaagacaaaat

SEQ ID NO: 398869 - DNA, 581 bp, Homo sapiens
ccaccagtttcagacacaatatgagacatgtctgtgggttattttagcatgacaggcaaataatgtgtgtaggactgacaataacaaaggaatagtaaggagtagtaagacttgggatatatatttgaaggaagtctacaacacttgccggtagtttggaggaaaagagtaagcgaattaagggtgattccccatttcaggcctaaacaacaaggttaaattgtgtgtaattaactggaatagagaagactagggaatagacaagagggaaataaataatgttagattttgaatatgtttcctttggaaarcctacaaaatatcagagtgggtatcctagtaggcattttaatatatttggtctggaaacccagacataagtcaggactaataacataaaacggaaatcaattaacacaaagaaggcatttaaactttggtgaccgagcgaaataatctacatagattctatgattagaaaagaagagacaggtaggaattgagagctggacatcccaatatttacaggtgagaaggaagatttcaaatatctacttaatttccctgctgtctcttagagt

SEQ ID NO: 398870 - DNA, 581 bp, Homo sapiens
ccaccagtttcagacacaatatgagacatgtctgtgggttattttagcatgacaggcaaataatgtgtgtaggactgacaataacaaaggaatagtaaggagtagtaagacttgggatatatatttgaaggaagtctacaacacttgccggtagtttggaggaaaagagtaagcgaattaagggtgattccccatttcaggcctaaacaacaaggttaaattgtgtgtaattaactggaatagagaagactagggaatagacaagagggaaataaataatgttagattttgaatatgtttcctttggaaagcctacwaaatatcagagtgggtatcctagtaggcattttaatatatttggtctggaaacccagacataagtcaggactaataacataaaacggaaatcaattaacacaaagaaggcatttaaactttggtgaccgagcgaaataatctacatagattctatgattagaaaagaagagacaggtaggaattgagagctggacatcccaatatttacaggtgagaaggaagatttcaaatatctacttaatttccctgctgtctcttagagt

SEQ ID NO: 398871 - DNA, 581 bp, Homo sapiens
ccaccagtttcagacacaatatgagacatgtctgtgggttattttagcatgacaggcaaataatgtgtgtaggactgacaataacaaaggaatagtaaggagtagtaagacttgggatatatatttgaaggaagtctacaacacttgccggtagtttggaggaaaagagtaagcgaattaagggtgattccccatttcaggcctaaacaacaaggttaaattgtgtgtaattaactggaatagagaagactagggaatagacaagagggaaataaataatgttagattttgaatatgtttcctttggaaagcctacaaaatatcagagtgggtatcctagtaggcattttaatatatttggtctggaaacccagacataagtcaggactaataacataaaayggaaatcaattaacacaaagaaggcatttaaactttggtgaccgagcgaaataatctacatagattctatgattagaaaagaagagacaggtaggaattgagagctggacatcccaatatttacaggtgagaaggaagatttcaaatatctacttaatttccctgctgtctcttagagt

SEQ ID NO: 398872 - DNA, 581 bp, Homo sapiens
ccaccagtttcagacacaatatgagacatgtctgtgggttattttagcatgacaggcaaataatgtgtgtaggactgacaataacaaaggaatagtaaggagtagtaagacttgggatatatatttgaaggaagtctacaacacttgccggtagtttggaggaaaagagtaagcgaattaagggtgattccccatttcaggcctaaacaacaaggttaaattgtgtgtaattaactggaatagagaagactagggaatagacaagagggaaataaataatgttagattttgaatatgtttcctttggaaagcctacaaaatatcagagtgggtatcctagtaggcattttaatatatttggtctggaaacccagacataagtcaggactaataacataaaacggaaatcaattaacacaaagaaggcatttaaactttggtgaccgagcgaaataatctacatagaytctatgattagaaaagaagagacaggtaggaattgagagctggacatcccaatatttacaggtgagaaggaagatttcaaatatctacttaatttccctgctgtctcttagagt

SEQ ID NO: 398873 - DNA, 607 bp, Homo sapiens
ttggtttatgctcttttataattcagttgttatatatactagataggtaggtaggtaggtagaataaagaaagatatggctaattcgaacactatgcatttatcttacttgatgaaatatagttccactgatatttatttatttttaatactaattttcattggacaacaggtttatatttctatgcaaaaaatactttcccatgttagcttttctatgaatgctgacttctttaagacgatttcttaatgataggcaaacactatgagtgtttaaaaattgaaaccaatattaaattaaaaacctgatgcttatagtattctgctgttccatgaattcaaatttctgtgcataatcaataaaaattgccagtagacaactgctctagtctacaatttttaaatggaatactgctgtagcaatggtactgggttgaaaaaaatcagtatgactgaatacatggagttaaartggctaccatttcataaatgttaaagtcaataaaatccccataaaaaacccaatgttatattaagtatacacaaatttatgatgatggatctgctgtgtcttcaaaggaaatataaatgtactacttcaatggaat

SEQ ID NO: 398874 - DNA, 441 bp, Homo sapiens
ctcaagaaactatgagctgaatccaacagcacatcaaaaaactaatccaccaccatctagcaggctttatcactggaaagaataggatttaaattttacaaaaaattcactaattttcccagagccacacaaatagctaggatttgaagctaggattttgaattttaaagtcatggattttttcactaaccactagtaaatgaattagatttattaacttctgaagcatcctaaatggtgactgaacagtcatatgtcttcttcaggaggttctgagtcaaaacaatgcttttctatttgaaaatgtaaagttggtactctacactctgctgcttatacatgcatatattttttaaaactattataataaaaacttctaggttttcttaattattcyttagttatagcattgtgctcatatttaaatgcacatcaaacact

SEQ ID NO: 398875 - DNA, 523 bp, Homo sapiens
acctgtttgctgcttctgccatttgaagatgaagcaagaagccaccatatttgaagcagacagtgtctcctcaccagacactgaatctgctggccccttgatcttggacttcccatcttccagatcagtgcgcaatatacttctgttgtttatttaaaaaattaattaattaaaaaaataaactcactatttttacaaagtaatttcgattatgctgatgcaggtggtcaaagaaccacattttgygatctgctacctcaaagattatttggctcaaatttcaatttgtgaaagagtaaatagagtacaatggttaagtgaatttgatgtaaactacagttaattagtttctcacctgggacttgaagtaagtcactaccataaattactcactattctaataaatttaataataatacttgtaaatattaataaatgaaattattaaaccaattacattcatatcagcaaattaacttaatgttgcagatggtatcactttgctgaaattaatacccacaac

SEQ ID NO: 398876 - DNA, 635 bp, Homo sapiens
aggtgcctaaactaaagatcttctgttcagctcttgtattttatatgctatactagccccgcttctgccattccaaattatttcaagacttcacatgtattaagagagacaagttctttcctacagtttttttttcttaaagcataacctcatgctatcaatttcttttgatatgctcttttctttgagcttgtcatgagtccacctagcatatttttcttcaatttggtgcacttcgaaaatggtaaaaaattagtacattctgagtggtgatcttccaaatttagacacattctaaagagtccaagatgggtaaagaaaaaaagcacagagagaacacctaaatgtcttctttccttagtaaaaatagactgttactttctaccacaaaaataaagttatagattccacagtggcatagataaatatggcagaactttgtactttcttcaaaaagcataatttatactaaaataggcacataagaagtggcccacagtaaagtgaaaactgtgggtcttgacagccatgtggcaagtcttccaagggaagcaatgcactgcttaactyagcagaattccatgtgatgtcatttttcttcaacaaaaaaggtcctctaaagttgatatattcat

SEQ ID NO: 398877 - DNA, 457 bp, Homo sapiens
  misc_feature (1)...(457): n = A,T,C or G
ttttgaagctttaagatttaatgactctcctgctgggttttggccttgcatggggcctgtagcccctttgttttggcaaatttctcccttttagaatggaagcattccatctcggctaacacagtgaaaccccgtctctattaaaaatacaaaaaattacccggccgtggtagtgggcacctgtagtcccagctactcgggaggctgaggtaggagaatggcttgaacctgggaggcagagcttgcggtgagccaagattgcaccactgcactccagcctgggtaacagagggagactctgtcttaaaaaaaaaaaaaaaaaaaaaaaaaaaaaanaaagaatgggagcatttacccratgtctgtgccctcattgtatcttggaagtaactaacttattttttattttatagactcataggcagaaggaacttgtcttgcctcagatgagattttg

SEQ ID NO: 398878 - DNA, 417 bp, Homo sapiens
tatgatgtacctccttttcccctggtgtaggacattgcatgagctagagttctggggacccagtcatgccactgggtccagctcatgtcatgatgctgcagccctgggggtggacatggagaatatcagcagagctctaggttgtggagatcatagggctcttgagccccagaacagtatatgatctactgggggctggaatctcaaaatgatgccatgctgcatgttagtaggacccagtgtgaatttcctctctggatcattttagccacatgaactccaggcagctctgtacactaggatcaaagcctgtaattgccaaaggtctctcctgtcggtargattacaggtgcccatgttggaaacagactactgggggtctcttacattttctctgtgttagggagttcctcctgg

SEQ ID NO: 398879 - DNA, 576 bp, Homo sapiens
ccagaaagaaaggaaaatataactctagaagtatacagaaataaattatgtctataatctgtcacataaagtattgtagttctattcagtattttaagtatttacataawccttctgaagtagagtaaacccccataagctttgtaaacattgactggaggtttaaaaatattttcttatgtttaatgtgtgtgtgtatatatatttaacatgaattttgctatatatatttactatatatatttgtgtgtatatatatgtattactttctattttgttgtattgggaagctttaaaatggagatagataagaaaattgtatagtaaaaactaaacgtaaaagcctaactctgccaggattgttttaagagtttgcaatttccattctctatatttcaatacagtaatggcacatagaaggaaaggaaaaaaagaaaaaatgtgatgcaagagaatatcacaaacttaaaagtcaaatagacctatgttgcaataagtgtaactttctccctatatgattttgaaaaccatttaagctctttgacctttagatttcttatctatataaaaaggaca

SEQ ID NO: 398880 - DNA, 536 bp, Homo sapiens
taatctgtcacataaagtattgtagttctattcagtattttaagtatttacataaaccttctgaagtagagtaaacccccataagctttgtaaacattgactggaggtttaaaaatattttcttatgtttaatgtgtgtgtgtatatatatttaacatgaattttgctatatatatttactatatatatttgtgtgtatatatatgtattactttcyattttgttgtattgggaagctttaaaatggagatagataagaaaattgtatagtaaaaactaaacgtaaaagcctaactctgccaggattgttttaagagtttgcaatttccattctctatatttcaatacagtaatggcacatagaaggaaaggaaaaaaagaaaaaatgtgatgcaagagaatatcacaaacttaaaagtcaaatagacctatgttgcaataagtgtaactttctccctatatgattttgaaaaccatttaagctctttgacctttagatttcttatctatataaaaaggacaattatttctatctc

SEQ ID NO: 398881 - DNA, 590 bp, Homo sapiens
ggacattttggaatctcaacagttttgcacaagacatctttgagkccatgtttaagaaacaaatcaaggaaacagaacaactcttggttggctcagttacaaataacactcagatccccttataagtgcagcctcgtaaatgtatttatccataaacatataatatttatataaaactgtgtttttccctccttcacccaccacattcataattaattcccatacattttcctcatttccatgatataagttagaaaaattgttaatcaactatgataaataaatgttatcccagatcaccctaagatttctttccacaaatgtgcaaatggtgcagtaggtgacagtggtgggtcttaagaataggcatgtctttaaggtagccacaatagttaacattattctaagtcttgaggtaaatcagaaatgatctcatcattcatggaagaaaaactaataaatataaacagaaactatgataagggaatattcatctcagtagcaatggctatatagcttgaagtacttttgttttcaactacctagattttgggggttgttaatgaagcatagatagcccattctgacta

SEQ ID NO: 398882 - DNA, 512 bp, Homo sapiens
aatttccctgaacctgattctcatttggcaaaaataaccttacagggttatggtagaattactaagacaatatacatgagaaagtggcatatagtaggtgattataaattataatgattattattattttcctatttccctacacagatcatacctcagcctatttgtgaaaatcatactttcccagttctcactgtagtgaaacagccagatctcagatgaataaccacattgtgtagaaaatggaatcattaagtagccaaaggaggagttagaagagagagaaaagagaaattatrtaggaagaacaagagacaattcattatttctgactcttggattacatttctattctttggacatgaaaagttatgagaatagagaggaaaagagctatcgcttttgtgcttttaatttgattttcagtttgaatcaggtgcacccgagaggcaaggcctggcagaatcaacccctgtattaggtggttcccataagccaatacctatttattc

SEQ ID NO: 398883 - DNA, 512 bp, Homo sapiens
aatttccctgaacctgattctcatttggcaaaaataaccttacagggttatggtagaattactaagacaatatacatgagaaagtggcatatagtaggtgattataaattataatgattattattattttcctatttccctacacagatcatacctcagcctatttgtgaaaatcatactttcccagttctcactgtagtgaaacagccagatctcagatgaataaccacattgtgtagaaaatggaatcattaagtagccaaaggaggagttagaagagagagaaaagagaaattatgtaggaagaacaagagacaattcattatttctgactcttggattacatttctattctttggacatgaaaagttatgagaatagasaggaaaagagctatcgcttttgtgcttttaatttgattttcagtttgaatcaggtgcacccgagaggcaaggcctggcagaatcaacccctgtattaggtggttcccataagccaatacctatttattc

SEQ ID NO: 398884 - DNA, 452 bp, Homo sapiens
atatatcaactcttctccttgcaataatttagtccaaagggaacttggactgtctggacacttgaagaacattacattggtccactaatttgatgacgtcaagttaataggttcacattaacaagatgtggcaagtaattagagacctgctaacatatgtgcttcagagggtgtgagaaaaccccacaaacactgaggtgtctatcatatctatgaacatttagtaaagaacagttgactgcatttcatatttcccctcactmagaggacagcatatcacctggtaagcctctttgggttctgaaggtagcattttcctccttggaaatatgactttgatacattttccaagtgacatagaaggctgtcagctttgagtggggcccagagcaagaaagggctctgcgtcaggtctaggttgtgatgcaggcagccctgctgcttgaaccgta

SEQ ID NO: 398885 - DNA, 452 bp, Homo sapiens
atatatcaactcttctccttgcaataatttagtccaaagggaacttggactgtctggacacttgaagaacattacattggtccactaatttgatgacgtcaagttaataggttcacattaacaagatgtggcaagtaattagagacctgctaacatatgtgcttcagagggtgtgagaaaaccccacaaacactgaggtgtctatcatatctatgaacatttagtaaagaacagttgactgcatttcatatttcccctcactaagaggacagcatatcacctggtaagcctctttgggttctgaaggtagcattttcctccttggaaatatgactttgatacattttccaagtgacatagaaggctgtcagctttgagtggggcccagagcaagaaagggctctgcgtcaggtctaggttgtgakgcaggcagccctgctgcttgaaccgta

SEQ ID NO: 398886 - DNA, 542 bp, Homo sapiens
gttgtgatgcaggcagccctgctgcttgaaccgtatgatcagcagaccttctgttattagaagtatctgagtgggaaaatatgccatgtggagtttatggcaagcccaataggagatgcacaatgtagacccctagggttctggagcaaggccatgccatctgcagcagagaattatataccgtttgaaagaatagctcctggcgtgcyaatgggccttggttgaaatgaacgtgggacatcaggtgaccatgtggccagactgcctgtgatgatgtgggttctattcaacccatcaagtcataaggtcaggtgggcctaggagcaatccgtcataagatagaagtagcacatccagaatcgagcatcagcagggcaggtggacacaggggagctggataagcaggtggcccagaccctcctgtcacccacccctgccacatagcccctctcatgccattcatatttatgatgaccacctgcatgactgtgagggctgcagagcctcttattgatcaactgatggaggaagaaaaaggccaa

SEQ ID NO: 398887 - DNA, 580 bp, Homo sapiens
agaataaaattaacaagcatatgtaagacctgtaaattgaaaactaaaaaaaaaattgttaaggaaaaatttaaactacctaaatcagtgagatatgccatcattatgaattagaaattcaatttcttttttttctagaaatctgatttcttttttgcttttttttkttgttgttgttggttgtttgttttttgagacagggtctcactctgtcacctgggctagagtgcagtagtgccatcttgtctcactgcaatctccacattctgagctcaagtgatcttcccacctcagcctcctgagtagctaggactacaggtgtgcaccactatgcccagttaatttttttgtttgtagagatcaatctgggcaacatggtgaaaccctggctctacaaaaaatacaaaaattaactgggtgtggtaaagcaagcctgtagtcccagctactccagaggctgaggtgggagaatcacttgagcctgggaagtcaaggttgcagtgagccatgattatgccactgcactccagcctgggcgacagaatgaagttaagcaaatggcccatatagtccagctatt

SEQ ID NO: 398888 - DNA, 539 bp, Homo sapiens
ttcttagtgaaagagaaaaaaaacccaatattggtctccgaaagagaattaaaaaaaagttaaactgaagtgatttatttagaaacccagtgtaaagaatgaagcatttatctccccctaaagcaaggtcacccaaaccctctgagagctagaagtcagctatgaatccagcatcagcatgcttgttgggagcaattagcactgagtcaggtcckcatgcatgttgggagctgatacgaccttaattgttgcatcccactgtgtgaagaaataagcacttatattagctctaggtcaatgactgtggctcccccacatttatgagcttggagtcttgtcaggctgaacaaataaaataatacttgtggctcctttggtcccagcatcttcccagggattgactgttcttcccgtgaaatgtcagctttcatcagcaaagagaacaaagcaagccagaatattagcttgaggaggactaaggcaccatctggtggccgtttactataaatctttgcctcagatgcaaattcctcgcacaa

SEQ ID NO: 398889 - DNA, 539 bp, Homo sapiens
ttcttagtgaaagagaaaaaaaacccaatattggtctccgaaagagaattaaaaaaaagttaaactgaagtgatttatttagaaacccagtgtaaagaatgaagcatttatctccccctaaagcaaggtcacccaaaccctctgagagctagaagtcagctatgaatccagcatcagcatgcttgttgggagcaattagcactgagtcaggtccgcatgcatgttgggagytgatacgaccttaattgttgcatcccactgtgtgaagaaataagcacttatattagctctaggtcaatgactgtggctcccccacatttatgagcttggagtcttgtcaggctgaacaaataaaataatacttgtggctcctttggtcccagcatcttcccagggattgactgttcttcccgtgaaatgtcagctttcatcagcaaagagaacaaagcaagccagaatattagcttgaggaggactaaggcaccatctggtggccgtttactataaatctttgcctcagatgcaaattcctcgcacaa

SEQ ID NO: 398890 - DNA, 539 bp, Homo sapiens
ttcttagtgaaagagaaaaaaaacccaatattggtctccgaaagagaattaaaaaaaagttaaactgaagtgatttatttagaaacccagtgtaaagaatgaagcatttatctccccctaaagcaaggtcacccaaaccctctgagagctagaagtcagctatgaatccagcatcagcatgcttgttgggagcaattagcactgagtcaggtccgcatgcatgttgggagctgatacgaccttaattgttgcatcccactgtgtgaagaaataagcacttatattwgctctaggtcaatgactgtggctcccccacatttatgagcttggagtcttgtcaggctgaacaaataaaataatacttgtggctcctttggtcccagcatcttcccagggattgactgttcttcccgtgaaatgtcagctttcatcagcaaagagaacaaagcaagccagaatattagcttgaggaggactaaggcaccatctggtggccgtttactataaatctttgcctcagatgcaaattcctcgcacaa

SEQ ID NO: 398891 - DNA, 389 bp, Homo sapiens
tgtgcactttgctggacaactccttctgccccaccaggccctgctgtaactacaagagcagcacgtgagacttctttccacatggattggtagttctgtcaagtggaatttaatccttccaaatcagaaggattattttggataagccattaaaattgttaattaaaatgttagtgtctgattgccattattctctgcttataagarttctctcagatcctggtgtgtggcacctctctttccgcactcccatctaacccaagtgaaacccagggccttgctatcaccttcattcctgcctgtgcctgaggaaccctccaaaggtgcgcatgaggcctaaaatgaaaagggcatttaaagacacactcgaaggtgaaagaagacagaat

SEQ ID NO: 398892 - DNA, 601 bp, Homo sapiens
attatatcacagtgtcacacatcttatttccttcaagctcagaaatgaatgttatgaattcatgttatcgtttaaccagcattgctgtggatttttttatctgggaggtggcggtggtgtactgggattggccagtatcagttcacaagaaccaactgttaaatatttaggaatgttgtcagtgttcgatgaaagggctgcatttgcaaagtggtcctcaaatgctgacggagccaagaaaccaaagaacaaggcagacaaattcagtttgttttattggggaacttacagacagaagcgtgggcttgggtggccacaagacaggtggatttccacactgttcctccccacactgagggcttatgtactatagggaaagggtatgcgtgctccagtgagacaattaaaggcaatcctttggaacaggcaagaatgytctgtgcatcacagcctataatttgtgtgataacatcaaggttgcatgttcctatgctatggacagtaaataaagtaggaatcaggagtcattcacaggactgggctaatcagaagtcaagatggcagattagcatccaagatggagtcacttttgtccccacaa

SEQ ID NO: 398893 - DNA, 509 bp, Homo sapiens
gaggaagcagcctggcctggtagaccagggagtgctgatgtatctgtgctgcaatttcagcaaggccttgaaccttggtgttgtcaacatgtggagaattgtggactgaatcatagacattagatgggtacagttactgtgttctgtgagtgttggtcttacaagagttttctagagayctgcacctgggctctgttctgatctagtcagtaaactcaccaatgtcttcttagaaagcagagacaaggctgggcgcagtggttcatgcctgtaatcccagcactttgggaggccagggcaggaggattgctttagcccaggagtttgagaccaggctgggcagcatagcaagaacctgtctgtacaaaaaaaaaaaaagtagggtgtggtggcacacgcccgtggtcccaactacttgggacattgagttgggatgatcccttgagcccaggaggttgagacagcagtgagccacgattgtgccactgtactccaacctgactgacaga

SEQ ID NO: 398894 - DNA, 509 bp, Homo sapiens
gaggaagcagcctggcctggtagaccagggagtgctgatgtatctgtgctgcaatttcagcaaggccttgaaccttggtgttgtcaacatgtggagaattgtggactgaatcatagacattagatgggtacagttactgtgttctgtgagtgttggtcttacaagagttttctagagacctgcacctgggctctgttctgatctagtcagtaarctcaccaatgtcttcttagaaagcagagacaaggctgggcgcagtggttcatgcctgtaatcccagcactttgggaggccagggcaggaggattgctttagcccaggagtttgagaccaggctgggcagcatagcaagaacctgtctgtacaaaaaaaaaaaaagtagggtgtggtggcacacgcccgtggtcccaactacttgggacattgagttgggatgatcccttgagcccaggaggttgagacagcagtgagccacgattgtgccactgtactccaacctgactgacaga

SEQ ID NO: 398895 - DNA, 509 bp, Homo sapiens
gaggaagcagcctggcctggtagaccagggagtgctgatgtatctgtgctgcaatttcagcaaggccttgaaccttggtgttgtcaacatgtggagaattgtggactgaatcatagacattagatgggtacagttactgtgttctgtgagtgttggtcttacaagagttttctagagacctgcacctgggctctgttctgatctagtcagtaaactcaccaatgtcttcttagaaagcagagacaaggctgggcgcagtggttcatgcctgtaatcccagcactttgggaggccagggcaggagrattgctttagcccaggagtttgagaccaggctgggcagcatagcaagaacctgtctgtacaaaaaaaaaaaaagtagggtgtggtggcacacgcccgtggtcccaactacttgggacattgagttgggatgatcccttgagcccaggaggttgagacagcagtgagccacgattgtgccactgtactccaacctgactgacaga

SEQ ID NO: 398896 - DNA, 564 bp, Homo sapiens
ttgagtgattcaatttatacaaagttcaaaaacaaagtgaaccacctcacactcattaggtggctggttgctattaacaaaagcaaaaataaaacaacaacaacaattcagaaaataaccagtgttggcaaagatgtggagagtttgaaactcttgtgcaccattagtgggaataaaaaatggtgcagctgctttggaaaacagtatggctgatacggtttgactgtgtccccacccaaatctcatyttgaattcccacatgctgtgggagggacccggtgggatgtaattgaatcatgggggcaggtctttcccaggctgttcttgtgatagtgaacaagtctcacgagatctgatggttttaaaaacggaaatttccctgcacaagctctcttctcttgtctgctgccatgtgagacgtgcctttccccttctgccatgattctgaggccttcccagccacttggaactgtaagtccattaaacctctttcttttgtaaattgtgcagtctcgggtatgtctttattggcaatgtgaaaacggactaatacaatggcggttc

SEQ ID NO: 398897 - DNA, 526 bp, Homo sapiens
caagcctaaagtctgggagtctagttaaaaagttgttatagttatctaagaaagagagagaggcttgaaatctgggagtgaccgtggcaatgggaataaatacacaaaggacttgagagatggaaaggagcattaaaaaattcatgggctgataaatagtaatatggagcaaggggacgaggaaaggagacaaggacgactcatgattcyaatcactgcgggagtggcagtgccatttgtagtgggaagagatcacagaggaaggcaacatagaagagaagacagggctcatttccaggcatgttgagcctgaatgcctatgtggatggagaagtaaagatgtccactaagcagttagaaagaggagcctgggacttggtcaaaaggacttattgacttattttaaggtaaaactttggttgtaatcagcatattaatggttgtcaaaaccatgaggattttctttctttctttttttttttttcttttttttaaagacagggctccaccacattgcccaggctgg

SEQ ID NO: 398898 - DNA, 526 bp, Homo sapiens
caagcctaaagtctgggagtctagttaaaaagttgttatagttatctaagaaagagagagaggcttgaaatctgggagtgaccgtggcaatgggaataaatacacaaaggacttgagagatggaaaggagcattaaaaaattcatgggctgataaatagtaatatggagcaaggggacgaggaaaggagacaaggacgactcatgattccaatcactgcgggagtggcagtgccatttgtagtgggaagagatcacagaggaaggcaacatagaagagaagacagggctcatttccaggcatgttgagccygaatgcctatgtggatggagaagtaaagatgtccactaagcagttagaaagaggagcctgggacttggtcaaaaggacttattgacttattttaaggtaaaactttggttgtaatcagcatattaatggttgtcaaaaccatgaggattttctttctttctttttttttttttcttttttttaaagacagggctccaccacattgcccaggctgg

SEQ ID NO: 398899 - DNA, 592 bp, Homo sapiens
ttcccatgcagaagcacacagaccctaacaactcccggaaacattgtggcagctcagaccaaagcctgattcttgccttttcaacaggatgactttctgttagtcatcattttctttctcacatgcaatcttccttctattccttccttgttttccttgttatttcataatcctcccccctgaggctttgagaatattattataaaatgcaacacttagaaagagggcatagaatgtatgtgtatggtttaaagaagaataacaaaataaacatgctgtacccagcttgagaaatagaatattcagattataatcttcccactttgatttgcatctcccagtmtccctcctcccagaggtaataaccactattctgaattttgtgggtttagcacttttttaaaatcacatatgatatcacaaaacggtattttgccttcttgcagagggtcttggtataaatggtataaaactgtgtatattctttttcatagccttttgtgactgatgctgtttttcaatattctgcttttgagattctttttttctaatacacgcagctgtcattcattctttcagtactgtttagtcc

SEQ ID NO: 398900 - DNA, 615 bp, Homo sapiens
acaaggaagtaaaaacaagccaaggccacattgttatgtgggcctgatgagagacaactttgtcttaccttcaagcttgggagtctgaattgtggtaataaaagcaattttaggccaggagtggtggctcacgcctgtaatcccagcactttgggaggccgaggtgggcagatcacaaggtcaggagattgagaccatcctggctaacacagtgaaaccccatctctactaaaaatacaaaaaattagctgggcgtggtggcgggcgcctgtagtcccagctactcggaaggctgaggcaggagaatggcatgaacccaggaagtagagcttgcagtaagccgagattgtgccactgcactccagcctaggcaacagagcaagactccgtctgaaaaaaaaaaaaagcaattttatctcctccaaagtattgcattcctcaacaattttatgcctctctaggaaaaagccaagcaaaggaaaaagcatttctcccaatatttatgcagggtatctatgcccagktaccatatttagcatttagctttaagtgtcctcccagcagagggatcataggaccaaagatccagtaagaggccagagagaactagacctt

SEQ ID NO: 398901 - DNA, 629 bp, Homo sapiens
agcccaccagagaggaagactctgccccagatctgcctgctcagtaacccccactcaaggttcaacctctggcaggatcttcccgagatccggagcagcggggtgcttgagatcctacagccygaggagattaagctgcaggaggtaacaggcgccgaggggcgggggctcccccacagcacaccggggtggccctcactgctgggggtgaggcttcctctggggggtgaggttccctggctggttcaccagaggaatcgctggcagggttgtccatctagaacatgcagaaaaataaacatggtttcacaggcagcaagagacacccagctaccttctaggacagctcacccccaacattgagcgtctgaagcattgctgtctgatgcgatagtaggatcgcagtttttccacccttcgttatcatcattgtgtatttccgtcacgcgtgaatgccacggcacgaggcaatgctgagctcactgtgactatgccatagctccagttatctgtggttggcggaggtctgccatatctctttgcattcacgatcttatcccaccactttcttttggggctgtctgaacttcggatgaatggggtctctgaaggaagtccctcagcttgcc

SEQ ID NO: 398902 - DNA, 629 bp, Homo sapiens
agcccaccagagaggaagactctgccccagatctgcctgctcagtaacccccactcaaggttcaacctctggcaggatcttcccgagatccggagcagcggggtgcttgagatcctacagcctgaggagattaagctgcaggaggtaacaggcgccgaggggcgggggctcccccacagcacaccggggtggccctcactgctgggggtgaggcttcctctggggggtgaggttccctggctggttcaccagaggaatcgctggcagggttgtccatctagaacatgcagaaaaataaacatggtttcacaggcagcaagagacacccagctaccttctaggacagctcacccccaacattgagcgtctgaagcattgctgtctgatgmgatagtaggatcgcagtttttccacccttcgttatcatcattgtgtatttccgtcacgcgtgaatgccacggcacgaggcaatgctgagctcactgtgactatgccatagctccagttatctgtggttggcggaggtctgccatatctctttgcattcacgatcttatcccaccactttcttttggggctgtctgaacttcggatgaatggggtctctgaaggaagtccctcagcttgcc

SEQ ID NO: 398903 - DNA, 629 bp, Homo sapiens
agcccaccagagaggaagactctgccccagatctgcctgctcagtaacccccactcaaggttcaacctctggcaggatcttcccgagatccggagcagcggggtgcttgagatcctacagcctgaggagattaagctgcaggaggtaacaggcgccgaggggcgggggctcccccacagcacaccggggtggccctcactgctgggggtgaggcttcctctggggggtgaggttccctggctggttcaccagaggaatcgctggcagggttgtccatctagaacatgcagaaaaataaacatggtttcacaggcagcaagagacacccagctaccttctaggacagctcacccccaacattgagcgtctgaagcattgctgtctgatgcgatagtaggatcgcagtttttccacccttcrttatcatcattgtgtatttccgtcacgcgtgaatgccacggcacgaggcaatgctgagctcactgtgactatgccatagctccagttatctgtggttggcggaggtctgccatatctctttgcattcacgatcttatcccaccactttcttttggggctgtctgaacttcggatgaatggggtctctgaaggaagtccctcagcttgcc

SEQ ID NO: 398904 - DNA, 649 bp, Homo sapiens
gtttttaataaatttaaatgtacacctattctaagacctagcaagtccactcctgggtatacaccccagagaaatgagtacatacatccacaaaaagaattgtctaaggatgttcatagcaactttattcataatggctgaaaactggaaacaattcaaatatccatcaacagaagggtagataagcaaattgtggcaatacctctcagcaataaaaaagaataatttgggccgggcgyggtggctcgcacctgtaatcccaacattttgggaggctgaggcaggcagatgccttgaggtcaggagttcgagaccagcctggccaatatggtgaaacacctgtctctactaaaaatacaaaaattagctgggtgtagtgacaggtgcctgtaatcccacatattcgggaggcaggagaatcacttgaacctgggaggtggaggttgcagtgaactgagattttgccactgtactccagcctgggtgaaagagtgagactctgtctcaaaaataaaataaaataaaagaacaaaaagaacaatctggtacacatatattgatgaatttcaaaaatattatgttgagcaacagaagtcagacactgtagagtacacactgtgtgatcccatttgttgtgtgaaccaacaaa

SEQ ID NO: 398905 - DNA, 528 bp, Homo sapiens
gacttatttttgtatttttagaagagacagggttttgtcatattggccaggctagtcttgaactcctgacctcatgtgatcctcctacctcttcctcccaaagtgcaaacctcttttcttgtaarttacccagcctcgggtatttttttatagcaatgcaagaacagcctaatccacccataatatctaattacatgcaaataaaataggggtgtgtgtgtgtgtgtgtgtgtgtgtgtgatcaaggatcaatgagcaaagcaacctcaggaaggaagtgttgcctccccaccttgtcctaggattctgctctgttgcctggttcacaattccccagtgcagatacaggggatacagtttccctgtagccatccagggatttgtagagattgtgaagcttctaggaatttagcttaaagaaataatgagggctgggcattaggttttgccacagtgatatttatcatagtgtggcttacaaaacagcaaaaatttgaaactgtcttgggtcagagattgctgttgcct

SEQ ID NO: 398906 - DNA, 526 bp, Homo sapiens
gctatctcaatttccctttgttcatcttgcttgtgcacgctgacagattctgttagaaaatgcaagggaaacagatcatgcagtaggtatgacagtttcaatttgcatggactatggctaatgtggatgtacttaacagctctgatgtgtataagaaaactgcagccttgattcctattagtcttttaaaaattatttatttatgtattyaattgtactctttgattctgctctgctactaattgaacatgatggaattatccatagatcaattcatatattgatctaaagtgcacataagtatataacatattataacatatttgggccttatttgtcaaagagaaatatttgccatcaaatgggttttaaatattcctgttagaagcttatttctaagattaaattgccaatgttcacatttactttacttttgttccaaatctagatttctgcatagtcagaatattgtatgctggctactaaaatactgactttctgttcttcagttcataaaattatagat

SEQ ID NO: 398907 - DNA, 512 bp, Homo sapiens
gatttaggaaaccactagcaataccatggatgaccaaattcagcaaatatttattgagctttaccatatgtaggatgtttgagataaattttattgaaatcccagtaaaatagcagcacttaaaaactcttctacagaaaagagagtatatattagaaaacattagctagaacattgaagaatattaacttcagaaaatttggtaagtgaggtaacaagtcaaagataagtttaagcgtcagaagggaaaaataacaactatatcatggataaagatcagtattaaagcatttcagaaagatcttggttttgataagaagataatctgaaaacacaagctattaatcaaacacaagttaaagaacacacaatatataaggaaaagcatagcacatggactygattattcatgttacccaaacaaaaaagaatatgaataagataaagagttaacagctagagataaagaagtgaaaatgtcaaagttaactaaaacaattggatgattcaat

SEQ ID NO: 398908 - DNA, 615 bp, Homo sapiens
aattggtccatttattcattgttaatgttttgttatttttgataatataacagatgggaattgactttaataaattatctgtaagatcttaaatcatgcattagttattaggctaaaactaaaatttattttccaataatattcataaattgtttatagcattcatatactatataaatgtaatctaaatattaaaaattaaaatgtattaacttattgataggcaaatcctgtcacatattcactagtttttatattattgaatatatgtttttaataaaagcacatgcctcttttgaggctcaaggccctcttattaatcattttccttcttcattaccrttgagagataaactgtttcattgattaattttgagtaagaataataatattcaagtatggtacctcaataatatttgttaaaaagcatttgcttcttcagatgctttccatttctgaaaaatctgcacaagtttcagtgttcagcacatatggatatagttcataatgagaagaaatactcctgggatatgaaattgcttcagggaaaatatgtaatatacattcagaaagtaaataaattccctgtgtcttccctctgacgtggattttagt

SEQ ID NO: 398909 - DNA, 615 bp, Homo sapiens
aattggtccatttattcattgttaatgttttgttatttttgataatataacagatgggaattgactttaataaattatctgtaagatcttaaatcatgcattagttattaggctaaaactaaaatttattttccaataatattcataaattgtttatagcattcatatactatataaatgtaatctaaatattaaaaattaaaatgtattaacttattgataggcaaatcctgtcacatattcactagtttttatattattgaatatatgtttttaataaaagcacatgcctcttttgaggctcaaggccctcttattaatcattttccttcttcattaccgttgagagataaactgtttcattgattaattttgagtaagaataataatattcaagtatggtacctcaataatatttgttaaaaagcatttgcttcttcagatgctttccatttctgaaaaatctgcacaagtttcaktgttcagcacatatggatatagttcataatgagaagaaatactcctgggatatgaaattgcttcagggaaaatatgtaatatacattcagaaagtaaataaattccctgtgtcttccctctgacgtggattttagt

SEQ ID NO: 398910 - DNA, 563 bp, Homo sapiens
gctagcaggcttcagagagaacatgttgtaaaatattttcttatgggacttaaaagggtgcctgtctcttagttgattatctcctggatttggaaagaagaaaaagggaaaaggagattctctacagaatgtggatttttcccaaagaacaaactttgcagggctatttcaagataggaaaagtaaatatatttgggattaaaatattttgatttatttatttgttatgtgatggccagagaagtataatgagacatgtctgacccccacttccccttgtggcctgaaacagtctcttgggttaaattttaaaatatccctagctgaggaggaattccacttaggtggttggcagggtggggcttagaatttagtgttggtttacagtatcaaagtccataggttgaggctacgtatatgagacaaataagaagaagcataggtaagagggtagagtgtayttggagtaagagaaaagagttctgagacagatggagacaaatatgatgtgaaggtctgacactaatgacaggagggggtatctgaggggtgagcaggaggct

SEQ ID NO: 398911 - DNA, 612 bp, Homo sapiens
cttaaggatcttccttccagcaattccaacccacatttcttgacctctccttttgtaagagaagcctttcttgtatctccaaaaatatactgcctcccctcttagacttcctttgtcatatttatatactctcctrtatatttcttattatatttcaattagcctcaactatcttaaacctggaacttctccaccagccctagaatctccctcactgtggagattctcgtattagttagagatctctagcacagaccatttttaaaattccccattccttctttctcttttgatccactctccaggttctgcacttatttttttctgccttaatggagtcttaagctgcctgatttcctaatgaaaataatttatgtattctgtcaagaaacactttatcctccccaatctgcagaagagccctggaaatactatgtcctatgtgataagaacagatctctttgttattcttattacgaagacaatataaccatgccctttgtttaagactctgcattaccttaatattttttcttgccttttagttagtgatggaatacaagtgggatacttgttttctgcggtgtaatcactcttggctaattgttgtaa

SEQ ID NO: 398912 - DNA, 612 bp, Homo sapiens
cttaaggatcttccttccagcaattccaacccacatttcttgacctctccttttgtaagagaagcctttcttgtatctccaaaaatatactgcctcccctcttagacttcctttgtcatatttatatactctcctgtayatttcttattatatttcaattagcctcaactatcttaaacctggaacttctccaccagccctagaatctccctcactgtggagattctcgtattagttagagatctctagcacagaccatttttaaaattccccattccttctttctcttttgatccactctccaggttctgcacttatttttttctgccttaatggagtcttaagctgcctgatttcctaatgaaaataatttatgtattctgtcaagaaacactttatcctccccaatctgcagaagagccctggaaatactatgtcctatgtgataagaacagatctctttgttattcttattacgaagacaatataaccatgccctttgtttaagactctgcattaccttaatattttttcttgccttttagttagtgatggaatacaagtgggatacttgttttctgcggtgtaatcactcttggctaattgttgtaa

SEQ ID NO: 398913 - DNA, 612 bp, Homo sapiens
cttaaggatcttccttccagcaattccaacccacatttcttgacctctccttttgtaagagaagcctttcttgtatctccaaaaatatactgcctcccctcttagacttcctttgtcatatttatatactctcctgtatatttcttattatatttcaattagcctcaactatcttaaacctggaacttctccaccagccctagaatctccctcactgtggagattctcgtattagttagagatctctagcacagaccatttttaaaattccccattccttctttctcttttgatccactctccaggttctgcacttatttttttctgccttaatggagtcttaagctgcctgatttcctaatgaaaataatttatgtattctgtcaagaaacactttatcctccccaatctgcagaagagccctggaaatactatgtcctatgtgataagaacagatctctttgttattcttattacgaagacaatataaccatgccctttgtttaagactytgcattaccttaatattttttcttgccttttagttagtgatggaatacaagtgggatacttgttttctgcggtgtaatcactcttggctaattgttgtaa

SEQ ID NO: 398914 - DNA, 542 bp, Homo sapiens
cttgaaccgtatccaaaaatcaactcaggatgaattaagaacttgaatgtataacttaaacctataaaaactctggaaaataacctaggaaataccatatggatatagaawctggcaatgatttcatgacaaagatgccaaaagcaattgcaacaaaggcaaaaattgacaaatgagatctaattaaacttaagagcttttgcacagcaaaagaaactgtcaactgagtaaacagacaacttacagaaagggaaaaaatatttacaaactatgcttctaactacatataatagccagaatctatatggaatatatataaatttacaagcaaaaaacatacagccccattaaaaagtgggacaaatacttgaacgacactttttaaaagaagacatacatgaagccaacaagcatgtaaaaaaaatgctcaacatcactaatcatttgagaaatgcaataaaacgacaatgagataccttctcaaatgagttagaatggctattattaagaagtcaaaaaaaaaaaaaaaaaagagatgctgg

SEQ ID NO: 398915 - DNA, 599 bp, Homo sapiens
ccaaccaaaaaaagccctggaccagatggattcacagctgaattctaccagaagtccaaataagagctgttactgatcctactgaaackattcaaaaaaactgatgaggaggggcttctccctaactcattctacaaagccagcatcactatgatatcaaaacctggcaaagactcatgggaaaaggaaaaccacaggctaatatccctgctgaacacagatgtaaaaattctcaacaatatactagcaaaccaaatccagtagcatgtcaaaaagttaattcaccatgataacatggcttcattcctggaatataaggttgggatgcaaataaaaaattgtgattcaccatataagcagaattaaaaactaaaattaaaaattatcatctccatagatgcataaaaagctctcattaaaatccaaaatccctccatgataaaaaccctaaagaaactaggcattgaaagaacatacctcaaaatattaataataagagccatctgtgacaaatgcacagccagtatatttaatgggcataagctggtagcatttcccttgagaactggaacaaaacaaggatgcccactctcaccact

SEQ ID NO: 398916 - DNA, 594 bp, Homo sapiens
tctgcagctgtaaatgtctatcctaaagaggaaaatatatttgcatcaatacataacaattcacataaagaagctaaaaaaaagaacataaaactaaacccaaagcaagcagaaggaagaaaataatgaaaactacagaggaaataaataaaatagaaagagaaaagcaacagtaaaaataagcaaatccgaaatttgttttttgaaaagattaataaaattgactaacttttagctagaatgactagaaagagagaacacacaaattactaaaatcataagtgaaaaagggggcatgacaataaatcttacagaaataaaattgatcaaagggatcaaggggaaatattatgaatcaccrtataccaatattaggtaatatagctaaaatggacaaactccccaaaagatacaaattaccaaaaccgaatgaagaacaagaaaatctgtacagacctaaaaaagtgaagaaactgaattaaataataataatagtaaaaactcccatgaaaagccttcactggtgaattcattgaaatattctaagaagaaataatagcaatttttcataaactctttcaaaaaatagaatag

SEQ ID NO: 398917 - DNA, 594 bp, Homo sapiens
tctgcagctgtaaatgtctatcctaaagaggaaaatatatttgcatcaatacataacaattcacataaagaagctaaaaaaaagaacataaaactaaacccaaagcaagcagaaggaagaaaataatgaaaactacagaggaaataaataaaatagaaagagaaaagcaacagtaaaaataagcaaatccgaaatttgttttttgaaaagattaataaaattgactaacttttagctagaatgactagaaagagagaacacacaaattactaaaatcataagtgaaaaagggggcatgacaataaatcttacagaaataaaattgatcaaagggatcaaggggaaatattatgaatcaccatataccaatattaggtaatatagctaaaatggacaaactccccaaaagatacaaattaccaaaaccraatgaagaacaagaaaatctgtacagacctaaaaaagtgaagaaactgaattaaataataataatagtaaaaactcccatgaaaagccttcactggtgaattcattgaaatattctaagaagaaataatagcaatttttcataaactctttcaaaaaatagaatag

SEQ ID NO: 398918 - DNA, 587 bp, Homo sapiens
atttcactaaacatgtagattaaaaaaatcaacacagaaacactggacttaaactgcactatggaaaaaattgatttaacaaacatagaacattttatccaacagctatagaattaacattcttctcagcagaacatagaatgttatttaggagagactatattttaggtcatactgtaagtcttgacacatttaaaataatcaaaattatatttagtatctttttagatcacaataaattaaaactagaaatcaataacaaaaggaactttagaaaccatgcaaatacattgaaattaaacaacatgcccctaaatgaccaacacatctataaagaaattaagaaaaaatttaaaaaattttcttgaaacaaatttraatggaaacaacatatcaaaaccagtggcgtaaaacagcaagttctaagaaggaaagttatagcaataaatgcctacatcataaaagtagacatgttttggccaggtacagttcctgcctgtaatctcactgcttttggaggctgaaattggaggatcacttgaggacaagagttcaagaccagcctggacaatataatgaaaccccca

SEQ ID NO: 398919 - DNA, 590 bp, Homo sapiens
caattaaaccccaaagagcaaaaatagcaatgctagaggtatcacatcacatgtcttcaaaatatactacaaagctatagtaaacaaattagcatggtatttgtgttaaaacagatgtgtagaccaatagaacagaatcgagaacccagaaataaatctacatatttacagccaagtgaagtcaagaacatacactagggaaaggacaccaaagatgaccccatagaatggtattttgcagacttaccatttgcctctatgtaagtaacctcataagttatagtccatacagcaagaaaaacacaaggccggggtcagaatgtaaggctgccatacaaattacacaaagaaatatggagttggagacctgcttattataacacrcaaacctaatcatatttcacaataatgttcctctcttctgtcgtactggaaaagtgcctatggattaaagtgtgttcggcgtgcaaaaggattgctcctgttttaacttctgctgctcgccagaggttatgaaaaccgtaaatccttccacatttgcacataccaccccttctcattttacttcgacatctacttctgccaagtcc

SEQ ID NO: 398920 - DNA, 658 bp, Homo sapiens
aatgcaggaccaagattcagtggggtgcttggaaatagaggaatatattggagtttcacaggcagacaggaagtgattgaaatactgaagttagtaaaatgaaagaagagaaatgagaaaggaaagaataaaagatgagtatcagatttcataatgtctatatttatgggttagaggataaagaagagttatttaaaagactgaaaagaatggsataagaaattgcacagagagaagataatattgttaaaggaaaatatattttcatatttgactgttttggaggcaaaggaagacatagttgtatttgtagcctacaacagaatgaacttatacacttattgtccaaactgggacatttttgagagtgaaaaaagatgccaaataataaccatgctatttgatttacaacaggcataaagtagtactttccccagaatgctggatataacagtcactctgaataagaggagacagctaggggacaattgcagactatatccttgctaacaggagagtaagcacttggtaaactcagacaagagaggagaaacgaaatcaagcgcataagcagagtagttagctttgataagaaagagggagtgttcttcctaaacatcaatagaaaagtaagagtagcaacacaatggcccagagg

SEQ ID NO: 398921 - DNA, 437 bp, Homo sapiens
cattacaatttggaattgaatttcaacaacatatgtgataatcccaccacacaacatctattcttaggtgattgtaaatgccactcttcattttactttctacatgaacaacaacccttgaatatatggcttaaaatatctaaatttgcagcttttggagacatgaaagcctctgcaaatgagccgtattttcttttttcatttttttgagatcagatctctctctgttgcccaggctggagtgcagtcatgccatctcggctcactgccacctggacttcctgggctccggcaatgctcctgcctcagcctcccaakttgttgggactacaggtgtatgccaccacacttggctaattttttttttctttatagagatggggtttccccatgtttcccaggcccagccatgttctctttaccaatataatattctc

SEQ ID NO: 398922 - DNA, 615 bp, Homo sapiens
taagtaattgttcttcatttcactctgttaagaagcactctttcttattgattttgggctgcacctgaagcatgactacaatttttttccccaacaacctgaatctgctcctattgatcaactaatgctgcccttctggcaaaatttgctataccaaaaacactgagcaagaaaaacgtgtatatgaaataaaacactgctatgagaagaggccagcaactggtgcttgcttatctaatatcgctggtgaagaaatagacttaaaaggaacaraaattagaaggactagccattttatgtttccttttactctctacttactaattaacttctatataattatgtggttagatgtgtttaaatagcaactttctattttctttttatacaattgtccaggaggtctgttggtgaagtccttatctgtggaaggtctgcctctagctaaaaataattttaggtagtgaagcataatagttaagaacttgtgctccgagacagatagtttttggtttgtatcctatcttagtcacttaaaggttatataattttggctaaattctttaacatctttgatctttattttcctcatctgtaaaatgaagatgtatggtt

SEQ ID NO: 398923 - DNA, 612 bp, Homo sapiens
taacatgcacagttactagcagattgttaatcataacaattcagtacactctctaaacaaagaatattataaaatatgttttatgcagtgggtttcttttgttgtaamaatgtgtctggtctaaaaagatgtctgtactttgcatgaggactagttttaactgaaatcttatcctaactataacttgtctatgtatgggtttaaggagagtactcatataccctttatttgtaaaacatttcttttttcacttataaaatcattttcctctgattctgaaacctatcctggcttataaagtgtctttctaaagcttcaaattcctcaaataagaagtagattagaaataaaaagaaaagaacagaagaggattaaaatgtaatttatgttggaaaaatgcaataatttcatcagatggcattttcaatcccttcagtatgctatggataacagacaagaccagtgaaattgggtgaaattattatatgaatttgtgtattcaaattttattctgacttaaataaagataaatactagttggaggccgtagaattctaaatgagaggtgtgtttcaaaaaaaaacatataaaatctcttaaaattttaagatg

SEQ ID NO: 398924 - DNA, 612 bp, Homo sapiens
taacatgcacagttactagcagattgttaatcataacaattcagtacactctctaaacaaagaatattataaaatatgttttatgcagtgggtttcttttgttgtaaaaatgtgtctggtctaaaaagatgtctgtactttgcatgaggactagttttaactgaaatcttatcctaactataacttgtctatgtatgggtttaaggagagtactcatataccctttatttgtaaaacatttcttttttcacttataaaatcattttcctctgattctgaaacctatcctggcttataaagtgtctttctaaagcttcaaattcctcaaataagaagtagattagraataaaaagaaaagaacagaagaggattaaaatgtaatttatgttggaaaaatgcaataatttcatcagatggcattttcaatcccttcagtatgctatggataacagacaagaccagtgaaattgggtgaaattattatatgaatttgtgtattcaaattttattctgacttaaataaagataaatactagttggaggccgtagaattctaaatgagaggtgtgtttcaaaaaaaaacatataaaatctcttaaaattttaagatg

SEQ ID NO: 398925 - DNA, 616 bp, Homo sapiens
tattcacctatttccaattcttatctcagataaaaattataaaccttacttaacagattctgattactgggcaccttttctgctcaatctccagtaatcatgagtctttttgagtcacattcatctaaaagctatttgcaggtcagtgttgacataygattattatgccaactgcttcttttatctgtcttccaagttatgtcaatcaattagcaatgatacagtagtcctggatttcaataataataatcatgattcttactattattctattctaagaactaataagaattttagttttgttctaatagatctgtattatctattacaacttatcagataagaagaaatactccatagatgattacagatgtcttccaagaaaatcagactattatcatagtgctatagcactatagcaatacaggaaatatttctgagcaagtaataattacataaatacatgtggctttgtgcttactgccattagctaccacactattagaatatggttagttacaagaaagaaaagggaattaattggttttgagatagcagtatgagggaactcttgacaacattttaacaaccacaacaatgaaggaatgaaatctgg

SEQ ID NO: 398926 - DNA, 539 bp, Homo sapiens
tgacaaaaccctaagcacttggtactttttaaaaataccgtactgaggcaggttatatccagctgcaaatctgcattttatttgcttaactgaccctgaatgcaagcattatttcttccttaatgagaacttttgtgattcatccaacagtaaaattgtgtggtgttttaatcaggaatatgttaccttttctgctttttaatttgtgaagctccatttctacatacagtcaatgcttggcattttttaacatatgaaattcattttgtatatcattttttatctttatcttgtataytcagaaatcaatttgtacttgatattttctatacttttgcaggttatctctaccatattttgccattttacagtagagatgcacaacatatgtgttctagtttattgtttctacagcatcaaatacgcctttataaatatatcatagatatgaagacataaagcagcaggtttggggtttttttgacttatggtactgaagaattgactttgtgaaaagcctcctcgttgactatacatct

SEQ ID NO: 398927 - DNA, 603 bp, Homo sapiens
  misc_feature (1)...(603): n = A,T,C or G
caaacattcagaccatagcataagagttaaaacataagcaaacattaaactactctatttacaaaatgtaagtgttactctcactttgtctcagtatctctgtatttcacgtgtacacacatacaagttcattttaactaaagagagaataactaatcaaaatcataattttaaaagtatcagaaaactgattctaaagatgaaattcaaaaactgtagggacattaaacaggraaattgtcatagtttgcataatacatttactgagtaatctgagaaaattttctaggatgtagttcagagaagtaaaaatgttgaaactataataaaatatgttaaggtcctagaggatatgaagagaacatttagctcaagtctaatagcagttatagaaggaggtaaaagagcatgtttgaatacatgactaagaatgtgtgataaagctctatctggacatgtttagccatgataacatatatattttttaaaactttaaagttcttgaaacgttgatctagttaaacattcatctcaagaagatagaaaataaagttagtataatnnnnnnnnnnnnnnnnnnnnnnnnnnnnnnnnnnnnnnnnn

SEQ ID NO: 398928 - DNA, 550 bp, Homo sapiens
  misc_feature (1)...(550): n = A,T,C or G
ctctatttacaaaatgtaagtgttactctcactttgtctcagtatctctgtatttcacgtgtacacacatacaagttcattttaactaaagagagaataactaatcaaaatcataattttaaaagtatcagaaaactgattctaaagatgaaattcaaaaactgtagggacattaaacagggaaattgtcatagtttgcataatacatttactgagtaatctgagaaaattttctaggatgtagttcagagaagtaaaaatgttgaaactataataaaatatgttaaggtcctagaggatatgaagagaacatttagctcargtctaatagcagttatagaaggaggtaaaagagcatgtttgaatacatgactaagaatgtgtgataaagctctatctggacatgtttagccatgataacatatatattttttaaaactttaaagttcttgaaacgttgatctagttaaacattcatctcaagaagatagaaaataaagttagtataatnnnnnnnnnnnnnnnnnnnnnnnnnnnnnnnnnnnnnnnn

SEQ ID NO: 398929 - DNA, 616 bp, Homo sapiens
tacttttgaacaccatgagccttgtttacagaattgtgccaactctgtcttaaatattcttactttacagaacctgatcttacataaaatactctatttcacctaatgtcttattttttgctgtagccctcctgtcttctgtctttattctctgctctgttgagctttgaccctttgatctataactcaatctgtgcccttgacaatgccttcagttctctgggctcctcattcctacatcaaacaagcctgacataaacccactctgagtcaatccaaatctctgttgcttagtatccatacttagattgctgtggtcagtgagagggacagacaatgctgcagaacaatgcacttcagtatcaatggtgccactacaacctcaactggtgtcacttcaacaacgtctgttcttcaawtgtttttgtgtttgcctagtttcttctattgtccacaatgtttaaacattttacacatctttcccggtttccagcccagtttctctgccttcacaatcagcagataacattgccttctacttcacagggagttattggatgagattgttaagaatagaaaatattgatttaggttaaaaatataagggcatactctt

SEQ ID NO: 398930 - DNA, 180 bp, Homo sapiens
taaaagaaaaaaaaaatgacatgaaaaaacccacttggcaaaatagtatcatagctaagtcctgttgtatgtacaaaatacatyatgattgagttttatttatcataggtatacaagtattttaagatttataacctctaattgtaatttacccattaacaaattaatgaataaaaaggc

SEQ ID NO: 398931 - DNA, 483 bp, Homo sapiens
gattcctaatttatgtggtcagacaatatccttttaacacttccatccttattaatttattgatagctgttttatcacccagaatgtggtatactaaatgttctatgtgcacttgagaaaagaatgtatattctgctattgtttggagtgtggrgtattgtctataaatgtcaattaactcagtttggttgaaaatattgttcaactcttctctatccttaatgattgtctacatgatctataatttactgatggagggcatttctcagctataactgtggatatgtctatttattaatgcacttttgacagtttttgcttcatgtactttgtggctgtctttatgtgcgtaaactttataatttttatattttatttatcaactgaccccttaacatttaaaagaccacctttaaccttgatactattcttttatctgaaatctaagttatctgatataaatatggtcaccccagcttcctg

SEQ ID NO: 398932 - DNA, 480 bp, Homo sapiens
agggttgaaatttggtgcacgcactgtggttggtttataagtttcttaagactcttaacttttatgttggtcctcaatatcatttattttctcgcatatcttttcctcgtagaagacacccagacattttttcctgtggtgtcatgacagtccagcttttgcttattatttcactgttgcattgttaacatattccttctcctttagacataaactttaattacatctaaaggctcgattaaattcagattcaactttttaaaaagtatttctcataagtgacattgtatgtttctctcatagaatgaaaaatatttgtttcaattcaatgaatttattaattcatttaaatggattattattagtattcaaattattgatattcaaattgcccagtcttttttaacagaaggagttacttcaagttgrttcctgagaactataggtttaattctattcttaacttctattatgatgagg

SEQ ID NO: 398933 - DNA, 571 bp, Homo sapiens
agtcccaaattgagaaaacacaatattcaaatataaaaaaaaatctaacttaaaaagaataatgagaatatataggagtatggttaaagcaatgtagagggagatacaggataacactaaatgaaaaataaaaatggatgacagttcaaagtaaagtacaagcctattcaggaggagagagaatgtggagcagccctatggggccgaataaaaatattaatgttatattttgttggaatattttgaagccagtttgcctgtttaaagtataaaacaaaacatgtatttcccaaattattacayggaataaaaaaagaaagaaaatgtgatcaatctagtggaaggtacaaaatagaactggagaggaagcaaagaataaaaggtaaaatgtatgtacataccatatttatatgtgtcaatatagatagagctttaagaacagttttgactaaaaactgaaagggcacattgcgaaaagatttcagagtatacatggtttcttgtttctgagtacatagacagatgatagaatagagatagatttaaaatttaaaatcatgaattagaaaga

SEQ ID NO: 398934 - DNA, 571 bp, Homo sapiens
agtcccaaattgagaaaacacaatattcaaatataaaaaaaaatctaacttaaaaagaataatgagaatatataggagtatggttaaagcaatgtagagggagatacaggataacactaaatgaaaaataaaaatggatgacagttcaaagtaaagtacaagcctattcaggaggagagagaatgtggagcagccctatggggccgaataaaaatattaatgttatattttgttggaatattttgaagccagtttgcctgtttaaagtataaaacaaaacatgtatttcccaaattattacacggaataaaaaaagaaagaaaatgtgatcaatctagtggaaggtacaaaatagaactggagaggaagcaaagaataaaaggtaaaatgtatgtacataccatatttatatgtgtcaatatagatagagctttaagaacagttttgactaaaaactgaaagggcacattgcgaaaagatttcagagtatacatggtttcttgtttctgrgtacatagacagatgatagaatagagatagatttaaaatttaaaatcatgaattagaaaga

SEQ ID NO: 398935 - DNA, 521 bp, Homo sapiens
aggaaactcaatgaaattcaagataacacagaaaaggaattcagaattctattagactaatttaacaagagattgaaataatgaaaatgaatcaagcagaattctggagttgaaaaatgtaactggcatactaaagaatacgtcagtcttctaatagcaaaatagatcaagcagaagaaataattagtgagcttgagcacaggttatytgaaaatacccaaacagaggagacaaaagaaaagagaataaaaacaaacaaccacaaccgtaggttctagaaaatatcttcaaaaaggcaaaatgttattggtcttaagaggaggtagagaaagcgataagggtatagtttattcaaaagcattataacagagaattttccaaacctagagaaagatatcaatactaaagtacaagaagtttatataacaccaaacagatttaaccaaaagaagactacctgaaggcatttaataattaaactcccaaagatcaagaataaagtaaagctactaaagcagcaa

SEQ ID NO: 398936 - DNA, 521 bp, Homo sapiens
aggaaactcaatgaaattcaagataacacagaaaaggaattcagaattctattagactaatttaacaagagattgaaataatgaaaatgaatcaagcagaattctggagttgaaaaatgtaactggcatactaaagaatacgtcagtcttctaatagcaaaatagatcaagcagaagaaataattagtgagcttgagcacaggttatttgaaaatacccaaacagaggagacaaaagaaaagagaataaaaacaaacaaccacaaccrtaggttctagaaaatatcttcaaaaaggcaaaatgttattggtcttaagaggaggtagagaaagcgataagggtatagtttattcaaaagcattataacagagaattttccaaacctagagaaagatatcaatactaaagtacaagaagtttatataacaccaaacagatttaaccaaaagaagactacctgaaggcatttaataattaaactcccaaagatcaagaataaagtaaagctactaaagcagcaa

SEQ ID NO: 398937 - DNA, 598 bp, Homo sapiens
aatttaaactgaaaaaattgtaactacagaacctctctaatgtgtcctttgaacttgtctgacagcatgcmaactaaaaaaaaatctcaacaagagaatgagggattgcttatggagacactgatgtcacttgaggttaaattatgcaccttaaccatggccataaatggctctgtcaaggtcactttatggccactaacccaagatcagtggctcctgtgagtgttcagtaatttacactgtacactgatttttctaattctgtctttgaattcgttaaagtacctttactgtgtgtctaatagatttaaaggaactgcatgagtaagcaatcacacatgttagcattccaaggtgttatacaaatgccttaaattattgaccatatgttaggaggcataatcttaagcatcttaagaaatgtttatgataatgaaggtagcaatgatactagaatttctggtacaatactagtagataaagcttttaaaaattaaaatgtacttgttgaatgtcaatttaaaatgattggtagattgataagtataaattgtccagttactttcccatgcccaatatattttagcaccactttaca

SEQ ID NO: 398938 - DNA, 598 bp, Homo sapiens
aatttaaactgaaaaaattgtaactacagaacctctctaatgtgtcctttgaacttgtctgacagcatgccaactaaaaaaaaatctcaasaagagaatgagggattgcttatggagacactgatgtcacttgaggttaaattatgcaccttaaccatggccataaatggctctgtcaaggtcactttatggccactaacccaagatcagtggctcctgtgagtgttcagtaatttacactgtacactgatttttctaattctgtctttgaattcgttaaagtacctttactgtgtgtctaatagatttaaaggaactgcatgagtaagcaatcacacatgttagcattccaaggtgttatacaaatgccttaaattattgaccatatgttaggaggcataatcttaagcatcttaagaaatgtttatgataatgaaggtagcaatgatactagaatttctggtacaatactagtagataaagcttttaaaaattaaaatgtacttgttgaatgtcaatttaaaatgattggtagattgataagtataaattgtccagttactttcccatgcccaatatattttagcaccactttaca

SEQ ID NO: 398939 - DNA, 598 bp, Homo sapiens
aatttaaactgaaaaaattgtaactacagaacctctctaatgtgtcctttgaacttgtctgacagcatgccaactaaaaaaaaatctcaacaagagaatgagggattgcttatggagacactgatgtcacttgaggttaaattatgcaccttaaccatggccataaatggctctgtcaaggtcactttatggccactaacccaagatcagtggctcctrtgagtgttcagtaatttacactgtacactgatttttctaattctgtctttgaattcgttaaagtacctttactgtgtgtctaatagatttaaaggaactgcatgagtaagcaatcacacatgttagcattccaaggtgttatacaaatgccttaaattattgaccatatgttaggaggcataatcttaagcatcttaagaaatgtttatgataatgaaggtagcaatgatactagaatttctggtacaatactagtagataaagcttttaaaaattaaaatgtacttgttgaatgtcaatttaaaatgattggtagattgataagtataaattgtccagttactttcccatgcccaatatattttagcaccactttaca

SEQ ID NO: 398940 - DNA, 598 bp, Homo sapiens
aatttaaactgaaaaaattgtaactacagaacctctctaatgtgtcctttgaacttgtctgacagcatgccaactaaaaaaaaatctcaacaagagaatgagggattgcttatggagacactgatgtcacttgaggttaaattatgcaccttaaccatggccataaatggctctgtcaaggtcactttatggccactaacccaagatcagtggctcctgtgagtgttcagtaatttacactgtacactgatttttctaattctgtytttgaattcgttaaagtacctttactgtgtgtctaatagatttaaaggaactgcatgagtaagcaatcacacatgttagcattccaaggtgttatacaaatgccttaaattattgaccatatgttaggaggcataatcttaagcatcttaagaaatgtttatgataatgaaggtagcaatgatactagaatttctggtacaatactagtagataaagcttttaaaaattaaaatgtacttgttgaatgtcaatttaaaatgattggtagattgataagtataaattgtccagttactttcccatgcccaatatattttagcaccactttaca

SEQ ID NO: 398941 - DNA, 608 bp, Homo sapiens
tacatacatttcctaattatgaaaatactagtagtgagattctcatttactgtaaacatcacagaatttagtacatttcatatttacgtttattaatatgtatacataaagaaatacaaccacacaaaagatatggcaatggaactcagattcttctccttctctgacttggcattcagcctcaccttaaggaaaatgagcttcaggaaaatatcacttaaaktcctcaggagatacctcgttttatgcattgtaagtcttgtaaagacaaataatccaactccagggaagacaataacttcaaaactagcatagttgaaataaatccatcaagataagagaattacatggaaaatatacattttcatagccctcaaaatgaagtatatttacacagaatccagaagcatatcaacatcattgattcatcagggaaacataaggaagctctatctatatgaaaaaaaatctggaattaaaagtcttggaacatctggaatgttaacttttagtgagcatttcaacattctactatcttaattgaggaaattcatttcctagcatctgttcagaaggaagttggtgatatcagtagtgattactatacg

SEQ ID NO: 398942 - DNA, 608 bp, Homo sapiens
tacatacatttcctaattatgaaaatactagtagtgagattctcatttactgtaaacatcacagaatttagtacatttcatatttacgtttattaatatgtatacataaagaaatacaaccacacaaaagatatggcaatggaactcagattcttctccttctctgacttggcattcagcctcaccttaaggaaaatgagcttcaggaaaatatcacttaaattcctcaggagatacctcgttttatgcattgtaagtcttgtaaagacaaataatccaactccagggaagacaataacttcaaaactagcatagytgaaataaatccatcaagataagagaattacatggaaaatatacattttcatagccctcaaaatgaagtatatttacacagaatccagaagcatatcaacatcattgattcatcagggaaacataaggaagctctatctatatgaaaaaaaatctggaattaaaagtcttggaacatctggaatgttaacttttagtgagcatttcaacattctactatcttaattgaggaaattcatttcctagcatctgttcagaaggaagttggtgatatcagtagtgattactatacg

SEQ ID NO: 398943 - DNA, 608 bp, Homo sapiens
tacatacatttcctaattatgaaaatactagtagtgagattctcatttactgtaaacatcacagaatttagtacatttcatatttacgtttattaatatgtatacataaagaaatacaaccacacaaaagatatggcaatggaactcagattcttctccttctctgacttggcattcagcctcaccttaaggaaaatgagcttcaggaaaatatcacttaaattcctcaggagatacctcgttttatgcattgtaagtcttgtaaagacaaataatccaactccagggaagacaataacttcaaaactagcatagttgaaataaatccatcaagataagagaattacatggaaaatatacattttcatagccctcaaaatgaagtatatttacacagaatccagaagcatatcaacatcattgattcatcagggaaacataargaagctctatctatatgaaaaaaaatctggaattaaaagtcttggaacatctggaatgttaacttttagtgagcatttcaacattctactatcttaattgaggaaattcatttcctagcatctgttcagaaggaagttggtgatatcagtagtgattactatacg

SEQ ID NO: 398944 - DNA, 640 bp, Homo sapiens
agctctcctgaacttcatgttctcatgatttgtcattcctctgttattattattattattattattattattattattattattttgtgtgtgtgtgkgggttttgtcatgcctctggtttttgttcctaactgaaatcaaggaggtgcctaacttccatgtgccagtggttttcaaagattttgaaatgagggcataataagacatgcatttcacattatgactcagtatattcatgcatataaatatgaagcaaatgtttcactatgcatattcctactacttgcattgtgtgctgaaaattcacactacttttttttcttgtatgtctttatttaaaacccttttcaaaacccactaagtttattttgtgatccactaggacccacactgtcctagaataaaattttcaattcctctgtcaaggattcttggctgcaaaacctgatactgcatttccccttagcccttccacttctgtttttctcctcttcactaaacaactcacttcttcattaacaatatctctacttcatactacagaacttaatcctacaaatatttagtgggcttttaatatttgttgatactgtgtcaggaactggatctatgaaaatgcttgtcattttctgtgccctgg

SEQ ID NO: 398945 - DNA, 562 bp, Homo sapiens
tgtttgaatattaaattcagtaaaaaatacagatgtggtttaagttgtgccgtttgtatcttgctatgaaatataaataaagcttgtagtaatggagaaactgatacagatggagaagtggtaataaattctgcctctggctatgcttagcaaaatgtttagtacaataaatattagggcataattatatctttttaaaaatactgtttatgaaaattttcataaatgatctaaataaggtaatcctgttttattttcgtgaaacttactcatcttaaaaatacggttttaaattattgagatgttaaatgagagtttttaaatttttaatcattaataaaatcttactattaaaaataaactttatcaagacaagtctgtgtgtatatatatatatatatatatatatatatatatacwtttttttttttttttttttttaaaacaaagtctcactctgtcttccgtactggagtgcaggggcacaatcttggcttactgcaacctccgcctcccagattggagacattctcctacctcagcctctcgagtagctgggatt

SEQ ID NO: 398946 - DNA, 562 bp, Homo sapiens
tgtttgaatattaaattcagtaaaaaatacagatgtggtttaagttgtgccgtttgtatcttgctatgaaatataaataaagcttgtagtaatggagaaactgatacagatggagaagtggtaataaattctgcctctggctatgcttagcaaaatgtttagtacaataaatattagggcataattatatctttttaaaaatactgtttatgaaaattttcataaatgatctaaataaggtaatcctgttttattttcgtgaaacttactcatcttaaaaatacggttttaaattattgagatgttaaatgagagtttttaaatttttaatcattaataaaatcttactattaaaaataaactttatcaagacaagtctgtgtgtatatatatatatatatatatatatatatatatacttttttttttttttttttttttaaaacaaagtctcactctgtcttccgtactggagtgcagkggcacaatcttggcttactgcaacctccgcctcccagattggagacattctcctacctcagcctctcgagtagctgggatt

SEQ ID NO: 398947 - DNA, 592 bp, Homo sapiens
tctatgtgagggagaaacaagtagaacctatcagctgtgttctggaatcctgtgggggggacatacatgtagacaccagcagcggtgttctggaatcctatgtgagggacaaacattcagaaccgagcagcagtgttctggaactctgtatgagggacaaacattaagaacacggcaggattgttctgcaatcctatgtgagggagaaacactctgaaaaccgtaagtgtgttttrgaatcctacatgagggccaaacaatcaaaccctcatagctgtgttccggaatcctatgtgaggggcaaacactcagacaatcgtagcagttttctggaatcctttgtgagggacaagcattcattccctcgtagcggtgttcgggaaccctgtatgagggacaaacattcagaccacaccgttctggaatcccctctgtgggaaaaacattcagaccctcgtggcagtgttctggaatcctatgtgacggacaaagatttagaccacagcagcagtgttctgaaatcctatgtgagggacattcagaccctcttagcagttttctggaatcttatgtgagggacaatcattcagac

SEQ ID NO: 398948 - DNA, 496 bp, Homo sapiens
cagaccctcttagcagttttctggaatcttatgtgagggacaatcattcagacctcagcaggagtgttctggaaaacccatgtgagggacaaacactcagactacagcaggagtgttctggaatcccctgtgagggacaaacattcagactgtcgtaggggtgttctgsaatcctatgtgacgaacaaacatatagaatccagcagcattgttctggaatcctatgtaggagacaaacattcagacaatagtagcagtgttctggaatcctatgtgaggggcaaacattcagaccacagcagcagtgttctggaatcctatgtgagggacaaacattcaaacaacagcgagagtgttctggaatcctaagttatggacaaacactcagaccctcgtggcagtgttctggaattctatgtgatggagaaacactcagaatccagcagcagtgttctggaatcctatatgacggagatacacgtacaccccagcagca

SEQ ID NO: 398949 - DNA, 522 bp, Homo sapiens
aatcctatgtgagggacaaacattcagragcctgcagcagtgttatggaatcttatgtgagggacaatcattcagactctcgtagcagtgttctggaattctgtgtgagggtaaaacattcagaacctcatagcaattttctgaaatcctatgtgagggacaaacattcagaacacagcaggagtgttctcaaatcctctgtgagggaaaatcattccgaccctcatagcagtgttctggaatcctgtgtgagggacaaacattcagaccccaacaacagtgttctgtaatcctatgtgttggacaatcattcagaaccccatagcagtgctctggaattctgtgtgagggacaaatattcaagctgtcattgcagtgttctggaatcccgtgtgagggacaaacattcagacactggtagcagtgttctggaatccaacgtgagggacaaacattcagacaacagcaggattgttctggaatcctatgtgagggacaagcattcagacaatcgtagcagtg

SEQ ID NO: 398950 - DNA, 575 bp, Homo sapiens
aaaaacatacagaccatcatagcagtgtattggaatcctgtgggagggacaaacattcagacaatcgaagcagtgttctggaatcctaagagagagacaaatattcagaacacagaaggattgttctggaatcctatgtgaggagcaaacactcagaacacagcaggagtgttgtggaatcctatgtgagggacaaactttgagaccctcgtagtagtrtcctggaatcctatgtgagggacaaacatgcagacaattgtagcagtgttctggaatcctatgtgatcgacaaaccttcgaacaacagtggaagtgttctggaatcctatgttatggacacacattcagaaccttgtggcagtgttctggaattctatttgagagagaaacattcagagcccagcagcagttttctggaatcctatgtgatgaacatacatgcagaccacagcagcagtgttctggaatcttatgtgagggacaaacattcagacaattgtagcagtgttctggagtcctccgtgaaggacaaacattcggaacccagcagcagtgttctggaatccaatgtgagg

SEQ ID NO: 398951 - DNA, 575 bp, Homo sapiens
aaaaacatacagaccatcatagcagtgtattggaatcctgtgggagggacaaacattcagacaatcgaagcagtgttctggaatcctaagagagagacaaatattcagaacacagaaggattgttctggaatcctatgtgaggagcaaacactcagaacacagcaggagtgttgtggaatcctatgtgagggacaaactttgagaccctcgtagtagtgtcctggaatcctatgtgagggacaaacatgcagacaattgtagcagtgttctggaatcctatgtgatcgacaaaccttcgaacaacagtggaagtgttctggaatcctatgttatggacacacattcagaaccttgtggcagtgttctggaattctatttgagagagaaacattcagagcccagcagcagttttctggaatcctatgtgatgaacatacatgcagaccacagcagcagtgttctggaatcttatgtgagggacaaacattcagacaattgtagcagtgttctggagtcctccgtgaaggacaarcattcggaacccagcagcagtgttctggaatccaatgtgagg

SEQ ID NO: 398952 - DNA, 576 bp, Homo sapiens
ttcagcacctcgtcacagtgttctcgaatcctatgtgagggacaatcattcagatcctcgtagcagtgttctggaattctgtatgagatacaatcattcagaccctcgtagcagtgttctggaatcctaagtgtgggacaaatattcagacaatagtagtagtgtcctggaaatctatgtgagggacacacattcagaccctcttaggagtgttctggaatcttatatgagagacaaacattcagacaatcgtagcagtgttctggaatcctcggtgagggacaaacattcggaacccagcagcagtgttctggaatccaatgttatggacaaacattcagagactcctygcggtgatctggaattctatgtgatggagaaacactgagaaaccagcagtattgttctggaatctgatgtgacggacatacatttagaccagagcagtagagttgtggaatcctatattggggcaaacattcagtccccagcagcattgtcctgcaatcctttgtgagggacaaacattcagaacccagcagcagtgttctggaatcctatgtgaggcaccatcat

SEQ ID NO: 398953 - DNA, 523 bp, Homo sapiens
gaatcctatgtgacggacaaacatttggactgcagcagcaatgttctggaatcctatgtgagggacaaactttcagaaaatcgttgcagtggtctggtatcctaggtgagggacaaacattcagaacccagcagcagtgttctggaatccaatgtgagggacaaacattcaarcaacagagggagtgttttgcaatcctaggtaaaggacaaatatttagacaacaggagcagtgttctggaatcctgtgggaaggacaaacattaggaccctcagtatagtgttctagaatcttatgtgagagaaaaacattgagacaatcatagcagtgttgtagaatcctttgtgacggacaaatatttagaccccagcagcattgttctggaatcctatgtgagggacgaacattaaaatcacagcgggaatgttctggaatcctttgttacgggcaaacattcagatcctcgtcgcagtcttcttgaattacatgtgagggagaaacactcagaacccaccagcagtg

SEQ ID NO: 398954 - DNA, 523 bp, Homo sapiens
gaatcctatgtgacggacaaacatttggactgcagcagcaatgttctggaatcctatgtgagggacaaactttcagaaaatcgttgcagtggtctggtatcctaggtgagggacaaacattcagaacccagcagcagtgttctggaatccaatgtgagggacaaacattcaaacaacagagggagtgttttgcaatcctaggtaaaggacaaatatttagacaacaggagcagtgttctggaatcctgtgggarggacaaacattaggaccctcagtatagtgttctagaatcttatgtgagagaaaaacattgagacaatcatagcagtgttgtagaatcctttgtgacggacaaatatttagaccccagcagcattgttctggaatcctatgtgagggacgaacattaaaatcacagcgggaatgttctggaatcctttgttacgggcaaacattcagatcctcgtcgcagtcttcttgaattacatgtgagggagaaacactcagaacccaccagcagtg

SEQ ID NO: 398955 - DNA, 523 bp, Homo sapiens
gaatcctatgtgacggacaaacatttggactgcagcagcaatgttctggaatcctatgtgagggacaaactttcagaaaatcgttgcagtggtctggtatcctaggtgagggacaaacattcagaacccagcagcagtgttctggaatccaatgtgagggacaaacattcaaacaacagagggagtgttttgcaatcctaggtaaaggacaaatatttagacaacaggagcagtgttctggaatcctgtgggaaggacaaacattaggaccctcagtatagtgttctagaatcttatgtgagagaaaaacattgagacaatcatagcagtgttgtagaatcctttgtgacggacaaatatttagaccccagcagcattgttctggaatcctatgtgagkgacgaacattaaaatcacagcgggaatgttctggaatcctttgttacgggcaaacattcagatcctcgtcgcagtcttcttgaattacatgtgagggagaaacactcagaacccaccagcagtg

SEQ ID NO: 398956 - DNA, 523 bp, Homo sapiens
gaatcctatgtgacggacaaacatttggactgcagcagcaatgttctggaatcctatgtgagggacaaactttcagaaaatcgttgcagtggtctggtatcctaggtgagggacaaacattcagaacccagcagcagtgttctggaatccaatgtgagggacaaacattcaaacaacagagggagtgttttgcaatcctaggtaaaggacaaatatttagacaacaggagcagtgttctggaatcctgtgggaaggacaaacattaggaccctcagtatagtgttctagaatcttatgtgagagaaaaacattgagacaatcatagcagtgttgtagaatcctttgtgacggacaaatatttagaccccagcagcattgttctggaatcctatgtgagggacgaacattaaaatcacagcgggaatgttctggaatcctttgttacgggcaaacattcagatcctygtcgcagtcttcttgaattacatgtgagggagaaacactcagaacccaccagcagtg

SEQ ID NO: 398957 - DNA, 581 bp, Homo sapiens
gttctggaatcctatgtgagagacaaacattcagacaatcgtagcagtgttctggaatccaatgttagtgacaaagtttcagaccccagcagcagtgttctggaatcctatttgagggacaaccattcagacactttcagcagtgttccagaatcctgtgtcagggacaaacattttgaccactgcaggactcttctggaatcccttgtggggaacaaacattcagaccctcgtaggtgtgttctgtaatcctatgtgactgacacacatttagaccacagcagcagtgttctggaatcccatgtgagggacaaacattcagacactcgtagcaatgttctggagtcctgtgtgagggacaaaaattcaggccacamcaagagtgtattggaatcccctgtgaggaacaaacattttgaacctcctagcagtgtctggaatattatctgacggacaaacatttagaccccagcagcagtattatagaatctcatgtgagggacaatatttcagaacgtcatagcagtgttctggaatattatatgagtgaaaaatattcaaacatcctcgggagtgttctg

SEQ ID NO: 398958 - DNA, 585 bp, Homo sapiens
gtcttttgggatcatggccggagagggcaaccagggttggagaggccccatgggttgaattacggcgttyatggcccttaagtcagttaacatacgccatttgccagatttcttctgaattacaaacacaggagaattccaaggcgagaatgaaggctcaatatgtccctttcctaactgttcatttgctaataaatgtaaagcctccagtttttgttttggtagcagccactgattcacccacaccggtttttctcttttccaagttaatgctatgggtttaggaggctctacagtggccgcccctaagaaggataccctaattccttctctttcttgatttattttagcctcaactggaactttaatgccatcttcattttattcctagtccctttcctggtatacatcccatcttggtcatgattttttgactcgtggggctatataatggagtgggcatagtgatttccgcaccccattgttgtaataaatctcgaccccacagattaagaggaattgaagtaatcattggctgaacagtactttcttgattatctggccctaaacaatgtaaaatctcag

SEQ ID NO: 398959 - DNA, 585 bp, Homo sapiens
gtcttttgggatcatggccggagagggcaaccagggttggagaggccccatgggttgaattacggcgtttatggcccttaagtcagttaacatacgccatttgccagatttcttctgaattacaaacacaggagaattccaaggcgagaatgaaggctcaatatgtccctttcctaactgttcatttgctaataaatgtaaagcctccagtttttgttttggtagcagccactgattcacccacaccggtttttctcttttccaagttaatgctatgggtttaggaggctctacagtggccgcccctaagaaggataccctaattccttctctttcttgatttattttagcctcaactggaactttaatgccatcttcattttattcctagtccctttcctggtatacatcccatcttggtcatgattttttgactcgtggggctatataatggagtgggcatagtgattkccgcaccccattgttgtaataaatctcgaccccacagattaagaggaattgaagtaatcattggctgaacagtactttcttgattatctggccctaaacaatgtaaaatctcag

SEQ ID NO: 398960 - DNA, 579 bp, Homo sapiens
catctcaaaaaaaaaaaaaaagattacatttaaaacagcattataaaaattaaaaataagcttaacaaaaagggcaaaagatttgaacacagaaaactacaaaacactgttgaaagaaattaaacacaaataaaygaaaaagaaaagctgggtttgcagattagatgatttcatcttggaatgatgtcaacactactcgaagtgacctagattcaatacaatccttataaagattccaatgacatttttgataaacagaaaaacctatattaaaattcatatggaatctccagggcccatgaataggcaaatcaatcttgaaacagaacaaaattaaaggtctcaatacaattaacaaactgcaataagccaaaaaaaaatgtggtcatggcataaagacatacttgacacagttatggaccaacacaacagagacctcagaagccaaccctggcatatatggtttgatgatcttccagaaggatgccaagaccactcaatggcaaaggacagtttcttcaacaaatggtgttgggaaaattgtatatctacatgcaaaacaatgaagttggactctta

SEQ ID NO: 398961 - DNA, 579 bp, Homo sapiens
catctcaaaaaaaaaaaaaaagattacatttaaaacagcattataaaaattaaaaataagcttaacaaaaagggcaaaagatttgaacacagaaaactacaaaacactgttgaaagaaattaaacacaaataaacgaaaaagaaaagctgggtttgcagattagatgatttcatcttggaatgatgtcaacactactcgaagtgacctagattcaatacaatccttataaagattccaatgacatttttgataaacagaaaaacctatattaaaattcatatggaatctccagggcccatgaataggcaaatcaatcttgaaacagaacaaaattaaaggtctcaawacaattaacaaactgcaataagccaaaaaaaaatgtggtcatggcataaagacatacttgacacagttatggaccaacacaacagagacctcagaagccaaccctggcatatatggtttgatgatcttccagaaggatgccaagaccactcaatggcaaaggacagtttcttcaacaaatggtgttgggaaaattgtatatctacatgcaaaacaatgaagttggactctta

SEQ ID NO: 398962 - DNA, 579 bp, Homo sapiens
catctcaaaaaaaaaaaaaaagattacatttaaaacagcattataaaaattaaaaataagcttaacaaaaagggcaaaagatttgaacacagaaaactacaaaacactgttgaaagaaattaaacacaaataaacgaaaaagaaaagctgggtttgcagattagatgatttcatcttggaatgatgtcaacactactcgaagtgacctagattcaatacaatccttataaagattccaatgacatttttgataaacagaaaaacctatattaaaattcatatggaatctccagggcccatgaataggcaaatcaatcttgaaacagaacaaaattaaaggtctcaatacaattamcaaactgcaataagccaaaaaaaaatgtggtcatggcataaagacatacttgacacagttatggaccaacacaacagagacctcagaagccaaccctggcatatatggtttgatgatcttccagaaggatgccaagaccactcaatggcaaaggacagtttcttcaacaaatggtgttgggaaaattgtatatctacatgcaaaacaatgaagttggactctta

SEQ ID NO: 398963 - DNA, 579 bp, Homo sapiens
catctcaaaaaaaaaaaaaaagattacatttaaaacagcattataaaaattaaaaataagcttaacaaaaagggcaaaagatttgaacacagaaaactacaaaacactgttgaaagaaattaaacacaaataaacgaaaaagaaaagctgggtttgcagattagatgatttcatcttggaatgatgtcaacactactcgaagtgacctagattcaatacaatccttataaagattccaatgacatttttgataaacagaaaaacctatattaaaattcatatggaatctccagggcccatgaataggcaaatcaatcttgaaacagaacaaaattaaaggtctcaatacaattaacaaactgcaataagccaaaaaaaaatgtggtcatggcataaagacatacttgacacasttatggaccaacacaacagagacctcagaagccaaccctggcatatatggtttgatgatcttccagaaggatgccaagaccactcaatggcaaaggacagtttcttcaacaaatggtgttgggaaaattgtatatctacatgcaaaacaatgaagttggactctta

SEQ ID NO: 398964 - DNA, 546 bp, Homo sapiens
tggttatcattccaaaaaatgagctccagccccaagattgttcsatcctcaattgctttgagtgggcaatgtaggctctccacacacgagctacatgtaggttccttgggtacccagatgggagccatgaaacacaaaccctccatggtcaggtctgtatttgtttcctgccttttccccggcaatccccaggccccagcagtggtggtctacctctgctgattctcattcagaatctaaacttagaaacaattagaacctagaccccaattctacctgaaagtaacagaataacataatctataccctgcagcatgactgtttgcccaacgtaatgaggatgaactgagagataatgaatgatcatgaccctggcccaagtaaggagaatgaactgtgagataaatgaatgatcatgacaaaaaaaccccactacaacccaacaacaaaataaagtgattaaaaaaatggacaaacaacatttatccaaagatgcaaagatgatatacaaatagccaacagatacatgagatatatgagaagatg

SEQ ID NO: 398965 - DNA, 546 bp, Homo sapiens
tggttatcattccaaaaaatgagctccagccccaagattgttcgatcctcaattgctttgagtgggcaatgtaggctctccacacacgagctacatgtaggttccttgggtacccagatgggagccatgaaacacaaaccctccatggtcaggtctgtatttgtttccygccttttccccggcaatccccaggccccagcagtggtggtctacctctgctgattctcattcagaatctaaacttagaaacaattagaacctagaccccaattctacctgaaagtaacagaataacataatctataccctgcagcatgactgtttgcccaacgtaatgaggatgaactgagagataatgaatgatcatgaccctggcccaagtaaggagaatgaactgtgagataaatgaatgatcatgacaaaaaaaccccactacaacccaacaacaaaataaagtgattaaaaaaatggacaaacaacatttatccaaagatgcaaagatgatatacaaatagccaacagatacatgagatatatgagaagatg

SEQ ID NO: 398966 - DNA, 501 bp, Homo sapiens
ttctaaatctgttgtcatctcaacaatgtttacactgtcttcaccacgagtaratttcatctcaagaaaccactttctttgctcatccgtggaagcaactcatccactcacgttttctctggaggctgctgcggtctcgccacatcttcaggctctgtctctgtttctagtgctcttgttatttccaccatatctgcagttacttcctacagagaagtcgtgaacccctcagtgtcatctgtgagggttggaataatcttcccaacttctctctctcttttttttttttttgagatgaaatcttgcctgggctggagtgcagtgatgcgatctcagctcactgcaacctccacctcccgggttcaagcaattctcctgcctcagcctcccaagtatttgggattacagtcactcccgaccaggcccagctaattttttgtgtgtttttagtacagagaggatttcactttgttggccagtctggtctcaaattcctgacct

SEQ ID NO: 398967 - DNA, 501 bp, Homo sapiens
ttctaaatctgttgtcatctcaacaatgtttacactgtcttcaccacgagtagatttcatctcaagaaaccactttctttgctcatccgtggaagcaactcatccactcacgttttctctggaggctgctgcggtctcgccacatcttcaggctctgtctctgtttctagtgctcttgttatttccaccatatctgcagttacttcctacagagaagtcgtgaacccctcagtgtcatctgtgagggttggaataatcttcccaacttctctctctcttttttttttttttgagatgaaatcttgcctgggctggagtgcagtgatgcgatctcagctcactgcaacctccacctcccgggttcaagcaattctcctgcctcagcctcccaagtatttgggattacagtcacycccgaccaggcccagctaattttttgtgtgtttttagtacagagaggatttcactttgttggccagtctggtctcaaattcctgacct

SEQ ID NO: 398968 - DNA, 593 bp, Homo sapiens
tgtcttaaaaacaaagaaaaaaagtaaaaagagaggcttaggcttaatggaatttttttttcatcttctatctagaccaattaaactttcttcataacagcagcaagactgtttagctttttatcattcatgtgttcactggagtagtactttaaatttctttccagaacacttcstttgcattcacaacttggctaagtgtttgttgcatgaggtctagctactggcctgtcttgcttacagcatgccttcctcactaagcttaattatttcttccttttggtttaaagtgacagacatgcaactcttctttcacttgaacatatagaggctattgtagggttattaattggccacattttaatattaataaaaagaagcctgagaaaaagagagagaaagagaaatggcccgttggtggggcagtcagaacaaacgcatttgtcaattgtttgcggtcttatccgggtgtgatttgtggttcccaaaacaatgacaacagtagcattaaagatcactgattacagatcaccataacagattcaataataaaaagcttaaaatactgtgagaatgccgaaatgtgacacaga

SEQ ID NO: 398969 - DNA, 561 bp, Homo sapiens
ttcccttgtgtataagcatacataatctatctgtgtgtatttattgttatctacaaacttattggtcagatcaattatgaataaatacatgtttttattttaccacaattcctccctcccatccttccattgcattccttgtattagtgttactcatttcacttgtgtataagcatacataatctatctgtgtgtatttgttattgtctgtgaacttcttggtcagatcaattaagaataaatatataggtttttattgtaccgcaattctttctttaatgatctttttaaaaaattgttgatccaagtttcagttaaatatcttttgtttccctctaaagaatttcatttaacatttcttgcaagacaggtctcctggcaacaagtttcttgaatttttatttttctgaggaaggccttaattctccttcacttttgaagrgtggtttcagtgtgtacagaaacttaggttggtggggttttttctgtcaatattttcaatttttcatttcactgtcttcttgctttcacaatttctgcaatgttgaatgctgttcttat

SEQ ID NO: 398970 - DNA, 258 bp, Homo sapiens
gaccccatgatggaaaccacacggccagtccatgactagctacacgcattgcattgacatcccccactgaccctccagcaacaccgactcccaaccactagtgakcctccagcaacatccactccgaaccactagtgagccaccctgcacaccaccccgctgtgctttcacacaatccagcttggctgcaactgtgtgtgagatgagctggccaccaagactctctaagccaaaaaacaagtaataatgagttgtttt

SEQ ID NO: 398971 - DNA, 258 bp, Homo sapiens
gaccccatgatggaaaccacacggccagtccatgactagctacacgcattgcattgacatcccccactgaccctccagcaacaccgactcccaaccactagtgatcctccagcaacatccactccsaaccactagtgagccaccctgcacaccaccccgctgtgctttcacacaatccagcttggctgcaactgtgtgtgagatgagctggccaccaagactctctaagccaaaaaacaagtaataatgagttgtttt

SEQ ID NO: 398972 - DNA, 535 bp, Homo sapiens
gagagttacgtgctgagggactgtgggaaaactacgaccacaacatggaaactgaaagggcactgcaccatctccgggatctgcctaaggagacatctgggaagaacatggaaagtgctaccagcctcccctaactgtcaatgaataaatatgacaggagagggacatgatctaaagaaggaagttcagttttcaaacaaaatttacagaaaatataaagaaataatttcttgtctcaaaaggccaaagaaaaaaaaagaaaagaaaaaaattaaaaagaagccattgaataccctattgacyataagaaaaacgcagagaaagttggtcaacggcaacccaggcactgaaggaaaaagaacatggagaatgacaaaagcccagagggaggagtaaaaggacacaaacgctgttctcagggacaaggactgggcgccgttctcagggacccggactgggcactaatcacagaactgtaacaggcgacccatgggaatgaccaactgttagacggggcctgcagggcagcatctcc

SEQ ID NO: 398973 - DNA, 535 bp, Homo sapiens
gagagttacgtgctgagggactgtgggaaaactacgaccacaacatggaaactgaaagggcactgcaccatctccgggatctgcctaaggagacatctgggaagaacatggaaagtgctaccagcctcccctaactgtcaatgaataaatatgacaggagagggacatgatctaaagaaggaagttcagttttcaaacaaaatttacagaaaatataaagaaataatttcttgtctcaaaaggccaaagaaaaaaaaagaaaagaaaaaaattaaaaagaagccattgaataccctattgactataagaaaaasgcagagaaagttggtcaacggcaacccaggcactgaaggaaaaagaacatggagaatgacaaaagcccagagggaggagtaaaaggacacaaacgctgttctcagggacaaggactgggcgccgttctcagggacccggactgggcactaatcacagaactgtaacaggcgacccatgggaatgaccaactgttagacggggcctgcagggcagcatctcc

SEQ ID NO: 398974 - DNA, 535 bp, Homo sapiens
gagagttacgtgctgagggactgtgggaaaactacgaccacaacatggaaactgaaagggcactgcaccatctccgggatctgcctaaggagacatctgggaagaacatggaaagtgctaccagcctcccctaactgtcaatgaataaatatgacaggagagggacatgatctaaagaaggaagttcagttttcaaacaaaatttacagaaaatataaagaaataatttcttgtctcaaaaggccaaagaaaaaaaaagaaaagaaaaaaattaaaaagaagccattgaataccctattgactataagaaaaacgcagagaaagttggtcaacggcaacccaggcactgaaggaaaaagaacatggagaatgacaaaagcccagagggaggagtaaaaggacacaaacgcygttctcagggacaaggactgggcgccgttctcagggacccggactgggcactaatcacagaactgtaacaggcgacccatgggaatgaccaactgttagacggggcctgcagggcagcatctcc

SEQ ID NO: 398975 - DNA, 617 bp, Homo sapiens
aaaaggccaaagaaaaaaaaagaaaagaaaaaaattaaaaagaagccattgaataccctattgactataagaaaaacgcagagaaagttggtcaacggcaacccaggcactgaaggaaaaagaacatggagaatgacaaaagcccagagggaggagtaaaaggacacaaacgctgttctcagggacaaggactgggcgccgttctcagggacccggactgggcactaatcacagaactgtaacaggcgmcccatgggaatgaccaactgttagacggggcctgcagggcagcatctccctcctgcctcccaccaacagcttctaaagggaaatgccgactgttttcacacctgtcccctcactgcggctgagtgtgtgggctcagatggtaggtcacaacaacctgattcagtcctcactgtggctgagtgcgtcaggggcagatgacaggccaccacaacttgattcagtcctcactgcggctgagtgtgtgggctcagatgataggtcacaacaacctgattcagtcctcactgtggctgagtgcatcaggggcagatgacaggccaccacaacctgattcaggattcagttgggctaccagccagtgccataag

SEQ ID NO: 398976 - DNA, 617 bp, Homo sapiens
aaaaggccaaagaaaaaaaaagaaaagaaaaaaattaaaaagaagccattgaataccctattgactataagaaaaacgcagagaaagttggtcaacggcaacccaggcactgaaggaaaaagaacatggagaatgacaaaagcccagagggaggagtaaaaggacacaaacgctgttctcagggacaaggactgggcgccgttctcagggacccggactgggcactaatcacagaactgtaacaggcgacccatgggaatgaccaactgttagacggggcctgcagggcagcatctccctcctgcctcccaccaacagcttctaaagggaaatgccgactgttttcacacctgtcccctcactgcggctgastgtgtgggctcagatggtaggtcacaacaacctgattcagtcctcactgtggctgagtgcgtcaggggcagatgacaggccaccacaacttgattcagtcctcactgcggctgagtgtgtgggctcagatgataggtcacaacaacctgattcagtcctcactgtggctgagtgcatcaggggcagatgacaggccaccacaacctgattcaggattcagttgggctaccagccagtgccataag

SEQ ID NO: 398977 - DNA, 617 bp, Homo sapiens
aaaaggccaaagaaaaaaaaagaaaagaaaaaaattaaaaagaagccattgaataccctattgactataagaaaaacgcagagaaagttggtcaacggcaacccaggcactgaaggaaaaagaacatggagaatgacaaaagcccagagggaggagtaaaaggacacaaacgctgttctcagggacaaggactgggcgccgttctcagggacccggactgggcactaatcacagaactgtaacaggcgacccatgggaatgaccaactgttagacggggcctgcagggcagcatctccctcctgcctcccaccaacagcttctaaagggaaatgccgactgttttcacacctgtcccctcactgcggctgagtgtgtgggctcagatggtaggtcacaacaacctgattcagtcctcactgtggctgagtgcgtcaggggcagatgacaggccaccacaacttgattcagtcctcactgcggctgagtgtgtgggctcagatgataggtcacaacaacctgattcagtcctcactgtggctgagtgcatcaggggcagatgayaggccaccacaacctgattcaggattcagttgggctaccagccagtgccataag

SEQ ID NO: 398978 - DNA, 569 bp, Homo sapiens
ttgagaggggcaaagcataatttgcatgtgggagaaacgttaatagtttgtggacagaggacaacctgtggtttattaaagactgctgcaggttcctactatgcttctcatcaagaggtggaatctaatcaccttccgcccttgaatcatggcttgtctcagtgatgagtatgactggacagtgtggcaggagagatgctctgggatttctgagggatgatcatgagagaacttacagcttctgcctgggcctcttggacacacgccctrggagaagccagacaaacctgactacctgactgccagactgggaggaagtccgtgctggccacaaagagagggctgggtgcctgctccatgtccccagccactagagtccttctgggtccctgcttcaagtccccagccactagagtatttccagatgagaccagggacatcacgaagcaaccaacccacaccgccctgtccagtgtcttgacccagaaaattgacatgtaaaaagaataaattcctggtttaagccagtaaggttacgggtacattgttacatctcagataactaaaac

SEQ ID NO: 398979 - DNA, 569 bp, Homo sapiens
ttgagaggggcaaagcataatttgcatgtgggagaaacgttaatagtttgtggacagaggacaacctgtggtttattaaagactgctgcaggttcctactatgcttctcatcaagaggtggaatctaatcaccttccgcccttgaatcatggcttgtctcagtgatgagtatgactggacagtgtggcaggagagatgctctgggatttctgagggatgatcatgagagaacttacagcttctgcctgggcctcttggacacacgccctgggagaagccagacaaacctgactacctgactgccagactgggaggaagtccgtgctggccacaaagagagggctgggtgcctgctccatgtccccagccactagagtccttctgggtccctgcttcaagtccccagccactagagtmtttccagatgagaccagggacatcacgaagcaaccaacccacaccgccctgtccagtgtcttgacccagaaaattgacatgtaaaaagaataaattcctggtttaagccagtaaggttacgggtacattgttacatctcagataactaaaac

SEQ ID NO: 398980 - DNA, 605 bp, Homo sapiens
  misc_feature (1)...(605): n = A,T,C or G
actgctgttagtatagcttcagtaatgtggtgatgaggtgacagggcagctgatgctctcttagtctctttaggctactataacaaaatactttagactgagtaattcataaacaacagagattattgctcacagatctggaggctggaaagtccaagactaaagggccaggatatttggtgtttggtgaaggtcaaacattcagacacttgcaacgactatagtgacagcagcagtcttcagaaatcctatgtgagggacaaacactcagaagccagctggagtgttctagaatcctaygtgagggaaaaacattcagaccccagcagtagtgttgtggaatcctatgtgagggaagaacattcaaaccctcgtagcagtgttctggaatcctatgtgagggaaaaaaattcagaacctcgtagcagtgttctggaatcctatgtgaggaacaatcagaccacatcaggaatgttctggaatcctatgtgagggacaaacattcagagtacagcaggagtgttctggaatcctatgtgtgggacaaacattcagaccacagcaggagtgctctgcaatcctatgtgagggacaaacatttcnnn

SEQ ID NO: 398981 - DNA, 605 bp, Homo sapiens
  misc_feature (1)...(605): n = A,T,C or G
actgctgttagtatagcttcagtaatgtggtgatgaggtgacagggcagctgatgctctcttagtctctttaggctactataacaaaatactttagactgagtaattcataaacaacagagattattgctcacagatctggaggctggaaagtccaagactaaagggccaggatatttggtgtttggtgaaggtcaaacattcagacacttgcaacgactatagtgacagcagcagtcttcagaaatcctatgtgagggacaaacactcagaagccagctggagtgttctagaatcctacgtgagggaaaaacattcagaccccagcagtagtgttgtggaatcctatgtgagggaagaacattcaaaccctcgtagcagtgttctggaatcctatgtgagggaaaaaaattcagaacctcgtagcagtgttctggaatcctatgtgaggaacaatcagaccacatcaggaatgttctggaatcctatgtgagggacaaacattcagartacagcaggagtgttctggaatcctatgtgtgggacaaacattcagaccacagcaggagtgctctgcaatcctatgtgagggacaaacatttcnnn

SEQ ID NO: 398982 - DNA, 598 bp, Homo sapiens
tgaatgtttgtacctcacgtaggattccagagacattgctgttgggttctgactgtgtgtccctcacgtaagattcaagaacacagctaygtgggtctaaatgattctccctcgtataggattccaaaacactgctatgagggtctgaatgtttgtcccacacataaaattccagaacactcctgctgtggtataaatgtttgtacctcacataggatttcagaacattcctactgtcgtctgaatgtctgtccttcacagaggattgcagaacacccctgctgtgcactgactgtttgtccctcactcagaattccagaacactgcagttgggtcctgattatttgtccctcacgtacaattccagaacattgccacttgggtctaaaagtgtgttactcacataggaatccagaacactgctaccagggtctgaatgtttgtccctaacataggattccatatcactcctcctgtggtctaactgtttgctccttacataggatttcagaaccattctgctgtcgtctgaatgtttgtccggcatataggattccagaattctcctgcagtggtctaaatgtttgttccttacata

SEQ ID NO: 398983 - DNA, 505 bp, Homo sapiens
cttgggtctaaaagtgtgttactcacataggaatccagaacactgctaccagggtctgaatgtttgtccctaacataggattccatatcactcctcctgtggtctaactgtttgctccttacataggatttcagaaccattctgctgtcgtctgaatgtttgtccggcatataggattccagaattctcctgcagtggtctaaatgtttgttccttacataggatttcagaacactcctgctgtggtgtaaatrcttgttcctcacttaggatttcagaacactcctgctgtcatctgaatatttgtccctcacataggattccagaacgctcctgatgtggtgtgaatgtttgtccctcacataggattccagatcattcctgctgtgctcatatcacactgctgcgtgggtataaatctttgtccctcagataggattctagaacactgctatggggtatgaatgtgtgtcctgcacataggattccagaacactcctgtttt

SEQ ID NO: 398984 - DNA, 505 bp, Homo sapiens
cttgggtctaaaagtgtgttactcacataggaatccagaacactgctaccagggtctgaatgtttgtccctaacataggattccatatcactcctcctgtggtctaactgtttgctccttacataggatttcagaaccattctgctgtcgtctgaatgtttgtccggcatataggattccagaattctcctgcagtggtctaaatgtttgttccttacataggatttcagaacactcctgctgtggtgtaaatgcttgttcctcacttaggatttcagaacactcctgctgtcatctgaatatttgtccctcacataggattccagaacgctcctgatgtggtgtgaatgtttgtccctcacataggattccagatcattcctgctgtgctcatatcacactgctgcgtgggtataaatctttgtccctcagataggattctagaacactgctatggggtatgaatgtgtgtcctgcacatagkattccagaacactcctgtttt

SEQ ID NO: 398985 - DNA, 539 bp, Homo sapiens
cagatcattcctgctgtgctcatatcacactgctgcgtgggtataaatctttgtccctcagataggattctagaacactgctatggggtatgaatgtgtgtcctgcacataggattccagaacactcctgttttggtctgaatatttgtccctcacttaggattccagaacactgctgttgggtggtgaatgtttgtacctcacgaaggsttccagaacacagctacattgttctaatgtttgtccctcacataggattccagaacactgctacgaaggtctgaatgttgctccctcacatgggattccagaacactcctgctgtggtctgtttgttcctcacataagatttcagaatactcctgctgtcttctgaatgtttgtccctcacataggattccagaacactgctaggagggtccgaatatttgatcctgaaataagattccagaaaactgctgctcgagtctgagtgtttgtccctcacatggcattcaagaacactgctgctggggtctgaatgtccctcacatagaatt

SEQ ID NO: 398986 - DNA, 539 bp, Homo sapiens
cagatcattcctgctgtgctcatatcacactgctgcgtgggtataaatctttgtccctcagataggattctagaacactgctatggggtatgaatgtgtgtcctgcacataggattccagaacactcctgttttggtctgaatatttgtccctcacttaggattccagaacactgctgttgggtggtgaatgtttgtacctcacgaagggttccagaacacagctacattgttctaatgtttgtccctcacataggattccagaacactgctacgaaggtctgaatgttgctccctcacatgggattccagaacactmctgctgtggtctgtttgttcctcacataagatttcagaatactcctgctgtcttctgaatgtttgtccctcacataggattccagaacactgctaggagggtccgaatatttgatcctgaaataagattccagaaaactgctgctcgagtctgagtgtttgtccctcacatggcattcaagaacactgctgctggggtctgaatgtccctcacatagaatt

SEQ ID NO: 398987 - DNA, 539 bp, Homo sapiens
cagatcattcctgctgtgctcatatcacactgctgcgtgggtataaatctttgtccctcagataggattctagaacactgctatggggtatgaatgtgtgtcctgcacataggattccagaacactcctgttttggtctgaatatttgtccctcacttaggattccagaacactgctgttgggtggtgaatgtttgtacctcacgaagggttccagaacacagctacattgttctaatgtttgtccctcacataggattccagaacactgctacgaaggtctgaatgttgctccctcacatgggattccagaacactcctgctgtggtctgtttgttcctcacataagatttcagaatactcctgctgtcttctgaatgtttgtccctcacataggattccagaacactgctaggagggtcygaatatttgatcctgaaataagattccagaaaactgctgctcgagtctgagtgtttgtccctcacatggcattcaagaacactgctgctggggtctgaatgtccctcacatagaatt

SEQ ID NO: 398988 - DNA, 492 bp, Homo sapiens
ctcttgctttcgtttcaaagtttgtccctcacataggatttcacaacactcctgcagtgttctgaaaatttgtccctcacataggattccagaacactcctgctgtgttctgaatatttgtccctcacatacgtctccataacactcatgctgtggttataatgtttgtccctcagatagcattcaagaacactgctgctggagtctgaakgtttgtctctaacatacaattccacagcactactgctctggtctgaaggtttgttcttcacatatgatttcagaacagtggtgatggattctgagcatttgtcattcacataggattccagaacactgcaaagagggtctgaatatttgtccctcacttaggattccagaatactgctgctgggttctgagtgtttgtcccacacataggattccagaacactgctacaaggctctgaatgtttgtccattaaatgatattccagagcactgctgctgggg

SEQ ID NO: 398989 - DNA, 560 bp, Homo sapiens
ctcctgctgtggtctgaatatttgtccctcacataggattccataacactgctgctgtggtctgactgtttgtccctcacataggattccagaacaattctgctaygatctgaatgtttgtccctcacatagcattccagaagactgctgctgcggactgaatgtttttccctcacataggattccagaacactgctcctagattctgagttttttttccctcaaataggattccagaacactgctatgagggtatgaaagattttccctcaaataggattccagaacactcctgctgtgttctgaatttttgtccctcacatacgtctccatagcactcctgctgtggttagaatgtttgtccctcagatagcattcaagaacactgctgctggagtctgaatgtttgtctctaacataaaattccacagcactactgctctggtctgaaggtttgtccttcacatatgatttcagaacagtggtgctggattctgagcgtttgtcattcacataggattccagaacactgctaagagggtctgaatatttgtccctca

SEQ ID NO: 398990 - DNA, 560 bp, Homo sapiens
ctcctgctgtggtctgaatatttgtccctcacataggattccataacactgctgctgtggtctgactgtttgtccctcacataggattccagaacaattctgctatgatctgaatgtttgtccctcacatagcattccagaagactgctgctgcggactgaatgtttttccctcacataggattccagaacactgctcctagattctgagttttttttccctcaaataggattccagaacactgctatgagggtatgaaagattttccctcaaataggattccagaacactcctgctgtgttctgaatttttgtccctcacatacgtctccatarcactcctgctgtggttagaatgtttgtccctcagatagcattcaagaacactgctgctggagtctgaatgtttgtctctaacataaaattccacagcactactgctctggtctgaaggtttgtccttcacatatgatttcagaacagtggtgctggattctgagcgtttgtcattcacataggattccagaacactgctaagagggtctgaatatttgtccctca

SEQ ID NO: 398991 - DNA, 560 bp, Homo sapiens
ctcctgctgtggtctgaatatttgtccctcacataggattccataacactgctgctgtggtctgactgtttgtccctcacataggattccagaacaattctgctatgatctgaatgtttgtccctcacatagcattccagaagactgctgctgcggactgaatgtttttccctcacataggattccagaacactgctcctagattctgagttttttttccctcaaataggattccagaacactgctatgagggtatgaaagattttccctcaaataggattccagaacactcctgctgtgttctgaatttttgtccctcacatacgtctccatagcactcmtgctgtggttagaatgtttgtccctcagatagcattcaagaacactgctgctggagtctgaatgtttgtctctaacataaaattccacagcactactgctctggtctgaaggtttgtccttcacatatgatttcagaacagtggtgctggattctgagcgtttgtcattcacataggattccagaacactgctaagagggtctgaatatttgtccctca

SEQ ID NO: 398992 - DNA, 555 bp, Homo sapiens
atttgtccctcacttaggattccagaatactgctgctgggttctgagtgtttgtccctcaaataggattccagaacactgctgatggggtccaaatgtctgtccctcacataggatttcagaacamtcctgctgtgagctgaatgtttgtccatcacataggattccagaacactgctgctgaggtctcaatgtttgtccctcagagagcattccagaacaatcttgccgtggtctgaatgtttgtccctcatgtagggttctgttacactcctgctgtggtctaaatgtttatccctcacataggactccagaactctcctgctatggtctgaatgttggcccctcacatagcagtccagaacactgctgctgtggactgaatgtttgtccctcacataggattccagagcactgctcctggattctgagttttttttccctcacataggattctagaacacccctacgaggatacggatgcttttccctcacatagggttccagaacactgctgctggggtctgaatgcttgttcttcacataggattccaga

SEQ ID NO: 398993 - DNA, 555 bp, Homo sapiens
atttgtccctcacttaggattccagaatactgctgctgggttctgagtgtttgtccctcaaataggattccagaacactgctgatggggtccaaatgtctgtccctcacataggatttcagaacactcctgctgtgagctgaatgtttgtccatcacataggattccagaacactgctgctgaggtctcaatgtttgkccctcagagagcattccagaacaatcttgccgtggtctgaatgtttgtccctcatgtagggttctgttacactcctgctgtggtctaaatgtttatccctcacataggactccagaactctcctgctatggtctgaatgttggcccctcacatagcagtccagaacactgctgctgtggactgaatgtttgtccctcacataggattccagagcactgctcctggattctgagttttttttccctcacataggattctagaacacccctacgaggatacggatgcttttccctcacatagggttccagaacactgctgctggggtctgaatgcttgttcttcacataggattccaga

SEQ ID NO: 398994 - DNA, 493 bp, Homo sapiens
tgcttttctgtctcataacactccagaacactgcttctagggtctgaatgttggtccctgacataggattccagaacactgctacgagggtctaaatgtttgttcctcacataggattccagaacactcctgctgttgtttgtatgtttgtctgtcacataggattccagaacactgtggctggggtatgtatgtccctgatatrggatggaagaacgctgataccaggttctgaatgtttgtctgtcacacaggattccagaacaccactatgagggtctgaatgtctctccctcacaaaggattccagaaaactgctgcaagggtctgaatgtttgtccctcccataggactccagaacacagctgcgagggtctaaatgtctgtccctcacatacgattgcataacactgttaggagggtcaggatgtttgtccttcatgtagcattccagaacactgctgtcgtggtctgaaagtttctccctcacata

SEQ ID NO: 398995 - DNA, 586 bp, Homo sapiens
aaggattccagaaaactgctgcaagggtctgaatgtttgtccctcccataggactccagaacacagctgcgagggtctaaatgtctgtccctcacatasgattgcataacactgttaggagggtcaggatgtttgtccttcatgtagcattccagaacactgctgtcgtggtctgaaagtttctccctcacatagcattccagaacactgctatgagggtctgaatgtttgtcccacacctaggattccagaacacctctgcttccatgccatggtctgaaagtttctccctcgcataggattccagaacactgctatgagggtctgaatgtttgtcccacatctaggattccagaacacctctgctggattctcaaagtttatccctcacatatgattccaggacactgctacgagggtatgaatgcttgtccttcacataggattccacaacactgctacgagggtctgagtgtttctccctcacatagtattccagcacacttctgctggtgtctgaatgtttgtacctcacatcacattccagaacactgctgctggggtttgaatgtctgtccctcacata

SEQ ID NO: 398996 - DNA, 586 bp, Homo sapiens
aaggattccagaaaactgctgcaagggtctgaatgtttgtccctcccataggactccagaacacagctgcgagggtctaaatgtctgtccctcacatacgattgcataacactgttaggagggtcaggatgtttgtccttcatgtagcattccagaacactgctgycgtggtctgaaagtttctccctcacatagcattccagaacactgctatgagggtctgaatgtttgtcccacacctaggattccagaacacctctgcttccatgccatggtctgaaagtttctccctcgcataggattccagaacactgctatgagggtctgaatgtttgtcccacatctaggattccagaacacctctgctggattctcaaagtttatccctcacatatgattccaggacactgctacgagggtatgaatgcttgtccttcacataggattccacaacactgctacgagggtctgagtgtttctccctcacatagtattccagcacacttctgctggtgtctgaatgtttgtacctcacatcacattccagaacactgctgctggggtttgaatgtctgtccctcacata

SEQ ID NO: 398997 - DNA, 586 bp, Homo sapiens
aaggattccagaaaactgctgcaagggtctgaatgtttgtccctcccataggactccagaacacagctgcgagggtctaaatgtctgtccctcacatacgattgcataacactgttaggagggtcaggatgtttgtccttcatgtagcattccagaacactgctgtcgtggtctgaaagtttctccctcacatagcattccagaacactgctatgagggtctgaatgtttgtcccacacctaggattccagaacacctctgcttccatgccrtggtctgaaagtttctccctcgcataggattccagaacactgctatgagggtctgaatgtttgtcccacatctaggattccagaacacctctgctggattctcaaagtttatccctcacatatgattccaggacactgctacgagggtatgaatgcttgtccttcacataggattccacaacactgctacgagggtctgagtgtttctccctcacatagtattccagcacacttctgctggtgtctgaatgtttgtacctcacatcacattccagaacactgctgctggggtttgaatgtctgtccctcacata

SEQ ID NO: 398998 - DNA, 540 bp, Homo sapiens
tcttgctgtgttctgaatgtttgttcatcacataggatttcagaacactcctacgagggtctgcatgtttgtccctcaaattgaattccagaacactcatgcagtsgtctgaatatttctccttcacacaggattccagaacactcctgctatggtctgagtgtttgttcctcacataagattccagaaaacagctacaagggtctcaatgtttgtccttcaggacaaaacactgctgtcctggtctgaatatttgttcctcacataggattccagaacaatcttgctatggtctgaatgtttgtccctcacataggattacagtacactgctacgagggtctgaatgcttgtccttcacataggattccagaacactgttgctgggttctgagtgtttgtgtctcacgtaggattccagaagaagctacaagggtctgaatgtttgtccatcacatacgactccaaaacactgctgctggcgtctgaatgtttgtccctcacataggattccagaacactgcaaagagggtctaaatgt

SEQ ID NO: 398999 - DNA, 540 bp, Homo sapiens
tcttgctgtgttctgaatgtttgttcatcacataggatttcagaacactcctacgagggtctgcatgtttgtccctcaaattgaattccagaacactcatgcagtggtctgaatatttctccttcacacaggattccagaacactcctgctatggtctgagtgtttgttcctcacataagattccagaaaacagctacaagggtctcaatgtttgtccttcaggacaaaacactgctgtcctggtctgaatatttgttcctcacataggattccagaacaatcttgctatggtctgaatgtttgtccctcacataggattacagtacaytgctacgagggtctgaatgcttgtccttcacataggattccagaacactgttgctgggttctgagtgtttgtgtctcacgtaggattccagaagaagctacaagggtctgaatgtttgtccatcacatacgactccaaaacactgctgctggcgtctgaatgtttgtccctcacataggattccagaacactgcaaagagggtctaaatgt

SEQ ID NO: 399000 - DNA, 540 bp, Homo sapiens
tcttgctgtgttctgaatgtttgttcatcacataggatttcagaacactcctacgagggtctgcatgtttgtccctcaaattgaattccagaacactcatgcagtggtctgaatatttctccttcacacaggattccagaacactcctgctatggtctgagtgtttgttcctcacataagattccagaaaacagctacaagggtctcaatgtttgtccttcaggacaaaacactgctgtcctggtctgaatatttgttcctcacataggattccagaacaatcttgctatggtctgaatgtttgtccctcacataggattacagtacactgctacgagggtctgaatgcttgtccttcacataggattccagaacactgttgctgggttctgagtgtttgtgtctcacgtaggattccagaagaagctacaagggtctgaatgtttgtccatcacatacgactccaaaacactgctgctggcktctgaatgtttgtccctcacataggattccagaacactgcaaagagggtctaaatgt

SEQ ID NO: 399001 - DNA, 512 bp, Homo sapiens
ttgtccctcacacaggattccagaacactgctatgagggtctgaatgtttgtccctcacataggattccagaagacttatgctggcatctgaatttttgtccctcacataggattccagaacactcctgctgtggtctgaatgtttatccctcatgtaggattccagaacactgctatgaaattctgaatgtttgtccctcacttagggttccagaaaattactaygagggtctgaatgtttgtcgctcacattggattccagaacactcttgctgttgtctgaaagtttgtccctcacttaggattccagaacattgctacgagggtctgaatgtttgtccttcacataggattccagaactctgctgctgtgatctgaatgtttgtccctaacaaaggattccagaacactcttgctgtggtctgattgtttgttcctcacataggattccagaacaccactacgaggctctgagtgtttgtgcctcacataggattccagaacactgct

SEQ ID NO: 399002 - DNA, 512 bp, Homo sapiens
ttgtccctcacacaggattccagaacactgctatgagggtctgaatgtttgtccctcacataggattccagaagacttatgctggcatctgaatttttgtccctcacataggattccagaacactcctgctgtggtctgaatgtttatccctcatgtaggattccagaacactgctatgaaattctgaatgtttgtccctcacttagggttccagaaaattactatgagggtctgaatgtttgtcsctcacattggattccagaacactcttgctgttgtctgaaagtttgtccctcacttaggattccagaacattgctacgagggtctgaatgtttgtccttcacataggattccagaactctgctgctgtgatctgaatgtttgtccctaacaaaggattccagaacactcttgctgtggtctgattgtttgttcctcacataggattccagaacaccactacgaggctctgagtgtttgtgcctcacataggattccagaacactgct

SEQ ID NO: 399003 - DNA, 532 bp, Homo sapiens
tgatgctagggtctgtatgtttgcccttaacatatgatttcaaaacactgctcctgggttctgaatgtttgtccttcacataggaatacagagcactgctgctggagtctgaatgtttgtcactcacatagtattccagaacactgctgcgaggatctgaatgtttgtccctcacatgggattccagaacactgctgcgagggtctaaatgtctgtccctcacataggtttccagcacaatggtaccaggttctgaatgtttgtccctaacatgggattccagagcactcctgctgtgctctgaatgcttctccctcacataggattccagaacactgctacgagggtctaaatgcttatccctcatataggataccagaacactcctgctgargtctgaatgtttgttccttacataggattccagaacactcctgccgtggtctgaatgtttgtccctcacataggattccagaacattcgtgctggggtctcaatgtttcccttaacttaggatttcagagcactgctc

SEQ ID NO: 399004 - DNA, 595 bp, Homo sapiens
atgctacatactttaatacatgctggaagaagacaatctgggtagctacctctgcaggctcatgaggagttgaacctcatggtaagtctgttagctgctgtgtctcccttctccagaaggtccaaatttattctccttgtgcagagactatacttttaattttttctccaaacaggaattgggaatttcctctttatttccatatctatttattaatcagagtgacttctctttatgttctctttgtccccctgagtcccttttctttctgaatcatttctttctttttttttttaatgtattttatttacttattttttttgagacagggtctcactccattgcccaggctggagtgcaagtggtacgattatattaatagttccctgtagctccaaaatcctgggctgaaacaattctcccctctcagcttcgcaaagtgtagggattacaggcatgagccattgcgcctggccytgaatcattttttttaatgacatctaggaaccctttgtcaatgctttaaaattctcctcaagcccattcattctctcctttggcaggagatcagttcacatttatagcaccaataatt

SEQ ID NO: 399005 - DNA, 563 bp, Homo sapiens
tggtgctttcagcgtctctaataccactttgagaggtttcagcattgagtaatttctgggggaaaagggatcctcctgtaatatgaatttgggagattttaactaagaggggggaaaaaaagaaatgaaacaattttagactgccttttttttagggcctgtgcaaaattattacccttctgtgaagtacttaaaacctactcaaggtgcaagctttacacaccaatgccgggcttgattaatggtatcagaggtacaggatgtactccgtgccaaatccatttacccagtcatcattttttctttcttatttaaatcattaaaattacagatttgctactgtctgtyctctaccaaaacaaaaataaataaataaaataaaataaaagggtgatttcaagattctctcatatactccagggcatttgtagtagggtttttaaaaaagagataatttaatttttgacagtacagtgtcaggaagcagagaaactgggtttaagtattccaaattattggcaattaaagatctgacatacatggtgtttccaaaagcattttgt

SEQ ID NO: 399006 - DNA, 535 bp, Homo sapiens
aataaataaaataaaataaaagggtgatttcaagattctctcatatactccagggcatttgtagtagggtttttaaaaaagagataatttaatttttgacagtacagtgtcaggaagcagagaaactgggtttaagtattccaaattattggcaattaaagatctgacatacatggtgtttccaaaagcattttgtaggtcactgttaaaacactatatatagttcctggaataaattgatcagaggtatrcttatcttcacacacaactctttatttaaaagaggactaaacagatatagcatctgtaatgtcacaaatatctccctggttacttacagagatatttgtgacatctccaacttctaaaagagtaaaatgtctatgaaaagtaatggattaaaaaaactaattccattgcatgtggtacaatgcatctctaccaaaggtcttttaaaacttaggctgtttcatatagcggaatcatttttttctagacatacccccccacccccaaatgaaactcatttcaggac

SEQ ID NO: 399007 - DNA, 524 bp, Homo sapiens
tgtgtgtagcatatcaaatttttcataagtgggcaggatacaaggacacccttcacagccagcatcctccgcagcactttggcccaaggaatcagatattttcaaagtcaaaggaaagagaggagcaaaatagcacacagttcataacttcctagaaaaacactcgcgccagcctgcctgcgtgccccgtccaaacaccacaagaaatgttcagaataacgcctctctcaaatgccaccaaaccgtatacaaaatctgagaaacctcagcagtgagttgaggggcatgaaagagagagtgctctgtcgcttaggaaaatctgtcagattaaatcatggcctaagacattttgtgaatgtgttaggaggaaggggacaaccagtagaagacgggagggggagatatttttcagtctcatgatgaaatacttcacccggaagagcaaaaaaaattctaaaaaaytaaaagaaataaactgccataaacgaacggaaaagaggcattccagggttagaaaaattgta

SEQ ID NO: 399008 - DNA, 501 bp, Homo sapiens
gacctagcatctgcctctcttgttcagcgactaccgggaaacatcatttcaacccagagtggtaaaggacagagctggccaaagtcaaaggaggcagattttagctccaaatagggttaggaaggactctgggatgtttggagtggtccagcaaaggaagattgtatctggccctgagtcttccatcacaggaggcatttatgcagaaagatttagggatagggtagagggactaatgcattttccaggatagaagaactctgaggattgttccatctctcagagtctctgattctgggaatwtggaggtttgtgctggacaaggggtacagctcttggcacagccatcttggctgcagcattaaaagtcagagtacagcctgcgatgacctgagccagctcctgggcccagggtgggctcctcatttttaaatatttactgatatcttctctccactcttcttccttcttctctttatgatttacctccccggctcctct

SEQ ID NO: 399009 - DNA, 631 bp, Homo sapiens
agcctgcgatgacctgagccagctcctgggcccagggtgggctcctcatttttaaatatttactgatatcttctctccactcttcttccttcttctctttatgatttacctccccggctcctcttcttttgttatctttgcctttataagagttaaaggtagtatttagaagttctttgtctattacrttgaggcttccctcctaggaacattacttacatgggaggttttgtcgaacaagcatgtgttctaattatcattccctctcctccaggagagaaacaggattggaaaagaaaacaaaaagagagaccagtcctctggcacattcatctaatgtcaatctagcctttgtcctctggcagtagcaaaactcaatcacagcacgataactagacccttgttctttaaactcaatttgcagtgtgtctagaggggaacagtgtagaagaatagaaaagaaagtaccttgccccaagcctgagaactgttaccctttagagaactgcttttagaattttcccctaaaatgccaaaagcaagttaccgtataaggcaggcaaccctgtcttgagctgatcaccaaaatgatcgtgggaaatatggaagcatcatgatcctggtttctcat

SEQ ID NO: 399010 - DNA, 604 bp, Homo sapiens
ctctgctgcttttaataaacagattatcatgaaacaactataacccaactgtttaattgagattaactacttacagactgaagaattcagaaaaagcagagttcagaggctttgctgcagtaatgacttagcaaccttccctggccacccaacttaaactgtacctcccccatcactccttatctcctttatttttttttctccttagacttattaccatctcacttaccataaattttatttatcttatttatcttcccccacaagaatgtaagtgttaaaaggcaagactatttgtggtttgctcactgctgtactcccagcacctaagaacaatgttaccacatagaaggtgaccatttgttatataaatgaatggaaagattcacgaacaagatggtaccttgagaaataaatagagtttaggagactgaagagggtgaacaataaaatgttataggcaattaaaaccccatgagaataggcattggggcataactgacatgggagcctcagggcaaaaggacaatytaacagccatgccacatctgcaggaaggagaagaaaggctcactgaatgcaaagcttctgaaaatggacttga

SEQ ID NO: 399011 - DNA, 584 bp, Homo sapiens
ggataaataaaatgtggtacgtccatacaatggattattatttgacaataaaagaagaactgatacatgctacaacatagatgggacttgaaaacgttatacaggcaatactccattttattgcagctttctttattgtgctttgtagatgctgcatatctacagttttacaaattgaaggtttgtggcaaccctgcaccgagcaagtccattggtgccatttttccaacagcatgtgctcaactagtgtctctgtgacagattttggtcattctcacaatatttcaaaatttttcattattattatatctgatrtggtgatctgtgatcaatgacctttgatgttactatggtaattgttttggggcggcatgaattgcgtccatataagatagctagcaaacttaatcaataaatcttgtgtgtgttctgacttctccaccagtcggcattcccccatctctctccctctccccaggcctccctattattaggctaattaataaacttaacaaatggtctctaagtgttcaagtgaaaggaatagttgcatgtctctcactttaaatctaaagctagaaatg

SEQ ID NO: 399012 - DNA, 601 bp, Homo sapiens
acctataatgtggtttcatttactccatctctttcaattcttaatgagtcctgtgatgcaactcttactgtctcttttttacagatgagggcaatgatactcagcatctctcatcttcactgccttgcgtttgaactcagagctatccagctacaaagcccatgcattctttctgctatactatacctgttaaacttcataggtttggcatgtccatagctgttaygatttttctttatttttaaaattagagacaggatcgtactttgtcatccaggctggagtacagtggcaagatcatagctcactgtaacctcaaattcctggactcaagtgatcctcctgtctcagactcctgagtagctaggacaacaggtacataccaccacaactggctaattttttattttttttgtagagacaggggtctcactatgttgcttaggctggtctcaaactcttggcctcaagcaatcctcccaccttggcctttcaaagtgctgggattacaggcatgagccatagtgcccagccaagatttttctaaaacatggagaattctataatgattattgattttgtaatgtttctgcttacaaaa

SEQ ID NO: 399013 - DNA, 636 bp, Homo sapiens
ttttagcaggaacagacattaatctttgtcagaagcattttctgcctttattgagatgatcatatgttttttcttttttggcttgctaatatagtagattatattgatcaattttcaaatgttaaaccaaccttcttatattcttaagataagccccacttgatcatgatgcattgccatatgtatgttcatatgtatattatggacaactttggatatgttgtattaatattgcataaatattatcctcttaatatttatggactctgtattgatggcacctctcatattcatgatattggtgatttatatcttctcccttttttcctgataagtcaggctagaggtttatcaattttattgatctcaaagaatcagtgtttggtttcattgatttttctctattatttttctgtttycctttttattcacttctgctctaatctttattacttctttttttttttctggtcaagtttaacttactcttctttttcttgaatatttagctagaaactgagttcactaattgagacctttcctaataatagccatttagtgctattaatttcctctaagtacttcattcgtggcatcccataaattttgatgtgttgtattttcattcaacgcaaa

SEQ ID NO: 399014 - DNA, 548 bp, Homo sapiens
ttatttttaaatttttacgtacagtttatgcctaattttctgtatctagaatgatacaggttccacaacctcaactttttccacagatagaactactaacttcaagtgagctctgcctcaaaattacaattttacagtttcccaaacctcattcaccccctcttcttaacttttagaagactgcggtacattgtaatgccctcagaaaacagaaataatcaagagaacwtcctcatcttcctactacaaaatcagccaaccctccattgtctgtacccatagtccccgaattctttcttgttgaagtaaatgaatgctcaatccctcaacatgtatactatatcctttatctcccagtgactcaaggattttgctctggcaattacccttttctctctcttgtaatcaaccttttccctctcaattatttttttcaacaacaaatgaatttgtcatatctgacattaaaagaaaaacaaaaaaccttaccttcacatgttttttttttactattgccctacttcctttctccaacttattacaaaatt

SEQ ID NO: 399015 - DNA, 562 bp, Homo sapiens
cattatgaattttaccttttgggtgctggatattttcatattmctgagttttttttctgtaacattgttaaattggttggaatgtttcatccctttgaggttttcttttaggcttcattaggcaagactgtggccattggtgcagagctaattttgccccattactgaagcattacccttctgagtattctgactaatatccatgtatttttcttctgtggctggtaagatacaacctattcccaactctgtaaccatcagggattcttctactagctccttgcctgtgattcttttccagtgttgggtaatttcatcatatataagcactgttcagtactcatctgaacactcaaggaggaatctttggcagattgctagaattatacctctgtgcaactccctcatccccagtaccctattgcatggcttttagctgccttgatatcttgaaacttcttaactctgttttctcaactcaaaaacctctccaggctcagtatgagcttgcttttcctgctctgcagcctgtaaactctctccaggcagtaaactggagaat

SEQ ID NO: 399016 - DNA, 501 bp, Homo sapiens
aataacgaagacctggaatcaacctaaatgcccatccatgataaactggctaaagaaaatgtggtacatatacaccatggaatactatgcagccataaaaaatgagatcacgttcttcactgggacatggatggagatggaggccattatcattagcaaactaactcaggcacagaaaaccaaataccacatattctcacttataagtgggagctaaatgatgagaacacacrgacacacggaggggaacaacacaaagtaggcctgtcagatagtgaaggatgggaggagggagaggatcacaaaaaataactagtgggtactaggcttaataactgggtaatgaaataatctgcacaacaaacccccatgacataaatttacttatgcaacaaaagtgcacatacacccttgaactttaaagttttaaaaaaagaaaataatagcctttgttttttattaaaaacatgtctagatacataatataaaattatatgagat

SEQ ID NO: 399017 - DNA, 501 bp, Homo sapiens
aataacgaagacctggaatcaacctaaatgcccatccatgataaactggctaaagaaaatgtggtacatatacaccatggaatactatgcagccataaaaaatgagatcacgttcttcactgggacatggatggagatggaggccattatcattagcaaactaactcaggcacagaaaaccaaataccacatattctcacttataagtgggagctaaatgatgagaacacacagacacacggaggggaacaacacaaagtaggcctgtcagatagtgaaggatgggaggagggagaggatcacraaaaataactagtgggtactaggcttaataactgggtaatgaaataatctgcacaacaaacccccatgacataaatttacttatgcaacaaaagtgcacatacacccttgaactttaaagttttaaaaaaagaaaataatagcctttgttttttattaaaaacatgtctagatacataatataaaattatatgagat

SEQ ID NO: 399018 - DNA, 505 bp, Homo sapiens
ctgaataacaaaggatgggagtatcagcagagctgaaagcaaaagacattctgagacagaggctcatcttgagggcatgtctttgctctgtgaaatgtgtggttcttatcacagwtgaggtacttcacaaccatgcagattccttgacatacacttaatcacttagtctgaaaatctgcatttttagtaagcagtcaaaatgatccaaatgcaggtggttttagtactatactgaaaaacacaaacctaattcattttcagtctctgcatctaacttcacacttcctcctttctgcaagcacaaaccttttcaccaccatcctcaccccaagcaggaaattctaaaatcaaatccaacaggtagaatttaagaaacaccaacccaatactcaagattcagtatccatcaccctcactctggtccagccccaatcttacatttgaagttttgaattactagagtattcccttgtttccttttttgccccgtaactgcttcctaaca

SEQ ID NO: 399019 - DNA, 505 bp, Homo sapiens
ctgaataacaaaggatgggagtatcagcagagctgaaagcaaaagacattctgagacagaggctcatcttgagggcatgtctttgctctgtgaaatgtgtggttcttatcacagttgaggtacttcacaaccatgcagattccttgacatacacttaatcacttagtctgaaaatctgcatttttagtaagcagtcaaaatgatccaaatgcaggtggttttagtactatactgaaaaacacaaacctaattcattttcagtctctgcatctaacttcacacttcctcctttctgcaagcacaaaccttttcaccaccatcctcaccccaagcaggaaattctaaaatcaaatccaacaggtagaatttaagaaacaccaacccaatactcaagattcagtatccatcaccctcactctggtccagccccaatcttacayttgaagttttgaattactagagtattcccttgtttccttttttgccccgtaactgcttcctaaca

SEQ ID NO: 399020 - DNA, 608 bp, Homo sapiens
tttgcaaacctgacacatttgctaaagacaaattttagaatataaagaactctaaaagctcacattaaaaagtaactgaagtaagaaacgagcaaaagacatgaaaagacattccactgaagataatacagtagtcttccctggccatggttttgctttccaaaaccaaaaatattaaatggaaaattccagtaataaacaattcatcatttttaaattgcatgctgtcctgagttgcatgatgcagccttgtgctgtcctgctccaccctactaaggacatgagttatatctttgtccagtgtatccccatgctgtatatacaacytgcctgttagttgcttagtagccaacttggttatcatatataaaaaaaatagtatatatagggtttgatactatcagtggtttcagacattcactgggcatattggaacatatgtaccctaagtaaatgagggggaactattatacacagatgataaataagtgcatgaaaagatggtaagacaaaagacaacaagtgttgccaaggatgtggagaaattggaatttttgcacacttttggtggggatgcaaaatggtatatatgctatagaaaacagtag

SEQ ID NO: 399021 - DNA, 608 bp, Homo sapiens
tttgcaaacctgacacatttgctaaagacaaattttagaatataaagaactctaaaagctcacattaaaaagtaactgaagtaagaaacgagcaaaagacatgaaaagacattccactgaagataatacagtagtcttccctggccatggttttgctttccaaaaccaaaaatattaaatggaaaattccagtaataaacaattcatcatttttaaattgcatgctgtcctgagttgcatgatgcagccttgtgctgtcctgctccaccctactaaggacatgagttatatctttgtccagtgtatccccatgctgtatatacaacttgcctgttagttgcttagtagccaacttggttatcatatataaaaaaaatagtatatatagggtttgatactatcagtggtttcagrcattcactgggcatattggaacatatgtaccctaagtaaatgagggggaactattatacacagatgataaataagtgcatgaaaagatggtaagacaaaagacaacaagtgttgccaaggatgtggagaaattggaatttttgcacacttttggtggggatgcaaaatggtatatatgctatagaaaacagtag

SEQ ID NO: 399022 - DNA, 560 bp, Homo sapiens
agatctgatggtttttaaaagaggagtttcctgcacaagctctctctctttgcctgctcccatccatgtaagacatgacttgctcctccttgccttccactgtgactgtgaggcctccccagccatgtggaactgtaagtccattaaacctctttcttttgtgaattgcccagtcttgggtatgtctttatcagcagtgtgaaaatggactaatacagaggctaaatctcatgttagtgttttcatcacatgctttttctctaaaaatatctttttaaataaaaaacctaaaaaaactctattataataaagtgacacacacatcacacatagtagaatttgtagaaatataactacctatctaatgatgtaaatttctgtcctaatattcttccctgtgactttaaatcttggttttctataagaatctttaaaaagaatttgatagcttttcagcatttctcagaatactactgtatcattcttgcttatttttcatgtggyacctgtggtataagggcagccattctgagtgtaagtctcctaaggtgatggcctct

SEQ ID NO: 399023 - DNA, 534 bp, Homo sapiens
gtaggccatgatgagtcttttagctttgttatgaatgagatgggaagcccttgaaagttatgagcagagaatgacttcatctttctcatgttttaaaaggattgttcttgctgctctgttaagaacatactgtaggstgtaagagtggaagcagagagactacttaagaaggagactactgcaataatctaagtgagagatgcaagtgcattggaacaggcttgggagtgggtagtggtgcaggtaagaagtggattcagcatataatttgaaagtagaaactacaggatttgctggtgaattggatgtaggatgtgagaaaaagaaataaataaaaatattacatccaaaatttttggcttgaacaattggaagaacataatactgaattaggtaaaatgcatcattgaaagtttccaggtgttgaggaatatgtctttgggcttgatgagcttcaacacatggctgttgctgctccttggttcatagttgaagacttggtgaaaatatttacttttcttcttcttgccactt

SEQ ID NO: 399024 - DNA, 363 bp, Homo sapiens
gaagaaactgaatctaaaatcagagaaagcagatgtatatgcctatccagaaaagccagaatgagaattcaaatttgaggacaaagtcatttaccaaagtggaaactagattaatacggaaattggtcagcagtaaatgaggagattcaggacaattcaaatttaaatttgtatttaagatttatatttatggataaaagtggagygtgtgtgtgtgtttatatttatggataaaagtggagcatgtgtgtatgtgtgtgtgtgtaaaacacacaaagacatagtggtaagaatgagaatacaaatgctgtattctcactattgtgctggtcatgcattcattttaaggcatctcctacaggt

SEQ ID NO: 399025 - DNA, 518 bp, Homo sapiens
gtcaaagtccaatgtaacagtaaatgcattacatgagaaacttaaagtcatagtatgagccagagaataaagctgtaaataagaaatcagggtaggagatgctggctgatgatgaactcaagatattgaagcttgaaacctcaaataaaaaggaatatctcattgaagacctgatctgaaaaaaaataccaktaacagaaaagagaattcaagaggaacaagagcaaacctcacagagattcaagttggaggaactcaaattaacattgtagataaaagatgtccaattaaatttaaatttcagataaacatttcaaatgtaactaatttttatttgctaaatctgcaaccttaactgaaatgggattttaatacatctccacagcagcgttaaaaactcatctcccctctcttttaaatgtgcagtcttgggtcaaagaacagtaaggctcgaagaaagagggatgagccgatgtccagctactattacacctcttgcattatattgagaggcaaaa

SEQ ID NO: 399026 - DNA, 589 bp, Homo sapiens
ttgtggttggcaattggttgagtttgtctaaagacctgggatagatagaaacaatggaatgttcaggttaagataaagattgtagagatcaaagttcttttgaagtcttagagtggctgcccttagaggctataggtgacaaatgtttcctattcagatcttagttaatctgtttaggattaggagggtctggaagaaaaagatctagctatgttaatagagagtctttacagatgcaaattttcccccacaaagaatagctctgcagggccatttcaaaatacggcaaagaaacatgttttgatgtaaaatattttgattttcttctttgtctcgtaatgttatgccagagtcagtttggaaagtaagtcatgatatataggattaaataaaacacatctgatgagaatttatgatttgtagggcatgacccccagaccactttttagataagaatttgggcaagataaaaaaaaaatcagagtttaatcctcaactggaacycttgcaggtgctaccatcactctcttttattattgtactagccttctgtctggtctcattgtttccactcttccatgttaaagtt

SEQ ID NO: 399027 - DNA, 595 bp, Homo sapiens
ggcatgaggaattcaaagtgggcaggtggcagccttaacttccagttcaatggaatcattgctgtgtctcctggtagaagcatcttctctttgagactaggacatccaggccagcagaatatcaggttgcatgaataggaagcaaatattttgttagtgggtcactatggtaatagcagcaccactcctttttcacttcttgatttctgaacctgtaaatcctggctatgatggaarcagcatcatttatcagacgttgattcagagcatatcctcagaatcttgccccatccttgcaagttcttgccacccagctggtagttaactgagtctttggaagaatatcccaccattctatcaaaccagctgttttaggatggtggtggaacatagaaaggccagtaaaattccataagcatgggcctcttactgaactttttttgttgtgaaaggagatccttgatcagaagcaatgctgtgtggaatatcataatgctggataagacattctataagtcaacaaatgatagttttggcagaagtattgcatgcagtgaaggtaaatccatatctagggtaaatgttggttttagta

SEQ ID NO: 399028 - DNA, 553 bp, Homo sapiens
attacataatggtaaagtattcaattcaacaagaagatcaaccatactaaatgtatatgcattcaagactggggcactcagatccaaaaaccaagttcttagagaactatgaagacacctagataaccacataatagtagtgagagacttcaacaccccactgactgtagtagacagatcattgaggcagaaaactaacaaagatatgatatgcacgaccyaactcaacacaaccaaatgggcctaaagacatctacagaacactccagccaaaagcaacagaatacacatcattctcatttgcacatggtacatactctaaaattgaccacacaattggccatgaaacaatcctcagcaaacttttaaaaaattgaaattataccaaacacactcttagaccacagtgcaataaaaatataaatactttaaaatcatttaaaactatacagttatgtggaaagtaaagaacctgctcctgaacaacttttgggtaaacagtgaaattaaggcagaaatcaagaaattttttgaaactaataacaaagatacc

SEQ ID NO: 399029 - DNA, 553 bp, Homo sapiens
attacataatggtaaagtattcaattcaacaagaagatcaaccatactaaatgtatatgcattcaagactggggcactcagatccaaaaaccaagttcttagagaactatgaagacacctagataaccacataatagtagtgagagacttcaacaccccactgactgtagtagacagatcattgaggcagaaaactaacaaagatatgatatgcacgacccaactcaacacaaccaaatgggcctaaagacatctacagaacactccagccaaaagcaacagaatacacatcattctcatttgcacatggtacatactctaaaattgaccacacaattggccatraaacaatcctcagcaaacttttaaaaaattgaaattataccaaacacactcttagaccacagtgcaataaaaatataaatactttaaaatcatttaaaactatacagttatgtggaaagtaaagaacctgctcctgaacaacttttgggtaaacagtgaaattaaggcagaaatcaagaaattttttgaaactaataacaaagatacc

SEQ ID NO: 399030 - DNA, 553 bp, Homo sapiens
attacataatggtaaagtattcaattcaacaagaagatcaaccatactaaatgtatatgcattcaagactggggcactcagatccaaaaaccaagttcttagagaactatgaagacacctagataaccacataatagtagtgagagacttcaacaccccactgactgtagtagacagatcattgaggcagaaaactaacaaagatatgatatgcacgacccaactcaacacaaccaaatgggcctaaagacatctacagaacactccagccaaaagcaacagaatacacatcattctcatttgcacatggtacatactctaaaattgaccacacaattggccatgaaacaatcctcagcaaacttttaaaaaattgaaattataccaaacacactcttagaccacagtgcaataaaaatataaatactttaaaatcatttaaaactatacagttatgtggaaagtaaagaaccygctcctgaacaacttttgggtaaacagtgaaattaaggcagaaatcaagaaattttttgaaactaataacaaagatacc

SEQ ID NO: 399031 - DNA, 528 bp, Homo sapiens
tccctgcttgctcctgctagccctgccttttttctttccctaggtatacttccaacaaatttcttacacttttaactttgtcttagcatctgctacctggagtacctggactgatgcagccacagtcmaaaaatgctaaagttatgattcaccaaaggttatctgaccccagagatctgcatatgtaaacaatgcttcctttcccaggtgtaaattctggattacttcctgcccccattcctggccttacagtcaaaagtcttaacatgtctctaaggtactgggagctggaacttcaatataactttagggaggacacaattcagctcataacaacacccaaagaagaggcttctttcacctggatttaagggtggtcctagtagttactgtgtgacctggagaatttcagataatacatgatcaacttgcatcactggcctcatgtgagactgccaaatacactatacatggagagtcacccccacatagtatccttaaacttccacaaaataatgaaaccatagg

SEQ ID NO: 399032 - DNA, 538 bp, Homo sapiens
atggtttatttttctcacataacaactctctaggcaggtgatggtgggtgttgttagcctctctctggtgtcatccagaatccatatccttgttatgtctgctccaccatcctcatcttgtaatttttagttttaggtttatcatttcatgggcttaaggtggctgctgcaattcctggctttatgcacatgtttaaggctggagggagctagcaaatgtgccattttctgtttttctttyttttttttttttttttgtcaacaaataaattttttcctggaaactctaaactggtatttgtttttcgacttgtggcccttaggtcagaaccctgtcacatggctacccattacggtgagtctgggaaagtgagtatccagctttctgaattctaaagtgggcagcaatggaagtagcagttgcaaaatgacttctgagttggctaaaggacaatgtctgccacaatattctctcattaccaatgacccaggacttggactctttaagaacaggagagctgagagctgaactactgga

SEQ ID NO: 399033 - DNA, 534 bp, Homo sapiens
caggcaggtgagcaaatggaagctgaaattaggtcctggagaatcagtagccccagtgacagcagaggtgggagcatagtggttaagatagaaaggcttcctggcagcactcatcatgcatggaaacccatgctaggctacagcaagaacaragactatcacccaaagactgggtaagaggaattacatcagtcactccagtcctctgacagaacatgcaagtactatcttgagcataagggaaagaggaggtctccaaaagctgtgaggaagctttaaactttgaataagctgaatacttagcttacctaaatgagctgagtccatccaaacaacagttttaagttaagtgagatccaaggacctataatcacacaggtcctccttttattaagaacagggaatgagaatgagatcatactgaagaaaataaattcttatacattaaatggcagggtaataatttcaaccctgatacctgaagactaatacattaagtaaaaataaacccctgtagaatgagcacaaaatgtt

SEQ ID NO: 399034 - DNA, 532 bp, Homo sapiens
gaaatgcagtccagggcatgtgttcccttagtaggcaagactttgctccccttgtgatggcacatggctctaggctctcatcagatcatggtgtctgaatacttccttaggataatccccatcctaggaatcagaggccatctgaaaatgctggacytgttgggcaaacaccagagttggttttcaagatcaggactgggtcaggagaatagtgagctgtggaatccaggagtggaaaccaccagaagatacccacagagcatggctaaggaagcacctggggtcaagagccagagaagccagtgcaattggatgttgagcaggacttctccccagagccagaattagtatcaaagctgaggatgaaatgaagccaagtactcaaatcctaaagaaagttaaaaaaacaattaggtgccagacaccatctccaagtgttgctatctaaatcattacaactccatcccctcgcctatgcatagaagcaaaaatgacagctcagggagaaaggataatgtggtatgagtcacta

SEQ ID NO: 399035 - DNA, 532 bp, Homo sapiens
gaaatgcagtccagggcatgtgttcccttagtaggcaagactttgctccccttgtgatggcacatggctctaggctctcatcagatcatggtgtctgaatacttccttaggataatccccatcctaggaatcagaggccatctgaaaatgctggacctgttgggcaaacaccagagttggttttcaagatcaggactgggtcaggagaatagtgagctgtggaatccaggagtggaaaccaccagaagatacccacagagcatggctaaggaagcacctggggtcaagagccagagaagccagtgcaattggatgttgagcaggacttctccccagagccagaattagtatcaaagctgaggatgaaatgaagccaagtactcaaatcytaaagaaagttaaaaaaacaattaggtgccagacaccatctccaagtgttgctatctaaatcattacaactccatcccctcgcctatgcatagaagcaaaaatgacagctcagggagaaaggataatgtggtatgagtcacta

SEQ ID NO: 399036 - DNA, 532 bp, Homo sapiens
gaaatgcagtccagggcatgtgttcccttagtaggcaagactttgctccccttgtgatggcacatggctctaggctctcatcagatcatggtgtctgaatacttccttaggataatccccatcctaggaatcagaggccatctgaaaatgctggacctgttgggcaaacaccagagttggttttcaagatcaggactgggtcaggagaatagtgagctgtggaatccaggagtggaaaccaccagaagatacccacagagcatggctaaggaagcacctggggtcaagagccagagaagccagtgcaattggatgttgagcaggacttctccccagagccagaattagtatcaaagctgaggatgaaatgaagccaagtactcaaatcctaaagaaagttaaaaaaacaattaggtgccagacaccatctccaagtgttgctatctaaatcattacaactccatcccctcgcytatgcatagaagcaaaaatgacagctcagggagaaaggataatgtggtatgagtcacta

SEQ ID NO: 399037 - DNA, 565 bp, Homo sapiens
aggcatcaggttgtagaaagtattaaaaccatttatcttttttaaatttaagcatttctaagtttacattaagcagattccctttgactgtctataccccagaccaatagagatactgaagccttcagtgtaagagaaatcacccagtctgctatagattyccagaagagcagcccagaagggagagctaactaaagatttttgacaatcctgagaaatgctattcatcatagcttatgagaagttgtgaaaggatgctctgtttaccctccgcaccaaaaaatgctgagttggtgtatcagaaaaacaaattcagagaaaatattatttctgtgaaagaaatctgcaaaagtctagaactggagaaaatggacaactaaccaaatgtatcctggggaaaaaaaaaaagataacaggaatcaattggagttatttttcctctggatcgtcttatagggccatgaattatttctgatgtcagacgggcctgagattaaatcctgactctgtcatatagtgtgtgacaagccttggtttatttattgaccaattacagacaggactg

SEQ ID NO: 399038 - DNA, 597 bp, Homo sapiens
aagccatcctggaacgtgtaccctctgattttttctttaaaatctccaggcactgagactctagatggatcccaagtaatctactcaaagatgacccatgatggttaccaaagattatttacaaaatgctagagctgatgaaagtttgtcatctgcctccaaggtaatcagatcaaacagactcaacataatttccaggttttgagaggctctattccaagacatcttctaccaaattgacgagacacctacaatgccagcaacagagaaaaaggagggaggtggtctaggagagggttcagggatcttgctattataaacgatggggaaatgaaggaagaaagagcaagctagattaaaaggtcagggacacatttctgcgtgttgtgtgttcgagcaggaagcagaacacatgttaatgaaatatgggctacagctgtattgctgactaaaatgtacacatatggctaatggcacatattctgaataatcaacagaaaaagaaatgttttgcttctaagacaacaaaattagggcatgtyattccttactgatactgcctgaggcagccaagtctcattatagctttgaagcata

SEQ ID NO: 399039 - DNA, 612 bp, Homo sapiens
aatcgtcaatagcaaacaatctgcattatcggtggactggcctttttgctcagcagccccgcccactggctgcacccatttatctctgcrtacaaatgtgttttcaagtattatgtgtgttttcagtgtgtatgtgtgtgttgaagggcaaagagaagtgagaagagagtaagaatcagactaatatagcaagttcctattccatgtctacatttattccaggccactcagtggattctaattcttatagaattatccgttgtttatctaatgaagtggaaagagtagacttgactcagatggtcctactttaaattctgactctactatttattaactccatggtcttgggcaaattagttaagccttttatgtttatttctaaaatggagagaatgttgtgatgattaaatgaggtaatatatgtaaaaggtataaaactgaacataccacatgatatgcactccagaaatgttagccatcatttatatcaatagggccccttcttgcacaaagacctccattcatccaggcacagggtctaggatacatccaaaggccactagacaccagaatgaatacatctccatctatgagaaaaatgtacttaaa

SEQ ID NO: 399040 - DNA, 612 bp, Homo sapiens
aatcgtcaatagcaaacaatctgcattatcggtggactggcctttttgctcagcagccccgcccactggctgcacccatttatctctgcgtacaaatgtgttttcaagtattatgtgtgttttcagtgtgtatgtgtgtgttgaagggcaaagagaagtgagaagagagtaagaatcagactaatatagcaagttcctattccatgtctacatttattccaggccactcagtggattctaattcttatagaattatccgttgtttatctaatgaagtggaaagagtagacttgactcagatggtcctactttaaattctgactctactatttattaactccatggtcttgggcaaattagttaagccttttatgtttatttctaaaatggagagaatgttgtgatgattaaatgaggtaatatatgtaaamggtataaaactgaacataccacatgatatgcactccagaaatgttagccatcatttatatcaatagggccccttcttgcacaaagacctccattcatccaggcacagggtctaggatacatccaaaggccactagacaccagaatgaatacatctccatctatgagaaaaatgtacttaaa

SEQ ID NO: 399041 - DNA, 361 bp, Homo sapiens
ttcagcagctttccattgcacacaggataaaatctgaactttttaccatagcctagaagacatccagtacccagtcttaccttggactactcaacccctcagttttcaatttcggaggaaatcctatcggctctagcttcaaaacatatccaaaacctgaccgaytgtcaccccctcctctcttaacaccctgttctgaactactatcatctcgctcctggaaaatgacaactgcctcaaaactagtattccttctattcttgtttgttatagtccgtttttaccacagcagcctgtgtaaatttattaaagaggaagttagtgccattctccaaatggaagagttcactcagaaaaaagt

SEQ ID NO: 399042 - DNA, 616 bp, Homo sapiens
ttgtctgtgtcacctgctggaatgtaaggttcaagaacaggaatgtttgatattcactaatatatctgaagtgtctagaaaaatgcggcrcaataaacattagttaaatggtgaattcgtctttttgctcttctcacactgcacttttcagtctgttgtgttacaaagaatttgtctggtctttgtttcaggctcctggcacagagcttctaaaatccttgaaatttctcaagtaatataagtgtgtctttgttatatatgagcctcctgtatcacacatgtgtttatgctaatgaaataactcatggtggacccctagataatgtcaggattggggctggtcaccaaaaagaagaagcctataattagagggttgggattttgaagcaatttgacctccagggagagaagggggactagagattgagttcaactaaatggtcagtgattcaatcaaccatgcctgtgtaataaaactccaataaaacctctggacaccgaagctcagcagagcttcctggttggtgaacacctcagtgtgccaggaggttgatgcgccctgattccaggggaagaagccatggaagctctgtgctagggcctctcccagaactca

SEQ ID NO: 399043 - DNA, 576 bp, Homo sapiens
tgactaaaacattcttctccatgattgctgcaaggctaactccatcacttccttcaagtctttgcttcagtgccactctcctagaagatctacactgaacagtgtattacaaattacaacccacagtttgccaatcacaccacaccaacactgacaatctgttttatttttgctttctcccatagcaccaacttcaaatagtttttataattgatttattagttagtttgtttattgttgtctgtgtcacctgctggaatgtaaggttcaagaacaggaatgtttgatattcactaatatatctgaagtgtctagaaaaatgcggcacaataaacattagttaaatggtgaattcgtctttttgctcttctcacactgcacttttcagtstgttgtgttacaaagaatttgtctggtctttgtttcaggctcctggcacagagcttctaaaatccttgaaatttctcaagtaatataagtgtgtctttgttatatatgagcctcctgtatcacacatgtgtttatgctaatgaaataactcatggtggacccctagataatgtcaggattggggct

SEQ ID NO: 399044 - DNA, 589 bp, Homo sapiens
tgaacccaggaggcagaggttgcagtgagctgagattgtgccaatgcaccccagtctgggcracagagtgagactctgtctaaaaaataaataaataaataaataaataaacaaacaaacaaaaaaggaaaactataatcataactgtagaacttgcctgaattctgtgatttgttcccatgaattatcaagcccagggaaggccataagaatccccagatttatagtcagttagtatgaaaggagggcagtcttgccgtggaatgtgccctttagcttgtaggatcaatggtaattccagggggttagtgccagaactgaattgcagtataccaattgatgttggaatatagtccctcaaacactaaaggcaaatgaaccaaagttcactccttctaccttttggtttataactagttcatgaaacagaaaagaaagtttagccaaaagctttctagttaatagatttattaataactggattgacaactgtggcttagatctaagggagaatggaagcttctagtcttctcatacttctagatcagcactactcaaaagaaatataagcctcaaatctgaaccacct

SEQ ID NO: 399045 - DNA, 589 bp, Homo sapiens
tgaacccaggaggcagaggttgcagtgagctgagattgtgccaatgcaccccagtctgggcgacagagtgagactctgtctaaaaaataaataaataaataaataaataaacaaacaaacaaaaaaggaaaactataatcataactgtagaacttgcctgaattctgtgatttgttcccatgaattatcaagcccagggaaggccataagaatccccagatttatagtcagttagtatgaaaggagggcagtcttgcygtggaatgtgccctttagcttgtaggatcaatggtaattccagggggttagtgccagaactgaattgcagtataccaattgatgttggaatatagtccctcaaacactaaaggcaaatgaaccaaagttcactccttctaccttttggtttataactagttcatgaaacagaaaagaaagtttagccaaaagctttctagttaatagatttattaataactggattgacaactgtggcttagatctaagggagaatggaagcttctagtcttctcatacttctagatcagcactactcaaaagaaatataagcctcaaatctgaaccacct

SEQ ID NO: 399046 - DNA, 513 bp, Homo sapiens
aaagaagcataaatgctcccacctccagttctctggaggagaagcaaaaatggacttttgcttctctaccaccgacagcaaaatccgaagtatcagcgaagactatctccctttctctcactctaaggcctttgcaaatgttaatgacagttcatgtttcttgagcacagcaccaaattgagcaatgtaagaaatacattttaatctaatccttatagcaaatcyctttttcagatgggtagacaaaagtataatgaggttaaataccttgtccaaggctagctagtcaaaagtggatctggccccaaagtctaacttcctaactaaaactttacagtggaacagctttctccttcttttttatctggtcaactcctgtgtacccttcaaagttctactgaaatatcacttcctcagtgaagtcttccctgatctctttgataaagccaatcctactgtcactccactccagtcaattctatttcattattctggttgatttagtgttttatc

SEQ ID NO: 399047 - DNA, 513 bp, Homo sapiens
aaagaagcataaatgctcccacctccagttctctggaggagaagcaaaaatggacttttgcttctctaccaccgacagcaaaatccgaagtatcagcgaagactatctccctttctctcactctaaggcctttgcaaatgttaatgacagttcatgtttcttgagcacagcaccaaattgagcaatgtaagaaatacattttaatctaatccttatagcaaatccctttttcagatgggtagacaaaagtataatgaggttaaataccttgtccaaggctagctagtcaaaagtggatctggccccaaagtctaacttcctaactaaaactttacagtggaacagctytctccttcttttttatctggtcaactcctgtgtacccttcaaagttctactgaaatatcacttcctcagtgaagtcttccctgatctctttgataaagccaatcctactgtcactccactccagtcaattctatttcattattctggttgatttagtgttttatc

SEQ ID NO: 399048 - DNA, 478 bp, Homo sapiens
ctgtttttcaatccaactcaataaaacttccctcagactctggaaaactgttttagtcatccttagttaacagttaaaatgtccagttatgtatgtgtttgtatgtgtttataaaaatttgctcagaatcaataaaattccaagagattcatagttagaggttctaatagattccaacaattattcctactgttctaagaccaggtttatctcctgaccatgctcaataactatacttcttctgaactctgtaccccatgaccgattatagaaaaataaaaggagaaaattgctggaaatttacattcttatgaattcaagagtaaagtgagttgaaaacactgtagagctgagatcttgtcaaagactgatcttaggccaggtctggtggctcacgcctgtaatcccagcactttaggaggatcacttgagcataggtgtttgagacaagcytaagcaaacataatggaaccccatg

SEQ ID NO: 399049 - DNA, 549 bp, Homo sapiens
atatttatgcacaaccataatcacaagatgtcataagatgaactgatttttttaatttaaggacatagctccaacctctgactcagcaaaagcctattctacttaattccagtagcagcaaaggaagatgcagtagcgaaaggcaaacctgtttaytcatccccatgctctgttattcctggggtcctatagggcatagaagagatgactactgtcctacagagtaggggaattaagtcatattacgttaatcactttcagaccctagtgtatatccgaaagtaaaaagctcttaatttctccaaattggtaaaataccaatttttctatggcttggtgaaataaaatattataccagggtaattaatactttcttattgggatgccttttggtatcatcaggactaaaatccaagagaagagcaaagattcttcttggggagtaagggtgaaggctacatttaagaaaggctttcttagaatggattcagaatgaagtatgaaaagcagctggaaaaatcccaaggttccggtcagcaaaggcagcaa

SEQ ID NO: 399050 - DNA, 549 bp, Homo sapiens
atatttatgcacaaccataatcacaagatgtcataagatgaactgatttttttaatttaaggacatagctccaacctctgactcagcaaaagcctattctacttaattccagtagcagcaaaggaagatgcagtagcgaaaggcaaacctgtttactcatccccatgctctgttattcctggggtcctatagggcatagaagagatgactactgtcctacagagtaggggaattaagtcatattacgttaatcactttcagaccctrgtgtatatccgaaagtaaaaagctcttaatttctccaaattggtaaaataccaatttttctatggcttggtgaaataaaatattataccagggtaattaatactttcttattgggatgccttttggtatcatcaggactaaaatccaagagaagagcaaagattcttcttggggagtaagggtgaaggctacatttaagaaaggctttcttagaatggattcagaatgaagtatgaaaagcagctggaaaaatcccaaggttccggtcagcaaaggcagcaa

SEQ ID NO: 399051 - DNA, 559 bp, Homo sapiens
gatattctagagtgctaaagccctgtttatataaataatacatcactacatgtcagttaattatatctcccccaaaacccacagaaaatgcacttggcactgtggagaaagaaaaagttcatgttagatctagaagatcacccttctttactagtaggggataaacacaaatatcatcaccattagagttttgccaatcaggggcttaagtgtcactctgcaagcaagataaaatgctacaaagtctcccaccccatttccataatacatctmaatgcacagtgtgaaacaagaaatgacattaagtgtgcttactaataacagcaaaggagaacaacgatttaatttaaacaagctaaaccaaacatttgtttcacttagagcttggaatatgtcatttcattaaatcatgttttcatttcaaaagatgactgtcagactcaaactattttattataattgaaggaggatataaagacaatacatttttaggcaaagtaattcaaaatgtattctaattttaaaaaattgtaatgaacttatgaatctgtatgcctaa

SEQ ID NO: 399052 - DNA, 590 bp, Homo sapiens
ggcctagatttcaagctgaaactcaacctcctcttctgaaagatggcaaacaattgacatagcaggttttaatcaacaaactctgcctataggagaaagcataagaaaaaaataataacagtttctttaaaccatgtaagcatgtttggaaataattctagtattaattttttcctagcataaaactaatttatggtcattatagaaaagttaaaaawcacagataggcaaaattttaaaaactatccataatctatagtcagtttttatattttggggatacatttttaagtactggtataattttttaaaataggaatttaattaaacacccatctgcagcttgtgttttgtatacataataatataccaaatattcatttcttttcattgcatattttctatattattattttaaatactactttttaattgtatggatatagactaatacatttgaccagtttcttgttgttaaacattgtttcaagactttttctattttaaataataggtagataaatatattgatatatttacaaacaagcataatcactcctaaagataaattcctaagagtaaaattgctg

SEQ ID NO: 399053 - DNA, 575 bp, Homo sapiens
aagcatgtcctaattcagctgcctaaaccaagactccctttgatgccgagtgccaggaaaagaaatgatcgccattgtaaagaattcagctgtaattttcaaggtccccagaggcaatacaggtgaagtattaagctacaatagttcaagttgctgttaggaagaaaatggtacatttttgtgagagagtatggcgtagtgtttcagagtataggctctaaagccaagtggcctgcgtctaaatctcagttcccccatctgagtaaattatttaacttctttaagggctatagtagttcctgtctcataagatcatttgaaaaataaatgagataaccttcataagtccctgamcacacagttagtattcacatgatttaatttatactttttacgaagatcactctggctgcattagattggatgagtagaaggagagatatggagagcagaaaggagggtatttaactagttcacaaaagagatcatagcagtttgaacatgggtaaaattatatgaatttgagacacattttccagagaaactagacaagacttgctagatgaagtcaagaa

SEQ ID NO: 399054 - DNA, 580 bp, Homo sapiens
gtcccctccttcctacttcaaacatctctattggatctttcccattcacttatatacatgctctggtatcgctcatcttaaaacatcaacatgcatacacataaccaaacaacagcaaaacaaatttccatttgtcccctgatctgccctttctgatccatttttctgctactacgccaaacttctcaaatgcgttgcttaacatgctttctccacattcttacttttaattcactcttcctttctggcagctttctgccctcaccactcctatgaaaactgcttcaacaaggtcaccagcaacagacctcctgataagtaaaatacagtagatatgtttctgatctcctaatgtatctcagcagcatttgacagaattaactcctccttcttaaaatcccttcctgctgctgctttctygctaaaggcaccttctatcaccctgggcacaatgtatccatcctctttgttggcttctccatctgcaccctaactctaaacttcaagcatcctcaggatttgatctgagccctatcattctctctgccaatctcaagcatttttatggtttcaaatgtca

SEQ ID NO: 399055 - DNA, 599 bp, Homo sapiens
tagttttttcacatgatgcctagtattaaatttacacacacacacatatatagtgtgtgtgtgtaataatttcaacctgtaaaaaaaaattatatgagggcacaagaaaaaaaaagccgggaaaaaataccaatattagtgataattttaggctggtgagattaggaggaaatatatttttatttatattttatctgtattttccaccatgttcaaaataatcatgttacttttgtatyggtaaaaaagttaaattatacaatttctacaaagttattaagatttattgcatccattgcaacaaaattgagctccttcaaaagagggctttgtaacaccaaaagccaagaaaggtgtgggttaatagaataagggcattagagatatatatcagctccagaatgacctcaaactgcctttgggaattcctaccctccaattttattcattttagataagaatttttctctctgttagttcctaaatggggactcaataaaggcaaacctgccatattattgcacctttttgttttatacaatgaaaattgtaccagttggcaataataatattgaagatgtttaccagaaaccttggta

SEQ ID NO: 399056 - DNA, 599 bp, Homo sapiens
tagttttttcacatgatgcctagtattaaatttacacacacacacatatatagtgtgtgtgtgtaataatttcaacctgtaaaaaaaaattatatgagggcacaagaaaaaaaaagccgggaaaaaataccaatattagtgataattttaggctggtgagattaggaggaaatatatttttatttatattttatctgtattttccaccatgttcaaaataatcatgttacttttgtattggtaaaaaagttamattatacaatttctacaaagttattaagatttattgcatccattgcaacaaaattgagctccttcaaaagagggctttgtaacaccaaaagccaagaaaggtgtgggttaatagaataagggcattagagatatatatcagctccagaatgacctcaaactgcctttgggaattcctaccctccaattttattcattttagataagaatttttctctctgttagttcctaaatggggactcaataaaggcaaacctgccatattattgcacctttttgttttatacaatgaaaattgtaccagttggcaataataatattgaagatgtttaccagaaaccttggta

SEQ ID NO: 399057 - DNA, 562 bp, Homo sapiens
tttcattatttacccaaaagctattcaggagcatattattaaatttccatgtaactgtatggttttgagtaaatttcatagtattgatttctaatttgattgcactgtagtccaagagattgtttgttatgatttcaggtctttcgcatttgctcaggagtgttttacttccaatgatgtgatcaattttagagtatgtgccatgtggcaatgagaagaatgtatattctgttatttttgggtagagagttctgtggttgatttgatccagtgctcagttcaggtcctgaacagacacacagaccaatggaacagaatacagaacccagaaataaggccacgtacctataactatctgatctttcacaaacstgacaaaaacaagcaatggaggaaggattcccacttcaataaatggtgctggataactgggaagccatgggcagaagaatgaagctagatcccctccttacaccatatataaaaattaactcaagattaattaaagacttaaatgtaaaacccaaatctataaaaacccgcaaggcaacgtaggcaacac

SEQ ID NO: 399058 - DNA, 594 bp, Homo sapiens
ggtatatacccaaaggaatataaattgttctatattaaagacacatgcacgtgtatactcattgcagcactattttcaatagcaaaagacatggaatcaaccaaaatgcccatcgatggtagactggattaaaaaaatatatggtacatatacactatggaatactatgcagccataaaaaaagaatgatatcatgtccttggcaaagacatggatgcagctggaggccactatccttagmaaactaataaagaaacagaaaatcaaataccacatgttttcatttataagtgaaagctaaatgatgagaacaaatggacacatagagggtaactacagacactagagcctacttggaggtggagggtgggaggagggaaaggatcagaaaaaataactattgagtactatatatcaaacttgcacatttacccctaaacttaaaatagaagttaaatttaaaaaaatacttggagaatagctgaaaattttccagattttatgacaatcaccaatcttcaaattcaagaaattattaccaggcagaattaatacaaagtaacccacacctggataaatcataataaagcagca

SEQ ID NO: 399059 - DNA, 541 bp, Homo sapiens
ttgagtgagtttagctgaaagaattaaaaaaaaacagaataacatcaaatgactcaactggcttaaatgacaaattctcacataaaacaatgactgtgcggacaggtttttcagaaatagttaattcagctgctccatgaaatcctcagtggaacagattctttctaactttttacttggttattttcagtatgatagttttggaacttgatctagctcccctcaagatctcaaaatggtgaagttactccaagcatcaaatcctgacttaaccatgtcccagagtcagaagggaaaagagatttcccttttcacagtccctttttaaaaataagagtaactttattaaaaacctcaacagatttattgtcatgtctcattaacaaaaatagtttgacctacctattcataaaatataccttagaaagataaatagaatcaagatttatcccctgaggcttgggcagatcccagcttcttttgtagtactyggataacttacatctaaacaaaatgtgggtttctttgtcaaggaagatgt

SEQ ID NO: 399060 - DNA, 564 bp, Homo sapiens
tcatgtctcattaacaaaaatagtttgacctacctattcataaaatataccttagaaagataaatagaatcaagatttatcccctgaggcttgggcagatcccagcttcttttgtagtacttggataacttacatctaaacaaaatgtgggtttctttgtcaaggaagatgtgtgtgcctgcgtgtgtgtgtgtgtgtgtgtgtgtgtgtgtgygcgtttccatgtatgtgtagatccacaattgttagagtatattaacagctttgaaaacatgtttcaagcttaggattaataaaaagaaatgcaaattaaaatgaaaattagatagcagttatactaaatttatgtgtgtgactatctgtgtgtagatatatggatacacatatatagatagacatatatgtcaatcactcttttctggagaaggttcaagaattcagcactttcatatatcactgatgagaatgtaaattgatacaacctttcttgaggctaacttgacggtttatagccaaaggcctagaaatgtttatttatagtaacttatcctaagaaaacaatca

SEQ ID NO: 399061 - DNA, 564 bp, Homo sapiens
tcatgtctcattaacaaaaatagtttgacctacctattcataaaatataccttagaaagataaatagaatcaagatttatcccctgaggcttgggcagatcccagcttcttttgtagtacttggataacttacatctaaacaaaatgtgggtttctttgtcaaggaagatgtgtgtgcctgcgtgtgtgtgtgtgtgtgtgtgtgtgtgtgtgtgcgtttccatgtatgtgtagatccacaattgttagagtatattaacagctttgaaaacatgtttcaagcttaggattaataaaaagaaatgcaaattaaaatgaaaattagatagcagttatactaaatttatgtgtgtgactatctgtgtgtagatatatggatacacatatatagatagacatatatgtcaatcactcttttctggagaaggttcaagaattcagcactttcatatatcactgatgagaatgtaaattgatacarcctttcttgaggctaacttgacggtttatagccaaaggcctagaaatgtttatttatagtaacttatcctaagaaaacaatca

SEQ ID NO: 399062 - DNA, 569 bp, Homo sapiens
aatatattaattaaactgctttggcaatcctagcttttcatttcgtcagtgggcattacctgttatcactgcactttgaaatgccaatttaggtcttcagcatggagtcactgatttaaagcccctgttttgtaaatgttttcttagctctgaatgggtcagattttctctggccaaagtgcattaagcctgcaagaggtaattattctcttcmcacccagcccagaggtggcttaaagcagaggttctcaatcctggctgcatgttagaatcaccgggagagcattaaaataaaatgctgatgtgctattttctctggactaattaaattaaaatatccaaggaacagccccaaacaaggacatcttatgtgctaggtgacactcttacatcccttcagaaatatagaatggcttctagggtgtgggtacacaagatttttacatggttacattttgtttttactctattttcagctcgttcttcagcgaacaaagtttctgagaactgagtatggggacatattcttgctgcagacttgaatacacctaactttttataaaatgtgt

SEQ ID NO: 399063 - DNA, 569 bp, Homo sapiens
aatatattaattaaactgctttggcaatcctagcttttcatttcgtcagtgggcattacctgttatcactgcactttgaaatgccaatttaggtcttcagcatggagtcactgatttaaagcccctgttttgtaaatgttttcttagctctgaatgggtcagattttctctggccaaagtgcattaagcctgcaagaggtaattattctcttcccaccsagcccagaggtggcttaaagcagaggttctcaatcctggctgcatgttagaatcaccgggagagcattaaaataaaatgctgatgtgctattttctctggactaattaaattaaaatatccaaggaacagccccaaacaaggacatcttatgtgctaggtgacactcttacatcccttcagaaatatagaatggcttctagggtgtgggtacacaagatttttacatggttacattttgtttttactctattttcagctcgttcttcagcgaacaaagtttctgagaactgagtatggggacatattcttgctgcagacttgaatacacctaactttttataaaatgtgt

SEQ ID NO: 399064 - DNA, 483 bp, Homo sapiens
tagggagtattcccccaccagtctattaaatttgcagtttcatacactaaaaaaaaaatttagcagcattgaatagtttctgatttgaaaaataataaatatgcacattagaatatttagaaaatataagtaaacacacacacacaaattaaaatgaaagtcatattgccrctacccagtgataaccccttagattcacataattttgaatcaaaatataagtcatttggagagataatagagctgtggctggctgtattgtttctgttggtactcttttcgcattactataaagtcattttgtgacttttttaaggtactaaggcttagtcacaattcttcattttacaatgagaaaactaaggttcaaaggagaagaatggctggctgaagaacacacactgcttggctctggaaagaacttaaccgctgacattttaactcctgtgctaaccttccaaggcaatatcccactgttctatc

SEQ ID NO: 399065 - DNA, 589 bp, Homo sapiens
gagaatcattgaggctaggcattcaaaaccagcctggtcaacatagcagcaatctgtctctacaaaagaaaaaaatttaaaaaattagccaggtgtaattagccaggcattatgacatgggcctgtagtcccagctactcakgaagctgaggaagaggattgcttgagcctagtagttcaaggattcagtgagctatgatccgagaagaagaagaggaagaggaggaagaggaagaagaggaagaggaagaagaagaggaggaagaggaggagggggaggacagggaggaggaggaaaatgacgacaacctctattaacattttgcatttaggagtatttatcttatgtctgttttcaatgcctgcatttgtagtctacattgtggaaatcacactaatgatcaatattcaattttttctttttacttatttcataagcattgcccaaattataagattatttgaaagatatacttgtttatggttaaaaatattctctcatatggacatcttatcatagctgttactacattagagaagtattaacatccagttgcctctctgtcttcatttgtttttaacagatgca

SEQ ID NO: 399066 - DNA, 588 bp, Homo sapiens
gccataatgatgttttattaaccactattgacttgtgacttggaattgtcacacaagtgatcaaagaaccttcctttgcacatcaggagatttctgagggaaaactggagacacaggtacaggayggacagctggtctcccctttgaagttcttgtcatgctgagtttcatacacgcttttgaacacttgttggcaaatatcacccctctggcattgactatgctgtttgtttaaactggtgcccacagagccaaggcagtaacatagaggctcatggtgcaatgataacaggttccagttgtgcctttcctcaaggattagcctgtattttgtgtgtgtgtgtgtgtgtgtgcatgtctgtgtgtgtatttgtatatgcacgcgtgcacacacacagggcaatggggagggtaatgtgggattgtcacgggatccttggggtgttgcctcaccagctggaaacctctgtggctgacggagcctcccgtctaagtattgctcaggcccattgggctcgttccatcctcttggcccagcaggctgtgcttagcttatactactggcttggatcccacatctgtcaaggg

SEQ ID NO: 399067 - DNA, 454 bp, Homo sapiens
cttattatttcagttgttataagtgctgcgaagaaaaccaaaacagggtaaaggattaggaaattattggtgtgatccagagggctaaattacatagggccgtaggggaagatctagtgaggcagtagcctatttgagtgaaaatctgaataaggggatagtatgagccctgaaaagttctgtgagaacatttcattcagagggaataccaartgctatgttgccaaagaaggactgagcttggtatgtgtgaggaaaagacagaaggcagccatgcctgttgtgaggggggtgggtaatgaggttggagtaataaggggagaccaggtcatgtagggccatgtgggccatggtaaggggtttagatataattatgaatgttttgagaagccattaaaagcttattcaactatagcagtggtaggatagtcactattggtgacatcagtagttc

SEQ ID NO: 399068 - DNA, 454 bp, Homo sapiens
cttattatttcagttgttataagtgctgcgaagaaaaccaaaacagggtaaaggattaggaaattattggtgtgatccagagggctaaattacatagggccgtaggggaagatctagtgaggcagtagcctatttgagtgaaaatctgaataaggggatagtatgagccctgaaaagttctgtgagaacatttcattcagagggaataccaaatgctatgttsccaaagaaggactgagcttggtatgtgtgaggaaaagacagaaggcagccatgcctgttgtgaggggggtgggtaatgaggttggagtaataaggggagaccaggtcatgtagggccatgtgggccatggtaaggggtttagatataattatgaatgttttgagaagccattaaaagcttattcaactatagcagtggtaggatagtcactattggtgacatcagtagttc

SEQ ID NO: 399069 - DNA, 582 bp, Homo sapiens
gatgacactcataatgatatatttattacctcatgttcatttccacagcaatagcctgtgcatttgtagagatatgctttctgtgccagggcacaaactgagacaaaccatctatcactcagagacacgtcaacaagaaaataaaaagtgaacacatggtttgttttgacctaaatattgttttgggtgcagagcctgttgtgaatttttctcctgaaaacaaastctgccccctaccttgctggaaaaatatttaaaaggagacctgaaggcttcttgggtcatgctgggtttgagatgtcaataaacaaagtatgaaatccaactgtgaataggtgtgatttatcagtgacagcaatttaaaaacatttttaatttttaaaattaaagttattttaatcaaataacttgattgttcaaataacaatcaagtcaggaatctctgaattttaattaggaagaatgatagtttctgtttgaaaccgtgactcatggaggggtccttcctctttgtgaagtgttagtgtaaggaatttctgtttgtctgctcttgtgccaaagctctggattacaatggatcta

SEQ ID NO: 399070 - DNA, 587 bp, Homo sapiens
catgtatcccaggcaagaatgaggggcaggtgaagtccagaggtttctctgtggggtctggggcagagataactttcttttgtatcatagtaccagctcttctagtaactcattaacatgcaattatgatttaacagtgagtaatttaacaaaagtaatttaacaggtaagggaaagtagaatttaacatggaggagaagaagaagcttctaaaatactgttggtttcgaggttccatcaactgcagcattcagtgtgtcaagtaaggtagagtctccaacgggatccaatcaggttcatcagggagagggcaactgtggcaatttgattggtgggacatgaatgtttataaacaccttgatgtccatggacctgtgtttatttggtatgtgtgaaactgttgtgctgcaatttactgttggaatcatgacagccacttttcatgggacccaaggatgctcatctctgaytcacggctgcctccagcataattcctggaacattaattcacctgattgagcattctcctcggcattgatccatccctatgttgtttcacatcaacttctatgtagcctcatggcaat

SEQ ID NO: 399071 - DNA, 585 bp, Homo sapiens
ctgtgaactgcttgtattacagtatgtacagtgacactggagagttaggaaatttgaactttatgatattgagaaaacccaaggagatattggctaaatacattcacatattgttaaaatatatattgatcttcctctatcataactgatgttgacattcccctatcataagataaattctcatggaattacagaggccttccttaggagccagattacttcctcagcwtgggttataatgaagtgcaggtgagcaggaattccaccatcagggaagtcactgtgcacctgtcaggactctgtcatagatttccagggtcctggagcttttatcccatctaaactgctcatgcctaaacatttcatcaaacttgggtctgtgttcaatttcatttgggagtaatcttattctcaacttttatgaatttataccttaaatcaagtgactataagcagtttttaaaacaaaggagaatgaagaactggcttaagggctccagtgctaagggaaagtaaacatgggcaggggaaaaagaaggcagcgcctaaaccaaacctgccagtaccctagtagttttccctgcc

SEQ ID NO: 399072 - DNA, 600 bp, Homo sapiens
atttgtttctcctttcacaaacaaaatcattatggcttgtgagaggctggtatttttgtccatctgtgatcaatctcaatagcttgaggggttgagaatccaacacatggttacacaatcatttgacatgacacataagcaagagagtcagacactcatttaccaaaatggattgagcagaaaatcctagcacatttaatggaaatgaatgggtaagtttccaggaatctaggttactttaagcaatggagagtaatcggttcttaagttcttcaatagcacggatccccaaaataggaacttaagtaatctgttgaataccagcctcccaaatattaccagaacttgttgctatragaaagctaaacttgtggcttattagtataagggtcactaccacctcaaacatgaaaaagggcagcatcactatttttattgagactttaaagtttggtttaaaagtggagagaatgtattaagattaggtgaaggttattatatatatagtcatatgatgccaaatgatttgatcaatgacagatgaaatattcagcagtgatcccctaggattataatggagctgaaaaattcctatggacc

SEQ ID NO: 399073 - DNA, 569 bp, Homo sapiens
gttcccattttttaatgaattttccttcagagccagaacatattccatacaaggaaagtggtttctgtcagcaccttcttttttcttttcaaaccacagtgggattactcaggagtctccctctctttatttgaaatacctgttttgaagggattttcagttgattctaaaaacaagtcaaatayaccatcaaagagcaaagatttatgcttcttcaggctagtcagtaaaattatgtgtcacaggctcttaggacaattttttttttttttgactaagtctcactctgtcacccaggcgacagagtggcacaatcttggctcactgcaacctctgcctcccaggttcaagagattctcctgtcttagcctcctgagtagctgggattacaggtttgtgccactacgcccagttaatttttgtatttgtagtaaagatggggttttaccatgttggtcaggctggtctcgaactcctgatctcgtgatccacccatctcggcctcccaaagtgctgggattacaggcatgagccactgcacccagccaggacaattattaaaggtgttc

SEQ ID NO: 399074 - DNA, 569 bp, Homo sapiens
gttcccattttttaatgaattttccttcagagccagaacatattccatacaaggaaagtggtttctgtcagcaccttcttttttcttttcaaaccacagtgggattactcaggagtctccctctctttatttgaaatacctgttttgaagggattttcagttgattctaaaaacaagtcaaatataccatcaaagagcaaagatttatgcttcttcaggctagtcagtaaaattatgtgtcacaggctcttaggacaattttttttttttttgactaagtctcactctgtcacccaggcgacagagtggcacaatcttggctcactgcaacctctgcctcccaggttcaagagattctcctgtcttagcctcctgagtagctgggattacaggtttgtgccactacgcccagttaatttttgtatttgtagtaragatggggttttaccatgttggtcaggctggtctcgaactcctgatctcgtgatccacccatctcggcctcccaaagtgctgggattacaggcatgagccactgcacccagccaggacaattattaaaggtgttc

SEQ ID NO: 399075 - DNA, 577 bp, Homo sapiens
agtgtaaaccttgtggtggaattattcttccctttagatctaaacctttggtttctttataggttgaaagttcttatcttaaaaaaaaaaagtctcagcaaattttggggcaaattagctaaatagtcttattaagttgccrtctactgaccccgtgtttcaatagtttgtctttggctccatccaaacattacccttttctactctttaagaaataacattcagggaaggcttcagtgtttgtcattaacccttctctctctctccacccagttcctacagacgcctatgtccctcactttctctcctcacttctttctgtctgaactcagatatttcattaatactaggaatatgtaactaagatgcttttaaaacagccactcaaaaactataggttttaattgtacaatagataagttttaaagccaaagaactggctcccgtctaccttccattcctgctctctggctattttcacccgtaggaaaatatgttatttccaaattatcgattcatttaggtatttatgcatatattgagtgtttctatcaattcactaaccaaaccatgacag

SEQ ID NO: 399076 - DNA, 590 bp, Homo sapiens
aatagtcttattaagttgccgtctactgaccccgtgtttcaatagtttgtctttggctccatcyaaacattacccttttctactctttaagaaataacattcagggaaggcttcagtgtttgtcattaacccttctctctctctccacccagttcctacagacgcctatgtccctcactttctctcctcacttctttctgtctgaactcagatatttcattaatactaggaatatgtaactaagatgcttttaaaacagccactcaaaaactataggttttaattgtacaatagataagttttaaagccaaagaactggctcccgtctaccttccattcctgctctctggctattttcacccgtaggaaaatatgttatttccaaattatcgattcatttaggtatttatgcatatattgagtgtttctatcaattcactaaccaaaccatgacagtcatgctgactcatgctgggcacccagagtgtgggtggtagatagcgcagattaaaggagctcctaggatgcaaagaagagacactctgaggtcagcagaaactgatctggtgtcacagctgagaaagtaatag

SEQ ID NO: 399077 - DNA, 577 bp, Homo sapiens
agtgtaaaccttgtggtggaattattcttccctttagatctaaacctttggtttctttataggttgaaagttcttatcttaaaaaaaaaaagtctcagcaaattttggggcaaattagctaaatagtcttattaagttgccgtctactgaccccgtgtttcaatagtttgtctttggctccatccaaacattaccyttttctactctttaagaaataacattcagggaaggcttcagtgtttgtcattaacccttctctctctctccacccagttcctacagacgcctatgtccctcactttctctcctcacttctttctgtctgaactcagatatttcattaatactaggaatatgtaactaagatgcttttaaaacagccactcaaaaactataggttttaattgtacaatagataagttttaaagccaaagaactggctcccgtctaccttccattcctgctctctggctattttcacccgtaggaaaatatgttatttccaaattatcgattcatttaggtatttatgcatatattgagtgtttctatcaattcactaaccaaaccatgacag

SEQ ID NO: 399078 - DNA, 604 bp, Homo sapiens
tttgggctagtcagttggtgttgaaggaatctggtcatgcgaactagaatggaacaatcatttttacacggcctatggctttctctaggggttgtagtggagttcgtgggcccagcttaccaccatttcaaactccggtgagtatgcttgggtgtatgagtttgaacattaaaggtacattaaaccactcataagtaatttggctattcagtgaattgtagactttcctagcaatacagataattttccttatattgaatagmcacattaaggacaagctatatgattcctaaatctaccaaagataatctatttgggaaagaaaacaggcacaacagacagagatagacacagatttacaaatgtacacacacagggacatccacggacatagacacacaaagagaaatacatgctatcttttcatttctcaaaatgtctgtaaactgccatgctttgattgatgtaaaatcatatggcaggttgatgcaagacctcggagatcttgcatctcaggtcagttggttgtgagattttaccatatgctccaaatctatcagtgaattagggctgtcaaaaagtttaatagaggcaggacttgtaa

SEQ ID NO: 399079 - DNA, 604 bp, Homo sapiens
tttgggctagtcagttggtgttgaaggaatctggtcatgcgaactagaatggaacaatcatttttacacggcctatggctttctctaggggttgtagtggagttcgtgggcccagcttaccaccatttcaaactccggtgagtatgcttgggtgtatgagtttgaacattaaaggtacattaaaccactcataagtaatttggctattcagtgaattgtagactttcctagcaatacagataattttccttatattgaatagacacattaaggacaagctatatgattcctaaatctaccaaagataatctatttgggaaagaaaacaggcacaacagacagagatagacacagatttacaaatgtacacacacagrgacatccacggacatagacacacaaagagaaatacatgctatcttttcatttctcaaaatgtctgtaaactgccatgctttgattgatgtaaaatcatatggcaggttgatgcaagacctcggagatcttgcatctcaggtcagttggttgtgagattttaccatatgctccaaatctatcagtgaattagggctgtcaaaaagtttaatagaggcaggacttgtaa

SEQ ID NO: 399080 - DNA, 592 bp, Homo sapiens
tttcaagacaaattgattggccatcagtcaatgagaagaagaggaaaggttactttgcaaataattactttaactcttayggaaagacaccataatatgccccagtgatcaagaaaaatggagaaaaaacaaaactgttttgagttttaaaaaacagtgctctaacacatactgatcatgagaccttatttggcaataaaatcagatcaactgcacgttaattgtgcttgacaaaacagtaacaattctcttcatctgtgattattctttaatttctagaaggatatcataaccatggtagaaataataacagtagcgtagtacaagtagcaataataatatttgtatagttagtattaatgaaataaataaaacagtctgttcatgccaattggtatgtgattataagtgggagaagcatttcatccaccctcactgtaatttaggtgggattaaccacacctgtagaggccagttctggttgacctaaggcagtctatgcagtctcatctctcctgtgccagtgatggtgaagacctatgccaattagtgtgtgacattcctctggccacagagatggtcagtgagtttc

SEQ ID NO: 399081 - DNA, 395 bp, Homo sapiens
agccccactatcaatttacttattgatgttaaccaaacccaaggacagaagtgttgctagttatggtatgaaagtttrtggctagatgtaaagtggcagacatgatttgttgattaaccactccccgccccatcttcttcctggaaaatagagcctcatttttgttcaggggtaaataaatatatgcagtatcaggtaagacaacttcttccccatttgcctttgtagatagggatggccatctaacacaattatgccaaaaggggtggaaggtgacatgtaaggatgttctgatatgcttttgtttttgatgttgttgttgtggaaagaagacacttgtgtctggcattgccactgttactcccctgcactttttttttctttttttttttttt

SEQ ID NO: 399082 - DNA, 614 bp, Homo sapiens
tggcaaaaatctcttttgagggcaatttgtcagtatctagcaaagaagcaaaacttggaaagaaacacacgaaatttttcactgaggttatttctgggaagaagaattggtttacaggaactgagtaaattagaaagaattttactttttactctgtattatgctacattgtttgaatttaacaatgtgtgtattcctttgtaaaattaaattaaatttaaaaaataagaactccatgatcaaatactttgtttctatatatactatatactatagttctgtcttaaaaatttctaatgctcatttgcatatttaagctctgaaaagccctaagttacttaaatgctgccccctttattcaaataacccttattaatatgtcaataattggatatttccataaaaccctttaaaaaatcatgccratttttggagaatagctatagagaaagagattttcccaaatgccaaattgttcaaaatcaatcacattcaagttttccgtaagtatcaggctcatgcctttagattcaagagcaaatgatttctaagagaaaatgacacttcccaaggtaacttcagtaactaactctgtctatgatgaactttgtgtt

SEQ ID NO: 399083 - DNA, 516 bp, Homo sapiens
tttttcccttatgtttcctgaatctttttctcaccagtctctattccagcaggcagcagagaagagaaaaagcaaattaaaagtatctgttatttcctggagggtcaattatgctccaaacttgaattaccaaaagccctggtggtgaagcayagctggtttgatttggtccacccttgtaggaaaaatttaaaatcttgatggggctgcccgccacgctacagatcaaagagaaaggataacctgggctgggaataaaatgtatagtctaagatctgtttagccccaagcatccagcactcctctgtgatgggtcatcaaaggctctgtgcaaatgatgtctcagtcagcccagggagccagacaccaccgagggaaagagaggtggtgagtagacaccaagacacgtttcttttatactctcagcacagcctggcagaatcctaaaatccctcttcaagtttggctttcccctgaatcagcaatcctaaacttgtctgcaatcttgcccagcct

SEQ ID NO: 399084 - DNA, 603 bp, Homo sapiens
ggtattaatggcagattagacattgctaaaaaagtgataagtgaattgaaaaataacataaactattaaaattaaaccacaggggaggggggaagaaagaacagagtattagtgagcagaagcacaacttcatgtcacccaatatacatattattggtattcttgaaggtgaggaagatgaagaataacaaacatatttgaagaaataatggcaatttttcccaaatttgttggaaaatacaaaatttacattcaagaagctcaagtccaagaaatacgaagaaaattacaccaagacacatcataatcaaattagtaaaagagggagaggaagaggggaagaaaatattaaatttttttttwaaaaaaatgcatacaaaggaaaggactgaagattattcataaggaataattcaagagagatgaaaatggagaaacggctttaaagtagtggaagaaaaagtgctcgatcgacaattctacacccaaataaaacatcgtgcaaaaataaaaacaattttttgtggaaacatgaatacttatagattcaatagtagatctgcactgtaaaaaggaaaaatgataccagatagatagaaatat

SEQ ID NO: 399085 - DNA, 456 bp, Homo sapiens
tactgttattgttttttaatgagaattatgaggcgatattcagattcaccataaaagagcttcataactaatttgccaagtcttacatgagctctaaagggtgatattttgacatgcatgccatagatatgccacacctattctgaattttgacaaactctacaagacaaaaccataatattatacaagtgccttcctcaactttctcaatgcctgctggtgagttatttctgcttcacttgtctccctcagccccagtactaatgacctttcctgtgagttttaatacacatagstaattgatcctttgtgtattcccctgcctctagaatttgctattcaactattttttacattatattaataaataaagtcttccaaactacatattcccaaaaaatcattcatattaggtttatgatagggactgagagtttatattttttagaagtttcc

SEQ ID NO: 399086 - DNA, 595 bp, Homo sapiens
ttctgcttcacttgtctccctcagccccagtactaatgacctttcctgtgagttttaatacacatagctaattgatcctttgtgtattcccctgcctctagaatttgctattcaactattttttacattatattaataaataaagtcttccaaactacatattcccaaaaaatcattcatattaggtttatgatagggactgagagtttatattttttagaagtttcctagataaatcaatggcataaaaaaattaagaatcattaccataaaccatatttctttggaagatttcctcaaattcaataactttcaaatcctgttactgtcagtgggaatctggacaattttaaagccagggtgagaatatatcaaccttcttaaacataaatattacatagtcaaacatcacctagaaaccaagtggtggagctgtgtgtcatccaaaataatgttaaagacatgcatatatrtatatatatatatatatatatatatatatataaaatgaaagttatttacatatataaccttcagtatacacatgcatgcatgtaagttatgaaagttatatatacatgcatgtatgtaactt

SEQ ID NO: 399087 - DNA, 489 bp, Homo sapiens
caagccattcacgaggaatttcctctcatgactcaaacacctcctactaggcccaccttcaacattgagatcacattttaacatgagatttggaggggagacacatccaaaccatgtcagcaatgaagatttggcatacaagtaataggagttgaagaagcaaaccaaactaaagcaaaaataaaaattaaaaaaaaaaataagaaaaatttccccccaacacaaataaaattgaagccacttattgaaacggcatacagtrtacttaacgatatcaacccagatgagcattaaaaaaacaggaagagaatagggaaggtggaaataatggcatttgtataatccatgaaggcatgcagcaagatatactgaaactaaatacaaaacttggaagagaaagggaaaagcatgagcaaagatataacaaaagccaaaataaaattttaactgttactatactcatcattaattgtgatagtgttagaattg

SEQ ID NO: 399088 - DNA, 589 bp, Homo sapiens
cctgggggctctcacttttttacccttgcgccctggtaggaagccttccctagatcggcaccaatccctggtgggcggctgtcctgccttgctcttgtctgctctcygtgggtcactactacttccttgatgaatcctaatgttgactcctggatgatctacttgaataactactgcttactccccattttgtctcctctctgtgaaagtgatacaccatagctgcttttactcagccgtcttggcactgctcctttctgcagtttcattagatggcagataggttttttatttcaagcttttctcttttcatattatagacatcagaggtacaatttttccttttagcatagctttaactgcatcccacgaatttttatgtgtattttattattatttaatttgattattttctaatggatttaagagtgtattgtcttatttccaaatacttgaatgtttctagatatcttcctgctgttaaatagtaatgtaattgttctgtggtcaggaaatatacagttgagccttgaacaacatgagtttgaactgcacgggtccacttatatgcaaattttttctcaataaa

SEQ ID NO: 399089 - DNA, 596 bp, Homo sapiens
aaattatttatacacagaatttgaagattttcctctccagctttctcctttcctggattttcatcttmaatttccgtttactgctgttggtggcttttacttggatttttggtcctacatgccacagagtctgagttttctgagtttttcctgtgtatagtatttggtacaaattgagtttgccctcaatctgaaaactgtggagctggaagactgtctcattgtgttgactctggtccaatatttatctccttctggtaactcccatattttcaggtaggtttcattgtgtgtgtgcatgtgtatatgtgtgtgtgtgcgtgtgtgtgtgtttgccccaaaagtttgtagttgttgtctgaaggtgcactggaataaaaagagccacttattcatgttggaaaaatatgtttcctatgtcagtgttcaactctttcttactctatcttattatattctaaaaagttagttttctttcccccccccgccatgggtcttctctcagtttgatttgaatatatcttcttattaaatttacttatcccatctaatagtccttgaaagtatggatttaaattctttgaactaacttttat

SEQ ID NO: 399090 - DNA, 619 bp, Homo sapiens
aattttcacatatagatgcttaatttatctggaatttattcttatttattcctatatatggtgtgaggtaagaataaaaccatatttttcactgattaacctatttgattaggaattatttatttcactgaattagaaaaccatttttgtcatatatgaaaatccacatatatgtgccccttctatgggtctccactttgtttcaatgcttggttttactcctgagtgtttataacacrgtattttaatttagaccactttattgtaagtcttgatagcataggaagtcctgcttcttgctttcctgcactagaaaaatttcttaatctactatattagaatcagttgcttgatttccacaagaaatcaattcacaattacttttggtatgtgtcaaatttataggttaatttagtgaaagtagattttttaagaaatcaagtctttccatttttgaacatggtatagcacttcattcatacaggtattcttttgtcacaacaaatactttctctttacgttaaacgttatagaacatttttttgcaatactctataaagaggcccatttctatgtcacttaaagtaaaaaacatacatttttatgcatgtttaaatgc

SEQ ID NO: 399091 - DNA, 619 bp, Homo sapiens
aattttcacatatagatgcttaatttatctggaatttattcttatttattcctatatatggtgtgaggtaagaataaaaccatatttttcactgattaacctatttgattaggaattatttatttcactgaattagaaaaccatttttgtcatatatgaaaatccacatatatgtgccccttctatgggtctccactttgtttcaatgcttggttttactcctgagtgtttataacacggtattttaayttagaccactttattgtaagtcttgatagcataggaagtcctgcttcttgctttcctgcactagaaaaatttcttaatctactatattagaatcagttgcttgatttccacaagaaatcaattcacaattacttttggtatgtgtcaaatttataggttaatttagtgaaagtagattttttaagaaatcaagtctttccatttttgaacatggtatagcacttcattcatacaggtattcttttgtcacaacaaatactttctctttacgttaaacgttatagaacatttttttgcaatactctataaagaggcccatttctatgtcacttaaagtaaaaaacatacatttttatgcatgtttaaatgc

SEQ ID NO: 399092 - DNA, 619 bp, Homo sapiens
aattttcacatatagatgcttaatttatctggaatttattcttatttattcctatatatggtgtgaggtaagaataaaaccatatttttcactgattaacctatttgattaggaattatttatttcactgaattagaaaaccatttttgtcatatatgaaaatccacatatatgtgccccttctatgggtctccactttgtttcaatgcttggttttactcctgagtgtttataacacggtattttaatttagaccactttattgtaagtcttgatagcataggaagtcctgcttcttgctttcctgcactagaaaaatttcttaatctactatattagaatcagttgcttgatttccacaagaaatcaattcacaattacttttggtatgtgtcaaatttataggttaatttagtgaaagtagattttttaagaaatcaagtctttccatttttgaacatggtatagcacttcattcatacaggtattcttttgtcamaacaaatactttctctttacgttaaacgttatagaacatttttttgcaatactctataaagaggcccatttctatgtcacttaaagtaaaaaacatacatttttatgcatgtttaaatgc

SEQ ID NO: 399093 - DNA, 570 bp, Homo sapiens
aacattatgtctaaaaatatacgtaacaattaaaatattttattgctaaaatatgctgacacagagacataaagtgagcacatgctgtcggaaaaaatggcaccgatagatttgcttgatgcagggttgccacaaaccttcaatttgtaaaaaaattgcactggctgcaaagtgcaataaaacaagataatgcctgtatttctgaaatgagggcattctgcatgaggacatgacctttaaaagcaagaaacctatytgaccttctataaataacatttccaataaattagttagaaatagcataccatatgagcaaattacaatgggaacagattgagaaatagacaccattttgaggaaaaggtcaatataaatgtaatgtaaacatataggacatggaaaattatcagggtaatctttaaagtgagtagctgtaatagaacattacttctagaaatggtcttaaagactgagtagtccaatcctctcattttgcaaataaataaaatgaggccctgagaagatatataacttacttaataaacatgacaaagaggtgctctttctcct

SEQ ID NO: 399094 - DNA, 561 bp, Homo sapiens
tcccaccagatatatataagtgaggccagagaaactacttaactgaatccagcctaaatcactgaactgcagactatgagctaaataaatktgtgtttgtgtattttacggcactgacattttatgattgattttgtttataatgcacatcaaattgcctgtaattgatgtaagacaggaattggtggcctagaagatcaagaggcaaaaatgcaggaagaaatacaaaaagatgggaagcattaaaaaacaaagcatatatgaagggaagatattcagaagccctaaattgccaataaatagaagtttctattactggaaaaaaaggaaaataaaaaaaagaagaggaggtaatactgatctaaatgatagaaaatcattttcctagacaataagaatttgagcgtgagtttgtaaaatcatttaatttcagtgcagcagtaaagaaagagacacatactttggcataccttattagtattctaaatcaaataatgaagagaaacatttctgcaaaaagtttttaaagattaaattactcgcaaaagtactaacacaggg

SEQ ID NO: 399095 - DNA, 602 bp, Homo sapiens
ccaagctctttattatctgggtctttacataaaacgtttcctgatagctaaaagataatagaataatcatctttatctttggtctgttgagttaaaaggactctgaacttgaaaccctactgccagccaagatatcattcaccaatagaatcaaaaaaagttctgaatatgcagagaatcggagaacatatattaatcaagcactcagaagaagaaatgacctgaggaagaacgttaaacgccaaatgagttgaaacagaaatctcaatgcggggaagaattagatgagtgggaaattgtagataaagaattttgcaataaatataattaaatctaaatcgattgtgagagaattattatatataayatagttactaaatatgaatttgtgaaatgaaaaagacacactgaaaaaaaaactgaaaagtagatatttcaacaaaacccaggagttataaaatatcatggagaagaggaaaataaaagtattctaaactttcatataggggatgaagactctgatagaaaaaaaaataatgtattacaaattctatagaaaaacttgcatgtatacatgtgcagggaaaacaattacaagaatg

SEQ ID NO: 399096 - DNA, 587 bp, Homo sapiens
tattaacatcttaggaattaaggattagcaatctaaataatctttgagggccaaagtaaagccaaaactgaaattataagcagcatagaaaaattttaaaaaggaaaataaacccttctgtgttggttcagattatttggataaaattgtcatagaagccagattcaaattgctttagtaataatctcccataacacggaatcctgagatgaatgcttccagggttacttccactgctccaatacatcatcagggccctgtttttcttccacttatatgmctcgccatccttggtttgttagatttgttattagtcctcttttatctacatttccaagaagggtgcttcatttccagatattatattcaaatatgccagcatccattggataaagagaacatattttttagtatgtctttttataataacatacaaatctttccccaacattccccagtagatgtctattcacatctcattgtccagaatttggttacatgtctaagtgcaaaccaatctcaggcaaagtaaatttgatccataatttacttacattaattaggattgcttgattgtgttaaatgga

SEQ ID NO: 399097 - DNA, 559 bp, Homo sapiens
ggatacttttttgagaaccagttatgtttattttcttgatgtttgtgataacttcacaggtgtgcacatatgtcaaagttatcagattgtatattttaattatatacaggctgtatcaattatacctcaataaacrtcttaaaattttaagggtagcgaaaaatggctaatggctactgtaggtgacagcatagctccaggttgttctattagcaaaataagtgttaactaggagacttaggcagcagatgaggataaaatcaaattaactatattttgcttttgtggaattttttttttctttccctccagtacaaccctgtttgtatatctttaaagattttaaaggagtggaatgagtttgttttctgctacctgcctgcaagaagcacacaatctaatcataaagatatgaaactataaaataacaacttaaagaatataaagacaaatgaccagcagaggagatcatactatttttcatttcacagaaagtgctaatcaagtttagagggccctgaagtagagctggaaatgctctgagacacttttacaaatg

SEQ ID NO: 399098 - DNA, 606 bp, Homo sapiens
tggtttaagattctgcctagtgaattgaacaactgaataattatccagctagttgaatcaagatagactattggtctacttaatattgcctgaaatatatctattacattaaaactgattgagagcctgaagtctatttggctatgtgaaaaatctgataaaatttatatccgtaaaatttatatccccacagaagacagagtgtaattcctctctgcggaggtttgtgctcatagagttaatttgagtcaaccttccttctagattatagctgccagccttggctgcatattggaatcacctgggagcctattaacaggtggagattttcwgtccccacaccagaccaattaagtcagaatctcttgaggtgggaccccacaatcagtgttttaaaaagtctacatgtgattctaataggcaaacaaggtagataacccttatcctacagtctttgatggcagaaaatgtaatgtaggctttcttactctccactaaatgagcatcccccatctgaacatatatacttctatgtcattagtaaaaatctactcggttttaagttggctcatctgtggacagttgcttagatgtgttcagtttgtc

SEQ ID NO: 399099 - DNA, 570 bp, Homo sapiens
atcttgcatccatgctttgatctattagttgttcttttaaaattctcttttatatattttttaacatttttaaaaatttatcttttgagactgggtctcactctgttgcccaggttggggtgcaatggtgtgattatggctcactgcagcctccatctcccaggctcaagtgatcctcccacctcaagcytcccgagtagctgggactacaggtgtgtactaccatgtccagctcattttttaatttttcattttttttttgtagagatgagatctcactatgttgcctaggctggtcttgaactcctgacctcaagtgatcttcccaccttggcctcccaaagtgctgggattacaggtctgagccaccgtgcctggcctattagttgtttttaatgtagctctgtatgtgtgagtttgtataaagatgggaacacatgttttgtgtatgtgtaatgtgagctttaagtgaacccggaaatattatcattcttaatgccatttatgcatactggcagctaacaaagaggagaaaaaaatataaaatcttggtttgattttataaagtaa

SEQ ID NO: 399100 - DNA, 570 bp, Homo sapiens
atcttgcatccatgctttgatctattagttgttcttttaaaattctcttttatatattttttaacatttttaaaaatttatcttttgagactgggtctcactctgttgcccaggttggggtgcaatggtgtgattatggctcactgcagcctccatctcccaggctcaagtgatcctcccacctcaagcctcccgagtagctgggactacaggtgtgtactaccatgtccagctcattttttaatttttcattttttttttgtagagatgagatctcactatgttgcctaggctggtcttgaactcctgacctcaagtgatcttcccaccttggcctcccaaagtgctgggattacaggtctgagccaccgtgcctggcctattagttgtttttaatgtagctctgtatgtgtgagtttgtataaagatgggaacacatgttttgtgtatgtgtaatrtgagctttaagtgaacccggaaatattatcattcttaatgccatttatgcatactggcagctaacaaagaggagaaaaaaatataaaatcttggtttgattttataaagtaa

SEQ ID NO: 399101 - DNA, 522 bp, Homo sapiens
agggattttcaaatggacaggaaattaaatggctgcctgaagtttttttkgggggcgggccaaaaactacctttaactggttcttttcaactattctgagaaattggagtcaagtcactatgggaggcagagtcctcatctagaagcttataaactggttatgataatcagcacggcagagacccatttaactggcagcttagttaaaaaagccacaggggacactgtcttgaactccaagtttacgtattatattagcctgaatataacagtggtttaaacaaataatgtgtatacagctacacaaaaccacgcaaaataaatttccttatttttttgctcccagtttctcctacttcttggcacatcatagtattcaatttttccttcctgactgccctcttgagtattaaaaactcgctttcagagaactccacaacatacaagaaatgcacagaacaaagagctttttaaaattttccaaggccgcatacctatacaccaatcacatctgcaaaagta

SEQ ID NO: 399102 - DNA, 505 bp, Homo sapiens
tcgtgtatgtatttgccatttttaatatcactagacaattcaatcaggttgctacgttggtcccttgggtttactctaaatagcttgattgcaaatatctttgtatatattattgttttttctcctatcttgtaatttctttgagcacatcccaaagaggaatgcctagatcaatgggcacaaataatttgacagctcttattaaacattattctgtaagtaaaaactgaactacttttcagtatcactagcaacatatgagtgtatcagcttcctaaacccctccatgttaggtcattatgaacttatgatctaacaaattacagggtcttatcccactaatgaaattataagagattcaacacttattcagccccgaaggattcattcaacgtagaaaattytaagaacattaaccaagtatttacctgcctagtgagtgtggaagacattgtgaaggacacaaagatgtatagaattccattcctgacttccaggtatttac

SEQ ID NO: 399103 - DNA, 377 bp, Homo sapiens
aattctaaattttaaaagcaaagatttgaaaacrttagtttggggacttctaacccataaagaatttagaatttagtctaaactgcaggaaaaacctcaagaacagctaacagtgtactatagtttttcttctgaagcataatttttctctctccagtccccatttttattaaaaacctattatgatggaactgatttgtttataaaataaactttagccttactgtactcagcctgattatttacataaagtgaagcaaaaataattattttccacttaggcttttaaaaattggctttaatagaactctgttccatgaggaatctcagataagactttttaatagccgagcccagccatgggtttgtaccctcaa

SEQ ID NO: 399104 - DNA, 377 bp, Homo sapiens
aattctaaattttaaaagcaaagatttgaaaacgttagtttggggacttctaacccataaagaatttagaatttagtctaaactgcaggaaaaacctcaagaacagctaacrgtgtactatagtttttcttctgaagcataatttttctctctccagtccccatttttattaaaaacctattatgatggaactgatttgtttataaaataaactttagccttactgtactcagcctgattatttacataaagtgaagcaaaaataattattttccacttaggcttttaaaaattggctttaatagaactctgttccatgaggaatctcagataagactttttaatagccgagcccagccatgggtttgtaccctcaa

SEQ ID NO: 399105 - DNA, 585 bp, Homo sapiens
tcgggcaattatccttcgatagcctttacatcaaacacagagaagaattctgtgtctatatatattaatatacatgcaaattaatacatcattatatattattatatatcatataaacatgctgtatacatggtacatatgcagtaactatatatgtatatataaacagrcgttagggtagatattcattcactctttccccaacgtgtgggctgcaaggacagagagggtgggctatcctgggaaggtcccgggcttactgcagaaggggacagcatttccactgggccatagtgaccccagggaccatagctgcaccccaccatcactcacccctgatgggtgactccactcttgggaaatccttcttaacctgatacttgaggcaaaaatctgacactagcatcagaagtcaaagcaaggctcatgttcttggcagccctgaaattaataggagtaagtgtcagtgggccgtaactattctgctgtaaggacagcctctctgtgatcatgtatatttccacagggcttttgttcccacgatttctccccagatggctctgtaagcagcttggtaactacccc

SEQ ID NO: 399106 - DNA, 585 bp, Homo sapiens
tcgggcaattatccttcgatagcctttacatcaaacacagagaagaattctgtgtctatatatattaatatacatgcaaattaatacatcattatatattattatatatcatataaacatgctgtatacatggtacatatgcagtaactatatatgtatatataaacagacgttagggtagatattcattcactctttccccaacgtgtgggctgcaaggacagagagggtgggctatcctgggaaggtcccgggcttactgcagaaggggacagcatttccwctgggccatagtgaccccagggaccatagctgcaccccaccatcactcacccctgatgggtgactccactcttgggaaatccttcttaacctgatacttgaggcaaaaatctgacactagcatcagaagtcaaagcaaggctcatgttcttggcagccctgaaattaataggagtaagtgtcagtgggccgtaactattctgctgtaaggacagcctctctgtgatcatgtatatttccacagggcttttgttcccacgatttctccccagatggctctgtaagcagcttggtaactacccc

SEQ ID NO: 399107 - DNA, 558 bp, Homo sapiens
taagtcaagtccaattctctcccagaggctttgatgaggctcttgtcccagtgccccttccctgctctgggaagcagaaaccaagccagttaacctcccagaaatttcccagccatgctgcccccagcctcccacccctgaccctccgtgaactcagccttgtgtattatcctgcacagttcagcttccttgctgaccaagcccactgctggtttcccccacaccagtacagttacccccagcccatgaatcctgccttcacgctttcaaatgccgagatggtttcatggaattgagtaccatcctcctatttttggtcgtgacacacttggaacataatccctgtcccccaaggttgttcagtagttgagagcgtggagtctggyaccagatgcttaaattcaaagactagatctgacatttgtaagccattgactctgggcaaatcatgtaactctgtgcctcagtttccccatctgtaaaatgagataatcatatctctctcataaagctgttgtgagataaagtgattttagatacacaaggctttagagcaat

SEQ ID NO: 399108 - DNA, 506 bp, Homo sapiens
tctaaaaggtacactctgaaaaagtcttcctctggcctggtgtggtggctyatgcctgtaatcttagcactttgggaggctgaggcaggtagatcacttgaggccaggagtttgagaccagcctggacaaaatggtgaaacctcatctctactaaaaatacaaaaattagctgggtgtggtggtgggtgcctgcaatcccagctacttgagaggctgaggcatgagaatcacttgaacctaggaggtggtggttgcagtgagcccagattgtgccactgcactccagcctgggcaacagagtgggcaacagagtaagactctgtctccaaaaaaataaaaataaatatataaataaaataattattaaaaagtcttcctccttccccttttccttcctcaccacccaatttttcttcctggagggaacccgaaagcccattttttgtttatcttttctgagacattttttgttttatgcatacacaagtaaatgtgtgtaaatgtt

SEQ ID NO: 399109 - DNA, 506 bp, Homo sapiens
tctaaaaggtacactctgaaaaagtcttcctctggcctggtgtggtggctcatgcctgtaatcttagcactttgggaggctgaggcaggtagatcacttgaggccaggagtttgagaccagcctggacaaaatggtgaaacctcatctctactaaaaatacaaaaattagctgggtgtggtggtgggtgcctgcaatcccagctacttgagaggctgaggcatgagaatcacttgaacctaggaggtggtggttgcagtgagcccagattgtgccactgcactccagcctgggcaacagagtgggcaacagagtaagactctgtctccaaaaaaataaaaataaatawataaataaaataattattaaaaagtcttcctccttccccttttccttcctcaccacccaatttttcttcctggagggaacccgaaagcccattttttgtttatcttttctgagacattttttgttttatgcatacacaagtaaatgtgtgtaaatgtt

SEQ ID NO: 399110 - DNA, 609 bp, Homo sapiens
agggcccctgtctcaggcagggaagtgaagacaggagaagctggccatgaccttctcactcccctaaaggacaaactgggggcagtggctgtagtcctgcccttggggaaggaagagagcaagtggcccaagaggcagggctagagagaagatcttagaaccaaatacactctgaggaactgttttgggctttaaactaggagttgacaaactagaccacaatggaatcacctggggcaattttgaaaaccacagattccccgcctccaagcccccatctcactgaagcagaatctcttggagcacattagggcttcagccacccgtatttttgaaaagctccttagatgcagctaattttagggactgaaggctaactctaatgacacctccaggcctccttttcagtgtcttgtgacgttgaaaaacatttactacattcctgcctgagtcatcctagaatccaggcttcccctgagccatctggatatgcaggtcaaagkgagatgggctggaggggagacagggagcatctgcttggggagggatggagtgaggggagggtcaggccaagggtccagactttgctgggaaaaatcccctacacag

SEQ ID NO: 399111 - DNA, 458 bp, Homo sapiens
ttaggactctgagatcctattcccaccacagggcttcgctgtcctgcagagcccacctacagacatgtcactggatctggaaggctgtgtgaacacagctgcacatactgaggctcagtatcttcaaaccaatgtcatggtgccccatagccagtggaacccactcactgcagaattttactgatctcctggcaagaggagcttcataatagcatttatcatgttcccaggggaggaaaccaagtkgggggataaaacagcaggaacctttgaagtacaaatatgaagaaagcagaagagatcccccaggtcttctggtttctcagcaagatgcagaaagaccagatgaggagatttagttctcaccttggctaattcatgaaaatttgaggcaatggccaatgacttaccaattcaagtaccacaaagaagtttgatcagaaaggatatctcaggac

SEQ ID NO: 399112 - DNA, 592 bp, Homo sapiens
gtttcaggcagatggagcagtgtatgcgcaggtccagagagaagagttgacagattgtatgtatccattaagtattgcaaaatagggaaagtaacagatacctgggaaaaaaaaaagaggtaagtttatttttgtcttaactgaaagtccaaaagtgggcatttctcagttcatatgtcagccccacgaagtcttcastgacctggacttacttatctcttgctacttcatcacattactggaattactgcctcacgatctcgtgatcatggctgcttgagctccatgcttgacatctgcattaaggaaaaagaaataatcagatttgccattttggaggatgactgttcctacactgtgaagaatgacttggaggagataatacctgttaccaggctattaaagtaattcaggaaaaagatcattgcaatctggattgcttgagctcaagagttcgagaccagcctgggcaaaatggtgaaaccccatctctacaaaaaatacaaaaaatcagctgggtgccttggcatgtgcctgtagtcccagctacttagaaggctaaggcaggagaactgcttgagcccgggaggca

SEQ ID NO: 399113 - DNA, 558 bp, Homo sapiens
attttgggtttggtttgcttttgacttttctagttcattaagatacatcaagtcaggcacagtggctcactcctgtaatcccgtcactttgggaggttgaggtgggaggatcacttgagctcaggagctcaagacaagcctgggccacacagtgagaccctgtctcaataaaacatcaaaaaaattatctgggcatggtggtgtgtgcctgtagtcccagctacttgggaggctgaggtgggaggaatatttaatttccgtgtgtttttatagtttccaaaattcctcttgttgtttatttctagttttattccattttgatcagataagatacttgatattatttccattttttgaatgttttaagacttgttttgtggcctaacatatggtctgtccttgagagtgatccatgtactgaggaggagaatgtgtattctgaatatccattrgttccattcagtctacagtgcagataaagtctgatgtttctttgttgattttctatctggatgatccctccaatgctgaaagtggggtgttgaagtgtccagctat

SEQ ID NO: 399114 - DNA, 636 bp, Homo sapiens
aataaataaattagatttcctcattaaatccaaattatagtataaattaagtactaccctgctatatgataattttttaatagacacaaacaaaaccatgtcaatatttccagtcaccaacagaaaatggaagcagttttgagcaggcattttagctttcactattctgaaatatgttagctatagactctgtttgctgagtgtagtgatgtttgtaaaatttttaatatataatctttaatacaatcatgtctgaaagtacaaaagcagagtattacatttgctagtgagaaaaggctgatgattatgatgaaaatgaaaatcaagataattttacacattcaaaacaatgataaaatgccaaattccacatgtaaatatgaaataaattgttcaataagagactgttcctcatgaacaaagtcaatcatgcaaaatgtataaagtgctgtgctcatgcaattgacaataacgaacaggaaatgaataagagtcacagatgaattagaaaattttaagagctgtcatgttagaatattgtcaataacaagactgatgtgcttctctggagtaggctctttaaaaaattccttataataagatatgytggtaattaggccctcaaaggaaaaaaaa

SEQ ID NO: 399115 - DNA, 552 bp, Homo sapiens
tgggttggtttcattctgcttcacttgtttttacattcctcttaaatcagcagtttcccaggacatatttttcttgtggcaatagcagaaatgmaagtgtgtgagcagaaccatgtaatgcctcttaagggcttggcttagaactgacacattgtcagttttgcctccattcccttggccaaaacaaatcaaatggtcaagctgaagattaatggtgatgggaaatgcactctcccgactccagtgtactacaaggtcacatggcaaaggagaagtgaagaattgaaatgataatcaaacctaacataatatataacacagaatttcatgtattgtttacataaatgggatgacaacatatataccttttgtacaccttttcagtacacagacatgcccctgggataatgtgagtttgtttcagaccattgcaataaagtgactattgcaataaagcaagtcacatgaggtttttggtttctaagtgcattataaaaattatgtttataccataatgtagtctagtgtgcaatagtattatgtctaaaagac

SEQ ID NO: 399116 - DNA, 418 bp, Homo sapiens
ccggggccgagtgcttggcagcagggctgtctccctacaaggcccggcccagtacccgagtcggccacccggtctttgggcttataaggcaggactggcggctctcaagtgctggaggcttcgagtgggcccggggccaagccctcagactttggggagcctcttctcagccaccagcagacatgggaactactcactgtgtgaccatgggccagggackcaatccccacagcctcagtctcctgatctgtcagatgtgggctctaggacctgcctcatgggcctgttgtgaggaaaaccctgccagactccagagggtggagctctggcctctgtcctgcccacctcagccccaaacacccagaacaaaggcaggtgtctgtccctgaggacgctggggcagggcccaagggtgaga

SEQ ID NO: 399117 - DNA, 601 bp, Homo sapiens
gtgcagcaatagcatttgtcaaaattcaactcctttttatcattaaaaaatctttcagcaaattaagaataaattaaaacttcytcaacctgattaagggcatctacaaaatctgtcagctaacatcctactacaatgtgaaaaatcaatgctttctacctaagacgaggtagagggcaaggatgttggctctcatcatttttatttaacttaaattgtataggagtgcctagtcagtgcaacaaagcaagggaaaaataaggcatacatgctagaaagaaataagtaaaattgtccttatctacaagtgacattgtatagaaaaccctaagaaacccacaataaaagctattagaggtacaaggttgcaggataaaatatacaaaaatcaattcaaggttgcaggataaaatatacaaaaatcaattctgtctcacatactagcaactaacatttagaaagttaagttataagacactttgtttacaatagcataaaatacttagcaaaagacatgtatgacctgtaggctgaaaacaataaaacatgacaggaagatctgcataaatgaacagctataccgtgttcatggattcaaagt

SEQ ID NO: 399118 - DNA, 489 bp, Homo sapiens
gtggtaattgagagatgagtagtaaatttttcagaatatactttcaggagaatataaggaggaaaatcaggtacatgatgtaatttttgacctctggaaatttggaagacaagatataatcaaatacaataagcaataataattatgagtcactacatttttggaatttcagcagtatgtctttggtgtatgattgtgtcaaatcatctctactaactcacaaaaaaaaatctaattctgagaatattctgagatggccaaaatacttarcactagaaagacagaatgttgtaattaaactcttattgtttgttataattaactaaaacaatacccttaatcattatataatctgtcttagatttgaagactcagaatctatcccttgtataagtagaaacaacattcacgtggtcatttagaaatagtatttttctctcttcaaacttaaagaataagtttaatgaggataatgttactgcttattaa

SEQ ID NO: 399119 - DNA, 533 bp, Homo sapiens
attatcagtgttggcagagtttttgctgtttaataaacatttgttccgatcagataagtgggaagaaattgtcatttgcttgttcaagtcatccttttctgtgataatctgctcctagctgaacatagggaaatagatagaacaatgcctcaggcctacaacagggccaggctcagtgtgatttcacataagtttggctaaaataggactcaagtggagatggtcactcttcagcacggagagagaacacaccacacaacctcttcaggagattcagcctcaatcttacgcattgaagggactgtcctccaagtgagaggattggcttatgtctcaggccctccagtttctgttcaagttgaatgtggttatcaactacacatcacttaaagtcaaatacctgaaaattctcaacaatgcacactgacttggggatcacaaccacattcctctggatttggaaatggatcagaacctgggctwtttatttatttatttatttatttatttatttatttatttatttgtgcttg

SEQ ID NO: 399120 - DNA, 544 bp, Homo sapiens
ctgaaagcatcatcgctaagtatttcatattgaaaggtatactattaatggcaaaattatgaaaaatagtgcattggcattatttccagatgtgccaaacagcattgcctgtytactaaagtaatccatataaatagacttaagaaaatccaacaccctataagcattctgtttgtaacgttaccagtttttaagatatgggggaaaaatacagcataataaatagctgataaatgcatattaaagaaagctgaagagatttaccttagtgtgtatagaatgggccctgattcatgaaaatggcattttagccagatgtacttgctatcttgtaatgaaagaaagtcaaggaaccgtgcctgagtcaggaggagagagggataaaggctgtgatgtgtcagctgctagatagacagcagagcctcagcctgggcgccgggttctcatgtggtcagttctaagattccctaacctgacttgtttatttccctttagtatattttttccttgatctctccactccctcggttgtagaggaaaaata

SEQ ID NO: 399121 - DNA, 585 bp, Homo sapiens
ggtttacatttgatgctaatattatatctgatgaaaaatagaccatttacttacgcttttctaataaacaatatataaatgtttctaagtatatgtgaaaataagcatttcatatttatattaaaagatttgtgtttttgagtaaaatataaagtcaactaaccattgtacataaaaatatctattccaaaatctcatgttatatagtgttaataactgaatactttaaatttattaatatggatatcaatgccttataaactattttttccttatcctttttaaatattgcattggasctttatggtaactaaataattactttgttctcatatgatttcattatattctctctatagttaccactaattgatcacaaattgatttttttgcagaattctcatattttaaatgctttcctgtactaacacttaatttgtatcactacagactaacttttttcttacatatatatttcttttgatgtattgcttttacaaaaaatcataagttccttgatgtgtattgatcatgtgtacacaatattttgctcctgcctgaaggacgtagggcaggtgcgtttgc

SEQ ID NO: 399122 - DNA, 587 bp, Homo sapiens
atgattattttcatgtagttttatttaatttgctaatgttttgttgaggcttttacatctaatttcatgagacatgcatgtctgtacctttctttgttgcactgtcattttcttgtattgggactgaagtaatactgaacacagaaagcaaattggaaaagactctcccctgcsttattttctggaataattgattaaaattggtaattcttttaaaagtgcattttagaattatcaaccaccacttacttttcaaaacgaagtttgtttggaaagcaaacaacgttcacttgcatttgcatatagtgcatggctgctttcatgctatgatggcagagatgaatgggtgcaacaaaaactttattcctcacaaatgctaaaatatacactacccggccctttacagaaaatcgtttgccatcctctgatttaaaccatctttttctatccaaagttttactatgctgatcaaattgattttcttgtttttggtcctaacctgtcttctgacgaagtaaatgatctgaggcaaacaaaagtagaaaagaaaatgaataattagataattagaatcctcacagctcagc

SEQ ID NO: 399123 - DNA, 597 bp, Homo sapiens
ttcagtggaatattttgaacataattagatctaatcaaattaaaattagagaagtatctatatatcttcatttgttatggaaatatagtttctttgttgcaattatttacataccatttaaattttaaaatatatataatttatttctgaaatcaatttaacattagcctctctgaagcttatttcagggagatattgttggcttttaaaaaacattctgaagaaatggggagatagctataaactccaggtctctattaattcaaggtctcttccaatggtagccatggatttttaagctgttgttttctaaaarctgaatttcatgagtatttgaaactgctgagacaaccacatgtttataaagaaatactactgctgcataaatctcttgttgtttgttatatgtggtttattgacagagctaaatgtataaacaagaagtggactatcattggcccacaactttatgttcattttgttagcttaatgtgttaccttctcttatggagttaatatataatgatggggtttacacaaattagtgtttaaaatgtgtgtacagtcactcaaaagaatctttcattacaaaagata

SEQ ID NO: 399124 - DNA, 451 bp, Homo sapiens
attgttaggtgttagtgtgtatgagtattttatgtgtggcccaagacaattcttcttccaatgtggcccagggaaatcaaaagattgaacacccctgttttatacgaccatttaaaatattacacaagcaattattgcttattgtaaattgccagaaatataagtatgcaaaaactagaaaaagtggttttcagctatacaatctcaaatatttaacggycattcatactgtggggtctatttttccagatggattttcttatttcccactgatttctcatcatgctcctgtttactgagatgctgaggaatccctaaaccaggcgtcctttcagcatgtttccctgccctttatagggtcatctggcttttcatctattccttctcaaatctattatttatggtataaatgatgccttttcatactcaatatatcatggttcttataata

SEQ ID NO: 399125 - DNA, 512 bp, Homo sapiens
ttatctcttactgggtccctcccccaacacatgagaattatgggagtacgattcaagatgagatttgggtggggacacagtcaaaccatataattctgccccrgcccctgtcaaatctcatgtcctcacatttcaaaaccaatcatgccttcccaacagtcccccaaagccttatttcagcattaactcaaaagtccacagtccaaagtctcatctgagacaaggcaagtcctttccacctatgagactggaaaatcaaaagcgagctagttatttcctagatacaatggggtacagaaaatacagctgtttcaaatgggagaaattggccattgtatgggctacagggcccctaaaaatccaaaatccagtggggcagtcaaatcttaaagctccaaaatgatctttgactccatgtctcacatccatgtcatgctgatcaagaggtggattatcatggtcttgggatccacccctgtgattttgcagggtaccgcctccctcccagctgc

SEQ ID NO: 399126 - DNA, 582 bp, Homo sapiens
tttacaaatctctagggcaggggcaaagtgccaccagtctctttgctaaaacatgactagagtcacttttcctccagttctcaacaaattcctcctcatctctacctgggaccaactcagcctggaccttattgtccatatcactctcaggcttttgttcaaagccattcaacaagtctctaggaagctccaaactttcccacatttttctgtcttcttctgagctcttcaaactgtttcracctctgcctgttacccagttccaaagttgcttccacattttcaggtatcttttcagcaacaccctacctactctgctgataccaatttattgtattagttcattttcatgctgctgataaagacatacctgaaactgggcaatttgcaaaagaaagagtcttaattggacttacagttccacttgtgaggctgaggaggcctcacaatcattgtggaaggcaaggtggagcaagtcccatcttacatggatggcagcaggcaaagagaaaatgaggaagacaaaaaagcagaaacccctgataaaaccatcagcccttgtgagacttatttactgccatg

SEQ ID NO: 399127 - DNA, 338 bp, Homo sapiens
ctaagctaatcagactctatgggcaagaaatagcatgtatgttggaggtcttaatccatgccctctagaaggtagaaaataaatccaatgataatgtaggattctgacacatgagtgaagtttgtaaatattyagtgggtgtggggcatgttgggtctttctttcccacataagggcagattattgcagctcatgccactcaaaactaaaaaaaaaacacagagcgtagaccactatgtgtttttgttgcaacacatttggcatgcagacattctgctccatcctatttagtgggtacacagaggtacctagattttattgggacccagagtaggaaa

SEQ ID NO: 399128 - DNA, 338 bp, Homo sapiens
ctaagctaatcagactctatgggcaagaaatagcatgtatgttggaggtcttaatccatgccctctagaaggtagaaaataaatccaatgataatgtaggattctgacacatgagtgaagtttgtaaatattcagtgggtgtggggcatgttgggtctttctttcccacataagggcagattattgmagctcatgccactcaaaactaaaaaaaaaacacagagcgtagaccactatgtgtttttgttgcaacacatttggcatgcagacattctgctccatcctatttagtgggtacacagaggtacctagattttattgggacccagagtaggaaa

SEQ ID NO: 399129 - DNA, 338 bp, Homo sapiens
ctaagctaatcagactctatgggcaagaaatagcatgtatgttggaggtcttaatccatgccctctagaaggtagaaaataaatccaatgataatgtaggattctgacacatgagtgaagtttgtaaatattcagtgggtgtggggcatgttgggtctttctttcccacataagggcagattattgcagctcatgccactcaaaactaaaaaaaaarcacagagcgtagaccactatgtgtttttgttgcaacacatttggcatgcagacattctgctccatcctatttagtgggtacacagaggtacctagattttattgggacccagagtaggaaa

SEQ ID NO: 399130 - DNA, 514 bp, Homo sapiens
gcctctgttctttttatttctgtctctgtctcactacctttgtctcatgcacagttttatgagtacartattgtaatagaaaaatcacagattagtatcaaatctcaaaaaaatgttttaaggtgccttgacatgtcttaaatacaatttttcaaattgaaagcattgatgtcaagggtatgtctagtaggattaagcacagtattttgtaaacataagagctataaataataagtaaccaccaagtatatcatgattaataaaatcaatctagttgcaaagtagacttttgagaatacactatttttctagtttaatttctgaatggttcttctcagaaccttccaacatatgatttgaagtaagtaaagtgaagtaaactgcaaatgtatgtagattcatacccaggttcagaaaatggcaaaatagagatgtatgtgagtaaacagaccagctctgcagctgtaaaaacaacttggaggcaccatgtcagacaaaacgggatccactgaat

SEQ ID NO: 399131 - DNA, 514 bp, Homo sapiens
gcctctgttctttttatttctgtctctgtctcactacctttgtctcatgcacagttttatgagtacagtattgtaatagaaaaatcacagattagtatcaaatctcaaaaaaatgttttaaggtgmcttgacatgtcttaaatacaatttttcaaattgaaagcattgatgtcaagggtatgtctagtaggattaagcacagtattttgtaaacataagagctataaataataagtaaccaccaagtatatcatgattaataaaatcaatctagttgcaaagtagacttttgagaatacactatttttctagtttaatttctgaatggttcttctcagaaccttccaacatatgatttgaagtaagtaaagtgaagtaaactgcaaatgtatgtagattcatacccaggttcagaaaatggcaaaatagagatgtatgtgagtaaacagaccagctctgcagctgtaaaaacaacttggaggcaccatgtcagacaaaacgggatccactgaat

SEQ ID NO: 399132 - DNA, 514 bp, Homo sapiens
gcctctgttctttttatttctgtctctgtctcactacctttgtctcatgcacagttttatgagtacagtattgtaatagaaaaatcacagattagtatcaaatctcaaaaaaatgttttaaggtgccttgacatgtcttaaatacaatttttcaaattgaaagcattgatgtcaagggtrtgtctagtaggattaagcacagtattttgtaaacataagagctataaataataagtaaccaccaagtatatcatgattaataaaatcaatctagttgcaaagtagacttttgagaatacactatttttctagtttaatttctgaatggttcttctcagaaccttccaacatatgatttgaagtaagtaaagtgaagtaaactgcaaatgtatgtagattcatacccaggttcagaaaatggcaaaatagagatgtatgtgagtaaacagaccagctctgcagctgtaaaaacaacttggaggcaccatgtcagacaaaacgggatccactgaat

SEQ ID NO: 399133 - DNA, 517 bp, Homo sapiens
ttcaagtgtttaagaaaacacgaccaatagatcatgtacatctaatatgattgtgcagatctcaaaaatgagactaactttgcatacgcatggaggatatttagatgtttcacttacttgtatatgactataatttgtgcttacactgtgagaacttattcttacatgggagtcctctaattaaaaagagtatgaatacaggtatttctgacattatctaacgtaatgaattaygccaccttgacaatggaaggctaccagactatcctcaagtcacaggtcagggaggttatggatggtagaattgtcttatgcaatctctaatacttcctaccgcacctggtttatatttcaggccaagtagaattattaatatgaaagtttaaggagaaatatcaatagagaaattttaggagaaaactaccggcatttctaggatagactccaatgagatttctgcagttgagcctctgggatcctacaggaatagcagcggtcaatactgccagatggcttc

SEQ ID NO: 399134 - DNA, 516 bp, Homo sapiens
ataactctctgaattgtctcgcataccccgaaatcttctcatttgaatttgttcttaatacttcatcttatgaatctttccaaagtgaagatcaaatagtaacattcccttgctcaaaacatcaataacttcattttaatatttaaattgtccaattatttagactagatctcaaggtcctctaacacttaaactaaatattacwttgtgtttgttctctgactgctctgcaatttattttctattataacaaaattataaaattcactaatctacaagcatacctgaactttcacgcctctataccagggtgtccaacctttggcttccttgggacacactggaagaagaatcatcttgggctacacataaaataacaccaatgacagctgatgggcttttaaaaaaaatctcaaaaaaaagtcataatgttttaagaaagtttacaaattcgcactggaccacatccaaagccatcttggaccacacgcggcctgtgggccatggtttggacaa

SEQ ID NO: 399135 - DNA, 529 bp, Homo sapiens
gaatatagaagtaaattgaatataaaatttaaaatatgcaatcaatatcaatcattataattgcataatgcaagccatgcttgtgaaatttttattttatattatgccatttggtaagaagattcaccagtctaaattatggtttcttaaattttgtagcacttttggtggcatatttcatgtggtaaaactacttgatgtttcayagaatggagataatattaacatcattaagattccacaagtatattcaaggaagattcttacttttagtattaatatattcaaggaaggttcttacatttctcactaattgtgggaaatgtctcttctctcagtctagtacagtatgtttcgatttctcacctaatgaagacaactttttcagagatggaaagtcaaataaatattcatctaaactcaaaaattgtgccccttttcccatgaaatctctttatggtctactaaaatataaaaaaaaatatcaaaataggaacatcaaaatctgaaattttcagatttattccaa

SEQ ID NO: 399136 - DNA, 550 bp, Homo sapiens
ggattcaaagtgatgttatgattcatgaatacaaggtggggtaattaaagcaaactaattaacctatccttcacctcaagtgtgtatgtttgcagtcagaacatttaaaatttactctcttagggcttttcaaaggtacaatacatttttaactatgttcattacactttgcaatataggtcaaaaaacaacaamaaaaaattcctcttttctatttgagactttgcaccctttggtcaccatgtccccatctcctccacatccccagcctctgtactctctccttcagtccaaatgttttagatttcacatgtaaatgacaacatgtggtatctgtctttctgtgtctggcttatttagctcagcataatgctttccaattatatccctgttgttgcaaatgacttttttttttctttttaaggctgaatagtatttcattgtgtatctccaccaccctttctttattcatttgttgatggacacaggctaattccataacttggctgttgtgaatcatgctgcagatatctcatcaacatactgactg

SEQ ID NO: 399137 - DNA, 468 bp, Homo sapiens
cagaagaagggggtccaggtagtctcagatagaaaggaagaaatagaaataataggaagaaatataataaaagcaggaagttttaaataaaaagaaatgataagttagaaatcccagaaggtcrggaaggaaaaaagaactggaaagagttttaaatatggtaaattttaacaagcctacccttacatcaagtgttttctaaatcatgtgtgatgatggaaatacaaattataagaccatctaaactcaagacaattctaacttggaagtgaagatggtaaaggagtctaaatggaagtaaattttccacatttcactcaaagtgaaaaaatattaatacaagtagactatccaaagtcatgtgtatactgtaatttgcaatgatcggaccaaagactaggaaaactcttaaaagtaataccataaataaattataaattaaaacattataagctgggtgcagaggtg

SEQ ID NO: 399138 - DNA, 468 bp, Homo sapiens
cagaagaagggggtccaggtagtctcagatagaaaggaagaaatagaaataataggaagaaatataataaaagcaggaagttttaaataaaaagaaatgataagttagaaatcccagaaggtcgggaaggaaaaaagaactggaaagagttttaaatatggtaaattttaacaagcctacccttacatcaagtgttttytaaatcatgtgtgatgatggaaatacaaattataagaccatctaaactcaagacaattctaacttggaagtgaagatggtaaaggagtctaaatggaagtaaattttccacatttcactcaaagtgaaaaaatattaatacaagtagactatccaaagtcatgtgtatactgtaatttgcaatgatcggaccaaagactaggaaaactcttaaaagtaataccataaataaattataaattaaaacattataagctgggtgcagaggtg

SEQ ID NO: 399139 - DNA, 566 bp, Homo sapiens
ctatggaaggaaagaactagtactgaattttatttacagatattagtatgaactcatattttctaaaatgtgtgtatatctcagttctggtcacagaaacactccaggggcaataaagtcccagtgaccacaaacaaacccagcagccagatctaagcacttatgcacattcctcacccaaaataaccagggatccttggataaatgactgatttcaggtctgggtcaaagagagtacaagtgaatacatgaaagtacaatttgttgaamcagaaacctagagagtgcctaaaaagataagacggtcatgccaaaacacataagactcagcccgaggggattccacatgccaaatttagattactttgaatatcagaaaagaaaaatgatagtgagggattgtgatacattggattaaaaagaaatcagtggatcaaaagatgagggagtagtaaaagggtaagctctttttacagattaaggtaagcaataaagtatttgtagctttataaattttacaaataaaacaaatttttaaaaataaacacaaaaggccatcagatttt

SEQ ID NO: 399140 - DNA, 592 bp, Homo sapiens
atacaaaaagatcatcagagattaataggaacatctgtgcacagacgagaaaacctagaggaaatgaataaatctggggaggttgtacatttctagaaacctatccatttcatctaggaagaaatagagccaggaaggaatagaaaccgtgaacagaccaataatgagtattgaaatcaaattagtaattaaaaatctcccaaaaacagaaaaggaaagtaccagatggattaacagccagatttaccagatgtacaaagaagagctaataccaatattgcyaaaactattccaaaatattgaggaggagagattcctccctaactcattctatgaagccattaacaccttgattccaaaatcagcaaagacacaacaacaacaacaaactataggccaatatccctaatgaacatagatacaaaaatcttcaacccacatggaaattgaacaaatgtcaaatgtctcctttgcagatgacaagatcctgtatctagaaaaccctatcatctcagcccaaaagcttcttaagcttataagcaacttcagcaaagtctcagaatacaaaatcaaagtgcaaaaattgcaagca

SEQ ID NO: 399141 - DNA, 573 bp, Homo sapiens
aaacacattagaatcttttccatagcctggaatattgtaaacaatatcatcattttctgttgttcaacagatagaaaaaaaaaaacaaaasaaaacattgatgaatctgttcctgggtgctcttttcgatgttagagctctaaggacatttccaatttttccaatggtaaattgttatccacattctcccattttcttgttttgatattggtaatttgtattttgctaatacataattttctctaaatttaaaaatttgctactatatagttcacttagtgtttgcctgtaattcccttactttcttctgtatctactctatgatttcttctttatttctgatcttgttatttatgctcattctctttttgccttggtaaggcttgggtggaattactcaattttgcaaatctttcaaagtatcagatttcagacatttattttttcaacaagttttatatttcagttgacacatttaatttattcatttcctatacctaatttccctggcttttaaaaaacactgttctttgcaattataaagatgaaaacttatagagtttaaagatgaac

SEQ ID NO: 399142 - DNA, 573 bp, Homo sapiens
aaacacattagaatcttttccatagcctggaatattgtaaacaatatcatcattttctgttgttcaacagatagaaaaaaaaaaacaaaagaraacattgatgaatctgttcctgggtgctcttttcgatgttagagctctaaggacatttccaatttttccaatggtaaattgttatccacattctcccattttcttgttttgatattggtaatttgtattttgctaatacataattttctctaaatttaaaaatttgctactatatagttcacttagtgtttgcctgtaattcccttactttcttctgtatctactctatgatttcttctttatttctgatcttgttatttatgctcattctctttttgccttggtaaggcttgggtggaattactcaattttgcaaatctttcaaagtatcagatttcagacatttattttttcaacaagttttatatttcagttgacacatttaatttattcatttcctatacctaatttccctggcttttaaaaaacactgttctttgcaattataaagatgaaaacttatagagtttaaagatgaac

SEQ ID NO: 399143 - DNA, 573 bp, Homo sapiens
aaacacattagaatcttttccatagcctggaatattgtaaacaatatcatcattttctgttgttcaacagatagaaaaaaaaaaacaaaagaaaacattgatgaatctgttcctgggtgctcttttcgatgttagagctctaaggacatttccaatttttccaatggtaaattgttatccacattctcccattttcttgttttgatattggtaatttgtattttgctaatacataattttctctaaatttaaaaatttgctactatatagttcacttagtgtttgcctgtaattcccttactttcttctgtatctactctatgatttcttctttatttctgatcttgttatttatgctcattctctttttgccttggtaaggcttgggtggaattactcaattttgcaartctttcaaagtatcagatttcagacatttattttttcaacaagttttatatttcagttgacacatttaatttattcatttcctatacctaatttccctggcttttaaaaaacactgttctttgcaattataaagatgaaaacttatagagtttaaagatgaac

SEQ ID NO: 399144 - DNA, 589 bp, Homo sapiens
cacagcaggtaccttttcatcctggcacccattaccaccaccttaagaagtaatttttgatctgtggtttgaaaatctcttttccaatgacatgagagttgctttgaggtgaggtgcaaggagacagcttcaagtatgcataagaatcattcccaagtccaaagtcagggaagaactctcagtgaaaaaacaaacaaacgaacaaacccagaagaggggaatgttttgctacctcaaccaagtaactccattggacccaagaggaaaaggcttcaaacaggcatatacactgtgtctctacaaacccagtgaggttattttcctgactagctggggatcagcttatgcccagaggcagatactgagaccgtgaatgttcaaagtgtaaggtgggaattgtactttcttcaaatgaattggctttgaaactgccttttctttttgatcagcaactactttctcccaccattgcygcaggcatttatggccttacgcttgaaatgaaaaggcaaactttgaggctgcaaggattgggtagttctgagagccagggggttaggaagaacagtagttagggcactccatgctc

SEQ ID NO: 399145 - DNA, 589 bp, Homo sapiens
cacagcaggtaccttttcatcctggcacccattaccaccaccttaagaagtaatttttgatctgtggtttgaaaatctcttttccaatgacatgagagttgctttgaggtgaggtgcaaggagacagcttcaagtatgcataagaatcattcccaagtccaaagtcagggaagaactctcagtgaaaaaacaaacaaacgaacaaacccagaagaggggaatgttttgctacctcaaccaagtaactccattggacccaagaggaaaaggcttcaaacaggcatatacactgtgtctctacaaacccagtgaggttattttcctgactagctggggatcagcttatgcccagaggcagatactgagaccgtgaatgttcaaagtgtaaggtgggaattgtactttcttcaaatgaattggctttgaaactgccttttctttttgatcagcaactactttctcccaccattgctgcaggcatttatggccttacgcttgaaatgaaaaggcraactttgaggctgcaaggattgggtagttctgagagccagggggttaggaagaacagtagttagggcactccatgctc

SEQ ID NO: 399146 - DNA, 605 bp, Homo sapiens
gaattaaatggagataaaatggcaccaccactccagtaacctttaggtccaaacgctggttctaatctttaccctagactctacaatgcaacattaatgtttgatctgctatcttgactgcaggggtaaaggtgatttcagaggcttycaactggtctttcctcctgtgagaattcttagcccaccaaaccaaggaccctgaaggttctgccaactactaattattttcaatccactagtagagtccatggccccagaggacccaatgtgagttggtcctgggccagaattctataacgtggccctcatataacctgcactctttcagagagggatgtgatgatgctttgtgtttctagttatcaatgtatgagtattgtatgagtaatgtataagtattccccttgttcagaatacatagttgctgagtaaatagccataggtcttttggggatgagcttggggaattattgccttattcatttaccgtggtgtttcagggtccaacctgcttgcaatccagcttctctttccaagaaatgggctccatgaaaactgtcttatgtcctaaaactagccaaaagtttgtgatctttcttggggat

SEQ ID NO: 399147 - DNA, 649 bp, Homo sapiens
gcaccaccactccagtaacctttaggtccaaacgctggttctaatctttaccctagactctacaatgcaacattaatgtttgatctgctatcttgactgcaggggtaaaggtgatttcagaggctttcaactggtctttcctcctgtgagaattcttagcccaccaaaccaaggaccctgaaggttctgccaactactaattattttcartccactagtagagtccatggccccagaggacccaatgtgagttggtcctgggccagaattctataacgtggccctcatataacctgcactctttcagagagggatgtgatgatgctttgtgtttctagttatcaatgtatgagtattgtatgagtaatgtataagtattccccttgttcagaatacatagttgctgagtaaatagccataggtcttttggggatgagcttggggaattattgccttattcatttaccgtggtgtttcagggtccaacctgcttgcaatccagcttctctttccaagaaatgggctccatgaaaactgtcttatgtcctaaaactagccaaaagtttgtgatctttcttggggatgactgctctcaactcctaatcacccattcttgaattagtttgattgtatagatagaacagtattc

SEQ ID NO: 399148 - DNA, 605 bp, Homo sapiens
gaattaaatggagataaaatggcaccaccactccagtaacctttaggtccaaacgctggttctaatctttaccctagactctacaatgcaacattaatgtttgatctgctatcttgactgcaggggtaaaggtgatttcagaggctttcaactggtctttcctcctgtgagaattcttagcccaccaaaccaaggaccctgaaggttctgccaactactaattattttcaatccactagtagagtccatggccccagaggacccaatgtgagttggtcctgggccagaattctataacgtggccctcatataacctgcactctttcagagagggatgtgatgatgctttgtgtttctagttatcaatgtatgagtattgtatgagtaatgtataagtattccccttgttcagaatacatagttgctgagtaaatagccataggtcttttggggatgarcttggggaattattgccttattcatttaccgtggtgtttcagggtccaacctgcttgcaatccagcttctctttccaagaaatgggctccatgaaaactgtcttatgtcctaaaactagccaaaagtttgtgatctttcttggggat

SEQ ID NO: 399149 - DNA, 551 bp, Homo sapiens
gaatcacgttcaatgtcatttcaatattatttgtattttattgtaagtttttgccaaacacttaggcatgaacagtatatgttaaacttcaattaatcacagataattgctggatgtattggatacaaaaaaaattattttaaaaatamatgaaaggtttactacctagaaaaaatgaagagaatggtagtttttcctgtcctatttttctggtttcaagttgatgtgaggatactaaattaggctggagcattctgtggtgtcgttctgcttttcaaaggtgagtaatgatttctgccatgtaagtagaggagatgattgaattcatgtcaacactttcctagttcctggaagaaggtgtaagctaataaccacatacaaaagcacacacacacccagaggagtcaggagctggaaatatatgttacttgttagcaggggtgtttaatgacaaggtcacataaaaagtcaagatttatattcctgtgagtttgtagtaggagtcacttaacttggtgataaaattaaaataatggatactaactaatctg

SEQ ID NO: 399150 - DNA, 566 bp, Homo sapiens
agcaggggtgtttaatgacaaggtcacataraaagtcaagatttatattcctgtgagtttgtagtaggagtcacttaacttggtgataaaattaaaataatggatactaactaatctggagggtgtttactccccaagtagtaagtatttataaaggcctggggaccccttattacaagaaaggaacgaacaattatttattttgtcgtatcaaggtgttctctccataatagatgcagctaaacaagaaaccacaagtattttattattatttacttgcctaaaaataagtgacattatagacaatgaataattttcttaccactgaatttataaatacgctatgtaaacaggactgtgtaacaagagtagtcccagattgaactgtgttgtagcttttgactcagaaataaaaaagcagcccctgacctccatgaattgatctgattctcacagctaagtcatgttgtcttttattgcacataaataatctcacagaacacccacctcagtcaagggcactgtgaaactcataacaaccaaatatctccgtctcacactaaatg

SEQ ID NO: 399151 - DNA, 561 bp, Homo sapiens
tgcttgaggagagaagaggggagagtaaagaggactttgtcttataacttggataccagcttacccacagtaggatagggtaacaggtagagttctgaggcccccatttcaaaccctagcacctggaaaacatttctagacacaccatggcccagaagggagcccattgctttgtttttttgtttgcttgttttttgtttctgtttttttttttttttttttttaaratggagtcttgctctattgcccaggctggagtgcagtggtgtgatcttggctcactgcaacctctgcctcccaggttcaagcaattatcctgcctcagcctcccaagtagctgggactacaggcacgcaccaccatgcctgactaatttttgtatttttagtagagacagggtttcactatgttggacaggctggtctcaaattcctgacctcctgatctgcctgcctcagcctcccaaagtgctaggattataggcatgagccaccatgcctggccaggagcccattgctttgaatggaaggccccagtcctggcaagattcatcatctccta

SEQ ID NO: 399152 - DNA, 449 bp, Homo sapiens
gggcagataagaaaatgctgtatcatactccaaattcttgaagtattacaataataaaataactcaggtattttaaaatccaaaataaaatataatctctcaattaaaaaatggttttttttagaacaatgataaagtgaacataaggagccaaacatttttatacactatggataagagtgtwaattggtaacacatattatgtaagaaactatagttggaatcatacagacattccagaacagcttctttcacctaccaatatgcatttaaggtttctccatttcttttcatggcttgataactcacttgtttttaggacagaataatattccattacagaattaccacaatttatctatgcattcacctattataggacatcttggttgtttccacattttggcaattataattaaagctgaaataaacatctgtgtacaggtttc

SEQ ID NO: 399153 - DNA, 474 bp, Homo sapiens
agcaacttcaacactcaacactgatgggatcaggaatgattgaccgttttcatgggagataatgacacacattacttattttcattggaggaatttatgaagtgtggaaatattgcttatccataggcatgtaggacagacataaagagaacaagacttagaagaaaattgccttcttagtggatggctataggtattgtcaagaggatgtttgcattctcaaagagtaactgagggactgcagacattagctaggattatcmtgatgataataattatagtaataattacttacattatctttaactgttggcacaattcttccccagacattttcagaataagaaaatcagagtatgggaacgtttctccctgaaaaatgaatgcaaccaagaaaaatttcaactatctctaaaataaatatagacttgccttggctctcagcccacttccagttggaaataaacaaaattc

SEQ ID NO: 399154 - DNA, 541 bp, Homo sapiens
tatgtatcaaatgttcattcaaaattaaggtttttgttcacattatatgaaactaaatatttctttcaatggaccaaggcagaaaaaaattttgttttactatactgtttcttctttactgatacttgtctttctcaaattctccatactacacatactccttagtttggcagtattcaaattcactttttaaaaattagatcagatgacaaggttatctatattgtctacataattttataattcatatatagcacatattttagacacagtaaacaacamcaagatggaaaataagagtggaaaagaaagtaacttgaagttacactttgtaagactgaatgcaaactaaatatttttctattatgtttatagacaacaggaaaccactgaaagctttgataagaatggaggacgatattaagaaattaatgttcttgaagaatgaatgtgatctcaaaaagcagaaacaaccccaaagtccatcaactgatgaataaaatgtggtaccctccatacaactgaatactattcagtccta

SEQ ID NO: 399155 - DNA, 682 bp, Homo sapiens
tatatctcattaaggttattgtttaattttagtaatgtataataggtttctaaaaaacttaaaaatgtggtaaaatatgtacaaaataaaatttgccattttagctgtacaatttggtggcacagttgcattcacagtgttgttcgttcattactactttttccagaacttttctatcattccaaacagaaactctgtacctactaagcagtaatttcccatttcccttccccgagtctctggcagtgtctaatctactttctgtctttatgaatttggctattctgtatttcatatatagtagtcccccttatccacagttttgctttccacaattttggttatctgtggtcatccatggtctgaaaataggtgattatagcacaataagatgttttgagagaccacattcatataactttattacagtataattgttcttttttattattgttgttgttaatcttttactttgcccaatttacagattaaactaataagtatatatgtataggaaaagacatagtatatatagagtttggttctatctgtggtttcaagcatccrctggggggtctggaacatatgctctgtggataagtgggggactagtgtacttcctgccctaccccttggtttggagtcgctgctgtatgaatataagggcagtctgcctgtgatg

SEQ ID NO: 399156 - DNA, 639 bp, Homo sapiens
tatctttaacattaggtggtaaaatggaatatactatggaaataaataccattgaaatgttttatggtattgccaatttaatacatattttatgataagaaagaagagaagaagttcattgtagattccacatgggtaaatactttaaaaagtattccaaatacagctcctcatatccttaatatatctgttgtcaattattatatatttcatgtcttggatcaagttttcttgtttggacaagaaatggaatggcaaaatccagatctttttagctgaaaacctcacctattctctattcacccacttctaaagtggacacaataattcttamaatggtacttaaatcagtatagatttgcagaaacaaaggcctgcttaagaatgttctttcatttaagtattatgaggttaattaaatgtgtgaaattgtaacattttgaattattcacatggcattttagtttttccttttaagaaccatggcttttctgtgcaggtgttcttcactgggataatgttttaagataatcccctgatgtcatttaaaggaactcttatttctgaagcatgattgtgtgtttttgtgtttttatagtgtatctctttcttatcctcttttggcctttgtttatattc

SEQ ID NO: 399157 - DNA, 617 bp, Homo sapiens
ctctgactatgttggaaatcttgttcagtgatgtttgtcaaattcaaccatagggggcagcatagcatgtggaaagagaaaggggttttttgctattaggcaaatcaggattaaaatctctcatcacgtagtgtaatctggggtggatcattcggcctctctgtaacttttgtttatgtatctgtagtaggatctttcaaacagtgtgagcttaataaatagcaattcttgactaccacttcccttgacttttaacattaagacaacatggaatttttaacatatattgcttgccataaggctcccaaaagaacaaacctttagtgacaaggggggaaaaactgtcctcagagtgttgacagttttcagaatgctttcaaagaataaagcaatgcaaggaagaattaaaaatctttttttctcattaatatatttgcttatgcagcatatttagggatgatgggtaaaaytcagtctagctgtccacagggtttgtttatgagaatgccaaaaaataaaacttgaaaggtatcctgagtaaaatttgtagaaagctaatcctatgttaacatttaaaatgggatttcatttcttatgcctctactctcaaaagtcaa

SEQ ID NO: 399158 - DNA, 558 bp, Homo sapiens
cttaattttggtttgtctaattttggattcacattatgcatcgcaggcaggaatatgacggaagtgatactatgtttctctcattgctttgtattatcaggtaggcatatttccagttcatcccattattgatcttcactttcaacctttctcaatctttctacactggaggcacacttaaaataattttcagatctcaggaacccctgcattaaaatggttgtatctacaactcacactacattagcttgattagcaagttgtagatataataattcaatgatacttgtcagtgctcttctgagtagacgattttttttctgcgggtttgttttacaggcatacctcattttactggactgcagtttactgyacttcacaaatagtatatttttttaaaaattggaagtttgtggcaatcctatgttgagcaagtctatcagcacaattttttcaaaagcatgtggtaacttcatgtctctgtatcacattttggtaattcttgcagtatttcaaactttttcattattattgtatctattatgatgatcaatgatc

SEQ ID NO: 399159 - DNA, 498 bp, Homo sapiens
gaagaaaagctggaagctagcagaggttggttcacgggcttaaaaaaagaagctgtcttgataacatataagtacaaggtaaagcagcaaatgctgatgcagaagctgcagcaagttacytaaaaggtctagctaactaagatcactgacgaaggtggctacactaaacaacagattttcactgtagatgaaacagccccctgctggaagatgccatccatgactcttctagctggacaggtgaagtcaatacctgccttccaaactaaaggacaggctgactctcttgttaggggctgatgctgctgttgactttaggtagaacagtgctcatttaccattccaaaaactgtagagctcttaagaattaggctaaatatactctccctgtgctctacaaatggaataacagagcctagatggcagcacatccatttattgcaagactttactagacattttaagcccactgttgagacctactgctcagaatgaaag

SEQ ID NO: 399160 - DNA, 498 bp, Homo sapiens
gaagaaaagctggaagctagcagaggttggttcacgggcttaaaaaaagaagctgtcttgataacatataagtacaaggtaaagcagcaaatgctgatgcagaagctgcagcaagttacctaaaaggtctagctaactaagatcactgacgaaggtggctacactaaacaacagattttcactgtagatgaaacagccccctgctggaagatgccatccatgactcttctagctggacaggtgaagtcaatacctgccttccaaactaaaggacaggctgactctcttgttaggggctgatgctgctgttgactttaggtagaacagtgctcatttaccattccaaaaactgtagagctcttaagaattaggctaaatatactctccctgtgctctacaaatggaataacagagcytagatggcagcacatccatttattgcaagactttactagacattttaagcccactgttgagacctactgctcagaatgaaag

SEQ ID NO: 399161 - DNA, 578 bp, Homo sapiens
tagacattactgaggtaaaaacctagatccaccacttaatatgatctcaggaaagcttataatagtttcagtgcctcctcaacgctaaaacaaagctcatatctaattaatacattctaggtgaagattgaaagaagtaacatattaaagcacccaaggccaggcgcggtggctcatgcctgtaatcccaccactttgggaggccgaggcaggcggataacctgaggttgggagttcaagaccagcttgaccaacacrgagaagccctgtctctactaaaaatacaaaattagccgggcgtggtggtgcatgcctgtaatcccagctactcgggaggcagaggccggagtatcacttgaacccgggaggcggaggttgtggtgagccgaaatcgcaccattgcactccagcctgggcaacaagagtgaaactccttctcaaaaaaacaaaacaaaacaaaaaacatattaaagcacccaaaacctggtgtatggcagataaccagaatatggtagctgttactttaattaagctatttctttaaaattaaacgattaaagtgtatgaaagtgggagaa

SEQ ID NO: 399162 - DNA, 570 bp, Homo sapiens
ggatgaaagcaacttccatcaatgctcaaaagttattcgtttaactttttttttttttttttttttgagatgaagtctctctctgttaaccaggttggagtgcagtggtatggtcccgggtcactgcaacctccacctcctcagttcaagtgattctcctgcctcagcctcctgagtagttgggactacagttgtgtgccaccacacctggctaatttttgtatttttagtagagatggggtttcaccatgttggccaggatggtctcgatctcttgaccttgtgatccaccctccttagcctcccaaagtgttgggattacaggcatgagccaccamgcccagcccacttaacttctatattactttcctgttggtggatttaccagtgcaaactgagcagcttaaacaccacccagttattatgtgttttcatgagccaagggtctgggcagggtttaactgggtcttctattcagggtcacaatactgcaaccagagtgtcagttggagctggggtctcatcagatgctcagggtcctctttcaagcttattcagtttgtggactga

SEQ ID NO: 399163 - DNA, 507 bp, Homo sapiens
gtgagcacctggtgctggggtaggatgcaggagcctgcaaagcaagtatgaaaagccttctctgggctgggtgcagtggttcaygcctgtaatcccagcacttcgggaggccgaggtgggcagatcatgagatcaagagattgagactatcctgggcaaccaacatggtgaaaccccatctctactaaaaatacaaaaattagctgggcgtggtggcgcacatctctaataacccagctaaccaagtgagcaattcctgtcccttttaagggctcacaagtctaagggggtccatgtgagagggtcgtgatcatgagagggtcgtgatcggttaaccaagcaggtagtatgtgactgggggctgcatttggcaaactccatctctactaaaaatacccaaattcagcaaagtctcagatacaaaatcaatgtgcaaaaatcacaagcattcttatataccaataacagacagagagttaaatcatgagcaaacttccattcacaatt

SEQ ID NO: 399164 - DNA, 507 bp, Homo sapiens
gtgagcacctggtgctggggtaggatgcaggagcctgcaaagcaagtatgaaaagccttctctgggctgggtgcagtggttcacgcctgtaatcccagcacttcgggaggccgaggtgggcagatcatgagatcaagagattgagactatcctgggcaaccaacatggtgaaaccccatctctactaaaaatacaaaaattagctgggcrtggtggcgcacatctctaataacccagctaaccaagtgagcaattcctgtcccttttaagggctcacaagtctaagggggtccatgtgagagggtcgtgatcatgagagggtcgtgatcggttaaccaagcaggtagtatgtgactgggggctgcatttggcaaactccatctctactaaaaatacccaaattcagcaaagtctcagatacaaaatcaatgtgcaaaaatcacaagcattcttatataccaataacagacagagagttaaatcatgagcaaacttccattcacaatt

SEQ ID NO: 399165 - DNA, 565 bp, Homo sapiens
taggagccaggataatataggtccagggggggccatcgtgtctccagaaccagaactggaaggtccaacttccagggggagaaaggaagagtgtccttagtgaagtggagggcctcacagcaagatgcctggcttaatcaaacttggacatacctgaagcacgttcagtgactaaaagtgcctaccatgagcagctggaacccactccctgagagcttcaagawgcatgggtacctcttgtacctgtttgtaattacagccaaggaccagcaggcagcattactgcatccacatggggcttttactggaaccagtaagtctctgccagcccctcacaggctcctgggatgccactcgttctgggtctgtggacagacaaccaggacacttgctcagtgcccacccactccttgtggcccacagcccatcactcaaccccagccccaccatcccctgcttcctaagccgttcctcatgccagaagaaaaggcaatgcctttgtcccacagcctctgccttgtgtcatgtcatgtgggggtatggaatgaaccggccagcctaaact

SEQ ID NO: 399166 - DNA, 430 bp, Homo sapiens
tgaatgccatctgggctggggctgttgtgggtaggggctgtggctgccttggcttatcatggtgccacccacagatgtgcctgccctgtgctgyttctccagcagctggctgcctgtggccctgagcctttaacagcatgcgtgctacctcatgctacttgtgtttgaaaaaccatcccaacatgatgctgctggatgtgagtgctgaaaagggggcagcacctttgtcctgggggattaggagctgaccagattcctcctgactccctcccaaaacaagtggggctggtgctgcaattaatgatgccccccagaagatgtgtttgcactggctgaacaagtacatgatacagaggcctaaatgaagacacatgaatggggacatcagttagcagctgggaaacaggtgcctctcaggcctctcattctt

SEQ ID NO: 399167 - DNA, 621 bp, Homo sapiens
agaagatgtgtttgcactggctgaacaagtacatgatacagaggcctaaatgaagacacatgaatggggacatcagttagcagctgggaaacaggtgcctctcaggcctctcattcttcagcaagtgtggaatatgcctgtgcccttgagtgtatacatctggattgtatacatctggctgttgcttttgctgccactatccccaggcccaatctagcttaaagtccaggttttaagtaaaaaagataagaggattttctgtgttctgggataggaagctagggatctgtgtagggctggggttgggtgcacattagttttgtgacaggatgagagctgcagtggttttattaatcgtgatagcctggcctggttgtagctccaggtgagggggagggagtcagcagtggtggtcccggagacatccaccygcccagccctggccttcctgccctcaggcacagcaaaaggcaccgccacaggccccgacttccttccctactctctgcagcccagatgggaaaacttggaggctacaatctgaatatatttttctcccattttaacccgagctgcctaacacacagtgggggcagggtgggtgaagggcctggggaaaag

SEQ ID NO: 399168 - DNA, 429 bp, Homo sapiens
catggaggaggaagttgccgccctgagagcctgagggagctgtgtctgactggggcttctgcctggggktttgcaaagagctacttatgaatatagtctctccagattccttgtttcaaaggaagtgagcatgagctagcaagtgtagcaaccccacagctgataaacaactttgtcttggttttaaaccatcacatcttcatttcacattggaataaagtaagtgaaacctgctaccccagccttgcccgtgtgttctgtaacccagtctcctttggttgtgagggctgttgtcagaaatgttataagaaaagattatgcataaatgaaatcaaatgtaaaattatgcttataatgtcacttgagtgaaaggtaagagggtagagtcacaggcactcagctggggtttacccacccatcacttaccac

SEQ ID NO: 399169 - DNA, 429 bp, Homo sapiens
catggaggaggaagttgccgccctgagagcctgagggagctgtgtctgactggggcttctgcctggggttttgcaaagagctacttatgaatatagtctctccagattccttgtttcaaaggaagtgagcatgagctagcaagtgtagcaaccccacagctgataaacaactttgtcttggttttaaaccatcacatcttcatttcacattggaataaagtaagtgaaacctgctaccccagccttgcccrtgtgttctgtaacccagtctcctttggttgtgagggctgttgtcagaaatgttataagaaaagattatgcataaatgaaatcaaatgtaaaattatgcttataatgtcacttgagtgaaaggtaagagggtagagtcacaggcactcagctggggtttacccacccatcacttaccac

SEQ ID NO: 399170 - DNA, 429 bp, Homo sapiens
catggaggaggaagttgccgccctgagagcctgagggagctgtgtctgactggggcttctgcctggggttttgcaaagagctacttatgaatatagtctctccagattccttgtttcaaaggaagtgagcatgagctagcaagtgtagcaaccccacagctgataaacaactttgtcttggttttaaaccatcacatcttcatttcacattggaataaagtaagtgaaacctgctaccccagccttgcccgtgtgttctgtaacccagtctcctttggttgtgagggctgttgtcagaaatgttataagaaaagattatgcataaatkaaatcaaatgtaaaattatgcttataatgtcacttgagtgaaaggtaagagggtagagtcacaggcactcagctggggtttacccacccatcacttaccac

SEQ ID NO: 399171 - DNA, 478 bp, Homo sapiens
taaatgaaatcaaatgtaaaattatgcttataatgtcacttgagtgaaaggtaagagggtagagtcacaggcactcagctggggtttacccacccatcacttaccacgctcatgagagtgtggcacaggtgaatgtcacctgacattggtgacagaagagaaaaggccggcatgaaggccaggtaggggagaggtgccaggctgtggggccaggccctgggcatgctggacctgtgaggtcactgaacatctaactgcccaggcactggcccttttcacatcagttgaggtaagaggatgggggagcactctctggaagtcacactgcgctgggagaatggaggagagtctacaactcaccatcctagtgtagsttttagagtgagatggactgtcttggagagctaatgagatgggaggaaaggagtcccccaggtgcatctgagggccacagcctatgaagtaaccggtgtgtgtg

SEQ ID NO: 399172 - DNA, 478 bp, Homo sapiens
taaatgaaatcaaatgtaaaattatgcttataatgtcacttgagtgaaaggtaagagggtagagtcacaggcactcagctggggtttacccacccatcacttaccacgctcatgagagtgtggcacaggtgaatgtcacctgacattggtgacagaagagaaaaggccggcatgaaggccaggtaggggagaggtgccaggctgtggggccaggccctgggcatgctggacctgtgaggtcactgaacatctaactgcccaggcactggcccttttcacatcagttgaggtaagaggatgggggagcactctctggaagtcacactgcgctgggagaatggaggagagtctacaactcaccatcctagtgtagcttttagagtgagatggactgtcttggagagctaatgagatgggaggaaagsagtcccccaggtgcatctgagggccacagcctatgaagtaaccggtgtgtgtg

SEQ ID NO: 399173 - DNA, 504 bp, Homo sapiens
ataattggaaattttggttatattatcaagatttttactggaatatcatatttaggaagtgtacctaagatcagttatgacaagcaattttaaggaagtaaggttgacttttatggagacaatgcttacaaagcactgtggaaaactttgaggaaagttcttcctcaaagattataaagtcacaactatccactatttttatgtgtgtgtgtgtgtgtgtgtgtgtgtatgtattccaaatcacttgtcctagcttgctccagcatgcctggacagaactagacaagccccagcccatagtacatgcaattccttatttggagatgcttccttaactatccytgggcaacttccttttctttctttcttctattccccttacctaattaagaaagttttaaactaacagccaatcgggtaaagtgtaaattgtgaggtcctattccagccaatggaaactggacacagcagtagggtagatacatcaggttataagtaactctg

SEQ ID NO: 399174 - DNA, 557 bp, Homo sapiens
ggtttctgttcagttcctgcatcatccttcaggtcatgcgattcccatttccctcygtggaccaagaaattcagtggggtttctgccttttaaatatttcattatcaatatgtcattctttcagcctccagaaagcattttaacatggagattctggcttaagacacttgtgggtctgtctctctctctctctcttttccttgaaacagggtctcactttgccacttaggctggagtgcagtggcatgatcacagctcactgcagctggaccttccaggctctagcaatcctcccacctcagcctcccaagtacttgggattacaggcacacaccaccatacctggctttttttttttttttttttttttttggtagatatgaggcttcaccacgttgcccaggctggtcttaaactcctgggctctcaaagttctgggattattggcttgagccaccacacccagccaagaaccttgtctcttgtgatgcaccccagaacaaaacttcactgcaaaaacaaaccaaggcatgagtttcagtcctaagtcccattta

SEQ ID NO: 399175 - DNA, 557 bp, Homo sapiens
ggtttctgttcagttcctgcatcatccttcaggtcatgcgattcccatttccctctgtggaccaaraaattcagtggggtttctgccttttaaatatttcattatcaatatgtcattctttcagcctccagaaagcattttaacatggagattctggcttaagacacttgtgggtctgtctctctctctctctcttttccttgaaacagggtctcactttgccacttaggctggagtgcagtggcatgatcacagctcactgcagctggaccttccaggctctagcaatcctcccacctcagcctcccaagtacttgggattacaggcacacaccaccatacctggctttttttttttttttttttttttttggtagatatgaggcttcaccacgttgcccaggctggtcttaaactcctgggctctcaaagttctgggattattggcttgagccaccacacccagccaagaaccttgtctcttgtgatgcaccccagaacaaaacttcactgcaaaaacaaaccaaggcatgagtttcagtcctaagtcccattta

SEQ ID NO: 399176 - DNA, 557 bp, Homo sapiens
ggtttctgttcagttcctgcatcatccttcaggtcatgcgattcccatttccctctgtggaccaagmaattcagtggggtttctgccttttaaatatttcattatcaatatgtcattctttcagcctccagaaagcattttaacatggagattctggcttaagacacttgtgggtctgtctctctctctctctcttttccttgaaacagggtctcactttgccacttaggctggagtgcagtggcatgatcacagctcactgcagctggaccttccaggctctagcaatcctcccacctcagcctcccaagtacttgggattacaggcacacaccaccatacctggctttttttttttttttttttttttttggtagatatgaggcttcaccacgttgcccaggctggtcttaaactcctgggctctcaaagttctgggattattggcttgagccaccacacccagccaagaaccttgtctcttgtgatgcaccccagaacaaaacttcactgcaaaaacaaaccaaggcatgagtttcagtcctaagtcccattta

SEQ ID NO: 399177 - DNA, 557 bp, Homo sapiens
ggtttctgttcagttcctgcatcatccttcaggtcatgcgattcccatttccctctgtggaccaagaaattcagtggggtttctgccttttaaatatttcattatcaayatgtcattctttcagcctccagaaagcattttaacatggagattctggcttaagacacttgtgggtctgtctctctctctctctcttttccttgaaacagggtctcactttgccacttaggctggagtgcagtggcatgatcacagctcactgcagctggaccttccaggctctagcaatcctcccacctcagcctcccaagtacttgggattacaggcacacaccaccatacctggctttttttttttttttttttttttttggtagatatgaggcttcaccacgttgcccaggctggtcttaaactcctgggctctcaaagttctgggattattggcttgagccaccacacccagccaagaaccttgtctcttgtgatgcaccccagaacaaaacttcactgcaaaaacaaaccaaggcatgagtttcagtcctaagtcccattta

SEQ ID NO: 399178 - DNA, 557 bp, Homo sapiens
aaaccaaacattgcatgttctcacttgtaagtgggagctaagctatgatgatgcaaaggcacaagaatgaaacagtggacgttgggggctcagggggaaggtgggagggggtgagagataaaagactatacattgggtaaactgctttggtgatgagtatgccaaaatttcagagatcaccactaaggaacttatccatgtaactaaataccacctgttccctaaaaactattgaaattaaaaaaaaaaagaaatatacaacaaattgttgtagtcactttctgtgataatgaacactagatcttattccttctgttatatatttttatacccattaatyaacctcttttcaaacccctcctattcccagcctctggtaactatcattctactctttatctccatgatgtcaattttatatagctccagggcacacaagtccataactgcggtctctatccctgaccctactgacctgaaacatggcccccactttgatttccaggagcataaaccgctcatataagtgagaacaggcaatgattttctttctgtgc

SEQ ID NO: 399179 - DNA, 622 bp, Homo sapiens
ggagcaaaaaggagggacaaccacgacctaggaggrcaccatgccagagaggcctggaccccacgctaggctcagtgcctgttatactcttgggacccagcgctttccttctccatcacgtggcatacttggcattatttgttgtttaaaatattgtccttagttttcacctttcctaggagacacaggcagaccctgtgacactacagctggcacacagtaggtgcatcacaaacatctgctgagttcacacactcttgccttctcaaaccttcttgtcaagtcttcagtgaaaaggaactgctgattgagcaagaattaaacttctagagactcctggatccactgaagtttgagacaagttgagatttgtttactgccatattcctagctcatagcatactgtagtcacttaaaaaatgtttgttgaataagtgagtgaattgattcaattgtcatacttagctatatattttctgagtaaaactgataaatttaatagtttacttctagtataattttactttacttattcagtgaacctgacaattcaactaggtgccaggcacactgctgctgaagaaaaagaggtataagatacaacttctgtctatgagaaagc

SEQ ID NO: 399180 - DNA, 622 bp, Homo sapiens
ggagcaaaaaggagggacaaccacgacctaggagggcaccatgccagagaggcctggaccccacgctaggctcagtgcctgttatactcttgggacccagcgctttccttctccatcacgtggcatacttggcattatttgttgtttaaaatattgtccttagttttcacctttcctaggagacacaggcagaccctgtgacactacagctggcacacagtaggtgcatcacaaacatctgctgagttcacacactcttgccttctcaaaccttcttgtcaagtcttcagtgaaaaggaaytgctgattgagcaagaattaaacttctagagactcctggatccactgaagtttgagacaagttgagatttgtttactgccatattcctagctcatagcatactgtagtcacttaaaaaatgtttgttgaataagtgagtgaattgattcaattgtcatacttagctatatattttctgagtaaaactgataaatttaatagtttacttctagtataattttactttacttattcagtgaacctgacaattcaactaggtgccaggcacactgctgctgaagaaaaagaggtataagatacaacttctgtctatgagaaagc

SEQ ID NO: 399181 - DNA, 622 bp, Homo sapiens
ggagcaaaaaggagggacaaccacgacctaggagggcaccatgccagagaggcctggaccccacgctaggctcagtgcctgttatactcttgggacccagcgctttccttctccatcacgtggcatacttggcattatttgttgtttaaaatattgtccttagttttcacctttcctaggagacacaggcagaccctgtgacactacagctggcacacagtaggtgcatcacaaacatctgctgagttcacacactcttgccttctcaaaccttcttgtcaagtcttcagtgaaaaggaactgctgattgagcaagaattaaacttctagagactcctggatccactgaagtttgagacaagktgagatttgtttactgccatattcctagctcatagcatactgtagtcacttaaaaaatgtttgttgaataagtgagtgaattgattcaattgtcatacttagctatatattttctgagtaaaactgataaatttaatagtttacttctagtataattttactttacttattcagtgaacctgacaattcaactaggtgccaggcacactgctgctgaagaaaaagaggtataagatacaacttctgtctatgagaaagc

SEQ ID NO: 399182 - DNA, 622 bp, Homo sapiens
ggagcaaaaaggagggacaaccacgacctaggagggcaccatgccagagaggcctggaccccacgctaggctcagtgcctgttatactcttgggacccagcgctttccttctccatcacgtggcatacttggcattatttgttgtttaaaatattgtccttagttttcacctttcctaggagacacaggcagaccctgtgacactacagctggcacacagtaggtgcatcacaaacatctgctgagttcacacactcttgccttctcaaaccttcttgtcaagtcttcagtgaaaaggaactgctgattgagcaagaattaaacttctagagactcctggatccactgaagtttgagacaagttgagatttgtttactgccatattcctagctcatagcatactgtagtcacttaaaaaatgtttgttgaataagtgagtgaattgattcaattgtcatacttagctatatattttctgagtaaaactgataaatttaatagtttacttctagtataattttactttacttattcartgaacctgacaattcaactaggtgccaggcacactgctgctgaagaaaaagaggtataagatacaacttctgtctatgagaaagc

SEQ ID NO: 399183 - DNA, 599 bp, Homo sapiens
aacatggggtactcatgaatataaagatgacaacaatagacactgagaactactagatgaaggagggaaggaggagggcagggcgtgagaaactgtgggtgctatgcttactgcctaggtgatgggatcaattatatcccacaatatatgctcactaccttggtgatgggatcaataatatcccagatagctcagcatcacacaatatatccatgtaacaagcctgcaaatatactccctgaatctaaaaaatttaaggcagagacagagtaaragggcagaatagaagcctacactctcatcccccacacaaaaacaccaaattttcacaactcactacattcaagaagcactgtcaaagggaccaaaaattgggtgagcgatcacagtacctggtattgacttcatatcactgaaagagacattggagaaggcaaaaaaaaaaaaaaaaaaaagacggtctagaagcacggatgccacctccttttcaaccaccagtagtggctacatggtgcaaagatagtatgtttgggagagggagagcatagtttgtgaggctttgcaataaactcagtactaacccctcacagtgaaaagca

SEQ ID NO: 399184 - DNA, 599 bp, Homo sapiens
aacatggggtactcatgaatataaagatgacaacaatagacactgagaactactagatgaaggagggaaggaggagggcagggcgtgagaaactgtgggtgctatgcttactgcctaggtgatgggatcaattatatcccacaatatatgctcactaccttggtgatgggatcaataatatcccagatagctcagcatcacacaatatatccatgtaacaagcctgcaaatatactccctgaatctaaaaaatttaaggcagagacagagtaagagggcagaatagaagcctacactctcatcccccacacaaaaacaccaaattttcacaactcactacattcaagaagcactgtcaaagggaccaaamattgggtgagcgatcacagtacctggtattgacttcatatcactgaaagagacattggagaaggcaaaaaaaaaaaaaaaaaaaagacggtctagaagcacggatgccacctccttttcaaccaccagtagtggctacatggtgcaaagatagtatgtttgggagagggagagcatagtttgtgaggctttgcaataaactcagtactaacccctcacagtgaaaagca

SEQ ID NO: 399185 - DNA, 544 bp, Homo sapiens
tcagttaagtgccttgaggtggtcttctttgggttaaatctgctttatgttttgtaagtttctgttactcgagtgttgatttcaaatgttgaggaattgtttaatattatttaatattatttatttaaataaatgttcaactcatctctttttgtacctcctctttaaggccaataactcttagatttgctattttgaggctattttttasattctgtaggcatgctttattttttattcttttttgtctcctctgactttgtatttttaaatagtctgacttcaagttcactaaatctatcttctccttgatcaattcttttaagtaattctgatccattcttcagtatgacaatatcattttaacttcagaatttctgctttattctttttatttcaatctcattgttaaatttatctgatagaattttgaattccttctctgtgttatattgcatttctttgaattacctcaaccagctattttggatttcctgtatgaaaggtcacatacctctgtttttccaggatttgtccctggtgc

SEQ ID NO: 399186 - DNA, 474 bp, Homo sapiens
taatgtccttttcttcctgattgaagtactctctttagcattcctttaggacagacatggtattcataaaatacttcagcttttgtttgtctggaaaagtcagtatttctttttatttgaagaacactttcactgtatatgctattctaaggtaaaagtttttttcctttagtactttaaatatttattgcttctctctcctrgccggtagggcttccactgtaaagtcggctgccagacgtgttggagctcaccggtatgttacttgtttcttttctctttcttcctttagaacttttcttatctttgacttttggaggatctactgaacgctttgaaatagtctttttggggttaaatctgcttaatgtcctataacatttttgtagttggatatggatatctttctctaggtttggaaagttttctgttattatccctttgaataaatttttctacccctgcctctgtctc

SEQ ID NO: 399187 - DNA, 579 bp, Homo sapiens
ttcctttagggcagtgagtgccctcagtccctggctgggtccagaaatgccattcagaagtcagggagtacagtcaaaaattttagaagtccacttgacattctattgcattgcagctgatctggcactcaaaccacaagacatagttcttcctattcctcccttcctttcctaaaggcagggtagccaccaccacctcaggccacagtgagtactgccaggctaccaccaatgttcccttaaggcccaaagcctcttgtcagcttgtgatgaatgctgcctggcctgggacttgcgttttcaggacaatgggatccctactggccctgggcagcttcataaatgccaaccaaaaatcaagtcctagaatcagggattctgaaagttcgcttgrtgctctacccacctctggccttgctggtacctaaggggcaagaaaaagtcccctttaattttccctctacttttcccaagaagaaggagttttgcctcttagccaccacagctagtaatgtgctgacctcacctaaatctagcaagtctatgagggtcatccaaggcccttgatgtagtacctgg

SEQ ID NO: 399188 - DNA, 572 bp, Homo sapiens
ctaaactaatttttaatggttaatatttcactattttagcttacaaatgactcaagatattttatggctatctattacttaatttaacgtgactttaagattttaaattactgaacagaattttgaaaccatgacacaggtagcatccgtaatgtcttccctcagtaattttaggtcccaagtagccacatggcacccaggaaaactgtgaagatcagggcctgccygagtccattaggactaaagacagagctgtgaaggctatacctggaggatccaacccctcctaaaatagccagaaggcaaaacagggaaagcacagaaagaaggggccgattgggcttgattctggcttttagctgctggtctaggcactgagaacatgtctccatacttcatcatggtcctctatcaagaccccctgaatccagaaactctcaacaaaagacataagctcacagttaaatcaagcaaatatctaattatatttaatggataattgtaaagccatttctattttactaacgatttaagaacgagcttatttacaaaatattatcacatacacgtaa

SEQ ID NO: 399189 - DNA, 578 bp, Homo sapiens
gaacaagtgccttatgaaaggtggcaaaaagggagttaagaagaaaacagttgatccattttctaagaaagatcagtatgatgtgaaagcacctgctatgttcaatataagaaatattggaaagacttggtcaccaggacccaaggaacccaaattgcatctgatggtctcaagggtcttgtgtttgaaatgagtcttrctgatgtgcagaatgatgaagttgcatttagaaaattcaagctgattactgaagatgttcagggcaaaaactgcctgactaacttctatggcatggttcttacctgtgacaaaatatgttccatggttgaaaaatgttcaacaatgattgaagctcatgttgatgtcaagactaccgatggttacttctttcatctgttttgtgttggttttactaaaaaacacaacaatcagatactgaagacctcttatgctcagcaccaacagtctgccaaatccagaagaagatgatggaaatcatgacctgagaggtgcagacaaatgacttgaaagaagtggttaataaattgattccagacaacattggcaaagatgtagaa

SEQ ID NO: 399190 - DNA, 578 bp, Homo sapiens
gaacaagtgccttatgaaaggtggcaaaaagggagttaagaagaaaacagttgatccattttctaagaaagatcagtatgatgtgaaagcacctgctatgttcaatataagaaatattggaaagacttggtcaccaggacccaaggaacccaaattgcatctgatggtctcaagggtcttgtgtttgaaatgagtcttgctgatktgcagaatgatgaagttgcatttagaaaattcaagctgattactgaagatgttcagggcaaaaactgcctgactaacttctatggcatggttcttacctgtgacaaaatatgttccatggttgaaaaatgttcaacaatgattgaagctcatgttgatgtcaagactaccgatggttacttctttcatctgttttgtgttggttttactaaaaaacacaacaatcagatactgaagacctcttatgctcagcaccaacagtctgccaaatccagaagaagatgatggaaatcatgacctgagaggtgcagacaaatgacttgaaagaagtggttaataaattgattccagacaacattggcaaagatgtagaa

SEQ ID NO: 399191 - DNA, 578 bp, Homo sapiens
gaacaagtgccttatgaaaggtggcaaaaagggagttaagaagaaaacagttgatccattttctaagaaagatcagtatgatgtgaaagcacctgctatgttcaatataagaaatattggaaagacttggtcaccaggacccaaggaacccaaattgcatctgatggtctcaagggtcttgtgtttgaaatgagtcttgctgatgtgcagaatgatgaagttgcatttagaaaattcaagctgattactgaagatgttcagggcaaaaactgcctgactaacttctatggcatggktcttacctgtgacaaaatatgttccatggttgaaaaatgttcaacaatgattgaagctcatgttgatgtcaagactaccgatggttacttctttcatctgttttgtgttggttttactaaaaaacacaacaatcagatactgaagacctcttatgctcagcaccaacagtctgccaaatccagaagaagatgatggaaatcatgacctgagaggtgcagacaaatgacttgaaagaagtggttaataaattgattccagacaacattggcaaagatgtagaa

SEQ ID NO: 399192 - DNA, 578 bp, Homo sapiens
gaacaagtgccttatgaaaggtggcaaaaagggagttaagaagaaaacagttgatccattttctaagaaagatcagtatgatgtgaaagcacctgctatgttcaatataagaaatattggaaagacttggtcaccaggacccaaggaacccaaattgcatctgatggtctcaagggtcttgtgtttgaaatgagtcttgctgatgtgcagaatgatgaagttgcatttagaaaattcaagctgattactgaagatgttcagggcaaaaactgcctgactaacttctatggcatggttcttacctgtgacaaaatatgttccawggttgaaaaatgttcaacaatgattgaagctcatgttgatgtcaagactaccgatggttacttctttcatctgttttgtgttggttttactaaaaaacacaacaatcagatactgaagacctcttatgctcagcaccaacagtctgccaaatccagaagaagatgatggaaatcatgacctgagaggtgcagacaaatgacttgaaagaagtggttaataaattgattccagacaacattggcaaagatgtagaa

SEQ ID NO: 399193 - DNA, 407 bp, Homo sapiens
ttcaacaatgattgaagctcatgttgatgtcaagactaccgatggttacttctttcwtctgttttgtgttggttttactaaaaaacacaacaatcagatactgaagacctcttatgctcagcaccaacagtctgccaaatccagaagaagatgatggaaatcatgacctgagaggtgcagacaaatgacttgaaagaagtggttaataaattgattccagacaacattggcaaagatgtagaaaaggcttgccaatttatcctctccatgatgtcttcattagaaaagtaaaaatgctggagaaccctgggtttgaaaggcatggagcttcgtggtgacggtagtagttttggaaaacccactagggatgagacacatgctaaagttgaatgagctgatggatatga

SEQ ID NO: 399194 - DNA, 407 bp, Homo sapiens
ttcaacaatgattgaagctcatgttgatgtcaagactaccgatggttacttctttcatctgttttgtgttggttttactaaaaaacacaacaatcagatactgaagacctcttatgctcagcaccaacagtctgccaaatccagaagaagatgatggaaatcatgacctgagaggtgcagacaaatgacttgaaagaagtggttaataaattgattscagacaacattggcaaagatgtagaaaaggcttgccaatttatcctctccatgatgtcttcattagaaaagtaaaaatgctggagaaccctgggtttgaaaggcatggagcttcgtggtgacggtagtagttttggaaaacccactagggatgagacacatgctaaagttgaatgagctgatggatatga

SEQ ID NO: 399195 - DNA, 407 bp, Homo sapiens
ttcaacaatgattgaagctcatgttgatgtcaagactaccgatggttacttctttcatctgttttgtgttggttttactaaaaaacacaacaatcagatactgaagacctcttatgctcagcaccaacagtctgccaaatccagaagaagatgatggaaatcatgacctgagaggtgcagacaaatgacttgaaagaagtggttaataaattgattccagacaacattggcaaagatgtagaaaaggcttgccaatytatcctctccatgatgtcttcattagaaaagtaaaaatgctggagaaccctgggtttgaaaggcatggagcttcgtggtgacggtagtagttttggaaaacccactagggatgagacacatgctaaagttgaatgagctgatggatatga

SEQ ID NO: 399196 - DNA, 407 bp, Homo sapiens
ttcaacaatgattgaagctcatgttgatgtcaagactaccgatggttacttctttcatctgttttgtgttggttttactaaaaaacacaacaatcagatactgaagacctcttatgctcagcaccaacagtctgccaaatccagaagaagatgatggaaatcatgacctgagaggtgcagacaaatgacttgaaagaagtggttaataaattgattccagacaacattggcaaagatgtagaaaaggcttgccaatttatcctctccatgatgtcttcattagaaaagtaaaaatgctggagaaccctgggtttgaaaggcatggagcttcgtggtgacggtagtagttytggaaaacccactagggatgagacacatgctaaagttgaatgagctgatggatatga

SEQ ID NO: 399197 - DNA, 344 bp, Homo sapiens
tctttaaactatcaagctcttggytcctggctgcagtcctttgctggtggcagtgggctgggtactgccaccggggagaaatgctgcccacttagagaaagagaaactggttctctttaagaggcagagggaggtttccagtgccagtttgtttggagtcaaagtggctgttgtattaaaattgcccaaacttgggctggtgccttgtgtgtttagagctcaaagccacgattgttttcttttcttttcttttcttttttttttttttttggtggttggttttccatccttttgcttggcaggtttctgttaatagcttcaacctcaagagtcccattatgcag

SEQ ID NO: 399198 - DNA, 344 bp, Homo sapiens
tctttaaactatcaagctcttggttcctggctgcagtcctttgctggtggcagtgggctgggtactgccacyggggagaaatgctgcccacttagagaaagagaaactggttctctttaagaggcagagggaggtttccagtgccagtttgtttggagtcaaagtggctgttgtattaaaattgcccaaacttgggctggtgccttgtgtgtttagagctcaaagccacgattgttttcttttcttttcttttcttttttttttttttttggtggttggttttccatccttttgcttggcaggtttctgttaatagcttcaacctcaagagtcccattatgcag

SEQ ID NO: 399199 - DNA, 344 bp, Homo sapiens
tctttaaactatcaagctcttggttcctggctgcagtcctttgctggtggcagtgggctgggtactgccaccggggagaaatgctgcccacttagagaaagagaaactggttctctttaagaggcagagggaggtttccagtgccagtttgtttggagkcaaagtggctgttgtattaaaattgcccaaacttgggctggtgccttgtgtgtttagagctcaaagccacgattgttttcttttcttttcttttcttttttttttttttttggtggttggttttccatccttttgcttggcaggtttctgttaatagcttcaacctcaagagtcccattatgcag

SEQ ID NO: 399200 - DNA, 344 bp, Homo sapiens
tctttaaactatcaagctcttggttcctggctgcagtcctttgctggtggcagtgggctgggtactgccaccggggagaaatgctgcccacttagagaaagagaaactggttctctttaagaggcagagggaggtttccagtgccagtttgtttggagtcaaartggctgttgtattaaaattgcccaaacttgggctggtgccttgtgtgtttagagctcaaagccacgattgttttcttttcttttcttttcttttttttttttttttggtggttggttttccatccttttgcttggcaggtttctgttaatagcttcaacctcaagagtcccattatgcag

SEQ ID NO: 399201 - DNA, 475 bp, Homo sapiens
agtctcacactacacctctgcccccagcctcttggccagaactagccacaacccctcccccaccacagggcaatgcrtgcagacaggagaattggatacattacaaatttctaccccatggcatttcataaaagggaaaaaaatgcaaatacaaaaatgttttaaaagaatagaatatatacatttttagaatacagaacaatcctccaaaaagacagctggtggtctttcaccaatgggcacatttctgtgacattttctctgtttttccattttatccttgacctatgaacattttatacagatggtccaaagaacaccatttggggaccactgctctaatcaggtgatgaaaatggccccaagaacagagcacactttctttagcaaagacccagcagggccagggtgaccatgttctcaccatcaatgtgcagacatccacctgcagcatcctcacatcccaacatcaaac

SEQ ID NO: 399202 - DNA, 475 bp, Homo sapiens
agtctcacactacacctctgcccccagcctcttggccagaactagccacaacccctcccccaccacagggcaatgcatgmagacaggagaattggatacattacaaatttctaccccatggcatttcataaaagggaaaaaaatgcaaatacaaaaatgttttaaaagaatagaatatatacatttttagaatacagaacaatcctccaaaaagacagctggtggtctttcaccaatgggcacatttctgtgacattttctctgtttttccattttatccttgacctatgaacattttatacagatggtccaaagaacaccatttggggaccactgctctaatcaggtgatgaaaatggccccaagaacagagcacactttctttagcaaagacccagcagggccagggtgaccatgttctcaccatcaatgtgcagacatccacctgcagcatcctcacatcccaacatcaaac

SEQ ID NO: 399203 - DNA, 475 bp, Homo sapiens
agtctcacactacacctctgcccccagcctcttggccagaactagccacaacccctcccccaccacagggcaatgcatgcagacaggagaattggatacattacaaatttctaccccatggcatttcataaaagggaaaaaaatgcaaatacaaaaatgttttaaaagaatagaatatatacatttttagaatamagaacaatcctccaaaaagacagctggtggtctttcaccaatgggcacatttctgtgacattttctctgtttttccattttatccttgacctatgaacattttatacagatggtccaaagaacaccatttggggaccactgctctaatcaggtgatgaaaatggccccaagaacagagcacactttctttagcaaagacccagcagggccagggtgaccatgttctcaccatcaatgtgcagacatccacctgcagcatcctcacatcccaacatcaaac

SEQ ID NO: 399204 - DNA, 475 bp, Homo sapiens
agtctcacactacacctctgcccccagcctcttggccagaactagccacaacccctcccccaccacagggcaatgcatgcagacaggagaattggatacattacaaatttctaccccatggcatttcataaaagggaaaaaaatgcaaatacaaaaatgttttaaaagaatagaatatatacatttttagaatacagaacaatcctccaaaaagacagctggtggtctttcaccaatgggcacatttctgtgacattttctctgtttttccattttayccttgacctatgaacattttatacagatggtccaaagaacaccatttggggaccactgctctaatcaggtgatgaaaatggccccaagaacagagcacactttctttagcaaagacccagcagggccagggtgaccatgttctcaccatcaatgtgcagacatccacctgcagcatcctcacatcccaacatcaaac

SEQ ID NO: 399205 - DNA, 354 bp, Homo sapiens
tcaaatataatcaggaaaaaagagcaaattctctgtgactccacctttttgttttgttcaggycttcagtggattggatgaggctcacccatattggggaggacaatctgctttattcagtctaccaattaaatgttatcttcatccagaatacctcagagacacacccagactaatgtgtagccaaatatctgggcaccccacaacccagtcaaattgatacataacattaaccatcatgtcttgcttctactctctccccattactgcatgtccaaatccttctcttatttcaaggcttagttcaaatgtcacctcttaactaagccttccctgctaaccccaaatattaat

SEQ ID NO: 399206 - DNA, 354 bp, Homo sapiens
tcaaatataatcaggaaaaaagagcaaattctctgtgactccacctttttgttttgttcaggccttcagtggattggatgaggctcacccatattggggaggacaatctgctttattcagtctaccaattaaatgttatcytcatccagaatacctcagagacacacccagactaatgtgtagccaaatatctgggcaccccacaacccagtcaaattgatacataacattaaccatcatgtcttgcttctactctctccccattactgcatgtccaaatccttctcttatttcaaggcttagttcaaatgtcacctcttaactaagccttccctgctaaccccaaatattaat

SEQ ID NO: 399207 - DNA, 354 bp, Homo sapiens
tcaaatataatcaggaaaaaagagcaaattctctgtgactccacctttttgttttgttcaggccttcagtggattggatgaggctcacccatattggggaggacaatctgctttattcagtctaccaattaaatgttatcttcatccagaatacctcagagacacacccagactaatgtgtagccaaatatctgggcaccccacaacccagtcaaattgatacataacaytaaccatcatgtcttgcttctactctctccccattactgcatgtccaaatccttctcttatttcaaggcttagttcaaatgtcacctcttaactaagccttccctgctaaccccaaatattaat

SEQ ID NO: 399208 - DNA, 354 bp, Homo sapiens
tcaaatataatcaggaaaaaagagcaaattctctgtgactccacctttttgttttgttcaggccttcagtggattggatgaggctcacccatattggggaggacaatctgctttattcagtctaccaattaaatgttatcttcatccagaatacctcagagacacacccagactaatgtgtagccaaatatctgggcaccccacaacccagtcaaattgatacataacattaaccatcatgtcttgcttctactctctccccattactgcatgtccaaatccttcycttatttcaaggcttagttcaaatgtcacctcttaactaagccttccctgctaaccccaaatattaat

SEQ ID NO: 399209 - DNA, 621 bp, Homo sapiens
atatgtgtgggtttgttactgagcaccattttgttactttggtctatttatccatctttgttccagcaccacattattgcaattactataacttcgtaataagcttaatatcaattagagtaagttctctcatcttgttcttcttcatgaaggaagttgattattcatggctcttggctcattgcattgctctgtgaactttataatcaacttgtcaattcataccttaagaagacagaaatttcactagaactgcactaaatctagtggatcagattgagtagaattgacatctttgaaacattgactctttaaatccataaatrtagtgtatgtctccatttctttaagtcttctaaaaatttacctttaaattgttttttgaatagtagtcatgcacaacctatgtcagatttattgctaggtattggttgttgttttaatgctactgtaattgttattttatttcattttctaattctctgccaatacataaaaatataagttatgttttcatattggatcttgcactcaataaacttgccaaaatcatttcttaatcctaataatttatcagtgattatttcagatttttggagcatgaaattatattgtacatta

SEQ ID NO: 399210 - DNA, 571 bp, Homo sapiens
tctcgtgagtgaagtatctgtagccaccagtcttattctggttaacttaattaagacatttaaaacatatatattgaactcaaactacgtacattgcattgatttagattctgtgatggatacaagaagtttaagacacagtccctgttctcaacaagtgtatacttcagctgcataaaatataaaacaaatatgtaaaaggtaaataattcaagagttctattyctacacaagagaataaaaccaagctcatcacagggtgttacatgatgttgaatttgttaggatattacagaaaaacaagaggttctgtagtaaaaaaataatttggagattctagattacatatattcaagtagttttctttaatgcacaatttctcatcgcctttattatggcaatgtacattgcaatcttgcaagagagtttcattctttgtaatattttccacatttgttttgaaaaatgctatggtctgaatgtctgtgttccccctaaaattcatatgttgaaattataaccccaaagtgatggtattaggaggtaggtcctttggggaggtgattagggc

SEQ ID NO: 399211 - DNA, 520 bp, Homo sapiens
agtccatgtctttctacccagaaaatgacaaaagactgactctgtccattgcttctggggaaccacctcccaactagaacaggacttgacacatagcaggcactcaagagatggtgagtgatgaatgaataaacaggttttcctctcattcagagggggtatgagatgaaaaaagtcagtgctattccagttaaggcaataaagaaacacaatcaagaaatgcatcaatttactaaaccctgccaaaaatattttctaaacattttggcctgaaatgaatccaattattaacaattatcattcgaattgacttaagtggaaagaatggaaaggaaaacccagagtaaagaaacagtgggagacagatgcaagtaaaaaaattaaaaagtattacggaaccacaatatttatragggacagtcctaagaatcccatgatttcccagattgataagggaacagtgagcactaaaccaagttcactcctgagtaaaatgcctcacttctgaataccagcccca

SEQ ID NO: 399212 - DNA, 646 bp, Homo sapiens
aaaccatacccttgtgtgatttataataatttatcatgctaagaagaaaaagctttgttattttcagaaacattatatttggaactaacacaagcatcatgaatgttgttccttaaaatatttaacttggtatatatccttaaacaccaactgataattaaatagaggcactgagatgctaatttgcattacttygatgtgctgtaaatgttatttttctttttgctccttaatctgacctatttatttgcttgctttctgtgtatttcttgtaatatttgtgcttagtaaaagaggaatactaataagtaccacaattttatgaggcttgtcaaacaggagactatctagtgtgctggtaggctttaatgatgttatcatgtctctgtcccagtacaccttgtagcaatttcccagcacattcttaggattatatttataatgcagtattaatccatttgaaaactcacatctgaggtcataatgttgacctgcaaaattaacagtatactcatgctgttcatccagcagctaagtataacctccaattattttaaaattgttttgatggctgtagtttcttttgtacatgaaaatgatcatcctttctcagctgaacttagacttggattgttcccctttgtga

SEQ ID NO: 399213 - DNA, 629 bp, Homo sapiens
ttaatgtacttttagaaagttgaagagctgtgaattatatagtttataagagtcttaaaggacaaggataacttactgtgaagcctgtcattcaagggaagagcagagtttgacaggaaacatgtattaatacacttaatgtaaaacctaaaacctagagaagcactctaagcctgtcttctcttccttcttgccatcttctttaaaagaaacaggattatttctcttttcctatctcttttcctgggtttttgataaagtgttactatttccaccagtggacttctccctctttctctctctgtctctgtttctcccttcttcctccttccacctcagtttttctcaggatggtgcagcagcccatgggttcacacatrtagtcacttgccagccaaggtcactttcccccactcagtttcagtgtttacctttcctattcttcctgattctacttcctgttatccctgcttcctgctccaacttcctctcgtggtttcttacagctacatccatttcccaaatccccctccctaggtcctgatttctgtgtccaactcaggccggcaatcatgcttcgccttctgactgtcctcttggtatggctgcttcaatgtacccatctgatc

SEQ ID NO: 399214 - DNA, 673 bp, Homo sapiens
tttccttctgaaggagaagttaagagaaatagataggggtagtaagtattaaattcttactgaggtagatttttccagggcctaagtcacccctctacacccaaaataaatttgtyattttggactggacattgactctttctgagcttcatggtaccatttagaattcagatttgtattatgataatcaagagtcaggtcatagatggaaatgttttatcagccagtattgaccagtttcatatcgttggttcaaacaaatgtggctgttgattagtccattgaacctttttcccatcctcaggttcaggtggaataactgaccaggccataggcccaccattgaaaagggtaaaagtggcacctaacaatgatatgtccaactctgacctcatccttcaccacaccccaaggttctagactccttataaagagagattagggaatgattcaagttcttcttacatatcaccatctatgtatttttgaaaccttgctttcctactttaatcataggtttttggtcagtgatacttttttacatagcattgctttgtatttcaaaacaaatattagaaataatcatctatatcccagagaaaatattctaaaatacagaaatgggaggcaaatataatcttctgagtatagtcctcttaattagaagcaaatg

SEQ ID NO: 399215 - DNA, 574 bp, Homo sapiens
ttttaattcaaccattgtcattttgatcctgtaaaatctaggtatagtttctatgtgagggaatttccttttaaaattgttaatattgctcgaagaaggagggaaagccagaagccagctgccagctgggtctcttggtgacatccccactgtcctgtggaatcaactgaccccagttcagaggagagagtgagaggccagtaggtggctcatgctgccagactagtctaaactgagtacagaaagagaaaagaagaaatgtttaaatacaaccttgaacttttctttaaaaawtttttttttagatttagggggtacaagtgcaattgtgttacctgagtatattgtgtagccattgcccaaagagtgtacattgtacccattaagtgatttctcgtcccttatccccctcccaccctcccacccttccttgtccccaatgtctattattccactctctatgcccatgtgtacacattatttagctcccacttaaaagtgagaacatgcagtatttgactttctgagttacttcacttaagatgatggccttcagttccatccatgttgctgc

SEQ ID NO: 399216 - DNA, 586 bp, Homo sapiens
tgtaaacataatctaatttcagacctccaaggcctaatccctgataatcagagaagacagacttaaattttacttcctaaaatgactctggacagaatcataggtttataagcagctgtggcctatgcatagaatagagatataatttatcaccaaaccaagctatttttgagagtgtaaaggggctcagtatagttactgtattagttacctattatttctgtacacaaatttagtgacttaaaacaccacaaatgtattatcttacagttctagaggtcagaagtccaaaacragtttcactaggccaaagttaaggtgcctggaagactagcttcttctgaagcctgtaaagggagaaactgttctcttgcctttttcagcttctagaagctatctgcttatctaggctcatggcttcttctcatatcactccaacctcatgcgtctactatcacattccattatcacatctccctctactaactctgatctgcctgccccttttcataagtactcttgtgattacattgggcccacctagttaatcctggataatctccccatctcaagaccctaaattaat

SEQ ID NO: 399217 - DNA, 574 bp, Homo sapiens
ttttaattcaaccattgtcattttgatcctgtaaaatctaggtatagtttctatgtgagggaatttccttttaaaattgttaatattgctcgaagaaggagggaaagccagaagccagctgccagctgggtctcttggtgacatccccactgtcctgtggaatcaactgaccccagttcagaggagagagtgagaggccagtaggtggctcatgctgccagactagtctaaactgagtacagaaagagaaaagaagaaatgtttaaatacaaccttgaacttttctttaaaaaatttttttttagatttagggggtacaagtgcaattgtgttacctgagtatattgtgtagccattgcccaaagagtgtacattgtacccattaagtgatttctcgtcccttatccccctcccamcctcccacccttccttgtccccaatgtctattattccactctctatgcccatgtgtacacattatttagctcccacttaaaagtgagaacatgcagtatttgactttctgagttacttcacttaagatgatggccttcagttccatccatgttgctgc

SEQ ID NO: 399218 - DNA, 605 bp, Homo sapiens
aaagtgaagagaaaaataaaattgaaaaaaaaagagaacaaaatatccaagaactctgggacaactaaaaaagatataccatgaacataataggaatgccagaagaaaaagacataaagaaaggggaagaagcaatatttaaagcaataacgactgggaatttcctccaaattaatgtcagacagcaaaccacagatacagaaaactcaaaagatcagcgagcaggataaatgcaaaaaagcaaaacagaaaaacaaaatgaaaacccctacaccgaggcataccatattcaaacttcagaaacaaaaaaaaatttttttggaaagaaggmagaagaaaataaaaagcaccttacttacaaaggaacaaagataagaattacatccaacttcttcccagaagccaggcaagcaagaagagagtggcgtgaaatacttaaagtgttgagagaaaaaaagaacaccaacctagaattttgtacgccatgaaattatcctctaaaagtggaagagaaataaagactttctcagacaaacaaaaattgagggcctttgttgccagtagactgagaaatgttaaaataagttgttcagaaagaaggaaaa

SEQ ID NO: 399219 - DNA, 542 bp, Homo sapiens
atgtcttttccaggaatgtggctggagctgaaggccattatccttagcaaactaatgcaggaacagaaaaccaactaccacatgttctcacaagtggaagctaaaagatgggagctcatggacacaaagaagggaacaactgawactggtgcctacttgaaagtgaaggttgggaggagggagagaagcagaaaaaaataactattgagtattaggcttagtacctgggtactaacgacttgagtttacctataaaacaaacctgcgcatgtaccccaaaactaaaataaaagttaaaaaataaaatatgtcaatatgcaacatacctaataaaagcaaaggtatttattaaatgagtttgtttaaaaatgagataactgtgcttacaatgtattgttctgttaaaggcactagcaatctctatgtatttacttaccaccagagatgtccgtaaggaacagccagaactctacttcagtaccttaggtgtgatgctcacattaggacaatatctagggaaggcaggccatgacacaggcaaa

SEQ ID NO: 399220 - DNA, 555 bp, Homo sapiens
ggacctattcttaccgctcttataaagcaactctttctgtgtgtggtgtttcagctttactttaataattagcaagtcctggtagatcagaatttcacttgggccttgtcccttagaaaatagtgttagaggttcctctgccagtggcattggcagccaagaaggaacaaattaagggatcagtctgtactcacatgtagagacctttacttcttgggatgatccaaatatctgcgtaattttacaatggagataaaagttgatgaaatacttttgaatagattgtgcatatagatatggccagagagcttgtggatgtagttgttcagatgcagttactctgctaaaaggaatacagatacaactcaaaggtacataaagaaaaaaattctgcaggaaactatacttaggattacatctctggcatttatgtttctttatagtattagcactttacctgatgtctcacacacaatgtaygcttgattccaaaaatattttttatttttattttatttttttgagacagtgtcttgctatcttgcccaggctggc

SEQ ID NO: 399221 - DNA, 660 bp, Homo sapiens
tgtgtactccttttctttctgggccaccttccaggcaggtggaagccatctcctctaggccttttctcctccttcccaaaccacccctccaggcaatagagggatgaggatcgatcttcctgaaccagagaacttggtctttactcctgtttccccacactctactcctccttatcttggaggcccagctgtatcctttagtttrtctttgacttgtatgactttgttctccctaaggatagagtcaggggatagaaacacttcagttctgtcttgaaattagaataaagatgcagagggcatgagacccacctctgccgtagattcagttttgattgcttaatcaggtgagttttatgtgtctactaaatcacaaataattagagaacagcatgtgttaataatcctgaaaaatcccaggaacagttctatagcagtgcctccaaatgtgattagaattctttgctcacagacagtatatttcttccaagtctaagaaaacacatgtgctgtgtgaattaattttattgtactttttctaattagtcttcaaaaggcttggctgttttgcttattggtgagctcctgtgacaaaccagggcattcgattgaattgtaaaccaacttatgacattgagcaaagcaaacttccaaacagat

SEQ ID NO: 399222 - DNA, 660 bp, Homo sapiens
tgtgtactccttttctttctgggccaccttccaggcaggtggaagccatctcctctaggccttttctcctccttcccaaaccacccctccaggcaatagagggatgaggatcgatcttcctgaaccagagaacttggtctttactcctgtttccccacactctactcctccttatcttggaggcccagctgtatcctttagtttatctttgacttgtatgactttgttctccctarggatagagtcaggggatagaaacacttcagttctgtcttgaaattagaataaagatgcagagggcatgagacccacctctgccgtagattcagttttgattgcttaatcaggtgagttttatgtgtctactaaatcacaaataattagagaacagcatgtgttaataatcctgaaaaatcccaggaacagttctatagcagtgcctccaaatgtgattagaattctttgctcacagacagtatatttcttccaagtctaagaaaacacatgtgctgtgtgaattaattttattgtactttttctaattagtcttcaaaaggcttggctgttttgcttattggtgagctcctgtgacaaaccagggcattcgattgaattgtaaaccaacttatgacattgagcaaagcaaacttccaaacagat

SEQ ID NO: 399223 - DNA, 583 bp, Homo sapiens
aatgttttgtatgtatttattcttttcttctctaagctaaacttcatgttcacttcaattctgcctcccgaagacttcatggtatcacaggagttttgttgtcagcccatcacatctggatccaaatcacagccatatctcttgtgagtgtgtgaacacggcctttgcaggtttcttctctgggytgcagtgtccttatctgaaaaatgagcatagtaatatgtacctcttaggactgttgtaagggtgaaatatgtaaagcatatagaacaaaacttggcacacagtaagtgctatctggttggtagttattattattaccgtcattaattgcatatgatatgtttggtagaacttccagcccataataaactctcaacaaatgttagctattattattattcatactaatatcactatagcacataacaactcttcatttctttccttccttccttgtccctcttatgttttcagtctcttcactatttttgttactaatagtacccgtgttacctgaccaggcaaaataaaggagggcagtgatttccaaagtatgatcccagaaccagcaacattagca

SEQ ID NO: 399224 - DNA, 506 bp, Homo sapiens
aagaactctatactgcaatatcaaactcctaaacttttcatctttcttttctggtcctcataccatgcaaaaatggggttactctgataataatgaataaatgtgaagcctggaaattactgtcaatcacctgcactgctacattaaccccctggaatcacagagtcttagagtaggaaccccagacttcgaaagtcatttagaccaatgaccttgttttgcaaatggggaaactgagatccactcargttaagtgtcctatccaaggctatagagctagtttgtgatgaagctggactaaaatctgggctctacactcaaagtatgtcactctccctcctccatactgtctccctagacagcttggtcattttaatcccttcttatatttgccttgccaataggaccatgctgttctggcctgctgccaatttaggctgtccagttccagccaagtcttcatggttaatcttgttattcatctcctctttttttcctagcatgta

SEQ ID NO: 399225 - DNA, 539 bp, Homo sapiens
tgagaacttgaaaaagacaactgaaaagaagctctgagactgtatgtacaaaaattgagaaaggagaagacctttatcaagacagaaaattaagaaactataaaagctataaaatgataatatttttctacaaaatgatataaactagtgtatgacaaatatttactatataaaatcctagttaaattatacacatttgaattatacatgacagagaaaatagtaatatttaacatgagaccacttaaaaattcacatgaaaaactaatgaaaacaagcaaaactcacaaaatagtaaacccaaataaccaataaatgtgtccctaaaccaaccagtagtcagataaatgaaaagtatgatgccaataaaattttacatatagttcaattggcacaaattaaggcaataatcrgtgttgcttgttggaatatgggaaaaataaccttctcttaatttgctggtgaacatatgacagtctttgaagaaataatttagcaacaaaacctactaaatttgaaaatacacatacctttcaacc

SEQ ID NO: 399226 - DNA, 552 bp, Homo sapiens
caaatgggagaaattggccaaaacaaaggggccacagggcccatgcaagtgcagaatccaatagggcagttattaaaccttaaagttccaaaatgatctcctttgtctccstgtctcacatccaggtcatgctgatgcaagaggtgggctcccattgccttgggaagctctgaccctgtggctttgcaggattcagcccccctcccagctgcttttacgggctggcactgagtgtctgtggctttttcaggattacgatgcaagctgtcagtggacttaccatgctggggtttggaggatggtggccctcttctcacagctccagtaggcagtgccccagaggagactctgtatgggggctctgaccccacattttccttccacatttccctagtagaggttctccatgagggctctacccctgcagcaaacttctgcctggacatccaggagtttttatacatcctctgaaatctaggtggagtctcccaaacctcagttctggacttctatgcacctgcaggcccaacatcatttgtaatccaccaaggc

SEQ ID NO: 399227 - DNA, 552 bp, Homo sapiens
caaatgggagaaattggccaaaacaaaggggccacagggcccatgcaagtgcagaatccaatagggcagttattaaaccttaaagttccaaaatgatctcctttgtctccgtgtctcacatccaggtcatgctgatgcaagaggtgggctcccattgccttgggaagctctgaccctgtggctttgcaggattcagcccccctcccagctgcttttaygggctggcactgagtgtctgtggctttttcaggattacgatgcaagctgtcagtggacttaccatgctggggtttggaggatggtggccctcttctcacagctccagtaggcagtgccccagaggagactctgtatgggggctctgaccccacattttccttccacatttccctagtagaggttctccatgagggctctacccctgcagcaaacttctgcctggacatccaggagtttttatacatcctctgaaatctaggtggagtctcccaaacctcagttctggacttctatgcacctgcaggcccaacatcatttgtaatccaccaaggc

SEQ ID NO: 399228 - DNA, 568 bp, Homo sapiens
actttggtctctgtcagagaaaaatgaaaaacaaaatattatagatggggagtgctgtaaagatarattttagtgccaattgaactaccagtcatggaagaaagtaaaataaagttatttcaagacatgaaaagtgtctcaaaaatttaccttttcaaaggaaattactaaaggatattctataaacaaataaataaaaaagctaagaggaggagagcatgaaatagggaacagaagatcaaaactcattagagaaaaaagaagccttgagagcaattagtttgaattgtttgggtgaggctgctgagggaatgaaactgacaaataattagatagtttgatgatatagacaattgttctgacctatgagaagctatgggaggatgttgccataatttgaaaaaaattcaggaaactgacattagcaaaccaaagccagtaatacaaagtagaatgatatatcatgaccaaggggattttatcttaggaataaaaggtgggctgaagattcaaaaagtcaatccattaatatttaatactttaataatttgatcttatttaattaaac

SEQ ID NO: 399229 - DNA, 595 bp, Homo sapiens
ttcctttgaaaaaaacactaagtgccctgagtattgaaccctcaggacatcttaaaacagcagacatctaaaaagtcaaaatgatgctaccttctttcagtattcactgccctggagccatgctgcattctgtgaagaacaggcaggtcactgccattttctgagactgtggtcaaagccacactccttcttggctcaagtaaggatggccctcattttgcacctaatacaccgtactgcccctcagacccatgcttcctcttgggctttttttctgagctttttctgtaataactattaccattcttccaactactgaagttcaaattctttgaaatctctctgtttaaattctcacataaaatcattcaaaaggtgccattgattgtcatttgcatagcccttccaacttatcatggactcatatgtttacttattaaaagcatattttttaaaaaggcaacgtgttaaacactgtgttaggaatttagattcaaattcaaataagatagaacaatagataaataactgcaatatggtgtgacaatacttmatttaggcccttattatttctcacttgctctattttaaaatt

SEQ ID NO: 399230 - DNA, 493 bp, Homo sapiens
cttacgtcggtctctagtatattagcaatcagttgcttatcctacccagtgagttttctgtcattgacataatgggtcaatgtgatattacacaggatatgcagacagttcacatctctttaggcagtgtaataacaacaagaaacagagagtttaagcaatgttatggcagtcaagatctctttagacattatgacaaaaggaaacaaaactgcaaatgaatatcaatatccattctacttatacgcaagctgttctcatcctcttttctaatctgaatagcaaagatgcatttgctaaatcagtgggcatataccacctacctgagggcttgttaaccaagaaatgtaccacttccggcatagcagctgctgcagagcyacaacttgtttgtgtttgcagtattagaacaagccaagaactgtctgtagtggttattttaaattacaaatatattaacctcagttatactcttggggactaggcaataacc

SEQ ID NO: 399231 - DNA, 504 bp, Homo sapiens
caaaacagttatttccatttccaggtatagcacaggcttaccagctaactccatatacacatacagaattttcatcttcctaagaggaattatttgccagttataaatatattaattcacatatataagtacacagtatacacatacacatatatactatatactatatattttattaatacacatggaatatatggaagaaagaaagggaaggagaaaaggagggaaggaagggagaagagagaaagggcaagggcagaaaggaaaggaggaagcaaaagagagatgygttagagaacaacactggggatatagatacagcggtactaatggaatagagaggcaaagttctatagtggttaaaatcatggctgtgttcaaatatttacttcacctgcataatagctttatgacttggagcaagtcattgaactttgctatgttgcagtttcctcatctatgaaatttcaatgctaatagtatccagcacatgggctgttagaa

SEQ ID NO: 399232 - DNA, 612 bp, Homo sapiens
ttattacacattcaccacatccccttctcttgtcctgctaattgaatagtatatattctaacactgggcttccattgaagtgcagctgtcattaagacaaagtggctttttatatacagaacataaattrttgcaatagattagtaggcatttcaaattatgggaaacccaactgaggggctaagattgccagagtgaacaaaaatgaaaaaaagtatgaaatacatggtaaatatacacacatcattcaatcactgcagtcagatttctaagtagatataatcgactttattttgtggatgagaaaaaatagtgaagattttgtcacctactcacacacttactctgaatcagggaaggagaaaggtaccactaatgagtcccttcacagagcacagtcacttccctgaacttatataaatgatgtggtgacagcacacttcagaaaaccattttcagagccaacgttttttattgttttattctgtcatctttgcaacggacctttcagagctgaagctgaccgtgatgaaactgtcactcttgctttattgatagtgtttttgtggatcctacaagtgtcctaaggaacacttggactttttatgcaca

SEQ ID NO: 399233 - DNA, 612 bp, Homo sapiens
ttattacacattcaccacatccccttctcttgtcctgctaattgaatagtatatattctaacactgggcttccattgaagtgcagctgtcattaagacaaagtggctttttatatacagaacataaattattgcaatagattagtaggcatttcaaattatgggaaacccaactgaggggctaagattgccagagtgaacaaaaatgaaaaaaagtatgaaatacatggtraatatacacacatcattcaatcactgcagtcagatttctaagtagatataatcgactttattttgtggatgagaaaaaatagtgaagattttgtcacctactcacacacttactctgaatcagggaaggagaaaggtaccactaatgagtcccttcacagagcacagtcacttccctgaacttatataaatgatgtggtgacagcacacttcagaaaaccattttcagagccaacgttttttattgttttattctgtcatctttgcaacggacctttcagagctgaagctgaccgtgatgaaactgtcactcttgctttattgatagtgtttttgtggatcctacaagtgtcctaaggaacacttggactttttatgcaca

SEQ ID NO: 399234 - DNA, 612 bp, Homo sapiens
ttattacacattcaccacatccccttctcttgtcctgctaattgaatagtatatattctaacactgggcttccattgaagtgcagctgtcattaagacaaagtggctttttatatacagaacataaattattgcaatagattagtaggcatttcaaattatgggaaacccaactgaggggctaagattgccagagtgaacaaaaatgaaaaaaagtatgaaatacatggtaaatatacacacatcattcaatcactgcagtcagatttctaagtagatataatcgactttattttgtggatgagaaaaaatagtgargattttgtcacctactcacacacttactctgaatcagggaaggagaaaggtaccactaatgagtcccttcacagagcacagtcacttccctgaacttatataaatgatgtggtgacagcacacttcagaaaaccattttcagagccaacgttttttattgttttattctgtcatctttgcaacggacctttcagagctgaagctgaccgtgatgaaactgtcactcttgctttattgatagtgtttttgtggatcctacaagtgtcctaaggaacacttggactttttatgcaca

SEQ ID NO: 399235 - DNA, 601 bp, Homo sapiens
agataaagtaaagcctgtgttgtttttatttttttacctttatgtattatcaaaatttattctaagatattaaagagtatgtgcttagagcagtggctgtttaccaacgaatcctgtgttttatcatgcctctcttttccgctacatttattcatttgtttttaaactttcattttaggtttgggggtacacatgaaggttatataggtgaactcatgttatgggggtttgttgtacagattagttcattacccaggtattaatcccagtacctaatagttatcttttctgccccctscctccttccattctccaatctcaagtaggccccagtgcttgttgttcccttctttgcggttcatgacttctcatcatttggctcccacttaacgtgagaacatgcattatttggctttctgttcctgtgtaaatttgctaaggataatagcctccagctccatccatgttcccacaaaagacatgatctcattctttattatggctgcatagtattccatggtatatatgaaacatggaattgcctttatacaatctgttggacatttaggttgatttcctgtctttgctattgtgactagtg

SEQ ID NO: 399236 - DNA, 521 bp, Homo sapiens
ccaactcgcaagaaaacaataggcattcctatctttgttcattctttttatgtgaagcatatgttatttctcaataatctacaaatatggaaatatagagagactcttatttggttgctttgttttctcctgcttttcttctttctagtaacataacaaccaacatatatatggcaaaattcaagttgctgcagtttgaggttcagtattgtttctagcctcacatagagaggcttcttccattaacttyagctgatctcattttccagccttctaagtttaatcaagttaattgttagtctcagggaaaccaaggtcctctctagctggttttgttagaattctgatctatcctatgtcctctgcattcatatgataccccagaggtttgtcctcttatctccctaaccctttatataaaagcccttaaatctttccaaggcattaagtatgctttaagccctcacatactgcagtcatgtaagcacttgcttttaactggtcaatagaatggtattatc

SEQ ID NO: 399237 - DNA, 589 bp, Homo sapiens
tgcacaaatgggtttatctgtctcacattagactgtgaaaatgtgttctgtctgctggctgttcagtttgcaaagcttgcacgactgggctgttggcaagggtttccagaccatgatgagtagctaggagacaaatcataaaaggtcagaattggcaggggccttagaaggtcttcatgcttgaagcccctgttttgcaatatggcaattgagccccagagagggaggttgcttgcccagtgacacttattaatagaatcaatcagcatacaaattctataaatagtaactgataacagtgtttgctgtaataagttgacaatatgggggaatcagcaaaaacataattttaagtgctaattctcagataccacaaaatatgttttggttggtttttcaatctattttgttcttttaccagtacttctcaactcgaaatcttctgaattatygatctaacttggaatatcttttcaggttctttgtggaaaaaacagcatttatataacaattacttctattctcaccagtaggaaatttattagaaggttttttttttctttttgccttaaatatggatgtaaatcag

SEQ ID NO: 399238 - DNA, 617 bp, Homo sapiens
gactgggctgttggcaagggtttccagaccatgatgagtagctaggagacaaatcataaaaggtcagaattggcaggggccttagaaggtcttcatgcttgaagcccctgttttgcaatatggcaattgagccccagagagggaggttgcttgcccagtgacacttattaatagaatcaatcagcatacaaattctataaatagtaactgataacagtgtttgctgtaataagttgacaatatgggggaatcagcaaaaacataattttaagtgctaattctcagataccacaaaatatgttttggttggtttttcaatctattttgttcttttaccagtacttctcaactcgaaatcttctgaattattgatctaacttggaatmtcttttcaggttctttgtggaaaaaacagcatttatataacaattacttctattctcaccagtaggaaatttattagaaggttttttttttctttttgccttaaatatggatgtaaatcaggaaatgaaatactagaagccctaagctggttccctctgaaatgttactacttcccagaacagcctttaagtattttgtttcttagtgccaagaataggacttttacctcg

SEQ ID NO: 399239 - DNA, 617 bp, Homo sapiens
gactgggctgttggcaagggtttccagaccatgatgagtagctaggagacaaatcataaaaggtcagaattggcaggggccttagaaggtcttcatgcttgaagcccctgttttgcaatatggcaattgagccccagagagggaggttgcttgcccagtgacacttattaatagaatcaatcagcatacaaattctataaatagtaactgataacagtgtttgctgtaataagttgacaatatgggggaatcagcaaaaacataattttaagtgctaattctcagataccacaaaatatgttttggttggtttttcaatctattttgttcttttaccagtacttctcaactcgaaatcttctgaattattgatctaacttggaatatcttttcaggttctttgkggaaaaaacagcatttatataacaattacttctattctcaccagtaggaaatttattagaaggttttttttttctttttgccttaaatatggatgtaaatcaggaaatgaaatactagaagccctaagctggttccctctgaaatgttactacttcccagaacagcctttaagtattttgtttcttagtgccaagaataggacttttacctcg

SEQ ID NO: 399240 - DNA, 617 bp, Homo sapiens
gactgggctgttggcaagggtttccagaccatgatgagtagctaggagacaaatcataaaaggtcagaattggcaggggccttagaaggtcttcatgcttgaagcccctgttttgcaatatggcaattgagccccagagagggaggttgcttgcccagtgacacttattaatagaatcaatcagcatacaaattctataaatagtaactgataacagtgtttgctgtaataagttgacaatatgggggaatcagcaaaaacataattttaagtgctaattctcagataccacaaaatatgttttggttggtttttcaatctattttgttcttttaccagtacttctcaactcgaaatcttctgaattattgatctaacttggaatatcttttcaggttctttgtggaaaaaacagcatttatataacaattacttctattctcaccagtaggaaatttattagaaggttttttttttctttttgccttaaatatggatgtaaatcaggaaatgaaatactagaagccctaagctggttccctctgaaatgttactacttcccmgaacagcctttaagtattttgtttcttagtgccaagaataggacttttacctcg

SEQ ID NO: 399241 - DNA, 528 bp, Homo sapiens
aatctatatacataaatagccatattactcaggtgcatcccctggagtcagtaaagtgatgttactgaaatgatggataaaatgtgtaacttatgaattcagatgccaccatccccaatatcactaktgctatctacataatgaaagtaatgtaaatctaaatctaaatcattctaaatcttaagattgacttaagaataacctatagatataaaacacacccaggaaattattatatgcttatgagtgaaacagggatgtaaactcaggacctagtgatttgtctgttggaggttttaagaattctgttcttcaccagaaattcttactatgtagtgacgtcaatggattcaggaggcaatgaacacaaagcacaactactttgtggttgttttcagaatctctctcagtaactgtttttgttgccttaatgaaggcatttgatcttggcacccctttttcaagagttcagtgatatgatgaatggatgattttttccacagctggctgattaggcttaaagcccta

SEQ ID NO: 399242 - DNA, 677 bp, Homo sapiens
tactttaaaacctctgacatcgttttttcagacatgattaagaccaccaaagcaattttaccatcattccttctggcctttgctacttgacttgctagcaatgagtaataggtgcagtaatcccaattctgttaggtaaagacaagaagcgaaagggactaaatgccctttcagctaaatcccctttcttttgtttttttcttctttcttttcccttccttcctcccttcctcctttcttccttccctcccttcgtccctttctccattccttcccttcctttccttctttccttttttctttcttgtagtcagggaaaaggtgrgtattcaaagagtttcctaaagtaaatttgtgctgtgactttacccatatgagtatgtccgctgttagggacacatgtatcttgaaccaggagaaaacaaacaaaggactgagtgacccagttctaagcttcacctaacctactataaaaaaaaagaggttgaaatcacagtttaagaactaataagcaaatgacactagcaaacagagttattaaaactatttttagatgcaaaaatatatatagttagattacataacaattttactattactctgtattttatgtttctcagaatttactgcccacattttctggcttataaatagtttaattatgaatatttaacatt

SEQ ID NO: 399243 - DNA, 492 bp, Homo sapiens
tattcaaagagtttcctaaagtaaatttgtgctgtgactttacccatatgagtatgtccgctgttagggacacatgtatcttgaaccaggagaaaacaaacaaaggactgagtgacccagttctaagcttcacctaacctactataaaaaaaaagaggttgaaatcacagtttaagaactaataagcaaatgacactagcaaacagagttattaaaactatttttagatgcaaaaatatatatagttagattacataacaattttactattactctgtattttatgtttctcagaatttactgcccacattttctggcttataaatagtttaattatgaatatttaacattttctaggtaaactaaatcaactatacaaattcattacgcatttgaaataagttatggatattacctgcttsatcagtttgaggaataaaattttttaaaatccttttatattcaaattacaaggacactgaacccctttct

SEQ ID NO: 399244 - DNA, 658 bp, Homo sapiens
ttatagcacacctttcagaatttttgaaaaacatggagttatatcttaaatattgcagaatttaaaagcaaacaaacactgttaacccagaattaaacatttgggcagcataaagacaaaataaagactttttttattgaaacagaagatgagacatttcaccacagcagacaagaaatgctgaagaaagcttttcrgagacaagttgtatgataccaaatgaaaataaattaggatctataccaagaaatgaagaatgccgcaaatagtgaaagtaagaaaataaacctaaaagatagtttctttatatttaataactgtaaaaaataagtgactatactaatgatgtattttggtaatcatatttagttgtaaaatttatgttaacagtaacaaacaaatgaagacaagctattctacatgctttacactatatttcacatggcataatattattgaagataggctgggataagttaaaaatgtgactataacctctaaagcagcaaataaaaagaaagactataattactaagcctagtggagataaaatggaaaaattgataatattctatccaaaatcaggcaggaaaaaagtgggataaaatgaacaaagaacagatgggacaaataaaaaacaacaacaggaatatggtaa

SEQ ID NO: 399245 - DNA, 573 bp, Homo sapiens
acaaaacaggcacagaaaaaccaacatcacgtgttctcacttatttatgagatttaaaaattaaaacaattgaattcatggagatagagagtggaaggatggataccagagactggaaagggtagagcggggatggtggtagggagttgagggatgattaatgggtacaaaaggatatagaaagaatgaataagacctgctatttgttagcaygacagggttactatagtcaataataatttaattgcatatttaaaaataactaaaagagtataattggattgtttgtaacacaaaggataaatgcttgaggggataaataccccattctccatgatatgattattacatgttgcacacctgtatcaaaacatctcatgtacccaataaatatatatgcctgctatgtacccacaaaaatttaaaaaataaaaaagttacacaaagtttgcaactcacactacagtgcaaaaatatgagaagaatgtttttcctagttaagaggagaaaattgttttaaaacaattaagaagaaatattaatatgcttcctaccactgcatattagcttatg

SEQ ID NO: 399246 - DNA, 573 bp, Homo sapiens
acaaaacaggcacagaaaaaccaacatcacgtgttctcacttatttatgagatttaaaaattaaaacaattgaattcatggagatagagagtggaaggatggataccagagactggaaagggtagagcggggatggtggtagggagttgagggatgattaatgggtacaaaaggatatagaaagaatgaataagacctgctatttgttagcacgacagggttactatagtcaataataatttaattgcatatttaaaaataactaaaagagtataattggattgtttgtaacacaaaggataaatgcttgaggggataaataccccattctccatgatatgattattacrtgttgcacacctgtatcaaaacatctcatgtacccaataaatatatatgcctgctatgtacccacaaaaatttaaaaaataaaaaagttacacaaagtttgcaactcacactacagtgcaaaaatatgagaagaatgtttttcctagttaagaggagaaaattgttttaaaacaattaagaagaaatattaatatgcttcctaccactgcatattagcttatg

SEQ ID NO: 399247 - DNA, 527 bp, Homo sapiens
gcaaattactggatccatattatgtatcttcccttctcctttcccttcctggggcctctgttctgcctttctatccctgaccaaactgggtgttcactctgggataaagttggcattctctgctctctctgaaatgtaaatggttggggtatttcagtgtttactttatcmaatgctgtagtttggactttggcagggagaggtattcatgagatgtcctctgccagacaacttgtctatttcagtagcgtgctccactcttcagtcagagataatttttttctctcatatttttcccacagtgttcagcagaacagtagttccgtgtattagttcaggtcctcaaataccaagaaggaattaaatgtgtaaggattttacaaggagaaatccctgtgtaaggaaaaaacatagaggtccagaggaggctagggatcctctaggttattctaatgccagtattttaaagtttctgtcacggcgaacatgatgcagaactgacttatatcctccagtttcattactgt

SEQ ID NO: 399248 - DNA, 479 bp, Homo sapiens
cccttcctggggcctctgttctgcctttctatccctgaccaaactgggtgttcactctgggataaagttggcattctctgctctctctgaaatgtaaatggttggggtatttcagtgtttactttatcaaatgctgtagtttggactttggcagggagaggtattcatgagatgtcctctgccagacaacttgtctatttcagtagygtgctccactcttcagtcagagataatttttttctctcatatttttcccacagtgttcagcagaacagtagttccgtgtattagttcaggtcctcaaataccaagaaggaattaaatgtgtaaggattttacaaggagaaatccctgtgtaaggaaaaaacatagaggtccagaggaggctagggatcctctaggttattctaatgccagtattttaaagtttctgtcacggcgaacatgatgcagaactgacttatatcctccagtttcat

SEQ ID NO: 399249 - DNA, 614 bp, Homo sapiens
agtaaaaaaaaaagtgctttgatttagatcacacaatagatcagtgtcagactccaaaytttaacccagacttacctccgatctctgagatctgctcacaggccaagcacatcatccctaggtacatggaagcagcaaaatgacataatgacttggcttcagagtccaagctctagctacctagttttagtgttgtgatgtctttgtctttacagcacactcttgcacattaacgtagccgatgaccttcatagtcatggagagaagcttgtccctgtttatggtgaaatgcttcaatcctagatttcattgccataaccatccaaattgtagccagttaactcatccatctctacctgtagataatcttgtccttgtcctcaaatccttaggctggccggcaagtgccatgttagccatgtcctgggccctgctctgaccatgtgtctgaatgccaacacccctgatattattttatttctggaaattaattaacctcttaatatcctggttccagcctatcttacatccttatgcctaaacctgcctttgttttccttccagtatcctttgttttccaggatctatttactcaaaacatcctcctggggatt

SEQ ID NO: 399250 - DNA, 614 bp, Homo sapiens
agtaaaaaaaaaagtgctttgatttagatcacacaatagatcagtgtcagactccaaactttaacccagacttacctccgatctctgagatctgctcacaggccaagcacatcatccctaggtacatggaagcagcaaaatgacataatgacttggcttcagagtccaagctctagctacctagttttagtgttgtgatgtctttgtctttacagcacactcttgcacattaacgtagccgatgaccttcatagtcatggagagaagcttgtmcctgtttatggtgaaatgcttcaatcctagatttcattgccataaccatccaaattgtagccagttaactcatccatctctacctgtagataatcttgtccttgtcctcaaatccttaggctggccggcaagtgccatgttagccatgtcctgggccctgctctgaccatgtgtctgaatgccaacacccctgatattattttatttctggaaattaattaacctcttaatatcctggttccagcctatcttacatccttatgcctaaacctgcctttgttttccttccagtatcctttgttttccaggatctatttactcaaaacatcctcctggggatt

SEQ ID NO: 399251 - DNA, 328 bp, Homo sapiens
atgtgattctctcactggaggactgaatttggatctggttctttcttcttttaaagtccaacttcattcccatatatcctttaagactttccttggccatctctgtccttatagaatttcccattcaaatgcctcagtaaacgcaccactgttctgcaygttacaagttaccatgggtggttagcattcttttcctatgtaaagcttaccctccatcctctcagcaataacattgtttagaggagagatgggctgaggagaaaattgtgttcctaacttgctgtgttatcttgcacaagtcagttaatacctccagacttcacatgta

SEQ ID NO: 399252 - DNA, 328 bp, Homo sapiens
atgtgattctctcactggaggactgaatttggatctggttctttcttcttttaaagtccaacttcattcccatatatcctttaagactttccttggccatctctgtccttatagaatttcccattcaaatgcctcagtaaacgcaccactgttctgcatgttacaagttaccatgggtggttagcattcttttcctatgtaaagcttaccctccatcctctcagcaataacattgtttagaggagaratgggctgaggagaaaattgtgttcctaacttgctgtgttatcttgcacaagtcagttaatacctccagacttcacatgta

SEQ ID NO: 399253 - DNA, 328 bp, Homo sapiens
atgtgattctctcactggaggactgaatttggatctggttctttcttcttttaaagtccaacttcattcccatatatcctttaagactttccttggccatctctgtccttatagaatttcccattcaaatgcctcagtaaacgcaccactgttctgcatgttacaagttaccatgggtggttagcattcttttcctatgtaaagcttaccctccatcctctcagcaataacattgtttagaggagagawgggctgaggagaaaattgtgttcctaacttgctgtgttatcttgcacaagtcagttaatacctccagacttcacatgta

SEQ ID NO: 399254 - DNA, 328 bp, Homo sapiens
atgtgattctctcactggaggactgaatttggatctggttctttcttcttttaaagtccaacttcattcccatatatcctttaagactttccttggccatctctgtccttatagaatttcccattcaaatgcctcagtaaacgcaccactgttctgcatgttacaagttaccatgggtggttagcattcttttcctatgtaaagcttaccctccatcctctcagcaataacattgtttagaggagagatgggctgaggagaaaattktgttcctaacttgctgtgttatcttgcacaagtcagttaatacctccagacttcacatgta

SEQ ID NO: 399255 - DNA, 576 bp, Homo sapiens
cttggccatctctgtccttatagaatttcccattcaaatgcctcagtaaacgcaccactgttctgcatgttacaagttaccatgggtggttagcattcttttcctatgtaaagcttaccctccatcctctcagcaataacattgtttagaggagagatgggctgaggagaaaattgtgttcctaacttgctgtgttatcttgcacaagtcagttaatacctccagacttcacatgtagtatctrtgagtagagaaagttggattaaagggtctctaatgtttctattagtgccactatttgtgaaactgtggcctatccagtgccaaatagcaaacatcctgtaagtgttggataatgagattctgacctcacaaggggtttataattatcagagggtcaggtaatggagtgttttccatggaggcattagagacccttccctgagccgcattatgtccccagagggtatgacttggaagcaggaaagcttatgtatttttaatcaaaggcaacaggatcagtacccaaacagccaaatgacaatctgattgcatttccactcttcagctatgctg

SEQ ID NO: 399256 - DNA, 576 bp, Homo sapiens
cttggccatctctgtccttatagaatttcccattcaaatgcctcagtaaacgcaccactgttctgcatgttacaagttaccatgggtggttagcattcttttcctatgtaaagcttaccctccatcctctcagcaataacattgtttagaggagagatgggctgaggagaaaattgtgttcctaacttgctgtgttatcttgcacaagtcagttaatacctccagacttcacatgtagtatctgtgagtagagaaagttggattaaagsgtctctaatgtttctattagtgccactatttgtgaaactgtggcctatccagtgccaaatagcaaacatcctgtaagtgttggataatgagattctgacctcacaaggggtttataattatcagagggtcaggtaatggagtgttttccatggaggcattagagacccttccctgagccgcattatgtccccagagggtatgacttggaagcaggaaagcttatgtatttttaatcaaaggcaacaggatcagtacccaaacagccaaatgacaatctgattgcatttccactcttcagctatgctg

SEQ ID NO: 399257 - DNA, 576 bp, Homo sapiens
cttggccatctctgtccttatagaatttcccattcaaatgcctcagtaaacgcaccactgttctgcatgttacaagttaccatgggtggttagcattcttttcctatgtaaagcttaccctccatcctctcagcaataacattgtttagaggagagatgggctgaggagaaaattgtgttcctaacttgctgtgttatcttgcacaagtcagttaatacctccagacttcacatgtagtatctgtgagtagagaaagttggattaaagggtctctaatgtttctattagtgccactatttgtgaaactgtggcctatccagtgccaaatagcaaacatcctgtaagtgttggataatgagattctgacctcacaaggggtttataattatcagagggtcaggtaatggagtgttttccatggaggcattagagacccttccctgagccgcattatgtccccagagggtatgacttggaagcaggaaagctwatgtatttttaatcaaaggcaacaggatcagtacccaaacagccaaatgacaatctgattgcatttccactcttcagctatgctg

SEQ ID NO: 399258 - DNA, 576 bp, Homo sapiens
cttggccatctctgtccttatagaatttcccattcaaatgcctcagtaaacgcaccactgttctgcatgttacaagttaccatgggtggttagcattcttttcctatgtaaagcttaccctccatcctctcagcaataacattgtttagaggagagatgggctgaggagaaaattgtgttcctaacttgctgtgttatcttgcacaagtcagttaatacctccagacttcacatgtagtatctgtgagtagagaaagttggattaaagggtctctaatgtttctattagtgccactatttgtgaaactgtggcctatccagtgccaaatagcaaacatcctgtaagtgttggataatgagattctgacctcacaaggggtttataattatcagagggtcaggtaatggagtgttttccatggaggcattagagacccttccctgagccgcattatgtccccagagggtatgacttggaagcaggaaagcttatgyatttttaatcaaaggcaacaggatcagtacccaaacagccaaatgacaatctgattgcatttccactcttcagctatgctg

SEQ ID NO: 399259 - DNA, 506 bp, Homo sapiens
tacaattttatatagatatgagtcttctgtatcattaagtcaatgtaaygaatatatacatgtcaaaaccaatattgctgtgctgcactggttgagagattcaccccagcacaatagcttctctgtatgggtccattagcactggcttttggggacctcagtgggaggctgtctacttccctgatcacttggattgagaatatgtgtgctattcttcaagttagcaatgtaaaaagaaacacaaaatcttacttaaacagtattttgagatcatttgtataatttgtatacaagtttatgaagagtaggaaagcaaatatcagtgagaaataaaagtgttccaccattttgacttaaaagcactaaagtattaaatctatctagattttgtgtgtaggtagctagtggaaacaaggaaggtaagttgccaagagaaagaatatatctgcatggaaattaaagcccaaaaacatgtgcataagaagtgcagccagataagcaaaggt

SEQ ID NO: 399260 - DNA, 506 bp, Homo sapiens
tacaattttatatagatatgagtcttctgtatcattaagtcaatgtaatgaatatatacatgtcaaaaccaatattgctgtgctgcactggttgagagattcaccccagcacaatagcttctctgtatgggtccattagcactggcttttggggacctcagtgggaggctgtctacttccctgatcacttggattgagaatatgtgtgctattcttcaagttagcaatrtaaaaagaaacacaaaatcttacttaaacagtattttgagatcatttgtataatttgtatacaagtttatgaagagtaggaaagcaaatatcagtgagaaataaaagtgttccaccattttgacttaaaagcactaaagtattaaatctatctagattttgtgtgtaggtagctagtggaaacaaggaaggtaagttgccaagagaaagaatatatctgcatggaaattaaagcccaaaaacatgtgcataagaagtgcagccagataagcaaaggt

SEQ ID NO: 399261 - DNA, 612 bp, Homo sapiens
aattaaagcccaaaaacatgtgcataagaagtgcagccagataagcaaaggttgtctgaaaatgcaatttctaaatatagccataatcatattgacatgaaaaagaaatgacataaaaactgatgaaatcaaaataaggcaatttatgccatgaagaaacttgagctataatgatttctgaaacagatgttataaggaaaaaaaaatctctaactttgtgaactgcaccgttatatttaagaaaaatgaaaattctcaaagaggcctatgccaatttgcaaaatatcaagaacaaagaggttagcaaagtaattctattatatcttagtgctagacgttttgggaggcaagtgtagttgaatgataatgggggtggttcccaaggctaccatatcccattggtagaagaatattaygggcttttggaggaaggattcaagaactcattcaacagattgtttttattatcttagctgcttggacatgaagtaaatctactagaaaaactcaagcagtgatttgggacattagtcaaaaagtagaattgggttactcttagagttaggagcaagaagcaaattaatacatcctatctgataaactaattacagt

SEQ ID NO: 399262 - DNA, 607 bp, Homo sapiens
tatgtgaatataagtccacatatttgatgacagtggggaataaaggagcaacaagaggatttcttctaaaaggcacttcttctcaggagttggtctcaaaattaatctgtgtaggactgcatgcgttggtggtaatcataaaaacaggctttgaggactcttctcgacacatccagatgaagcagcctcctttytctgggcacagtctgcctccctgcagccttttatgaccacacctctctaaccaactcttttgtggggtacttttaaaattaaatgtacaagactctttagtctctggtttgtagcccctcacaacctcctcatcacgagttgcagaattaagcccagtgaatccatattcttacttgcattaaggggatgaatgagttacttacctgcagtgcagattaccctaaaaaggtggatttaaataactgaaatccaccagaaagggaggaaagacttgaaaagcttacagtattcacagttctttcttttctgtatcctctatctcactctccactaagaattcagagtgaagaaaatacttaaaatccaggtatattctgcttggatgagatctttgtgggtcccattttggggt

SEQ ID NO: 399263 - DNA, 454 bp, Homo sapiens
cagcattcactgggagaggctggaaactagtttcatccaatgggataggatcaatgccaaaggaacactcacatacaagttacaaaaggaaattaatgcagatggctggaaattggtatcttcygagttcagagccagttgagcccagtagtcttggcatttctccaaagagtgttaagatttccccagacatagatagtcatgggaatcttaaatagaagaaaattgtagagattctgatgactgatgatgatgtttactgtttactcataatgcaaccaggtcacccatgggtggctagccacataggaacctttcgagaaaatgaatgtagttaatcagactacacgtaagaggcaagattccagtttctgaagagaaaaagtgacgagaagattcttcagcaagaacaatttggcaagacagttctttatcaagatcaattcaagaccca

SEQ ID NO: 399264 - DNA, 459 bp, Homo sapiens
aaaattagtagatttgagacttgagcccagctattcaatagtcatatacttatcatatactattgttaagcaaaaaggaccaattactcaaaatagatcagaaggttagaaccatactggcaataagttttgcttgataataagccaactaaataatgaaatgatttggtgccagaaggcagaagtagatcaactagattgagcgtggagagaagaggcaagggacaygacagccgtttttagaactgcacatgttttttcctcaattctatcaaaaagattcaaaagacacaattacactcaatacacacagcattataaaatcatacatcccgccacaatgaagaaggtctgaattcttctggagctgtgtgcatttggtagtttcttaactgatcactattcctgtagtgatctaaattaatctaaattaggaaaacaagaacaacagcaatgcct

SEQ ID NO: 399265 - DNA, 459 bp, Homo sapiens
aaaattagtagatttgagacttgagcccagctattcaatagtcatatacttatcatatactattgttaagcaaaaaggaccaattactcaaaatagatcagaaggttagaaccatactggcaataagttttgcttgataataagccaactaaataatgaaatgatttggtgccagaaggcagaagtagatcaactagattgagcgtggagagaagaggcaagggacacgacagccgtttttagaactgcacatgttttttcctcaattctatcaaaaagattcaaaagacacaattacactcaatacacacagcattataaaatcatacatcccgccacaatgaagaaggtctgaattcttctggagctgtgtgcatttggkagtttcttaactgatcactattcctgtagtgatctaaattaatctaaattaggaaaacaagaacaacagcaatgcct

SEQ ID NO: 399266 - DNA, 459 bp, Homo sapiens
aaaattagtagatttgagacttgagcccagctattcaatagtcatatacttatcatatactattgttaagcaaaaaggaccaattactcaaaatagatcagaaggttagaaccatactggcaataagttttgcttgataataagccaactaaataatgaaatgatttggtgccagaaggcagaagtagatcaactagattgagcgtggagagaagaggcaagggacacgacagccgtttttagaactgcacatgttttttcctcaattctatcaaaaagattcaaaagacacaattacactcaatacacacagcattataaaatcatacatcccgccacaatgaagaaggtctgaattcttctggagctgtgtgcatttggtagtttcttaactgatcactaytcctgtagtgatctaaattaatctaaattaggaaaacaagaacaacagcaatgcct

SEQ ID NO: 399267 - DNA, 512 bp, Homo sapiens
ttctttactagttacaacattatttattcatattttctgtttctttttattgccagttttgataagttgaattttgatttcaattatttgaaaattatattggcataaagttgttttctgtcactttctttctaatgctataacatttataattttcactcgcgtccgtgtgaagagaccaccaaacaggctttgggtgagcaacatggctgtttatttcacctgggtgcaggtgggctgagtccgaaaagagagtgagtgaagggagataagggtggggccgttttatagggtttgggtagataaaggaaarttacagtcaaaggggagttgttctctggcgggcagagtgggggtcgcaaggtgctcagtgggggagctttggagccaggatgagccaggagaaggaatttcacaagacaatgtcatcagttaaggcaggaacaggccattttcacttcttttgtggtggaatgtcatcagttaaggcaggaactggctatctggatgtg

SEQ ID NO: 399268 - DNA, 604 bp, Homo sapiens
ctaggtctttgctcctggatggcctttctagacccatcttgggcatgaaggaaatccactgctctagtggcatgaggccaatcctggcaagatttgccacccactacctaaagtggccttgggccttaaataaacagcattggcagccaggcagtagtggtccaaggacttggttaagccccagtactgtggtggtctgaaaagtcatttgcctcagttatgacccagtgcagtgccagctgtggtgaccacaggaatgctgacatcatccctcccccaactccaggcagcccaatggaggcagagactcctgattgcagaaaagagagggaagagaggaggtaacccaaggaatcctcttgttatctgctccaaatccaccaaggctgtgtatgtaggactccatatatcaacagttgtagtgttcctgggtttaggtgcccctagtgctaaaacagctgcagtaaccacagccttaggtcgcaacacwcaaacctctttgagttcttggaaaggcctctcaaaaatgatgcgcacaaacaaacccagacagcacaaattggaataaatacacaagtctctaatgcccagacattgacaaatg

SEQ ID NO: 399269 - DNA, 471 bp, Homo sapiens
ctgctccaaatccaccaaggctgtgtatgtaggactccatatatcaacagttgtagtgttcctgggtttaggtgcccctagtgctaaaacagctgcagtaaccacagccttaggtcgcaacactcaaacctctttgagttcttggaaaggcctctcaaaaatgatgcgcacaaacaaacccagacagcacaaattggaataaatacacaagtctctaatgcccagacattgacaaatgtccaaaaacatcaagaaaatctagagaaaygtgaccttaccaaatggacatcagtgaccagtcctagagtaatggatatatgtgaactctctgacagggaattcaaaagagctgtctggaggcagctcatcaaacttcaaaataacacaaagaagaaagtcagaatatatcagagaaatttaacagagattgaaataataaaaagaaagcaagcagaaaatctgcccctgaaa

SEQ ID NO: 399270 - DNA, 471 bp, Homo sapiens
ctgctccaaatccaccaaggctgtgtatgtaggactccatatatcaacagttgtagtgttcctgggtttaggtgcccctagtgctaaaacagctgcagtaaccacagccttaggtcgcaacactcaaacctctttgagttcttggaaaggcctctcaaaaatgatgcgcacaaacaaacccagacagcacaaattggaataaatacacaagtctctaatgcccagacattgacaaatgtccaaaaacatcaagaaaatctagagaaacgtgaccttaccaaatggacatcagtgaccagtcctagagtaatggatatatgtgaactctctgacagggaattcaaaagagctgtctggaggcagctcatcaaacttcaaaataacacaaagaagaaaktcagaatatatcagagaaatttaacagagattgaaataataaaaagaaagcaagcagaaaatctgcccctgaaa

SEQ ID NO: 399271 - DNA, 561 bp, Homo sapiens
aactgcaatagcattatggagttgtcttaaatagaggggttggggactcacgcttctatatccattcacaaaccaattattggctgccagacactcccaggagggaaagagtataatctcaggacaactacttccttgttgctgagggcaattcccagtgagtgaagcagcaaccattcacagtagctagcagatgagtgcttcactccagaaagaaaatatsgacagaatacagctcttattgacagcttgttaaggtaattctatctgggaacagctactccaggatttgtcttattcttattccttgggttaatgggaaatactgtaagctctaccactaatagtggtcttggggtgacaacttatgatataatttatgtactctacaattctttttagattcttctcacactcagctcccacctctcctggtgtaaatggcttgcttgtgtgtgcacacagattctcatccttgagggatatgggccataggttacaatgcccttatcaggctatggctgctgcacttctcatctaccattaaatccaagcatgaaa

SEQ ID NO: 399272 - DNA, 494 bp, Homo sapiens
tgcttttagtcttagccataaaatctttgcctagaccaatgtcctgaggtgtttcccctgtatttttttctagtagttttatagtttcgggtaatacatttaagtctttaatacaatttgagttgatttttgtgtatactgataaaaatccagtttcattcttctgyatatggatatccactttttccagcaccttttattgaagagggtgtcctttttcaatgtatgtcagtggcacctttgtaaatatgtggatttatttttcattttcctattctgttcctttggtccatgtttctgtttttatatcaataccttgctattttgattattataactttgtagtatattttgaaatcaggtaatgtgaaaccttcaacattgttctttttgctcagtattgttatggctatttagagtcttttgtggttccatacaaattttagaatttatttaaatttctgtgtaaaatgtcaatagcattttgatagata

SEQ ID NO: 399273 - DNA, 602 bp, Homo sapiens
tatagttcgccacactgggcgctgtgcttatgttaagtttccatgtttttccagcctatcagacttcctgtaaatcatttctatggatcactcatatgctcagacgttgccttggtaaaggaaggaaagacacaaagtagagttgaggcttttttatcagatatggaaatacaagcggtgagacagacagttaaaatttataacaacaacaacaacaaaagatcattttgtagaatttgtgagtatagtatatttttccttctggtatttttgtgggtcctgttctatttttgttattaaatttgaaattgttactctattagttgaaaatatactattaatgaatgtagtcagtactcttctacctcaggacaatgtttcatttattgaattaaattacattaattgaattaaataacatggatgagtctgtaatatttacctatatccccaaggtgctgggagtgggagatggcaatggcttaagtggggaaggattatgaagaataataaaacatattcttttgmctggataatttatattccagtttttttctttagttttctacctatagaattaaaatgatatatccctgcttaaa

SEQ ID NO: 399274 - DNA, 553 bp, Homo sapiens
gcattcttttgttccagttcttggaaaaaagagttttagcttctctgttcactatgatgccagctgtgaatctgtcatacatggcttctaatgtgttgtggtttttttaatgcttartttgttgagagtttttatcatgaagggatgttgaaattagccaaatgcttcttctgtatctattgaaagaaccatggttttttgtcttttattgcattgatgtaatgtatcaggtttattgatttgtgtatgttgagctatccttgcatccttggcaaaaatcccagttgatattggtatgttatctttttagcgtattgttggatttgatttgctgttattttgttgaggatttttgcatctattatttatcaggaatatcagtctgttgttttcattttctttgctatttccttgtctggttttaatatcagggtaatgctggcctcatagaatgagcgaggaaaaattctctcctctttaattttttggaatagtttgaaaaggattggtgttaattctcctacaaaagtttggtagatctcaacagtaaagc

SEQ ID NO: 399275 - DNA, 633 bp, Homo sapiens
ttgatgtaatgtatcaggtttattgatttgtgtatgttgagctatccttgcatccttggcaaaaatcccagttgatattggtatgttatctttttagcgtattgttggatttgatttgctgttattttgttgaggatttttgcatctattatttatcaggaatatcagtctgttgttttcattttctttgctatttccttgtctggttttaatatcagggtaatgctggcctcatagaatgagcgaggaaaaattctctcctctttaattttttggaatagtttgaaaaggattggtgttaattctcctacaaaagtttggtagatctcaacagtaaagccatctggttctgggctcttctttgttgggagtcatattactgatcagtctcattacttgttattggtctgttcagagtttccatttcttcttggttcaatcttggcaggtggcatgtgttgaggaatgtattcgtttcctttaaattttcctatttgttggtgtatagttgtwtataataaactgtaatgatccttttttttttatagtctcggttgtcatcgtttttgtttgtttcttattttacttatttgagtcttctctgtttatttttcttactttagctaatggttt

SEQ ID NO: 399276 - DNA, 473 bp, Homo sapiens
tctagaccataatgtaaatacatttttacctctatttaaaaaaacaccaaacagtttctaaaactgtttgcttttctgtttaatgattactttttcactagtatttttggtgatttaaaagtttagtttataagcaaagtttaccataatagaaaaattctgcatgattggaaatggtttagtgtatattaaaagctggtgaagagaattagaagcctattatagtaacagaataatggatctctaaagatatctgtgtactaatccctggaacctgtgaatatggtactttaaatggcaaagagggattaaagttgttgatggaattaaagttgttaatctgctggccttgggatacrgagattattccagattatccacttgggcccaatgtaattgcaagagtcctaggagtgaaaggaggaggcagaaaagggagaaccagagagatggtgtgagaaagacttacccca

SEQ ID NO: 399277 - DNA, 570 bp, Homo sapiens
gcctttgtctctgcagtacattgtttttaaaagagcaggcactggaattgaactgcctaagtgcaaatgtcagctctgacaattaacaactgtgtgactttaggcaagttatgttaygcgttggagtacctgattattcatctatatgataaggaaatactgacatattcctcaaagggttattagaaggaacaagtaaattaatacataaaatgtctgacatgtaattcgtgctcaataaatataagtccatgcttataagccaagtaaacaaagctccatctcttccctggtccaagttcacttgcaatgttgtttctcctgcaaattatgcagattttcagaattgtctttatatattttcagcaacatttcctttggaagaaaaatcatatgttagctacccacattctctatatcttggttccaaatacttaatatgtatacatgcaatatgtgaaaatttttcattttaaaattgatgtcatataatcatacaattaattttagcattggtgccctccttttccctgcaccctcctcccatacccttttgaataccatttttgc

SEQ ID NO: 399278 - DNA, 467 bp, Homo sapiens
tatatgataaggaaatactgacatattcctcaaagggttattagaaggaacaagtaaattaatacataaaatgtctgacatgtaattcgtgctcaataaatataagtccaygcttataagccaagtaaacaaagctccatctcttccctggtccaagttcacttgcaatgttgtttctcctgcaaattatgcagattttcagaattgtctttatatattttcagcaacatttcctttggaagaaaaatcatatgttagctacccacattctctatatcttggttccaaatacttaatatgtatacatgcaatatgtgaaaatttttcattttaaaattgatgtcatataatcatacaattaattttagcattggtgccctccttttccctgcaccctcctcccatacccttttgaataccatttttgcttacttgtactatcttttatgagtttgcaatttggaaaa

SEQ ID NO: 399279 - DNA, 498 bp, Homo sapiens
aagggatgcttactcaacagatatcacttttgttttagggtgttataatttgacatcagccaaagggccattctgaaagtaggagtgtcattagccaaatatgaaaacaattgcagaaataataatagttagctgaagccaatgacacatcgaagatctgtgctgagattggtgaagttgaaacttcaaagaataggccaggaatatagggtatcacatctgatgttactgtgcagttttattcatgatttactaattattttcttgcagagagaayagtgtttaacatactggactttcattgttttacatccctgctatcatgccacactatgggcattccgtaagaattacagtgttaacagaattcaataaagaggagaaaagaagacaaagacaaaagaccaaatctaaagtgaaaatttgcatccttattttaaatatgctgtacataaaaccaaataaaaaaataaatacatattctcagtagtaattagc

SEQ ID NO: 399280 - DNA, 498 bp, Homo sapiens
aagggatgcttactcaacagatatcacttttgttttagggtgttataatttgacatcagccaaagggccattctgaaagtaggagtgtcattagccaaatatgaaaacaattgcagaaataataatagttagctgaagccaatgacacatcgaagatctgtgctgagattggtgaagttgaaacttcaaagaataggccaggaatatagggtatcacatctgatgttactgtgcagttttattcatgatttactaattattttcttgcagagagaatagtgtttaacatactggactttcattgttttacatccctgctatcatgccacactatgggcattccgtaagaattacagtgttaacaraattcaataaagaggagaaaagaagacaaagacaaaagaccaaatctaaagtgaaaatttgcatccttattttaaatatgctgtacataaaaccaaataaaaaaataaatacatattctcagtagtaattagc

SEQ ID NO: 399281 - DNA, 582 bp, Homo sapiens
ttccacatatgaaaaatttttaaaaacatacaatatatattcatttttgcaaccagatcctttgggattcagacataagggagaaaagcactggttatggtaacacaggaaaataamtttcgatttccatatatttaaatattgttgtttgtgggtttttttttctgttcttttatctccactaattgtaaagtatggacaatgatctacatattttctgtggataatgtcaagtagctgagtgtttagctgggaggaaactatctattgattatttattaggcatctccacatatattaagtcattttatctttgcaacatctttgcaacataaacattattatatatgattttctaggtaaagaaactaaagcccagtgggataaaatggactccaagcacatggaattcaaatatgagttcttactgcttgagtgctttttttgcggtctgaagtctgaattaagacactgattctttgagttgttctatttgctttatttgttagccttataggttcatagcagaaaactacaaagcctagcagctacacaaccctttggaaactaaccttccagcat

SEQ ID NO: 399282 - DNA, 582 bp, Homo sapiens
ttccacatatgaaaaatttttaaaaacatacaatatatattcatttttgcaaccagatcctttgggattcagacataagggagaaaagcactggttatggtaacacaggaaaataaatttcgatttccatatattyaaatattgttgtttgtgggtttttttttctgttcttttatctccactaattgtaaagtatggacaatgatctacatattttctgtggataatgtcaagtagctgagtgtttagctgggaggaaactatctattgattatttattaggcatctccacatatattaagtcattttatctttgcaacatctttgcaacataaacattattatatatgattttctaggtaaagaaactaaagcccagtgggataaaatggactccaagcacatggaattcaaatatgagttcttactgcttgagtgctttttttgcggtctgaagtctgaattaagacactgattctttgagttgttctatttgctttatttgttagccttataggttcatagcagaaaactacaaagcctagcagctacacaaccctttggaaactaaccttccagcat

SEQ ID NO: 399283 - DNA, 582 bp, Homo sapiens
ttccacatatgaaaaatttttaaaaacatacaatatatattcatttttgcaaccagatcctttgggattcagacataagggagaaaagcactggttatggtaacacaggaaaataaatttcgatttccatatatttaaatattgttgtttgtgggtttttttttctgttcttttatctccactaattgtaaagtatggacaatgatctacatattttctgtggataatgtcaagtagctgagtgtttagctgggaggaaactatctattgattatttattaggcatctccacatatattaagtcattttatctttgcaacatctttgcaacataaacattattatatatgattttctaggtaaagaaactaaagccmagtgggataaaatggactccaagcacatggaattcaaatatgagttcttactgcttgagtgctttttttgcggtctgaagtctgaattaagacactgattctttgagttgttctatttgctttatttgttagccttataggttcatagcagaaaactacaaagcctagcagctacacaaccctttggaaactaaccttccagcat

SEQ ID NO: 399284 - DNA, 526 bp, Homo sapiens
tggaactagcgcaatgtcgcaggatacaaggttaatacacaaamgttaattccttttcaatataccagaaataaacaactgaaattttaaattaaaaaaatagcatttgcattagcatctccaaaataaaatacttagatatgaatataacaaaatatgtacaatacctatataagaaaaactgcaaaattctgatagaataaataaaagaataaatatcatgttcatttatagaagacttaatgttttcaagataacaagttcttgctaactttacagattcaatgcaatcccaatgaaaatcccagcaggtttctttttacatcaagaagcctattctaaagtttatatgtagaaggcaaagactcagagtagccaacacagtattgaaggagaaaaacaaaaatgaagaattaacactatccaatttcaagacttactataataacacagtaatcaagactgtgtgatattggtgaaggaatagacaagcagtcagtggtacagaatagagagcccagaaata

SEQ ID NO: 399285 - DNA, 526 bp, Homo sapiens
tggaactagcgcaatgtcgcaggatacaaggttaatacacaaacgttaattccttttcaatataccagaaataaacaactgaaattttaaattaaaaaaatagcatttrcattagcatctccaaaataaaatacttagatatgaatataacaaaatatgtacaatacctatataagaaaaactgcaaaattctgatagaataaataaaagaataaatatcatgttcatttatagaagacttaatgttttcaagataacaagttcttgctaactttacagattcaatgcaatcccaatgaaaatcccagcaggtttctttttacatcaagaagcctattctaaagtttatatgtagaaggcaaagactcagagtagccaacacagtattgaaggagaaaaacaaaaatgaagaattaacactatccaatttcaagacttactataataacacagtaatcaagactgtgtgatattggtgaaggaatagacaagcagtcagtggtacagaatagagagcccagaaata

SEQ ID NO: 399286 - DNA, 604 bp, Homo sapiens
cacacttgtataatcccgtccctaggagtgtgggctggactaattgactcacttctcaaaaaatataatactgtaatgatgataaactgttgcttccgatattaagttgttgcttctgatattaagtgataggaagataactttctccttgggagcccactctggagtgttctctctytcctctttctctttatctgtcttttgctgaggcttgccaatatccatgtgagtaagcttgaaagctaatccttcccctggaatttgcctctctttttatagtttctttccaaataaattgtgttttctgtaaatcatgttatatttatctctccatctttcacactgtctaatgttttatctggcacatattaagcattaaatcatgacattttaaatcaatgatgcattttgtatgcttcaatcaggatatctttattgaagaaatcactatttgatgctgtgtttcttataaatttcaatcaaagcatttataagctgcctcttacaaatcaacatctttcagggacaaaatacaacaaaatgatacacaaatatatggattactttttttttaagtatgccatttgaataatttacataagac

SEQ ID NO: 399287 - DNA, 580 bp, Homo sapiens
tgttgcttcaataaatgaatacagcaatgaaatcattgtgctgcattttcattatttaggtttagtgattttgatactttcttctcccatgttaggtaaggggagataakagaattttctgtcccaagttatctagtaagtgagtaatgcttctaagggttatgtaaaatataagatattataatttaccagatggggcactcagttgaaattttagtttatatcatctttttatagtacatatttcaattttaatatactccatacttgtaaacaacacagagaaggggtgatgactaaggcagtaagcttggtgaggggaacctgttgaaacagcaggagatttgaaacaatgggacctaaattcagtttttgttttgctaaagtctcattcaattgagatttctgtttctgtatctataaaaatgaagataatattcaacctacagtacacttcgaggcttttaataaaatattatatgtaaatgtactttataagatgttacgtgactatacgtgtgtctatatatacatatgtttatgtatttataattctaattttaatgacaaatattgtatg

SEQ ID NO: 399288 - DNA, 597 bp, Homo sapiens
ggaaatatttgtttgggaataaaactatattgagttttaatatattaaaactaataaaaatattgagaactaatataaaatgtatatctttctgtactctttccacatcaatttttaaatagataaaatattcttttcttctttattctttcaatttctctgcaattgtaaattcattgacttattcaacaaatgtttatgagtgactaatctcctcaggtgytattttgttgtctttttctcttctaagaaacaataacaaacaagacacaaaccctaatcctgtcctcatgaatcttagaatctagcaaaggaaatagaaatgaaaaatgaaacaataaatcaacctaatactgggggaagaatattttttattaaagtcagggagtcaagaagtgtcagaggaaggtgtcaggtggaagtcagaagtgactttctggtggagagaatgtatttatttacataaataccttggtgacctttcttagtatgaaaaaacataccctcagagtgatatgctggatgtattgaatggttcttaaacctggctatatattagaataatctaggtaaattaaacaacaataaagaccacaa

SEQ ID NO: 399289 - DNA, 671 bp, Homo sapiens
agggtattggtttatatcttacttaacacttattagattttattcaagaagattggaaagttttcactgaatatcttcaaagatacttaaatattttcaccaaaatttcaaaaagattaaattgaatgatgaataaaatggctttagttgacgaaagctttaatttgggggactagcaaacatcagagtattctcattattttttgcaaactgaagacctcttgactggaccaaaggaagatacacaacaaacagaaaggctagtatggaggggaggaataggtctaagagcatggtataaagaaggtagacataagcattttcccttcatatgaatstacttcactctctctccaacactcttcaatgatccccattgcccaaagcttataatctaagatgcttaaaatagaccaaaaggctttccaagaactgagcttcctcacctcatctcccgtctgtctcccactcctttcactctatgcttgagaaacactggactgctcagcctcacactagatgattctgcacatgactcatctttcccatttgtcctactgcctggaatgcttttgacatcaattatttgcaagactgaaatctactcattaattaagtctcaactcagactcctaccttccaggaagcctttgctgatggagttaaaagcc

SEQ ID NO: 399290 - DNA, 544 bp, Homo sapiens
aagccttgacatgaccctaaaaaccctaattattactcagaaaatatatgattccctaggaattatcaagataatattttaaataaacttttaattttagagtagctttcaatttactgaaaagttgtgaagatagtccagagagttttcataaaccatgcactgttttccttattgtaaacatcttacataactaaagtatctttgtcacaaccaatgaatattgatgcattattatcaactaaaattaacacaatttggatttccttaatttttaactaatgtgttccaaaatcctaccaaacggctccttctgctaagtgacacaaatcactttgatctccattccattggccaaagcaagctctgcagccataccttactctaggaagacaaggaactgcaattctatgaagattgtggaaagatttttcatatatatatatatatatatatatatatatatatatatgtctctatatatgtctmtatatatagtctatatatgtctctatatatagtctatatatgtctatatatagac

SEQ ID NO: 399291 - DNA, 573 bp, Homo sapiens
tctttgttaaatttaataaattccgaattgattttctgtattatcttgtagatcactgagtttccttaaaactgctattttgaattcttggtcagagagctcacatattgccatcttcttagggccatcactggttccatgctttgtctgtttggggtgcccatggtttcctgtttcctgttrtttcttgtggatatacatctacatctttgcattgaaggattatttatttattctagtcttctctgtgtggcctgttttgctttttattgggtatgtttgcttatagagtctttgtaatatactgctgaatttcttatttgtttgtttattttccactaggtcactacctcctttttggcactagatgatttcttaagcccaggtttgcctcggctctaataaacaattggaacactgaagttccaaatgggggaggtcccagagcagatatcctggcagtatggataggctggctggggattagtgcccaggagacctgtggaatgcagctgctacagtgtggtgctgctaacagccactctgatttggtgtcttctttggccgagttac

SEQ ID NO: 399292 - DNA, 502 bp, Homo sapiens
ggagcctttggccagactttaaaggctaggcaggattcagacatgcagagacagggaggatgggcttttattccgggagagctgacagcatcaccaaggcagggaaataggaaaggcaggatgcagcttcaggtaaacccctttctcaccttataaagaaaaggtgagaaacagagctgaaaactttgtagagcagctaagtttctaaaactctgatttatctggatttctagcccccagcaagtgagacacattcttcccatcattctacaragtcttactttgcctctactaaatgcccagcgctgttctaataccataatatctggcctgttggggaagtgagccatcccatattattgagtgtaacagttgcttattacattaaattatttattttaatcagccagatagaaattcttctgaaggtcattatatagttctcaaacttcttaaacagtatgctgagtgggagctggctgttttttctttgagacttgaa

SEQ ID NO: 399293 - DNA, 606 bp, Homo sapiens
ctgccacatacgagtgatgacaataggcagggcatgggataggcgctgcatttatgtgcatcgcgtcatgtaatcctcataacaactagatgaggtagttactgtcatccccatttaacaggtgagcaaaatgagacgcatacatgagcccccgccatcctccccaccgcctctgagtgtgtcccgccccgtgtcatgccaagtaccaggaaccaagmcacaccctggcctctggggcctctggggtctcagacatcagaagggctgtggtccaggctttcatatgggtatcaggggctgaggcggcccctgcagagtggggtgcaggctgggggtgagggagcctcgagacctggtcccaggccccacctaactgctgccatgatgtctgccacccacctccaggaggactcagacggtagcattgagtgtgtgaacgaggagaggaggctccagaagcaagtctgcaacgtcagctatcccttcttccgggccaaggccaaggttgagactggggacaatgtgggggagggtcagggtgggcactgggaggcacaggtagtttggggagggcggcaagagcaacaagagtgaacacagaagacc

SEQ ID NO: 399294 - DNA, 606 bp, Homo sapiens
ctgccacatacgagtgatgacaataggcagggcatgggataggcgctgcatttatgtgcatcgcgtcatgtaatcctcataacaactagatgaggtagttactgtcatccccatttaacaggtgagcaaaatgagacgcatacatgagcccccgccatcctccccaccgcctctgagtgtgtcccgccccgtgtcatgccaagtaccaggaaccaagacacaccctggcctctggggcctctggggtctcagacatcagaagggctgtggtccrggctttcatatgggtatcaggggctgaggcggcccctgcagagtggggtgcaggctgggggtgagggagcctcgagacctggtcccaggccccacctaactgctgccatgatgtctgccacccacctccaggaggactcagacggtagcattgagtgtgtgaacgaggagaggaggctccagaagcaagtctgcaacgtcagctatcccttcttccgggccaaggccaaggttgagactggggacaatgtgggggagggtcagggtgggcactgggaggcacaggtagtttggggagggcggcaagagcaacaagagtgaacacagaagacc

SEQ ID NO: 399295 - DNA, 608 bp, Homo sapiens
aagtagccagctccagttcgtacaactgagatccaagccctggcctcctggagttagtgtcaggggccttccagacaaggagagctctgaagaggtttcctgactaatggagttggatagaactttctttttttttttttttgagacggagtctcactctgtcacccaggctggagtgcagtggcgacatcttggctcactgcaacctctgcctcccaggttcaagtgattctcctgcctcagcctcccgagtagctgggattacagacatgtgcccctatgcccagctaatttttatatttttaataagtagagacaggttttcagtatgttggccagactggtctagaactcctgacctcargtgatccacctgcctcagcctcccaaagtgctgggataataggtgtgagccatcatgcctggccgccttctattatttattagagacattagtctgtaacttctccttttttaataactttgatatatttttatattaaagttatgctggcctgaaagttgagatattttcccttttttctctagtattttctttgagggaaggtttctaattatggattaaagtttttaaagtagatgtaggt

SEQ ID NO: 399296 - DNA, 634 bp, Homo sapiens
tgctcactctgggaagattggttagtggctcaccaagtctatctccttttcttccaagacacacaaatagactacattttccagtcttcattgcagttaggcacaaccatttgactgaggtctagtcaaagaatatgaatggaaatgatgttgctattccaggcccatgaaaacctctcacacaagatatttatgcctttcaccttctgccaatgcaatgcaggtggatgcgaccatcttggaagccatgttaaagaaggcagagccacaagatagatgcagccgggttctctaaatcaccactggggagaaacccacacaccaatgaggaatacccattttttggattttaagagcaagaaataaacttcaattgtgttcagcattatgtgctttggggtttgtttattacagcaactagtgttactgcaactaatacatagtacactatgaaaatacaatgctggagaaagaagtgatggaatagatatgcataaaacaccattgataggcctcacaaacatagggttaagtgcagaagtrcagaaacagaatgaaatttataactagattctatttattaaatagcatatgcacacaatataataatacatgttttctgaggatacatgca

SEQ ID NO: 399297 - DNA, 630 bp, Homo sapiens
gagattactatggccactgcatgaggatgtcgtgcaaattcatgatcaatgaaaaaaagatcaggatctcaaaacataatattttaatgacccagttgcaataaaaaattattcatcataccaagaactaaaaatatctcaaactaaatgaaaaaagacaatcaatagatgcaactaccactgagagagatgttgaaatttactgggaaaaatttttaaaggagccataattttttaatgctccaatgagctatacaaacatgcttgaaataagtgaaaaaatagtaaatttcaacgaagagwtataaagtttcaagaaagaaatagaagatataaaggagaatcaaatggaaattataaaactaaaacatacaaccgtgagtataaaaagctcattgagtaggctaactgtaagaatggacgggaaagaggaaagaatcagttatctggaaggtaaaacattagacattgcccaaataacaatagagaaaatggattgaaataaatgcacacagcctcaagaaccagtgagactgtaacaaaagatctaccatttgtgtatttggaaccctggaaggaaacaagaaagaaaatggggctaaaaagtactcaaagaaataatggatgaaa

SEQ ID NO: 399298 - DNA, 630 bp, Homo sapiens
gagattactatggccactgcatgaggatgtcgtgcaaattcatgatcaatgaaaaaaagatcaggatctcaaaacataatattttaatgacccagttgcaataaaaaattattcatcataccaagaactaaaaatatctcaaactaaatgaaaaaagacaatcaatagatgcaactaccactgagagagatgttgaaatttactgggaaaaatttttaaaggagccataattttttaatgctccaatgagctatacaaacatgcttgaaataagtgaaaaaatagtaaatttcaacgaagagatataaagtttcaagaaagaaatagaagatataaaggagaatcaaatggaaattataaaactaaaacatacaaccgtgagtataaaaagctcattgagtaggctaactgtaagaatggacgggaaagaggaaagaatcagttatctggaaggtaaaacattagacattgcccaaataacaatagagaaaatggattgaaataaatgcacacagcctcaagaaccagtgagactgtaacaaaagatctaccatttgtgtatttggaaccctggaaggaaacaagaaagaaartggggctaaaaagtactcaaagaaataatggatgaaa

SEQ ID NO: 399299 - DNA, 526 bp, Homo sapiens
tgcgccccataaatttatacaaataaaatttaaagtttcatcacaacaacaamaaaaaaagaagcagagttgtagatgagacctttcctgctcttttttctatacatgataatttgctactgccaacaggactctggaaagtgaatacttttgcaggaagaactttccaaattgctcaagtcttcatgttgctccctatccagtgatctcgtggctttttgtatggatctgaactataatattgatcatactcaactgtagttatgtgtgcacctgtttagctccccaccagaccagaagccctcctatcatccatgtctctttcatcttggcccacaaaattctccttggcaggagaatcacttgaacccgggaggcagaggttgcagtgagccgagattgtgccactgcactccagcctggacaacagagcaagactccgtctcaaaaaaaaaaggaaaaataggtgaagcaaattgatcacaaaaccactacatcgtcttaagaactttctcctgcctcattt

SEQ ID NO: 399300 - DNA, 620 bp, Homo sapiens
ttgcaacgcatcggccggtcagttgggaagtcacatacagagagagcatctttgggttcgctctaagctccctcctctccccactgcccttcccttcctccctgggtgaccataaatgttcctgcattatctattgatgattataatcacacgaagtcaggacagatgggctccactcctcagctcacagccataaagtttacaaactcgccatggccgggggataaattaccattgctgatctctcgctcatttacacagagcatttttyttcaagatggctattttttcctttcaatcatctggccaaagtttttttttttttttaaaccaacttgattttatagaacatgagaaatattggggatttgaagagcagtttagaaaccatcatcataagtgattaggcaaaaaagatatttctgaacatggaaaggaagcccagtttctcatcctttataatcccacgggactgctgagcaactgtgtattcccgctgggtcacaggcagtgagaaaggggcccccaatggtttatttaaaagtgtgttgtcgaagataatggtgctcagattaagtttttagtctccttgataactgctgttgttccatggactaatt

SEQ ID NO: 399301 - DNA, 620 bp, Homo sapiens
ttgcaacgcatcggccggtcagttgggaagtcacatacagagagagcatctttgggttcgctctaagctccctcctctccccactgcccttcccttcctccctgggtgaccataaatgttcctgcattatctattgatgattataatcacacgaagtcaggacagatgggctccactcctcagctcacagccataaagtttacaaactcgccatggccgggggataaattaccattgctgatctctcgctcatttacacagagcattttttttcaagatggctattttttcctttcaatcatctggccaaagtttttttttttttttaaaccaacttgattttatagaacatgagaaatattggggatttgaagagcagtttagaaaccatcatcataagtgattaggcaaaaaagatatttctgaacatggaaaggaagcccagtttctcatcctttataatcccacgggactgctgagcaactgtgtattcccgctgggtcacaggcagtgagaaakgggcccccaatggtttatttaaaagtgtgttgtcgaagataatggtgctcagattaagtttttagtctccttgataactgctgttgttccatggactaatt

SEQ ID NO: 399302 - DNA, 592 bp, Homo sapiens
acaaaagacgcttctcagccctgcacctgaagccatgctgggtttttgatttgtttgttttttgataattttggtaatgatcattttgatatttctgcatctgttaccaagtggctaatgagtctctgctttatctccttaaattgtatttaaacatttataaagtggtatttattgtgaaatgatgatctctaagttaaaatgaaatatgtgcgcaaccgtcatggttggccggcttcctaaaagacactttttcctcctcctccctctttcgtcttctatctgtctttacctcytcctgtccttctctgtcttcagccacatgatggttgcagagagccaagcctactacatgccccctgaggatgctagatggaaggatggaaggtgccagggcccttgtgggtgtcacggggctcatgactgagccactgctggaactcttcaaccacttctttctggacagggcagtcgtgccacttttagctggattcctgaatcttgccttcagatgcatcctgactcatacagtgtgcaaaaagcacatggtaaattgcaaaagcctccacaaatgaatgctgaatgtgtgagt

SEQ ID NO: 399303 - DNA, 566 bp, Homo sapiens
cattgtcagccgcatttttattaaaaaaaaaaaatagtgtaccacttgtgttttgatggtcatgatcttagaccatttgcgctactattataaaataccggagactggctaatttataaagaagagatgctttattttttcacagttctggaggcctggaagtccaaggtccaggtgttggcagagtcgacatctagggagggctgccccctgcttccaagatggcgtcttgccacttccaagatggcgtcttgcygccgtgtttgtgtcctcagagggccagagtagaagaaaccaggtagctctctggagcctctttcataagggcattaatcccactcccgagggagaagccttcatgacttaataatgctcccagaggccccatctcataataccatctcagtgaggtttaagttttaacctctgaactttggagggatcccagcattcaaaccatagcaggcgcctctgggattactgtggaccgagttcttcccaggtgtgcctgaggcggctgtgtctcctactctgcgaaccatctggttgtgctgtctaaggaggcc

SEQ ID NO: 399304 - DNA, 553 bp, Homo sapiens
tttgctaggatttctataaacttagttttatctggaatgaattcacattctttcttttatgatttgtstttcttgtatgaggtttgttttatgtgttttggaattttggtgagtaggcctgttttgagtgggaaggttgtgtttttgtatcttgcatccgtattttctctcccccaagcgtttctctctctctcctcactcccccgtctctccccgctttatcctccctctttagctctctggctgttgcctgtgcccagctcatggtatctctaatgcggaattggaactttagctccactctcatactgggcacgttgctgatgcagtcacaaagccatgaggtgtaagatttgaccttgatctttttccagcctccttttgtgagtagaggaagaggggcgtctcgccccccatccctgccttcaacagcatttatctgtttttgatgaagccctgtattccccgccttttttgttgttccttttctgccactggaagctaactcctgatgctactgcgcttcgagacccagagccctgccaggctgcag

SEQ ID NO: 399305 - DNA, 606 bp, Homo sapiens
aattgtatttctgcacactttttttctaatggcattgatttctaagttggctttcaagctcacagtaattcttaaatgatttgaggacaatgcagcctttctagtgctttcccttctgttgaccgccaagtttagaaggatatgagccaacaaaacagaaacctgtgcaataaagatgttgggtgttttaaatatctgccatgtgaacctggcttttaaaaacctttctttcctagccaaggaatccttgtatgaattaaatatgaaacttcctttccttacaaagtaaacatgtaatgatatacttcttgtccccattacaaatctgaggggagcctgctctctgatctcacatgaaacaggtgactcttcaattaaacataaattttcaattaaagcacatccctctgggtggcggatcgcagttcccaccctggctgggcagagcctgcctgggcagcctctcagcgtccagctgctgctggagaggccaggctccctggcggctcccaggagtgtgggctcagcyggctgcttgaggagcccgggcctgggcagaggggcccagagccctgctgtgatgcccaccgtgcagggcagagccgg

SEQ ID NO: 399306 - DNA, 607 bp, Homo sapiens
tattacccaaatgaaaaggaagtgctatctatattaatatgacacaaaaatacaatctgtggcaaaaagtattaaaatgtctaaataatgacactatcatagggaaaaattcaccacaaagatattagcaattacaaattttgtatrcttctaacaacatagctccaaaatgtaacaagctctaactggcagcattacaaggataaatttaaagtttcataagtgccagggtggtggctcatgcctataatcccagcactttgggaggctgaggcaggaggattgcatgaggccaggagtttaaggccagtctggccaacatagcaaggcccctatgtctacaaaaaaataaaaaattagccagtcatggcggcatacacctgtagtcctaggtacttgggagcctgagatgggaggactgcttgaacccaagagttccaggtgacagccaactgtggtcattccactgcacttcagtcttggtgacagagtgagactctgtctctaaaaataattaattaaaatccacagtcacagtatttgtaaactataaactagatctaataagcaacttccttaccctgacaaaagacacttattcaaaacc

SEQ ID NO: 399307 - DNA, 546 bp, Homo sapiens
ctttctgtcttgcatagtgtctcatgtgatacatggtctgtagtgcaacttcaataaatgtttattaaaataatgaactgtgggaaattttgtggtccatttaaagatgaattaataagggacccaaggtgaagttattactaattaaatcagctatagtgattaaccaaattacatagtcatttgtagttttgcagttttaatctttgactatattatggtcaaatccataygtacaaagatgaaagaaggaagtgaaaatttattgaacactatgtgctatatgctttatatatcataattggtgacctttaaattattaccattttacagttgaggaaacagattcagagatgtttagtgatatatctaaggtaaaaaacaaacaaaaaaccaaaaacaaactagaggctgggcgctgtggcttacacctgtaatcccagtactttgggaggccaaagcgggcagatcacctgaggccaggagttgaagaccagcctgaccaacatagagaaaccccatctctattaaaaatacaaaattagc

SEQ ID NO: 399308 - DNA, 542 bp, Homo sapiens
catgtttgtgttaccttctttttgccaggattttgatatccattgtggaacactcaaattccttttgggaagaatctactggacttccagtagcctaggaasatggaacctaccattcccatttgtatctccatatctaagcattgtgcacaaagtagctgtccataaatattaaatgatttgtattttaagaaaatttaagatagcccaaagatagagcctagaatatgaggtgcaatgaaagtaatctgtgccctcctcaaaatgatgtacctttgtgttaactacaattaaaagcacttatcttggtgtatgagtgtctgtttaatctgctgtaataagttacttaagagacttctactttttcatctttctttttctacatctagcatggtggttagcacatttgtgatatgcataatcaatagatgtatatataaatgaatatgagtaatagaaggtcagaaaaatccccagaataaaataaaatttatattttacatcaagcacatcataatcataatgactcaatggctgcagta

SEQ ID NO: 399309 - DNA, 542 bp, Homo sapiens
catgtttgtgttaccttctttttgccaggattttgatatccattgtggaacactcaaattccttttgggaagaatctactggacttccagtagcctaggaagatggaacctaccattcccatttgtatctccatatctaagcattgtgcacaaagtagctgtccataaatattaaatgatttgtattttaagaaaatttaagatagcccaaagatagagcctagaatatgaggtgcaatgaaagyaatctgtgccctcctcaaaatgatgtacctttgtgttaactacaattaaaagcacttatcttggtgtatgagtgtctgtttaatctgctgtaataagttacttaagagacttctactttttcatctttctttttctacatctagcatggtggttagcacatttgtgatatgcataatcaatagatgtatatataaatgaatatgagtaatagaaggtcagaaaaatccccagaataaaataaaatttatattttacatcaagcacatcataatcataatgactcaatggctgcagta

SEQ ID NO: 399310 - DNA, 626 bp, Homo sapiens
tagtagcactagctctggaatcaggccacctaagacctaagtctaattctaattctttacgcctgtgaaccttgggcacattgcttaacctgcctgtgcctcatttttttaatctataaatgaaagaaaacaataaatccttaaatacagggttgtcataaagattaagcaaattagttcatggaaagaggctaaaaaatgtttaaaacatagctcaataaatgttatgtattataatattttagtgtaactacctcgtagataaaatgttttcttatcaatcaaaaaaagttgtagtaaagaaygagctcaattattttttgcatccatgtcactgctcctaattcacctgttgtctccattttcatcgtctcccaatggaccctccatactctagccagactcaactttctgagacctcaagctgatcattttaaaccttgcaaaagatccttcacatggttaacggcattttccattatctagttctacctgcttctgtctcctctacaacttatcttagccaattctccagattgtcctggatacagagccatggagatgtgttagaagagatgagcccatcccctccagtaacatccagaagccacacactcccattttta

SEQ ID NO: 399311 - DNA, 594 bp, Homo sapiens
tctccccactcccccgaagaggagagtgctccctcagtgctccctctgtctaaggccaaggattatcatttctaagaatgaatcttcttttagttattttttgtcccaggcaagttgctcaagtactggcagtgcagcagagcaggagaagcttctcatggaatcctggaggatcaggtggggaatgccttgcaagaggctacatgagatgccagagatgtgcaggggyctggaacctcatgctgggttcctttactgctcccattttcatgtttctctgtctatgaaagtgagtctattttaccttagctgaaatcagagctagatacatcaatcaaggtagagcctaggaagtactaaataaggaaattattttcatccaaacctcattgctatatattttctgtttcagaagcattgattcctcaagggacccacatcacaccaaagaagagtcatcatgcgaactacaactcgggcaattctgcaagctgcaccaaatctccctcttgcacgatcactagtttcaataaaagttttattaaagaaaaatgggtttgtattggtttcccagagctgtctaacaaaatacca

SEQ ID NO: 399312 - DNA, 594 bp, Homo sapiens
tctccccactcccccgaagaggagagtgctccctcagtgctccctctgtctaaggccaaggattatcatttctaagaatgaatcttcttttagttattttttgtcccaggcaagttgctcaagtactggcagtgcagcagagcaggagaagcttctcatggaatcctggaggatcaggtggggaatgccttgcaagaggctacatgagatgccagagatgtgcaggggcctggaacctcatgctgggttcctttactgctcccattttcatgtttctctgtctatgaaagtgagtctattttaccttagctgaaatcagagctagatacatcaatcaaggtagagcctaggaagtactaaataaggaaattattttcatccaaacctcattgctatatattttctgtttcagaagcattgattcctcaagggacccacatcacaccaaagaagagtcatcatgcgaactacaactcrggcaattctgcaagctgcaccaaatctccctcttgcacgatcactagtttcaataaaagttttattaaagaaaaatgggtttgtattggtttcccagagctgtctaacaaaatacca

SEQ ID NO: 399313 - DNA, 539 bp, Homo sapiens
aaacatgccttcaaaggaactcatgaaacgactgggaaatttaacttgaagaacagaactcttaggagagaaaccaggctttaaacatttgaataggcaatagatttgtcatacatgsgtcagtagaccaaaggagaaacaaggagtagaagctttatctatgaatgaggaagaattctttaattgatgaggacatgaaactccaccagccaatgaagggctggctccccatgactccaaaactggctcctatggtgtctctttgttccttacaaacaagatcctgaagaccggtctgttgtattttctcctttaaagatgcttttgaaggtcatgaatttcccatcattgaaagcactcaagcaacagttgggcaagcacttagtagggatgttgctgacaaaatctgagtttttcccagatgtctcttaaaactctgggatctgaaaatatgagtgtcaagaggaggaaagcgacttcctcccaggagtctcagactttgattagagtaggatgtgttgcctctcctctcacactct

SEQ ID NO: 399314 - DNA, 604 bp, Homo sapiens
gattgatgattttattgcacagtgtctggaacttagtagatgttcaacatgaataagttatcttggttcttctgggtgtggtcctaagggacatgaggttggctgcaggttgcaataaaaaatattgtgtgtccccagttgtgtttgcctcaagcatctctgctctgggatgtcacttccttctatgagacatttatttctatttgcaagaacttttcactctctctgtctgttactgctcaaaggtcacctgaaatgcagagcttttattagctccggtgaaaggatatggtctgccctgaatgcgctctgccaggtgcctttctcattttcttattagcaaggaatggattctctcttcgcttacctagccctgcggcttttcctttctgtctctcttcacacttattaatccccctcctgtcttttgcccaaaggaaaaygatgaaagggcctattttcctgcatgtttctttttttttaatttgctgaggggaccaacttacagatgagaatataaactcaaaaagggttttccccgttgttgagatgaccactgtccttctttcagcatagtactagtaaattatcctgagatgtgtgt

SEQ ID NO: 399315 - DNA, 587 bp, Homo sapiens
tgaaagggcctattttcctgcatgtttctttttttttaatttgctgaggggaccaacttacagatgagaatataaactcaaaaagggttttccccrttgttgagatgaccactgtccttctttcagcatagtactagtaaattatcctgagatgtgtgtgaggggttatgcttaactactgcctttcctctgtcatatggatggcacagggaaggaatgattatgatcacacaaattaagtggaggcaatggaacaagacttatatttggcttctactccaagagccagatatttcaaatgaaaagagatggccttttggctgacacgaagctctcaggataagaattgtttaacttctggttggctcctcattcatggcccaagagcaagagaagtatattttttctgagaatttgaaaacttcccaagctataaatgacactcatttgcatttcttttcagcagaggaggtggaccatgggcgaagcctctgttgatgaggattaaactcacaaaacaggatgagttaacgtaattcttagagttgtgccaacattaccagctactaatatggagtatcattggc

SEQ ID NO: 399316 - DNA, 555 bp, Homo sapiens
attggaataaggaactggcagatcctcatgttcctctttgcagctgtatttctggtcttaatgtggagctcaaactgtgggaaagtcttcctcttgagtgcccttttgttactgctactttgtgatataaacccatatgatggattttcttgtccctcctctagctctgtaagccatgcagtcggttggcatgactccaatttccacagacccacattttattaggtgcaaccttccagaatagttcgaggagaagtaaaactgtatgtctctttcactctcaccatcagttttgcctaccctttctaaaygtatatctgtatctcttaaggatcacttctggtttcctttgcaagtttattcttcttctacaagccaacgttttgtttaactattcattcacccagcaaacatttactgagcaccatttccaatacacatattctgccatgcacttagaatacagatatgaatatgacccatttattcattcaacaaatgcttattatgctaggcggcatgtatacaatagtaagcaagatagattctcaaaga

SEQ ID NO: 399317 - DNA, 573 bp, Homo sapiens
tggagatagataaaagggttgagtttaaggaatagatagttgatgactataatgggtaattatatttatacctgtcagttctccacttgctatggtctgaatgtgtctcttcaraatccatgtgttgaaaccaaatccacaatgcaataatcttaagaggtggggactttaggaaatgattagactatgagggcggagctctcgtgaatggaattagttcctttattaaagaaaaaaaaaaaggcccaaggaagctcatttgctccttccaccatctgaggacacagctagaaggcaccatctatgaagcagagagtgacccttcatcagacactgaagcttcttgatcttagacttgccagcctccagaactgtaatacatttctgtagtttataagttacccagtccaaggtattttgtgacagtaggctgaaaaaattaaggctgtgaaactatgttttacaaattatcaatattaaaccagttctatgtttttctgtcttccttttatttttcatataaggtagcagctgcagcattgtggttaattctgccaactctgggatcgcaca

SEQ ID NO: 399318 - DNA, 586 bp, Homo sapiens
taattgcatgggcagaaaagaattattattattcaacttctggatttctggaaggtatatgacggcatcattaaccaaggtaggaaatataggaagaggatccaggtgttttgtggagaagataataaaataaattcagttttaaatgtattgagtttgaattgcctttggttacatagtcgaaggatgtgtcacctagatgattggaaatatgtaactgaagttccaagagagaaatctcagctggaaatacatattttggaaacactggtgttcacgtgctaaactcatggtattgaaggcaatcacctaaagagcttggaaagtagaaaagtcagccaagagccaggtgtggtggctcatgcctgtaatcccagcaatttgggaggctgagttgggtggatcacctgacgtaaggagttcaagaccagcctggcctatatggtgaaaccccacctctactaaaaatacaaaaaattagccaggcatggtggtgggcaactgtaatcccagctactcaggaagctgatgcaggagaatcacttgaacctgggaggcagaggttrcagtgagccaacgtcgcacc

SEQ ID NO: 399319 - DNA, 566 bp, Homo sapiens
aagttgttttggggcttaaaagtgtgagtgttgggttaaggttgtctggataagcatccaggcttagcctgtttcctgtcccagcttactacctgacttcggacaagttacctctcaaggcttaagtttctgtctgtaaaatgggcataacagtaattcctgtcttacrtggttattatgaagggtaaatgggatcatacatgttcagtgcttagcatggtacctgacactaagtaaattctcaataaacatgttgtattattgtcattgattatcccactcaatatctagcatagtgactaaaatagggtaggtattcaggagagaaatgtttgttaaattaaaatgtaaatggaataggttacttttgatattggaggatagatagtcagaaaagcatttcagacatgaggtgtcagtcattattcatgcagcactgagtcactgagtaaaatcaactcagtaacttattaattgtttaattaacttattaaatgtttagttactatgtgccattaactagagacataggaaaatgagtgaaagacatagaagggccaagtgtt

SEQ ID NO: 399320 - DNA, 631 bp, Homo sapiens
tagaagctatgagaaaaaggaaaagaaaaagtacagcaagataacaaggatcagatatgccagggttagtgtatgcaggggactttgcagtttggtatatttctcactgagaaagtgagatattgatgagcaaaactaaggtcctcttctaccatctagtgaaagagacagacaagaagaaagaaaataaatcattagtggctgggcatggtggctcacacctgtatcccagcactctgggaggccaaggcaggtgtggatcatttgagaccaggagtttaagaccagcctgggcaatatagcaagactctgcctctacaaaaaattataaaaatgaaaaaaagtaatgataaatatcattaaaaaataggataatgtgagaaaatcaaggtcctagctctggatatctgtgcccttccaggtgggaagcccaggccactaccagtcytgcccatctggctgaaaagagtctctattgaagcacacacctatgttatgaccacctcctgtgtgtctgtgaataggacagcagaactattatgtgttgtagcaggtattgtattccaacaaattggtcgacaaaagaagagacattcgtaatctgttagtcatatttctggtggtgtaaatg

SEQ ID NO: 399321 - DNA, 538 bp, Homo sapiens
ttaaatgaaaacaggataatttaagataagaaagctgagtttyttccctgggttctggaggctgacgtctcttctgtaagatctccagggaagatacacatcagtctggtgtagtttattttagctttagtaaacattttacccaaggtgtgtagctttgtccatctctttcaatgcttccagctggtaaactgagaatacatatgatgtctgaaagccgcgttaggctgaagaaatctgatcttagtgtcgggtattgaatttccaattagaatgctcatttgccctctgtgctgcacactctgggccttgggctaatttaaatggagtattttcagtggatcctgcctagagacaggaaggtggcttaggggccatctcctgctttcttttattctcaacgtactgtgggaaatactgtttattcatttaagattgctgattgaaggccagattaaattattttttattcaactagtgttgcttgacatttttgtatatgatctttaatattcttcatttttaaaaggtatgtata

SEQ ID NO: 399322 - DNA, 636 bp, Homo sapiens
agagcaggaaatcaaatccatgttgattgctggttttcaaaacttactgtatggagggaaacattctatatgtattttggaaaaaggaaggggagcaaaacttaagttctgtgcaatgaaaggagatattattttgctagacatgaatgtcaagtaatcagatcacctaggaggtggagtctattgtgggaagagagagggtctatctggctttgacacacctggagaaataccccactggatcttccagttccctatgaactcatgcttaccaagtcatcttccaacagctaagttagcttcctatgtamttgatagaccccagttactggacatggatatctgaatctttaaataaatatgtttatgtcttgtttccgtatcattgtctccagagttgaggaagtctgtccaacccaccaatgcaattcctttaaggacactgttgatccactgtcagcacattcaagaccaaattatggcataggtggggaaggccctgtatctgaacagtggacccacctgctcctttcccttcacgctagtctggctttgctatacattctttgttcaaatcatcaaaatccagttagctacacattaaccacaatgatgattactatcattacctgaagg

SEQ ID NO: 399323 - DNA, 608 bp, Homo sapiens
aaattgatttttcttttaagattcagcaatatgaacatagaccaatctctccacttttaagacacacacatacatacacacacacacacacacacacacacacatcccaggaaatgctgcataccttcaaggaatgtagtggaactactacgtatggaaagcctaagctttgccttcaactaaaattttcaactaaatttttaaatattccttaaaaaagaactaaaaatagaactacwgtttgacccagcaatcccactgttggccatctacccaaaggaaaagaaatcattatatgagaaagacgcctgcactgttcacaatagcaaagtcatggaatcaacctaagtgcccatcaatggttgactggataaagaaaatgtggtatgccatgggatactatgcagccataaaaacagaataaaataacatactttgtagtaacaagaatggagctgaatgccattatctaagtgaaataactcaaacagaaatatcaaataccacatgttctcacatataagtgggagctaaacaatgggtacacatggacataaatagaaacaatggacattggggactccaaaaggagggagattgggaagggg

SEQ ID NO: 399324 - DNA, 576 bp, Homo sapiens
actcacccagggagcagcatcagagattaagtagcatcagagattaaggatgacgataggagagtgctgggtcaggaggagcctttggaccctaaaggaaatctaatgctaatccatgagggtgtgctaatttccttaacctacaaaagaccaaaaaggaattgaaagagctggtaaaatttttccctctttccaggttggaagagttctggtagaactaaatttttccctctttccaggctggaagagttctggtagaactgayactgaagaggctaccctagcagccttagggtggtggctgataccctgcccttaaaccaccggcctacaggataaaagatacctcaaccttttatttctctcagagtcccatcattaagaatatcttagcatttagacttgataggccccaacagtcggagaagaggaaaagaggagaagagaatcacattgagcaattagggcacaaacttggtgaaatagagctactgggggagatgtctgactatctgagtggagaaaggatgagggaagaaacaaaatacaatatagccctattggaacttgataact

SEQ ID NO: 399325 - DNA, 572 bp, Homo sapiens
agtagatgctcaataaatttttgctgaatgcatgartgagtattgatcctggtcaaagcccttgctgaaggccattgccttgatcccttcctgcctcatcctgggtgaactcagcatgttgggactcagtgtccagccagtcagagaatcaagagagcatccaggctgagctcaggattcaaggcccctatctgagatgggtggggaagcaggaacattcaggcataatatggtcagattatgtgtcaatattgtgttgtgttcatgtgtgttcttttcagtttggaatagaaaaccaggcagtggttgatggccagagagcaaagtttagctgcctccaggagaggaatttgactgatcagggtgacgcagggtaccatgcctcagccattctgctggggttcagggatggcttccaggctcagtgtcaggggacctggattgtaaagtcaggatgtctggtgaggcagggtttgttaggttagtgtgatcctgaggatgattgatttccaagctaggatatattcttttgactttctgacatttctttcttcttggtgctcatagtagga

SEQ ID NO: 399326 - DNA, 618 bp, Homo sapiens
aactcttgtatttctcgtgctgaagagttaataaattagataaagaaaactactgacagaagaaagttgaaaagaatactctaacttatctaagaaccattttcttatcattaaaacaattttgcataaaggctattaagtttgttattgattttagtacagtaaaataataatgtttattcattaattacaaaaaatgtaaaatgttctgtagctataaagatctgccttgagggtgaatggccaaagcgtcagtaactaaattcctagtagtccaggatttgaactaacctgaattttcatttcattgtactctacttttaagagaaagatsctatggatacacaaagaagctgtgacactattttagtttacactttttaagcaaatttcaattactctacaaatatttagtatatgcaaggtattttactacatatggtggaggacacagataatgaaagacctgttccctacattcaggaactttatgattgagaactactacttctgattaagatggagccacatgggctggagtcacattcttgtctgaaacaatctgaagaccaaaatcacatgtgaaccaatttctgaacattgttcctaaactaacga

SEQ ID NO: 399327 - DNA, 553 bp, Homo sapiens
ctgactaagggtcctggctttttgctgactggagggtagaggccacctttaagtcctagaggctgtctacaattctttgccatgtgtgcctctccaacatgaccaattacttcatcaagattggaaggggagtctctagctctagcctgctaaatacagactcacacaacataatgcaatcaccagagtgacatcccatcccatcctaatatttcctctgtcatttwctactggttagaaacaaatcacaggtacattcaggactcaagaagagaggattatggaaaggcatgaacacctggaggtagagattactgggagtcattttaggatctgtttgctactggtagagttcctatcttggctccaacactttccttctgtgtgaacttgaaaaagttcttaattatactgtgactcagtttcctcacttgtagaatgaggaaaatatatatacatatatatgataattaaatgtgtattcatgtaaacagtatgaaaaatggtgcaaactttgaatagattatagctattaatattattgtgattgaca

SEQ ID NO: 399328 - DNA, 604 bp, Homo sapiens
caaataagtaatagaaaatcatcaacagatttagagtaaggggtgatatgatcaaaaatgagatttaggaaggtagaaagacascatagctgccatgcatttgagataaggtgtgacaaagcttttggtaggaatagagtccctgtgttggacatccccaggaagcgctattcatccagaatacaaagtgaacattgttccttgtggttaagcaatagagacaccctgacaggaggctctaccaatagccaaggtaagggttaaaaaaatggaaaatcaacgaatgaatgaatttttataaatgtgctatatccatacaattcatccataaaaaggaaagaagtactgatacaagctactatatggatgaaccttgaaaacagcatgctaagtgaaagaagccaaacacacaaatcacagattgtattagtccatttatatgaaatatctggaataaataaacccacagagacagaaggtggattagttgttacctggggctgtgggaaagaaggtaaggggagtggctgcttaataggtatggagcttccttttgggatgaccatgtttttaagtagatagagatgataactatacaacattg

SEQ ID NO: 399329 - DNA, 604 bp, Homo sapiens
caaataagtaatagaaaatcatcaacagatttagagtaaggggtgatatgatcaaaaatgagatttaggaaggtagaaagacagcatagctgccatgcatttgagataaggtgtgacaaagcttttggtaggaatagagtccctgtgttggacatccccaggaagcgctattcatccagaatacaaagtgaacattgttccttgtggttaagcaatagagacaccctgacaggaggctctaccaatagccaaggtaagggttaaaaaaatggaaaatcaacgaatgaatgaatttttataaatgtgctatatccatacaattcatccataaaaaggaaagaagtactgatacaagctactatatggatgaaccttgaaaacagcatgctaagtgaaagaagccaaacacacaaatcacagattgtattagtccatttatatgaaatatctggaataaataaamccacagagacagaaggtggattagttgttacctggggctgtgggaaagaaggtaaggggagtggctgcttaataggtatggagcttccttttgggatgaccatgtttttaagtagatagagatgataactatacaacattg

SEQ ID NO: 399330 - DNA, 430 bp, Homo sapiens
tcttcccataactaatttcttataatttttttcaacaaaatgtcattgtgtggtatgtttttatctatcgcttttttatatgcatctcttttaaatagttctaagtacttaaatatgtacactctaaaataaagcaataagatccatgaaattgcattatcatatcctccaaaagaattgaggtgaggtaaagttgaattagagtgagttacaagtactaaatatgctgcttttcatggcaaagttattttgatatacacctaagtttcaaatacacagaggaaaagcaatccagtaatagattccagagaacatatcctggtcagaaacagaacattgcaaagtctcattcccagtgarggtggagggtaagacgggagagcagtacttaaaattctgcttaagggaagcatcatgcactagaaaacat

SEQ ID NO: 399331 - DNA, 627 bp, Homo sapiens
aataacttctgttagatgttcatagaaaaaaaagcagaattattattactaatgttattgtgaataactgtactgatscttactttttggagactcaaaaaattatgatgagtagagctaatttcctttcccttgtgggagcaggacttagtgacttgtacctaatgaatagagtacagaaagggaaaaatagtaactttacagttactgtagttacagttaccaagaaatctggtagataccaccttaactaagaaaagttgccatttccagtgataagtcatgttgatatcatgtattctttgatatgatatgatgagaagtgtaccttaccactgtggtattctttcaaaaagctataaaccccagtaaataatgagtaagcaacagacaaacacaactgagaagcattctacaaaatactaaactagcacccttcaaaagtaataaggtcatgaaaaacaaggctaagaaacaatcaaactggggtagactgcggagacataataactaaatgcaacatggtagccttgaatggatcctggaagagaaataggacgttagtggaaatactaatgacatcaaataaatactaatgatattgaataaggtttataatttagttaa

SEQ ID NO: 399332 - DNA, 562 bp, Homo sapiens
taataaggtcatgaaaaacaaggctaagaaacaatcaaactggggtagactgcrgagacataataactaaatgcaacatggtagccttgaatggatcctggaagagaaataggacgttagtggaaatactaatgacatcaaataaatactaatgatattgaataaggtttataatttagttaatattgttatgctactgtttattcgattttatgaatgcacctttgttttataagatggtaacattaaatgaagctgagtagagtgtataggaactctgtcctatctttacaactcttctgtaaatctaaaattatttcaaaattaaaagtttaaataagtcacagtgagtaattataattattttctccattttataaatataaaaaactgcttgctcaagacaatgaaaaaaacaagccacagattgggagaaaatatttgcaaaatacttatctgataatggactgttatccaaaatatacaaacaactcttaaaactcaacaatgaaaaccaaaaaatctgattaaaaaatgaaaataggttaaggatgtgacagat

SEQ ID NO: 399333 - DNA, 562 bp, Homo sapiens
taataaggtcatgaaaaacaaggctaagaaacaatcaaactggggtagactgcggagacataataactaaatgcaacatggtagccttgaatggatcctggaagagaaataggacgttagtggaaatactaatgacatcaaataaatactaatgatattgaataaggtttataatttagttaatattgttatgctactgtttattcgattttaygaatgcacctttgttttataagatggtaacattaaatgaagctgagtagagtgtataggaactctgtcctatctttacaactcttctgtaaatctaaaattatttcaaaattaaaagtttaaataagtcacagtgagtaattataattattttctccattttataaatataaaaaactgcttgctcaagacaatgaaaaaaacaagccacagattgggagaaaatatttgcaaaatacttatctgataatggactgttatccaaaatatacaaacaactcttaaaactcaacaatgaaaaccaaaaaatctgattaaaaaatgaaaataggttaaggatgtgacagat

SEQ ID NO: 399334 - DNA, 562 bp, Homo sapiens
taataaggtcatgaaaaacaaggctaagaaacaatcaaactggggtagactgcggagacataataactaaatgcaacatggtagccttgaatggatcctggaagagaaataggacgttagtggaaatactaatgacatcaaataaatactaatgatattgaataaggtttataatttagttaatattgttatgctactgtttattcgattttatgaatgcacctttgttttataagatggtaacattaaatgaagctgagkagagtgtataggaactctgtcctatctttacaactcttctgtaaatctaaaattatttcaaaattaaaagtttaaataagtcacagtgagtaattataattattttctccattttataaatataaaaaactgcttgctcaagacaatgaaaaaaacaagccacagattgggagaaaatatttgcaaaatacttatctgataatggactgttatccaaaatatacaaacaactcttaaaactcaacaatgaaaaccaaaaaatctgattaaaaaatgaaaataggttaaggatgtgacagat

SEQ ID NO: 399335 - DNA, 553 bp, Homo sapiens
ctcattctgtgccttgaatctatcagtcacaatatcctgttgaattcaatcttgtatatatctttcagatcaaactttctcttttcattttcctggcactgtactaaaaacaattcttcactctagctctgctatcttccaatctgccctccaccttgtcttcagagtggccttccagaaagcagtatgattagcttcctccctgcatcataacctccagacccactccactacccacagaataggaccagggtaggcctacaactgccaccaaccctttgttccatccctgaggagcttaatagtgattcttgccaatgccaggcccagtcctaccttctacctctgtacctgctggtctctcagttctgagttcttttccttcctcccacaggcatagccctcgctatccttcaagccaatactcagatctctcctcctctgagaagcttcccctactagcctctaacyccctgcagtgtgagatgatgtcttctttgggcgcacatagcattttgctggcacttgcaaaaacatcatgttcgaattattg

SEQ ID NO: 399336 - DNA, 526 bp, Homo sapiens
ataatcatgtagaagtggaaaaaactgctacctcctttttgtagataggagaacggaggctcagagaagtgagttaacttgtccaaggccgcacaagtttggggcaaattcaggcttggaagcaaggtctgtcacttggaaagaccttgcccttttccttgccccagtgaatgaatggataccttggtgctgcatctccaaacacacgtctcatgggaggcagagcaggaagataagatatgcattctgaggcctagggaaatcgttgagattatgcctcagtggaaaaaataaaggcttgcatatggtgggttggtaattggtgaaggaaatgaaggtaaatggaccactaggatgaaggatacagggwcagttgcagcaggttatacaatgataaataaatgtgcacaggcccctcaagaacttgacagttatgatcccagggaaaggctggtgactgaggtcagattcctccagtgttttgtggttttgttttgtttttgtttaacatcaagggttctataaa

SEQ ID NO: 399337 - DNA, 526 bp, Homo sapiens
ataatcatgtagaagtggaaaaaactgctacctcctttttgtagataggagaacggaggctcagagaagtgagttaacttgtccaaggccgcacaagtttggggcaaattcaggcttggaagcaaggtctgtcacttggaaagaccttgcccttttccttgccccagtgaatgaatggataccttggtgctgcatctccaaacacacgtctcatgggaggcagagcaggaagataagatatgcattctgaggcctagggaaatcgttgagattatgcctcagtggaaaaaataaaggcttgcatatggtgggttggtaattggtgaaggaaatgaaggtaaatggaccactaggatgaaggatacagggtsagttgcagcaggttatacaatgataaataaatgtgcacaggcccctcaagaacttgacagttatgatcccagggaaaggctggtgactgaggtcagattcctccagtgttttgtggttttgttttgtttttgtttaacatcaagggttctataaa

SEQ ID NO: 399338 - DNA, 549 bp, Homo sapiens
ttagtttttcctgtcttttttttcttcattctgyttccttttcccacttttcattttactttctagttttccctcctctcttttcttctcttaccattctctatttttctcttgtttattgtggttttttccctctctttctctctctccctttctctctttcaatgtgtgctgtatgtgggagtagaagaacattcagggaaggcttcctggaagggacagtgtctaagccaagtcttccaggcagggtgggatttagataataagtggaggagtgggtgggatacaaatggaaagaaagaaagagtcagaaggaacatcaaatgtgagtcccctgagaagaaagaatgagagggaaagtgtatgcatgcatggcaaaacgtaccaagtttggtaaggttgtcaacaccccaaaggtgtagtgggattggcaggagaggcagattgtgaaacccaggtcatgggaattcaggctttctacgctatggttggattctcttcttgatgggatgagttctaaattggggttttaaggaataaggtgaacat

SEQ ID NO: 399339 - DNA, 615 bp, Homo sapiens
ggggctcaatgaagaggctgagaaagcagatgcaaatttgggagttatcagcacatatcaaaccccagaaccccatgtgaacaaagatgaagaaaaattccaaggactgaatccgggactatcacagcagttagagtttagaaaaatacataaaatctatcaaaagtgactgagaagcagcagccagcagcaagtgaagacacagaggagagggaagaaagtgtgttaggaagggagtaggtttggaaaatgttggtgtaaaatcagccttttcccttactttccatacgtcacataaaatcaaaaatggagaatgaaaagaaagccataaagcacatatttaatggaaatagcagatagttataacaacaaaataggcaaaactgtgccaaaagcaatcgagtattgaacagggctgtgggagaaagcagaaaggtgaaacmcttgatagcatatcttggaaagagccatcacaggacactttgctgggatgcatagcctggtccccaggtgcaaatccagcaacgggagtgctgctggtgctgcttcatcaagaaacaggtggtagaactaaatgagaaatcacacaagaggcacaaggtaaaagaggaactt

SEQ ID NO: 399340 - DNA, 595 bp, Homo sapiens
agacactgatcaatattcacaaattttaaaaaagagaaaatttaatgaagctattttaaaaatgtacaaaacaaagtacacattggggaatagataatgatacaacaaaaagagataaaacatgagccgcacgcatcaagaaggaggagtgaaaaacataaatgaaggaaaaatttaatataaatttaaatacataagtatatatatatacatatatatatgtatgtatatatatttcttggtgttgactattgagtcagtctttccttgaacttatacatcttttaaatctctagacattgacatgttttgaactgtaattttaaaaacctgttctgcttattcatttgagttttcttcttaagaggctctagttacacattgtaaagtcctaacctgtataaccatgtagggaaatatgtctagttacgcattgtaaagtcctaacctgtataaccaygtagggtctatgttgaagacttattgcctgttttttatggctcttttgttcttttatctttctctctctctttagtgatatagatcagtttctctttaaaatattagtcatcattcatcactagaagaagcaata

SEQ ID NO: 399341 - DNA, 593 bp, Homo sapiens
tgcaccattcctttcaccttatctggactccacaaacacactttaaaaaccaattattctgagtcatttaagccycatagaggtctcctctctcaccccttcttctggaataatgtctatttccccttcaggtcttgagacagacactatatcatattgaaagccatgcctagccaatcaagactgttttaggtatcctgacacacaatgtatttaaattgcttgtttaactatttgtctctcataatagactttgagctcatcaaggcaagaccaagtatgttcagctgtggcaccctggtgcccagcacagagctagtgctcaataaaataatggaaggatagaataatatagacatggagaaagaacactgactgaaagaggacatggaaatgtgaaaacagtttaatttgatgagactggggttgtaatgagttttttctctcttttgtttcccataaatattaatatatttgcccactacaagcaaatgaaaagcatggggaaaaacactaatgcatatatgcatacacaaatctattccaaaaccagtttatctcccaatgagacccaaaacatatgtgatgtaagt

SEQ ID NO: 399342 - DNA, 593 bp, Homo sapiens
tgcaccattcctttcaccttatctggactccacaaacacactttaaaaaccaattattctgagtcatttaagcctcatagaggtctcctctctcaccccttcttctggaataatgtctatttccccttcaggtcttgagacagacactrtatcatattgaaagccatgcctagccaatcaagactgttttaggtatcctgacacacaatgtatttaaattgcttgtttaactatttgtctctcataatagactttgagctcatcaaggcaagaccaagtatgttcagctgtggcaccctggtgcccagcacagagctagtgctcaataaaataatggaaggatagaataatatagacatggagaaagaacactgactgaaagaggacatggaaatgtgaaaacagtttaatttgatgagactggggttgtaatgagttttttctctcttttgtttcccataaatattaatatatttgcccactacaagcaaatgaaaagcatggggaaaaacactaatgcatatatgcatacacaaatctattccaaaaccagtttatctcccaatgagacccaaaacatatgtgatgtaagt

SEQ ID NO: 399343 - DNA, 593 bp, Homo sapiens
tgcaccattcctttcaccttatctggactccacaaacacactttaaaaaccaattattctgagtcatttaagcctcatagaggtctcctctctcaccccttcttctggaataatgtctatttccccttcaggtcttgagacagacactatatcatattgaaagccatgcctagccaatcaagactgttttaggtatcctgacacacaatgtatttaaattgcttgtttaactatttgtctctcataatagactttgagctcatcaaggcaagaccaagtatgttcagctgtggcaccctggtgcccagcacagagctagtgctcaataaaataatggaaggatagaataatatagacatggagaaagaacactgactgaaagaggacatggaaatgtgaaaayagtttaatttgatgagactggggttgtaatgagttttttctctcttttgtttcccataaatattaatatatttgcccactacaagcaaatgaaaagcatggggaaaaacactaatgcatatatgcatacacaaatctattccaaaaccagtttatctcccaatgagacccaaaacatatgtgatgtaagt

SEQ ID NO: 399344 - DNA, 544 bp, Homo sapiens
agtaaaagacaaagctaatatttataaaataaaagtaactagcagaagacatcttttcagagcacattggagtgaataaaagcctcctttaaaaacagttgacagggagcatttatctaacacattaacttcgggctattacagatgaaggattaaagtttttaaaaatcagtaataatgtccctcatgcaatcaggaaacaacttaatatagaatgatgcaaaacaaaaacagcatgaagaagattagcaaataccagatgacactagaaataaaccttagctggattatagcagtcacacacagcaagattcttttattaaaaatcatttttccataggttattggggtacatatggtgttcagtgacatgagtaggttctttagtgatgatttgtgagattttggtgcgcccatcacccgagcagcttaaaggtcttgagctaagatggactgaaaattaacatcagagttccaccatataccaacagtttrtatggcatatagttacatttttgtgaactgtagtttcttttccaaagca

SEQ ID NO: 399345 - DNA, 642 bp, Homo sapiens
tattaagtacttatatttctaacccagcagttattgtccagcatttatttttcagagattctatatattcattttcttgaattctcctgtgaaccagatttattatctcgccaagtcccttattagttagttgacatatgtttattctgtaatattatgaatcatgtttttagctttttcaatatgatattttgacactattatgtccatttaccctcattaccacacaaagtctaagagtaaggatcttttcccttcttttgctctctacaaggaagattcctttcaatagaaagtggtttttttcagataaaggaatactttctcctattatgtttttttcttttatatatttttagtttccaataaacctattacaaactttgatctcagtgtactctatttgctatttatcctctcttctttcatcatcatcatctttgctctttgatctgcatcttggaccaaagacctataaaactttccttccgcatgttttcaactttagggaatgtagattctgctttgcccaattttcaaaaaaaatttcaatttkgtacatgtgctttcagttatttttaatctaattttccttggtcccattttaactcaactttcagtttaacaactcaaccccttatg

SEQ ID NO: 399346 - DNA, 541 bp, Homo sapiens
tccaatatttactcaggacctattatatgctgagtacttgctaagggctgagaatacagtggcagacaacacagctttgactctgtgtccaggtgcttacagcctagtatgaaataggaacaatttgaattgtatttgaatactatytatctgtacacattatacatatatttaaagctactatgttgataacaagaaggtaatagtcctaatataaggtctgttacttaaagcatgtctctatgtgtcagattctgtgatgttatgtttattatcttgtctaattcttataatagtcatgtaagacatttaccacttctcccattttatatatgaagaacttgagacttaggtggatcaagcaacatgctcatggtcaaatagataatgactggaacgaatgcatgtctaattccaaagtctgaatatttccactgtactatgcttctgagatctcttaatgctatatttctaatcttcccatggatattgataaataaaagatacagactatgcctatggtcaaaaatagtgacaccat

SEQ ID NO: 399347 - DNA, 525 bp, Homo sapiens
tgcaacaaagtggatggtgattctagtttctggataggaaacagaaaaagaacagaggaggaggcgagaagaagcagaagcatggggaggtggtggagcaggaagaagaggaggaagaggagggggaggartgagtttggggaaaaatgatgagttcagttttagacatgatgaattaaatacatctgaaaggatttctagtaggcctttggggtatgagagagctatggtagagataaatatttgcaagtcatagttagtgataaataagtcatatgcatgaaatcaccctgggagagagtatagagtgagtgagaagaaagataccaataaaccacagctacccacagtcaggtgtctaggatgatgaagtccctggaaactacttatcacaggaaatttaaaaatggctggggctgttcagcttaagaagagaagaatcaagtgattataaaaatatctgactgattataaaaatttatgaatactttcatgaagtaaataacaggcttatttcacagacct

SEQ ID NO: 399348 - DNA, 525 bp, Homo sapiens
tgcaacaaagtggatggtgattctagtttctggataggaaacagaaaaagaacagaggaggaggcgagaagaagcagaagcatggggaggtggtggagcaggaagaagaggaggaagaggagggggaggaatgagtttggggaaaaatgatgagttcagttttagacatgatgaattaaatacatctgaaagratttctagtaggcctttggggtatgagagagctatggtagagataaatatttgcaagtcatagttagtgataaataagtcatatgcatgaaatcaccctgggagagagtatagagtgagtgagaagaaagataccaataaaccacagctacccacagtcaggtgtctaggatgatgaagtccctggaaactacttatcacaggaaatttaaaaatggctggggctgttcagcttaagaagagaagaatcaagtgattataaaaatatctgactgattataaaaatttatgaatactttcatgaagtaaataacaggcttatttcacagacct

SEQ ID NO: 399349 - DNA, 628 bp, Homo sapiens
aatttgtacatagagaggaatatacaatataaatagtaactttcaaaagcctgaatctcctgacctcaagccagaagtgccacatactgattgctgataggtaaggaggccagttcccaacatgaatgtcattcaagcccaagggtgtaaaagctgttgattttgatataytgttgacaaaggggtggttagctggtgtccctgaccaggcagcatgttgcccagtgccccagaatggcataggttacatctcacctgacagaggggtctccgcccacaggaacacaggtctgtgtgcagagcagggtcatttttccagttggcagatggtgccatagaagcatcacaaaaagcttgctccagggccttaaatacagcaaaattaattaaaacacgtttttaagaagttctgaaacagtaaattatgacaattcatttaaaaaaaaaaactcacctatatggaaaaacagatggtaaatttaaaaagcaattaaatttgttttttaaactcactaaatttaaagattatggacacgtattaacttatttcttcctttattctattttttttcaaattctgaataaaatattgcaaaataaaactagctctgtaatggacaccagcaga

SEQ ID NO: 399350 - DNA, 628 bp, Homo sapiens
aatttgtacatagagaggaatatacaatataaatagtaactttcaaaagcctgaatctcctgacctcaagccagaagtgccacatactgattgctgataggtaaggaggccagttcccaacatgaatgtcattcaagcccaagggtgtaaaagctgttgattttgatatattgytgacaaaggggtggttagctggtgtccctgaccaggcagcatgttgcccagtgccccagaatggcataggttacatctcacctgacagaggggtctccgcccacaggaacacaggtctgtgtgcagagcagggtcatttttccagttggcagatggtgccatagaagcatcacaaaaagcttgctccagggccttaaatacagcaaaattaattaaaacacgtttttaagaagttctgaaacagtaaattatgacaattcatttaaaaaaaaaaactcacctatatggaaaaacagatggtaaatttaaaaagcaattaaatttgttttttaaactcactaaatttaaagattatggacacgtattaacttatttcttcctttattctattttttttcaaattctgaataaaatattgcaaaataaaactagctctgtaatggacaccagcaga

SEQ ID NO: 399351 - DNA, 572 bp, Homo sapiens
gatatgtaggaatgaaatccctttagaggatttgagaactggtgggataataatgaggagaggcagagtctaaccgtggctcagtcaccaggtggacagcatgagaagccattggaatttgtctcttttatctaaaagggataacaacttctggcccacctgctccatgagctgtaggcaactcctacagaaagcctcttaatggtcctccatgactgtagattcctccccttctggtccaccctacacttgctgccagaggaagcattttgaaatgcacatttactgtgacttgctcttgacttttttctgtttcgtttktctagctaatttctactcatttcttaggttcaagctgagacaacacttctttccaaaagccccttctggtctcccaagtctaagtctctcctgagtgcttccacagtatcccattcaaggtacacaacccacaatattgggtatgttcattttcacagcatggagaaagtccagcttccatggactccatgcttgtggtgggcagagatggtgcctttttctgcttgtcaccagaacctgtcagacacaag

SEQ ID NO: 399352 - DNA, 572 bp, Homo sapiens
gatatgtaggaatgaaatccctttagaggatttgagaactggtgggataataatgaggagaggcagagtctaaccgtggctcagtcaccaggtggacagcatgagaagccattggaatttgtctcttttatctaaaagggataacaacttctggcccacctgctccatgagctgtaggcaactcctacagaaagcctcttaatggtcctccatgactgtagattcctccccttctggtccaccctacacttgctgccagaggaagcattttgaaatgcacatttactgtgacttgctcttgacttttttctgtttcgtttgtctagctaatttctactcatttcttaggttcaagctgagacaacacttctttccaaaagccccttctggtctcccaagtctaagtctctcctgagtgcytccacagtatcccattcaaggtacacaacccacaatattgggtatgttcattttcacagcatggagaaagtccagcttccatggactccatgcttgtggtgggcagagatggtgcctttttctgcttgtcaccagaacctgtcagacacaag

SEQ ID NO: 399353 - DNA, 572 bp, Homo sapiens
gatatgtaggaatgaaatccctttagaggatttgagaactggtgggataataatgaggagaggcagagtctaaccgtggctcagtcaccaggtggacagcatgagaagccattggaatttgtctcttttatctaaaagggataacaacttctggcccacctgctccatgagctgtaggcaactcctacagaaagcctcttaatggtcctccatgactgtagattcctccccttctggtccaccctacacttgctgccagaggaagcattttgaaatgcacatttactgtgacttgctcttgacttttttctgtttcgtttgtctagctaatttctactcatttcttaggttcaagctgagacaacacttctttccaaaagccccttctggtctcccaagtctaagtctctcctgagtgcttccacagtatcccattcaagktacacaacccacaatattgggtatgttcattttcacagcatggagaaagtccagcttccatggactccatgcttgtggtgggcagagatggtgcctttttctgcttgtcaccagaacctgtcagacacaag

SEQ ID NO: 399354 - DNA, 588 bp, Homo sapiens
tgactatagtttagacttccctggtagaaaagcaggtgacaacatcacaccacattccaggtactaagaagatggtataacagctgctgagtcttacgtttcattcctatttgggtgcaaactattccccctaagcagctacccatatcagtcaactctttttcctgaaatcaacaatacacgtaaacatctccctaaaatgctaatttagttgctgctgatgctactgcaaagcacagtgcattcactgacttcattaactgagtaatcagggaaatcgagtgtcaataactcaagcacagattttgtgtaataaaattattgtttaattctgtagatctcagtttttctgtcctcattgcagaaggatgtaagtacattttcagtctgtaatctagcrtcataagctgtcccagaagaacccattttgattgaaaaaaataccttctccctgtaaacattagcctttaaaaataaaaaataaaatgttgctagattgggggccaattatcctgataattatctaattgatgtaaatgtattcaccctaagtgtgtaataacaaaatgtcacttaagtattttgaaa

SEQ ID NO: 399355 - DNA, 560 bp, Homo sapiens
ttcttatttgacctacatataatttcagagcctgttttgatgtttaygtatgtaatttttaatattaataattgttggttgaatatttaaaatttaatgtgattgcatttgttacaagtaaggagtccaatccagaccccaagagaggattcttggatcttgtgtaagaaagaattcagggcaagtccatagagtaaagtgaaagcaagtttattaagaaagtaaaggaataagagaatggctactccacagaccagccccaagggctgctggttgcccttttttatggttatttcttgatgacatggtaaacaaggggtggattattcatgcctcccctttttagaccatatagggtaagttcttgacattgccatggcatttgtaaactgtcatggcgctgatgggagtacagcagtgaggacaaccagaggtcactctcatcgccatcttggttttggcgggttttaaccagtttctttactgcaacctgttttatcagccaggcctttggacccgtatttcatgctgacctcctatctcatcctgtgacttagaat

SEQ ID NO: 399356 - DNA, 649 bp, Homo sapiens
tgacggtataatcaaaaaagacatgtcaaaattattttgtttaatctcaaatgattattgaaaacagttttttttaaaaaaggctgacccactgacatgctttttactgtttgcatgtatgacatatatgttttattttaatgctgcttagttcctagaatgttttatctgtgtgtgattttctttccaagctaygatatatatcaagtaaggaaaagctgaagggtatattccactgaaaatttctatttaccacgttacataagatcatctttaaaacaccttaacagatgtttgaaatcataattcatttcagtgaattaaatatagtctcattccttgaaatttccccttaaaaaggttgcaaagaaggggtataatttgacatttaatttaacaggaaaaagtgcttttagaagtattctaaataatgctatttaaaagagcatgagactaccaatttggctagggaaacattttctactaatcaagtattttaaaaaaaaatgagtttctagaaatcttacattttttttactggtattttaataaaaaaatggatcctgcagtcaaacaaaagtacattttcctaacatttctttgaattttaaatgttagggaatcaacactattatttatagcaaccaac

SEQ ID NO: 399357 - DNA, 649 bp, Homo sapiens
tgacggtataatcaaaaaagacatgtcaaaattattttgtttaatctcaaatgattattgaaaacagttttttttaaaaaaggctgacccactgacatgctttttactgtttgcatgtatgacatatatgttttattttaatgctgcttagttcctagaatgttttatctgtgtgtgattttctttccaagctatratatatatcaagtaaggaaaagctgaagggtatattccactgaaaatttctatttaccacgttacataagatcatctttaaaacaccttaacagatgtttgaaatcataattcatttcagtgaattaaatatagtctcattccttgaaatttccccttaaaaaggttgcaaagaaggggtataatttgacatttaatttaacaggaaaaagtgcttttagaagtattctaaataatgctatttaaaagagcatgagactaccaatttggctagggaaacattttctactaatcaagtattttaaaaaaaaatgagtttctagaaatcttacattttttttactggtattttaataaaaaaatggatcctgcagtcaaacaaaagtacattttcctaacatttctttgaattttaaatgttagggaatcaacactattatttatagcaaccaac

SEQ ID NO: 399358 - DNA, 546 bp, Homo sapiens
tattaaaaacatactcattataaccacatcctcagggcccatgctgctcaactgtacagcttttataayacacatatgtaggaatgaaacacaagtcctttgccgaccaagttatcttctgctatagtgaatccttcagattatagctataaacagctttaccaaaggactcttaaatttaagtaagtacaaattaaatttttctccctgcttttcatgtgtcccatagatgacagtacctctgttttcaatgatagtccactgttaaagaatattgttgcaacagcaatgtaggatacagttatttctggcttcagtggtcctaaaaagagaaaaaagagttattgctagaaaagaatttcagtagataacttggcacaaaagaagaatctatttgttcacacctgtaatcccagcactttgggaggccgaggcgagtagagcacttgaggccaggagttcaagaccagcctgaccaacatggcaaaacccagtctttactaaaaatacaaaaattagccgggcatggtggtgcatgcctgtagt

SEQ ID NO: 399359 - DNA, 514 bp, Homo sapiens
atgtgttaacactgcgagaacaatacttaaaagtatcatttgtgagtggatataagtatcatttgtgacatgtacacaattggcttgaagacctaatgtgctaacaaaaaacaacattctttcaaaaaatgcagtcctgagaaaatgacattttatacctatatagcagtggttctccagcagtagaaatcttaccckccatggacatttgaaaatgtttagaaatgttttttggttgtcataacttgggggataggatgtgctactaacatctagtgggtagagatcaggaattctattaaacatcttggaaggcatagaacagcccctccaacaacaaaaattatcatgttcaaaatgtcaatgtgccaaggctgagaaatcttggtacaaggcaacatttaaaaacctaagatcatctcatatttggcatcctattcagtcttcttgtactagattaaatagtgtcccccgactcccaaaattcatgcccacccagaacctgtgaatgtca

SEQ ID NO: 399360 - DNA, 514 bp, Homo sapiens
atgtgttaacactgcgagaacaatacttaaaagtatcatttgtgagtggatataagtatcatttgtgacatgtacacaattggcttgaagacctaatgtgctaacaaaaaacaacattctttcaaaaaatgcagtcctgagaaaatgacattttatacctatatagcagtggttctccagcagtagaaatcttaccctccatggacatttgaaaatgtttagaaatgttttttggttgtcataacttgggggataggatgtgctactaacatctagtgggtagagatcaggaattctattaaacatcttggaaggcatagaacagcccctccaacaacaaaaattatcatgttcaaaatgtcaatgtgccaaggctgagaaatcttggtacawggcaacatttaaaaacctaagatcatctcatatttggcatcctattcagtcttcttgtactagattaaatagtgtcccccgactcccaaaattcatgcccacccagaacctgtgaatgtca

SEQ ID NO: 399361 - DNA, 607 bp, Homo sapiens
attaccatcaatcagagggagaaaccaccaggaataactgctttattctcacagttacatattctacacattttgttctaagttgaatacagaagaacaaaattttaaaacaaacaatccttcatctccacaattttggtttaaataattccttttaaaatgttcccggaagctacttctaaacagagtaatggggtggaggttaaggggagaagggaccactgctgttctcctaagagatcatttcattcacttccatcatgttttaacaaaaagataaaaataacttcaaatatcctcctgagcgcttcctactatgaaakattgtgcctgttcacctctatccttatttgctccggttgcatgagttaggtattaaacctgtcaataagcttggaaactgacaaacaaggtcaaaaagacaagcgaattgaataaattcaattaatgtttatgaaaagtagtacaagattgtctaaaggtgttggggggggcataaaaaactaatatttctaatgttcccaccagtgcccatcatctcctgtacaaagctcccactattcagagatctaagtatgctttcagtccatctacatttccttgccaa

SEQ ID NO: 399362 - DNA, 594 bp, Homo sapiens
tttttcctttgtgcttctcctagaattatgttaagaattttagaggctctctctttaatctttargcaaactttgaacaatgctgtgcacatattagatgctcaatgtctgactaaaaattgaatgaattgaagataataccaaaaggaaactacttaaaagtagttaaaagactaaactacttagtcttctttgctatgctaacactgaatattcacaggaacaaaccatgggtataacccagaataccaacacttaaattgaaaatactatttatttatactatttatccattaatagcttattgataaatatctaagatttttattgtaaatctctaagattaagctgaatgaaacttacttaaaatgttatatactatttgatattatatcttttaaaaaatcaatttctcagtattcctcaagtttaattcttcttaatcctttgggtttcctatctcttccagaaaagaataaaacaaatgcttctctaattattcattccttcaacctaaatttattaagcaaacacaaaaataaataccatagagtaccaactcacagtctagggctagaagacagacatcataat

SEQ ID NO: 399363 - DNA, 619 bp, Homo sapiens
tgttgaatccattgcataaagtttagataatatgttcttacaaaaatgaataaaaatatagttgaccttgaacactgtgaggcttagaggtgccaacccccatgccgttgaaaatccacatataacttttgactccccaaaaacttaactactattagcctaaccrttgactggaggccttacctataatataaagagtcgattaatatatatttcatatattacatgtattacatattcttacaattaagccagagaaaagaaacatattaagaaaattataaggaagaaaaaatatatttactattcattaagtggaaatggatcattatacaggtcttcatttttgtcatcttcacattgagtaggctaatgaagaggaagaagtcttgctgtctcaggcatagcagaagcagaagaaattcttgtataagtggggccctcacatttcaaatccatgttgttaaatggccaactgtaacctttaatcatacccattcaaaatctaagtcagatactctgtgtcatctatgccctgtatgaactttccacttaggccagctacctgttctccccagaagatatattctatatgaattttgagtaattaaaaaaatgt

SEQ ID NO: 399364 - DNA, 633 bp, Homo sapiens
aagcctgggcaatggcgggcgcccctcccccagattttttaaggctgaatagtaagtattccattygctaggtcaacatcaggaaggttttccctaatgtttttgctagtagaacattgctgtaaaacatagttttggatagttataaatgtatgttttttagtttcaggacttacattgcaatttttaacccatttagggatgatttttatataaggggtgagagaagggtctggtttcatgcttctgcatgtggatatttcattttcccaacaccatttattgaagagactgtcctgtcctgattgtatatgtatgttttggtacctttgccaaaaatcagttgtccgtaaatgtgtgtatttatttctgggctatttggttacattgacctatatgtctgctttggtgccagtaccatgctgttgcagttacaatatcattgtagtagattttgaggtcaggtagtttaatacctccagttctgttctttttgctcaggattgctttggctattcaaggttttgtgtggtttcatacagattctagaattattatttttatttctgtgaaaaatatcatggaaatttttataggaaatgcattgaatctgtagattgctattggcagtat

SEQ ID NO: 399365 - DNA, 633 bp, Homo sapiens
aagcctgggcaatggcgggcgcccctcccccagattttttaaggctgaatagtaagtattccattcgctaggtcaayatcaggaaggttttccctaatgtttttgctagtagaacattgctgtaaaacatagttttggatagttataaatgtatgttttttagtttcaggacttacattgcaatttttaacccatttagggatgatttttatataaggggtgagagaagggtctggtttcatgcttctgcatgtggatatttcattttcccaacaccatttattgaagagactgtcctgtcctgattgtatatgtatgttttggtacctttgccaaaaatcagttgtccgtaaatgtgtgtatttatttctgggctatttggttacattgacctatatgtctgctttggtgccagtaccatgctgttgcagttacaatatcattgtagtagattttgaggtcaggtagtttaatacctccagttctgttctttttgctcaggattgctttggctattcaaggttttgtgtggtttcatacagattctagaattattatttttatttctgtgaaaaatatcatggaaatttttataggaaatgcattgaatctgtagattgctattggcagtat

SEQ ID NO: 399366 - DNA, 633 bp, Homo sapiens
aagcctgggcaatggcgggcgcccctcccccagattttttaaggctgaatagtaagtattccattcgctaggtcaacatcaggaaggttttccctaatgtttttgctagtagaacattgctgtaaaacatagttttggatagttataaatgtatgttttttagtttcaggacttacattgcaatttttaacccatttagggatgatttttatataaggggtgagagaagggtctggtttcatgcttctgcatgtggatatttcattttcccaacaccatttattgaagagactgtcctgtcctgattgtatatgtatgttttggtacctttgccaaaaatcagttgtccgtaaatgtgtgtatttatttctgggctatttggttacattgacctatatgtctgctttggtgccagtaccatgytgttgcagttacaatatcattgtagtagattttgaggtcaggtagtttaatacctccagttctgttctttttgctcaggattgctttggctattcaaggttttgtgtggtttcatacagattctagaattattatttttatttctgtgaaaaatatcatggaaatttttataggaaatgcattgaatctgtagattgctattggcagtat

SEQ ID NO: 399367 - DNA, 617 bp, Homo sapiens
ctttctttcacaatatttgtatgctcattcgtctgatcacacccctgctaggcaaaatcagagacaccatcacggttgtcatgagtaaaagcagaatgtgcatctagmtcatttaaattcacctgttagatcaaaatgaagatttcccaaattaattataatggaatagttattctttatataaatttttttttgcaaaaagtctcatgacctgtttcattttaatagtattatcttctgaatgtatacaatatcctagttcacaaaaataatcacataccgatacaagtacacacacacacttttttagccagttggagcaaggctgctcctttccattgctcctgtaaacatcattcccttccactctgggctggcaaagtggaagtgaaagttgctgagctctggagatgggttcatcttgatttcaatctggacaatcagtcaaatggatataatgatatctggtttgcaagattattataaaaatagtaataaaatgtgtaaagtaaaatatctataatatatacaataaactataaaagtgcctggtacatgtgttcaacaaacactagcttctattattgtttcaccatcatactcttcaaataactcac

SEQ ID NO: 399368 - DNA, 573 bp, Homo sapiens
aatgtgacacctgtaggcaatacaactggctctctttctgaagcatatattagaaatatattccagcttaattgtgtgacagggccaaagagccttcccgtgtcatgagtttgtcaaaagaagaacagacttagagtttagcaggagtaacttcctcacttcacatccaagaaaaccaaggttcaatataattaagaccctaccagtatggatacacacctacttccatggcagagctgaaacttgaattcagaacccctgatttgcaggccggaaagtattccactgcacgaaattgtagcaagaaattacaatgatctcttcagtttaccagttatatattttgccaagcaaaattcygcacaactcatatttatttgaagtctatatttaatttttatttattttgagatggagttttgcttttgttgcccaggctggaatgcaatggcacgatctcagctcactgtagcctccacctcccaggtccaagccattctcctgcctctgcctcccgagtagctgagattacatgacaggcacctgtcaccacacccgtctacttttttgtag

SEQ ID NO: 399369 - DNA, 575 bp, Homo sapiens
ttattttacttttttcttaagactgtattataagactggtaaacactgtaattcttaaagctaactaaataygtctcaagttttgctatgtagaggccaaactatattcttaaatcagaggactaaataaaggatcggtacattcttcagggaatgtctaatgtgaaccatacttgctatagatcatgccagggtgatactgggaggacagagctcatgatctaagtttttttttcttctgtatgggaaagtcagaaagcactgggccgctatagagaattgctagaagccaggatgcccagaaaactaaattactgccaaagtaaaacattctgtgttatttataagtgggtgttgtcaggtcagctaaatcaattattcaccatttgttcaatttcgctttgtataaatcttcattttctcatatagcacactcttgatttattgtgaagccatacatagtcagtaatgaggattgaatgccaaacattaaactgaggatggttgcaaaatgcacaagttctgcccctcagctggctttatttttctacatccctcccttttctaatagccat

SEQ ID NO: 399370 - DNA, 587 bp, Homo sapiens
tgttttgttttgtttttgtttttttaaaggcacctagtccagcccacagcataacaggggtttaggcaaatgtgtgtgtgtgtgtgtgtgtgtgtgtgtgtgtgtgtgtgtgtgtgtgtagatagataaatagatgaatattatatataaataaaaggagaaagagaagagagggaaggagagagaaagaaagggagggagagaggggaagaaagtaagaagggagggagggagagagggaatgcaaaagaagaaaaaagaraagccccaattttgtgtgtgtgctgtttctcatggtgtaaatactcccttggtggctcatttcaacctccctgaccatcactattagactgagtgttcacaatcagctcttgaggacctgcacaagccagctccagcacatacctggatccctctggcctctcactgggcagttgattgaaaggaggtagaccagtgtgagactgatggaatgagttgctctttgtcagaattgaccattacgtgtgatatcttgagaagaatcccagctaattaattgtcgagctgtggccaacccttttggtgcacttgacctacaggacaag

SEQ ID NO: 399371 - DNA, 587 bp, Homo sapiens
tgttttgttttgtttttgtttttttaaaggcacctagtccagcccacagcataacaggggtttaggcaaatgtgtgtgtgtgtgtgtgtgtgtgtgtgtgtgtgtgtgtgtgtgtgtgtagatagataaatagatgaatattatatataaataaaaggagaaagagaagagagggaaggagagagaaagaaagggagggagagaggggaagaaagtaagaagggagggagggagagagggaatgcaaaagaagaaaaaagagaagccccaattttgtgtgtgtgctgtttctcatggtgtaaatactcccttggtggctcatttcaacctccctgaccatcactattagactgagtgttcacaatcagctcttgaggacctgcacaagccagctccagcacatacctggatccctctggcctctcactgggcagttgattgaaaggaggtagaccagtgtgagactgatggaatgagttgctctttgtcagaattgaccattacgtgtgatatcttgagaagaatcccagctaattaattgtcgagctgtggcsaacccttttggtgcacttgacctacaggacaag

SEQ ID NO: 399372 - DNA, 605 bp, Homo sapiens
taggagcacatatacttagaattgttgtattttattaatgaattgacccatttattatttctaaatacctctcttcacatgtggcaatatttcttgttttgaagtctgcattgtctgatattcatatagccactcaatctttcttttggttagtgtgatttttttttttttttttttaratggagtctcgctgtgttgcctaggctggagtgcaatggtgtgatcttagcttactgcaacctccgcctcccaggttcaagcaattcttctgccttagcctcctgagtagctgagactacaggcatgtgccaccacgcccgtttaatttttttttttttttgtatttttagtagagacggggtttcaccatattggccaggctagtctcgaactcctgacctcgtgatccacccaccacggcctcccagagtactgggattacaggcatgaaccaccgtgcttggctgattagtgttaattttaatgttagaatcctaattttagtcagtttttcacttactgtgtgcaataggtaaaagatcatttcttacacatcattaagcatttagaaaatagatccattttcaatgacaacaaaaatatac

SEQ ID NO: 399373 - DNA, 583 bp, Homo sapiens
ttctatttgaggtgatttaactatgtctatagctgacatttattagtgctttctctatgccaggcattatgttaggcacttttcatagatcattagcaattatcctctctgaattaccccatgagataggtcctagtattatactactgttatttacttttttatattttagataattgagtcttagagatagtaaataacttttataagtttacccaggtggtaaaatgttttatttcagaactcaatctcttagctatttagctctactattattaatatagttaacgttcacatagatttgcagtttgaggatatgtgtgtatgtctatgtattgtgattgctcttgatgaaatgtatacttgcagttcagattaactttgccatcagttgaaacttgtgcatattttcatatcatctttgttttaggcataacactgtaattatacacagtcatatatgtctacttattttagaatttaaatgcaaaaaaaagcgatatcatttaattacttgccttattgaatcttttttttatcscactttcctttccttatcaccaagttggtattacttttttaa

SEQ ID NO: 399374 - DNA, 578 bp, Homo sapiens
tggactaaaataccgataaatccataagtccactttggtactatacttatgcttgctggaaatatatgcataaaatagttatagttgttatctaagtgaaatttatagcttagggagactatattaattatatattaatttaattatcataaaagtagttatgtaattacaagctgcaataatgtcttcaaagaccattctcttaatcactrtagtattactatcttgccttgactttgagattttctagtgctggaattaatattatttcatcttttattgtcttgttgaaacattccatcattcttatttggttgttttattatgatcaactgacatataagcagacctgaaaaacacttgcttgggaagatcatgatggagattcttggaaatctccttgctattactggtccccatcctactatagtatcatcctttaagagggacagaattgttcctaacatctagatcatgaagatgaattccctaaaagagaattttaattacagaaaaaaataaaaacttagaggtcattcatctgagctttttattatgttatagaaaaaaaaaaatcc

SEQ ID NO: 399375 - DNA, 578 bp, Homo sapiens
tggactaaaataccgataaatccataagtccactttggtactatacttatgcttgctggaaatatatgcataaaatagttatagttgttatctaagtgaaatttatagcttagggagactatattaattatatattaatttaattatcataaaagtagttatgtaattacaagctgcaataatgtcttcaaagaccattctcttaatcactgtagtattactatcttgccttgactttgagattttctagtgctggaattaatattatttcatcttttattgtcttgttgaaacattmcatcattcttatttggttgttttattatgatcaactgacatataagcagacctgaaaaacacttgcttgggaagatcatgatggagattcttggaaatctccttgctattactggtccccatcctactatagtatcatcctttaagagggacagaattgttcctaacatctagatcatgaagatgaattccctaaaagagaattttaattacagaaaaaaataaaaacttagaggtcattcatctgagctttttattatgttatagaaaaaaaaaaatcc

SEQ ID NO: 399376 - DNA, 566 bp, Homo sapiens
cactgtagtattactatcttgccttgactttgagattttctagtgctggaattaatattatttcatcttttattgtcttgttgaaacattccatcattcttatttggttgttttattatgatcaactgacatataagcagacctgaaaaacacttgcttgggaagatcatgatggagattcttggaaatctccttgctattactggtccccatcctactatagtatcatcctttaagagggacagaattgttcctaacatctagatcatgaagatgaattccctaaaagagaattttaattacagaaaaaaataaaaacttagaggtcattcatctgagctttttattatgttatagaaaaaaaaaaatcccaaaggctcggggaggttaaataatccattgaagatcacatggtctatagatgtagactattaagaytgggacaacaggctcccagtccaaataactacagtatcttttaaagcattaacttaagttctctaaacactgaatttagctaaagtcagatccactcctaagaagaagttgtggtaaagcaaaattct

SEQ ID NO: 399377 - DNA, 617 bp, Homo sapiens
tccacctgtttatcctgacattcactactttctccttacccttcctgcctcccacctgaacaatgacatcaaggcaatgacggcaaacagcagcagttggrttgccaggtgatagacttctgaaatgatttctcttctatcaatgcctccagcagctttgtcttcctgtgtggctttatctctcaacacaatcatacaaacaaaaactagaaaatgtctttaatgctgaattagaggagacatttgcatcaaaatgatcaaaaagcattccagattataaaggatttcctagaacctgaatggcatcaaaaagtcttttactgacagcaatggcataagctctggggccagatggatatgggttcaaaactagactctaccacttggaaattaagtggccttggatgagttaatgtaatgtctctgagccacggttccctcatttataaaatgtgaatgaaaaatcgtagaactttccttatagtttattgtgtaagtgtctactgagttgtaagccctcaataaatgtttgttcaatgaatgatcaggtagagattgaacaaggcaattcatatacctgacgtggtgcatggcacaaaataaactgtcaatgtacg

SEQ ID NO: 399378 - DNA, 617 bp, Homo sapiens
tccacctgtttatcctgacattcactactttctccttacccttcctgcctcccacctgaacaatgacatcaaggcaatgacggcaaacagcagcagttggattgccaggtgatagacttctgaaatgatttctcttctatcaatgcctccagcagctttgtcttcctgtgtggctttatctctcaacacaatcatacaaacaaaaactagaaaatgtctttaatgctgaattagaggagacatttgcatcaaaatgatcaaaaagcattccagattataaaggatttcctagaacctgaatggcatcaaaaagtcttttactgacagcaatggcataagctctggggccagatggatatgggttcaaaactagactctaccacttggaaattaagtggccttggatgagttaatgtaatgtctctgagccayggttccctcatttataaaatgtgaatgaaaaatcgtagaactttccttatagtttattgtgtaagtgtctactgagttgtaagccctcaataaatgtttgttcaatgaatgatcaggtagagattgaacaaggcaattcatatacctgacgtggtgcatggcacaaaataaactgtcaatgtacg

SEQ ID NO: 399379 - DNA, 469 bp, Homo sapiens
tattgtgtaagtgtctactgagttgtaagccctcaataaatgtttgttcaatgaatgatcaggtagagattgaacaaggcaattcatatacctgaygtggtgcatggcacaaaataaactgtcaatgtacgatggtattactattacttatagcgcacatcttagtctgcacaaaatacttaagactgggtaatttataacattatacatttattactcacattaatggaggctggtaactccaagattaagacactagttagtttagtgtctggtgagttcccagtctgcttctaagatggtgccttgtttctgtgtcccccagaggggaagaatgctgtgtcctcatgtggaagaagagatggatgggcaaaagggcctagctagttctctgcaaccctttaggacatgattatagcctagtcatgtcttaaaggacccacctcaacgctgttgcattgaagattca

SEQ ID NO: 399380 - DNA, 469 bp, Homo sapiens
tattgtgtaagtgtctactgagttgtaagccctcaataaatgtttgttcaatgaatgatcaggtagagattgaacaaggcaattcatatacctgacgtggtgcatggcacaaaataaactgtcaatgtacgatggtattactattacttayagcgcacatcttagtctgcacaaaatacttaagactgggtaatttataacattatacatttattactcacattaatggaggctggtaactccaagattaagacactagttagtttagtgtctggtgagttcccagtctgcttctaagatggtgccttgtttctgtgtcccccagaggggaagaatgctgtgtcctcatgtggaagaagagatggatgggcaaaagggcctagctagttctctgcaaccctttaggacatgattatagcctagtcatgtcttaaaggacccacctcaacgctgttgcattgaagattca

SEQ ID NO: 399381 - DNA, 469 bp, Homo sapiens
tattgtgtaagtgtctactgagttgtaagccctcaataaatgtttgttcaatgaatgatcaggtagagattgaacaaggcaattcatatacctgacgtggtgcatggcacaaaataaactgtcaatgtacgatggtattactattacttatagcgcacatcttagtctgcacaaaatacttaagactgggtaatttataacattatacatttattactcacattaatggaggctggtaastccaagattaagacactagttagtttagtgtctggtgagttcccagtctgcttctaagatggtgccttgtttctgtgtcccccagaggggaagaatgctgtgtcctcatgtggaagaagagatggatgggcaaaagggcctagctagttctctgcaaccctttaggacatgattatagcctagtcatgtcttaaaggacccacctcaacgctgttgcattgaagattca

SEQ ID NO: 399382 - DNA, 561 bp, Homo sapiens
tatgtgctttgacctttaatttcactctgacatcttccagttaggactctattattgagagcatagtaaacaggatgcccattgtggcgggaactggatttctggggaaggatcctggatttaatctttttaggaaaaatcacataactatgatttattattagcatcttaatgatgtgagctattttaaagagatagtgcttttctcagcagccacctggagggaagaagtggctcagacctcagaaattgtcacttgtgagtattccggagacatggcctcttcctgcccctcagtacacaacagctttcacagcccattgtttcagggatatctttttttttttttttttaatggaaaggacagaagagaaacaagggccccttcctaccaaggtttgtgagaggttaaacatgaagtcaatgtatgtgaaagtgttcagtaagtgcctagcacatgacaggcacccaaggaatattctagaacttatgctgacattttctactatggtccaagtattttctcatgcattmatttattcataaaagtaattgagcatt

SEQ ID NO: 399383 - DNA, 574 bp, Homo sapiens
aatgtgacatgtgaaacagaccgaggtggtaagaaggaatcccaaatttctcacctaagacactaggttcacaatggtgccattttatgacatgtcagtgtatgatttgggcagaaacaggtttggtagagaaggccacgatgccatggatgtgttaagtgtatgatgttttgagttatcaactgaagatgagtcagcagccatttcatctctggaaaactcatagaaactataaatctgttgctattattaagggacagaattcaatacattaaaaagcaatattatttactsctaaatgtatggaaaagaggctagacatttaatgtatacacaactggaatgaagatagtatattagaatataaaagtatatttagaatatgggttttagaatgagacagacctagaagtgccctgccatctactctaatgaccatggacaatttactctacctctataagctcagtttcttttctgtaaagtgggaatgctattatatgcttataaaattgatgaatagattacataatataaatgatcacatatcattattgcgttaatattgaccatt

SEQ ID NO: 399384 - DNA, 593 bp, Homo sapiens
tgcctgtaattatacattgctataacattgcctatagaaagtaattatgtaaagacagtggggaaaagctccattccctctcacttccctcttctcggcacgtttattgagcaagaccctttagggtaaatwctcttttcatgattctgtaagtggctccacactgaagcaggtgataacagatgaccgcctgtggcaatcatcagaggaaggcaccaaccttcggcctttagggagaaataaggtaccacacttttgttacaggtgttaaaagaaaattgttgcctcaaaacagaaagaaagagaacagagacctgtgctgttttcactgtctttacaccaaaaagtgaaaagacaataagaactggaatcagcacacccacaatttgaggccttattttgtcactttctggttgtgtgaccacaggaaagctggtaaatttttttgtgtatggttgttgcaccttcattcttttagttttaatttttattttatttcagtagttttcagggtacaggtggttttgtttacatagataaattctttagtggtgatttctgagattttggggcacctgccacccaggcagcat

SEQ ID NO: 399385 - DNA, 562 bp, Homo sapiens
tgtttgtcactacaagacatccatacktccaaatttttttgtcctgtctatctaggtctcttcctctctctcccttgctggatcctcctgatgttcctaaatctttcaacattagtaagtccctgtgctcacttcttagagatctcatccaagatcatgattttaaaaggaccaatacactgctgactctcaaatcacatttctagacctgacctcttccagaaagtctagactcacatatccagctgcatttccactcagataacaatgggctgctaagtttaccatgttcaaaatggaacccttgaattcacatgctcaatcctgcttttttttctgtgttctctatttcagtcaatagcatcaccattcctgctattgcttgattccaaaagagccagctagatgcctgttacatcctacatctaatccatcagcatactctttttgttcagccttcaaagtatatttttaattggaccaaatctcatcaccttccctgctaccactgtagtttcactcctcatctgagataatatttcttaactgatctttctgcttc

SEQ ID NO: 399386 - DNA, 562 bp, Homo sapiens
tgtttgtcactacaagacatccatacgtccaaatttttttgtcctgtctatctaggtctcttcctctctctcccttgctggatcctcctgatgttcctaaatctttcaacattagtaagtccctgtgctcacttcttagagatctcatccaagatcatgattttaaaaggaccaatacactgctgactctcaaatcacatttctagacctgacctcttccagaaagtctagactcacatatccagctgcatttccactcagataacaatgggctgctaagtttaccatgttcaaaatggaacccttgaattcacatgctcaatcctgcttytttttctgtgttctctatttcagtcaatagcatcaccattcctgctattgcttgattccaaaagagccagctagatgcctgttacatcctacatctaatccatcagcatactctttttgttcagccttcaaagtatatttttaattggaccaaatctcatcaccttccctgctaccactgtagtttcactcctcatctgagataatatttcttaactgatctttctgcttc

SEQ ID NO: 399387 - DNA, 556 bp, Homo sapiens
tgccctcattttttttttcttttctttttttgcttgtttgcttaatttttttttttttgttaggtaaaaaaaatatttttaaggagagtcagtaaactctacttcacatctgggcttccctcatttttttggtttaattttttttttttttttttttaggtaaaaaaagatttttaaggagagtcagtaaactttgtttcacatctggattgtgcctctttggaagtatgggaatcccataaatcttttctgtcaaggatcattgtatccactgggcaaagaggcaagtgaagtgcrtatcagggctgctgcttacagtcagcccagctatcagcaagggaaggaagctggagtgacaggatatgggcaggttagaacacagtttatggaatgctaaggaacaatacccacctcccgctggaaggccagacgtctttagaagggaagtctctctcttcctcaagttcagactaggggtctgttcaaggagtgcctggaggagagaaactgatctcattttagagtagatctaacatgcccaggatagtgagcaaac

SEQ ID NO: 399388 - DNA, 556 bp, Homo sapiens
tgccctcattttttttttcttttctttttttgcttgtttgcttaatttttttttttttgttaggtaaaaaaaatatttttaaggagagtcagtaaactctacttcacatctgggcttccctcatttttttggtttaattttttttttttttttttttaggtaaaaaaagatttttaaggagagtcagtaaactttgtttcacatctggattgtgcctctttggaagtatgggaatcccataaatcttttctgtcaaggatcattgtatccactgggcaaagaggcaagtgaagtgcgtatcagggctgctgcttacagtcagcccagctatcagcaagggaaggaagctggagtgacaggatatgggcaggttagaacacagtttatggaatgctaaggaacaatacccacctcccgctggaaggccagacgtctttagaagggaagtctctctcttcctcaagttcagactaggggtctgttcaagkagtgcctggaggagagaaactgatctcattttagagtagatctaacatgcccaggatagtgagcaaac

SEQ ID NO: 399389 - DNA, 556 bp, Homo sapiens
tgccctcattttttttttcttttctttttttgcttgtttgcttaatttttttttttttgttaggtaaaaaaaatatttttaaggagagtcagtaaactctacttcacatctgggcttccctcatttttttggtttaattttttttttttttttttttaggtaaaaaaagatttttaaggagagtcagtaaactttgtttcacatctggattgtgcctctttggaagtatgggaatcccataaatcttttctgtcaaggatcattgtatccactgggcaaagaggcaagtgaagtgcgtatcagggctgctgcttacagtcagcccagctatcagcaagggaaggaagctggagtgacaggatatgggcaggttagaacacagtttatggaatgctaaggaacaatacccacctcccgctggaaggccagacgtctttagaagggaagtctctctcttcctcaagttcagactaggggtctgttcaaggagkgcctggaggagagaaactgatctcattttagagtagatctaacatgcccaggatagtgagcaaac

SEQ ID NO: 399390 - DNA, 538 bp, Homo sapiens
cccccttggggcttccagacttagagagaagccctggggtagggggtgcagtgacaagccagatcctcccaaggccctgggaggacagcagcagaacttcagtcatggtgctgggctgggtatcagtcccttagttactgaatagtgggagatcccaggattttgaaggagaggtcagagcagaggatggtgacaygggcctatgcgaagctcaggtcagcagccatttaccaaacagcataagcatctttcagaacttcagcagccagtgaggatgtagcagagcctccagccctggctctcaagggcaacacatttttaagtgaaaaagttcaaggggcttagtgttgtaagacttcccagaagaatcccatttggtggagtttgtttattggaaggagtctttggggatgacaaggcacagacttctctcaaggaatcaatagggaaacctaaaggagaacatctgtgagttctacgtctggcaaaagtctatgagtagggtgagcacttgatcatctggtttgtgttgggtggt

SEQ ID NO: 399391 - DNA, 538 bp, Homo sapiens
cccccttggggcttccagacttagagagaagccctggggtagggggtgcagtgacaagccagatcctcccaaggccctgggaggacagcagcagaacttcagtcatggtgctgggctgggtatcagtcccttagttactgaatagtgggagatcccaggattttgaaggagaggtcagagcagaggatggtgacatgggcctatgcgaagctcaggtcagcagccatttaccaaacagcatragcatctttcagaacttcagcagccagtgaggatgtagcagagcctccagccctggctctcaagggcaacacatttttaagtgaaaaagttcaaggggcttagtgttgtaagacttcccagaagaatcccatttggtggagtttgtttattggaaggagtctttggggatgacaaggcacagacttctctcaaggaatcaatagggaaacctaaaggagaacatctgtgagttctacgtctggcaaaagtctatgagtagggtgagcacttgatcatctggtttgtgttgggtggt

SEQ ID NO: 399392 - DNA, 588 bp, Homo sapiens
gggcaattaattaattaatttgtttgtttgtttgttattgcctattttccccctatccagatgtaagctccatgagagtggttggaggcaatgtttattctgttttccacttcaccttaagagagtgccgggaagagggtctcatccatatttctttggatccttttatcattttcctgcatactttcactgagagtgctctcatgtccatcagccagcacttgcttctcttttctgagggctgccccaggctcctgaagtccagcttggattgcctgcatgaaaacatagagagctaaaggctgggaacttgcatagccttagccatttgcyaaggaacggggtgataactgtaaacactctagctcccttgttccctgatcaggaaaacactaatgtgtgatctccctgtctgcagtgctcacctgcaggactttccttgctggttttcttcacggtgtttgtaataagtgcattgtacccttgattgcctttcttccttgccctgtcctacttctccagttctctggaggtttttccaggaatgcttcttaataaacaccactttcacacaaatccttgtgtcgg

SEQ ID NO: 399393 - DNA, 623 bp, Homo sapiens
catctactcttcttatgtttaaagttcagtgtgaacacagctcttcagtgcaaggaaaaagctttgccacttacaagtaagcaggttttatgggttgaatgtggcctgccagaaagacatgtccatgtsctaactctggaaattgtgaatgtgaccttatctggaaaaggggtttttgcaaatgtaattgagtaaaggatcctaggacgagatcattctggattatctaggtgggtcctaagttcagtgacaagtatctttataagagacacctagacaagagacatagggagaaggccatgtcaagacaggagcagagacaggagtgaaccaaccacaagtcaaggaatgcctagggcctccagaagctagaatagcagaggttgagtctccccatgtgaaccttccaaggaagcatggccctgataatcccttgatttagacttctggactccagaactatgagacaatagatttctattgctttaagccactcaggttgcagtaatttggtacagcagccctgggaaagtactgcaacagctgtgtgatcttgggtgcgttacttcctctccctgggccacttaatccccgtttgctagataagagtgataacacctacc

SEQ ID NO: 399394 - DNA, 555 bp, Homo sapiens
ttctgtctggttggcccttaggagttaagggtccattcagtcctttgagtgcattttttcactctcctcatcctgcagaaagtggctgctcagtgacattgctgcattcttaggaaaccaaaayccagaccctagctgcctccttcaccattcctggtgccaccccatgaagctctaacaaaacctgtagaaaggagcctaaaggctccattgagactatcaaaacttcacaagacaaaaatagtacacccaacctttagatgtgaaatattgatagaaatggcatgatttctgcattggcatcatttggacaaaagcacgcttgctgagagatcaagccctctttgcgttgtaagaatcaatgagataaacatcacataaatatagtgttggcacatggagctttcatttctattcttctgacaccagacactctgttgccatggaaattagtccatcactgcacaaacacagccttccttccagaggtgcagaggcaccaaacatgcctgcatttgagaatcaaatttggccaaatgttgtccttctacccca

SEQ ID NO: 399395 - DNA, 644 bp, Homo sapiens
attttctacttttgtgtttcccttwtaccatccatcaacaagctgatacaacaagaacccagaaattgaatcaaattttttccagagttattagactatagctctttatatcttgttgcctgtgccttcttcacttttgaatgtagataagtctaaggatttatcttatagaaaggcttagcccattgagaaatgactaaaatcacttggaagaaaggcaccatatattctgatatgtacatatgtaggcttgcatatacattaaatagttggatgcatattccttgattagtatatatatttatgttgtaattcaaccaatatgtaatgagagcctaattatgagctgaacgctttacgaggagctgtaatgcagcagtaactatgcatagtgtaattcttatgaagcttattatttaataggggatagaataaacagatttttacctatatgtacgtttttagaatctacacatgacatttgcacattgctacttggatttttgatagataaatataaacctacctggatatatgaaacacttgacacaaattgtatctatttattcaacaaacattaagtgagcatttgctacagtacaagacaatccttagaggtgacacattctcctggttctggggca

SEQ ID NO: 399396 - DNA, 573 bp, Homo sapiens
aaataatatatgctaaaatgcttctctgtgccacaaatattgaccttgtttaataattgatgatggactccagtactaccctggaaccatgctgacacaggtttgtgccctttccactggcctatatttatagtttttatttccttaagttaaaatttaccttaatttctttgtggaaaaatattttcccccaggactctaatataatactggaaactgaaatcagtaaggcaggtatagtagagataaaaggggggattcttactccatcattataaacaaaaccaagcttattttctttaaatgacattcctgacatgtcccttttttcttcataatttttcaaaggcttaccaattgccaaagaataatacaaaaaaaaaaaataagacttagtgaagacttacctggtgccagtttctctataagcactttacttgtattgcttcatttaatactcaaaaagttttctttactacagataagaaaactagacacattaagtaatgcatttaacatacytagaaagtagtctgaatcaaaaccttaggctctaaatgactataataaacc

SEQ ID NO: 399397 - DNA, 585 bp, Homo sapiens
gatagtgtcttgctatgttgctctggctagtcttgaactcctagccamaaataatcctcccacctaggtctcccaaagtgctgggattacaggtgtgagccaccatgtccagccttgaaaacacatttccgataatattctttgagcacctggaactaccagtgcctaaagccagtatacacttggactttcttgtgacatgaattaataaatctccacaccgtcccttaaaaaaaataaacagtagacatgggtgcctgctccatataaacacagtgttgattaatatgatcactgtagactttactgtatattccaatgcacatcaaatatctacctttttctgtccctttgctccaatagattctcatcctaaagtgtcctttgcacatatctttatcaagcctttatcatttgaagtctgaaccttgcttcagaatcgtttgaaaataacgtcaaggagcaaaaactaagtttattagtaagaggcagaatggaagatactaagaatagagaagaaggaatattacgccttggaatagatttgactcaaggtcagaatcattaactaattcattgaacaag

SEQ ID NO: 399398 - DNA, 585 bp, Homo sapiens
gatagtgtcttgctatgttgctctggctagtcttgaactcctagccaaaaataatcctcccacctaggtctcccaaagtgctgggattacaggtgtgagccaccatgtccagccttgaaaacacatttccgataatattctttgagcacctggaactaccagtgcctaaagccagtatacacttggactttcttgtgacatgaattaataaatctccacaccgtcccttaaaaaaaataaacagtagacatgggtgcctgctccatataaacacagtsttgattaatatgatcactgtagactttactgtatattccaatgcacatcaaatatctacctttttctgtccctttgctccaatagattctcatcctaaagtgtcctttgcacatatctttatcaagcctttatcatttgaagtctgaaccttgcttcagaatcgtttgaaaataacgtcaaggagcaaaaactaagtttattagtaagaggcagaatggaagatactaagaatagagaagaaggaatattacgccttggaatagatttgactcaaggtcagaatcattaactaattcattgaacaag

SEQ ID NO: 399399 - DNA, 631 bp, Homo sapiens
gcttttctgaggccatattgatcttgcccaggattcaattttagacaaacaggcgacataatttatgtaaactgggcaggtaattaaactcttctcccaggcaaaaaggtcagagcagaatatttaaagtttcatttctaagtggaagcagttagctaaaaaaaagagaaagaaatctcactgggattgtcatgttgccaactgttaccctataaattatttggtccggattatcttgctaggaataggtttgagttctctttgctgaaagagctacaaaaggtgagatactcattaagcacaaagtttcatgtttaaaatgactrtggagtagaatacttagtgttagactgtgaaaaaaagttcaataactttttcagagtgattttaagataatatcagacttaaaccatttgagagtaatttactaacatgatgatgtcctatcaccctcaaataattcagtgttcattttctataaacaaaaacattctcctgtgtaatcactaaacaactatcaagatcagaagttaacattactatcatctaatcctcagaccccatttaaatttaagtgttgtaataatgtccttcataccaaaaagatgcattttaattttgtgtttagata

SEQ ID NO: 399400 - DNA, 553 bp, Homo sapiens
caggtgtataaaaaaccattggttttagcctagtttcacatttgaaacacctgggttgctttggaatgtacagatgtctggcctcccatccyctgagactcctgttaagttggcccaggcatggcctgacacaaatattttttaaaagctcctcaggagacttgattcattgaaaaccactgatccaaaaaataaaacgtttaacatataccacttatcaattctgtccattctttagtaaacatgcagatatttttcatggcttcttgtagaagataggcaataaataaggtcagtacattctgctgaactgatgcacctgaggtcactgcaatggtgcaaagaactgctgctttggttcatttaatattaatgacccctgatttgatgaattctcagaatgtgaactccttaacgacagggactctatcagacaggatcttggaagaaaacagataacatcctcaaattggatactttgatgaaagtttaaatatctgttttcaaatgtgttagcagggtgtgtggaaacgctaaggaataattaccgaaa

SEQ ID NO: 399401 - DNA, 616 bp, Homo sapiens
tatacagagaatgaaagcaggtgatgtgataaagagtgatggatggttttgttaatttgggaagccaggaagaactcttccaaaaggtttatgtctcagctgagatyggcaggtctgaaggaaccagctatgagaaaatcaagggcaagaaaatttcccatagtgtggaggctctaaggcaggaattctaggatgtgagagaaaactgagaaagctaaagcatagtgagctaggagaacagttataaaatagaagttaaaaaagcatttggggtagatcatataggattttttgcccatccaagggtgatgggaagccataggtaggttttgagcagggaatgcagtgatctgatgcagtttgaatgcattactctggctgctttctggactgtagtggggaggagggagaacagaaaaacctactaaagcactgttgtagggataaaggagaagatactggaggcttggactgggggtgatggtagtggagcagaagagaagaggatactctcaggccatgatttggaggtaaaaggtgtcaacaggatttgctgaattttcagacgtgggacatgcaggagacaggaatccaggataaactcactgatataata

SEQ ID NO: 399402 - DNA, 620 bp, Homo sapiens
tggggacctactggaggatggaggctgggaggagagagactctcagaaaaaataactaatgggtactagatctaatacctgagcgacgaaataatttgtacaacaaacccccatgacataaggttacctatataacaaaactacacacatgccgctgaactcaaaataaaagttaaaaaaattaaaaaaattctaaatggagggaatagcatattcaaatgctgtgaaacraagaatgagcaatattttgaagaacaaaaggtagtctagcataggagtattagacaccgtggtgtaaaaatgagtaataaaattatatctcttgaggaacatttcatctgtgatgaaagagaggaatgtatcagaggatcagaggaaaaatgtgttaagtgatacgtattaatgtgtgcaaagtcctaaggaggtaaagcgagagtgactcggtttgcctggcagtcaaggaaggcgtcacacaggaggtaacttctctcttttgcttgatcataagtaccctgaaggcggagatcttgtcttacattttttttattatccattttgcctagcatagtagcaggtacccaaggagtgttggataaattcctgatttaatgttatttgtt

SEQ ID NO: 399403 - DNA, 527 bp, Homo sapiens
ttcacatcctgtcattctgtgagcaaagggatctggagtagattgattcagaaattggaaaagggtggagaatgggttcaatccaccaaccaggagttctgaaattgaaaaaaaaaaaaagagagagagagagaagtctttagatgtgtacawgtgttcaagaagttttggatttctgctggtttgttagccaataaagatctggcactgatcttccccatcctgggagcaatgaggacccaccctggcatcagtgaaggagcaccatttcctgcagggattggctctggtgtgctaggaacaaacagtgctaggaatcaacagcaaaatatgtgcaaatgagatggaaataatggaagtcagtgatgtgggtggcagagggccattgttttagacagagttgcaagtgattgaacaaatctagggtgtgagccatggagatgtctgggaaaacagtattcttggtagaaagaatgttatgtgtaagaaactcaaggtgagggtggtcatggttgaaataatagtga

SEQ ID NO: 399404 - DNA, 442 bp, Homo sapiens
aatccataatatttaacttgtttatttgtttgttttctggctcattgactatttcccctattagaatggaagctgtcttactttttcaatgtgcatacggtgccgaagaaggtctaggcaaagccttgtccctgttgctgtcaagccactaaggagacaggtgtttcaaggcacaacccaaatacagggagaagtgcttaggtggccaaggaaggcttcaccagtacaatgaattttgacctgggctttgaatactgagtggtttgctgatggagaatgtgggctacagcttttccatgtgttgaataatgaagggagtgttttgtgtggtgtgcrgtgtgcagcagctgaaggagggagagagatattcgcagacagctgcgggcagatctcacagcatttggatgatgcaaagtggagagtgtgtcaacctcccctaata

SEQ ID NO: 399405 - DNA, 500 bp, Homo sapiens
tccatctggattctggatagtttgaagtataaaatagaagtgaagggcatggtagaaagagcccaggctttgcattttgatggaggtgggtttttcyttctgagtaaccatgacgaagccacttaactttctgagactcagtttactattctatgaaatggaaataattatggtacctgggttataggtgatactgtaatgtatccctgtgtttagcgcttaacatagagcaggttctcaactgggggcaattttgtcctctagaggacatttgccaattactagcattttttattttcacaactaggaaatgttatggcatctagcagatagaggccagggttgctgctgaatatcctaaaatgcacaggacaactcctcacaacaaagaattacctgaccccaaatgtcaacaatgctgatgttgagaaaatctgccttggagtaagcttggccatctggaggcactaaaaagtgtagctattaaaatataattataa

SEQ ID NO: 399406 - DNA, 500 bp, Homo sapiens
tccatctggattctggatagtttgaagtataaaatagaagtgaagggcatggtagaaagagcccaggctttgcattttgatggaggtgggtttttccttctgagtaaccatgacgaagccacttaactttctgagactcagtttactattctatgaaatggaaataattatggtacctgggttataggtgatactgtaatgtatccctgtgtttagcgcttaacatagagcaggttctcaactgggggcaattttgtcctctaraggacatttgccaattactagcattttttattttcacaactaggaaatgttatggcatctagcagatagaggccagggttgctgctgaatatcctaaaatgcacaggacaactcctcacaacaaagaattacctgaccccaaatgtcaacaatgctgatgttgagaaaatctgccttggagtaagcttggccatctggaggcactaaaaagtgtagctattaaaatataattataa

SEQ ID NO: 399407 - DNA, 590 bp, Homo sapiens
taactgcacctctgcatcatcaatgggcaaatgactgyacccacgttcctgcacctgtattctgagaagcttagattaaatgatttctgaaagtccttaaaatagtagtaattatatacaaatgatatgcaaagtactttatatatgtgtgtgtatgtatatacatttattttatacatatatatatatattttttttagacggagtctcactcacatttttaaagcccattcatttctgactcttaaggaccattgacttctgggtccaggaagccctggacccagaagtcgcccaggctggaatgcagtggcgcaatgtaggctcatgcagcctccgcctcccaggttcaagcaattctcctgcctcagcctcctgaatagctgggactacaggtgtgtgccgccacacgcagctaatttttgtattttagtagagacaaggtttcaccatgttggccaggctggtcttggactcctggcctcaagtgaccctcccacctcggcctcccaaagtgccgggattacaggcctgagccactgtgcctggcccatattacctcatttaatatgtgccatgccctgggaatt

SEQ ID NO: 399408 - DNA, 461 bp, Homo sapiens
aatataacctagcaatttatttaaccttccagtgcatcatataatttttatgagtattaaatgaaattagtctagtaaagttcttagaatacttcctagcatgtagtagcacttgaaaagttttattttttattatgatgggacttatttgcaatgtgtatgggagcattcttgactgcctcaatgactgggggcactatgctgacattttgaactcagcttcctgaaatacttaatattttaaagtgtatgcaacaggcttgcacaaagggaatgtacccccatgtttcccttgttgagaaacacagctaggtcctatactgttggttgcataatttttaatcattactaaagatgctgtgaggtcagtaattattacccctaattcacagatgggaaaactgawagtttcaataacttgcacaatgtcaaaatgctatgagtaggtattgctcaggttt

SEQ ID NO: 399409 - DNA, 576 bp, Homo sapiens
atgagcatccacagtggtggccagggacattgcaaatttcctacctgagtatgcattacccagcatttgatttagtctgtgtttacattcatttattcattttaaaacactcattgtctcaattcaaggctaacacattgtgctaaaaactggatcaaaggcaaatctaatgtattattttcttcaaagacattctgatttaatgaagaagatgcgtaagaaaggattgcagtgcactgtggaaagaacaatgatagaagagtttacaaggtgcaaagatagcttaaggcaagagatgctgaatctcccccagagagtccaactaggcctccctatttcagcagtggtttgggcattcgtcaggtgtgcatcaagaaacctatgcagcaagagaggatagcaggtgcaaagtaagaaagcctcygaagctcagctccaagtaccttggcaaggcatgaacaaggctgtggggagaaaatgggaaaatgtaagcctggagagtaggcaggggcaagatcagaaagggagtttgctgaagagttccccttttatttggcagttaataaagaaccagta

SEQ ID NO: 399410 - DNA, 537 bp, Homo sapiens
ttgttgtccttgaaggcattctagcaggacaagatgtgtaagtggaaggtaatgataggaataaccctgcctctgtgtaagcctaggctagcgtgtgtgcttgtgttttcatttttaataaaaaagttttaaaagtaaaaaaaatgttaaatagaataaaggcttataaggatatgaagaaagcaaatatttttgtacagttgtacaatctattgtgatttaaggtaaatgtttattacaaaagagtcaaaaagtttaaaaacattaaaagtttattaagtaaaaagttatagtaagctaagattaatttatcattgaagaaataacatgtaaagtaaatttagggtagcctaaatrtacattgtttataaagtctacagtagtgtacagtaataaatatcctatgccttcacattcactcaccactcactcactgactcacccagagccacctctagtcttgcaggctccattcgtggtaaatgccttagaccatttttttatcccttacaccatatttttactgtacattttcta

SEQ ID NO: 399411 - DNA, 621 bp, Homo sapiens
ccatctataagccaaggaatacgacctggaacaaatctttccctcacaatcctcagaaggaaccaaccctgctggcaccttgattttgaacttctggcctccagaactgtgagacaataaatttctattgtttaagcctcccagtttgtggttgtttgctctggcagtcatagcaaactaatacaaatgtcaaggaattacgatgctaggcttcggatggttgatccacgtggctgccgctagttgctactgttggtgccttgcrcttatacccttggatgccttttaccatttctatgagcctctccccacttcattgtgctttatcttctttctagatgacagccctccagaaaggagcaacttttctcttacttgcagacagtcctttgaagtttacaacctcccttccagtgcccagtggcctttgactgatgactgaagggtacaggagtaggaattgcccactctctgttctctgaggtggaacctaccctcaagagatctcttgcactataaagatgaagctccctttctcaggacatcatctgagatctccctcttgccctacgtcttccattcctttaccagattctcccaggagctgtgcctttgtaagtc

SEQ ID NO: 399412 - DNA, 621 bp, Homo sapiens
ccatctataagccaaggaatacgacctggaacaaatctttccctcacaatcctcagaaggaaccaaccctgctggcaccttgattttgaacttctggcctccagaactgtgagacaataaatttctattgtttaagcctcccagtttgtggttgtttgctctggcagtcatagcaaactaatacaaatgtcaaggaattacgatgctaggcttcggatggttgatccacgtggctgccgctagttgctactgttggtgccttgcacttatacccttggatgccttttaccatttctatgagcctctccccacttcattgtgctytatcttctttctagatgacagccctccagaaaggagcaacttttctcttacttgcagacagtcctttgaagtttacaacctcccttccagtgcccagtggcctttgactgatgactgaagggtacaggagtaggaattgcccactctctgttctctgaggtggaacctaccctcaagagatctcttgcactataaagatgaagctccctttctcaggacatcatctgagatctccctcttgccctacgtcttccattcctttaccagattctcccaggagctgtgcctttgtaagtc

SEQ ID NO: 399413 - DNA, 621 bp, Homo sapiens
ccatctataagccaaggaatacgacctggaacaaatctttccctcacaatcctcagaaggaaccaaccctgctggcaccttgattttgaacttctggcctccagaactgtgagacaataaatttctattgtttaagcctcccagtttgtggttgtttgctctggcagtcatagcaaactaatacaaatgtcaaggaattacgatgctaggcttcggatggttgatccacgtggctgccgctagttgctactgttggtgccttgcacttatacccttggatgccttttaccatttctatgagcctctccccacttcattgtgctttatcttctttctagatgacagccctccagaaaggagcaacttttctcttacttgcagacagtccyttgaagtttacaacctcccttccagtgcccagtggcctttgactgatgactgaagggtacaggagtaggaattgcccactctctgttctctgaggtggaacctaccctcaagagatctcttgcactataaagatgaagctccctttctcaggacatcatctgagatctccctcttgccctacgtcttccattcctttaccagattctcccaggagctgtgcctttgtaagtc

SEQ ID NO: 399414 - DNA, 568 bp, Homo sapiens
gttataagcatgatgcaacataattcccagcaggtaagtttaatagttcacacataaatctcagcaggtaagtttaatacttagcatgggcttttacatcttcttcttatgctccagaagcattaaggcaaactgtggaacttgtagcaaggaagtgactttttcacctgtggaatttggctcagtgttcattaaatgctttggaatttaaagtgattttttttctttctttaaaatgtctaaatgctgtgttgataaatgtcacatagaataacgaatgtgatggaatgtgctgaggataatgggagttactttctagttcacctgaaccatgacttgtctacatttagtaagaataatgaatgtaatttaatacagcacctttgcatggaagtgactcaaaacacctttcaaagtgaatattaaaatgctgrattatgcaataaagacatagatttaagtagataataatggatcacatacttacaaaagcacacagtgcggcagagggtacatttttaaaatatgcattatattgttattaggtagaaggatgaacacagaaagt

SEQ ID NO: 399415 - DNA, 600 bp, Homo sapiens
agttgttgccttttaactcatagtcaagcttcattctttcaacgagaaacttgtgatttacatttacttgctaatattttgtagtttggagatccttgtgggcattattctaactaatatgtagacacttacatggaaatttttggacataatattaaatgagtggtatctgtgaaattggttgtattaggtggcttgactaatttttttctataattgcatatgggctgcattaaaaaaaamcctgcattttcctttatgctggattgtaaacaattatattacaatgtataagacatgtttttccctcatatgttagacttttcttagtatttcatatttatgtgtagtcattttgtgatttttaaaccagaatttggtttaaaaaatatggttataatatatgtgtgaaatagtttggtgtttaccttatgaaaataaaggattgtaggtaaggtttcctgtgcaccttataccagaattcagtataatacactactttctgttttcaaacagataaatcataatatagtctgaattgtctgtaagatctatctcagaaaccacattcttgacaactatttacttttgaatagtttg

SEQ ID NO: 399416 - DNA, 520 bp, Homo sapiens
caggctccttacaactaatgaagactcttgtctttcatccgaaagctctgctcaatctcaggctttagcaccaatgttatggctgttcaagggattttaaaaagccccagattagtcattctggggatacagaaccaactttctcttgcttcacccttacttttgtcttcagtcccagtgactgggcctctgccttgactgagattaagctctaatttacattttggttgtaggtacctagctcccctttytccccctgcatcataatccttgtgtcttccgcgactagttccttggggccccagttctagctacatgtgaatatttattcgatttaacaaaaatatattgagtagctactatgtgccagattattttaggtaaggtggtagaaatacagaaataaacaagatacagaaactttatgatctcaaggaactttaagtctacacaatgagacaaaaatacatgtataaattatatacacaaaataaacaagtaagtcaagggagaccccatt

SEQ ID NO: 399417 - DNA, 549 bp, Homo sapiens
cttttatctcagtaaatggcatcaccattcattcaatacccaagttgactccatcctcttcctcaatcctcatgcctagccaaccacccggctctcttgtgtctgtatagggtgacagactcttcctggtttgcccagaactatcccagttttagcactgacaaccccctagtctcaggcatacaggaatgattcgtcaccctatctctagctctgaaatgtttctcaaataatttataattttacttctcttcatttctaacttaatttatcattctttttttttttttttttttttttggaaagggagtttcgcccttgttacctaggctggagtgcagtggtgcgatcttggctcactgcaacctccgcctcccaggttcaagcaattctyctgcctcaacctcccgattagctgggattacaggcatgcccaaccatgcccagctaattttgtatttttggtaacgatgggttttctccatgttggtcaggctgctctcgaactcccgacctcaggtgatccatctgccttggcttcaccaaagt

SEQ ID NO: 399418 - DNA, 594 bp, Homo sapiens
tactttctttctaacacaaaataatattccattgtacgtatagcacattttggttgtccttttaaccattgacagggacttgggttgctttcgcttttgggctattgtgaatgatgcttctatgaacacaggtgtgtttaaaatgtcttgggtatatacccagaaccaactgctggatcatttattcattttatttttaatttttttagaaactgccatactgttttccacagtggctatgccattttacattcccamcagcagtgcacaaaatccagtgtttccacatccttaccaatgcttggtattttctggattttttttttgatagcagccatcctaatgggtgtgattaattttatttttatgggacaaactttaagcattattcaggggcatataacatattacacaatgtgtgaaattggctcctttaaaaggttcttaattgtgcctagagatttgcaataaatgatttgaaacttgaaaactgtttagaacagtgatttgtgcacagtaagcttccaattatgttagtttctttgaggaggatgttgatgaagaggatgaggaggatgaagaggatgaggataa

SEQ ID NO: 399419 - DNA, 594 bp, Homo sapiens
tactttctttctaacacaaaataatattccattgtacgtatagcacattttggttgtccttttaaccattgacagggacttgggttgctttcgcttttgggctattgtgaatgatgcttctatgaacacaggtgtgtttaaaatgtcttgggtatatacccagaaccaactgctggatcatttattcattttatttttaatttttttagaaactgccatactgttttccacagtggctatgccattttacattcccaacagcagtgcacaaaatccagtgtttccacatccttrccaatgcttggtattttctggattttttttttgatagcagccatcctaatgggtgtgattaattttatttttatgggacaaactttaagcattattcaggggcatataacatattacacaatgtgtgaaattggctcctttaaaaggttcttaattgtgcctagagatttgcaataaatgatttgaaacttgaaaactgtttagaacagtgatttgtgcacagtaagcttccaattatgttagtttctttgaggaggatgttgatgaagaggatgaggaggatgaagaggatgaggataa

SEQ ID NO: 399420 - DNA, 564 bp, Homo sapiens
gggaacacagccatatcaacttgcttatggatggtctgctttcagaacagcaggatcaaatagtttggacagatatcttgaggcccatagcctaaaatatttaccatcttactctctaagaagttcagtgttccctactctaatgctcttttagagagactcaaaatacatttgtatgctaaaaactctgagaagttttgtactcaatacatctttgaattctgtttaacccaggacttctgtggtagrcagtttctaagatggccctcagtgactcctacctccggctattcatggcctgtatactcattcctctccctctgagtagaggttggactgaataattttctttctaatgaatagaatgcagcataaataatgggatatcattttagatgctggattataaaaatatctacgtttttgtctgggacactctttggttctctcttgctctaagatcaccgactaccatgttgtgaacacactcaggaagcgtctagtgaaacccgcttggtgaggatccaagatgtgcagccacatgagtacacttgaaaagggagg

SEQ ID NO: 399421 - DNA, 547 bp, Homo sapiens
gtttgcagaatgaacacttgttgtttcttcccctttcttccttttgtcttctgtgcattcttggctttgaatgtgaactggttaggataggtggctatattaaatcaggacagttttgttagaaggggagggtgctctcacagtaggatagcaaggccaaccagggatagaccctarcaaacaagggcacacattcatcctggttgggggttataagggtttacatcaggagtgttggtatatgctctgacttctcataaaatacttttctgtgggttgctcaatattgctaacgagatcatgcaataaaagataataaacataatacttacagtggctatcttttatcgagtgcctactttatagtactgaatgtgtagagtaatgattaacaacattggattgcttatcacaatttgatagggttatcaactaccatgtctcagtctttgataaatataaagcactgttacagactaagcactcaaagagatgagctattgttattctgtacatagtcctttatatacataacactatgtaatcc

SEQ ID NO: 399422 - DNA, 572 bp, Homo sapiens
ctctgcaacctccacctcctgggttcaaacgattctcctgcctcagcctcttcagtagctgggacttcaggcgccacacccagctaattttttgtattttaagtagagatggggtttcaccatattggccaggctggtcttgaactcctgacctcatgatctgcccgccttggcctcccaaagtgctgggattacaggcatgagcaaccacgcccagsctaacaatacttttaagagtctaattcttctagtcactagagaatcagtggtaagttacacagccatggaaatatcttgttttaggtaaaatagacaataaaagtgtgaacaaaaaaaaagaagaaaatatctgatcattataataccctaaggaaaataaaacaagatgatccaataaagaattacttttagagggtggaggaagaaaatctattacttgtatgtccaatcatgttttcagctactttcttttcttgtcccacaaactctattttggaacattaagacaggtcgacctaacctgactccagtttgttttctcccctggcatgaacattggcttagactacata

SEQ ID NO: 399423 - DNA, 572 bp, Homo sapiens
ctctgcaacctccacctcctgggttcaaacgattctcctgcctcagcctcttcagtagctgggacttcaggcgccacacccagctaattttttgtattttaagtagagatggggtttcaccatattggccaggctggtcttgaactcctgacctcatgatctgcccgccttggcctcccaaagtgctgggattacaggcatgagcaaccacgcccagcctaacaatacttttaagagtctaattcttctagtcactagagaatcagtggtaagttacacagccatggaaatatcttgttttaggtaaaatagacaataaaagtgtgaacaaaaaaaaagaagaaaatatctgatcattataataccctaaggaaaataaaacaagatgatccaataaagaattacttttagagggtrgaggaagaaaatctattacttgtatgtccaatcatgttttcagctactttcttttcttgtcccacaaactctattttggaacattaagacaggtcgacctaacctgactccagtttgttttctcccctggcatgaacattggcttagactacata

SEQ ID NO: 399424 - DNA, 594 bp, Homo sapiens
agctgggtggttctggctaggagtctctcatgaggttgcagccaagttgctggctggggctgcagtcatttgaaggactgggggatatgttctcaagctcattcaggtgactactgtcaagaggcttcacttcctctccatgtaagactctccacagggttgttcccagattctcccagacagagtaatctgagagagacagagaacaaaggggctcctccagcacaccaccatgcaccagccaccaccacatggtcattaaactgggaatcatctttgactgctctctcactgttatcctccatgtatcatcaatcacagatctcatccttctaacctcctcagtgcctctcagttcaagccacttctctccatcctatttttaacaactccaagatgaggtgctcatagatagatagttacagtagttataatattaaaaaatggtacwcattgattgagctcctattatgtataacagcatcattgtagtcttctcaccaaaattcagaggtagctattaccccttttgacagaggaggacactgaaactcagagggactgatggacttgcccaggttcatacatagtaga

SEQ ID NO: 399425 - DNA, 591 bp, Homo sapiens
tttgttggtgggtggaagggataaagggttaaatatattcattcttccacttaatgaactagggtttggaaaaattacataatgtccccaagccttgctcttctcatctgtaaagcaggataacacttacctggttgggcttgttctgagaagtaactgaaatagcacagtttccttttcccttacttgcctttgttcacaaagcacccaactgcctttaaatgccaatttcccaaatatatcttaaagaaaaccccacagggaagtacaaaagcccattgttgggcctattcaaacataatgcaatattccactccattttctgggctcctggtaatgtctacccacgacrgccttccatacctcattccaaggtgttgatcacacttctgggtgccaaccacggtgtctgtacattcgtatcttttaatcctgcacaataaagccttcaattgcatcctacatcaaacaactactcccttacctctcatttattttctgtacttcccaaagccacactatctcctatgatgctttttatgtgaattctaagacttgccctcccagtttagacatctacctggtgggtac

SEQ ID NO: 399426 - DNA, 595 bp, Homo sapiens
actctgctgttttcttagccctagacatcaaggtccctcatgccttccctcagtctcactcctggaggggatgatatcacaaagaggtagctgtcttaaccctgggtatcaggstctgtgtgcagcactcctaggcagtgaaaagatcttggggagtatgattggccaagcaagtagaggccaggtcctcgtgagaggacttccaacctccacaaatatgctcgccttgggctccaggccagccccacaccagccaagatgttttacctgaaagaattaggtagtctaagacattgggcttccctaacaaaacagcatgtacctaaaatctgccatgagatgattccctctgatgatttggtgctgtctgtgtaaagcaagtaacctttttacaagtctggggcacagaggaggtcccaagaatgacagcgactgcctttttcatgagcctgaattacaggtctgagagatggattttagtggattcaaagcaagtaaagtgacatccttttctcacctatgtgactgtcatactcgacataaaagtagctgagatgaccaggtccataaattctataggaagtggacatgatga

SEQ ID NO: 399427 - DNA, 595 bp, Homo sapiens
actctgctgttttcttagccctagacatcaaggtccctcatgccttccctcagtctcactcctggaggggatgatatcacaaagaggtagctgtcttaaccctgggtatcagggyctgtgtgcagcactcctaggcagtgaaaagatcttggggagtatgattggccaagcaagtagaggccaggtcctcgtgagaggacttccaacctccacaaatatgctcgccttgggctccaggccagccccacaccagccaagatgttttacctgaaagaattaggtagtctaagacattgggcttccctaacaaaacagcatgtacctaaaatctgccatgagatgattccctctgatgatttggtgctgtctgtgtaaagcaagtaacctttttacaagtctggggcacagaggaggtcccaagaatgacagcgactgcctttttcatgagcctgaattacaggtctgagagatggattttagtggattcaaagcaagtaaagtgacatccttttctcacctatgtgactgtcatactcgacataaaagtagctgagatgaccaggtccataaattctataggaagtggacatgatga

SEQ ID NO: 399428 - DNA, 606 bp, Homo sapiens
agactgcattatcaaggaggttaccacaggggattactgaggctgaatgatgttcagaaactctgggagacagtgtggagcatgtctcatcattatcctactcacagaggaagggatatgagttattacctaccacttgtcattaatcatttgttgaaggatgatgagatgaacattaactcttcatacctcccatttgcccacctataggagcctgtgcaccctgagagccaaagaaagcctcagacagggtagaaggagcataaaagtacaagacagctgggttagcatgcacagaaatggtaaacataatcaagtccagctacctttttcttttcaggaaagggagaatgatctactttttagaaagatataatatttgaaaaatcaacatttctataatttataaaactgaagtgaacaacatttyctcagcacccatccttagataaggggaagaaaggagtagatgttagaataaaatcagcaatggttgcacccccagatgaatgtgtgttcattcactttcttttaatctctatcccatctaatgctctatttttttattgttcttgttcagcttccaaattattttattttacttta

SEQ ID NO: 399429 - DNA, 629 bp, Homo sapiens
atggttattatgtgttatcgaaatggcaaattaattattcaaaagctgtgtttaagatataccagagatgtaactgaggaggcctctttgttcctaatttgcagtaagcattgcatttctggccagtcagtatttatttcaagtataataattatcttgttaaacccaaatctattaaattgaaatgaaagtcaggaattagtgctggagggtggggaagggtttactcaggcgatgttgcgagcatcctaaaccaccagcctcatgactctcacctcaccgtgaggatgccaaagccagcccctaaagcataactgcattgataattgttcattatccagggacagagccacctactatccttggctcaagtaactctcccttggttataaacttttaacrtaatgatgagaaagacagccactgtttatcagtgcctcttacgtgacaattgctttacatccattatctccagttctcacaacaatctcaatttacagatgaagaaactgagacttggaggggttaaataatctgctgaaggtcacatatgtatagtcagtcccttggtgttcacaggggattgattccaggaatccctgtggataccaaaatccacagatgctcaa

SEQ ID NO: 399430 - DNA, 567 bp, Homo sapiens
cccctggcaacagccagagacaagccagagaaagaaaggactaccatccacagccctggaaattctgctctttaacgcagcaaaaagaaacaccaaatcagagtggtgattcagtggcactaggctgcaggaggtacatccacaagttccccaggcatgaactcctagccagcctttcaaaactattgggatattccttttgggaattccccaatttggaacaggcagttttctatttgtttactagagccaaggcaaatctgggcttaagacaccatctactgcccaaaaagaagtagcaacwcagcaggaaaaaaaaaaaaaaagatttcaataggtaaattacaaagaatttctaagcaaacatacccagtaaaaaataaaacaagccatacagagacgactaaaataaataatccttcaatgcaaaaacaaagatgtgcacaaaaaacaacagcaaacagggaaccatgacttccccaaatggacaaaacaagggagagtgactgaccctaatgagatggcaatatgtgagctctgaccaagaatttaaaatagcagttttag

SEQ ID NO: 399431 - DNA, 621 bp, Homo sapiens
caaatctgtcaaaagcaataatagtacagccatttgttaagaaataggcagtgtaaaaatatgtaaattgagacaacaaaaagttaaaatgtgggagggatggaattraattgtagaattctttaaaagctgttttctttctttgttcctgttttttttttagtgatctaaggtaagttgtcatctgtttaaaataatttgttatatctataagatatttttgtaaacctcatggtaactcaatgaaaaaaaatctgtaatagatacactaaaaataaaaagcaatgaattcaaacatactacccgagaataacccttaaccacaaaggaagacagtaaaaaaggaacaaaggaagagatgagttacatgacaaacagagaacaagccacaaaatggcaatagaagtacttacttatcaataacaactctaaatttacatgagctcaattctccaaaactaaaagacatagaatgactgaatggataagaaacaagactcaattatatgctgcctacaagaaacccacctcacttatacagatacagactgaatgtgaagggatggaaaaagaaattctatgcaagtagaaaccaaaaaagagcaagagtggttatacttc

SEQ ID NO: 399432 - DNA, 621 bp, Homo sapiens
caaatctgtcaaaagcaataatagtacagccatttgttaagaaataggcagtgtaaaaatatgtaaattgagacaacaaaaagttaaaatgtgggagggatggaattgaattgtagaattytttaaaagctgttttctttctttgttcctgttttttttttagtgatctaaggtaagttgtcatctgtttaaaataatttgttatatctataagatatttttgtaaacctcatggtaactcaatgaaaaaaaatctgtaatagatacactaaaaataaaaagcaatgaattcaaacatactacccgagaataacccttaaccacaaaggaagacagtaaaaaaggaacaaaggaagagatgagttacatgacaaacagagaacaagccacaaaatggcaatagaagtacttacttatcaataacaactctaaatttacatgagctcaattctccaaaactaaaagacatagaatgactgaatggataagaaacaagactcaattatatgctgcctacaagaaacccacctcacttatacagatacagactgaatgtgaagggatggaaaaagaaattctatgcaagtagaaaccaaaaaagagcaagagtggttatacttc

SEQ ID NO: 399433 - DNA, 621 bp, Homo sapiens
caaatctgtcaaaagcaataatagtacagccatttgttaagaaataggcagtgtaaaaatatgtaaattgagacaacaaaaagttaaaatgtgggagggatggaattgaattgtagaattctttaaaagctgttttctttctttgttcctgttttttttttagtgatctaaggtaagttgtcatctgtttaaaataatttgttatatctataagatatttttgtaaacctcatggtaactcaatgaaaaaaaatctgtaatagatacastaaaaataaaaagcaatgaattcaaacatactacccgagaataacccttaaccacaaaggaagacagtaaaaaaggaacaaaggaagagatgagttacatgacaaacagagaacaagccacaaaatggcaatagaagtacttacttatcaataacaactctaaatttacatgagctcaattctccaaaactaaaagacatagaatgactgaatggataagaaacaagactcaattatatgctgcctacaagaaacccacctcacttatacagatacagactgaatgtgaagggatggaaaaagaaattctatgcaagtagaaaccaaaaaagagcaagagtggttatacttc

SEQ ID NO: 399434 - DNA, 537 bp, Homo sapiens
agcaataaacacctacaccaaaaaagtggtaggacttcaaataacrtaacaatgcacctcagggaactagaacaacaaaaaaaatcccaaagtaagtagaaggaaagaaatataaagattagagcagaaataaattaaattgagactaaaaaaattaagaaaagcaatgaaacaaaaagttggttttttgaaaagacaaaatcaacaaacctttagctaaaattaaaaaaagaggaatcccaattaaataaaattagaaatgaaaaaagacataaccaagaccacagaaacacagagaattattagagactattatgaacaactataatccaacaaattggaaaacctagaagaaatggataaattcctgggcacttgaaacctaccaaggttgaaccaggaagaaatagagaaccccaacaatccaataatgagtaacaaggttgaagctgtaataaaaagtctcccatcaaagaaaagcccaggaccatctgatggcttcactgctgaattctaccaaacatttaaagaaaaatt

SEQ ID NO: 399435 - DNA, 537 bp, Homo sapiens
agcaataaacacctacaccaaaaaagtggtaggacttcaaataacgtaacaatgcacctcagggaactagaacaacaaaaaaaatcccaaagtaagtagaaggaaakaaatataaagattagagcagaaataaattaaattgagactaaaaaaattaagaaaagcaatgaaacaaaaagttggttttttgaaaagacaaaatcaacaaacctttagctaaaattaaaaaaagaggaatcccaattaaataaaattagaaatgaaaaaagacataaccaagaccacagaaacacagagaattattagagactattatgaacaactataatccaacaaattggaaaacctagaagaaatggataaattcctgggcacttgaaacctaccaaggttgaaccaggaagaaatagagaaccccaacaatccaataatgagtaacaaggttgaagctgtaataaaaagtctcccatcaaagaaaagcccaggaccatctgatggcttcactgctgaattctaccaaacatttaaagaaaaatt

SEQ ID NO: 399436 - DNA, 537 bp, Homo sapiens
agcaataaacacctacaccaaaaaagtggtaggacttcaaataacgtaacaatgcacctcagggaactagaacaacaaaaaaaatcccaaagtaagtagaaggaaagaaatataaagattagagcagaaataaattaaattgagactaaaaaaattaagaaragcaatgaaacaaaaagttggttttttgaaaagacaaaatcaacaaacctttagctaaaattaaaaaaagaggaatcccaattaaataaaattagaaatgaaaaaagacataaccaagaccacagaaacacagagaattattagagactattatgaacaactataatccaacaaattggaaaacctagaagaaatggataaattcctgggcacttgaaacctaccaaggttgaaccaggaagaaatagagaaccccaacaatccaataatgagtaacaaggttgaagctgtaataaaaagtctcccatcaaagaaaagcccaggaccatctgatggcttcactgctgaattctaccaaacatttaaagaaaaatt

SEQ ID NO: 399437 - DNA, 537 bp, Homo sapiens
agcaataaacacctacaccaaaaaagtggtaggacttcaaataacgtaacaatgcacctcagggaactagaacaacaaaaaaaatcccaaagtaagtagaaggaaagaaatataaagattagagcagaaataaattaaattgagactaaaaaaattaagaaaagcaatgaaacaaaaagttggttttttgaaaagayaaaatcaacaaacctttagctaaaattaaaaaaagaggaatcccaattaaataaaattagaaatgaaaaaagacataaccaagaccacagaaacacagagaattattagagactattatgaacaactataatccaacaaattggaaaacctagaagaaatggataaattcctgggcacttgaaacctaccaaggttgaaccaggaagaaatagagaaccccaacaatccaataatgagtaacaaggttgaagctgtaataaaaagtctcccatcaaagaaaagcccaggaccatctgatggcttcactgctgaattctaccaaacatttaaagaaaaatt

SEQ ID NO: 399438 - DNA, 520 bp, Homo sapiens
gattgggaacaaggcaaggatgcccactgtcaccacttttgttattcattataatactgggagtcttggccagagcaattagacaagagaaagaaatcaaggacatccaatttggaaaggaagaagtcaaattagccttgcttgcagaccaaataatcttatatttaaaaaaaatctaaagactctaccaaaaaactgttagaactgataaatgaattcagtaaagtcataaaatacaaatcaacctataagaatcagtagcatttatatacaccaacataatctgaaaaacaaatcaagaaagtaacccacttacaatagctacaaagaatataaaatacctaggagtcaatttaaccagagcaatgaaagagctatacatggaaaactatgaaacrctgatgaaagaaattaaagaggtcacaaaaaatggaaagatattgcatgcttatggattgggagaattaataccattaaaatgacaatactactcaaagcaatttatactcaaagcaatgct

SEQ ID NO: 399439 - DNA, 552 bp, Homo sapiens
agatattcagtgggcaggaaaagccagccgagaaaggaaacatggaaagaaagcaagggagaaggagtggcaagaaaaatgagatgtgagattacactgggatatgttggcaaattcctaggagaaagctaggaaaattgggccttcttggcacgggtggatttttgcggggatcatgaagagggtgttcccctaatatacaatctgagagctcctggcatccccaacaggaaaataatttaatgatgggatcatggagtttaggagctgagagtgactttagaaattattttagtatgagtccctcaattcagaggaygaagagattaaacatcaagcaaacatttagtgaacatttattaatgtgtccagtctttgagccaaaggcttcatatgcattaattctcagaccaccctgaaatggcattgctgttattatccgtgttttacagatgaggttcagagaggttctatgatacacagaggtttaaggatatacaagtatggttcccccaaaaattgaacatagaattaccatttgatttagcaatt

SEQ ID NO: 399440 - DNA, 461 bp, Homo sapiens
tctccctgtctctttcaggtaccccaatcaggtttggtctttttacataatcccatagttctcagaggtttggttcattccttttcattttttttttctctaatcttgtctgcctgtcttatttcagcaggatagttttaatgttctgagattctctcctccattttgtctattcagctattgatacttgtggttgcmttgtgaagttcttatgctgtgtttttcagctccatcaggtcatttatgttcctctctagactgattattctggttaacagctcctgtagtgttttatcatgattcttagcttctttgcattgggttagaacttactcctttagctcatcaaagttcattattacttaccttttgaagcctacttctgtcaattaatccatctcagcctcagcccagttctgtgccattgctggagaggtgttgcaatcatttggaagagaaga

SEQ ID NO: 399441 - DNA, 376 bp, Homo sapiens
gaaagtctaaataaggaaattaaaggtattcagaaaagatgtcaacattttgatgtctatccttcaagtcatgttttcaatgggcatatatatccacatgtaggtattaacaaatgtataaacatagagtcttattatctctcaaaattggtaatatgttttattttagaaactgtttcttttcttgtatcacgaacgttttctcttggcattgaatagtctttatacgaaattttaaattgctgcataattattctatgtgtgcaagtgctcccctgatcccctctttaaaatcagaataaaaaaatwttaagacagttgcaaagtattttggcatcataagtccaaacacttctctcaacttccatggttatgg

SEQ ID NO: 399442 - DNA, 594 bp, Homo sapiens
ctcagcaaacgttaagtgatgaggacatcagacttcctactcatacctcagcaaaagtctgaagagaagcccatgattcttagactttcaaagtcccttcctaccctttcctctgtaatggtgagatattcttccatgttttatgccttatgggcaagaggtcagagttttccaaactgtattccatgaagcactaattccactggatggtataaggtaaaaagacaaaaagaggctctgtggtcaaacaactttgtgaaatatttcattataaaaaatgaattatagctttctttactgcaggactctgcagagtctataatctccaaatcccccagacttatttcatcataacatcctggattctgtttacttttgctgaatatctcccaggattagcatttcctgaaacccaytttgggaaatgccaagctgaaccatcagttctctcagtagattgcaagtgccttcagaaaaaggactttgtcctgttcatcttgatattgccaacacctataaccatgcctggcacccgataggggcttgataaggattactaaataaatacatgaatatggacatgggagcatgtgt

SEQ ID NO: 399443 - DNA, 603 bp, Homo sapiens
ggaaacagggcctttaaagaggtgattgaattaaaatgaggctgttagggtgggctctaatccaatctgattggtaattttgtaagaaaatgtggacaaacagagagacaccggggcacacatacagaaaggggctaccatgtgaagacacagcgagaagatggccatctgctttccaaggagaaaccaaatctgccaatgccttgatcttgaacttcagggaaattgagaggctgctggctgcattggtgagcgagagtgaggaggcaggtagtgcagtggtctgaggctcctggtggcagctgtcattgtgagaagagaagggagctggatgggtttcttcagcaaccatgtccaacacacccaatagggctgagattgagaaatttgacaggtcaaaattgaagacagaaaagcaagagaaaaatccactactgacagcagtggctaccaacctggactgattaaaaaggatcaaaggactgatgtttttgtagatatcactgtgaacagatgacrtggggaccaggtaagcactcataaacttggcatgttataaccccctcagaatgtggtcacaaccacagagagaaagggcagaag

SEQ ID NO: 399444 - DNA, 596 bp, Homo sapiens
acacacacacacagagcaagcactttcttggctgaaaatgccaaggaacaaattttggtgggtgctaacacccatgtagcaacraacacaaaagcaaatagagacacagcaatttgcttgttctgtcgccctaagaaagctatggaaagaggatttttattaactcttccatgtaagcctggagcaatcttcctgtccaaatactaaagtcctttcagagatttccccctctagtggtttgtgtttaagaatctaaggggagagtagcaaatgggaattactgatcaaagggcataaagtttcaattatacgagacgaataagttctggagacctgcctatagttaacaatacagtattgtacacttaatttaaaaggtagatttcatgttaatgtatattacttttatatgtataaatattttatacatttacttatttgtatggtttttttttttgtttgtttgttttttttgaggccgagtctctgttgcccaggttggaatgcaatggcacgatctaggctcactgcaatccccacctcccagttcaagcaattatcttgcctcagttgcctgagtagctgggactacagat

SEQ ID NO: 399445 - DNA, 581 bp, Homo sapiens
accttccacagaggtcagcatatggtggctacctaaaaaccaacagscttgccaccaccacaggtgacagactggacttggagctccctgaaaagtcaatccacaaagtattgccactatttgacctatctcaagcacctgaaaaagccccatttgcaagatacaaactttatttgactgggcttagagatcaccctgcaggaaaagctctatctccagggtgcttgttgaaaacattcagcagtagttgtttgacatcacagctgcctctagtagtcaaggcataagaagagctgcctgtaaacttgaagatttaggaaatgagatgtccacaggggcctttggaaagctctaaactttttctgggaagacagaagactgcacacgtgcagggctgtgtgaaagctcaggaaagacctgggagagccccagtctctcatccagagcagattttaagccctcacaaaagcaagaagtgaaggctaggcaggtttgtaaaatgccagaacactaatgaaggtttgccccaacacacacacacacacacacacacacacacacacagctccttggcaaaggat

SEQ ID NO: 399446 - DNA, 581 bp, Homo sapiens
accttccacagaggtcagcatatggtggctacctaaaaaccaacagccttgccaccaccacaggtgacagactggacttggagctccctgaaaagtcaatccacaaagtattgccactatttgacctatctcaagcacctgaaaaagccccatttgcaagatacaaactttatttgactgggcttagagatcaccctgcaggaaaagctctatctccagggtgcttgttgaaaacattcagcagtagttgtttgacatcacagctgcctctagtagtcaaggcataagaagagctgcctgtaaacttgaagatttaggaaatgagatgtccacaggggcctttggaaagctctaaactttttctgggaagacagaagactgcacacgtgcagggctgtgtgaaagctcaggaaagacctgggagagccccagtctctcatccagagcagattttaagccctcacaaaarcaagaagtgaaggctaggcaggtttgtaaaatgccagaacactaatgaaggtttgccccaacacacacacacacacacacacacacacacacacagctccttggcaaaggat

SEQ ID NO: 399447 - DNA, 434 bp, Homo sapiens
gaagactttgctgaagaagtaatactaaaactgcaaactataggatacygggtgaagtggtgatgaagaacagaagaacattctaggtaacaaatacagcacatggtgcattggaagccaggtattatttccagtttacagggaaacaaaaaacaacagaaaaacttgaagatttaagtagaacacctaagtaagtccataacatgcaaatgggaaagccagaatttaaacgtggatctacttgacatcaaaattcttttttaaaacttctctgcaataatatatttgctttgatctgaaaaagaaagattcctgaatatctcttttcagttcttttcactcaattagtgccttaaatactgctttttaaatatatgcagggctctttttcttttattttctttatctttaatttagtggttgtttaaaaactg

SEQ ID NO: 399448 - DNA, 561 bp, Homo sapiens
acacacatacatagtagttttcagtgatagtagtccaacagtatttcacatatttgaattatgtcaagaccaggtagaaataagaataaattaatgactttgagtcttaaatcagaaaaaaagamtacttggattactaactcaaataacgttatgattaggaaaatgtctttttgataagagcttgaacttcagtaccttcttaattgtgaaatttgttaggtgttcagaaatgacattattctctaaagctcatatccattaagcagggtgtagccatcccattgtacttattaagataccaggaattgctgtcctggaaaagaggccagaaactgagatcactgaacaaaaatagaacatttctggctaggacactaattacataaaaatacagaaaaatgaaacttctacctctagaaagaacaaaaacgaaagtgagtcttatcttctctaattatgttcccaacacattttaacttttcttcttggaaaggggatccctagttgtctctcagaactcttcccatattttctgccacaattgcaagttaccaacca

SEQ ID NO: 399449 - DNA, 593 bp, Homo sapiens
aaataacgttatgattaggaaaatgtctttttgataagagcttgaacttcagtaccttcttaattgtgaaatttgttaggtgttcagaaatgacattattctctaaagctcatatccattaagcagggtgtagccatcccattgtacttattaagataccaggaattgctgtcctggaaaagaggccagaaactgagatcactgaacaaaaatagaacatttctggctaggacactaattacataaaaatacagaaaaatgaaacttctacctctagaaagaacaaaaacgaaagtgagtcttatcttctctaattatgttcccaacacattttaacttttcttcttggaaaggggatccctagttgtctctcagaactcttcccatattttctgccacaattgcaagttaccaaccatatgatctcaatcatgatgagggtgaataaatgcatgcatgaattaatcaatgactagtcctagctttgaacayggaatgccagaggtgctttctgctgaactcattgcactgcactgacaaagccagtgggtgaaatgacaatgaatggcattatttcccatacagttttagtg

SEQ ID NO: 399450 - DNA, 632 bp, Homo sapiens
cagaaatcaccacttattcatgtacccaaaaacgattgaaataaaaataaaaattaaaaaaatatatacatacatatataatgggcttgttgaacctctttatactccagtctttttatttataaaatgaacaagttagattaaaaaacaattttgggtctttctgattgtaagtctgtatacttgacaggcttcttactagattgtataccaaaaacagagacgatttcttatgtattcttcccagagatagtgtcgactgagtaaattttataacaaagaaaaaataccagaaacatcaattgtttattgtcaagaatgtgcgcctgagagattcccacaactctcagagccaaatcttatggatctcaagacagtcgtatttttaacacgcacctcatattctgccatctstcactgttataatctcagctatatattcccttttcttttgctggagtcatgtccattatattcttgttgtttatggtaaccactctcccatgctctcatcataataatttcatttcctcatttaatctattctcagttactaattcagaaaacatttaatggtgagccccatatcttaaacctaagtgggcacaggagagtgagaaagcaaaacccca

SEQ ID NO: 399451 - DNA, 440 bp, Homo sapiens
tccctagcaggatttctactcagacgtgccagccttcaagacctcttccttttgaacgacatgctgcctttaccatgacaacagccttatagcttgattggcagaatgagacatcccttgtcttctaggatcacctgatatacattgctgaacatctgctatttagtgattgagcccagcaccacatagctaaattgatcattgcttattttgtcatcttccaatgtggtccctctcactgtaacttctcagggaagttctagtccccattgataagcctttatctcatcctattttcatctgggctttccatcattatcttatctamaagaaagcacgtgagtgacattctattattattatttttagtgccaataattcatttaagtttatttgtaccatgctcattctaatccttgaaagatctctgaggtagtagg

SEQ ID NO: 399452 - DNA, 553 bp, Homo sapiens
taatttgaacaatagaagaattaaagggcagcagttagcaagagtatcagcagatagagtatgcctacctaaatggttctttttcaatttcaaaattgcctacttgaagatttgtattgggattaaaaaaaaaattaaaggagccttacattgtaaataccagcaaggaaagacatcactctaattctgccttggtaaagctaccagggtatttctggtcagtagtgtcctgggtstgactagctggggctggcattgtcttgggtggtaaaggaatttaccaagacagtcatgaataaacaaaggcaggtttattagagaaagtacaaagataggttgtaagaaagcaatgggcagcacagcagagaaggggctgtctgcaaagagtcaggcgctggagggaagttttataaggtcatgctggaagggacgatgagcaagtgagtttgtgttgtttgctaagaatatgttggggtaatgtttaactgccagtccttttctctcaaggtgcccaaaagaaatgctctgctgttcttagcaacctgcctgcctt

SEQ ID NO: 399453 - DNA, 553 bp, Homo sapiens
taatttgaacaatagaagaattaaagggcagcagttagcaagagtatcagcagatagagtatgcctacctaaatggttctttttcaatttcaaaattgcctacttgaagatttgtattgggattaaaaaaaaaattaaaggagccttacattgtaaataccagcaaggaaagacatcactctaattctgccttggtaaagctaccagggtatttctggtcagtagtgtcctgggtctgactagctggggctggcattgtcttgggtggtaaaggaatttaccaagacagtcatgaataaacaaaggcaggtttattagagaaagtacaaagataggttgtaagaaagcaatgggcagcacagcagagaaggggctgtctgcaaagagtcaggsgctggagggaagttttataaggtcatgctggaagggacgatgagcaagtgagtttgtgttgtttgctaagaatatgttggggtaatgtttaactgccagtccttttctctcaaggtgcccaaaagaaatgctctgctgttcttagcaacctgcctgcctt

SEQ ID NO: 399454 - DNA, 506 bp, Homo sapiens
acaaatgtgtctctgttaccatgtggcagtaattaaattgtgtattcaggcatgtgaattgtagcagcgtgcattttccaaaggtggctgcagtaacatccttcaccccatgtgcctttttgccatgtggtcttgtcactccccatcaagaaatagactctattccttctacccttgaatgtgggcaagcctgtggcatagtttggtagtcagcttttrgtcataaagttggctttactttgtttaataatattacatttttcttctatgtatctttgcctttggacacaaacattacctgggaggcaaaatcctttacttgaattaggcttgtaatttgttctctttaatcattatacttaacctttaatgacagttctctttaataactatagtctttagtgtgttttgagttgtattttttatatttttggagaaaagacttgtgaaagggaaagtgccagccttccttaagtcacaaaagtgctttgttaattcatttgtgc

SEQ ID NO: 399455 - DNA, 603 bp, Homo sapiens
tggtaaatgtcctttaagttgtatcatttttatctcttatgtagtgcttttaccgtaccttttctatgttaggtgtatttcgatacacaactgcttcccatatgctgcaattgcctacagtatacagtacagtaatatgctgtccagtacagtaatagcctaggaccaataggctataccatatagcctaggtgtatagtaggttctatcatctaggtttgtgtaagtgcattctatgatgttcccagggtaatgaaatcacctaaagatgcatttctcagaatgtatccctatcattaagtgatacatgactgtacatagtttttttttcagtttgcaaataattctttcatttatatccattaattttccattgctgtccattaaaacattttttttctgattcagcagtattttattaggaaggtatacaaagtgatgttctgtgggacgatttagactgctccctgtttttgtaaacaaagctttgttggaacacagctgtgcccttcctttgtrtatcactcatggctgctcttctgcatggcagatgtgagcagttgaggcagaaaccatagtgccacaaagcttaaaatatttacc

SEQ ID NO: 399456 - DNA, 480 bp, Homo sapiens
tacttaataatgagaaaataaatatttttctgctgtgattasggatgagaaagaaatgttctttgttaccactcctattttacattgtactagaattccaagatactgaagtaagagaaataaagaagagatactcagattaggaaagtagaaataaaagtgtctttgttcacagatggcatcattatttatgtataaagctccaaagaatcaacaaaatttctggatctaattgcaagtgtagcaacatcccatgataaaaggttaacatctaaagtaaatttctttcctatataccaacaatgaatgattggaatttgaaatatttttttaaataccttttgcagtagcaccaaaataataaaatattagatataaatctaacaaaatgtatacaggttctattcatggaatactacaaaatcttttggaaaaaacattaaaacattatctaaatgaattaagaatgtgttcatagat

SEQ ID NO: 399457 - DNA, 480 bp, Homo sapiens
tacttaataatgagaaaataaatatttttctgctgtgattacggatgagaaagaaatgttctttgttaccactcctattttacattgtactagaattccaagatactgaagtaagagaaataaagaagagatactcagattaggaaagtagaaataaaagtgtctttgttcacagatggcatcattatttatgtataaagctccaaagaatcaacaaaatttctggatctaattgcaagtgtagcaacatcccatgataaaaggttaacatctaaagtaaatttctttcctatataccaacaatgaatgattggaatttgaaatatttttttaaataccttttgcagtagcaccaaaataataaaatattagatataaatctaacaaaatktatacaggttctattcatggaatactacaaaatcttttggaaaaaacattaaaacattatctaaatgaattaagaatgtgttcatagat

SEQ ID NO: 399458 - DNA, 480 bp, Homo sapiens
tacttaataatgagaaaataaatatttttctgctgtgattacggatgagaaagaaatgttctttgttaccactcctattttacattgtactagaattccaagatactgaagtaagagaaataaagaagagatactcagattaggaaagtagaaataaaagtgtctttgttcacagatggcatcattatttatgtataaagctccaaagaatcaacaaaatttctggatctaattgcaagtgtagcaacatcccatgataaaaggttaacatctaaagtaaatttctttcctatataccaacaatgaatgattggaatttgaaatatttttttaaataccttttgcagtagcaccaaaataataaaatattagatataaatctaacaaaatgtatacaggttctattcatggaatactacaaaatctkttggaaaaaacattaaaacattatctaaatgaattaagaatgtgttcatagat

SEQ ID NO: 399459 - DNA, 520 bp, Homo sapiens
gttttatcaacaaatgatgatggaaaataggatgactatattcaaagagagagaaaaattctagagatagactttatatttcacaaaaatggattaaatatgagttgtaaccctaattattataaaacttataattgtattatattataatattataattattataaaatttatagaagaaaatataggaggaagtctcatggccttgttttcaccatgagtgttaacatacaacatcaaaagcacaaatcatgaaagaaaaatggawaatttgaattgtattaatattaacaaaaaaacttctagtctatgaaaaatattattaagggaatgaaattaaaagccacagactaagataaaatattttgaagcacatagtgtctatactgaaataaatgaatagatgaatgaataaacacacaaataaataaatgagagggagatcgatttctatgcagaagaattccaaataatttatgtaattgtacttgaggggctggagcataactctccactctgg

SEQ ID NO: 399460 - DNA, 619 bp, Homo sapiens
atgggtgcttgtgtcatcccatccccagatttaggtggtcagaggagagagagagtctatatgtttgagagaaagtgagggaagagaacaagactctctgcctggtaatccagagaattctcccagatcttgtccaagaccatcaagttgtacttctacaagtctgcaaaaaccacagtgttactgggcttggagtgcccckaaagcacatacagtttagatcacaacacccaagggcttttaaatatctagaaagccttcccaagaaggatggctacaaataaacccagatagcaaagactacaataaataaataactcttcaatgcccagacaccaaaaaacatctactagcatcaagaccatccaggaaaacatgacctcaccaaaggaactaaaggtaccagggacaagtcctggagaaactgaaatatgtgacctttcagacagagaattcaaaatagctgtgttgaggaaactcaaagaaattcaagataacacagagaaggaattcagaattctatcagataaatttaacaaaggattacaatgcttaaaaatatcaagcagaaattctggagctgaaaaatgcaactgacactgaagaatgcatcagtctc

SEQ ID NO: 399461 - DNA, 610 bp, Homo sapiens
gtttaagagcagactatatcaagaagaagaaagaactggcaaatttgaagaaaagttataaaatgattcwgttagagaaacaaaagaaaaaaaagcaaaagagtgaagaaagctttagcggcttatggaataccaacaaggggaccaatataaatattatggggatctcagagagacaagagaaagaaccagagatcttattccatgaaataatggatgaaaacttcatacatctgaagaaggaaatgaacatccagatccaagaatctcaaaagtcatcaaataaaaaataaaaataaaaatcaacaccaaaacacattataatcaacttgttgaaagtcaaagactgagagaattttgaaagcagtgagagaaaaatgactggttagatacaatggaaactccacaatactatcaatagatttttttcagcagaaactttacagtccagaaggtagagggacgatttattcaaagtacagtaagaaaaaaactgtcaccaaaattactatgcccgacaaaattgtcattcaataataaaggaaagataaagaattcctcagacaaactaaagcagagggaattcatcacaactatacttgtttacaaa

SEQ ID NO: 399462 - DNA, 448 bp, Homo sapiens
taaggaaacaacagaaagacaaaagacagcctatgaaatgagagactatatttgcaaaacttacatctaagaagggtttaatatccaaagatatttgaagaaatgatgcagcttaataacaaaagagagtaatccaatttaaatatgggctaaggacttgaacagacatttctccaaaaaagacatacaaatggacacaggttatgtaaagctggttgctgtcactaacatacagaaagtaggttggaggctaccaggggctggggagagggccaggaaatggaaaactattgyctaccagaaaaatgcaaatcaaagccacaatgagatattacttcatacctagctgggtggctatttttttttaatgacaatttaatggtgtcctcatgaaatgcattggaaaatactttcttttctacttcctgaaaatgtttatgtaagacag

SEQ ID NO: 399463 - DNA, 535 bp, Homo sapiens
gctgtcagtggggtgataatgcatcaaaatatctttgacaacatttgcctgaaaatactcagtacatcctactgagaagcattycacaatgctgcaatgctgggaagagaagcattctacaatcttaagcttgaatctcagtcttttagtaggactgtgtcactgggatgtggccttcactagtgtgtcttagctttcctgccccctttaggttagataggaaagcaagggcagactggagttagagaaatgcccttttcaggtggagtagttattgagaatgttttggtcatattttaaaatggttactcatcccttcccactgcctgacttcactttaggaagtgccacacaaccaacgccaggagtccttctgctgtgatagatgattgtggccattgtggaaaggacaatgtttgttatgaaactgttgttacttgatgtttccaaggtttcctatctttagaataccagagaagggctgaggctgtggggactaaaaacagactagggtggctgtgctacaaaaattaaa

SEQ ID NO: 399464 - DNA, 535 bp, Homo sapiens
gctgtcagtggggtgataatgcatcaaaatatctttgacaacatttgcctgaaaatactcagtacatcctactgagaagcattccacaatgctgcaatgctgggaagagaagcattctacaatcttaagcttgaatctcagtcttttagtaggactgtgtcactgggatgtggccttcactagtgtgtcttagctttcctgccccctttaggttagataggaaagcaagggcagactggagttagagaaatgcccttttcaggtggagtagttattgagaatgttttggtcatattttaaaatggttactcatcccttcccactgcctgacttcactttaggaagtgccacacaaccaacrccaggagtccttctgctgtgatagatgattgtggccattgtggaaaggacaatgtttgttatgaaactgttgttacttgatgtttccaaggtttcctatctttagaataccagagaagggctgaggctgtggggactaaaaacagactagggtggctgtgctacaaaaattaaa

SEQ ID NO: 399465 - DNA, 618 bp, Homo sapiens
ctgcactccagcatggatgacaaagtgagactgtctcagaaagagacaaaaacaaaatcaaaaccaagctacagattagaagaaaacacttgcaaaaaacatgtctataaaaaagaacctgtgcccagaatatatgaaaaactcttaaaaattcagtaattgctaaacaaattagaaatgtgtcaacagtctgaataaacacttaacaacatatggataagcaaatgaatagatgctcaacatcatttgtcattagggtaacacaaaactacaatgaaatatcactacacacctaatagaattgataaaaataataatgaaagacaatgcaaattactggggtgggggcgaggggttgtagggcaacaggaactctcactgctggtgggaatacaaaacagtatttgtactactgtatttgtacattgtgtctatatttaagacagtattgtgtasttaaaattttgttaagagaatagatctcattttgagtgttctcacacagtttaaaaaatactcatgtatctgctcacttacccaaaaacatattactggaaggataaaacagaaactaaagagattgattgcttaagcgggtaggtgagaaaggaaaaaatg

SEQ ID NO: 399466 - DNA, 503 bp, Homo sapiens
tttcatcctatttttgtgtgcacatacatttccacagacagataggcttaaagactttaagattacaaacttatagatttttaaaaatctttaagcctataaatatgtgtttataaatgtatgcacatatgtttatacatgtatttgtacacaaatactatatttgtataaatgtatgtacaaatagtttctatccttgatacacacatacatatgtacatgtatatatgcagagaagacagaaaacattaaaacaaataaaacaaaatacaaacaattgttgaatttcctaaattgattatttttaattgacaaaaattgtacgtatttattgtgtacggcatattttgaaatatgtataaatcatagaatggctaaatcaagcaaattaacrtgcgtattacctcacatagttaccattttttgaggggacaatacttaaaatctactctcttagagattttcaagaatacaatatgttgttattagctatagtcaccgtg

SEQ ID NO: 399467 - DNA, 503 bp, Homo sapiens
tttcatcctatttttgtgtgcacatacatttccacagacagataggcttaaagactttaagattacaaacttatagatttttaaaaatctttaagcctataaatatgtgtttataaatgtatgcacatatgtttatacatgtatttgtacacaaatactatatttgtataaatgtatgtacaaatagtttctatccttgatacacacatacatatgtacatgtatatatgcagagaagacagaaaacattaaaacaaataaaacaaaatacaaacaattgttgaatttcctaaattgattatttttaattgacaaaaattgtacgtatttattgtgtacggcatattttgaaatatgtataaatcatagaatggctaaatcaagcaaattaacgtgcgtattacctcacatagttaccattttttgaggggacaatacttaaaatctactckcttagagattttcaagaatacaatatgttgttattagctatagtcaccgtg

SEQ ID NO: 399468 - DNA, 530 bp, Homo sapiens
aagtgagtccttgaatccatctttagaccatagacatcaatgatgaaaagagtagtctatgacatcagctgagctacaccaggcctctgcaaactcatttcctccctggcaccacacactagaaaacagaatatttattgtttgtataaaacaatatactgcattggcataaatctcattttcaatatttaaagctattctggctcttgtgacaccccgtgtcagaatcctgggcatggaatgctaagtgtgcaccaagccttaaagatctgaaatggtattttcctcttttaatattttcccacacacttaaagtttatacttaaatggaaagaaaatgacaaatattccatctcaaaaaataacgcagagaattctagtttacaatktcctctctcaaaattctgtaatttgtttcattattattatttttttgagatggggtcttgctctgtggcccaggccacaaagcaagagggcagtggcgctatcaagactcactgcagcctcaaactcttgggctgaagcga

SEQ ID NO: 399469 - DNA, 490 bp, Homo sapiens
atcacaccctttagctcctacagtatcagccgtggcacatttatacggcagaactaattgctgggtctgtcctgagcagtttgtttagttcaataacactaaggaagctcttgatgacctggaacttattgtcttaggaacccctttattagctttatctttaaccattaaacaactagtcaggcataaatggaacatggtatgggagaactttcaactgggtaactaactcctcctaggaaaacacttcacccctgstgccaggaaactattccccaaaagataagcttcatatcttcgtattaggaaaagttgaccaggcaatagcaaattcctccctctgctttaaaagcaggggaaaaaggaccatacctgggagatctcaaatactgtaacaccacacatgtaatcgctgaaagctcaaaagtttggagaaagaaaacgctatagggaagatctaagaaaattggaagccctatgtgggggcttt

SEQ ID NO: 399470 - DNA, 490 bp, Homo sapiens
atcacaccctttagctcctacagtatcagccgtggcacatttatacggcagaactaattgctgggtctgtcctgagcagtttgtttagttcaataacactaaggaagctcttgatgacctggaacttattgtcttaggaacccctttattagctttatctttaaccattaaacaactagtcaggcataaatggaacatggtatgggagaactttcaactgggtaactaactcctcctaggaaaacacttcacccctgctgccaggaaactattccccaaaagataagcttcatatcttcgtattaggaaaagttgaccaggmaatagcaaattcctccctctgctttaaaagcaggggaaaaaggaccatacctgggagatctcaaatactgtaacaccacacatgtaatcgctgaaagctcaaaagtttggagaaagaaaacgctatagggaagatctaagaaaattggaagccctatgtgggggcttt

SEQ ID NO: 399471 - DNA, 560 bp, Homo sapiens
gaactttcaactgggtaactaactcctcctaggaaaacacttcacccctgctgccaggaaactattccccaaaagataagcttcatatcttcgtattaggaaaagttgaccaggcaatagcaaattcctccctctgctttaaaagcaggggaaaaaggaccatacctgggagatctcaaatactgtaacaccacacatgtaatcgctgaaagctcaaaagtttggagaaaraaaacgctatagggaagatctaagaaaattggaagccctatgtgggggcttttagaatctggcctttcttcctgctttggaagtcccaatgggaatggtaggctctggataactgccttgacacatggtactatgatgtagaaaataacacataggcttccccaagcatgtcccttcatgtaattccagacccttgtatgatgtttgctaatactagtggcctgcaaatttgtaggcaaacaggtgatgtctgggctgtcatcccctgccacaagaattatcttagatattggccaggacatattgtgtctctaatctttcaaaactcc

SEQ ID NO: 399472 - DNA, 493 bp, Homo sapiens
cccaagcatgtcccttcatgtaattccagacccttgtatgatgtttgctaatactagtggcctgcaaatttgtaggcaaacaggtgatgtctgggctgtcatcccctgccacaagaattatcttagatattggccaggacatattgtgtctctaatctttcaaaactccatatgtcatgtgggtccttctcatttagcatgtaaaattccaaayggcttcgtgagtgattatctgagtatggatatccctatcccaaagatgctcctattatatacaaaaatagaaagcttctaagagatgagaaagatttatctgtgtttttcacaagtaacaacttagaactgtccctttgagggacagggctgtatttcctttgtggattttggctatacttaatcttccctggtcactggaagggaacctacactatagtagcagtggtcccagatgtattattttaaaattccactaacatggcagcatcacctgggg

SEQ ID NO: 399473 - DNA, 493 bp, Homo sapiens
cccaagcatgtcccttcatgtaattccagacccttgtatgatgtttgctaatactagtggcctgcaaatttgtaggcaaacaggtgatgtctgggctgtcatcccctgccacaagaattatcttagatattggccaggacatattgtgtctctaatctttcaaaactccatatgtcatgtgggtccttctcatttagcatgtaaaattccaaacggcttcgtgagtgattatctgagtatggatatccctatcccaaagatgctcctattatatacaaaaatagaaagcttctaagagatgagaaagatttatctgtgtttttcayaagtaacaacttagaactgtccctttgagggacagggctgtatttcctttgtggattttggctatacttaatcttccctggtcactggaagggaacctacactatagtagcagtggtcccagatgtattattttaaaattccactaacatggcagcatcacctgggg

SEQ ID NO: 399474 - DNA, 568 bp, Homo sapiens
acatccacaggcaaattcagagagggagaaagacatccacgaagagaaagtcctttggatgctttggcagttgcctcaaaaaattaaattctatttcaaagcaggtggggcaatgttacccaaactgaccgcttttgcaaagagcaaagacctggggcatcggacattttccttgaaccactgaagcataatgtatttaatgttaagctaagtaattggtgtttgagagggtgccagggaacagatccctttatacatattgttaaattaacttaaatttggcccaaagctgcctgtgtacataactgtaccctaatttaagagtatattcttgtaacaaagaaccaaggctcagccaatcacagtagccaagcttcagtcaatcacatgctgcccactggtcagactgtgtccacatacggcaaatgcctcatcataccatkccccagtgaggcaaatgctaatcttgctgtttttatatgtcacttcctttttctgtctattaatagtgccttgccacattgctaggtggagctctatgagcatctactgattcaggatgctgccc

SEQ ID NO: 399475 - DNA, 518 bp, Homo sapiens
aaagctgcctgtgtacataactgtaccctaatttaagagtatattcttgtaacaaagaaccaaggctcagccaatcacagtagccaagcttcagtcaatcacatgctgcccactggtcagactgtgtccacatacggcaaatgcctcatcataccatgccccagtgaggcaaatgctaatcwtgctgtttttatatgtcacttcctttttctgtctattaatagtgccttgccacattgctaggtggagctctatgagcatctactgattcaggatgctgcccaattcatgaatccttttattgttcaaataaactctgttaaaattaatgtgtttacaggaaggggaacatcacacactggggcctgttgtggggtggggggaggggggagggaaagcattaagagatatacccaatgtaaatgatgagttaatgggtgcagcacaccaacatggcacatttatatataggtaacaaacttgcatgttgtgcacatgtaccctagaacttaaagtat

SEQ ID NO: 399476 - DNA, 608 bp, Homo sapiens
tacataacatttttgaatgtcacaaatatcacttaagatttgtatacattttactaagaaattatgctttcagaactattttgcaataaaataatcagttgtatatgcagatatatatagaataccagagttttatgtgtaaagaagtaaaactgtagatacgatcaatgatagagttaatatgtaattttcccaacaactaggttattttttgatagatgagaatattacataatcaataaagttatatcacagaataatttataataccatagwaggatgttcataaaatattacagtagtcatattttatatttattttatatccacgaagtagagaagatcttaaatttaatctacttatttataagtttacacatacacatgcacacacgtctcaaataggtctgaacagatctgtactaaaaaccactattgacaatggttattagtggatagtgtcattatgtttatctatattttctcaaatttttacaataaatttttttgacttttttgagggaaaaaacacttggtatgtgaccagtgcttcctttcttttcagtaatgctgcatatgtcaggatcctaatacttttaaagaggctc

SEQ ID NO: 399477 - DNA, 480 bp, Homo sapiens
cttggtatgtgaccagtgcttcctttcttttcagtaatgctgcatatgtcaggatcctaatacttttaaagaggctcacattatttatcctcaatcttcattagggcagtgatcctggcaccgccaaggagaaaatttaacccttctgtgcaactyttttatataaaccctttgtgtggtaaaagtcaaggatcctgagggaggtggtcttgcaagaatagtcacctgtccttttgcaaatactgctctggctaagtggatgccaggtcaatttgcacaggcacaaacaaattgacaatggccttcataattccagagagctggaacaaaggtataatctgaaacaaagatgatctttggccacctggatgctttgtgttatgacctttaaccctctgtgataagtttgctagccattcaggcaaggagaatgaacatgctaagtggatcatgtgccatgtgttaatgatcatatgtaca

SEQ ID NO: 399478 - DNA, 480 bp, Homo sapiens
cttggtatgtgaccagtgcttcctttcttttcagtaatgctgcatatgtcaggatcctaatacttttaaagaggctcacattatttatcctcaatcttcattagggcagtgatcctggcaccgccaaggagaaaatttaacccttctgtgcaactcttttatataaaccctttgtgtggtaaaagtcaaggatcctgagggaggtggtcttgcaagaatagtcacctgtccttttgcaaatactgctctggctaagtggatgccaggtcaatttgcacaggcacaaacaaattgacaatggccttcataattccagagagctggaacaaaggtataatytgaaacaaagatgatctttggccacctggatgctttgtgttatgacctttaaccctctgtgataagtttgctagccattcaggcaaggagaatgaacatgctaagtggatcatgtgccatgtgttaatgatcatatgtaca

SEQ ID NO: 399479 - DNA, 608 bp, Homo sapiens
taatacttaccatttatttatagatgacttgttatgagctcggctctgtactaggcactttagatttgtttactacattatcatgatggattagtagatgcratgggttaaccatcaaaaaatcctttatggataggagtaaaatagacagaaaacagttttgtttgttcagaaaaaccatcttaaagttaaaacttactgagaaattactgagaattgactcaaagtatttgtagaatttagtttctagtttgcatcatttctctaataggtataactgaaggtgatttcagagctttgagagaagaaaatttgttctgcaatccgttaacctagacttttaatgtttggttaggaatgaatatctgggttcactaatgcgttctgtaatgtcactaaaatagcagctaaacaaagccttttggaaaatacattccaagagaaaggcaagattacttgctgaatagaatgaggagggacaagtgtatgatgagcgataggtgcccagctgccagaaggtgagtgacaaaggaaaagtaaagaaagaaaagttttatttgtaagctagtagcagtaatgtcctttgttgtgttgtgggaatagtgact

SEQ ID NO: 399480 - DNA, 605 bp, Homo sapiens
aacttaagcatcctaatatacaagtaactggagtcctggaaggagaggagagagtgggaaggattggacaaatattcaaatccaaaccttcctctttttgttttaaaatttttaaatgtttaatatgcaactaatttttttatttttaaaaaacataatttcaacttttattttagattcagggagtacatgtgcaggtttgttgcacgggtatactgcatgatgttaaggtttggggtatgattgatcccatcacctaggtagtgagcatagtagccaatagttagtttttcaacccttgctctgctctagcagtccccagtatctattgaatgcaactaatttaaaagttaaaaattattgcaggccagacatggctggtaggttgccagccaattgcaggtctctggtataayggcgtgagtaagataagatacatctcattacagtacaactgcataatgaagcaatagtttttctcccaatgctccagtgcccaaacctatactcttatcagtgctgctcagtgggtaagatgcccagagcctttgtgctttgaagaaacctgaggtagacttgaaagacaagggtaataacaagaaaag

SEQ ID NO: 399481 - DNA, 614 bp, Homo sapiens
ggtgtgatggtgagcacctgtaatctcagctactcaggaggctgagacaggagtattgcttgaatccaagaggcagaggttgcagtgagccgagatcgcgccattgcactccagcctgggcaacaagaacaaaactccatctcaaaagaaaaaagaaatatgtagggtctggtggagaggatgttggaagctgagatattttctccagtgttttcaactcaccttgcatttaggctcagcagctcagccttctgttattattatgtaggcttagagccagattcagagaggctctttgttttgtgttctgattttatgtctttaaagtccaaaggggattttacgctgggagaaggtatcaagcaagactttgtgctcttcccacagtacgccgcagagctctccacccagaacgagccatggacaaccacagtgacagcgaagaggagcttgctgccttctgtcctcaggtatcttgagtgtgggagctgcttcactgtccagttttctttagctmccttttaaccatccgacagctcacatttaggccataaccaggtttgaggccttagactccccttgttcccaagacaaggagagaagtgagactttgt

SEQ ID NO: 399482 - DNA, 524 bp, Homo sapiens
gaacatactgacatactgattctttgaagagaaacttgggtttcactatctttaagataatcaagaaattaccaacaaaattggcaaccagcagaccttggagtagctcttcttttattcctttattttcctaatacacttgctttcactttacggacttgccctgcctgaattctttcttgtgtgagatccaagaaccctctcttggggtctggatcgggacccctgccctgtaacagagatgctgttctttctaaccctgagtgtcagcctggggatgcaaaaaggttgctctctgttgccttgcttcatcctcagtcttaggcagaccctgcgcccctgggtctgggtctggaggtgggtgggggtctctgggttcctgcctttkctcccgcctcctgcctgagaagactgtctgtgtcctgggcccagatggtaccctgtcactctctcaggagtggaaggcttttttccctctttcctccagacaaaatgggtcttcatcagctttaaacctcggtttc

SEQ ID NO: 399483 - DNA, 546 bp, Homo sapiens
attgacagctatataagttatttctggatgttgcaattatttacagtacggtaataaattcactttgtgacttatgggcaagatattactctctctgtgtctcagtattctcatctgtataatgggaataaacgaagtgcctcccaataggttgttgtctgagcgaaatgagataataacattaagtgcttagaacagcatctggcatgttgtaaacactcagtaattgtcaaatattattattattattattattattattataaacctttgtgttcctgtgccagaataaatgatccatttctrttaataaaattcacatgtaagtacagacatttagttctgatacatgtagtcaaaaatcaccttcctaaatattgactctaaagatattcaacctctctcataagtgaacgcaaatcaaaacaacaacacaataccaattcctacctgcctaattgtcaaagattaaactgttggaagatggccagcattggcaacaatttgggagaaggcattctcatactaagtggcatttgtttaaga

SEQ ID NO: 399484 - DNA, 613 bp, Homo sapiens
tggtgtgatatcatttagcctctctgtgtgttagtgtgctcttctgtgaaatggctgtgatagattgcctgcctttcacacagtagtgaagattcagtacagccatcaccgtaacgaccctggcactgagcccagcacagagccagcccttaggaaggttctgaaacgctggccttcagggtcaggaaacagcattcctcttcccacctgacttctttctttttccttttttttttgagacaggatcttgctctgtcacccaggctggaatgcagtggcgcaatcactgcagccttgatctcctaggctcaagcaattctcctacctcagcctcctgagtagctgggaccagcggtgcataccgccaaccctggctaattaaaaaaaaaattttttttrtagagacggagatcttgctatgttgcccaggccagtcttgaactcctgggcccaaacaatcctcccgcctcggactcccaaagtgctgggattatagatgtgagccactgcatctgatccccacctgacttctgaacaatgctaaactaaataaaaatatcagtggacagagacctcaatgtcacctttattactgacaaggccagattcaagg

SEQ ID NO: 399485 - DNA, 613 bp, Homo sapiens
tggtgtgatatcatttagcctctctgtgtgttagtgtgctcttctgtgaaatggctgtgatagattgcctgcctttcacacagtagtgaagattcagtacagccatcaccgtaacgaccctggcactgagcccagcacagagccagcccttaggaaggttctgaaacgctggccttcagggtcaggaaacagcattcctcttcccacctgacttctttctttttccttttttttttgagacaggatcttgctctgtcacccaggctggaatgcagtggcgcaatcactgcagccttgatctcctaggctcaagcaattctcctacctcagcctcctgagtagctgggaccagcggtgcataccgccaaccctggctaattaaaaaaaaaattttttttatagagacggagatcttgctatgttgcccaggccagtcttgaactcctgggcccaaacaatcctcccrcctcggactcccaaagtgctgggattatagatgtgagccactgcatctgatccccacctgacttctgaacaatgctaaactaaataaaaatatcagtggacagagacctcaatgtcacctttattactgacaaggccagattcaagg

SEQ ID NO: 399486 - DNA, 262 bp, Homo sapiens
gctgttttgggcctcatgtggccctcaggccgggggttggacaagcttgctctaactcctgggctcaagagatcttcccacctcagcttcctgagtagctgggactacaggcacgtgctaccatgcccagctkattttttttgttttgtttttaatagagacgtggtctcactatgtcacctagactggtcttgaactcctgggctcaagtggtcctcccaccttggcctcccaaagtgctgggattataggcatgagccac

SEQ ID NO: 399487 - DNA, 466 bp, Homo sapiens
atatttataaacatgtatttatgaaatacttgagaataaagttaaaatatgtgcaagacttgtatattgaaaaaataacaataacagcaaaattactgggagaaatttaaaaagagttaaataaatgagagacacacatgttcacagattggatgactcaatatcgttaagacattaattcttcctgaactgatayataagttcaataaaatcacaatcaaaatcccagaaagtttatggttgttgaaattgacaagttggttctgaattttacaaggaaatgcaagagacctagaattgctaagacagccttgaagaacaaaattggagaatttacagtacaaaatgttgagtcttacaaaaatgacaaagctttagtaactaagacagcatggtattggtgaaagaatagataagttgatcagtgttataaaattcagtgcagaaatagacccacatatatgct

SEQ ID NO: 399488 - DNA, 566 bp, Homo sapiens
aataactaaaatttaaaagcctgacactaccgaatgctagtgaggataggaagcgactggacctttcaatcactggtggttgggatgtaaaatgtcataaccactgttgaatatcatttggtagcatctattaaagtcaacaggtgcataccctgtgatccagcaaattcacccattgtgttcacccaacaataagctgcacatatgtgcatgaaaaaaaacatgcacaagaatgttcatagcagctttatttgtaatagcaaaaaactagaaacaacccacagacccatcaacaggagaatgggtacgtcaatcatggaatataggtgtgtgtacataaatattcacgtgcatgtgtacacacaaatatataaacacatacgcacccacaaacatacaatagaaaactacaaaacaataaaaggtatgaagtactaataagtgcaacaaaayaggtgaaccttaagctattatattaaatggaagaatccagacactaaagtacatagtgcatgatttgattgatattaaggtcataagcaggctaacctattccctgttgatag

SEQ ID NO: 399489 - DNA, 510 bp, Homo sapiens
cgggtgggaaaccaggcgctttaaaagctcagggttttaagctgtctttagtttcctagcctaacaaatgaacaccctagatgagataagaacccaaacatcctcgaaatgtatctccctgtacttttattatgccacctgccctcgtggggcttccagaattcagaggcacatcatgatggtctccactgtttgggagctgtacactgcagatgtcctcactggataatcaacaggtaagaccttctttaattaagtccccgccacacartgtttttgagctggaagggctatctccagcttttctatttcccaaataaagaagccaagtcctaaggagtataagtagtttgtctaagatcacccaacaaggtaacggcgagacttgagctcttgatacagcactccttctattgtttgttgctgttgtagttattgtagcatggatgcatctgtaagaagcagatcagggttggggactcctttcaaatgctggtggctggtggcact

SEQ ID NO: 399490 - DNA, 608 bp, Homo sapiens
tcaccatccctcggtcaatagcaattggacgaggcatcagatttcagatgttcacatttgtcctttggtggtccctgtatgagacctctctaaaggttccgtattttgtggcacttgggcacctggcagggtttggaggctctgctgagaaagctaggatcaactccatcctgaagcaggacccaactgtcgtgccaggtggatggcagcaggtaacccttggcacaaactcttcacatccattgcttctccaccagctgcatgtaattccccccaagttctgctcagctggcctctgacagttctgacagcaaagttttgctgcatgaagcccaaattcagcctatgttaaataaggaggggaaacaaataaaactacatagaaccagagagtgcacaggtcatgcgaaatactcagcagctcttgtcatgttcatagtagacaaaaaccattcattctaaagaaggaatcaaagattttatggttttgttttmtttaagttactcatgtatttattttaggaaaccaaatgtgaattaaatactaacttccctcaattcttctttggtcatttgctttaggaatactttgggagaataaaataatt

SEQ ID NO: 399491 - DNA, 602 bp, Homo sapiens
ttttcccctctgtcaaggagtttaagctgctggtttgaatttctgccctatgaagaatttccrgattattggtggggctttctttttctgaagaaaaatttcaaacattgtttttctaccttagttttatgcattcaggtcaaagcttctggctcctctttttggtagaatgaaatatcccaacctggctgaattcaggatggaaatgtttgtggaaattttggcctggccctgctaagaggagcatgtggctagagaggccccaaaaacccagaggaactggctaccaaccaccagcgggcttggtcatgtgtgcatctgtccagacagcaatttttcctccctggctttagttcatgctttctggtttcacattatgttcttgtccctcaagaccttcccagccctttccgtgaaggcttccacaagctcctccaggccacagtggcttgtctctgctcctacaagagacagaccatgtacagtatgacccaggacttggctgaacgttctcgatgcttaccagtgagactcctttccttatgaagatggaaagcttgctgaaggcaaagagcatgttttgtcagcattgggctagtatg

SEQ ID NO: 399492 - DNA, 606 bp, Homo sapiens
tctgtttcaagcagtaggaaggaggaagagggaaagaagtagcacagggcatgtgctagctttgtcttaaggaaggtcctggccaagcagaactttgggaggccgaggagagaggatagcttggggccaggagtttgaggccagcctgggcaacatcatgagaccctgtggctacaaaaaataaaaaattagctgggcatggtggtgcatgcctgtagtcccagatactcgggaggctaaggcgagaagatcacttgagcctaggagtttgaggatgcagtgagccatgtttgtgccactgcactgcagcctgggtgacagagcaagaccctgtcttaaacaaacaaaactacaaaaaaggtccttagactgtgctacatggacttctgcttacactccattggtcaaagcttagtcatatgccacacctaactacawgagacagaaatgtagtctttattccagaaagccacttgcccgataaaataactatgcgtatgaatcagggttctctagagaaacagaatcaatagtttgtgcaagtctatggaaagagacttattatatggaactgatttacatgattatggaggcaagcaagtctaa

SEQ ID NO: 399493 - DNA, 564 bp, Homo sapiens
ccattacattggcaataaaatttcaatctgagttttgaagagaatacacattaaaaccataacacaaggtcacaaacaatttatcctatatttccttctagatattgtatagtctaagatttatatttaggtctatgatctatttttagttttgaatatgctacaaggtaaggagggtagagagaggttccgtctctctttttgcctttttccttcctttcatctttctttctttctttttttgagtatatgaacatgtaattgttccagtaccatttattgaaaagaacattctttcttcattgaattgtccctgcacctttgtggaaagccmatcaatagtatatttatggatctattttaggaccctctattctgttctactgatctacacatctgttcttcggtcaagaagactatcaactttgtctttccttataaaaaatatattggtaatcctaggtcatttgtactttcatatacattttataatggacttttaattggtacaaagagagcctactaaaatttcgcattgaatctatagacaaatttggggagaac

SEQ ID NO: 399494 - DNA, 502 bp, Homo sapiens
attccttgcagcaggccttgtatttgattctgggggctaatctgggaatgttttcccrggatatggactggcagatgcggcaatttccgggtcatgttaccttctgtgttagccggggcagatagggagaggagaggaaaaaaagtggaaataaaaggtttcttttaaattcaattttgaaagtctacgctgtcgagaataaagtacataacatctggtccctgccttaagattcttacattaaagcgggagactgaaacctaataatcttgtgtccggaggtggttccttccggtgggttcgtggtctggctgacttcaagaatgcagccacggacctttgcggtgactgttacagctcttaaagatggcacggacccaaagagtgagcagcagcaagatttattgtgaagagcgaaagaacacagcttccacaacctggcaggagacccgagcgggttacccctgaaggctggggtggcccagcgtttattcccgtattt

SEQ ID NO: 399495 - DNA, 502 bp, Homo sapiens
attccttgcagcaggccttgtatttgattctgggggctaatctgggaatgttttcccgggatatggactggcagatgcggcaatttccgggtcatgttaccttctgtgttagccggggcagatagggagaggagaggaaaaaaagtggaaataaaaggtttcttttaaattcaattttgaaagtctacgctgtcgagaataaagtacataacatctggtccctgccttaagattcttacattaaagcgggagactgaaacctaataatcttgtgtccggaggtggttccttccggtgggttcgtggtctggctgacttcaagaatgcagccacggacctttgcggtgactgttacagctcttaaagatggcacggacccaaagagtgagcagcagcaagakttattgtgaagagcgaaagaacacagcttccacaacctggcaggagacccgagcgggttacccctgaaggctggggtggcccagcgtttattcccgtattt

SEQ ID NO: 399496 - DNA, 611 bp, Homo sapiens
tatgcacaatctgggcaaaatggaggtgtgtgagttagggggaagcttcctagctgaatggtttattgtgttctggtttactatgtattatgtttattgtgtagcttgcagtataatttgaagtcagatgatgtgacagtggggctgcaaatagcttagcaggcaagctctgcgtcaaactgctaccttgaatctgagggaccctggttactatccagagttactgtcctcctcatacctcagttgcctcatttgtaaaataaagataataatatctacttacacagttgtgagggtccacaagtcataagctatataaagccctttgcaagtctctggcatatagtgactgctctayaaatgattgttattagaaaacaattagtggggggaggaggggaagtattcacattcatgcagaaagttccagagaatcagattttcaccaccctctaaataaatgaattcaatcataaattgtgcggtacagagaatttgtgttggttgccagtataaagaattgaacatcaaagccattattggtcagcagacctctatgcccagtggacactttacaggaccacctatctgtgggctcccacttcctcctc

SEQ ID NO: 399497 - DNA, 536 bp, Homo sapiens
ctagttctcatggtgtgagccaaggaaatagactcttatgtgatgttatcaaagcttttctgtttaatgttttatycaacatcaaatgagaacatagaagcattgcttctaggaagggaagacaacccctgactcctacacgagtattctgctccaggaattgcaaggaagtttaaggattaggagagatgggggtagaaggaatgggtgaagtcaggactcagtatggttggccctctatatctgtgggttccgtatctgtggattcaaccaacctcggatggaaactattcagaaaaaaaaaaaaaggatggtttcatctgtactgaacgcatcataggcttttctttcttgtcattattctctaagaaatacagtataacaactatttacaaagcatttacattgtattaggtattataagtaatctagagatgacaaagtacactacataagaggatatgcataggttatatgcaaataccatataattttatataagggacttgaacatctgtggattttggtattcttgg

SEQ ID NO: 399498 - DNA, 536 bp, Homo sapiens
ctagttctcatggtgtgagccaaggaaatagactcttatgtgatgttatcaaagcttttctgtttaatgttttattcaacatcaaatgagaacayagaagcattgcttctaggaagggaagacaacccctgactcctacacgagtattctgctccaggaattgcaaggaagtttaaggattaggagagatgggggtagaaggaatgggtgaagtcaggactcagtatggttggccctctatatctgtgggttccgtatctgtggattcaaccaacctcggatggaaactattcagaaaaaaaaaaaaaggatggtttcatctgtactgaacgcatcataggcttttctttcttgtcattattctctaagaaatacagtataacaactatttacaaagcatttacattgtattaggtattataagtaatctagagatgacaaagtacactacataagaggatatgcataggttatatgcaaataccatataattttatataagggacttgaacatctgtggattttggtattcttgg

SEQ ID NO: 399499 - DNA, 536 bp, Homo sapiens
ctagttctcatggtgtgagccaaggaaatagactcttatgtgatgttatcaaagcttttctgtttaatgttttattcaacatcaaatgagaacatagaagcattgcttctaggaagggaagacaacccctgactcctacacgagtattctgctccaggaattgcaaggaagtttaaggattaggagagatgggggtagaaggaatgggtgaagtcaggactcagtatggttggccctctatatctgtgggttccgtatctgtggattcaaccaacctcggatggaaactattcagaaaaaaaaaaaaaggatggtttcatctgtactgaacgcatcataggcttttctttcttgtcattattcyctaagaaatacagtataacaactatttacaaagcatttacattgtattaggtattataagtaatctagagatgacaaagtacactacataagaggatatgcataggttatatgcaaataccatataattttatataagggacttgaacatctgtggattttggtattcttgg

SEQ ID NO: 399500 - DNA, 582 bp, Homo sapiens
atatatctgacagaagattcatatccaccatatccacaatatataaagagctcttacaagtcaaaaacaaatacaacccaaagatcataaatgtacaaaagactccacagacacttcacaaagaggatatccaaatggccagtaagcatttgaaaaggtgctcaatrtcattagtcatcaggacatgcaaattaagccttcactcaaatacacaaattgcagaaggactgaaaaagtagaaattcatgatgtcaagtgttggagaggatatggagcaactgaaactcacacactgtgggtgggaacgtacactagtatacccactttggaaagcttttagtatctactaaaacaaagcacaaattgatgcccaagacccagtaactccattcttagttataggcccaagattggatttgtctaccaaaagacaggtacaagaatatagctttatgtattttatatatttataaatataaatattcatttatataaatatttatcaactttattcactatagcatcaacctggaaagaacccaaattgcagtatatttacacataggaatatcacgtagcaat

SEQ ID NO: 399501 - DNA, 582 bp, Homo sapiens
atatatctgacagaagattcatatccaccatatccacaatatataaagagctcttacaagtcaaaaacaaatacaacccaaagatcataaatgtacaaaagactccacagacacttcacaaagaggatatccaaatggccagtaagcatttgaaaaggtgctcaatatcattagtcatcaggacatgcaaattaagccttcactcaaatacacaaattgcagaaggactgaaaaagtagaaattcatgatgtcaagtgttggagaggatatggagcaactgaaactcacacactgtgggtgggaacgtacactagtatacccactttggaaagcttttagtatctactaaaacaaagcacaaattgatgcccaagacccagtaactccattcktagttataggcccaagattggatttgtctaccaaaagacaggtacaagaatatagctttatgtattttatatatttataaatataaatattcatttatataaatatttatcaactttattcactatagcatcaacctggaaagaacccaaattgcagtatatttacacataggaatatcacgtagcaat

SEQ ID NO: 399502 - DNA, 582 bp, Homo sapiens
atatatctgacagaagattcatatccaccatatccacaatatataaagagctcttacaagtcaaaaacaaatacaacccaaagatcataaatgtacaaaagactccacagacacttcacaaagaggatatccaaatggccagtaagcatttgaaaaggtgctcaatatcattagtcatcaggacatgcaaattaagccttcactcaaatacacaaattgcagaaggactgaaaaagtagaaattcatgatgtcaagtgttggagaggatatggagcaactgaaactcacacactgtgggtgggaacgtacactagtatacccactttggaaagcttttagtatctactaaaacaaagcacaaattgatgcccaagacccagtaactccattcttagttataggcccaagattggatttgtctaccaaargacaggtacaagaatatagctttatgtattttatatatttataaatataaatattcatttatataaatatttatcaactttattcactatagcatcaacctggaaagaacccaaattgcagtatatttacacataggaatatcacgtagcaat

SEQ ID NO: 399503 - DNA, 542 bp, Homo sapiens
tccatttatgtgaaagatgagaacaggcaaaacaaatctatggtgataaaggtcaggatagaatttacttttgcaggatggggaattgattgggagaggacacaagggcaccttctgtggtgctgagttataaatattattgactttctgaaaagtgatttggaaatgcagtcaagtaaaagcagactgccatactgtagattcactccctctgactctggttttatattacaaaaggatttcacttgggccataggagcatgaagagagtacaagggcaagctacaaactggcaaacgattcttgcaatagacgtatctgatgaatggcktgcatccagttaaaaaatgtgcaaaagattcaaactttataaaagaagataaccaaatggctaataagtgtagggaaagttgctcaatatctttattcgtcagggaaatgcagattaaaaccacaatcccacaaaataatacacgcccacgaaatgactgaaataccaaaggtgggcaagcattgagcaatggaactctcccacactgctg

SEQ ID NO: 399504 - DNA, 595 bp, Homo sapiens
tctcagctttaatttaaatacgcttgtcaactttgcattttactccataaaatcttttgatatattaaatcttatcagtttgttctcccagaatttttgagtaacttcaagattctgtgaagacaaatgttccccttaaacacatatccctgttggagaatctcacactaacatcacctctgccagtggaaggtcagcaggttcgaggagggaggcttcaagttagaccagcaaggatgacttcatggaaatggtgaggcctgggctggcctagtaggatatggactcatgggaagaaggaataaatgtcttgagcagaggtctggaggtggagaacacaaatggaactcccaaagaaccatgaagaaacacrgttctggaaaccaagaacgaggattccttctcagctgaaagtcactaatctttgtgtctcattccagtaaaacccaatcccacaggagtcagagttgcattccaaggccatcagtcaccttcagcagccacacactcccatctctctccttactcactccgtacatgtttttcacctggacaggagcccctgcacaagcgtggctggtgccaggcattgctc

SEQ ID NO: 399505 - DNA, 595 bp, Homo sapiens
tctcagctttaatttaaatacgcttgtcaactttgcattttactccataaaatcttttgatatattaaatcttatcagtttgttctcccagaatttttgagtaacttcaagattctgtgaagacaaatgttccccttaaacacatatccctgttggagaatctcacactaacatcacctctgccagtggaaggtcagcaggttcgaggagggaggcttcaagttagaccagcaaggatgacttcatggaaatggtgaggcctgggctggcctagtaggatatggactcatgggaagaaggaataaatgtcttgagcagaggtctggaggtggagaacacaaatggaactcccaaagaaccatgaagaaacacggttctggaaaccaagaacgaggattccttctcagctgaaagtcactaatctttgtgtctcattccagtaaaacccaatcccacaggagtcagagttgcattccaaggccatcagtcaccttcagcagccacacactcccatctctctccttactcactccrtacatgtttttcacctggacaggagcccctgcacaagcgtggctggtgccaggcattgctc

SEQ ID NO: 399506 - DNA, 595 bp, Homo sapiens
cttgttattaaatcccaagataccattcattcattcatgcactcagagaatcattttgtcagcctctaccatgtgcccagcaccatgtggctgttggtgacacaacagaaagcagcagaacagaagaagtctctgccccaacagtgctaatggtccagtaagggaggaagattttaactttttttaaaaaattttatttattatttttttgagatggagtctcgctctattgcccagactggagtgagtgcagtggtgtaatctcggctcactgcaacctccaccttccaggttcaagcaattctcatgcctcagcctcccargtagctgggactacaggcgtacaccaccatgcccagctactttttgtatttttagtagagacggggttttgccatgttggacaggctggtcttgaactcctgacctcaagtgatccacccgcctcggcctcccgaagtgctgggattacaggtgtgagtcaccatgcccagccagtattttgacttttagaaatcactcctgtctgcacatttcacattccccaaccctaaactaccaaaagaaggtagttgttaagtttagaatcatcagg

SEQ ID NO: 399507 - DNA, 595 bp, Homo sapiens
cttgttattaaatcccaagataccattcattcattcatgcactcagagaatcattttgtcagcctctaccatgtgcccagcaccatgtggctgttggtgacacaacagaaagcagcagaacagaagaagtctctgccccaacagtgctaatggtccagtaagggaggaagattttaactttttttaaaaaattttatttattatttttttgagatggagtctcgctctattgcccagactggagtgagtgcagtggtgtaatctcggctcactgcaacctccaccttccaggttcaagcaattctcatgcctcagcctcccaggtagctgggactacaggcgtacaccaccatgcccagctactttttgtatttttagtagagacggggttttgccatgttggacaggctggtcttgaactcctgacctcaagtgatccacccgcctcggcctcccgaagtgctgggattacaggtgtgagtcaccaygcccagccagtattttgacttttagaaatcactcctgtctgcacatttcacattccccaaccctaaactaccaaaagaaggtagttgttaagtttagaatcatcagg

SEQ ID NO: 399508 - DNA, 657 bp, Homo sapiens
acaagtttatcaaaatgttgacattggtttctgcataaaaccacaacataaatcaagtcattcatgtagcaagtatttactgagcacctagtccacagtcagccctgtaagcaacattccacaccagaaaatgcaggaattcatgggcgagttaggcctgcttctatcctacaagaatttgaagagactttgagaaaacaagctacaggcatgaaagataatcctagagctgatgcccaaaggatgatggttcttcaaggcaacatgaggtagacagaaagaggaagaggagtcaacaccatccattagaatgggacaggggttgagaggcagctccagctgacaaagaagtcaagtttccgctgcttataggatgcatagatgcaataatggatagatacacacatgcttgtaaatacagatgaaccaagagatgagcggtccaaaagccatccatccatccaccattaaagaaacatttacccaacacatactctgttccattcataggggatacctagataagtcaaccttcagggagactgtagtctagcctggtggcacggcaattyagtcatagggcaaccaaatgtgactttaaaagttcaaagagaagtcataatagctgccattttttaaatgtctacaatatgttag

SEQ ID NO: 399509 - DNA, 547 bp, Homo sapiens
gactgtcttttctttttttctctttcaatctaattctacccttcttcaagattctgcttggcccatggtctccatcgcagggcttttctaactccagcttgcactggttacaccaacccctgaaggtccacatcctcagcatatgtggtatgtggcatacaatttgccactgagaattcaagcatcagtgtcacagatggttagatgtgaccggacttcagagatggtgtctaagacaggaaactggagcttagggaaagtgacttgtctaggcaagtcactaactacttgacaactaactacttgtcttgtagttagttagtggaatacagaacatcaacaccgcaactctatagttttggtaatccaaatttaccaagtacctgaatyaaaaatagaatcaggacagggcccattgggaaccagcaattgcaaaatgggcttatacctgctgtaaaacaaagagaagacactcagagggggcagttacaaagttgacttctatcagactatatgtttggcaagggaagatactcaaaacaagcat

SEQ ID NO: 399510 - DNA, 577 bp, Homo sapiens
gctgccttttacataattgaactagatggttggccatttggtgtaactggagaagggctggaatatctcctctaccctgaatgtcactcacactgttctgtctcattgcctgggatcctccattggaggtgcactaccttgtcatcttaagagcctttgagataagtgttgtcaacaattcaacatgtggttggcatgacactaaatattcagatacatgcatctccattactgggattgtataaagatagtatcactatcctaaccaaattaaagaaaacctacccaagatgagattcacrtgcttcttattttctgaaactgaaggtacctcatgtctccagaagtgccatgaattccaggccccaagcctagaaaaggaagcaaaagtgtagaaagaaaaaatggccttgaaattagagtgggaaacaagaaacaagcaaggagtaggaaagaagagcggaaaaggagatgctggcagtggtgacagcaaagagaactatggtgcccattttctacagggaagcaatgatttgttcctcatgagccatgaatcctttctccctggactcacctt

SEQ ID NO: 399511 - DNA, 564 bp, Homo sapiens
ggtgtcaccaggctagattggagtgtgttgtctgggatctgctcctttctggaggctctagggcaggttccatttccttgcttttgtcaggttaasttcccttcttttcctagtttactgagtgttttcaacactaaagaatgttgggctttgttaaatgctctttctgtgcctcttgagatgactgtgcggtttctagtctgtcagcatttaaagactgggtagagagaaatgggcctgcaagaaaaagacagacaggagctgccaggaataggagggagaaaaagtgagtgtggtgttattgaagtcaagagaaaaaagggtttcaaaaaggaggaagtgatcaaaagcaccaatactgatgagaggtgagatggaaactggaaaatgttcatttggtttggttttgtggaggtggtttgtgaccttggtgatagctactgtagtgggatgatatgaggtaaagacaactgggagtgcaatgacattacctaaatttcaggcagtctaggggtaaaagctagaggacagtgattacattggagaggttaatatcaggagaac

SEQ ID NO: 399512 - DNA, 564 bp, Homo sapiens
ggtgtcaccaggctagattggagtgtgttgtctgggatctgctcctttctggaggctctagggcaggttccatttccttgcttttgtcaggttaagttcccttcttttcctagtttactgagtgttttcaacactaaagaatgttgggctttgttaaatgctctttctgtgcctcttgagatgactgtgcggtttctagtctgtcagcatttaaagactgggtagagagaaatgggcctgcaagaaaaagacagacaggagctgccaggaataggagggagaaaaagtgagtgtggtgttattgaagtcaagagaaaaaagggtttcaaaaaggaggaagtgatcaaaagcaccaatrctgatgagaggtgagatggaaactggaaaatgttcatttggtttggttttgtggaggtggtttgtgaccttggtgatagctactgtagtgggatgatatgaggtaaagacaactgggagtgcaatgacattacctaaatttcaggcagtctaggggtaaaagctagaggacagtgattacattggagaggttaatatcaggagaac

SEQ ID NO: 399513 - DNA, 544 bp, Homo sapiens
tcataattaagcatataattacctaatgtgtcttttgcattagaccttacattccacaaaagtagggatcatttcagccttgctcatagctgtatcctcaagattcaacatgggtttggcaaaagttaagtattcaatttgttgaataaatagtgataaaataaacatctttaatggtgagtgcaaacaaatcagcaataagaaaaacactaaaattccaacagaaaaaggtaaaagcttaaaactataattttccaaaggaaaatacaagtagtaaataaacataaaaaatgttcaaaccaataatcctgcctctaccctccttgcaaccccttcctttttttttgtttctagcaactttttttttttttttttttttttaaaatacaaggtttcagtctgkggcctagttaagaatgcaagtggtgcaaccattgctcaccacagcctcaaactcctgggctcaatggatcctcccacctcagcctcccaagtggctggactacaggcatgtgctggcatgcctgggtagttctaaattttt

SEQ ID NO: 399514 - DNA, 574 bp, Homo sapiens
atgttaaaactgtaaaaataggtaatttgaggcaataatgaaggatacaactgaaagtgaggacataartgaattaagataattgttaatgtattttggtgcaataaatcaaaataggaaaataaatataattcaacattaaagttacacactttttttttttttttttttttttgagatggagtctcactctgttgcccaaactggagtgcaatggcgcgatctctgctcactacaacctccgcctccttggctcaagtgattctcctgcctcagcctgccgagtagctgggataacaggtgtgcaccaccacacccggctaatttttatatttttagtaaagacggggcttcaccatgttggccaggctggttttgaactcctgacctcaaatgatctgcccgcctcggcctcccaaagtgctaggattacaagcgtgagccactgcactcagcctacacaccatttttaaaagcgacttggctactgtgtcaatagcaaattatgaaactatcactatattcccaggagagtgaaaaaggaaactggagtgctaagcagacattgacaaag

SEQ ID NO: 399515 - DNA, 559 bp, Homo sapiens
caccatttcaccataagctcaaagagcataacggaaaaaatcaaagatcacaaagcaaatacttaagaatgcaaagaagtgagccgttagaagagataaaacattcatgtcttcattcaataaatattgagattccaacaacaacaacaaaacactgcttctaaagtaaaatcagccttacaagtcacgtcactctaaagcagaagctgttcactggaatttacattcaaaaacctccccaccggctctgcctgacttaaaggatttgataaataaccgctgtttcattatgaattacagatctgatgaggaaagccccaaaccatggttttaaacaacgattgccgttttcagacaagttttcaagtcatctggctccaccccgataaaatcttgccacttagccagtaaagaactygtaccaagaatatattttccagtataatttcccatgcttgaaaagttcattaagggaaagcaaaatcaattcctcaaaaaaacttcctttgagcaagccatctacctgctaaggaaatgtccaaatacacaaaaatataaa

SEQ ID NO: 399516 - DNA, 648 bp, Homo sapiens
attaattaaatgaatacataaccacctaatttcatacacgagaaagcaaaggcccagaaaggttcattgacatggccaaggttaagtggaaatgagtggaatataactcaaagttttaaatttagaagtcctagatcatcacagttctgatcctagattacctttggttcattcactcaytcgtgtatgcattatgcattctttattgtatttatttatccacaaatctttatggagcacctaccatgcacctggccttgttctaggcacttgagaaacatcagttaacaaaacaagcaaagattcttgccctcatgaagcttatattctaccgaaggcagacataatggataatttatacggtacctaaaggatggaggtgctatgacaacaggaaaagcagataagttgaatggggaggtctgggggaaaggatcaggttgcaatttaaaatataccagaagctgacttaccatgaagctaatgaaaggtaagttctgggacccttcaattgcaaaggtgtttttccaaggtgtgggagaaacttaaccatagaatgtgtaaaactttcaaaagcaagatattgcaattgctattggttaagagttctgtttctttgcattccaacttcacctccattacatttcc

SEQ ID NO: 399517 - DNA, 648 bp, Homo sapiens
attaattaaatgaatacataaccacctaatttcatacacgagaaagcaaaggcccagaaaggttcattgacatggccaaggttaagtggaaatgagtggaatataactcaaagttttaaatttagaagtcctagatcatcacagttctgatcctagattacctttggttcattcactcactcgtgtatgcattatgcattctttattgtatttatttatccacaaatctttatggagcacctaccatgcacctggccttgttctaggcacttgagaaacatcagtkaacaaaacaagcaaagattcttgccctcatgaagcttatattctaccgaaggcagacataatggataatttatacggtacctaaaggatggaggtgctatgacaacaggaaaagcagataagttgaatggggaggtctgggggaaaggatcaggttgcaatttaaaatataccagaagctgacttaccatgaagctaatgaaaggtaagttctgggacccttcaattgcaaaggtgtttttccaaggtgtgggagaaacttaaccatagaatgtgtaaaactttcaaaagcaagatattgcaattgctattggttaagagttctgtttctttgcattccaacttcacctccattacatttcc

SEQ ID NO: 399518 - DNA, 653 bp, Homo sapiens
ggaggtgctatgacaacaggaaaagcagataagttgaatggggaggtctgggggaaaggatcaggttgcaatttaaaatataccagaagctgacttaccatgaagctaatgaaaggtaagttctgggacccttcaattgcaaaggtgtttttccaaggtgtgggagaaacttaaccatagaatgtgtaaaactttcaaaagcaagatattgcaaytgctattggttaagagttctgtttctttgcattccaacttcacctccattacatttcccctcctgttggagggacaaggagaattttggggatccagctaaggaggaaacgagttggagatacatttggtttgagtttagtgaatttatttatgtggttcatggtctttcctgccatcctcgtgtaaaaaatggcttctgggaatactgccatccactgggccaactcacctggcaccgtggcaggaagtcccactggaagtggcatctgatatgaaagtgttctgcagcacttgaccttggaaataagtggatggagaggaaaaacaaggtttgaaatgtacagatccagaagctagtctgtgtaaaattcttccaaatatcagatgtataaaattataagtgcaagacacagtgcttagtacataggaagatatgg

SEQ ID NO: 399519 - DNA, 536 bp, Homo sapiens
gcaacatactgtatgatcccaactacatggcatactgaaaaaggcaagagatgttgtgagagtcaagtgaggtattaataatatgcaaaaaaaacctcccatctgactcaaaatagactctcagaaccagtaggaggaattatggctactattaatatttttttcttaatccaggacataagtaattaagagaactagartgttcacttcatttgttctgtcactggtggcctcttccccagtgaagtactccttcccgtgaactctagaggcaagactatggagacagtaaaatgatcagtggttgccgggggtaggggggagagtatgatactataatgatgagtacatatcattatatatttgtcaaaacatagactgtacaaccccaaagtgaaccctgatgtaacccgtggactttgggtgataaggatgtgtcagtgtaaattcaccaattgtaacaaatgtactactctggcaggggaagttgatagtggaggaggctgtgcatgtgtgggggcaggagtagatgggta

SEQ ID NO: 399520 - DNA, 510 bp, Homo sapiens
gacccccggctgattgcttggagtaccctccaccgtgcccacaatggtactgactagctctttatgtcctgcacaaaggaagccccaactccccctygtcctcctctgccctgtctcccccacccccatcaccaccacccctgccctcgccagtggctgttgaagtcttttctgcttttttccccagactctgaaacaaacagtaaataaaagctaacctcacctggacttattaggaggagctgggcagttccagaggaattaactttggaaaacaaggccataaaccccttagcagcgtgtgggcaggagcttaaggaaacgctgccaatctttgtttagcggtgattatcgagatcaatttaatattggggaagtttgcataaaaagcattctcggtcagagggggaacaacaaataccaattaattatccccacagctgccctctgatcaccaccacctcagcacgtcagccacctggtctatgtcactggcagtcagaccttttc

SEQ ID NO: 399521 - DNA, 510 bp, Homo sapiens
gacccccggctgattgcttggagtaccctccaccgtgcccacaatggtactgactagctctttatgtcctgcacaaaggaagccccaactcccccttgtcctcctctgccctgtctcccccacccccatcaccaccacccctgccctcgccagtggctgttgaagtcttttctgcttttttccccagactctgaaayaaacagtaaataaaagctaacctcacctggacttattaggaggagctgggcagttccagaggaattaactttggaaaacaaggccataaaccccttagcagcgtgtgggcaggagcttaaggaaacgctgccaatctttgtttagcggtgattatcgagatcaatttaatattggggaagtttgcataaaaagcattctcggtcagagggggaacaacaaataccaattaattatccccacagctgccctctgatcaccaccacctcagcacgtcagccacctggtctatgtcactggcagtcagaccttttc

SEQ ID NO: 399522 - DNA, 571 bp, Homo sapiens
tgttctctactaaacggattctctgtcttgcctgtgaaggtggaactggtrgtaaaaatgtaattacacatattccagcacttttatcaaatcagtaatgaagtttcattggaagaacccgacgttactcttggcaaggacttcgtacagataaagaagaagaagcaaaaaaccttgtcattgagctaaggtcttagggtaatgtcaaaattaactttgtaatgtaaaagtagatataatagactggaatgattgtactccttgaaagtaataacaaacagcagaaatagtaagcagacattaattaaataaaaataaaaatattaaagcagcaattcaaatatggttggggcaaaataaaccccacttgctcctatctagttatcataaccagtaatccgtgaaaagagctgaattttaacgcccattcttgccaattactctacttaacaatatttatttatacctgtatttagagacaaagggtaggtaaagcagagaaagtctgagaccaaaatacagcaacttagatctgtaccatacagagaacaagcaagtctaaactgttagg

SEQ ID NO: 399523 - DNA, 571 bp, Homo sapiens
tgttctctactaaacggattctctgtcttgcctgtgaaggtggaactggtagtaaaaatgtaattacacatattccagcacttttatcaaatcagtaatgaagtttcattggaagaacccgacgttactcttggcaaggacttcgtacagataaagaagaagaagcaaaaaaccttgtcattgagctaaggtcttagggtaatgtcaaaattaactttgtaatgtaaaagtagatataatagactggaatgattgtactccttgaaagtaataacaaacagcagaaatagtaagcagayattaattaaataaaaataaaaatattaaagcagcaattcaaatatggttggggcaaaataaaccccacttgctcctatctagttatcataaccagtaatccgtgaaaagagctgaattttaacgcccattcttgccaattactctacttaacaatatttatttatacctgtatttagagacaaagggtaggtaaagcagagaaagtctgagaccaaaatacagcaacttagatctgtaccatacagagaacaagcaagtctaaactgttagg

SEQ ID NO: 399524 - DNA, 635 bp, Homo sapiens
aactattttaggattaaaatcagttcacaatctagactacattattacactgcttggcaaygtcttctaacttgctaagaatataaggtagctaaaatcattctgggatctggaaataaggataaggtctacaaaaggctttctaatgttataaaaatagggattatatgccaatatatcatgatgcattatgtaattgagaaaaattaattctatgagtattaaggagcattaaaatcaggtttactgcattgcagtgtgagcatttgccaaattgcttatgacatgagacttcacacaatttcaggatcctaactggggatactgtcccaagtgaagacctggaatcctgaatgactggctcctcacgtatcagcttggtcacatggtgctcagatagccactcaataaccttgcattcagccataacggtgattatgttgtgcaacttcccaggaagtagtgatgcatttgactttatttatatggaggaaattaaatcatgatggttggaaggcaggattagaatcctgatactcccagtgatgacctagatcaccttgcccttctaactgactatcatctagttagaatgctggaaatgagaaagagttattgccagtaaaacagagaag

SEQ ID NO: 399525 - DNA, 534 bp, Homo sapiens
atttacatattaaaatgtacccattttaagggtgtactttgtcgagttttgacaaatgtacacaaacaccacaatccagatattgaacattcctgccatctccaatagttccccccaagtttagtaaatcactgataagctttctcttactctagatctgttttgtctttttyagaatttcatatagatggtcctctagtgtatgagtcttttgtatctggtgtcttttatttaccacaatgcttttgagattcagaccagcagtggcatgtatcagatatctgttcctttctgcgagtgttctgttgtgcagctatccctcaatttgtttgctcattcaccagtcgatggatatgtgggtgtttccagtttttctgttttcgctttttgtttgtttgtaggctagaatcttttcctgatacaaaagccagtgctctgtgtttggagaagccatcaagttatttctccatatttgggggtgcctctaattctgactttatgtactgcacagaaatgcctggtggacccttattc

SEQ ID NO: 399526 - DNA, 534 bp, Homo sapiens
atttacatattaaaatgtacccattttaagggtgtactttgtcgagttttgacaaatgtacacaaacaccacaatccagatattgaacattcctgccatctccaatagttccccccaagtttagtaaatcactgataagctttctcttactctagatctgttttgtcttttttagaatttcatatagatggtcctctagtgtatgagtcttttgtatctggtgtcttttatttaccacaatgcttttgagattcagaccagcagtggcatgtatcagatatctgttcctttctgygagtgttctgttgtgcagctatccctcaatttgtttgctcattcaccagtcgatggatatgtgggtgtttccagtttttctgttttcgctttttgtttgtttgtaggctagaatcttttcctgatacaaaagccagtgctctgtgtttggagaagccatcaagttatttctccatatttgggggtgcctctaattctgactttatgtactgcacagaaatgcctggtggacccttattc

SEQ ID NO: 399527 - DNA, 534 bp, Homo sapiens
atttacatattaaaatgtacccattttaagggtgtactttgtcgagttttgacaaatgtacacaaacaccacaatccagatattgaacattcctgccatctccaatagttccccccaagtttagtaaatcactgataagctttctcttactctagatctgttttgtcttttttagaatttcatatagatggtcctctagtgtatgagtcttttgtatctggtgtcttttatttaccacaatgcttttgagattcagaccagcagtggcatgtatcagatatctgttcctttctgcgagtgttctgttgtgcagctatccctcaatttgtttgctcattcaccagtcgatggatatgtgggtgtttccagtttttctgttttcrctttttgtttgtttgtaggctagaatcttttcctgatacaaaagccagtgctctgtgtttggagaagccatcaagttatttctccatatttgggggtgcctctaattctgactttatgtactgcacagaaatgcctggtggacccttattc

SEQ ID NO: 399528 - DNA, 487 bp, Homo sapiens
gaagtgttcatgaacatcaagcaaaacaaaagttaactaaatgaaccgaactcagaaagctgaagcaaccttttgactttcgcttggattattgctgatccttgttttgtttttcagagtcaaggaaacttaccttgaactatttatggtctttaataattgagtaaggtatatgcctatgaacaaaatttggagcatgtttgtttctctctgcctggttcctctaaaatttggaaactgtctctgattattcttatggcaatatatttgttcacatcrgtgcaatgagaatccattttccttttgcaacagaacgaaattggagaaagtgtttattctaccaaggctttgactggaagggtatgcttccctttaaggagtcagtcttggcttgcagagacaataaaaacccagtggggaaactggcctcatacacttgccaacacagtacctatacagggtttctgacctgtagtcagtaaacaat

SEQ ID NO: 399529 - DNA, 456 bp, Homo sapiens
aggcaaaatgatccagggatgagcttggggacaggaaggcatttatgccagtaatctcattgctttgccattaaagtagtatgtatgggaatgacaagaatgaaagaagaaaattgccacwtatttatcatcattcagcttataacatggaggctacagtgacttccaaggacagtgctgataaagtctgaaaataacttgaatcaggcactagaggacatggctgtctacacatgcttgatgcaactgaggcaaatctagaaaattgagttaaaaacataccggcttgaaatctttttccttctgcatgtgtagacctgttgcctgatttcccaaaagtttgtactttctatggaacattagattaagttgtatttttatttgtagtagaatttgttgtcccttaaacaagaaatgagcaagcaggaaacctcccacccaactcgccacttcccc

SEQ ID NO: 399530 - DNA, 590 bp, Homo sapiens
agaagaacaaagatacatctataatgaaaaattattagtctgagtagatgcaagccactagtccactagygttacagactgctctgccatttgagtgaaaggaaaacacagacacatagaatattccagggaaatcttttaaagaaaactcatctgcagtctatatggtctttgaattaaaactatattttgttcaaaggaaagcatcttaccaatggatctccatcatgaaagccaattgttccttaaagtaaacaaaatattaaggttcagaatacaattaaataatgaattcaaacatactaatactagaaagctcatcaggcaaaagtataaaatatatttgtttaataaaatataagaaaccagataatatgctaatattctaaaatcctgactcatgggcatgttctctttggagagccatgaattgcagtagattattttgggaagacattgaagggaaacgaaataagaggcaaaatagaaaatgtggggaactctgaattacaaataaaaatatgaattaccttccatttaaactcatattctttaaatttttcttactatgaaaacctttgtaaaaacta

SEQ ID NO: 399531 - DNA, 590 bp, Homo sapiens
agaagaacaaagatacatctataatgaaaaattattagtctgagtagatgcaagccactagtccactagtgttacagactgctctgccatttgagtgaaaggaaaacacagacacatagaatattccagggaaatcttttaaagaaaactcatctgcagkctatatggtctttgaattaaaactatattttgttcaaaggaaagcatcttaccaatggatctccatcatgaaagccaattgttccttaaagtaaacaaaatattaaggttcagaatacaattaaataatgaattcaaacatactaatactagaaagctcatcaggcaaaagtataaaatatatttgtttaataaaatataagaaaccagataatatgctaatattctaaaatcctgactcatgggcatgttctctttggagagccatgaattgcagtagattattttgggaagacattgaagggaaacgaaataagaggcaaaatagaaaatgtggggaactctgaattacaaataaaaatatgaattaccttccatttaaactcatattctttaaatttttcttactatgaaaacctttgtaaaaacta

SEQ ID NO: 399532 - DNA, 421 bp, Homo sapiens
tccaccagtttatccctcctccaaccccatctcacccaacatcatcacaatttctaagtttctaaaaaaaaaaaatgcttgtaaagtttctaaaaaatgaaaatrgtaaaaaccaacttctccactcagcaactagctggagagttatttgttttgttcactttcaagttcctgtgtaacaatgtgatcttttaaaaaacacacaaattagcagttttaatttgcaatttcattcatactacagaaatatgggaattctaatagcatgggcaattatcttgcccatctttgccccatcttatcttgctagtgtataatgattgatgtagaaaagagcataggtaaataggaaacatgacctataacttgtaattacacttgtgttggtttgcactgaatttgtatatagaattaatgccta

SEQ ID NO: 399533 - DNA, 421 bp, Homo sapiens
tccaccagtttatccctcctccaaccccatctcacccaacatcatcacaatttctaagtttctaaaaaaaaaaaatgcttgtaaagtttctaaaaaatgaaaatggtaaaaaccaacttctccactcagcaactagctggagagttatttgttttgttcactttcaagttcctgtgtaacaatgtgaycttttaaaaaacacacaaattagcagttttaatttgcaatttcattcatactacagaaatatgggaattctaatagcatgggcaattatcttgcccatctttgccccatcttatcttgctagtgtataatgattgatgtagaaaagagcataggtaaataggaaacatgacctataacttgtaattacacttgtgttggtttgcactgaatttgtatatagaattaatgccta

SEQ ID NO: 399534 - DNA, 632 bp, Homo sapiens
agaagtgaagttttggaatcttcacctagatttcagaggatgtatggaaacacctggatatctaggcagaagtttgctgtagaggcagagtcctcaaggagaacctctgctagggcagtgcagaaaggaaatgtgggatctgagaccctacacagagtccccactggggcactgcctaatggagctgtgagaagaaggccactgtcttccagaccctaggatggtagatccaacaacttgcaccatgtgcctggaaaagctgcaggcactcaacaccagcccrtgaaagcagccaggaggcaggctgtgctctgcaaagccacagggatggagctacccaaggcatgggagtccacctcttgcatcagtgacctggatgtgaggcatggagtcaaaggagaacattttggaactttaaggtttagtggctgccttattggattttggacttgcatggggcctgtagccccttgttttgtccaatttctcccatttggaatgggtgtatttaaccaatgcctgtaccccaactgtatctaggaaataactaacttgcttttgattttacactctcataggtggaagggacttgacttatctcagatgagactttggacttggacttttgggct

SEQ ID NO: 399535 - DNA, 553 bp, Homo sapiens
taatggttactgccttcagttggaaagaacaatgaacaaatccatgaattattcttctgtttttctttggattccaaaggccataaatatgaattgaartcatactttaatctttgcatagaaagacttctatctgaaagtgttttgaacttggtataaaatgtaagattggaactcaaacatacttgtatatggaaatcacagttttaatattaatcgtcgtcatggcccataattattttgtatttaaacatgtatgttgttttctggagtgcaaacaagagttattcatgaaattgaataattcttctcccctgctttgaacatcattaacatctatgtggaaataaacacatgttttggaatggaataaaatggtgcaagggatttggcaaccatcaagtcatttagaggaaaacttcccaccctactttggggcccaaattatttagtttctttttattaaaggaattgggcaactgccaaatctcaacttcattttgtgttaaattaggtggacccagcatttcttgctgccctttgttgcatatca

SEQ ID NO: 399536 - DNA, 553 bp, Homo sapiens
taatggttactgccttcagttggaaagaacaatgaacaaatccatgaattattcttctgtttttctttggattccaaaggccataaatatgaattgaaatcatactttaatctttgcatagaaagacttctatctgaaagtgttttgaacttggtataaaatgtaagattggaactcaaacatacttgtatatggaaatcacagttttaatattaatcgtcgtcatggcccataattattttgtatttaaacatgtatgttgttttctggagtgcaaacaagagttattcatgaaattgaataattcttctcccctgctttgaacatcattaacatctatgtggaaataaacacatgttttggaatggaataaaatggtgcaagggatttggcaaccatcaagtcatttagaggaaaacttcccaccctactttggggcccaaattatttagtttctttttattaaaggaattgggcaactgccraatctcaacttcattttgtgttaaattaggtggacccagcatttcttgctgccctttgttgcatatca

SEQ ID NO: 399537 - DNA, 474 bp, Homo sapiens
tactttgtttgaataaaaggktccatgctgtaagagtttcacagtgatggcaaatagagtttttatttccaactttttcatacttaaacagccccttaaagatcactccttgtcctaaatggacagagcagccatgcagactcatgtggacacacagcaaagatatcagtaggagagcatctcagtaggaaacagtaggctgtgatttagttgtgccttttcataaaggtgtgctgttacagtagaacatggcaggaggagaaaatgtaatgctccctatgaacagtatgtatgatcaattatttcccattattgttgagaattagatagcagtttttagatagcaggggttatcattttcactttgactaggtcatacaatgtacacattattatctgaacaacattggcaatgtaatcaccacacaggtatttatttgctttttatgtaagacctgatcataaatgtgaaac

SEQ ID NO: 399538 - DNA, 516 bp, Homo sapiens
cctgtgctgcaagccccaggtgggaatggacaccaaggaaagttctctcaaggcacagcaggaagccaatactcagaaccccatgggacggctaaaatctaaaagctgtctggaaatgttttcaatttaaaaaagacatcgacaatcacccctttggaaacattagaaaaactgcaaatgaagtgatgcaactcagaatccaaaaggtctttcttttcactttaagaaggtcagggtgctgaaggcggatcctcaagctttcatgatcagaatcttggtaggagcggctcttccttttttcaatatgaattgtgtacctctcacagtctgacgtcgattttctcactgctttctatacgtctcckgcttctcagaataagcacaggaaaccttatgaaacccctttatacttttgtcctttcctaaagataataaaggactcattccatagtgcatatttcaaaccaaccatttaattttaattttacatttcagattaatttagttaagcaatat

SEQ ID NO: 399539 - DNA, 516 bp, Homo sapiens
cctgtgctgcaagccccaggtgggaatggacaccaaggaaagttctctcaaggcacagcaggaagccaatactcagaaccccatgggacggctaaaatctaaaagctgtctggaaatgttttcaatttaaaaaagacatcgacaatcacccctttggaaacattagaaaaactgcaaatgaagtgatgcaactcagaatccaaaaggtctttcttttcactttaagaaggtcagggtgctgaaggcggatcctcaagctttcatgatcagaatcttggtaggagcggctcttccttttttcaatatgaattgtgtacctctcacagtctgacgtcgattttctcactgctttctatacgtctcctgcttctcagaataagcacaggaaaccttatgaaacccctttatacttttgtcctttcctaaagataataaaggactcattccatagtgcayatttcaaaccaaccatttaattttaattttacatttcagattaatttagttaagcaatat

SEQ ID NO: 399540 - DNA, 397 bp, Homo sapiens
agctcttctttacacatctggtagaatttggctgcatctggtcctggacattttttggttggtaggctttttattactgcttccattttgaaactcattactggtctgttcagggattcaatttcttcctggttcagtcttcagaggttgtctatgtccaggaatgtgtcgattcttctcgattttctagtttgcgtgcatagaggtgtttatagtggtctctgagggtttttgtatttctgcaggataagtgataacgtcccctttgtcatttctaattgtttttattkggatcttcgctcttttttcattactattctggatactagtctatttttcttattagttttttcaaagaacgaactcctggattcattgtttttttgtatggtttttc

SEQ ID NO: 399541 - DNA, 599 bp, Homo sapiens
tgattttgggtttttattttaatttgctgaggatagttttatttccaatcgcgtagtctattttagagtatgtgtcatgttcaggtgagaatgtatagtctattgtttttgggtggagagttctgtggatgtctatcaggtcatttgatcaagtgccaacttcacatcctgaatatctttgttaattttctgcctttatgacctgtctaatactgtgataggggaactggagtctaccactattatagtctgtgaatgtaagtctctccataggtctctaacaacttgctttatgagtctgtatgctcctgtattgggtgcatatatatttaggatagttaggtcttcttgcagaattgaaccctttaccattatgtaatgcccttcttttctttctttatctttgttggtttaaagtctgttttgtctgaaattaggrtagcaactcctgcttttttctgttttccatttgcttagtatatttttctccatccttttattttcagcatataggtgtctgcatgtgaaatgggtctcctgaagaccatatatcattgggccttgcttctttatccagcttgccactctgtgccctttaa

SEQ ID NO: 399542 - DNA, 549 bp, Homo sapiens
aaatctgttttcccatgagttttcaattaaaacaatcatttaaaaacaatgtaggcccatactggttaagaaagaaaaacaattgttttttcatatagaattattaagagaaaagccccaatagctatagagcattagctgwcattatccgaaaagtaatcacctacattcacattctcatgtcacaaagcatgcagaatggaaatataccacaacccgcacaggactagaatctctggctgcagactgaaggatgaatgggaggccaacagggatctaatggatgctggtcccaaggagtgatatgaaatcacctgccctcgagtatcactaccttactatctacctgggatgtgtggttgatattactatatgttattctagtaactaatagatagaacaaataggtaattaatatatagttttagttttacaaatcatcatactgaatgtacatataatatctttattacatcaaattatgaacttggggcattacaataaatatgaaattcaataatcacagtttgaatatttgctgttctgcac

SEQ ID NO: 399543 - DNA, 556 bp, Homo sapiens
tcttataatcttattccttaaaaaaattcaacaatctatttttggcttatggatgctaagcaaaggaagtaggaaccatgagagccaacatggattcatttgttaaatcttacagttcagaagagtaatcttgattttagcaaaccatttgtcaaaatcatgtgatactgtcaattccttgcaaatagacaaagaaatgtagggtgagttttaggacaatgaaatggattcagagctcactaaacaatagattagaagatgatttacaagtggacagaaagaatcccatggcatttggaaagacctaatccttgactcttggcttttttagtcaacatttctatcaacagctagaatgatgacatgcttatgaaatttagcatgacacaaagttatagggtcagccaacctgctcttcaagagacaacatttcaaaagacatcttcaggttggaayaagatatgaacacaaatgatttgaaattaataagaggaaacataagatcacacacttagattcaaaaaataaacacacagtccataatgagaaacacctc

SEQ ID NO: 399544 - DNA, 580 bp, Homo sapiens
catctttgtccagctttactagttcaggagctcatgccttaggtgctctctctatggttagtctcaattcactctgtaaataatttctaagaaactctacagccttaggtagattgttgacttcattggatctgttgtgcaaaagcgggtggatcatgacgacctggccttttctgagttcactttagggagtggttctgagagagcagtccccggagcagcggagtcaccagggaccttgttaggaatgcaaattcgctggtccacactgrgtccactgaatcagaaactctggggtcgaggtctagctgtctagtttaacaggccctcctggtggttctgctgcacctggtgtggagcaatcgcccattttcctactgaaagggaatgacttatagggcctatagacatcacagccctattttctttggttaacaggaagtctccttggggcagagcttaactttgtttgagctagtaacagaactcttctttaaaaaatgaaagctaagctagaacagtctaaagctgcctttgtcagccttgcctgcacactggaattgcctgaggagcttaaaac

SEQ ID NO: 399545 - DNA, 580 bp, Homo sapiens
catctttgtccagctttactagttcaggagctcatgccttaggtgctctctctatggttagtctcaattcactctgtaaataatttctaagaaactctacagccttaggtagattgttgacttcattggatctgttgtgcaaaagcgggtggatcatgacgacctggccttttctgagttcactttagggagtggttctgagagagcagtccccggagcagcggagtcaccagggaccttgttaggaatgcaaattcgctggtccacactgggtccactgaatcagaaactctggggtcgaggtctagctgtctagtttaacaggccctcctggtggttctgctgcacctggtgtggagcaatcgcccattttcctactgaaagggaatgacttatagggcctatagacatcacagccctattttctttggttaacaggaagtctccttggggcagagcttaactttgtttgagctagtaacagaactcttctttaaaaaatgaaagctaagctagracagtctaaagctgcctttgtcagccttgcctgcacactggaattgcctgaggagcttaaaac

SEQ ID NO: 399546 - DNA, 566 bp, Homo sapiens
aactgctgcataaataacaaacaagttttattatgaatgcttgaacagttcagcctatgtcttagtcactgtttttctcctagaaaatactctgaagaacacagtagaacattttcaataggaactagtagaaatatgcctcaaatcatagtcaaagcttaggttatatctataatttttctgtttttcactgacatgctttacamaatattatacaaaatgttagggcccaggcttaaaacctgagagatatctaactggccttatattcactttgcttggtattacattggtcttttgtgtcataaatattagttttaaatattcacagtttggattaattttaagtccctttgagtaaggctgtatatttttagatattttagtgtgaatcaaacagacactgcaatatgtaaatgaaggtttgagaaaacacacatgtcataattatgactaacacctttctcagtgataatctgtttacatggagatagagcatcaattatagctcatgaataaatgaaataaatagcaactatagagcaatgagaatttccactcgttca

SEQ ID NO: 399547 - DNA, 589 bp, Homo sapiens
ctgtgaggggaaaaccacctactgaagcctcagtaatggctgacgcccctccccccaccaagcttgagcatcccaggttgacttcagactgctgtgctggcagctagaatttcaagccagtggatcttagcttgctgggctccacgggggtaggatctgctgagctagaccacttggctccctggcttcatccccctttccaggggagtgaacggttctgtcttgttggcattccaggtgccactggggtatgaaaaaaaaaactcctgcagctagctcggtgtctgtccaaacggccgcccagttttgtgcttgaaacccagggccctggtggcgtaggcacccaagggaatctcctggtctgtgggttgagaagactgcgagaaaagcgtagtatctgggccagaaygcaccatccctcacagcacagtccctcacggcttcccttggctaggggagggagttccccaatcccttgtgcttccctggtgaggcgacacctgaccctgcttcatctcgccctccatgggctgcaccactgtctaaccagtcccagtgagatgacccaggtacctcagttggaagtgca

SEQ ID NO: 399548 - DNA, 589 bp, Homo sapiens
ctgtgaggggaaaaccacctactgaagcctcagtaatggctgacgcccctccccccaccaagcttgagcatcccaggttgacttcagactgctgtgctggcagctagaatttcaagccagtggatcttagcttgctgggctccacgggggtaggatctgctgagctagaccacttggctccctggcttcatccccctttccaggggagtgaacggttctgtcttgttggcattccaggtgccactggggtatgaaaaaaaaaactcctgcagctagctcggtgtctgtccaaacggccgcccagttttgtgcttgaaacccagggccctggtggcgtaggcacccaagggaatctcctggtctgtgggttgagaagactgcgagaaaagcgtagtatctgggccagaacgcaccatccctcacagcacagtccctcacggcttcccttggctaggggagggagttccccaatcccttgtgcttccctggtgaggcgacacctgaccctgcttcatctcgccctccatgggctgcaccactgtctaaccagtcccagtgagatgasccaggtacctcagttggaagtgca

SEQ ID NO: 399549 - DNA, 566 bp, Homo sapiens
gttttctaataaaaagtgactaatactgtcaaaaaccatgattatacatttcttgcttttctttcatatttccaactgaaaaataacaattgttctctgactgacastttatttcatagtaggatcatgctctggccatgttatgaaatttccccagcagcaactgagaccatttactgagaatgatactctgtgctggaaaacctgttagaaggtaacaaaaatgccatactccagccacctatgccatgaggcaccttcttatttctcaggatgacctaatagaagaataagaaaggaaaataatctttgttgactatttatagaggaccatgcatttttcatgttatttcacttaattcttagttttgaggttatttattttcctcactagtgaagagattgatgctattgaggttaagtaaattgcccaaaaaggttaatgggactagtaagtgacagtgtcagaatccgaactcaggactgtcagattctatttatttgttttccattttaccacctttctttaccaagctctcagtagaaatatgattaaggaactgtcc

SEQ ID NO: 399550 - DNA, 434 bp, Homo sapiens
tggccatgttatgaaatttccccagcagcaactgagaccatttactgagaatgatactctgtgctggaaaacctgttagaaggtaacaaaaatgccatactccagccacctatgccatgaggcaccttcttatttctcaggatgacctaatagaagaataagaaaggaaaataatctttgttgactatttatagaggaccatgcatttttcatgttatttcacttaattcttagttttraggttatttattttcctcactagtgaagagattgatgctattgaggttaagtaaattgcccaaaaaggttaatgggactagtaagtgacagtgtcagaatccgaactcaggactgtcagattctatttatttgttttccattttaccacctttctttaccaagctctcagtagaaatatgattaaggaactgtcc

SEQ ID NO: 399551 - DNA, 453 bp, Homo sapiens
agaatattggttccataaaacaaaagttcaggctggattcagaatcctgggcaaccatctatgtggaaggattgggtgggggagcctcctggaaggatgcaagtaatgtggtgtctaccagggagttccagccacaggggctgtcagttttctatgacaaaataccatagacggagtggcttataaacaacaaacatttatgcatatttctctcagttctggagtgtgggaagtccaagatcaaggtgctggcagaatcggtgtctgacagagtctgccttcttgttcatagatgtcacctactagctgtgtcctcacatartagaagggtgaccaagctcccttgggcctcctttataagggcactaatcctattcatgaaggctccaccctcatgacctaatcacctcccaaaggccccacctccaaaagctccagacagcagactggctc

SEQ ID NO: 399552 - DNA, 483 bp, Homo sapiens
agcgtcttgagctgcacatgagattgatggtggagagggcatctccagacatgtgctttccctagagcttgctgacggggctttctcagyagcatatcctatttccccatgttggttggattcttaatagtttcaatagtttaatgtgaggtagaaagactcaaataattatattggaggtggaaatggtaaaggaaagacatatattattaatattgtgaagaaagaaaaatcctctaattgaagaggatccccttaactgaaggctaaaacccctcattgtttgacatttgacctttaatatatttcccagactcacagacaatatcttgaatctaaaggatttcgatgtatctaacaagaaagagattctgcacattcccagattctcagtgtgaaagcagggaattaatgctattcaaatgtaagagatcccagtctgggtaaggcagattgatgattatgcttacttcagcatgagtt

SEQ ID NO: 399553 - DNA, 517 bp, Homo sapiens
attttggtgcctccagaggtttcatatgggcgcctgcctttacgatgtaggctatgcttctggatttctctatggccctccccttggttttcacctggtctgggtggctcctggttttgcacaggcacatgacctgggcttttcatttggtcctaccatgtggtagctctcggtccatttctgtcttcctggcttctgagaacttgccagggcttttgctgagtgggttgtgttcattctgctctcrtggcactgactgggatgagtttcatgctgatgtacctcagttttctgaagatgatacgttccttgtgtacagaagcctgtctactttctctcgtagtcctttaccacccctccaataccaacagcctcaatgacagaggtccacaaatgttgtattgtgaaagatctaagccaccctcccactccatctaggcactggcatgtttcctctgtcaataatttgtgaagctgatgtgtgtgatggttagagtttggacagattttttttttc

SEQ ID NO: 399554 - DNA, 607 bp, Homo sapiens
aggcttctcaccacagctctcaggatggaacacaattggatataataataataataacataatgttataaatccttacattctctaataagctaattaacttagaagttaatgtacagtatttcctttcttgcaattataacaacacatcaggaataggtagctttaactagattagaaaagaaaaaagagcgagagaagaactaaataaggacaawgagaaatgacaatgatgacactaccactgatctcacagaaataaaaaagatcctcggagactattatgaacacctctatgcacacaaattagaaaatctagaggaaatggataaatttctggaaacacacaacatctcaacattgaaccaggaagaaagtaaaaatttgaaagaaaaatttgaaagaaaaatttgaaagaaaaaatttgaaaaaacaataacaagttttgaaattgaatcagtaatagaaaaactgccaactaaaaaagccttggactagatggattcacagctgaattctaccagatgttccaagaataactggtatcaatcatattgaaacgattaaaaaaattgataaacaggaactcctctctaactcattctaag

SEQ ID NO: 399555 - DNA, 622 bp, Homo sapiens
gtgtgtgcgtgtgtgtgtatgcaaatatacatatgtcatatatatgctcaataacatttgatatactgacattgtcaagtaaaattagcttcacaaaagatattcttattactttaggatatattgagtctcctgctttttatttattcttttyattttatagaaaaatatcacactttaatgaaatgttgaattgcattttttattcctataataggtttacttatagtttattacctcttctgaaaatatgctcttctctttttttagccctattttaaatgaattattagattcttataagttcctagaatataaattttgagttgatttagattaaaaaaactgtagctatgttaatacaattttgaacttcaaagagtaaagcttgcaaaatattaaaatagaagccatagtgaaaatttatacacaaattattttgctggaaactacaacagcattaaaaacaacaacaaaaaatactcattgtgtgatatttctagtcatgaaaaaaccactttgaaagatccaaaaaaataaatgtatgtaaaacatttgaaaataattttatctgttatgactcactaaggtctcctatatctacatttgatttgttccattc

SEQ ID NO: 399556 - DNA, 622 bp, Homo sapiens
cttcattatagtaggataagttgtttagaataagttgtattagttttatgttgctgctattaaaaaaaaaactagtacaaacttagtggcttaaaagaacaagtctataaatcagaaatccattacaaatcttacaaggctaaaaccaagatgtctggagaactgtgttccttactggaagctctagggaasaatctgttctcatgctttaaaaggacatacatgttccttggttcatgggcctattcctccgtcttcaaagtctgaaacagaagttaagtacttatcatgtctcattactcacctctccttttttctccctcttctacttctaagctcacttgtaattactttgtgcccacttggataattcaggggtagctacccattttaaagtcagctggttagtaaccttaatttcatctgcaacctcgatttccttcttcaatgtaccctaacgtatctaccagttttgaaaattaggatatgtgcatctttgagggggtcattattcttcctatcacaagtatgttttaatctttttctaaagttttttttttttcaaaaatagatgaaacactaaagtgtttgctacctatttcagtatttattactctaaatg

SEQ ID NO: 399557 - DNA, 472 bp, Homo sapiens
tgtgaaaatacttctgcctttattataagttgatgactataactatatataatcagaaagcttagatataatagagggagtaagtcatatataaatgttgctatttattaatatcttctctctttgtcaaagttatatgagatacttataaataatttcactagcagtcaggagaagaaaagtgctgttagtttgatttagggaaaaaaggaagcctcatgaaaagtacaatttygacttgacaagtacagagggggataaatgttgttttacaaaaaataaaaataaactgtatgatgaaagcaaacagatgaacagttacaaatgagcaatcattggttatttatttatctgaaacacagtggcagaagaaaacagtgagaaattatacaggaaatatagattgaagtcagagaataactttctaaggaatttgtatttgactcttcagatcaacattaccactaattga

SEQ ID NO: 399558 - DNA, 516 bp, Homo sapiens
atataagtgctcagaaattatgagccattgttgctactaattctgtgatgataaatattactttgcaagatactagtttcactacaaccattattatttatgataaatataggataaccaaaggaggtaccacataaaaacattatttaaaatcgaaatgatatccatttctttttaaataatttttctggaagaagttagtaacaggttttgtaaaaaataaattcaaaaaattaaaatctaggaattatctctacatacaaattccaagagactagccgtttgtgaagaaccatttattgaatgtttatatatattaaaatgaaaataagctatgaaaatatttatcacacagcattccagaagagagaaatactgtgtacattatggtggtataaagttgtacaarggctgggtgtggtggctcatgcctgtaatttcaacattttgggaggcacaggtggtaggattgcttctagccagaagttcgagacaagcctgggcaataaagcgaga

SEQ ID NO: 399559 - DNA, 552 bp, Homo sapiens
tttgctaaatatgattcattttgaggttgtatatacaattaattcataaaattttaaattttaaattagagattaaactagatgtatttaaagtcaatctctaaacctacaggccattcatttggaacacayttccattgaaattggaaacacaaaacgacatatctaaatgaaaatcatagcttagggaagagagggagagatacacacacacacaaacacacacagtcacacacacacacacacacacacaaagagaataatactattggagaaaataagcatctcatccccagtgtcatcataaagttcctcacgagaactgatcacaataatcattattttttgcatttttaaactttcaaatatatcagatagttgatatggatctctagtgttgtacactaaaaattgcctttttattattttaaagtagaatatttttggcattcctgagaacagaggctatagtaagtagatgttagtctcaatacagtcaccttgtgtagttattcagactataaacattcattttgccatacaagcaggaat

SEQ ID NO: 399560 - DNA, 561 bp, Homo sapiens
tataggccaaagaaaatgagaagaaagccaatatgaagagacttgacattatttcccagtgaaatcctgggaacctacaccaacacagtgtaactttggcattataaaaatgcaagaagggcacatttaggcagagactgattaagagattctggcttctcattttttcccaaggaatccagtttctcagaagaaaggtaaaacatagctgggatatgggagagagagagagagctgatcttcaaatgatagtgaagttagaaatgagaagacctggagtcagaatttgtggaatgtacaacttaactaggaactatatattaatagaagacttacctaagaaaaatggtatttgcagaaccagggagaagcagaggggatagactggaagactagtgggcccagactacatccagataaaaggccacaaattacaatagctgtcaacagttttattggaagcagcaatgatagagagcattacctagagaccaggaragtggagtgacctcacaaaagagtaaatgggaaatataggatgatacaaatgactggtgagga

SEQ ID NO: 399561 - DNA, 636 bp, Homo sapiens
tgctgaaacttaggtttcttctgagtggaatggcttgttactagtgacagcttatcaacctggatccagtctgtgtgtttcactgtggagtgcccagtccacccccttggtcagtttggggatagtgtcccatcggctctaagaagrgggtaggaggtgaactctactctcttagatatctaacctttggtgtggactgccactaagaagagggcagcacagcctgacaaagccacccttgggtcaaaggaaatgtgaatgtggtgccagtctttgacagagaaaacaacaaagccacagtaaggacttgtagtcgggagtcatctcttgccccctcccggtaactaactgctgaagacagcagcagttcttccattggggcccagagagcatgggctgaaagaggtgcttcccaggcttctccagcggtttcacccttgccaaagaccaacgtagctggggaagaatatttttcgtgcttctctatttactccaccactgcagaaggccagccaagtaagagcctacctgccagctcttactctgaagcgccgtctactggaagtcagactgaattataccaccactacaccaagcaatcttgagaaagccatctgaaaccgaggaccctgcaca

SEQ ID NO: 399562 - DNA, 614 bp, Homo sapiens
tgaattttaaaaatgtggtatgtatataccatggaatagtatgcacccatagaaaagaatgaaatcatgttctttgcagcaacatggatgcatctggagaacattatcctgaatgaattaacacctaaacagaaaaccaaatattacatgttctcacttacaagtgagaacctaaatgttaggttctcatgacatacagatgggaacagtagacactgaggactccaagtgtgggaagggatggagaagcacaatggctgaagaagctggatatagtgttgggtcctatgttcactggttgggtgacagggtaaataaaaggccaaacatcaacatcacacaacatacccttgtaacaaacctggacaygtaccccatgaatcttaagtaaagagaaataatttttttaaaaaactacaaaaatgaaaacactattttattcaatctattaatctggtcataggtgttcttttgatgcattaaacttgtagcattaattctattttttcttctatcaaacaataaatagattaaaattatgcctgggaaaatcatggtcttctgtggggagaagagaaaaaggaaaacttctccttaggcacataatctgaaaa

SEQ ID NO: 399563 - DNA, 574 bp, Homo sapiens
ttttcataaatggcagaattttcttcttttttaaggtggataaatactgcctgatttcacttacatgtgaaatctaaaatagtaaaactcatagaaagagtaaaatgctcgttatcatggattgggggcaggagaaatgaaaagagactggtcaaaaggtacaaagtttcagttatgcaagatgaataattcatggtaatttaatgtacaacaatgtggctatagttaatactgtattataaacttgaaatttgctaaggtaaaagattttagttttcgtctcacaaaaaagaaagaaaaggagagatgatggatgtagtaattagctagactacgttaatcatttcacagtgtatatgtatataaaaatatcaagttgtatrccttaaatatatgcaatttttatttgtaaattaaataaaaatgtttcaataaagctggagataaaaccttggagaagctgatggcttatattaagtaaagttgaagtacctcagttactgtggcagatggtagataaaagaaataaaaggactcaggggtgtgttcataaaatgattacataatgtaaggt

SEQ ID NO: 399564 - DNA, 574 bp, Homo sapiens
taaaaacagacataccatttgacccagcaatcccattactgggtatacaaccaaaggagtataactcattctattgtaaagacacgtgcacatatatgttcactgctgaactattcacaataaaaaagacaaggaatcaacctacatgcccatcaatgataggctggataaaaaaaatgtggtacatatacaccatgaaatactatgcagccayaaaaacgaatgagatcatgtcctttgcagagacatggatggacctggaagccattatccttagcaaactaatggagaaataaaaaccaaataccacatgttatcacttataagtaggagctaaatgatgagaacacatggacacatagaagggaacaacacacactggaacctttaagaagatggagggtgggaggagggagagagtcaggaaaaataactaaaaggtactaggcttaatacctgagtgatgaaataatcagtacagcaaacccccatgacacaagtttacctatgtaacaaacctgcacttgtacccctgaactttaaataaaagtaaaaaaacaaaaatatgcattga

SEQ ID NO: 399565 - DNA, 622 bp, Homo sapiens
agctgcttcagctccaacgtggctaaaaggggtcaatgaacagctcaggctcttgcttcagaaagtgcaaaccccaagcttttgtggcttacttgtggtattaggcttgcagatgcacaaaagtaaagtactgaggtttggaaatctccacctagattttagagaatgtatggaaatgcctggaattccaggcagaaatttgctgcaggggtggagccctcatggagaacctctgttagggcagtacagcagggaaatgtgaggttgaagctcccacacagagtccccgctggagtactgcctagtagagctataagaagagggccaccattctccggaccctacaataagtagattcactgacagcttgcattgtgagcctggaaaagccggaccctcaatgtcagcctgtgaaagcagtcagaaggagggctgtaccctgaaaagccacaggggtggagccrcccaaggctgtggaagcccacctcttgcatcagcatgacctggatgtgagacatgaagtcaaagtagatcatttttgaactttaaggtttaaagactgccatactgaattttggacttgcatgaagcctgtccattttggccaatttctatcatttgg

SEQ ID NO: 399566 - DNA, 617 bp, Homo sapiens
actttcaaacttactacaaaattacactaattgtgacagtgtggtattggcataagagtagatatagagatcattgtaataatattgatagtccagaaataaaccctcacatttatagtcttattaacttttatcaagagtaccaagcaaactccatggcaggtagtcttagcagatggtattrggacaattggatatccacatgcaaaagggatggatttatatgtcacatcatattaaaaaataacttaaaagtagataaaatatctaaaaggtaggaatcaaagtagaaaactcttagaagacaacaaaagcataacttttatggattaaacaatttatttagatatgacatcaaaagaacaagcagcaaaagataaaaataaattggacatcatcaaattaaaaacttttgtgatttaaagaacatcatcaggagattagaaactcacccacagaatgggtggaaaatttttgtaaattataacttagaaaagacttttatctacaatatatgaggagctctttcaactcaataacaaaaaggcaaataatccagttacaaaatggggaattgatctgaataaacattctccaaagaagaaatacaaatggcc

SEQ ID NO: 399567 - DNA, 617 bp, Homo sapiens
actttcaaacttactacaaaattacactaattgtgacagtgtggtattggcataagagtagatatagagatcattgtaataatattgatagtccagaaataaaccctcacatttatagtcttattaacttttatcaagagtaccaagcaaactccatggcaggtagtcttagcagatggtattgggacaattggatatccacatgcaaaagggatggatttatatgtcacatcatattaaaaaataacttaaaagtagataaaatatctaaaaggtaggaatcaaagtagaaaactcttagaagacaacaaaagcataacttttatggattaaacaatttatttagatatgacatcaaaagaacaagcagcaaaagataaaaataaattggacatcatcaaattaaaaacttttgtgatttaaagaacatcatcaggagattagaaactcacccacagaatgggtggaaaatttttgtaaattataacttagaaaagacttttatctacaatatatgaggagytctttcaactcaataacaaaaaggcaaataatccagttacaaaatggggaattgatctgaataaacattctccaaagaagaaatacaaatggcc

SEQ ID NO: 399568 - DNA, 609 bp, Homo sapiens
gtaggaatctaactgtagcatttttcatttgtgtactattgcaggaaggattaaattagttagaattaaagcatgtagaacaaattccaggagtagatccacagctgataatgttaatgagaaaaaaatgctttaaataggatatcagaaaggtccagaagaagaaaatagtacttcagtattcacaataattgtttcttaagtaattgcaagataatacaacaggaaaaatattttgagctagttacagtgataactgagccctagatcaaccagtttctagccatgtaaacttsgaaaagccacttcccttttatattatttattcacttataaacaagacacaaaacctactttccctacctcacagattgataatacagaatatgtatgtgtatacacatacatgtacacacgcacacactctacataatgtatattatatacaattatacataatagagcaaataatgagaatataaatattcaaatataaacatttataataaatacataatatagtgttttaaatataacttaaatagaatatatttctataatatataaaacaataaaatatgtagtaatcatatatgttatactagactt

SEQ ID NO: 399569 - DNA, 596 bp, Homo sapiens
tgggttttttgtttgtttgtttgtttgtttgttttcttttgagacggagtctctgttgcctgggctggagtgcagtggcacaatttcggttcactgcaaacttcacctcccgggttcaagcgatcctgctgcctcagcctctggaatagctgggactacaggctaatttttgtatatttagtaaagacgaggttttaccgtgtttaccaggctggtctcaatctcctgatctcaagtaatctgcccrcctccgcctcccaaggtgctgggattacaggggtgaaccactgtgcccggccaagtatcaaaatatcttatgtactccaagaatatacacacctactataaaagaactaaatcttttttttaaaaaaagggagtaattatggttataatgctatatagcatacatctttttcaacatatattacaaacagtgtaaaaataatatacataaaaaatatacctagaaaagtcacattttcatagtgtcactaaatgtttaaaattgctacagaaattttcaaaagagtgttttaataacattcaagaacgaccctaaaaatataagttggagattgaaaatcatttatgtg

SEQ ID NO: 399570 - DNA, 567 bp, Homo sapiens
gaccatttttagtctcatatgacgctccagaagcttagcagtctcttctagaggtggagtccattttccctcccttgaacctctgatggtgtttgaaactgctgcttttaatagagtagaatgcagcagaggtgatactgcattacttytaagttttaggtaaaaaaaaaaaaaaaaaaaaaaaaggtggatacaattttcctctcaggacatgcaagccattttaaaacccaaaccaaaccaaaccaggaccctgtgcttccttaaaaaatcaatgttggaaagacacaggaagagactccatggaaataaaaagaaatgcccaaaaaggcttggctgtttgaggtgtcctactccaagccttaacatgtgtgtgagcaagacatcagataattctagcaaacagtcttccaactgcactggggtagcagagaccagctttccctttcaaggcctttccaaatttcagagtcatgactaaaactactgttattttaatccactcaaatttgatgtagttcattatgcaacaacaaataactgaaaaagacaattagacaaagtgtt

SEQ ID NO: 399571 - DNA, 530 bp, Homo sapiens
caggctcctctgagcccttttctcaattaggccttaactctggactttttataaaaactgcagatgttcagcagaaattattttgtttcattcyctcttctacgtatggaatctgataccctgcaggtgtaggctaaccctccagttactatctggcaggttaaggcagccagcctaagaagtaaacggttgaatgtggcaatagcctacttgaaaaaaatgtacatgtcatagactcagaaatctcgtgagaggttactttcaaaaggagaattttcaataatcttgattaattattcttttttcatttaatcttggttcaacttttagtgagtttctcagaatttgctcttttaacaaaatgtttgtttttaaaaatacctgcttgaagattagctcttactaacataaatacaatactgaggatatatatctactgacaaattaaaacaaaggatagatgtgaaagtaaaggttttgaatttttaggaatttctccaaaggcagggtttctataataatttatcttg

SEQ ID NO: 399572 - DNA, 598 bp, Homo sapiens
atctatatctctctcaaaatgatatgcctagaacttaacatggttttccattgtgatctattagacagtaaaatgtatcatcttcactccaatatcacataatatcaacttagatatttggccaccatagtacatcattccttcattcatttattcacaatattcagtgagctttttatcaactaaaattgctggataatttttaatgaatttctacttacctcatcctctacttacaagtgtggtttcttagacccaagtgacctttcaaaacatgtatttgctaaatgtttgaaacagaacaaaatcaaagattttgatcactccattgtaaaatttattccaagaggccaataatgaaacagagagtttagtgtgtgagcagctatataaattgtacaaagtcacagggatataactgagataacacaaaggacatcaaattctcatcatatttttaattccctcttctttattagacattgtacttcaaagttctgaaagacaatttgtttgggaacaccctgaacaaasacacatggttggattgtcaaatgagactcacacaaattagaaaatttattttatattaaacttt

SEQ ID NO: 399573 - DNA, 567 bp, Homo sapiens
gaccatttttagtctcatatgacgctccagaagcttagcagtctcttctagaggtggagtccattttccctcccttgaacctctgatggtgtttgaaactgctgcttttaatagagtagaatgcagcagaggtgatactgcattacttctaagttttaggtaaaaaaaaaaaaaaaaaaaaaaaaggtggatacaattttcctctcaggacatgcaagccattttaaaamccaaaccaaaccaaaccaggaccctgtgcttccttaaaaaatcaatgttggaaagacacaggaagagactccatggaaataaaaagaaatgcccaaaaaggcttggctgtttgaggtgtcctactccaagccttaacatgtgtgtgagcaagacatcagataattctagcaaacagtcttccaactgcactggggtagcagagaccagctttccctttcaaggcctttccaaatttcagagtcatgactaaaactactgttattttaatccactcaaatttgatgtagttcattatgcaacaacaaataactgaaaaagacaattagacaaagtgtt

SEQ ID NO: 399574 - DNA, 615 bp, Homo sapiens
ttaccacgttcttctgttctgttcctgtgccttcctgcttgcttgcctttctttcctccttccttccttcttacattacaaatctcaatgagacaagaataattcggcatttctaatattacatgtgtaacttatttgtgaaaagatatttttaaagatgaaaaacaatctcattacagatgagcattaacatattaacttttgcaatcaattttcaatataggaaaccctaactttgaactgtaattgagcaaaaatgttatccatcccccaatactcctattcttctcattggcagacttgtattacaaaagttttgctcagtcattattgttgtcattgctgttgttttgtactgaattgtgtttcccaaaaaattcccacattgaaataataacccccaatgcaactgcatttggagatagggtagggtctttaaagaggtaattatggttaaataaggtaatgaagacagagctctaatgtcaaagcatttgtgtccttttaagaaaaggaagggtgagcatacrgtggaaaggccatgtggagtcacagccagaaggcagccatctgcaaacctaggagaggtctcaggagaaaccaaagttgccagta

SEQ ID NO: 399575 - DNA, 552 bp, Homo sapiens
cctccttcgtaatacagtcacactggtgttttstatttcaacataagaattttggggaggagacacaaactttcagtccatagcagtaacatattcataaatgtgactttgcctgtgataactgaggcttatttttattgtcccaaagtcctgttgcgttagtattacttttgttctcaaatggctgtgtcaggaacaataaatcatgtgattgcacaagctaacacagtacttaaaaggcaattaaataaattgcaacttccaatcaacttagaatagaaaattcagagttgttcttcgctaatcttttatacaaatccccaatacatggtcctaaaattataattttgaggcaaaaacattatttttgcttagttaagtggatgttcataattttctacaattctatctaataaaagattaaatatcctaaatgtcttttcaagtttaaataatcactaatagtcattttaaaaacttagaggtatcaagatccactattattttaatataattattttacttttctgtaacatcaaaacaaacattaag

SEQ ID NO: 399576 - DNA, 552 bp, Homo sapiens
cctccttcgtaatacagtcacactggtgttttctatttcaacataagaattttggggaggagacacaaactttcagtccayagcagtaacatattcataaatgtgactttgcctgtgataactgaggcttatttttattgtcccaaagtcctgttgcgttagtattacttttgttctcaaatggctgtgtcaggaacaataaatcatgtgattgcacaagctaacacagtacttaaaaggcaattaaataaattgcaacttccaatcaacttagaatagaaaattcagagttgttcttcgctaatcttttatacaaatccccaatacatggtcctaaaattataattttgaggcaaaaacattatttttgcttagttaagtggatgttcataattttctacaattctatctaataaaagattaaatatcctaaatgtcttttcaagtttaaataatcactaatagtcattttaaaaacttagaggtatcaagatccactattattttaatataattattttacttttctgtaacatcaaaacaaacattaag

SEQ ID NO: 399577 - DNA, 567 bp, Homo sapiens
gaccatttttagtctcatatgacgctccagaagcttagcagtctcttctagaggtggagtccattttccctcccttgaacctctgatggtgtttgaaactgctgcttttaatagagtagaatgcagcagaggtgatactgcattacttctaagttttaggtaaaaaaaaaaaaaaaaaaaaaaaaggtggatacaattttcctctcaggacatgcaagccattttaaaacccaaaccaaaccaaaccaggaccctgtgcttccttaaaaaatcaatgttggaaagacacaggaagagactccatggaaataaaaagaaatgcccaaraaggcttggctgtttgaggtgtcctactccaagccttaacatgtgtgtgagcaagacatcagataattctagcaaacagtcttccaactgcactggggtagcagagaccagctttccctttcaaggcctttccaaatttcagagtcatgactaaaactactgttattttaatccactcaaatttgatgtagttcattatgcaacaacaaataactgaaaaagacaattagacaaagtgtt

SEQ ID NO: 399578 - DNA, 496 bp, Homo sapiens
atcttccacaagtgtaatatggttgtcttttcagtgtaaaaattaactgctaagaaaaatgytgaaatttatctgtttcaagtaaaagacttgtctacttttggtctttaaaggaggtcaaagagtgacctgacatttttgttgggtgacatccaaagtatagatacatgaagatcttgtatctggggtagtacagatttttaaatgaagaatgctccaaatttctgcttaagaaaatgtgctgggctgaagaaattgaggaaatagaattgggttccaacaactcagtatacagaatcatataatttcctattttctgttctttgcctcactgctactcttcattagaactcttgtcgtctttcttgttcagtttcgcatgtctctaaatctgatacttcttgtcagttcatgtgaggtctttccaaatttttaaaaaatctgtcatctataatgatgtataccacaaatagttttcccttgactatatctatta

SEQ ID NO: 399579 - DNA, 549 bp, Homo sapiens
taaaagcaattatacaccatgaccaagtgggattctctaggtctgcaagactgggaaaacagtcaaaaatcaattaatgtaattaatcacatcaataagctaaagaagaaaaatcagataataaatacagaaaaatacctttgacaatagttaacactcataataaaaaactatcagcaaaataggaataaagggaaacttcatcaaattgatgaacatatacaaaaatcctacagataacatcatacttggtaatgagaagctagaaatttttctactaagatcaggagcaaggcaagaatgtcaccactcaccattccttttcgacattayactggaactcttagctaatgtgataagacaagagaaggaaatataagatatacagactcagaaggaaaaaataaaactgtctttgttcacaaattataggattattttagtagaaaatctaatctacaatagaatttgttgaactaataaatgatgatagcaagattccaggatacaaagttaatattaaaaaatcgattactgtcttatacaaca

SEQ ID NO: 399580 - DNA, 595 bp, Homo sapiens
atcttgtgtaattcactttataggggttacatcactctgatactaatactgaatgtagtgcaaaaataaagacagtaattaaatgataatacagtaatactaactcaaaaagagtttaaccacacgaattaaagaagccacattcagttgagaaacagatccatatatatgtggkcttaatggttaataattatggcaatttaaactagaaaaagcagtgttgcaaaatgtatttgatgtaaattgtgtcttctaattcacaccataaattaaaaaattctatgcatattagatatttgtacaaaattttaaaagtaaaattatgtaagaaaatattttaaaagatttgagtagaggataagcgtttcttaaattatcaagaaaaatactaataaagctgtctatataaaagttttaaatttctttaaataaacaatgccacatataaaagacaaatatttctagaagaattgccacttgctatatatatttcagacaaaggtgtttttgttttgtatcttgtcaaaagttcttcagtatgtttcttttggtaagggggaaaaagaccaaattgttaaaataacacagtaacaat

SEQ ID NO: 399581 - DNA, 445 bp, Homo sapiens
tatgagttcagttaatgtatctgcatcccaaccaaaattcytaaaaggataaaccaaatgaagctggctcatatgtccaggaaaagccacacaggcatctttcctattaagctgcttccagtggtggctggaatctgttaaatttctcacggcagttcctaaaatctctgaggaagttttttaaatcatcctaaagtctaaattttattttgcaatggattgtaatttttaacagctttttaaagatacacataccataaaattatcctgctttaagagtacaattcaatgatttttagtaactttgcagttattcaaccatcaccacagtccaattttgcagtatgctatggtgtcgtatctaagaactctttgcctaacctaaagttgtaattgttttaggatgtatcaaattcagagctataaactgttcaaatgttttata

SEQ ID NO: 399582 - DNA, 445 bp, Homo sapiens
tatgagttcagttaatgtatctgcatcccaaccaaaattcctaaaaggataaaccaaatgaagctggctcatatgtccaggaaaagccacacaggcatctttcctattaagctgcttccagtggtggctggaatctgttaaatttctcacggcagttcctaaaatctctgaggaagttttttaaatcatcctaaagtctaaattttattttgcaatggattgtaatttttaacagctttttaaagatacacataccataaaattatcctgctttaagagtacaattcaatgatttttagtaactttgcagttattcaaccatcaccacagtccaattttgcagtatgctatggtgtcgtatctaagaactctttgcytaacctaaagttgtaattgttttaggatgtatcaaattcagagctataaactgttcaaatgttttata

SEQ ID NO: 399583 - DNA, 445 bp, Homo sapiens
tatgagttcagttaatgtatctgcatcccaaccaaaattcctaaaaggataaaccaaatgaagctggctcatatgtccaggaaaagccacacaggcatctttcctattaagctgcttccagtggtggctggaatctgttaaatttctcacggcagttcctaaaatctctgaggaagttttttaaatcatcctaaagtctaaattttattttgcaatggattgtaatttttaacagctttttaaagatacacataccataaaattatcctgctttaagagtacaattcaatgatttttagtaactttgcagttattcaaccatcaccacagtccaattttgcagtatgctatggtgtcgtatctaagaactctttgcctaacytaaagttgtaattgttttaggatgtatcaaattcagagctataaactgttcaaatgttttata

SEQ ID NO: 399584 - DNA, 595 bp, Homo sapiens
ttttgttgttgttgttgcaaaattgctttgcatgttatggaaatgtgatttttcaatttaaataatcagcwctgcaagcacaccatcttataataaataacctaaggaagaatcaatccaccatgactatgtatgctaactcttatagcctgagtaatggtgagaaacctcactaataacaatgtagaaaaatacataattaagaaacattacacaaatacagtccattacatagaattaaaacaagcacacttgaattacaatggagcctcctaaactagttttccttttctctcattttttcatttttgtcaaatatgtatttaatgtaggaagatattcaaataatacaagctgccaggttgggagggaaataatattatagaaatatctgctttctttttcactcagagaacaatttaagatagaaatactgactttttgagtgcagctatatctacacccctatttttttcaatatcaatcattttaatcctgtgcctggagtttattgatgtaattacctgaaaaataaaaacccgaaccaactttaaaaagtcagtggaaaaaaattataaatatttgactgagtatc

SEQ ID NO: 399585 - DNA, 552 bp, Homo sapiens
cccaatcagatggatataagcaagcgtatttctagttttgtgttctacattttcagttcatctctttctttagcaagtgctcatgctgctcttcagattacattttgaatttagaagtctctaacggatgtactagacctatttctgactaacttctgtaaagttaaagctttattttgaaagaggagactaattgtcagctcagttagcaagtgggaagaggaaatttttgtggcacttaattacaagtttttagagatgttatcagtatcagtagagaaaaaccttgaaatgtgrctaaaagtagtatttatattatcattaaaagaaccaggtaatagaagagcatatcttctacctttacactagctttctggcttaaacatcaaagaaagatgaactgaattagaagtatagccagaaaacaaaaactgttgtatgggatgaacaaaaatctcacctaagcataacccaaggcagtttgcactatagctttatattaagaatgacaaaattagctacatcaccttttatagttttttcaatctattg

SEQ ID NO: 399586 - DNA, 552 bp, Homo sapiens
cccaatcagatggatataagcaagcgtatttctagttttgtgttctacattttcagttcatctctttctttagcaagtgctcatgctgctcttcagattacattttgaatttagaagtctctaacggatgtactagacctatttctgactaacttctgtaaagttaaagctttattttgaaagaggagactaattgtcagctcagttagcaagtgggaagaggaaatttttgtggcacttaattacaagtttttagagatgttatcagtatcagtagagaaaaaccttgaaatgtgactaaaagtagtatttatattatcattaaaagaaccaggtaatagaagagcatatcttctrcctttacactagctttctggcttaaacatcaaagaaagatgaactgaattagaagtatagccagaaaacaaaaactgttgtatgggatgaacaaaaatctcacctaagcataacccaaggcagtttgcactatagctttatattaagaatgacaaaattagctacatcaccttttatagttttttcaatctattg

SEQ ID NO: 399587 - DNA, 616 bp, Homo sapiens
agcaatgctaggtagcctttctgtgcaaactctttgcagctgtggaaaggtgaaaacaaaaactttcatacacagttatcttatagctcatagaacgacttgcaaagacatagatggagctggaagccattatcttcagcaaactaatgcaggaacagaaaaccaaacaccgcatgtcctcacttataagtgggagctgaacaatgagaacacatggacacagggagggaaacaacacacgctggggcctgycgaagtgcggggagggtgtggtgaggggactgagagcatcaggataaacagctaatgcatgcagggcttaatacctaggtgatgggttgataggtgcagcaaaccaccatggcacatgtttacctatgcaacaaacctgtacgtcctgcacatgtatcccggaacataaaataaaaattgaattgaattagcaaaaaaaatcccataaaagtagggagcagtctggaatctacagctggacttttgcccttctttcccttgtaaggttccattgtcatgattctcgcatacctcagtttccaactgacacattcaatctctgaccatctcacatccacctttcaaactgaacactcttttcata

SEQ ID NO: 399588 - DNA, 565 bp, Homo sapiens
catctcacatccacctttcaaactgaacactcttttcatagaaaaagagtatcttcagcattcctgaatcttggcttaaattttctattccttgatgttgacctttgctggttcttgctaagtatcttgggacccgattctgactctctgactcctggctcttcctcgatttgatttttctggtttgggatttttatgcctatrtattagccatggttttcagtcttcctgaacacaagatttatctccatctggactgaaaatttgctttgtccatatatgaaaattttttaaaaacttattgagaaagatgaccagttaagtacattgtctacactcctccatgtgtaaaaaataaggaaaaataaaaagtaattttcattgtttacagatgacataactatattcctagaaaatctaactctacgaacaaaaaatgcagtaaaacaaagagagtttcctaagttggcctgaatgcaatattaacttatgaaaccaatagctctttaatacaacacacttcctacacactccaacaagtagggactgtaacaaaaaaaagatc

SEQ ID NO: 399589 - DNA, 565 bp, Homo sapiens
catctcacatccacctttcaaactgaacactcttttcatagaaaaagagtatcttcagcattcctgaatcttggcttaaattttctattccttgatgttgacctttgctggttcttgctaagtatcttgggacccgattctgactctctgactcctggctcttcctcgatttgatttttctggtttgggatttttatgcctatgtattagccatggttttcagtcttcctgaacacaagatttatctccatctggactgaaaatttgctttgtccatatatgaaaattttttaaaaacttattgagaaagatgaccagttaagtacattgtctacactcctccatgtgtaaaaaataaggaaaaataaaaagtaattttcattgtttacagatgacataactatattcctagaaaatctaactctacgaacaaaaaatgcartaaaacaaagagagtttcctaagttggcctgaatgcaatattaacttatgaaaccaatagctctttaatacaacacacttcctacacactccaacaagtagggactgtaacaaaaaaaagatc

SEQ ID NO: 399590 - DNA, 609 bp, Homo sapiens
atttttcatcattttcatccatcagatttagaaaaaattagtcttttcaaatgttggtttgaaagcttactatatgccaggtgttctcacaagtgttctatataagctgtattattcaacttttatactattttgtgaatgtagaattattattatcctcatttacttctaataatctaacatccaaaactagagaggtggttttaaaaatagtggtatattaatactgttgagtacaatgcagttatactacatgtgttgatgcaaaagatctataagatatatcactaaataaaaaattcaaattgaaaaatatgtcatattattttcccatttttgtgataataggaagaaaaggaggagcgatgcatttatatgtataggtagataccggccattgcatagaaagcagactttagaatacagagaaagcattttgcacaggttacctctgggaaaaacagttgaagtttgggaaagaaaagaaaaagttaactttcctattctcccgtgtccatttctatattgtctgcrtcttttgaaaacaaatttgtgcttgttattatttttataaccaaaatgttaaaaacatcactgacatctagcttg

SEQ ID NO: 399591 - DNA, 634 bp, Homo sapiens
gtcctatttttgaatttataataaaatgctttattatacatttaattgtagaaataagtttatatctaaatcacatagtaatcctaattataccgaaaagcctcaaaatttaatatagatactaagttggcagggttgtattcacttctttaattttagagaaaacataggtcaaattatagacccaaacacaaattctatatctagcaccattatatgacaatgtgatattttagttatttgaaaaattgtaaaactatcaacataaaagtaatttgtgtccataaatayatacacacacacacacatatatatgcaaataacctgttttaaaaattattcaaagaaatcccaaatgttcttccccatctaggcagactaactgacattgcttcaagtggctatcgtaatcccattcaatttttagatccacttctcactcagacgcacatgcacagtatattgaaaaaaccaatacttgcactactatatttccaaaattcaatatattaatgtattttacaaactgaaatatgggtaaaacaatataccaagtaaaaataaacaccagcttcttcaagtttttgaaaagaaaaaaagacaagcacaaacatcctcacttcccttatgtatt

SEQ ID NO: 399592 - DNA, 565 bp, Homo sapiens
ataaaagaaataagcccatcagtttaaataagtacaaataatcagggtaatctagagaaaaattataggaacagacatgaaaaaaagtctaaattgtcagcaacaggaagaaaccatgtaattctattatgtaattaactgtccttggcaatatggtatctgaagaacagtacacatactatgaaaaagctttcagttttttgccttgtctgagtcaagtaaaaggaaacagaacwtgtcttctgaatttggatcataagtctaacttctacttacaattctgattgaaatcatttatgtgcctgctatccaaaataaataaataaatatacaacatgtcaagtgatggcaagtgttatgaggttaaggagggtgaaacaccaagtgatggaagattctgtttttgatgaggtgttaatggaaggactctcagataaagtgacatttgaacagacttcaagggaagagtaagccatgttaatggctggagagagtgtccaaaatcacccccgccaaaaaaaaaaaaaaaaaaaaaagcagaccatgcaaaagatttggagtggga

SEQ ID NO: 399593 - DNA, 565 bp, Homo sapiens
ataaaagaaataagcccatcagtttaaataagtacaaataatcagggtaatctagagaaaaattataggaacagacatgaaaaaaagtctaaattgtcagcaacaggaagaaaccatgtaattctattatgtaattaactgtccttggcaatatggtatctgaagaacagtacacatactatgaaaaagctttcagttttttgccttgtctgagtcaagtaaaaggaaacagaacatgtcttctgaatttggatcataagtctaacttctacttacaattctgattgaaatcatttatgtgcctgctatccaaaataaataaataaatatacaacatgtcaagtgatggcaagtgttatgaggttaaggagggtgaaacaccaagtgatggaagattctgtttttgatgaggtgttaatggaaggactctcagataaagtgacatttgaacagacttcaagggaagagtaagccatgttaayggctggagagagtgtccaaaatcacccccgccaaaaaaaaaaaaaaaaaaaaaagcagaccatgcaaaagatttggagtggga

SEQ ID NO: 399594 - DNA, 565 bp, Homo sapiens
ataaaagaaataagcccatcagtttaaataagtacaaataatcagggtaatctagagaaaaattataggaacagacatgaaaaaaagtctaaattgtcagcaacaggaagaaaccatgtaattctattatgtaattaactgtccttggcaatatggtatctgaagaacagtacacatactatgaaaaagctttcagttttttgccttgtctgagtcaagtaaaaggaaacagaacatgtcttctgaatttggatcataagtctaacttctacttacaattctgattgaaatcatttatgtgcctgctatccaaaataaataaataaatatacaacatgtcaagtgatggcaagtgttatgaggttaaggagggtgaaacaccaagtgatggaagattctgtttttgatgaggtgttaatggaaggactctcagataaagtgacatttgaacagacttcaagggaagagtaagccatgttaatggctggagagagtgtccaaaatcacccccgccaraaaaaaaaaaaaaaaaaaaagcagaccatgcaaaagatttggagtggga

SEQ ID NO: 399595 - DNA, 614 bp, Homo sapiens
ggtttctcgaatatattaactttgagaaactwtcatagagaatgtgtttagataaactgtttaacttgattaataagtaaataagcccacattcttatgtttctttaattcttgttccaaattatatttgtctttatcctctaggaactgcttttgaaagttatacaattatactttaataaattagtgagatatttttaagtgtctacttatgctgtgaattatctaggtcaaccaagcctgctttaagatcatctctcttacccaatgataacaccgacatctagtggttattaatctgaatcttggttatctatttcattctctcaagggacaaaactagcttaaaaattttgaagtgcaacataagtactggcttacatactgtagatattgttagtcaaattcagaaaacgatagttacaatggagagtattttttaatgaatcatcttctgtaaagaaacacgaagcatgaatctagaatgtgagctgcaaaaggtttctaactgagggtccaactcagtggaacccggagtgttttctgtagaactctggttccacaaggccttaaaaagtatgcacaatggagatgctgccgtcaaataaaagaaa

SEQ ID NO: 399596 - DNA, 588 bp, Homo sapiens
ctaaggaatgcccaggtagctggtaaaacattatttctgggtgtctgttagggtgtttctggaagaggttatcatttgaatcaatagactgagaaatgaagacccagtctcagagtgtgcgtgggcatcatacaatccaytgaggacccaaatatagtagtgtgaagaaataaagtttacatagaacaacatggcacattaattgctctcttacatcagagcaaacgcaggagaaaatagaagaaaaaggtgaaggaagagcaaatttgctctctcttcttgggcaaggacatcaacattggtgatcctggtccccaggccttcaaactcagactgggactcacaccattggatccactgcttctcacgcactcaagctcaccctggaactagaccactggcttttccgaaccttcagcttgcaaacaacagatcttgggacagcctccacaatcatgtgagccaacccctcatagtaaatatcttcccatatatctatagctacatctgtaactatatgtagatctagataaatagatcctattgattctatttctgtggcgatccctgactaatacaaaagcaaaa

SEQ ID NO: 399597 - DNA, 554 bp, Homo sapiens
tagaacattctccaaggtagaccatatgataggttacacaacaagtctgaacaaatttaataaaactgaaattatatcaagtgtcctctcagaccacagtggaataaaactggaaattgaccccaaaggaaccctcaaaactatactaataaatggaagttaaataatctgctcccaactgatctttgggtcaacagtgaaatcgagatggagattaaaaaaaattgtgctgaacaataatattgacacaagctatcaaaacctctaggatacagcaaaagcagtgctaagaggaaagtttatagcatcaaatgcttataccaaaaagtctgaaagagcacaaagagacatctaaggtcatacctcaagggactagagaaacaaaccaaaccaaaacccaacagaagaaaagaaacaaagatcagagcacaaataaataaaattgaaaccaaaaaaatacaaaaaataartgaagtaaaaacctggttatttgaaataatcaacaaaattgatagaccatatgggactaaccaagaaaagaagagaaaatatct

SEQ ID NO: 399598 - DNA, 537 bp, Homo sapiens
tggtgtttctctagcccctggttaaagataaaatagtatttcagtattggtcacatgctgataaagtggrcatcaaatctaattacttacacttaaaaaccagcattaacaattctgaacttagaaaaatctcctatatcatgcccagtctatgcagtattatgttttctttcaactatttaatttctactatttgctagaccacattatttttgtattttctctcagtagattgtaattccttttcaggaatatatattgtagtacttcgtctgttgcatatgttcaatcgactatttgtttaacaatctgaaaaaaagacaaagcaaggtaattggaactatggttcaatgtaactgatttggtcctcttttttggtagtgtaaatttatttagcaaatatttattgagcgcttatctttctattagatgtcaggcattgtattaggtataaggtttccatgtagcaaaaatttatgatggagtaaagtcaaggtagtttttatagcaaaaatcaatattaaaaaagcaaaccat

SEQ ID NO: 399599 - DNA, 468 bp, Homo sapiens
gactgcttactaccaagtccttttccatggcttccccattcttgacctctttatttgagtcaacttttggtcacctgcatgtcatcattgagtactatttttgtccaggagggcttatgtgtgtcatagtctctaagtttgtcattgtagagaataaatgcccccagtgttataattaaatgacaactcaatattgtcaaataatgaaatttcagcaaattgaattgaaagatctaattggcttttattagctatttttcaactaggcagtatcacgtctatgaaagatgttctgtcaggtggctaaacagtcagtttttgaaaaggaacttgagcaggaacaaggaagcagcataktgcaaagagccatcatctaacatcaacttactgcaggtgactttccttatagcgccaaggcagaggggtcctccgtaccatgcagggtcaggttgattgggcatgtttgga

SEQ ID NO: 399600 - DNA, 567 bp, Homo sapiens
cttatagcgccaaggcagaggggtcctccgtaccatgcagggtcaggttgattgggcatgtttggattggttgctgtgaatcccctggtttttgtttttgtttttttattttttttaattgacctgtttttaagttgtttggttaggtaccaccctaacatgaataattctgttctggttggttctggtctgttgggtctagtgtgggagctcagttcaaaacagcggcctctcatacattttatttaacagtatgcttttctttgatattacttttcttcccttggaacttcataaaatagtgcttctggttttactggcattkaataatactgagaaagtttgagggtaacctcagtttctcccctctgatagatgacttcaagaaaaaattgaatggtggaagaattttttctttattattgagtttctacaatttaactatgatttatttctatctcagtcactctaaatcaaaattttcaactaaacatattgatttcaatctacagactcaattctttctacacttcagtgacattttcctgtattatacctatagatgtt

SEQ ID NO: 399601 - DNA, 567 bp, Homo sapiens
cttatagcgccaaggcagaggggtcctccgtaccatgcagggtcaggttgattgggcatgtttggattggttgctgtgaatcccctggtttttgtttttgtttttttattttttttaattgacctgtttttaagttgtttggttaggtaccaccctaacatgaataattctgttctggttggttctggtctgttgggtctagtgtgggagctcagttcaaaacagcggcctctcatacattttatttaacagtatgcttttctttgatattacttttcttcccttggaacttcataaaatagtgcttctggttttactggcatttaataatactgagaaagtttgagggtaacctcagtttctcccctctgatagatgacttcaagaaaaaattgaatggtggaagaattttttctttattattgagtttctacaatttaactatgatttrtttctatctcagtcactctaaatcaaaattttcaactaaacatattgatttcaatctacagactcaattctttctacacttcagtgacattttcctgtattatacctatagatgtt

SEQ ID NO: 399602 - DNA, 570 bp, Homo sapiens
tttttatcctagctccactggcagctgattaggtggtgcccacccagattgagggtgggtctgcctctaccaatccactgactcaaatgttaatcttttttggcaacaccctcagagacacacccaggaacaatactttacctccttcaacacaattaagttgatactcgatattaaccatcacacagggtatcttcctacattttttcaagaggtatctgttttataacgtgaagtctgaatgttcaagaaacaaagtctgcattgggttatgtatcagaaccacaaygggaaacataagtacactcacagtaggataattcaaagaaggtttaataaaggatttgtttacaaaatggtgcacatgatttagggaaaccagaaaggagcatgcactaccctgtaaccaccattaggccccaaaagaaaaggagatggaatgcttaccagaaccaaaatgagaaattatgtggagaggcccacatgagaagaactgtctcccttaagtcagtaaccaggacaccatccaggaagagagcaaagatagtaaaagcatggcctcactctcca

SEQ ID NO: 399603 - DNA, 570 bp, Homo sapiens
tttttatcctagctccactggcagctgattaggtggtgcccacccagattgagggtgggtctgcctctaccaatccactgactcaaatgttaatcttttttggcaacaccctcagagacacacccaggaacaatactttacctccttcaacacaattaagttgatactcgatattaaccatcacacagggtatcttcctacattttttcaagaggtatctgttttataacgtgaagtctgaatgttcaagaaacaaagtctgcattgggttatgtatcagaaccacaacgggwaacataagtacactcacagtaggataattcaaagaaggtttaataaaggatttgtttacaaaatggtgcacatgatttagggaaaccagaaaggagcatgcactaccctgtaaccaccattaggccccaaaagaaaaggagatggaatgcttaccagaaccaaaatgagaaattatgtggagaggcccacatgagaagaactgtctcccttaagtcagtaaccaggacaccatccaggaagagagcaaagatagtaaaagcatggcctcactctcca

SEQ ID NO: 399604 - DNA, 581 bp, Homo sapiens
gaaccacaacgggaaacataagtacactcacagtaggataattcaaagaaggtttaataaaggatttgtttacaaaatggtgcacatgatttagggaaaccagaaaggagcatgcactaccctgtaaccaccattaggccccaaaagaaaaggagatggaatgcttaccagaaccaaaatgagaaattatgtggagaggcccacatgagaagaactgtctcccttaagtcagtaaccaggacaccatccaggaagagagcaaagayagtaaaagcatggcctcactctccaccttccctcctgttttctgcaggactgatcattggcctaatctacccaagatcaaagggcaaaggtattcatcatgaactctatataaattagccttccagaattgaaatccagtttaaaaagacagaaagtagatttgaaatgacaaacaagatatccagcaaaggctgcatttctcagtgctttacatttctttgagcttctttacttctcccaacatagaatttcttcctaaataaagatggagaaaaatccagagacatccattttgtggaataaaatatataaaa

SEQ ID NO: 399605 - DNA, 581 bp, Homo sapiens
gaaccacaacgggaaacataagtacactcacagtaggataattcaaagaaggtttaataaaggatttgtttacaaaatggtgcacatgatttagggaaaccagaaaggagcatgcactaccctgtaaccaccattaggccccaaaagaaaaggagatggaatgcttaccagaaccaaaatgagaaattatgtggagaggcccacatgagaagaactgtctcccttaagtcagtaaccaggacaccatccaggaagagagcaaagatagtaaaagcatggcctcactctccaccttccctcctgttttctgcaggactgatcattggcctaatctacccaagatcaaagggcaaaggtattcatcatgaactctatataaattagccttccagaattgaaatccagtttaaaaagacagaaagtagatttgaaatgacaaamaagatatccagcaaaggctgcatttctcagtgctttacatttctttgagcttctttacttctcccaacatagaatttcttcctaaataaagatggagaaaaatccagagacatccattttgtggaataaaatatataaaa

SEQ ID NO: 399606 - DNA, 595 bp, Homo sapiens
aagcacatgaaatgtctgggggcmgtaaaactattctgtgtgctactgtaatggtggatacatgacaatatgcatttgtcaaacatagcaatttatggcacaaagcatgaaccctaatatatagaacttaagcaatgatcatttagaagtttgcggaattccaggatggactgtaacaaaaggatctaatactattattacagttgtataaaataacatcattgaagggcgtggggaaaggaggtgctgatccatttaactttagaaaagcatggagactgtaagactaaaggcaaaaggaattgtacataagcctgtgatctcattgatatagttgtcttccatgggagttcaggttaacaattctgaaaccactatactagaattagacaattaagtgaatatgtggaatgtggaagttatgtttttacatgttgttgtatattacagcaaacaaggggagaaggctggaatgatgcatgtaatggattagagttgaagatattatatactcatgtttagcttgatatagatacagatggatatataaatatttacatatatttgtatgttcagaagttagtgtgcacacata

SEQ ID NO: 399607 - DNA, 595 bp, Homo sapiens
aagcacatgaaatgtctgggggcagtaaaactattctgtgtgctactgtaatggtggatacatgacaatatgcatttgtcaaacatagcaatttatggcacaaagcatgaaccctaatatatagaacttaagcaatgatcatttagaagtttgcggaattccaggatggactgtaacaaaaggatctaatactattattacagttgtataaaataacatcattgaagggsgtggggaaaggaggtgctgatccatttaactttagaaaagcatggagactgtaagactaaaggcaaaaggaattgtacataagcctgtgatctcattgatatagttgtcttccatgggagttcaggttaacaattctgaaaccactatactagaattagacaattaagtgaatatgtggaatgtggaagttatgtttttacatgttgttgtatattacagcaaacaaggggagaaggctggaatgatgcatgtaatggattagagttgaagatattatatactcatgtttagcttgatatagatacagatggatatataaatatttacatatatttgtatgttcagaagttagtgtgcacacata

SEQ ID NO: 399608 - DNA, 595 bp, Homo sapiens
aagcacatgaaatgtctgggggcagtaaaactattctgtgtgctactgtaatggtggatacatgacaatatgcatttgtcaaacatagcaatttatggcacaaagcatgaaccctaatatatagaacttaagcaatgatcatttagaagtttgcggaattccaggatggactgtaacaaaaggatctaatactattattacagttgtataaaataacatcattgaagggcgtggggaaaggaggtgctgatccatttaactttagaaaagcatggagactgtaagactaaaggcaaaaggaattgtacataagcctgtgatctcattgatatagttgtcttccatgggagttcaggttaacaattctgaaaccactatactagaattagacaattaagtgaatatgtggaatgtggaakttatgtttttacatgttgttgtatattacagcaaacaaggggagaaggctggaatgatgcatgtaatggattagagttgaagatattatatactcatgtttagcttgatatagatacagatggatatataaatatttacatatatttgtatgttcagaagttagtgtgcacacata

SEQ ID NO: 399609 - DNA, 595 bp, Homo sapiens
aagcacatgaaatgtctgggggcagtaaaactattctgtgtgctactgtaatggtggatacatgacaatatgcatttgtcaaacatagcaatttatggcacaaagcatgaaccctaatatatagaacttaagcaatgatcatttagaagtttgcggaattccaggatggactgtaacaaaaggatctaatactattattacagttgtataaaataacatcattgaagggcgtggggaaaggaggtgctgatccatttaactttagaaaagcatggagactgtaagactaaaggcaaaaggaattgtacataagcctgtgatctcattgatatagttgtcttccatgggagttcaggttaacaattctgaaaccactatactagaattagacaattaagtgaatatgtggaatgtggaagttatgtttttacatgttgttgtatattacagcaaacaaggggagaaggctggaatgatgcatgtaatgrattagagttgaagatattatatactcatgtttagcttgatatagatacagatggatatataaatatttacatatatttgtatgttcagaagttagtgtgcacacata

SEQ ID NO: 399610 - DNA, 449 bp, Homo sapiens
aatgctgatgacttatgattgaggctctgatcttttatgagtmtatcatgaacatcaggaacacatatataacagtacagctctgaagtggcaatctgctcagtgttttgtgataaatctttctccattcagtagacaaatatttctttaggctctgttagtgctagtctctgtgctgggtcgtggaaacaagaaagatatcattcccattttcacagaactcacatctagttgggaagacatatatgaataactggtttgttaagtctgaattagatagatagaaaaactgctttcaaggaaaggcttcattcaaacacagtctatctacacgcttcccttaacactcccaagaattctcaaatagataacgtcatttcctaatatctctaagtgaccaaaaagttttaaatcaaaattcccatgcaggtaacaaataatttaacctt

SEQ ID NO: 399611 - DNA, 449 bp, Homo sapiens
aatgctgatgacttatgattgaggctctgatcttttatgagtatatcatgaacatcaggaacacatatataacagtacagctctgaagtggcaatctgctcagtgtttkgtgataaatctttctccattcagtagacaaatatttctttaggctctgttagtgctagtctctgtgctgggtcgtggaaacaagaaagatatcattcccattttcacagaactcacatctagttgggaagacatatatgaataactggtttgttaagtctgaattagatagatagaaaaactgctttcaaggaaaggcttcattcaaacacagtctatctacacgcttcccttaacactcccaagaattctcaaatagataacgtcatttcctaatatctctaagtgaccaaaaagttttaaatcaaaattcccatgcaggtaacaaataatttaacctt

SEQ ID NO: 399612 - DNA, 449 bp, Homo sapiens
aatgctgatgacttatgattgaggctctgatcttttatgagtatatcatgaacatcaggaacacatatataacagtacagctctgaagtggcaatctgctcagtgttttgtgataaatctttctccattcagtagacaaatatttctttaggctctgttagtgctagtctctgtgctgggtcgtggaaacaagaaagatatcattcccattttcacagaactcacatctagttgggaagacatatatgaataactggtttgttaagtctgaattagatagatagaaaaactgctttcaaggaaaggcttcattcaaacacagtctatctacacgcttcccttaacactcccaagaattctcaartagataacgtcatttcctaatatctctaagtgaccaaaaagttttaaatcaaaattcccatgcaggtaacaaataatttaacctt

SEQ ID NO: 399613 - DNA, 543 bp, Homo sapiens
cccgcattgactttcctgtttcaaacaattcctctggaatgtctagacaccccctttctataggttagtgagtgtttggtgggaatggtgtcgaggattacaggagagtttggagagygtgataagcttggaaacagatttctagcttctttagaatgcagaggtacctagtttctttagctttaggaatttacctgttgtccctgcataaaagaagtcctatgagcatgctttgatgcaattaaacaggcaatcgcaacccagtgtgttaagtgctataaaaagggcagtgaagactgcattggaaatatatacagaaagatttctaagtcaagctggaggacatgggaaagtaaaaagaaaaaaagtataaaagctggagactgaagcacaaataggagctgtcttggaaaacaaggttgaaataagaagagaagagttcattccgatttaaggagtcacatatgtgacaacaaccaaaagtaagacatagtgtgagattttggaagaactgcaagttattgagtcccagtgggacaaaaa

SEQ ID NO: 399614 - DNA, 579 bp, Homo sapiens
caccccctttctataggttagtgagtgtttggtgggaatggtgtcgaggattacaggagagtttggagagtgtgataagcttggaaacagatttctagcttctttagaatgcagaggtacctagtttctttagctttaggaatttacctgttgtccctgcataaaagaagtcctatgagcatgctttgatgcaattaaacaggcaatcgcaacccagtgtgttaagtgctataaaaagggcagtgaagactgcattggaaatatatacagaaagatktctaagtcaagctggaggacatgggaaagtaaaaagaaaaaaagtataaaagctggagactgaagcacaaataggagctgtcttggaaaacaaggttgaaataagaagagaagagttcattccgatttaaggagtcacatatgtgacaacaaccaaaagtaagacatagtgtgagattttggaagaactgcaagttattgagtcccagtgggacaaaaacttgtagagtcaaatcaagaggcaagagataacgttggaaaggtaaataatgaccaaattttaaagctctcagtaggctacac

SEQ ID NO: 399615 - DNA, 543 bp, Homo sapiens
cccgcattgactttcctgtttcaaacaattcctctggaatgtctagacaccccctttctataggttagtgagtgtttggtgggaatggtgtcgaggattacaggagagtttggagagtgtgataagcttggaaacagatttctagcttctttagaatgcagaggtacctagtttctttagctttaggaatttacctgttgtccctgcataaaagaagtcctatgagcatgctttgatgcaattaaacaggcaatcgcaacccagtgtgttaagtgctataaaaagggcagtgaagactgcattggaaatatatacagaaagatttctaagtcaagctggaggacatggraaagtaaaaagaaaaaaagtataaaagctggagactgaagcacaaataggagctgtcttggaaaacaaggttgaaataagaagagaagagttcattccgatttaaggagtcacatatgtgacaacaaccaaaagtaagacatagtgtgagattttggaagaactgcaagttattgagtcccagtgggacaaaaa

SEQ ID NO: 399616 - DNA, 604 bp, Homo sapiens
actaaaattttcaaaacttttaaacttttttattttttattacttctgtggctgtgatctgggatcaatgatctttgatgttactattgtaattgtttggggtgccagaaaccatgcccagggtgtgttctggctgctccactgactagctgtttccctatttctttctctcatttcaggctttgcttttccctaagacacaacaatattggaattaggccaatgaataaccctacaatggcatctaagtgctcaagtgaaaggaagagtcacatgtctttcagtttaaatcaaaaactagaaatgattaaccttggtgaggaaggcatgtcaaaagctgrtatgtccccaaaactaggcctcttgcaccgcttagccaagttatgaatgaaaaggaaaattcttaaaggaaattaagatacgactccagtgaagacaaaaatgatgaaaaagtgaattagtcttcttgctgatatggaaaaaatgttagtggtctgggtagatcaagccagctacatttccttaaaccaaagcctcatccagagcaagacctcaactcatctcgattctatgaaggcagagagaagtgaggaagctgcagaag

SEQ ID NO: 399617 - DNA, 604 bp, Homo sapiens
actaaaattttcaaaacttttaaacttttttattttttattacttctgtggctgtgatctgggatcaatgatctttgatgttactattgtaattgtttggggtgccagaaaccatgcccagggtgtgttctggctgctccactgactagctgtttccctatttctttctctcatttcaggctttgcttttccctaagacacaacaatattggaattaggccaatgaataaccctacaatggcatctaagtgctcaagtgaaaggaagagtcacatgtctttcagtttaaatcaaaaactagaaatgattaaccttggtgaggaaggcatgtcaaaagctgatatgtccccaaaactaggcctcttgcaccgcttagccaagttatgaatgaaaaggaaaattcttaaaggaaattaagatacgactccagtgaagacaaaaatkatgaaaaagtgaattagtcttcttgctgatatggaaaaaatgttagtggtctgggtagatcaagccagctacatttccttaaaccaaagcctcatccagagcaagacctcaactcatctcgattctatgaaggcagagagaagtgaggaagctgcagaag

SEQ ID NO: 399618 - DNA, 553 bp, Homo sapiens
agaagtaaaagtacagtttttgtatgtgattgaagttgttatcaacttaaaatagactrttatatctgtaaaatgttttaaataaacttcatgataaacacaataactgtaatagataaacaaaatataaagagagaagagtcaaagcataccactataagatatcatcaaatctcaaaggaagaacacaataaattaagaaggagacagaaaaactaaaaatcaattataaaataaagaataaaatggcaaaaactccttacctgataataattactttaaatgcaaattgattaaattccctaatcaaaagacacacagtggtttaattaataaacaacaagattcaactttctgctgcctacaagagattcactttacagacacacataggccaaaaagttcagatagatatcttgtttaaatgcgaaccaaaagaacataaatgtctattcttgcatcaaacaaagtaggctttaagtcaaaaactgtcagaagaaagaaagaagatcattatgtaatgataaaatggtcaattcaccaggaagatgta

SEQ ID NO: 399619 - DNA, 473 bp, Homo sapiens
gttctgtctgcttctaagtactatgtctctctcaaatatatatccagtgacttgtaaatatcttcaggatgtatttaagtgtccattgtgctctttttgtatcagacttggaccaaaatctaatttcccccctagtctccataaactcccactcatcccaagamaatgtaggcattttggatctcctggtattagtgtcacctcagacctagaatttagccctctttgtaatattggatattctttcttctccagtgcattattatcatgtcaaatgggaggatcaaaggaatagacttgtaattacattgcaggggtcatcctcaaggcaacaggccttctctttaaccaacagattctacaaacttactgagatcttaaactggttgagggactgccattgtcaattttggtggtcgatatgagtcatatgatcaccagctcttgatatttatgctcatataaattgaaca

SEQ ID NO: 399620 - DNA, 526 bp, Homo sapiens
acttcccacatggtagaaactgctaagtaatgtcttcttcattatctcttaggatattcacagcaatcctgtgagcttggttttattttccccatttgtatagctgaagaggcttacrtatttttccaagatggtacagctcatagggatctgtgctaaaggttagatttgaactcattttcttaactcctagtttaccaatactttcgtcagatcttacaccgacctctctcttttttattacatatttcttaatacattagagtaataatctctctccctcctccccaaacacacataaactatggtttcatgatttaattttcattgaatatttaatcattcgttaaaatttttactttccatcatttctagtaaatacaacgttgggcatatgaaagttttataagtaattgttataatggattataaaatttgtagtatttatttctttgctattcacttaaagccatttgatgtcttcacattcagtgcattcaacttttgagttagaaagtattggttt

SEQ ID NO: 399621 - DNA, 595 bp, Homo sapiens
agtcctgcattttaactggcaacctcatcacagaatggtacctcctgtcacatttatcaccagagacaaccatttagatctctgttacctgatggcatttgagaaatagccattcttcctataacttattcttatcttcatcttgcctttctgtctccttggggtaagattatcctcaggtgacmttacatcttgttttgtgtgggacagtctgattttatttctgttgtcttgacataattgctaacaaccgtttcactttcagaagtgtctcagtttagatgataaattatatggttactgatgcctcattccatctttgattttctcccaaccctattagtaagtaaattttcaggtttatttatttatttatttatttatttatttatttatctctcatagccacactctaatctccaggagatgccaacattttgactaacccttatttcactcccacgaagcactgggtcataccatgctgctgaagctaatgtagacacacacaaaaatgtctcctgaaaaaacaatattagtgacagtacttcctgaacttgttaccatgtgtaaagagaaagagagactgagccaa

SEQ ID NO: 399622 - DNA, 657 bp, Homo sapiens
attaaactttgtaacctctagttacaactagtttcataaattgtctttattctttgtgatgaaccatgttctggtgtttagggatgattgtggctctttcctcaaaaattaagaacagaactgmaaataaaattctagttacaattctaggtgaattttaataaatctcaaaaacgttaacatgaggtgtgtctgtttaggctgctataaaaataccataatctggatggtttataaacaacagacacttgttttttggagttgtaaaatctgggaaacccaagatcaaggcaccatcacctttggtatctggtgagggcttgtttcctgttcacagatgtctgtcttctcactgtgtcgtcacatgactgaaggagcaagggatctctctgtggtccctttaataagggcactaaccctattcataagggctctgcccttatggcataattgtctctcaaaggttctactttaaaataccatcacatttgggattaagtttcaacctatgaattttgagaggatacagaaatttggtttatggcacaaggcaaagatagttttgggtaatttaataatcagattcatttttctttattcttttctgcctacttaccacaggttcacaaaagccaatctgccaaatcatattttcaa

SEQ ID NO: 399623 - DNA, 609 bp, Homo sapiens
gtattccctgcgtaccatatctagataggttctttcactatacatttgcttcatagcatttaccataattttaaattatatacttatgcttgcatttgtttttatctcttccacctgattgcaagttccttgagaacaaaaccatgtttatttttgttcttaataattagcactctacrtatgactcagcacatagagggactcacattttgttaaatgaatgaatgaacatgtggaaaaatggaaacttctgattgattaaaaataattgtatctaagattcaaccctaagcataaaataaacctagaaatctagcacatctagtttaaaatgtttataaagaggactgactctttgagatggtctttaagatttctaataatgataatgagcaaaagcacacatttgatttttgttttactttgttgtactgctgaatgatatgcaaaatgaattgatataatctctgatcccaaagggactagtaaatgatgacaatgacattgagaaaaggctttaatagttatttcagttagctcttaagcatgtgttctaatgttgcaatgattcttcttttgacttcctctctagtgccttttcctttttct

SEQ ID NO: 399624 - DNA, 602 bp, Homo sapiens
ggtgcgatctcggctcaccgcaacgtccgcctcccgggttcaagtgattctcctgcctcagcctcccgagtagctgggattacaggcatgtgtcaccatgcccagctaattttgcatttttagtaaagacggggtttctccatgttggtcaggctggtctcgaactcttgacctcaggtgatccgccttcctccgcctcccaaagtgctgggattacgggcatgagccaccgcacccagccgaaaacatttttacatatggagtatacagtaaaaaaagctgggacctctaggacaacaagtgaaatgaccgattatagttgagaatttttttaaaatractcaattattacttaatttttcacccttcatttagcagggaaaataatacctcttattctagagtatactgtttctatgaatctgactttagagtttgattcaaagaatataaatatatctttttaaaaaatagtacctaaaattatattttacagaatatttttagtctctaggatatattattaagatttatgttacaggttactagctttttaacactttgtatactgttagaattaatgctactaaattattattctg

SEQ ID NO: 399625 - DNA, 637 bp, Homo sapiens
tcactgttttttaacatgttctagaggtacctattttggaagtacttagaaaacaaaacgctatatggagcataaacattgaaaagaagtgataaaattaccatttttgcaaatgatgtaattgtatacttggaatgcttggattatatacttgcagaacccaagattatcaactaaaaatcttgggtaagttggttgggtacaatacaaatatacaacagttagtraccttatatacaattaacagttagaaaataaactggaaaatttccatttgcagtaagaatagcattacagaaaatacccaggaataaataaatttaacaaaactctttaagatttaaaaaaaaaaaattggggtggggagaaaatcaaaaagctgtttgggagatgcagaagatatgaaaaatgaacaatatggcaataatctattcttatagaggaagattcccaatcataagtatgtcaggttttcctaaacttagtatacatttaattttatcagtgcaaataccaacaggatttttaaaatgataggagctgattctaaagcttatttgttatacaaaagttttaaaatatcctggaatgttctgaaataatagagtaaggaggggattgaataggcttgtcaatt

SEQ ID NO: 399626 - DNA, 525 bp, Homo sapiens
gttttttttgtttttgtttttgtcttttgagacggtcttactctgtcacccaggcaggagtgcagtggtgtgatcttggcttactgcarcctctacctccggggttcaagtgatccaccctcctcagccttctgagagtagctgggactacagatgtacaccaccatgcctggctaatttttgtaatttttggagagatgaggtttcaccatgttgcccgggctggtctcaaactcaactcaagcaatccgcccaccttagtctcccaaagtcctgggattacaggcatgagccactgtgccccgcctaacccatggttacatagtgccaatcatgtatttcgggacttctggtatgtgttaaagacccagtcataaatgaaatgtagttcttgtcttcagggagctttcagtccacttcaagaggtagacataaactaggtaagagaatgtacaacatggaaaggaccataataaaaatttaaattaagtgcaatgggatcccatatgaaagaataactttgct

SEQ ID NO: 399627 - DNA, 609 bp, Homo sapiens
gatagtaatttaagtccaaaattattctttcatcaagattttttgacattattggaactttaaatttttrtataaatttggaatctattttctcaatttctttaaaattgttcttgaatttcttgagcaatggtacctaggaaattgatagaaataattgaagagacagttgatgagaaaaagtaaaagttttttaaaatgtctcttctgcctttacatttggcactgggttaagaaatttagcacagagtttgggaacactttatcaagagtttatattttaatcaggctttaaataatagcaagttaaattgtttagaaatacagcaagcatagtggtcaaggatgtgacataaagttacataaagttgcattgaaatcttgttggatatacaattcatcactactgctacaacttgtttttatgttactaaaatatttaagcaattagagtaatcatacaacatggcaaagtcttcaaaatatcatctgactatttaaaaaagctggataatttgcttagtgaattcaatcaataatagagttcaatcatatctaacaccaccaatgttatttagactcattgaagaaaaaaaggaaagtcataat

SEQ ID NO: 399628 - DNA, 609 bp, Homo sapiens
gatagtaatttaagtccaaaattattctttcatcaagattttttgacattattggaactttaaatttttgtataaatttggaatctattttctcaatttctttawaattgttcttgaatttcttgagcaatggtacctaggaaattgatagaaataattgaagagacagttgatgagaaaaagtaaaagttttttaaaatgtctcttctgcctttacatttggcactgggttaagaaatttagcacagagtttgggaacactttatcaagagtttatattttaatcaggctttaaataatagcaagttaaattgtttagaaatacagcaagcatagtggtcaaggatgtgacataaagttacataaagttgcattgaaatcttgttggatatacaattcatcactactgctacaacttgtttttatgttactaaaatatttaagcaattagagtaatcatacaacatggcaaagtcttcaaaatatcatctgactatttaaaaaagctggataatttgcttagtgaattcaatcaataatagagttcaatcatatctaacaccaccaatgttatttagactcattgaagaaaaaaaggaaagtcataat

SEQ ID NO: 399629 - DNA, 504 bp, Homo sapiens
gctttcattgttttatttctctttttatttttattaggagacagtctcttcatatttactgtaagaaattaaatagacattattagaaattaatttacaaatattgcttgtcatgtcaccatatattcaaagatctagaataaaattatgtgctatatcatttcactgaaatatagtagctcccacgagtttagcaaatatttccttcattaaacaaatttgtacttactagactttgtttcaggaagtgggattatrttagtgaataatttaaacaaataaccagctatcatgaagtctacaatctgatggaagagacagctaataaatgaaaacaaacagaaataactaacttaaataatattataaactgtgtaataaaataaagtagaacaaggggttagataatctgggaataattatctcagagattttataagagtagagaccaaaaccattggcaggattaaccaaattgatgtgctctattaagtaacttacatg

SEQ ID NO: 399630 - DNA, 604 bp, Homo sapiens
tcctaattttcaaatgttaaatgtgtaagagatcctaattttcaaatgttaaatgtgtaagaggtaagtggaatattgaataatataggaaaaaaatcagacattgtgacaagatgtttgaagagttctatataaaatattacacaagaaaagataagaaataacagagtgaaggaagaaacatccatttgtcaatttcacaagcataaaaaggttcacaagagaaaaagttcacaagagtaaaatgtgtaaaagatggccagaataaaactttactagcacttctgctttacagtaaagtgtgctgaaagtgatgaaaggacaaaggaaaataattagcacaaggacataaaatttcaaaatgctcaaaggatagatctggaagttttaatgtatgctaggaatagcttcaggcttaggtagggagagcagatagagaaataaaaagaraaaacagtctttaaaatgtctaggcaaattttccaagcaaacaaaacattgtctttttaaataaaatattatgttatcactaatttttaaccactatttaatgcttacacacaactgataatgttttggtctcttagatcatagaagtaaacaa

SEQ ID NO: 399631 - DNA, 580 bp, Homo sapiens
gtattctacacattcaataacttaatatatattataataattggtttaaaaaataaaacaaaacttaaagatattaaatgtaaacattttccacttgtacatataaatgctatttaacttagctcaagatagagacttttaaaaacttacatattccatgtaatgtaacattaagcaaaattatcagttaaaacaatacttattagcttttataatcaaaaaattaaataatacatgatgaccttggagtaagtatttgcaaaaagtagggaaaaaagttaatatatttcrcaaagaatggcttttaaaaactaaaagccgaacagtaacatcctaaagaaacttgacattttctaggaatacattataaaaataagtgtaactggaaaatacacatatgaataaataagattcaatttccaagccatcaaattggtgtagagcagaaaaatgacaacactagtttttggtgctcagtgaagtgggaattctcatataacaaatcataagaatgtaaattagtacagactttgttgaaaggccatactgattgccttaaatttttaaatatttatttctt

SEQ ID NO: 399632 - DNA, 583 bp, Homo sapiens
aaattatttttagagttaactctagatcttctctagcaaaacagaaaagaataaagcaacaaacaaaagcaaagtgagaaaggtcaaggggatccacaaaacatttagaatagctaaaacaattttgttttttttaaaaaggacttatactacctaatgtcaagattcattatcaatgaacagtaatcaagacaacatggtgttgacacaaaatctgaaaaaatagattaatgaaacacaagagaatattcagaaataggtgtatatttatatagtcaattaatttttgaaaaagtcactaaacccattcaagggagaaagggatgattttgaatcaaattgcaatgcagaaaatttaaaaacacataaaacacatgtaaagaaatgaaccttggcactaactcatattaaactgaagagttgtttagacataagttmacttaaagcctctatgcagctatggagagacaaagttttatcaatatctataaatcagtaactataaaataagacaatgtgaattggatttgattaaaattaaacttctaatgaatagatagttcacagatggcaggaaatagtt

SEQ ID NO: 399633 - DNA, 595 bp, Homo sapiens
ggggatgactggtagaggacagtctcaaatggaactgatcatttttacctaagtggctgattaacttakttttctctgcttctcctcatatagttttcaatattctcaccaatcactgtttcatcacattacctaaagtaattggagcacatactcagaggaactggttacttactctactcacccctaattatattattatcactttatctcttgtatatgagataaaaatattttgaaagggtaaacattggtgaagacagttggtaaaggtgatttgtggagaaggatttttgttttcaatttgaaatatgattatctcacagtgtttgtaatgtgtagaaatacttgaaatgatttaatatgaataaatactttaaaaagtaaaaaatgttaaatagctttctaatatttcaattatatcctcttaataatccttaatatttaataaattttattgtatgttaagaaggaattatatatattctttatatatatagtgaataaaatgtgcattaaaagttgaaatatgttccaagatacttacttagcaagagtcaaacaattactataattgttgaagtgattattctaa

SEQ ID NO: 399634 - DNA, 591 bp, Homo sapiens
aaattttaattcctcctgataattacttctcccttgcctctccataggatggactaaatatcttttacagctttttcactttctactaagctaacatgtgaatatctcagtgatagcacatctcatgtgaaaatagattatattcttatatatgttctcaatgacatttacttctttgaatgctttttttgcccatagatttatatagccacgctttttgaggcatttcaaaaaattaagtccactatcaaaggataagtgtatattggcattataatatttaatataatgtttggatggacctaaagataattccaaataaggaaatcatagacatgaaagatggtaaagatctttgattaaatgtatyatctctaaatttcttgctattctctactcatgtcttcttttaaatttcaaattaaattatttctgttttatttattagcaaatgcttttacaaatatgagctctatgttgtcatatttgaagtgaaacttcacaagtttgattttggtctttttattgtgcttattattttagatgttactcacattttatattttatatatttaaatttacctgtctata

SEQ ID NO: 399635 - DNA, 444 bp, Homo sapiens
taaaaaatttaaaactgtttgtactaactaaagtagaatatgatgaggtatttatccaggctaacttcctatcttttctgcataatatgtactttataggtggctttgcgttatgatctcaaataaaagtttctaatcattaaaagaaagataagaagtttttagcactcaatggacagcaagcatatatagaaggaccagttttcaagatggttcacagcgtgtgtttttaagccaggagtgaacagtggaaaaaagcccatgtttttcttactttcttaaggacagtggatttgttttgtgtgaatagcaatgcacttatgaatcaaacagtgtatttttcattctggtacaccacagatattttcaattaacytaagcaggtacatttttattctgtttttagaagatggttataatcagaactgagagcaaaaatattta

SEQ ID NO: 399636 - DNA, 594 bp, Homo sapiens
gacaagaagattaacagtgtaattgaaacttaattgaatgctaataaagatgtgacctgtggttattatgatttctaattgttttctcttgatgatacttacataaaacaacaagcaaaaaagtaatacacatgacatttatttatactatagagttatgtaacttgtaaatattttaaactatgtatttggtagttcagaatacttgaatagttttgcactctatgttgtaaatacaaaaatagtaattattcagttatgtcawacatggatttattgtctttcagcctgtatttttatgtgttcttatgcacaatgggactattctgactgacagcatttatcattagcaattttacaactgggctgtgtcaggacctgcctgattctttagactatgaactcttcctcccactcctttgtttatctgttctacattaagaacgtatttattgaattcttattctaaaccaaacactattctagggggagggagaaacagaagtgaataaagcaataaatatctctacctataccacgtataatatcacttgctatccaacactacactcaaggccttaaaattataaatag

SEQ ID NO: 399637 - DNA, 589 bp, Homo sapiens
ttacatatgttttggggttatttgaayatgttattttagaatgtttatttttttctgggttgtaattttactaatacaaaatttaaggctttaacttctattatattttcaaaataaacttcttacatgatttttctttgttaagctattagtaaatagttattgaataaatattaatttaatagttctatattccaggtacacatatacatatgatggaagtatgagggaagaacattctaggcagataaaatagcttgcataagggcttggtatgttcatgatctggcacgttagcataactggatcctaataagttagagagagggagagtacaagatatgcaatcagctagtaggcagaagcccaacctgaaaagggcttgaagacttaatgatgtttggattttatcttacttatatatttaaaagtttactctaattgtttaataattactggataattataagacattgagaaataaaaagccaggagaataataatgacctaaatatggtagtctagatgagaacaaaagggtggcttttaccagaaaggtaacaatacagattatggagataaataaatg

SEQ ID NO: 399638 - DNA, 589 bp, Homo sapiens
ttacatatgttttggggttatttgaatatgytattttagaatgtttatttttttctgggttgtaattttactaatacaaaatttaaggctttaacttctattatattttcaaaataaacttcttacatgatttttctttgttaagctattagtaaatagttattgaataaatattaatttaatagttctatattccaggtacacatatacatatgatggaagtatgagggaagaacattctaggcagataaaatagcttgcataagggcttggtatgttcatgatctggcacgttagcataactggatcctaataagttagagagagggagagtacaagatatgcaatcagctagtaggcagaagcccaacctgaaaagggcttgaagacttaatgatgtttggattttatcttacttatatatttaaaagtttactctaattgtttaataattactggataattataagacattgagaaataaaaagccaggagaataataatgacctaaatatggtagtctagatgagaacaaaagggtggcttttaccagaaaggtaacaatacagattatggagataaataaatg

SEQ ID NO: 399639 - DNA, 589 bp, Homo sapiens
ttacatatgttttggggttatttgaatatgttattttagaatgtttatttttttctgggttgtaattttactaatacaaaatttaaggctttaacttctattatattttcaaaataaacttcttacatgatttttctttgttaagctattagtaaatagttattgaataaatattaatttaatagttctatattccaggtacacatatacatatgatggaagtatgagggaagaacattctaggcagataaaatagcttgcataagggcttggtatgttcatgatctggcacgttagcataactggatcctaataagttagagagagggagagtacaagatatgcaatcagctagtaggcagaagcccaacctgaaaagggcttgaagacttaatgatgtttggattttatcttacttatatatttaaaagtttactctaattgtttaataattactggataattataagrcattgagaaataaaaagccaggagaataataatgacctaaatatggtagtctagatgagaacaaaagggtggcttttaccagaaaggtaacaatacagattatggagataaataaatg

SEQ ID NO: 399640 - DNA, 612 bp, Homo sapiens
tggttttgcttatttagcctgtgcacttctgtcagtaggtttttttagtgtgtcaggcagttcagctcccaggccagcaggtggcacctgtgagcaacaacaaggtgccgcagaaacacttggatgtatgctggacctttgtttactaggatgtactctgtattgttctggtgatgggctagtctctgtgttcatcctggtggggaggtcaaaactaggtggaactggactaccaagatcacctatgaatgtcccaatgaccagctcacacaccagccctgatgcaagtgtttgagggagcccttggtgaaatgtgttgaggttaccataggttggggagggagctgcaccagatccatatcctgggcaggtargaatctaatgtgttttcctatcacacctctgtcccagggctcatgactctcagatcagacagacagtttcctatacctccagtccagaatgtagctaatagccatggaaaatgccggtctcaaagtactctgtggtagtgggacagggtgagacttcttccctcagcccgatacagacagcattgtggcttgcttgttctccagtgcagatatgctactacttcatgtagataaaggt

SEQ ID NO: 399641 - DNA, 612 bp, Homo sapiens
tggttttgcttatttagcctgtgcacttctgtcagtaggtttttttagtgtgtcaggcagttcagctcccaggccagcaggtggcacctgtgagcaacaacaaggtgccgcagaaacacttggatgtatgctggacctttgtttactaggatgtactctgtattgttctggtgatgggctagtctctgtgttcatcctggtggggaggtcaaaactaggtggaactggactaccaagatcacctatgaatgtcccaatgaccagctcacacaccagccctgatgcaagtgtttgagggagcccttggtgaaatgtgttgaggttaccataggttggggagggagctgcaccagatccatatcctgggcaggtaggaatctaatgtgttttcctatcacacctctgtcccagggctcatgactctcagatcagacagacagtttcctatacctccagtccagaatgtagctaatagccatggaaaatgcckgtctcaaagtactctgtggtagtgggacagggtgagacttcttccctcagcccgatacagacagcattgtggcttgcttgttctccagtgcagatatgctactacttcatgtagataaaggt

SEQ ID NO: 399642 - DNA, 612 bp, Homo sapiens
tggttttgcttatttagcctgtgcacttctgtcagtaggtttttttagtgtgtcaggcagttcagctcccaggccagcaggtggcacctgtgagcaacaacaaggtgccgcagaaacacttggatgtatgctggacctttgtttactaggatgtactctgtattgttctggtgatgggctagtctctgtgttcatcctggtggggaggtcaaaactaggtggaactggactaccaagatcacctatgaatgtcccaatgaccagctcacacaccagccctgatgcaagtgtttgagggagcccttggtgaaatgtgttgaggttaccataggttggggagggagctgcaccagatccatatcctgggcaggtaggaatctaatgtgttttcctatcacacctctgtcccagggctcatgactctcagatcagacagacagtttcctatacctccagtccagaatgtagctaatagccatggaaaatgccggtctcaaagtactctgtggtagtgggacagggtgagacttcttccctcagcccgatacagacagcattgtggcttgcytgttctccagtgcagatatgctactacttcatgtagataaaggt

SEQ ID NO: 399643 - DNA, 612 bp, Homo sapiens
tggttttgcttatttagcctgtgcacttctgtcagtaggtttttttagtgtgtcaggcagttcagctcccaggccagcaggtggcacctgtgagcaacaacaaggtgccgcagaaacacttggatgtatgctggacctttgtttactaggatgtactctgtattgttctggtgatgggctagtctctgtgttcatcctggtggggaggtcaaaactaggtggaactggactaccaagatcacctatgaatgtcccaatgaccagctcacacaccagccctgatgcaagtgtttgagggagcccttggtgaaatgtgttgaggttaccataggttggggagggagctgcaccagatccatatcctgggcaggtaggaatctaatgtgttttcctatcacacctctgtcccagggctcatgactctcagatcagacagacagtttcctatacctccagtccagaatgtagctaatagccatggaaaatgccggtctcaaagtactctgtggtagtgggacagggtgagacttcttccctcagcccgatacagacagcattgtggcttgcttgttctccagtgcagatatgctrctacttcatgtagataaaggt

SEQ ID NO: 399644 - DNA, 558 bp, Homo sapiens
atctatcctagtagatgaggcaaaagacatgccctgacaatgcatgctgacttgtaaagtcctttttaattgcactgagcatcatttaayatattcactaaataccatccaattataaataatggaaagcaaagaattattcattgtcaatatgccattatatatatatttaaaaatgataaacatttaaatactttgatttaactaaaaactgagtgtatataataatgtataatttctaataacatgacaaaataaaaattgtcatagtgtgatactttgttttatatattaataacatagtatataacataacactacaatattatgactgtggttacatatattaattaaatctaatgttaataatccattaagactatggctttttacatcttaaaaggaatcttcccccaattctgactgtagttttacaaaatgttgttattaagtacttcctagatactttttggggaggtgaatgtatgtgaagtaatgagtagagtatgtttgcaaatatcactgataccggaaaaataatcattggcctaggatagt

SEQ ID NO: 399645 - DNA, 558 bp, Homo sapiens
atctatcctagtagatgaggcaaaagacatgccctgacaatgcatgctgacttgtaaagtcctttttaattgcactgagcatcatttaatatattcactaaataccatccaattataaataatggaaagcaaagaattattcattgtcaatatgccattatatatatatttaaaaatgataaacatttaaatactttgatttaactaaaaactgagtgtatataataatgtataatttctaataacatgacaaaataaaaattgtcatagtgtgatactttgttttatatattaataacatagtatataacataacactacaatattatgactgtggttacatatattaattaaatctaatgttaataatccattaagactatggctttttacatcttaaaaggaatcttcccccaattctgactgtagttttacaaaatgttgttattaagtacttcctagatactttttggggaggtgaatgtatgtgaagtaatgagtagagtatgtttgcaaatatcactgataccrgaaaaataatcattggcctaggatagt

SEQ ID NO: 399646 - DNA, 558 bp, Homo sapiens
aataacagatatctttgggttttattcctccgacttgaaatactaaaactttctggcaacagaatgtttcaaacacgtcctattttttgagggggttggggtcatgtatagaatgatacatatgcctccaagctgcattacttgttttttctccactcataatatagtttcttacccatctccttcctcttgtcagttaagtctgcataatgctgcctcctagaaaaactttcctggctttccgacttaaaagggccctggcacagcactttctatgctcttttcttatggcacttaaacctatgacagaaattataaaaactgcttgtagctttttgtattttagactatgagaaggtttttttaattaattgatctgtaggaatgtattaccatttttctgaaataaggaagtacatttaaattttgatgcmtgtgttttaactctttccctaaagttttctaacaataaaataggtgattcttccatatgtaagtataggtgcagtttgaacttttatactttaaaaatcaagaaaattccttgagtcattttct

SEQ ID NO: 399647 - DNA, 558 bp, Homo sapiens
aataacagatatctttgggttttattcctccgacttgaaatactaaaactttctggcaacagaatgtttcaaacacgtcctattttttgagggggttggggtcatgtatagaatgatacatatgcctccaagctgcattacttgttttttctccactcataatatagtttcttacccatctccttcctcttgtcagttaagtctgcataatgctgcctcctagaaaaactttcctggctttccgacttaaaagggccctggcacagcactttctatgctcttttcttatggcacttaaacctatgacagaaattataaaaactgcttgtagctttttgtattttagactatgagaaggtttttttaattaattgatctgtaggaatgtattaccatttttctgaaataaggaagtacatttaaattttgatgccwgtgttttaactctttccctaaagttttctaacaataaaataggtgattcttccatatgtaagtataggtgcagtttgaacttttatactttaaaaatcaagaaaattccttgagtcattttct

SEQ ID NO: 399648 - DNA, 662 bp, Homo sapiens
atatactgatatattttaacagtgcctaagagacaatattttaaagtggtagattttgctgctaatgtaacctgaaaatcctcaataattagagggttagcatattctaggatgtatatatcaaaaattgtgttatgtttcaacattttaagcatgcatgcatgtatatgtagacacaaatgttccaaataattttcattgtcattgtatagattctacagtatttcttgtcatttttatgcacttgtcaaaacaactgcagaaacatttattggttagtttctgctttaggattttattttcagttgacatttgctaactggctattagtcattttttttttttatctctagaaagamctccaaatccaatgcaattttgtcttattattttccccagtgctgaattatttgaacttctaaggcctttttatgtgggtgtagaaagataaaatacatcaaactgaaccttttaataaaatttcaatgaagtgataaatcagatagctattgcaaacaatgtagaagtacacttgtgccattaaatgatgcaagaagctcatctagcataaatgagttgtttggaaatcaaagaaacatccctctgtttaatatttcctgcaaattgatccttcaaactctattttttagcaaaataacttg

SEQ ID NO: 399649 - DNA, 662 bp, Homo sapiens
atatactgatatattttaacagtgcctaagagacaatattttaaagtggtagattttgctgctaatgtaacctgaaaatcctcaataattagagggttagcatattctaggatgtatatatcaaaaattgtgttatgtttcaacattttaagcatgcatgcatgtatatgtagacacaaatgttccaaataattttcattgtcattgtatagattctacagtatttcttgtcatttttatgcacttgtcaaaacaactgcagaaacatttattggttagtttctgctttaggattttattttcagttgacatttgctaactggctattagtcattttttttttttatctctagaaagaactccaaatccaatgcaattttgtcttattattttccccagtgctgaattatttgaacttctaaggcctttttatgtgggtgtagaaagataaaatacatcaaactgaaccttttaataaaatttcaatgaagtgataaatcagatagctrttgcaaacaatgtagaagtacacttgtgccattaaatgatgcaagaagctcatctagcataaatgagttgtttggaaatcaaagaaacatccctctgtttaatatttcctgcaaattgatccttcaaactctattttttagcaaaataacttg

SEQ ID NO: 399650 - DNA, 493 bp, Homo sapiens
agcatttcaagtaattccgactgctcccagagagaaagaaacactccctgctgatagccaggttgctttgaatttctttgctgccttctgtattgtctcatctccagattctctactaagtggggagaccacattagggtaaatcacaraagctactgaacagaagaatctgacctagaaatcaaatcccttctactttattccccatgagaattttacctaaaaagtggaagaaaaatatatctgttcagctgtggcagaacaatttctctatttatgaagttagaatattttttgtatttaaacacataccaccttcaagtaaatatacctcacgattttagggaaccctactaaatgttctattttattatctttgccatccatacataacaggttgctctatgatctcaaatttccatggtcagtcattgaaaaatgaaacaaaacaatgttctagtgaataattattttatttaatctctagagatat

SEQ ID NO: 399651 - DNA, 493 bp, Homo sapiens
agcatttcaagtaattccgactgctcccagagagaaagaaacactccctgctgatagccaggttgctttgaatttctttgctgccttctgtattgtctcatctccagattctctactaagtggggagaccacattagggtaaatcacaaaagctactgaacagaagaatctgacctagaaatcaaatcccttctactttattccccatgagaattttacctaaaaagtggaagaaaaatatatctgttcagctgtggcagaacaatttctctatttatgaagttagaatattttttgtatttaaacacataccwccttcaagtaaatatacctcacgattttagggaaccctactaaatgttctattttattatctttgccatccatacataacaggttgctctatgatctcaaatttccatggtcagtcattgaaaaatgaaacaaaacaatgttctagtgaataattattttatttaatctctagagatat

SEQ ID NO: 399652 - DNA, 493 bp, Homo sapiens
agcatttcaagtaattccgactgctcccagagagaaagaaacactccctgctgatagccaggttgctttgaatttctttgctgccttctgtattgtctcatctccagattctctactaagtggggagaccacattagggtaaatcacaaaagctactgaacagaagaatctgacctagaaatcaaatcccttctactttattccccatgagaattttacctaaaaagtggaagaaaaatatatctgttcagctgtggcagaacaatttctctatttatgaagttagaatattttttgtatttaaacacataccaccttcaagtaaatatacctcacrattttagggaaccctactaaatgttctattttattatctttgccatccatacataacaggttgctctatgatctcaaatttccatggtcagtcattgaaaaatgaaacaaaacaatgttctagtgaataattattttatttaatctctagagatat

SEQ ID NO: 399653 - DNA, 493 bp, Homo sapiens
agcatttcaagtaattccgactgctcccagagagaaagaaacactccctgctgatagccaggttgctttgaatttctttgctgccttctgtattgtctcatctccagattctctactaagtggggagaccacattagggtaaatcacaaaagctactgaacagaagaatctgacctagaaatcaaatcccttctactttattccccatgagaattttacctaaaaagtggaagaaaaatatatctgttcagctgtggcagaacaatttctctatttatgaagttagaatattttttgtatttaaacacataccaccttcaagtaaatatacctcacgattttagggaaccctactaaatgttctattttattatctttsccatccatacataacaggttgctctatgatctcaaatttccatggtcagtcattgaaaaatgaaacaaaacaatgttctagtgaataattattttatttaatctctagagatat

SEQ ID NO: 399654 - DNA, 566 bp, Homo sapiens
ttagctgcaggaaaccccatgacccatatgaacacttgagtgggtagggagaactgcccagaaaattgacaagagacagagctccagcttgaacagagccaacagagctrggcgaaggaacgactgcagtggagcatggccaagggcacctatccctcaaagattgccatgctcctctaggtggctttagcatttgttggatgccagacctgctcagagaagggctatgtggcctgtggggtggggccaatctgatccgagttctccccatgtctgctggcctctccaagggttcctgcctggctgcttgtagcagtttcggctgcccagaggaagcacttgccagaggccactaccatacctctttcaccagcagacaccacctaacatttgaagaccttctgcacaggggcctccactggcacacatgtgcatgcagccctctccatgctactttgctagtgtgagctcatgagctgtcaccaccactgtccccctgctgatgtacactcatgtgaggaaatctctccatcgtgctgctgcttcaccaagtgcatttgtaggca

SEQ ID NO: 399655 - DNA, 566 bp, Homo sapiens
ttagctgcaggaaaccccatgacccatatgaacacttgagtgggtagggagaactgcccagaaaattgacaagagacagagctccagcttgaacagagccaacagagctaggcgaaggaacgactgcagtggagcatggccaagggcacctatccctcaaagattgccatgctcctctaggtggctttagcatttgttggatgccagacctgctcagagaagggctatgtggcctgtggggtggggccaatctgatccgagttctccccatgtctgctggcctctccaagggttcctgcctggctgcttgtagcagtttcggctgcccagaggaagcacttgccagaggccactaccatacctctttcaccagcagacaccacctaacatttgaagaccttctgcacaggggcctccactggcacacatgtgcatgcagccctctccatgctactttgctagtgtgagctcatgagctgtcaccaccactgtccccctgctgaygtacactcatgtgaggaaatctctccatcgtgctgctgcttcaccaagtgcatttgtaggca

SEQ ID NO: 399656 - DNA, 574 bp, Homo sapiens
tttattcacacatccttcagttcatattcttcaaataaagtagtgcagtttaaagctatgacctaatatgtctctgatgccaatcaggaaactaaatttcctagctaaatactgtattaaataaaaacattctccatcagccttatyacttacagcatactgttcttcactcaaacacagaaatttcattataaagaattcttgccaaatatgcaactcagccttaattttatttaaattgcatacgttggataggtagaagtaatctgtagataatttcccatttatatctaggtagaggacattttgggcacttaaggaatatttgattcaactggtagtttcctatgacatatttcttgcatatgccttacatgaaaattttcaacttttctttcctttcattaacagatttttcagtaaaatgcagacctcaattttttttagagtttgtttttaactactacttctttttaatttgcttatttataattaagaacttttagcttgggcattttcggtttcaaagtaacagaaattagcttgtagtagctttaaaaagtggggcattttt

SEQ ID NO: 399657 - DNA, 574 bp, Homo sapiens
tttattcacacatccttcagttcatattcttcaaataaagtagtgcagtttaaagctatgacctaatatgtctctgatgccaatcaggaaactaaatttcctagctaaatactgtattaaataaaaacattctccatcagccttattacttacagcatactgttcttcactcaaacacagaaatttcattataaagaattcttgccaaatatgcaactcagccttaattttatttaaattgcatacgttggatagrtagaagtaatctgtagataatttcccatttatatctaggtagaggacattttgggcacttaaggaatatttgattcaactggtagtttcctatgacatatttcttgcatatgccttacatgaaaattttcaacttttctttcctttcattaacagatttttcagtaaaatgcagacctcaattttttttagagtttgtttttaactactacttctttttaatttgcttatttataattaagaacttttagcttgggcattttcggtttcaaagtaacagaaattagcttgtagtagctttaaaaagtggggcattttt

SEQ ID NO: 399658 - DNA, 574 bp, Homo sapiens
tttattcacacatccttcagttcatattcttcaaataaagtagtgcagtttaaagctatgacctaatatgtctctgatgccaatcaggaaactaaatttcctagctaaatactgtattaaataaaaacattctccatcagccttattacttacagcatactgttcttcactcaaacacagaaatttcattataaagaattcttgccaaatatgcaactcagccttaattttatttaaattgcatacgttggataggtagaagtaatctgtagataatttcccatttatatctaggtagaggacattttgggcacttaaggaatatttgattcaactggtagtttcctatgacatatttcttgcatatgccttacatgaaaattttcaacttttctttcctttcattaacagatttttcagtaaaatgcagacctcaattttttttagagtttgtttttaactactacttytttttaatttgcttatttataattaagaacttttagcttgggcattttcggtttcaaagtaacagaaattagcttgtagtagctttaaaaagtggggcattttt

SEQ ID NO: 399659 - DNA, 526 bp, Homo sapiens
aacatactgatttcatttcctttggatgtatgcccagtactgagattaccagatcatatggtaattttatttttaccttaaggaacctcatactgttttctgtagtggctgtactaatttacattcccaccaacagtgtgcaagacttgtcttttctctaaatctttgccaacacttgttatcttttgcctttttgayagtagccattttaagagttgtgaggtgatatctgattgtgattttaatctacatttctgatgattaatgatgtcgagcatatttttatataccagttggccagtcgcatttcttcttttgagaaatgtcttttcaggtcctttccccattttctcatcatattatttgttttcttactattgaattgcttaagttaactcctcattagatgtatagcttgcaaatattttatcacattgttccatttgtctcttcattctgtcaattgtttattttgctgtgtagaagctttttagtttcatgtaatttcatttgtctattttcactg

SEQ ID NO: 399660 - DNA, 490 bp, Homo sapiens
tcagtcttctgtgatgtggcttggcacaaaataacagacagtccaaataagatcacgaggataaagagggtgaggggattagcagagcrttgttggaaatgttgctggtagatacgagagagacagtgagacagagatattgaaacatccaagccttaatatcagaaccatgattgtgacctcaggttttatttttttaaggtaatacaaacgtataattgttccttgccaccaaaatacctaatataaaacttggataaatggccataattaagcaacccatagtccaaaaacaaatgactgcattattaacactattaatatgatcaaagaaggagaatataacacgggggataggaagaaaacaaaaaagcagttagggtgtacagtcaatttttcattagtttttttttttttgtatctatgttatagtgagtgaaagtgagttacaaaggcaagatttctttttctgtgttgttctacagtctat

SEQ ID NO: 399661 - DNA, 548 bp, Homo sapiens
acaatagaaataatggcaattcagagatgttggcaaaaatagttgctgcttttagtattgctacaatgtaacaccacagagggaagaagccagagagaggagttaaagacaacatttttgaagtgatctatagaattatctgaagtttgtgacccatatctagtagagatgccaccaatcccccatgwctccaaacatcattttagagaaatgtttgcatgtgttcaaaattttgcatgctgaaggcagattcaacaaatttctgacttttgacagttatttccaacacctttttatagtccttcactgccaactcccacagacacattcagtctggcctggaagaatagcagatacgctaatagtagtttctttttctgtttggctcagtactaaagaggtatagaaataggaggtagagaagctaaagaaaaattagtgaaaagaaaggagagctatagcttgatagtaacacatggttactatcaaacattactttggatactctcttgattttgtttatttcacatactgaaaggataacatag

SEQ ID NO: 399662 - DNA, 596 bp, Homo sapiens
attccttctctttttagcttgcattgtatcctgtaggctactgtttcctacttgctcatgatcagaacacagctataattttcactttacattttgcatttacagagcatttaatatattttaaagccttcataagtgtatttcctttaatgcccataatacatatcttatagggctgaaaatgttgacctagttcacagtcaacaaaagaraaataacttgtgcctcccacaagatgcagggtcctccaacagatcatataagtgaaaggaaaatctgtactttgggattcatgtttatgagatgattctcagatttctattcgaaacctccttcctgggctcccggagaggcccatccttagaaatgtgttccatgtgtatgtttcatttgcacttgactcgtgtacctaaacctcaatgattctctcttcacctctggtttccatgctgtttaatttgtggcacctttctccctagaatccagatagaaacctcagattcttcttggttcttactcttcgttctttttcacattttatccaatcagttgccaaatcctgcagatgacatgttttctttacaaaacaccttgac

SEQ ID NO: 399663 - DNA, 596 bp, Homo sapiens
attccttctctttttagcttgcattgtatcctgtaggctactgtttcctacttgctcatgatcagaacacagctataattttcactttacattttgcatttacagagcatttaatatattttaaagccttcataagtgtatttcctttaatgcccataatacatatcttatagggctgaaaatgttgacctagttcacagtcaacaaaagagaaataacttgtgcctcccacaagatgcagggtcctccaacagatcatataagtgaaaggaaaatctgtactttgggattcatgtttatgagatgattctcaratttctattcgaaacctccttcctgggctcccggagaggcccatccttagaaatgtgttccatgtgtatgtttcatttgcacttgactcgtgtacctaaacctcaatgattctctcttcacctctggtttccatgctgtttaatttgtggcacctttctccctagaatccagatagaaacctcagattcttcttggttcttactcttcgttctttttcacattttatccaatcagttgccaaatcctgcagatgacatgttttctttacaaaacaccttgac

SEQ ID NO: 399664 - DNA, 563 bp, Homo sapiens
cggactagcagactggtaactcaggcaggatttctatgctgcagtcttgaggcagaataccttctttttcaggaaacctcagtctttgcttctccccacccccccygctgagacggaggttcgctcttgttgcccaggctggaatgaaatggcacgatctcggctcactgcaacctccgcccctggggttcaagtggttctcctgcctcagcctcccgagtagctgggattacagacatgcatcaccatgcctggctaattttgcatttttagtagagacggggtttctccatgttggtcaggctggtctggaactcccgacctcaggtgatccgcccgccttggcctccccagtctttgctcttaaggccttcaactgattgtaggaggaccgctcacactaaggagagtaatctgctttacttaaatattgtaaatgttaattacattcacaaataccttcacagcaacatctagactagtatttgaccaaacacctaggtaccttagcctcaccaagttgacatataaagttaatcataacaatgagggaaaataatgac

SEQ ID NO: 399665 - DNA, 563 bp, Homo sapiens
cggactagcagactggtaactcaggcaggatttctatgctgcagtcttgaggcagaataccttctttttcaggaaacctcagtctttgcttctccccaccccccctgctgagacggaggttcgctcttgttgcccaggctggaatgaaatggcacgatctcggctcacygcaacctccgcccctggggttcaagtggttctcctgcctcagcctcccgagtagctgggattacagacatgcatcaccatgcctggctaattttgcatttttagtagagacggggtttctccatgttggtcaggctggtctggaactcccgacctcaggtgatccgcccgccttggcctccccagtctttgctcttaaggccttcaactgattgtaggaggaccgctcacactaaggagagtaatctgctttacttaaatattgtaaatgttaattacattcacaaataccttcacagcaacatctagactagtatttgaccaaacacctaggtaccttagcctcaccaagttgacatataaagttaatcataacaatgagggaaaataatgac

SEQ ID NO: 399666 - DNA, 609 bp, Homo sapiens
ctgtagtctcagctgctcgggaggctgatatgagtggatcgcttgagcccaggaggcaragtgacctgaaatcgcaccactgcattccaccctgggcaatagagcaagatcctgtctcaaaaaaaaaaaatttgtctaaatattttagcataaacattaagacagagaaatagagtaatactcaaactatacataattaaggaggtaaagcaaacaaacagctcaataataccaaaagaacaagaaaggaaaaattcctgaaaatatttttaaaaggttaataagcacaaatataaggacatctatgaattttttaaaaatctgtatttataaataaaatgtaataaattctccaggtgaacgataaaacttggttaggctggacaaaagaaactacgtcttaccatgtgctctttctaaaaagcacatctaaatcagaagagcacagaaaaggtgaaaaaaacacacacaagggtaagaggttggatgtgtctcctaaagttcatgtgttggaaacttaatccccaatgcaatagtgtagagaggtgaggcctttaagaggtagttaggacataagggctttgctctaattaatagattaatgctatt

SEQ ID NO: 399667 - DNA, 508 bp, Homo sapiens
acattttggactggaaaagtctttgttgtggggctgtcctgtgcattacaggatgtttagcagcatccttggccttcacttactagatgccagtagcactctttccccctcattagtgacaatcaaaaaatgtctccctacattgccaaatatcccctggggagaaaaattcgtacctatgtgagaaccactgactttagaggatggtgaaagcaataaaattctgtctttttctgagatctcctcattcattccagaaaggtgcctttgccaaatgagaagttctaggttaatgtggagggaccagccagtccraataggctgaattggatttagaaggcatcagaatcaactttcaaaatataaaggcaataactgtttccgatgagaaaaataccaattttcagggtattcatttattcaacgaaaatgttactaaatgcctactcctctatgtgccaggcacaattataggtgctgtggatagtgaacaaaacacaacagaatt

SEQ ID NO: 399668 - DNA, 425 bp, Homo sapiens
ttgcagcaccctagctgaagacaactctgctgattttgctaatgttgggcagtctcttcaaatgaaatatactgccctagtcaaaggataggcttgagctgctcctccgttaggttcctgggttgaccagaattctycatcctcatgaagtgggccctgtctctaagatcatatgtgagatgaaggtagtgaacccgtaaccttgtctcattcatccttaacatgatctcaccttctcccattggctgctggagatgctgaccaggccagtcttctacatggtaaatctagcctcatggaattttcaacttagcctctttgttttataggcttacaaaaactctcatataaataaaatcctttgtttcttattgtcctatgccagtaagtccttgaagctacaactatttattgtcttgcactat

SEQ ID NO: 399669 - DNA, 535 bp, Homo sapiens
tgacattcagctggacattggaagacatgaaatggagtattgtgtgtgagccagactacacatcagaacaagagcacaaactgtggctgcatgaacatcattcatgactctcagttttggtctgcattctactgtattaaatctaattctacatattccccaagcaagcaacagataccagaggaatgacctcttctcaaagacctacgccatagtctagcacagtagttagaggagtacaccctgaaaccagacatcctgggtttctagctttgagtttttttagttttgtgacttaaaatttttgtttcctattttcctcatctttaaaatgggcacagtaaaataataaggtttgtattaaggttaaatgaattgatgatatgaagtacttagctcctagcacatactcaatacatgttagcttttattgcttggaaccatggtgagaattactagtcttgaatgcttttggctcctgttcacagaggtatgyactgcaatgtcttctttcaggtgccttaaacgaaaaagc

SEQ ID NO: 399670 - DNA, 632 bp, Homo sapiens
ttaataggtcactatacttttaggaaatatcctcttccttcattatacactatcaagagaagagaactgaaataatagtttcttctaattgtctacacaatacgtttttctggaatcctccctttaacraaaatcactacccaaattatcttttatattctatgatggggttcaggacactgtactcccaaatgttttaagctgaaggaatttgagaaaacaagaaaagcagaaagatcactctgaccttcccctcaccctccatcctgaaggaagtcataaaacctaggattttctgaccttcccatgtagcaagtcataagaccctcatgcgagaggtgcccctgttatacccagaagaaagaagaattcccccccgcctttttgtttgagatgtggtcttactctgtcacccaggctagagtgcagttgcatgatcatgttctgctgcaaccttgaactcctgggctcaagcaattctcctgcctcagcctcccaagtagctcagaccacagacacatcctccacacttggctacttaaaaataattccttttttttattatttatttattttttttttagagatgggggggtctcgctatgttgacccggttgatcttgaactcatag

SEQ ID NO: 399671 - DNA, 583 bp, Homo sapiens
cctcagcctcccgagtagctgggattacaggtgcatgccaccacacccagctaatttttgtatatttattaaatatgggggttttgccgtgttggccaggctggtcttgaactcctgacctaaagtgatccgcccacctcagcctcccaaagtgctgggattacaggcaggagcaagcacgcctagcctgtgatattcttctatggattttggttttttaaaaatcacattaaaatattgtcttgatcattgagtttttcccccttaaattttgtgctcaagatgagtgcctcacctgattcttggccttgtcatgagagaggtgataatctatttaacagccaagaaragaagacttctgaagaaaaggctgagttaatgtcactatgtattgggaaaaaagagaaaaaccgacaggttgggtttccatgagttggaaatcaaagctaataggatgtggatgtttgtgctgattcttgcagctgcagtgagcagaggaaatgttctgagcactttctcaaaaggttcttcagtattttaacttaaaatcatcttacaaaagaaaagcctttgttgtgtttat

SEQ ID NO: 399672 - DNA, 361 bp, Homo sapiens
tagctgtaaatataaaaaatgagagtgttctacccagttttcaataaaccttccaggctgcaataaccagcaaggttttcagttaaagccctatctgcactttttatttattagctgaaatgtaagcaggcatattcactcacttttctttgcctttcctgagagttttattaaaacttctcccttggttacctgttatcttttgcacttctaacatgtagccaataaatctatttgatagccatcaaaggaataaaaagctggccrtacaaattacatttcaaaacaaaccctaataaatccacatttccgcatggctcattcacctggaataatgccttttattgaatatgttcttata

SEQ ID NO: 399673 - DNA, 570 bp, Homo sapiens
ggtctcccagcaaaaatgcataaggtaagtgtgggcagttcagaaaatataaagtgatcgaaaggaaagaaaaggaaactgtaggcaaatgaatttagtcttttacatttagtaaaggaagctccatgaggacctctgagcacagtgggggctgtatgtgtcatagagcaccagacagaaagttagaaggtcttggttgtagtgactagcctgccactttctaaacctatgtttcctcatttacacactcagatatgtaagatgttctggaggtgtcttccggcagaacaattctgcaattctgcattttsgaaaatgggtctacagaaagagtagggattgggctatgagttatgaggctccttgaagttctaggggtgagacaataaggataaagcgagacttcagagacaggaagggaagtttgcccctgtggttgttcaggctgtgcactacaaatctctaggggttgctatttgcatgaactaagatgacaagacaggttaagaggtttcaaagttctttgtggttggatgggctggaggtgcaggcttggagatctcctgtagg

SEQ ID NO: 399674 - DNA, 548 bp, Homo sapiens
tattgccacatagtcatgacgaagtaggcatagtgggtttttggtgccttgagccctcactttgtagcatttctatrctttcctcaaacattacttttttcttcccaggagcctgggctcttacccattccttcaagtgtttgcccccatctcaatagtcatttactgcttcttctttgaggccatgatggagtagctgtctgattctttaccttcctttaaagggcacacctgattaggtcagagccatatagagtaatccccattctgatttactcaaagtctcctggttagtattctatttgagggtgtgaaaacccttcatgctcaggaggcccactcacactcaaagaggaaaagatgcaacaaaagtgaatcctgaaggccatcttagaattctgcctgccatagatattattattgctagtactacttattcacttatagcatgcttcagctaagcattttccagtagaaaagtaatgtttgccaggtatacgttttgtattttcaaacaggcacatttaaaaaaggcaaaaggaaacgtg

SEQ ID NO: 399675 - DNA, 548 bp, Homo sapiens
tattgccacatagtcatgacgaagtaggcatagtgggtttttggtgccttgagccctcactttgtagcatttctatactttcctcaaacattacttttttcttcccaggagcctgggctcttacccattccttcaagtgtttgcccccatctcaatagtcatttactgcttcttctttgaggccaygatggagtagctgtctgattctttaccttcctttaaagggcacacctgattaggtcagagccatatagagtaatccccattctgatttactcaaagtctcctggttagtattctatttgagggtgtgaaaacccttcatgctcaggaggcccactcacactcaaagaggaaaagatgcaacaaaagtgaatcctgaaggccatcttagaattctgcctgccatagatattattattgctagtactacttattcacttatagcatgcttcagctaagcattttccagtagaaaagtaatgtttgccaggtatacgttttgtattttcaaacaggcacatttaaaaaaggcaaaaggaaacgtg

SEQ ID NO: 399676 - DNA, 579 bp, Homo sapiens
ggtgaatcataggatataaagacagtttattcacaatctctataagttggctgaaactggcttaaagtctgcagttgcttatcacaaaagaatgtttgtaaggctggtcctgttactttagtggtctgggttgtaattcagagttagggagggagtatgataattttcctgatagcscttattcctagagagtttagcaagtgtatggattttcttgtagccataggaatttaggaagttgccatgtcagctgggccttgaaatctcaactcctaggtaacctttgtttccttaaccttaaggtccatcctagttgataaaggggtgtctattttgatctctcagatcacatgtcatattattggtgcatgaagggtgaagcaaataataaagggaatgaagctagaagtctgggttacagagaagtcaggaatcaggggtagggacttctatgctacaggaatcttgtcagtagattatgatcctaagcaagtttgcatttttattttaccaatcactcttggaggcaacatggggacagagttgacatggcccatgcctggaggcaaggacagaaat

SEQ ID NO: 399677 - DNA, 463 bp, Homo sapiens
  misc_feature (1)...(463): n = A,T,C or G
tgaatagagcctgaaacaaagcagagactcctcatggagaaccttgcgagggcagtgcaaaagggaaatgtanggttggagcctncacacacagttcccactggagcactgcctagtggcattatgagaagaaggccaccatcattcagatcccagaatggtagatctactgacagcttgaactgtgctcctggaaaagccacagacactcaatgccagccatgaaggagggatacctgaggctgtgggagccaaccctgcatttcccctttgcactgccctagcataggctctccatgagggctccmcccgtgtagcagacttctgcctggacattcaggcatttccatacatcctctgaaatctaggtggagtttcccaaacttcaattcttgacttatgtgcacccacaggcccaacaccacatggaagccaccaagacttggggcttgcaccctctgaa

SEQ ID NO: 399678 - DNA, 501 bp, Homo sapiens
tgacagcttgaactgtgctcctggaaaagccacagacactcaatgccagccatgaaggagggatacctgaggctgtgggagccaaccctgcatttcccctttgcactgccctagcataggctctccatgagggctccacccgtgtagcagacttctgcctggacattcaggcatttccatacatcctctgaaatctaggtggagtttcccaaacttcaattcttgacttatgtgcacccacaggcccaacaccacatggaagccaccaagacttggggcttgcaccctctgaagcaacagcctttggtcccttrtagccaccactggagctgaaacggctgggacgcaggatgccatgtcctgaggctgcacagagcagcagggaccatgagcctggcccaggaaaccatttttcctcctaggtctctggacctttgatgggaggggctgccatgaatacctctgacatgccctggagacattttccccattgtcttggtg

SEQ ID NO: 399679 - DNA, 391 bp, Homo sapiens
taacctcttgtagaagtatcattggagaccgaaggatgacacaccagccatctgaccatgagagaacatcattcaaggcaaaggaaacagaccaccaccaacawaaaaagatgcactggggaatttccagtaacacttttgttagctctcttaatatctgattttttgagcactagaacactgcctctcacagaatcctagcttaaaacagcaatgaacagactagaattctaggctaaaaccaacaagatgaaatgtgactgatatgaatataaatggtgcacataagttcacaaacccaattacacagcacaaaatgatatccacgtggcttgacagctgttcatattagaaaaatctagggattctaatggactacatattggagatt

SEQ ID NO: 399680 - DNA, 474 bp, Homo sapiens
  misc_feature (1)...(474): n = A,T,C or G
tgcaaaagctgcttgtcnaaaaaaaaaaaaaaaaaaaaaaaaaaaagcctggtgcctcctctctctctctygcttcctctcctgccatgtgatctctgcacagccagctccccttcaccttctgccatgaggggaagcagcttgaggccttcatgagaagcagatgctaacaccatgtatcttatacagcctgcagaactgtgagccaactgaactcttataaatacccagcttcatgtattcctttatagcaacacaaatggactaagacaccccttcattgtttttgtttttaaaaaatttttattttatttattttctttttttttgaggtagagtctcactctgttgctcaggctggagtgcagtggcacgatcttggctcaccgcatcctccatctcccaagttcaagcaattgtctgcctcagcctcttgagtagctgggattataggagcctgccaccacacctgac

SEQ ID NO: 399681 - DNA, 474 bp, Homo sapiens
  misc_feature (1)...(474): n = A,T,C or G
tgcaaaagctgcttgtcnaaaaaaaaaaaaaaaaaaaaaaaaaaaagcctggtgcctcctctctctctctcgcttcctctcctgccatgtgatctctgcacagccagctccccttcaccttctgccatgaggggaagcagcttgaggccttcatgagaagcagatgctaacaccatgtatcttatacagcctgcagaactgtgagccaactraactcttataaatacccagcttcatgtattcctttatagcaacacaaatggactaagacaccccttcattgtttttgtttttaaaaaatttttattttatttattttctttttttttgaggtagagtctcactctgttgctcaggctggagtgcagtggcacgatcttggctcaccgcatcctccatctcccaagttcaagcaattgtctgcctcagcctcttgagtagctgggattataggagcctgccaccacacctgac

SEQ ID NO: 399682 - DNA, 604 bp, Homo sapiens
ttccattctctttttgaatggcctatatcctgtcttaaccttatctatggaaatacttcctgggttctagcagaccgtggacaaatatttatgttcctaatgctttagaattttcatgcctttttggtatttaatgggattttggaggtggacaaattgggtaacagctagttaagtacaaccttaacatgaaagtttgaggaatccattaatgtgtaatggtgtatgttagttatttataagtgagtrgccagagaaaagacttatgaggcatccataaagctagggtggtttttaaatttgtaaattaagacaagaaggcataaagaaaccctacagaatgccacatagattagaggaatggaagatgaagaaggaataaatgagttgaagaaagagttatcaggtgatatggggatgaggaaaaagattgttctgtataaaaacatgaaattcttgtaaaagaagtcaagagggatgaactcttgaaacaccctttaattgtggaatgggcaagacagtgaccaccttctaaggggaatttcaaagtaacaatgttggttgatttaaatttatctttcttgcaagagaagataaattgatt

SEQ ID NO: 399683 - DNA, 605 bp, Homo sapiens
attcctttttactcaggtaacctactcccaacctctagtttcactagactgttaccaagctttttaaagcaaaaataataataaaatagcatactttttttwaaaaaatagcatatgtagaattaatatatatgacaataagaatacaacagatttagggttattctttggaaatacttgttaaaacaaattatttctgaagtagtaaaatatctctgtacgtagattgtgatgagttaaagatgcatttttcatctctaaagcatcactaagaactagcacaaaatgctcaaattaaaaattagtagacacattagaataggatgtgaaaaaagtattcatcctcacaaaacaaaggcaggagaaaagtaacagggaaacaaagaacagattggaaaaatagaaattggacaccaatattgtaagttgaagtacagacgtgcccacaattatagtaaatataaatgtactaaacattccaattaaagcaaatattgtcagactgaataaagagtatagattttttaaaatataagaaacatacttaaaacatgcagatacaaacagtttgaaactccaacaaaaagaagcctatatggctaaag

SEQ ID NO: 399684 - DNA, 605 bp, Homo sapiens
attcctttttactcaggtaacctactcccaacctctagtttcactagactgttaccaagctttttaaagcaaaaataataataaaatagcatacttttttttaaaaaatagcatatgtagaattaatatatatgacaataagaatacaacagatttagggttattctttggaaatacttgttaaaacaaattatttctgaagtagtaaaatatctctgtacrtagattgtgatgagttaaagatgcatttttcatctctaaagcatcactaagaactagcacaaaatgctcaaattaaaaattagtagacacattagaataggatgtgaaaaaagtattcatcctcacaaaacaaaggcaggagaaaagtaacagggaaacaaagaacagattggaaaaatagaaattggacaccaatattgtaagttgaagtacagacgtgcccacaattatagtaaatataaatgtactaaacattccaattaaagcaaatattgtcagactgaataaagagtatagattttttaaaatataagaaacatacttaaaacatgcagatacaaacagtttgaaactccaacaaaaagaagcctatatggctaaag

SEQ ID NO: 399685 - DNA, 597 bp, Homo sapiens
ggtttttatttagtcttttagccaacagaagtcttcagggcctcttaatttaaaagcctactaagtatgctaaaataaagctaattaaatttctcttacacttgaacctgtgattaatatctgtgaaggctatcccacttttattaaatatatgctcataggttgatttacataagcctgaaaggaatttgtaatgaaacagttatcagggacaaaatacagtttactaacataatattttgaaaactcagtagtgttataaaataaagtattttttttggtgtggtaaaaaaacacacacaaaaggtagctatttgaaatgatagatatgttaatttgagtgacaatagtaaccatttcactatgtattaatataagtatatcaaagtattatgtkgtacatattatgttgtacactttaacttatacactaaaaaactaattatttggacagagaagaattcacatatataactcagcctccttatcaaagacatgattttatagcagtttgaaaaagtttcaagtactcttgagatattcatgctatatttggattgttttgctaaatatgcaattttaacattggagaaattt

SEQ ID NO: 399686 - DNA, 631 bp, Homo sapiens
aactgtatttattagaatgccttaagtcagtgccagttagtcctaataatagtgaaaatttatttatttatatgagtttatttcatttctataagtttatgggggtacaattgtaattttgttacatggatagtttgtgctgtgttgaagtcagggcttttatatatctgtcaccagaacagcatacattgcatccattaatttctcatcatcaaccccccgttctaccctcccacctttccatgcctccgttgtctatcattccacactttatgtccatgtgtacagattatttaactcccacttaaaagtaagaacatacagtatttctctttctgtttctgagttgtttcactgaagataatggcccccagttccatctatgtcactgcaaaagacatggtttcattcttttatggccaaatagtattccactgtgtatacatatcatgttttctattattcartcatctgttgatggacattgaggttgattttatatttttgctattgtgaattgtgctacaataaacatatgagagcaggtaccttcttgatataataatttcttttcctttgggtagattcccagtagtgggattgctggatcaaatggtaattctattttcag

SEQ ID NO: 399687 - DNA, 464 bp, Homo sapiens
aatactttgtatgacactataatggtgaatatacatcrttgtatatttgtccaaacccatggaatgtacaccaagagtgaaccctactgtaaactacagactttgggtaataaggatgtgtcaatgtaggttcatcaattgtaataaatgttacactctggtggaggatgttgtgatgggggaggttggtgcctgcatggggcaggtggcatatgagacacttctgtagcttcctgttaattttgctgtgaacctaaatcctaacaatatgatctttttaaaaaaaaaaaaaaaaggtagggagattattaaaatatgtttatttcaatgcagagatttgggattctcagaaagtctctaatatgggaaattagtatgtaaaatatatcatatttccaatcaactaagaaagaatacacattcaatcagtggtattgaggcagttctacatacatattgaaata

SEQ ID NO: 399688 - DNA, 464 bp, Homo sapiens
aatactttgtatgacactataatggtgaatatacatcattgtatatttgtccaaacccatggaatgtacaccaagagtgaaccctactgtaaactacagactttgggtaataaggatgtgtcaatgtaggttcatcaattgtaataaatgttacactctggtggaggatgttgtgatgggggaggttggtgcctgcatggggcaggtggcatatgagacacttctgtagcttcctgttaattttgctgtgaacctaaatcctaacaatatgatctttytaaaaaaaaaaaaaaaaggtagggagattattaaaatatgtttatttcaatgcagagatttgggattctcagaaagtctctaatatgggaaattagtatgtaaaatatatcatatttccaatcaactaagaaagaatacacattcaatcagtggtattgaggcagttctacatacatattgaaata

SEQ ID NO: 399689 - DNA, 596 bp, Homo sapiens
atgctggtaacttattaggtaactcagaggcatagtcaagttctcagtcatttatacttaagttccttttatatatgcataatgaagtataattaattttgtttaaaaaaacctaagtatttttgaagtacttaaatatagtaaatgtttcagtaagataacagcattgatttgtctttatgtctttctctgagcctctcctcttcaatttgtcacttttctctttccttctcttcctttattacttccttcctgtcttttttaaaggaagtttcacttaccttgcagcctaagcctgaaacatttgtgcacaattgtgatgtctaaagacaaactaaggttcctactgaagttgaaaaatgttttctgcgacattcagtttctmaaacatattctaacattcttttgtctgtaatagcttacccttgacccttcatattcctaggcatatttttatatcaaatcattgtcaccaaacccaagattttatataccttaggatgggtattttccactctcaacatatattaactcatatgatgtgatttgccaaaagtattatcaaaagaaaatcattttttctccttttcaatcat

SEQ ID NO: 399690 - DNA, 544 bp, Homo sapiens
tgtaaagtgccatcactatgtacacttacttcctctccctgccttcaggttctataggttttcttaccattgaacacttcagatagaatatagatgttagtcttctaccccacaacgtcacaactccagcatagacacttgaagttgatttcgtttcctacttggccctccccagtacccatctcccatcaaccttgactgccttctagttgttcttataatatagttctaatgtaacagttgtctacgtgccactttcttcatagactatgaactcctaaaccacaaggatcttagctttcatacattctaaactttctattgcccatattaatgatatctattgatgaagtcagtatattttcaatttyatttttcattgttatttgacatggtgaggcagaaataagaagtataaaacagaacatgtcctttgacatcaaggatttcacaattagtactgaccagtgattctcaatagaaacagggggccccattccagatgtttggaatcttggactaatgacagccagaatgtgtgtgt

SEQ ID NO: 399691 - DNA, 498 bp, Homo sapiens
ccatattaatgatatctattgatgaagtcagtatattttcaattttatttttcattgttatttgacatggtgaggcagaaataagaagtataaaacagaacatgtcctttgacatcaaggatttcacaattagtactgaccagtgattctcaatagaaacagggggccccattccagatgtttggaatcttggactaatgacagccagaatgtgtgtgtgtttgtgtgtgtgtgtgtgtgtgtgtgtgtgtgtgtgtgwgagacacacagagagaaagagagagtgcatgtgtgtagcttgcattcagagaggggtggaaacaaacataatatattttgtgacctttccccaatagttatatgtccaggaaaaaaaaaacccttgttctattcttcatttatgtctcccagaatgtgacaatattaatccctaggcatgtcaaagttgctcactagggatttccatactgatagttgtttaaaaaaaatactttttgt

SEQ ID NO: 399692 - DNA, 498 bp, Homo sapiens
ccatattaatgatatctattgatgaagtcagtatattttcaattttatttttcattgttatttgacatggtgaggcagaaataagaagtataaaacagaacatgtcctttgacatcaaggatttcacaattagtactgaccagtgattctcaatagaaacagggggccccattccagatgtttggaatcttggactaatgacagccagaatgtgtgtgtgtttgtgtgtgtgtgtgtgtgtgtgtgtgtgtgtgtgtgagwgacacacagagagaaagagagagtgcatgtgtgtagcttgcattcagagaggggtggaaacaaacataatatattttgtgacctttccccaatagttatatgtccaggaaaaaaaaaacccttgttctattcttcatttatgtctcccagaatgtgacaatattaatccctaggcatgtcaaagttgctcactagggatttccatactgatagttgtttaaaaaaaatactttttgt

SEQ ID NO: 399693 - DNA, 498 bp, Homo sapiens
ccatattaatgatatctattgatgaagtcagtatattttcaattttatttttcattgttatttgacatggtgaggcagaaataagaagtataaaacagaacatgtcctttgacatcaaggatttcacaattagtactgaccagtgattctcaatagaaacagggggccccattccagatgtttggaatcttggactaatgacagccagaatgtgtgtgtgtttgtgtgtgtgtgtgtgtgtgtgtgtgtgtgtgtgtgagagacacacagagagaaagagagagtgcatgtgtgtagcttgcattcagagaggggtggaaacaaacataayatattttgtgacctttccccaatagttatatgtccaggaaaaaaaaaacccttgttctattcttcatttatgtctcccagaatgtgacaatattaatccctaggcatgtcaaagttgctcactagggatttccatactgatagttgtttaaaaaaaatactttttgt

SEQ ID NO: 399694 - DNA, 533 bp, Homo sapiens
tacatttttatatttaatcaaatcatatgaacatagccaacattttttgtaatgtgtggaaaatattagaaaaagattaagactttaagatagtctcacagattaaaactctcccctggtttcagaccatctagacttgaccaatcctgcttacacctgaattcacgttattcacaaaaagcctattcagttttatgaaattcaccaaatacaagctatacatccatttcagtcttcagcatttccttccttcatcagccccaaataactcatttaaagtatgagtgagaagtacagcactgttttacaaatgaaataaaatgttggctaatggattaaacaaaattmaaaagagaatgtgtttttctaatacattccattaggaaacatttccaaggtcaacattcaatccttaggctttttccaaaacatagcctttattacctgaagccaagaacatgatattatcacttttcaaaatcataataacctatgaaagaagaaaataggactctagtccctaccataagcat

SEQ ID NO: 399695 - DNA, 533 bp, Homo sapiens
tacatttttatatttaatcaaatcatatgaacatagccaacattttttgtaatgtgtggaaaatattagaaaaagattaagactttaagatagtctcacagattaaaactctcccctggtttcagaccatctagacttgaccaatcctgcttacacctgaattcacgttattcacaaaaagcctattcagttttatgaaattcaccaaatacaagctatacatccatttcagtcttcagcatttccttccttcatcagccccaaataactcatttaaagtatgagtgagaagtacagcactgttttacaaatgaaataaaatgttggctaatggattaaacaaaattcaaaagagaatgtgtttttctaatacattccattaggaaacatttccaaggtcaacattcaatccttaggctttttccaaaacatagcctttattacctgaagccaagaacatgatattatcacttttcaamatcataataacctatgaaagaagaaaataggactctagtccctaccataagcat

SEQ ID NO: 399696 - DNA, 630 bp, Homo sapiens
tcatacattaccagtcaccatcacagggatctgaagtaggaaatggggaaatggggctagaggacacagttttatggttaacatcatggcccaaatttaggcaaatgtttcccctcttaatgtgctctacatmgtacagttgaagtaaattcagaattttcaataaaattttactagaaactaggatgtaaataaagaatataaacatggccatgataatgaccccagataatttcactctcaagtgtgtgctggacctaggatgacggtcacatcttcctgactttcagatttcctaattcttggtctgacattatctttaacctatgctacaatatataacctcctagatatgcagactcaatgtctaggccaaaagaaagacagcactcttctgatcatgagagtggagctttcattttctagctcctgtctgaggaaccccttttctcccaggaggatgaaactggcatggatgccagtgcacggatgcaaagtagacctatcagaagatatgatataaatataaatataaatttcagaattgccaaatagaattctattccaaccaaatagaaagtgttggaatccatagaatctttctaaaggaaagtataaaataaaaaaaga

SEQ ID NO: 399697 - DNA, 630 bp, Homo sapiens
tcatacattaccagtcaccatcacagggatctgaagtaggaaatggggaaatggggctagaggacacagttttatggttaacatcatggcccaaatttaggcaaatgtttcccctcttaatgtgctctacatcgtacagttgaagtaaattcagaattttcaataaaattttactagaaactaggatgtaaataaagratataaacatggccatgataatgaccccagataatttcactctcaagtgtgtgctggacctaggatgacggtcacatcttcctgactttcagatttcctaattcttggtctgacattatctttaacctatgctacaatatataacctcctagatatgcagactcaatgtctaggccaaaagaaagacagcactcttctgatcatgagagtggagctttcattttctagctcctgtctgaggaaccccttttctcccaggaggatgaaactggcatggatgccagtgcacggatgcaaagtagacctatcagaagatatgatataaatataaatataaatttcagaattgccaaatagaattctattccaaccaaatagaaagtgttggaatccatagaatctttctaaaggaaagtataaaataaaaaaaga

SEQ ID NO: 399698 - DNA, 525 bp, Homo sapiens
ccaaccaaatagaaagtgttggaatccatagaatctttctaaaggaaagtataaaataaaaaaagaggagatctaggactgagtcctgagaatgttcaacttttaaagagcaggtggaggtggaggagttcctaagggagactgagaagaaatggcctgaagaggctggaagaaaactaagggagcatggtgtcacaggggccaagggatggcagcatcttactgtgtggaatagatgggaggccaggaatgatgggaaatagaaatgcttctgaacctaaggcccattggtccagcaaaagtattctgcaatgagagcagtactctaggtctgctgtgttcaacacagtaggtacacgttacttttgaactcttgaaatctggctagtgagaatgaagactgaatttytaatttaatttactttagttcattgtataattatttctgtatcacagatgaggaaacagaggcaaaaatacagagaaaaaagcaacctataacactgtcaagattgtaaactgtaa

SEQ ID NO: 399699 - DNA, 541 bp, Homo sapiens
ctttcaaacttgagctgtcttctcttgttgcaggacttcactgctgcttagggagctacttactgattagcactgagtgtgcatttcatggtagttgtgttacagtggttcttgattgccttctgttgttggtggtaattttccactgatcttttccaattatgaattccatgaagattgcttctggtttttgttcccaagaccaattttggtcttattccagataaaacagacattcartttaccgtttacccactctttactcactgttttccatggaaatattcttcacaaagcctgtatgaagagttttaggataaagtgcaattactaatattttgtatttggcaaactcagtccttaagctgtttagtctctgtgtatttctgcagagccccagtggagtctgacatagctttccttctctagagttcatgaaaattcttgcctgatcacctcagctagctgagaatcaccccttttctgacatgtaaagtacatgtaaccactttctatgtcattatggtatgcattttgatac

SEQ ID NO: 399700 - DNA, 541 bp, Homo sapiens
ctttcaaacttgagctgtcttctcttgttgcaggacttcactgctgcttagggagctacttactgattagcactgagtgtgcatttcatggtagttgtgttacagtggttcttgattgccttctgttgttggtggtaattttccactgatcttttccaattatgaattccatgaagattgcttctggtttttgttcccaagaccaattttggtcttattccagataaaacagacattcaatttaccgtttacccactctttactcactgttttccatggaaatattcttcacaaagcctgtatgaagagttttrggataaagtgcaattactaatattttgtatttggcaaactcagtccttaagctgtttagtctctgtgtatttctgcagagccccagtggagtctgacatagctttccttctctagagttcatgaaaattcttgcctgatcacctcagctagctgagaatcaccccttttctgacatgtaaagtacatgtaaccactttctatgtcattatggtatgcattttgatac

SEQ ID NO: 399701 - DNA, 577 bp, Homo sapiens
caacaggcatgaactggaacaaccttggccatgctgggacgtatgttcaccctaagcaaaggtcttcttcaytggattctgtttgctttatggataaacttcaaactctttagaaaagcacacagccctgtataatttggccctagcctctctcatgctactccatgcttccattttatgcttgggcagagtgtaactgcttgtagagctatccctgacccaccggcaagctatgcttaaccctctgcttgtttctggaagttggcccattctgcaccccacctgattgacctctctcttcacaggaatgatgcttatccctactcaacaattttgttaatttcctgcagaagagccttgagggggcagcctgtgctaccatgtgcttatttgtttattcatttatttactttgagatagggtcttactctgttgcccaggctggagtacagtggtttgatcatggctcactgcagcctcaaggtgctgggttcaagatatcctcccatctcagccacccaagtaactggggctataggcaccaccatgcccaaataatttttgtatttttcataga

SEQ ID NO: 399702 - DNA, 585 bp, Homo sapiens
gtagataaatatgaagacttacctggatttaaaagaactaagatgatctgtaacggcttatggaagatgtaaacacaagaaagggactatcataaggatggtggaaatgttttttttggtttagagtacaggatgttgctacatagcctggcctctgtttttatgactcaaagagaactcagaactctttgatctcaatagagcacatagtatctggaaraggaaataatctaaatatccattagtaaggcactagtcaaataaattatagtaaatccatacagtggaatattaggcagccattaaagtcactgaggcagccgctgaagtcaatttcttttttgttttttttttttgagacagagtcttgttctgttgcccaggctggagtgcaatggtgcaatctcggatcactgcaacctctgcctcccgggttcaagcgattctcctgcctcagactcctgagtagctggattataggcacacaccaccacacctggctaatttttgtatttttagttgagatggaatttcaccatgttggccaggctggtctcgaactcctgacctcaggttatgtgcccg

SEQ ID NO: 399703 - DNA, 230 bp, Homo sapiens
aaggcagcagggagctgtggttatgccgctgaactccagactgggtggtagagtgaggccctttctcgaaaaaagaagaaaaaraaaaagaatgacttgggaggtcaagtgatttattcaagatcagtgacaaaccattttaaaaaataaaacatattttgatttcttgagattatgcccatttacttcttggggttaaggcattaggcacttaaaaatatcaaaggtta

SEQ ID NO: 399704 - DNA, 631 bp, Homo sapiens
tctccaaggaagttgttttaaaagttagagtgtcaataaaactcttagaggtgtttaagttctgagaagcgacctctaaatgtgcacaacctaaaataatattaagtctttctgagggcacatttgattttaggctcctgagccccagaacattgaaggcttcaaaccttccaaatttatttatttaatttttttccaggttgctcttctgcaaaaatgtaccaaatttaaatagatgcttcagagcatgcagttttacataatatttgatgttcaaattgaaacataaggctaccaaaaattaatgctgaatgacacattcagttttattattaaatttaatttcaactattaacttttaatcttaggacagtttttccaataaaaactagacctagttaaraataaaattgtagctatagaaagcagtagttctaactcccaagagaatgtggtagatccagaaggcagttgtagaatttctggcagtatatcaaatttattttgatggaatttcttagaacagcctttatttaaccactccagtctcaaaatcaacttcagcgacaacacacttgattcctcagcccccttcattttagtttgcacactctttatactaactgtatat

SEQ ID NO: 399705 - DNA, 605 bp, Homo sapiens
aattctattgcttaatcaaaaagttttgatttttaaaagcatgttaatgaaatagactaggagaggaataaataagtaactgtttaagagaatacatcctagaccatggcaaagaactcactgatttcactaatgttaacaagcaactgtcaattcaatgaaaaaaacaaaacaaaacaagacaaaacaaaacccaaaagagtctgacaagctgacgagtcgtattggttcaaagggttaatcaggcacctcagatcagtcatagcttatttttgctacaagagtctatgtaccctaatatttataatttgccaccctcatatttataatttccaaggacattacacagtacctagcacatagtaggtgctggatgaatggatgactccaactcattaaatcagatcatattttcatagtttgaaatgagacagtaccaattttgccctgaaaacacattcactttgaaatttattttctatttgaaagttgtttatcagtrtctcaaagtagtgctcccactctttatgttgaaagaaacctaccatcgagttgtttgaggaagtgggagaatactgtgctatttaagagtctaggctgaagag

SEQ ID NO: 399706 - DNA, 561 bp, Homo sapiens
caaaataataccatatgtgtgtttcgggaaaaaaagaataaagtagaataaagttgatgctctcactgacttgatagtaaataagattgaggtgattttgaatatttaacaacagaaattcattagaaaataaaacttcacaattactcataattgaggcatwaagcaaaatagaagacaaagtcaggatggctggcttactaatcatattatgaaacttcagataagaatggcatacattttaataattcactataaagttttagaagccaggctgtcttctagggaaatgcaatttgtggtgtcgagagtattaaaaccacaaaagttctattgaatgcagagatggaaggatggaacatactaaaggagaagttagaaatgctggcttccagtctagctctgtcaaaaatctagaagatttagctccctcctctgccaaacaagaaatgttaggctagaactagatactctctgaattctctaccagctctgaaattgtacattattttcatatcagaactctagtctgtaactagtttatctgaaactattattaac

SEQ ID NO: 399707 - DNA, 465 bp, Homo sapiens
aaacacaggagagtcagaattttttttttaattttatctctaataggaagactatattagaacataagactgcacatgactatgtcactgtttcagtcagcattctttagagaaacattagttataagaagttggcctatgcaattatggaggctggcaaatcccaagatcttgyggggagaggtcagtcagccaaggtgatatctgagagtagaggtgaatgaagaaggtaagggagaaagtcataagggaggacatttttcagacaccaaggagagccaatgctttagtttcagcccaaacctaaagtcctgagaaccaggagagctgatggtgtaattctggtctaaaggtcagcaagctcaacatccaggagtttgagtttgagtcttaaggcaggagaaaagccagtgtcagccagacatggtggtttatgcctgtaatcccagcattttgggaggccaa

SEQ ID NO: 399708 - DNA, 597 bp, Homo sapiens
ctgtcccagacaggaattgcagtgcctgagggcctttttccacccagggcacaactcgccagtttgargtttctagcttatctatcttctctgcctcatttctggctccacattcaacccctccactggctaaatcttaggggtccagagtgggaccactgagatcctaaagaatccaggcagggcgtgcactttgctccctgctaagctctcctgctgctcaggaggggtgtgtgccctctcctcaatctggtagatacttctttcatcattggttttgaaatcctccactgatgactttgttgttctgggtgtttcctctgtcctctcctctcatatcttaatggtggatagggttttagggattaaaaaatctctggattactgaaaggaaaaatgtttagagaggcatttaagatgatttttcttattatcacttttaaacccacactgaaggtctaggtcctatacctgttctgttggaatcttggccaatctcacagtttttctggtcattcttagaatagttataatggcctttgtttaaaaaacaatttcatatgaaaactaaaatatgcaggtcagcataataatcaa

SEQ ID NO: 399709 - DNA, 632 bp, Homo sapiens
attcatagagccgctatgatattagcttcttagtccatttgggttgctctcacgaagtaccataaactgggtaacttgtaaaaacagaaatttatttttcatagttttagaggctgggaagttcatgatgaaggcactggcagatttggtgtctggtgaggtgtttggttcctggttcacagatgctgccttctctctgggtcctcacatggcggaagggacagccaagctccctcaggcctcttttataagggtgctaatcccattcgtgagcagtccactctcatgacctaatcacctcccaaaaggcgccccccaccctccgactcctaataccatcaccttggggtgagaatttcaacatatgaattctggggagacaccaacattcagactgtaatggcttgtatctacacccccattccagaaccctgcaaggatattcactttcttccaccctgaactacattaaactaaaacttctggtggtatcatctctccatcagcattgcaaattgaaattctacttgattgtatttattatttratataggtaagtctcacccttgagcctgcatgctctttgagttgagtcagaaaaatatatttgatagctttcatgcaagtttcac

SEQ ID NO: 399710 - DNA, 591 bp, Homo sapiens
gggtaaagaaggctctatttatgtcctgtctcatagatttccttcaccattgttgatactggatatatcctggaggagcctgtgtgtttgtctgtatgtatatctgtatctatatccatgtgtacatcgatatagctatatttttaacatggattctgtgttttaattagcatggcattatagtttgttttaatatttgttagggcaaatttctcatcttttctttatttttaagcacttcttttgggggtcagatttactactgcaagtcaactttagaatcaacttttcaagttcgtttgaaaatagtttggattttagtccgaattgcattgaatttatagatatcaatttggtcaaaatgaatactkttaccaatggaatctccctatactcaaaggaataatgtattttgatgtttattaggatttttttacaaaaaattttcaaaaaatatttaatagttttcttacacttctcatttgattattcttaaatacattatataaaaattttaattgttattataaatatgcaattatattgcatttaatgggccattgttttatagtaatggcattattttggtat

SEQ ID NO: 399711 - DNA, 591 bp, Homo sapiens
gggtaaagaaggctctatttatgtcctgtctcatagatttccttcaccattgttgatactggatatatcctggaggagcctgtgtgtttgtctgtatgtatatctgtatctatatccatgtgtacatcgatatagctatatttttaacatggattctgtgttttaattagcatggcattatagtttgttttaatatttgttagggcaaatttctcatcttttctttatttttaagcacttcttttgggggtcagatttactactgcaagtcaactttagaatcaacttttcaagttcgtttgaaaatagtttggattttagtccgaattgcattgaatttatagatatcaatttggtcaaaatgaatactgttaccaatggaatctccctatactcaaaggaataatgtattttgatgtttattaggatttttttacaaaaaattttcaaaaaatatttaatagttttcttacacttctcatttgattattcttaaatacattatataaaaattttaattgttattataaatatgcaattatattgcatttaatgggycattgttttatagtaatggcattattttggtat

SEQ ID NO: 399712 - DNA, 481 bp, Homo sapiens
aggctgaggcaggtggatcacgaggtgagaagttcgagaccggcctggccaatatggtgaaacccgactctactaaaaatacaaaaattagctgggcatggtggtacgcacctgtagcccagctactcaggaggttgagtcagaagaatcgctcgaacccggggggcggaggttgcagtgagccaagatcatgccactgcactctagcctgggtgactccctctcaacgagaaaaaagatatgtgaacatacattaatatattttaaaaataaatgctaaatatatacatgtgtaccagtaagatggataaatgcatgaattgaaatatatacatattactatggttttaatgtgtcctctccaaaattcagccatttccaatgtagyattaggaggtagggctttttagtggtgatcaggccagaaaggcttctcccttatgaataggattaggtgccctcataaaagggattcatagat

SEQ ID NO: 399713 - DNA, 606 bp, Homo sapiens
ttttgttttgtttttacttgtaaatttttatggtggaattattaaaattccaggatgaatttttttttcccagaaacaaattctgtgtttttgttatttgcctgggagcactgacagatttatgaataagggtatactctttgggttccaaactttacataataccttctattacactcctcacctagagaaggtctgatatggtttagctgtgtccctacccaaatctcatcttgaacccataatccccacatgttgtaggagggacctggtggaaggtaattgaatcatgggggtgggtttttctcattctattaggatagtgaatcagtttcatgagatctgatagttttataagggggagttcccctgcacaagctctcttgcctactgccatgtaagacatgcctctgctcctcctwcatcttctgtcatgattgtgaggactcctccccagccatgtggaactgagagtccattaaacatctttttttatttacaaattacctagtcttaggtgtttcttcatagcagtatgaaaattggctaatagagtaaattgctaccagtagagtggggtactgctataaggatacccaaaaatgt

SEQ ID NO: 399714 - DNA, 606 bp, Homo sapiens
ttttgttttgtttttacttgtaaatttttatggtggaattattaaaattccaggatgaatttttttttcccagaaacaaattctgtgtttttgttatttgcctgggagcactgacagatttatgaataagggtatactctttgggttccaaactttacataataccttctattacactcctcacctagagaaggtctgatatggtttagctgtgtccctacccaaatctcatcttgaacccataatccccacatgttgtaggagggacctggtggaaggtaattgaatcatgggggtgggtttttctcattctattaggatagtgaatcagtttcatgagatctgatagttttataagggggagttcccctgcacaagctctcttgcctactgccatgtaagacatgcctctgctcctccttcatcttctgtcatgattgtgaggactcctccccagccatgtggaactgagagtccattaaacatctttttttatttacaaattacctagtcttaggtgtttcttcatagcagtatgaaaatkggctaatagagtaaattgctaccagtagagtggggtactgctataaggatacccaaaaatgt

SEQ ID NO: 399715 - DNA, 597 bp, Homo sapiens
aatctgcagctccaatctttagaaaatatgttcaaaattttattttttcgtgatcaattttgttttcaaatttattaacttctttaatgtctgcaacaaatataaatgaaaactgctacgtcatagaccatacatcacaatggccccagtgtaaagcattgactacagtggcttcattttaccagtcagcaatgcttaaagcatgaggaggtgctcggcacctggcaaagaggcattccaagtacagagagaagcacaagaaaagcctatatttgatccaaacataggtccaaactagcagctactttcgggtaaagcaaatagttttgaatggctaaaactaggctgctttatgtayggttggatcctaaagtacaagaagcaatagcaattcgtgcacctggagaagtagacaggagaggagcaacgtcatgtagaaacttttataccacttcataatttactagctaggtaatagaaggagatattcagatgggtataggcacacagagaaacagatatgaatttatgacttttttttttttttttgagacagagtctcactctgttgtccaggctggagtgcagtggtgcaat

SEQ ID NO: 399716 - DNA, 467 bp, Homo sapiens
ttagtaatcctgtctttttattttcttttaagatatgtattggagtagttaccaaggggatagttaacactgacgtcattttagaagtggaaatacagtggatttctggaaaatcaaacttatatttgtgagtttcaataattttgaattgccacagggatttcatcctcyatcactcaaagaatccctctcatattatctccctcagtaagataagcctcattaatttcaagaagccccaaatacttacctaatgactcagaaattagtcattgagtcacggaatattatgatcagtgtaaggtgaataatggttcaccaggatgtctatgacctaatccccagaacctgtgagtatgactttatatggcaaaataaaatttgcagatgtgactaacttaaaaatatttagacagggagattatcctggattagccaggtggccccttaaatgaaataacaagtga

SEQ ID NO: 399717 - DNA, 467 bp, Homo sapiens
ttagtaatcctgtctttttattttcttttaagatatgtattggagtagttaccaaggggatagttaacactgacgtcattttagaagtggaaatacagtggatttctggaaaatcaaacttatatttgtgagtttcaataattttgaattgccacagggatttcatcctctatcactcaaagaatccctctcatattatctccctcagtaagataagcctcattaatttcaagaagccccaaatacttacctaatgactcagaaattagtcattgagtcacggaatattatgatcagtgtaaggtgaataatggttcaccaggatgtctatgacctaatccccagaacctgtgagtatgactttatrtggcaaaataaaatttgcagatgtgactaacttaaaaatatttagacagggagattatcctggattagccaggtggccccttaaatgaaataacaagtga

SEQ ID NO: 399718 - DNA, 467 bp, Homo sapiens
ttagtaatcctgtctttttattttcttttaagatatgtattggagtagttaccaaggggatagttaacactgacgtcattttagaagtggaaatacagtggatttctggaaaatcaaacttatatttgtgagtttcaataattttgaattgccacagggatttcatcctctatcactcaaagaatccctctcatattatctccctcagtaagataagcctcattaatttcaagaagccccaaatacttacctaatgactcagaaattagtcattgagtcacggaatattatgatcagtgtaaggtgaataatggttcaccaggatgtctatgacctaatccccagaacctgtgagtatgactttatatggcaaaataaaatttgcagatgtgactaacttaaaaatatttagacagggagattatcctggattagccaggtggscccttaaatgaaataacaagtga

SEQ ID NO: 399719 - DNA, 639 bp, Homo sapiens
tctaagacatgatagcacctattgtttcctcctacccccagacctaaaatcaagtatcctataaatgcaaatatttctctaaagagtaacatgaacatctaaactaaattattagcaagggttctttctgagatataatcatgtaactgtccttggcatgtaaataaagacacagtgattcaatgtcaaggggcaatataatacaatggataagaatactagtgggaggctagacagccaatgtttgaatctcaggccccacttctggtcgtgtaacttaagaaaagatacttaatttttctgaacttcatttcactaacccttaaaatgataataatagtacctacctcctaggactgttctgaaaaaagtgtgtgtgtgtgtgtgtgtgtgtgtgtgtgtgtgtgaaattcatgtaaaagtacttagtacagagcttggaaaacattaagtgctcaattaatgtcagctacttttagatgaccttgaagccaataagaatatgaattgaaatactttattaaattacaatttgtcawcttctggcttgacaaataactactcaagaagaaactaatgagacatactagatatgaaactggttactaaagaaaaatttatgcaaaataaatgcaactt

SEQ ID NO: 399720 - DNA, 624 bp, Homo sapiens
taagttttctttcttcctcttttttaaaatttcatgtaaaaaaagtagaaggataggtagaacaagcctgatgcaggggattgatgatgtcatctaggggctttctatctttaatatcttagttttctgtttacaacatagggactgctctgccttcatctgtgtccagggaaggatggagggaaaatagctttatgtactgctcctgttctattcattgtaaacgcagaacactgtcagagatcctttccagacttctgctgtatgttattaggaaggagtgtgtcagccgggcgcagcggctcccacctgtaatcccagcactttgggaggctgaggagggcggatcatgaggtcaggacatcgagaccatcctggctaacatggtgaaaccccgtctctactaaaaatacaaaaaaattagccaggcgcggtggtgggcacctgtggtcccagctactcgggaggctgaagcaggagaatggcgtgaacccgggaggcggagcttgcagtgagccgagatcgcgccactgcactccagcctgggygacagagcgagactccatctcaaaaaataaataaataaataaataaaggagtgtgtcatctggtcacttctagctg

SEQ ID NO: 399721 - DNA, 569 bp, Homo sapiens
aataatattccattattcataaatgaaatacatttcagccttaaagaagaagaaagttcagatatacgctacaatatagatgaagctagaggatatcatatgatgagaaaaaagccaatcatgaaaggacaaacactatctgattccacttatatgaggtactcagagtagtcaaaaacatagagaaaaaaagtagaataatagttaccaggaacacaggggagaggaatgggagattattgtttaatgggtatagartttcaggtttgcaagagaagagttctggacatggatggtggtgatggttgcacaatataaatgtattttatactaccaaactgtttgtttcaagttggttaaaatgatacattttatatgtattttaccacaataaaaaattggaaaaaattaacccaaccataaattgttaaatttttttttaaaccagtagcaagaatgacacttacaaccaaaaccaaaaccaaaaacaaacaaacaaaaaacatactcagagaaccaatatactgataggaaattcaaagataaaaccattacaattggcaaatgga

SEQ ID NO: 399722 - DNA, 551 bp, Homo sapiens
catattgtccatgctgaaataaaagtacattgaaagctttagttttatgaagtkcatactgcatatggagatttgttttctaagtaaacactaagcaatttatgcactagtagcattcaaatctctgatgctgttttgggataattctcaaggatttatgactttcatgaatttctctctaaccaacctagatgtacttcagaattttatcattgtttttgaccaaataccttgagtttgaaggctgctgtggaaagtactccatatacaaagattggataaaatctgaggcttttcagaatgctaaagaagatttcaattctgctgccctcccaaaattaaaaaacaaatcttcaaagctctgtgttatttttacattttgtttatgaaaataaaataaaatgttggaccacttttgataatatttaagttgaccaaatcacatttgttttcaccaaatgaagaaattcttcatttactgtatcactttagttttccttctcatgactcctttgccaagaaaacagattttgcaatcagatgcctactag

SEQ ID NO: 399723 - DNA, 581 bp, Homo sapiens
tatctttaccatagaatgatttagattcctttgggtatatactcaataacgggattgctgggttgaatggtaattctaagttttttgagaaattgccaaactgctttccagaaagactgaactaatttacattcccaccagcagtgtataagcactaccttttctccaagacctcgtcagcatctgttattttttgactttttaataatggccattctgactggtatgagataatatatcactgtggttttgatttgcatttctctaatgattagcaatgtggaacttttttttttgtatacttgtttgccttgtctatgacttttgaaaagtgtctgttcatatcctttgcccactttttaatggagttgttttttgcttataagtttgtttaagttccttatagattctggatattagaccttggttagatgcatagttygcaaatattttcttccattctacaggttgtctctttactccgttgatagcttattttgctgtgcagaagctctttagcttattctatttatcaattttatatttttgtttcaaatgcttttgacatctttgttatgaaa

SEQ ID NO: 399724 - DNA, 577 bp, Homo sapiens
cgggtaaaacatgtactgacttcagtggtgaaaatgttagtgctgcccttgaataacttatcctccagtaagatatggtaaaagacggttcatttcttcaactggttarttaatagcagtacttgaagtgctgccttgagaaggatgataagatcatatctctgttcatcataacaaaagctgttatcaattactgatgtttgttctgatggggagaaagaagtggaagtatgtgcatcacctatttaccacctctgttctagttttagatgttaaatttagtaagttactcaaaatcatattaaaatagaaatttgaagaaatgaattaaaaaataagactcttacccccaaaaccagagtattattttatgggtattcctatctgtaaacaaaaaatcctcaactcaatggcttgttcttttagcacgtagcccaatatcctgagccaataaagctgattatgtattttagggatgcaaagaataaaggcagtttaaactgccttggacaaattaaatttcatattctgttcaaagagcctatcttccgttacaacagcccttagatgtgtctcc

SEQ ID NO: 399725 - DNA, 577 bp, Homo sapiens
cgggtaaaacatgtactgacttcagtggtgaaaatgttagtgctgcccttgaataacttatcctccagtaagatatggtaaaagacggttcatttcttcaactggttaattaatagcagtacttgaagtgctgccttgagaaggatgataagatcatatctctgttcatcataacaaaagctgttatcaattactgatgtttgttctgatggggagaaagaagtggaagtatgtgcatcacctrtttaccacctctgttctagttttagatgttaaatttagtaagttactcaaaatcatattaaaatagaaatttgaagaaatgaattaaaaaataagactcttacccccaaaaccagagtattattttatgggtattcctatctgtaaacaaaaaatcctcaactcaatggcttgttcttttagcacgtagcccaatatcctgagccaataaagctgattatgtattttagggatgcaaagaataaaggcagtttaaactgccttggacaaattaaatttcatattctgttcaaagagcctatcttccgttacaacagcccttagatgtgtctcc

SEQ ID NO: 399726 - DNA, 577 bp, Homo sapiens
cgggtaaaacatgtactgacttcagtggtgaaaatgttagtgctgcccttgaataacttatcctccagtaagatatggtaaaagacggttcatttcttcaactggttaattaatagcagtacttgaagtgctgccttgagaaggatgataagatcatatctctgttcatcataacaaaagctgttatcaattactgatgtttgttctgatggggagaaagaagtggaagtatgtgcatcacctatttaccacctctgttctagttttagatgttaaatttagtaagttactcaaaatcatattaaaatagaaatttgaagaaatgaattaaaaaataagactcttacccccaaaaccagagtattattttatgggtattcctatctgtaaacaaaaaatcctcaactcaatggcttgttcttttagcacgtagcccaatatcctgagccaataaagctgattatgtattttagggatgcaaagaataaaggcagtttaaactgccttggacaaattaratttcatattctgttcaaagagcctatcttccgttacaacagcccttagatgtgtctcc

SEQ ID NO: 399727 - DNA, 556 bp, Homo sapiens
aaattattttgaattttattgcaatggcttttcagtaagtttttccttattctacttttctacaaatttagtatttcacagagagacagtttgtgactttgtaagaaagctatccttgaaccttttaccataggatagagttataacaagggccctttattacttcaggcataaacacctttgaatgggccaaagatggaccagctttattctgagctccaatatagaaatgtcttgttatttgagtatatctcagatatccaaacctatctattaggaacwatttataagtaacctaattaaaagcaatgatgccttctagagcactttcttactgcagtgttttttgcattctttcttagttaatctgggttaggcctttgggagtttataagcagaatcagttaatgtgcaaaaaggatgatgtgaaagattgctagagagaaggaattaacttgaaaagatgtgaataacacattctctaacatccccctgcagaatttaaattcagaacattatggatagagataaggaggttcctgaacttagctctatt

SEQ ID NO: 399728 - DNA, 509 bp, Homo sapiens
tcctgggtgccagacatattactccttgccaccattggatgacatcaacctgattccctcttggtaaattacattgagtacccaagcaatatttaatcacctttgcctattacttcagtagtacaaagagccccaaacgaccaagtggtggtgtcagcttccagtcatgtggaactcttgttgtgttacctggccaaaccactcttcccttgggaactaagatagctaaattagcagaacccaaatttggaggagaagaaaacaataattttatgagcggcaagtttgttgtaatagtgagagaaactagtctttcttctaccacagtattctggcaakgggggagaaacagcattgcatattgctctctgtttcaaatgctatactggaagctgtaggttaatactcaaaagttttatggtgttgtttccagtgaaggccacatctgagtcttcaataggccattctgctgacctatcaggtcagctcctctggatgatggtgtatgt

SEQ ID NO: 399729 - DNA, 611 bp, Homo sapiens
aatggggaaggaaacagctaagaaaacaataatgttaacagaggaagtcaactgttgaggcaatagtcacattacaggtgaaatagcaatatctatgccacaaaactaaaaaaaatagcaggaaatcatgaaaatacaatggggcagcaatcgaaatgaayatgaacatacatggagtaacctgttctatggggaaggcaccactctgtggttaggtgcggggcttcaatgactagatgcccaggttggacatttgtagtgtgtagggccaaccctagagagatggtttctcattccattttaaaaacatatctgatattatattctggtagctgtatttatccaccattgcatgttctaagacaggcagcctgctaggtggcactagctgggtgaccttaaccaagttagttaacccctgtataggtcatttttcttctctgaaaaatgggaacacttatacaaataaggttatcttacagggctgttatgaagaatgaaattgtatttgcagagcactcaaaccctgcttggcatacagtcttatgtaagtttaaatataaatgtactgggtaatttacaaatattattttacttaatcctatcacatc

SEQ ID NO: 399730 - DNA, 523 bp, Homo sapiens
ggaaagggaaaggcctatgatgatacatttgttaatccttctatacccttcactcttattccatttactttaggatttattcccatctacccagtatatagagaataaacaaaaatacaggagacttgtatatgcatcttttactcagagttcaaagcaatccacgaataactcaaatgtttatcawgcctcactgtctaaagcaggatgtaaatggaaaagcaagtcctgaagggaagaaagcaaaaaccaggtcatcctgctttcttctctgtttcaagtaccatttggcttctacctttcccctaacccccaaagcacactaaacgaatgtactgctaataccagctacaccaggcaggacctccctaaggggcccagattttctctcccactttgtcttctgcttcacttcaagattacacatgagcaaggtttctgctcacacttaagaataagataaagaagaaagaatcgtcttacatatcaattggcagtgatacccccctactcccttcaaggc

SEQ ID NO: 399731 - DNA, 583 bp, Homo sapiens
tatacaccacattttccttattcagtccaccattgatgggcacttatgtttaatagatgtctttgctattgtgaatattgccccagtgaacatgttagtacacgtgtctttttggtagaaagatttgttttcttttggatgtatacccagtggtgggattgtggattgaatgatagttctaagttctttaagaattcaccaaactgctttccacagcagctggtctaatttatactcccaccaaccatgtatgagtgttcccctttctctgcagctttaccaacatgaagaaaaaaaaagaatagtaagtgaaaaaaagcagatacaaaacatatgcttcaaatatacctacagttctgagaataaaagatattacagcaaaagatttattgtagwtatagctaagcaatgtaattatggataatgcattgttgctttgtgagacaatttttaaatttctcacaaatgttccagaaaacaaatagtctttaaatcagaagaaaatggttaatttctaaaacagcactcgaagtagagtttttggttatatataataggaatgatcaggtcttctttttatttt

SEQ ID NO: 399732 - DNA, 583 bp, Homo sapiens
tatacaccacattttccttattcagtccaccattgatgggcacttatgtttaatagatgtctttgctattgtgaatattgccccagtgaacatgttagtacacgtgtctttttggtagaaagatttgttttcttttggatgtatacccagtggtgggattgtggattgaatgatagttctaagttctttaagaattcaccaaactgctttccacagcagctggtctaatttatactcccaccaaccatgtatgagtgttcccctttctctgcagctttaccaacatgaagaaaaaaaaagaatagtaagtgaaaaaaagcagatacaaaacatatgcttcaaatatacctacagttctgagaataaaagatattacagcaaaagatttattgtagttatagctaagcaatgtaattatggataatgcattgttgctttgtgaracaatttttaaatttctcacaaatgttccagaaaacaaatagtctttaaatcagaagaaaatggttaatttctaaaacagcactcgaagtagagtttttggttatatataataggaatgatcaggtcttctttttatttt

SEQ ID NO: 399733 - DNA, 581 bp, Homo sapiens
aaccacaacagacccagacagcctcccccagcagcctactgtctatatccagagaactgggatagtctagcaaaagattttaggtaataactgctctacaccaaacaatcaccacaagaagaactgtgggtctgtccaccattaatgtcagcaaagatggagcaggggacctgagcttccacccttgccaagctgtaatgaagcacctcgatgccatcctggggtggtcagcaaaggctgagtagaaagctgggactcattctagtccatgtatcagtgaagactatctggggatcatggatttttatccctaccagcagtaaaaaggtgcctcagctttctgtgggagagtgtcagaggaggccaagtagagtcagcttttacaatcacctagggttaacaaggttatccttccctgactatggtgtcagtgaaggccacagggaagcaataatgagggacttctrtccctcacagccagggtggtaccagagaagcctcatgaggagctggaagtcccatcctcatccagcaataatagggagcccctcctttctcagggtataaacggggtctgaatg

SEQ ID NO: 399734 - DNA, 592 bp, Homo sapiens
ttagcctttaaattaaaaagtggtatatatttagtctgacagaaaacttaactaagataaatattatgtgtgtgtatgtgtatgcatgtcttgacatctttatttcctccagaagcttcacagtaggaagakatacaatttgggtaaattacattaaagcattgagctggtaaacttcctaattccccatccccatatcatgactatttccaccatcaactgggaatcccagccattgtaaggtatcagcaagaactatcggttttttaaatgctgcacattctcataaacgagaactaaacattgggtacacatggacataaagatgggaacgacagacactgggaccacaagagaaaaaagggaggtgcaagggcaagggttgaaaaactacctgttgggtataatgctcgctacctgggtgaggggttcaatcataccccaaacctcagcaccatgcaaaacattgttgtaacaatcctgcacatgtactgtctaaatctaaaataaagatttaatttttaaaaaatgtataaaaaagataaatgagccaacaagtcatggaaagacatgaagaaacattaaatgcaca

SEQ ID NO: 399735 - DNA, 468 bp, Homo sapiens
gttgattttgtccctttgaaatacacagctagcttgaaggctctctcttctactttctctatttaaagattattgtactttttggactcaaagagaagtgttagactggataaacatagaatacaattctattcatggtgatgacaccatttaacatttattgaacgctaactatgtgctggagtarttttatatgtttttgtttcaatgtcttatttaatattgaaaacaactgttattacaaacttctgcttctgtttgcttgttagactgctctgcccctaatttaccttctactttctttcaatctattgctttcttcagctaattttttatttagcttacatcctgtggtttgttattttaaaaatgcacttggagagccataacctctcttactgctcatctggaaactcaaacaaatcatagagattctacaagtaactgagcttggctgaagtccctcag

SEQ ID NO: 399736 - DNA, 468 bp, Homo sapiens
gttgattttgtccctttgaaatacacagctagcttgaaggctctctcttctactttctctatttaaagattattgtactttttggactcaaagagaagtgttagactggataaacatagaatacaattctattcatggtgatgacaccatttaacatttattgaacgctaactatgtgctggagtagttttatatgtttttgtttcaatgtcttatttaatattgaaaacaactgttattacaaacttctgcttctgtttgcttgttagactgctctgmccctaatttaccttctactttctttcaatctattgctttcttcagctaattttttatttagcttacatcctgtggtttgttattttaaaaatgcacttggagagccataacctctcttactgctcatctggaaactcaaacaaatcatagagattctacaagtaactgagcttggctgaagtccctcag

SEQ ID NO: 399737 - DNA, 589 bp, Homo sapiens
caaatatttagaaacaaattaaatgcctctaaatagaggactggaaaaatagattatgttatatggataaagctgaatactatataattgtgtaaaacaatgaagaagctgtctaattactgatctagaaatatactaagatatgttaagtttttagaagtagatgaatttgtatgtatgatttgtataaaaatgagggaaaatgagaatacttgtattttctgacttttacataaagagacatatgcaagcatttataacaaaagtgtttacctcatgttggcggatgtttggaaccgggaaaataggagaaagtgagcaggmgtgtgacttatcacagtacaccattatatgccttttgatttttgaaccatgatattgtgatagatatttaaacattgaattttaattgttgccatatggatttctcatgatgagtagaaaaatactcaagcatgatgtaaaacattaatagtatcatagtttgatttatgtatttgctgtatcacatcaccctctataacttttccaatagcttcctcctgcaaccaaagtaaaatccacctttttatcaaggcctacaaggctc

SEQ ID NO: 399738 - DNA, 568 bp, Homo sapiens
actgggggatgtaaagagacataaagtcaggtaaggtttttacacttcaagttggtcaaatgttgataccagtagaccagttatgtatgtatgtataatgtaatacatagagtgaatactaaaaaaatacaaaacagtacactcaaaaacactatagacgaatcaaaaattcattctaaatgtatgttaaagtagcccacataaagtaaggatacactaattaaaatatagaaattgcaaaatggattmaaaaacatgactcagctatgtggtatgtataagaatttcatttcaaatataacaataaagaaaggttgaaagtaaaaggataaaaaagaccatatcatgtaaacattaatcaaaggaagcagatgtagctactttaatatcagatgaattagatttcagagctaagaaaattaccagagacatagaggggcactatgtaattataaaaggtcaatccatcaagaagacatagcaatcttaaatgtttattcaccaaacaaaggagctgcaaaatgtgtgaagcaaaagtgatagaactaaaattggacaactctacata

SEQ ID NO: 399739 - DNA, 562 bp, Homo sapiens
ctcaacaaacattgataaaacaaatggacactactgacaaaagaaaaaataaacccaacctaaacctcacaccttatataaaaattaactctatatggttcacaaacgtaaatagaaaatatttaactataaaatttccaagtaaaaagaataaaatcctctggttgtaaacagtttttagatgataccaaatacatgaaaaaaattgataaattggactttatcaaaatttaagatgtgatctgcaaaattcttccaatgagatgaatagacaagctacagagtgggagaaaatatttgtaagccatagattccacaaaagactattactataaaawagactcacaaaaaccaaaagtataaaaaccaaacaagccaattagaaaatgggtaagacaggaacagccattttaccaaagaggatatccagaataagcacatgaaaaaatgtacaagccaggcacagtggctcatgcctgtaatcccaacaatttgagaagccagtgtgggaggactgcttgagcccaggagtttgaaataagcctgggcaacgtagcaagac

SEQ ID NO: 399740 - DNA, 572 bp, Homo sapiens
aaggagaacgatcccaaataaacaacctagcactacacttcatggaactagaaaaacaggaacaaactaatcccaaagttagcaaaaagcagaaaataataaagaccagagcagaaataaatgaartaagactagaaaaacagtagaaaagataaacaaaattaagagttgatttttgaaaaagataagcaaaatcaacaaatctttagctagactaaaaaaaaaaaagagatatgactcaaataaaatcagaaaggaaaagaggagacattataacttataccatagaaatataaaagatcatgagactactaggaaaaattatatgccaataaattggatagtctggaagaaattgatacatttccagacacatgcaacctaccaagactgaatcacaaagaaatggactatctgaacagactaataatgagtaaggagacggaactaatgaaaagtcttccatcaaagagaagccaagacctaatggtttcactgctaaattctatcaaactttaaaagatctatttccaatccttctcaaactctttcaaaaaattgaagaaaaggga

SEQ ID NO: 399741 - DNA, 564 bp, Homo sapiens
ttttttggaaatgtgtttggcgcacagtaagtaatatattattgattgattgggtaactgaaaaggtagaacaggwggatgataatgattattcttttgattggcagaatggcagaacttaaaataagagatttaaaacacacagaaattgtaagaaaaagggacctaattattctccaatgtgctaagcacataatacataaaattgagtaaacaatcactgagcacatattatgtataaagccttgaactaagaatgagaagcacaaaaataaaagcatagtatctccaaatttatgaaatgcacaaactactgaaggtacatagaatgcattaaagtaagttttgtatttattttggcttatcatccatggtatatagggtaaaagagagtgttgtaggagatatatctaatgtaaatgatgagttaatgggtgcagcacaccaacatggcacatgtatacatatgtaacaaacctgcacgttgtgcacatgtaccctagaacttaaagtataattaaaaaaaaaaaaagaaaatgacatgcacagacaattgaaaactgg

SEQ ID NO: 399742 - DNA, 539 bp, Homo sapiens
atgtgtaacatgctatgttaggcacagcaaggaatacagggaagcattaaccatcagagagcttacaatgagggtgggaaaacaaaacacacacgtgaatatttaactaaaaatatgacagatgaaacagcagcaatatcagaagwtatgaaaataaaagcaacaattaatatgattcaatatgtaacaactacagaaaaataccactctggtttcttaaaaggatgacatttaagtgtcatttattaaaggataattttcaagaatcaggtaaaatcatgagtctcacatagatataaaatgaatacgtgttaaagattgttttaaactcattaatgaggaaaacagtaagctgttacaatcacttttaaaaataagttaaaggagcagaaagttatgtgtagtaaaggaatgtttaaatgcatttacaaatagagagagacctgcttttttccctggagggagggaattcaattgaatcaccaaacaaaattattttgcatgcctatagacaagaattatcgcatcttgctatcagt

SEQ ID NO: 399743 - DNA, 539 bp, Homo sapiens
atgtgtaacatgctatgttaggcacagcaaggaatacagggaagcattaaccatcagagagcttacaatgagggtgggaaaacaaaacacacacgtgaatatttaactaaaaatatgacagatgaaacagcagcaatatcagaagawatgaaaataaaagcaacaattaatatgattcaatatgtaacaactacagaaaaataccactctggtttcttaaaaggatgacatttaagtgtcatttattaaaggataattttcaagaatcaggtaaaatcatgagtctcacatagatataaaatgaatacgtgttaaagattgttttaaactcattaatgaggaaaacagtaagctgttacaatcacttttaaaaataagttaaaggagcagaaagttatgtgtagtaaaggaatgtttaaatgcatttacaaatagagagagacctgcttttttccctggagggagggaattcaattgaatcaccaaacaaaattattttgcatgcctatagacaagaattatcgcatcttgctatcagt

SEQ ID NO: 399744 - DNA, 539 bp, Homo sapiens
atgtgtaacatgctatgttaggcacagcaaggaatacagggaagcattaaccatcagagagcttacaatgagggtgggaaaacaaaacacacacgtgaatatttaactaaaaatatgacagatgaaacagcagcaatatcagaagatatgaaaataaaagcaacaattaatatgattcaatatgtaacaactacagaaaaataccactctggtttcttaaaaggatgacatttaagtgtcatttattaaaggataattttcaagaatcaggtaaaatcatgagtctcacatagatataaaatgaatacgtgttaaagattgttttaaactcattaatgaggaaaacagtaagctgttacaatcacttttaaaaataagttaaaggagcagaaagttatgtgtagtaaaggaatgttkaaatgcatttacaaatagagagagacctgcttttttccctggagggagggaattcaattgaatcaccaaacaaaattattttgcatgcctatagacaagaattatcgcatcttgctatcagt

SEQ ID NO: 399745 - DNA, 539 bp, Homo sapiens
atgtgtaacatgctatgttaggcacagcaaggaatacagggaagcattaaccatcagagagcttacaatgagggtgggaaaacaaaacacacacgtgaatatttaactaaaaatatgacagatgaaacagcagcaatatcagaagatatgaaaataaaagcaacaattaatatgattcaatatgtaacaactacagaaaaataccactctggtttcttaaaaggatgacatttaagtgtcatttattaaaggataattttcaagaatcaggtaaaatcatgagtctcacatagatataaaatgaatacgtgttaaagattgttttaaactcattaatgaggaaaacagtaagctgttacaatcacttttaaaaataagttaaaggagcagaaagttatgtgtagtaaaggaatgtttaaatgcatttacaaatagagagagacctgcttttttccctggagggagggaattcaattgaatcaccaaacaaaattattttgcatgyctatagacaagaattatcgcatcttgctatcagt

SEQ ID NO: 399746 - DNA, 648 bp, Homo sapiens
cttgctcattttacatttctggtgcttagaccagggcctggtacagaagcactcaacaacaacaaaaaaactacatgaatgagtaaataaattaaaaaccatcctgaggtatttggggccttcatggtatctattacatcttagcagaataatagaatctctgaagcatagcaagagagggttgttaaagccctccaggtgtaaccccactcatcaaacaaccctcttcttatctgtgtcatctgaagacttagggtgatagaagactcactgtcttctaaggccatttactaatctttgaaaggcttaaatgagaaagttgtttgttttaacaagctgacaactctggcttcctcccatacattctagctgcatccttagggctttcagtgagtaaatacaatccctcagaagatrctttgctatcgatttgagagccttgtctaggccatatttgatttcagactgaacttgttacaagctttaagtcttttcattcacaaatcctaataaaagattattaaaaaaccaattgaaattgctcagcacagcaatatcgaagtgatgggttctttcttgaggtcttaccttcttttaatcaagaagaaagaaaagaactatagactgttgacagtaaccatgtgttat

SEQ ID NO: 399747 - DNA, 621 bp, Homo sapiens
taaatcatgttatactttatatttgggagagttttattattttgtattgaatatttatggggttttttaaattttcacttggggaggtgggcagttcccagcatccatttctctttatttttcttattacacctatgccatttccaatctttagtgttacggtggacatgtgacccatggcccacctatcaggacagaggattcacccatctatatagataggtttagggattggtgtttgattcagtcacgaacaattggctgcatacggctttttctgagactattggaraagaagcatgttctcaaatctgtagactttaacctgtaaatacatgagcccagaacggttaggggccaccagataatatctgagaataaagctactcaatgtaaggcagagcgaaaaaatggagaagcacccaactctgaaaaaatcaatagcaacgactgaaactatcaattttcctttttgccagtgtctgttttctgttattagtgagtaaaagagaactcactggtccaatttcattgtatagtccagattaataaagatttttagcaaagcagatttagtgtgaagataaatgaatgttttagcacaaaacatcacaattaaaa

SEQ ID NO: 399748 - DNA, 545 bp, Homo sapiens
ttaccacccctttccatggcaatggcccagaagttactgactgctttccctgaaagttctacataacccactcctcaatttgcattaacccactccttaatttgcatgtaattataagagggtataaatgagtataaacacagttgccaagagcccatacattgccaactctgggtgcactgactgtgagttagccctgccctgcaagaagcagtaccattccaaagaagattaggcttgcccttgaattctttcctgggtgaaaayaagaacccttccagggtaatccccaattttggggctcacctgtcttacaccagtaccacaaagtgccaaccttttttaccaatcagattaaatttttcctcaattcccactttgtgagaatgcctttcttcactaggaaatggggaccttctctacatttcttcaaatccaaagcatcagtttggctggtatccgtccaagaagggaaaatgaaaagcgtgttcagtgcctgaggatcctgtgctcattgaagcacatgctgctagcagttttttcag

SEQ ID NO: 399749 - DNA, 561 bp, Homo sapiens
gtgataaaatttaatacatttcttttcaaaattgcaactgccactaggctgtaaaatgtaattttgaagactgaggcaggtattacaacmctgtgacactttgagtcattcattgacaagatgggacggccagactgtggatacttagctattggaagatcctacagttgagatcccattgaaatgggaaaattgatcactctaaacttaagagctttgctatgtcatgtagggctgccctggtttctacttcagatcaactaaatttgtattgatagagatgccctctctaggaagaatgagaacaatgctaaagcaagtattcagagcttgaagcataccttttgtgcctcctcaagtggtcctaaattgaaggacactctttctgcattgctaaatgtggcatacttagacatcataagttaacttttaataaacaattctgtttcttgtgtataaaatgaaagaacttagaagaaataatctatgggacaagcacttagaaaaacttgttcagcttccagtttttggcttgaagaaagccaaggtgaaactttcttt

SEQ ID NO: 399750 - DNA, 620 bp, Homo sapiens
ctttacgaagtcttataaagtaatgcctaaaatccattaatccttacaaaactttctgaagtcatacaagtttagtgtgataaaatttaatacatttcttttcaaaattgcaactgccactaggctgtaaaatgtaattttgaagactgaggcaggtattacaaccctgtgacactttgagtcattcattgacaagatgggacggccagactgtggatacttagctattggaagatcctacagttgagatcccattgaaatgggaaaattgatcactctaaacttaagagctttgctatgtcatgtagggctgycctggtttctacttcagatcaactaaatttgtattgatagagatgccctctctaggaagaatgagaacaatgctaaagcaagtattcagagcttgaagcataccttttgtgcctcctcaagtggtcctaaattgaaggacactctttctgcattgctaaatgtggcatacttagacatcataagttaacttttaataaacaattctgtttcttgtgtataaaatgaaagaacttagaagaaataatctatgggacaagcacttagaaaaacttgttcagcttccagtttttggcttgaagaaagcc

SEQ ID NO: 399751 - DNA, 620 bp, Homo sapiens
ctttacgaagtcttataaagtaatgcctaaaatccattaatccttacaaaactttctgaagtcatacaagtttagtgtgataaaatttaatacatttcttttcaaaattgcaactgccactaggctgtaaaatgtaattttgaagactgaggcaggtattacaaccctgtgacactttgagtcattcattgacaagatgggacggccagactgtggatacttagctattggaagatcctacagttgagatcccattgaaatgggaaaattgatcactctaaacttaagagctttgctatgtcatgtagggctgccctggtttctacttyagatcaactaaatttgtattgatagagatgccctctctaggaagaatgagaacaatgctaaagcaagtattcagagcttgaagcataccttttgtgcctcctcaagtggtcctaaattgaaggacactctttctgcattgctaaatgtggcatacttagacatcataagttaacttttaataaacaattctgtttcttgtgtataaaatgaaagaacttagaagaaataatctatgggacaagcacttagaaaaacttgttcagcttccagtttttggcttgaagaaagcc

SEQ ID NO: 399752 - DNA, 558 bp, Homo sapiens
ttaatttatttacattcaaggttattattgataagtgagggcatattcctctcattttattaattgatttctggttctatacttatcttttgtttctttctctcattgcttgtcattgttgtttggtggtttttttgtcttggtaatatttgtgttttatctcttgtgtgtttgcttgaccagtggtttatatatatatatatatwttaaatgatggtagatattattctttcgcttccaggcataggactaaagagtttctgtagtgccaatttagtggcgatgaattccctcagcttgtttgtttgggaaagacgtcagttctccttcatgtatgaagaataacgttgttggtataatatccttggctagcaggttttttctttcaggactttaaatgtattatcccattctctctggcctgtaaggtttctgctgagaaatccactcttagtctgatgagagttctcttataagtgactagacacttttctattgctgtttttagaattctttctttgtctttgacttctgacaatatgactataatgtgttgtg

SEQ ID NO: 399753 - DNA, 557 bp, Homo sapiens
ggcttacattaaaacacctgtcttcaagttctgagattctttcttctgcttgatctagtctattgttgaagcttttgaacatattttgtatgcattcaatgaattcttcagttccagaatttctgtttggctcttttttatgatatctatctctttggtaaatttatcattcattgttctctttctctgaattctttttattgtttttcataattcttttgtatctcaccratcttctttagtatcaatattttaaattcctttttttctataatttcttaaatttcattttaaaatcaagatatattgctggaaaattattatattcctttggagatatcatagttccttgttttttcatgtttcctgtgtctttatgttgatatttgcacatgtggtataacagtcgcttcttccaactttttaaatttgctttcacagggggaggacttcttcctgaagctgtatctatagtattggttgtgtagggtgcattggctttgtttctcggtatatgcagtagtgtagtctctgtatgatttctttgatggtaaata

SEQ ID NO: 399754 - DNA, 558 bp, Homo sapiens
tattcctttggagatatcatagttccttgttttttcatgtttcctgtgtctttatgttgatatttgcacatgtggtataacagtcgcttcttccaactttttaaatttgctttcacagggggaggacttcttcctgaagctgtatctatagtattggttgtgtagggtgcattggctttgtttctcggtatatgcagtagtgtagtctctgtatgatttctttgatggtaaatagcatcagtgatgtctgtgatttccttggtgaagttttgctgagccctgagatgctacatgggccagtcttcaagctctagtcatggcaacagtgggctgagtgttcctgtccttgkgcttcagagtggcatatgctggcactggtgttagtgggttcaggcaggcaaattctcgggccttcatgtagcttgcttgggtgctggaaatgacagtggtgggctggatgagtggttgggttcttggcccttgggtagtgtgtgtggtatgggcaatggtggtagcagtagttggccaaccttctgggacccaagtggttcacgctgg

SEQ ID NO: 399755 - DNA, 415 bp, Homo sapiens
ctgactgttggtttgcaatttcttttctgatgagatttttttggcmtgtgaaaatgcagagcagctttagttctactccgggttgttttccttcaccgtttttctcattttggggggcctattttttattcagcagcgggtttggtgcttttgtggttattttctaacccttggccatggcatacttagtacttaatttcggacagaatcttttctgatgcttgtcagcttctatttgactctctgtgttttcttagtatgtaaaactcaaccaccacttattgttttttgaagataatgttggtcgtgcgcctggaacgacttgaataagcttgcaataaatgaccctatccaaatgaatcaaagagtatgtgcggggcacagccgataaccagtgcatgcagacggtatcagt

SEQ ID NO: 399756 - DNA, 575 bp, Homo sapiens
atgttatgtttgctcctaatgttttaagaacatattaattgcataaactatactcctatataaacatcttargaatatttatttcataagattgacattaaccgttgagttcctctgtttctgcaaacgtgatgttagttcacatgcagttttatttgatgttacacaacatatatatcaattgtcactttcttttcatgtttcttttcttttcctttttttccggctttattttggtgtaattgacaaacattgtatatatttatagtgtactatgtgatgatgctttgacacatgcagacattgtgagaggattgccatgatcaagctaattaacattgccttcacttcacagagttgtcatttttttgcaaaattttacaaaattattgcaatctttgctttgacagtccagtgaaaatgctggcccttgtttcttacacactttcttggacaacaaaaagtgctaaacttaccagctgccttaggtttaccacgggccttccatggaaatgagtcctggggtggaaatggtccccttctgagggagcttgctaaaaccacaaacctcactc

SEQ ID NO: 399757 - DNA, 522 bp, Homo sapiens
aaattctctattattcaaatataattatttaaaatttaagttattcaaatataattcaaaaacaatttgagcatagcagatgcaaatcacgataggccatacactagagcctaaacactggtcagattctggggttcaaactccagtcttgcacttgctagagctcgtagaagggtgaattaacgaaccctctcagtgcttcagtctcctaatctgagacgtggttataataacaggacctagctcatagagttgtcragaggatttaatcagtatataaagaggttagctcaggacctggtacagtagaacgcagcatacagttagtaactatcattattatacaagagcaatttgcatttttatgcatctaaatagcaatagttagagaatgtcattaaatttgcactagctcaaaaaccgtaagattcttaggaatgataattaacaaaaaataagcaagattgttatgttgaaaattatcaaatgctatagaatgtcattaaagatgaccaaaataaa

SEQ ID NO: 399758 - DNA, 572 bp, Homo sapiens
atgtgacaagaactaaaatcagctaagggagatgaatctaaattatgtaaattttataatcaaactaagtgtaatttccctactaaaagacaaaaatcttttatattggaaatgaacagcactgtcttgccaaatgtggttttcagttagcttatctcaaataaagtgacaagaaatataaatgtgaaatgataggcaaagatgtatcaagtaaatttaaacaaaaagacatcaggtgtcaagctattaatataaaaaagtagacttcaatgaaataaataaaaaagcagaaatgctgtcatttggtatagaaaagggtatgattcatagtgaagataaaattcaaactttaatrtgcctctttcaatgttggacagatgaacataaaaaatagaaatttaataaaaagctgaatattccactgtgcttaaggcccatattaagatctatttttgtatatcttcatgcttctgaaattaagatcttgatgtaattatcagtgtccatacaagtgtgtatttcatcattggtgcctatattgttgtcaccacaagttcatgttggtgctgtat

SEQ ID NO: 399759 - DNA, 572 bp, Homo sapiens
atgtgacaagaactaaaatcagctaagggagatgaatctaaattatgtaaattttataatcaaactaagtgtaatttccctactaaaagacaaaaatcttttatattggaaatgaacagcactgtcttgccaaatgtggttttcagttagcttatctcaaataaagtgacaagaaatataaatgtgaaatgataggcaaagatgtatcaagtaaatttaaacaaaaagacatcaggtgtcaagctattaatataaaaaagtagacttcaatgaaataaataaaaaagcagaaatgctgtcatttggtatagaaaagggtatgattcatagtgaagataaaattcaaactttaatatgcctctttcaatgttggacagatgaacataaaaaatagaaatttaataaaaagctgaatattccactgtgcttaaggcccatattaagatctatttttgtatatcttcatgcttctgaaattaagatcttgatgtaattatcagtgtccatacaagtgtgtatttcatcattggtgcctatattgttgtcaccrcaagttcatgttggtgctgtat

SEQ ID NO: 399760 - DNA, 635 bp, Homo sapiens
ttttaatagttcttggcaagagatgagggatattaattgaaagtagtggagtagtgtatgcagaaaaggaaattgttagagacatatttcaaggaggaatcataggttctcatgttggacagaatgtaccaggataggtatgggaatagtgagggcagataaattatacaaggatttgggataagcaaaggactgaaaagaggtgcctttcttgctgaaggctttgggtgagatggggaccaagggttccattttgaacctgttacaattgaggttcctgcaatgtatacrtttaaatttcacaaaggtagcctcatagctgggtatgaagcttgggagagaattctagatggatgaaagggccctgggaatggctgggaacgctgaagacctcagaagagagagtgtgggctgagcatcctatcagcaatccttcctcatgccaactctctcagtcttttcatgccagactcctttcactgtgatcatcctgtttcataaataatatatcttgtttttgttgcatattccaaacagtttccacacattatctttggattctacgggacatcattttcagattatcttttttctgagtattttgcatgctgcttcttttcctttgatcgaagatt

SEQ ID NO: 399761 - DNA, 594 bp, Homo sapiens
tgaaactcagccccatatatctttcatctgatagaagccagccttctcatgatgcttgtagatgtgcmagagaataatccccaagcactactcttcaaagcttcatctctcctagcatcacgaccatcaatgcaggtatgtggctgagcagttgtttggaaaagagtatgagaacagggaggtgtgaggaatcagcgccaaatgatgtcatcaaccacacatagtgtggaatataagtgactagtgctctacgaaaaaattgtggatgtgcattcgaggagagttgactgtgatcacataatgccttctaatattgtgcccactgacaacaacttcactgactcttggttaaactgactccttaagcttccccaatcaagaaggcccctttcatccctttcattacattgcttattcattaagccaaacacatacagattgcatttcctattcctattcctattcctattcttatgtacctgcttgaatcctactcattcttctccattcttcaaggcacagatcaagacctattttccataggaagtctgctttgaacttcatgctaaaatgtttccatggatttgttaatgt

SEQ ID NO: 399762 - DNA, 616 bp, Homo sapiens
cctggtctggactctgctcaccttttagatggagaagggagatcgttttctgtcacacattggtgtcgtgggggctagagtccctgatgacagtgttgaaactgtggaatctgtatatttttatctcatgtgatgctttcagagaatatcctagtgaccttcttgtgacctctagagagctagagctcagagaatgaagttcaatgagccatttcaaaatgtgttgagattaaggtgaaatccaaaactaaayaaaaaatataagggatctctttcatcagacactattttgaaaaaaaaaaaaaggagttacacgacttcttttccaggtagcaatttaaaacattgggaaacattggtttattggagtaaaatgtccatgtttgatttttctcatggagccaatgagcaaatggcatacatagtgcttgtctccccttggatccaattcacaggcgatgtgattaggacagttagcagagcccggcagaatgtgacaaaaggtgcttgaaggataaagtttccttggaatactcagactgtggatgtgaatgaaaatcccgagaaggaaacttaggtcacaagaagagttaaattcagaattagctgccttcag

SEQ ID NO: 399763 - DNA, 569 bp, Homo sapiens
tctctcgtgtaacagaagatttaggtataatttgtttaaatagtagcaataatgattattaattcaccctttgaatgttaacaaagacttggtttttgttagtttgtactttagattcatttccaagctcaagtttgttttaggctaatgctcccatcaatgggaaatgcaattagctttagattcctattcccctctctccccaaaatatatttgatgtttggtaatacaaaataaaataattccctttcagaagactgccctggaaaccttatgatcacaacagagtgaatttttgttgaattcttctctacttccctgggaaacaataaggaattctttttgttctttgccacagaaggtataacaaatggatttcaaaatacctgcactatataagcggtgcttagaagaaagagaaaaatcaaagcaagaaataaaaattacaaaatggyagagccagaccacttcatccacaatttgtatctgacctcattgttgaaaaactttgcgaaggatcacggtggcttgtttttctccctttgacgctggaacattaaaactagttt

SEQ ID NO: 399764 - DNA, 609 bp, Homo sapiens
tccaaatgagtgagatgaagtaaactcagtaatagctagattgggtcagaaatgaacagctgcttccagcatgggcagggccaggctggcccactgtacctgggaaggacaggttcacatggtgcttgggtccagccacacagcagagcagtcctgagctcctagggtcaacctgttccttccttccaaggtctttccctggatctactcaggtaatttcctagctgttgagaagacagtgaactcaaaaaaaccattgttcctgggtgtggcaggctcatgggtgggcacatgcacacacggttgacccttggctagccaaggctttttggatctgagttccccatcttccatgtcatctggcactctgtccccagacctcagagctgctagaatgcacgataaaaagccaaattaaaagttgtatcaagtgcaccctagactgaagaagccatgtggcttttgaaatggcctcacttcctccccagagtggcttctttctttcyaccttctccttgaagactccatactggccctgcctaggtctgcatgccttcctccccggtctccctcagggcctcttgaagctggcaggcaaagagtcgcttc

SEQ ID NO: 399765 - DNA, 437 bp, Homo sapiens
attacctcccactgggtccctcccacaacacggtggcaattatgggaactacaattcaagataagatttgggtagggacacagccaaaccatatcacaaggaaagggagtttcactgtgcctttatttctcctcctctctcccataatatgggaacataacacamgacttcttctgaaatgatttgggatttattataatttggcaaatttgttattcaggctaaacgagcaaataaacacacgaaagctctttagcaaagaactcttggaacacagcacctgcttggtacaatgagatctcttcccactccaatttcagccctgacatagttactacgtggtttctgaactcatgaccagatgtgacctccctgggttttatatgctctgctgacagcatgtgatgtgcctgccaccctagaggcggggttggtgc

SEQ ID NO: 399766 - DNA, 527 bp, Homo sapiens
tgctatgaactcttattcctgaagtagtgacgatgtgttggccatagcctcttgttcagtcttgttttgaccaacaccaaacatttgaagcacagtatcaggatggagttatggtctgtagccagagaaccaaggtaactggcaccatgggaatcacacacaggactgcagcttcatgacaccagctacagtataatgatacattacagaacatcaacctcctggatgcaggacaggcatctggctgtccaaccttctgaattgagaacagcctgtaacgaatccccagttccataacatgtttaacaattaataagctaggggtttccttgaggacaacaaagaataaaatatgagtttgccaagaaagaggtcacacagcataaatacmttctaggaaaacaatactcgtgatgaggctagaggtgggcagtttttcctctactttgaaaatagagtgaaatacattgagggcctaaattatctggacgttggtcagtcctgtatttcattccgccagttagacc

SEQ ID NO: 399767 - DNA, 546 bp, Homo sapiens
aagtcgaaattattatccttattttttatttatctaaaagataactgaaatattaataatactgttactaatatgttggtgtttaagtggtaagcacccaatacattaagcaccaatacagtatgaacattattaacaggaatgtcataataggaggaagaagttgagaaaacttcttcagaaggtactgtactacatgtgaagcagcataatatataatttgaagctagacacattagttaaaactgtattttgaaagctccaacagaagcactaaacaaacaaaatttttttaaaaatatttaaatcctatattacattgaattatataaaatactaaattaraaccagagaagacagaaaaaaattaaaaatgcaacaaatagaaaatacattgttattaattcaactatattaataagcacttcaaatgtgactggtctaaatacatcaattgaaagaagtaggttgtcagagtaggtatagaaacagacccactatttcttatttatcagaagccaacttaaaaaaaactcagatagttta

SEQ ID NO: 399768 - DNA, 615 bp, Homo sapiens
atcaacctaaatgcctgtcaatgacagactgaataaggaaaatatggtacacatacaccatggaatattgtgcagccataaaaaggaacaagattaygtcctttacagggacatgaatggagctggcagccattatccttggcaaactaacataggaacagaaaaccaaataccacgttttcacttacatgtgggagctaaatgatgacaacacatgaacacacagaggagaacaacagacactggggcctactggagatcagagggtgggaggagggagtgaaccagaaaaaataactagtggtatgaggctcaatatctgcgtgatgaaataatctgtataacaaatccccctgatacaagtttacctatataagaaacctgcacatgcagccctgaacctaaaataaaagtttaaaaaaaatgtgttataaaggaatgattttgttttgctcttgtgtaaatattccaaacctcatgaactgattggtgtcttaattccatgagaactaactattatcttatccttggaaatttaagtctgtgaacatctgtgtgttttatacctcctcagtataggaaatactaatgggcccattgacattctcttgaaga

SEQ ID NO: 399769 - DNA, 601 bp, Homo sapiens
ttctctacttgagctatacaaaaacccaaaagatgcacagacagcaaacaaataaaaatactacctagaatattctccaatggatataaatgattctcaattcagtcacatctttaacatattattaagttagtgcagaggcctcctcttcaatgttttcagatttctccatctcaggctgctckttggcctcatgctataccaaccagttatttagccctctatgctgattaaatgctggagagtcatagattcccttgccaggctacccaaatgttgggctattccataaatatgattttcttgttatatataatggtggctctttacatctccatatttcagggccctagaaaacctctgcagcctggcacagtggctcacacctgtaattttggcactttgggaggccaaagtgggaggattgcttgaggacaggagtatgagactagcctgagcaatatacaaagaccctgcttctgcaaaaaaaaaaaataattaataataatacaaagtagctgggaatggtggcatatgcctatagtcccaggaagctgaggtgggagtatcacatgagtcctgcaggttgaagctgcagtgt

SEQ ID NO: 399770 - DNA, 499 bp, Homo sapiens
aaaaactgcacacagatgtttatagcaactgcatttataattgctaaaatgtagaagcaaacatgtccttcaatagggaaatagataatctaggtaaatctaaacactggaatattactcakgctaaatggaaatgaactatcaagccataaaacaatatgcaggaaacttaaatgcatattactaagagaaacaaaccaatgctatatagcgtatgattctaactatatgacattctggaaaaagcaaaacaatgaagacaataaaaagaccagtgtttaccaggggttagaagggagggagggatgaataggcagagaacagaggatttttagtgtagtgaaattattctgcatgatactttaatggtgggtgcatgccatgatacattttaccaatcccacagtacatgcaacaccaaaagtgagccacaaactttggacttagggtgataatgatgtattcattgtaggttcctccattgtagcaaatggtccac

SEQ ID NO: 399771 - DNA, 490 bp, Homo sapiens
cgtggaaattccttaaagagctaaaaatagaactaccttttgatccagcaatcccactactgggtatctacgaagaggaaaagaagtcattatacaaaaaagatacttgcgcacacatgtttatagcagcacaatttgcaattgcaaaaatatagaaccaaatgtccaccaatcaacgagtggataaagaaattgtggtatatatggcatttgcagcaacctggatggaactaagactactattccaagtgaagtatctcaggaatagaaaaccaaacactgtattttctcacccatatgtggaagctaagctatgaaaatgcraaggcgttaagaatgccactctatggactttggggactcatgggaaagggtgggaaggaggtataggataaaagactacaaattggattcagtttatactgttcaggcgatgagtgtgacaaaatatcacaaatcaccactaaaaacttactcatgtaaccaacta

SEQ ID NO: 399772 - DNA, 575 bp, Homo sapiens
attcactattacaattgggcatttattttatcaaagcaaaaattgcactgtacaaagttaaacaggaaaggcagactttattcaaggtgactgctacaataggagagagacagacatcagaactcagtctgggttcaactccactaagacaaagagttggagagtttttaagagttggggtgggagatcttaagccatctgtgcttactaattggctttacctaaaggaaaagtaaattttatcatatcttcayggcaggaggtagttttataacttggactaaggaccttgctacagttaagctcctactgtcccacagagtctgagaggtaagggcactatcctccttaattgcatttcagagggagttcctaggttctccagaattgctttcttgggttgtgacacagacaagaggctttttaaatagggtgatgggtaaactaaaagccccgacttcgccactatgcaacataagcatgtaagaaacctgcacttgtaacccctaaatatatttaaaaaagaaaaaaaatagatttacatctcaaatgggggagagaaagaatttacaatt

SEQ ID NO: 399773 - DNA, 411 bp, Homo sapiens
gaatgggtagaaataatgtggtacatatacacaatggaatactattcagccataaaaaagaatgaaattccatcatttgtgccaatgtggatggaactaaatgtcattatgttacgtgaaataagctaggcacagaaagacaaatattgcatgttctcacacatatgtgggagctaaggcagtgagtctcatggaggtggttaccagaggctgagtagggaagcagaggaggagaagaatgaaagagttggttaatgggtacatttaaatggaaggaataagttataaaatttaatagtacagttgggaaattataattaayaataatttattgtatattataaagtacctaggagaaaataattatgttttcaatacaaaaaaaataaatattttagtgatgcatatccc

SEQ ID NO: 399774 - DNA, 623 bp, Homo sapiens
ctacaatgttaaacattttcagttttcagttatctgcatagttccctaaattattcaaaagattggtacattaaaaatataattaaaccaaatccaggacacatttctttgcaaggaaatgtagcaacaattgcatctttttaaatgtaatgtaatccatcatttcccaggatccatgaatctttttcacagtatgaactggatccatgaaaaggagggayagaatgcatcttatcagattctctcagatcttgatggtcaattaaatatgctttggtttaattcttttgaaagggaacacgggcttctaaagccttccatatcaccattcttaccataataaccctcactctacaggtaaggaaaccaatgtagagattttgcctaaacacaggatttagggaaacaacttcagagtaaattcttggtctcactgagtctattgtgatatatactagtggcagaacagcatttactacttaacctcctcactctgactgaaagatcacatcatccctggagaatttattttatctcaaagtcagtatccgaatagttcctgaaaagtttgaaagtttccatctctttgtatatattcacaaaaataaatggctacaggtttg

SEQ ID NO: 399775 - DNA, 500 bp, Homo sapiens
gctgactctcctctgactcaggtgtgagatgttttagtgaatattaactaggcagtccttaataggcttgcttgtggttttgtcactgggacatcagaactaaagaatctttataaagagatctcactgaaccctaggtaccaggcatcaacaactaccaattggcataactctgcctacttaattttgttttctccactacttgagcccagctattcttgcctctccagttcygtataattaattatccacctttggtccgagattccctcacagggcttcaggcattccattacagatcttttcctaatgtgaggaaaagggaatagtggagagtcctgaggaccctggtgagaaacatagggcaagcatatatgacagatccacactagcatttttcttctgcagcctttcaagtttatattatgcaaagggacctttacatcagcaaactgtgaaagtaactactagttactacattaaatcaagcttctccagtg

SEQ ID NO: 399776 - DNA, 500 bp, Homo sapiens
gctgactctcctctgactcaggtgtgagatgttttagtgaatattaactaggcagtccttaataggcttgcttgtggttttgtcactgggacatcagaactaaagaatctttataaagagatctcactgaaccctaggtaccaggcatcaacaactaccaattggcataactctgcctacttaattttgttttctccactacttgagcccagctattcttgcctctccagttctgtataattaattatccacctttggtccgagattccctcacagggcttcaggcattccattacagatcttttcctaatgtgaggaaaagggaatagtggagagtcctgaggaccctggtgagaaacatagggcaagcatatatgacagatccacactagcatttttcttctgcagcctttcaagtttatattatgcaaagggacctttacatcagcaaactrtgaaagtaactactagttactacattaaatcaagcttctccagtg

SEQ ID NO: 399777 - DNA, 556 bp, Homo sapiens
gcatagcagagcaaaatgctactcttctctgggaatggggttgcaatggaaagtattttggagaagaataaggggtcaaagttccataatttttttttttttttttttttttgagatggagtcttcctttgtcgcccaggctggagtgtgrtggtgtgatctcagctcactgcaagctctgcctcccgggttcacgccattctcctgaggttccatgatttcttttactatccttgcatttatcaagaaaatatgatgggattatgaaggcaacagaaacttgaaatcaacttatttgattttcagctttctcaactatccagctgcaaaaggaaggggattactgcaataaagcttcattatagtcctgtgtttccttagattcctgagatgggcattctaggaaggacgagaattggcctcatttttatcttaagttacccagtgttgttaaaagcgatcacatggctcatattcctcaatttctttaaattgatcagcagacactagtcctccatagcttctccctcagtgggaacatggtcataagtgactt

SEQ ID NO: 399778 - DNA, 546 bp, Homo sapiens
ttctagatattgttgttatgggatctttggggtgttgcttttttggctggaaacctctggctgttggtgcctttgcccaagttttgcttgtgcccgcttggctttttccacccactcagcctggtaggctgcgctcttctcatgctactgatctggatcccatgcctccaagggagactgcaagtcaagcgtggaattgggaggagtgtatgagcgagcatggggtccagccactgtgcagtcagacttgtctgctgctgccacacggcaggcagctccaggtgctggcatgggttccagctctctgcaaggctgcaactggaccaggtgcaaggcaagcagcttccccagctggtaccagggaatgtggtggcacccagaagcttgtagatgccatgaaacacagggccccaaagagggaatcaccaccctggctctgggagctcccaggtctgggttcccccaagggccacagctcttgtctccttatctttgcctggaacgtggcgarcaaggggtgtgtttcagccctgtttgtgttacagc

SEQ ID NO: 399779 - DNA, 493 bp, Homo sapiens
cttaaaatatatagagaatacattatatatatatatgatgtatatattagcttttatgatctctttaaaatttgtttttttgaaatgyattgatggctgggtattttcttaatataacaaaatttgcctccattacctctacacattttcctctcttttaaactactggatagcattgttaacatttaatagaaatttaatagaaatgtaactctgatctctctaggagtggttatgaagatgtcatgatcacagacataatttttggtccaagtagtctgatttcatttattctactgaataagtttcttcaagaaaaaaatgaccactaactttgcatttgatggtatctcttaatgcttgtcaaaccccagagagagtaataaaactgtaatttctgacagctgtgctttcttttttcctcaatcttagcttttttgtggttgaagatcacattttacatacaacccagggcttagtaaatagagcctac

SEQ ID NO: 399780 - DNA, 565 bp, Homo sapiens
cctgttaatattataaacactgatttggagttcacagttctactgttaccttttgaaaaaaaaagttcataacatattaagctgcccaatgttctgttcccatgatctattgatatattttaatgtggcatatatttttggtgataatccactttatttcagttatagaatgctggctctgaattcccttccttctttccttccttccttccttccttctttccttccttccttccttccttccttccttccttccttcyttccttccttccttccttctttccttccttccttccttccttccttccttccttccttccttccttccttccgtgtttcttaaagattgattatgctttggcagtgggaatatgacaatgaacaagatagatagtctttgctctcagagagttatattttgattggaagagatatccaataaacatgtaacaagaatgtcagacagtgatcatgcaatgcagacaatgaaaatagaatgacagattaggaaacagggtgtttgcttttgaagtggcactctgagattagaatatcaatgagtcac

SEQ ID NO: 399781 - DNA, 565 bp, Homo sapiens
cctgttaatattataaacactgatttggagttcacagttctactgttaccttttgaaaaaaaaagttcataacatattaagctgcccaatgttctgttcccatgatctattgatatattttaatgtggcatatatttttggtgataatccactttatttcagttatagaatgctggctctgaattcccttccttctttccttccttccttccttccttctttccttccttccttccttccttccttccttccttccttccttccttccttccttccttcyttccttccttccttccttccttccttccttccttccttccttccttccttccgtgtttcttaaagattgattatgctttggcagtgggaatatgacaatgaacaagatagatagtctttgctctcagagagttatattttgattggaagagatatccaataaacatgtaacaagaatgtcagacagtgatcatgcaatgcagacaatgaaaatagaatgacagattaggaaacagggtgtttgcttttgaagtggcactctgagattagaatatcaatgagtcac

SEQ ID NO: 399782 - DNA, 473 bp, Homo sapiens
catttcaggctctggtatttttcaccaaagaagatatgtatttttgttacttatttgcctttcatgtcttttggtaaaatatttaataatacttcccatcaaagtactgtttttaggtgtkttttttttttttttttttttgcgggtaatattttgtggaaggtttttttttcccccatcatatttattaactagtattactgtcattctgtgggtgaaaagtttctgattttgtttattttatatctatccatttcactgaattctctaattttattttgtttcctgaaaaaagttatctttcctttaaaaatcagatttattccatgccctgtcttttttttttttttctaaagcaatgtttttttgtgttcctgatacatttgggaatgtaacagatctctaaatctcgcagtacaaaaatgcaccctctcttcttcagcatgaaattttatttgatactattaagagca

SEQ ID NO: 399783 - DNA, 473 bp, Homo sapiens
catttcaggctctggtatttttcaccaaagaagatatgtatttttgttacttatttgcctttcatgtcttttggtaaaatatttaataatacttcccatcaaagtactgtttttaggtgttttttttttttttttttttttgcgggtaatattttgtggaaggtttttttttcccccatcatatttattaactagtattactgtcattctgtgggtgaaaagtttctgattttgtttattttatatctatccatttcactgaattctctaattttattttgtttcctgaaaaaagttatctttcctttaraaatcagatttattccatgccctgtcttttttttttttttctaaagcaatgtttttttgtgttcctgatacatttgggaatgtaacagatctctaaatctcgcagtacaaaaatgcaccctctcttcttcagcatgaaattttatttgatactattaagagca

SEQ ID NO: 399784 - DNA, 473 bp, Homo sapiens
catttcaggctctggtatttttcaccaaagaagatatgtatttttgttacttatttgcctttcatgtcttttggtaaaatatttaataatacttcccatcaaagtactgtttttaggtgttttttttttttttttttttttgcgggtaatattttgtggaaggtttttttttcccccatcatatttattaactagtattactgtcattctgtgggtgaaaagtttctgattttgtttattttatatctatccatttcactgaattctctaattttattttgtttcctgaaaaaagttatctttcctttaaaaatcagatttattccatgcmctgtcttttttttttttttctaaagcaatgtttttttgtgttcctgatacatttgggaatgtaacagatctctaaatctcgcagtacaaaaatgcaccctctcttcttcagcatgaaattttatttgatactattaagagca

SEQ ID NO: 399785 - DNA, 572 bp, Homo sapiens
tagcaactccttttataatgcatacatgatcttgataatgaaaccagatgagggtagtataagaacttgtaaatgcataaatatagatcagacttatttataaatataaatcaggaatcttaaaatattaaaaacagaatccagccatttacaacaaatattartatatttggttgagtttctagtagcaaatgctagcttagttcaatattacaaagtgtattaatataatgcacttaattgcaggttaaaaaacaaaaaatatatagtcatttcagtagatacagaaaagcaattaataaaatgcacaataaacttatggtaaaatttcttagtaaattagaaactggagagaattccttaaactaataaaagcagtcctccaaaacgtattcaagatagtcaggacccctgtggagaaattctaaaatgtcattcagaaattaaaatgggttaaagaagacctaggtaaaaatgaaccatgttcattgtttggaagagttattattacagtgatatcagcactttcaaaattgacctatagatttaatttagtgtcaatcaaaatttca

SEQ ID NO: 399786 - DNA, 427 bp, Homo sapiens
ttacaatataattctatgacatttcttttattattagttttttgtttttgtttttgtttttgttttggtagagacaaggtttcgccatgttgcctagggtggtctcaaactaacttaagactgtgcccactgagttggctgagttaagttgatagtaagtactcttctgtcagttattgggtagaaatatttatgctaaatgatattaacattttctgtttttaaatatttttcatttaagaaataaaatcaattgctatagcaaccctgagggatccttaagactcaggtattcatttacattttcaagtcargaaagataatgagctttacggttctaaattcagctaaattaaagaagccaaatatcccaaatgatgcctttacgtcagtctctcaaatacttagctatggagatctgaaagct

SEQ ID NO: 399787 - DNA, 564 bp, Homo sapiens
actttcttttgtcatttgctattacttctccagaagccttacgaccttctgtcccccccttatttcctgcattactgtctttttttgtgattagttaatttttttgtagtgaaatatttagattcatttctaatttcttcttttgtgtatcgagctattttctttgtggttataatataggttatgtttaacatcctaaagttatcacactctaatttgaatttataccagcttaacttaagaaataaacaaaaactctgttcctttatagctcgatctccacccctttcagttgctactgtcaacaaatttacaaatttatatagtgtatgtctgaaaaactagatgaataattatttttaatgtgttagtctcataaattatgtagaaaacaaaatgtggagttacaaaccaragttataataatattagcttttagactaacaattgtgtttttaaaatgttttagtatctaaaatcatatctaaaacaaaaagcagagttacaacttctcattacaataataacagctttcataatggcccacgtatttactgttgctca

SEQ ID NO: 399788 - DNA, 615 bp, Homo sapiens
agaattctctcccaatggttattttyttttcttagtagtgttacctatatgtgtataaagtaggtataaatgttatacatatagttcttatatatctataaatcaaaaacaaatttataacttaaatataaatatttacaaccaatataagtaaaattaaaattagcttcataagatcagtgttgttttaccaaagctaaattgctgtactcaacatgaatatagtaatatcttttaacatgtggtgtgtgatttttcagtatttctaccatattcatctatttaaccattgtaagactgttttcatactgtttggtaagctgatttgactttcacctgataaaattgcataaaggcctgtgtatagccttttgcttgtggcagcaatgttgcttacttgatactaacctaagtgttaacacagacacaaattgagatactgaaatcacatagtagttttcagttataactacaagcattcagatgaaacagaccacacattttgtgtttttagacagtcataaaaaaggagaacaaattttcagaaacgttccatcaagaaccatggtacccatcattggaaataagattgaacattgctgatctatgacatat

SEQ ID NO: 399789 - DNA, 564 bp, Homo sapiens
ctattaaaataaatatccactgaaaaaaatttgcctggctaacagcccctcaatttagcttcttctaaatattcctaaacagcatagarccagaaaaagaagagaagccacaacaatgctaaaataaagattaatgaaatcacaagtgatcctaagcaaaagacaaaaggtgaattgagaaaaacctacttaggactcagaatatgggacatcaaacatctatcccctgttctcggagttcctggataaagtgttacagagaaccaggatctatagtttgctactcctagccattatgttagaatatggtttcccttattcctagtgactccatcacctactctgctactcagcctctttcctatgtaaacatgtagaagtaaaaggtaaaaaaaaccctgccaaattgtgttattgaagacaaatagtcccttgagcaaagcaaagtaagaacaagaaataagaatctttgtaataacaggtgatgctagatatttattatttacattgtactcaacaaattcagaaaattttcagagttccagacattggcgactgggagaa

SEQ ID NO: 399790 - DNA, 609 bp, Homo sapiens
tgatatcatttttattctactgaggagcttccttcaatgtacactatagcgcaattccacttatattaaattctctaaacttttttttttctggtaaaatcttcagaaagatgttttcactgtataatgaattctaggttaatagggttttttttttctttcaacactttaaagagttccaactattttcttttgattgatatagtttctgatgataagctttttgttatctttgttcctttgtacaaattatgtctcattttctctacttttttgagattttcttcactagttctcagcaatttcattaggctgtgtcttttctgtgggattctttatgttaattctgcttaraattcattgagtttggacatgcaagtttataccttttattaaatttgagaaggctttggctattatttctttgaatatcttttctatctctcctttgtgtctgaaacttcctttacatatattttagaccacttcacattgtcctgtggttaccgatactctgtttattttcttttcaatcttcttttcttctttatgcacttcattttggatgctttctattgatgtctttgagttctttgaactttgcttttg

SEQ ID NO: 399791 - DNA, 607 bp, Homo sapiens
cacttttcctttaaaaattgataatgacctctgtgtttttctgctttgtgtggatttcatcttagatctcagtatgtttatatgtttyatatttggttttaaacattagagcactggatcctggcagagaaactgagatttaaacaccagcaggtgttgattgcctaataacttctagatctaacttaggctattgtatccctcatgcactaggaatattcagtctgtgtctgggtttggaatttcctaagctttctctttgcatattcaaaatgaggaagtctagattcatattccagctcaaccacttgttaccagcattaattcagtaatctgctcattcagtcagcagatatatgtgggccctactctatgcaaaataccatggttggaggctggagttaagatgagaaatcatggattttaaataggagggtgactgtattagatttgtatttttggaaggaacttgcattttgcaggagcctcagagactagttagaaggctattgcagtaatctatggtagagttgatttggtagcctcagcatatatttgtatgataattcaagccacgagggtgaatgaatcaattcatttaacctct

SEQ ID NO: 399792 - DNA, 606 bp, Homo sapiens
cagtcatggtggaaggcaaaaggggaacaggcacgtcacatggcaaaaacaggaacaagagaggaagcaggggaggtgccacacacctttaaaccaccagatccatgaaaactcactatcatgagaacagtaccaaggggatgggactaaaccattcatgaaaaatccacckccctcacctcccaccaggctccaccaccaacattggggattacaattcaacatgagatttggatggggacacagatccaaaccatatcaccattctattgatattccatgcttgttcctacctcagggctttccacttgctgttccttctgcctggaatcctcttccccagatcttcttagattccctctctccattcgggtctctgcataagtgattcatcctcagagacgatctcctgacccctaagtaaaatagccaccaatcccccagtcaccctatgtctccacctcactttatcttatttcacagcatctattaatatcactgacattacattatatgtgttgctatatgtttgtcatcctaagctctggcccctgcaatgtgagaatggcccaatacaaatggcaagaaggctgtcgtgggtgagtg

SEQ ID NO: 399793 - DNA, 545 bp, Homo sapiens
tactccccccccaactcccctaggctctcatctctggagcctccatcattgtgcagtgagctcctgaggcagggactcargttatttaattcttcaatccccactcttgagcagagcttggaggtgctaattgaatgattgctgatagggtggacctgttggggaagggttcttggagggaagcagcaaattgctttaagatcaagctggagctctttggaggaccgctgtgggccaacctctattctcggttttctcctcaagctctgagatctgggaagttggagacagcaaggtccaggggcagaccagggcatcatcaacttgtttgatggcagagaggagagagctcctctgtgaggtcccagacggttgacaccaccacagggtcgtggggatgttaatgcccactgcaaggggagcagaacccgagctggggggcagagtccagcgctgggagcctgcggccaggggcgccgatcgccccccagcgcagagtgtggatcccagtgcctggagagagcagctccctttccttaggacgc

SEQ ID NO: 399794 - DNA, 545 bp, Homo sapiens
tactccccccccaactcccctaggctctcatctctggagcctccatcattgtgcagtgagctcctgaggcagggactcaggttatttaattcttcaatccccactcttgagcagagcttggaggtgctaattgaatgattgctgatagggtggacctgttggggaagggttcttggagggaagcagcaaattgctttaagatcaagctggagctctttggaggaccgctgtgggccaacctctattctcggttttctcctcaagctctgagatctgggaagttggagacagcaaggtccaggggcagaccagggcatcatcaacttgtttgatggcagagaggagagagctcctctgtgaggtcccagacggttgacaccaccacagggtygtggggatgttaatgcccactgcaaggggagcagaacccgagctggggggcagagtccagcgctgggagcctgcggccaggggcgccgatcgccccccagcgcagagtgtggatcccagtgcctggagagagcagctccctttccttaggacgc

SEQ ID NO: 399795 - DNA, 577 bp, Homo sapiens
aatttgaggataaagataaactcattatttctctaaagcacagagtgccccataaaaaatgagcaatgtagcgtgtgctgtttgccgtgacgtggacgaagtggcagatagtgcagctaatgcttctgagaagtttctattttaggaggcccatttatcaatgttcatgaatgtgtcctaatgagtttatgttatatcttagatttataaataattaactttgctatttattgcagttagtatttaccatttgccaactaacatgttactattaatattttatcaactgtcccaatctccaccgtccatacctatttagcagccctgtttagcacaatgcctgtgtctgtgggcggcagaacgcaggcagaattgcataatttagttagaggtctcttcccacctacaaattctcctttcagaatacaaattatagaagtattttgtttgttygtttcaaacagaaaaaacatttccattacacagtcaaaccttgtgtcctcatcctttccatgtttattttatccggggggccttttctttcccatccaatgctcctcacaccacatcccacagg

SEQ ID NO: 399796 - DNA, 579 bp, Homo sapiens
tacaaattagaaagacatttgacaggcagaatgagaggatttggtgcctggctgtgaggggggagggaggaggtatggaggttggggacttggcagcaactggactgacggtatgggtggtctgctgggggtggtgtctttggttcatcctcccgccaggatgagagatgccaaatatggggcctctgcctagcactgggggccactggggagggctgtcgagactgtgaggagaaaaactggggaagggggattgtccccccctcaggtatgctgtgggctctgtcagcttgaggggtgggatgtggggacagtgtctggggacaacraggagggagcgctctgtggagggggaggctgtctttgggggcaggggctccctgatgagaagtggctaggggctatccgtggaggtgggagtttgccatggtgctgggcagacaacccatatccaaacaggagggagggtgaccagcgcctccagctagcaccagcgccaccacacccccagatgtgtgtgtgtgcatctgtgtgtgtatgtgtgtttgcgcgcgtgtatgttgggggccatagcaatgg

SEQ ID NO: 399797 - DNA, 478 bp, Homo sapiens
tttataacagaagcttggagagcaggacacagcttctggctccacaggtatctgagattatcctggaaaaattatttaacctctttaggtttcagttttctcatctgtaaaatgggatttttatatctctttccaaaagatattgtaaggatcaagttattttcccctgtggctcatggcaggtaacaaccaacctggctctcaggtgtggggagaaaggagatggctgtaaaggatgtcactgtcattccaccaggcagaacacaatgggaagagagtacagaagtccagccatacagcttctgcatttttgagtgaagacagatcatatgtaattttttttttgtgtttgttttgtttggttgctttttaaaatgtgattgcagcttcagggrtacatgtgcaggtttgttatacaggtaaacttgtgtcacgggggtttgctgtacggattgtaatggcaccaggtaataagcat

SEQ ID NO: 399798 - DNA, 571 bp, Homo sapiens
ctggagcaaactaagcccaaagctagcagaaaatttttttaaaaagctataatcagagcagaactgaaggaaattgatatccaaaaattcatccaaagaattaacaaaactaagagtttgtcttttgaaaggataaacgagatcaatagaatgctagctagattaacaaagaaaaaagagagaagwtccaaataagcacaatcagaaacaacaaaggtgacattacaaccaatcccacagaaatgcaaaagatcccagagactattattaacacttctatgcacataaactagaaaatctagaggaaacggaaacacacaacctgccaagattgaatcaggaagaaactgaaactgcaaacagatcgatatagggttccaaaattgaatccatcataaaaaaaaattgccaaccaaaaaaagccctgggccagagggattcatatccaattctaccagatgtacagagaactggtatcaattctactgaaactattccaataaatcaaggagaagggactcctccctaacttattctacaaagctagcatcaccctgataccaaaacctag

SEQ ID NO: 399799 - DNA, 582 bp, Homo sapiens
ctctgaatttctttcttctacttgtttggttcaattactgagacttttcagagcattttgcatttctataagtgtgttcattgtctcctgaagttttgattgttttctatttatgctatttcactgaatatttctcccttcacttctcaaattttttttawtttccttacattggacttcacccttctctggtgcctccctgattaacttaataactaacctgctgaattctggttcaggtaaatcacggatttcttggcttggatctggcgctggtgagctagtgtgatttttggagggtattaaagaaccctgttttgtcataatactggagctggttttctagttccttctcatttgggtaggctgtgttatagggaacgtctagggctgaaggctgttgttcataatcttttgtcccacagggcgctccctagatgtagcattctccctcttttcctatgggtgtggcatcctgagagccaagctgtagtaattgttatctttcttctgaatctagctacccagcaagtctaccaagctctgggctggtactgggggttgtcttcacagagtcctgtg

SEQ ID NO: 399800 - DNA, 617 bp, Homo sapiens
cacatgcttaataattaatggaaatgggactccatcccaggccttctaactctaaagtttctaacttcaaaggtaacactgtaatagagatttaaaacaaaattctgtggaaataccaaagagataattctttctaacatttttttgagttgtaatttgacaagcaatgagctgcacatgtttaagkcatagcatttgataagcattgaaatgcagctgtgaagccatctgaccatctatgactacagattaatgtgcatttctagaattttaagtttgtctgaagtttgtcagattaattatattgagatccaaccataatgctgcatgtatcaaaagtttattttattttattgctgggtaatattccattgtttggatataccacgatatatttatccattcagctgttgaaagacatttggattgtttccagttttagtctattacaagtaaagctgctgtaacaacaaaagcacaggcaaaaaaagtaaaaatagacaaactgtactacatcaaaatttaaaactgctgtgcatcaaaggacacaatcaacaatgaaaagacaacctacagaatgggagaaaatatttgcaaagtatatatctaataagggg

SEQ ID NO: 399801 - DNA, 577 bp, Homo sapiens
ggacaagtattctatgattccacgtatgtgagatatttagattagtacaatggtggttaccaggggctggagggaaggatgaatgggtacttgccattagtgggtataatttttcagttttgcaagtgaaaagtattctggagattggttgtaccacaatgtgaatgaacttactactgaactgtacactttaaaatgataaagatggtaaattttatgttatatgtattttaacacaattttttgtaaaagtcagtatagcgattacctttgcagaggtgggaaggggttttgattaggaaggggcacatccatctattgtcattttatccctttactataattttaatagagttgtgggagaaagtgagataaaggcatgaatttaaactgttgcacaagtttttgggttttgattttgttttagataatactacccagttaccaatgtgggaagcatagactgaaatcagaaaaccctcatggcagtagatatctgtagggaatggttatcatagtcaaatttaaacacactcaygtgattggatcccagataaggagaataggcagaaaggat

SEQ ID NO: 399802 - DNA, 594 bp, Homo sapiens
ttaatatagtctatgaaacaatgtaaaacaaactagtaatgtaatgtaaaaatctagtaatataaaacaaactagtaatggccactgagctgaatatcaattgctgtaaatgtttaatggtggttcatataatttttaatcaccagcttgtccatatatatgtgtgtatatatatatatatatatatatatatgtgtgtgtatatatatatatatatatgwgtgtatatatgaatatataaacatgcacaaacacactactaggaagcaacccagaaattttattgtagttattatatgacactggaaaaagtgtctcatcatcctcaagttgttaaaatttgtcatagatttggtctctttaataattccatatttctttttttgtgtgtgatggagtctcactctatcacccaggctggagtgcaatggcgtgatcttggctcactgcaacctctgcctcctgggttcaagccattctcctacctcagcctcccaagtatctgggactacaggcatgtgccagcatgccttgctaatttttgcatttttagtaaagacaggacttcatcatgttggccaggctggtcttgaa

SEQ ID NO: 399803 - DNA, 595 bp, Homo sapiens
taagatagttaataactttcattagattttcaaaaagttaagattgctgaatcagtcttacaatttcagtttcgctttagggcctttagttgtttgcctccacaaatgcttggtatataggcatctcataaatgttattacgtaaaatgacttagattctctgtgtgtactgccctatttaaacctgcgtatcattttattatttagttttaaggtccttagtcgtgcaaagtcttttggatatgagaggtctaagactactcacaggagtctatatttaatagaaaaataggctgcatatatttcaaaaagataawtaataatataatgttatatttgttaaacaccggattagtgcctcacaaaaatatgaactgtatgaattcagagagatgtctttgagtgaactagtgggaattgagccagtccttcagtgaagggcagggttttggtaagtgtattcattcaataattatttttttgagtacctgctgtgtgccaagtactgttaggtacaggagaggagagggcattctagtacaacacatgcagcatgtgaaggcactgagggaggaatgtgcttgacatgtttggg

SEQ ID NO: 399804 - DNA, 618 bp, Homo sapiens
gtcttattatagttgtcaaagggaatgcttccagattttgcccattcagttagatgttggctatgagtttgtcatagatggctattattattttgaggtatgttcctttgatgcctaatttgttgagggttttttaaatgaagggttgttgaattttattttatttttaaaattttatttcaatagttttgggggagcaagtggtttttggttacatggataagttctttagtagtgatttctgagatttggtgtacacgtcacctgagcagtgtacactgtacccrgtatgtagtcttttttcccttgcatccctctcatccttcccctggagtccccaaagcccattatattgttattatgtcttgcatcctcatgtattagctctcctcaagcttagctctcatgtataagtgaaaacatacaatatttggttttccattccttagttacatcacttagactaatggcctccaactccatccaagttgctgcagaggccattatttcattctgttttatggctgagtagtattctatggtgtatatatcacacattttctttatccactccttggatgatggttattttggttggatccatatttttgcaattgc

SEQ ID NO: 399805 - DNA, 619 bp, Homo sapiens
aaaatctagaagaaatggataaattcccagacacacacaacctaccaacattgaaccatgaagaaatccaaaatctgaacagacagataacaatgagatggaagatgtagtaaaaatctccccagaaggaaaagcctgggacttgatggcttcactgctggattttaccaaatatttaaagaaraaataccagttctactgaaactattctgaaaaacagagaagaggggaatacttccaaactcattctacaaggctaatattaccctgatattacagcacatcaataaagaaaactatagaccaatatccctgatgaatattgatgcaaaaatcctcaacaaaataccagcaaatcaaattccaaaacacattcaaaagatcattcatcatgaccaagtaggatttatcctagcgatgcaaggatggttcagcatatgcagatcagttagtgtggtacatcatatcaacagaatgaaggattaaaatcataataatcatttcaactgatggtgaaaaagcatttgataaaattcaacatcagttcatgataaaaaaccttcaaaaaacttgctatcacaggaagctcgccctgtatttttccctggagaaatggtac

SEQ ID NO: 399806 - DNA, 484 bp, Homo sapiens
tggagtcttggcagagcagctgctcaggcatgcgtggaaaccctggaaccttagatactggggatttctggcaaaagtagctgcagctccagcaaaataggaggttagacccccatacatacccccaggaaagaggctgaatccagggggctgagcagtgacagcctgaaggctctacttccgtggcacctcacaagataagacccactggcttggaattccagccagccactggtagtggcattgcccttccctaagaaggagcttcctagggggaagggtgggccaccatctttgctgtttgggcaccttaaccattccacccttcaggctttggagagtccaagctgactgggggcataaaggatcctgcgccacagcacagttgctctaccaaaacatggccagacttctttgagcaggtgcctgattccattcttcytcactgggcaggacctcccaaatggggcctctagccacctcc

SEQ ID NO: 399807 - DNA, 545 bp, Homo sapiens
ccttcctctgctgcctccaagttggagaagaaacataaacaatgagattgccccagagctgcaatgggtagcccaggagtaccaagtcaagatctrtagccagcactcaagcaggagatgaacccacactttcagagcattgaaagggaacagagctgcaactgtgtggacacataaggaagccacaaagccattcaagagtctaccaattgaccaataagcctaagtgccacctgctggatcacacagcatagagtgaacaccaaaaatatttcactaatatacacccatctaaaaccagagatgagaagtcagcctcaagtaaagaccctacacaatgccttggcctggtgaaaacatccaggaaagaagtctattgaatgtactcaatctacaatgcagttaatggaacacccacatgcatagatgagaaaaaccaacacaaaaaatctggtaactcgaatggccagattgtcttatgttatccaaacaactgcaccagttctcaaacaagagttcttaacaaggctgatctggctggaatg

SEQ ID NO: 399808 - DNA, 593 bp, Homo sapiens
tgcattccccttgaaaaccagcacaagctgaggatgccctctatcaccatttctattcaacatagtattggaagttctagacagtataatcaggcaagagaaataaagaacatccaaataggaagagagaaagtmaaactctccctgtttgcagatgacatgattctatatttacaaaaaaccgtggtttgtgcctaaaagttcctccagcagataaacaacttcagcaaagttgcaggatacaaaatcaatatacaaaaatcattagccttcctatacaccaacaacagccaaactgagagccaaatcagaaaggcaatttcattcacaattgctacaaaagaataaaatacccagcaatacaggtgtaagatctctaaaattagaactacaaaatattgctcaaagaaatcagagaagaaacaaacaaatggaaaaacatccaatgcttacggataggaagaatcaacagcactgaaatggttatactgcccaaagcaatttacagattcaatgctatttctatccaactattatatcaatgacattcttcacagaactattatgaactattttaaaatttatgtgaaacc

SEQ ID NO: 399809 - DNA, 587 bp, Homo sapiens
ataataggactatagcaactttttgtcccacctcagtgacttgatgtatacactgggaatagtcctcagtctgaagaaggtcagttgaagtccttactgaaaaagttcaaattttaaggaaaatgagtcccrtgatgagttttctcatgctttggccatgcgtggaccaatcagcttctgggtgtgactggagcagggcttgttgtcttcttcagagtcactttgcagaggttggcgaagctgctcccgtccatgtactgctcacagtctactgagttcaacgatggtctcggaggttgggcctgctagaataaactgagtccaacacctctacacagttatgttcaactggactctctgataccagcagcaaggtggcagggtttagggtgttgcaaacttcaatggttatgcagggattttcacatagcaagctttggtacttggttaatctagcatttgttaaccaatgatgtcctttggtaatcattgaaattaccacagcataggaggcctttatattcaggtcttgcccaagggttagtttatctgcttcttgtgctaacagggcctttgctgccagggcc

SEQ ID NO: 399810 - DNA, 539 bp, Homo sapiens
ctaccaaacatttaaaaaaggagtaataccagttcttctcaaactcttcaaaaactgaacagcagacaatactttcaaatgyattttacaaggccagcattaccatgatacaaaagccagacaaggatacaacaagaaaagaaaattacaggtcagtattcctgatgaacttagatgcaaaagtcttcaacaaaatactagtaaactgaactcaacagcacattaaaataatcgtttaccctgatcagtgggatttatccaagggatggaaggatggttcaaaatatgcagatcaataaatgtgacatatgacattaacaaaaggaaggacaaaagccatatgatcatgtcaatagatgcagaaaaggcatttgacaaaattcaacatcctttcatgataaaaacttcaagaaattagttatacaaggaatatacctaaacatggtaaaggccatgtataagaatcctacatttaacatcatactcaatggtgaaaagctaaagctaaaagcttttcctctaagaccaagcacaagaca

SEQ ID NO: 399811 - DNA, 563 bp, Homo sapiens
tcaaattttcaggtatctttatagcaatgccccactcctgataccaattttctgtgttaggcattctggcactgctataaggaaatacctgacactgggtaatttataaagaaaagaggtttaattggctcacagttttgcaggctttacaggaagcatggtagcatctgcttctgtgaagattctcaggaagcttcgaattatggtggaaagtgaagctggaacaagcatcttacatggcagaagcaagagaagtcgggggagggaaggagaaagggagaagggaaggtaccacagacttttaaacaacaagatttcacgaactcactgtcgtgaagacagcaccaagccatgagggatctgctgccatgacccaaacaccycccactgccagcccccacttcctatattggggattaatattcaacatgtgatttgggaagggataaatatccaaactatataacggacgttttagataatatattggagcaactctggtttctgataacacttcacaaccccacttcacgcttgttattggtgttgcatgtttgttcact

SEQ ID NO: 399812 - DNA, 628 bp, Homo sapiens
taaagatgtgatgaaactgaggtgatacagtgataaatgttataaataaaaagtgatcttagtgatgatatccctaacaaatttttcaccatgctctgtccacaatcactaaatgtgctgcttcccattaggtttgtcaatgtgactttgatgaagatgtacaaaagagatgaaaaacagacatgaaaacacagagtataactttgtattttctcttctcaaccatggtggtcttttgtactgttcaaatttaggtgttttacaaataccacttattttaaattattaaactaaagatatcttactctgtggagacatttttccatagactgggaggaggtagaacattgcgggtggaktcagacacattcatatattttacaaaaatcctgcataagccctcttataaaccctcctataaatttttgctcaagtaagctactgaatgacagcttgatacttaatctcaagataggtctttagataaggtgcaaaatatctggggaaaatatgtcagagatacatgtctacttttttgtatctaagcctaatatcaggcaatagcatgtaagagaaagaagactggccaggattcagggtcactggttctagacctggttttgttgct

SEQ ID NO: 399813 - DNA, 573 bp, Homo sapiens
tcttactctgtggagacatttttccatagactgggaggaggtagaacattgcgggtggagtcagacacattcatatattttacaaaaatcctgcataagccctcttataaaccctcctataaatttttgctcaagtaagctactgaatgacagcttratacttaatctcaagataggtctttagataaggtgcaaaatatctggggaaaatatgtcagagatacatgtctacttttttgtatctaagcctaatatcaggcaatagcatgtaagagaaagaagactggccaggattcagggtcactggttctagacctggttttgttgctaacaatgtgtattaccttggacacagtattgaatctctctgaacctcaatttgcaaataaatgaaatgaggtgataaaactaaattgtcttaattgtcttagacttccaaacatctcagacttggtgaatctcagtatagttattggtcagatattttacaagccttataagagtcgggactctgccttattggtctttgtaaccattatagtacttggctatagacaaccaataactattagt

SEQ ID NO: 399814 - DNA, 530 bp, Homo sapiens
agaactgtgcacatgtgcagctgagccgcatgccccttcaagggtcccatgtcaaaaaaatggcggtgtttgatctgaaggtagagtttttggccctctgatgtcaataagtgaagcagaagacatggaaaccccaatgtgcattctccatagaccaggcagaaccactccatggttggtgatctcttttcaggaagaaatgttagttggttgctttgttgaaattgcagagggagggggcagcagccagatggttgatatcagcagtggagtctgaaagggctggtttctgtttagcccttagggaagaaagcctaagacagttagcaagccaggagttttaatgaggsgtgtctgacctcccatcctgtcctggctgagaactcagttttcaaggtttttttggggggtccccttggtcaagagggagtctgttcagttggttttggagagggttagaattttctttttatttctcattttgccccttttggccaagttttgccagaggcagcattgatggctaaact

SEQ ID NO: 399815 - DNA, 581 bp, Homo sapiens
acctctcaaataaaccacttgccctcacatccttgtctctgggtctgtggaaacagggagcccaattaaaacaccaggattattaacagaaattcagagcatgaacgtggccttccccatggctctcacaccaaaacccttggctcckcatgctgtcagtccctaatgaatttggttctccaggtgctccattcccgaaggaggaagggaagaggtgaggtggacacaacagactgcccccagtaacgtgaaagaaggcaaacctccacaccagatatgggccaggaggagccccatgtttcaagatggtgggtctgaaggattcccaggcaccagggaaggtcctatatggttccagaaatggtcaaaagtttgcactttgcaatcaagccgacctgagcctgaatcacaggtctgcccttcctggcagggcaagacagcatctaatgagagaatgtctaagtagtaccacataggcaccaaataggtcaacgctttagcaggcagggatatgacccactctgagcacacacagaaaaagcctgcaaacttggaaaggatttatttaaaactttcatggc

SEQ ID NO: 399816 - DNA, 427 bp, Homo sapiens
tgaaaagaaagtagcaagaaattccttgcttctctgcaaagggcatgaatatactgttctcaaaataagatatacatatgaaaaaatgctcaacatcactaattatcagggaaatgcacatcaaaaccacaatgcaataccaccttactcctgcaagaatggccataataaaaaaattaaaaaataatagatgttggcatggatgtggtgaaaacggaacacttttatactgccagtgggaatgtaaactagtacaaccactagggaaaacagkaaggagattccttaaagaactaaaagtagaaccaccgtttgatccagcaatcccactagagaagtcattatatgaaaaagacacttacacatgcatgtttatagcagcacaattcgcaattgcaaaaatataaaaccaagccaaatgcccatc

SEQ ID NO: 399817 - DNA, 532 bp, Homo sapiens
cccttttggagacagcagggcagagtcagggtacagaagaggcttggttgtccccagtgccactgaagcgtgagcagcggttccttgctgctcaggtacctgccggtcctcagcactgcagcccggccaacaggaatggagccccacatggggtcaactcagctctgtaagacaaccaccccttgaggggaggaaactggatgcttttacmaaactgtggagagaaggcagcaaggcattggagcaaacgattaaggcttgaattccagctctgctgcttacaaacagggaacagtacttaacctctctgaccctcagtgtcttcatctgtacagcagagccaaaaatagtatctcaagtgtctaatggtgtccaataatatgagcttgcctagcccacgggttccttgaagacatggctgtgtcttacgcagtgcccagagaggtatcagccatatagtagctgttcgattaagaaaaaatatccactgaacaaagaaatgtgcaaacaaatgtacaaaaccacagatgat

SEQ ID NO: 399818 - DNA, 578 bp, Homo sapiens
aacacagttgcacctgctcacttttgtgttgtctgtggctgcttttgtacaacaatggcagagttgagtagtcgtgacagaggccataygacagggctctcaagggtccttcaagggtggcaccagcgatgtttggggctggatgattcctcatgttggaggatggtgctgggcattgtaagatattgagctgtatccctggtcccatcccactggcattccactgcattctctccccagctatgacagccaaaaatgtttccagacactaggagtggaaaatcactcccagttgaaaactactgccatatggcccacaaaacctacaatatctactacctgtccctttatggaaaaagcttgccaactcctgagctgacccaacttcctttttgcacaaaagagaaactgagacacagggacgcatgcatgactcgcccagatacaccctggatggcggcagcttggagtctgcttatatcgttttcttatttttatatttttttctgagtatgctttctagatattactcagcctcctgggtaagaagatttttggattttagggagtataaatca

SEQ ID NO: 399819 - DNA, 578 bp, Homo sapiens
aacacagttgcacctgctcacttttgtgttgtctgtggctgcttttgtacaacaatggcagagttgagtagtcgtgacagaggccatatgacagggctctcaagggtccttcaagggtggcaccagcgatgtttggggctggatgattcctcatgttggaggatggtgctgggcattgtaagatattgagctgtatccctggtcccatcccactggcattccactgcattctctccccagctatgacagccaaaaatgtttccagacactaggagtggaaaatcactcccagttgaaaactactgccatatggcscacaaaacctacaatatctactacctgtccctttatggaaaaagcttgccaactcctgagctgacccaacttcctttttgcacaaaagagaaactgagacacagggacgcatgcatgactcgcccagatacaccctggatggcggcagcttggagtctgcttatatcgttttcttatttttatatttttttctgagtatgctttctagatattactcagcctcctgggtaagaagatttttggattttagggagtataaatca

SEQ ID NO: 399820 - DNA, 538 bp, Homo sapiens
gaaataagccagtcacaaaaggacaaatattgtatgattccactcaaatgaggtacctagtccagtcaaattcatagagacagaaagtcaaatggtggttgccagagactatggggaggagggaatgaggagttagtgtttaatgagtacagagtttcagttgggaaagatgaaaaagttctggaagtggatggtagtgatggttgcacaacaatgtgaatgtacttgatgccatagacctgtactctaaaaaatggttaaagtggtatatctcatccaggcgcagtggctcacgcctgtaatcccagcacttttgggaggctgaggtgggtggatcatgaggtcaggagatcaagaccatcctggccaacatggtgaaacctcgtttctactgaaatacaaaaaattagccgggcgtggtggtgcayccctgtagtcccagctactcgggaggctgaggcaggggaattgcttgaacccaggaggtggagatttcagtgagccgagatcgcaccactccactccagcctggcgacag

SEQ ID NO: 399821 - DNA, 531 bp, Homo sapiens
gaaacatgtagggaggcaattggatcatggtggcagtttcccccattytgttctggtgatagtgagtgagttctcaccagacctaatggttttttaagtggcagttccccctgctctctctcttttgctgccctggaaagatgtaccttgcttccccttttccttctgccatgattgtaagtttcctgagacttccccagccatgtggaactgcaagtcaattaaacctcttttctttagaaattacccagtctctggtagtatctttatatcagtgtgggaacagactaatacagacagattaaggcaaaaccatttttcagctcttcggctagcaaatcctgacaaagactgatagtatccagagttggtaacagtataggaaatgactctctcatacttccctagtggggctgtaattccacgtaacctcactggaaagcaatttgttgcaatctatcaaagctctatatgcacatacattttgacctaacaattctacttctgttatatcacatagaaatagtagtg

SEQ ID NO: 399822 - DNA, 531 bp, Homo sapiens
gaaacatgtagggaggcaattggatcatggtggcagtttcccccattctgttctggtgatagtgagtgagttctcaccagacctaatggttttttaagtggcagttccccctgctctctctcttttgctgccctggaaagatgtaccttgcttccccttttccttctgccatgattgtaagtttcctgagacttccccagccatgtggaactgcaagtcaattaaacctcttttctttagaaattacccagtctctggtagtawctttatatcagtgtgggaacagactaatacagacagattaaggcaaaaccatttttcagctcttcggctagcaaatcctgacaaagactgatagtatccagagttggtaacagtataggaaatgactctctcatacttccctagtggggctgtaattccacgtaacctcactggaaagcaatttgttgcaatctatcaaagctctatatgcacatacattttgacctaacaattctacttctgttatatcacatagaaatagtagtg

SEQ ID NO: 399823 - DNA, 531 bp, Homo sapiens
gaaacatgtagggaggcaattggatcatggtggcagtttcccccattctgttctggtgatagtgagtgagttctcaccagacctaatggttttttaagtggcagttccccctgctctctctcttttgctgccctggaaagatgtaccttgcttccccttttccttctgccatgattgtaagtttcctgagacttccccagccatgtggaactgcaagtcaattaaacctcttttctttagaaattacccagtctctggtagtatctttayatcagtgtgggaacagactaatacagacagattaaggcaaaaccatttttcagctcttcggctagcaaatcctgacaaagactgatagtatccagagttggtaacagtataggaaatgactctctcatacttccctagtggggctgtaattccacgtaacctcactggaaagcaatttgttgcaatctatcaaagctctatatgcacatacattttgacctaacaattctacttctgttatatcacatagaaatagtagtg

SEQ ID NO: 399824 - DNA, 562 bp, Homo sapiens
ttccctagtggggctgtaattccacgtaacctcactggaaagcaatttgttgcaatctatcaaagctctatatgcacatacattttgacctaacaattctacttctgttatatcacatagaaatagtagtrtatcagactcagctcccccattggcctccccagaattccccagcctcagtcccagacccagctgagtcccagactttcagctactggccctgtctaagttgtcaccctgcaccccaactccatgtgacccatgtggttttgccacccgaggctgatcagtggcacctctagagtctctggcccctcctgcactggactcagatgaaacatgagaccacagggcatgggatttggcctctgtgagctactgccacatgggctagctgacacaacctgtaagtgagggagagttaatgccctgtggggtgaaccttggtcactggaagacaggatgtaaaaagcagttgggcagatccattttctctcccttcctctcttcaatggactattcttgaagcatggtttctctgcacagcctatcctaaggacat

SEQ ID NO: 399825 - DNA, 562 bp, Homo sapiens
ttccctagtggggctgtaattccacgtaacctcactggaaagcaatttgttgcaatctatcaaagctctatatgcacatacattttgacctaacaattctacttctgttatatcacatagaaatagtagtgtatcagactcarctcccccattggcctccccagaattccccagcctcagtcccagacccagctgagtcccagactttcagctactggccctgtctaagttgtcaccctgcaccccaactccatgtgacccatgtggttttgccacccgaggctgatcagtggcacctctagagtctctggcccctcctgcactggactcagatgaaacatgagaccacagggcatgggatttggcctctgtgagctactgccacatgggctagctgacacaacctgtaagtgagggagagttaatgccctgtggggtgaaccttggtcactggaagacaggatgtaaaaagcagttgggcagatccattttctctcccttcctctcttcaatggactattcttgaagcatggtttctctgcacagcctatcctaaggacat

SEQ ID NO: 399826 - DNA, 559 bp, Homo sapiens
ctcttttctctggagatgtgaggcaccatccagatatcccttccaagtacctgcccttgactaaagaaaacagccttgcccaaaatcactctctccttggggtcagcccactactaaatactggtcagtgaggtcatataaagacctgtgccttttgtcccaattcagaacaactctgcattgccagctcagctcctgagcacactgtgaggytggatgaggtctttactgagactgtatcacagcccaacttctccttctgcccaaccttgcttcctttactccccttgttgttgattccaacagtgttccctaacaaccttctgatatgctcatttctttctcagattctgcttcctaggaaacaacttgaaatatctggcaattcttggatagaaagccaggctccatgattcatctttttattcttccttctctccttgctttctttcattcttttgttcattcattcattcatatgtgcattaatgtaatgaacaaaagctaggagccctgcattaaccagaaattcatttcaaggcactgggtttagcagttt

SEQ ID NO: 399827 - DNA, 607 bp, Homo sapiens
gcatgcactccaatggaggaagtttaaggtagtgactcaaagcacaggtattaacagtcagagctgacatgaaaaccagactctgccagctgctggtatgaggctcagaggaagctaccccacctctttgagcctcattttcctctgctttaaatttcataatgcaaatttgataatgtgcttcgcacatggtagataccaatgaacactcagaggtgaatacyagttaaattccataacaatatctcacatttatacatttacttatttatgcctttgggttttttttaattattatactttaagttctagggtacatgtgcacaacatgcaggtttgatacataggtatacatgtgacttgttggtttgctgcacccatcaactcatcatttacattaggtatttctcctaatgctatccctcccccagccccgcaccccgataggccccagtgtgtgatgttccctccctgtgtccaagtgatctcattggtcaggtcctgcctatgagtgagaacatacagtgtttggttttctgtccttgtgactagtttgctgagaatgatggtttcccagcttaatccatgtccctgcaaaggacatgaa

SEQ ID NO: 399828 - DNA, 607 bp, Homo sapiens
gcatgcactccaatggaggaagtttaaggtagtgactcaaagcacaggtattaacagtcagagctgacatgaaaaccagactctgccagctgctggtatgaggctcagaggaagctaccccacctctttgagcctcattttcctctgctttaaatttcataatgcaaatttgataatgtgcttcgcacatggtagataccaatgaacactcagaggtgaataccagttaaattccataacaatatctcacatttayacatttacttatttatgcctttgggttttttttaattattatactttaagttctagggtacatgtgcacaacatgcaggtttgatacataggtatacatgtgacttgttggtttgctgcacccatcaactcatcatttacattaggtatttctcctaatgctatccctcccccagccccgcaccccgataggccccagtgtgtgatgttccctccctgtgtccaagtgatctcattggtcaggtcctgcctatgagtgagaacatacagtgtttggttttctgtccttgtgactagtttgctgagaatgatggtttcccagcttaatccatgtccctgcaaaggacatgaa

SEQ ID NO: 399829 - DNA, 607 bp, Homo sapiens
gcatgcactccaatggaggaagtttaaggtagtgactcaaagcacaggtattaacagtcagagctgacatgaaaaccagactctgccagctgctggtatgaggctcagaggaagctaccccacctctttgagcctcattttcctctgctttaaatttcataatgcaaatttgataatgtgcttcgcacatggtagataccaatgaacactcagaggtgaataccagttaaattccataacaatatctcacatttatacatttacttatttatgcctttgggttttttttaattattatactttaagttctagggtacatgtgcacaacatgcaggtttgatacataggtatacatgtgmcttgttggtttgctgcacccatcaactcatcatttacattaggtatttctcctaatgctatccctcccccagccccgcaccccgataggccccagtgtgtgatgttccctccctgtgtccaagtgatctcattggtcaggtcctgcctatgagtgagaacatacagtgtttggttttctgtccttgtgactagtttgctgagaatgatggtttcccagcttaatccatgtccctgcaaaggacatgaa

SEQ ID NO: 399830 - DNA, 607 bp, Homo sapiens
gcatgcactccaatggaggaagtttaaggtagtgactcaaagcacaggtattaacagtcagagctgacatgaaaaccagactctgccagctgctggtatgaggctcagaggaagctaccccacctctttgagcctcattttcctctgctttaaatttcataatgcaaatttgataatgtgcttcgcacatggtagataccaatgaacactcagaggtgaataccagttaaattccataacaatatctcacatttatacatttacttatttatgcctttgggttttttttaattattatactttaagttctagggtacatgtgcacaacatgcaggtttgatacataggtatacatgtgacttgttggtktgctgcacccatcaactcatcatttacattaggtatttctcctaatgctatccctcccccagccccgcaccccgataggccccagtgtgtgatgttccctccctgtgtccaagtgatctcattggtcaggtcctgcctatgagtgagaacatacagtgtttggttttctgtccttgtgactagtttgctgagaatgatggtttcccagcttaatccatgtccctgcaaaggacatgaa

SEQ ID NO: 399831 - DNA, 592 bp, Homo sapiens
aaaaaaataaataaaataaaaataaataaaatggatttggttcttaaaaaaaaagaattgcacaaagaaaataagtttagctttgattaaatartgctgacatcatatttgagatctgttgtgaaaacttgatgctgtgggaaaaacaatgaaatgacattgtcaaagcaacatacattgtagtaaatgttagcttcattattaatataatgaatagaaataagaataagtttttaggggacaacaacaataactgcgatttgggggaagcaggtaagtacaagttaaatgaatgtgagagagaacagggagatatttgagttttgtgatggagaaagacctggcttctttgagtcaattattattccacagaaaacagagccccatgtgttttgacacaagagacagttaggaaattggtgctggctttaatgagtgtgaagcattggtgaagaggcgggcattatggttctgaattgtgtgtcttgttcattggtatgatataaaaatagatccctgggattttaataatacatttgactttcatttttactttaaattcaaaaaacagctttaattacatttttaaatt

SEQ ID NO: 399832 - DNA, 502 bp, Homo sapiens
ttccaaattttctgtctaacttaaacttcccttaatgccaaattgaagtatattcaactagttactcaccttagatgtcccataggcactccaaacccatcatgattttctcactcaatctgttccctaagtgagcagcaccaacatctgcctatttattagtccagaaacctgggaatcaacctctaaacctctctcctcatcatctactaccascaattaatcaagactggctggttttacctcacaaatgctcttagatgcatccacatctccacttacatttttaagacaagccctcactggctttcgtccattggtttccctgcatccagcctttctcctgttcatcctacagctggagtgatatgtttaaaacacaagtgtgatcacgaaacttctcatcttaaaatctttaattagctgtcccttgttcttaacatgaaactcttaatctttagtgtgaccttcaagatcctgcttctcattatcagtctcactg

SEQ ID NO: 399833 - DNA, 595 bp, Homo sapiens
ggatttatttggcttttgggtgtcttaatgattcaacacttaaaaattcaaaatattttgtcattaaaatctggatttccagccagattttcagattaatccctattaattttggatctgcattgccgtacctcaactatcaattacagctgaaatagtaacagccttcttagaagaaggtctcccctctcctagtcactgagattcagcagttccagtagaaaaacatgttcggataaatactaggaattcttatagccagcctgtttcacccatttgctttatctgtctgacccacaaattggagyatttttggcttgtgacccatgatttatggtgttcaagtgatcataaatatgatcatcttaaaccatggagattttactataagaattaatgtcaaaggtttgtcttctttatgagtcatattcctaatagattcacaagtcacactgaaataaaccccagaagaaccagtagacacttcaataaatgtcgaatcatctgcattagttttcctttcaaaattaaattataataaccttaaatagtatagtcacagagagaatatatatatcattatagtgtagtatca

SEQ ID NO: 399834 - DNA, 695 bp, Homo sapiens
agctttcaggattaatatgatatatggaaacattatttttaggctttgaggaacatctgtgtaacatatttacaatactgaggaaataatggatttattttttcatgagaatcattccttcttcaattaaagaattttgttatggaagttctgaaaatccctactaagtgacatagctaaatttgaacttgcattagctattcatctgggctcattcatcatttactttctattgtgcttcaactttctcagactcaaaacaatttccattcatttctaaacttgaacaccattaagacattcaaataagagaaaaggacattttaaaatttgaagcaaaggtctcctttgataggagaggattttgaaatttataaatgaaacctgataaagatgaaaccgttmtaaatttcttcttaggcgtggtttctcatacaaagctaattgaagacacaatcaatgctatccatatacaggcataccttggagatattgctggtttgtttccagaccactgcaataaagctaatattgcaataaagcaagtcatatagactgttttgtctcccagtgcatataaaagttatatttacactctactgtagtctaagtgtgcaatgtcattatgtctttaaaaatgtatgtatcttaatttaaacatattttactgcaaaaaatgctaacaatcgtccgag

SEQ ID NO: 399835 - DNA, 581 bp, Homo sapiens
tgattacttttacttctcatcaactttctgttgtccacatggcttctcttctagtataattaattttaatgtacatcaattaatacttttattaataaaaaataaaacctataattaatactttaaaaaccaagtagtatagctcacagaatttatctagacattgctatttcattcaggaatttatctctgctgtatctagaaaatgaaacttctgttacgttttatgttttagaatacttacatatgttactactcagaatccataacattataatttatactagcattatttcctggtaatacaaatctttgtagaaaaaatctatcagaaaacaggcagtacatctttcccactgcataccctctttaccagactcttaaaatatctcatattgctttacccatagttttatgaatagggcttagattmcactgagttttgctgctgctttgtggtgacttggtactaaattcagctaagctggaaccacattccccagagttctctttcttgtatggttctgtatggccatgagagacattctgtgtgaaatccagaaggaagaagtaaagaagtc

SEQ ID NO: 399836 - DNA, 548 bp, Homo sapiens
ttataaaagaaccaacagagattttaacaagcttgattttcagctttctggaccaatcagctaactttagtacttgtttaaaacatcatttaatcttgactttcgtggttcaatgcttagctacctttggtttttcctgcttttgagtattttccaccttcccacaagcaatcagtgagccctaagactaagagcagggatcaaaatctcaatgtcttccaggactagatttaatgtaaatgtgtgmagtggatagatctaagataagagggcttggtggggtctgtggctggactagagaagtgtatccagcctatagagtctcaaatttaaaaaaagaaaaataaaaaagaatttcaaaaagaataacaagaacaataaccctatgctgaccaagaacatttatgtggaggacatcggtttgatccctgacatacaagtcttgttcttttctctctacctaacctcctttagcaaatattttgctcatattcctccaactgcaggtttcaacaaaggtcaaaggactgtagaatttaagtgctgga

SEQ ID NO: 399837 - DNA, 508 bp, Homo sapiens
accctagcagtgactgtgcatgtttatatgtttttaataaattttttattttataatagttttaggctaaggcgggtggatcacttgaggtcaggagttcgagaccagcctggccaacatggtgaaaaccctgtctctactaaaaaaaaaaaatacaaaaattagccaggtgtggcaggtacctgtaatcccagctacttgrgaggctgagacaggagaattgcttgaacctggaaggcggaggttgcagtgagccaagactgcgcaattgcactccagcctgggcaacaagagcgaaactccatctcaaaaaaaaaaacaaatagttttagacaaaatttgcaaagacaggagagagagtaatcatataccccacaaatagtttttcctacttattaacatcttacattattttggtatactagtcataataaactgatgttgacacactattattaactaaagtccatattttatctaggcttccttagtgtgtgtgtgtgtgtgt

SEQ ID NO: 399838 - DNA, 508 bp, Homo sapiens
accctagcagtgactgtgcatgtttatatgtttttaataaattttttattttataatagttttaggctaaggcgggtggatcacttgaggtcaggagttcgagaccagcctggccaacatggtgaaaaccctgtctctactaaaaaaaaaaaatacaaaaattagccaggtgtggcaggtacctgtaatcccagctacttgagaggctgagacaggagaattgcttgaacctggaaggcggaggttgcagtgagccaagactgcgcaattgcactccagcctgggcaacaagagcgaaactccatctcaaaaaaaaaaamaaatagttttagacaaaatttgcaaagacaggagagagagtaatcatataccccacaaatagtttttcctacttattaacatcttacattattttggtatactagtcataataaactgatgttgacacactattattaactaaagtccatattttatctaggcttccttagtgtgtgtgtgtgtgtgt

SEQ ID NO: 399839 - DNA, 603 bp, Homo sapiens
gtgcctcaaacacagagtttgaaaaccactggtctacatcaaagcagactgtaaatatgcataagtcaaggttattgagatgcttagtctaccatttgaacttcagtttcaaaaagccaggtaggcttttagacctttcccacagtggctgcatagcaatctcaatttgtactgtctgcatgtcacccaaaatggccaggccatcggccacccgcctcatttggcagccctgacttagaagagaagacaatagctctttgcccaaaggtcrctttgtagtgactcaccttgaaggaaaaaggaaggtaaattacacataatggccttctaagttgtcccacagttttcaacagaaaatactcttaaagtataaccagaaacaagaaaccttcaatgcaatattttcctttttgttttccaaataagtaaagtccaaattaggaaacagaagcaagtatatcctattaatttgtaatgtctagaaccatagaagtagtctagttatggaagagctgttgtgcatcttctagtaattaaacctgtgcaagttacagccttaatcaaaacaccttttaggagtctactctggtctccatgagagtg

SEQ ID NO: 399840 - DNA, 519 bp, Homo sapiens
actctgtcttgcaccgcaggtaccagctcagccacagtggggtagagcaacaagcaggctcttggacagcatttctggacctgccccgggccagaagggagcccactgccctgaaagtgagtcccaggcctcacagcattcaccaaaagctgactgaagagcctttgcactttaagggaacattgacaatggcctggcagaactcaccatgggtcagtggtggtggccactgagagaggctcctctgcctatggaaaggggaagaaagagcaggaagaactttgtcttgtggtttgagggccagcatagccatattagaatagagtaccaggtagattttacgttttttttttactccaatccctggctcccagacagcatttctgacctgcccagagcctgggggagctcactgccctgmaggtgagcacataatcctggctggtttcccaaactgctgactataaagccctagggccttgagtgaacataggcagtagccacatagtggttacagtg

SEQ ID NO: 399841 - DNA, 520 bp, Homo sapiens
ctcctgggctcaagcaatcctcctgccttagcctcccaaagtggtgggattattggcatgagccaccatgcctagcccaaagtgttagtcttatggctgctaaactgtggaaaggtctggaggtttttagagatggggatggggcaacctgaggagggagtgggcactctctggtttggggcagtagtcatgtaccaactcagtaagaattgttycctaatattttctaatactgatacagtcataccagccctgtttttctctttaattaattgaactgagcatcatacagctcaccttttaatggagctatcaaggtgagagtgctgaaggacttcagagaacagaaaggttaatgtcaggacaagagttaaaaagttgttaagatttagacaggcaccaaagaattgttaagatttagacaggcaccaccctgggcaacattgcaagaccttgtctctacaatatatataaaaaattagctaggcatggtggtgcacgtctgtagtctcagctattg

SEQ ID NO: 399842 - DNA, 561 bp, Homo sapiens
tttttcactgcattaaggttggaagtctgtaagatatctaggaatacatgtcaatttaacctgattctggagatcacaggaaagggcagggatatatataattatatttgggagttactggtacaaaactagtatttaaaaccatacgaccaagctcggcatggtggtgcttgcctgtaatctcagcactctggraggctgaggcaggaagatggcttgagtccaagagttgagactatcctggacaacatagtgaaacccatctccacaaaaaaatacaaaatattagctgggcctggtggtgcatgcctgtagttccagctacttgggaagctgagacaggaggatcacttgagtccaggaggttgaggctgtagtgagccatgattgcaccactgcactccagcctgggtgacagagtgagatcctgactcaaataaataaataaataaacccatgggaccacaagaaatcatctaaggagagaatgtaaccccaaggcacctccaaatttggaagtagtataggctgagaaagggaagctaaaatggtaaacaggag

SEQ ID NO: 399843 - DNA, 567 bp, Homo sapiens
gtttttctctgcccctgagcctgagagaccaaagcccatctttcccattatacatccccaaggttaggctgcgaatttacttgaatgacaaatagttttactgaattttcacttcatactcaatttctttataagttaaaggaagaatagccaagagaaaaagaagacttttatatatagaaaataatagctgttcattgtgaaaccatgcagttttgagtgagaagcatcaatcttgaaatgactgaagtcattttagttctgctgtctggtgattggtgttctctaagagctaaatattgcctgacttggccagctcctctgatacaaactgaggtctttttctttctcatgttatgatgatatcatctgaagataagatatatrtgcatgaatatgagtatgaaacaccttttaaagcatttgtaacaataacgacttagaggaaaaaatgttcagtacaattttgtgtaattcaccagatattcactgtggttattgctaggtaaagggattgcatgtaagctgtattttctttctgcttgtctacattttctacaatgaata

SEQ ID NO: 399844 - DNA, 567 bp, Homo sapiens
gtttttctctgcccctgagcctgagagaccaaagcccatctttcccattatacatccccaaggttaggctgcgaatttacttgaatgacaaatagttttactgaattttcacttcatactcaatttctttataagttaaaggaagaatagccaagagaaaaagaagacttttatatatagaaaataatagctgttcattgtgaaaccatgcagttttgagtgagaagcatcaatcttgaaatgactgaagtcattttagttctgctgtctggtgattggtgttctctaagagctaaatattgcctgacttggccagctcctctgatacaaactgaggtctttttctttctcatgttatgatgatatcatctgaagataagatatatgtgcatgaatatgagtatgaaayaccttttaaagcatttgtaacaataacgacttagaggaaaaaatgttcagtacaattttgtgtaattcaccagatattcactgtggttattgctaggtaaagggattgcatgtaagctgtattttctttctgcttgtctacattttctacaatgaata

SEQ ID NO: 399845 - DNA, 587 bp, Homo sapiens
agttctctgctggactatcttagttttggacagtctcaatttagtatctcttcctctgaaaaactttccttgcctagggcagagaaatgtcctgctgttctgtcactaaggctacagggttattagtgttttatggaggccattggtccttcatacttactgagcatcccatgtgctgcattatgtgggaaaatacaaagacaggtatatggtggaaaatatccaaagtggggaccctctttaaaagaaagatcattttcaacttctgagagtttawgtatcattccatcaaaacaaatgtgatggggtctgctgtgcatgtggtggtgtgctgggtgctgcacacatctcaaagggaattgacgtagcatcaacactggctgccaggagctcatggtcatattgggaagataaggattgaatatgtgaaaacaatttttaaaaagagaaagagagaaagaaatcaaagttaagtacagtccaaaagctgtcacaaaactgtaaataatcaccaaatgactggtgcaggtactaaatgttatcagaaggaaaagaccaccatggggctgagcaggctgccaggactg

SEQ ID NO: 399846 - DNA, 583 bp, Homo sapiens
ctggggaaccaggaagactgctggtgtggctcagtctgactccaaaggtctgagagccagaggagcctatggtgtaactctcagtccaagtccaaaggcctgagatccagaggggttgctggtggaagtccaagagtcccaaggccaaagaacccagaattttkatgtgcaagggcaggggagaagatggatatacaagctccagaagagagtgaatatagcttttctctttgttccatctggtccctcaactgattggatggtgcctgcacacattgggtgaaggcagatcttccttactcagtccagtgattcaaatgccaatctcttctggaaataccctcacaggcatacctggaaataatgttttaccagctatctgggtatcccttaaccagtcaaattgacacctaaaattaaccatcacaaatatactcttaaagagcccatggctcaaagatgaaattatgaaaattcaaaaataatttgaattgaaagattatgtaaatatcaattgaaatgcaactcaagcagtacttagagaaatttgatagcttttatgcatatattagaaaacaaaata

SEQ ID NO: 399847 - DNA, 566 bp, Homo sapiens
tttgaattgaaagattatgtaaatatcaattgaaatgcaactcaagcagtacttagagaaatttgatagcttttatgcatatattagaaaacaaaataaaaaggctgagttgagcatccattctaagaattttgaaagagaacagcaaaacaaaacagaaaagaatataataaagatgagaacaaaaattaataaaatagaaaagcactatagaggtacaataaagactgaagatgggttttttttttaaagatttatgaaattgataacttcctggcaagaatgttaagtaaaaaaaagataaggcactaataaccgtcaaagaaaaaaaaagacgattagaaagccaggattgattgctgagtagaagagttttactgctaaacaggcaatccaataaagcatggagtctaggaaggctctgctggttgaggtytggaggagaaaagaaaggaccacaaattgtcttgtcccaaatgagaaatgcaaagcccctagacattgttaattatctggcagtatctaggcttgttgagtccatacatactgggctagctaagggcatg

SEQ ID NO: 399848 - DNA, 597 bp, Homo sapiens
tatttttgggcgtggtaattttttggtgaatgtcaaacatctgaagttttatgttgttgggtgctgtattttttttaaattattcctttaaatatgttgaggcttttttttctgggaactatttagtttagctgaaattaattagaacccgttaaggcttgcttttaagctttatcaaggaagatccaaatcagccttttgtcaagggctaacttggctctattactgaggcaatatgcttctaaggacttgatgctcagtatggtagaaggtcttgttactcttactctgcttagtggaaatacaaactattcccagccctgtgtgaggtctggaaattgctccacctactcctttccacagtgactctttccccagtctcaaagatgtcacagtacatgcagatgaatactcagccaaaggcttgggagaacccccctgtggacctctggagctttctctctgtgcagctacctcctgtctgtgcagtacctaccttcargtactctgttttgctaattctgtcttaactcttcagctcagcaagactactgggctctctttgggtttcccttctctgtgctatgcctccagaca

SEQ ID NO: 399849 - DNA, 586 bp, Homo sapiens
atctcacactgtctgtctgatcactcattcttcctaatacaggaacaactaaaaggacaatatatggaacaataccaacatctagttgttccattacacctgagtaagtgattaaggaaattttgaaatggttccaagacagatgttttcacaaacaaactgataccaagattttaactttttaaaaggctcaccattttctcatctgtattatgagggaaaagactgaccctccaggcctatgattcaattataaaagtatctgcccattttgttgctccttggaaaatattatgtaactttctcatgattaggaatataaaattatgtttttcttctgaggaaggctggagaaagctttaccaataagatttttttcatagagaaattgctacaagcgtctggaattccaatgtcaaaataaaataagtcacattgtaagtaaaggaatataactgagtgtcactcaaagattaattccaaatttcccaccaggatcttgacaatcaccagcaggatatagtgagcytagtaagcgcagttctcctgtaatcttcagtatttttgaaccagagtttctactgat

SEQ ID NO: 399850 - DNA, 587 bp, Homo sapiens
ttattactatgtacaaaaaaaaaaatccattcttctccaccctctcatagattctcccttttgtgttaaataacaatagagaactgggctaatacccttcaaaatggggtaaattgcagacagcttcctattgcagagatatgaaaagaataatattcttctatgaaaaaaaccagataattctctattttcctcctccctctgtcctaattcttttgtaagaaacattttaatagttttttaaaaaaatcccaaaccagtgttctatctttgccactgaccagcttcaccttaggcaggtgactcctttcacctttgtacttatctaggaaacagatttcattatatatgcttttcctttcttggagctgtattattaggatcatctggatgaacagggctgcagttttctttcctatttacatctggctcctgtgtcatcagagtcctttcctcaatgcccccacattctaagcttccaggttgggttttctattaaattcaagcagcctggtctacatcaaagcccacaggagttgcactgttagtaamggaggaatctagttataccacagcaaagaaaaatg

SEQ ID NO: 399851 - DNA, 553 bp, Homo sapiens
ctcgctcctcccactggggaccccgtgctgcacagtcccaggaggctccttccccttgtatttcctctcccatgtgaaacctctcccacggagtcgtgcacaggggtcctgccttccgtggtcccagactgtcattcagagtgagacacataacttgcctgggaggaattaactaagctcttccatgaagagctagctgccaaccatcaaaagaaagtattcccagcctgccagattctcatggagggaaattacaagtcttagtaatgatcatcacagggagctcrgagtaaacacaaagtctgtctcttttttaatctcaagtgattgatgtgagcagtacagcttccctggtgctttaaggataacaaagaacaaatggaacttggtgtgccgagtgcattcgtggagggtggcatgtcactgggtgttgatcagatgcagatgtggtactcacacccacatgaacacaagggctcacacaaaacgctcacgtgtatagctcacgcatgtacacatgcacaactgcacctacccacattcattcctcagt

SEQ ID NO: 399852 - DNA, 553 bp, Homo sapiens
ctcgctcctcccactggggaccccgtgctgcacagtcccaggaggctccttccccttgtatttcctctcccatgtgaaacctctcccacggagtcgtgcacaggggtcctgccttccgtggtcccagactgtcattcagagtgagacacataacttgcctgggaggaattaactaagctcttccatgaagagctagctgccaaccatcaaaagaaagtattcccagcctgccagattctcatggagggaaattacaagtcttagtaatgatcatcacagggagctcggagtaaacacaaagtctgtctcttttttaatctcaagtgattgatgtgagcagtacagcttccctggtgctttaaggataacaaagaacaaatgraacttggtgtgccgagtgcattcgtggagggtggcatgtcactgggtgttgatcagatgcagatgtggtactcacacccacatgaacacaagggctcacacaaaacgctcacgtgtatagctcacgcatgtacacatgcacaactgcacctacccacattcattcctcagt

SEQ ID NO: 399853 - DNA, 581 bp, Homo sapiens
aacccaacaatctcaccatttgaatctatcccaaggaataactttaaaatctcaaataaacctcataacaaagatgttcaccaaaacatatttatgataacaaaaaaatgaagataatttaaatgcccaacagtggaaacgtttcaggagcctatagtgcatctatttggtragacatgttacacaatcattgaaaacaatgcttgccaagtgtgataaaaacacaggaaacattcaccttcaacaaaaaggctgcataaaattcaatatgtaccatcctcaaaaacattaaaaagctttgcctagaaaaggaatgaaaggacatgccccaaaatgttaacactgagtagttttaattttctctgttcctacttttctaaaatgagcaagtatttcctcttaaagtatacaatccaatggttcagtatattcagtctgtgcaaccactgccaacatcaattttagaacattttcatcatctcagaaataaaccctatacattttggctatcaccctcagcccccaatcccctcagccctgagcaaccactaagctctgggtctctttatagattttcttat

SEQ ID NO: 399854 - DNA, 581 bp, Homo sapiens
aacccaacaatctcaccatttgaatctatcccaaggaataactttaaaatctcaaataaacctcataacaaagatgttcaccaaaacatatttatgataacaaaaaaatgaagataatttaaatgcccaacagtggaaacgtttcaggagcctatagtgcatctatttggtgagayatgttacacaatcattgaaaacaatgcttgccaagtgtgataaaaacacaggaaacattcaccttcaacaaaaaggctgcataaaattcaatatgtaccatcctcaaaaacattaaaaagctttgcctagaaaaggaatgaaaggacatgccccaaaatgttaacactgagtagttttaattttctctgttcctacttttctaaaatgagcaagtatttcctcttaaagtatacaatccaatggttcagtatattcagtctgtgcaaccactgccaacatcaattttagaacattttcatcatctcagaaataaaccctatacattttggctatcaccctcagcccccaatcccctcagccctgagcaaccactaagctctgggtctctttatagattttcttat

SEQ ID NO: 399855 - DNA, 613 bp, Homo sapiens
ggctcccaccaacagccagtccccagtcccccgccatgacagtgagccacactgtcctccagcatcagaaaagcctgtagaggactgcagccctgcctgacatctgatcacaacctctggagagaccccaagcaggaactgtccagctcaagctgcccctgccttctggatcctctaaaggttgggtgatttgttatgcagaaatggatacataatacaccaactaatcttccatccagttcctytctattttgggaaaacccaacaaattccactgcatgggcaatgagaacactccaaaactactcattcagcaacttgtatatttaagaatgctgtttttcaagtgtggtgcattgctctgcagaactggcatttttaaaaataaaattggattcatttcccgtagacatgttgctggtaatgttctggaaagttgtttctctttctagaagggttggaggtatagagagtgcttcctggttagtgctggagcaaaggaatgctattaaaaaaaatgggtacggggaggaaggccaaatataaaaacccctgcttcaagggtcaggattgcagacctggccaggactcaagtggtccgagatatccatac

SEQ ID NO: 399856 - DNA, 610 bp, Homo sapiens
ttctccaggcttgggttcggggaacctgagggccactatctgctgggttccatcagcaagtccagcagcacagctgatctgacaggtgtcacatgactcacaggcaggcaggctcagtgggacaagtcctaaactaggactcaggggaccgcctggtctctgttgtctactaaccagctgtgtgaccttcaataggccacttcccttttctaagcctcagtttccatagcagtaaaaccagagggcccttctctagagagttcttcccgccctgacagtctctctctctctctctctctctctctcwcacacacacacacacacacacacacacatatctgggtgggtatgttttacagaagtactgtattgctctacattttgtaacatgctcttaagtttttgagaaaatgatatacagaaggatttgtaacttctttgctattcactcaaatgaatccattttgtgttttagtagcttcagatcacttcaacagccaatgcaaataatcaagacagaagcagtgcaacctcttggagttggcctatttccagtggtacagccaaacgcaatggcattatttacccaaattgttgggcaaccagcatg

SEQ ID NO: 399857 - DNA, 570 bp, Homo sapiens
aaatagaaagtgaacccagaagaaaagcacgactggaaaaaaaaaaacaaaacaagtgtattaatttgctagggctgccataaccaagtaccacagagtgggtggcttcaaccgcagacagttattttctcccagttctggaggctggakgcccagggtcaaggtgtcagcagctctggtttctgaggactctctctctggctcgcagacgccggtcttattgctctgtcctcacacggcctttcctctctttgcagacatgtgtctgtgtccaaatttcttcttcttttaaggacatccatcatattggattaaggcccattctaaacacctcactgtaacttaattacctctttattttaaagaccctatctcccaatacagttacattctgagctattggggcttcaacatatgaattttgaagaaacacaattcaacccataacagtaagtgtgtacaaagaaattagtaagatctaaataagtattgaatcatcattatcaccatcatctcatcatcatcatcatcatcaatttgggagatttaaaaacatgaggaattaaaata

SEQ ID NO: 399858 - DNA, 604 bp, Homo sapiens
aggaagtcaaaccactatctctagcaaacaatctaagaagactaaatggttattatctggttttggattgtttgcttgttcctgaaaaaaaaaatggatcccaaatggtcagttgattaataactgcaggttccctaatttttgtccctgcttccaacttagtacaagccaaagaaagccagatacagtatacactgcttgtcaatcacatatgatgccctacttctagttagcctacctacagcttccttataccaacaccttccaatcagcatacatgaagccttcccttttttccactataacactttcccacatctctgcctctcttttcaatttctgccaaaaccaagtaatggtggctaacyccattgctatagaaagccctgaatagactgcctttgctttctcatctgggtggtctttatttattgacacattatatatggacttctagaattaatgctatttataagactgataacagtgtgacttttttctaatatcagtcttattggcatataattcgtacaccacacaattcacccacttaaagtatacaattcaataatttttagtatattcacagacctgtgcaaccact

SEQ ID NO: 399859 - DNA, 480 bp, Homo sapiens
caaatagaaatcaatgccaagaagatctttcaaaactatgcaaacayataaaaatcaaacaactcaatactgaataattcctgggtgaaaattgaaattaagatagaaatcaaaaaattctttgaaattaatgaaaataaggaaacaatttacaaaaagctctgcatgcagtccaaagcagtgttaagaggaaagtttatagcactaaattccttcatcaagaagtcagaaagaccataaattagcaatctaaattggtacttaaaagaacgagaagtcagaaagaccataaattagcaatctaaatttgtacttaaaagaactagaagtgaaagagcaaaccaacccccaaaagtagcagaagaaaatgttaaaaaaactacaattaaataacttaatgaaattgagatgcaaaatttatacaaaagattaattaaaccagaataaaaacaaataaaattgatggactactagctaaat

SEQ ID NO: 399860 - DNA, 480 bp, Homo sapiens
caaatagaaatcaatgccaagaagatctttcaaaactatgcaaacacataaaaatcaaacaactcaatactgaataattcctsggtgaaaattgaaattaagatagaaatcaaaaaattctttgaaattaatgaaaataaggaaacaatttacaaaaagctctgcatgcagtccaaagcagtgttaagaggaaagtttatagcactaaattccttcatcaagaagtcagaaagaccataaattagcaatctaaattggtacttaaaagaacgagaagtcagaaagaccataaattagcaatctaaatttgtacttaaaagaactagaagtgaaagagcaaaccaacccccaaaagtagcagaagaaaatgttaaaaaaactacaattaaataacttaatgaaattgagatgcaaaatttatacaaaagattaattaaaccagaataaaaacaaataaaattgatggactactagctaaat

SEQ ID NO: 399861 - DNA, 372 bp, Homo sapiens
atgtaacaaggtctcaatatatcaaatcctctccaccacttactatctctttcatcatagccatcttagagagtgtgaagtgatatctcattgaggttttaatttgcatttccctgatggctattgrcattgaacatcttttcatatgtttattggctattagtctctcttctggggagaaatgtctattcagatcctttcttcatttttaagttgggctttttgtcttttcattattgagttataaggtgatctgctttttacctttgttgttttctttctaaaaactttagcatcttctctttatcatttgtattctgaattttcataacatgtttcagaaaatgcattttcttcactttgctgagtaca

SEQ ID NO: 399862 - DNA, 561 bp, Homo sapiens
aatttttcagtggctatacttagcaagaaagtgacaaagatatgaatggccctattcagatgagaactaaaatattttgctcactttagggacwcagaattcattaaatacccaagatttaaagatttatgttcagaaagcctaaaggaagtttggctttgaattaaacctgtatgagacaaaagtatagtctgccttatttactgttatgtcattagcacatagtccaatgtcaggccatcgaatgaaaaaacaaacaaacaaacaaacaaatgaatgaattaaacatcaattgcaaattaagctttctgacctacaggaactggatgagcatacccagttattgtctcaagtaagaatttaagaaaccagaagagcatgtcctctaatttggattttccctacccagtacatttttgcttttgtatctgccttgaaagaggagcagagggggaatgttcctgaaagaacagcatatgtgggagaaattacacattcctatagatagaaagtcatgagactgtaaccaggttttgctatgtaatctctgacaaggggtga

SEQ ID NO: 399863 - DNA, 643 bp, Homo sapiens
catgtcctctaatttggattttccctacccagtacatttttgcttttgtatctgccttgaaagaggagcagagggggaatgttcctgaaagaacagcatatgtgggagaaattacacattcctatagatagaaagtcatgagactgtaaccaggttttgctatgtaatctctgacaaggggtgacatttctgagtttcaggctctggaagacagggcaaccataatatactaaggtgactcaaaagagtgaacagcaattgggggaaggtgaacttgaaaccaccaaactccttcagaccactctgtggttgaagtttggacccttttgtaagccaaaagaatggtgagttcatttcaaagatgaccaaattggctttactatcagctcttatggctgtgggcaaaggagagaatggtagagaacctggtcctacatggtgataggctaggggtaaaaaaggggaagaagtgaagatgaaaatagatgagttcaaggagacaactgtggcrttgagaaggaaggagagaagaattatctaaagatatatagattggatttttaatatttgtgggtcacaatactctttgagaacttttaaaacaataagtattcaattcagaaaaatatacctacaaaacaca

SEQ ID NO: 399864 - DNA, 543 bp, Homo sapiens
ttggggaatgttgtggggtttgcgggcgggggagggatagcattgggagatatacctaatgctagatgaccagttagtgggtgcagcgcaacagcatggcacatgtatacaaatgtaactaacctgcacattgtgcacatgtaccctaaaacttaaagtataataataaataaaaataaaaaaaagaaataattacatcccaggttcctaattcccagctacataatttgaccaatggttgtggtggtttgaaaaaccttcatttagcatctttgaaatttcatttgaatgctttttacaatctctcccagattattrattaaggcattctaagaggccagtcatctggtctcacaatcaccacttccttcagactcagtagagggttatttatcagcaatcttggcgatcattcaaccctttttcgagaagtttttaatccctagcaacttctaaacacaatgaaacctttaaaaacttcaaatagagaagcattttatctcccttcaaagcagactgttttaaattgccaaattttgtggt

SEQ ID NO: 399865 - DNA, 591 bp, Homo sapiens
atcacttgatacgttttcacagaacaaacacactcatcaaaaaacggaatagaatcagaaccacagaagcctttcttgtgcccccttgtgtttttttctgcttttcctcctatgcaggtaacctctatcatgccctttaacagcacaatttagtcagttttgtatttttatataaacaaaatcatacagcatattcttttttgtatatagctttttaatttcaatattgtttttgagatatatcaaattgctgtatagaattctactgtgtgaatataccacactacrccttttacagttgatggccatgaaggcagttttagttttgggatattacaatcaatgctgttctgaacattctagtacatatttttgggtgaacatagataggtatttgtgttaggtgtctatctgacagtggagtttctggatacgcagtgtttcactttggtagattccacgagctaaaggggttatatcaatttacatatcagtgtatgagaaatcaagttttcccacatcctctccagaagttattattttctgacttataaaaaactttagccattctgcatgtctagtgataccaca

SEQ ID NO: 399866 - DNA, 561 bp, Homo sapiens
tacctccaaacgggaaaaaagtcatttcttatattttctttaagtgaagggttaaaaggagaagaaataaagaagaaagtaagaaatgattcagcattttataaaaataagtttgcagccaacataaattacagtaattctatacttagatcaaatgaagagctgtctggaagcctgccacccctcctcaccacctaccactgccaactactgttaattatgagaacactttttctctttctgctatactggactaagttttttttccccaatttccagtattgagggtaaatccctgccactttcttctaatatgtcaccaattcttacttattttaccattaaatattctctattcatccatttctctacatgtacatcaactacaaccttgtttatggtatcatttcttacctgggctgcctcaatggcccctgatgggtcygctgcagcctctaaagtcccttccaatccataatcttatatgttcgtcagaatgggcttttcaaactggaggggtatcagatcatgttaccttgatttccccatgtgtcctcccca

SEQ ID NO: 399867 - DNA, 357 bp, Homo sapiens
agtttattattatgttcagaatagaactaaattagaccaattttaaaattagattgaatgtatttctcggtgattattttctctccctattaccagtgatataaccacasctaaggattgtattcatttagtcttgtgaatgaagtatctaaaacttttcccaagagcttcaaaatatttatgtattacagtccatgtgcattttcttttttaaaaaagaaagatgctgtggacaatttaagttttccttgaatctttatgtatatgctatacatttttacttcttttatgccacttaatttttttcctagattataatttcttggtgattgtacacattgagaagagatagacaaa

SEQ ID NO: 399868 - DNA, 357 bp, Homo sapiens
agtttattattatgttcagaatagaactaaattagaccaattttaaaattagattgaatgtatttctcggtgattattttctctccctattaccagtgatataaccacagctaaggattgtattcatttagtcttgtgaatgaagtatctaaaacttttcccaagagcttcaaaatatttatgtattacagtccatgtgcattttcttttttaaaaaagaaagatgctgtggacaatttaagttttccttgaatctttatgtrtatgctatacatttttacttcttttatgccacttaatttttttcctagattataatttcttggtgattgtacacattgagaagagatagacaaa

SEQ ID NO: 399869 - DNA, 290 bp, Homo sapiens
attgatttcaataaatattattaattttaatatgaattgttattcttgatgggctaaactatggggaaagatgtatcttaaaattgatataataaagcatctgtcattatatggcctttctttcctattcatttctactccagctaaagtcaggtaccatgtgtgtactgggattctactgccagtgaatgttatttggataccacttccttcctatgaatgatccctagttaccgcaggattagtgcacatastgtgtgtgtgaataccatatccactattgttcaaag

SEQ ID NO: 399870 - DNA, 629 bp, Homo sapiens
cagtttattaaagctgaaaaatgctgtcacacttcttccacttaatctggctgtgtaagcattttccaaaaagaaataaagttagtattcagagatacgatcactctagacacagatctggtaagaagatcaagataggtgtgttttaattccagtcttattactaattaattgaatgacagcctggattaactatttaacctatcttcttgtaaattttttaaatctctgaaatgaaaaaaaaagagatcatttctaagtattatgtagggaaattgaataaatacctgattatagaaatgatcttaagatagaaattagaaattaatggattaatcaaatgtatagtacctgtaaacttgcttaaatatatgtgatrtaacactaaatttccaaattatcaacagccatttacatggctccaaaaatctttttcagtttacttgaaagagttatttttgttacttgttttaatgtatgttggtaacatggaaagtcattttatcaataaaattccctctaaagacaaacctattcttagatttcgttaactgatatcttgccaagaaccctgatattttcagtttatccctgaatcactgactcaacaatctatctagtacataccc

SEQ ID NO: 399871 - DNA, 626 bp, Homo sapiens
ggtattaggaaacatataattggggaggtgtacacttgctgcaatattgggagttaggatattgcgatattaggaacaatatcacagcaggggtgtacatccctttygatattgggagcaatattatcctcagccccctttatattaggaacaatatcacagtgggggtgtgcacccacagcgatattgggagtaatatcatcccctccccccgtggatattagggacaataacacaggggaggtttataccccctgcgatactgaaactaatatcctcatctttctttttagatattaggaacaatatcccaggggtgttgttcacccctgggatattggaagtaatataatcctttccccctggatattaagaacaatatcacgagggagtgtataccccatgcaatattaagagtaatatcattctctcttcccctggatattatgaaaacatcacagagtgggtgtataccttctggataatggaggataatatgttctttcctcatggatattaggaaaaatgtaacagagtggatgtacacttcctgcgatattgggagtatatcatccttttctcttaatattatgaacaatattacagcgggggtgtacacctgcgat

SEQ ID NO: 399872 - DNA, 540 bp, Homo sapiens
tggggacagattaggataaattacagaaagaattcaaatattaccattaagtaatattcagtttctcacattcaaaaaatataacttatcaataaaacaatacattatatgcaaaattcttatcttgagtaagcattctataaattactttaactccattttaagggacagttgtagcagttgacaccttacagttttagataaaataggtacagawgaggagaagaaggaaaagtcttctctttatgaccctgagaaaattgtgagcagaggagaaagagtgattagcagtgcaaaatgagttaatgtgtaaaactttgcttctccaagctttgttcctcaatagaagatactttttgtcctcatgcttcctatttgggacactaagaagaggccactttgcaatccaacgatttggaccacaactaaaacgaataaagtcagcatctcacaaaggttggaaagatacgggtcttaaaggggaactttcctgagcttctctttgagcagactcagaagtaactgcaggctgacaggcaa

SEQ ID NO: 399873 - DNA, 540 bp, Homo sapiens
tggggacagattaggataaattacagaaagaattcaaatattaccattaagtaatattcagtttctcacattcaaaaaatataacttatcaataaaacaatacattatatgcaaaattcttatcttgagtaagcattctataaattactttaactccattttaagggacagttgtagcagttgacaccttacagttttagataaaataggtacagaagaggagaagaaggaaaagtcttctctttatgaccctgagaaaattgtgagcagaggagaaagagtgattagcagtgcaaaatgagttaatgtgtaaaactttgcttctccaagctttgttcctcaatagaagatactttttgtcctcatgcttcctatttgggacactaagaagaggccactttgcaatccaacgatttggaccacaactamaacgaataaagtcagcatctcacaaaggttggaaagatacgggtcttaaaggggaactttcctgagcttctctttgagcagactcagaagtaactgcaggctgacaggcaa

SEQ ID NO: 399874 - DNA, 459 bp, Homo sapiens
gtgtgcactccctgcgatattgggggtaatatcatccttctccctcttggatatcargaatgatattacgggggggtgtacatcccctgtgatattgggattaatattgtcctctcccctcctggatattgggaaaaacatcacgtggggtggggggtgtatacaccctgcaatattggaagtaatattattttccccctcactggatattagaaagattatcatagaagcggtgtaaaccatctgcgatattaggagtaatatcatcctctcccccccccatatattaggaacaatatcacaggaaatgagtgtacactttcaatattgggcattattatcattctttattttcctggatattagaaacaatatcacaggagggagtgtacaccccctgcaatattgggagtaatattatcctctcccattctggatattaggaaccatatctctgga

SEQ ID NO: 399875 - DNA, 459 bp, Homo sapiens
gtgtgcactccctgcgatattgggggtaatatcatccttctccctcttggatatcaggaatgatattacgggggggtgtacatcccctgtgatattgggattaatattgtcctctcccctcctggatattgggaaaaacatcacgtggggtggggggtgtatacaccctgcaatattggaagtaatattattttccccctcactggatattagaaagattatcatagaagcggtgtaaaccatctgcgatattargagtaatatcatcctctcccccccccatatattaggaacaatatcacaggaaatgagtgtacactttcaatattgggcattattatcattctttattttcctggatattagaaacaatatcacaggagggagtgtacaccccctgcaatattgggagtaatattatcctctcccattctggatattaggaaccatatctctgga

SEQ ID NO: 399876 - DNA, 602 bp, Homo sapiens
ttgagagtaatatcatcctctcccaccctggatattaggaccaatatcacaggtggggttaccccctgcaatattaagagtaatatcatcggctccgtcctggatatcagaaacaatgttaacaggaagaatgtacaccttgtgccgtattggcagtaatatcatcctctcctctggatatttgaagcaatatcagagagggtgtacacacagcgtgtttaccatattgagagtaatatcatcctcttcctccctggatattatgaacaatatcacaaagtgtttttcactttctgctttattaggagtaatgtcttcctctccctttctggatattataaacaatataacaggttggtgcacaccattttcgatattgggagtaatatcctctttgcacttgatattacaaacaatattaaagagggtgtacacaccctgcgatakagggagtaatatcatcctcacacccccaaatattaagaacaataccccagggtgggatattagaagtaatatcatcctctctccccctggatattacaaaaaatatcacggtgggtgtacaaacagggtgtttagaatattgggagtaacatcat

SEQ ID NO: 399877 - DNA, 571 bp, Homo sapiens
atcagtaatacaaatggcaatggaatttgaggaattctttcatttttttctagaaacaacaggcactttgtgtgattggtgctattttagatttctttgaatgtagacaagtaaacagagttgaattwaagatgtagtattcaaaaatgcatttagcgatcatttaattaatatttcttatgccagaccagagggctaatgaaaatgtataaaacagattattctcacctgaagatacaaagtcctacatgattcccaaagctaggcaggtttgtgtacatggcaagatatggagtaaaagaaataaatggaaactatcaacaggataaacagacaacctacagaatgggagaaaatgtttgcaaactatgcatctgacaaaggtctaatatacagtatccacaagcaacataaacaaatttacaagaaaaaacaaccccattaaaaagtgggcaaaggacatgaacagacatttttcaaaagaagacatataagcagccaacagtcatatgaaaaaaactgaacatcactgatcattagagaaacgcaaatcaaagccacaatgagatac

SEQ ID NO: 399878 - DNA, 631 bp, Homo sapiens
caggcctacttacagaaaagattaagaatattgtgaagagatcttgtatacctttcatccaaattccataattgtctccttattatmatttactttgttatttctctttctttctctcaaatatgtacattttatgcattttcctaatgatttgagatggcccttaacacctaaatatttcaacaaatatttcctaaaacaaagatcagtcttttacataaccacagtccagttagcaaaatcagaaaatcaatattgatataatactattacacagttgactgacactttttctattttgctgctgtttcaaaagtgtcatttagagtactattacaacaacaactaataataattccggtcacgaatgcaactgtagtgagattattttgtacaatttcattttctaattgtttgttgctagtagatagaaaaacagttgttttttgtatattgattttatatactataaccaatgtaaactccttcattagttctaatagttttctggtagattccatcattttttatataaatgaccatttaatctttgactaaaaatggctttacttatttgttttccaaactggatgctttttgtttctttttcttgccttactacactggccag

SEQ ID NO: 399879 - DNA, 623 bp, Homo sapiens
gggattgatgtgttaaatgtcactaccatcacattctttttgtcagagtcaacttatgcgctttttaatttaaatggtgtggctggtccatagaagaaaaagtacggcatcccagaatttgatgatgagttcagaaaaaaattgccttcagaagcaaaaattcactaaagtaaatacataatattgaagattagttgtttaatccaatcagagtaatttgttaatggcttttgaggtgtgtgtgtgggggtagttttatcagtatcagtatttgtttttctattcattaaayacacttcctcttcagacaaccatagaccatacttctgaagtagacagctctgttttggcatgctatctgcagtcatgaaacaagataaagatcattggtctgacctttggcctcattagacaataaaattggactgattgacaaaactcaataaagaatagatttaagcacagtgctaatgaggccatgatcacaaattttacacaggaccactgattttattttatcttatggccacaggatgttccccaacactcaaagtgtttcctcttggccataaaaaaaagcctgcataatgagcaggaacagaccacagcaaatccatcacatc

SEQ ID NO: 399880 - DNA, 623 bp, Homo sapiens
gggattgatgtgttaaatgtcactaccatcacattctttttgtcagagtcaacttatgcgctttttaatttaaatggtgtggctggtccatagaagaaaaagtacggcatcccagaatttgatgatgagttcagaaaaaaattgccttcagaagcaaaaattcactaaagtaaatacataatattgaagattagttgtttaatccaatcagagtaatttgttaatggcttttgaggtgtgtgtgtgggggtagttttatcagtatcagtatttgtttttctattcattaaatacacttcctcttcagacaaccatagaccatacttctgaagtagacagctctgttttggcatgctatctgcagtcatgaaacaagataaagatcattggtctgacctttggcctcattagacaataaaattggactgaytgacaaaactcaataaagaatagatttaagcacagtgctaatgaggccatgatcacaaattttacacaggaccactgattttattttatcttatggccacaggatgttccccaacactcaaagtgtttcctcttggccataaaaaaaagcctgcataatgagcaggaacagaccacagcaaatccatcacatc

SEQ ID NO: 399881 - DNA, 384 bp, Homo sapiens
acttgtctgtgagtcagcccaggcacaattcctctgtaccttctgactcaaagtggcatgcatcagtcagcagcattgacttcacttgggagttggttagaaatgcagaatctaaatccctttccagacctactgaaacagaatctgaatttatcaagattccstgtttggtatgtttgcatattcaagtttcagaagcactgggttagaccccaaaatttgtagcatcaactcttacatctcttataacatctctaggattgttgtattgttactcataagagtaaataaatatcttcctggaacagcagtcaacattcttcacttaatgagtatgatagcatctcatgaaattgtaataaaattaaaaacaggtgactactc

SEQ ID NO: 399882 - DNA, 384 bp, Homo sapiens
acttgtctgtgagtcagcccaggcacaattcctctgtaccttctgactcaaagtggcatgcatcagtcagcagcattgacttcacttgggagttggttagaaatgcagaatctaaatccctttccagacctactgaaacagaatctgaatttatcaagattccctgtttggtatgtttgcatattcaagtttcagaagcactgggttagaccccaaaatttgtagcatcaactcttacatctmttataacatctctaggattgttgtattgttactcataagagtaaataaatatcttcctggaacagcagtcaacattcttcacttaatgagtatgatagcatctcatgaaattgtaataaaattaaaaacaggtgactactc

SEQ ID NO: 399883 - DNA, 384 bp, Homo sapiens
acttgtctgtgagtcagcccaggcacaattcctctgtaccttctgactcaaagtggcatgcatcagtcagcagcattgacttcacttgggagttggttagaaatgcagaatctaaatccctttccagacctactgaaacagaatctgaatttatcaagattccctgtttggtatgtttgcatattcaagtttcagaagcactgggttagaccccaaaatttgtagcatcaactcttacatctcttataacatctctaggattgttgtattgttacwcataagagtaaataaatatcttcctggaacagcagtcaacattcttcacttaatgagtatgatagcatctcatgaaattgtaataaaattaaaaacaggtgactactc

SEQ ID NO: 399884 - DNA, 613 bp, Homo sapiens
gccctgtttttctcttgcactgtgtatacacgctccaatttttatctgtgcatctgccttcctttagctttatattgaagtaagagaatttttaaatctcaattatgttttctcctaataccacaagacttaagaaaacaattgtcaaagggcttagcttaatccatcacataattcytttaagtatctagatagactgtggagccattgataactatattttacttaatatacttagttatctagtgtatcatctgtgtgacctctattggagaggctccaatcacttccctttttattcatttgtactagttttcttatcaaagattattttaagaaagcaacactgtatctcaaatgttttattttctaatcaaataggagtatctattgtactttcaaggactatttctcaggatacttattttttttatttcccagaatatttgtgggaaaaaaaaatctccttatacaatgatactaacacattgttttctttggatagcaaggacaaaatgtctgaacattgaccctaatttgtcatcagattaggctgtgatgcaaagaaagcaaagctctgttttaatagtcttctatgtgttagttcatgttc

SEQ ID NO: 399885 - DNA, 627 bp, Homo sapiens
agactgtggagccattgataactatattttacttaatatacttagttatctagtgtatcatctgtgtgacctctattggagaggctccaatcacttccctttttattcatttgtactagttttcttatcaaagattattttaagaaagcaacactgtatctcaaatgttttattttctaatcaaataggagtatctattgtactttcaaggactatttctcaggatacttattttttttatttcccagaatatttgtgggaaaaaaaaatctccttatacaatgatactaacacattgttttcttkggatagcaaggacaaaatgtctgaacattgaccctaatttgtcatcagattaggctgtgatgcaaagaaagcaaagctctgttttaatagtcttctatgtgttagttcatgttctatcataacaagctctcaaaatattattgatgtcttctcccatatcactggttaataggcatgtttagctgatgactcacctccacaacataatatctgtcagtgctgtcacttagcctagacctctgtctagagctcacccctcttttagtgttttaatttttttacatttttgcatgtaacaatcagttatatgtgtttttgtct

SEQ ID NO: 399886 - DNA, 538 bp, Homo sapiens
ctgtggaaaaactgtcttttacaaaactagtccctggtgccaaaaagattggggaccactgagctagatgaaaaggtggggaaatggcatttcaggaaaggagttaccaatgatcttattgtcaattcttagttctcattttactaaatctctcagcagcatttaatacatctcataattttcctcttcctgaaacatctttttctcttgagtcttatggcattctgtcttgggactcttccttcctcactcattgcttctcctggcaccgtaagaaatccctcctcacctcccttaccttgatatttggggtgccctaacgacagtcctctggctcattcatttctctataagcatttactctctaagtgatctcatctagctgcattctttgaacaccatttacatgtaaaakactgtcaatattgtatttcaggccgcattactctgactctaagctcatatatttaaatgtcaatttaacctctccactttcatatctgatagctatctcaaaattaacgtatccaaaagaaaa

SEQ ID NO: 399887 - DNA, 565 bp, Homo sapiens
tacaaacagggaacctgacatcactggacaacaaatttgggggaagtgaaggtctaaaactatataagatattgtaaagagtctatatatttagcttcagtatataattctcttcctatggttaaatcttactctggcaatgagagatgaataaccccagtgtggtacacaggtcaaarctggagacaaggctggagttttttacaaagaggcactacctccagtctgggaataaaatccctgtaacatttttagaatgaaagacattactctgaagtttaacagcccttgctagcagtatcatttttttaacaatacgatagaccctataccactgttgtctttttgtatatctgtgtcacatcccacttgaaggctggtgtgaagcatagtaactatataacctagcattcaccatatatttgttccttgattggattaaggacttagcaaaataaggcaatatgttagtagagccataaacaacatcctggattaataatcatgatcaggcataaaatgtcctcctatactttagagtttctcataatcttctgtctccaat

SEQ ID NO: 399888 - DNA, 583 bp, Homo sapiens
agctcattcatattttgattcaggcaaagagaatatgagcttaatctaaaacttaccatatagttgtgttatgaatttataagagcagctccataatttataggttgatgggacatatttccaaaacaacctggtatgactaatgaaaccgtgtgtcacagttcagcaactgaataggtaatgtagctacagggcttgatttctaaatcactgaactcatcatacatagataggagagactacatccctctgcgataaaaataaagatgaatgagcatgtgacatgagcggcaatggcattaagattgaatagcatacacaaatactcatttacgtttttaagtttagaaaaggatacaagaaaccatatataaattttcataattggcagatattatccaggacagcttcctcaattcaaataaaaatgatgatgatgatgatggtgatgatgatgatggtgatgatgatratgatgatgatgcctgtcattgatcatttcctgcataccaggcaccattaaaagcattaacataattacactatgatactcaaaaatgaagagcaagatgatactagcttc

SEQ ID NO: 399889 - DNA, 583 bp, Homo sapiens
agctcattcatattttgattcaggcaaagagaatatgagcttaatctaaaacttaccatatagttgtgttatgaatttataagagcagctccataatttataggttgatgggacatatttccaaaacaacctggtatgactaatgaaaccgtgtgtcacagttcagcaactgaataggtaatgtagctacagggcttgatttctaaatcactgaactcatcatacatagataggagagactacatccctctgcgataaaaataaagatgaatgagcatgtgacatgagcggcaatggcattaagattgaatagcatacacaaatactcatttacgtttttaagtttagaaaaggatacaagaaaccatatataaattttcataattggcagatattatccaggacagcttcctcaattcaaataaaaatgatgatgatgatgatggtgatgatgatgatggtgatgatgataatgrtgatgatgcctgtcattgatcatttcctgcataccaggcaccattaaaagcattaacataattacactatgatactcaaaaatgaagagcaagatgatactagcttc

SEQ ID NO: 399890 - DNA, 596 bp, Homo sapiens
gctaatgccaatttgaagaatggtaatttattagtttaaaatgaggagatatataaattaagaagtctttcccagttatgatgcatatcataacacataaagtataacatatattctctgctttcaaagctatccctcttcctcaggccagaatctatgtaaacaatatgcagatctatcaagcaaatactgaagggcacagaagagataaataaatcttatacttcatttgtggtcctgtttaggtcatatgtagaaagattaatgaataaataagtttaaaatctgtcattaggtaaatcaaataatttaaacttttttcaaagaagccctagaatgccttccatcaagaataccaatctagtactatttcaagctccctgcatttgtgttggtcaacatctcaggatgctaatgagagaacacacacaccatattctttgagcatatactttagaatcctttgctataactgggcagctataactarctatttaataaatgagacaaaaagtattatttaatttctttcaggaacattttacagttttcagggaacaaacattttcccttcttagtttaactatttttttgtg

SEQ ID NO: 399891 - DNA, 602 bp, Homo sapiens
tgctataactgggcagctataactagctatttaataaatgagacaaaaagtattatttaatttctttcaggaacattttacagttttcagggaacaaacattttcccttcttagtttaactatttttttgtgatgttattgtaaatggaatttttttcttaattttcttttcagaaagttcattgttagtatatagaagtgtaattgacgtttgagtgttgrttttatattctacaactttgctaaatttatttatagtcataacagttttttgtaaaatctttagggttttctacagttgttcatgctacctgcaaacagagacaatttcactatttcctttccaatttggaggccttttatttctttttcttgcataaatttttctggctagaactttcagtactatgtaaaagagaagaagcaagaggaaggcttccttgccttattccttatcttagaggaaaagcttttcatttttcatcactgaatatgatgtgagctgcaggttttaatatatggtctgtattatgttaaagtagtttccttttattcttggtttgttaacagttttcatattgaaaacatgtcaaattttgtca

SEQ ID NO: 399892 - DNA, 533 bp, Homo sapiens
gtaaaaaaaaaaatttcttatactttgattgtatctattgtcatacatatattgtattaattagatgactagtaatagtttacattgcagccaaaaacttagaggtgctaccgtaatctaatgcaggaacagaattggaaccccaggcatggaggggatcaagtttgctaggcaaattatagtgctaagaaagataaacatatatggacacacttttttttatttcatttttcagtatcttctttccatttctgtacttttggctcttctagaatagcaaaatattctatttttgtcttcctaaaaaaatgtatgataccatacacagaataactgctttttattaaggagttgagctacattcatcactcattattttatgacactggrgtcactctctcagaattttgtataataaagattgcaataaggattaaatgagattatgcaagcaaaaaagtgcttcattttctacctggcatagaatgaggttctcaataatgctaagttacttttctctctgctgtggcatt

SEQ ID NO: 399893 - DNA, 624 bp, Homo sapiens
ctcagcaaatttcaagtaaacaatacggtattagtaactatattcaccatgctgtatgttagatccccaggacttactcgtcttgtaattgaaagttctggattaatgtatttgaacattaacttgtaaatcatttttttgagaaaacctaaagtgttctagaatgctatattttaaagaagaattctcaaagtttatttatttattttttagcttattttctttatggctgccccayagccagccccctagcaactgtctgctcttcggcctgatgcaaaatgtcaggtcacttgctgggaacagagtttggagggcgggggtctggaaatgaatttagagccgtaggatgcaggttcacattttctcctggatcagctatgtttctccaggcttccgggtacggatcttcagggaagaagtagctaggcactcccaagaaagctctcagtctcttcaacttcctcatttcagcttccctgcactctggaattaaacttttgtgcagccaggctgtgagaactgatgcataaatcatgagatagggctttattagggggagtaaagaattctctcacatggaaaatgttcacaaacagatcctcaacagttgtttagaatgcc

SEQ ID NO: 399894 - DNA, 492 bp, Homo sapiens
ctataattgaacttaacctagaaaagcattttgcatgtttagcttttaagtgtgtttgacagaaaaggagaaaggaacctgaaataagaaataatytagtgataaaattgttgatgttctccttcactgtaatccattccaaatatagtttattttgctacagagcatgttctgtaatgtaaatggaaataagattgttaaagagggaatgatgtgaacataacttgggtgatgagaaggctcctaagggattttccccctgcattttgcactgccagcatttacactgcagcagagtgcaaaatatgctaacaaagctgcatacagcaaaccttagaagaatacagtactgtacaccatgtccattcatcctatcttcccaggaggttgatcatgtgcaaaagaaacaatgacaagataatgatccaaaatcaccagccatatctttgctgtggtatgtgtgaaacttgcatctacttattacataaaatg

SEQ ID NO: 399895 - DNA, 614 bp, Homo sapiens
gaacaaaattaaaaaaaaaacaaaaactgagaagttgcggtgagttctgaggcagtacggtgtggcatgagaatgcaggctctgaatctacagactgcctggttcaaatactagctctgccaaaaactagttacataaatggagcagattatttaacctctctttatgcctcaattttctcatttacaaaattgttgttagcattaagtgtgttaatacttataaaatacttcatatttatatgtatgaagtattattactgctttaaaatacmattgactgatcacattattatacagtacatatcttctactgatatatgagttccttgaagtaagacctatgtcttattgctgttacatcttcaatgcatgaaacataagaaatgttcaatcagtgctagttgaattgaattaaattttttaattactattttttgttttcctttgactagataatttgtttggagattcttccaaagataatcacttttcttcctgtgcaacctatatattttttaaaactattttaaattatttagttttagaattctttcttatctctaaaatgtaaaaagatatcaacagatagcatcaacaaataggtatcagatg

SEQ ID NO: 399896 - DNA, 558 bp, Homo sapiens
gacctcaattgatcctcgcactttagcctcccaaagtgctgggattaccggcatgagtccttgtgcctggccctacaaagtttttttttgtttgtttgttttttttttttttttttttttttgagatgggggtctcactctgtcgccctggctggagtgcagtggcgcgatcttggcttactgcaacctccgcctcccaggttcaagtgattctmctgcctcagcctcttgagtagctgggactacaggctcacgccaccatgcccaggtaatttttgtatttttagtagagacagggtttcaccatgttggcccggattgtctcaaactcctgacttcgtgatctgcccacttgggcctcccaaagtaatttttaaataaaatttagttaaaacgaaaaccaaacacttcccattaaagatgatacactaaatttgctgtttgtttttctcactgcatgatatgtaatttactcttttgaaagtatagacatttgaaacacatcaggagtctaatacttcacttgctttcaaatttattttcacttaaagaatgaaa

SEQ ID NO: 399897 - DNA, 558 bp, Homo sapiens
gacctcaattgatcctcgcactttagcctcccaaagtgctgggattaccggcatgagtccttgtgcctggccctacaaagtttttttttgtttgtttgttttttttttttttttttttttttgagatgggggtctcactctgtcgccctggctggagtgcagtggcgcgatcttggcttactgcaacctccgcctcccaggttcaagtgattctactgcctcagcctcttgagtagctgggactacaggctcacgccaccatgcccaggtaatttttgtatttttagtagagacagggtttcaccatgttggcccggattgtctcaaactcctgacttcgtgatctgcccacttgggcctcccaaagtaatttttaaataaaatttagttaaaacgaaaaccaaacacttcccattaaagatgatacactaaatttgctgtttgtttttctcactgcatgatatgtaatttactcttttgaaagtatagacatttgaarcacatcaggagtctaatacttcacttgctttcaaatttattttcacttaaagaatgaaa

SEQ ID NO: 399898 - DNA, 307 bp, Homo sapiens
aaaacagacaagttctaagtcccatggaaattttattttagtgggaggacacagattgtaacgagtaaccaaataaatatataatacgtgagaggtgataagcgttatgtagaaattaagcaggattaagaggtatagtggaaatgactgtaggttaagagggaaagggtgaaaawtcagagatgttctttcagtcaagaacaaggcaagtattaaataaacttatacttaggtctactgttcttaatatgttccagctcctgcatggtccctgttgagcacacacgagcaaacaatgaccaccttc

SEQ ID NO: 399899 - DNA, 583 bp, Homo sapiens
ggatttgtccttaagattttaaaatgtaaacatagattaaggccaaagatagaaattgttcaatgtcatgaacacaatgttaaagcagacctttgaaaccggattttccagctaccagttaatattttagaattattaccatatttgaattattacaatatgatggcatttccttatttgggctttggcatctgacactaagcacagttgcatagtaggtctcaggaaacagatcctctgctagtagagattgactcattacaaaccagattgatttctaattccttcaaagcagtctataatcttaatttttcatcattcatatcacattgtcataactgccacatttcaaagaaaagtgatttgaatccccaggttctaaaaatggtggatatgctcagagaaattaaatcctcttgggrtctgttaattagccagttccacttatctgagaaaatgaaatcttaagaaaatctgatgctgcttggtatttggagtttgggaatttcagtgtaactaatgtcatgttgtgccaggattcactgtgtggaaccatgaagccagaacataatcaatgctgtga

SEQ ID NO: 399900 - DNA, 606 bp, Homo sapiens
atgggtgaactgaactcttatacactgaagttgagtatgtaaaggggtacaaccactttactggaccaatcagattcacattgaggtctcttttaagtttttagcctttttattccttcaatatcaaaaagctatatatatatatatatatatatatatgtctgtgtgtgtatacatatatatatakagagagagcaatatatatatgtgagtgtatatatatatatatatatagagagagagagagagagagagacagagttcttcaatctgaactaaattacagtagcctcccctcttctgcaagggatatgtttcaagacctcaagtggatgcctgacactgcagatagtaccaagccttacaaaagtactatgcttttttcttatataccaatgacaaagtctaacataaattaggtactctaagagactagtaataatgaataataaaatagaacaatgataacaatatactgtaataagagttacgtgaatgtggtttctgtcccaaaatatcttattgtactgcattcacccttcttgtgatgatgtgagatgataaaatgcctacatgatgagatgaagtgaggcaaatggcgcaggc

SEQ ID NO: 399901 - DNA, 583 bp, Homo sapiens
gtaaaatattctggcaaatcaatatctttacttaacacaatctctggagtccattacttattactttgtcgtatgattgggttcctgctgaatctcaccaaatcgcaccaaaagggtgacaaaacaacttcctgtaagcaaaggacaaacagttaagtaaggtaagtaaagggcaaaagacwtgtgccaggggcaaggaattggggagggccaggggcatgtagggcactccagggcagaccccggatttaaaaatacatttttaaatttgtataaaaatttaatgtagttggaggaatagaaaaagcacaaggacctgagaaagggcctttgcaggcaaaatttattgaatttttaagctaaagagagtgagaaaaaaaaacctctaagcaatacaaacaaattaaggtactgtgtatgttagaatgttaagaagtgcaaaggatttggaaaacattgctgcagagcctgagaagcatttgcaggttgaggttacttgtgtctcagaatccattgtaaacaaaacataggaaagataacagagtcatggatctctatggctctgtgactttaggcaatttca

SEQ ID NO: 399902 - DNA, 561 bp, Homo sapiens
ttggtgccatatagaagaggcaaagccaaaatttaatacaggtttttttgaattctaaactcatgatctttccatttcacaatgctactcttctgctttaatccatgtaaacttgtacctacagcatattgagtagctcatagttagtatagttgtttttagcttggtattttgatgttttaaaaacttttaatttcatatatttttcacacttttaaaatttgatacttaccccttttaattcctctctagtttgttaaccaaaatatttaacaaagaaatccaccaagctttaaggaactataaacccataaactttttttttctttctttttttttttttttaatttacagagtctcgctctgttgcccaggctggagtgcagtggtacaatctckgctcactgcaacttccacctcctgggtttaagcaatcctcccgcttcagccccccagggagctggaactataggcacaagccaccaagcctggctaattctaatattttttgtagagaaatagttttaccatgtagcccgggctggccttgagctcctgaag

SEQ ID NO: 399903 - DNA, 658 bp, Homo sapiens
tcaatatatgaatggtagttcaggaaaagaaccacgtggaaggattcaagggaacaacactcagagaccacacagggtcaaaacagaacccaggatcaaaacagtgcctctatgcaacagccagactagaaaacctcataatttagagggcattggcaagaagtactagctatggggaaagctgaggtgggaggcttgcttgggcccaagatttcaaggctgcagtgatgataccactgtactccagcctgggtgacaaattgagaccttaaaaacaaaaatcttgcctcattgttggagaaatattagccttagttcttctctggtctaacattaaaactaaagcccaaaaggatcaaactcttgccaaataaccacatgcagaacaaaagtcaagaatattcacaagaatatgaaaatatctaggcataaaagggttaaattcacactggcaactgaactaaaaaaattgcaatacctgcaagaagcatgaaaatataactcatgagaaaaattgttccactgaagctgaattaaaaatgaagtgaaatggtataataycactgccttatttttataatattctgaggtattagaaattgagactttttttcagtggggttaattaagcatggaaaaggaaatggtgattaaatgt

SEQ ID NO: 399904 - DNA, 664 bp, Homo sapiens
caatgagctgtttttctttatattgaattataaatattccaattaatttatctgcaataaatatgcattcatttataattataaataaatcccaacgaaagtaatttatttgttttaaaaactattaaatactgggacctagggtagaaaattctactctctaaatgtgcttcctttctctgaaatttatataccattcagtggctaatgtgagttctttgtgggtcaggagaggttaaatatttcaaattaaatacagcagaatttgtcttggtttaaagggtcattttgagatacacattgtgtcaattcaaagatctgacaatttccccctgtcaaggagtctctcctgccatcatccttccctgaatgtgttcaggatgcagaaggaataccatatgtctaggatgagagagtcttctccaggttggtctatgaatacactgtcttgtgccactgatttctgagtattggcctctcttttaattttattattactcagatatggtaaagccaacagatcaayaggtaattcccattgaaaagatagtttgttactcacagttccaagagaaggggacacgtcacttcacatgggtggccacatgggtaagtaccagggtcaggaggtaagggaattgaggaaaaagcaagggcaagagcc

SEQ ID NO: 399905 - DNA, 461 bp, Homo sapiens
catattcttgtcttctctaacaaaggcattataccttttgctatggactggattgtgttctccttaaaattaatatgtgaagtcccaactcccaatacttcaacatgtaactgtacttgaaaatagrgcctttaaagaggccaatgggggggcctgaatctaatctgactgatgtccttatgaaaaaagaaaatttggacatacaaagagacacaagagatgcatgcacacagaagaaagaccacgtgaggctacagtgagaagctggccatctgcaagccaagaagacaggactcagaagaaaccaaccttgtcaacatcttgatcttggactcgtagcctccagaagagtaacaaaataaatttctgttgtttaagccacccagactatagtattttgttatggcaggctgagcaaactaatacattcttcctaaaaagatcctccagtcttccctaat

SEQ ID NO: 399906 - DNA, 588 bp, Homo sapiens
ttgctataattatagttatttcaaaggactaatatattatcttggattggaagcaactacagagaagaaaaactatgtcaattaccataatacctagacaagattttagttgatgttatcaattgatggtctartgcttcactttatttatttattatttttattattctttatttgaaacctattatgtacctttaggcagttcaggtagtttcccaatttagaatcaccacaatgcctggcacatagtaaatgttaaataacgtttgctataattatagttatttcaagaactaatatattatcttctattggaagcaactacagggaagaaaaactgtgtcaattactgtaatacctggacaagattttagttgatgttatcaattgatggtctaatgattcactttatttatttattatttttattattctttatataaaacctattatgtatctttaagcagctcaggtagtttcctaatttagaaccacaataaaatgttctgtatgagttgataaaaattttgcttcccaaattatttcctccacagcttttagcattaaagtacaatttgctttccatga

SEQ ID NO: 399907 - DNA, 546 bp, Homo sapiens
accaggtatctaagcttgggcaaattattacacttctctatgcttccttttcctcatctaaaaatggtgataaccacagtaactgcctcatagagctcttgcaagaattttaaagataatagtcaactcatgcaaattgcttacaacaatgcctggcacatagtaaatgttaaatagtgtttgctataattatagttatttcaaaggactaatatattatcttggattggaagcaactacagagaagaaaaactatgtcaattaccataatacctagacaagattttagttgatgttatcaattgatggtctaatgcttcactttatttatttattatttttattattctttatttgaaacctattatgtacctttaggcagttcaggtagtttcccaatttagaatcaccacaatgcctggcacatagtaaatgttaaataaygtttgctataattatagttatttcaagaactaatatattatcttctattggaagcaactacagggaagaaaaactgtgtcaattactgtaatacctggacaa

SEQ ID NO: 399908 - DNA, 605 bp, Homo sapiens
ctttttgcaactggcttatttcatttagcagaatgtcctcaaggttcatctatgttgtcaaaaatggcagatttccttcttgtttaaggctgaatagtattccattttcagagaactatcattgttttcagtagtgtaccacattttctttatgcattcatctgttaatgggcatttaggttatttccaaatcttggctgctattcttttatgttttctaaattatcttagggcaacgtttttgtctttattttggtcttttgtgtatgtgtggctctttttacatgcctgttgaccctcattgcctatttatatttaagtctgaaaccatgkgctgattggtctaggtaggttcatgtggctctctgctgcattgcataaaaaggtatgttccccagtgggtcccttggagtagaaagtcactggagagtctgggtattactggggctggtcatgtccctggcagagtttgctgtaaagtgagagagaatgttttcagcattctaatgagagggaatttcatttgagacactaacactcacagaagtttgactttgcttatctttaaatcagaggcttgttttttctgcctgcaggaaaacatg

SEQ ID NO: 399909 - DNA, 579 bp, Homo sapiens
gttagctaacccagaatataaccaccagttagactgagcctttggaggctcagtgataaacgggatttggatttgggaccatcttgcagtagaaatgttaggcccatgtgtttattctatagatatttttgaagtttagtgtacattaacaaaataaatatactcagctatgggcagaatcagcatcagctacatgtggctctgtgtatttttttttktgtgtgtatatatattcatttaattcacaacttataaagcagagcccactgatttttcattttacagataaagaaattaagacccagaatgaataagtaacttgctcctaaggtcacaagccaagtttgtggcagagatggtgatgctcccagcagcctgtctggagcagccactgcagggatgccagttgcagcaggggaagggcatccagggctgtgctctctatggagctggtgggaggcaggaacaggtgggagccacgccccctactgagttggcagggtgggagccccaagcttctgggtgcagctgcagccacccagccacggctcctgacctgggcatccttgcactcttggg

SEQ ID NO: 399910 - DNA, 565 bp, Homo sapiens
tgagatataatttacatataatgcaacacttgtaagtgtacagttcaatgagttttaacaaattatgaaactgtgtaactaccaccacaatcaagacacagaaaatatacatcacctaagagtttctcctgtaaacttttagacttaattctccccactttgcccctgatcccttcagctccaaacactagccagttctgaatttattgatttatttagagactgagtctcgctcttgttgcccgggctggagtgcaatggcctgatctccacttaagggaggagaccacctctcatattatcttatgcccaatttctgcctccaaagaaagaaaaagtaaaaactaaaaggcagaaatgaaatcckcaagcagacagcccagcgccacaccctgggcctggtagttaaagatcgacccctgacctaatcagttattttatctacagattacagacattgtatagaaaagcactgtgaaaatccctatcctattttgttccgatctaattatcggtgcttgcagcccccagtcacgtaccccctgcttgctcaatcgatgacgac

SEQ ID NO: 399911 - DNA, 565 bp, Homo sapiens
tgagatataatttacatataatgcaacacttgtaagtgtacagttcaatgagttttaacaaattatgaaactgtgtaactaccaccacaatcaagacacagaaaatatacatcacctaagagtttctcctgtaaacttttagacttaattctccccactttgcccctgatcccttcagctccaaacactagccagttctgaatttattgatttatttagagactgagtctcgctcttgttgcccgggctggagtgcaatggcctgatctccacttaagggaggagaccacctctcatattatcttatgcccaatttctgcctccaaagaaagaaaaagtaaaaactaaaaggcagaaatgaaatccgcaagcagacagcccagcgccacaccctgggcctggtagttaaagatcgacccctgacctaatcagttattttatctacagattacagacattgtatagaaaagcactgtgaaaatccctatcctattttgttccgatctaattatcggtgcttgcagmccccagtcacgtaccccctgcttgctcaatcgatgacgac

SEQ ID NO: 399912 - DNA, 610 bp, Homo sapiens
gcaagcaaaaagcaaataacccaattaaacagctggcaaaagacatgaacagacactacccaaaataatttatacaagtggccaataaacatgaaaaactgctccacatcaatgatcatcagagaaatgcaaagcaaaaccacaatgagatattatgacacaccaggcagaatggctattatcaaaaagtcaaaaaacaacagatgatggtaaggctcctgagaaaagggaacaattacatactgctaatgggaatgtaaattagttcaactactgtggaaagcattctggagatttctcarataacttgaatcagaactgctattcaacctactaatcccattactgggtatatgtccaaaaaaaataaatcgttctactacagagatacatgcacacatatgttcattgttattcacaacagcaaatacatgaaattaacctagaggtccattaacagtagactagataaagaaaatatggtatatatgcaccatgggatactacgcagctattaaaaagaatggaaaaatgtctcttgcaacaacacggatggagctggaagccattatcctatgtgaattaatgcaggaacagaaaatcaagtaac

SEQ ID NO: 399913 - DNA, 610 bp, Homo sapiens
gcaagcaaaaagcaaataacccaattaaacagctggcaaaagacatgaacagacactacccaaaataatttatacaagtggccaataaacatgaaaaactgctccacatcaatgatcatcagagaaatgcaaagcaaaaccacaatgagatattatgacacaccaggcagaatggctattatcaaaaagtcaaaaaacaacagatgatggtaaggctcctgagaaaagggaacaattacatactgctaatgggaatgtaaattagttcaactactgtggaaagcattctggagatttctcagataacttgaatcagaactgctattcaacctactaatcccattactgggtatatgtccaaaaaaaataaatcgttctactacagagatacatgcacacatatgttcattgttattcacaacagcaaatacatgaaattaacctagaggtccattaacagtagactagataaagaaaatatggtatatatgcaccatggratactacgcagctattaaaaagaatggaaaaatgtctcttgcaacaacacggatggagctggaagccattatcctatgtgaattaatgcaggaacagaaaatcaagtaac

SEQ ID NO: 399914 - DNA, 553 bp, Homo sapiens
aataagcattttattttccttccttcttgctcttagaaattccagatttagcacaaatagttttaatattyacatatgatatatgatctgcttattcttttatgtgggctctatgattatgatgtgtgtattagagttctctggagaaagagaagccatagggtaattgatagagcaagaaagggggggagagagaaagagtgtgtgtttgtgttatgtgtgtgtgtgtgtgtgtgtgtgtgtgagagagagagagagagagagagagggaagacagaagacagagtaatatttattacaaaaatttggcttacataattatggggactgtcacatcccaagatctgtactgcagttggcagactgtcgactccagagagccaatgaagtacctttaacaggaagcttggcaagctcaagacccaggaagagccagtgtttcagtttgcatccaaaggcataaaaaacaatgttccagcttaaaggcagtcaggcaggaggagttttcctttattcagcttttatgttctattcaggccttcaactgtttgga

SEQ ID NO: 399915 - DNA, 553 bp, Homo sapiens
aataagcattttattttccttccttcttgctcttagaaattccagatttagcacaaatagttttaatattcacatatgatatatgatctgcttattcttttatgtgggctctatgattatgatgtgtgtattagagttctctggagaaagagaagccatagggtaattgatagagcaagaaagggggggagagagaaagagtgtgtgtttgtgttatgtgtgtgtgtgtgtgtgtgtgtgtgtgwgagagagagagagagagagagagggaagacagaagacagagtaatatttattacaaaaatttggcttacataattatggggactgtcacatcccaagatctgtactgcagttggcagactgtcgactccagagagccaatgaagtacctttaacaggaagcttggcaagctcaagacccaggaagagccagtgtttcagtttgcatccaaaggcataaaaaacaatgttccagcttaaaggcagtcaggcaggaggagttttcctttattcagcttttatgttctattcaggccttcaactgtttgga

SEQ ID NO: 399916 - DNA, 671 bp, Homo sapiens
agtagttccccattgacatttagattagcaagtaatttattgtaaactaagacccgtgattttcactagcacaaatgggtcaagtagagaaataacagtggaaagattattgccataaaaacacactctacgtaccttaaattctakcaagattaaaatcatatgtctttttatagattgcatagccttccactctgaagctgcatgatattgggaaaaacaactcatgaaaagtagctatgagactgctaaggccttgattctagcagatagttaatagatagcaccaaaaaaaagtttaatttttaaagaaatcctgagaaaaatattgtaacataagcaaaatcttctttaaatcacagttattattccaggaataataccactactacattaaaagaaacatatatgtggtgcgcattctcctcaaataagttcatagtttctctgtagatggttcttttaattattctaggcagtgaattattaatatttgttagagcaattgattttttcagaaaattaaagagaattaatgttggcatacatacaaataacttacaaacaacgcaaacaattgccacggaacaataattataaagagacagctttaaaaagtgatgtaatgaaaatctcatgtcctgttattggaatcatacctgtttgtgaag

SEQ ID NO: 399917 - DNA, 556 bp, Homo sapiens
acattggtacagtctgaaaaggagggacgacttgaagcaaaggcaaaaagactccaagtagggagggagcttccaggtcacagataggtggtacacaaacagttacattcttttgagtttctggttagcctttccaaaggaggcaatccaatatgcaactatctcagagagcagaggggtggctttgaatagaatgataggtaggtttgccctaagcagtttccagcttgagttttccttmatgattttgggatcccgaactattttcctttcacatttccccccttttcttttaaaaaattttgtggagaaagaattttacaagaaaatgagtctctggtctcaggtttcatctgatctctcatggctacgatggtttatgcctagatggggaggtcccaaaagctcatcattagcaggttgtgaagtctcatgttctgtgaaggtaaaatagggaggaggaagggagaaacaacaacaacaaacaaacaaaaaatcttggaaaaattgatatagggcatattactctgaagcccatacattagtaggcaggtat

SEQ ID NO: 399918 - DNA, 553 bp, Homo sapiens
ctttgggttactgttgagaagggataattgtattttaaaatgtgagaaggacatgagatttgggaggggtcggggcaaaatgatattgtttgtttctgtgtccccaaccaartctcatgttgaattgtaatccccatgtgtcagggctgggacctggagggaggagatcagatcatgggagcagattcccccatgctgctcttgtgatagtgagtgagttttcacaagttctgatgatttaaaaatgtggcacttcccccgctctcttctgccgccttgtgaagaaggtgcttgcttctccttcaccttctgtcatgattgtaagtttcctgaggccaccctagccaagcagaaatgtgagtcaattaaatatattttcgttataaattacccattctcagatagttctttatagcagtgtgaaaacagactaatgcaatcattatcaagtattctgtactgtatgtaattgaatgtgacatcacttttgtacaactggcaatacaataagcttgatttcactaacatcaccacaaaaatgtgagtttttcat

SEQ ID NO: 399919 - DNA, 553 bp, Homo sapiens
ctttgggttactgttgagaagggataattgtattttaaaatgtgagaaggacatgagatttgggaggggtcggggcaaaatgatattgtttgtttctgtgtccccaaccaagtctcatgttgaattgtaatccccatgtgtcagggctgggacctggagggaggagatcagatcatgggagcagattcccccatgctgctcttgtgatagtgagtgagttttcacaagttctgatgatttaaaaatgtggcacttcccccgctctcttctgccgccttgtgaagaaggtgcttgcttctccttcaccttctgtcatgattgtaagtttcctgaggccaccctagccaagcagaaatgtgagtcaattaaayatattttcgttataaattacccattctcagatagttctttatagcagtgtgaaaacagactaatgcaatcattatcaagtattctgtactgtatgtaattgaatgtgacatcacttttgtacaactggcaatacaataagcttgatttcactaacatcaccacaaaaatgtgagtttttcat

SEQ ID NO: 399920 - DNA, 538 bp, Homo sapiens
ctcaaattttttgattacattaatttatataataaaacacaccaattaaaaatgattttggacaacaaaactcgagatagtcttaagctaaataacagattacattactttatatacagcatcttcttatttttgtgaatttatatatgtcaaartgatgcacagattattattctgtatctaattatgtagtctaaatattttaaaatttggctaaaatacaggaaaaagtgaccagtttctcataaatgtgtttaatgtgtacttcctaatagcctcggtttcttatattatcaaagctcttatacatcgacaagtagataaatgtagaacccagtatacacttataacatgactgcagagggcctagaaagttgtctcctatactaaaaatcatgaaacataataataacagcaacagcagtggcaacaacatattgctatctccacatcaccaaccttctatccactatgaattgttcatgtaacttgattctatagcatttacttctattaacaagtaattaacaaagaggaa

SEQ ID NO: 399921 - DNA, 538 bp, Homo sapiens
ctcaaattttttgattacattaatttatataataaaacacaccaattaaaaatgattttggacaacaaaactcgagatagtcttaagctaaataacagattacattactttatatacagcatcttcttatttttgtgaatttatatatgtcaaagtgatgcacagattattattctgtatctaattatgtagtctaaatattttaaaatttggctaaaatacaggaaaaagtgaccagtttctcataaatgtgtttaatgtgtacttcctaatagcctcggtttcttatattatcaaagctcttatacatcgacaagtagataaatgtagaacccagtatacacttataacatgactgcagagggcctagaaagttgtctcctatactaaaaatcatgaaacataataataacagcaacagcagtggcaamaacatattgctatctccacatcaccaaccttctatccactatgaattgttcatgtaacttgattctatagcatttacttctattaacaagtaattaacaaagaggaa

SEQ ID NO: 399922 - DNA, 538 bp, Homo sapiens
ctcaaattttttgattacattaatttatataataaaacacaccaattaaaaatgattttggacaacaaaactcgagatagtcttaagctaaataacagattacattactttatatacagcatcttcttatttttgtgaatttatatatgtcaaagtgatgcacagattattattctgtatctaattatgtagtctaaatattttaaaatttggctaaaatacaggaaaaagtgaccagtttctcataaatgtgtttaatgtgtacttcctaatagcctcggtttcttatattatcaaagctcttatacatcgacaagtagataaatgtagaacccagtatacacttataacatgactgcagagggcctagaaagttgtctcctatactaaaaatcatgaaacataataataacagcaacagcagtggcaacaacatattgctatctccacatcaccaaccttctatccactatgaattgttcatgtaacttgattctatagcatttacttctatyaacaagtaattaacaaagaggaa

SEQ ID NO: 399923 - DNA, 382 bp, Homo sapiens
gttcatgtaacttgattctatagcatttacttctattaacaagtaattaacaaagaggaaaatttttctcattttaaaataaaaataattttcagaagagttacatgtcattaaaacaattgtataatatagtttatccaattacacttattraaacatttagtgggtactcactctatgcatgccactatgctggggccagagatacgaggataaatatgttgcattttttgcccttaaagttattatgatcttctataggaaatagagaaaaattgatcaattattatatacagcagcagtctccaacctttttgtcatcagggaccagtttgtagaagataatttttccatggaccaaggcatagatggtttggggata

SEQ ID NO: 399924 - DNA, 472 bp, Homo sapiens
aaggtgagatgcagagaattaaaatcatcatgaccttgtattgtgtgttaaaaagttargacatcatcctgatcatattttttccctctaataattttagctaagagtagtcattacgaaaaagaagactttcatgacttttatggggagaatgaggacagcactaacatttattgaagacctgttttgtctgatggttaggaagagtctgactccatgttttatatttgactgcacagtgtttaggctcctaccctgccctgcccaaacactatatatctggtactatagacaaataaacctgcatgccttttgagattttgggtcctgtggaaatttgaacttcacagccccagactgaatgtgagaactcctctccagccccactctctcgccattacaaaagtcaaaccaactctctgctcattgttcttgccgttctagccagatcagcttgcagttaccttgctct

SEQ ID NO: 399925 - DNA, 472 bp, Homo sapiens
aaggtgagatgcagagaattaaaatcatcatgaccttgtattgtgtgttaaaaagttaggacatcatcctgatcatattttttccctctaataattttagctaagagtagtcattacgaaaaagaagactttcatgacttttatggggagaatgaggacagcactaacatttattgaagacctgttttgtctgatggttaggaagagtctgactccatgttttatatttgactgcacagygtttaggctcctaccctgccctgcccaaacactatatatctggtactatagacaaataaacctgcatgccttttgagattttgggtcctgtggaaatttgaacttcacagccccagactgaatgtgagaactcctctccagccccactctctcgccattacaaaagtcaaaccaactctctgctcattgttcttgccgttctagccagatcagcttgcagttaccttgctct

SEQ ID NO: 399926 - DNA, 472 bp, Homo sapiens
aaggtgagatgcagagaattaaaatcatcatgaccttgtattgtgtgttaaaaagttaggacatcatcctgatcatattttttccctctaataattttagctaagagtagtcattacgaaaaagaagactttcatgacttttatggggagaatgaggacagcactaacatttattgaagacctgttttgtctgatggttaggaagagtctgactccatgttttatatttgactgcacagtgtttaggctcctaccytgccctgcccaaacactatatatctggtactatagacaaataaacctgcatgccttttgagattttgggtcctgtggaaatttgaacttcacagccccagactgaatgtgagaactcctctccagccccactctctcgccattacaaaagtcaaaccaactctctgctcattgttcttgccgttctagccagatcagcttgcagttaccttgctct

SEQ ID NO: 399927 - DNA, 550 bp, Homo sapiens
catgcgaccctataacacactattttgtctctaagaatttgattactctaggtatctcacgtgagatcatacaatattttcccttttgtgtctaacttattttacttagcataatatttctgaaagtcatccatgttgtaatacacatcagaattttatttcattttaaggctaaagagtagttcattagatgtatatttcacatattgataattcattcatatatatatagacacgtgggttatttccactttttggcaattgcaaataataatgctgtgaacattcatgtacaaatagctgttccagtccttcctttcaattcttttggatacatacctagaagtgaaatttctggatatayagtagttctgggttgaattttttcagtaaccactagaggtcttcaacagctgctacatcattttacattctcatcagcaatgtactagggtttcaatttctacacatccttaacaacttttttttagattagttttatttcatattgataatagccattataatgggtataaagtaatatgttatt

SEQ ID NO: 399928 - DNA, 631 bp, Homo sapiens
gtgtggggtaacactgcatcacttcttccatacatgcaaacactgatagttggaattgtcggttttcagaaaatgtgttttattatcaacatgtcatttatattattttcattgtttccaaaagctgattttctgttagtacagtttgtaaaaaactgttaagaaatacatttatattattgacaaaacaaaatattgtaaaattttatagtttatgaaaatttagaattttgtgatcattttgtgattgtatcatagtgacattgctattattgtgatcactgttttatcctcagttttttgttaccactggacagtaggagtgagtgaggtatgtaagcttcacggttttttatcctatttaaatgggcctatgtctcaaaatgtgagatttacygacctgtaggatttgaatgccatgttaaggagtatagaccatataacaaaaactatggaaaattcttcagtgtcttataaaatgaatagtagtatgctataacatgtcttagaagtgtgaagcactgtctaaatgagaaaggaccgattataatcatatagaccagtttcgagtggtagtaaaggggatgagtatgtataccagaattgcgacagtagggatttttaaatgagg

SEQ ID NO: 399929 - DNA, 631 bp, Homo sapiens
gtgtggggtaacactgcatcacttcttccatacatgcaaacactgatagttggaattgtcggttttcagaaaatgtgttttattatcaacatgtcatttatattattttcattgtttccaaaagctgattttctgttagtacagtttgtaaaaaactgttaagaaatacatttatattattgacaaaacaaaatattgtaaaattttatagtttatgaaaatttagaattttgtgatcattttgtgattgtatcatagtgacattgctattattgtgatcactgttttatcctcagttttttgttaccactggacagtaggagtgagtgaggtatgtaagcttcacggttttttatcctatttaaatgggcctatgtctcaaaatgtgagatttactgacctgtaggatttgaatgccatgttaaggagtatagaccatataacaaaaactatggaaaattcttcagtgtcttataaaatgaatagtagtatgctataacatgtcttagaagtgtgaagcactgtctaaatgagaaaggaccgattataatcatatagaccagtttcgagtggtagtaaaggggatgagtatgtataccagaattgygacagtagggatttttaaatgagg

SEQ ID NO: 399930 - DNA, 620 bp, Homo sapiens
tggggcttggcagctccatgaagggtttccagcttcctccttttttagcccaggatctgtgtcctccctccatccactatcaacgccttctctttgatgatctgtttggagtggaccagtccacctgatagcttgttctctcccagtgggagaagctcttcctggctctacckagttggccatttttactcccagtcttaactttttattggagtgtcatgactttgtttcttgggagcatttcaagcatcactagtggcacttcatataggtcccatagtgttattcaaagtttatggtattgtactaaacacgatgaaaaatacatgagaaccatgagagattagtttttactgtgatatgatatgcagtttactggagagacaaactgctcatgtagtgatgattaaatgtcacatgacattctaagcatgtactctcaacacctgagctcaccgcaacagtaatggaaggcagctataaaattatacaatagtacagtatctactacagttaattttatgttgtgatttagtactgcatctttacatttgtttacatttctctagactgctaatggctccatgtgcagtctgtgtgcatatgttttgataaatttt

SEQ ID NO: 399931 - DNA, 617 bp, Homo sapiens
aggagttgatgagtagggatactcgagaagggaaacttaaactttatctacaatgtcataacattaagaagacaatatgttcttttgttatatgtatggatttttttttttttttttttgagctggagtctcactctgtcaccaggctggagtacagtggcatgatcttggctcactgcaatctctttttcccaggttcaagagattctcctgcctcagcctcctgagtagctgggatttacaggtgcacaccaccacgcctggttaatttttgtatttttagtagagacgggtttcaccatcttggccaggatggtctcgatctcttgacctcrtgatccacccgcctcggcctcccaaggtgctggaattgcaggcgtgagccaccacgcctggtctatggtatggatttttaaaaagtacttacaaagcaacaaaagactggaagcataaatgttaaatgttaagggtaactaattctgggagtgacagaataaagataactgtcactttatgttttttaaaatagctttattgagatataattcagataccataaaattcattcatttaaagtgtatacttctgtgctttttagtacactcacagagttatgc

SEQ ID NO: 399932 - DNA, 564 bp, Homo sapiens
tgtgacctagtgagacatcagccaaagcaactaagaaagtggttgtgccatcccttccccaaccagagatagcacagtttttggctccaatagtgtcccctttattctgcttgaggagagaagaggaaagagtaaaaaccatattgtcatgcatcttggataccagttcagccacagtaggatagggcaccaatcawatttgagatatcccttttctaggccctagctccaggatgacttttctaggcacaccctggaccagaaaagaacccacttccttgaaggaaaagatccagtccaggcaagaaaacatcaactaatgagccactgagccctgaaaaaccagcagtaatactcagctagtacaccatgggccttgggtgagcctcttagacttactggcttcaggagagactcagtacattcccagctgtggctgctatagttagagattccatctcactgagaaatgcataaggaaacataaaggggaccttgttttgcatcttaggtaccaggttggacatggggtgggggcgggcactatgtgggcagttgggatga

SEQ ID NO: 399933 - DNA, 564 bp, Homo sapiens
tgtgacctagtgagacatcagccaaagcaactaagaaagtggttgtgccatcccttccccaaccagagatagcacagtttttggctccaatagtgtcccctttattctgcttgaggagagaagaggaaagagtaaaaaccatattgtcatgcatcttggataccagttcagccacagtaggatagggcaccaatcatatttgagatatcccttttctaggccctagctccaggatgacttttctaggcacaccctggaccagaaaagaacccacttccttgaaggaaaagatccagtccaggcaagaaaacatcaactaatgagccactgagccctgaawaaccagcagtaatactcagctagtacaccatgggccttgggtgagcctcttagacttactggcttcaggagagactcagtacattcccagctgtggctgctatagttagagattccatctcactgagaaatgcataaggaaacataaaggggaccttgttttgcatcttaggtaccaggttggacatggggtgggggcgggcactatgtgggcagttgggatga

SEQ ID NO: 399934 - DNA, 564 bp, Homo sapiens
tgtgacctagtgagacatcagccaaagcaactaagaaagtggttgtgccatcccttccccaaccagagatagcacagtttttggctccaatagtgtcccctttattctgcttgaggagagaagaggaaagagtaaaaaccatattgtcatgcatcttggataccagttcagccacagtaggatagggcaccaatcatatttgagatatcccttttctaggccctagctccaggatgacttttctaggcacaccctggaccagaaaagaacccacttccttgaaggaaaagatccagtccaggcaagaaaacatcaactaatgagccactgagccctgaaaaaccagcagtaatactcagctagtacaccatgggccttgggtgagcctcttagacttactggcttcaggagagactcagtacattcccagctgtggctgctatagttagagattccatctcactgagaartgcataaggaaacataaaggggaccttgttttgcatcttaggtaccaggttggacatggggtgggggcgggcactatgtgggcagttgggatga

SEQ ID NO: 399935 - DNA, 426 bp, Homo sapiens
ccagctcaaggcagctcagaaaagagaaagttactctatttgtttggtccaagcagaatctagaaaatatactcaaaaggaaaaatctcggttgtccttgaaaagaaagcagaaaaagagatggggtataaactgyatttaatggagttataacagaggactcctgaaacctagagaaaaatattaatacccaagtacaagaaggttatagaataccaagcagatttagcccaaagaagactatctcagggcatttaataatcaaactcccaaaggtcaagattaaagaaaggattttaaaagcagcaagagaaaaaagtaacatacaatggaactccaatacgtctgggtaataaaattttcagtggaaaccttacagaccaggagagagagacatgagatatttaaagtgctgaaggagaaaaa

SEQ ID NO: 399936 - DNA, 474 bp, Homo sapiens
tacaatcaataacaaaaggaatttcaaaaattacacaaatatatagaaattaaacaatatgctcctgaatgaccagtgggtcaacaaataagaagaaaattgaaaattttcttgaaacgaatgataatggaagcacaacatacccaaacctatggaatacaacaaaagcagtactacgagagctgtttatggcaatacgtgcctacatcaaaaaagaagaaaaaaataaaataacctaacagtgcatattaaagaactaggaaagcaagagcaaaccaacctaaaattagaagaaaaaaataaaaatcagagcagaaataaatgaatttgaaatawagcaaagaatgccaatattcaacaaaacaaaaaaagttgtttttttgaaaagttcagcaaaactgacaaaccctgagccagactaagaaaaaaaggagaaaacccaattaaagtcagtggtggaaaaaagacattaca

SEQ ID NO: 399937 - DNA, 360 bp, Homo sapiens
gagggtgtttctagaagcgattaacatttgggtcagtgggctggggaaagtagatccacccttaagctgggtgagcacaatctaattagctgccaggaatgtaaggcaggcagaaaaacatgaaatggagagatttgcctagcttcccagcctacgcctttctytacagaaccctgactaatacagccacagccaccttggctagtgtctcagtaggttacatgccattgctttccactgtctctgggcccagttcagcactaggactctcctaggaattgtactcctttagtcccagggtgtctttaagttcatttagtgcccagagcactctagctcctggtggtgtggcttgcagta

SEQ ID NO: 399938 - DNA, 591 bp, Homo sapiens
tgacaaggggtggacttgtgatggttaatactgagtgtcaacttgattggattgaaattattgatcctgggtatgtctgtgagggtgtttctagaagcgattaacatttgggtcagtgggctggggaaagtagatccacccttaagctgggtgagcacaatctaattagctgccaggaatgtaaggcaggcagaaaaacatgaaatggagagatttgcctagcttcccagcctacgcctttctctacagaaccctgactaatacagccacagccaccttggctagtgtctcagtaggttacatgccattgctttccactgtctctgggcccagttcagcactaggactctcctaggaattgtactcctttagtccyagggtgtctttaagttcatttagtgcccagagcactctagctcctggtggtgtggcttgcagtaattgaagttctgaccgctgggattggcaattctcctctggcaagaggcagtttaaatgctctttttgtgggtgggcataagctgagtttagtccagttttcctttctgctataaaagaacaacactgagtacaatgcctcacaattgatga

SEQ ID NO: 399939 - DNA, 581 bp, Homo sapiens
aggaccaattactgttctcccacctgctcctggcaatgtcaaaatgcctcatgacacttttgagtaggactatactttccaaaattggtacctgcttaatatttactcaactyccaaatttatctttcctccaatagccaaatttctcctgagaaagctgactgttctattacaggactctagagatagcccacccttattcagacaagccctagttaaaaaaaaaaaaatctaacaacaatgtgtcttgaagggggacaactttaacctaatgatgacatctcttgaagggggacaacttctatagtatgtagatgacctactcatctgctcccctttcacagaacccaatagctatcaaagttcctggcatcttaagttggatccaacattcccaaataaaaccttggaaaggttgcaaagaaccaattaaaggaccaaaacctgagtattcttatgagtgattggagaatttaaaatgtatctttaaatgaaaagataagtaattccttcattttttttcaaactatttctacctcaatataaggcagccccaatactgtggatctgattaatggtga

SEQ ID NO: 399940 - DNA, 586 bp, Homo sapiens
aaaggttgcaaagaaccaattaaaggaccaaaacctgagtattcttatgagtgattggagaatttaaaatgtatctttaaatgaaaagataagtaattccttcattttttttcaaactatttctacctcaatataaggcagccccaatactgtggatctgattaatggtgacattgctcattcttaaacttggttcaacaccaacattccccagtgggcctgtacctctrcccctccatatattttttatatagacctaaacaaatgtaaactgctctgtgagggaagttataaaagaacttatgcaatttattcacttgcaaacttctttatttgcatagataacacaacatgcagaggaaggtgctcaagggcttctggcaccacaagaataagtgtaaccatcattaacattacaaattcccaagaaaaatgacctgttggccttatactagcttatagtagttaaggtgaggttttattagttttctttctcttgtttgtttatttgcttatgcaaatagtgtcaggttaaaaaaatgggttataagatagtatttggaagcctcatggtaacttcaaacca

SEQ ID NO: 399941 - DNA, 505 bp, Homo sapiens
aactaatactgcagaaattcaaaaattcattagtggctactatgaggaactacatgccagtaaattggaaaatctagaagaaatggacatattcttaaacacatacaacytactaagattgaaccaggaagaaattcaaaacctgaaatgaccaataacaagtaataagatcaaagctataataaaaagcctttcagtaaataaaacctaggacctgatggcttcactgctgaattctatgaaacatttaaagaagaactaatgccaatgctactcaacctattccaaaactagaatagaaagcaatactttcaacttcattctacaaggccagtattacgttgataccaaaacaagacaaagacaaataacaaaataagctacaggttcatcagttatgatgaatattgatgcaaaaattctcaccaaatacaagcaaacagaattcaacaacacattagaaagatcattcgttataaccaagtgagatttatttctgggaagc

SEQ ID NO: 399942 - DNA, 655 bp, Homo sapiens
gggttgcccgatttgcaaattgttcattgctcctttaaactcctttaaatttaatttggttgaagtttttcttttaacatctctaagatctggaacrtgaccaggatgcccactgtcatcactgttattccatatagtactggaagccctagctagagcaattaggcaagagaaagacaaaaagcatatgcaaattggaaacaaagaagtcaaataatcctcgtttgctgattgtatgatcttatatttggaaaaatctaaatatgcttccaaaaagctattagaactgataaacaaattcactaaatattcatatagaaaatcaatatagaataaccagtagcattcctatttgacaagagtgaacaatgggaaaaagacatttaaaatcagtaatttcatttacagcagccaaaaataaaattaaggttcaatcaagaattttatatccatttaaactaagcttcataaaagaagaagaaatgttttatttttttcagacaagcaaatccgaatggaatttattactaccagacctgccttacaagaagtcctgaaaggagtgctaaatatggaaagaaaagaccatttccagccaatacaaaaatatacttaagttcacaaattattgacacaagaaagcaactacacaaac

SEQ ID NO: 399943 - DNA, 584 bp, Homo sapiens
tgctgattgtatgatcttatatttggaaaaatctaaatatgcttccaaaaagctattagaactgataaacaaattcactaaatattcatatagaaaatcaatatagaataaccagtagcattcctatttgacaagagtgaacaatgggaaaaagacatttaaaatcagtaatttcatttayagcagccaaaaataaaattaaggttcaatcaagaattttatatccatttaaactaagcttcataaaagaagaagaaatgttttatttttttcagacaagcaaatccgaatggaatttattactaccagacctgccttacaagaagtcctgaaaggagtgctaaatatggaaagaaaagaccatttccagccaatacaaaaatatacttaagttcacaaattattgacacaagaaagcaactacacaaacaagtctgcataataactacctaaaaacacaatgacagaatctattccacacatatttgctatgctagttcagataaaagatactttaaagcaacaaaattcaaaaaacgggccttacatatcagcaaaactctcaattcaacaaaaagacaaac

SEQ ID NO: 399944 - DNA, 584 bp, Homo sapiens
tgctgattgtatgatcttatatttggaaaaatctaaatatgcttccaaaaagctattagaactgataaacaaattcactaaatattcatatagaaaatcaatatagaataaccagtagcattcctatttgacaagagtgaacaatgggaaaaagacatttaaaatcagtaatttcatttacagcagccaaaaataaaattaaggttcaatcaagaattttatatmcatttaaactaagcttcataaaagaagaagaaatgttttatttttttcagacaagcaaatccgaatggaatttattactaccagacctgccttacaagaagtcctgaaaggagtgctaaatatggaaagaaaagaccatttccagccaatacaaaaatatacttaagttcacaaattattgacacaagaaagcaactacacaaacaagtctgcataataactacctaaaaacacaatgacagaatctattccacacatatttgctatgctagttcagataaaagatactttaaagcaacaaaattcaaaaaacgggccttacatatcagcaaaactctcaattcaacaaaaagacaaac

SEQ ID NO: 399945 - DNA, 531 bp, Homo sapiens
actctaataatagttatttgattatatgtgtcaaatgcttaattctgcaagctaaaatttgatagatatatgtgatgttattcaatatgttgcccaataagttatttttatagttcaaaagtgaaaggagagccattcyaatccttgattcaaaaaataatgaaaggagctaaatttgcaaaatgttatcaagtagaagacatgagcaatacctcttttagaatttataggtatattcttttgaacacaatggcatccataaatggcataaaatattgagattcaacatttctctttatttgttgatatctgtggtttcattactaaggtcagatagaaaagttctggaaagtatctgactgcatctttcttatcaaatacaaatttatatctgtaagagaaatgtacctactaataacccagatataaactttacctactttacaagcttaagcaaacatggtgaatgtgatgctctgtttggtaatatgaaatttatagaaatttctatggtgtgttgtttattttata

SEQ ID NO: 399946 - DNA, 631 bp, Homo sapiens
cattacataaactactaatttctttcacttagcatagtgatttttatattatttaaaagtttcatgattttcattgaatgcctgacattaaatcagttggtttaactccagtttagtaacattatttatttaacmtttttgttaaacttgtaacctttcctcttttttattatagccattcttacaggtatgaggtgatatctcattaagattcatttaatcattccacaatgtaaacatatatcaaaacatcacatcataccacataaatatatacaattattatttgtcaattaaaaatgaaataacattcaaagataattcaattcctacttttccttagaaataacactgcagtagtaaatacctttttttctacagttaagattatttccatgtgatagattgccagagtgtaacagaccaaagaatatgaatattctcttaaaaaacatattcttcttttccagttttatcaaacttcaattgataaatgatattgtataaagttaaggatacaagatattgatttgttatatgtatatattgtgaaattattatcccaatcaagttacttaacatatctatcacttcatctggttacccttattcgtgtgtgtgtgtgtgtgtg

SEQ ID NO: 399947 - DNA, 514 bp, Homo sapiens
atttgatgacccatagtcaaacattcagtttctaccaaagcccagtaacaggccaagagctgtttctcaaatggagagtagttatctgcagaagatggcaaggccttgctccaaaatcctacaggcctccactgtgattcacccatgggggcctgccaaattcytcaaacaacactcttatccgccactgacacctcaagcaatattggctctgtagggtcatatgtcccaagtggcagagcagcttgcacagcaacctggaccttttgcagagccttctcctgttctggactccactcaaaactggcaaccttttgggtcactcgataaatgggctggagtaacacacccaaatgaggaatatgttgcctccaaaatgcaaataggcccactaggagttaggtctctcttgttataggaggggccaaatgcagcaacttatccttcaccttagaaggaatatctatctatcttgacaagccccacaccaatggacccctagcaattttgctga

SEQ ID NO: 399948 - DNA, 526 bp, Homo sapiens
cctccaaaatgcaaataggcccactaggagttaggtctctcttgttataggaggggccaaatgcagcaacttatccttcaccttagaaggaatatctatctatcttgacaagccccacaccaatggacccctagmaattttgctgaggtagaagttccctgaatttttctcagatttatttcccatcccctggcacactagtgtctcaccaataagtccagtgtgtttgctacttcttgatcactggatccaatctacataatgtcatcaatgtaatggaccagtgtgatagcttgtggaagggaaaagcaatcactatctctgtgaacaagattatggcacaaagccagagagttgatatacccttgagataggacagtgaaggtatattattggccttgccagcggaagacaaattgcttctggtgggccttatggacaggaatggagaaaaaggcagtttccaaataaatggctgcataccagttaccaggagatgtgttaatttgttcaagcaatgaaacca

SEQ ID NO: 399949 - DNA, 494 bp, Homo sapiens
tcctgtccctctagagaaccatgactaatacagtgtcaaaagtgaaaagttgttaatctctgacaaaatcatgccctacastagaagtagatacagatctaacaaagactactggtataaaattttacatattttctcaggagtgacattgacaccgtatctcattcctaaagcatcataattgctctgaatatcagagtttgacacattcatgatttttttctgtaagaaaaagtgaacagaggcttactgtagattcactatgcttaacaaaagagctttgagagaatggtgtataagaaataaaaatgaaaagtacagaagtctttaccaaaatatgtcactgttttcaataccaagacagtaagaaaaggatggtaagcacagttaggagtgctgcaatgagttcatcaattgttccttgtataaaatcaaaattatactttttcacatatgtgccttgagtacctcaaaaaaaggatgctaggtgtctc

SEQ ID NO: 399950 - DNA, 494 bp, Homo sapiens
tcctgtccctctagagaaccatgactaatacagtgtcaaaagtgaaaagttgttaatctctgacaaaatcatgccctacagtagaagtagatacagatctaacaaagactactggtataaaattttacatattttctcaggagtgacattgacaccgtatctcattcctaaagcatcataattgctctgaatatcagagtttgacacattcatgatttttttctgtaagaaaaagtgaacagaggcttactgtagattcactatgcttaacaaaagagctttgagagaatggtgtataagaaataaaaatgaaaagtacagaartctttaccaaaatatgtcactgttttcaataccaagacagtaagaaaaggatggtaagcacagttaggagtgctgcaatgagttcatcaattgttccttgtataaaatcaaaattatactttttcacatatgtgccttgagtacctcaaaaaaaggatgctaggtgtctc

SEQ ID NO: 399951 - DNA, 594 bp, Homo sapiens
aaagttgttaatctctgacaaaatcatgccctacagtagaagtagatacagatctaacaaagactactggtataaaattttacatattttctcaggagtgacattgacaccgtatctcattcctaaagcatcataattgctctgaatatcagagtttgacacattcatgatttttttctgtaagaaaaagtgaacagaggcttactgtagattcactatgcttaacaaaagagctttgagagaatggtgtataagaaataaaaatgaaaagtacagaagtctttaccaaaatatgtcactgttttcaataccaagacagtaagaaaaggatggtaagcacagttaggagtgctgcaatgagttcatcaattgttccttgtataaaatcaaaattatactttttcacatatgtgccttgagtacctcaaaaaaaggaygctaggtgtctccgtctttctaggtacttgttaattttttacctgagagtagaagatatacattgaatttttatttaactggctttttaaaaggtttaattacctacccttaacatttgggttcatctaacggtgttgttattttggattatttaat

SEQ ID NO: 399952 - DNA, 629 bp, Homo sapiens
atactttttttggacaaaataaatagtacatccttaatagcagtacaaaatattaaaacaaaaatatgaaatttgtatgatcartctttacaaaatatgcacagacctgtataaatttaatactgggataaaaggaagacaaataaatgggaaactacatttctgggtgaagagacaaagcactaaaaatatgttctttataaattacttcctagttttaatgaaattccaataaaatccccaaaagagaggagctttgaaaattttgaaaagagtgaaaaggggactggcactgtcagggttacaatataatttaatctctgataatcaaatcagtctaatcatagcaatataataaaaaattgaaacagatcaattgaacagaataggtagcccggaaacagatcttattatgaactaattatgtgtatatgacaaaagtggtattacaccacaatgcagaagaaaaagattattcagtaaatggtgttggtgtaacaaataaagtataaatgcagattttcatcccatagtgtatgccaaaataaattccaaaatcaaatttttactaaagcctttaaacaaatataaatgaaggtaaatatttattaactaaagtgttctaatac

SEQ ID NO: 399953 - DNA, 587 bp, Homo sapiens
tgtgaaaagataggaacgtaggatatggaaagagtcacaagaccaggaaatggtgtgcagagagaggtcctttcattcttatttctatattctttagatgagcgttggtaggctcaatggatatttattatattaatgtccatcattttaggtatcaaaatacttcataattttaaaaaagttaaagggtctgtttgggtaagttatacaaattattcataattgcccctaattatcagattttatacatatgtaaactgtaaaataatagacaaaactgtattrttaacttcttcccaaattctttgtgaatgtcctctttctacataaaacacaacctcatcactcccactgtaacttgcatgcttggcatcttccagttccccagacatgtcactcactatcttccccaccacctccaaagagtgagttgtttcagcaggttaatttgttcctgtgcttgtaaataggcttacaatgtggcatagtcatttctcatgactttaacacatctgccccactggactattccctgaaggcaagtactcttttattcattttccattccctttacctaacccaaagta

SEQ ID NO: 399954 - DNA, 461 bp, Homo sapiens
atgaatgattttcgtgatatccatcttggactaataatttayttctagctgtggatctagaaataaaatttgacggttatgttgattataattttggtctattttggtctctccagcaggaggtacctaaaatagcttacaagtagacaatggggagatgctggcagagtatgtaaatgcatccctgccttctccttctgtacaattattaaccacttatcaatctggttcccagaacatttttagagtcttcactccatctaatctctagagcctcttgaaaaagtaagttggttttggagtttcccactgaatttggatctgtcattggggatggtagcagaatttggacatactaattcatccccctaagaatacctgtctccaaagttattccccctcaaaacctaaaaacaccatgaaagccattgcaggatctaacagtagcctatgtaattgta

SEQ ID NO: 399955 - DNA, 573 bp, Homo sapiens
gaacatttttagagtcttcactccatctaatctctagagcctcttgaaaaagtaagttggttttggagtttcccactgaatttrgatctgtcattggggatggtagcagaatttggacatactaattcatccccctaagaatacctgtctccaaagttattccccctcaaaacctaaaaacaccatgaaagccattgcaggatctaacagtagcctatgtaattgtagatttttttttttttttgagatggattcttgctctgttgcccagactggactgcaatggcaccatctcagctcactgcaacctccacctcccaagttcaagtaattctcccacctcagcctcctgagtagctgggattacaggtgcataccaccatacttggctatttttttttttttatttttagtagagactgggtttcaccatattggtcaggctggtctcgaactcctgacctcaagtgatccacctgcctctacctcccaaagtgctaggattacagttgtgagccactgtgcccagccgtaaattctttttataataatggatggatccacaactagaaa

SEQ ID NO: 399956 - DNA, 493 bp, Homo sapiens
gaataaagttcctttggaaaagcaaaagatgggaacacagtcactggaccatagaaatgatcaaattttgattgtcaggaaatgcaaagcctgctttagcagtggagtccttcttaaggaagcccatcttggagtttctagatggtttaaacatctgagaggaattcctagcccattatcctttgtgtcccctggctttgcccactggaagtttcctccttggggccatagacagcatggagtatgccctcttgtgctatgcacagatttcagagcttactccctcctggtgcagctttataaattcagaaatttgcaggtcacmatattgtagatgtttgtaagccaggtatgtggtttttgttggcaacacaattccttcaataactttgtaagtttcttccagtcaatttgatgtgcagtaaatcagcaaatagtctcatccagatgtagattttacatttgttttatcactcattcattcattcatttt

SEQ ID NO: 399957 - DNA, 554 bp, Homo sapiens
atacctacaatcattacatgtcaagtaaaaaggaaaaaaaaaagagagattaccagatgtgaagaaaaaaagagggagaaagttattcatgctctgccagtgttcaaaggccacaggcaaagagtgttctttgggccaggagctaatcactagtttcagtgaagacactatatgtttgttaaagacaaccaaccactaacagccrgggcagctcacaggcagagtaggaacctcaaaaactctacatctgctcaacagaagttcagatcctatttctctcatgcttctccagctttacatatgtttctccaaagctgttccacagagctaccctcaacatttgagaacaaatgtatatcttcatgaacctgacagtttaatccaaagaaacccatctcaagatcaatgtttcttatcatcttgtgtttcaacttaaaagtagattcaaatttggccctttatcctataactccaccactaccaccaataaagagccatgtccattttctaaatcagaattttgtagcatctgacattctgcctgaatgcaataa

SEQ ID NO: 399958 - DNA, 612 bp, Homo sapiens
tcatcttgtgtttcaacttaaaagtagattcaaatttggccctttatcctataactccaccactaccaccaataaagagccatgtccattttctaaatcagaattttgtagcatctgacattctgcctgaatgcaataaatatttatttaattactaaattatacatccgagttgactttaatggaaagaggtatatcttcctatattttcaagtaaaatcagtgcaccaggaatacccttcatgattactctgttgcgtcaagtatcaaaggcacatatcacagtttagaaacatggtggtataatggtctcataactgattctttaccacgatagctcccagaaatatttttaaatacaggcaatagtggagaatcattatgccaaacatagttcttgggccacagaaaatataatttaatcttgatctttgtttccttactgagttagctatgcactagagaaatagccatttaaacagtcaaaatcaaacttttyactacacaagtagttagtgcctctcttccttcagcagattgtttcagcaatttctttgtccagattctgtgaagaagaaagtggaagcaatcatcctcatcatttaggtaaaa

SEQ ID NO: 399959 - DNA, 424 bp, Homo sapiens
tctgtacattgcaagccatatagatggagtccgatttggatgatctgcaacttttttctgaagaaaaaaaaaagaaaaaaaaaacagatgtaacaaaataaaactgcttagagcagtaactaatctcatgtatggaaattccttcttatacttcaaaaatactttaagggtttaaaaattgatgttaatgtgtgcctttcagcatagcatgcataattctgtatccttgccttctaygaaaatagtagctactgaatgcattttaataaaatagagagaatgagaagtaaacaagacagtttttctaagactctgtattattttacttatcaaaggatgacacaggattcttaaagcctaattcattttcagttttctttgattgggaaaatatatatttgtcatgcaaattgccaaatagcat

SEQ ID NO: 399960 - DNA, 518 bp, Homo sapiens
taagacatgactgatatcagtgttgagaaggcaaggacagatttggaaaccatcagcagtgatgaaataactctgaacatctttgccccaccagcaagtagaccagcaatagtatcaraagaaaagaaatgtgaagttgattactagcttctccattttgatcagaatttgctgcaagcaaagacgatgagtctagggatgaaaaacagactaaatgtggatccctgacatttaaaggatcctaattcatagctaagagggagaaacaactatttcttcaaattatgaaatgttatatgatacattcagaggttcccatctacaattcttttcttcttatctcctcctactttctttcaccttccttgcactcaagtcatattaacattttcaattttctgaataaactcaatacctaccttcttattctagcacttatccatgtattaggattactttgtatatgttttatcttccttagagactatacatttcttgagaacaggcccctgacatat

SEQ ID NO: 399961 - DNA, 647 bp, Homo sapiens
atcctgtcttctagcattttgacactatgttagtggtgcattgctggaagataaaactccttccaactttatgtctaatgtatcaagcattagggctagaataaaggggctatatargccaaatattttctctaaatctatttcaaaaaagaaatgtttataatctttaaactctaaaggagtttataattcaagaggaaacaatatataaacttccaaaattttaatttgttaaaggtcttgggagcaacaaagatgagcaaaactgacacataaatcaaatcaaatattagtgggagtagttttgctaagtttgtgtaaagtatactaacataaaccctgttattcatgagaatactcagtcatactttgagggaaaaaacaatatttttgtaacagttgcttttaaagttagagttgaggatgaaagaagtctctattttgaaatttttgaaaatatattggaaaaaagggttttatgtgaacgaagtttggcttcctttacctgaaaatggtatttttttctcctcagttttcaaaaatggctaagttttcttgacaatcttcaagaaaatatcacatcataagctcccaaggagacaagttaaaaaactgcaaatatttttaacccttttcccgtttagaaa

SEQ ID NO: 399962 - DNA, 567 bp, Homo sapiens
ctgctgctgtgtaaatgcttagaagtcctttacttcaacagactgaattcgttttttttaaagctcaaaacaaaccaaaacaataaactaaatgatatggtaagacaccaaatactttgctatcattctttcaccattacatgtgtctctgattgcataaattttatttatttatttattgagacagagtctcactctgttgcccaggctggagtgcagtggcatgatcttggctcactgcaagctcggcctcctgggtttatgccattctcctgcctcagcctcctgagtagctgagactacaggtgcctgccaccatgcctggctaattttttgtatttttagtagagacagggcttcaccgtgtttgccaggatggtctckatctcctgacctcataatccgcctgtctcggcctcccaaagtgttgggattacaggcgtgagccaccgtgcccggccataaattttatttttgaatgtgtcctcatgcacaggcatgaacaaaatcgagtaaagtactctgacctactgcagcaggaaatatttactttgggccggagaaaag

SEQ ID NO: 399963 - DNA, 600 bp, Homo sapiens
acatacaacattttgcaaagtcaaatagaatcaatttttggagtttctgtaggctttaattatttgtatggttattgaattcacgtctgtaatgtgtatgttattgaattcaactgaccctaaattataaaaaattagaacaataaaagaaataggtcttcaggtgtctttcctcataatacaggcataacaaattgtgaccaaagcccactttttacataaatcatatcaataattgattctacttagatgtagtttggtttctggtgcatgtctgtttttcttacaagctcctgaggggccagtgtgttttgtgtatctttcgtgtttagygcccaaaaagtatttctgctgctaccttagggtagctaatttggaatttaaatttattgaattcaaattttaaaggttggaaggccttggaaatacagagtccttatgaaacgggaaactgtattctagagggattccccaagtttacagctgtttggagcagggttagcactagaacccagtcattgtatgaaccaaaatttttatgaaagagaacagtgctatctatgttttagaagcttactaagcaattatttcctagctgat

SEQ ID NO: 399964 - DNA, 605 bp, Homo sapiens
atgtgcatatatacatatatatggagacatttaggagtcagttggaataattayccaggcatgcagtgtgtgttgcctacacttaggaatgacggtagaaatataaaagaagggatggttgagaaaaaaaaattgaagaacaacaatggacagatatcaacaggaagaagaagagggaagaatgaagaatgactctactacattaagatgaactgattaagaaaataaaatcattgccatttcccccagcatcttcaatccccatgcttccttgtacttccagttcatctgatttccagtcccagccttatatgaacttgaggactgtcagtcctcactatctcccttgtctcctctcttcagcatgcatgacagtgtggaagggcgcccactcacaacctctgctttagccataatgaacctcctgcagtcccttacattcatcatgaacttttttactttctcaagttccttaaacttcgttactcattttcttcctgaaaacttactactcaactttctgaacacagtttaagctttgcctcctctgatacttctcagaatggtcagtcatttcttcatttgtgttctaggagtgctttata

SEQ ID NO: 399965 - DNA, 605 bp, Homo sapiens
atgtgcatatatacatatatatggagacatttaggagtcagttggaataattatccaggcatgcagtgtgtgttgcctacacttaggaatgacggtagaaatataaaagaagggatggttgagaaaaaaaaattgaagaacaacartggacagatatcaacaggaagaagaagagggaagaatgaagaatgactctactacattaagatgaactgattaagaaaataaaatcattgccatttcccccagcatcttcaatccccatgcttccttgtacttccagttcatctgatttccagtcccagccttatatgaacttgaggactgtcagtcctcactatctcccttgtctcctctcttcagcatgcatgacagtgtggaagggcgcccactcacaacctctgctttagccataatgaacctcctgcagtcccttacattcatcatgaacttttttactttctcaagttccttaaacttcgttactcattttcttcctgaaaacttactactcaactttctgaacacagtttaagctttgcctcctctgatacttctcagaatggtcagtcatttcttcatttgtgttctaggagtgctttata

SEQ ID NO: 399966 - DNA, 615 bp, Homo sapiens
tattaaaaataaaatttcaaccttttctacattttcatttcaggtgaccaaaatttatattttaatgcctccttccatccctttctgaaatattctttgagatatttccttctgttgtgactagatgaactagttaatgccagaattttgcatgtaatcctcttggggtcaattctaaaagatcacttaaccttttaaaagatagtttttactaagagtcagtgtttcatgatatcctatgatagggtcaaccaaatgaaggtttttactttgtttagattttaaaatgtattatcaacaccattattgagtctcttgatctatggtttcctgatgttaactgactactctccacatgcattgcagcatatatctttctactcacagatcaagttcaaagttctctgataaaaaatgaatactggaaaatctatctctagtatctcacacaacataactgacagtattaagtggtggaaagtacaatcratatgcaattacaaaccaggtgtgtgtcttgaccatattactttggatatatagccaaagctatctctacatgtttcttcatcagcaaaatgagcaaactggattagattattttcttttcagttt

SEQ ID NO: 399967 - DNA, 559 bp, Homo sapiens
cttgattttggtggtagttacatggcagtatacaattgccaaaacttaaagaactgctaccctaaaaaagttatattttattgcatataaactttaactaaataagccttagctaaataaatgtttaaaarggatatactgataatctccaaatatatagcaattaaaacaaacatttctaaataaccaatgagccaaataaaaaatttcaaagaaaactggtaaatataaagtcaatgaaaccaaaagtatttttaaagctaaataaactggatacatcttcagctaaactgatcaataaaaaagattgaaactataacttagcaatattaggaatgaaagaagggatatcaataaaaattctatatacatcaaaaagatactaaagaaacagtgtaaacaactttatgccatggcattcaataaattagaaaaaaatgtacaaattctttaaaagtcacaggttatctaaactgacagaagaagaaatagaaaatctgagtaccatcatgtctagtaaagaaattaatagccattttacaaggaaaattccaggctc

SEQ ID NO: 399968 - DNA, 559 bp, Homo sapiens
cttgattttggtggtagttacatggcagtatacaattgccaaaacttaaagaactgctaccctaaaaaagttatattttattgcatataaactttaactaaataagccttagctaaataaatgtttaaaagggatatactgataatctccaaatatatagcaattaaaacaaacatttctaaataaccaatgagccaaataaaaaatttcaaagaaaactggtaaatataaagtcaatgaaaccaaaagtatttttaaagctaaataaactggatacatcttcagctaaactgatcaataaaaaagattgaaactataacttagcaatattaggaatgaaagaagggatatcaataaaaattctatatacatcaaaargatactaaagaaacagtgtaaacaactttatgccatggcattcaataaattagaaaaaaatgtacaaattctttaaaagtcacaggttatctaaactgacagaagaagaaatagaaaatctgagtaccatcatgtctagtaaagaaattaatagccattttacaaggaaaattccaggctc

SEQ ID NO: 399969 - DNA, 456 bp, Homo sapiens
cttttaattctaccaaaagtttaaggaagaaataataattaaataaaattctttcagaaaatggatgaggagggaagacctccagatttattttatgagactagcagaatcctaatatcaaaattgaatgaagacattgctgataaaacaacaaaaaacaacccctaaaccacaaaaaaagaaagaaagaaaagaaaatgaaaaaatgttcttcatgaagatagatgaagaaattataaataagatataagtaaattgaatccaggaatrtatagatgatatcatgaccagggaaaacttatccttggaattcaagattggtttaatactcaacaatcaaacaattcattttggcctattaacagaataaaagggaaagagcttaagattatcacaatatatgcacaaaaaattttttgacagaattgaataacaattcataataaactcagcaaa

SEQ ID NO: 399970 - DNA, 456 bp, Homo sapiens
cttttaattctaccaaaagtttaaggaagaaataataattaaataaaattctttcagaaaatggatgaggagggaagacctccagatttattttatgagactagcagaatcctaatatcaaaattgaatgaagacattgctgataaaacaacaaaaaacaacccctaaaccacaaaaaaagaaagaaagaaaagaaaatgaaaaaatgttcttcatgaagatagatgaagaaattataaataagatataagtaaattgaatccaggaatatatagatgatatyatgaccagggaaaacttatccttggaattcaagattggtttaatactcaacaatcaaacaattcattttggcctattaacagaataaaagggaaagagcttaagattatcacaatatatgcacaaaaaattttttgacagaattgaataacaattcataataaactcagcaaa

SEQ ID NO: 399971 - DNA, 448 bp, Homo sapiens
aagctgtgaccatataattcctaaaaataaatttaggagaatatatttatgatcttaggctrgacaaaaatttcttagagaggaaagtcaatgcattaagctactgaataaacaaaaattgctaatttgaattgatcaaaattaaaatattccttaaaaacaccaagagcaagccaccaacgggcaacaaatgttctcaatacatatagctgacaaataacatatgcataatacatttttttaaaagtaatagaaagaatgaataagacctagtatttgatagtacagtgggatgactgtagtcaataataatttaattgcatatttacaaatgactaagagtatagttgttttgtttgcaatacaaaggatcagtgcttaaggggatggattttccatgatgtgattattatgcattgtatgctcatatcaaaacatctcatgtacc

SEQ ID NO: 399972 - DNA, 591 bp, Homo sapiens
cattctacgcagcaggaacaatatgagaaaaggcacagaaatgagaaagcgccacatgttytggggcttgagacaggttcttctccctagaggactgtgtgatggagagattggagatgaggccaggtggaccaaagccagtggactacatttgagatgaacctcaaacacttgattctgacaaagtgctttatctggaacacttttgactcttcctctagttttgggatattgtttcagatccactcttaaagagtttgtaaatggagttggcaatagtctgaggcagcagtgagaggggaggggtgaaaatgcagtgaacattctttctgcgtgtttctatttggcaagaaaccttctgttttcctaatggaaactttgacacactcagcctgtatcttttcatccatatccagctcatcttctgaacattcttagacctttattctgtcagacaagaaaaaaataggaaaggtcactaaaatctcagtctaatttaactgtgatgctttcgtggtaaactacttgagggagttcattgcttcatgtgagtacaccacgaaccctcaatgcgggggaggaaaagcagcc

SEQ ID NO: 399973 - DNA, 591 bp, Homo sapiens
cattctacgcagcaggaacaatatgagaaaaggcacagaaatgagaaagcgccacatgttctggggcttgagacaggttcttctccctagaggactgtgtgatggagagattggagatgaggccaggtggaccaaagccagtggactacatttgagatgaacctcaaacacttgattctgacaaagtgctttatctggaacacttttgactcttcctctagttttgggatattgtttcagatccactcttaaagagtttgtaaatggagttggcaatagtctgaggcagcagtgagaggggaggggtgaaaatgcagtgmacattctttctgcgtgtttctatttggcaagaaaccttctgttttcctaatggaaactttgacacactcagcctgtatcttttcatccatatccagctcatcttctgaacattcttagacctttattctgtcagacaagaaaaaaataggaaaggtcactaaaatctcagtctaatttaactgtgatgctttcgtggtaaactacttgagggagttcattgcttcatgtgagtacaccacgaaccctcaatgcgggggaggaaaagcagcc

SEQ ID NO: 399974 - DNA, 499 bp, Homo sapiens
cataaacaaggcattggtttggatttgacggcatcaggctggcmtatgttggggttggccaggagcaggaggagctcaataggatttttagttgaaagactgagaccatgacaaggggcaacatcaacccttcccctttactgagcaagctgactgggaacagaattcaaacagtctgtccaaattaggagggctggaagcagatagatgttgaagtaaagagccatggagatattaacagaaagtagtaggttgagcaacgaagtgtcctttaatttattcacaaaacatctggacacctagtatgtaactgactctgtcaatattctaaagattaagatgaaggacacattacagctcttaagtagctcccaatcttgtagaggaatgcaaacacacaaacagttgattatgatgcagtgtgctaagtttaggatgcaacttaacatagagatctaagaaggacatggactctacattctaacattcagagaaggct

SEQ ID NO: 399975 - DNA, 599 bp, Homo sapiens
atgacaaggggcaacatcaacccttcccctttactgagcaagctgactgggaacagaattcaaacagtctgtccaaaktaggagggctggaagcagatagatgttgaagtaaagagccatggagatattaacagaaagtagtaggttgagcaacgaagtgtcctttaatttattcacaaaacatctggacacctagtatgtaactgactctgtcaatattctaaagattaagatgaaggacacattacagctcttaagtagctcccaatcttgtagaggaatgcaaacacacaaacagttgattatgatgcagtgtgctaagtttaggatgcaacttaacatagagatctaagaaggacatggactctacattctaacattcagagaaggcttaccacagtagatgataatcatggactgatatttcagcaatgagataggcactggttagccaaatataaaaggatattgggagggacaagtaatataacctatcttcctcttaacctaagaggaccagctttgtttaatgaggcagcaattggcagatcatattttccacaggatcttttttatctactttttcgttaagtgctggt

SEQ ID NO: 399976 - DNA, 500 bp, Homo sapiens
aggaggttacagatacaggaattgaaatgtatgacctgcagtgcagggggttctttctgtggcacacttcataggccctgactatctgcttgatagttttgaaaaggcctggtcctgtaaataatgatttggccatctgatgggtgctatcaatgcctaagtgaaaagtttggtgaagggttttaagtaattttcactggttagctgcaggcaggagtatttttccttctttggtggctagccttcctgaggggaggaaactatgtcctcgtgagtttccccatcctatttcttctgctgagtactgggrcttggtttcccggaggggattaccccatgctaggggtccttctataagcatttctaatggagcgtcctgccttgaggctgtttttgctttaatatccgcttggtgattctcttttatttccctttcctttcctttctgatgaccccagcagtgtaagactgccacctctttaggtttctgtacagccaat

SEQ ID NO: 399977 - DNA, 606 bp, Homo sapiens
gcatatccacccaaactgtttttattatgtgagctttatgttacaaaaagcaaccagaacaaaaactaataataattttaaatatttatgatagagacacatctctatcaatgaattatttaactgtaacattaatctcccttagaatagcccacattcaggttcacggaggaaggggaatacaaatcatactcatcacagtttctctttgtaactgagcccaggtttcgctgcttgccactgaaaaaccaagctcaagagatgagagttaatgggaggaaaagcaggtttattcaaaagctggcaacctgagaacattgtgaactagtgttgcagagaccatcttgagtttttcaggctggctggagggtttttatgggagggggatatrgagaagctaaacacaggggttgactatgtatgtcaatatgtttggtctcagtgactgtcttgagtgatggccatctggtggtctggtgggcgtcaccctgattccaacaggaatacagattaactgcttagaattcttcccaggacgggatgttctgcaaccttgattccatgcttagtttttcaaggacagttcctggagttctttaggcgaag

SEQ ID NO: 399978 - DNA, 606 bp, Homo sapiens
gcatatccacccaaactgtttttattatgtgagctttatgttacaaaaagcaaccagaacaaaaactaataataattttaaatatttatgatagagacacatctctatcaatgaattatttaactgtaacattaatctcccttagaatagcccacattcaggttcacggaggaaggggaatacaaatcatactcatcacagtttctctttgtaactgagcccaggtttcgctgcttgccactgaaaaaccaagctcaagagatgagagttaatgggaggaaaagcaggtttattcaaaagctggcaacctgagaacattgtgaactagtgttgcagagaccatcttgagtttttcaggctggctggagggtttttatgggagggggatatagagaagctaaacacaggggttgactatgtatgtcaatatgtttggtctcagtgactgtcttgagtgatggccatctggtggtctggtgggcgtcascctgattccaacaggaatacagattaactgcttagaattcttcccaggacgggatgttctgcaaccttgattccatgcttagtttttcaaggacagttcctggagttctttaggcgaag

SEQ ID NO: 399979 - DNA, 566 bp, Homo sapiens
cgttcctggaatcctggccccagccacagggtcagatagccatgatcagctggcactcttgagcaagttgttgctctgcccagtagcgtgaatgggtaagttctgacatgctgcttaggacaacttctccacccactgaaaactaggcaggctagatcacctgaggtgcacagcaccatgctgggtgccacaaattgtaattgaacccaggtttggctgcttgctgcttgaaaaccaaactcaagagacaagagttggtgggaacaaaagtgggtttacccaaaatctgacaatctgagaagatggcagaccagtgttgcaaagaacatctcaagtttctcaggctggctggaaggtttttgtgggggkaggatgtagagaaattatgtgcagggcttgaccatgtgtgggtcagtgtgtgtggtctcaatgactgtcttgagcaatggtcacctgatggactccctggcatcagcttgactgcaacgggaatgcagactcactgctcagaattcttcccagggtggggtaatctgcaaccttgattctatgcttagttttttaag

SEQ ID NO: 399980 - DNA, 566 bp, Homo sapiens
cgttcctggaatcctggccccagccacagggtcagatagccatgatcagctggcactcttgagcaagttgttgctctgcccagtagcgtgaatgggtaagttctgacatgctgcttaggacaacttctccacccactgaaaactaggcaggctagatcacctgaggtgcacagcaccatgctgggtgccacaaattgtaattgaacccaggtttggctgcttgctgcttgaaaaccaaactcaagagacaagagttggtgggaacaaaagtgggtttacccaaaatctgacaatctgagaagatggcagaccagtgttgcaaagaacatctcaagtttctcaggctggctggaaggtttttgtgggggtaggatgtagagaaattatgtgcagggcttgaccatgtgtgggtcagtgtgtgtggtctcaatgactgtcttgagcaatggtcacctgatggwctccctggcatcagcttgactgcaacgggaatgcagactcactgctcagaattcttcccagggtggggtaatctgcaaccttgattctatgcttagttttttaag

SEQ ID NO: 399981 - DNA, 566 bp, Homo sapiens
cgttcctggaatcctggccccagccacagggtcagatagccatgatcagctggcactcttgagcaagttgttgctctgcccagtagcgtgaatgggtaagttctgacatgctgcttaggacaacttctccacccactgaaaactaggcaggctagatcacctgaggtgcacagcaccatgctgggtgccacaaattgtaattgaacccaggtttggctgcttgctgcttgaaaaccaaactcaagagacaagagttggtgggaacaaaagtgggtttacccaaaatctgacaatctgagaagatggcagaccagtgttgcaaagaacatctcaagtttctcaggctggctggaaggtttttgtgggggtaggatgtagagaaattatgtgcagggcttgaccatgtgtgggtcagtgtgtgtggtctcaatgactgtcttgagcaatggtcacctgatggactccctggcatcagcttgactgcaacrggaatgcagactcactgctcagaattcttcccagggtggggtaatctgcaaccttgattctatgcttagttttttaag

SEQ ID NO: 399982 - DNA, 346 bp, Homo sapiens
gcttgactgcaacgggaatgcagactcactgctcagaattcttcccagggtggggtaatctgcaaccttgattctatgcttagttttttaaggctggttcctgaagttatctaagtaaatcatatgactaagcattattaaaagcccagaatagaaaaaagggaaaataaaaaggaaataaaaggagaacaattgtttctcaagatggggtggtaatttargttacatcttctccaatgggaagcagtgagtattcagaaatagtggaataatttgcactttttttaaaaaaagtatattatctattttcctttaaatatgcagcagaagtttactattatacaac

SEQ ID NO: 399983 - DNA, 346 bp, Homo sapiens
gcttgactgcaacgggaatgcagactcactgctcagaattcttcccagggtggggtaatctgcaaccttgattctatgcttagttttttaaggctggttcctgaagttatctaagtaaatcatatgactaagcattattaaaagcccagaatagaaaaaagggaaaataaaaaggaaataaaaggagaacaattgtttctcaagatggggtggtaatttaggttacatcttctccaatgggaagcagtgagtattcagaaatagtggaataatttgcacttttttwaaaaaaagtatattatctattttcctttaaatatgcagcagaagtttactattatacaac

SEQ ID NO: 399984 - DNA, 591 bp, Homo sapiens
cttcttgttctcttagcgcagtcagtgacatcaaatatttgtggaattaaaaacatatgtagttgacattcaagggggtgcaaaacttaagaaatgcatgtattgattataatttaatccttaaaatatcactgagtcctgtagtctcaggtctcacaagttgcaattggtgctgtttggtaaacagttttgcactgacctcatgtgagtatttaattgaccatctaggtgacaaatgtgttatttgtatgcattttctgccactgcagctataaaagccctaattttgaccactaaaggcccttgtgtggggaacactcatcaggaaagatctagctctttctcttcttattagcagcacatttctatatacaaatgggggcaggggatttctatgtagttcatgggccataagcaggtggattttccagaaataatccatagattctgaatttcggagcgtcctaacatggttwggtcttccatttagttattaggagccgttggtgtaaaagttttcctccctgagaaaaagatggggttatctgtcttctgaaatgtcaaggatgtcatgggtttgtttacagaacc

SEQ ID NO: 399985 - DNA, 450 bp, Homo sapiens
gccgcaccagtgtccaggagatagttaacctcctggccctccatggtcaagcatacctggggctctgtgagggtgattggcatgggctggtgcttgccccaggcaccctcagtcctgctctgctggatcaatctggttagtggcttctgactaagaggaccttcgtctcctggggcagtgggccttccagtgattcccctgacataaggggcatggacaagggggcaacttatttatacttggacaatcttttttaaagtgtccttgtagatcgcactgaaagcgagccctattaggcattctatttgcccrgcttttcccatttccagagccttcaaagtccactcacctgagggccatgactaaggtggcctttttgttaatcccgtttttccttttgcacctgttcctcctgatctctattataaaaaactgaggttcctaagttca

SEQ ID NO: 399986 - DNA, 666 bp, Homo sapiens
gtggactcattatggcggggtcgcttaggggacacagccgagaacagttctggaagcatggctgaggtatggtcgaatctctcagcagtgtttaggcaaggccttggctcttcaaggaagttcagagttcatattacaaataccagagtatatggatgcaggttgtattagttttctactgtttctgtaataaattaccaygtactttgtcacttaaaggaacacaaacgtattatctgagagctctggaggtcagaagtccaaaagggtccacaggactgcattccttctgaggctctgggaagaatctcccagtgggcctcttccagcttctagagactgcccaaatttcctggctcacagcctctcctccatcatcaaagccactaccatggtatcctttctcttctctgacctccgcttttatcctgacatctccttctgactctgaccctcctgccatcctcttgtgaggactcatgtgatgatgttgaggccacccaacaacccagggtgatctcccatctcaagattcttaatcacatctgcaagtctcttttgccatatgaggtgacatattcttaagctccagggaataggatgtgggcatctttgaggggctattatcctgcctacaataatgattaacaaaaaaagcaagtggtg

SEQ ID NO: 399987 - DNA, 666 bp, Homo sapiens
gtggactcattatggcggggtcgcttaggggacacagccgagaacagttctggaagcatggctgaggtatggtcgaatctctcagcagtgtttaggcaaggccttggctcttcaaggaagttcagagttcatattacaaataccagagtatatggatgcaggttgtattagttttctactgtttctgtaataaattaccatgtactttgtcacttaaaggaacacaaacgtattatctgagagctctggaggtcagaagtccaaaagggtccacaggactgcattccttctgaggctctgggaagaatctcccagtgggcctcttccagcttctagagactgcccaaatttcctggctcacagcctctcctccatcatcaaagccactaccatggtatcctttctcttctctgacctccgcttttatcctgacatctccttctgactctgaccctcctgccatcctcttgtgaggactcatgtgatgatgttgaggccacccaacaacccagggtgatctcccatctcaagrttcttaatcacatctgcaagtctcttttgccatatgaggtgacatattcttaagctccagggaataggatgtgggcatctttgaggggctattatcctgcctacaataatgattaacaaaaaaagcaagtggtg

SEQ ID NO: 399988 - DNA, 537 bp, Homo sapiens
ttccctaaagaatgagtttatttttctgttcatattttgagtaatttgagagcaaatcctggacattgtgccatggagactctgggttctgctgtattttatatatatatatataaatattatatctgcaactgcaaacttgttcttacctgcaatggatagtgactcacatatctgtttactcccttagccctgagcctgtcctgcccacacgttgcatgttagccagagactggcagagtttacaacagaacaaatgaacaaatgctcacctctccaacgctctcctctcccagattcaccttcaattcccagtggctgctgccacctgggtctttcccaggccagaaaggcaatgtgcttttcagtgaagttttagcaaccccgaattayactatattcatggccttccctcaggacaaagccacaaaaatgggaagcttacattgtgctgataacttctttcatattttgttactctttcaaaatctgttgtcattttgaggtaggagaatagggtctggcagcagggaacat

SEQ ID NO: 399989 - DNA, 507 bp, Homo sapiens
tttttgcaggacgttcattgctgttctctgtgtgtgacacacgggtgagcggaagttttgcaggacgttcattgctgttctttgtgtgacacacaggtgagcgggagttttgcaggacgttcattgctgttctccgtgtgtgacacatgggtgagcgggagttttgcaggacgttcattgctgtcctgtgcgtgacacaggggtgagcgggagttttgcagcacgttcattggtgttctctgcgtgacacacgggtgagcgggagttttacaggacgttcattgstgttctgtgtgtgaccaggggtgagtggcatttttgcaggacgttcattgctgttctctgtgtgtgacacacgggtgagcggaagttttgcaggacgttcattgctgttctttgtgtgacacacaggtgagcgggagttttgcaggacgttcattgctgttctctgtgtgtgacatgcacgggtgagcgggagttttgcagccgttcattggtgttctctgc

SEQ ID NO: 399990 - DNA, 474 bp, Homo sapiens
atcctgattctcctgaatggaatgttagatattattcaatataaattactttgatttgggctaagcatatttaagaactattttttctgaactttgtcatcatgtttttatcctggtaaacatggacaacaaagagcaaacaatcctaagacaagttttatttcatatatattctaggccaggaagagcaaaataaacctaagatatagctgtaggtaaattagtgaggcatcatcaacatcatacagaataaaaattgttaaaatgtgtcartatcaatagtaattaacatatcacttattgagcatttattatgtgctagacagcttgcatcctttatctcattcaattccacaacaatagtttggtaggcattatatttttcaattttcagataagaaaacaaacttagagagtctgtcactgcctgtggtcatatggctagtgcgtggaaagtggggcaccaagcttaag

SEQ ID NO: 399991 - DNA, 591 bp, Homo sapiens
gaaatcaatcaatatatgtaaaatgagcattagttcggtccaaaaaggtgggacaacttgaggtgaaggcaggacaaattgaagcaggcaggggacttccagatcacaggtaggtgagagacaattcttctgagtttctgatgagcttttccaaaggatgcaatcagatatctatttatctcagtgagcagaggagtgactttgaataggatgagagacagtttgccctaagcagttccaagcttgacttgtcctcttaggttagtgatttcaggggctccaaatattttcctctcacacatctatactcacaaacataaacatactgaggcccttaataatttattgctttcgtacattttctaattggcttagtcactgagcttgcaggcagaagacagcacaatgcaatcactgaggccagtgctggtgctgtcgcacagattttcatttcaccgtcctcacaaatgtgaaagagctacatcagtcaattttcagaattactttagtttttaaagaagacaagaattaaataatgtgtgaggaaactcctygccagccattttaatttttagagaaactaggaatgtg

SEQ ID NO: 399992 - DNA, 531 bp, Homo sapiens
gtgttcagctcgattaggatgaacctgggcacttagccatgcaggaacaatggcaagcctttagcccagtccagcacagcaatgggtgcctcactggatcaggagcacagcagacaccctgttggatccggaggggtggaagtcagtggtgggtctgcaacagcgacaaacagcactggtggacggtgagcgaaagctcagctcgagccrtaacaaacacggaccagaagagtgtgcagttgcaagatttaatagagtgaaaacagagctcccataaaatgggaggggacccaaagggggttaccatggccggctcaaatgcctgggtttatatcccaatcattgtccctcccactgtgctctcaggtgatagatgattggctatttctttacctcctgtttttgcctaattagcattttagtgagctctctttactacctgattggtcgggtgtgagctaagttgcaagccccgtgtttaaaggtggatgcagtccccttcccagctgggcttagggattcttagttggc

SEQ ID NO: 399993 - DNA, 620 bp, Homo sapiens
ctatgcctcattctttttggataatatgattactattgaatggatttactatcattcacttaatcaatactccttttgatggccattttaattgtctattttttccttttgcacagattggtgtaataaacctgattttatagtaatatttttgtctgcctgtgaaaatgtttgctggacaataaattcctaggagtcaaataaggtcaaagattataaatacagtatttattttcataaatattaccaagtcagccacaaatgtttaaattactaatggtttcagattattgtatttaatgagtaaacacttttatagggtttacttttatgaacacttttatttgccagatatcattctaagtcctttacaaaattaactttttwaatttgtaatataaccctgagatgtatattaggattatccccattctacagataagaacactgagaagttaattaacttgccacatatctaggaagtgacaaggctagttgcacagccaggcagtctggctcctgagtccacattttagacaacactatacctcctggttcttttgaggcattactgctggaactatcctaatactcataaataaacatttcttttggggagg

SEQ ID NO: 399994 - DNA, 619 bp, Homo sapiens
aatttattaatgatatcatctattttaaaagacgtatgtaaaacccaacccttaagaaaggattcctatcactgttcccacaggcaccctcctcagtcttatacctttccattccaccccccaaaacaaatcattcagcatatttatttcatactgtaatagaggaagtagcttctttttagattttcttagattattaacattgatcatacaaacatggaatagaaattccttatgttttatctggatttaaggtgctacataatggaatctatttctatcaagccatacacattggagataatgaaatcacttgtgttctagcctaaacgttatgggaatttcagaactgcaacataacagataatccttggacgaaaactaaatctctcctctggtcaggcatctatgtgcatcagtgaagagaagacggggactgtggaagggaaaacagtgagtcaggaaggactgtggccacatctgttccccggaccctcamgtagttaaatcctgacctcctctaccccagactgtcctggggaatggccaacactggcttttcacaactgtgtgttaccagaaatgcaacagaaacccagctgaatccccagggtttccc

SEQ ID NO: 399995 - DNA, 619 bp, Homo sapiens
aatttattaatgatatcatctattttaaaagacgtatgtaaaacccaacccttaagaaaggattcctatcactgttcccacaggcaccctcctcagtcttatacctttccattccaccccccaaaacaaatcattcagcatatttatttcatactgtaatagaggaagtagcttctttttagattttcttagattattaacattgatcatacaaacatggaatagaaattccttatgttttatctggatttaaggtgctacataatggaatctatttctatcaagccatacacattggagataatgaaatcacttgtgttctagcctaaacgttatgggaatttcagaactgcaacataacagataatccttggacgaaaactaaatctctcctctggtcaggcatctatgtgcatcagtgaagagaagacggggactgtggaagggaaaacagtgagtcaggaaggactgtggccacatctgttccccggaccctcacgtagttaaatcctgacctcctctaccccagactgtcctggggaayggccaacactggcttttcacaactgtgtgttaccagaaatgcaacagaaacccagctgaatccccagggtttccc

SEQ ID NO: 399996 - DNA, 565 bp, Homo sapiens
ctgttctctcccagtcaacactgaccctcagaggtcaccactattctgtcaccataaattagttttgcctattttggaacctcatatatacagtaatgcagtatttacttttttcgtgtgtatgtgtgcatggtgaactcatttttaagaccaaattttatgcatcttctctgtgaagcaaaaccctgtctgttccacacagacttagagtggcagaggagtaccttaacctatcaaaggctattttgagcaaaagccactttgtgtcattgaagctgtagaactgagccacaagagggaactgttaaagtcccagggtcaaggaccaggtacytacgttatccccacagcacagaagcacagcctgagtctcttctttggctgagccaagggcgtgctggagaggcctgagagaaggagcggcccttgtgaccagtgcccttttggttcacaaggaacgtctcctcttgttgaagtgacttggctgagcttgctccttctgctttcagagcccaatatcaggatcaagacttcaattatccccaatttacagatgatgaaacca

SEQ ID NO: 399997 - DNA, 565 bp, Homo sapiens
ctgttctctcccagtcaacactgaccctcagaggtcaccactattctgtcaccataaattagttttgcctattttggaacctcatatatacagtaatgcagtatttacttttttcgtgtgtatgtgtgcatggtgaactcatttttaagaccaaattttatgcatcttctctgtgaagcaaaaccctgtctgttccacacagacttagagtggcagaggagtaccttaacctatcaaaggctattttgagcaaaagccactttgtgtcattgaagctgtagaactgagccacaagagggaactgttaaagtcccagggtcaaggaccaggtacctacgttatccccacagcrcagaagcacagcctgagtctcttctttggctgagccaagggcgtgctggagaggcctgagagaaggagcggcccttgtgaccagtgcccttttggttcacaaggaacgtctcctcttgttgaagtgacttggctgagcttgctccttctgctttcagagcccaatatcaggatcaagacttcaattatccccaatttacagatgatgaaacca

SEQ ID NO: 399998 - DNA, 565 bp, Homo sapiens
ctgttctctcccagtcaacactgaccctcagaggtcaccactattctgtcaccataaattagttttgcctattttggaacctcatatatacagtaatgcagtatttacttttttcgtgtgtatgtgtgcatggtgaactcatttttaagaccaaattttatgcatcttctctgtgaagcaaaaccctgtctgttccacacagacttagagtggcagaggagtaccttaacctatcaaaggctattttgagcaaaagccactttgtgtcattgaagctgtagaactgagccacaagagggaactgttaaagtcccagggtcaaggaccaggtacctacgttatccccacagcacagaagcacagcctgagtctcttctttggctgagccaagggygtgctggagaggcctgagagaaggagcggcccttgtgaccagtgcccttttggttcacaaggaacgtctcctcttgttgaagtgacttggctgagcttgctccttctgctttcagagcccaatatcaggatcaagacttcaattatccccaatttacagatgatgaaacca

SEQ ID NO: 399999 - DNA, 603 bp, Homo sapiens
caaaggctattttgagcaaaagccactttgtgtcattgaagctgtagaactgagccacaagagggaactgttaaagtcccagggtcaaggaccaggtacctacgttatccccacagcacagaagcacagcctgagtctcttctttggctgagccaagggcgtgctggagaggcctgagagaaggagcggcccttgtgaccagtgcccttttggttcacaaggaacgtctcctcttgttgaagtgacttggctgagcttgctmcttctgctttcagagcccaatatcaggatcaagacttcaattatccccaatttacagatgatgaaaccatattgggcaggaaagaaagtcaccccaggagagcgagttggacccgggcactggctgaggacaaaggggaatgataatttgggatgtagcttgttaaggggtctcacaagtgttcttgtgatccaggtggcgagaggatagagcagaaaggttgccagggagacgagggtagggtgcactgcgagagtgggagaaattaaagagaacacgcaacaaagccttgggacactgggagggggatggaccacccagttttgtgctatgggagaaga

SEQ ID NO: 400000 - DNA, 565 bp, Homo sapiens
ctgttctctcccagtcaacactgaccctcagaggtcaccactattctgtcaccataaattagttttgcctattttggaacctcatatatacagtaatgcagtatttacttttttcgtgtgtatgtgtgcatggtgaactcatttttaagaccaaattttatgcatcttctctgtgaagcaaaaccctgtctgttccacacagacttagagtggcagaggagtaccttaacctatcaaaggctattttgagcaaaagccactttgtgtcattgaagctgtagaactgagccacaagagggaactgttaaagtcccagggtcaaggaccaggtacctacgttatccccacagcacagaagcacagcctgagtctcttctttggctgagccaagggcgtgctggagaggcctgagagaaggagcggcccttgtgaccagtgcccttttggttcacaaggaacgtctcctcttgttgaagtgacttggctgagcttgctccttctgctttsagagcccaatatcaggatcaagacttcaattatccccaatttacagatgatgaaacca

SEQ ID NO: 400001 - DNA, 539 bp, Homo sapiens
attctcttcttatgtatgcggaattttttttttttttgagatagagccttgctctgttgcccaggctggaatgcactggcacgatcttggctcactgcaactgccaccycctggtttcaagtgattctcctgcctcagcctcccgagtagatggaattacaggcgtgtgccaccgcacttggctaatatttgtatttttagtagagatggggtttcaccatattggccaggctgttctagaactcctgaccttgtgatccacccacttcagcctcccaaagtgctgggattacaggcatgagccactgcacctggcctatttttgtttttactaatgtttcaagagacccactttatgtacagaattctggctacaacctaacaaatgagttgctctgttcatcagttatagccaatttaagtaattatgaaaagctcaacaatacttttaactggcaatgaaagcgtcaatagctcacatttaccaccacaacttaggatttcttggtagctaaataaaatgcttctattttgtgggg

SEQ ID NO: 400002 - DNA, 539 bp, Homo sapiens
attctcttcttatgtatgcggaattttttttttttttgagatagagccttgctctgttgcccaggctggaatgcactggcacgatcttggctcactgcaactgccaccccctggtttcaagtgattctcctgcctcagcctcccgagtagatggaattacaggcgtgtgccaccgcacttggctaatatttgtatttttagtagagatggggtttcaccatattggccaggctgttctagaactcctgaccttgtgatccacccacttcagcctcccaaagtgctgggattacaggcatgagccactgcacctggcctatttttgtttttactaatgtttcaagagacccrctttatgtacagaattctggctacaacctaacaaatgagttgctctgttcatcagttatagccaatttaagtaattatgaaaagctcaacaatacttttaactggcaatgaaagcgtcaatagctcacatttaccaccacaacttaggatttcttggtagctaaataaaatgcttctattttgtgggg

SEQ ID NO: 400003 - DNA, 572 bp, Homo sapiens
ctcactcactctattgcccaggctggagtgcagtggcacgatcttggctcctgcaacctctgcctctcgggttcaagtcattctcctacctcagcctcccaagtagttggtaccacaggtacatgccaccacacccggctaatttttgtatttttggtagagatggggtttcaccatgtgggccaggctggtctcgaactcctgacctcaaggttataggcctgagccaccatgtcccagctccatgctaactttagagcttatttcccatcccataagatacaacactacttgtgttatatagtgagcagtgtggggaagaaaagcatagaattaagttagtgacaaatccagtgaactcaaaaagagggaaaaaaacactcccaaacaattgttttccccatattctattctccctagaggtattccatacaggaacgacaaaagaaaaaaaagsatacaaaatgagaaagatgttcatgtgacatataagtacagtaataaaatcaacaagcatatatggtatttaagcaaaatagtatgtatgcattgatggtcatctgatataaatc

SEQ ID NO: 400004 - DNA, 620 bp, Homo sapiens
ctatgcctcattctttttggataatatgattactattgaatggatttactatcattcacttaatcaatactccttttgatggccattttaattgtctattttttccttttgcacagattggtgtaataaacstgattttatagtaatatttttgtctgcctgtgaaaatgtttgctggacaataaattcctaggagtcaaataaggtcaaagattataaatacagtatttattttcataaatattaccaagtcagccacaaatgtttaaattactaatggtttcagattattgtatttaatgagtaaacacttttatagggtttacttttatgaacacttttatttgccagatatcattctaagtcctttacaaaattaactttttaaatttgtaatataaccctgagatgtatattaggattatccccattctacagataagaacactgagaagttaattaacttgccacatatctaggaagtgacaaggctagttgcacagccaggcagtctggctcctgagtccacattttagacaacactatacctcctggttcttttgaggcattactgctggaactatcctaatactcataaataaacatttcttttggggagg

SEQ ID NO: 400005 - DNA, 589 bp, Homo sapiens
gctgcaccccacacccaatgctcagacttaaaaaaaatgagaatggcttcttccatcaccattttgaccttcttaaataatattaatgttgatttacaaggtttaaaatggcaaagagggacaatgaatatgctaaaatcttgctttatctgtagttataaatggtgagcatgaaagcaacacaaataattaatctggtttcctttgttttgtcttggtcattggaaagtcaaaagtgratcttggcccaaatctctcatctagaggatagacttggaatagacaattactattttttgtatttttgctattgtcttttttcagctaaatgcctatgcattgctaggaaatgtcaagctttttggtctttggtaatattttatttaaggactttaatggaaattaaagaatattacttaaagttttttcccatcttggtactttacagggtcaaagaatgaaggagaaaagaaagaaaatgcaaaacaaacaaacaaacaaaaaaactatgcaaagtcttcacttaacctgaataaactgagtgtcatggcaaatgccaagttctttgcattttttttttttttttttt

SEQ ID NO: 400006 - DNA, 548 bp, Homo sapiens
cactatgttgtgcagacagtgcatatgttcttttcatatgtcctttcctattgaacacacaaaccaaatcaaatttaccagatttccatggacatgtaaatttgatttcgctttaactatgagccattgatttcagggtactgtgttttttagcatttaggttttacattatgattttatcttcaggaattcattgatttacacactatatcataaaatacatagaacctatggtcaaatatcagaatcaatgttctctgaactgagcaacaatggagaraaatcccagagctttacataatggctctattgcaaatttacagtcttgaagctcagttgagcagtttagaccgcttataaattatggaaagttgggcagaatatttgaaatctggactatcctagaatagctgggaagaagtttaaggttcagtgtagggtgggaggaagagacagctgtcaaaaattctagcttgggtaactgagacagaagatgccagaagatgaggtatttttagaggaaggatgatgagtcaatttgggacaca

SEQ ID NO: 400007 - DNA, 569 bp, Homo sapiens
cccaccactgctgttggtgtttggatgcacacaagctggaaatactaacggaagtgcctgaggcagaggggaggaaggagggaataagcagactttctctactggagtgcctcagaaacagcctcaagaacctggagatgatgttgaaaccaagaatcaacacataatagatgaattcatctaactagaagagattcattctaggtggaargtggagaacaaagtaacacatagctcaacgagttaataagcatttggaacagtgtaagtaaatacatagtaagtatttatcgaataaataaataaatatgctgagtgcttattttatgatgatcactttgtattatataatctgttcatcctcataaaacattatcaccatcttgcacataagaagctgtgctaccagattaggagatttgcccaaggccatataaaacttgcccaagttcatagagcaattcagagacagagctgacaaccccactctctaaaatagctccattcaaagttgtaaaggccatattccctgtctcccttctcttcaatgacatgccacttgatagcac

SEQ ID NO: 400008 - DNA, 569 bp, Homo sapiens
cccaccactgctgttggtgtttggatgcacacaagctggaaatactaacggaagtgcctgaggcagaggggaggaaggagggaataagcagactttctctactggagtgcctcagaaacagcctcaagaacctggagatgatgttgaaaccaagaatcaacacataatagatgaattcatctaactagaagagattcattctaggtggaaggtggagaacaaagtaacacatagytcaacgagttaataagcatttggaacagtgtaagtaaatacatagtaagtatttatcgaataaataaataaatatgctgagtgcttattttatgatgatcactttgtattatataatctgttcatcctcataaaacattatcaccatcttgcacataagaagctgtgctaccagattaggagatttgcccaaggccatataaaacttgcccaagttcatagagcaattcagagacagagctgacaaccccactctctaaaatagctccattcaaagttgtaaaggccatattccctgtctcccttctcttcaatgacatgccacttgatagcac

SEQ ID NO: 400009 - DNA, 580 bp, Homo sapiens
tgaatagaattgggagcaatgcagtgaaagctgtaatacagttgctattactctctagaaagtcagtgtagttgagcagtcagactatatacaaaaaaagaaaaattgatgattacctcatatgttcaacaaaccgatttgatattgattaacctgtatacttaaaacagaagcaatgtggatatgtacggatagaagaagagcttgaaaactgcagagtaatgcaccgagggtggaaagaaaatgctgtagactaaaccagtgagtgctgtactaagaggtgcaacatctttcaaattaagagtgggggccatctagtgtgtcatcacayttatttaattggaatcatgattaaaaagaagtttctagcataaactagactagattaatacaaaaatagtgcattacaaattgaaaaggtatggaccatttcagaaagactttgtttccatatataaaaataaactgtgtatgtaaaatagatcatgtacatttacgtgcatatataagatacatttatgtgtatatgtatataggtgcacttgggttgtggtataaaatatattttttacagtattca

SEQ ID NO: 400010 - DNA, 580 bp, Homo sapiens
tgaatagaattgggagcaatgcagtgaaagctgtaatacagttgctattactctctagaaagtcagtgtagttgagcagtcagactatatacaaaaaaagaaaaattgatgattacctcatatgttcaacaaaccgatttgatattgattaacctgtatacttaaaacagaagcaatgtggatatgtacggatagaagaagagcttgaaaactgcagagtaatgcaccgagggtggaaagaaaatgctgtagactaaaccagtgagtgctgtactaagaggtgcaacatctttcaaattaagagtgggggccatctagtgtgtcatcacacttatttaattggaatcatgattaaaaagaagtttctagcataaactagactagattaatacaaaaatagtgcattacaaattgaaaaggtatggaccatttcagaaagactttgtttccatatataaaaatawactgtgtatgtaaaatagatcatgtacatttacgtgcatatataagatacatttatgtgtatatgtatataggtgcacttgggttgtggtataaaatatattttttacagtattca

SEQ ID NO: 400011 - DNA, 408 bp, Homo sapiens
ctttgacattccctgactcaccaccacccttccccatagaggaagatggtggagagcttcactctcacctgtaccaagtgaaaaagagaggcttcaggaacattccttagagggtttagcatgtgttccrtaaggctggggagttccaggctgaggctattcttgctaggagaaatctaaggtaggaggctgtctgtagcagaaagatcaaggggatgtggtacggagagcaagccacacttgtattcatggcatgggtctttgccatggaccagttgtgggctttatggaagagaggtagcctggggttgtttggacagggactctacctgagaggactatctggagatgtgataaatatcacagaggaaagaatccccagaagttcaagtgttgaatggagaaaca

SEQ ID NO: 400012 - DNA, 537 bp, Homo sapiens
tttactttctttaggtataagaaatcctaaactctgaaccacaataaaaaactgcaggattagaaacctagattcaggacaagacaaccaaaatcataaagactcctttacaacttcatagtttgtgcaatcttagcaaataatattattttcatgatcagaaagtgtatttaaactttaacgtttttattttattttgtctaatttttattggccttacagacaagattattttattcttttctaattgctttaatgtctttcttgttcgatattttctgtttttctgttcagttatcatgactgcctatttagaaacagactttygaaggtgtgagtcttaaagtcagagcatagccagtcctcatatttattggtaattgacttttttttttttttttgatagggtctcacctgttgcccaggctacagtgcaatagtgagatcccagctcacttcagtcccaaactcctgggctcaagggatctttctgcctcagcctcctgagtaggtgggactgtaggcatgttccatcat

SEQ ID NO: 400013 - DNA, 605 bp, Homo sapiens
cttcttatcaaatttgtaagtatatagtagagtaatgttacctacaggcacaatgttgtacagcatttgttctacataatgttctacaggtatctgtagaacttattcttcttacctaactgaaactatgcctgttaaatggcaaatcccaattttcctctcacccagcctccagmaaccactatcctactttctgtttctgctagttttactatattgaactccatatataagtggaatcacatagtatttgtccttctgcaactagcttattttacttagcataatgtcctcaaggttcattcacgctttcttatatagcaggatttgtttattatggttggataatattccattatatgtttataagacattgtctttacacattcatctctcaatgaatattttggtcatttccacattatagctattgtgaataatcatacaaaggaattgaacagggagcccagaaggaaactcatgcttatatggtcaactggtgtttggcaagggtccaagaatactcactgggaaaaagagagtctctttaattaatgatgttgggaaaactgaatatccatagcaaaaaaataaaattgaacact

SEQ ID NO: 400014 - DNA, 532 bp, Homo sapiens
tgacatgaacaggctgagaatatttttcaagactaatggatctccctgtcaccagagacactcctgaaaaggcagctctcctgaagtgttagggtccatcctataaatttacataaatagaggttgtttcctttggtctttaaaagactcctgtgctacatcaattatataacccrttagggaattaaatagtaccctgttggggaatgagtctactctgctctctagcattttagtgtactgatttatttatcattttaacccaaataaatagtactccttaacttttctgagtcatgggctctttttttactagaatctcatggaaattacagtgtttttttcttcagaaaaatgcacatacataattttgcaatgaagttcacattgtcaatggactctctcaagtatatccatgagcttcaaaagaaacacagcctcagctatttcaaaggcatgaaaaacttgtgtctaggacaagtagttctgacaatttttttctcataggaaatgaagggctgatgttcaccca

SEQ ID NO: 400015 - DNA, 539 bp, Homo sapiens
tacagtggctcacaactgtaatcccagcactttgggaggctaaggcaggaggatcacctgaggccaggagtttgagaccactctggcaacacagtgagaccttgtctctataaaaaatttaaaaattagctggatgttgtggtgacatgcctgtagtcccagctacccaggaggctggtaagggaggattgcttgagcctaggagttcaagactgcagtgagctatgactgcaccactgccctccagcctgggcaacagagcaagatcctgtctcaaaaaaaaaaaaaaaaaaaaaaaaaaaaattcagccagatagaaagttgcccagaaaaagtatggaaagatggaaaaattgggggactgggaccgcgagtgtgtactgaatgagggtgcttaraaccgttgtgtaactgtgtgtgctgaaataatgtttattactggaatagctaatgataagttaattaggttatcttacgtagtttgattcaaaaaaaaacttattgtttgcctcatggaacgacctaagcctttacagatg

SEQ ID NO: 400016 - DNA, 539 bp, Homo sapiens
tacagtggctcacaactgtaatcccagcactttgggaggctaaggcaggaggatcacctgaggccaggagtttgagaccactctggcaacacagtgagaccttgtctctataaaaaatttaaaaattagctggatgttgtggtgacatgcctgtagtcccagctacccaggaggctggtaagggaggattgcttgagcctaggagttcaagactgcagtgagctatgactgcaccactgccctccagcctgggcaacagagcaagatcctgtctcaaaaaaaaaaaaaaaaaaaaaaaaaaaaattcagccagatagaaagttgcccagaaaaagtatggaaagatggaaaaattgggggactgggaccgcgagtgtgtactgaatgagggtgcttaaaaccgttgtgtaactgtgtgtgctgaaataatgtttattactggaatagctaatgataagttaattaggttatcttacgtagtttgattcaraaaaaaacttattgtttgcctcatggaacgacctaagcctttacagatg

SEQ ID NO: 400017 - DNA, 565 bp, Homo sapiens
atgaattacggacagtaggctgcaactgttggtgaggtctggcttataactatgaattactagggtacgtttccaaccttattcctgtttaattccaacatatgatatagagtatttttcttgcagtcttctgggcagggggttatttttcatttcccttgatgctaattatttacccccttaggtgcaggttcatggacaggaaaggttctcctattagaatacacacatggtatgagccatgggctttgaacccctctacttctagaagataggagaacacaaatgtcaagatcacaatctagacacatgctccacaaagcaaaatcataacttaatgtttcagttactttgctggtttccacttgcactcagtcacyagcctgagtattttctgcactgactatatttgaaagaggcttattcctttgtctacttttttaaagttttgtaagttttctagcaatccatgctgttttaggaaatgtcaatgctttgtaggttaataggcattttagttcaatcagggttctcctctgaatttggagaacctataagtaagact

SEQ ID NO: 400018 - DNA, 565 bp, Homo sapiens
atgaattacggacagtaggctgcaactgttggtgaggtctggcttataactatgaattactagggtacgtttccaaccttattcctgtttaattccaacatatgatatagagtatttttcttgcagtcttctgggcagggggttatttttcatttcccttgatgctaattatttacccccttaggtgcaggttcatggacaggaaaggttctcctattagaatacacacatggtatgagccatgggctttgaacccctctacttctagaagataggagaacacaaatgtcaagatcacaatctagacacatgctccacaaagcaaaatcataacttaatgtttcagttactttgctggtttccacttgcactcagtcaccagccygagtattttctgcactgactatatttgaaagaggcttattcctttgtctacttttttaaagttttgtaagttttctagcaatccatgctgttttaggaaatgtcaatgctttgtaggttaataggcattttagttcaatcagggttctcctctgaatttggagaacctataagtaagact

SEQ ID NO: 400019 - DNA, 583 bp, Homo sapiens
gtgtttaataaacttcacctgagtaacaaggcaagctgtgctggctgtcgattgccaatacgctgtttggatattagcttagagcacgggatttagatcttactagctgttgtgaacagttgtcattctattaatatatctttaaaggaaggctcattcctggagattttacattttatttccagaaaagccaagaacaaatgtgaatatgactgatagctaattttttctctcctttcttctttttcttgttgccgatgatgatggcccttcaggggacaaagggacagaagacacaaaatgcattctttggagttgggtttagacaccttcagttttctgctaaaaagttctagtctggttgaccccgaatcctcttagtgtttgatcatggacacgctgacagtaccgtcacccgcatgcctacacagaggatggcaaagaggaggggctgaaggcccgctaaagcactttcrtcgttgacaacattggcagtgaccttaatcagtgactctctaagctttttagcactgacagaaataaccgtttttttccactctgtctattttcatcatagacactt

SEQ ID NO: 400020 - DNA, 646 bp, Homo sapiens
actgatttgccacttgagagagaataaagaaactagcaatatccagatgttataattctgttctcaaygatactactggcagctcttgtgctccgggggaaaggaagggagcaggtctctcctgtggtgaaatcacggaggagaaagacggaagcctattctttgttgcacttcacactgagtgctttacacagagcagaggcccaattaatgcttgtggaattgaatttattgaattgcactgaaggaaaaagaggactcaaggggcttggagacttcaagagtatattgcaagagggtcagtttcaagtcaagactgaaattctaaatctctaggtatgtctgttgtgaactggagctatatataggtatatcttaaatgggaaacaaacaacaaatatacgtattggaactgctgaatgtttggtattggaccatatttatatatgatatgtgaaagaatatactgattttcaactaatattattttaatacatcttgagccaaaatttatttactttcctttaagtttttgtgaacttttgaatgatgataatcaggtaaagtgattaaagatgacatatttttacttaattaaaactcttaatggaaagtttttccactaaatttgaagagtaagttaagc

SEQ ID NO: 400021 - DNA, 618 bp, Homo sapiens
taagtgtgccaatggacagaggccataaagtattattagggggagaagttaagatttgttcttaattctggagcttctgttctcagttcccctgacaaacttagtgatttacattttagctatcattacctggccttatgaaaagcacataataacttgaatatgcccaaacatcccacagaaaaaaaaaatatgcagagaaatctgtcccacatttccttacctttggaaaagaatgaattacttaagcaaaacagcatttgaaagtaaatgtggtatctttggccataaatatgcttcctcctctttaaaggtacratgtcctctggactatatttctggccatggagtccatgccttgagagcttagtaaacatgatataagacaaatactcttgttcattatttattttctttgactatacacctagttaatgcagactgacaacttgaatggctatccagttatttttcaatgaccaagttatatatcatattgaggatagtaataaatgttgaactttcaaatcttatgcaaatatgttgtatttccatatatctcatgtttggcaatttattacttttatgtttttattttgaaactatttatagcttatt

SEQ ID NO: 400022 - DNA, 551 bp, Homo sapiens
tttcagtggaagaaattacctccaaccacatttaaaatgttttcaatgaccttcttaactgattttgagcactggaaatttctcatttctcccagcaatagctacagtctactaaacactaggtagaactgacagaagcagtgaaggaaaattgctaccaacttagagaacaaggtgcccggctactgacactgctcgtaatctcttctcatgggaaagtgtttaatatctacagtaacatttaaatttgagaagacatggtttttaaaattcatatacagcaataacaatagttaatgaggtaaattttattttcttcaaaatatcttgtatccctctaactcatrgaacgttagagatcactatggagaagccccagatgtgactcctgtgatacttagaagagaccctgaactcttattccctctcataaaattagtagacacacttgtggcacttcgttgattgctcagtccaaagtgatctgtcaaaaatcagcacctgcaagcgtcatgcacataaaagttaagaaaaaaagtgttttttttaac

SEQ ID NO: 400023 - DNA, 501 bp, Homo sapiens
atggaactaattcttctgaatcactgcactcttaccccagttcagttctaatagtattgactacaatctaagcatttttgcttcactcaacacagctcttaaagggctttctcttttgaaggcatactctctgtgggtggtcaatacccttatgaaattgtcagacttgaaagtaagatggattgttactggaacattaagtaggacagagagcagatgaaatttcaatacaacgttgcagctgttcataagctcaaaaacrtaaattagttcagctaaactgctaaattccaataagaaacaaactaaggagttggctacttgttccctaataggaggaaaatgcatctaaaacataaattgaaaccttgtcatcttaagaaactaacatttgcactaaattattccctccctaaacaacccagttaatctaatatttacaacccctgtatacaaatccagatggtctttcctaccactcagcacctgccatctctgcag

SEQ ID NO: 400024 - DNA, 545 bp, Homo sapiens
gcaatatcttcaaaacaccacttactttgaaaaatagtgaatgaaatgcatttaatggtaaaaattttgaaatattattacaagcagaaagtttgggcccttggaatcacayacacatgacagatgaaaaatattaaaggaggtatttaccacaaagaatattttcccaacagaaatgtagaaaggggtctggtctgatagagtaatgggttatatgaaaaccttcaaacatcttaattcagaaagatgaatgccaggaagcttaatgagttggggggagttcaagtttgctgattagaacatatagcagtatacatttcagtgggaccagagaatattttactgatcatgaaaatgtgaataagcaaagttgatgggtcttagaccaccttcactttcctttcctttatgttaataatcagaggaaatttaatcaatggaaaatataaaccaggaacaggctttagatataaatatagaagagacgagtaaaaatgtagaacaaaacagtaaaaacacctagaataaaacactggaattgggta

SEQ ID NO: 400025 - DNA, 573 bp, Homo sapiens
aattatttatttaatcttgagaatatgggtagtatttgtgatcctgctcttacaaaggaggcttaktaacttgcccaaggccacataatcttttaaacattctttgaaaaattgatacacgcacacatgtccatttactctcaaggtgttgctataatagcttgaactggcagtctcacagatcaactgaaatagtttgtgttccttagatgccttgcagcttcacttaggtatgatactgagaagcgatatgaaaaaaaaagtaagaaaatctgtctgcacccatgctgagctaagctataaccctgaccaaacactctcccaaaggctggttttgtttgataaagttaagaagcaaaacatgacagcacatggttaagacaaataactaaaaactgaaaaccaaaaaaacacgcacgcacaaaatcaaaaacaaaaactccaaacaaaaactcccaacaccccccagctggagtgaaagctctatatacaagcggttcccagcaggctctctggatgacaccgtgtcatggcttggctctgatttgcttgaagtcaactctgggtgacttg

SEQ ID NO: 400026 - DNA, 536 bp, Homo sapiens
aaggtcctcatctgagctacaagtggctctgagcagtggatgaggaaggcacatgggaaactgctgctggtgccatgaacctaaaaggtagaagaatgctgatatgaatggggcgggcattgtgcatggtctgcttcctcgaattctccttaaaaatagttgagcttgcaaatgatcctggttttccatttcaagtagtaatataaaaaatttcttttaggccaggcatggtagctcacgcccgtaatcccaacacattgggaggccaaggcaggaggatggcttgaggcctggatttcaagacaacatagtgagaccctatctctaccaaaaaattaataaataaaattattgtcttaaaaaattccaggccaggcgcrgtggctcacgcctgtaatctgagcactttgggaggctgaggcggacagatcacgaggtcaagagatcgagaccatcctggccaacatgatgaaactccatctctactaaaaatacaaaaagtagctaggcatggtggcacgcgcctatagtcccag

SEQ ID NO: 400027 - DNA, 595 bp, Homo sapiens
agacgccagccctgactaagagtactgagggtggcagttaccaattctgccatcttcaagttcctgcctaggacaatatatcatacaaacttttagacaggaggatgccttagtggcttcatctactgcagtcggcttgaaaagaacttgttaactgaagcacatgttctttctggtgcccttgcttctctcctataaacttacatgaytattaacacacatgggaaatgacaaaataaaaccactgaaaaactccttaaatttcatgtaggcataggtaggcagactaaaaatacaaattcacaaaggagctatctgcagaaaaacaattttacaataaagcaacagtaaatgacactaaataaatcacatactttgccactgtattaaaatgcaatacactcaacaccacagaagagtggtaactgtcggatagacagccttatgtctctacggggcatacgttgtttgtgctgggtcagaaggttatacgtgttttggaaaaacaaaaacactttcaaagatagcaattttttgtaatttgtgttatccaatgacattactataatttctcctttaacaactagtgagcatt

SEQ ID NO: 400028 - DNA, 595 bp, Homo sapiens
agacgccagccctgactaagagtactgagggtggcagttaccaattctgccatcttcaagttcctgcctaggacaatatatcatacaaacttttagacaggaggatgccttagtggcttcatctactgcagtcggcttgaaaagaacttgttaactgaagcacatgttctttctggtgcccttgcttctctcctataaacttacatgactattaacacacatgggaaatgacaaaataaaaccactgaaaaactccttaaatttcatgtaggcataggtaggcagactaaaaatacaaattcacaaaggagctatctgcagaaaaacaattttacaataaagcaacagtaaatgacactaaataaatcacatactttgccactgtattaaaatgcaatacactcaacaccacagaagagtggtaactgtcggatagacagccttatgtctctacggggcatacgttgtttgtgctgggtcagaaggttataygtgttttggaaaaacaaaaacactttcaaagatagcaattttttgtaatttgtgttatccaatgacattactataatttctcctttaacaactagtgagcatt

SEQ ID NO: 400029 - DNA, 509 bp, Homo sapiens
attagctacttcatgttaaagaaattacaagtgttcaactgaccatatggaattaaaatttacttagaaaaaaatgaaataaaaaaaaccaaaaagtaaactaattcagcaactttatgttttatggagtcatctagcctcatgtaaactaccattaagcaatacgtaaacatattaatctgcttaatacgaaagtaatgtcgtctggccgcagacattctgaaagttttgccacattgtttcaaaatattggcttgtagcccttttcaaagctactgattattgaaaacttggcgaccatgtttaacaatgaagaaaaggcttccccgagcctacgtagattggattctctaatacatagtaataatgttttttaaaataatgaggtgtgtaataaaatggaggaatatccatgatgcrttgttggctaataaaacgatatactgtactatatatgatcccaatcttgtttctaaagcacactcattaaatgcacagaaaaaaaaaat

SEQ ID NO: 400030 - DNA, 532 bp, Homo sapiens
caacatattgagaccctgtctgtacataaaaattaaatgagttgccagctgtcatgacaagtgcctgtagtcccagctactaragaggctgaggtgggaggatggcttgagcccagacagttaaggctgccatgagctgtgattgcaccactgtgctctagtctgggtgaaagagtgagaccttgtctcaaaaactttaaaatttttaattaaaattaaaaataaaataaaatttaaaataaattttaaaattaagataatcttaaacaatatttacccacacttaaaatccttccagaagcattgctgttgaaagaggtcctaaggtaacaagtacacctgggccttctcagatagggtagtggcccacctgaaagtctttactgcagcggatttttcagttgtacacaccttctagcatgattattaacatatggcagagggcaataatcacccccaaagaactataatattgtggaaaacatttttttcaaataaaattcctacatttcaataattacattaagcaccc

SEQ ID NO: 400031 - DNA, 586 bp, Homo sapiens
atgctacaaattgactctattggcctctcagatttgctttttacatgctgtgaacacagagtattcaataaatattagttacgcaataatattgtaacaattttttccagaggataagaactaactttaacagaaaataagcagcagaagagaaaaagatggcaaaacagctatgaaataatagactttggaggaatctttgctgtcaggcacataagtatagatttacttaatattctgtttaatggtgattttatgcaattttataatcagtccaattaaacaactcatataaggaaagaatagcattcagtctacagggagacattatccatagagacacatgttaagtaggaaaataaacctctgtctctgacatgtaaaatacaacatccctctcatctcctcaaatcggatatataaggacttttattacaacttgccaaaatggcaagattgttttgtttygattttcttttttttttttttttttcacttagttctttcttattttttccttcttttggacatacagctctgaatcagaagactgtaaagaattctactcataaataccaaaagctta

SEQ ID NO: 400032 - DNA, 596 bp, Homo sapiens
atgtcccaatatgttaatttcccattaataccaatattcccaatattaccatctgattttgatggtaatattgcagttatataacagattgctcttgttcccaggagatacactaatgtattaggaagaaatggaacaagttggtcacttaacactcatatgggtcaagagacttttttaagtgctgtactgtactttcacatttgagattatttcaaaaaaaatttaatgccctaaaaataaattttaaaaattatttctaaaaaacaaagaaagaaaattacatctaggtcatagaagatgtaaattctttgtggttgtctagatgcaaacccctcacccacttttcaacttcaagagtctatttttgtgttaataataaaggccattcatcaaacataccatagcaagttgagcattgtatgtacattatctcatttactattcccaatactcctatgagataggtattatttttatccctttacraaggaagaaactcaggaagagagaggttgagatgtttgcccagtttgcttaatttataactggcagagctgggataggaactaggtatgtctcactccaaagcctgt

SEQ ID NO: 400033 - DNA, 598 bp, Homo sapiens
gttttatttccctacatgtaaactttgcaaagttaaaggccaagtcacactccattctttatctcacataagcagtggctgtcaaattttattgtgcaccaaaatcacccaaagagcttgttaaaaaacagattactgggcygtatcaccagagtttctgattcagtagtctagggtagggcctagaatttacttttctaataaattcccatgcgatgctggtgttgctggtccagggactgcactttgaaaaacatttcagtactgtatagagcttaccagtctcttaccaaagtagctaaatagtgttttttgatttataaaactataacacatacattatcttctttgctataatatgtccaaatacagatataatatatgtatgccatagaatgcctcatattatatggtaataataaattggttggttcatctttcccaccttttattcattcactcatttcttcaacaaatatttcttaagtattgactgtgtgccttgtactgatagagcagtgaataagacagattagcctctgctatgataaaaactaacagtctagtagaaaaaaagaagactaagcaaaatatgaca

SEQ ID NO: 400034 - DNA, 550 bp, Homo sapiens
ggctaaggtacccagggcagattctctgttttttctgctgccattatctgagagcagaacacagaataaaaatttttggtttgagtcctggctctaccatcaacaatgtgacttttgttaagttattctgcctcaaattgcattatttgtaaaaagggggataaagataaaatccacctcatggagcattgtgaggattaaatgagagaattaatgtgatgcccttaataagcctggcacagtayaagtactcaggcacaatatctctctattaccttacattctataattaggacaactgtcaatagagtgctacttcttgacttttaatagacattttttggatagatatacatgactataacataatgaaattgattgttaaacagttattccttccattgggcctatgtcaatcttcctttaacttcaacacttttgttctaaactttgaggatcttcttccacatgaaagctgaaagtttcaaggctccatggtcacttttggttgtacctccctaataccttaaactgtaaattccttcatatg

SEQ ID NO: 400035 - DNA, 594 bp, Homo sapiens
gtggcagtgttcagacgtctttcccctgtgaccttctgatcccctggggaatagccatggctgaggaccatcagttgtctccaggcttgaatgctgtccaatgagagattggagctggaaaacaggaaagggggatagtaggggagaggtccccatacgggtcaccaaaatgtcataggtgcatctggctgaagctgacatyataggtggtaacagttattgaaacaatagtgagttaaagaaagcaagtttattagagagaaagtatattccaaggaaacaacaggcatcacagcagagaaggggctgtctgcaaagaggcaggggctgaagggaagttttatagggtcgtgctggagtggcctgtgtagataaggtcgtgctgctagggttatgtgtagagcaaggtatttgggaacaggatgttgtgccaacaggtttgtggttagctgtctctcagacaattgttctcccccacctgctgcctcttccttgttgttgattgtttatcttattaggactccacagaggaatcacgttttggagtttcttttctcatgcatccagtagagtaagaaaagcctatatcctcca

SEQ ID NO: 400036 - DNA, 552 bp, Homo sapiens
gagatcattgtagcatgccctctgaagccttggagtcatgggccccccaacctggacactgccacaaggcctgcatggaatttsctcctgtaagggccaaagtgtctggcaagttcctgcactctcttgcctatgtgatccctcccatgtgcggtggatcatggtgggcctaagtaagtggagttcctcttgccagtgccaaagcagccagccattcccatacttgtgtgcttgtgtgctccctaccaaacaccgcatgttctcgctcataactgggagttgaacaatgagaacacatagacacagggaggggaacatcacacagtagggcctgttgggggatgggggactaggggagggatagcatcaggagaagtacctaatgtagatatcaggttgatgggtgtagcaaatcagcatggcacatgtatacctatataacaatcctgcatgttctgcacatgtatcccagaacttaaagtataatttaaaaaaaaagaaagaaagaaaagaaaaagaaaacatcctgcatcaatacaatgcagtttcact

SEQ ID NO: 400037 - DNA, 581 bp, Homo sapiens
tacctaatgtagatatcaggttgatgggtgtagcaaatcagcatggcacatgtatacctatataacaatcctgcatgttctgcacatgtatcccagaacttaaagtataatttaaaaaaaaagaaagaaagaaaagaaaaagaaaacatcctgcatcaatacaatgcagtttcactcatctttgtattctttaagtgtggcataaagtaggcttctgggcaatcaatgaaaatgtgttgaaagaatgaagaaataatttattaaatattttgtacgcccactttgctttcttttactcagaaccctcaattctgatgaagaaacatttgcttcacaaggagtcattttaccacagtcctcaaaaaatgttagaaaccaaaactttttagtgttgcaccacaagttatagagagtataaactttccattctgggtaataacagttttttcaggatatcctttggtagyagttacataattcaaactcagtggacttcctctatgctcccacaaaattttgcatccatctctactttaggattttgctatggactggatgcttgtatcccttcaaaattcata

SEQ ID NO: 400038 - DNA, 596 bp, Homo sapiens
gctctcactttcttcaggttttcattaataagtcactttttcaataacacctgccctcatcatcctttctgcccactcaccatttcatatcctccatccctactttattctgtcctgaactttgatcataatctaattaattatttatcttgttgatcatctgtcttccccattagaatgtaaacccagtaaagacatatttttttgggtcagtttaattcccttcaatattccaagtacctagagtagtgcttaggatataggaggcaggtaataaatatttgttgaacagatgaataagccctcatgtctcaccactctccccctaattcactgtgctccagacacacttgtcttctccttcccttatcatgcacaccaaacatcctcyccctcagagcctttgtattgtacttccttctgcctcggatctcctttcaaagatatccatatggggttttttcccacattttattcagacctatatccaaatgttgtcatgtccaagaagccttctcaggtcaaattatctaaaatggcagtctcatttttcatacacttttcttatactttttttttcctttataaccgtggca

SEQ ID NO: 400039 - DNA, 477 bp, Homo sapiens
agatgcttaagactactagagagggaggcaaggagcaggcatgggttgaaaaactacctatcaggtaccatgctcattacctgggtgatggaatctgtaccccaaacctcagcatcacacaatatccacatgtaacaaacctgcacatgtaccccctgtatctaaaataaaagttgaaattttaagaaataaaagttacctcttcataaaagctttttctgacacctctggtctctaggctagattatatactccacttctgtgttctctgagtttaattctcttataacactttcattacaatatttttccatatattagtacttctttagtctctgtcactagggtataaactccttgaagacagagagaactaggtcatttatcacaactccagtgcctaacawactgcatgatggtcaaaatagaatcccaaaatcaggacatcagcatggccgtgttctccctgagggttct

SEQ ID NO: 400040 - DNA, 548 bp, Homo sapiens
tctgtctcctccttatggcattgcctcctctttccttttctyttctctctgtttatttttcaacccaaagcattccaatgttgacttggggcagatattctgctgccactccagaggtagtctcaaacatccctatagcttcttcagcatcacctctaaatttctgactaccatttctccatctcaaatcacaaccactcttcttagctcccaaaccatattcctaaacatttacatctgaatgtcatacagatacttgttaatatgtccaatattgagctcatccctactaccatggaacttgttccttctctgtattacctagctccccaatgccatcaccaaccagacacttattgtagaaacctctgaattatctctgattccttccttatctccttcctttaatcaaaattgaatttccaaatttcaatctccaaaaatatttcttgagttcaatcattgctctgcatatccatagtgacataattgttatattaacaatatatgtgttataatttttataataaaaataatataattgcata

SEQ ID NO: 400041 - DNA, 548 bp, Homo sapiens
tctgtctcctccttatggcattgcctcctctttccttttctcttctctcwgtttatttttcaacccaaagcattccaatgttgacttggggcagatattctgctgccactccagaggtagtctcaaacatccctatagcttcttcagcatcacctctaaatttctgactaccatttctccatctcaaatcacaaccactcttcttagctcccaaaccatattcctaaacatttacatctgaatgtcatacagatacttgttaatatgtccaatattgagctcatccctactaccatggaacttgttccttctctgtattacctagctccccaatgccatcaccaaccagacacttattgtagaaacctctgaattatctctgattccttccttatctccttcctttaatcaaaattgaatttccaaatttcaatctccaaaaatatttcttgagttcaatcattgctctgcatatccatagtgacataattgttatattaacaatatatgtgttataatttttataataaaaataatataattgcata

SEQ ID NO: 400042 - DNA, 530 bp, Homo sapiens
gattatcttcttgttgggtatcttactggggttccctggattttttgaatttgaatgttggcccgatttgctaggttagggaagttctcctggatgatattctgaagtatgttttccaacttagttccattctccttgtctctttcaggtaccccaatcattcataggtttggtcactttacgtaatcctatatttctcagaggtttggtttgttcattttcattctttactctctattttttttgcctgtcttatttcagaaagrttgtcttcaagctctgagattctttcctctgcttggtctatgctgctattgatacttgtggtcgcattgtaacattcttgtgttgtttttcagcttcatcagatctattatgttcccactaaactagctgttctggttatcaggtcttgtattgtttcatcatgattcttaccttctttgcattgggttagaatatgctcctttagctcagcaaagtttgttattcattattaaccactctctgaagcctacttctgtcaattc

SEQ ID NO: 400043 - DNA, 510 bp, Homo sapiens
cccataggttttggtgtggtgttttctactttcattttccattacttttaatggcaaaaaaagcattacttttgcaccaaactaatacaacacaaaaataaamatcagaccatatataaatgaaattgatactaaaaaaatacaaaagatcaatgagatgaaaatctggttttttaaagacaaacaaaattaacaaacctgtagctagattaagacaaaaaaagagaagagccatataaacaaaatgagagaagagccatataaacaaaattagagatgaaaaaggagacattacaactgataccacagaaatacaaaggatcattagagacaactatatgccaacacattaggaaacctagaagaaattagtgaataaatttctggacatatacaacttaccacaagtgaatcaggaagaaatagaaaacatgaacaaataagtataatgagatcaaagaagtaataaaaagtctcctatcaaaaaaatgcctaggacctgatggcttc

SEQ ID NO: 400044 - DNA, 620 bp, Homo sapiens
gtttattcatgaaaaactactcaactacaggtaagagagtggaaattagtgtcagcgttgactgggcatgctcccrtctccactccatccagctcagtttgctagttctattaggatgggaaaagtagtaagaaccagtatctttgcagcctaagggaactcgcttgatttggagtggaacatgagaaaaaaatccacactcagtggcattggcagtaacagtaacagtctcagtggcaagcaaaaggaataaacagtggctccagtgaccttaggttgtagtgctggttggggcatgcaaaacatcagcagactaattggtagttcaacaggaagatccacgaaatgagacggccataaagggccttgataagctattcacaccaccctgctgatgggaaagtcttaaaactgttcaggagagattagagaaggccttagtctctctatgtgtccctggctgaatataatccacaagcgcagaggagacatgggaatagaggacctaaagagagtaaaagttggcaatggcttgtaaactacttgaactatgaatggaatccccaaaccaaacacagatccatcagtagagggtggaagccttgctgattcaagatatt

SEQ ID NO: 400045 - DNA, 620 bp, Homo sapiens
gtttattcatgaaaaactactcaactacaggtaagagagtggaaattagtgtcagcgttgactgggcatgctcccatctccactccatccagctcagtttgctagttctattaggatgggaaaagtagtaagaaccagtatctttgcagcctaagggaactcgcttgatttggagtggaacatgagaaaaaaatccacactcagtggcattggcagtaacagtaacagtctcagtggcaagcaaaaggaataaacagtggctccagtgaccttaggttgtagtgctggttggggcatgcaaaacatcagcagactaattggtagttcaacaggaagatccacgaaatgagacggccataaagggccttgataagctattcacaccaccctgctgatgggaaagtcttaaaactgttcaggagagattagagaaggccttagtctctctatgtgtccctggctgaatataatccacaagcgcagaggagacatgggaayagaggacctaaagagagtaaaagttggcaatggcttgtaaactacttgaactatgaatggaatccccaaaccaaacacagatccatcagtagagggtggaagccttgctgattcaagatatt

SEQ ID NO: 400046 - DNA, 564 bp, Homo sapiens
gcagtcaacagaaactctcttaatgaatacacaatagacctaacaatgactttaaagcaaatattacaaatatattataagaattaaagcccatttttaaaaaattaaagtatgactataatgactcaactaacagaaaatctcaataaaaatgaagcaattgttttaaaaatttaagtggaaattctgaagtataacatttaataactgaaatttaaaactcactagagagactcaacaacagttctgaaatgtcagaagaaattatcagtaaacctgaagattagaaatgatctaacctgaagaacaaagagaaaatgaagaaaaattaacagagccttggagacctctaggacaacatcaaacacaccaacacaagtaacgggagtcccaaaaggtgaaaacactgggaaacagacagtaaaaataagccccaagcttttaaaatttgataaaaactgctaatctatagatccatgaaactgaacaaaaccagaatagaaaaaatgcaaagcaatatccatctaaatacatcayagaaaaactgttgaaagaaaaagagaa

SEQ ID NO: 400047 - DNA, 583 bp, Homo sapiens
gcctgggcaacaaagcaagactctgtctcaaaataaataaataaataaataaataaataaataaataaataaataaataaataaaataaaaataaaaaataaaaaaaagttaagataataggaaaagcagcctctgaccaataggcagcagatgagtttccacatgccattaagaaaatcattgaggaaacaggattcttacctaaacaggtttttaatgcggacaaacytgccctattctggaaaaaaaatccacaaagaatatttactagtaagggaaagaagtgagcaccaggatttaaggcaaaaagggataggcaaactctactataatattttgtacaaatgcataaatcaagtttctaattaggactgctttaatttataaagctgctttgaagggaaaagatgaacaccaactgccagtcttttggttgtacaagaagggctggacaatgaaaaccctttttctggactggttcctctggtgctatgtctccaaagtcagaaagcaccttgccagtaagggtctgccttttaagagcctgttttgtcagtctgacagtctgtattttaacattat

SEQ ID NO: 400048 - DNA, 548 bp, Homo sapiens
gacgcaggaagcaacataatttgtttgaggatctgagagaaagccagtgtggcgtgacaacaactaaaagaggatgtggtaaagctgcagacatagacggggctccattttagtctttatttaaaaataatgtaaggccactgaaagggttcaatattaatcctttattctaactaaagctaccgagaaactaacatgccaacttctccagctacaaacggaaggaatcatcactctgaaggcagcctcatgatataattttatgctccaaaaacattaatttgcccagtatgtagcaggccctaacctagaaagaaatgagtaaaagaaaattaaagaatatgctgtctaatgttttatggtctgatggtagagacagggtcttactggaagaaaatacagsaagcactaaaatagtggtatgtgctggatgctatgagaatagtcttttgttccttcctccaaggaaagaattgagcatttaggaggaccccattaagttccccccagttttagggactgaacaaaataataagtaaataaactac

SEQ ID NO: 400049 - DNA, 576 bp, Homo sapiens
ttatctagggataaagtactgtaggaaaagggaacagagggtgaaaatatcttaagtcaggaatgtactattcatgctcaagaatcaacaaaaagccacagagactggagcagagtgaatgaaggtgaatcatgacagaagaggatgttggaaacatggtgtggtggcttattgtttagacctttggattttttttttcagtaaggaaaatcaatggaagktttcgaatagagaaattttatgatctaacttccattttaaagtgtccctccttagtctcatgtatggtccaaaaaataaaataaaataaaataaaataatctctccagctactgtttagggaataggaaactattgagcactctaggtaagagatgatagtgatttgaatgagggtaataatggacaaagtgatgaaaaaatattggatatattttgaagatagggagaaagagatttttgcctatagactacatgaaggctatgagagagaaaaagtagttttttagcctgggcaagtggaaaaattgagtcactatttattaagatggaaaagacaatgggagaagttgagta

SEQ ID NO: 400050 - DNA, 558 bp, Homo sapiens
aagagtaagttcaagagagaattagaggaaaagagatgcagacagtaagtgtgtataaatttgttgagtctggagtaaatgggagcagagaaatggggcagttccgagagaaaaaagggatcgatgttatattaaggctataagaatcaaccaggaaatgtgtggcagcagttccctatttcctrttacattttacttcattatattcagtaatattctcctctactccacttttatacctactctccaaaccttatcatcactccaaagtgccctactatatcataaatagatacactccaccttctggtcaccatatccttttctcacctcatctgtactttgactccagtggtacctccagtgtactgattcctctacatcaccgccacccataagcccctttccgtgtaaattttcctatccattcagcttatattccttggtccatcacttcagtcactctctcattaagattctaaactcctttcctctatggtcattccactgagtacaggaaatcctcaatcttggaaattttggatgaaaatcatttgc

SEQ ID NO: 400051 - DNA, 499 bp, Homo sapiens
tcacatgagcacccccaatactaggcttctgagagttatactaaatgccacttacctggaagaagtttgaaaataaastcagggataatatgaatgtagaggtctctaccatttctatcttaaaatgttttcccatatatcaaaatacacaatcagtttaaaaggtcaattaatctcaatcctcaatgtccaagaagtttcttaaagctaagccagagtttattctcaaataactgtttggcaagtgagaagaaatgtgaaacatatcatttactcacatcggattccaaagtatttatctaaatcgactctagaaataaagtatgccaatccattctctaaaggatttttctcttctgcttttcagttaagccaagtctgaaatgactttttaattaatatattgaattcttgtctagtatcaaaaacttggccaattgatggcagatagggaaaaaagaaacacttgaatcacttcaactaagagctgttttggtat

SEQ ID NO: 400052 - DNA, 545 bp, Homo sapiens
cgggtatcattatttcagaatttaagacaatttataactgaaactgggcataagatttcccaatttacaatccataagggaaaagggaggttcttcctagggaagaaagttatttattgactcaaaacaataaactgctctttaaacacattgtaagtatatattttaacaaagaaagtacattagatcaggattacattttgctgattrgggtgacatgtcgtctctgtctcgtgaccagttacttacctaagagcagtattacataaaacactcactagtggtgcctgccacacttgtgattccttcccaggcaggaacttccgatgctacacccttctccaaggagggtgtctgagtttagggcagtcaggtgttctatgaagggactcactaaaaactagattctcaatctttgggattaagattgggaaatacagacagaatccagcaattagcagccatagttgcggctaacagggaaagaagagagaagctggatgggccataaggagctatgagtgagccaaaattctgactaagta

SEQ ID NO: 400053 - DNA, 452 bp, Homo sapiens
caccattgcattccagcctgggtgacagagcaagactctgactcaaaaaaaaaaaaaaattaaaaggtataacagtacatctcccttccttctattatttctaaacaaaacaaaaaaaactaaaacaagaactaaaaaaaatgaagagaggcaaactctgtaattctgtcagtaactattacaaagcttctaatatttctrtcctaataggctagcaattctttttgaaaaactgtgaaacggggaataaaatattgctggattgacttcaaagtaaagaaactttcttaattaagcaaaaatctacctttaaattgagtgatgcacagataacgtgttatttttcgggctgtgacaaatctagctcatgacttgtaggtggcaggagaaacaaatacatatgcatgcaaacaatctatgtttttaatgtggtgttgagttttaagaaagtc

SEQ ID NO: 400054 - DNA, 504 bp, Homo sapiens
ctcccgctccgctggcggccggggaagttcccaccaaaggagtcaggccgctttgtgtgtgctttcggggccacggccctggttctcctcctccctccctgctcgccctgcgccttggccccagacratcaggcttgcgttagacgccccctgggtaccccgagggcgggtcgtttgaacggccgccagttctcacattcagaattctcctgccaccaaagagaacctgaagttcatttacaagttgacgagcgggatacctacatggtgtccctttgcaagacgccagttagaaaataacccaagttgtaagtttccggcgctttacttgccggtatccctttcccaccttgcctaatctaatcgcagtccttctagtttttcttagtaaatgaaacttgattccttaggtctctggctgttcagacttcattttttccaagccgcctggatcccagggaggcgatttaaggggctgtggaattagaataagacatgcaggag

SEQ ID NO: 400055 - DNA, 593 bp, Homo sapiens
aactgccagggagcgaaagacccaacagagcctgaagggcaaggggggaggggggctctagaggcagagattgtttgtgtgacaagaaatcacttgttcagggtatgagaagagaggcccagtcagggtgctggttacatggtgtgttcaattcatgaacatgcaccaagatatacattttttatatgtacacttttccacatgcatattatacttcaataagggcaatatttaaaagaaaagacagagctctttgctacatagatgaaaaatggaagggaagggtcttggaatggtgttccaagcagagggaaatcttgcctagaagaggcatttcagcaactgcaaaaggttcccactggctggagagtctgtcctgagactggaaattacaagatgtggctgaaaagggaggcaagagacaattcccaaaagacyttaaacactgtgcttcaaattaagtcttgagggtgacgggagagctactaaaggcatttcagcctgggagcaacgtgatcaagaattttggtatagcagtatctttctggtagcaatgcacactacagccagaaacaagaatggaaaaaaggaac

SEQ ID NO: 400056 - DNA, 593 bp, Homo sapiens
aactgccagggagcgaaagacccaacagagcctgaagggcaaggggggaggggggctctagaggcagagattgtttgtgtgacaagaaatcacttgttcagggtatgagaagagaggcccagtcagggtgctggttacatggtgtgttcaattcatgaacatgcaccaagatatacattttttatatgtacacttttccacatgcatattatacttcaataagggcaatatttaaaagaaaagacagagctctttgctacatagatgaaaaatggaagggaagggtcttggaatggtgttccaagcagagggaaatcttgcctagaagaggcatttcagcaactgcaaaaggttcccactggctggagagtctgtcctgagactggaaattacaagatgtggctgaaaagggaggcaagagacaattcccaaaagaccttaaacactgtgcttcaaattaagtcttgagggtgacgggagagctactaaaggcatttcagcctgggagcaacgtgatcaasaattttggtatagcagtatctttctggtagcaatgcacactacagccagaaacaagaatggaaaaaaggaac

SEQ ID NO: 400057 - DNA, 599 bp, Homo sapiens
atttgggtccacctaagtagagactctgcatttaatgttgcagcttggggagttaaaaaaggttctaacagtttatttgcttggctagctaaaatatggattaaaagatggcccactgtgaacgagctggaaatgcctcatctctcttggcttaatgtagaggaagggatccaaaggcttaaggagattgggatggtggagtggattagtcactttagacctactcatcctagctgggaaggtccagaagatatacccttgaccaataccttgtgaaatagatttgtgagggcagcacctgcatctttgaagagccctgtaattgctcttctctgtatgacagatctaacagtgggaaccacagtcactcaactacaaaatttaaatacaatgagaatgattggatcccaaggtgtcaggggccaagtggagacactcaaccatcaaaggcaaggtgggcatagctatcaaaatggacagcagaggcaaagcagccatcagcatagtctgagttgtgtagagctctggcgttggctaattaatcacatwatacctagaaatgaaactgataggaagcctactgcattcctacttaattt

SEQ ID NO: 400058 - DNA, 632 bp, Homo sapiens
aactggcatagctttaagtgccccttatacttctaaaggtaggggtacctacttttgggggctcaactcacccccaaattccttctttagagaggtaaggaacaaagattaacaaggctgaagagtataaacaggtcggaaagcctccaaaaagacagaaatatttgaaatctactaagacaaggatatcaatgtctggaagaaggaatttaataatttccaacatttttaacccctctgtaaatataaagctccctcccatcgattttacatcatttccaggtcatgaataaacttmtgaaccagaatactcctaagagcattacaatttctccactgacgttttaaaacacaagaacaacaatacaataaagagaaaactttatttttaggtttgcaaaatcctgtgtttatttttctaaaactgaagtcaaacaactgaacctgctttgtttggattttagtaaacttattctctcttaatcctgggggaccaaactctgcccagaaggaaatgaagaaaaagtcctccgtgcccgtgccatgctggaaagttaaaacacggtgcctcctttggttttctgttcaggcacatctgagcctcctgctgctggtcacggttcacactgctg

SEQ ID NO: 400059 - DNA, 611 bp, Homo sapiens
gggtcttggagccagccttcaagatgaggtgaagacttggatgagcaagtccaacaggaaacaaattccasacaaagaaacggcatgagcaaagcacaagtgtggagccaagaagaaaaactgacagctgcaagggtcaaaaactcaaaacacctacagcagccaggcaggaatacaatggagaaaagagggtcctgaaaaacaacagctacagtctcagtgacaagggcccttgatgctcagtctctgtgacgggagactttaggagtgctgggccctgtgtgaagccctggagcccactgtcagcaccctcccaccaaggtccaaggcaggcccctgctgcttggcaccagaagaaagttgccatagagaaatgtagacccaggattgctggatatcccagttttcccaaaaaagccaaacattggaatctttatgaaaaagctccctttcttactgtagttggcaacaaattcatttttaaaaaaatagaaaagcgatttctcctgcctaatttagtccgcaaaactaaagtctgccaactgtgtggttatgatgtctaaaatgtacctaaaatacttcaacatatgccatgtgatattatgtttgtg

SEQ ID NO: 400060 - DNA, 564 bp, Homo sapiens
taaaatatggttcaacatatgcaaatcaatcagtgtgatacatcatatcaacagaatgaagtacaaatcaatayaatcatttcaattcatgctgaaaaagcatttgataaaattcaacagcccttcatggtaaaacccctcaaaaatctgagtatagatggaacatgcctcaacataatagaaaccatatacaacagacccacagctagtatcatactgaatgaggaaaaactggaagcttctcttctaaactcaggaatacagcaaggttgcccacttttaccactgttattcaacatagtactggaaatcctagctagagcaattagacaagaaaaagaaataaagagcatccaagtataaaaattagccaggtgtggtggcacgcacctgtaatcccagctactcaggaggctgaggcaggagaatcacttgaactcgggaggtggaggttgcagtgagtcgagattacctgggtgacagagtgagactccgtcttaaaaaaaaaaaaaaaagcattcaaattggaaaggaagaagtcaaattatccttgttcacagatga

SEQ ID NO: 400061 - DNA, 611 bp, Homo sapiens
gggtcttggagccagccttcaagatgaggtgaagacttggatgagcaagtccaacaggaaacaaattccagacaaagaaacggcatgagcaaagcacaagtgtggagccaagaagaaaaactgacagctgcaagggtcaaaaactcaaaacacctacagcagccaggcaggaatacaatggagaaaagagggtcctgaaaaacaacagctacagtctcagtgacaagggcccttgatgytcagtctctgtgacgggagactttaggagtgctgggccctgtgtgaagccctggagcccactgtcagcaccctcccaccaaggtccaaggcaggcccctgctgcttggcaccagaagaaagttgccatagagaaatgtagacccaggattgctggatatcccagttttcccaaaaaagccaaacattggaatctttatgaaaaagctccctttcttactgtagttggcaacaaattcatttttaaaaaaatagaaaagcgatttctcctgcctaatttagtccgcaaaactaaagtctgccaactgtgtggttatgatgtctaaaatgtacctaaaatacttcaacatatgccatgtgatattatgtttgtg

SEQ ID NO: 400062 - DNA, 611 bp, Homo sapiens
gggtcttggagccagccttcaagatgaggtgaagacttggatgagcaagtccaacaggaaacaaattccagacaaagaaacggcatgagcaaagcacaagtgtggagccaagaagaaaaactgacagctgcaagggtcaaaaactcaaaacacctacagcagccaggcaggaatacaatggagaaaagagggtcctgaaaaacaacagctacagtctcagtgacaagggcccttgatgctcagtctctgtgacgggagactttaggagtgctgggccctgtgtgaagccctggagcccactgtcagcaccctcccaccaaggtccaaggcaggcccctgctgcttggcaccagaagaaagttgccatagagaaatgtagacccaggattgctggatatcccagttttcccaaaaaagccaaacattggaatctttatgaaaaagctccctttcttactgtagttggcaacaaattcatttttaaaaaaatrgaaaagcgatttctcctgcctaatttagtccgcaaaactaaagtctgccaactgtgtggttatgatgtctaaaatgtacctaaaatacttcaacatatgccatgtgatattatgtttgtg

SEQ ID NO: 400063 - DNA, 611 bp, Homo sapiens
gggtcttggagccagccttcaagatgaggtgaagacttggatgagcaagtccaacaggaaacaaattccagacaaagaaacggcatgagcaaagcacaagtgtggagccaagaagaaaaactgacagctgcaagggtcaaaaactcaaaacacctacagcagccaggcaggaatacaatggagaaaagagggtcctgaaaaacaacagctacagtctcagtgacaagggcccttgatgctcagtctctgtgacgggagactttaggagtgctgggccctgtgtgaagccctggagcccactgtcagcaccctcccaccaaggtccaaggcaggcccctgctgcttggcaccagaagaaagttgccatagagaaatgtagacccaggattgctggatatcccagttttcccaaaaaagccaaacattggaatctttatgaaaaagctccctttcttactgtagttggcaacaaattcatttttaaaaaaatagaaaagcgatttctcctgcctaatttagyccgcaaaactaaagtctgccaactgtgtggttatgatgtctaaaatgtacctaaaatacttcaacatatgccatgtgatattatgtttgtg

SEQ ID NO: 400064 - DNA, 595 bp, Homo sapiens
tccctttcttactgtagttggcaacaaattcatttttaaaaaaatagaaaagcgatttctcctgcctaatttagtccgcaaaactaaagtctgccaactgtgtggttatgatgtctaaaatgtacctaaaatacttcaacatatgccatgtgatattatgtttgtgataccacaacctaggtggtcagctggcattctaaccaagaatgtccagtgctgggggggttctgatagcactcgactcaggatgccagaggcagctgctggaagtatttctattatccaaatctaaatatagatgagcataagccaggtgactgattgtccaaaggggttattattagggaaaacagtgacctgttgagaggtatgatacatgttagaaatgggctttcactgctgaaaataaaggttcttagcaccagagagtggctaaaatattttagatatactccttactcttgcatgaacagaataaaacaatccagtccagyccaactgtagactataccctagccagttctgtggatggttggattcctagtagcaagcataaggataaagcaaaaactgcatctggaatcttggcatgtct

SEQ ID NO: 400065 - DNA, 595 bp, Homo sapiens
tccctttcttactgtagttggcaacaaattcatttttaaaaaaatagaaaagcgatttctcctgcctaatttagtccgcaaaactaaagtctgccaactgtgtggttatgatgtctaaaatgtacctaaaatacttcaacatatgccatgtgatattatgtttgtgataccacaacctaggtggtcagctggcattctaaccaagaatgtccagtgctgggggggttctgatagcactcgactcaggatgccagaggcagctgctggaagtatttctattatccaaatctaaatatagatgagcataagccaggtgactgattgtccaaaggggttattattagggaaaacagtgacctgttgagaggtatgatacatgttagaaatgggctttcactgctgaaaataaaggttcttagcaccagagagtggctaaaatattttagatatactccttactcttgcatgaacagaataaaacaatccagtccagtccaactgtagactataccctagccagttctgtggatggytggattcctagtagcaagcataaggataaagcaaaaactgcatctggaatcttggcatgtct

SEQ ID NO: 400066 - DNA, 595 bp, Homo sapiens
tccctttcttactgtagttggcaacaaattcatttttaaaaaaatagaaaagcgatttctcctgcctaatttagtccgcaaaactaaagtctgccaactgtgtggttatgatgtctaaaatgtacctaaaatacttcaacatatgccatgtgatattatgtttgtgataccacaacctaggtggtcagctggcattctaaccaagaatgtccagtgctgggggggttctgatagcactcgactcaggatgccagaggcagctgctggaagtatttctattatccaaatctaaatatagatgagcataagccaggtgactgattgtccaaaggggttattattagggaaaacagtgacctgttgagaggtatgatacatgttagaaatgggctttcactgctgaaaataaaggttcttagcaccagagagtggctaaaatattttagatatactccttactcttgcatgaacagaataaaacaatccagtccagtccaactgtagactataccctagccagttctgtggatggttggattcctagtagcaagcataaggataaarcaaaaactgcatctggaatcttggcatgtct

SEQ ID NO: 400067 - DNA, 607 bp, Homo sapiens
ctcaagggggaagaaaacatactgcaagaagaatctaattcgcttttttgccagtagttgctgctggggctatatttacataaacctacaccaaagaaaatagcacacttctaggaaaataggaaacagaagtaagttcgacatcctagtctagacccttgtaattcaaagtggggtccataaaccagaccagcattacctgtgaggctttaaatgcagaatcttgagtcccactctagacctactgaatcagaatctgsattgcagcaagatccccagctgacttgaacgcacatcgaagaagagaagcactactctagattactgtcctcctagcaggcactatggcgtgattcagtgggactggaagatctcaatgcacagccaactccacaggttcctctttcacctctcagatgaagagaaccatggcagtcgaggaagcgtagcaggaaaaaagtagttaagtgtgcatgttcatgtatcttatgacacagttagtccaagggcaattctaaaaacataaatcatatcccacacagaattgtctaacccagcgattctcaactatgtctcatatgtgcagtagaataaattcatatacatg

SEQ ID NO: 400068 - DNA, 607 bp, Homo sapiens
ctcaagggggaagaaaacatactgcaagaagaatctaattcgcttttttgccagtagttgctgctggggctatatttacataaacctacaccaaagaaaatagcacacttctaggaaaataggaaacagaagtaagttcgacatcctagtctagacccttgtaattcaaagtggggtccataaaccagaccagcattacctgtgaggctttaaatgcagaatcttgagtcccactctagacctactgaatcagaatctgcattgcagcaaratccccagctgacttgaacgcacatcgaagaagagaagcactactctagattactgtcctcctagcaggcactatggcgtgattcagtgggactggaagatctcaatgcacagccaactccacaggttcctctttcacctctcagatgaagagaaccatggcagtcgaggaagcgtagcaggaaaaaagtagttaagtgtgcatgttcatgtatcttatgacacagttagtccaagggcaattctaaaaacataaatcatatcccacacagaattgtctaacccagcgattctcaactatgtctcatatgtgcagtagaataaattcatatacatg

SEQ ID NO: 400069 - DNA, 374 bp, Homo sapiens
ttcaaatttcaaaaagctccaaaggaaagtatgggttacacagtgggaagcacagatggttcagtttggctggaggttagaatataagactggaagttgaaatagtgccataaattcgaggctaaggatcttggtctttattagacaggaacyattttttaaatttctattttttcatttatttgctcttctggttgtttttgtttaattttggaaaccacttttgagcaactaagaccagaaagttaaatcttgttagaaatgcctaagaaagaatagaaacggggaatggagggagaacagttagaaatttattgcaattgtccagttaaaaatagtggagaaaaaggtttcaaccaaaattgcagaaggaa

SEQ ID NO: 400070 - DNA, 374 bp, Homo sapiens
ttcaaatttcaaaaagctccaaaggaaagtatgggttacacagtgggaagcacagatggttcagtttggctggaggttagaatataagactggaagttgaaatagtgccataaattcgaggctaaggatcttggtctttattagacaggaaccattttttaaatttctattttttcatttatttgctcttctggttgtttttgtttaattttggaaaccacttttgagcaactaagaccagaaagttaaatcttgttagaaatgcctaagaaagaatagaaasggggaatggagggagaacagttagaaatttattgcaattgtccagttaaaaatagtggagaaaaaggtttcaaccaaaattgcagaaggaa

SEQ ID NO: 400071 - DNA, 564 bp, Homo sapiens
taaaatatggttcaacatatgcaaatcaatcagtgtgatacatcatatcaacagaatgaagtacaaatcaatacaatcatttcaattcatgctgaaaaagcatttgataaaattcaacagcccttcatggtaaaacccctcaaaaatctgagtatagatggaacatgcctcaacataatagaaaccatatacaacagacccacagctagtatcataytgaatgaggaaaaactggaagcttctcttctaaactcaggaatacagcaaggttgcccacttttaccactgttattcaacatagtactggaaatcctagctagagcaattagacaagaaaaagaaataaagagcatccaagtataaaaattagccaggtgtggtggcacgcacctgtaatcccagctactcaggaggctgaggcaggagaatcacttgaactcgggaggtggaggttgcagtgagtcgagattacctgggtgacagagtgagactccgtcttaaaaaaaaaaaaaaaagcattcaaattggaaaggaagaagtcaaattatccttgttcacagatga

SEQ ID NO: 400072 - DNA, 410 bp, Homo sapiens
tattttagggttttgatgctactgtaaatgataccttgtaaaatttcaaatttcaggtrtttgttgctagtatatagaaatacagttgattttcttatattgatattgtcctgcaacaatgctgatttcatttattaatgctgtctgtgataaagatactcttctttcttttaatatgtatgtttttaaatttttcttggcttcagtacaacattgaatagaaatagtgaggacagatatatttgccttgttcttgatcctaggaggaaagtgttcagtatttcgccattaattatgttgttagctgtagagttttcagataacttttattaaattgaggaaaattccttttattcctggtttgcaaagaatttttgggttttgttgttgttgttttatcatgttttgtt

SEQ ID NO: 400073 - DNA, 653 bp, Homo sapiens
tttttaacatgtctaaatactaaattatatattttattacatatttaataatcctccattatatattttcttaaagcaaggacattataactatagtacagttaccaaaattaggaaactaatattgataataacatgtaacttacatgccttagtaaatttctgtgttgtccttttcagtgtctgcgtttcaatccaagattacattttgtattgayttatgtcttcttagtctcctttaacctctaatagttctatagtctttgtttttttgtctttgacactttcaaagtgtattgagcattattagtcattttttaaaatgtctctcaatttggatttgtctgatgtttcctcatgatttgatcagtaagcatttttggcagaatgtcaaagaaggaatgttatgtccgtctcagtcattgtttcaggaggcacaagatatcaatttgtcctattaatggtgatacccctgatcactgctaggtttctccactctaaatttctggcttcccctatgtgattaatttgtgtcttataggaaaggtactctgagactctgtaaatatcctgtttctcaccatgcttttgcccacaaattttatcatccattgataattattgcctgaaaaaattattactgtgatggctgt

SEQ ID NO: 400074 - DNA, 622 bp, Homo sapiens
attgctcattttatgtggttgagaatctactgatgaagatagaaagtagcagctaacagaggagaagaaagtgttcattgaaacacaggcatgctagttgcagaaaagkgtgacccagtgtactcacaccttccccacttggcgcagcctgagtgggtgaaatcccttaggagccgagctgtggtacattagcaagatctatgaatgagttcttccagcaacagcagagacactacagacctgatttgtcaggaatacctaagggcatctctgtagcggcctgaaacccaggggtatgtgtggggtagtcagcactaattcctcaggaattctctttcctctgagtccctggctggcatggctgagaacatatattgattacatcagaactgaaatgcactattgcctgagcaacgtggcctgaaatgatggtacaattatatctcctccgggtgggatgatacccactaagcttctctcttttagagcctctaagcattgaaaacaaattggtgccctttttccaacacatatgtctaaaaataaaaatgatattcagccagaacatacaaattttacatttaggggaaaataaacggtttctttctggatttcaagatgg

SEQ ID NO: 400075 - DNA, 609 bp, Homo sapiens
catcaatagttccttccaaaaaggcagccatgagaaagaatcaaataacgggagtatagggttgctcagcaagacaactggcctgatctctttcagggggactgaaggaactgttctagactcaacagactttacaaaacattaaaaccaaatgtaacacacagccctggactggatcctgggcttgagaaagaagccacagaggctataaaggacatttgggaatcattagagatgtgtgaatctgctaaatattagataattttaggaacgtgctcttcattttcttaggtgtggaaaaktactgtagttgtgtaggaacatgtccttgtttataagaaatgcaagctaaagtattaagtcttttactttcagagttcagcaaataaaacatagatatcacaattatagaaaatgtgaatacttgtttaatctgggtgatggtatagaagtaaacaatgcactactttttcatcttttccatatgttttaaatgtttcataataagatattgggagagaaaggaggagggatgcattattgaatatcattaggtattatcttaggcaacaattaccaaacgcacaaataatattgtagcagggggtg

SEQ ID NO: 400076 - DNA, 605 bp, Homo sapiens
actcacaccttccccacttggcgcagcctgagtgggtgaaatcccttaggagccgagctgtggtacattagcaagatctatgaatgagttcttccagcaacagcagagacactacagacctgatttgtcaggaatacctaagggcatctctgtagcggcctgaaacccaggggtatgtgtggggtagtcagcactaattcctcaggaattctctttcctctgagtccctggctggcatggctgagaacatatattgattacatcagaactgaaatgcactattgcctgagcaacgtggcctgaaatgatggtacaattatatctcctccgggtgggatgatacccactaagcttstctcttttagagcctctaagcattgaaaacaaattggtgccctttttccaacacatatgtctaaaaataaaaatgatattcagccagaacatacaaattttacatttaggggaaaataaacggtttctttctggatttcaagatggcaatgttctgataaattcattgaagtggaacctagcttcctctctctctctctctctttgatgccccatgcatgcatttagtctgcccatccagtgatccagca

SEQ ID NO: 400077 - DNA, 622 bp, Homo sapiens
attgctcattttatgtggttgagaatctactgatgaagatagaaagtagcagctaacagaggagaagaaagtgttcattgaaacacaggcatgctagttgcagaaaagtgtgacccagtgtactcacaccttccccacttggcgcagcctgagtgggtgaaatcccttaggagccgagctgtggtacattagcaagatctatgaatgagttcttccagcaacagcagagacactacagacctgatttgtcaggaatacctaagggcatctctgtagcggcctgaaacccaggggtatgtgtggggtagtcagcactaattcctcaggaattctctttcctctgagtccctggctggcatggctgagaacatatattgattacatcagaactgaaatgcactattgcctgagcaacgtggcctgaaatgatggtacaattatatctcctccgggtgggatgatacccactaagcttctctcttttagagcctctaagcattgaaaacaaattggtrccctttttccaacacatatgtctaaaaataaaaatgatattcagccagaacatacaaattttacatttaggggaaaataaacggtttctttctggatttcaagatgg

SEQ ID NO: 400078 - DNA, 605 bp, Homo sapiens
actcacaccttccccacttggcgcagcctgagtgggtgaaatcccttaggagccgagctgtggtacattagcaagatctatgaatgagttcttccagcaacagcagagacactacagacctgatttgtcaggaatacctaagggcatctctgtagcggcctgaaacccaggggtatgtgtggggtagtcagcactaattcctcaggaattctctttcctctgagtccctggctggcatggctgagaacatatattgattacatcagaactgaaatgcactattgcctgagcaacgtggcctgaaatgatggtacaattatatctcctccgggtgggatgatacccactaagcttctctcttttagagcctctaagcattgaaaacaaattggtgccctttttccaacacatatgtctaaaaataaaaatgatattcagccagaacatacaaattttacatttaggkgaaaataaacggtttctttctggatttcaagatggcaatgttctgataaattcattgaagtggaacctagcttcctctctctctctctctctttgatgccccatgcatgcatttagtctgcccatccagtgatccagca

SEQ ID NO: 400079 - DNA, 534 bp, Homo sapiens
tataaccagttgcctcttcattcatgttctctgcttcactcttccttaactttagcctcatggcttgcaggctagggcagtgcttgtccaaaatcagaagtgatattccccattaaaaactattttcagcctttaaaatatgcagtagtatacatacctaaatatttaaaatatttctgcctccctccctgctaagctgatatattcttactcatttcaactctcagctatgccttacatctgttctctttgccaccaacaggcacatgtacttgcataacctgctgctgagacagggtgtctcccgtgcctctaggcagagtgcactgacccaaagttcaggaacacctgccatgtatcaggtaccatctgggaatgcygcgatgaacaacacagtttctccctctgggaagtatccagtctgaagggaagatgggaaagtaaaggcccaatgtcagtgctgtgtcataggctagctagagtatggccagaacccttgcaaaccaccagggtgaggggcttaacctggtgcag

SEQ ID NO: 400080 - DNA, 612 bp, Homo sapiens
tttcccctaaaaaaaaacaaaaatcattatgttttctattaggatagcaaaaatgccctttcttaaaaacagtgcacacaataatattctcaaggtgggcaatgtayattacactcaaagaaataaatgcaaacttaacttctcccctgcttaacttttatttcaaactacagggcctcagaggcataaagatacaaaggggaaagagcaaaaacagactgggtaaaaacaatgtattatttgtccaggtagcaacaaaaagggaccgtctcacccctgccgttgctgagtctccacattccactcttccccccgatctcgcctgtttcacccaccgacaaggatgccagtaaaagacccagagactcctggtcctcatttttgttcaggcagcaaccaagtacctgaccaagaaagtcaatctcctataaaatgaggacagcagtaacatctacctttccaaggagacattaaaaatgctttaaggcaataaccttatattatagtgaacactttaaaaattcaaactttaaatactgtattagttggatgttatgatcaggtcagagaatatgggagaaattaaatgtgaattctagaaagcgacagttc

SEQ ID NO: 400081 - DNA, 612 bp, Homo sapiens
tttcccctaaaaaaaaacaaaaatcattatgttttctattaggatagcaaaaatgccctttcttaaaaacagtgcacacaataatattctcaaggtgggcaatgtatattacactcaaagaaataaatgcaaacttaacttctcccctgcttaacttttatttcaaactacagggcctcagaggcataaagatacaaaggggaaagagcaaaaacagactgggtaaaaacaatgtattatttgtccaggtagcaacaaaaagggaccgtctcacccctgccgttgctgagtctccacattccactcttccccccgatctcgcctgtttcacccaccgacaaggatgccagtaaaagacccagagactcctggtcctcatttttgttcaggcagcaaccaagtacctgamcaagaaagtcaatctcctataaaatgaggacagcagtaacatctacctttccaaggagacattaaaaatgctttaaggcaataaccttatattatagtgaacactttaaaaattcaaactttaaatactgtattagttggatgttatgatcaggtcagagaatatgggagaaattaaatgtgaattctagaaagcgacagttc

SEQ ID NO: 400082 - DNA, 538 bp, Homo sapiens
aaagtaatactttaaagagaatatacttttcccaagttatttctattatttgtcttttttctcttttccagttaaaagtttgggcagggtgcggaggctcacatctgtaatcccaacatttcgggaggctgaggcaggcagatcatttgaggtcaggagttcgagaccaccctggctaacatggccagactctgtctctactaaaaatacaaaaaaaattagctgggcagagtgatccctcatctctaaaaaaaaaaaaaaaaaaaaaattctgggcacggtggctcatgcctgtaattccagcactttgggaggccaaggcrggtggatcatgaggtcaggagatcaggactatcctggctaatacagtgaaaacctgtctctactaaaaatacaaaaaaattagccaggcttggtggccagtgcctgtagtcccagctactcaggaggttgaggcaggagaatcgtttgaacctgggaggcggaggttgcagtaagcagagatcatgccaccgcactccagcctgggaaacagagc

SEQ ID NO: 400083 - DNA, 456 bp, Homo sapiens
gagcaaacagaaaaagaaaaaaaaaaagtagcagaggttgccattctgtttgcagacaaaacagattttaaactaaccatgatttaaaaaaaaaaggcaaagaagaccattatgtaatggtaaagggttcaattcaacaagaagactgaactatcctaaatatatatgtactcaacacaagagcacccaggttcataaaacaacttcttagagacctacaaagagacttagataactgttacacaataatagttggggacgtcaacacccccactgatagtattagrcagaacattgaggcagaaaacttacaaagatattagggacctgtactcaacacttgaccaaatgcacctattagacatctactgaaatcttcactcaacaaaaaaagaatatgcattctcatcttcacacacatggcacacactctaaaactgaccacacaatcagcca

SEQ ID NO: 400084 - DNA, 586 bp, Homo sapiens
cagtctcccaatagatagaaaaacctgaaactggtgatcagcgtaccaataagatctcaggagctgggtgagtgggctcaagcatgtgcattaagaggcaaaatggcagagtttaacttgtatatgactttataggaacactcgactggtaagggaaggatgcctcaagtgatcatgtgcacagtttcagtaaatacacttcgcatgtggcccctcccaagtgctagcaggccactgtgcatgtggacagcctaccccataggaagaatcaggggagaagtaatgcaacctcagaagcatgccaatgtataagaccccaagtcaaaggtcaaactgtgcacttgatctctcaagttgcctgcagggctctcttccaagtatacttcacttccttttgttcctgctttaaagctttttaataaattttcactcccactctaaaacttgcctcattctgtcactctagcttatgcctctgggtcaaattttttcttctgaggaggcaagaattgagtattgctgcagacctgtgcagatttgccaccactaacatactytgatactgcgtgactcagatacatactgc

SEQ ID NO: 400085 - DNA, 601 bp, Homo sapiens
gctgacactaggagataaataggctgacctaattgaggccactaatgacctattcttcccttttaaaagaatattttgtccaatttcttacatatacgtagtacagcattggagaggttcatttttctagcattttgttttatgatagcattgagtgtcctgggaattattaaaagcttcatcattgatacacagacatgtcacccacctggcctctgcaggcatgtgaattggagacccactatttaaagatagtaatgagaaagagatagaaaattactaacctataatttttcatttactgatcatggtagatatgaaacaaaatcctggttaatagcagatattcctcttaggaagatttagagtagaaacttaatggatgaaaagattgtagggcatgagaaaaaatatatttcactkgattagttaaataaaactgattatctggtatcattatattatgaattaggaaagataacaaaataggatgagttattattctttcattttaatagtttgtaacctacgaggagagataagatgtgaagttacacagcaaataagacaaaaaatagacagcaacaataaagcatatatc

SEQ ID NO: 400086 - DNA, 599 bp, Homo sapiens
atgccatgtcctcaggaattaactttctgcttgaggattagcacatggtaacttacaatatttacttctgtcataagattcccttctgaccttgtgataagatatgtctaaatgctgcgaacctgtcatattatctgttcttagtttttcctagcagctgattgatagcccatcatgtccttcaatgtttaatatctataagattattacacattttcttgtatacaggaaggtagagaataagaaatatataccaagaaataaaatagtgttctaagtggggagaaatgttktcaattttgccatttattactattttgtaacaagatttttatcaaagtaataagagatatttgaggttatttgaaaagaattattaaaacagcctaataaaactatgacaccagtgttagacacttgatgtaacagacacttttttcaatattgtagtaaatagaatcaaagatgttctcagaacatggtatttttattaactaaggagagctgggtaagaccctaagctatttctaaggtacagtgtgcatacctggctcaatgagaaatggggaaaatatagacaggaggtagtgaggctttct

SEQ ID NO: 400087 - DNA, 568 bp, Homo sapiens
tctatgtaaataaactccaacatgagttagacagaaggaaaaagtttaatgtttgatagcagagtagggtgagtatagctaacaacaatgtattgtgtgttccaaaatagacagaagaggcaaattggaatggtcccaacagatacaaatgacaaatgtcctaggtgatgggtgatgggtatcctttaagtgtttttctgctagatgcatgaatgccacaaacaatactatcaaaaaagtagtwctctatgtatatgtgcaggtggttcatatagtctatactgaagagttttatccattggtgataatagaaatattatttttgtatcatcaaattaatattcatgctaatgataacactacatttatatatgattaacaacctaagcacttttctgtaatcattgtctgagaattgctacctcctcttaataaaatgatcccactcacagaattatatagcacagattttgatttagtataagctttaaatgggatttgttgtccatttttggtgcttatggctaagcaaaattctaaaatcttgttgtatgccatagcagtgtta

SEQ ID NO: 400088 - DNA, 583 bp, Homo sapiens
atgccacaaacaatactatcaaaaaagtagtactctatgtatatgtgcaggtggttcatakagtctatactgaagagttttatccattggtgataatagaaatattatttttgtatcatcaaattaatattcatgctaatgataacactacatttatatatgattaacaacctaagcacttttctgtaatcattgtctgagaattgctacctcctcttaataaaatgatcccactcacagaattatatagcacagattttgatttagtataagctttaaatgggatttgttgtccatttttggtgcttatggctaagcaaaattctaaaatcttgttgtatgccatagcagtgttaatacagaagttgaaattctgtaatatacctctaattgacacctctttgaatctgggttggcttgcaactgcttcagccaacctaaaatggcaaataataataataatgctttgtgacttttgcagatagatgataaaaggccgcaaagcctccactttgttctctggaacacttgctcttggactgccatgtaagccttgaaacgacaatgctgaagatgtcacatg

SEQ ID NO: 400089 - DNA, 431 bp, Homo sapiens
gcttatttactgcttgtgggagtrtaaattaattcagccattgcagaaagcagtgtgacaaatcctaaaataataaaaacagaattaccatttgacccggcaatccccttattgagtatatacccaaaggaatataagtcattctgctataaagacacaggcacgtgtatgttcattgcagcaccattcccagtagcaaagtcatgggatcaacctaaatgcccatcaactgtagactgataaagaaaatgtggtgcctatacaccatgaaatactttgtggtcataaaacagaatgatatcatgtcctttgcagcaacatggttagagctggaggccattatcctaagcacactaacacaggaacaaaaaaaccaatatcgcatgttcttacttgtaagtgggagctaaatgatgagaacacatggacac

SEQ ID NO: 400090 - DNA, 431 bp, Homo sapiens
gcttatttactgcttgtgggagtataaattaattcagccattgcagaaagcagtgtgacaaatcctaaaataataaaaacagaattaccatttgacccggcaatccccttattsagtatatacccaaaggaatataagtcattctgctataaagacacaggcacgtgtatgttcattgcagcaccattcccagtagcaaagtcatgggatcaacctaaatgcccatcaactgtagactgataaagaaaatgtggtgcctatacaccatgaaatactttgtggtcataaaacagaatgatatcatgtcctttgcagcaacatggttagagctggaggccattatcctaagcacactaacacaggaacaaaaaaaccaatatcgcatgttcttacttgtaagtgggagctaaatgatgagaacacatggacac

SEQ ID NO: 400091 - DNA, 596 bp, Homo sapiens
atcaggtgaccatatatgtggaaatctatttcttgactctctattgtgtgacattgatctatttttctctcctatgccaatacaacattatcctgattatatttaaagtaactctgaagacaggtagtataagtccaccaattgtgttcttctttttgaaagttgctgtagtgtgtrtatttccttggcattaccatatgaatttttaattgctttatttatttaaaaagttcttctgggatttttattggtattacattatatatatagatatagttggagagaactgatgtcttaataatattactaacttctgatccataaacatggtatacctctgattatgtatgtctctcatttcaacgatttttgatagttttcagtgtgttagtattaaacatattttgtcacatatatcattaaatattttatgtttactgatgctgttgtaaatggtattgtaattttcatttctaattccaaacgctttgttctaatacataattataaaattcatttttgagaatgagatcacatcttttgcaggaacacagatggaactggaaaccattgtctttaggaaactaattcaggac

SEQ ID NO: 400092 - DNA, 572 bp, Homo sapiens
gttttcagtgtgttagtattaaacatattttgtcacatatatcattaaatattttatgtttactgatgctgttgtaaatggtattgtaattttcatttctaattccaaacgctttgttctaatacrtaattataaaattcatttttgagaatgagatcacatcttttgcaggaacacagatggaactggaaaccattgtctttaggaaactaattcaggaccagaaaaccaaatactgcatgttctcacctataagtgggagctaagtaatgagaatacagggacaaaaagagaggagcaacagacattggagcctacttgaggtgtgaagggtgagaaaaaggaaaaaattcagaaaaaaagaaaactgttaggtaatatgcttagtacccaggtgacaaaattacctgtaaaccaaacctccaagtcacaagtttactatataacaaacctgcacatatactcctgaacctaaaataaaagttaaaatatttttaaaaataaaaataaaattagtttttgtacttgattttatatcccacaggcttgttaaaattccttataagttctag

SEQ ID NO: 400093 - DNA, 530 bp, Homo sapiens
gacaatggtgaagcaaggctttttctggtccattctcaggcaaaaatctgggtatttagagcacccactagcctggttcagcagactgagcctcttcatcctttttatgcagagattattgtgaaatagggaccactctgatccatgcygaggcagatctcctggcattcagagtgcccacttacctggttcagaagcctgaaccatcccactctttctgtgcagagattgtggtgcagcaggaccctctcaactccgtatgtcatacttaagagcatttcgtggctgttcattgaattctttcttggcactggtgtttgtgcctgctatctggggacctccaggtgagcctgcccagtctagccccacccatcttggatctccttccctgtgtggcagggcatagagctgagacctctgagaactccatggatcagcccattgcctgaggcaaaggatagcttctcccagtaaacaaagattaagtaatatttccagctctgttagctgccagcagctcttacccataa

SEQ ID NO: 400094 - DNA, 588 bp, Homo sapiens
caacatatccagataagaaggaactagtgaaagatttctggaatcatgaaaaatctgcatgtagtgacaccaccaaaggatcacactagcaccccagtaatgctccctaacggtaatggaaactctgaaatgacagatgaataattcaaagaatagattgtggggtagctcaatgaaatccaagacaaagttgaaaatcaacacaaagaaatttctaataagcaatctaggaagtgaagacacrtctttaaaaaaatcaatcagagcttcttgaattaaaaaactcacttaaaaaatttcaaaatacaatttgaagcttcatcaatacacaggaacatgcaaaagaaaggatttcagagcttaagacaatctttcaaactaacccagccagacaaatataaagaaaaaagaattttaaaaaatgaacaaagtatttgagaaatatgaaattatgtaaagtgaccaaacctacaaattatcggaattcctgggagagaaggagaaaaagtaaacaatttgaaaagcatatgggagggaattattcaagattttcctaatattgcagtagaggtaaactttcagatacaa

SEQ ID NO: 400095 - DNA, 485 bp, Homo sapiens
gtaggtcccataatccccacatgtcatgggaaggacccagtgggaggtaattgaatcatgggggcagttacctccatgctgctgttcttgtgatcgtgagtgagtcctcgtgagatctgattgtttcataaggggcttttcccttttgctcagcacctctctttgctgtcgccatgtgaagaggggtgtgtttgcttccccttccacaatgattgtaaatttcctgaggcctccccagccatgctgatctgtgagtcaattaaacctctttcctttataaattacccagtcttgggtatgtctttattagcagtgtgagaatggactaatacaataattaaacaaatattttagtaaataaaaggatatatgtttttcttgaataraaaaacaatatttttatgcagcatatagtcaaactgatctgtaacattattttatttccattaactataataatgagtttgaccctgtcaggggtgctt

SEQ ID NO: 400096 - DNA, 614 bp, Homo sapiens
tttcacaaattgattatagtgctgttgaacatatgtctgtaaatgcagagagttgttcacagttagatccagctaaaattaattgcttgtctgatattggctgcaggacatataagtcctttcagattcttcagcacagagactggtcctagcatccaaccttgtacagaagatcatgtgggccccttcatgtacatcagtacatgttggcttttagccccatacagtctgacaatcattatcgcctccaacaacatcactcccaatgccaaaaggcaacagctggcttctgctaaaggaatccttcccaagagtctctatgacatgtggcagaaggaagggcatgccttggtagtcccttggtaactcttgttcacatcccacactgacagctcatagcaccattgtgcaggagccctgctgtatgtcttctgttttcatgtctaagttcaggaggcagaaattgcatcagacmttgtgatgctaatggctggctatgcagtatgagtaggaactcagggttattcttactatttgtgcatttagctttgaatgcaagtgtaggtgacaaaaaagagctggataaaatatctctgaaaaatctgagcctggta

SEQ ID NO: 400097 - DNA, 559 bp, Homo sapiens
tcaaaggaacctagaggcagaaataccatttgacccagcaatcccattactaggtatatacccaaaggaatattaataattctattataaaaatatgtgtatgctcattgcagcactaattacaattgcaaagtcacagaatcaacttaaattcccatcagtagtagactggataaagaaaaatggtatatatacaccatggaatactatgcagccataaaaaggaatgagatcatgccctttgcagggacatggatggagttgtctatcctcagccaaccaatgcaggaacagaaaaccaaacaccatatgttctcacttatgagtaggaactgattgatgagaacacatggacacatgggcagggaacagcacatactgggtacttgtaggggtgggtaggggaagggagaacattaggaagaatcactaatggatgctagacttaatagctggatgatggaatgatgtgttcactaaacaccatggcacatgtttacctatgtaacaaacctggacatcctacacattamccccaatcttaaaataaaagttgggg

SEQ ID NO: 400098 - DNA, 557 bp, Homo sapiens
acaaggattaaaaaataataatagttcacggtgacttactatgtcaggaactcatttctagggcttcatctatttgtgacattgagttatctaattcatcatttcatatcagaacactcaacttactgtggcatatatggcatataaaaggggaattttataattttaggcacaatagattgtggtaagtgtgccctgaaggctagccttakgtattaaaggaaatgggacattgcacattacaatgctttgttctcagttatgtgtactctgctctacctttaaatctcctataggaaagctttttataaaaatatttcacatgtgactaacattactcacattgttgagatggggataaaaacagaaggaacataacctttgtcacccctttctgttggtcttgaaactggaaaacaaaaaggcacaatgttggggaaaaaaatgtcaatattatcaataaaactggggaaaaaagagtctagaaaaatattaacaatgataagaggaagagagataacgcagttgttcggtgatacacagaaatgttttgttaa

SEQ ID NO: 400099 - DNA, 636 bp, Homo sapiens
taaaacaagctatttaatagatctaggaataactttctatgatagtttattttatttatttatttatttattttgagacagagtctcgctctgtcgyccaggctggagtgcagtggtgcaatcttggctcactacaacctctgccccctgggttcaagcgattctcctgcctcagcctcctgagtagctgggattacaggcatgagccgccgcacccggtctctatgatactttaaaggatagtatataaaattgatttcaagtttttatagtaaaattttaaatttaggataccattgaattttgttaaatgtttgaacttcaaagtcaaatatttgaagtacattcattatataatgttagataagtaaatttaaaagttcaaaattattctataaaataaaggccattcatttttaaaagtcttacatttggaattgtaattcaaaacgaaattagaaaacttacttgtcaattgatgccttaacctttacctgatagtttagttctggcaattttattagtagcctggaaagagatatcaataaaaaaaatcaaagataaaaattaaaagtgtttaaaaacccttttttatatttaaacatttaaatatactatgaaatatgcatataaata

SEQ ID NO: 400100 - DNA, 478 bp, Homo sapiens
attattttcagttagtctaagtttagaaaaaaggagaaaaataggcaaaagcccaaattaaaattcttcactaacctttctcttgaaatcgaggctgttaagcatttcctgcagtgtcaaaacttcctgattcaccatggcactattcttgtcactctgatctgcaaaggtaaagagatcagatttagagttctctctattcctgaaagtcaagtcagcctcaatccaccatcctaaaacagccctggcccggagaacttatgtggtaagagactaattgggttcactagaggtgagcttggaagtctgtctgctcattttgccagggagaatcacatccaagcatgcaaaaaaggacctctttattttagagcttcaggaaamaccattctgcactgggtgttttgttttgttttgttttggtggtggtggacagaggagataaagttgctgtaatggatgccttactatatacctc

SEQ ID NO: 400101 - DNA, 545 bp, Homo sapiens
tctcacaacagtgtaagcccagacttttgcattcatgttttacttgttatggaggatcactaaatcagaagtctgaaaataaatttaaaccctctgcctactattcagataatatatgggactgttgatctttaaatatttatagtttattttgatggaattattatttttataaatggcaaggaaatgaatgctatgtaagttttggaagggaaattaacatcctattttatatacaacatggcagaaagtcttatttaagacatcttcactagatcaataaaattgataaatctctagatagactgattatggaaaaaagagaaaaaaatttatcaatattaaatgagagatgtgatgttactacggattctacagatattcaaatgacaataaacattatgaacaactttatgccaataaaacaacttagatcaaatgcacacatttctggaaaaacacaaattaccaaagctcattcaagaagaaatagataacytgaatagccccatatcaaagaagttcaaggtgaagttaaaatgttt

SEQ ID NO: 400102 - DNA, 620 bp, Homo sapiens
gtagcagttcccatactttcagaataactytggtagcttagagcatttctgaatttatctttaccctagaagctaaaaaaaaaaaacttcttaaagagctgcagttgcacatcccttcgttttttagactgataaacttgactaatttatacttagtaattttgtctctggttcgtcttctgtagacaaatggcaaagttctgatgccagaaataggaggcattttctgacttactatggaaaacataaaaactgcatagtatgccagctctcactttcccagctaaaggaaagaggcagatagctaaatgtctgagaagagaggctggactaaggggatatagaaaaaggaaaatttttcaaaagcattataactacattcacacatacgttttggtcaccaaacatatcttaaacagattccctgataaagtctaatcagaattggtctatcttactaacagttgttaactattatagttttttaagagtcacatcatgaagctagggggtgagagagacattttaaacacacaaccgtaagtgcatatagttgttcaaacacttaaactaaatttgtatttgaagtcttgaaaatcacactatttgcttctaaaggc

SEQ ID NO: 400103 - DNA, 620 bp, Homo sapiens
gtagcagttcccatactttcagaataactttggtagcttagagcatttctgaatttatctttaccctagaagctaaaaaaaaaaaacttcttaaagagctgcagttgcacatcccttcgttttttagactgataaacttgactaatttatacttagtaattttgtctctggttcgtcttctgtagacaaatggcaaagttctgatgccagaaataggaggcattttctgacttactatggaaaacataaaaactgcatagtatgccagctctcactttcccagctaaaggaaagaggcagatagctaaatgtctgagaagagaggctggactaaggggatatagaaaaaggaaaatttttcaaaagcattataactacattcacacatacgttttggtcaccaaacatatcttaaacagattccctgataaagtctaatcagaattggtctatcttactaacagttgttaactattatagttttttaagagtcacatcatgaagctagggkgtgagagagacattttaaacacacaaccgtaagtgcatatagttgttcaaacacttaaactaaatttgtatttgaagtcttgaaaatcacactatttgcttctaaaggc

SEQ ID NO: 400104 - DNA, 620 bp, Homo sapiens
gtagcagttcccatactttcagaataactttggtagcttagagcatttctgaatttatctttaccctagaagctaaaaaaaaaaaacttcttaaagagctgcagttgcacatcccttcgttttttagactgataaacttgactaatttatacttagtaattttgtctctggttcgtcttctgtagacaaatggcaaagttctgatgccagaaataggaggcattttctgacttactatggaaaacataaaaactgcatagtatgccagctctcactttcccagctaaaggaaagaggcagatagctaaatgtctgagaagagaggctggactaaggggatatagaaaaaggaaaatttttcaaaagcattataactacattcacacatacgttttggtcaccaaacatatcttaaacagattccctgataaagtctaatcagaattggtctatcttactaacagttgttaactattatagttttttaagagtcacatcatgaagctagggggwgagagagacattttaaacacacaaccgtaagtgcatatagttgttcaaacacttaaactaaatttgtatttgaagtcttgaaaatcacactatttgcttctaaaggc

SEQ ID NO: 400105 - DNA, 431 bp, Homo sapiens
  misc_feature (1)...(431): n = A,T,C or G
tatcctctagatgccctgttcttgttccctcactgatcccctttgtttctagcatctttaacttttcctctttcattggttctctcagtttaccttaaaacagacacaatttcatcctatttttaaaaagcaacacttgaccctattgttctcccttcagcgcttatttcctgaaagtatatttttaattccctgaaaattaccttcacactcattgttacctctaaacagcgctctccaaagctccagcagcttcctaagccctgattccttcagatccccccagcaccctccaccctctcacgacttgccttccatgctgctccatcaccctaatcttcctcctgtttgctgctttgcgnattcattacccactttccactgccaaatamtactcccaaggcagtccaatcttcttgtttttcaatata

SEQ ID NO: 400106 - DNA, 595 bp, Homo sapiens
tcatccagtgctgctgcattcacttatgcaggttgagtccttcacaaggatgcctggccacagggcaacacgggttaccagcccacgctcttcccaccaaggtgtcctagcacccaggtacatgtgctgggaggaagggagcttctttacccagtggtgctgagaagtgcttctgcttctggccagagacagaattagctttttctaattcagacaaattcaccatacagaccatggggggtagtccttgattctattctttctctcacagcccacatctagctcatcaataaatcctctttcctgcaaaatatgtttggaatcctatcacttctcaccacctctatcactattgccttaggcctcatctgaaccaccaccttatcacctctgctgccatagggatcttttaaaaacatcaaggaactcccgtgcctttccatcatakctaaaggaaaatcaaactctttaccatggctttcaggaccctaaaggctctattcctggttacactgcacatatcattcctaccactcttccctttccagctctactccattcagaacatctggctggtctcaggcactcaaggcct

SEQ ID NO: 400107 - DNA, 597 bp, Homo sapiens
taattttatattgaggtgctacccaaaggtgttttttaaatgaagggaaaataaaagaacaaaagaaataattcaatttgataatatcacaaaygacaaatagaaaaagttattacctttattctttgcatttaaaactttaaaaatgaaatgtgagttgggtgaatgtgaataaaagcaaatatgactgttacgctactggcagcaaataaataacttcttttctcagtggcatattattccagtaaacaccaatgaatggtctaaaaagataccaatgaggtcataagcatccctctttatatatccaattataaaagtagctaacaatatatctttgtgtggtctgaaaaacagcactcctaatcaataagccagaaagcagaagagaagaaaaatagcaatgagcaaagacaaagacagctactcctccaaagaacaaaactgcagaccttaagcatatctgtattgcacagacaactatcaaagtttctcattcactatctttctggtcttctcccactattatacaaacaagtttttgtaaaagttcatgaacattagtgaatattacattagtgtgttaggatagaggac

SEQ ID NO: 400108 - DNA, 591 bp, Homo sapiens
agaaagcagaagagaagaaaaatagcaatgagcaaagacaaagacagctactcctccaaagaacaaaactgcagaccttaagcatatctgtattgcacagacaactatcaaagtttctcattcactatctttctggtcttctcccactattatacaaacaagtttttgtaaaagttcatgaacattagtgaatattacattagtgtgttaggatagaggacaaggttccacatttctggaatgataaagtgctatatttaaaaaacaagtacataaaacccaaaagtcaaagaacttaaaagcgaatttaagacaggaagagaagacattcatcaccaaatacacatattaaacaaaaaaaaaaaatccaggccattggaatcaaactattcttacaaagacaccattttgtgtaaattaaaaataaataaatacaaacaaggtccctgaaaatagatgaggttctcttcctgctgtgaaacaacacggttttagcattcatacaggamgaattatggtttcaattcagagtttaaggtcctatttctcttagcatgcctcaaatcctgctactataacaaagccaggcac

SEQ ID NO: 400109 - DNA, 591 bp, Homo sapiens
aagatgaaagccaaatcaggaatgcaataggcatttccagtagccacacacacacacacacacacacacacacacaaaatacctaggaatacatctaatcaaggaggcaaaagatgtttacaaaaatgactacaaaacactgccaaaataaatcatagatgccgcaaaattggaaaaaagattccatgctcatggattagaataatcagtatcattaaaatagccacattgcctaaagcaacctaaagattcaacactattcctatcaaaataataatgtcattttccacagaattagaaaaaaaaataacttctctraaatccatatggataccaaagaacagcttgaatagccaaagcaatcctaaggaaaaagaacaaagctagaggcatcacatctcctgacttcaaactatattataaggctatggtaaccaaaacagcatggtactgctacaaaaacccatgcaccaatggaacagaatagagaagccagaaataaaaccacacacctacaaccatctcttctttgacaaagctaacaagtaatggggaaaggactccctattcaataaatggtgctgtgataac

SEQ ID NO: 400110 - DNA, 314 bp, Homo sapiens
aatatacttcagatggtttcaattattattaatttatttagacttgttggatcctgtttttattttaaatcaaatctgacagcctctgtgttttgattccacttgcatttaatgaacatattgatatggtaggacttaaatttgytatttaactatatcttttctatatgtcatctttcttcgttcttttattcctattcccttcttttgagctgaatatatattttccagtgtactatgtacattcatttccacaatatatttagcttcattttagagattgttgtaatgtttacaatatgcatcttaaaaca

SEQ ID NO: 400111 - DNA, 498 bp, Homo sapiens
atgcactcaaagagattcacaccatagtcaaactgttgaaagccaaatcaaagagaaaagtttaaaaggagaaagaggaaaataactcatcacatacaaggaaatatatgtctcatggtcaggagaacagtctcaagaggacctcagaaagtgtgccaagagtcgggttacagtttggtgttacacattttagagacacatgaacttgagtcaaatcattaatcaatacttggaaggtgtacattcattcagcctaaagagcaaggatatctggaagtcagagcttacagatcataggtggattcaaacattttctgaytggcaattggttgaaagagttagactttgtctaaaggcttgaagtcagtaaaagaaagacatgcttaaatggagataagggggattatggaggccaaggttcttattatgtagatgaagcctcctaggtagcagccttcagagaaaatagatggtaaatacctcttttcaaagtttaaa

SEQ ID NO: 400112 - DNA, 531 bp, Homo sapiens
gtgtatctatgattctaatctttccagatttgtattagactgccaactactttggtatttagtagcagctcattatctctaaacttattccttaccaattatttccgtcttaattatattccttccatacattaaaaaaaattgttagcttcttcagagcgattaaaaatagtggcattgaaaaaataacaacagaaagggtaaactttatgagcagtctattttagctgtcacttttctactactrtaatcgtctgcattattgcctgtgtgcatttgtagtagtttttacatttttatatagttatttgtcatttgggatatatatttgcaatgattaccaagggggaggtttatttctttatttaacaaatgtaaatattacattgaatgttcatacatttggataaatagtgaattttgtcctttttctcataaataactctgtaatcacatgggcagtaagctcaaaaaaacaaactttagatacaatctttatgcctcactaatacctgtttgaatagaaaaatg

SEQ ID NO: 400113 - DNA, 531 bp, Homo sapiens
gtgtatctatgattctaatctttccagatttgtattagactgccaactactttggtatttagtagcagctcattatctctaaacttattccttaccaattatttccgtcttaattatattccttccatacattaaaaaaaattgttagcttcttcagagcgattaaaaatagtggcattgaaaaaataacaacagaaagggtaaactttatgagcagtctattttagctgtcacttttctactactgtaatcgtctgcattattgcctgtgtgcatttgtagtagtttttacatttttatatagttatttgtcatttgggatatatatttgyaatgattaccaagggggaggtttatttctttatttaacaaatgtaaatattacattgaatgttcatacatttggataaatagtgaattttgtcctttttctcataaataactctgtaatcacatgggcagtaagctcaaaaaaacaaactttagatacaatctttatgcctcactaatacctgtttgaatagaaaaatg

SEQ ID NO: 400114 - DNA, 530 bp, Homo sapiens
ttagagagcaaagccaacgaatggtactttaacaagcaataaattaaataattaaatcgaaagactttcagtttaaaaatgattttaagtaaactttaattttaaactgtgtttacctacaaaaaacctgaaaccttggaagatcatttgatttggctaaggttatgctgctagatagcaacatagttggaaatggaatttgctcttcttaacccactaaataaaaactggaaccacattagctttggmgtatctttactatatttcagaggcacaaacctaagcaccagaatttggtttttgaatgtatgactaatagaaaagtcagatgcaaattttgattcagtgggtaatatacattaaattgtttctaacaaatatattcaaaatcatgcaagagattatgatgaatgacattagtattatctccatattcatgtggatgatccattccaggaggaagagccatggcatcttagtccccaatctcttcactttgtggtccattttcttgcctccatctcagcatt

SEQ ID NO: 400115 - DNA, 575 bp, Homo sapiens
atgatgaatgacattagtattatctccatattcatgtggatgatccattccaggaggaagagccatggcatcttagtccccaatctcttcactttgtggtccattttcttgcctccatctcagcattctactcccatgatgcactgaagatatcataatgagagatacaaaattgtttctaagctttctatcttaaaccatttattaataatacgtcatgaccttcttgatcattttctgtagaaatctctttgcaagaatgctttcgtcctattaaaaactttaacccattgaatccactagtttatatccatttattggcctcaatctgtttctaattgctacctatctagagcacrtttaatggttcaaatacaaaccattcccttacatacagtcttaacaccttcaatctttgattctatctcatccatacttgccttgcaaaagactggagtaaaccagaatttgccttctcattctttgcatataaaaaccaaagtgttgctgtagaaaatcacaatactctgctgactgacctttctttgaattacaatcattaatgtcaagttaac

SEQ ID NO: 400116 - DNA, 551 bp, Homo sapiens
aggtatttctgaatatttgacacagtacttgagaaatattgcagttaaaatattgcgaatgccacgtaaacattcactcaggcatgcacctgtagtcctagctacttgggaggccgaggcaggaggatcacttgagcccaagagtagaaggttacagtgagctctactccaccctggatgagttgttcatcagggttctctagagggacagaactaataggagatatataaattaaatatatttattattaactcacacgatcacacggtcccacaattggccatttgcaagctgaggagcaaggaagccagtctgagtmccaaagctgaagaacttggagttcgatgtgtgagggcaggaagcatccagcatgggagaaagatgtaggctgggaggctaggcctgtctagttttttcatgttctgcctactttttattctggacatgctggcagctgattaggttgtgcccacccagagtaagggtgggtttgcttttcccagtccactgactcaaatgttgatctcctttggcaaaaccctcacagaca

SEQ ID NO: 400117 - DNA, 613 bp, Homo sapiens
ctttctttctttaccctccatttcctgcttcatactgctttagaatgatgcactgaaaatatggcttccatcatgcaacctgcttgttcataaaattacaacagcattctgatacctgtaattggcatatataaatccttagtttgtcatacaagacatctacaatttaaaagctcatgtctgtatcgtattacttcaaatcattccacaagtcaatttttttggagacaaattctgaatatgtccactcttacgattttgataatacttttctgattttttcagaataaagcttttgtatcttttatctaaatcctatacataatgtactactgtaattagagtttcttcatgaagtgtatcttgctcacctccttccaaaagattgttttttcatctttgaactttaacaatgttagcttattctgtttaaccctgtagctctataacctgctagtctgtgaagagggaacttactgatggatctgctgatggcctcaacacacagtattctgtatctgtctatcaacccctcatgttcatagctcagcacaaacataggtcrtgaatcaaaattttaaggagatagaatgccaagatctagattgctgat

SEQ ID NO: 400118 - DNA, 514 bp, Homo sapiens
ctctcctcaggctacttagcagcaaagaaaggcttcatgttctgagacagaatacgattgtcgcctcttaggtgtccatctcttgtctagttagctgtgcttaactggactacaaggtggtggagttatactttcataggtgggaaagtattaaagcaggactctttttgatctttgcaaatacccatgaaagagaagtacagtgctttaatgatattaagtcattaaatttagccctcccactttcctaacattctcagccttatcttctctaggtatttcacataatcttgaaaatgcacaggttcaaaacatgtcaccaactgagtacctacttctagaaactcaacagttggtcaatgtttctgaaatgatgttctgtcatgacaagggaggaaatgcctcccatctcaatttaataccaatattaatagatgtaaatataattatagatcttatctcaaatttattttatcataatatcmtatgttgaaagtaccattttaagggacaa

SEQ ID NO: 400119 - DNA, 595 bp, Homo sapiens
aagaccattcagaaacgaacagaaatttgaactttttcagaagatagtagaattattgggacacgttttaaggagtgaggtgacttaatctgatttgcttttaaacatatctcactttgactacatcatggagtaaagttgggtaagggaggttgtgaaataattaattttaaataatattttttattattgttattgttttagaaagatttttaaagcatatgtttcaaccctggaagaactaatttttgcaaaacttgttaattcaagatttatataaataaagggtgaggtccctaactctacaacttcaaaaattcatatatgacatggtttggatttgtgtccctgcccaaatctcctgtcaaaattgtaattcccaaagttggaggaggggcctggtrggaggtgattagatcatgaggactgatatccccccttgctgtttttgagatagtaagtgagttctcacaagatctggttggttaacagtgtgtagcacctcccccttcactctgtcttcctcctgctccagccatgtaagatgggactccctcttcatcttctgccatgactgtaagtttcctgaggcctc

SEQ ID NO: 400120 - DNA, 577 bp, Homo sapiens
gtgtctcgatccctgactgatttgtgagaccttttcttgtcctctagaaagaacagtggagagatcgtaagaccccaaagaagaaaggcagagaaggtctcagctcctggaatttaccccacactaccatgtcaatttaccccactctaccatgtcctgccacatcacagtgacgcttgtgagactaagagtgaagagatatagaaaagagaattgtatgaactaaaataaatttgcacaatgaactgaagtaacattctgcaaacatatgacagcagcatgttactctcatgtgtttgcagcaagttacttcagttcattgaagttacacacacacacacacacacacattcacttactggctcttaaaatttccatgtgaaagtgacccatgccaattcatcttatatgtccttggccaaaacaagtcaccagtgcatgtccaaatttaaaagagatatataagtgcaaccctactatttacctgaaaggtaaagagccagaaataaagaataaatacaagtgaaaggggtgagatgagcttaaaagtcatggatrtttgattacagaatgaagt

SEQ ID NO: 400121 - DNA, 450 bp, Homo sapiens
acaactctgtttttgaagttataagtcctttttcgtttctcatcggagatgcattccatagtaacatactggcattcatcaatcctatgttttaaagatttcctttgtgcctctaagagtttggtggtgcagagggtaattgcaactgaagagacaggcaatgcagtaaaataataagaggcctaaaaatttaggtataattttcagtctcaggatctcacctgaaagcaccactgtaccttttattgtcaatattagccattttattttctgcagtttctatgaactccttacagataaagaaaccaaactttaaaaatattcctcaaagatctaaagacagaaataccrttcaacccagcaatcctattaccgggattatatacacccaaagaaatattaatcattctaaaaatacaaaaaattagccaggtgtggtggcacacgcct

SEQ ID NO: 400122 - DNA, 590 bp, Homo sapiens
cacaattataattttaacaacatataagtacattgcaaatataaatttctcttactgaaggcttctataaaagtgctaatttctaaatcaattatgtcatctttctctcttttaaacttcccactatggaatgcaaatattgaataatgttctattattaaaaatgttagcacaataggttcatgatgctttatcatttgttgcttttaataatatgatggcattatctttatgtataaaaattaaaagggaaattctaagaaaataattaacatttcaactttgacaaaactatgcattatatttatctcatttttctgcaaatctttaaaaggcactattctctgataacatttctccagcgatacctatagatttgagagaaaaaaactcacacaaattctttttacaaagctattctcagataattaattatattatctggtactaattggtagagattgaaagtatttaatagcagaatctaacaaatgaccaaaacgcagacaatttgactggtctcatatctatatcttgccgttatagttactttaaraatgtattttcttgctttgttcatgatttcaaaa

SEQ ID NO: 400123 - DNA, 604 bp, Homo sapiens
tgtttgattaatcataccaccctgtatacaaatatatcaaaacatcacattgtattccacaaatatatacatttatttttaaaatgtgtgctagtgaaaaaaaatatatcatctattttgtacctggagagcaagttcctttggtcatggatcccaactatttttgtagtgccagaatagacactgtgggcaataggagaccttgtccagtcaagtcctctttatatttctgaaactcttactttgctgtcctattattatgcatttaatcttggaggaagtgtaggagggtgagtatgggtgagttggtatgtatagaasgttcctgtcatttgacagtcataaggatcagtatttaggcttatttccattgaggtttgatttttatgtatttacttcttttgtctcagtactcttaatgtggaactaagcattgggatgtaataatagggagtcttattacacagagcttcttcctaagctgcattcttggtctttgaatttattttgcatattaagtttttctaacagcttgtgggcaatggaaaacacttttgagggacccagagttactcagcttctcctcttgaagatcttctaaaac

SEQ ID NO: 400124 - DNA, 615 bp, Homo sapiens
gggtgagttggtatgtatagaaggttcctgtcatttgacagtcataaggatcagtatttaggcttatttccattgaggtttgatttttatgtatttacttcttttgtctcagtactcttaatgtggaactaagcattgggatgtaataatagggagtcttattacacagagcttcttcctaagctgcattcttggtctttgaatttattttgcatattaagtttttctaacagcttgtgggcaatggaaaacacttttgagggacccagagttactcagcttctcctcttgaagatcttctaaaacattttcattctcattgaattaaaagtgcttttcaactgtattctaagggtttttctggargattaatacacatatattatcaatgaactctatggtcaatgtacatgaatgcatttcggagctgaatttccagaaacagttttctaagtaatcttataaactacattttattgcaatggcttctgtttcttagactttctcataaagagaaaataatttgaaatttatcatgcagaaattgtattacagtagtcttaggacacataaaatgagacagtataaaacatataaaggattgctatagttagg

SEQ ID NO: 400125 - DNA, 606 bp, Homo sapiens
ttttcatctcattatgcatgcgtacgtttcagatagccattgtcaaaagactgtacactataaagcaaaacaatgtatttttaaatgttttaagacaaaactaatatttctttaaacattaaaactgtttgaccctatttcatgtcttatgaatgtagtagtrgtttgatctaaaaataaaatgctaatctttcagggtttaattttcttgaagtactaagattttaaaaagtaagtaagattactatgctttagtcacacagctgtgatcctgtatatctttctctaacacagtgttacattattaaatcttgattctaggattattcagattttcaaaatgatagaaacaccccaaaatatggagaatacccacttgaatgccacagtcatgaggacagaaaattcttttcaccacatatgtaccccagacacacacaagatttcctggtacgtactagccattcaataaatattagaaagaaagaatgaataattaagattaccatctatctcagctgcatctcagtctgtgctaaaactacaatccgaaaatccatcattccattcacctaaatgggtatagaaaccaacatttttaattgg

SEQ ID NO: 400126 - DNA, 471 bp, Homo sapiens
ctgtttttgaactcctggcctcaagccgttttyctacctctacttcccaacgtgctgtgattaccagaatgagccactgcaaccaactcctactttcattcttattctttctgaaaactccctataagtctatttgaaatgagaaaggacataggaatttaattttgaaatgtacttatgtgctgctcttcctaagaattatataaaattccccagacatgtaacttggtcatttttataatcagtcttattgatatcagatatcattaatatgtatatgtacatattatacaggtaataatacatgtcataacgtaagaaatacattgagcatgtaagtttcaacaggaccaaggctggatatcagggagagaggaggaaacaagacagtcatggacctaagactcatagtttatagaataaagtacaacttacaaatagtttgtttagtggctttacttttatcagtta

SEQ ID NO: 400127 - DNA, 569 bp, Homo sapiens
ccaaccttatttttaggactgctctaccacagaaaatggtgtggccatccmttaaataggatgtctcacctacattaggaaagtgatagaaaaaaaaaatgagatgtaataaggatataaggagagactgttaagttgcaaattgccctatgcatagcagctgtgcacaacagggctatccctcggaacgctatccttcactcaagggtggctgaggaaatgcacactttcttttttttcttgagacggagtctcgctctgtcacccaggctggaatgcaatggcacagtctcggctcacggcaacttccgcctcccaggttcaagcaattctcctgcctctgcctcctgagtagctgggattacaggtgcccgccaccaggcctggctgattttttgtatatttagtagagatggggtttcaccatgttggtcaggctggtctcgaactcctgaccttgtgatccacccgcctcagcctcccaaagtactgggattacaggcgtgagccaccgcacccagccagaaatgcacactttctaaatgagtattccctcctccatctcacag

SEQ ID NO: 400128 - DNA, 440 bp, Homo sapiens
tctaccgagtccttaggatgatgttgtatttgtcttcataatcattgatttatttgttcctgtttgtctttgaaggaaggtctgtctatctagactcagtgtttatttctcttgactttgctgggtcttccaaggtccacacatccacaggtgcagttgcctagctcccagctcacttctcagtgtctaatcaaattccaactgttgcattcctgtaataattgatattgtgtctttacttatcgctccaattcttaccccttcagcactgaaaacagatagtgtacatgaaaaatcacattgcacccccagcagtatctttttaggaagatcggtgttggtcaygcccaagacaaaactccttagttgtagggaccttatatcccgcaatatgtggaatccatcactatcttcttaacccatcctatatacgaagatat

SEQ ID NO: 400129 - DNA, 570 bp, Homo sapiens
aaataaattcctggaattgagtgtcttcttcaaataaaaacaaaataactcccatttttctgcccaaagagttgtgaaggcctttgttattgaaaacattaaatgaattgttaaaaaattaaagrtttaaacattttgcctaaatgaatattatagtgctggctacatttattttaatgcatttttggggatcgtacaacatctgctactggtatttcccacaaaatttgacctgtgtttcttcaactcttaggtttaccttagtctacaacttttgctttcacccgcccgtcatgtgaattttaaattttacattttgattttcaagttgaactttcatgttgaactgcttatgcttctcaaattgctcctttttctgcaatttaagtataatacaactggatgaaagaaggagtctcttacaaaatgtagctcatagctcataaagatatttgcaaactcaccttttttaagaaacaacaaatgtaggcttttcaataaaatacgtgaacttgagctctttataaaacaccacttgaagatcattgactttgaaacaaactaatttta

SEQ ID NO: 400130 - DNA, 606 bp, Homo sapiens
gacagccacataattttcattaatatcaatcatgtgtacaaatattttagcatgaattcttaaaagcttaccacgatttgagcacagttttgttgactgatgctttcaactttcaaggcagaagatattcaaaagtagcaaataccctctccagacttttttctctgaatgtgaaaagcctataattagcaagtattttgtcacttggtaagggaaatgcttcagagataaacaactcatggactgtgaaacactgtagcagaattccaaacatttagatttggaagttttttattcattcgatatttgagtgcctgttaacgtgaatatgcagtgctgaattggacagattttactctaatggaattaagaatctggaagagaagacagacattacatttatgattatagataggatatactgtaggtaaggagaagtgttgaattttctgaatgtttatatcaaagtaatttaggtcaagrttatgattcacaaaatgtggttctcagacaagtagcattaacatcatcaggaagcttcttagaagtgcaaattctaggctccacccaagacatactgagtcagaaatactggggatggaactc

SEQ ID NO: 400131 - DNA, 593 bp, Homo sapiens
tacttgaaagattctattccagggaaaacatacacacactggaaaatggagatctcccttagagactcgggatagagaaagaagcagctaaaaagaattgggttctatcagaataaaataccaccagtcaataagaagataatcaattaaaaacaggctaatgacaaacactaccataagatgataacaaaagtctacctgcattaaataaactgcacaattgtactttaatgtagygggaggtagaacatgtacccttgaactaaagctaaagccaagtgagccccctcctcccttgagtatcatctgctagtatgggagaaaaataattcaagacataatcctgatcataaggaaaatagaatccaatgtttgtaaaacttgctatataaagaaaagtattgcttactattgctggacaagaaaaattcaagatatgaaattctgatcattaaaaaggatcccaaaatttattaaaatattatgtgtaatgaaaagataataaatatttattgaatgaattcctcaattttcctatgaattgagaagtgctcatgaaaatgcataggtaaattataaaatgctattccatt

SEQ ID NO: 400132 - DNA, 640 bp, Homo sapiens
tattttataataaggtgttgaatatctcatgactgcatgtcactgcctggaaaaagataaaaattcaaaattcacagtacattgaaattgtgatggttttatatcatcgcacagtggaaaaattactaacttgaaccagcataagttgaagaccatctgtatatgacacttacctgcagagaatcatctggattctaactgaataaagccctcaactgagatttttttattgcraaactttgatttgaaacacagtgaataaacatcaaaatataaggtacaaagatacaagtcaatactttgaatataagaaaagcaacctttgacaataagattccaagaccaggatagtcaacattactctttcatcgtgactttaggatgaccaaggcaggcacaatgaagataaaatatggcatatccttgttcttcttcagagccatgagtatttgctttttgtttaaaggtgtttttagcagcttgaagaagctctaaaccattttttgactctgaatgttcaggaaactatgttgagctctgaagatgcaataatttttaagttatctacatatatctctctctttcttaccaaccatacatctgtgcaccatgttagattttatttgttatgattctcaaa

SEQ ID NO: 400133 - DNA, 523 bp, Homo sapiens
acaaatttaccaatgtcataggatacaagattaatataattgtatttctgtgtactttcaaggagcaatctaaaaatgaaattatagaaaaattatatccatgacatcagaaataagatacacaaaaaaattaagaatataatgtaaatgtaagtataatatatattaatatagcataattataatgaatatgaaataaatataaatatgtaaaataacatcacaaactaagaatataaataaaaaagattaaaaaatctgtgttaaaaactacaaaatgttgctaaaacaaattgaagatctatataaatggagagacattccatgttcatgaattgtaagtctccatactgtgaagatggcaattctcccaaaattgatctatacattgaatgcaatttctatcaaaattctaagtaggctttttttggaggtagaaatygatgagctggtttagaaatttatgtgaaaatgttaaggacctaaaacagccatgacaatatttaaaaataagaaaatggcc

SEQ ID NO: 400134 - DNA, 627 bp, Homo sapiens
acaggcatgagctaccacgcccggctgtgagtttgattttaatataaagttttctaaccacatgaaagagtttctattgttttgattaccatggctataattgatctcaatttttttcatgcaggcaatattagcattgtgatacataaaatatatactcaatttaattctttgggagtgaccaccagctctctccttaactgactactctctagggataaaaaagcaatttgaggaaatttgggccatgtaaagatattgtaaacatcaaaattgtgagaaacaaaaactaaatataatatgaattcaaattgtgtgtgtatattcacataaaatctgtccaacttccaacagttgaatgactggaattatttctaacttctgagatttgatattggttctatgactaaagaacaagctggaaaggactaccatgttattagaccacccataggtaaaattaytttcaaggcttacatagtaaaacatatattttatatatatatatatatatatatatacacacacacacacacctttgtttgcattatcatactagatattgtggctataaaacagaatagaatatgaaatttgtcctcaaggatgtaaaagtacatttatctt

SEQ ID NO: 400135 - DNA, 627 bp, Homo sapiens
acaggcatgagctaccacgcccggctgtgagtttgattttaatataaagttttctaaccacatgaaagagtttctattgttttgattaccatggctataattgatctcaatttttttcatgcaggcaatattagcattgtgatacataaaatatatactcaatttaattctttgggagtgaccaccagctctctccttaactgactactctctagggataaaaaagcaatttgaggaaatttgggccatgtaaagatattgtaaacatcaaaattgtgagaaacaaaaactaaatataatatgaattcaaattgtgtgtgtatattcacataaaatctgtccaacttccaacagttgaatgactggaattatttctaacttctgagatttgatattggttctatgactaaagaacaagctggaaaggactaccatgttattagaccacccataggtaaaattattttcaaggcttacatagtaaaacatatattttatatatatatatatatatatatatacacacacacacacacctttgtttgcattatyatactagatattgtggctataaaacagaatagaatatgaaatttgtcctcaaggatgtaaaagtacatttatctt

SEQ ID NO: 400136 - DNA, 585 bp, Homo sapiens
ccattatttgtaattgcagttcagactaggagaaaaaaaactccatccagaagagaaacgattggaatgtttgtatggatttgggttttgatagcttctgtaacattccatcactgtttgtgtgagcattttccaatcagctgtcccaacatcaaagccatttctgcataatttttttttctctatattgcttgttcttttcaaaatttggttttctatccccttctcccccagtctcagtgagatttgcattttaatgtatgatctgtctaatgtattgtctatttcacttctaacagttacatctcttacatttacaaatgtacttcaccatatttcttccagacagtcacctttcttattattttactgccctcatgacataatattgtaactatctgcagctcttggacaaagagaacctttccagaagagctttcaactttttctcttttgccttggagtatgtctctctacctctattatgttcttgtaagwgataaatatcttatgagttttttttgtctatccataatgataatagaatctgagcattaatatttattttggtggaccatgcacaat

SEQ ID NO: 400137 - DNA, 631 bp, Homo sapiens
agctcttggacaaagagaacctttccagaagagctttcaactttttctcttttgccttggagtatgtctctctacctctattatgttcttgtaagagataaatatcttatgagttttttttgtctatccataatgataatagaatctgagcattaatatttattttggtggaccatgcacaatttctaaaatccataatttattttcataaccaatattacagtaaattcattaagcatatacacggtttggaggcttattggcttaataggttcaatccatagaaaaggataattcactacctactcaaaagcatcctaccttgagagtcagctaagtggggaaaggaaaaatatgcttttctcttcagacagcctttgtatcagtgtttcagtaacatacatgactrcttattgccatttcatttcttctctttgaatattgcctttgcctctcctgggacagtagagttaatcttataggaatacctaattccacgaattccttagaatagtgtaaggctgtgcagtgattggcccttaccttgctctctggtctctccttccaccaccggcttctgagaggttcgcagtcttacatcttgaaaaccactttcagtttgtgaaatgga

SEQ ID NO: 400138 - DNA, 609 bp, Homo sapiens
cctttgtatcagtgtttcagtaacatacatgactacttattgccatttcatttcttctctttgaatattgcctttgcctctcctgggacagtagagttaatcttataggaatacctaattccacgaattccttagaatagtrtaaggctgtgcagtgattggcccttaccttgctctctggtctctccttccaccaccggcttctgagaggttcgcagtcttacatcttgaaaaccactttcagtttgtgaaatggaccaggattcttctttttcttttctttttctctcttttattttttttttgagacaaggtctcacactctcacacagactggagtgcagtggcatgatcattgctcactgcagcctctacctcactggctcaagcgatcctctcacctcagcctcctgagtagctgggaccacaggcatacgctaccatgccagactagtctttttttgtttgtctgtttttgtttgttgttgttgttgttgttgttgtttagagacaaggtctcacgctgttgcccagactggtcttggggtcctgggctcgagtgatcaactgcctcagcctcccaaagtgctaggactgcaggtgtgagcc

SEQ ID NO: 400139 - DNA, 637 bp, Homo sapiens
aagcatattcagtaaacaactgtagttatcatcagtcctattttatgaatgtggaaaataatgcaaagaaaattaagttacttacccaatgtctcacagctaatggtagaacaaattttgaagaggtctgtgacaggactgtccattagaagtcgaatatgaactaaaaatgctatgcaatttttaaaaaatttcaagtagatatattacaaaagcagaaagaaacaggtgaaattcattgtactgttattttattctcaatatcatttcaacatatgacctataaaaatgagattttttttatttcttcacactgagttttcatatccagtgtatattttaaacttaaagcagatcttgattcagactagcattctagaacacatgtgcctaattgctacctttgttcaacagcacaagtctttactcttaattacagcacccctctttgtattgaaatagttttatttgcctacctgccccattctactgtgtgcatctttactaggtgaagaatgtgctattcatttctttatttcaagtatatagactakttagtgcctaagatatagaaacaataaatgcttatggaattttgttgctgcagtattgcagtggcttcagagtacagagattt

SEQ ID NO: 400140 - DNA, 571 bp, Homo sapiens
gcagcattattattccaggattggaatacagttgcatatgataatctttgtttcctttataataactatgagtgactcagttaggaattcaccttggcacaggactaagttatttctgatctactcaatggagtgtatgtatttaggattattcatccttgtttacttaatgtggttttcttcacacattgttttttagatgtcrtttgagagaaacaaaacctttaactcttactgagagggaagatgaattttctaaccctgggatttggctgctcactgagtgtacacataatagatgggtgcttccattgtattattaggggcattcagtagagggcctctcatctaccagggcacaattgagtattcctgattattgatttgtttatttgtgtttatatatttgtaattcccctttaaatactaatattatcaagtgttctaccacatgtgatttccctgttctgagctgtctaacattaagtataatggccaaaccccattttctgtgggatttgggattcttgacctaaggaccacccagcaccatgcccctgagacctcccat

SEQ ID NO: 400141 - DNA, 571 bp, Homo sapiens
gcagcattattattccaggattggaatacagttgcatatgataatctttgtttcctttataataactatgagtgactcagttaggaattcaccttggcacaggactaagttatttctgatctactcaatggagtgtatgtatttaggattattcatccttgtttacttaatgtggttttcttcacacattgttttttagatgtcgtttgagagaaacaaaacctttaactcttactgagagggaagatgaattttctaaccctgggatttggctgctcactgagtgtacacataatagatgggtgcttccattgtattattaggggcattcagtagagggcctctcatctaccagggcacaattgagtaytcctgattattgatttgtttatttgtgtttatatatttgtaattcccctttaaatactaatattatcaagtgttctaccacatgtgatttccctgttctgagctgtctaacattaagtataatggccaaaccccattttctgtgggatttgggattcttgacctaaggaccacccagcaccatgcccctgagacctcccat

SEQ ID NO: 400142 - DNA, 544 bp, Homo sapiens
ttcagattttcgccaagctcataatagcttaaataaagtacgagtcaacatgttgaggtctgtcatgaatagcattcctgctaacactattaagtgtatttatccacagacttgatgttttctaaggaaggtgactaatagataacaataagtcccagggtagaaaaaaggaaaacaaatgttaactatataatttgaaatcccttttctgggttaattctgtttggtttgcttttctatctggagtatgggtaatttatagagcttaacttacgatgtttaatggcatcatttttatcactatacagtatacagatttcccgtttcccttggaaagcagcttatttgccttattatcaataattctgatgtaattctaayaaaattccaaatcccactttaaagatatcttgcagaaatgaagattcagaacactagtgttcaaaatgtagttcacatgactatttaggcagatgcaagtgcctgcttgttctacttttaaattcagatctacaaggagtgaagggacaatattgggccaaga

SEQ ID NO: 400143 - DNA, 628 bp, Homo sapiens
cacggttttaaaaatggcagtttccctgcacaaggtttctttttgcctcctgccatccccgtaagatgtgactttctcctccttttcttccaccatgattgtgaagcctccccagccatacagaactgtaagtccaataaaacctcgtcttttgtaaatatcccagtctcgggtatatctttatcagcagcgtgaaaatgaactaatacagtagtagaaccaaaaaaaaaaaaagatatatcctggtatattttgcatagattttttgggttatgttttgttttgtgttttacataaaagaagacttatatagaaatcaccaagcaaattacggagctcatttacttttagctattgtctttattattattaaaatgtaaaatatacagggccctataaagcaccttcacattattcactttcagacaaacaaaaaatatttttcattctcttgaaatatctctttcatagttgttctcttcarccgaaatgtttctacgtgtattctcagatttacttttagaaacacaatatgaagttgcttctttatagttattggaaaaatatagtaaaatgtaaaattcacagaaaagtctcttttcagaagtgtatttaactatgttgactt

SEQ ID NO: 400144 - DNA, 557 bp, Homo sapiens
atttattgatctgcatattttgaaccatctttgcatcctaagaataactctcacttgattgtgaaaaatgattcttttaatgtgttcttgaactgggtttgctaatagtttcgttgaggatttaaaaaatgtatctttatcaatgatgttgccatatatatatacatatatatatatatacacacacacatatatatatacatatatatatacacacatatatatacatatatatatacacacacacacacacatatatatatatatatatatatwtttttttttttccttgtagtgtccttgtctgcctttggtgttgtggtaatgagtttgggatataaaatgagtttggaagcattgtttatacttcagtttttttgaatggtttgagaattggtattatctcttctttaaatgtttagtagaatgtagcagtgaagccgtccagtcctgcgcttttcctcagtggaagacttttttttttttttaaactgattcagtctctgtgttcattattgctctattgagttttctatttctttgtgtttgttttcaaa

SEQ ID NO: 400145 - DNA, 612 bp, Homo sapiens
ttatggtagatgcattcagctagacaaatattaattttgttattctgcctgtgccttttttctcaragatctgtatgaaaaggaggtacagagaggagcgtgaggttactgaacctgggagaatgagaatgttcttagcacagcaatgactattagacttaagaggcatggattcttataacagcagtttcacttccttctttcccaatagattgagacataatatttcctgtagtttattatgttcttttttcttccactaatccaaacctctgcaacatgcaatttatctatattacaaacctaaatagtaccctagcccccaaagggtttttttaaaaagtcaaaaataacaaatgttgatgaggctgtggagaaaagagaatgcctatatggtgttgctggaaatgtaaattagttcagccactatggaaggcagtttgaagatttctcaaagaacttacagcagaactagcattggactagcaatcttattaatgggtatatacccaaaggaaaataaactttctaccaaaaagacccatacatttgcatgttctttgcagcactattcataatagcaaagacctgaaatcaacctaggtgccccaa

SEQ ID NO: 400146 - DNA, 529 bp, Homo sapiens
tactgcacactactgtagactttataagcactgcacagtctacattaaatgcattaaaaaattttctttctttagtagtagattaaccttagcttcctgtaactgctttactttatcaatgtttttcatcattgacacttttctaataacacttagcttaaaaayacatttgacaactgaacacaaatattttccttctttatgtccttattgcataacctttgtctattttaatatttttatttttaaaaaacaaagacataaacacacacatattagcctaggcctacacagggtcagtatcatcaatatcactgtcttccaccttcatatcctattccactagaaggtcttcagggtaaataaggtgcatggggctaaaatctcctatgataaccatgccttcttctggaatacctcctgaagaacattcgtgaggctattatacagttaacttatgttttaataggtagaaggaatgcactgtaaaataataaaagtgtagtatattaaatacataatccagtaa

SEQ ID NO: 400147 - DNA, 554 bp, Homo sapiens
tttctggtcgtgtgacaagaacccggttttttctacaacaatagtatttttcatgtttgttgtatctttacttatttagtctgttctttctctatcaattaagaaaagggtgttgaaatcacaattatatttgttgaaatgtccatttctrttttttcaattttgtcagattttacttcatatattgtaaagctctagtgttaagtacctttataattgttatcttttccttccgtgttgacctttttttaattaaaagatccctctttataactagtaatataccttagtttaaaatatgtttttgtctgattttaatatagcctctctaactctcttatggttatgtttgtatggtacagatttttaaatcaagttacttataacctatttttatatttcaatctaaagttagtctcatctcttatagacagcacatagtcatatctttctcttttaaacaagttagttaccatatccatcacctcccttacctatcatttaagtagaataatattctattataaatagtatttctgtatgtggagcattaa

SEQ ID NO: 400148 - DNA, 501 bp, Homo sapiens
tgattgttccagatacacccaagtatcaatatttttgtaaagccccccagtataactctaatatacaataagaatgatgaaccactgttaaagatcatacagagttcagaaaatctccagtcttctgggaacaatttaggtcttttataaggtgtttccaggaagcttcccatattattttaaactcctaggagaccactgaaaaataaccaaccatttcaatgaacttggtaaatgttacctagtttctgtcactatatttgtcattttaaaatccttatgaaaatagaaactagttagcagacactgcatttccacatgtcctccccacactttaaatgaagaaaagtctcattagtggttcaaattttgtgcatttattaacccggcttgcaaaacaagtgagttataattctaagtgatgattatttcaaaatagtagtgatgcctaagwgcctttaaggcagcctattttttaatacactcatttagcatttactc

SEQ ID NO: 400149 - DNA, 624 bp, Homo sapiens
ttaattgcaggaggctctgtaaccaatttaccaattaagtgataaccaattaagtcatctctacactgctctttggtttcctataagtgaatggaattttttgcattttcactagggatcaccttattggtgggatttctctgaaccttctcatgttcagaggtctgtctcatccgtgaatcagtttcgctttgctttgttttatttttctttgctcarattaaagtttaaacttcctaagggatttccctttaacagagttttcaaaaatgcaaattaaagactgattaaagcactttagcactttttgtttatctttagaagtgaaatgcaaagagtgaggccttcagagcaagcaattcaaatgtttcaggttctcaaaaagcatgtgttcaattactgtttttttttttgttgttgttgtttttttcatttttactgagcacacagaaagtagtttcagtgctaggcagtgaaggtacaacagtaaatgagacacagttcctgctctcatgggacttacagtctggttcagagagagacacctaaaaattcattaaattcttacaaaatctatgctagaaatttcttcagtgtaaagtgatagcaaagaggacagggtgt

SEQ ID NO: 400150 - DNA, 585 bp, Homo sapiens
aagcctgtcacttttaaggcactagttattaataaatagttaccgaagaaatgaattaaacaaatatattctgagcaaaatatcaataatcatctttataggtacctatttgtaccataaacaactacacttaagtaaaaagtactataaaaataaactatcataccctttttacattaaaaaatacaacaatggaaaggcatataagttttataaaaacactgaattggaactttctatcagaaaaaaaaaaacctgcacaagaacctgaaaagctaactggaaaaattattaaatttttttaatggaatagatagccatcttaamagtctggcagtgacttcttacagattgtaaaatatattcaattacaaacattttcttttcagcagaatctgattatactagcaagacgatattttggattaaactttgctcttcctttacattaagggaagatttaaggtaggcgttaatgagtgaaattatatttgaggtacaagaagaacaaccaggggagacataaagacagaaaagcttaagttacatttaggtcccaataactagctcagtttcggaggaggc

SEQ ID NO: 400151 - DNA, 640 bp, Homo sapiens
ttcatgttgaaatgtaatcttcaatgttggaagtggagggccaggtgggaggtgattgggtcagggggccagatcccttatggcttggaactgtcctcgcaatagtgagtgagttcttgcaaaatctggttgttaaagtttgcagcatgcctcaccccccaacacacatactctctctctctgctcctgctttctccatgtgaagtatctgcttctgctttgccttccatcacgagtaaaagctccctgaggcctcgccaaaagccaaacagatgctgatgccatgctttctgtacagcctgcagaactgtgagccaattaaaccccctttccttataaattatccagcctcagttattttattataggaatgcaagaatggcctaacacaatgggcaaagagaagtagggtggagttagagcatagaaggtataggtagctgaaaatagtaaggaaaacttagaccaaattccaagtctctgttgtgttggaaagtttgaggatcattctgaaagcaactgggagccactcagttatgtgaggagaggaataacttgatcacatatcartattttatttaaaaaactctatggtgatgatataagacgaaccaaatagcgaaggcatgaggcacggcaa

SEQ ID NO: 400152 - DNA, 575 bp, Homo sapiens
tgcattcactgtcttaccatttttcaagaataaaatatattattaattatggtcaccatgttgtacaatagatctcttgagtttattcttcctctagctgaaatcctgtatcctttgatcagcatctccctaaatcccccacctaccgaccaaccactgcagccactggtaagcaccattctactctctacttttatgggataaacatttttagattctacatgtgagcaagctcatgakgtgctagtctttctgtgcctacggcttatttcatttaacataatgtcctccagcttcaattatgttcttgccaatgacaggatttctttctttttatggctgaatagtatttcattgaatatatcacattttcttcatccatttatccattgatggacaataagtttgattttatgtctttattattgtgaataatgcttcaataaacatggcagtgcagataccttttcaacacactgatttcattttctttgtatatatacccagtagttggattgctggattatatggtagttctgtttttaatttttgaggaaactctatactgtttttcc

SEQ ID NO: 400153 - DNA, 581 bp, Homo sapiens
tcttagagaaaaagctttcaacttttcctattgagtgtgatgttagctgtgggtttgtcatatatgacctttgttgcactgaggtagatttcttcaatgcctaatttgttgaaaatttttatcatgaaagtttgaaagtgtgctgaatattgtcaaatgctttttttgtatcttgaaataattatatagttttagttcttcattatgtttatgtgatgtatcacatctattgatttccatatgttgaaccatccttgaatccttgatatgaatcccacttgatcacagtgaatgatctttttaatgtgttgtcaaatttcrtttgctagtattttattgatgatttttgcatatatgtttatcagagatattgacttgtagatttcttttctttctttttatttatttatttttatttttatttttatttttgtagtgtccttgtctggctttgatatcagggtgatgctggcctcataaaatgagtttggaaatattttctcctttttaatttttaataaaagcttgaaaaatggcattagttcatctttaaatgtttgctagaattcagtaatgaagcc

SEQ ID NO: 400154 - DNA, 484 bp, Homo sapiens
tatctccaaggtaatcttaaagtcaacagactgcttaatttgccactttctggggtaggtgaatcagcttagtaatgtcaatagccacgttctcatccaatcttaagttccctagaaataagacataaaatatttctgtatatgtttgatccctatgaaacctggtagacttttaggtatatcarctcaaaaaggtgatgaaatagatgctaatattcttttaaggagactatactataaatttttcagagcaaaaataattaaaattatatttcttgctgtgtgcaaataccaaacgctccatagaaattgatgagaaaaagagaaggaaaggttacaagtagacaatattcagaaaagataaggcataaagtcaatacatacattaagtgctcaagctcactaatagtgaaataagcatattaaatgaaaaatgagagatttctcttgcacatcaaaatgacaaaatgtatataaaaaatta

SEQ ID NO: 400155 - DNA, 501 bp, Homo sapiens
ctggtggagtgacccaaaccttctttcctgaaaggtctgggtcttttgtagtyctgcctggattgggttgttttagtttcccactgaccttactcacagggcatggtaatactaagagacaccctaatggatctcctgtattccatgaatactcttccttacttctgttgtagagtagtagagtgattttatcttgatattccaggtcagtcaccccagccaacaatgtaactccctttttagcctgttgacttaaaggtaggaggagcccaaagtgtccaggtgacaatcttaacttccagtttaatggaattgttgttatgtctcctggtggcagcattcctctctctggaactaggaactctaggccagcagaatgtaatgtcatgggaacaggaagcaaaaattttgctagtggatcattaggggtgatggtgagtggtgccacttccacttccactttcaccccttgattcctggaccggtgaatcctggctatgg

SEQ ID NO: 400156 - DNA, 596 bp, Homo sapiens
cacatacagtcaaaggtattatctatataaagtcaataaactccttgcctctcacaagccatgaatcaggagtttcaaatgcatttattttgcgtaactctctaaacagttcatgccaaggactatcagtgttctccatactattagaagtagagcacttagcatttttgggtctgatcatattaagcagccaactccagaaaccccaaaaccaatgaaagaactccatccttaatattttgttcctctagatccactcttggtaccaaaatctgtattagtcagggttcttttagaggaacagaactaataggagatatataatatatatatatatatgcacacacatacacacacacaagtcctgtatatcattcatatatactctatatatatatatatatatatatatatatatatctgtaccaaaatctgtattagtcagggttcttttagagggacagaactaataggatacatttatatttatatcctatcagatatatatatatatatatatakagagagagagagagagagagagagggagagagagagtttattaagtattaacttacatgatcacaaggtcccac

SEQ ID NO: 400157 - DNA, 523 bp, Homo sapiens
ctttaaaatattccaatccatgtatatgacttacctctccactaaactagtctttatcatgttttcataaagttttagaatttcctcctaaataatagtctgtaattttcccatctttatatacccagcatctattgaggtaatttggtccatagcagaaaccacataaatactagataaaagaaagaacagagagagagagaggggaaagggtggagagaggatgagtgagaaggaagaaggaaaaataaacagagcccatgtcttaaatggccttgaaagccaaatttgaaattttgtcyagtgtttgggaaatcagtgaagatttttagtgagtaaataaacaaattcaaatacatctggcagccttgagaaaaatgaatcaaggaggagaaacactaaaggtagcaataccagttgagagaaaattgcagtggtcagatgagccatttgtagacagtctacacttgtcaaacgggaatggaaagaaggtgagagatttacatgtttggtttggagatat

SEQ ID NO: 400158 - DNA, 405 bp, Homo sapiens
gattcctatctttcaattattcaacactcccataatattttactctcaaggcccaattaacattctactgctctaagagagcagccatagttaagccattacttgaaacgtgctaaaggacaacctcaatgtctgattcatctttgagctcccaatgtctaaaatggagcttcacacataatcaatgcccaatatagctggtgttgcaaagagaacrattctatcattttacctgaaagagccaatcattcataggcacatgcttagttgttccctgagggcataattcagcgctgcaaatggttatttctgcgtgggttcctgggacccctactaggtatcaaacgggttcttgtttagatctactcaaaaatacccacagaagatgtcaccaaaaataggtca

SEQ ID NO: 400159 - DNA, 599 bp, Homo sapiens
gtcacatgtggcgcaggacggctttgaatgaagcccaaaacaaatctgtaaacttccgtaaaacatcatgagatttttctttttaggagcttatcagctatcattagggttagtgtattttatgtgtggcctaagacaattctttttcttccagtgtggaccagggaagccaaaatattagatgccccgatctacagtctatacaaccaccccrtctttcaagatcagctaatcttgaaaagccattttatttaaatagatgagccattagctctcaaattagtttcttcagcagaagctaaataaatgtccagaatataatttagccagccattatggtctctaacatctcaaatgaagtccctgaatatttaaatgtttctaaaccactactttgttacaaaaggtataccatggagtcactcagagggactgaaacatgttcgcaaagtgttctgatggcccaaaaccaggtgaacatgttggcaaagtattctgatggctcaaaaccaggtgaacacccaagataaagcaccaaaggcagttaattttagatgggtctgaaacgggggtagggatgcacaaccaaaaaaaagaaa

SEQ ID NO: 400160 - DNA, 599 bp, Homo sapiens
gtcacatgtggcgcaggacggctttgaatgaagcccaaaacaaatctgtaaacttccgtaaaacatcatgagatttttctttttaggagcttatcagctatcattagggttagtgtattttatgtgtggcctaagacaattctttttcttccagtgtggaccagggaagccaaaatattagatgccccgatctacagtctatacaaccaccccgtctttcaagatcagctaatcttgaaaagccattttatttaaatagatgagccattagctctcaaattagtttcttcagcagaagctaaataaatgtccagaatataatttagccagccattatggtctctaacatctcaaatgaagtccctgaatatttaaatgtttctaaaccactactttgttacaaaaggtataccatggagtcactcagagggactgaaacatgttcgcaaagtgttctgatggcccaaaaccaggtgaacatgttggcaaagtattctgatggctcaaaaccaggtgaacacccaagataaagcaccraaggcagttaattttagatgggtctgaaacgggggtagggatgcacaaccaaaaaaaagaaa

SEQ ID NO: 400161 - DNA, 530 bp, Homo sapiens
agttgctggcaagactgtggagaaagggaatgcttatacagtgttggttctacacacacaaatcaataaatatgatttgtaaatcatatgtaaattaattcagccactgtgggaaacaatttggagatttcttaaaaawcttaaaacactactactatttaacctgtcagttcaattactggatataaatccaaacggaaacaaatcattctaccaagaagacacatgcactctcattttcaatgcagcactattcacaatagccaagacatggaatcaacccaggtgcccatcaatggtgcattggataaagaaaatgtaaatatacacctatacaccatggcgtactatgcagccataaacacaaacaaaattttgtcctttgcagtaacatagatgcagctggaggccattatcctaagcgaattaacataggaaaagaaaaccaaatactgcgtattctcacttataagtggtagctaaacattgagtactcatggacataaagatggcaacaatggaaactgggg

SEQ ID NO: 400162 - DNA, 530 bp, Homo sapiens
agttgctggcaagactgtggagaaagggaatgcttatacagtgttggttctacacacacaaatcaataaatatgatttgtaaatcatatgtaaattaattcagccactgtgggaaacaatttggagatttcttaaaaatcttaaaacactactactatttaacctgtcagttcaattactggatataaatccaaacggaaacaaatcattctaccaagaagacacatgcactctcattttcaatgcagcactattcacaatagccaagacatggaatcaacccaggtgcccatcaatggtgcattggataaagaaaatgtaaatatacacctatacaccatggcgtactatgcagccataaacacaaacaaaattttgtcctttgcagtaacatagatgcagctggaggccattawcctaagcgaattaacataggaaaagaaaaccaaatactgcgtattctcacttataagtggtagctaaacattgagtactcatggacataaagatggcaacaatggaaactgggg

SEQ ID NO: 400163 - DNA, 515 bp, Homo sapiens
ttgcatcctcataggttagctcccacttatgagtgagaacatacaacatttggttttccattcctgagttatttcacttagaataatagtctccaatctcatccaggtaactgcaaatgccattaattcattcctttttatggctgatcagtattccatcatatacatacaccacagtttctttatccacttgttgattgatatatatcaaaataatgatgttttttccaaagggggaaaaagaaattgagaaagagaatgaaatttgaagtcattacagcaaattattaacagctgttcatcctagctagtctctacatagatgtttacaacagtattttcttcaactttccattgctagcagattggtagcataatgaatgaaatcagcagtctttctcatttatcttccatcagctgccgctcatcctttagaggcaggattttcctcacctctctctcagcacactacaatgcacctaccattcaatgccactwaccaccaacttgtttaa

SEQ ID NO: 400164 - DNA, 475 bp, Homo sapiens
tttatatgatgttcaagaataggtaaaactaggctatggagttaaatagaatcgtggtgacctctggagtgactggggggattactaatttgaaagtggcatgaggaaattaccaatcagatcaaggaaaaaaaaaattacattacctcagaaagaaattacattacctccaatttttagtgacaaatataggcaaaaactcctcaagtcatgtgctcaagtgttatacattttactgtatgtcaattatgcttcagtttaagaaaaaagggttgtgtgaaagaaattaaatattttctggtgtttcttacccttctgacaatatataagcagaaccaagaaatttatggttcagttgtcactcagttgctcatttgttcattaatcctacaaatgtttgtatttccatttttcctacatatgaaaatcaagtragagaaagagaatcaatggcttattgtagcaggtggtggca

SEQ ID NO: 400165 - DNA, 559 bp, Homo sapiens
aggtttgtattcttgaggtaatattagcttgttcatattattggattctgagcaagagatctgaaaaatagtgacttaaatacaaaagtatgtattcccttttggtggaagtagtcaaagaataatatggcagttccacgcatttatcaatgaacgaagtgccttctattcttttgctctactatactggcattctcggttcttggcatccagcatcargatatcgcttcatgatccaagatggcgcctcagtctccagctgtcagttctgcactgaagacagcaggatgaaagaagagaaaagagaagtacactctgtttccattttatttattttttgagtcagagtctccctctgtcacccaggctgaagtgcagtggtgtgatctctgctcactgcaacttccacctcccgagttcaagccattctcctgtctcaacctcccaagtagctgggattacaggtgtgcgctgccactcccggctaattttttgtatttttagtagagacggggtttcacaatattggtcaggctggtctcgaactcctgacctcgtg

SEQ ID NO: 400166 - DNA, 523 bp, Homo sapiens
gagagagcgggttcaggtgttgctttgttttgtgttgtttttctttgtttgttttggtattgggcaagtgggaaacagtggggtcctggaatgactatagtttcctcttactcccctgttactgccagttgtttggtaatgtttgagaagacatttctcaaagccttatctatagcctgttccactagcttttmgaattttgtcagtatacaattctctgtttcaaaatatctttttgctaaaagtagctacagtccatcctgttatcttcagctaaatattgcactcagcaaaatcaggcttcagtagttatcgctcttattattactactattaatttacagaggcagattttagccctaaataagaaattccaaataataaaatggaatgggctacctatggagattctaagttaactcccttcagaagtttctaagccatgtaggcataatgagatataaaagagattccccacaaggtattttggttttggctccgacccttaaatggttcgcattgc

SEQ ID NO: 400167 - DNA, 637 bp, Homo sapiens
tgccagttgtttggtaatgtttgagaagacatttctcaaagccttatctatagcctgttccactagcttttcgaattttgtcagtatacaattctctgtttcaaaatatctttttgctaaaagtagctacagtccatcctgttatcttcagctaaatattgcactcagcaaaatcaggcttcagtagttatcgctcttattattactactattaatttacagaggcagattttagccctaaataagaaattccaaataataaaatggaatgggctacctatggagattctaagttaactcccttcagaagtttctaagccatgtaggcataatgagatataaaagagattccccacaaggtattttggttttggctccgacccttaaatggttcgcattgctaagatttagcaattttatttttcaraagtgcttctagtgaaactcacaggagctgtatgggttgtgaatcattttattcacagagacagaaaaagtgaaaatgaattctttcctccccttgcacttccaactcaatattaacacttgctgatgagggatctccacctgcagttagcagctagcccattgccaactgcagatgccagaaaaaattactttacaacactgacataca

SEQ ID NO: 400168 - DNA, 637 bp, Homo sapiens
tgccagttgtttggtaatgtttgagaagacatttctcaaagccttatctatagcctgttccactagcttttcgaattttgtcagtatacaattctctgtttcaaaatatctttttgctaaaagtagctacagtccatcctgttatcttcagctaaatattgcactcagcaaaatcaggcttcagtagttatcgctcttattattactactattaatttacagaggcagattttagccctaaataagaaattccaaataataaaatggaatgggctacctatggagattctaagttaactcccttcagaagtttctaagccatgtaggcataatgagatataaaagagattccccacaaggtattttggttttggctccgacccttaaatggttcgcattgctaagatttagcaattttatttttcagaagtrcttctagtgaaactcacaggagctgtatgggttgtgaatcattttattcacagagacagaaaaagtgaaaatgaattctttcctccccttgcacttccaactcaatattaacacttgctgatgagggatctccacctgcagttagcagctagcccattgccaactgcagatgccagaaaaaattactttacaacactgacataca

SEQ ID NO: 400169 - DNA, 637 bp, Homo sapiens
tgccagttgtttggtaatgtttgagaagacatttctcaaagccttatctatagcctgttccactagcttttcgaattttgtcagtatacaattctctgtttcaaaatatctttttgctaaaagtagctacagtccatcctgttatcttcagctaaatattgcactcagcaaaatcaggcttcagtagttatcgctcttattattactactattaatttacagaggcagattttagccctaaataagaaattccaaataataaaatggaatgggctacctatggagattctaagttaactcccttcagaagtttctaagccatgtaggcataatgagatataaaagagattccccacaaggtattttggttttggctccgacccttaaatggttcgcattgctaagatttagcaattttatttttcagaagtgcttctagtgaaactcacaggagctgtatgggttgtgaatcattttattcacagagacagaaaaagtgaaaatgaattctttcytccccttgcacttccaactcaatattaacacttgctgatgagggatctccacctgcagttagcagctagcccattgccaactgcagatgccagaaaaaattactttacaacactgacataca

SEQ ID NO: 400170 - DNA, 597 bp, Homo sapiens
ctccaatctttctggacctctgaattagaaccatcattatcttttactactgaaaacaatcataactctaataatagtagttattgatatatataatataccagacactttgttaagaacttgtcctrttttgtttttagtcaggatcatgttcagctacatgtaacaaagccaactacagtagctcgaaccaaatatgactttaatcttcaattacatgtcaaaacatttggaagtacaaatcaaatcaatataggtagtcaattaggtcatcaaagatccaggttcttcctttaccaccatctttaacttttctactcagccagaagggaattctgtttaagatccagacatcacactggcctttgaagcaaagggaaaaatgaaagggaaaagaaaaacgcatgttccaaatgattctgttcctgaatctctgtcatatatcagcaaaccaatagctttcccagaagttccatccattagtcattcacttacaattctctgtctgtaacatctttaaatggctactcctacatgcaaagaagcataaatatgaggtattctaactgaaaaaaattgctgcctttcccacactcc

SEQ ID NO: 400171 - DNA, 583 bp, Homo sapiens
gtgctaggaaaagcaaaatgtgctctttaaaacatatttaattgccaaaaagaaacacaaggatgttaaaatacaaatgtatatgagggctcacgtgccaagtgtgtgggcgtttaatccatcctttccttaagacaagcagctataatgcaactgaactctatagggtcagagccgatcagcacttgttgtattaaatattcccatgtattttgaatcatgcagtttcttatgaatcataagcagcctcttttccctgatgatgcctggcctscatctatcgagttttatgaaaatttctctaaaggtgttacaatttaaagtaagtattttgctcatagattatgaaaagaaaccaactgtcagtaagaaatattataatcaaacaacttctgagcttagggtaattttgagtttgttatttaaaaatatagacatggataatgaatcaatactaatcagtcagtcaatactaaccaagttctcaatatatgcaaaataacagactagacattgttaagagatataaaaatatcttggaattttgatagtctaatgagtggggtgtatatgacaaatcaat

SEQ ID NO: 400172 - DNA, 583 bp, Homo sapiens
gtgctaggaaaagcaaaatgtgctctttaaaacatatttaattgccaaaaagaaacacaaggatgttaaaatacaaatgtatatgagggctcacgtgccaagtgtgtgggcgtttaatccatcctttccttaagacaagcagctataatgcaactgaactctatagggtcagagccgatcagcacttgttgtattaaatattcccatgtattttgaatcatgcagtttcttatgaatcataagcagcctcttttccctgatgatgcctggcctgcatctatcgagttttatsaaaatttctctaaaggtgttacaatttaaagtaagtattttgctcatagattatgaaaagaaaccaactgtcagtaagaaatattataatcaaacaacttctgagcttagggtaattttgagtttgttatttaaaaatatagacatggataatgaatcaatactaatcagtcagtcaatactaaccaagttctcaatatatgcaaaataacagactagacattgttaagagatataaaaatatcttggaattttgatagtctaatgagtggggtgtatatgacaaatcaat

SEQ ID NO: 400173 - DNA, 583 bp, Homo sapiens
tttactgcaggaattgtaaatgcaaaccgttcacagtcttgctcagctaaaagggtagtaaagaaacagtcttttaaatctgtgactattaaaggccaatttttcggaattatagtagagaagggaatcctggctgttatatttccataggttgtataactgaattgatggctcttaagtcagttaacattctccatttacctgattttttcttaattatgaaaactggagaattccaasgggaaaattttggcgctatgtgcccattttctaattgttcagtaactaatttctctaaagcatccagtttccctttgcttagcagccattattctatccaaattggcttatctgttaaccattttaaagatataggttctggaggcttaactatggccaccatcaaaaatggtatcctaatctttggcaggaactttgtctttccgtttgaagcagttctttcaaaccttgcaatttttttttctactcctataccagggacatgccccatttcgtgcatcatatgttgactatgagggctgtataattgttatggaattagaacttgtgctccccattgtca

SEQ ID NO: 400174 - DNA, 288 bp, Homo sapiens
ttcggaattatagtagagaagggaatcctggctgttatatttccataggttgtataactgaattgatggctcttaagtcagttaacattctccatttacctgattttttcttaattatgaaaactggagaattccaacgggaaaatkttggcgctatgtgcccattttctaattgttcagtaactaatttctctaaagcatccagtttccctttgcttagcagccattattctatccaaattggcttatctgttaaccattttaaagatataggttctggaggcttaa

SEQ ID NO: 400175 - DNA, 320 bp, Homo sapiens
agctttatgtagattatctctgatatcatcamaggccttgttataatcaactaaatgtgctttccctctgataggtcgcagagcagcctggcaataaggattagcattgtcaaaaccaataactgcaacactatatcctaagcagccaaatctgcaatcatctttttaagagactcctgtaaccaagctataaaatgcacatatggttctcttggtccctgttttatagcactaaaggaagggtattgttctccacatgaagtgatttattccaagctctaatgcacactcctctaagctgttctatggcatcatcctgc

SEQ ID NO: 400176 - DNA, 320 bp, Homo sapiens
agctttatgtagattatctctgatatcatcaaaggccttgttataatcaactaaatgtgctttccctctgataggtcgcagagcagcctggcaataaggattagcattgtcaaaaccaataactgcaacactatatcctaagcagccaaatctgcaatcatcttttyaagagactcctgtaaccaagctataaaatgcacatatggttctcttggtccctgttttatagcactaaaggaagggtattgttctccacatgaagtgatttattccaagctctaatgcacactcctctaagctgttctatggcatcatcctgc

SEQ ID NO: 400177 - DNA, 320 bp, Homo sapiens
agctttatgtagattatctctgatatcatcaaaggccttgttataatcaactaaatgtgctttccctctgataggtcgcagagcagcctggcaataaggattagcattgtcaaaaccaataactgcaacactatatcctaagcagccaaatctgcaatcatctttttaagagactcctgtaaccaagctataaaatscacatatggttctcttggtccctgttttatagcactaaaggaagggtattgttctccacatgaagtgatttattccaagctctaatgcacactcctctaagctgttctatggcatcatcctgc

SEQ ID NO: 400178 - DNA, 571 bp, Homo sapiens
ctgcagttatattaatttgaggttgggcccaggcattgygagcagcctgaatggaagcttcatctgcctactaagttttaaattgtaagaactgagcaggagttagacaagctagagtaaaagtgtcccagtcagtaggaatcatccgactggaaacagcaacattctttaacagtcccatttcaaaaggagaacctggtccatactgatttatagcttgtttaatttttttgagtgatttaaaaggaaaaggcccaaatgtagctataatatttccctgttgatctggggggtgtatcaaacagggaactgccaagcctctaaatcccacttttgtctagcttgctgtattcctgtctgaatagaactaagagcagtcgctcaaggcgctgctcgaacagtcaccagggcaactacttttcacccagtgtcctccagaaaagaaagatctggagggtcgttttcttcaaaatagtaatgagggtgtgcagaaggataaggatgaacctctccctccttttctgctttaggtttatggtgacaaataaacctggtctgtaacctctactgt

SEQ ID NO: 400179 - DNA, 405 bp, Homo sapiens
tttaaattgtaagaactgagcaggagttagacaagctagagtaaaagtgtcccagtcagtaggaatcatccgactggaaacagcaacattctttaacagtcccatttcaaaaggagaacctggtccatactgatttatagcttgtttaatttttttgagtratttaaaaggaaaaggcccaaatgtagctataatatttccctgttgatctggggggtgtatcaaacagggaactgccaagcctctaaatcccacttttgtctagcttgctgtattcctgtctgaatagaactaagagcagtcgctcaaggcgctgctcgaacagtcaccagggcaactacttttcacccagtgtcctccagaaaagaaagatctggagggtcgttttcttcaaaatagtaatga

SEQ ID NO: 400180 - DNA, 405 bp, Homo sapiens
tttaaattgtaagaactgagcaggagttagacaagctagagtaaaagtgtcccagtcagtaggaatcatccgactggaaacagcaacattctttaacagtcccatttcaaaaggagaacctggtccatactgatttatagcttgtttaatttttttgagtgatttaaaaggaaaaggcycaaatgtagctataatatttccctgttgatctggggggtgtatcaaacagggaactgccaagcctctaaatcccacttttgtctagcttgctgtattcctgtctgaatagaactaagagcagtcgctcaaggcgctgctcgaacagtcaccagggcaactacttttcacccagtgtcctccagaaaagaaagatctggagggtcgttttcttcaaaatagtaatga

SEQ ID NO: 400181 - DNA, 405 bp, Homo sapiens
tttaaattgtaagaactgagcaggagttagacaagctagagtaaaagtgtcccagtcagtaggaatcatccgactggaaacagcaacattctttaacagtcccatttcaaaaggagaacctggtccatactgatttatagcttgtttaatttttttgagtgatttaaaaggaaaaggcccaaatgtagctataatatttccctgttgatctggggggtgtatcaaacagggaactgccaagcctctaaatcccacttttrtctagcttgctgtattcctgtctgaatagaactaagagcagtcgctcaaggcgctgctcgaacagtcaccagggcaactacttttcacccagtgtcctccagaaaagaaagatctggagggtcgttttcttcaaaatagtaatga

SEQ ID NO: 400182 - DNA, 591 bp, Homo sapiens
accaacccccaaaagttggtctgcagttatattaatttgaggttgggcccaggcattgtgagcagcctgaatggaagcttcatctgcctactaagttttaaattgtaagaactgagcaggagttagacaagctagagtaaaagtgtcccagtcagtaggaatcatccgactggaaacagcaacattctttaacagtcccatttcaaaaggagaacctggtccatactgatttatagcttgtttaatttttttgagtgatttaaaaggaaaaggcccaaatgtagctataatatttccctgttgatctggggggtgtatcaaacagggaactgccaagcctctaaatcccacttttgtctagcttgctgtattcctgtctgaatagaactaagagcagtcgctcaaggcgctgctcgaacagtcaycagggcaactacttttcacccagtgtcctccagaaaagaaagatctggagggtcgttttcttcaaaatagtaatgagggtgtgcagaaggataaggatgaacctctccctccttttctgctttaggtttatggtgacaaataaacctggtctgtaacctctactgt

SEQ ID NO: 400183 - DNA, 579 bp, Homo sapiens
aaaggcccaaatgtagctataatatttccctgttgatctggggggtgtatcaaacagggaactgccaagcctctaaatcccacttttgtctagcttgctgtattcctgtctgaatagaactaagagcagtcgctcaaggcgctgctcgaacagtcaccagggcaactacttttcacccagtgtcctccagaaaagaaagatctggagggtcgttttcttcaaaatagtaatgagggtgtgcagaaggatarggatgaacctctccctccttttctgctttaggtttatggtgacaaataaacctggtctgtaacctctactgttactttgttatactctccttcctcctcatcatcagtgtgaaaaagttccaaggtagaacgaaccacagcccacacttgtcctattgctaccctgatgcttccgagctccccttcttactcaccacggggattgctttaagagtactcgggtgtcctccagctagttccacattctccaatcgttgctccagcgatcctttgacctgtatttgagcccccatgaatgggcaccacttgctgagaccaggtcggttgg

SEQ ID NO: 400184 - DNA, 583 bp, Homo sapiens
ttttttacactcatcctcctcttcctcatctgagtctgcctcatcatctgtttgaaatggctcaagggctgcctttattagtgcccacactgaccatacagaaaatagaatttttgctccatctttatatgtcttttaaaaaatctcttccaattctctcccattcatccaacttcatagtcctttgttctggaaaccatgggcaaaactgctttactgtactaaagagtgataacaaattctaagtactaaatttcattccccatctttgtatgtcctcgggtgtcttttgatgttgtgtcctctgctttcacatgctccagccttccttcaccrggtctttgtcaccccatgttgggcgccaggaatgttggggtgatcagacccaacactaggtcatgggggtgatgaagtccggcagagtcaaaggaatgagaaaaagacagtttgagagagaaagtgggaccaggagaccatcacgagtgtggagtctgcaaagtccccaagctctgggagcccacgctatttgttggtgctcaaacaaacaggtggtgaggatttaggggttgaaaggaaacggtgt

SEQ ID NO: 400185 - DNA, 583 bp, Homo sapiens
ttttttacactcatcctcctcttcctcatctgagtctgcctcatcatctgtttgaaatggctcaagggctgcctttattagtgcccacactgaccatacagaaaatagaatttttgctccatctttatatgtcttttaaaaaatctcttccaattctctcccattcatccaacttcatagtcctttgttctggaaaccatgggcaaaactgctttactgtactaaagagtgataacaaattctaagtactaaatttcattccccatctttgtatgtcctcgggtgtcttttgatgttgtgtcctctgctttcacatgctccagccttccttcaccaggtctttgtcaccccatgttgggcgccaggaatgttggggtgatcagacccaacactaggtcatgggggtgatgaagtccggcagagtcaaaggaatgagaaaargacagtttgagagagaaagtgggaccaggagaccatcacgagtgtggagtctgcaaagtccccaagctctgggagcccacgctatttgttggtgctcaaacaaacaggtggtgaggatttaggggttgaaaggaaacggtgt

SEQ ID NO: 400186 - DNA, 593 bp, Homo sapiens
ttttttttttttttttttttttttttttgtgagacagggtctcatctgtcaccaggctggagtgcagtggtgcagtcttggctcactgcaacctccacctcctggcttcaagcaattctcctgccttagtatcccaagtagctgggactaaaggggcacatcaccacgcccagctaatttttgtatttttagtagagatggggtttccccatgttggccaggatggtcacgatctcctgaccttgtgatctccttgctttggcctcctcaagtgctgggrttacaggtatgagccaccatgcctggccattgtttaacatttgtactaataaaacactacctttctaaaatcatgtatatgcaatagatcaatattaactgcatttttgtcagattactctaaacagcattacacatatacatcctctgttatctaaacttaaaataagtagaaattttattttatttatgtgattatttttctatttaagcaaacttcaagttatgtctagtcactaaaaatactaaaggccacattttgtaagtgatacatgattttcatgataatgtttcttgtttaatttagacattat

SEQ ID NO: 400187 - DNA, 475 bp, Homo sapiens
ttacaggtatgagccaccatgcctggccattgtttaacatttgtactaataaaacactacctttctaaaatcatgtatatgcaatagatcaatattaactgcatttttgtcagattactctaaacagcattacacatatacatcctctgttatctaaacttaaaataagtagaaattttattttatttatgtgattatttttctatttaagcaaacttcaagttatgtctagtcactaaaaatactaaaggccacattttgtaagtgatacatgattttcatgataatgtttcttgtttaatttagacattattattatttttacttattttagatggggcyggactgtgtagaataaataattagagaaacaaagagaaatacgttgacaaaatttattaattaaatttaggtttattttagaaataaagtgtaaatagcaaatggcattacttttcattcttgggttagtaga

SEQ ID NO: 400188 - DNA, 475 bp, Homo sapiens
ttacaggtatgagccaccatgcctggccattgtttaacatttgtactaataaaacactacctttctaaaatcatgtatatgcaatagatcaatattaactgcatttttgtcagattactctaaacagcattacacatatacatcctctgttatctaaacttaaaataagtagaaattttattttatttatgtgattatttttctatttaagcaaacttcaagttatgtctagtcactaaaaatactaaaggccacattttgtaagtgatacatgattttcatgataatgtttcttgtttaatttagacattattattatttttacttattttagatggggccggactgtgtagaataaataattagagaaacaaagagaartacgttgacaaaatttattaattaaatttaggtttattttagaaataaagtgtaaatagcaaatggcattacttttcattcttgggttagtaga

SEQ ID NO: 400189 - DNA, 475 bp, Homo sapiens
ttacaggtatgagccaccatgcctggccattgtttaacatttgtactaataaaacactacctttctaaaatcatgtatatgcaatagatcaatattaactgcatttttgtcagattactctaaacagcattacacatatacatcctctgttatctaaacttaaaataagtagaaattttattttatttatgtgattatttttctatttaagcaaacttcaagttatgtctagtcactaaaaatactaaaggccacattttgtaagtgatacatgattttcatgataatgtttcttgtttaatttagacattattattatttttacttattttagatggggccggactgtgtagaataaataattagagaaacaaagagaaatacgttgacaaaatttattaattaaatttaggtttattttagaaataaagtgtaaatagcaaatggcattmcttttcattcttgggttagtaga

SEQ ID NO: 400190 - DNA, 344 bp, Homo sapiens
gtaaatagcaaatggcattacttttcattcttgggttagtagatactacatcaatattttttttcttacacacatctaatgaaagatgtgaaaacaaaaactttcacagagaagactgtacttatgcaccataaattcatcatgttccaaagcttaaacagttcccaagaagtctgtgcatctctttttcactggctctacactttcttaagttttgccatcctcatggaactgtcagccagcacactgaaacgattctcagaaaacaaatgcgtcatcaagttctcagggtttcrgtagagattgaaggccaacagacctaagactcattcagaaatacttag

SEQ ID NO: 400191 - DNA, 541 bp, Homo sapiens
aaaactttattactgggctatttacacattttaattgtttctcataaaatatataacattccaatatttactgaagtaggatatttttgtatcayatgtatgattataatttatagggtattttaaatgatgttttttggcctccttaagttttaagtggatcttgcaaatgaaaaccagtattattgagtttgacatactcaaattgcccaaatgtcagctgtttaaacaatcaagtcatcattgatactttagtaaaggttagtaaaggtcatcgaaggtttatttgcattttacagtttttattacttaggagagttaaggagtacctgccaggtttgtccatgctaatgttacaattttctttatgtagttcaaccgtattttgtatggagatactttgaggctctgtaaatatctggttactcctcagaacccactagatttagcatttcatggatgacttgtgtttgaacaattattactatgatggttaccagatgattattttcttattttcttctttgttctacatggagaa

SEQ ID NO: 400192 - DNA, 541 bp, Homo sapiens
aaaactttattactgggctatttacacattttaattgtttctcataaaatatataacattccaatatttactgaagtaggatatttttgtatcacatgtatgattataatttatagggtattttaaatgatgttttttggcctccttaagttttaagtggatcttgcaaatgaaaaccagtattattgagtttgacatactcaaattgcccaaatgtcagctgtttaaacaaycaagtcatcattgatactttagtaaaggttagtaaaggtcatcgaaggtttatttgcattttacagtttttattacttaggagagttaaggagtacctgccaggtttgtccatgctaatgttacaattttctttatgtagttcaaccgtattttgtatggagatactttgaggctctgtaaatatctggttactcctcagaacccactagatttagcatttcatggatgacttgtgtttgaacaattattactatgatggttaccagatgattattttcttattttcttctttgttctacatggagaa

SEQ ID NO: 400193 - DNA, 541 bp, Homo sapiens
aaaactttattactgggctatttacacattttaattgtttctcataaaatatataacattccaatatttactgaagtaggatatttttgtatcacatgtatgattataatttatagggtattttaaatgatgttttttggcctccttaagttttaagtggatcttgcaaatgaaaaccagtattattgagtttgacatactcaaattgcccaaatgtcagctgtttaaacaatcaagtcatcattgatactttagtaaaggttagtaaaggtcatcgaaggtttatttgcattttacagtttttattacttaggagagttaaggagtacctgccaggtttgtccatgctaatgttacaattttctttwtgtagttcaaccgtattttgtatggagatactttgaggctctgtaaatatctggttactcctcagaacccactagatttagcatttcatggatgacttgtgtttgaacaattattactatgatggttaccagatgattattttcttattttcttctttgttctacatggagaa

SEQ ID NO: 400194 - DNA, 628 bp, Homo sapiens
caattttctttatgtagttcaaccgtattttgtatggagatactttgaggctctgtaaatatctggttactcctcagaacccactagatttagcatttcatggatgacttgtgtttgaacaattattactatgatggttaccagatgattattttcttattttcttctttgttctacatggagaaataaaaccaataaataagggagaaggaaagctcatgattctgatgctccaattccccaagattaggccagtagtagacattcyaagctgactttatgtctctttgatttgtctccattactctgtcggcacttttttactttctggcagaagatgttctaagctcagcttgtattttctctgcgccagctctggaatgagtaattttttttagaagaagaggtggagccactgaggaagcacaggtgagccctccccattgtgtactcactggtccccaacagaagaaccactgccacatccactgaagtaccaagaaactagcaaagggccttctggctgtctggggagagtcctcatgtggtccctggctgtctcagaggttctggattagtcttcctgtagcctctgtgttgtgtgtttagatcggggctctgtgggaag

SEQ ID NO: 400195 - DNA, 628 bp, Homo sapiens
caattttctttatgtagttcaaccgtattttgtatggagatactttgaggctctgtaaatatctggttactcctcagaacccactagatttagcatttcatggatgacttgtgtttgaacaattattactatgatggttaccagatgattattttcttattttcttctttgttctacatggagaaataaaaccaataaataagggagaaggaaagctcatgattctgatgctccaattccccaagattaggccagtagtagacattctaagctgactttatgtctctttgatttgtctccattactctgtyggcacttttttactttctggcagaagatgttctaagctcagcttgtattttctctgcgccagctctggaatgagtaattttttttagaagaagaggtggagccactgaggaagcacaggtgagccctccccattgtgtactcactggtccccaacagaagaaccactgccacatccactgaagtaccaagaaactagcaaagggccttctggctgtctggggagagtcctcatgtggtccctggctgtctcagaggttctggattagtcttcctgtagcctctgtgttgtgtgtttagatcggggctctgtgggaag

SEQ ID NO: 400196 - DNA, 467 bp, Homo sapiens
tttttactttctggcagaagatgttctaagctcagcttgtattttctctgcgccagctctggaatgagtmattttttttagaagaagaggtggagccactgaggaagcacaggtgagccctccccattgtgtactcactggtccccaacagaagaaccactgccacatccactgaagtaccaagaaactagcaaagggccttctggctgtctggggagagtcctcatgtggtccctggctgtctcagaggttctggattagtcttcctgtagcctctgtgttgtgtgtttagatcggggctctgtgggaagggccctgagagacccaacagcacagcatgccttatctgccaaatgtccctcccttcctcacactctgacactcaggaatagggtagatggtgtgtccaggcagtgtcaggccacctcactttctcctttgagacgggcccagatgtcgcggggtga

SEQ ID NO: 400197 - DNA, 467 bp, Homo sapiens
tttttactttctggcagaagatgttctaagctcagcttgtattttctctgcgccagctctggaatgagtaattttttttagaagmagaggtggagccactgaggaagcacaggtgagccctccccattgtgtactcactggtccccaacagaagaaccactgccacatccactgaagtaccaagaaactagcaaagggccttctggctgtctggggagagtcctcatgtggtccctggctgtctcagaggttctggattagtcttcctgtagcctctgtgttgtgtgtttagatcggggctctgtgggaagggccctgagagacccaacagcacagcatgccttatctgccaaatgtccctcccttcctcacactctgacactcaggaatagggtagatggtgtgtccaggcagtgtcaggccacctcactttctcctttgagacgggcccagatgtcgcggggtga

SEQ ID NO: 400198 - DNA, 552 bp, Homo sapiens
tctttgatttgtctccattactctgtcggcacttttttactttctggcagaagatgttctaagctcagcttgtattttctctgcgccagctctggaatgagtaattttttttagaagaagaggtggagccactgaggaagcacaggtgagccctccccattgtgtactcactggtccccaacagaagaaccactgccacatccactgargtaccaagaaactagcaaagggccttctggctgtctggggagagtcctcatgtggtccctggctgtctcagaggttctggattagtcttcctgtagcctctgtgttgtgtgtttagatcggggctctgtgggaagggccctgagagacccaacagcacagcatgccttatctgccaaatgtccctcccttcctcacactctgacactcaggaatagggtagatggtgtgtccaggcagtgtcaggccacctcactttctcctttgagacgggcccagatgtcgcggggtgagtgtggagctgggaacctggagcctgaggccaactgtctctccctgtgtctt

SEQ ID NO: 400199 - DNA, 467 bp, Homo sapiens
tttttactttctggcagaagatgttctaagctcagcttgtattttctctgcgccagctctggaatgagtaattttttttagaagaagaggtggagccactgaggaagcacaggtgagccctccccattgtgtactcactggtccccaacagaagaaccactgccacatccactgaagtaccaagaaactagcaaagggccttctggctgtctggggagagtmctcatgtggtccctggctgtctcagaggttctggattagtcttcctgtagcctctgtgttgtgtgtttagatcggggctctgtgggaagggccctgagagacccaacagcacagcatgccttatctgccaaatgtccctcccttcctcacactctgacactcaggaatagggtagatggtgtgtccaggcagtgtcaggccacctcactttctcctttgagacgggcccagatgtcgcggggtga

SEQ ID NO: 400200 - DNA, 548 bp, Homo sapiens
catttcatggatgacttgtgtttgaacaattattactatgatggttaccagatgattattttcttattttcttctttgttctacatggagaaataaaaccaataaataagggagaaggaaagctcatgattctgatgctccaattccccaagattaggccagtagtagacattctaagctgactttatgtctctttgatttgtctccattactctgtcggcacttttttactttctggcagaagatgttctaagctcagcttgtattttctctgcgccagctctggaatgagtaattttttttagaagaagaggtggagccactgaggaagcacaggtgagccctccccattgtgtactcactggtccccaacagaagaaccactgccacatccactgaagtaccaagaaactagcaaagggccttctggctgtctggggagagtcctcatgtggtccctggctgtctcagaggttctggattagtcttcctgtagcctctgtgttstgtgtttagatcggggctctgtgggaagggccctgagagac

SEQ ID NO: 400201 - DNA, 467 bp, Homo sapiens
tttttactttctggcagaagatgttctaagctcagcttgtattttctctgcgccagctctggaatgagtaattttttttagaagaagaggtggagccactgaggaagcacaggtgagccctccccattgtgtactcactggtccccaacagaagaaccactgccacatccactgaagtaccaagaaactagcaaagggccttctggctgtctggggagagtcctcatgtggtccctggctgtctcagaggttctggattagtcttcctgtagcctctgtgttgtgtgtttagatcggggctctgtgggaagggccctgagagacccaacagcacagcrtgccttatctgccaaatgtccctcccttcctcacactctgacactcaggaatagggtagatggtgtgtccaggcagtgtcaggccacctcactttctcctttgagacgggcccagatgtcgcggggtga

SEQ ID NO: 400202 - DNA, 552 bp, Homo sapiens
tctttgatttgtctccattactctgtcggcacttttttactttctggcagaagatgttctaagctcagcttgtattttctctgcgccagctctggaatgagtaattttttttagaagaagaggtggagccactgaggaagcacaggtgagccctccccattgtgtactcactggtccccaacagaagaaccactgccacatccactgaagtaccaagaaactagcaaagggccttctggctgtctggggagagtcctcatgtggtccctggctgtctcagaggttctggattagtcttcctgtagcctctgtgttgtgtgtttagatcggggctctgtgggaagggccctgagagacccaacagcacagcatgccttatctgccaaatgtccctcccttcctcacactctgacactcaggaataggrtagatggtgtgtccaggcagtgtcaggccacctcactttctcctttgagacgggcccagatgtcgcggggtgagtgtggagctgggaacctggagcctgaggccaactgtctctccctgtgtctt

SEQ ID NO: 400203 - DNA, 581 bp, Homo sapiens
gacctgtgttccacctagagagggtgccagccctctcagcattatgmagtgcccctcctctgtctgcatccccaggacacccatgggtggggagggcagagattggggagcacctatagaggctctaatgctctaaggtgacagtgatgaggacctgggtgcacccatgagtggagaagctaggcctgtccagagaagcaagacaaacacacacacacacacacacacacacacacacacaggcacacatgcatactcaaatacattgcatacacacatgtcagttcaggggatagaggacactgactctgggccctgttgacccaagcagactcccatggtggtgggttgtgtcaccccacaatgtcactgttgctgagttcccatcgcctctgtgttgtggagcagttagagacacacagcagtgtctgtgagtagctctgcatgaaggaccattttctagatgagaggcacatctcaacacagctcactgatcagattcaggtgagtgggacctgctcttttctcttcctcctggcttgggaaaagtcactatcaggtgggtggttttggcctctggg

SEQ ID NO: 400204 - DNA, 463 bp, Homo sapiens
acctgtgttccacctagagagggtgccagccctctcagcattatgaagtgcccctcctctgtctgcatccccaggacmcccatgggtggggagggcagagattggggagcacctatagaggctctaatgctctaaggtgacagtgatgaggacctgggtgcacccatgagtggagaagctaggcctgtccagagaagcaagacaaacacacacacacacacacacacacacacacacacaggcacacatgcatactcaaatacattgcatacacacatgtcagttcaggggatagaggacactgactctgggccctgttgacccaagcagactcccatggtggtgggttgtgtcaccccacaatgtcactgttgctgagttcccatcgcctctgtgttgtggagcagttagagacacacagcagtgtctgtgagtagctctgcatgaaggaccattttctaga

SEQ ID NO: 400205 - DNA, 561 bp, Homo sapiens
ggcaggggggttgtctgtggagcctccttgcctccatctgcagggaaagtgagtcagggcaccctggagggtggctggaaagagaaggtgagaagatgtgttgaatccaagtactgcttggcagacctacaactttacaaatgacctgtgttccacctagagagggtgccagccctctcagcattatgaagtgcccctcctctgtctgcatccccaggacacccatgggtggggagggcagagattggggagcacctatagaggctctaatgctctaaggtgacagtgatgaggacctgggtgcacccatgagtggagaagctaggcctgtccagagaagcaagacaaacacacacacacacacacacacacacacacacacaggcacayatgcatactcaaatacattgcatacacacatgtcagttcaggggatagaggacactgactctgggccctgttgacccaagcagactcccatggtggtgggttgtgtcaccccacaatgtcactgttgctgagttcccatcgcctctgtgttgtggagcagttagagacaca

SEQ ID NO: 400206 - DNA, 254 bp, Homo sapiens
ccatgatggaaaccacatggccagtccatgactagctacacgcattgacatcccccactgaccctccagcaacaccgactcccaacaatctagtgagcctycagcatcatccactcccaaccactagtgagccaccctgcacaccaccccactgtgctttcacacaatccatgcttggctgcaactgtgtgtgagatgagctggccaccaagactctctaagccaaaaaacaagtaataatgagttgttttaag

SEQ ID NO: 400207 - DNA, 254 bp, Homo sapiens
ccatgatggaaaccacatggccagtccatgactagctacacgcattgacatcccccactgaccctccagcaacaccgactcccaacaatctagtgagccttcagcawcatccactcccaaccactagtgagccaccctgcacaccaccccactgtgctttcacacaatccatgcttggctgcaactgtgtgtgagatgagctggccaccaagactctctaagccaaaaaacaagtaataatgagttgttttaag

SEQ ID NO: 400208 - DNA, 615 bp, Homo sapiens
ctgtgtgtgggggggcagatgacatgccaccacaatttgattcagtccttactgcagctgagtgtgtgtgggtgcaggtgayaggccaccacaacctgattcaggattcagttgggctaccagccagtgccataaggaaaaccattctgggactcttgagaggggcaaagcataatttgcatgtgggagaaacgttaatagtttgtggccagaggacaaactgtggtttattaaagactgctgcaggttcctactatgcttctcatcaagaggtggaatctaatcaccttccccccttgaatcatgtctggtctcagtgatgagtatgactggaaagtgtggcaggatagatgctctgggacttctgagggatgatcatgagagaccttacagcttctgcctgggcctcttggacacacaccctgggagaagccagacaaacctgactacctgacactgccagactgggaggaagtccgtgctggccacaaagagagggctcggtgcctgctccatgtccccagccactagagtccttctgggtgcctgcttcacgtccccagccactagagtcctcccagatgagaccagggacatcttgaagcagccaaccca

SEQ ID NO: 400209 - DNA, 615 bp, Homo sapiens
ctgtgtgtgggggggcagatgacatgccaccacaatttgattcagtccttactgcagctgagtgtgtgtgggtgcaggtgataggccaccacaacctgattcaggattcagttgggctaccagccagtgccataaggaaaaccattctgggactcttgagaggggcaaagcataatttgcatgtgggagaaacgttaatagtttgtggccagaggacaaactgtggtttattaaagactgctgcaggttcctactatgcttctcatcaagaggtggaatctaatcaccttccccccttgaatcatgtctggtctcagtgatgagtatgactggamagtgtggcaggatagatgctctgggacttctgagggatgatcatgagagaccttacagcttctgcctgggcctcttggacacacaccctgggagaagccagacaaacctgactacctgacactgccagactgggaggaagtccgtgctggccacaaagagagggctcggtgcctgctccatgtccccagccactagagtccttctgggtgcctgcttcacgtccccagccactagagtcctcccagatgagaccagggacatcttgaagcagccaaccca

SEQ ID NO: 400210 - DNA, 644 bp, Homo sapiens
ctgttacagtgaactaaatatggcctgggaaggactctgtacttctagatttgagtccctgtggacaaactgcaacctaacttaataggtagaaagactgaaaacctaacttaggagtatgtgcctaaaacagtagctgagtcgtggccaatcccaacagccaaacttctgccactcacacactgctgagtgttcagctgtgttcaaataaggcaaatgctgagcactgtaaccagtccagttgtttytggacctcactgctgagaactgtaatggacccagttgcttctagacctcactcctcacttcagatttttgtacatcatgttccctttattgtctataaatcttccaccatgtgtctgtgctggagtctcactgaatctgctgtgattctgggggctgcctgattcgtgaatcattcattgctcaattaagttcctttaaatttaattcagctgaagattttcttttaatagatggtgtcagaagtgggatctgtgggagcaggactgctagggcctctggagctatactgtggtgagcagtgttgctaaggcttctaatgacccccagagtgctgaggtacaaggaaggaacctgaaaggacccgtttgtgatggcagcagtggcccacgtggagc

SEQ ID NO: 400211 - DNA, 554 bp, Homo sapiens
tgagtccctgtggacaaactgcaacctaacttaataggtagaaagactgaaaacctaacttaggagtatgtgcctaaaacagtagctgagtcgtggccaatcccaacagccaaacttctgccactcacacactgctgagtgttcagctgtgttcaaataaggcaaatgctgagcactgtaaccagtccagttgtttttggacctcactgctgagaactgtaatggacccagttgcttctagacctcactcctcacttcagatttttgtacatcatgttccctttattgtctataaatcttccaccatgtgtctgtgctggagtctcacygaatctgctgtgattctgggggctgcctgattcgtgaatcattcattgctcaattaagttcctttaaatttaattcagctgaagattttcttttaatagatggtgtcagaagtgggatctgtgggagcaggactgctagggcctctggagctatactgtggtgagcagtgttgctaaggcttctaatgacccccagagtgctgaggtacaaggaaggaacctgaa

SEQ ID NO: 400212 - DNA, 554 bp, Homo sapiens
tgagtccctgtggacaaactgcaacctaacttaataggtagaaagactgaaaacctaacttaggagtatgtgcctaaaacagtagctgagtcgtggccaatcccaacagccaaacttctgccactcacacactgctgagtgttcagctgtgttcaaataaggcaaatgctgagcactgtaaccagtccagttgtttttggacctcactgctgagaactgtaatggacccagttgcttctagacctcactcctcacttcagatttttgtacatcatgttccctttattgtctataaatcttccaccatgtgtctgtgctggagtctcactraatctgctgtgattctgggggctgcctgattcgtgaatcattcattgctcaattaagttcctttaaatttaattcagctgaagattttcttttaatagatggtgtcagaagtgggatctgtgggagcaggactgctagggcctctggagctatactgtggtgagcagtgttgctaaggcttctaatgacccccagagtgctgaggtacaaggaaggaacctgaa

SEQ ID NO: 400213 - DNA, 604 bp, Homo sapiens
tcataataggaactgttacagtgaactaaatatggcctgggaaggactctgtacttctagatttgagtccctgtggacaaactgcaacctaacttaataggtagaaagactgaaaacctaacttaggagtatgtgcctaaaacagtagctgagtcgtggccaatcccaacagccaaacttctgccactcacacactgctgagtgttcagctgtgttcaaataaggcaaatgctgagcactgtaaccagtccagttgtttttggacctcactgctgagaactgtaatggacccagttgcttctagacctcactcctcacttcagatttttgtacatcatgttccctttattgtctataaatcttccaccatgtgtctgtgctggagtctcactgaatctgctgtgattctgggggctgcctgattcgtgaatcmttcattgctcaattaagttcctttaaatttaattcagctgaagattttcttttaatagatggtgtcagaagtgggatctgtgggagcaggactgctagggcctctggagctatactgtggtgagcagtgttgctaaggcttctaatgacccccagagtgctgaggtacaag

SEQ ID NO: 400214 - DNA, 604 bp, Homo sapiens
tcataataggaactgttacagtgaactaaatatggcctgggaaggactctgtacttctagatttgagtccctgtggacaaactgcaacctaacttaataggtagaaagactgaaaacctaacttaggagtatgtgcctaaaacagtagctgagtcgtggccaatcccaacagccaaacttctgccactcacacactgctgagtgttcagctgtgttcaaataaggcaaatgctgagcactgtaaccagtccagttgtttttggacctcactgctgagaactgtaatggacccagttgcttctagacctcactcctcacttcagatttttgtacatcatgttccctttattgtctataaatcttccaccatgtgtctgtgctggagtctcactgaatctgctgtgattctgggggctgcctgattcgtgaatcattcattgctcaattaagytcctttaaatttaattcagctgaagattttcttttaatagatggtgtcagaagtgggatctgtgggagcaggactgctagggcctctggagctatactgtggtgagcagtgttgctaaggcttctaatgacccccagagtgctgaggtacaag

SEQ ID NO: 400215 - DNA, 604 bp, Homo sapiens
tcataataggaactgttacagtgaactaaatatggcctgggaaggactctgtacttctagatttgagtccctgtggacaaactgcaacctaacttaataggtagaaagactgaaaacctaacttaggagtatgtgcctaaaacagtagctgagtcgtggccaatcccaacagccaaacttctgccactcacacactgctgagtgttcagctgtgttcaaataaggcaaatgctgagcactgtaaccagtccagttgtttttggacctcactgctgagaactgtaatggacccagttgcttctagacctcactcctcacttcagatttttgtacatcatgttccctttattgtctataaatcttccaccatgtgtctgtgctggagtctcactgaatctgctgtgattctgggggctgcctgattcgtgaatcattcattgctcaattaagttcctttaaatttaattcagctgaagattttcttttaatagatggtgtcagaagtgggatcygtgggagcaggactgctagggcctctggagctatactgtggtgagcagtgttgctaaggcttctaatgacccccagagtgctgaggtacaag

SEQ ID NO: 400216 - DNA, 567 bp, Homo sapiens
tgtttgcagtcggcctggtccagctgcagcctcacagggagctggcatctgtgcctggagctgcccaccccactgcagctggcatgcttggctgtgtgcagtggccagatcccatgctcgcttgctcacacacccctcactgctctgtacccagctcgcccttggcaggtgtgggatccagaccactagcatgagctgagtggacagaactaacccagtgggcccaagcaaaacacaggtaaaggctccacaagccagaggtttcaggcagaaaagtgacacctcaggattctgtaacacttgtgtcctttgatctctcggagcagctgggatcatgrtaaattttctctcggatttcagagctccatggatttgtgttttgagctttgagtttctttgagcaaatttctgttccaaactgctatccagccatgactggctggatgttttagaagttatgacagaaaagggaccgggtccaggatcagatttgatccagtagttaactggcttgaatccagttccagttagaggcctcctacatctgactgggtcagaaggaaagtg

SEQ ID NO: 400217 - DNA, 474 bp, Homo sapiens
aaagtgggtgacatttggctttctctctttaaagaagatgttcaggtaatattaaaaaataatgaaaaatttgtttgccttttaaataaactaccaaaaaaaaaaaaaaggaaaaacaagaggcagatcgtttgtgaagataagtcttccctctatcaatgagtaaagatttttgccctttaaaactttyttaagtcatgattttaagtaaatgaatgacttacagtgacctggaattctatttcataacatcaagtgtttaaacttttaatatatttaataggcttcccaaaatcaaatttcaacttcaaaattgtcttttctgacctctaactttgggatactacagaggcccttgaagcacccaaaagagaggtaaacaggactatttaacatgttaagtcacatgggtagcactgtcaaaataaaacataatgttgaaccttcttcaggttatatttagtttatgtcatc

SEQ ID NO: 400218 - DNA, 474 bp, Homo sapiens
aaagtgggtgacatttggctttctctctttaaagaagatgttcaggtaatattaaaaaataatgaaaaatttgtttgccttttaaataaactaccaaaaaaaaaaaaaaggaaaaacaagaggcagatcgtttgtgaagataagtcttccctctatcaatgagtaaagatttttgccctttaaaactttcttaagtcatgattttaagtaaatgaatgacttacrgtgacctggaattctatttcataacatcaagtgtttaaacttttaatatatttaataggcttcccaaaatcaaatttcaacttcaaaattgtcttttctgacctctaactttgggatactacagaggcccttgaagcacccaaaagagaggtaaacaggactatttaacatgttaagtcacatgggtagcactgtcaaaataaaacataatgttgaaccttcttcaggttatatttagtttatgtcatc

SEQ ID NO: 400219 - DNA, 567 bp, Homo sapiens
aataaaacataatgttgaaccttcttcaggttatatttagtttatgtcatcaacccgttctaaaattgtataggatttctaaaattcttttttttttcccccgagatggagtcttgctctgtcaccaaggctggagtacagtggcacaatctcggctcactgcaacctccgcctcctgggttcatgycattctcctgcttcagcctcccgagtagctgggactacaggcatccaccaccatgccaagctaatttttgtatttttagtagagacggggtttcaccgtgttagccaggatgttctcatctcctgactcgtgatccttccaccttggcctcccaaagtgctgggattacaggcgtgagccactgcaactggccaggattctaaaattctaatatgcctatatgctatctatcataattacctgtttagtttgttttgagacagagtttcactcttgtcacctaggctggagtgcaatggtgtgatctaggctcactgaagcctccacctcctgggttcaagcatttctcctgcctcagcctcccaagtagctgggattac

SEQ ID NO: 400220 - DNA, 567 bp, Homo sapiens
aataaaacataatgttgaaccttcttcaggttatatttagtttatgtcatcaacccgttctaaaattgtataggatttctaaaattcttttttttttcccccgagatggagtcttgctctgtcaccaaggctggagtacagtggcacaatctcggctcactgcaacctccgcctcctgggttcatgccattctcctgcttcagcctcccgagtagctgggactacaggcatccaccaccatgccaagctaatttttgtatttttagtagagacggggtttcaccgtgttagccaggatgttctcatctcctgactcgtgatccttccacctyggcctcccaaagtgctgggattacaggcgtgagccactgcaactggccaggattctaaaattctaatatgcctatatgctatctatcataattacctgtttagtttgttttgagacagagtttcactcttgtcacctaggctggagtgcaatggtgtgatctaggctcactgaagcctccacctcctgggttcaagcatttctcctgcctcagcctcccaagtagctgggattac

SEQ ID NO: 400221 - DNA, 567 bp, Homo sapiens
aataaaacataatgttgaaccttcttcaggttatatttagtttatgtcatcaacccgttctaaaattgtataggatttctaaaattcttttttttttcccccgagatggagtcttgctctgtcaccaaggctggagtacagtggcacaatctcggctcactgcaacctccgcctcctgggttcatgccattctcctgcttcagcctcccgagtagctgggactacaggcatccaccaccatgccaagctaatttttgtatttttagtagagacggggtttcaccgtgttagccaggatgttctcatctcctgactcgtgatccttccaccttggcctcccaaagtgctgggattacaggcgtgagccactgcaactggccaggattctaaaattctaatatgcctatatgctatctatcataattacctgtttwgtttgttttgagacagagtttcactcttgtcacctaggctggagtgcaatggtgtgatctaggctcactgaagcctccacctcctgggttcaagcatttctcctgcctcagcctcccaagtagctgggattac

SEQ ID NO: 400222 - DNA, 567 bp, Homo sapiens
aataaaacataatgttgaaccttcttcaggttatatttagtttatgtcatcaacccgttctaaaattgtataggatttctaaaattcttttttttttcccccgagatggagtcttgctctgtcaccaaggctggagtacagtggcacaatctcggctcactgcaacctccgcctcctgggttcatgccattctcctgcttcagcctcccgagtagctgggactacaggcatccaccaccatgccaagctaatttttgtatttttagtagagacggggtttcaccgtgttagccaggatgttctcatctcctgactcgtgatccttccaccttggcctcccaaagtgctgggattacaggcgtgagccactgcaactggccaggattctaaaattctaatatgcctatatgctatctatcataattacctgtttagtttgttttgagacagagtttcrctcttgtcacctaggctggagtgcaatggtgtgatctaggctcactgaagcctccacctcctgggttcaagcatttctcctgcctcagcctcccaagtagctgggattac

SEQ ID NO: 400223 - DNA, 538 bp, Homo sapiens
agaaaatagagggtaaatatatcttttcaaactttaaatgcctcaggctcttagttaatcttccccagatctgggaagacctagaaggggagagattgggctaccttaatgagggccatttcaatctcttggccctgcagcagccatttcaaaataagtcaaaaaatatatttgggkgtaaaatattttgatttccttcacgcttcttctctctgtgatgctgcaccagaatcagattagaaaggaagccacattataagtgttaataaaacccatctgatgagatttgatagtttgaagggtgtgtttcccagaccctttagatagaaattggggccaaaggaaacaaggtcttattcctctatataaatctgtcagtgttttaagcagtgaaagaaagatttttcatttaattttacagacttgatactaatgaaaaggatagcttgtaaaatataaatctctttttctataaaaaggacatgttgttgattctcttagaccttgaaccccggccaggagttttaaaccaagcagt

SEQ ID NO: 400224 - DNA, 538 bp, Homo sapiens
agaaaatagagggtaaatatatcttttcaaactttaaatgcctcaggctcttagttaatcttccccagatctgggaagacctagaaggggagagattgggctaccttaatgagggccatttcaatctcttggccctgcagcagccatttcaaaataagtcaaaaaatatatttgggggtaaaatattttgatttccttcacgcttcttctctctgtgatgctgcaccagaatcagattagaaaggaagccacattataagtgttaataaaacccatctgatgagatttgatagtttgaagggtgtgtttcccagaccctttagatagaaattggggccaaaggaaacaagstcttattcctctatataaatctgtcagtgttttaagcagtgaaagaaagatttttcatttaattttacagacttgatactaatgaaaaggatagcttgtaaaatataaatctctttttctataaaaaggacatgttgttgattctcttagaccttgaaccccggccaggagttttaaaccaagcagt

SEQ ID NO: 400225 - DNA, 563 bp, Homo sapiens
aactattttattttgagttaattattaaatawgatatttggtcgaactttatttattttttgcttatggatacccagttgtcccagcaccatttgttgaaaagactattcttttcccattttgttcttttgttaagcttgtataaaatcaattgactgtaaaagtgcaggcttatttttagattgtcaattcttagcttgtttatgtctattcttatgtcaaggcccaatcgaattgaatgggaagtttttttcaatcatgttgcatattaccagttgtcttatgtcataataaaaattaaatttagtggaatgtctgtaacttcaccttttttgtcacaaaggagtctctggccagcttataccttacttcctctaagacatgatcagacgccaggcttacaagacacacttaatttctttttttctccattcaagcctttagtctcttttccattgcctcccactatagttacattttcagtaagttttggttacaggatctgctgacatagtctaatattcagtgcagtatgttttactaactcattataattcatagaa

SEQ ID NO: 400226 - DNA, 563 bp, Homo sapiens
aactattttattttgagttaattattaaataagatatttggtcgaactttatttattttttgcttatggatacccagttgtcccagcaccatttgttgaaaagactattcttttcccattttgttcttttgttaagcttgtataaaatcaattgactgtaaaagtgcaggcttatttttagattgtcaattcttagcttgtttatgtctattcttatgtcaaggcccaatcgaattgaatgrgaagtttttttcaatcatgttgcatattaccagttgtcttatgtcataataaaaattaaatttagtggaatgtctgtaacttcaccttttttgtcacaaaggagtctctggccagcttataccttacttcctctaagacatgatcagacgccaggcttacaagacacacttaatttctttttttctccattcaagcctttagtctcttttccattgcctcccactatagttacattttcagtaagttttggttacaggatctgctgacatagtctaatattcagtgcagtatgttttactaactcattataattcatagaa

SEQ ID NO: 400227 - DNA, 431 bp, Homo sapiens
ttttttcaatcatgttgcatattaccagttgtcttatgtcataataaaaattaaatttagtggaatgtctgtaacttcaccttttttgtcacaaaggagtctctggccagcttataccttacttcctctaagacatgatcagacgccaggcttacaagacacacttaatttctttttttctccattcaagcctttagtctcttttccattgcctcccactatagttacattttcagtaagttttggttacaggatctgctgacatagtctaatattcagtgcaktatgttttactaactcattataattcatagaaccttccatagatgtttaccatctaggaaggagaagtttaagtctgagccaccagctttcctcagtggaaatcaagtgaagtcatcatcttgcagtttacagaccctctttcctcc

SEQ ID NO: 400228 - DNA, 560 bp, Homo sapiens
cataatattctccttatttcctcatttagaaaagaaaatgaaaattgaatactaggttgattaataaatactcaaaacttcttcttttagaattttagttaattgaaatcaggtaaatgtctgattttgcctatgtcacccagtatttctagttgtttttcaaatcatacatcttcttgcttcccagtcttacttcctaacttgaggggaaattgtaagaagacacccttgccttgttwtcagagttcataattgaaggagttttaggaaaattcctcctcagcagcttatgtctctctcctggttatctactgcttctcaataatgtttgacatcaataaataaatatcaacatttattagatcctgctttaaaggagactcttttctgctgcataagttatgtttcctgttgtctctttttaaaacttattttcctaacaattacccagagtcttgtggcttgaaagaaaaacatttattttgttcatgaacctgtggtttgggaaaaacttggccaggacagcttgtctttgctcccttcagcttccctaggaacag

SEQ ID NO: 400229 - DNA, 560 bp, Homo sapiens
cataatattctccttatttcctcatttagaaaagaaaatgaaaattgaatactaggttgattaataaatactcaaaacttcttcttttagaattttagttaattgaaatcaggtaaatgtctgattttgcctatgtcacccagtatttctagttgtttttcaaatcatacatcttcttgcttcccagtcttacttcctaacttgaggggaaattgtaagaagacacccttgccttgttttcagagttcataattgaaggwgttttaggaaaattcctcctcagcagcttatgtctctctcctggttatctactgcttctcaataatgtttgacatcaataaataaatatcaacatttattagatcctgctttaaaggagactcttttctgctgcataagttatgtttcctgttgtctctttttaaaacttattttcctaacaattacccagagtcttgtggcttgaaagaaaaacatttattttgttcatgaacctgtggtttgggaaaaacttggccaggacagcttgtctttgctcccttcagcttccctaggaacag

SEQ ID NO: 400230 - DNA, 560 bp, Homo sapiens
cataatattctccttatttcctcatttagaaaagaaaatgaaaattgaatactaggttgattaataaatactcaaaacttcttcttttagaattttagttaattgaaatcaggtaaatgtctgattttgcctatgtcacccagtatttctagttgtttttcaaatcatacatcttcttgcttcccagtcttacttcctaacttgaggggaaattgtaagaagacacccttgccttgttttcagagttcataattgaaggagttttaggaaaattcctcctcagcagcttatgtctctctcctggttatctactgcttctcaataatgtttgacatcaataaataaatatcaacmtttattagatcctgctttaaaggagactcttttctgctgcataagttatgtttcctgttgtctctttttaaaacttattttcctaacaattacccagagtcttgtggcttgaaagaaaaacatttattttgttcatgaacctgtggtttgggaaaaacttggccaggacagcttgtctttgctcccttcagcttccctaggaacag

SEQ ID NO: 400231 - DNA, 628 bp, Homo sapiens
ctactgcttctcaataatgtttgacatcaataaataaatatcaacatttattagatcctgctttaaaggagactcttttctgctgcataagttatgtttcctgttgtctctttttaaaacttattttcctaacaattacccagagtcttgtggcttgaaagaaaaacatttattttgttcatgaacctgtggtttgggaaaaacttggccaggacagcttgtctttgctcccttcagcttccctaggaacagctgatcagttggggaaatggaatcctctgaagctttggtcacccacttgtttgatggttgatgctgccatcggctgtaaacttggttgggacaggcagcrtgaacactgacacaggcactttcaggctatctttgtgcctgatggctctcacaattggggctgggttccaagggaaaacagtctgagatagggaagccacatggtatccctttcactacattctactcattagaaggaagtcagtaaggctggcctatattctgttttttttaaatgggatgaatgtagcttctcttttgttttaattgacacatatatacataattatgggctatagagtgatatttttatacacgtatatagtgtgtaatgatc

SEQ ID NO: 400232 - DNA, 628 bp, Homo sapiens
ctactgcttctcaataatgtttgacatcaataaataaatatcaacatttattagatcctgctttaaaggagactcttttctgctgcataagttatgtttcctgttgtctctttttaaaacttattttcctaacaattacccagagtcttgtggcttgaaagaaaaacatttattttgttcatgaacctgtggtttgggaaaaacttggccaggacagcttgtctttgctcccttcagcttccctaggaacagctgatcagttggggaaatggaatcctctgaagctttggtcacccacttgtttgatggttgatgctgccatcggctgtaaacttggttgggacaggcagcgtgaacactgacacaggcactttcaggctmtctttgtgcctgatggctctcacaattggggctgggttccaagggaaaacagtctgagatagggaagccacatggtatccctttcactacattctactcattagaaggaagtcagtaaggctggcctatattctgttttttttaaatgggatgaatgtagcttctcttttgttttaattgacacatatatacataattatgggctatagagtgatatttttatacacgtatatagtgtgtaatgatc

SEQ ID NO: 400233 - DNA, 578 bp, Homo sapiens
aagggaaaacagtctgagatagggaagccacatggtatccctttcactacattctactcattagaaggaagtcagtaaggctggccyatattctgttttttttaaatgggatgaatgtagcttctcttttgttttaattgacacatatatacataattatgggctatagagtgatatttttatacacgtatatagtgtgtaatgatcaagctaactagcacatttactacttcaaccatttttcatttctttgaattgtgaacattgaaaattttctggctttttaaaaatatacaataagtcatagttaaccatattcaccctacaatgccacagaacaccagaactcactccacttatctaactgtaattctgtatccattaaccagcctcccctcccctacttctgtgagcttttttttgttaagagacaaggtcttgctagtgtagtctgggctctgggcaactgtagtcacccagactggagacagtggtttgatcatagttcactgcagcttcaaactcttgggcccatctgatcctcacacctcagcctcctgagcagctgtcattatggg

SEQ ID NO: 400234 - DNA, 578 bp, Homo sapiens
aagggaaaacagtctgagatagggaagccacatggtatccctttcactacattctactcattagaaggaagtcagtaaggctggcctatattctgttttttttaaatgggatgaatgtagcttctcttttgttttaattgacacatatatacataattatgggctatagagtgatatttttatacacgtatatagtgtgtaatgatcaagctaactagcacatttactacttcaaccatttttcatttctttgaattgtgaacattsaaaattttctggctttttaaaaatatacaataagtcatagttaaccatattcaccctacaatgccacagaacaccagaactcactccacttatctaactgtaattctgtatccattaaccagcctcccctcccctacttctgtgagcttttttttgttaagagacaaggtcttgctagtgtagtctgggctctgggcaactgtagtcacccagactggagacagtggtttgatcatagttcactgcagcttcaaactcttgggcccatctgatcctcacacctcagcctcctgagcagctgtcattatggg

SEQ ID NO: 400235 - DNA, 578 bp, Homo sapiens
aagggaaaacagtctgagatagggaagccacatggtatccctttcactacattctactcattagaaggaagtcagtaaggctggcctatattctgttttttttaaatgggatgaatgtagcttctcttttgttttaattgacacatatatacataattatgggctatagagtgatatttttatacacgtatatagtgtgtaatgatcaagctaactagcacatttactacttcaaccatttttcatttctttgaattgtgaacattgaaaattttctggctttttaaaaatatacaataagtcatagttaaccatattcaccctacaatgccacagaacaccagaactcactccwcttatctaactgtaattctgtatccattaaccagcctcccctcccctacttctgtgagcttttttttgttaagagacaaggtcttgctagtgtagtctgggctctgggcaactgtagtcacccagactggagacagtggtttgatcatagttcactgcagcttcaaactcttgggcccatctgatcctcacacctcagcctcctgagcagctgtcattatggg

SEQ ID NO: 400236 - DNA, 578 bp, Homo sapiens
aagggaaaacagtctgagatagggaagccacatggtatccctttcactacattctactcattagaaggaagtcagtaaggctggcctatattctgttttttttaaatgggatgaatgtagcttctcttttgttttaattgacacatatatacataattatgggctatagagtgatatttttatacacgtatatagtgtgtaatgatcaagctaactagcacatttactacttcaaccatttttcatttctttgaattgtgaacattgaaaattttctggctttttaaaaatatacaataagtcatagttaaccatattcaccctacaatgccacagaacaccagaactcactccacttatctaactgtaattctgtatccattaaccagcctcccctcccctacttctgtgagcttttttttgttaagagacarggtcttgctagtgtagtctgggctctgggcaactgtagtcacccagactggagacagtggtttgatcatagttcactgcagcttcaaactcttgggcccatctgatcctcacacctcagcctcctgagcagctgtcattatggg

SEQ ID NO: 400237 - DNA, 350 bp, Homo sapiens
atgatatctctgaaactttttttgacatactgtggggaatgataatgaaggaagggggttagacactttttactaggagataactttgtgccatttaaggaggaacaaaaatgaattatcagaaaaataaaagtaaaatgaagtacaaaaattctgtggcaaagatgrtgatagtaaagaatatatttttatgactcatggtagctttaactttgttcttaaaattctgagtaatttaagggttcacatttgaagaatctgctgcattacagataacattttattgcaagtaaacgcatttcaaaatttgctattggttttgtattagattattctcagcctacttcatt

SEQ ID NO: 400238 - DNA, 350 bp, Homo sapiens
atgatatctctgaaactttttttgacatactgtggggaatgataatgaaggaagggggttagacactttttactaggagataactttgtgccatttaaggaggaacaaaaatgaattatcagaaaaataaaagtaaaatgaagtacaaaaattctgtggcaaagatgatgatagtaaagaatatatttttatgactcatggtagctttaactttgttcttaaaattctgagtaatttaagggttcacatttgaagaatctgctgcattacagataacattttattgcaagtaaaygcatttcaaaatttgctattggttttgtattagattattctcagcctacttcatt

SEQ ID NO: 400239 - DNA, 555 bp, Homo sapiens
atgaaagggcaatgctggcagtagaaaaattagaagaaatccatttacaggtgagttgtttaaatcaggtaagtttacttgtaatgtgctttcatttatttcactgcaaattatattttggagatatatatatatatatatatatatatacacatatatatatagtgtttcctctgcctctcttgtagcaatctgctttgtagagttctagaaaaaaatggtatctgttttttcttttaaatatttaaatttccattattattataacaaaatcaatctttcagagtaatgattctcattatggagtmatttgatgattaagaccagttggcacaggaaaaaattgtgatttagaaattatgtgataattatgaattggtcttaagctacagtgttcattgatcactttttaaaactatgaatggattctattactttttatatgaccagattacattaatactagcataattatgatttcaaatttttacaagtcagacttaattctgaattcagttattacttttgatattgctgaaatattttaaacttcat

SEQ ID NO: 400240 - DNA, 555 bp, Homo sapiens
atgaaagggcaatgctggcagtagaaaaattagaagaaatccatttacaggtgagttgtttaaatcaggtaagtttacttgtaatgtgctttcatttatttcactgcaaattatattttggagatatatatatatatatatatatatatacacatatatatatagtgtttcctctgcctctcttgtagcaatctgctttgtagagttctagaaaaaaatggtatctgttttttcttttaaatatttaaatttccattattattataacaaaatcaatctttcagagtaatgattctcattatggagtcatttgatgattaagaccagttggcayaggaaaaaattgtgatttagaaattatgtgataattatgaattggtcttaagctacagtgttcattgatcactttttaaaactatgaatggattctattactttttatatgaccagattacattaatactagcataattatgatttcaaatttttacaagtcagacttaattctgaattcagttattacttttgatattgctgaaatattttaaacttcat

SEQ ID NO: 400241 - DNA, 555 bp, Homo sapiens
atgaaagggcaatgctggcagtagaaaaattagaagaaatccatttacaggtgagttgtttaaatcaggtaagtttacttgtaatgtgctttcatttatttcactgcaaattatattttggagatatatatatatatatatatatatatacacatatatatatagtgtttcctctgcctctcttgtagcaatctgctttgtagagttctagaaaaaaatggtatctgttttttcttttaaatatttaaatttccattattattataacaaaatcaatctttcagagtaatgattctcattatggagtcatttgatgattaagaccagttggcacaggaaaaaattgtgatttagaaattatgtgataattatgaattggtcttaagctacagtgttcattgatcactttttaaaactatgaatggattctattactttttatatgaccagattacattaatactagcataattatgatttcaaatttttacaartcagacttaattctgaattcagttattacttttgatattgctgaaatattttaaacttcat

SEQ ID NO: 400242 - DNA, 555 bp, Homo sapiens
atgaaagggcaatgctggcagtagaaaaattagaagaaatccatttacaggtgagttgtttaaatcaggtaagtttacttgtaatgtgctttcatttatttcactgcaaattatattttggagatatatatatatatatatatatatatacacatatatatatagtgtttcctctgcctctcttgtagcaatctgctttgtagagttctagaaaaaaatggtatctgttttttcttttaaatatttaaatttccattattattataacaaaatcaatctttcagagtaatgattctcattatggagtcatttgatgattaagaccagttggcacaggaaaaaattgtgatttagaaattatgtgataattatgaattggtcttaagctacagtgttcattgatcactttttaaaactatgaatggattctattactttttatatgaccagattacattaatactagcataattatgatttcaaatttttacaagtcagacttaattctgaattcagttattasttttgatattgctgaaatattttaaacttcat

SEQ ID NO: 400243 - DNA, 563 bp, Homo sapiens
ttttttaacatattcaaaaatactctttgaatcrctgactcaaaatgaaaggcaactaacataataattaggttataattgttttaaaagtgtattattttcctctgttttaggaacaagcacaatataaaaaacaattagagcagttaaacaaggatataatacagcttcactaaataagaaggaactcacacttaaagatgtggaacgtaaattctacaaaatgaaaactgcttatgaagacgttacaactgagttagaagaatataaggaagcctttgcagcagcattgaaagctaacagttccatgtcaaaaaaattaactaagtaagtcaaaacatacactcatagaaaatgaattaagctcattaatttgtttcaaaagcataatttttagtgagatggcttcaggagattagaaggaagtgaatgctaatttgacaatgtaattttgaaaaataatgttagtaaataattttacctttaaaatgttagtcaaagatagtttttgtctctcctctcatttttttttttgcttttgtatggctttttttcctgaaaag

SEQ ID NO: 400244 - DNA, 563 bp, Homo sapiens
ttttttaacatattcaaaaatactctttgaatcactgactcaaaatgaaaggcaacwaacataataattaggttataattgttttaaaagtgtattattttcctctgttttaggaacaagcacaatataaaaaacaattagagcagttaaacaaggatataatacagcttcactaaataagaaggaactcacacttaaagatgtggaacgtaaattctacaaaatgaaaactgcttatgaagacgttacaactgagttagaagaatataaggaagcctttgcagcagcattgaaagctaacagttccatgtcaaaaaaattaactaagtaagtcaaaacatacactcatagaaaatgaattaagctcattaatttgtttcaaaagcataatttttagtgagatggcttcaggagattagaaggaagtgaatgctaatttgacaatgtaattttgaaaaataatgttagtaaataattttacctttaaaatgttagtcaaagatagtttttgtctctcctctcatttttttttttgcttttgtatggctttttttcctgaaaag

SEQ ID NO: 400245 - DNA, 534 bp, Homo sapiens
caactaacataataattaggttataattgttttaaaagtgtattmttttcctctgttttaggaacaagcacaatataaaaaacaattagagcagttaaacaaggatataatacagcttcactaaataagaaggaactcacacttaaagatgtggaacgtaaattctacaaaatgaaaactgcttatgaagacgttacaactgagttagaagaatataaggaagcctttgcagcagcattgaaagctaacagttccatgtcaaaaaaattaactaagtaagtcaaaacatacactcatagaaaatgaattaagctcattaatttgtttcaaaagcataatttttagtgagatggcttcaggagattagaaggaagtgaatgctaatttgacaatgtaattttgaaaaataatgttagtaaataattttacctttaaaatgttagtcaaagatagtttttgtctctcctctcatttttttttttgcttttgtatggctttttttcctgaaaagtctcatgtaattaacctgatctg

SEQ ID NO: 400246 - DNA, 406 bp, Homo sapiens
cttcactaaataagaaggaactcacacttaaagatgtggaaygtaaattctacaaaatgaaaactgcttatgaagacgttacaactgagttagaagaatataaggaagcctttgcagcagcattgaaagctaacagttccatgtcaaaaaaattaactaagtaagtcaaaacatacactcatagaaaatgaattaagctcattaatttgtttcaaaagcataatttttagtgagatggcttcaggagattagaaggaagtgaatgctaatttgacaatgtaattttgaaaaataatgttagtaaataattttacctttaaaatgttagtcaaagatagtttttgtctctcctctcatttttttttttgcttttgtatggctttttttcctgaaaagtctcatgtaa

SEQ ID NO: 400247 - DNA, 581 bp, Homo sapiens
attgttttaaaagtgtattattttcctctgttttaggaacaagcacaatataaaaaacaattagagcagttaaacaaggatataatacagcttcactaaataagaaggaactcacacttaaagatgtggaacgtaaattctacaaaatgaaaactgcttatgaagasgttacaactgagttagaagaatataaggaagcctttgcagcagcattgaaagctaacagttccatgtcaaaaaaattaactaagtaagtcaaaacatacactcatagaaaatgaattaagctcattaatttgtttcaaaagcataatttttagtgagatggcttcaggagattagaaggaagtgaatgctaatttgacaatgtaattttgaaaaataatgttagtaaataattttacctttaaaatgttagtcaaagatagtttttgtctctcctctcatttttttttttgcttttgtatggctttttttcctgaaaagtctcatgtaattaacctgatctgttagtttttttcactaagtatttttgaagctttataattaatgaagtgatcttgttataaaattacttgtca

SEQ ID NO: 400248 - DNA, 534 bp, Homo sapiens
caactaacataataattaggttataattgttttaaaagtgtattattttcctctgttttaggaacaagcacaatataaaaaacaattagagcagttaaacaaggatataatacagcttcactaaataagaaggaactcacacttaaagatgtggaacgtaaattctacaaaatgaaaactgcttatgaagacgttacaactgagttagaagaatataaggaagcctttgcagcagcattgaaagctaacagttccatgtcaaaaaaattaackaagtaagtcaaaacatacactcatagaaaatgaattaagctcattaatttgtttcaaaagcataatttttagtgagatggcttcaggagattagaaggaagtgaatgctaatttgacaatgtaattttgaaaaataatgttagtaaataattttacctttaaaatgttagtcaaagatagtttttgtctctcctctcatttttttttttgcttttgtatggctttttttcctgaaaagtctcatgtaattaacctgatctg

SEQ ID NO: 400249 - DNA, 506 bp, Homo sapiens
ttatgaagacgttacaactgagttagaagaatataaggaagcctttgcagcagcattgaaagctaacagttccatgtcaaaaaaattaactaagtaagtcaaaacatacactcatagaaaatgaattaagctcattaatttgtttcaaaagcataatttttagtgagatggcttcaggagattagaaggaagtgaatgctaatttgacaatgtaattttgaaaaataatgttagtaaataattttacctttaaaatgttagtcaaagatagtttttgtctctyctctcatttttttttttgcttttgtatggctttttttcctgaaaagtctcatgtaattaacctgatctgttagtttttttcactaagtatttttgaagctttataattaatgaagtgatcttgttataaaattacttgtcagaatttccctaaatagaaatattaatgtgtttaatttacttttcagtggatcacaacctaaatgcaaagtggtactgctact

SEQ ID NO: 400250 - DNA, 557 bp, Homo sapiens
aaacaaggatataatacagcttcactaaataagaaggaactcacacttaaagatgtggaacgtaaattctacaaaatgaaaactgcttatgaagacgttacaactgagttagaagaatataaggaagcctttgcagcagcattgaaagctaacagttccatgtcaaaaaaattaactaagtaagtcaaaacatacactcatagaaaatgaattaagctcattaatttgtttcaaaagcataatttttagtgagatggcttcaggagattagaaggaagtgaatgctaatttgacaatgtaattttgaaaaataatgttagtaaataattttacctttaaaatgttagtcaaagatagtttttgtctctcctctcatttttttttttgcttytgtatggctttttttcctgaaaagtctcatgtaattaacctgatctgttagtttttttcactaagtatttttgaagctttataattaatgaagtgatcttgttataaaattacttgtcagaatttccctaaatagaaatattaatgtgtttaatttacttttcagt

SEQ ID NO: 400251 - DNA, 539 bp, Homo sapiens
ttcaaaagcataatttttagtgagatggcttcaggagattagaaggaagtgaatgctaatttgacaatgtaattttgaaaaataatgttagtaaataattttacctttaaaatgttagtcaaagatagtttttgtctctcctctcatttttttttttgcttttgtatggctttttttcctgaaaagtctcatgtaattaacctgatctgttagtttttttcactaagtatttttgaagctttataatyaatgaagtgatcttgttataaaattacttgtcagaatttccctaaatagaaatattaatgtgtttaatttacttttcagtggatcacaacctaaatgcaaagtggtactgctactctgggcacaattgtttttgattgtgatctttagtattatcaccagagggtgcctcaagaaagactatttgtgtaacatattcaagatgttacagaaaggcacccttgtgaaatagggaataattatcacaggaatttaaagaactgtaattcacaaagctgttaaaaaataacacc

SEQ ID NO: 400252 - DNA, 539 bp, Homo sapiens
ttcaaaagcataatttttagtgagatggcttcaggagattagaaggaagtgaatgctaatttgacaatgtaattttgaaaaataatgttagtaaataattttacctttaaaatgttagtcaaagatagtttttgtctctcctctcatttttttttttgcttttgtatggctttttttcctgaaaagtctcatgtaattaacctgatctgttagtttttttcactaagtatttttgaagctttataattaatgaagtgaycttgttataaaattacttgtcagaatttccctaaatagaaatattaatgtgtttaatttacttttcagtggatcacaacctaaatgcaaagtggtactgctactctgggcacaattgtttttgattgtgatctttagtattatcaccagagggtgcctcaagaaagactatttgtgtaacatattcaagatgttacagaaaggcacccttgtgaaatagggaataattatcacaggaatttaaagaactgtaattcacaaagctgttaaaaaataacacc

SEQ ID NO: 400253 - DNA, 539 bp, Homo sapiens
ttcaaaagcataatttttagtgagatggcttcaggagattagaaggaagtgaatgctaatttgacaatgtaattttgaaaaataatgttagtaaataattttacctttaaaatgttagtcaaagatagtttttgtctctcctctcatttttttttttgcttttgtatggctttttttcctgaaaagtctcatgtaattaacctgatctgttagtttttttcactaagtatttttgaagctttataattaatgaagtgatcttgttataaaattacttgtcagaatttccctaaatagaaatattaatgtgtttaatttacttttcagtggatcacaacctaaatgcmaagtggtactgctactctgggcacaattgtttttgattgtgatctttagtattatcaccagagggtgcctcaagaaagactatttgtgtaacatattcaagatgttacagaaaggcacccttgtgaaatagggaataattatcacaggaatttaaagaactgtaattcacaaagctgttaaaaaataacacc

SEQ ID NO: 400254 - DNA, 557 bp, Homo sapiens
acaccttgttcagcctgaagcggtgtgtggaaggcagaaagaacatgccccacctccagggccttggtcacagtgttgggggctaatwgccttcagagatgctttagttctttttgatcaccaaccagacaatctagttctcccctaggagttgttgctctgaattattcctcagtgccaaatgtttaattggtcctagataatgggtgaaatgtacaagagtgaaatccaaaactggtttactaaacacaagtattcctagattttttttcattcattttagttttcttaacctacattaaggagtacaacatgatgttttgatataattatttctagtgaagtggttcttataatcaagcaaatcaacatattcattttcccacattattaccctttaaatacaagtatttctaatggaatcttcagaatcttacaagtagagccattttagaaggcaggaagttttacctgttgagccatacgtcactgatagccatttctcttccctgtctactttgtttgaactgcttgttcagtagaaatcaccttagaaa

SEQ ID NO: 400255 - DNA, 615 bp, Homo sapiens
aacaatggtgcttctttagaacgattttaaaattataattccttacaacaggtatgctcttacacatcttckgtgtgaaaacactatttagtgggtaatttggtttactctcagggtaagtttttaaaaactgcaagtcattaagaatcatttaaggaaaaatgaaatattaagcatttgtctttgctatctttacagatcgaataagaaaatagcaatgatcagtatcagctctttatggagaaagagcaggtgaaatattttctcagcactcttcctacaaggcgaggtcgagagtcaccttgtgttgaaaatcttactagtataggactcaacagaaaatatattccccaaatgcccgtaagaattcctacttcaaacctcagacttcaaataactgccagaactacttgactgaggttagttatatgaccgtttctctttagggtttcatttctctagcgtaattcttgtttataatttggtgaaatactgagttgttctgttgacttttgcatgtgaagtaaagatcataattagctgtgttaacacagaaaggaaatgggaacttaacattttttaattccctggagctctcattttcaagagatatcc

SEQ ID NO: 400256 - DNA, 615 bp, Homo sapiens
aacaatggtgcttctttagaacgattttaaaattataattccttacaacaggtatgctcttacacatcttcggtgtgaaaacactatttagtgggtaatktggtttactctcagggtaagtttttaaaaactgcaagtcattaagaatcatttaaggaaaaatgaaatattaagcatttgtctttgctatctttacagatcgaataagaaaatagcaatgatcagtatcagctctttatggagaaagagcaggtgaaatattttctcagcactcttcctacaaggcgaggtcgagagtcaccttgtgttgaaaatcttactagtataggactcaacagaaaatatattccccaaatgcccgtaagaattcctacttcaaacctcagacttcaaataactgccagaactacttgactgaggttagttatatgaccgtttctctttagggtttcatttctctagcgtaattcttgtttataatttggtgaaatactgagttgttctgttgacttttgcatgtgaagtaaagatcataattagctgtgttaacacagaaaggaaatgggaacttaacattttttaattccctggagctctcattttcaagagatatcc

SEQ ID NO: 400257 - DNA, 465 bp, Homo sapiens
  misc_feature (1)...(465): n = A,T,C or G
nnnnnnnnnnnnnnnnnnnnnnnnnnnnnnnnnnngcatgctgggaggtcagaccctgtgagggctttgggggcgtcaggttgggtaggctccaggcactctcactcacataggattccagaacactgctacaaggctctgagtgtttgtccctcacataggattacagaacactgatgccattgtctgaatgtttgtcccccacataggattccagaagcctgctgctggggtctgaatgtttgtyccccatctaggattccagaacactgctgcgaggttctgaatgtctgtccctcacatatgattctagaacattgatgctagggtctgtatgtttgcccttaacatatgatttcaaaacactgctcctggattctgaatgtttgtccttcacataggaatacagaacactgctgctggagtctggaagtttgtcactcacatagaattccagaacactgc

SEQ ID NO: 400258 - DNA, 615 bp, Homo sapiens
aacaatggtgcttctttagaacgattttaaaattataattccttacaacaggtatgctcttacacatcttcggtgtgaaaacactatttagtgggtaatttggtttactctcagggtaagtttttaaaaactgcaagtcattaagaatcatttaaggaaaaatgaaatattaagcatttgtctttgctayctttacagatcgaataagaaaatagcaatgatcagtatcagctctttatggagaaagagcaggtgaaatattttctcagcactcttcctacaaggcgaggtcgagagtcaccttgtgttgaaaatcttactagtataggactcaacagaaaatatattccccaaatgcccgtaagaattcctacttcaaacctcagacttcaaataactgccagaactacttgactgaggttagttatatgaccgtttctctttagggtttcatttctctagcgtaattcttgtttataatttggtgaaatactgagttgttctgttgacttttgcatgtgaagtaaagatcataattagctgtgttaacacagaaaggaaatgggaacttaacattttttaattccctggagctctcattttcaagagatatcc

SEQ ID NO: 400259 - DNA, 387 bp, Homo sapiens
acaggatgatctctttgttttttaacaaaatgaattttaagataaatgtctttatctgcagatgcatcttaagacaagaaagtgaagaaaaaacaaatgttaatatgctgtacaaaaaaatagagaagaattagaaaggaaagagaaacaatataagaaagaagttgaagcaaaacaacttgaaccaactrttcaatcactagagatgaaactgaagactacaagaaatactccaaatcagataaatcaatctttggtaaaaattctatattttaaactttattttatcaatgttacttataatatcctcttgatttaatatataatattttggtctaaaacaaaccagaaatgttatctcattttcaaaaaatgaatgatgacact

SEQ ID NO: 400260 - DNA, 387 bp, Homo sapiens
acaggatgatctctttgttttttaacaaaatgaattttaagataaatgtctttatctgcagatgcatcttaagacaagaaagtgaagaaaaaacaaatgttaatatgctgtacaaaaaaatagagaagaattagaaaggaaagagaaacaatataagaaagaagttgaagcaaaacaacttgaaccaactgttsaatcactagagatgaaactgaagactacaagaaatactccaaatcagataaatcaatctttggtaaaaattctatattttaaactttattttatcaatgttacttataatatcctcttgatttaatatataatattttggtctaaaacaaaccagaaatgttatctcattttcaaaaaatgaatgatgacact

SEQ ID NO: 400261 - DNA, 553 bp, Homo sapiens
aggaaaaataatccagcacatagaaattttattaggatgataaggagcatctgcagaggtagatcacaggatgatctctttgttttttaacaaaatgaattttaagataaatgtctttatctgcagatgcatcttaagacaagaaagtgaagaaaaaacaaatgttaatatgctgtacaaaaaaatagagaagaattagaaaggaaagagaaacaatataagaaagaagttgaagcaaaacaacttgaaccaactgttcaatcactagagatgaaacygaagactacaagaaatactccaaatcagataaatcaatctttggtaaaaattctatattttaaactttattttatcaatgttacttataatatcctcttgatttaatatataatattttggtctaaaacaaaccagaaatgttatctcattttcaaaaaatgaatgatgacacttacaggtacaattattaatatttattataaatcatggcatccacataggatattattttattacaaagagcttttgaaaacaataatatgccataatatat

SEQ ID NO: 400262 - DNA, 605 bp, Homo sapiens
tgaataattccactggaaagtggagctgtgtagaagagaggatatgtcaactccaacatgaaaatccgtgcattgaacagcaactagatgatgttcatcagaaagaggatcataaagagatagtaactaatatccaaagaggctttattgagagtgraaagaaagacctcatgctagaagagaaaaataagaagctaatgaatgaatgtgatcatttaaaagaaagtctctttcaatatgagagagagaaagcagaaagagtagtaagtatcaaggaagataaatattttcaaacttttagaaagaaaatttaaacatttggttctggatacatgttgaacttagttgaatataaaaatcaatggataaaaagtgtgtttaccatactgtataattccatttacatgaagcatccagaaaagataaacgtatagggacaaaaagtagactaatgtttgcaaagggctgggtctgaaagctggtagtgactgctaatgggcgtgagggatcttgcagtgatggaaatgctgtaaagttggattgtagagatggctgcacaactcagtaaatggactaaaaaatcttttaaccttaagttaaaacag

SEQ ID NO: 400263 - DNA, 605 bp, Homo sapiens
tgaataattccactggaaagtggagctgtgtagaagagaggatatgtcaactccaacatgaaaatccgtgcattgaacagcaactagatgatgttcatcagaaagaggatcataaagagatagtaactaatatccaaagaggctttattgagagtgaaaagaaagaccwcatgctagaagagaaaaataagaagctaatgaatgaatgtgatcatttaaaagaaagtctctttcaatatgagagagagaaagcagaaagagtagtaagtatcaaggaagataaatattttcaaacttttagaaagaaaatttaaacatttggttctggatacatgttgaacttagttgaatataaaaatcaatggataaaaagtgtgtttaccatactgtataattccatttacatgaagcatccagaaaagataaacgtatagggacaaaaagtagactaatgtttgcaaagggctgggtctgaaagctggtagtgactgctaatgggcgtgagggatcttgcagtgatggaaatgctgtaaagttggattgtagagatggctgcacaactcagtaaatggactaaaaaatcttttaaccttaagttaaaacag

SEQ ID NO: 400264 - DNA, 605 bp, Homo sapiens
tgaataattccactggaaagtggagctgtgtagaagagaggatatgtcaactccaacatgaaaatccgtgcattgaacagcaactagatgatgttcatcagaaagaggatcataaagagatagtaactaatatccaaagaggctttattgagagtgaaaagaaagacctcatgctagaagagaaaaataagaagctaatgaatgaatgtgatcatttaaaagaaagtctctttcaatatgagagagagaaagcagaaagagtagtaagtatcaaggaagataaatrttttcaaacttttagaaagaaaatttaaacatttggttctggatacatgttgaacttagttgaatataaaaatcaatggataaaaagtgtgtttaccatactgtataattccatttacatgaagcatccagaaaagataaacgtatagggacaaaaagtagactaatgtttgcaaagggctgggtctgaaagctggtagtgactgctaatgggcgtgagggatcttgcagtgatggaaatgctgtaaagttggattgtagagatggctgcacaactcagtaaatggactaaaaaatcttttaaccttaagttaaaacag

SEQ ID NO: 400265 - DNA, 559 bp, Homo sapiens
ctattttcagactgaggggtggcaggcttcacgtacagtgggaatggagtaattgcaggagggagttgtaggagctttgaagtcagagagggatgtagagacctgtttacctaggacctcaaaggccattgaaattttacttttattctgagataggaatctgttggaaggatttgaacaggtgattgaatatgtcaggaastttgaggttgagttgagcttctaagatgattgaatggtgggatgaatctgttatgtaagtaagagaataccaacttggcaggaagagaacatattgtgcatccctcactgaattcagtaataaataaaaatgtgtacatgtgattaaaagaaggtgaatttatatgtgtggtgataattttcaaagtaggtatgttagagttaaatattattaacataatttaataataaggcaatttataaaatcagtaacaaaaatattttctcaggtggttgtgagacaacttcaacaagaagcggctgacagcctaaaaaaattaactatgttagagtctccactggaagtatatcacattat

SEQ ID NO: 400266 - DNA, 618 bp, Homo sapiens
ttgtaactgcctgtgatttatgagtaaggcattagatccctattttcagactgaggggtggcaggcttcacgtacagtgggaatggagtaattgcaggagggagttgtaggagctttgaagtcagagagggatgtagagacctgtttacctaggacctcaaaggccattgaaattttacttttattctgagataggaatctgttggaaggatttgaacaggtgattgaatatgtcaggaagtttgaggttgagwtgagcttctaagatgattgaatggtgggatgaatctgttatgtaagtaagagaataccaacttggcaggaagagaacatattgtgcatccctcactgaattcagtaataaataaaaatgtgtacatgtgattaaaagaaggtgaatttatatgtgtggtgataattttcaaagtaggtatgttagagttaaatattattaacataatttaataataaggcaatttataaaatcagtaacaaaaatattttctcaggtggttgtgagacaacttcaacaagaagcggctgacagcctaaaaaaattaactatgttagagtctccactggaagtatatcacattatcacattaatttggatgagac

SEQ ID NO: 400267 - DNA, 559 bp, Homo sapiens
ctattttcagactgaggggtggcaggcttcacgtacagtgggaatggagtaattgcaggagggagttgtaggagctttgaagtcagagagggatgtagagacctgtttacctaggacctcaaaggccattgaaattttacttttattctgagataggaatctgttggaaggatttgaacaggtgattgaatatgtcaggaagtttgaggttgagttgagcttctaagatgattgaatggtgggatgaatctgttatgtaagtaagagaataccaayttggcaggaagagaacatattgtgcatccctcactgaattcagtaataaataaaaatgtgtacatgtgattaaaagaaggtgaatttatatgtgtggtgataattttcaaagtaggtatgttagagttaaatattattaacataatttaataataaggcaatttataaaatcagtaacaaaaatattttctcaggtggttgtgagacaacttcaacaagaagcggctgacagcctaaaaaaattaactatgttagagtctccactggaagtatatcacattat

SEQ ID NO: 400268 - DNA, 618 bp, Homo sapiens
ttgtaactgcctgtgatttatgagtaaggcattagatccctattttcagactgaggggtggcaggcttcacgtacagtgggaatggagtaattgcaggagggagttgtaggagctttgaagtcagagagggatgtagagacctgtttacctaggacctcaaaggccattgaaattttacttttattctgagataggaatctgttggaaggatttgaacaggtgattgaatatgtcaggaagtttgaggttgagttgagcttctaagatgattgaatggtgggatgaatctgttatgtaagtaagagaataccaacttggcaggaagagaacatattgtgcatccctcactgaattcagtaataaatamaaatgtgtacatgtgattaaaagaaggtgaatttatatgtgtggtgataattttcaaagtaggtatgttagagttaaatattattaacataatttaataataaggcaatttataaaatcagtaacaaaaatattttctcaggtggttgtgagacaacttcaacaagaagcggctgacagcctaaaaaaattaactatgttagagtctccactggaagtatatcacattatcacattaatttggatgagac

SEQ ID NO: 400269 - DNA, 164 bp, Homo sapiens
taaggcaatttataaaatcagtaacaaaaatattttctcaggtggttgtgagacaacttcaacaagaagcggctgacagcctaaaaaaattaactaygttagagtctccactggaagtatatcacattatcacattaatttggatgagacacaggtcccaaaga

SEQ ID NO: 400270 - DNA, 557 bp, Homo sapiens
taaggcaatttataaaatcagtaacaaaaatattttctcaggtggttgtgagacaacttcaacaagaagcggctgacagcctaaaaaaattaactatgttagagtctccactggaagtatatcacattatcacattaatttggatgagacacaggtcccaaagaagaaattatttcaagtggaaagtcaagtatgtatggaacttagcatgtcaactgttattctgtagctagttgaattacataacatgttttaggatactaattatggcagaagcttgattttttattttcattacaatgaattatttccaytttactatctctataatgtacttatttttataaagttactttcattctaccattttgaaaaaccattgcataccttttctcttacaatatgtacccttggaaaagttgagaattatacatcattcctcatagaaaactgacttttgtcctgttaaaacagtatttttaagtaatttttgtattgctctgatgaggcaggccagattaaatcagagaagaatgtttcatggaatgttccagaaa

SEQ ID NO: 400271 - DNA, 261 bp, Homo sapiens
ggttcttaaggaggtaataagtgtgccttctatggtttataataatatgcattgtcttaacaatcgaatacttaaaagttaatracctcataatatgcaaaatttttaataagcacattggtccctgtgttcaagtagttggtaatcaaattagtgaagtatggtaagtcttttgaagagcattaaacagcagagaatgtaagaaatttgtctctataatagtgtgggccttctgtgtttcctaagggcacattcatatga

SEQ ID NO: 400272 - DNA, 261 bp, Homo sapiens
ggttcttaaggaggtaataagtgtgccttctatggtttataataatatgcattgtcttaacaatcgaatacttaaaagttaatamcctcataatatgcaaaatttttaataagcacattggtccctgtgttcaagtagttggtaatcaaattagtgaagtatggtaagtcttttgaagagcattaaacagcagagaatgtaagaaatttgtctctataatagtgtgggccttctgtgtttcctaagggcacattcatatga

SEQ ID NO: 400273 - DNA, 602 bp, Homo sapiens
gtttataataatatgcattgtcttaacaatcgaatacttaaaagttaataacctcataatatgcaaaatttttaataagcacattggtccctgtgttcaagtagttggtaatcaaattagtgaagtatggtaagtcttttgaagagcattaaacagcagagaatgtaagaaatttktctctataatagtgtgggccttctgtgtttcctaagggcacattcatatgatctaataactgagcagagagaagcctaaaggatatttaatggtttcatttttttgtttttgccaattaacatacatttctagattaaaagtcaactatcttttccttgggagtcaactataggagaagatagtgaagaggcaaggaaaattacagcagctcaacagctttaccctggaaatatctgtattgtgtactgctatagcctacctttatcagtcagataacaatgtcaaagaggcaagcttggcaccattgctcttagtgaatctctgctgccagccttttatcctaagtgctctccaaagtcccatttaatggacctttctgaaattgtgctcaggatcaatatgaggctcattgatacagcagcttt

SEQ ID NO: 400274 - DNA, 602 bp, Homo sapiens
gtttataataatatgcattgtcttaacaatcgaatacttaaaagttaataacctcataatatgcaaaatttttaataagcacattggtccctgtgttcaagtagttggtaatcaaattagtgaagtatggtaagtcttttgaagagcattaaacagcagagaatgtaagaaatttgtctctataatagtgtgggccttctgtgtttcctaagggmacattcatatgatctaataactgagcagagagaagcctaaaggatatttaatggtttcatttttttgtttttgccaattaacatacatttctagattaaaagtcaactatcttttccttgggagtcaactataggagaagatagtgaagaggcaaggaaaattacagcagctcaacagctttaccctggaaatatctgtattgtgtactgctatagcctacctttatcagtcagataacaatgtcaaagaggcaagcttggcaccattgctcttagtgaatctctgctgccagccttttatcctaagtgctctccaaagtcccatttaatggacctttctgaaattgtgctcaggatcaatatgaggctcattgatacagcagcttt

SEQ ID NO: 400275 - DNA, 602 bp, Homo sapiens
gtttataataatatgcattgtcttaacaatcgaatacttaaaagttaataacctcataatatgcaaaatttttaataagcacattggtccctgtgttcaagtagttggtaatcaaattagtgaagtatggtaagtcttttgaagagcattaaacagcagagaatgtaagaaatttgtctctataatagtgtgggccttctgtgtttcctaagggcacattcatatgatctaataactgagcagagagaagcctaaaggatatttaatggtttcatttttttgtttttgccaattaacatacatttctagattaaaagtcaactatcttttccttgggagtcaactataggagaagatagtgaagaggcaaggaaaattacagcagctcaacarctttaccctggaaatatctgtattgtgtactgctatagcctacctttatcagtcagataacaatgtcaaagaggcaagcttggcaccattgctcttagtgaatctctgctgccagccttttatcctaagtgctctccaaagtcccatttaatggacctttctgaaattgtgctcaggatcaatatgaggctcattgatacagcagcttt

SEQ ID NO: 400276 - DNA, 602 bp, Homo sapiens
gtttataataatatgcattgtcttaacaatcgaatacttaaaagttaataacctcataatatgcaaaatttttaataagcacattggtccctgtgttcaagtagttggtaatcaaattagtgaagtatggtaagtcttttgaagagcattaaacagcagagaatgtaagaaatttgtctctataatagtgtgggccttctgtgtttcctaagggcacattcatatgatctaataactgagcagagagaagcctaaaggatatttaatggtttcatttttttgtttttgccaattaacatacatttctagattaaaagtcaactatcttttccttgggagtcaactataggagaagatagtgaagaggcaaggaaaattacagcagctcaacagctttaccctggaaatatctgtattgtgtacygctatagcctacctttatcagtcagataacaatgtcaaagaggcaagcttggcaccattgctcttagtgaatctctgctgccagccttttatcctaagtgctctccaaagtcccatttaatggacctttctgaaattgtgctcaggatcaatatgaggctcattgatacagcagcttt

SEQ ID NO: 400277 - DNA, 468 bp, Homo sapiens
atcattcctagaaaacatttcagtggagtatatttatctgacatttgactgtatttatagcagtaataatatatgatgattcctccyaaaataatcccacaattacccattttgggtcacctttgagggtcttatccttaatatcagagatctgttctatacatttgagtcttagaaataattactagcttctccctgaatttaactgaagttccttacttttattcagcctgttacccaaattacataatgtattgaaagctaaaaactgtccaaatttctgattacctttagttaaaaatgggaatatgatttttctttttctaacttggcaaagattatgtttttttcatgaagaagtactgacatatttaaacactcaggatctgagaatttgaaatacatgaaacttagcaagtggtctttaagtagttttcatttctaaattatagtacatagcattgaatg

SEQ ID NO: 400278 - DNA, 468 bp, Homo sapiens
atcattcctagaaaacatttcagtggagtatatttatctgacatttgactgtatttatagcagtaataatatatgatgattcctcctaaaataatcccacaaytacccattttgggtcacctttgagggtcttatccttaatatcagagatctgttctatacatttgagtcttagaaataattactagcttctccctgaatttaactgaagttccttacttttattcagcctgttacccaaattacataatgtattgaaagctaaaaactgtccaaatttctgattacctttagttaaaaatgggaatatgatttttctttttctaacttggcaaagattatgtttttttcatgaagaagtactgacatatttaaacactcaggatctgagaatttgaaatacatgaaacttagcaagtggtctttaagtagttttcatttctaaattatagtacatagcattgaatg

SEQ ID NO: 400279 - DNA, 652 bp, Homo sapiens
tttatagcagtaataatatatgatgattcctcctaaaataatcccacaattacccattttgggtcacctttgagggtcttatccttaatatcagagatctgttctatacatttgagtcttagaaataattactagcttctcyctgaatttaactgaagttccttacttttattcagcctgttacccaaattacataatgtattgaaagctaaaaactgtccaaatttctgattacctttagttaaaaatgggaatatgatttttctttttctaacttggcaaagattatgtttttttcatgaagaagtactgacatatttaaacactcaggatctgagaatttgaaatacatgaaacttagcaagtggtctttaagtagttttcatttctaaattatagtacatagcattgaatgctacagaagaaaagacaatgagggattactcataaacattgcctttatgatatccttccaaagaaaaccaagtgtccctgtgcttggactcataaagcagaaatgcttaacttgcttttatgtcactaacaaacaattttgcctagtcattgaattctaatacatttaagccatcttgagagtagagcccatagggaaaactacaaatggaaaattcattgatttttgattttgctt

SEQ ID NO: 400280 - DNA, 468 bp, Homo sapiens
atcattcctagaaaacatttcagtggagtatatttatctgacatttgactgtatttatagcagtaataatatatgatgattcctcctaaaataatcccacaattacccattttgggtcacctttgagggtcttatccttaatatcagagatctgttctatacatttgagtcttagaaataattactagcttctccctgaatttaactgaagttccttacttttattcagcctgttaccyaaattacataatgtattgaaagctaaaaactgtccaaatttctgattacctttagttaaaaatgggaatatgatttttctttttctaacttggcaaagattatgtttttttcatgaagaagtactgacatatttaaacactcaggatctgagaatttgaaatacatgaaacttagcaagtggtctttaagtagttttcatttctaaattatagtacatagcattgaatg

SEQ ID NO: 400281 - DNA, 468 bp, Homo sapiens
atcattcctagaaaacatttcagtggagtatatttatctgacatttgactgtatttatagcagtaataatatatgatgattcctcctaaaataatcccacaattacccattttgggtcacctttgagggtcttatccttaatatcagagatctgttctatacatttgagtcttagaaataattactagcttctccctgaatttaactgaagttccttacttttattcagcctgttacccaaattacataatgtattgaargctaaaaactgtccaaatttctgattacctttagttaaaaatgggaatatgatttttctttttctaacttggcaaagattatgtttttttcatgaagaagtactgacatatttaaacactcaggatctgagaatttgaaatacatgaaacttagcaagtggtctttaagtagttttcatttctaaattatagtacatagcattgaatg

SEQ ID NO: 400282 - DNA, 652 bp, Homo sapiens
tttatagcagtaataatatatgatgattcctcctaaaataatcccacaattacccattttgggtcacctttgagggtcttatccttaatatcagagatctgttctatacatttgagtcttagaaataattactagcttctccctgaatttaactgaagttccttacttttattcagcctgttacccaaattacataatgtattgaaagctaaaaactgtccaaatttctgattacctttagttaaaaatgggaatatgatttttctttttctaacttggcaaagattatgtttttttcatgaagaagtactgacatatttaaacactcaggatctgagaatttgaaatacatgaaacttagcaagtggtctttaagtagttttcatttctaaattatagtacatagcattgaatgctacagaagaaaagacaatgagggattactcataaacattgcctttatgatatccttccaaagaaaaccaagtgtccctgtgcttggactcataaagcagaaatgcttamcttgcttttatgtcactaacaaacaattttgcctagtcattgaattctaatacatttaagccatcttgagagtagagcccatagggaaaactacaaatggaaaattcattgatttttgattttgctt

SEQ ID NO: 400283 - DNA, 498 bp, Homo sapiens
aagccaaataactattactcaacaataacaacatttgttactattatattaatattaaacacactattaagcaacaacatttcagttactcactgagcccaaagtcatttttcatgaaccattcacagcactgataasctattgaaaaatgattgaaaacaaaaaagcttattgctttccaagtccttttaaagccttctcatgtgtcatttcatataatccttataacgaatctatggagtatatactgactttatctctgtacagaaaagaaaactgagtcatattcagaataagttgcaaagttccccagataatcagtgacataggtgaaatttgatgtcacagtgtagtcaagtgtaatttagggaagcagtacaaatgacggttgaaagcacaggttctggggtaaatagcctgaagtcaaaatctagttcatagcctcagtggctgtgtgatcttgggaaatttcccttaactctctgtgtcttggtttta

SEQ ID NO: 400284 - DNA, 498 bp, Homo sapiens
aagccaaataactattactcaacaataacaacatttgttactattatattaatattaaacacactattaagcaacaacatttcagttactcactgagcccaaagtcatttttcatgaaccattcacagcactgataagctattgaaaaatgattgaaaacaaaaaagcttattgctttccaagtccttttaaagccttctcatgtgtcatttcatataatccttataacgaatctatggagtatatactgactttatctctgtacagaaaagaaaactgagtcatattcagaataagttgcaaagttycccagataatcagtgacataggtgaaatttgatgtcacagtgtagtcaagtgtaatttagggaagcagtacaaatgacggttgaaagcacaggttctggggtaaatagcctgaagtcaaaatctagttcatagcctcagtggctgtgtgatcttgggaaatttcccttaactctctgtgtcttggtttta

SEQ ID NO: 400285 - DNA, 498 bp, Homo sapiens
aagccaaataactattactcaacaataacaacatttgttactattatattaatattaaacacactattaagcaacaacatttcagttactcactgagcccaaagtcatttttcatgaaccattcacagcactgataagctattgaaaaatgattgaaaacaaaaaagcttattgctttccaagtccttttaaagccttctcatgtgtcatttcatataatccttataacgaatctatggagtatatactgactttatctctgtacagaaaagaaaactgagtcatattcagaataagttgcaaagttccccagataatcagtgwcataggtgaaatttgatgtcacagtgtagtcaagtgtaatttagggaagcagtacaaatgacggttgaaagcacaggttctggggtaaatagcctgaagtcaaaatctagttcatagcctcagtggctgtgtgatcttgggaaatttcccttaactctctgtgtcttggtttta

SEQ ID NO: 400286 - DNA, 650 bp, Homo sapiens
taaccagagatatgcggagaaaataataactgagtgttatatttcctctcagtagaaacctaaaaaaaaactgtaatcacacactgatcttttaactgacctccacttatcttgctgcctggattggcatacatattcctctgcctgaaaaattgctcaatacttttkaaaggttgtttctcactgttacacccaggcatttctgctaacaacagctgagttgtaaggggccctccaggagacctaggttgttctccttatcacatacattattttcatttatcaatttacctagaacatctaatgaaatattatggacaccaataacatgaatacaaatatagctatagaccctaaaaagtaaattgatgtctcttgaaaggctgtcatgtcttagatgataaatttggagtatgtatttctaataaataaatagcttgctttaataattctgatttatgaatgtaacataggggagcagcttttatttcacccttaatcttaaaaaacaattagctgggtgtggtggtgggcacctgtagtcccagctactcaggaggctgaagcaggaggatggtgtgcacctgggaggcggagcttgccataagccgaaattgtgccactgcactccagcctgagtgacagtgtga

SEQ ID NO: 400287 - DNA, 650 bp, Homo sapiens
taaccagagatatgcggagaaaataataactgagtgttatatttcctctcagtagaaacctaaaaaaaaactgtaatcacacactgatcttttaactgacctccacttatcttgctgcctggattggcatacatattcctctgcctgaaaaattgctcaatactttttaaaggttgtttctcactgttacacccaggcatttctgctaacaacagctgagttgtaaggggccctccaggagacctaggttgttctccttatcacatacattattttcatttatcaatttacctagaacatctaatgaaatattatggacaccaataacatgaatacaaatatagctatagaccctaaaaagtaaattgatgtctcttsaaaggctgtcatgtcttagatgataaatttggagtatgtatttctaataaataaatagcttgctttaataattctgatttatgaatgtaacataggggagcagcttttatttcacccttaatcttaaaaaacaattagctgggtgtggtggtgggcacctgtagtcccagctactcaggaggctgaagcaggaggatggtgtgcacctgggaggcggagcttgccataagccgaaattgtgccactgcactccagcctgagtgacagtgtga

SEQ ID NO: 400288 - DNA, 650 bp, Homo sapiens
taaccagagatatgcggagaaaataataactgagtgttatatttcctctcagtagaaacctaaaaaaaaactgtaatcacacactgatcttttaactgacctccacttatcttgctgcctggattggcatacatattcctctgcctgaaaaattgctcaatactttttaaaggttgtttctcactgttacacccaggcatttctgctaacaacagctgagttgtaaggggccctccaggagacctaggttgttctccttatcacatacattattttcatttatcaatttacctagaacatctaatgaaatattatggacaccaataacatgaatacaaatatagctatagaccctaaaaagtaaattgatgtctcttgaaaggctgtcatgtcttagatgmtaaatttggagtatgtatttctaataaataaatagcttgctttaataattctgatttatgaatgtaacataggggagcagcttttatttcacccttaatcttaaaaaacaattagctgggtgtggtggtgggcacctgtagtcccagctactcaggaggctgaagcaggaggatggtgtgcacctgggaggcggagcttgccataagccgaaattgtgccactgcactccagcctgagtgacagtgtga

SEQ ID NO: 400289 - DNA, 511 bp, Homo sapiens
cagctcctcaactcagagctccaagggaatggccaaggaggctgtattgtccwaagaaatttgagactgttttgacttacaataaatcctgctcaatcatatgtatgtatacacacacacacacccacacacacagacggtgttgtcagtgaagcctctaacaatgcatcttgactggacagatttgacaattaaaatggctggaagaaaataggcttcataagtgtcacttactattcacattacacattaaaaggacatctcctaaattaaatcttgtctatgataaaaaggcagaaaatcatgacccaaggctcatttataactgcagaaatgttcaagatagaccaaggcttgctatgtttaggaactgacaagtacaggtctttataatctaccattttgcctcatttgataccaggtgaccttcataatgcaggcaatagagaattgcaagatttgtcagacatttcaggtctttggaaagctatgctctttcacaagaacagcc

SEQ ID NO: 400290 - DNA, 511 bp, Homo sapiens
cagctcctcaactcagagctccaagggaatggccaaggaggctgtattgtcctaagaaatttgagactgttttgacttacaataaatcctgcwcaatcatatgtatgtatacacacacacacacccacacacacagacggtgttgtcagtgaagcctctaacaatgcatcttgactggacagatttgacaattaaaatggctggaagaaaataggcttcataagtgtcacttactattcacattacacattaaaaggacatctcctaaattaaatcttgtctatgataaaaaggcagaaaatcatgacccaaggctcatttataactgcagaaatgttcaagatagaccaaggcttgctatgtttaggaactgacaagtacaggtctttataatctaccattttgcctcatttgataccaggtgaccttcataatgcaggcaatagagaattgcaagatttgtcagacatttcaggtctttggaaagctatgctctttcacaagaacagcc

SEQ ID NO: 400291 - DNA, 511 bp, Homo sapiens
cagctcctcaactcagagctccaagggaatggccaaggaggctgtattgtcctaagaaatttgagactgttttgacttacaataaatcctgctcaatcatatgtatgtatacacacacacacasccacacacacagacggtgttgtcagtgaagcctctaacaatgcatcttgactggacagatttgacaattaaaatggctggaagaaaataggcttcataagtgtcacttactattcacattacacattaaaaggacatctcctaaattaaatcttgtctatgataaaaaggcagaaaatcatgacccaaggctcatttataactgcagaaatgttcaagatagaccaaggcttgctatgtttaggaactgacaagtacaggtctttataatctaccattttgcctcatttgataccaggtgaccttcataatgcaggcaatagagaattgcaagatttgtcagacatttcaggtctttggaaagctatgctctttcacaagaacagcc

SEQ ID NO: 400292 - DNA, 511 bp, Homo sapiens
cagctcctcaactcagagctccaagggaatggccaaggaggctgtattgtcctaagaaatttgagactgttttgacttacaataaatcctgctcaatcatatgtatgtatacacacacacacacccacacacacagacggtgttgtcagtgaagcctctaacaatgcatcttgactggacagatttgacaattaaaatggctggaagaaaataggcttcataagtgtcacttactattcacattacacattaaaaggacatctcctaaattaaatcttgtctatgataaaaaggcagaaaatcatgacccaaggctcatttataactgcagaaatgttcaagatagacyaaggcttgctatgtttaggaactgacaagtacaggtctttataatctaccattttgcctcatttgataccaggtgaccttcataatgcaggcaatagagaattgcaagatttgtcagacatttcaggtctttggaaagctatgctctttcacaagaacagcc

SEQ ID NO: 400293 - DNA, 328 bp, Homo sapiens
ggcttgctatgtttaggaactgacaagtacaggtctttataatctaccattttgcctcatttgataccaggtgaccttcataatgcaggcaatagagaattgcaagatttgtcagacatttcaggtctttggaaagctatgytctttcacaagaacagccatggaaacaggaagaaagtcaattcccacttaaggtaatcagaatttacaaatattcctttcttcattgaaatctcaataggcacttcaatattatatttaattaattcttttgttacaatcatgcatcacataacaacattttggtcaaggatagtgcacatgtatt

SEQ ID NO: 400294 - DNA, 430 bp, Homo sapiens
ggctcatttataactgcagaaatgttcaagatagaccaaggcttgctatgtttaggaactgacaagtacaggtctttataatctaccattttgcctcatttgataccaggtgaccttcataatgcaggcaatagagaattgcaagatttgtcagacatttcaggtctttggaaagctatgctctttcacaagaacagccatggaaacaggaagaaagtcaattcccacttaaggtaatcagaatttacaaatattcctttcttcattgaaatctcaataggcacttcaatattatatttaattaattcttttgttacaatcatgcatcacataacaacattttggtcaaggatagtgcacatgtatttcagtggtgcaataaaatcataasactgtacttttactgtacctcttgtatgtttagacatgt

SEQ ID NO: 400295 - DNA, 611 bp, Homo sapiens
aataaaatcataagactgtacttttactgtacctcttgtatgtttagacatgtatagatacacttactgtakagatataagtaagtatagatatacttaactgttgtgttacaattgcctacagtattcagtacagtaacatgctgtccaggtttgtagcctaggaggaataggctataccacctaacctagatatgtaatcagctatagcatctaggtttgtgtaagtaaactctgtgatgttcatacaataataaaattgtccagcaatgcatttctcagacacacccctgtcattaagtgacacatgactgtattagttaacactatgggaacttcatgggaaatggacactctagctccaccataaatagaaactgtttatgtcaaaaaaacacataaaagcatagttgcaagattacatttccttccagatatttcatttagtatctccacagatcactaacttcctgaatagcattcttgtgtctccactgcctcacatttgatttcaggtcattccatcaattgtcaaagacgcatccaacattaactttccaactactggtttggattgtgtcaacattgtcattctgggccacaacaacaca

SEQ ID NO: 400296 - DNA, 611 bp, Homo sapiens
aataaaatcataagactgtacttttactgtacctcttgtatgtttagacatgtatagatacacttactgtagagatataagtaagtatagatatacttaactgttgtgttacaattgcctacagtattcagtacagtaacatgctgyccaggtttgtagcctaggaggaataggctataccacctaacctagatatgtaatcagctatagcatctaggtttgtgtaagtaaactctgtgatgttcatacaataataaaattgtccagcaatgcatttctcagacacacccctgtcattaagtgacacatgactgtattagttaacactatgggaacttcatgggaaatggacactctagctccaccataaatagaaactgtttatgtcaaaaaaacacataaaagcatagttgcaagattacatttccttccagatatttcatttagtatctccacagatcactaacttcctgaatagcattcttgtgtctccactgcctcacatttgatttcaggtcattccatcaattgtcaaagacgcatccaacattaactttccaactactggtttggattgtgtcaacattgtcattctgggccacaacaacaca

SEQ ID NO: 400297 - DNA, 597 bp, Homo sapiens
gtaatcagctatagcatctaggtttgtgtaagtaaactctgtgatgttcayacaataataaaattgtccagcaatgcatttctcagacacacccctgtcattaagtgacacatgactgtattagttaacactatgggaacttcatgggaaatggacactctagctccaccataaatagaaactgtttatgtcaaaaaaacacataaaagcatagttgcaagattacatttccttccagatatttcatttagtatctccacagatcactaacttcctgaatagcattcttgtgtctccactgcctcacatttgatttcaggtcattccatcaattgtcaaagacgcatccaacattaactttccaactactggtttggattgtgtcaacattgtcattctgggccacaacaacacaaaaggctaactcagtgaggtaacatagacactgatcagtgagattttgctgatggatggtaccatttttttaccaagatcaagggtattcataccttcaggcatctagataacattgaaaagggtaggttcatagataaaaagggaaagaggaagggtttttgcactatacatgagctaccg

SEQ ID NO: 400298 - DNA, 597 bp, Homo sapiens
gtaatcagctatagcatctaggtttgtgtaagtaaactctgtgatgttcatacaataataaaatygtccagcaatgcatttctcagacacacccctgtcattaagtgacacatgactgtattagttaacactatgggaacttcatgggaaatggacactctagctccaccataaatagaaactgtttatgtcaaaaaaacacataaaagcatagttgcaagattacatttccttccagatatttcatttagtatctccacagatcactaacttcctgaatagcattcttgtgtctccactgcctcacatttgatttcaggtcattccatcaattgtcaaagacgcatccaacattaactttccaactactggtttggattgtgtcaacattgtcattctgggccacaacaacacaaaaggctaactcagtgaggtaacatagacactgatcagtgagattttgctgatggatggtaccatttttttaccaagatcaagggtattcataccttcaggcatctagataacattgaaaagggtaggttcatagataaaaagggaaagaggaagggtttttgcactatacatgagctaccg

SEQ ID NO: 400299 - DNA, 513 bp, Homo sapiens
atttacaaatattcctttcttcattgaaatctcaataggcacttcaatattatatttaattaattcttttgttacaatcatgcatcacataacaacattttggtcaaggatagtgcacatgtatttcagtggtgcaataaaatcataagactgtacttttactgtacctcttgtatgtttagacatgtatagatacacttactgtagagatataagtaagtatagatatacttaactgttgtgttacaattgcctacagtattcagtacagtaacatgctgtccaggtttgtagcctaggaggaataggctataccacctaacctagatatgtaatcagctatagcatctaggtttgtgtaagtaaactctgtgatgttcatacaataataaaattgtccagcaatgcatttctcagacacacccctgtcattaagtgacacatgactgtattagttamcactatgggaacttcatgggaaatggacactctagctccaccataaatagaaac

SEQ ID NO: 400300 - DNA, 597 bp, Homo sapiens
gtaatcagctatagcatctaggtttgtgtaagtaaactctgtgatgttcatacaataataaaattgtccagcaatgcatttctcagacacacccctgtcattaagtgacacatgactgtattagttaacactatgggaacttcatgggaaatggacactctagctccaccataaatagaaactgtttatgtcaaaaaaacacataaaagcatagttgcaagattacatttccttccagatatttcatttagtatctccacagatcactaacttcctgaatagcattcttgtgtctccactgcctcacatttgatttcaggtcattccatcaattgtcaaagacgcatccaacattaacttyccaactactggtttggattgtgtcaacattgtcattctgggccacaacaacacaaaaggctaactcagtgaggtaacatagacactgatcagtgagattttgctgatggatggtaccatttttttaccaagatcaagggtattcataccttcaggcatctagataacattgaaaagggtaggttcatagataaaaagggaaagaggaagggtttttgcactatacatgagctaccg

SEQ ID NO: 400301 - DNA, 597 bp, Homo sapiens
gtaatcagctatagcatctaggtttgtgtaagtaaactctgtgatgttcatacaataataaaattgtccagcaatgcatttctcagacacacccctgtcattaagtgacacatgactgtattagttaacactatgggaacttcatgggaaatggacactctagctccaccataaatagaaactgtttatgtcaaaaaaacacataaaagcatagttgcaagattacatttccttccagatatttcatttagtatctccacagatcactaacttcctgaatagcattcttgtgtctccactgcctcacatttgatttcaggtcattccatcaattgtcaaagacgcatccaacattaactttccaactactggtttgrattgtgtcaacattgtcattctgggccacaacaacacaaaaggctaactcagtgaggtaacatagacactgatcagtgagattttgctgatggatggtaccatttttttaccaagatcaagggtattcataccttcaggcatctagataacattgaaaagggtaggttcatagataaaaagggaaagaggaagggtttttgcactatacatgagctaccg

SEQ ID NO: 400302 - DNA, 587 bp, Homo sapiens
aacattaactttccaactactggtttggattgtgtcaacattgtcattctgggccacaacaacacaaaaggctaactcagtgaggtaacatagacactgatcagtgagattttgctgatggatggtaccatttttttaccaagatcaagggtattcataccttcaggcatctagataacattgaaaagggyaggttcatagataaaaagggaaagaggaagggtttttgcactatacatgagctaccgtgtctcctgtttaacctgagtctgaagagattcaaagtgcaggtgccatgaatgcctctttaatagctccatgtcgattgattttctgggctacacttcccagcattcaaattgctaaatgcatataaactactagtgaatatttattacctggatttgtgcttttgagtgatcttatctatagttatgtgcttcagtgatccaacttggggtgcactccaaactttgataaagaccctgcttattccttgagtaatgctacactgacaactgatttagtgaatgccactgtgaaaataataaacctcttggtgaatatatttagacatgtcttgtaac

SEQ ID NO: 400303 - DNA, 570 bp, Homo sapiens
gatccaacttggggtgcactccaaactttgataaagaccctgcttattccttgagtawtgctacactgacaactgatttagtgaatgccactgtgaaaataataaacctcttggtgaatatatttagacatgtcttgtaacctgtacacatcttaaccagggatgttacttggtctttctatgttcaggagtgtgtggagatagaaaaacatacaggattgtaattgttgcctgtgagactaacagaaaattcaagctagtgaagtatgcttatgcatggcacacttctcaacagcaattttaggaagttctacccacaacccatatgtcttttgatatgtgtgttaccttggagagagaaaaagaaactctgaacacaagcatgaaatactttcgaattttatctagagttggacttgtccgaaagcttttgtataaacttgcttgatgagcaactgttgtccactggtaccttcactgtacaatccacacacaacaaaacttcacaactggacacctaaatttgcactttgtttggtaaagttgaatgaaaaatgttgtcttttaagc

SEQ ID NO: 400304 - DNA, 496 bp, Homo sapiens
tggggtgcactccaaactttgataaagaccctgcttattccttgagtaatgctacactgacaactgatttagtgaatgccactgtgaaaataataaacctcttggtgaatatatttagacatgtcttgkaacctgtacacatcttaaccagggatgttacttggtctttctatgttcaggagtgtgtggagatagaaaaacatacaggattgtaattgttgcctgtgagactaacagaaaattcaagctagtgaagtatgcttatgcatggcacacttctcaacagcaattttaggaagttctacccacaacccatatgtcttttgatatgtgtgttaccttggagagagaaaaagaaactctgaacacaagcatgaaatactttcgaattttatctagagttggacttgtccgaaagcttttgtataaacttgcttgatgagcaactgttgtccactggtaccttcactgtacaatccacacacaacaaaacttc

SEQ ID NO: 400305 - DNA, 496 bp, Homo sapiens
tggggtgcactccaaactttgataaagaccctgcttattccttgagtaatgctacactgacaactgatttagtgaatgccactgtgaaaataataaacctcttggtgaatatatttagacatgtcttgtaacctgtacacatcttaaccagggatgttacttggtctttytatgttcaggagtgtgtggagatagaaaaacatacaggattgtaattgttgcctgtgagactaacagaaaattcaagctagtgaagtatgcttatgcatggcacacttctcaacagcaattttaggaagttctacccacaacccatatgtcttttgatatgtgtgttaccttggagagagaaaaagaaactctgaacacaagcatgaaatactttcgaattttatctagagttggacttgtccgaaagcttttgtataaacttgcttgatgagcaactgttgtccactggtaccttcactgtacaatccacacacaacaaaacttc

SEQ ID NO: 400306 - DNA, 496 bp, Homo sapiens
tggggtgcactccaaactttgataaagaccctgcttattccttgagtaatgctacactgacaactgatttagtgaatgccactgtgaaaataataaacctcttggtgaatatatttagacatgtcttgtaacctgtacacatcttaaccagggatgttacttggtctttctatgttcaggagtgtstggagatagaaaaacatacaggattgtaattgttgcctgtgagactaacagaaaattcaagctagtgaagtatgcttatgcatggcacacttctcaacagcaattttaggaagttctacccacaacccatatgtcttttgatatgtgtgttaccttggagagagaaaaagaaactctgaacacaagcatgaaatactttcgaattttatctagagttggacttgtccgaaagcttttgtataaacttgcttgatgagcaactgttgtccactggtaccttcactgtacaatccacacacaacaaaacttc

SEQ ID NO: 400307 - DNA, 449 bp, Homo sapiens
aatgctacactgacaactgatttagtgaatgccactgtgaaaataataaacctcttggtgaatatatttagacatgtcttgtaacctgtacacatcttaaccagggatgttacttggtctttctatgttcaggagtgtgtggagatagaaaaacatacaggattgtaattgttgcctgtgagactaacagaaaattcaagctagtgaagtatgcttatgcatggcacacttctcamcagcaattttaggaagttctacccacaacccatatgtcttttgatatgtgtgttaccttggagagagaaaaagaaactctgaacacaagcatgaaatactttcgaattttatctagagttggacttgtccgaaagcttttgtataaacttgcttgatgagcaactgttgtccactggtaccttcactgtacaatccacacacaacaaaacttc

SEQ ID NO: 400308 - DNA, 449 bp, Homo sapiens
aatgctacactgacaactgatttagtgaatgccactgtgaaaataataaacctcttggtgaatatatttagacatgtcttgtaacctgtacacatcttaaccagggatgttacttggtctttctatgttcaggagtgtgtggagatagaaaaacatacaggattgtaattgttgcctgtgagactaacagaaaattcaagctagtgaagtatgcttatgcatggcacacttctcaacarcaattttaggaagttctacccacaacccatatgtcttttgatatgtgtgttaccttggagagagaaaaagaaactctgaacacaagcatgaaatactttcgaattttatctagagttggacttgtccgaaagcttttgtataaacttgcttgatgagcaactgttgtccactggtaccttcactgtacaatccacacacaacaaaacttc

SEQ ID NO: 400309 - DNA, 570 bp, Homo sapiens
gatccaacttggggtgcactccaaactttgataaagaccctgcttattccttgagtaatgctacactgacaactgatttagtgaatgccactgtgaaaataataaacctcttggtgaatatatttagacatgtcttgtaacctgtacacatcttaaccagggatgttacttggtctttctatgttcaggagtgtgtggagatagaaaaacatacaggattgtaattgttgcctgtgagactaacagaaaattcaagctagtgaagtatgcttatgcatggcacacttctcaacagcaattttaggaagttctacccacaacccatatgtcttttgatatgtgkgttaccttggagagagaaaaagaaactctgaacacaagcatgaaatactttcgaattttatctagagttggacttgtccgaaagcttttgtataaacttgcttgatgagcaactgttgtccactggtaccttcactgtacaatccacacacaacaaaacttcacaactggacacctaaatttgcactttgtttggtaaagttgaatgaaaaatgttgtcttttaagc

SEQ ID NO: 400310 - DNA, 486 bp, Homo sapiens
cagcaattttaggaagttctacccacaacccatatgtcttttgatatgtgtgttaccttggakagagaaaaagaaactctgaacacaagcatgaaatactttcgaattttatctagagttggacttgtccgaaagcttttgtataaacttgcttgatgagcaactgttgtccactggtaccttcactgtacaatccacacacaacaaaacttcacaactggacacctaaatttgcactttgtttggtaaagttgaatgaaaaatgttgtcttttaagcttatgctctcttatgaaagctgttattagattaattttactccaagatatgccaattaggaaataacttccaatttaatttcaccagctccctgtgggtggactaattactcacacatcacacttactctggtggtgaaatgcctcaaaagaaggtctccagagtgttgctctacctagaaggacaagaatgaagagacataaaaatc

SEQ ID NO: 400311 - DNA, 486 bp, Homo sapiens
cagcaattttaggaagttctacccacaacccatatgtcttttgatatgtgtgttaccttggagagagaaaaagaaactctgaacacaagcatgaaatactttcgaattttatctagagttggacttgtccgaaagcttttgtataaacttkcttgatgagcaactgttgtccactggtaccttcactgtacaatccacacacaacaaaacttcacaactggacacctaaatttgcactttgtttggtaaagttgaatgaaaaatgttgtcttttaagcttatgctctcttatgaaagctgttattagattaattttactccaagatatgccaattaggaaataacttccaatttaatttcaccagctccctgtgggtggactaattactcacacatcacacttactctggtggtgaaatgcctcaaaagaaggtctccagagtgttgctctacctagaaggacaagaatgaagagacataaaaatc

SEQ ID NO: 400312 - DNA, 570 bp, Homo sapiens
gatccaacttggggtgcactccaaactttgataaagaccctgcttattccttgagtaatgctacactgacaactgatttagtgaatgccactgtgaaaataataaacctcttggtgaatatatttagacatgtcttgtaacctgtacacatcttaaccagggatgttacttggtctttctatgttcaggagtgtgtggagatagaaaaacatacaggattgtaattgttgcctgtgagactaacagaaaattcaagctagtgaagtatgcttatgcatggcacacttctcaacagcaattttaggaagttctacccacaacccatatgtcttttgatatgtgtgttaccttggagagagaaaaagaaactctgaacacaagcatgaaatactttcgaattttatctagagttggacttgtccgaaagcttttgtataaacttgcttgatgagcaactgttgtccactggtaccttcactgtacaatccacacacaacmaaacttcacaactggacacctaaatttgcactttgtttggtaaagttgaatgaaaaatgttgtcttttaagc

SEQ ID NO: 400313 - DNA, 627 bp, Homo sapiens
ctatgtatatatacacacataatcacatacatatatgtaactccggaggcctgcctggactgttaaataactgtattgaacaagagcaagaaaaagctgttcaaatttcaaacaacaagttgaactgaagagctcatatctttgaatgaaatagacactagtagcctttaaaaattaaacatttctactgttttaaaaaattatagccatcayagtatgaggaaaaatgtaataatcctttttaattcttgccattttattaaccacaaagtccttatgccctgacttcattgatacccctttgagattaaacagaacacttaatttaaaattctgataaataaattaattacaccatttacttgaggtactctttcacctttcaagaaatattttgagaattcattagctaaatattactataatgcaggctagtaataaatggaaataatgatttcattgtaaagtttaaactaatgatggtatgatctggaatttttgttaacctagaagacataattagctctagaggtgaaatgaaagacaaaatcacttcacatattagtaaaaaacaaataatataactttataagctactgctgttcttttgctattaagaaccaatga

SEQ ID NO: 400314 - DNA, 521 bp, Homo sapiens
gataactagcacttactctgccctaattggaatccgggagagataggaggtgccctagtgtgaaaatgtgtttgttcctctctgcttctggtagtctctctgtaggagtactttacgtattctgaatgttcacttcttatgagatacatgatgtgcaactataggttgaatgtctctgatccaaaaatctgaaatcccaaatgcgccaaagtctgaaactttttgagtgccaacatgacactcaaaggaaatgcttattggagcatcgcagactcaggtgtttgaattcgagatgctcaaccagtaagaataatgcaaatattacaaaatctraaacacatcccaagcatttcaaataagggacactcaactggtattttcttttattctacagtttgccttttaccctgtttgttgtgacctttgaggtacagaagtttttaagtttgatatatttttgcttttactgcctgagcttttaatgtcatatcctaaaaattattgacaaattcatcgtctta

SEQ ID NO: 400315 - DNA, 584 bp, Homo sapiens
gagcatcgcagactcaggtgtttgaattcgagatgctcaaccagtaagaataatgcaaatattacaaaatctaaaacacatcccaagcatttcaaataagggacactcaactggtattttcttttattctacagtttgccttttaccctgwttgttgtgacctttgaggtacagaagtttttaagtttgatatatttttgcttttactgcctgagcttttaatgtcatatcctaaaaattattgacaaattcatcgtcttaaagcattttccaaatttgttttccctaggagtttgatagttgtagttttacatttaggtttataattcactttgaattaattttaacatggtgtaaggtaagagtccaacatcattgttttgcatgtagatatacaattttcccaacaacatttgttgaagaaactgtccttcaccattgagtggtcttggcatccttgtggaagatcatcggaccatatatgccagggttggtttctgaggtctctgttgtgttggtccataagtgtgtcaagtatgtctttacgccatgaccactttttttttggcttattgcagttttgt

SEQ ID NO: 400316 - DNA, 537 bp, Homo sapiens
catatccttgtagctattttttttaaaagatgactatgccttctagaatatttctaagaaattgcctaagtcaccactgctcaccaagaggcctttgttttttcctcttcttaaccatgggaaaggaatgtaggagggtagggagtggatattttctaacctggaaaaaactcattttaccctatataatttttkttagcaaattccttctttgcacttactccacaatctttccaaattctcccaaatgctcaagcttttaaaaaacaaaagacagaaagatagcaggttattaggttttccaccaaaccttttctttctattcctttacatcagtgagcttagaataactctactcctggaactgggaaagggacttgggaaaagaaagaaaaaaaaagctcccaaagtttaacatcacaaaacattatagtcactgctattttattatttatttatttattgattgatttatttacttttgagatggagtcttgttctgccaccaggctggagggcagtggtgcgatctctgct

SEQ ID NO: 400317 - DNA, 537 bp, Homo sapiens
catatccttgtagctattttttttaaaagatgactatgccttctagaatatttctaagaaattgcctaagtcaccactgctcaccaagaggcctttgttttttcctcttcttaaccatgggaaaggaatgtaggagggtagggagtggatattttctaacctggaaaaaactcattttaccctatataatttttgttagcaaattccttctttgcacttactccacaatctttccaaattctcccaaatgctcaagcttttaaaaaacaaaagacagaaagatagcaggttattaggttttccaccaaaccttttctttctattcctttacatcagtgagcttagaataactctrctcctggaactgggaaagggacttgggaaaagaaagaaaaaaaaagctcccaaagtttaacatcacaaaacattatagtcactgctattttattatttatttatttattgattgatttatttacttttgagatggagtcttgttctgccaccaggctggagggcagtggtgcgatctctgct

SEQ ID NO: 400318 - DNA, 537 bp, Homo sapiens
catatccttgtagctattttttttaaaagatgactatgccttctagaatatttctaagaaattgcctaagtcaccactgctcaccaagaggcctttgttttttcctcttcttaaccatgggaaaggaatgtaggagggtagggagtggatattttctaacctggaaaaaactcattttaccctatataatttttgttagcaaattccttctttgcacttactccacaatctttccaaattctcccaaatgctcaagcttttaaaaaacaaaagacagaaagatagcaggttattaggttttccaccaaaccttttctttctattcctttacatcagtgagcttagaataactctactcctggaactgggaaagggacttgggaaaagaaagaaaaaaaaagctcccaaagtttarcatcacaaaacattatagtcactgctattttattatttatttatttattgattgatttatttacttttgagatggagtcttgttctgccaccaggctggagggcagtggtgcgatctctgct

SEQ ID NO: 400319 - DNA, 537 bp, Homo sapiens
catatccttgtagctattttttttaaaagatgactatgccttctagaatatttctaagaaattgcctaagtcaccactgctcaccaagaggcctttgttttttcctcttcttaaccatgggaaaggaatgtaggagggtagggagtggatattttctaacctggaaaaaactcattttaccctatataatttttgttagcaaattccttctttgcacttactccacaatctttccaaattctcccaaatgctcaagcttttaaaaaacaaaagacagaaagatagcaggttattaggttttccaccaaaccttttctttctattcctttacatcagtgagcttagaataactctactcctggaactgggaaagggacttgggaaaagaaagaaaaaaaaagctcccaaagtttaacatcacaaaacattatagtcactgctattttattatttatttatttattgattgatttatttacttttgagatggagtcttgttctgccaccaggctggagkgcagtggtgcgatctctgct

SEQ ID NO: 400320 - DNA, 500 bp, Homo sapiens
tgggaatgcagatatctctttcatatactaattttccctcycttgggtatatacccagcagtgggattgctgtatcatatgatagttctatttttaattttttgagggacctccatattgttctccatagtgaatgtactaatttacattcccaccaacagagtaagagggttctcttttccctacattcttgcaagcatttattattgcctgtcttttgcataaaagccattttaatgggggtaagatgatatcttattgtagttttgatttgaatttctctgatgatcagtgatattgagcatcttttcatatacctatttgacatttatatatcttcttttttgtttttgctcattttttgagacagtgtctcactctgtctcccaggctggagtgcagtggtataatgatggcttactgtagttatgactaccagggttcaagcaatcctcccacctcagcctcctgagtagctgggaccacaggcatggatcacc

SEQ ID NO: 400321 - DNA, 576 bp, Homo sapiens
tttcatatactaattttccctctcttgggtatatacccagcagtgggattgctgtatcatatgatagttctatttttaattttttgagggacctccatattgttctccatagtgaatgtactaatttacattcccaccaacagagtaagagggttctcttttccctacattcttgcaagcatttrttattgcctgtcttttgcataaaagccattttaatgggggtaagatgatatcttattgtagttttgatttgaatttctctgatgatcagtgatattgagcatcttttcatatacctatttgacatttatatatcttcttttttgtttttgctcattttttgagacagtgtctcactctgtctcccaggctggagtgcagtggtataatgatggcttactgtagttatgactaccagggttcaagcaatcctcccacctcagcctcctgagtagctgggaccacaggcatggatcaccatgcccaggtaggttttaaaattatttgctatgtttttcaggttggtcttgaactcctgggctcaagtggtccaactgtcttggctccccaaaa

SEQ ID NO: 400322 - DNA, 635 bp, Homo sapiens
tatcatatgatagttctatttttaattttttgagggacctccatattgttctccatagtgaatgtactaatttacattcccaccaacagagtaagagggttctcttttccctacattcttgcaagcatttattattgcctgtcttttgcataaaagccattttaatgggggtaagatgatatcttattgtagttttgatttgaatttctctgatgatcagtgatattgagcatcttttcatatacytatttgacatttatatatcttcttttttgtttttgctcattttttgagacagtgtctcactctgtctcccaggctggagtgcagtggtataatgatggcttactgtagttatgactaccagggttcaagcaatcctcccacctcagcctcctgagtagctgggaccacaggcatggatcaccatgcccaggtaggttttaaaattatttgctatgtttttcaggttggtcttgaactcctgggctcaagtggtccaactgtcttggctccccaaaatgctggaattacaggtgtgagccactgcgcctgacctgcatgccttcttttgagaaatgtctgttcagattttttgcccatttaaataattggattattagtttttttcttat

SEQ ID NO: 400323 - DNA, 576 bp, Homo sapiens
tttcatatactaattttccctctcttgggtatatacccagcagtgggattgctgtatcatatgatagttctatttttaattttttgagggacctccatattgttctccatagtgaatgtactaatttacattcccaccaacagagtaagagggttctcttttccctacattcttgcaagcatttattattgcctgtcttttgcataaaagccattttaatgggggtaagatgatatcttattgtagttttgatttgaatttctctgatgatcagtgatattgagcatcttttcatatacctatttgacatttatatatcttcttttttgtttttgctcattttttgagacagtgtctcactctgtcwcccaggctggagtgcagtggtataatgatggcttactgtagttatgactaccagggttcaagcaatcctcccacctcagcctcctgagtagctgggaccacaggcatggatcaccatgcccaggtaggttttaaaattatttgctatgtttttcaggttggtcttgaactcctgggctcaagtggtccaactgtcttggctccccaaaa

SEQ ID NO: 400324 - DNA, 576 bp, Homo sapiens
tttcatatactaattttccctctcttgggtatatacccagcagtgggattgctgtatcatatgatagttctatttttaattttttgagggacctccatattgttctccatagtgaatgtactaatttacattcccaccaacagagtaagagggttctcttttccctacattcttgcaagcatttattattgcctgtcttttgcataaaagccattttaatgggggtaagatgatatcttattgtagttttgatttgaatttctctgatgatcagtgatattgagcatcttttcatatacctatttgacatttatatatcttcttttttgtttttgctcattttttgagacagtgtctcactctgtctcccaggctggagtgcagtggtataatgatggcttactgtagttatgactaccagggttcaagcaatcctcccacctcagcctcctgagtagctgggaccacaggcatgsatcaccatgcccaggtaggttttaaaattatttgctatgtttttcaggttggtcttgaactcctgggctcaagtggtccaactgtcttggctccccaaaa

SEQ ID NO: 400325 - DNA, 587 bp, Homo sapiens
ctgggtttatgagtatgcgaccctatactccagaaacagctgtataaggaaaaacaggtgtacctaataaaaatrtgcttagtgacttgggataaaccaatagatgttcacaactgatggagagccgtgaaagagagatagcggtacatagttacaataacacaagtttcctgcacctgtcgaggatttccccaaaaaaacgcagaatgtgggatgcacctaaggcatatgaaagagagagggcagaaggagtaagagagaaataggaggaaggaaggaaggaaggaaagaaggaaggtaggaaggaaggaaggaaggaaagaaggaaggaaggaaggaagcaaagaaggacgaacggaaggaggaaacacccggtgttactaaaacccccaaaaaatatggtttccccctgtggtaagcctacagtgtggatgaatcttgaaaatattgtgctacgtgttatgtcagtcataacagctcacctattgtgcaattccgtttataggaaatgtccacaatatggaaatctatgcatatggggttgatcgcactaggtagttgctacctagggctgagggtcagggaga

SEQ ID NO: 400326 - DNA, 587 bp, Homo sapiens
ctgggtttatgagtatgcgaccctatactccagaaacagctgtataaggaaaaacaggtgtacctaataaaaatgtgcttagtgacttgggataaaccaatagatgttcacaactgatggagagccgtgaaagagagatagcggtamatagttacaataacacaagtttcctgcacctgtcgaggatttccccaaaaaaacgcagaatgtgggatgcacctaaggcatatgaaagagagagggcagaaggagtaagagagaaataggaggaaggaaggaaggaaggaaagaaggaaggtaggaaggaaggaaggaaggaaagaaggaaggaaggaaggaagcaaagaaggacgaacggaaggaggaaacacccggtgttactaaaacccccaaaaaatatggtttccccctgtggtaagcctacagtgtggatgaatcttgaaaatattgtgctacgtgttatgtcagtcataacagctcacctattgtgcaattccgtttataggaaatgtccacaatatggaaatctatgcatatggggttgatcgcactaggtagttgctacctagggctgagggtcagggaga

SEQ ID NO: 400327 - DNA, 587 bp, Homo sapiens
ctgggtttatgagtatgcgaccctatactccagaaacagctgtataaggaaaaacaggtgtacctaataaaaatgtgcttagtgacttgggataaaccaatagatgttcacaactgatggagagccgtgaaagagagatagcggtacatagttacaataacacaagtttcctgcacctgtcgaggatttccccaaaaaaacgcagaatgtgggatgcacctaaggcatatgaaagagagagggcagaaggagtaagagagaaataggaggaaggaaggawggaaggaaagaaggaaggtaggaaggaaggaaggaaggaaagaaggaaggaaggaaggaagcaaagaaggacgaacggaaggaggaaacacccggtgttactaaaacccccaaaaaatatggtttccccctgtggtaagcctacagtgtggatgaatcttgaaaatattgtgctacgtgttatgtcagtcataacagctcacctattgtgcaattccgtttataggaaatgtccacaatatggaaatctatgcatatggggttgatcgcactaggtagttgctacctagggctgagggtcagggaga

SEQ ID NO: 400328 - DNA, 268 bp, Homo sapiens
gcccaaatcttggtcatcctcaggaaaaaaaaaaaaaaagttgattaggttgtatataatctaattctacttgctaatttaatttctctaaaattacagcttgtatcaactctagaatttattgggcacctcctaggacataaacactggaatttggtgagagacatcaaataggaaagaacctggctctgacataaattcaacacacggagggggacacacgttatgagactgacctggcctctycatctcataaaagaggttcttg

SEQ ID NO: 400329 - DNA, 590 bp, Homo sapiens
tgcttgaacattttctcaattgatcgacatacagtctatcttggtactgccaagtaccatttgggtcaggattttgtcatttagatctgtatttttcctatatttttatctggttgttccgtcagttactgagagagcartattaattcaccagctataattttggattgtcaatttcctgcttttgttctgttgctttgattcacataatttgaggctctgtgtgtgtgagtactttgtgtgcactttgaggcacaatttataattgtaacatcatcctctctgattcttttatttttatgaaattaccttgtttatttctggtgatatattttgttctggagcctctttcatctagtgttaacatctccgttgaagctttttatgattagtgtctggatagcatatttttatgattagtgtctgcatagcatattttttctcatactttgtgtctttgtatttaaattgtgtctctgtggatgccatattgttgggtcttgctttcctctcaggtctggcagtctctgtcttaagtagagtatttgtccagttacattgtaactaatcattgctaaggttggatttag

SEQ ID NO: 400330 - DNA, 483 bp, Homo sapiens
gtaataggaattgtgttaaaaaacagaatcaggccaagctggtggcttatgcctctaatgccaacacttagggaggccaaggcgggaggataatttgaggtcaggagttcaagaccagcctggacaacatggcaaaaccccacatgtattaaaaaaatacacaaattasctgggcgtggtggtgaatgcctttagtcctagctactcaggaggctaaggcaggagaatagcttgaacccgggaggatgaggttgcagtgagccaagatagagccactgcattccagcctgggtgacagagtgagatcctgtcttaaaaaaaaggaaaaaagaaaaagaaaaaaacagaatcatacattgagagagattgtatagcccttttaattgtccataatggatacatttctttttctgtgtaatagtttatcagcatgaaaattttctttttctgtgtaatagtttatcagcatgaaaaaaaaaagag

SEQ ID NO: 400331 - DNA, 483 bp, Homo sapiens
gtaataggaattgtgttaaaaaacagaatcaggccaagctggtggcttatgcctctaatgccaacacttagggaggccaaggcgggaggataatttgaggtcaggagttcaagaccagcctggacaacatggcaaaaccccacatgtattaaaaaaatacacaaattacctgggcgtggtggtgaatgcctttagtcctagctactcaggaggctaaggcaggagaatagcttgaaccygggaggatgaggttgcagtgagccaagatagagccactgcattccagcctgggtgacagagtgagatcctgtcttaaaaaaaaggaaaaaagaaaaagaaaaaaacagaatcatacattgagagagattgtatagcccttttaattgtccataatggatacatttctttttctgtgtaatagtttatcagcatgaaaattttctttttctgtgtaatagtttatcagcatgaaaaaaaaaagag

SEQ ID NO: 400332 - DNA, 483 bp, Homo sapiens
gtaataggaattgtgttaaaaaacagaatcaggccaagctggtggcttatgcctctaatgccaacacttagggaggccaaggcgggaggataatttgaggtcaggagttcaagaccagcctggacaacatggcaaaaccccacatgtattaaaaaaatacacaaattacctgggcgtggtggtgaatgcctttagtcctagctactcaggaggctaaggcaggagaatagcttgaacccgggaggmtgaggttgcagtgagccaagatagagccactgcattccagcctgggtgacagagtgagatcctgtcttaaaaaaaaggaaaaaagaaaaagaaaaaaacagaatcatacattgagagagattgtatagcccttttaattgtccataatggatacatttctttttctgtgtaatagtttatcagcatgaaaattttctttttctgtgtaatagtttatcagcatgaaaaaaaaaagag

SEQ ID NO: 400333 - DNA, 630 bp, Homo sapiens
  misc_feature (1)...(630): n = A,T,C or G
aattatgtgttcctaaaacatattttttaagatggattttcgctcttgttgcccaggctggagtgcaatggtgtgatctcagctcactgcaatctccgcccmccaggttcaagtaattctcctgcctcagcctcccgagtagctgggattacaggaacccaccaccacacctggctaattttttgtattttttagtagagatgggtttcaccatgttgatcaggctggtcttgagctcctgacctcgggtgagccacctgccttggcctcccaaagtgcagggattacaggcagtgagccacagtgcctgggctaaaacataagttttaaattggaaataacccagatatttaatgagtatctattatttaatttaacataactaaaatttcaaaaataggctggacatgnngctcacgcctgtaatcccaacactttaggaggcctaggcaggagtatcatgaaaccagcctgagcaaaatagtgagatgctgactctacaaaaaaaataaaagttagctgaccatggtggtgtatgcctgtaattaacagatacatgggaggctgaggtgggaggatcccttgagagcagaaggtcaaggttgcagtgagctgtgatcatgccactgc

SEQ ID NO: 400334 - DNA, 630 bp, Homo sapiens
  misc_feature (1)...(630): n = A,T,C or G
aattatgtgttcctaaaacatattttttaagatggattttcgctcttgttgcccaggctggagtgcaatggtgtgatctcagctcactgcaatctccgcccaccaggttcaagtaattctcctgcctcagcctcccgagtagctgggattacaggaacccaccaccacacctggctaattttttgtattttttagtagagatgggtttcaccatgttgatcaggctggtcttgagctcctgacctcgggtgagccacctgccttggcctcccaaagtgcagggattacaggcagtgagccacagtgcctgggctaaaacataagttttaaattggaaataacccagatatttaatgagtatctattatttaatttaacataactaaaatttcaaaaataggctggacatgnngctcacgcctgtaatcccaacactttaggaggcctaggcaggagtatcatgaaaccagcctgagcaaaatagtgagatgctgactctacaaaaaaaataaaagttagctgaccatggtggtgtatgcctgtaattaacagmtacatgggaggctgaggtgggaggatcccttgagagcagaaggtcaaggttgcagtgagctgtgatcatgccactgc

SEQ ID NO: 400335 - DNA, 630 bp, Homo sapiens
  misc_feature (1)...(630): n = A,T,C or G
aattatgtgttcctaaaacatattttttaagatggattttcgctcttgttgcccaggctggagtgcaatggtgtgatctcagctcactgcaatctccgcccaccaggttcaagtaattctcctgcctcagcctcccgagtagctgggattacaggaacccaccaccacacctggctaattttttgtattttttagtagagatgggtttcaccatgttgatcaggctggtcttgagctcctgacctcgggtgagccacctgccttggcctcccaaagtgcagggattacaggcagtgagccacagtgcctgggctaaaacataagttttaaattggaaataacccagatatttaatgagtatctattatttaatttaacataactaaaatttcaaaaataggctggacatgnngctcacgcctgtaatcccaacactttaggaggcctaggcaggagtatcatgaaaccagcctgagcaaaatagtgagatgctgactctacaaaaaaaataaaagttagctgaccatggtggtgtatgcctgtaattaacagatacatgggaggctgaggtgggwggatcccttgagagcagaaggtcaaggttgcagtgagctgtgatcatgccactgc

SEQ ID NO: 400336 - DNA, 579 bp, Homo sapiens
acatgggtattttacaaataactcagaaaattccattatttttgttcaacaaamcatattaaattggtcttatgtatttaaaaaatcacataaacaaatattcttttttcctgtgtttatagctttataaccttcatgccaaaccctagcaccttaaaatatctagcaaatgtaaatataaaacacagtcaaaaatgtatgctgacaagtctgaagagatttctattttctatttttattttatcaatactttttaaattatttgtatttataaaagaactcttttgtctgggcacagtggttcatgcctgtatcccagcactttgagaggctgaggcaagaggatcacttgagctcaggagtttgagaccagcctgggcaacatagtgagacccaatctctactaagaataagataaaaaattgccaggcatggtggtgcatgcctattatcccagctactagagaggatgaggcaggaggattgcttgagcctgggaggttgagataacagtgagctatgatcccactactgcactccagtctggggaacagagtgagaccttagagtgagaccttg

SEQ ID NO: 400337 - DNA, 602 bp, Homo sapiens
gctatgtgtcgtaacaagtgctcatagtcctggctacttgggatactaaggtggaggatcaccgtgagcctgggaggttgaggctgcagtgagccatgatttcaccactgcactccagcctgggcaacagggtgagaccctgtctcaaaaaaataataaaataaaaaacaataaactgtcattctgttttggtcaaatgttttcaattttttgacatctttgctaaatcttagttgataacattgtatgggaagcaktgccaaaagataagtaacactaaatcttcttttttttttctctgagacagaatcttgctttgtcacccaggctggagtgcagtggtgtgatctaggtccattgcaacctctgccccaaggttcaagcgattctcctgcctcaacctcccaagtagctgagactacagacacatgccaccacgcccggctaattttgtatttttagtagaaacaagatttctccatgttggccaggctggtgtcaaactcctgacctctgatgatctgtccaacttggcctcccaaagtgttgggattacaggcatgagccactgtgcctggcctaaatcttcttttggttacatt

SEQ ID NO: 400338 - DNA, 602 bp, Homo sapiens
gctatgtgtcgtaacaagtgctcatagtcctggctacttgggatactaaggtggaggatcaccgtgagcctgggaggttgaggctgcagtgagccatgatttcaccactgcactccagcctgggcaacagggtgagaccctgtctcaaaaaaataataaaataaaaaacaataaactgtcattctgttttggtcaaatgttttcaattttttgacatctttgctaaatcttagttgataacattgtatgggaagcattgccaaaagataagtaacactaaatcttcttttttttttctctgagacagaatcttgctttgtcacccaggctggagtgcagtggtgtgatctaggtccattgcaacctctgccccaaggttcaagcgattctcctgcctcaacctcccaagtagctgagactacagacacatgccaccacgcccggctaattttgtatttttagtagaaacaagakttctccatgttggccaggctggtgtcaaactcctgacctctgatgatctgtccaacttggcctcccaaagtgttgggattacaggcatgagccactgtgcctggcctaaatcttcttttggttacatt

SEQ ID NO: 400339 - DNA, 604 bp, Homo sapiens
atccacggtgattgtttaaagttcttctctaaaaccctttacaggccgggcgtgctgctggaggctgtgcagggcacggtgctgggcgtggtgcagggcacggtggctcacacgtgtaaaaatcccagcactttgcaaggccgaggtgggtgaattgcttgaactcagaagtttgaaagcatcctgggcaacatggtaaaaccctgtctctacaaaaatacaaaaattagccagcatgatggtgcatgcctatggtcccaactacttcggaggctgaggtaggaggatggcttragtttgggagggagaaattgtggtgagcaaagatcatgccactgcactccatcctgagtgatagaaccagaccatgtctcaaaaaaaaaaaagtctttacaatcagctatcatctaaattacttttaatggaaaggactctgacaagttctcttaaatatggtttcagataactttggggatcataccattggactaggaaaatcttccaggactctaaaaagctgaatgaggatttccaattgaaatcaagcaaaacacaaaaaaactgaatgagaattgctatttgaaatcaagcagaacaagattta

SEQ ID NO: 400340 - DNA, 369 bp, Homo sapiens
atcatgccactgcactccatcctgagtgatagaaccagaccatgtctcaaaaaaaaaaaagtctttacaatcagctatcatctaaattayttttaatggaaaggactctgacaagttctcttaaatatggtttcagataactttggggatcataccattggactaggaaaatcttccaggactctaaaaagctgaatgaggatttccaattgaaatcaagcaaaacacaaaaaaactgaatgagaattgctatttgaaatcaagcagaacaagatttagttacattggactgaacttataaaagaaggaaaagattttattcatggctcttccattggaaacattgttgattctctttatgttttgttt

SEQ ID NO: 400341 - DNA, 369 bp, Homo sapiens
atcatgccactgcactccatcctgagtgatagaaccagaccatgtctcaaaaaaaaaaaagtctttacaatcagctatcatctaaattacttttaatggaaaggactctgacaagttctcttaaatatggtttcagataactttggggatcataccattggactaggaaaatcttccaggactctaaaaagctgaatgagratttccaattgaaatcaagcaaaacacaaaaaaactgaatgagaattgctatttgaaatcaagcagaacaagatttagttacattggactgaacttataaaagaaggaaaagattttattcatggctcttccattggaaacattgttgattctctttatgttttgttt

SEQ ID NO: 400342 - DNA, 524 bp, Homo sapiens
ggggatcataccattggactaggaaaatcttccaggactctaaaaagctgaatgaggatttccaattgaaatcaagcaaaacacaaaaaaactgaatgagaattgctatttgaaatcaagcagaacaagatttagttacattggactgaacttataaaagaaggaaaagattttattcatggcycttccattggaaacattgttgattctctttatgttttgttttccaaagtcaagaattttttttcttttcagctatttttaacttaccctacgttagaaaaactacattttgaacaaaaatttgaaccatttatctgtctctctaactgatttctccagaattcagaagccattggtgagcattcctaaattatggcaatataattatttgcataatttcaataagaatctgtttttggtaacaggattcaattggagacactgtttgttttatcaaggctttaactcgaacggcagatacaaccagaccactttaaggaattgagcttgactttatagca

SEQ ID NO: 400343 - DNA, 524 bp, Homo sapiens
ggggatcataccattggactaggaaaatcttccaggactctaaaaagctgaatgaggatttccaattgaaatcaagcaaaacacaaaaaaactgaatgagaattgctatttgaaatcaagcagaacaagatttagttacattggactgaacttataaaagaaggaaaagattttattcatggctcttccattggaaacattgttgattctctttatgttttgttttccaaagtcaagaattttttttcttttcagctatttttaacttaccctacgttagaaaaactacattttgaacaaaaatttgarccatttatctgtctctctaactgatttctccagaattcagaagccattggtgagcattcctaaattatggcaatataattatttgcataatttcaataagaatctgtttttggtaacaggattcaattggagacactgtttgttttatcaaggctttaactcgaacggcagatacaaccagaccactttaaggaattgagcttgactttatagca

SEQ ID NO: 400344 - DNA, 524 bp, Homo sapiens
ggggatcataccattggactaggaaaatcttccaggactctaaaaagctgaatgaggatttccaattgaaatcaagcaaaacacaaaaaaactgaatgagaattgctatttgaaatcaagcagaacaagatttagttacattggactgaacttataaaagaaggaaaagattttattcatggctcttccattggaaacattgttgattctctttatgttttgttttccaaagtcaagaattttttttcttttcagctatttttaacttaccctacgttagaaaaactacattttgaacaaaaatttgaacsatttatctgtctctctaactgatttctccagaattcagaagccattggtgagcattcctaaattatggcaatataattatttgcataatttcaataagaatctgtttttggtaacaggattcaattggagacactgtttgttttatcaaggctttaactcgaacggcagatacaaccagaccactttaaggaattgagcttgactttatagca

SEQ ID NO: 400345 - DNA, 524 bp, Homo sapiens
ggggatcataccattggactaggaaaatcttccaggactctaaaaagctgaatgaggatttccaattgaaatcaagcaaaacacaaaaaaactgaatgagaattgctatttgaaatcaagcagaacaagatttagttacattggactgaacttataaaagaaggaaaagattttattcatggctcttccattggaaacattgttgattctctttatgttttgttttccaaagtcaagaattttttttcttttcagctatttttaacttaccctacgttagaaaaactacattttgaacaaaaatttgaaccatttatctgtctctctaactgatttctccagaattcagaagccattsgtgagcattcctaaattatggcaatataattatttgcataatttcaataagaatctgtttttggtaacaggattcaattggagacactgtttgttttatcaaggctttaactcgaacggcagatacaaccagaccactttaaggaattgagcttgactttatagca

SEQ ID NO: 400346 - DNA, 527 bp, Homo sapiens
atggcaatataattatttgcataatttcaataagaatctgtttttggtaacaggattcaattggagacactgtttgttttatcaaggctttaactcgaacrgcagatacaaccagaccactttaaggaattgagcttgactttatagcaccaatgcaaagccccttagaatgactggcttggtgtcttgtctacaagggtcctttacaaagttgctgtccttgtggtaagaagtaaagaatgtcactttctgacgggcccaggaacctcaagttatttggggaccttgagaagataggactacacccattcataaaagtattacagaagagctgacaagatgtctgaataggaacagctccggtctgcagcacccagtgggatcaacacagaaggcaggtggttcatgcatttccaactgagcctccactggtgatacccaggcaaacagggtctggagtggacctccagcaaactcgagcaaacctgcagcagagggacctgactggtagaaggaaaactaacaaa

SEQ ID NO: 400347 - DNA, 466 bp, Homo sapiens
agaatctgtttttggtaacaggattcaattggagacactgtttgttttatcaaggctttaactcgaacggcagatacaaccagaccactttaaggaattgagcttgactttatagcaccaatgcaaagccccttagaatgactggcttggtgtcttgtctacaagggtcctttacaaagttgctgtccttgtggtaagaagtaaagaatgtcactttctgackggcccaggaacctcaagttatttggggaccttgagaagataggactacacccattcataaaagtattacagaagagctgacaagatgtctgaataggaacagctccggtctgcagcacccagtgggatcaacacagaaggcaggtggttcatgcatttccaactgagcctccactggtgatacccaggcaaacagggtctggagtggacctccagcaaactcgagcaaacctgcagcagaggg

SEQ ID NO: 400348 - DNA, 527 bp, Homo sapiens
atggcaatataattatttgcataatttcaataagaatctgtttttggtaacaggattcaattggagacactgtttgttttatcaaggctttaactcgaacggcagatacaaccagaccactttaaggaattgagcttgactttatagcaccaatgcaaagccccttagaatgactggcttggtgtcttgtctacaagggtcctttacaaagttgctgtccttgtggtaagaagtaaagaatgtcactttctgacgggcccaggaacctcaagttatttggggaccttgagaagrtaggactacacccattcataaaagtattacagaagagctgacaagatgtctgaataggaacagctccggtctgcagcacccagtgggatcaacacagaaggcaggtggttcatgcatttccaactgagcctccactggtgatacccaggcaaacagggtctggagtggacctccagcaaactcgagcaaacctgcagcagagggacctgactggtagaaggaaaactaacaaa

SEQ ID NO: 400349 - DNA, 466 bp, Homo sapiens
agaatctgtttttggtaacaggattcaattggagacactgtttgttttatcaaggctttaactcgaacggcagatacaaccagaccactttaaggaattgagcttgactttatagcaccaatgcaaagccccttagaatgactggcttggtgtcttgtctacaagggtcctttacaaagttgctgtccttgtggtaagaagtaaagaatgtcactttctgacgggcccaggaacctcaagttatttggggaccttgagaagayaggactacacccattcataaaagtattacagaagagctgacaagatgtctgaataggaacagctccggtctgcagcacccagtgggatcaacacagaaggcaggtggttcatgcatttccaactgagcctccactggtgatacccaggcaaacagggtctggagtggacctccagcaaactcgagcaaacctgcagcagaggg

SEQ ID NO: 400350 - DNA, 466 bp, Homo sapiens
agaatctgtttttggtaacaggattcaattggagacactgtttgttttatcaaggctttaactcgaacggcagatacaaccagaccactttaaggaattgagcttgactttatagcaccaatgcaaagccccttagaatgactggcttggtgtcttgtctacaagggtcctttacaaagttgctgtccttgtggtaagaagtaaagaatgtcactttctgacgggcccaggaacctcaagttatttggggaccttgagaagataggactacacccattcataaaagtatyacagaagagctgacaagatgtctgaataggaacagctccggtctgcagcacccagtgggatcaacacagaaggcaggtggttcatgcatttccaactgagcctccactggtgatacccaggcaaacagggtctggagtggacctccagcaaactcgagcaaacctgcagcagaggg

SEQ ID NO: 400351 - DNA, 466 bp, Homo sapiens
agaatctgtttttggtaacaggattcaattggagacactgtttgttttatcaaggctttaactcgaacggcagatacaaccagaccactttaaggaattgagcttgactttatagcaccaatgcaaagccccttagaatgactggcttggtgtcttgtctacaagggtcctttacaaagttgctgtccttgtggtaagaagtaaagaatgtcactttctgacgggcccaggaacctcaagttatttggggaccttgagaagataggactacacccattcataaaagtattacagaagagctgrcaagatgtctgaataggaacagctccggtctgcagcacccagtgggatcaacacagaaggcaggtggttcatgcatttccaactgagcctccactggtgatacccaggcaaacagggtctggagtggacctccagcaaactcgagcaaacctgcagcagaggg

SEQ ID NO: 400352 - DNA, 610 bp, Homo sapiens
agccttgctttctcagacgcctagattacaggcctctctcttgaacacctattggtaaggtatccgggatcctttaaatacacgatgattggcagggtttacataggggaaatcagtgcctgacaattcgccttccaggatatggattgtcattccctctctttgtgggccccagtctcctatacataaaagtagagattgtaatactcatttgacttgcagatacctcaccccgaacccacctactataaygtaaaagccaagaatgcaaaccctttcctcaccccgtgaaggtaaagtactcagagccaaggagagaaggctcagggatggtacctgggtgtttccaacactaaccatgcattgtagttttagtgttcaagtttaagcttcttatgttaaagttaccccagctttaattatattgtaacaagatttatttttgtaattccatttttggattcttgatttcttggtaaagaaatacagttatttttgtatacaaatcttatatactgttacattccaaaatttgttcatgagtcctaacactttttagtaaatttcttatgattttctaaatgcaagatcatgtcatctgtacataaag

SEQ ID NO: 400353 - DNA, 610 bp, Homo sapiens
agccttgctttctcagacgcctagattacaggcctctctcttgaacacctattggtaaggtatccgggatcctttaaatacacgatgattggcagggtttacataggggaaatcagtgcctgacaattcgccttccaggatatggattgtcattccctctctttgtgggccccagtctcctatacataaaagtagagattgtaatactcatttgacttgcagatacctcaccccgaacccacctactataatgtaaaagccaagaatgcaaaccctttcctcaccccgtgaaggtaaagtactcagagccaaggagagaaggctcagggatggtacctgggtgtttccaacactaaccatgcattgtagttttagtgttcaagtttaagcttcttatgttaaagttaccccagctttaattatattgtaacaagatttatttttgtaattccatttttggattcttgatttcttggtaaagaaatacagttatttttgtatacmaatcttatatactgttacattccaaaatttgttcatgagtcctaacactttttagtaaatttcttatgattttctaaatgcaagatcatgtcatctgtacataaag

SEQ ID NO: 400354 - DNA, 562 bp, Homo sapiens
ctgtctttctgattacattacccatctacacttgaatgctgtctactttattcattagacccttagcatattctccagaggtttaaaaaaawttccaaaatcatatcttggtctgcttctgaagcttgctctgttgacacaaattgtatttttttctttttttggattttagtatgccttgcaattttttccctttattctcatgcatgaagcacccactaaaggtgactgctgttagtatagctttagtaatgcggtgatgaggtgacagggcaggtgatgctctcttagtctctttaggctactataacaaaatactttagactgagtaattcataaacaacagagattattgcttacagatctggaggctggaaagtccaagactaaaggggcagaatatttagtgtttggtgaaggtcaaacattcagacactcgcaacgattatagtgacagcagcagtcttcaggaatcctatgtgagggaaaaacattcagaccacaacaggagtgctcgggaatcctatgtgagggacaaacattcagaccccagcagtagtgt

SEQ ID NO: 400355 - DNA, 562 bp, Homo sapiens
ctgtctttctgattacattacccatctacacttgaatgctgtctactttattcattagacccttagcatattctccagaggtttaaaaaaaattccaaaatcatatcttggtctgcttctgaagcttgctctgttgacacaaattgtatttttttctttttttggattttagtatgccttgcaattttttccctttattctcatgcatgaagcacccactaaaggtgactgctgttagtatagctttagtaatgcggtgatgaggtgacagggcaggtgatgctctcttagtctctttaggctactataacaaaatactttagactgagtaattcataaacaacagagattattgctyacagatctggaggctggaaagtccaagactaaaggggcagaatatttagtgtttggtgaaggtcaaacattcagacactcgcaacgattatagtgacagcagcagtcttcaggaatcctatgtgagggaaaaacattcagaccacaacaggagtgctcgggaatcctatgtgagggacaaacattcagaccccagcagtagtgt

SEQ ID NO: 400356 - DNA, 586 bp, Homo sapiens
tagtatagctttagtaatgcggtgatgaggtgacagggcaggtgatgctctcttagtctctttaggctactataacaaaatactttagactgagtaattcataaacaacagagattattgcttacagatctggaggctggaaagtccaagactaaaggggcagaatatttagtgtttggtgaaggtcaaacattcagacactcgcaacgaytatagtgacagcagcagtcttcaggaatcctatgtgagggaaaaacattcagaccacaacaggagtgctcgggaatcctatgtgagggacaaacattcagaccccagcagtagtgttgtggaatcctatgtgaggggaaaactttcaaacccttgtagcagtgttctgcaatcctatgtgaggggcaaaaattcagaacctcgtagcagtgttctggaatcctatatgaggaacaatcagaccacagcaggaatgttctggaatcctatgtgaggggcaaacattcagaccacagcaggagtgttctggaatcctatatgagggacaaacattcagaccacagcaggagtgctctgtaatcctatgtgaggggcg

SEQ ID NO: 400357 - DNA, 562 bp, Homo sapiens
ctgtctttctgattacattacccatctacacttgaatgctgtctactttattcattagacccttagcatattctccagaggtttaaaaaaaattccaaaatcatatcttggtctgcttctgaagcttgctctgttgacacaaattgtatttttttctttttttggattttagtatgccttgcaattttttccctttattctcatgcatgaagcacccactaaaggtgactgctgttagtatagctttagtaatgcggtgatgaggtgacagggcaggtgatgctctcttagtctctttaggctactataacaaaatactttagactgagtaattcataaacaacagagattattgcttacagatctggaggctggaaagtccaagactaaaggggcagaatatttagtgtttggtgaaggtcaaacattcagacactcgcaacgattatagtgacagcagcagtcttcaggaatcctatgtgagggaaaaacattcagaccacarcaggagtgctcgggaatcctatgtgagggacaaacattcagaccccagcagtagtgt

SEQ ID NO: 400358 - DNA, 586 bp, Homo sapiens
tagtatagctttagtaatgcggtgatgaggtgacagggcaggtgatgctctcttagtctctttaggctactataacaaaatactttagactgagtaattcataaacaacagagattattgcttacagatctggaggctggaaagtccaagactaaaggggcagaatatttagtgtttggtgaaggtcaaacattcagacactcgcaacgattatagtgacagcagcagtcttcaggaatcctatgtgagggaaaaacattcagaccacaacaggagtgctcgggaatcctatgtgagggacaaacattcagaccccagcagtagtgttgtggaatcctatgtgaggggaaaactttcaaacccttgtagcagtgttctgcaatcytatgtgaggggcaaaaattcagaacctcgtagcagtgttctggaatcctatatgaggaacaatcagaccacagcaggaatgttctggaatcctatgtgaggggcaaacattcagaccacagcaggagtgttctggaatcctatatgagggacaaacattcagaccacagcaggagtgctctgtaatcctatgtgaggggcg

SEQ ID NO: 400359 - DNA, 586 bp, Homo sapiens
tagtatagctttagtaatgcggtgatgaggtgacagggcaggtgatgctctcttagtctctttaggctactataacaaaatactttagactgagtaattcataaacaacagagattattgcttacagatctggaggctggaaagtccaagactaaaggggcagaatatttagtgtttggtgaaggtcaaacattcagacactcgcaacgattatagtgacagcagcagtcttcaggaatcctatgtgagggaaaaacattcagaccacaacaggagtgctcgggaatcctatgtgagggacaaacattcagaccccagcagtagtgttgtggaatcctatgtgaggggaaaactttcaaacccttgtagcagtgttctgcaatcctatgtgaggggcaaaaattcagaacctygtagcagtgttctggaatcctatatgaggaacaatcagaccacagcaggaatgttctggaatcctatgtgaggggcaaacattcagaccacagcaggagtgttctggaatcctatatgagggacaaacattcagaccacagcaggagtgctctgtaatcctatgtgaggggcg

SEQ ID NO: 400360 - DNA, 424 bp, Homo sapiens
ggccaaaaggtagcccaaacctaatgcccatcagtaggtgaatagataaagaaaatgtaatatatacatacacagagtattattcagccataaaaagaaaaatatctggccagattcaggggcttacacctgtaatcccagtattttgggaggccaaggtgggcaggtctcttgagccccatattttgagaccagactggacaacatggcacwtttggttagaagtgtttgaccataactactattccagaaaaagatctactcattagaactacaaatcataaaattataagttctacaaaaacaaatcaaccttatctaccacccagttctacccaattatatcatgttagaacagaaggtctcaccgtggactcgagagctgatatgagaaatgtcaccaccatcctgctctccacggaat

SEQ ID NO: 400361 - DNA, 424 bp, Homo sapiens
ggccaaaaggtagcccaaacctaatgcccatcagtaggtgaatagataaagaaaatgtaatatatacatacacagagtattattcagccataaaaagaaaaatatctggccagattcaggggcttacacctgtaatcccagtattttgggaggccaaggtgggcaggtctcttgagccccatattttgagaccagactggacaacatggcacttttggttagaagtgtttgaccataactactattccagaaaaagatctactcattagaactacaaatcataaaattataagttctacaaaaacaaatcaaccttatctaccacccagttctaccmaattatatcatgttagaacagaaggtctcaccgtggactcgagagctgatatgagaaatgtcaccaccatcctgctctccacggaat

SEQ ID NO: 400362 - DNA, 579 bp, Homo sapiens
gttagaagtgtttgaccataactactattccagaaaaagatctactcattagaactacaaatcataaaattataagttctacaaaaacaaatcaaccttatctaccacccagttctacccaattatatcatgttagaacagaaggtctcaccgtggactcgagagctgatatgagaaatgtcaccaccatcctgctctccacggaatcatcttcaacagactcctcatcttccatgggcagggtggaaactgcaacttgtgccatgatccctgtgcaaaaaagtagtaagaaattgaatggtagaaatgcagtgtcctaaactcacatccagagctgtgagrgtttctcaccggctgccaaattgttttttgggtcagagaaaaaaataaaacttggtaacctggtactcgacttgccccaaactctcatcagatagagaatctatccgctaactttctatctagtattatttccatgaagttacatcaatatcactcccaaaatcaatccaggtggaagactaaatccaaagctagcagaaggaaagaaataataaagagcataattagagcataaat

SEQ ID NO: 400363 - DNA, 579 bp, Homo sapiens
gttagaagtgtttgaccataactactattccagaaaaagatctactcattagaactacaaatcataaaattataagttctacaaaaacaaatcaaccttatctaccacccagttctacccaattatatcatgttagaacagaaggtctcaccgtggactcgagagctgatatgagaaatgtcaccaccatcctgctctccacggaatcatcttcaacagactcctcatcttccatgggcagggtggaaactgcaacttgtgccatgatccctgtgcaaaaaagtagtaagaaattgaatggtagaaatgcagtgtcctaaactcacatccagagctgtgagggtttctcaccggctgccaaattgttttttgggtcagagaaaaaaataaaacttggtaacctggtactcgacttgccccaaactctcatcagatagagaatctatccgctaactttctatctagtattatttccatgaagttacatcaatatcactcccaaaatcaatccaggtggaagactaaatccaaagctagcagaaggaaagaaataayaaagagcataattagagcataaat

SEQ ID NO: 400364 - DNA, 397 bp, Homo sapiens
caacaaggtggccaagtctagtcaagggaggaaagaacagtctcttcaacagttggatgtcagtgcacaagagagaagttagacccctaccttgcagtatatacaaaaattaattctaaattaataaaagacttaaatgtaaggactaaaaatatgtaactcttagaagaaaacacacggtaaacctttatgacctttgagttttaagtgtattttgaaatatgacagaaaakcacagataacaaaagaaaatacacgaaaattagatttaatcaaaataaaaaaccctttatgcatcaaaggacactatcaagggagtgaaaagacaacccataatatgtgagaaaatatgtatctgataaaatcaaaatgtgtatctgataaaagcttaatatcc

SEQ ID NO: 400365 - DNA, 568 bp, Homo sapiens
aaattacaagtaattgtgaagtttcccctcattttataggtttggtcttataaggcatacaacacaaattttaattacttttmtttttggtatttggatcttaatttggtcaagtggccactgggtagatgatggagcctcttgagacatacagtcttcttctagctttgttgatgtgaatattactgtgtatttttcattcacttattattttacaaggcatgcttcattaaaaatatatcagcatctcattgacaaatcacaaaatttaaaaggcaccagaaaaaaacaatttatttaaaacattcctgtgtaaaggtagtcaccgctcttactattcttcaaatatttttattatctttaaacacaagcctagttttatctcgagtgtctgaccttgatgatattgtacactttaaacttagaaaaaatgaactctattggaaatttcctacagatcagcttttctagatgccaagcgccttgtttcagccatggtgatgacagccaattgggttctcagggattctggcctctggcatcatctcaattgtttatcattgaagtt

SEQ ID NO: 400366 - DNA, 568 bp, Homo sapiens
aaattacaagtaattgtgaagtttcccctcattttataggtttggtcttataaggcatacaacacaaattttaattacttttatttttggtatttggatcttaatttggtcaagtggccactgggtagatgatggagcctcttgagacatacagtcttcttctagctttgttgatgtgaatattactgtgyatttttcattcacttattattttacaaggcatgcttcattaaaaatatatcagcatctcattgacaaatcacaaaatttaaaaggcaccagaaaaaaacaatttatttaaaacattcctgtgtaaaggtagtcaccgctcttactattcttcaaatatttttattatctttaaacacaagcctagttttatctcgagtgtctgaccttgatgatattgtacactttaaacttagaaaaaatgaactctattggaaatttcctacagatcagcttttctagatgccaagcgccttgtttcagccatggtgatgacagccaattgggttctcagggattctggcctctggcatcatctcaattgtttatcattgaagtt

SEQ ID NO: 400367 - DNA, 568 bp, Homo sapiens
aaattacaagtaattgtgaagtttcccctcattttataggtttggtcttataaggcatacaacacaaattttaattacttttatttttggtatttggatcttaatttggtcaagtggccactgggtagatgatggagcctcttgagacatacagtcttcttctagctttgttgatgtgaatattactgtgtatttttcattcacttattattttacaaggcatgcttcattaaaaatatatcagcatctcattgacaaatcacaaaatttaaaaggcaccagaaaaaaacaatttatttaaaacattcctgtgtaaaggtagtcaccgctcttactattcttcaaatatttttattatctttaaacacaagcctagttttatctcgagtgtctgaccttgatgatattgtacaytttaaacttagaaaaaatgaactctattggaaatttcctacagatcagcttttctagatgccaagcgccttgtttcagccatggtgatgacagccaattgggttctcagggattctggcctctggcatcatctcaattgtttatcattgaagtt

SEQ ID NO: 400368 - DNA, 568 bp, Homo sapiens
aaattacaagtaattgtgaagtttcccctcattttataggtttggtcttataaggcatacaacacaaattttaattacttttatttttggtatttggatcttaatttggtcaagtggccactgggtagatgatggagcctcttgagacatacagtcttcttctagctttgttgatgtgaatattactgtgtatttttcattcacttattattttacaaggcatgcttcattaaaaatatatcagcatctcattgacaaatcacaaaatttaaaaggcaccagaaaaaaacaatttatttaaaacattcctgtgtaaaggtagtcaccgctcttactattcttcaaatatttttattatctttaaacacaagcctagttttatctcgagtgtctgaccttgatgatattgtacactttaaacttagaaaaawtgaactctattggaaatttcctacagatcagcttttctagatgccaagcgccttgtttcagccatggtgatgacagccaattgggttctcagggattctggcctctggcatcatctcaattgtttatcattgaagtt

SEQ ID NO: 400369 - DNA, 608 bp, Homo sapiens
aactgtttttgtttgtttatgcctggggctttattgttgtttcacttttctcccgtctcttcctgayttggtcaaatccaaaggaattttccaaattgtaggcagcaagtcctctgaattggctaaaactcctatggctgcaaacaaacaaacaaacaaacaaataaacaacaacaaaaaacattccagttagcagaaattattttttaaaactttttttttttacataagtggtctcatctacataacaaggccacccttttgctagccaaggctaaactgaaggagtagtggtggtgacccaatgtgaagattctgccctgttcactacagaaacctgagtttggttcctaagtctagttctttctgtttgatatttgtgttacttttaaagcgtcagcagtttgtcccagctatgatgtggtaataaaagattcaaaaggattttctttgcaagttctatgattaaaagcttaattaaaagcaaatttcttctttttaattatactttaagttctggggtacatgtgcagaacatacaggtttgttacataggtatacacatgccatggtggcttgctgcatccatcaacccatgatctacatta

SEQ ID NO: 400370 - DNA, 608 bp, Homo sapiens
aactgtttttgtttgtttatgcctggggctttattgttgtttcacttttctcccgtctcttcctgatttggtcaaatccaaaggaattttccaaattgtrggcagcaagtcctctgaattggctaaaactcctatggctgcaaacaaacaaacaaacaaacaaataaacaacaacaaaaaacattccagttagcagaaattattttttaaaactttttttttttacataagtggtctcatctacataacaaggccacccttttgctagccaaggctaaactgaaggagtagtggtggtgacccaatgtgaagattctgccctgttcactacagaaacctgagtttggttcctaagtctagttctttctgtttgatatttgtgttacttttaaagcgtcagcagtttgtcccagctatgatgtggtaataaaagattcaaaaggattttctttgcaagttctatgattaaaagcttaattaaaagcaaatttcttctttttaattatactttaagttctggggtacatgtgcagaacatacaggtttgttacataggtatacacatgccatggtggcttgctgcatccatcaacccatgatctacatta

SEQ ID NO: 400371 - DNA, 608 bp, Homo sapiens
aactgtttttgtttgtttatgcctggggctttattgttgtttcacttttctcccgtctcttcctgatttggtcaaatccaaaggaattttccaaattgtaggcagcaagtcctctgaattggctaaaactcctatggctgcaaacaaacaaacaaacaaacaaataaacaacaacaaaaaacattccagttagcagaaattattttttaaaactttttttttttacataagtggtctcatctacataacaaggccacccttttgctagccaaggctaaactgaaggagtagtggtggtgacccaatgtgaagattctgccctgttcactacagaaacctgagtttggttcctaagtctagttctttctgtttgatatttgtgttacttttaaagcgtcagcagtttgtcccagctatgatgtggtaataaaagattcaaaaggattttctttrcaagttctatgattaaaagcttaattaaaagcaaatttcttctttttaattatactttaagttctggggtacatgtgcagaacatacaggtttgttacataggtatacacatgccatggtggcttgctgcatccatcaacccatgatctacatta

SEQ ID NO: 400372 - DNA, 608 bp, Homo sapiens
aactgtttttgtttgtttatgcctggggctttattgttgtttcacttttctcccgtctcttcctgatttggtcaaatccaaaggaattttccaaattgtaggcagcaagtcctctgaattggctaaaactcctatggctgcaaacaaacaaacaaacaaacaaataaacaacaacaaaaaacattccagttagcagaaattattttttaaaactttttttttttacataagtggtctcatctacataacaaggccacccttttgctagccaaggctaaactgaaggagtagtggtggtgacccaatgtgaagattctgccctgttcactacagaaacctgagtttggttcctaagtctagttctttctgtttgatatttgtgttacttttaaagcgtcagcagtttgtcccagctatgatgtggtaataaaagattcaaaaggattttctttgcaagttctatgattaaaagcttaattaaaagcaaatttcttytttttaattatactttaagttctggggtacatgtgcagaacatacaggtttgttacataggtatacacatgccatggtggcttgctgcatccatcaacccatgatctacatta

SEQ ID NO: 400373 - DNA, 371 bp, Homo sapiens
ggtggcagctacctcaggagttacaaagcagacgtggtyccaggacagtatatgtcagggcaaagctgtcctcggaggctattaggagttggttacggcacagacattgtaagtcagatggtctcattactttcaatgacaaaaccaaaattacttttgcatcagcctaatacaacggcctggcaagagcacagaaaaagtccctgtggctgttaggtggggacctctgatgcagcacaattccttcattcccttctccaaaacctccctcttccaattccactgaagagagaatctgatggaagtcctgtgtaagcaggctcagatatatctaccactatagacagtagaggtgattcataaatccaagc

SEQ ID NO: 400374 - DNA, 371 bp, Homo sapiens
ggtggcagctacctcaggagttacaaagcagacgtggttccaggacagtatatgtcagggcaaagctgtcctcggaggctattaggagytggttacggcacagacattgtaagtcagatggtctcattactttcaatgacaaaaccaaaattacttttgcatcagcctaatacaacggcctggcaagagcacagaaaaagtccctgtggctgttaggtggggacctctgatgcagcacaattccttcattcccttctccaaaacctccctcttccaattccactgaagagagaatctgatggaagtcctgtgtaagcaggctcagatatatctaccactatagacagtagaggtgattcataaatccaagc

SEQ ID NO: 400375 - DNA, 371 bp, Homo sapiens
ggtggcagctacctcaggagttacaaagcagacgtggttccaggacagtatatgtcagggcaaagctgtcctcggaggctattaggagttggttayggcacagacattgtaagtcagatggtctcattactttcaatgacaaaaccaaaattacttttgcatcagcctaatacaacggcctggcaagagcacagaaaaagtccctgtggctgttaggtggggacctctgatgcagcacaattccttcattcccttctccaaaacctccctcttccaattccactgaagagagaatctgatggaagtcctgtgtaagcaggctcagatatatctaccactatagacagtagaggtgattcataaatccaagc

SEQ ID NO: 400376 - DNA, 549 bp, Homo sapiens
tttacttgtattttatttgttacacatgaatattgcatatgtaagatgatatactaagaaattatcacatttaatgaaatgctttaatcaaattcctgattgaatttttgatatcaatatctttttccttgtttaatccatctttagagtgaacagggctgtstaggccaaagtcctcacttctatgtaaattgtctgagttacagaactttttgaatttattatgttgtcacaggaagtttcttattgcttgtttaaaggagtcgctctcaatatgatgcggaatccaaaagcactgaagggcatatatcctgagtttctgttactgaagccaaaggttgccaatttcttgtagatcctgctagagttaaacttcatttaagtaatcattaaaagctgcatttattccctcacttgaacttttgatttcacactattaggactaatcctctaagtctttgctaagttatgttcctccttttcttgtggcttgactctgatgctctctatatgcaacatcaattgatgtaaagtacattcagggcaata

SEQ ID NO: 400377 - DNA, 549 bp, Homo sapiens
tttacttgtattttatttgttacacatgaatattgcatatgtaagatgatatactaagaaattatcacatttaatgaaatgctttaatcaaattcctgattgaatttttgatatcaatatctttttccttgtttaatccatctttagagtgaacagggctgtctaggccaaagtcctcacttctatstaaattgtctgagttacagaactttttgaatttattatgttgtcacaggaagtttcttattgcttgtttaaaggagtcgctctcaatatgatgcggaatccaaaagcactgaagggcatatatcctgagtttctgttactgaagccaaaggttgccaatttcttgtagatcctgctagagttaaacttcatttaagtaatcattaaaagctgcatttattccctcacttgaacttttgatttcacactattaggactaatcctctaagtctttgctaagttatgttcctccttttcttgtggcttgactctgatgctctctatatgcaacatcaattgatgtaaagtacattcagggcaata

SEQ ID NO: 400378 - DNA, 602 bp, Homo sapiens
aagtttcttattgcttgtttaaaggagtcgctctcaatatgatgcggaatccaaaagcactgaagggcatataycctgagtttctgttactgaagccaaaggttgccaatttcttgtagatcctgctagagttaaacttcatttaagtaatcattaaaagctgcatttattccctcacttgaacttttgatttcacactattaggactaatcctctaagtctttgctaagttatgttcctccttttcttgtggcttgactctgatgctctctatatgcaacatcaattgatgtaaagtacattcagggcaatagagtttctttaaatattactttgttattcaaaataatcacaaaagcactcatcgtaggaaaacttggaggactcaaatatagggaaatactttttctttctaaggcacaattctctaaagaagttcaccttaacttgaatatacatgggaaaatatccttgttcactaatagtctatattcactctgttttcttccctcatagaccagccggttcactattattctccaaatgatgtgtgcctctatagagtccaggctatctgcatatctaatttttcccacaaatta

SEQ ID NO: 400379 - DNA, 602 bp, Homo sapiens
aagtttcttattgcttgtttaaaggagtcgctctcaatatgatgcggaatccaaaagcactgaagggcatatatcctgagtttctgttactgaagccaaaggttgccaatttcttgtagatcctgctagagttaaacttcatttaagtawtcattaaaagctgcatttattccctcacttgaacttttgatttcacactattaggactaatcctctaagtctttgctaagttatgttcctccttttcttgtggcttgactctgatgctctctatatgcaacatcaattgatgtaaagtacattcagggcaatagagtttctttaaatattactttgttattcaaaataatcacaaaagcactcatcgtaggaaaacttggaggactcaaatatagggaaatactttttctttctaaggcacaattctctaaagaagttcaccttaacttgaatatacatgggaaaatatccttgttcactaatagtctatattcactctgttttcttccctcatagaccagccggttcactattattctccaaatgatgtgtgcctctatagagtccaggctatctgcatatctaatttttcccacaaatta

SEQ ID NO: 400380 - DNA, 602 bp, Homo sapiens
aagtttcttattgcttgtttaaaggagtcgctctcaatatgatgcggaatccaaaagcactgaagggcatatatcctgagtttctgttactgaagccaaaggttgccaatttcttgtagatcctgctagagttaaacttcatttaagtaatcattaaaagctgcatttattccctcacttgaacttttgatttcacactattaggactaatcctctaagtctttgctaagttatgttcctycttttcttgtggcttgactctgatgctctctatatgcaacatcaattgatgtaaagtacattcagggcaatagagtttctttaaatattactttgttattcaaaataatcacaaaagcactcatcgtaggaaaacttggaggactcaaatatagggaaatactttttctttctaaggcacaattctctaaagaagttcaccttaacttgaatatacatgggaaaatatccttgttcactaatagtctatattcactctgttttcttccctcatagaccagccggttcactattattctccaaatgatgtgtgcctctatagagtccaggctatctgcatatctaatttttcccacaaatta

SEQ ID NO: 400381 - DNA, 531 bp, Homo sapiens
gagtttctgttactgaagccaaaggttgccaatttcttgtagatcctgctagagttaaacttcatttaagtaatcattaaaagctgcatttattccctcacttgaacttttgatttcacactattaggactaatcctctaagtctttgctaagttatgttcctccttttcttgtggcttgactctgatgctctctatatgcaacatcaattgatgtaaagtacattcagggcaakagagtttctttaaatattactttgttattcaaaataatcacaaaagcactcatcgtaggaaaacttggaggactcaaatatagggaaatactttttctttctaaggcacaattctctaaagaagttcaccttaacttgaatatacatgggaaaatatccttgttcactaatagtctatattcactctgttttcttccctcatagaccagccggttcactattattctccaaatgatgtgtgcctctatagagtccaggctatctgcatatctaatttttcccacaaattactgttt

SEQ ID NO: 400382 - DNA, 565 bp, Homo sapiens
catttattccctcacttgaacttttgatttcacactattaggactaatcctctaagtctttgctaagttatgttcctccttttcttgtggcttgactctgatgctctctatatgcaacatcaattgatgtaaagtacattcagggcaatagagtttctttaaatattactttgttattcaaaataatcacaaaagcactcatcgtaggaaaacttggaggactcaaatatagggaaatactttttctttctaaggcacaattctctaaagaagttcaccttaayttgaatatacatgggaaaatatccttgttcactaatagtctatattcactctgttttcttccctcatagaccagccggttcactattattctccaaatgatgtgtgcctctatagagtccaggctatctgcatatctaatttttcccacaaattactgttttgaattgcactgaattgaattcaaggggatgtcatttataaacagtgcaaatatatactgcacgagggatcttagaaatcatacacatggtttgatccataagctcatatgagcatgcaa

SEQ ID NO: 400383 - DNA, 619 bp, Homo sapiens
tatattttgcagatgtcattctttaaaaaattattaatatctacatgattgctgcagatattttacttttaaacaaacatttttcacttatgtgaccagtatttgtgtcctattttattaaacagacatttcaagattcttttagagttaattattaaaaattaagtatcataaatatttctgaagtactaccttaaaaaaaaccctttcctggcttttcatatagttaaacattttcataattactaaaaagttaaaaataaattaacaaccataatcaaattagaattctactttttatatcagatgaaatactatataaaatgtccagaatatctagtgttaatgaggctgtgcagcctggacatttgatgtctcatgtgtgggaatgtgaactaacccawccattctgaataattattggctctgtgtgttaacagtctagagtcctgaaacaaggatcttaattctaaaataaaatcctattctaagaatataccaatggttgataatcaaggaagtttcaaagttatacagaagaaccttcatcctagcattatatatgtaatcatccatataaaccagataatgttgaatgaaactgcagaaaaacaaagag

SEQ ID NO: 400384 - DNA, 399 bp, Homo sapiens
taatgaggctgtgcagcctggacatttgatgtctcatgtgtgggaatgtgaactaacccaaccattctgaataattattggctctgtgtgttaacagtctagagtcctgaaacaaggatcttaattctaaaataaaatcctattctaagaatataccaatggttgataatcaaggaagtttcaaagttatasagaagaaccttcatcctagcattatatatgtaatcatccatataaaccagataatgttgaatgaaactgcagaaaaacaaagagcctacagaatatgtttctctttgtgtacaactgtaaatgtacacatctatccatgtaaaattttacatctcaggaggataggtaccaacttgttaacatgctgtatctataagataagaaatt

SEQ ID NO: 400385 - DNA, 399 bp, Homo sapiens
taatgaggctgtgcagcctggacatttgatgtctcatgtgtgggaatgtgaactaacccaaccattctgaataattattggctctgtgtgttaacagtctagagtcctgaaacaaggatcttaattctaaaataaaatcctattctaagaatataccaatggttgataatcaaggaagtttcaaagttatacagaagaaccttcatcctagcattatatatgtaatcayccatataaaccagataatgttgaatgaaactgcagaaaaacaaagagcctacagaatatgtttctctttgtgtacaactgtaaatgtacacatctatccatgtaaaattttacatctcaggaggataggtaccaacttgttaacatgctgtatctataagataagaaatt

SEQ ID NO: 400386 - DNA, 257 bp, Homo sapiens
tcatgtgtgggaatgtgaactaacccaaccattctgaataattattggctctgtgtgttaacagtctagagtcctgaaacaaggatcttaattctaaaataaaatcctattctaagaatataccaatggttgataatcaaggaagtttcaaagttatacagaagaaccttcatcctagcattatatatgtaatcatccatataaaccagatartgttgaatgaaactgcagaaaaacaaagagcctacagaatatgt

SEQ ID NO: 400387 - DNA, 512 bp, Homo sapiens
cacacaaatatatatataaacatacatgtttatataggtacacacacacatacatatacacagatggtcaacaactgataatggttcaatytatgattttttttactttatgatgaagcaaaagtgatagctttgaatagaatataaccattctgcttttcactttcagtacaatattcaacaaattacataaaatatccaatactttattataaagcaggttttgtattcaatgattttgcccaattgtcagctgatgtaagtgttctgagcacattaaaggtatgccaggctaagctgtgatattcagtaagttaggtattaaatacatttttaacttactgtattttcaatttataatcagcttatcaagacttaaccccattgtacattgaaaagcatttgtattgcattaaacatgttatataatatttttaattgaaattactggcaacttttgaaaaaatgtaatgaaataatgtgctttgctattggttaaaatgtttttgggc

SEQ ID NO: 400388 - DNA, 512 bp, Homo sapiens
cacacaaatatatatataaacatacatgtttatataggtacacacacacatacatatacacagatggtcaacaactgataatggttcaatctatgattttttttactttatgatgaagcaaaaktgatagctttgaatagaatataaccattctgcttttcactttcagtacaatattcaacaaattacataaaatatccaatactttattataaagcaggttttgtattcaatgattttgcccaattgtcagctgatgtaagtgttctgagcacattaaaggtatgccaggctaagctgtgatattcagtaagttaggtattaaatacatttttaacttactgtattttcaatttataatcagcttatcaagacttaaccccattgtacattgaaaagcatttgtattgcattaaacatgttatataatatttttaattgaaattactggcaacttttgaaaaaatgtaatgaaataatgtgctttgctattggttaaaatgtttttgggc

SEQ ID NO: 400389 - DNA, 512 bp, Homo sapiens
cacacaaatatatatataaacatacatgtttatataggtacacacacacatacatatacacagatggtcaacaactgataatggttcaatctatgattttttttactttatgatgaagcaaaagtgatagctttgaatagaatataaccattctgcttttcactttcagtacaatattcaacaaattacataaaatatccaatactttattataaagcrggttttgtattcaatgattttgcccaattgtcagctgatgtaagtgttctgagcacattaaaggtatgccaggctaagctgtgatattcagtaagttaggtattaaatacatttttaacttactgtattttcaatttataatcagcttatcaagacttaaccccattgtacattgaaaagcatttgtattgcattaaacatgttatataatatttttaattgaaattactggcaacttttgaaaaaatgtaatgaaataatgtgctttgctattggttaaaatgtttttgggc

SEQ ID NO: 400390 - DNA, 512 bp, Homo sapiens
cacacaaatatatatataaacatacatgtttatataggtacacacacacatacatatacacagatggtcaacaactgataatggttcaatctatgattttttttactttatgatgaagcaaaagtgatagctttgaatagaatataaccattctgcttttcactttcagtacaatattcaacaaattacataaaatatccaatactttattataaagcaggttttgtattcaatgattttgyccaattgtcagctgatgtaagtgttctgagcacattaaaggtatgccaggctaagctgtgatattcagtaagttaggtattaaatacatttttaacttactgtattttcaatttataatcagcttatcaagacttaaccccattgtacattgaaaagcatttgtattgcattaaacatgttatataatatttttaattgaaattactggcaacttttgaaaaaatgtaatgaaataatgtgctttgctattggttaaaatgtttttgggc

SEQ ID NO: 400391 - DNA, 474 bp, Homo sapiens
gccaagtacttttgcatggttttaatatgccatgaattttgcaagaatgaaactactatgtatatgagaaaagwtggtagattttttcatttagatacttatttcagagtctcaataggaaaaacagaacacactcaaactaagataatttaacatgggtttatttccaaagagactacttacgaaaatgtcaggggagaagggtgaaggaatcacagaaatcacaccccacaataactctgggttagtagcagcaggcagagttctggggagtaaactgccctgatcacacaaggaaacactaattttcttatgaaaaagattgatcaaggagacctagcagagagggagtttaggcaataacccccaatcccatttcctccttccctttaatctcatgaacatgcatagaaggcaatgagcaagggaaccggtggagatattcaatatggaccattccacttggacaaaagc

SEQ ID NO: 400392 - DNA, 387 bp, Homo sapiens
ctttaaggaaaaactttaaggattggaaaacagggatgccatatgtccagtaacatgggatagccgttcctaattaaggattgctgtatgtcctgaatgactttctaatgtaatgaaggtgaataacctgctctgtttaattatacaatcccaaatgtaactgcctaagtgccaagtacttttgcatggttttaatatgccatgaattttgcaagaatgaaactactatgtatatgagaaaagatggtagattttttcatttagatacttatttcagagtctcaataggaaaaayagaacacactcaaactaagataatttaacatgggtttatttccaaagagactacttacgaaaatgtcaggggagaagggtgaaggaatcaca

SEQ ID NO: 400393 - DNA, 387 bp, Homo sapiens
ctttaaggaaaaactttaaggattggaaaacagggatgccatatgtccagtaacatgggatagccgttcctaattaaggattgctgtatgtcctgaatgactttctaatgtaatgaaggtgaataacctgctctgtttaattatacaatcccaaatgtaactgcctaagtgccaagtacttttgcatggttttaatatgccatgaattttgcaagaatgaaactactatgtatatgagaaaagatggtagattttttcatttagatacttatttcagagtctcaataggaaaaacagaacacacwcaaactaagataatttaacatgggtttatttccaaagagactacttacgaaaatgtcaggggagaagggtgaaggaatcaca

SEQ ID NO: 400394 - DNA, 398 bp, Homo sapiens
tggagctggaccaggccatccacwtcagtatagatgccttccactctgtcagtgagctcttttccagtcagtccaggaaggacctggacccagccatggacctgttagtgctgtctcagggacaccagaccaacatcctggacatcatccacatacacaaggaagctcttaccaaagtcatggagagcaggcaacatgtggccgaagggaagacagaggtgcagaggctgatgacgtcagaatcacaggaacaggatttctttggccactttggctgaaattcaccacttccatccaattccagtgagagacatggactcacagatgcaggatttcttgcaacaagagatactactttttcaaaaagtcacccaggaattgatagtgttgaacgactc

SEQ ID NO: 400395 - DNA, 398 bp, Homo sapiens
tggagctggaccaggccatccacttcagtatagatgccttccactctgtcagtgagctctttkccagtcagtccaggaaggacctggacccagccatggacctgttagtgctgtctcagggacaccagaccaacatcctggacatcatccacatacacaaggaagctcttaccaaagtcatggagagcaggcaacatgtggccgaagggaagacagaggtgcagaggctgatgacgtcagaatcacaggaacaggatttctttggccactttggctgaaattcaccacttccatccaattccagtgagagacatggactcacagatgcaggatttcttgcaacaagagatactactttttcaaaaagtcacccaggaattgatagtgttgaacgactc

SEQ ID NO: 400396 - DNA, 365 bp, Homo sapiens
accaagaagatggacaacagggcactcagctcaacttcacagccaatgagtggtggcaggctttgagaaagagcatcagaagcctgacagttcttcttcagcctcagccaggccttggagctggaccaggccatccacttcagtatagatgccttccactctgtcagtgagctcttttccagtcagtccaggaaggacctggacccagccatggacctgttagtgctgtctcagggacaccagaccaacaycctggacatcatccacatacacaaggaagctcttaccaaagtcatggagagcaggcaacatgtggccgaagggaagacagaggtgcagaggctgatgacgtcagaatcacagga

SEQ ID NO: 400397 - DNA, 398 bp, Homo sapiens
tggagctggaccaggccatccacttcagtatagatgccttccactctgtcagtgagctcttttccagtcagtccaggaaggacctggacccagccatggacctgttagtgctgtctcagggacaccagaccaacatcctggacatcatccacatacacaaggaagctcttaccaaagtcatggagarcaggcaacatgtggccgaagggaagacagaggtgcagaggctgatgacgtcagaatcacaggaacaggatttctttggccactttggctgaaattcaccacttccatccaattccagtgagagacatggactcacagatgcaggatttcttgcaacaagagatactactttttcaaaaagtcacccaggaattgatagtgttgaacgactc

SEQ ID NO: 400398 - DNA, 365 bp, Homo sapiens
accaagaagatggacaacagggcactcagctcaacttcacagccaatgagtggtggcaggctttgagaaagagcatcagaagcctgacagttcttcttcagcctcagccaggccttggagctggaccaggccatccacttcagtatagatgccttccactctgtcagtgagctcttttccagtcagtccaggaaggacctggacccagccatggacctgttagtgctgtctcagggacaccagaccaacatcctggacatcatccacatacacaaggaagctcttaccaaagtcatggagagcagrcaacatgtggccgaagggaagacagaggtgcagaggctgatgacgtcagaatcacagga

SEQ ID NO: 400399 - DNA, 365 bp, Homo sapiens
accaagaagatggacaacagggcactcagctcaacttcacagccaatgagtggtggcaggctttgagaaagagcatcagaagcctgacagttcttcttcagcctcagccaggccttggagctggaccaggccatccacttcagtatagatgccttccactctgtcagtgagctcttttccagtcagtccaggaaggacctggacccagccatggacctgttagtgctgtctcagggacaccagaccaacatcctggacatcatccacatacacaaggaagctcttaccaaagtcatggagagcaggcaacatgtggccgaagggaagacasaggtgcagaggctgatgacgtcagaatcacagga

SEQ ID NO: 400400 - DNA, 523 bp, Homo sapiens
ttcaaagattgatgatgcaatttgaatatgtgtccccacsgaatctcatgttgaattatatttcctaatgtggaaggtggatcctggtataaggtgattgaattatgaaggcaaatttctcatgaatggttcagcaccatccccttgtaccatcctcacaataatgagtgacttctcatgagatgtagtcactgaaatctctatatcacctccccactctccgtgttttccccttgccatgtgagacaattgattctttctttgccttccatgattattgaaagatttctgaggcctagaagcagaagcactgtgcttagaaccatgagccaattaaacctctttttcaaaataaatcatacagaaaatggcaaatgaggactggagcgttgctataaagatacctggaaatgtggaagcagctttggaaccaggtaatggacggaggttggaagagtttggagggctcaaaagaagacagatgagaaaacttttggaccatcttagagtctggttcaatggt

SEQ ID NO: 400401 - DNA, 523 bp, Homo sapiens
ttcaaagattgatgatgcaatttgaatatgtgtccccacggaatctcatgttgaattatatttcctaatgtggaaggtggatcctggtataaggtgattgaattatgaaggcaaatttctcatgaatggttcagcaccatccccttgtaccatcctcacaataatgagtgacttctcatgagatgtagtcactgaaatctctatatcacctccccactctccgtgttttccccttgccatgtgagacaattgattctttctttgccttccatgattattgaaagatttctgaggcctagaagcagaagcactgtgcttagaaccatgagccaattaaacctctttttcaaaataaatcatacagaaaatggcaaatgaggactggagcgttgctataaagatacctggaaatgtkgaagcagctttggaaccaggtaatggacggaggttggaagagtttggagggctcaaaagaagacagatgagaaaacttttggaccatcttagagtctggttcaatggt

SEQ ID NO: 400402 - DNA, 526 bp, Homo sapiens
aattgattctttctttgccttccatgattattgaaagatttctgaggcctagaagcagaagcactgtgcttagaaccatgagccaattaaacctctttttcaaaataaatcatacagaaaatggcaaatgaggactggagcgttgctataaagatacctggaaatgtggaagcagctttggaaccaggtaatggacggaggttggaagagtttggagggctcaaaagaagacagatgagaaaacttttggaccatcttagagtctggttcaatggttgtgacaaaaatcctgacagaaacatggacagtgaaggccaggctgaggaggtctcagagagaaataagaagctttctggaaaatgtcttccttttggawatggaaagcttacacaatgcctgctttttatttcagagactcataggcaaaagagactgtagccttgacccatatgagactttggactttgtaactttgagttaatgctgaaatgagttaagactttgggagactgctggcaaggcatgt

SEQ ID NO: 400403 - DNA, 526 bp, Homo sapiens
aattgattctttctttgccttccatgattattgaaagatttctgaggcctagaagcagaagcactgtgcttagaaccatgagccaattaaacctctttttcaaaataaatcatacagaaaatggcaaatgaggactggagcgttgctataaagatacctggaaatgtggaagcagctttggaaccaggtaatggacggaggttggaagagtttggagggctcaaaagaagacagatgagaaaacttttggaccatcttagagtctggttcaatggttgtgacaaaaatcctgacagaaacatggacagtgaaggccaggctgaggaggtctcagagagaaataagaagctttctggaaaatgtcttccttttggatatggaaagcttacacaatgcctgctttttatttcagagactcataggcaaaagagactgtagccttgacccakatgagactttggactttgtaactttgagttaatgctgaaatgagttaagactttgggagactgctggcaaggcatgt

SEQ ID NO: 400404 - DNA, 607 bp, Homo sapiens
aaggcatgtttgtattttgcaatgtgaggacatgagattcatcgggtcaaggacagaataatacggtttttgtctatgtccctaccaaaactcatgtggaattayattttggaatgttacaggcaaggtctaggtggaaaaagatttagtcataaaatggtgcaggtagatacttcacgaatgataaagaaccatcaccttgatgctatcctcctgataatgagtgagttcccatgagatcttgttgtttaacagatctcatcctcctgctcctgctttaggagacatctcattgtcccttggctttctgatataatgaggaggcttcctgattcctcccagaaacagaagacactatacttccttcacagcttgcagaaccatgagtcaattacacctcttttatttacaataatacagaaaagtagaactgcagagaggagctgtgaaatgccttcaaggcctttttccctttgttttggctattagcacagggcttctttatatgcaaatttctgaaatcttcttgaatgtttccccttaaatgggatttttcttattgctacatagacaacctgctatacagatttctgaaaaagtagaagca

SEQ ID NO: 400405 - DNA, 607 bp, Homo sapiens
aaggcatgtttgtattttgcaatgtgaggacatgagattcatcgggtcaaggacagaataatacggtttttgtctatgtccctaccaaaactcatgtggaattatattttgkaatgttacaggcaaggtctaggtggaaaaagatttagtcataaaatggtgcaggtagatacttcacgaatgataaagaaccatcaccttgatgctatcctcctgataatgagtgagttcccatgagatcttgttgtttaacagatctcatcctcctgctcctgctttaggagacatctcattgtcccttggctttctgatataatgaggaggcttcctgattcctcccagaaacagaagacactatacttccttcacagcttgcagaaccatgagtcaattacacctcttttatttacaataatacagaaaagtagaactgcagagaggagctgtgaaatgccttcaaggcctttttccctttgttttggctattagcacagggcttctttatatgcaaatttctgaaatcttcttgaatgtttccccttaaatgggatttttcttattgctacatagacaacctgctatacagatttctgaaaaagtagaagca

SEQ ID NO: 400406 - DNA, 607 bp, Homo sapiens
aaggcatgtttgtattttgcaatgtgaggacatgagattcatcgggtcaaggacagaataatacggtttttgtctatgtccctaccaaaactcatgtggaattatattttggaatgttacaggcaaggtctaggtggaaaaagatttagtcataaaatggtgcaggtagayacttcacgaatgataaagaaccatcaccttgatgctatcctcctgataatgagtgagttcccatgagatcttgttgtttaacagatctcatcctcctgctcctgctttaggagacatctcattgtcccttggctttctgatataatgaggaggcttcctgattcctcccagaaacagaagacactatacttccttcacagcttgcagaaccatgagtcaattacacctcttttatttacaataatacagaaaagtagaactgcagagaggagctgtgaaatgccttcaaggcctttttccctttgttttggctattagcacagggcttctttatatgcaaatttctgaaatcttcttgaatgtttccccttaaatgggatttttcttattgctacatagacaacctgctatacagatttctgaaaaagtagaagca

SEQ ID NO: 400407 - DNA, 607 bp, Homo sapiens
aaggcatgtttgtattttgcaatgtgaggacatgagattcatcgggtcaaggacagaataatacggtttttgtctatgtccctaccaaaactcatgtggaattatattttggaatgttacaggcaaggtctaggtggaaaaagatttagtcataaaatggtgcaggtagatacttcacgaatgataaagaaccatcaccttgatgctatcctcctgataatgagtgagttcccatgagatcttgttgtttaacagatctcatcctcctgctcctgctttaggagacatctcattgtcccttggctttctgatataatgaggaggcttcctgattcctcccagaaacagaagacactatacttccttcacagcttgcagaaccatgagtcaattacacctcttttatttacaataatacagaaaagtagaactgcagagaggagctgtgaaatgccttcaaggcctttttccctttgtttkggctattagcacagggcttctttatatgcaaatttctgaaatcttcttgaatgtttccccttaaatgggatttttcttattgctacatagacaacctgctatacagatttctgaaaaagtagaagca

SEQ ID NO: 400408 - DNA, 603 bp, Homo sapiens
aaagaagaactgggaaatttgaatgacatgggagaaatctcacacaactgaaagtcacagaggagaatgtcacagagtaaaaatctaaaatcagcacttaaacttcattcagatatatgatggctgctacatttcacattcataaaagagactccatagaatcyagcagaaaacaacagctaaattgctagtacagagcagagatttcaaccattgcatatagctcaggagtgaaagtttggtgtttgactacagaaagaagactaatgttagaaaagagtcactcttcaaaggaaaataaaagagcctatctctacaaaatatcatacacataatctaacatataatttaacctgcctagacatagaaccaggaaaatatgacacataacaaaaaagtaaacaatggattaagacattgaaatggcccacatgctggaattagaagataagaaatttaaaataagctattataagcatattcaaggatttaaggaatagatggtcgtaagagggaatatatggagaatctcaacagagaagtaaaaatgataaagggataataggacaaattttagaactgagagagagaatatcttatata

SEQ ID NO: 400409 - DNA, 603 bp, Homo sapiens
aaagaagaactgggaaatttgaatgacatgggagaaatctcacacaactgaaagtcacagaggagaatgtcacagagtaaaaatctaaaatcagcacttaaacttcattcagatatatgatggctgctacatttcacattcataaaagagactccatagaatccagcagaaaacaacagctaaattgctagtacagagcagagatttcaaccattgcatatagctcaggagtgaaagtttggtgtttgactacagaaaraagactaatgttagaaaagagtcactcttcaaaggaaaataaaagagcctatctctacaaaatatcatacacataatctaacatataatttaacctgcctagacatagaaccaggaaaatatgacacataacaaaaaagtaaacaatggattaagacattgaaatggcccacatgctggaattagaagataagaaatttaaaataagctattataagcatattcaaggatttaaggaatagatggtcgtaagagggaatatatggagaatctcaacagagaagtaaaaatgataaagggataataggacaaattttagaactgagagagagaatatcttatata

SEQ ID NO: 400410 - DNA, 603 bp, Homo sapiens
aaagaagaactgggaaatttgaatgacatgggagaaatctcacacaactgaaagtcacagaggagaatgtcacagagtaaaaatctaaaatcagcacttaaacttcattcagatatatgatggctgctacatttcacattcataaaagagactccatagaatccagcagaaaacaacagctaaattgctagtacagagcagagatttcaaccattgcatatagctcaggagtgaaagtttggtgtttgactacagaaagaagactaatgttagaaaagagtcactcttcaaaggaaaataaaagagcctatctctacaaaatatcatacacataatctaacatataatttaacctgcctagacatagaaccaggaaaatatgacacataacaaaaaagtaaacaatggattaagacattgaaatggcccacatgctggaattagaagataagaaatttaaaataagctattataagcatattcaaggatttaaggaatagatggtcrtaagagggaatatatggagaatctcaacagagaagtaaaaatgataaagggataataggacaaattttagaactgagagagagaatatcttatata

SEQ ID NO: 400411 - DNA, 603 bp, Homo sapiens
aaagaagaactgggaaatttgaatgacatgggagaaatctcacacaactgaaagtcacagaggagaatgtcacagagtaaaaatctaaaatcagcacttaaacttcattcagatatatgatggctgctacatttcacattcataaaagagactccatagaatccagcagaaaacaacagctaaattgctagtacagagcagagatttcaaccattgcatatagctcaggagtgaaagtttggtgtttgactacagaaagaagactaatgttagaaaagagtcactcttcaaaggaaaataaaagagcctatctctacaaaatatcatacacataatctaacatataatttaacctgcctagacatagaaccaggaaaatatgacacataacaaaaaagtaaacaatggattaagacattgaaatggcccacatgctggaattagaagataagaaatttaaaataagctattataagcatattcaaggatttaaggaatagatggtcgtaagagggaatatatggagaatctcaacagagaagtaaaaatgataaagrgataataggacaaattttagaactgagagagagaatatcttatata

SEQ ID NO: 400412 - DNA, 599 bp, Homo sapiens
aagaacagaggagcaaaaaatgatggaacaaatagaagataagagcaaaataggctgggcgcggtggctcagcctgtaatcccagcactttgggaggccgaggcgagtggatcacgaggtcaggagatcgagaccatcctggctaacacgatgaaaccccatctctactaaaaatgcaaaaattagccgggcatggtggtgggcacttttagtcccggctactccggatgctgaggcaggaaaatggcatgaatccgggaggcagagcttgcagtgagcgagatcccgccactgcactccagcctgggcgacagggccagactccatctcaaaaaaaaaagcaaaaatagtaggcttaactccaaccttatcaataattatttcaaatgtaatttaaatactccaaataaaacacagattgtccaactatataataaaagtacctataagagatgcatgccaaatattatggtatagataagttgagagttaaataatttccaagtatacyaaggaaacaacaagcacaagaaatcttatgtggctatattaatataagaaaaagtggacctccaaacaagcaatattacaacagaaag

SEQ ID NO: 400413 - DNA, 599 bp, Homo sapiens
aagaacagaggagcaaaaaatgatggaacaaatagaagataagagcaaaataggctgggcgcggtggctcagcctgtaatcccagcactttgggaggccgaggcgagtggatcacgaggtcaggagatcgagaccatcctggctaacacgatgaaaccccatctctactaaaaatgcaaaaattagccgggcatggtggtgggcacttttagtcccggctactccggatgctgaggcaggaaaatggcatgaatccgggaggcagagcttgcagtgagcgagatcccgccactgcactccagcctgggcgacagggccagactccatctcaaaaaaaaaagcaaaaatagtaggcttaactccaaccttatcaataattatttcaaatgtaatttaaatactccaaataaaacacagattgtccaactatataataaaagtacctataagagatgcatgccaaatattatggtatagataagttgagagttaaataatttccaagtataccaaggaaacaacaagcacaagaaatcttaygtggctatattaatataagaaaaagtggacctccaaacaagcaatattacaacagaaag

SEQ ID NO: 400414 - DNA, 587 bp, Homo sapiens
ccaaccttatcaataattatttcaaatgtaatttaaatactccaaataaaacacagattgtccaactatataataaaagtacctataagagatgcatgccaaatattatggtatagataagttgagagttaaataatttccaagtataccaaggaaacaacaagcacaagaaatcttatgtggctatattaatataagaaaaagtrgacctccaaacaagcaatattacaacagaaagctatttcataatgataaaatgtcaagtaattatgaagacataatgctgtgttgctgatagaataactaaagaaagttaaggtaaagtaattttgacaacaccctgacctaatcgatattgaccaagaaaatagaatatatgttctattatgctacacatgaaacatttatcaataggctatagaccacaaaatatctctcaagaagtttcaaaacactgtaatcatataaagtatgctttctgaccataatgaaaatgagttgaaatgggttaaaacaagctacccaggaaagtctacactattggaagatttaaatacaccttaaaatgccctttagctcaaggaaga

SEQ ID NO: 400415 - DNA, 587 bp, Homo sapiens
ccaaccttatcaataattatttcaaatgtaatttaaatactccaaataaaacacagattgtccaactatataataaaagtacctataagagatgcatgccaaatattatggtatagataagttgagagttaaataatttccaagtataccaaggaaacaacaagcacaagaaatcttatgtggctatattaatataagaaaaagtggacctccaaacaagcaatattacaacagaaagctatttcataatgataaaatgtcaagtaattatgaagacataatgctgtrttgctgatagaataactaaagaaagttaaggtaaagtaattttgacaacaccctgacctaatcgatattgaccaagaaaatagaatatatgttctattatgctacacatgaaacatttatcaataggctatagaccacaaaatatctctcaagaagtttcaaaacactgtaatcatataaagtatgctttctgaccataatgaaaatgagttgaaatgggttaaaacaagctacccaggaaagtctacactattggaagatttaaatacaccttaaaatgccctttagctcaaggaaga

SEQ ID NO: 400416 - DNA, 587 bp, Homo sapiens
ccaaccttatcaataattatttcaaatgtaatttaaatactccaaataaaacacagattgtccaactatataataaaagtacctataagagatgcatgccaaatattatggtatagataagttgagagttaaataatttccaagtataccaaggaaacaacaagcacaagaaatcttatgtggctatattaatataagaaaaagtggacctccaaacaagcaatattacaacagaaagctatttcataatgataaaatgtcaagtaattatgaagacataatgctgtgttgctgatagaataactaaagaaagttaaggtaaartaattttgacaacaccctgacctaatcgatattgaccaagaaaatagaatatatgttctattatgctacacatgaaacatttatcaataggctatagaccacaaaatatctctcaagaagtttcaaaacactgtaatcatataaagtatgctttctgaccataatgaaaatgagttgaaatgggttaaaacaagctacccaggaaagtctacactattggaagatttaaatacaccttaaaatgccctttagctcaaggaaga

SEQ ID NO: 400417 - DNA, 587 bp, Homo sapiens
ccaaccttatcaataattatttcaaatgtaatttaaatactccaaataaaacacagattgtccaactatataataaaagtacctataagagatgcatgccaaatattatggtatagataagttgagagttaaataatttccaagtataccaaggaaacaacaagcacaagaaatcttatgtggctatattaatataagaaaaagtggacctccaaacaagcaatattacaacagaaagctatttcataatgataaaatgtcaagtaattatgaagacataatgctgtgttgctgatagaataactaaagaaagttaaggtaaagtaattttgacaacaccctgacctaatcratattgaccaagaaaatagaatatatgttctattatgctacacatgaaacatttatcaataggctatagaccacaaaatatctctcaagaagtttcaaaacactgtaatcatataaagtatgctttctgaccataatgaaaatgagttgaaatgggttaaaacaagctacccaggaaagtctacactattggaagatttaaatacaccttaaaatgccctttagctcaaggaaga

SEQ ID NO: 400418 - DNA, 519 bp, Homo sapiens
gaattggtacattcataccattagcattcaaagtgattattgatatcattggattaatatctactatatttgttactgttttctattcattctcctcagtctycattcttttgtctaccactctttttctgccttttgcagttttcattgatgattttagatgactacattttccctgtctttcttagcatgtacttctctttttaaaactttttttttaactagttgccacagaatatgcaatatacatttacaaccaattcaagtccactttcaaataacactatcccactatcccacgaataagactacctgcttaacaaacaaaacacctaattcctcagtaacatttacaacaaattcaagtccactttcaaataacactatcccactatcccacaaataagactacctgcttaacaaagaacacacctaattcctcaatatacatttacaaccaattcaagtctactttcagataacactatcccacttcatgggtgactacctgcttaacaa

SEQ ID NO: 400419 - DNA, 519 bp, Homo sapiens
gaattggtacattcataccattagcattcaaagtgattattgatatcattggattaatatctactatatttgttactgttttctattcattctcctcagtctccattcttttgtctaccactctttttctgccttttgcagttttcattgatgattttagatgactmcattttccctgtctttcttagcatgtacttctctttttaaaactttttttttaactagttgccacagaatatgcaatatacatttacaaccaattcaagtccactttcaaataacactatcccactatcccacgaataagactacctgcttaacaaacaaaacacctaattcctcagtaacatttacaacaaattcaagtccactttcaaataacactatcccactatcccacaaataagactacctgcttaacaaagaacacacctaattcctcaatatacatttacaaccaattcaagtctactttcagataacactatcccacttcatgggtgactacctgcttaacaa

SEQ ID NO: 400420 - DNA, 519 bp, Homo sapiens
gaattggtacattcataccattagcattcaaagtgattattgatatcattggattaatatctactatatttgttactgttttctattcattctcctcagtctccattcttttgtctaccactctttttctgccttttgcagttttcattgatgattttagatgactacattttccctgtctttcttagcatgtacttctctttttaaaactttttttttaactagttgccacagaatwtgcaatatacatttacaaccaattcaagtccactttcaaataacactatcccactatcccacgaataagactacctgcttaacaaacaaaacacctaattcctcagtaacatttacaacaaattcaagtccactttcaaataacactatcccactatcccacaaataagactacctgcttaacaaagaacacacctaattcctcaatatacatttacaaccaattcaagtctactttcagataacactatcccacttcatgggtgactacctgcttaacaa

SEQ ID NO: 400421 - DNA, 466 bp, Homo sapiens
atcaattatgaataaatacatgtttttattgtaccacaattcctccctcccatccttccattccattccttgtattagtgttactcatttcamttgtgtataagcatacataatctatctgtgtgtatttgttattgtctatgaacttcttggtcagatcaattaagaataaatacatagatttttattgtaccaaaattctttaatgctctttttaaaaaaatgttgatccaggtttcagttatatatcttttgtttccctctaaagaatttcatttaacatttcttgcaagacaggtctcctggcaacaagtttcttgaatttttatttttctgaggaaggccttaattctccttcacttttgaagggtggtttcagtgggtacagaaacttaggttggtgggtttttttctgtcaacattttgaatttttcatttcactgtcttcttgctttcacagtttctg

SEQ ID NO: 400422 - DNA, 466 bp, Homo sapiens
atcaattatgaataaatacatgtttttattgtaccacaattcctccctcccatccttccattccattccttgtattagtgttactcatttcaattgtgtataagcatacataatctatctgtgtgtatttgttattgtctatgaacttcttggtcagatcaattaagaataaatacatagrtttttattgtaccaaaattctttaatgctctttttaaaaaaatgttgatccaggtttcagttatatatcttttgtttccctctaaagaatttcatttaacatttcttgcaagacaggtctcctggcaacaagtttcttgaatttttatttttctgaggaaggccttaattctccttcacttttgaagggtggtttcagtgggtacagaaacttaggttggtgggtttttttctgtcaacattttgaatttttcatttcactgtcttcttgctttcacagtttctg

SEQ ID NO: 400423 - DNA, 493 bp, Homo sapiens
tgtggcccacccctagcaaatggatcaaagtttatagtatgtttattttgtattagtcccatccttggctccattttatggctttacccttgcttttacattttttttctttctcacctgcttctaatttatgtcgtcctgctgaattttatgcatctttgtaaactgccttaaatccttttgtgaaacaaagaggtgtatacacaaacagataaataaatrcatattctatgtcattactagacaacatatcatagtttttggcttgggaaatagggtccacatagctgctgatctcctcctgggccactgtccttctacaagagcatccaaacagacaaactgtgagcaaagccaatagtccactctcccaggggtgagaagacaaaaagcaagccagtaactacacagtaagataggtggtgttgagcgatgtgatgaaaatacagtaaggaggagcaggcatggacaggccagccagggaggagctccc

SEQ ID NO: 400424 - DNA, 546 bp, Homo sapiens
tgatgtggagcatctttttatatgcttatttaccatctgttcatcttctttcatgaggtttctgttaaagatctttagtctattttttaattgggtggtttgttttcttattgttgatttttaatagttctttgcatattttgggtaagagtatgtcatcagatgtgtcttttgcaaattttyttattctgtgtcttgtcttctcatttccttgacattttctttcatacagcagaaatatctaatttcaataaagtgcagcttatcaattatttctttaaggttcatacctttggtgttgtacctaaaaattcatcaccatacccaaggttatgtaggttttctcctatgctatcttctaggagtattttagttttgcattttacttttaggtctaaggttcatttttagtttatttttgtgaaagctgtaggctctgtgtctagattcatttttttgtatatggatgtccagttgttccagaaccacttgctaaaaagactatctttgttccattgtattgcctttgctcctttgtcaaagatc

SEQ ID NO: 400425 - DNA, 546 bp, Homo sapiens
tgatgtggagcatctttttatatgcttatttaccatctgttcatcttctttcatgaggtttctgttaaagatctttagtctattttttaattgggtggtttgttttcttattgttgatttttaatagttctttgcatattttgggtaagagtatgtcatcagatgtgtcttttgcaaatttttttattctgtgtcttgtcttctcatttccttgacattttctttcatacagcagaartatctaatttcaataaagtgcagcttatcaattatttctttaaggttcatacctttggtgttgtacctaaaaattcatcaccatacccaaggttatgtaggttttctcctatgctatcttctaggagtattttagttttgcattttacttttaggtctaaggttcatttttagtttatttttgtgaaagctgtaggctctgtgtctagattcatttttttgtatatggatgtccagttgttccagaaccacttgctaaaaagactatctttgttccattgtattgcctttgctcctttgtcaaagatc

SEQ ID NO: 400426 - DNA, 546 bp, Homo sapiens
tgatgtggagcatctttttatatgcttatttaccatctgttcatcttctttcatgaggtttctgttaaagatctttagtctattttttaattgggtggtttgttttcttattgttgatttttaatagttctttgcatattttgggtaagagtatgtcatcagatgtgtcttttgcaaatttttttattctgtgtcttgtcttctcatttccttgacattttctttcatacagcagaaatatctaatttcaataaagtgcagcttatcaattatttctttaaggttcatacctttggtgttgtacctaaaaattcatcaccatacccaaggttatgtaggttttctcctatgctatcttctaggagtattttagttttgcattttacttttaggtctaaggttcatttttagtttatttttgtgaaagctgtaggctctgtgtctagattcatttttttgtatatggatgtccagttgttccagaaccayttgctaaaaagactatctttgttccattgtattgcctttgctcctttgtcaaagatc

SEQ ID NO: 400427 - DNA, 491 bp, Homo sapiens
gtcttctgcttcctaccggcctcactccctgctcccgagagctcttccatgtgctgttccccatgcctgaagtcctactttcccctggttaatgcccacccaccctccaggccccagctcacaggtggtgtccccaggaccccaaccaccactacagcaccccatagatgttggtccctcttatatgctgccayggctcactgtgcggtctcccacggttctctcatggttcataagcacacactgacatgcttatttgcttcatgtctgtctccgctatcagaatgtgagctctaatgaggacagggaccaggcctactgcacttaccatttcatctccagcaatgagtctggcatatagtaggtgttcaataaagatttcaggaatagacgaataagtgaatgggaaagatgggataatttttttaatcacgcagaagatcttcagcaccatgtaggctgaccaccctccaggcccccaccctacccct

SEQ ID NO: 400428 - DNA, 491 bp, Homo sapiens
gtcttctgcttcctaccggcctcactccctgctcccgagagctcttccatgtgctgttccccatgcctgaagtcctactttcccctggttaatgcccacccaccctccaggccccagctcacaggtggtgtccccaggaccccaaccaccactacagcaccccatagatgttggtccctcttatatgctgccatggctcactgtgcggtctcccacggttctctcatggttcataagcacacactgacatgcttatttgcttcatgtctgtctccsctatcagaatgtgagctctaatgaggacagggaccaggcctactgcacttaccatttcatctccagcaatgagtctggcatatagtaggtgttcaataaagatttcaggaatagacgaataagtgaatgggaaagatgggataatttttttaatcacgcagaagatcttcagcaccatgtaggctgaccaccctccaggcccccaccctacccct

SEQ ID NO: 400429 - DNA, 611 bp, Homo sapiens
tacatgaaaccatttgaaataatttctgaatgcctcctattcatcttaaggcaccttccttttatcatttttatcatttcaggccatgttaagacatttgaacttgatcctgcagcaaaagggtgacccttgaaatttgccctttagtagacagactttgttggtttagtgccctgaaaaggacagtctagcatcaatagaaagaatgggtagggtcggctgagaattgaggcaggagagttgccagaggtcattacggcagttcattgagagacaataaaatcctgaactagggcaatttgaggagatgcatccaagggagtaggggaaggtttgagagccatttctaagggagagtttatagggttagagggggacggttagagcagatgaggagttaagattgtatcttaagatttatagcttgggaaataaattaaatggtgattactccaaatatgtaatgcaggagaaatrgatatctgagcaaatgataatgaatttgagatacccgaaaagcactgacatagttggatatttgtccctatccaaatctcatgttgaaatgtcatcactaatgttggagatagagcctattgtgaggcgattgg

SEQ ID NO: 400430 - DNA, 611 bp, Homo sapiens
tacatgaaaccatttgaaataatttctgaatgcctcctattcatcttaaggcaccttccttttatcatttttatcatttcaggccatgttaagacatttgaacttgatcctgcagcaaaagggtgacccttgaaatttgccctttagtagacagactttgttggtttagtgccctgaaaaggacagtctagcatcaatagaaagaatgggtagggtcggctgagaattgaggcaggagagttgccagaggtcattacggcagttcattgagagacaataaaatcctgaactagggcaatttgaggagatgcatccaagggagtaggggaaggtttgagagccatttctaagggagagtttatagggttagagggggacggttagagcagatgaggagttaagattgtatcttaagatttatagcttgggaaataaattaaatggtgattactccaaatatgtaatgcaggagaaatggatatctgagcaaatgataatgaatttgagatacccgaaaagcactgacatagttggatatttgtccctayccaaatctcatgttgaaatgtcatcactaatgttggagatagagcctattgtgaggcgattgg

SEQ ID NO: 400431 - DNA, 564 bp, Homo sapiens
gatgtcatagtttttcaatagttttatgcttttattgtgatgtaaaataatgatgtattttacagttgatacatacgatacttcttgcaattacttggaaaaagctgtcactagtagcaaatattgacttagtgtttagtgcagaactatgtaraacaaaaatgactgacacagatctcattcaattcagagaattattttgccatgtttaaggataaagaaacacaagtcacagtaggctctgtggcctgtgctttttccaaagaaggttttgctgacttccatatttatagaggtgagaccagggaggagtggatggaggataaagaaatgggggaaagacagcgaggcaagtgttacatccaaattagcactcactgcatccagaggttgcatgtgtaaagaggaatggggtaaaagttaattgtgcatttgtcttgtgcgtggtagatctacattttacataagataggcaaacttgtgaaattacagctgactctttgggaacaaaaggaaggtagtattagcatgactcagtttccaacttttcctttggcacagtga

SEQ ID NO: 400432 - DNA, 564 bp, Homo sapiens
gatgtcatagtttttcaatagttttatgcttttattgtgatgtaaaataatgatgtattttacagttgatacatacgatacttcttgcaattacttggaaaaagctgtcactagtagcaaatattgacttagtgtttagtgcagaactatgtaaaacaaaaatgactgacacagatctcattcaattcagagaattattttgccatgtttaaggataaagaaacacaagtcacagtaggctctgtggcctgtgctttttccaaagaaggttttgctgacttccatatttatagaggtgagaccagggaggagtggatggaggataaagaaakgggggaaagacagcgaggcaagtgttacatccaaattagcactcactgcatccagaggttgcatgtgtaaagaggaatggggtaaaagttaattgtgcatttgtcttgtgcgtggtagatctacattttacataagataggcaaacttgtgaaattacagctgactctttgggaacaaaaggaaggtagtattagcatgactcagtttccaacttttcctttggcacagtga

SEQ ID NO: 400433 - DNA, 563 bp, Homo sapiens
ccaactaaatcatgatgtcatagagtcctgacagagggcatctatagtagaaatatgggtatctacatgtatagcttgggttatattgtgagaataatctggtgtgtgtgtgtgtgtgtgtgtctgtatgtgtgtaaaatggtcagccttaatgaatgcacaagtgccaccctgggctgcagtkaacatatctaaagccatatgatttaaagacatcatgagattggagataggattagtttgcttgtgcatgtcttttagggctgaggatatgtttctggagttatccaggaagtatacacagcatttagtcttaattatagtgcaaagccccaaatgtcagttgtacccagagctccagtggagatatgaggacaagttggttaactatacatacttaacaggctacaggaggagttgtaaatgttcatgaaggtggtcctcacccatgtgtattaacaaatatccatggaacacacaactcatttattttggggcagagacttaacttttcaatatattataattatgccctatatttcaaaagttcttctgaggacaaa

SEQ ID NO: 400434 - DNA, 563 bp, Homo sapiens
ccaactaaatcatgatgtcatagagtcctgacagagggcatctatagtagaaatatgggtatctacatgtatagcttgggttatattgtgagaataatctggtgtgtgtgtgtgtgtgtgtgtctgtatgtgtgtaaaatggtcagccttaatgaatgcacaagtgccaccctgggctgcagttaasatatctaaagccatatgatttaaagacatcatgagattggagataggattagtttgcttgtgcatgtcttttagggctgaggatatgtttctggagttatccaggaagtatacacagcatttagtcttaattatagtgcaaagccccaaatgtcagttgtacccagagctccagtggagatatgaggacaagttggttaactatacatacttaacaggctacaggaggagttgtaaatgttcatgaaggtggtcctcacccatgtgtattaacaaatatccatggaacacacaactcatttattttggggcagagacttaacttttcaatatattataattatgccctatatttcaaaagttcttctgaggacaaa

SEQ ID NO: 400435 - DNA, 563 bp, Homo sapiens
ccaactaaatcatgatgtcatagagtcctgacagagggcatctatagtagaaatatgggtatctacatgtatagcttgggttatattgtgagaataatctggtgtgtgtgtgtgtgtgtgtgtctgtatgtgtgtaaaatggtcagccttaatgaatgcacaagtgccaccctgggctgcagttaacatatctaaagccatatgatttaaagacatcatgagattggagataggattagtttgcttgtgcatgtcttttagggctgaggatatgtttctggagttatccaggaagtayacacagcatttagtcttaattatagtgcaaagccccaaatgtcagttgtacccagagctccagtggagatatgaggacaagttggttaactatacatacttaacaggctacaggaggagttgtaaatgttcatgaaggtggtcctcacccatgtgtattaacaaatatccatggaacacacaactcatttattttggggcagagacttaacttttcaatatattataattatgccctatatttcaaaagttcttctgaggacaaa

SEQ ID NO: 400436 - DNA, 560 bp, Homo sapiens
gtgaatgaataggttttaataacaaattcactctaacattaatctgtctctaagcctttgcataccttcctctgtggtaaaccaagatagatggcacaacttgctcatggtcggccatttttttatccttacttcagctgatcagctaaaaaaactattagaacctttcgtgactccccaaacgggaacattaatgggccatgttaattaattcaacttgatccaacrctattttccttccactatcccacaaccttgctgccatttaagatccatttccacagactttctgaaggttttagttgatacatatttttttaaaaaaaattcaagtaggtttttttttaaatgtagtgcacatcctcataagtaacaatttgtacctcatatttaagatcccactgaaacttgcacctagatatagttctattatagaaacagtgctgtcagtggtcagtcctaatgaaaatcaccattgtcttgcttggcaactgcctcaggtgagtccattatcatttccataggtaaataaatatttaatcctttcagacaggggatac

SEQ ID NO: 400437 - DNA, 609 bp, Homo sapiens
tccctgggtctgcaggaattgaacagttttaaattctggatatattaataaaacaaaatattcaccattaacaacattttaagcaaaaatgccataagtcttgtcttttcctaagagtgacaggactgagatgggtggatcacgaggtcaggagatcgagaccatcctggccaacatggtaaaaccccgtctctactaaaatacaaaaaaatagctgggcgtggtggtgcgcacctgtagtcccagctactcgggaggctgaggaaggggaattgcttgaacctgggaggcagagattgcagcgagccaagatcatgccactgcactccagcctgggcagcaragtgagactccgtctgaaaaaaaaagaatgagtgacaggaaaggaagcctatagatagataaacatttaaattatttaatattaagtcacagaataaattatatatgttagatgctggcaggattctgtgtcttctttagaggagctacatgtatcctggagtcaattctttgtaccttaacaccagaaagattagttaatagcacctgataagaactttttcagggtgttggaggtggtgatacacttcacagtgattaaagttt

SEQ ID NO: 400438 - DNA, 560 bp, Homo sapiens
gtgaatgaataggttttaataacaaattcactctaacattaatctgtctctaagcctttgcataccttcctctgtggtaaaccaagatagatggcacaacttgctcatggtcggccatttttttatccttacttcagctgatcagctaaaaaaactattagaacctttcgtgactccccaaacgggaacattaatgggccatgttaattaattcaacttgatccaacgctattttccttccactatcccacaaccttgctgccatttaagatccatttccacagactttctgaaggttttagttgatacatatttttttwaaaaaaattcaagtaggtttttttttaaatgtagtgcacatcctcataagtaacaatttgtacctcatatttaagatcccactgaaacttgcacctagatatagttctattatagaaacagtgctgtcagtggtcagtcctaatgaaaatcaccattgtcttgcttggcaactgcctcaggtgagtccattatcatttccataggtaaataaatatttaatcctttcagacaggggatac

SEQ ID NO: 400439 - DNA, 560 bp, Homo sapiens
gtgaatgaataggttttaataacaaattcactctaacattaatctgtctctaagcctttgcataccttcctctgtggtaaaccaagatagatggcacaacttgctcatggtcggccatttttttatccttacttcagctgatcagctaaaaaaactattagaacctttcgtgactccccaaacgggaacattaatgggccatgttaattaattcaacttgatccaacgctattttccttccactatcccacaaccttgctgccatttaagatccatttccacagactttctgaaggttttagttgatacatatttttttaaaaaaaattcaagtaggtttttttttaaatgtagtgcacatcctcataagtaacaatttgtacctcatatttaagatcccactgaaacttgcacctagatatagttctrttatagaaacagtgctgtcagtggtcagtcctaatgaaaatcaccattgtcttgcttggcaactgcctcaggtgagtccattatcatttccataggtaaataaatatttaatcctttcagacaggggatac

SEQ ID NO: 400440 - DNA, 560 bp, Homo sapiens
ttcctctgtggtcacataatcatcacgtatagagaaaattttatttttgtgttgtgcaataagacattctttttttttcaaatgcattcgtaattgttcctttcttcttcttcttcctcttcttcttcttcttactcttcttcttcttcctcttcctcctcctcctcctcctcctcctcctcctcttcytcctcctcttccccttcctcttctccttctcttttttgagatacggtcttactctatcacccacattggagtgcagtggcatgatcacagctcgcagcagtcttgacctcccaggttcaagcaatcttcttgcctctcgcacatgagtggctggcactgcagatgcatgccaccatgcctggctaatttttcactttttttgtagagacaggattttgccatgttgcctaggctggtctcaaactcctgagctcaagtgattttcctgcctcaacctctcggagtactgggattaccaacgtgagccactgcagctagcccataattgtttttcaaataaccatttcaattattgtaatctgttcacacat

SEQ ID NO: 400441 - DNA, 560 bp, Homo sapiens
ttcctctgtggtcacataatcatcacgtatagagaaaattttatttttgtgttgtgcaataagacattctttttttttcaaatgcattcgtaattgttcctttcttcttcttcttcctcttcttcttcttcttactcttcttcttcttcctcttcctcctcctcctcctcctcctcctcctcctcttcctcctcctcttccccttcctcttctccttctcttttttgagatacggtcttactctatcacccacattggagtgcagtggcatgatcacagctcgcagcagtcttgacctcccaggttcaagcaatcttcttgcctctsgcacatgagtggctggcactgcagatgcatgccaccatgcctggctaatttttcactttttttgtagagacaggattttgccatgttgcctaggctggtctcaaactcctgagctcaagtgattttcctgcctcaacctctcggagtactgggattaccaacgtgagccactgcagctagcccataattgtttttcaaataaccatttcaattattgtaatctgttcacacat

SEQ ID NO: 400442 - DNA, 560 bp, Homo sapiens
ttcctctgtggtcacataatcatcacgtatagagaaaattttatttttgtgttgtgcaataagacattctttttttttcaaatgcattcgtaattgttcctttcttcttcttcttcctcttcttcttcttcttactcttcttcttcttcctcttcctcctcctcctcctcctcctcctcctcctcttcctcctcctcttccccttcctcttctccttctcttttttgagatacggtcttactctatcacccacattggagtgcagtggcatgatcacagctcgcagcagtcttgacctcccaggttcaagcaatcttcttgcctctcscacatgagtggctggcactgcagatgcatgccaccatgcctggctaatttttcactttttttgtagagacaggattttgccatgttgcctaggctggtctcaaactcctgagctcaagtgattttcctgcctcaacctctcggagtactgggattaccaacgtgagccactgcagctagcccataattgtttttcaaataaccatttcaattattgtaatctgttcacacat

SEQ ID NO: 400443 - DNA, 560 bp, Homo sapiens
ttcctctgtggtcacataatcatcacgtatagagaaaattttatttttgtgttgtgcaataagacattctttttttttcaaatgcattcgtaattgttcctttcttcttcttcttcctcttcttcttcttcttactcttcttcttcttcctcttcctcctcctcctcctcctcctcctcctcctcttcctcctcctcttccccttcctcttctccttctcttttttgagatacggtcttactctatcacccacattggagtgcagtggcatgatcacagctcgcagcagtcttgacctcccaggttcaagcaatcttcttgcctctcgcacatgagtggctggcactgcagatgcatgccaccatgcctggctaatttttcactttttttgtagagacaggattttgccatgttgcctaggctsgtctcaaactcctgagctcaagtgattttcctgcctcaacctctcggagtactgggattaccaacgtgagccactgcagctagcccataattgtttttcaaataaccatttcaattattgtaatctgttcacacat

SEQ ID NO: 400444 - DNA, 558 bp, Homo sapiens
tataagcacactcacaataatttttccttccaagcaaagtgcacagctagatatactgactgatttatgtcgatagagaagatttatttccccactgtccttcagggatgtcccagaaagggcgatagtgctgcagctgtctactttcaggtggtgtctggatatcctgaagaaccatctgaacagtcttctcttactctgtcaactgattatagggaactcttcatgaggccataagtgcagattaggagagagaaggcaatgtggcaggagtggagattgtaggcagttgtatatttcttcatgtaacttgtgttttcaggacctgttctggaccaatcacatatgtaccatttccatttgttagagtgctaccatgcacactcaactttatggctaggtgggtcaggaaacacttcattcatgatgggcagctcaggatacatggaacttggtggctcaaaatcatgcattttattttattacaacccagtggtaggmcacaaactgaccctgaaaaagagggtatttatctgtggataagggcagtgccttgct

SEQ ID NO: 400445 - DNA, 549 bp, Homo sapiens
ggtggcgggtgcctgtagtcccagctactcgggaggctgaggcaggagaacggtgtgaacccaggaggcggagcttgcagtgagccgagatcatgccactgccctgcagcctgggggacagagcaatactgtgtctcaaaaaaaaaaaaaaaaggacaatcttagtaaatggaagtttgctcttttcatttcattataagaggagtttctataaggtaagtgacttgtcaaatcccatttttctcttcatttctatgcatacatatggtctgttatgatgtgtactgtgaagatcattcatgaccaaactgttcaggaaaaacaaaatcaccaagtggcaggccatgaaggagatggaagtagatttgtctaaggagagactcatctctaggtagcaagagggtcaatgagttctgagtgcccagggttaagataggaaakgtgatagacacaaaactgtgctaccgtgatgtccctggcacagagaacaaacacagtgctgagcaccgagctccgaaactctaccaccatagcatggaagttatgatt

SEQ ID NO: 400446 - DNA, 549 bp, Homo sapiens
ggtggcgggtgcctgtagtcccagctactcgggaggctgaggcaggagaacggtgtgaacccaggaggcggagcttgcagtgagccgagatcatgccactgccctgcagcctgggggacagagcaatactgtgtctcaaaaaaaaaaaaaaaaggacaatcttagtaaatggaagtttgctcttttcatttcattataagaggagtttctataaggtaagtgacttgtcaaatcccatttttctcttcatttctatgcatacatatggtctgttatgatgtgtactgtgaagatcattcatgaccaaactgttcaggaaaaacaaaatcaccaagtggcaggccatgaaggagatggaagtagatttgtctaaggagagactcatctctaggtagcaagagggtcaatgagttctgagtgcccagggttaagataggaaatgtgatagacacaaaactgtgctaccgtgatgtccctggcacagagaacaaacacagtgctgagcaccragctccgaaactctaccaccatagcatggaagttatgatt

SEQ ID NO: 400447 - DNA, 433 bp, Homo sapiens
ttcctttttatggttgaatagtagtccattatatatatatatataccgcagtttccttatccactcattgattgatgggcattggggttggattactgtaamcttttaaatactgtcagatgcccttatggcactttgcagaactgtgaccactacattcatatcaagacaaccactttctaggaaaactctgaattggaaaaatgttaagttcaggtgtgttggtcatgtgagacacagaggaggccactcaacagagcacatgagataatgtaagcggtgtatttcttacaggtgaggttcactgggcaccatcgtagggtctacctgacacatcaagtattctctaatctgcagatttctcagtcttcacttattttttgtgaacttgacttttttgaaaacacaggtcagatattatgtaggttttccc

SEQ ID NO: 400448 - DNA, 538 bp, Homo sapiens
taaaaactgtcaacaagggtagacagtcattattggcagaatgtctacaaattcctttaaaccttcaccgtaaacatgtgcctattctcttccaattatttcatgtgtattaatttattcacttaaacatgcatcttttatttatatcattatctaaatatggagatttattttacaatgcatatgtgctatttttttttttgagacagagcctttctgtgttgccaaggctggagtgcaatggtgcgatctcagctcattgcaacctctgccccctgggttcaagcgattctcgtgcctcaatctcctgagtggctgggattacaggcatgagacactacacctggctaagttttgtatttttagtasagactgagtttcaccatgttggccaggttggtctcaaactccatacctcagatgatccaccctcctcggcctcccaaagtgctgggattacaggcatgagccaccatgctcggctgctattttttttttaattgcacaaattgttccagtgttggctattggaaggttt

SEQ ID NO: 400449 - DNA, 343 bp, Homo sapiens
atgagttcctgatgagggcagggaggtgaatcctaagaacaatcatgtgagtttggaaggagacccttccccagctgagcctcagcctgagccatcacctacatctagaccgaagacccagagaaacygtgagtagtatgtgtgtggttttgagccactaaggtatgtggtaatttgttatgcaccaagtagtaagtaatatacctgacagtaattgtaaggtggtattctggattaggtcctggaatagataagtatatcattattagaaaacctggtaaaatatgaaggaagtttgtagatcagttaatagtcttgaaaaacagttaaattcttagttttc

SEQ ID NO: 400450 - DNA, 343 bp, Homo sapiens
atgagttcctgatgagggcagggaggtgaatcctaagaacaatcatgtgagtttggaaggagacccttccccagctgagcctcagcctgagccatcacctacatctagaccgaagacccagagaaactgtgagtagtatgtgtgtggttttgagccactaaggtatgtrgtaatttgttatgcaccaagtagtaagtaatatacctgacagtaattgtaaggtggtattctggattaggtcctggaatagataagtatatcattattagaaaacctggtaaaatatgaaggaagtttgtagatcagttaatagtcttgaaaaacagttaaattcttagttttc

SEQ ID NO: 400451 - DNA, 343 bp, Homo sapiens
atgagttcctgatgagggcagggaggtgaatcctaagaacaatcatgtgagtttggaaggagacccttccccagctgagcctcagcctgagccatcacctacatctagaccgaagacccagagaaactgtgagtagtatgtgtgtggttttgagccactaaggtatgtggtaatttgttatgcaccaagtagtaagtaatatacctgacagtaattgtwaggtggtattctggattaggtcctggaatagataagtatatcattattagaaaacctggtaaaatatgaaggaagtttgtagatcagttaatagtcttgaaaaacagttaaattcttagttttc

SEQ ID NO: 400452 - DNA, 343 bp, Homo sapiens
atgagttcctgatgagggcagggaggtgaatcctaagaacaatcatgtgagtttggaaggagacccttccccagctgagcctcagcctgagccatcacctacatctagaccgaagacccagagaaactgtgagtagtatgtgtgtggttttgagccactaaggtatgtggtaatttgttatgcaccaagtagtaagtaatatacctgacagtaattgtaaggtggtattctggattaggtcctggaatagataagtatatsattattagaaaacctggtaaaatatgaaggaagtttgtagatcagttaatagtcttgaaaaacagttaaattcttagttttc

SEQ ID NO: 400453 - DNA, 585 bp, Homo sapiens
tgttccatcccatgtaatcataggagtgacaaaagacaagagaaatatccacatatatatgtcttgaaaatagctttttttccaataattataatataatgatgttattattatacaatgtatttccacatgataaaagtattagtttcattgttggtggttttgttctttcattctgatacagaaaataatgacatgttacaactgatgcaattgatacatctcacaatttactagaatattgatttctcggggytagtgtaggcttagtaatatactgcatggtttatatgttaccatttcatacaatccacctgccatctcagaaagtaaggactattcctgctcctctggtccatttctaagtctgagctaaatctccacaggagaggcctaacagaaccttgagtttgattctatatgccctagagtctttgctgacatcaactacatagaatatgttttgtcttatatgttaaatgcttttcaggtctagtttcagacagcttagcctacctcatggtcttgaagttattttcctgaattgtgttctgtatactctactacatatttttgtatttatgt

SEQ ID NO: 400454 - DNA, 585 bp, Homo sapiens
tgttccatcccatgtaatcataggagtgacaaaagacaagagaaatatccacatatatatgtcttgaaaatagctttttttccaataattataatataatgatgttattattatacaatgtatttccacatgataaaagtattagtttcattgttggtggttttgttctttcattctgatacagaaaataatgacatgttacaactgatgcaattgatacatctcacaatttactagaatattgatttctcggggttagtgtaggcttagtaatatactgcatggtttatatgttaccatttcatacaatccacctgccatctcagaaagtaaggactattccygctcctctggtccatttctaagtctgagctaaatctccacaggagaggcctaacagaaccttgagtttgattctatatgccctagagtctttgctgacatcaactacatagaatatgttttgtcttatatgttaaatgcttttcaggtctagtttcagacagcttagcctacctcatggtcttgaagttattttcctgaattgtgttctgtatactctactacatatttttgtatttatgt

SEQ ID NO: 400455 - DNA, 585 bp, Homo sapiens
tgttccatcccatgtaatcataggagtgacaaaagacaagagaaatatccacatatatatgtcttgaaaatagctttttttccaataattataatataatgatgttattattatacaatgtatttccacatgataaaagtattagtttcattgttggtggttttgttctttcattctgatacagaaaataatgacatgttacaactgatgcaattgatacatctcacaatttactagaatattgatttctcggggttagtgtaggcttagtaatatactgcatggtttatatgttaccatttcatacaatccacctgccatctcagaaagtaaggactattcctgctcctctggtccatttctaagtctgagctaaatctccacaggagaggcctaacrgaaccttgagtttgattctatatgccctagagtctttgctgacatcaactacatagaatatgttttgtcttatatgttaaatgcttttcaggtctagtttcagacagcttagcctacctcatggtcttgaagttattttcctgaattgtgttctgtatactctactacatatttttgtatttatgt

SEQ ID NO: 400456 - DNA, 596 bp, Homo sapiens
ccacttgtcacttacaatattaaataacaagcaagagggtggtaaaaagaaagtgactttatttcacagcttagcaatggagaagaaccaggttcatatctaaaggagccgcttcagttttccgggaagaaagcagggttttaagaagagaaactttcttgtgcagggtatgcagaaggaacatggaggtgtggggtctatgtgacttgctgtaaaacttagctaaggggtcatctgttagtctgaccagtgtcattgaggaaagagtcagaatgtggattaactattgtcttgagacagtstccttgtgagggagaattctggatgttgcctgctttggttcaacatttggtccttagaatttctaaggaaacatatacttagataagctggcaatacttgcaggttgtttcactggtggaaacgaaggaaagaaaaggttacatttgcatttctgaggagctaagcaagaggtgaacactgagaaaaagaaaaaatgcaaaggtaatttttaggaaaatagtatactgggttacaacttaacttaatttcactgtgtctaaagagcaaccctatacttcatgcaaactacatag

SEQ ID NO: 400457 - DNA, 596 bp, Homo sapiens
ccacttgtcacttacaatattaaataacaagcaagagggtggtaaaaagaaagtgactttatttcacagcttagcaatggagaagaaccaggttcatatctaaaggagccgcttcagttttccgggaagaaagcagggttttaagaagagaaactttcttgtgcagggtatgcagaaggaacatggaggtgtggggtctatgtgacttgctgtaaaacttagctaaggggtcatctgttagtctgaccagtgtcattgaggaaagagtcagaatgtggattaactattgtcttgagacagtgtccttgtgagggagaattctggatgttgcctgctttggttcaacatttggtccttagaatttctaaggaaacatatacttagataagctggcaatacttgcaggttgtttcactggtggaaacgaaggaargaaaaggttacatttgcatttctgaggagctaagcaagaggtgaacactgagaaaaagaaaaaatgcaaaggtaatttttaggaaaatagtatactgggttacaacttaacttaatttcactgtgtctaaagagcaaccctatacttcatgcaaactacatag

SEQ ID NO: 400458 - DNA, 515 bp, Homo sapiens
ccactctatgtccaggcaaataactgtgtagaagctaatgaatggatagacgtactctgcagggtgagccgatgcaatcaaaacaggctcagtttttatcatccctctgtgtatctraacggaaattggctctgctgtcaggagactggtgaaaacactctcggctgcaagccatgtactgcgtaagtttctttctgattataaaagcagtgtgtcaaaatttgatatatccatgcaatgttaatattatttgtccatgaaaaggaatgacatactgatccatgcaacaacaaggatgggaccttgaaaaattatgctaagtgaaagaagtcaatcataaaggccacgtattatctgataacattgatataaagtgtctagaataggtaaattcatagaaacacaaagtagattagtggttacaagggataagaagggaggaatggggagtgctattggatgcagagattcttttaggagtgaagaaaatgttccaaaattaatagtggttgcac

SEQ ID NO: 400459 - DNA, 607 bp, Homo sapiens
agttattttgtattctgtctaatagtttcaataatctgaattatttggggctgatattgtgatctcttgcttctactggctcttactcatggtgacaccaatttgtgtgttttgtgatttcctttttactgttaactcatatttcctgggataatggttgtggcaatttcctgagctctggtttgaagagaacttcctcttcagggcttgaatttgtgtctgccattcactctgggtgctaccatcccagggttatattaaattaaattattgacctgtgatttctttgaaccatccagatggttaattaacacagggtgcaaaactgtattagagctagtttgtgagttctcaggagatacattttttcctcatatttatcagtctgagataggcaattttccctagggtcctttgggaaaaaaagagagttaggtatttatttctagttatccttactctaagagaaaaarcctatggcccactttgtatttggggccataacttcatgtagcattttctactggactccttgtctccagtgtctatgactttatctcctattccctggactccacgatccatgaaaaccaactactgtttgagt

SEQ ID NO: 400460 - DNA, 596 bp, Homo sapiens
ataggaggtactaacaagaagaggcaacgtattttctaagctatcayagtcagcagtgtctacttggggttatgtttattcttgaaagttatacttaaggcctccacaggctctgcgcctcagcccctcctaaatgtaataactttgcacatatggaagatcctagtaggccaaatcccttctgtttgaaaatatttttccaatcagaaggacaaaaacagtatcacagatatatgttaaataaacagctcttttcttttatatattcttgttcacaactaacataatatttttttctgccttgtaggtaccagaggtttgaaaaggcatttctcctagctgttgacgttggtgctcgtgacctctttatggtgagtcattttcagagatgattttgtgccttcagttctaaggctaagttgtcagcttttgtgaccataaaaaggattactgtcattttgcagccttagacacagggtgggaaagcattattccatcttgacttgcaggtttgctttcgtgaaactggtcaataaccatctaatatcttttgatttgttgacattttgtttgctggctccaatggatcttttgtg

SEQ ID NO: 400461 - DNA, 596 bp, Homo sapiens
ataggaggtactaacaagaagaggcaacgtattttctaagctatcatagtcagcagtgtctacttggggttatgtttattcttgaaagttatacttaaggcctccacaggctctgcgcctcagcccctcctaaatgtaataactttgcacatatggaagatcctagtaggccaaatcccttctgtttgaaaatatttttccaatcagaaggacaaaaacagtatcacagawatatgttaaataaacagctcttttcttttatatattcttgttcacaactaacataatatttttttctgccttgtaggtaccagaggtttgaaaaggcatttctcctagctgttgacgttggtgctcgtgacctctttatggtgagtcattttcagagatgattttgtgccttcagttctaaggctaagttgtcagcttttgtgaccataaaaaggattactgtcattttgcagccttagacacagggtgggaaagcattattccatcttgacttgcaggtttgctttcgtgaaactggtcaataaccatctaatatcttttgatttgttgacattttgtttgctggctccaatggatcttttgtg

SEQ ID NO: 400462 - DNA, 596 bp, Homo sapiens
ataggaggtactaacaagaagaggcaacgtattttctaagctatcatagtcagcagtgtctacttggggttatgtttattcttgaaagttatacttaaggcctccacaggctctgcgcctcagcccctcctaaatgtaataactttgcacatatggaagatcctagtaggccaaatcccttctgtttgaaaatatttttccaatcagaaggacaaaaacagtatcacagatatatgttaaataaacagctcttttcttttatatattcttgttcacaactaacataatatttttttctgccttgtaggtaccagaggtttgaaaaggcatttctcctagctgttgacgttggtgctcgtgacctctttatggtgagtcattttcagagatgattttgtgccttcagttctaaggctaagttgtcagcttytgtgaccataaaaaggattactgtcattttgcagccttagacacagggtgggaaagcattattccatcttgacttgcaggtttgctttcgtgaaactggtcaataaccatctaatatcttttgatttgttgacattttgtttgctggctccaatggatcttttgtg

SEQ ID NO: 400463 - DNA, 595 bp, Homo sapiens
aaagcaggcatagtcaataaatacagaaataagtttggctgtgttccaataaaagttcatatatggacactgaaatttgatgtcacataaaattgttcctgtgatttttttttttccaaaaaccattcttagcttgggttagacttggatggcaggtcacagtttgctgattccttgtttagagtatgatcacttaaggctgcattgtagawaataaactgaaacgagacaaggctcctaggtacaagtgtgaagtaaacaaagaggtgggttctttcaggcccatttcctcaggtccagcaacctcatagtaattttcttatatttaaggcctgttgattcaactccaagctctctcagttattagctgcataattttgtataatttacctaactttgcttgctttcattttattacctgtggtgatgataatgcataaatccctagtgtgctttaagtatcaaatgaattaataatatatatgaagtgcctggcatattgtaatgacttaagaactacagttctagtatatattttatattactcacttttcaaatatttaggtagtacttcactttacattgtttatacatt

SEQ ID NO: 400464 - DNA, 587 bp, Homo sapiens
agtttcctttttttgttgtctctctgccagattttgtatcaggatgatgctgggcctcatagaatgagttagggagtccttccttctcatttttttggaatagtttcagtaggaatggtaccagctcttctttatacacgtggtagaatttggctgtgaattgtctgstcctaagctttttctgatggtaggctttttattagtgattcagttttggagcttgttattggtctgttcagggattcagtttcttcctgattcaatcttgacagggtgtacgttcccagaaatttattcatatcttctaggttttctagcttgagtgcatagaggtgttcctaatatcctctgagggtttttttttgtatttctgtgccacagttttttaatcctttcacatattgatggacgtttggtttgtttccagattttcgctaacagattaaaaatgctatgtactttcatctacaagtctttgtatgaacatatattttcatttctcttgtcaaaaacctacaagtttaaaatggctgggcatatgctaagtgtttgttcaactttagaagaaactgttttctaaaatgatt

SEQ ID NO: 400465 - DNA, 587 bp, Homo sapiens
agtttcctttttttgttgtctctctgccagattttgtatcaggatgatgctgggcctcatagaatgagttagggagtccttccttctcatttttttggaatagtttcagtaggaatggtaccagctcttctttatacacgtggtagaatttggctgtgaattgtctgctcctaagctttttctgatggtaggctttttattagtgattcagttttggagcttgttattggtctgttcagggattcagtttcttcctgattcaatcttgacagggtgtacgttcccagaaatttattcatatcttctaggttttctagcttgagtgcatagaggtgttcctaatatcctctgagggtttttttttgtatttctgtgccacagttttttaatcctttcacatattgatggacgtttggtttgtttccagattttcgctaacagattaaaaatgctatgtactttcatctacaagtctttgtatgaacatatatwttcatttctcttgtcaaaaacctacaagtttaaaatggctgggcatatgctaagtgtttgttcaactttagaagaaactgttttctaaaatgatt

SEQ ID NO: 400466 - DNA, 476 bp, Homo sapiens
attgcccaggcaaatgttgaggagtttttccctcctcctcaagtttcaagtcttgtgcttaacatactatcttttatccattttgagttgatttttatatgtggtttgatgtaagggtccaattttattattctgcacatgaatatccagttttcccaacaccatttattaaataaattggaaaggacaataaattgttctttcccattgcatgttcttggctgctttgttgaaaatcaactgaccataaatacttggatttgtatctgggctttctatcttgtaccattcttcartgtgtctgtttttatgccagtactatgctgcttttgtttcaatagctttataatatgttttgaagttattgtgttgcctccagctttgttccttttgtgcaagattgttggctctctagggtattatctggttccatattgattttaggactgttttttctattttgctaaaaaaaaatg

SEQ ID NO: 400467 - DNA, 616 bp, Homo sapiens
atttcatgattttattggtttgattgtggttatgtaagtgaatgtcctaatttgtggaaaagaaacgctgaggtattcaagaatatgttggcaacttactctgaaatggttcagaaaaaaagtgatctttgtactgtacttgaaacttttctgtatctttgagattacttaaaaaatataaattttcacttactatcacagatctagactctactattacatgcattctctcaatagatgctgtgtggtttggaagtcratttggccacagaaatgctgcttttaattctttgtctttaggacattattctgcttttgaaaattcaggtaacctctccaaactcattattactgtgccataaaagctactcattttactttactcattgtggcataaaagccacccaagattgcatctctggcttcatgttggatggcatgaggatgagtatgccttctgaacattctcatgttggcatccctaattaccttggccattggcgcaggtccagttggaatgtcaactgtgccatctgataatgctataaaaagacctatagctgctgctctccagccatctgtgccttcccttggcatgatactgttgggtagtttg

SEQ ID NO: 400468 - DNA, 526 bp, Homo sapiens
aagagtactgtacccagaaaagctgcttttcaaaaatgaaggaaaaataaataaaatgtttcccagataagcaaaaactgagggaattcatcaccactagactggtcctacaagaaatatttaaggaagtcctagatctggaagcaaaaggatgatatctaccaccatgaaaacacataaagtataaaactcactggtagagcagacacacaataagagaaaggagtcaaatgttactactacagaawcccagcaaactacaataataaacagtaagagaggaagaaaagaataaagaatatacaaaacaaacttaaaacatgtaaaaaaaaaaaaccagaaataagtcctcatctaacaataaaaccttgaatgtaaatggattaaattccccatttaaaagatacagacagcttgaatgtattaaaaagacatgacccaactatatgcttcctataagacactgacttcacctgtaaaggtacaataaacaaagtaaagggatagaaaaatatgtgttgcacaa

SEQ ID NO: 400469 - DNA, 526 bp, Homo sapiens
aagagtactgtacccagaaaagctgcttttcaaaaatgaaggaaaaataaataaaatgtttcccagataagcaaaaactgagggaattcatcaccactagactggtcctacaagaaatatttaaggaagtcctagatctggaagcaaaaggatgatatctaccaccatgaaaacacataaagtataaaactcactggtagagcagacacacaataagagaaaggagtcaaatgttactactacagaatcccarcaaactacaataataaacagtaagagaggaagaaaagaataaagaatatacaaaacaaacttaaaacatgtaaaaaaaaaaaaccagaaataagtcctcatctaacaataaaaccttgaatgtaaatggattaaattccccatttaaaagatacagacagcttgaatgtattaaaaagacatgacccaactatatgcttcctataagacactgacttcacctgtaaaggtacaataaacaaagtaaagggatagaaaaatatgtgttgcacaa

SEQ ID NO: 400470 - DNA, 533 bp, Homo sapiens
ttcagctagtgccaattcacctttatctagtgcaaggtaatgaatatcctgaggaaataaagcaaaataaaagattgattcaaaatgaaccttgcccaagttacaaggaggattttgaaggaaacttattgtccagattacaaaatagaaacagtttgtaaatattcttttctgtgttttaagtttcttagttttctagtataagcaaatttttctgaattggagatcacagctataactaaaggcaagtatttaaataaattattttaagctgtgagggmaaatacaagtttttaataaagtgtttgacaaagttttgtcagggaataaaaatgttaattgctatttttctttggtaagacattaatatccaagagtgtgtcttcaaattttaattgtatattatgctaagcacgatacaagggatactaaacagatttgttgctgcatatggcatatatttgttattattaatattactagtattttgaactcaaataattagtactgactaattgctgggcactgttttg

SEQ ID NO: 400471 - DNA, 526 bp, Homo sapiens
tttggaaacatactatgcagtccatttatttgctgattcacttgtggacctcctcattattcatatatttgaatgtggacttaagcaaaatgcattcaagagtatatctctataattccatgcccctgaggtctgacagagttaattaagctttaggatctggtgaaagacatatctagtatctatatcacctctcaagtggctatcttctgacttcrtttaataatttttgatagatttagcctaggaatttagtttaaatgtttgatttacacaattaaatgctatgatatgaatgtcccaccaaaacacatgttgaaacttaattgccaatgcaatggtattggaaggtggggcccttaagagaggattaggtcataaagtctctgccatcatgaacaaattaatgctgttatcacaggagtgggttagttatcaaaaaaatgggtttgttgtaaaagtgaatttggcccaatttcctttctctgtctcatgtgtttactctgccgtctacccttcaccatgg

SEQ ID NO: 400472 - DNA, 526 bp, Homo sapiens
tttggaaacatactatgcagtccatttatttgctgattcacttgtggacctcctcattattcatatatttgaatgtggacttaagcaaaatgcattcaagagtatatctctataattccatgcccctgaggtctgacagagttaattaagctttaggatctggtgaaagacatatctagtatctatatcacctctcaagtggctatcttctgacttcgtttaataatttttgatagatttagcctaggaatttagtttaaatgtttgatttacacaattaaatgctatgatatgaatgtcccaccaaaacacatgttgaaacttaattgccaatgcaatggtattggaaggtggggcccttaagagaggattaggtcatraagtctctgccatcatgaacaaattaatgctgttatcacaggagtgggttagttatcaaaaaaatgggtttgttgtaaaagtgaatttggcccaatttcctttctctgtctcatgtgtttactctgccgtctacccttcaccatgg

SEQ ID NO: 400473 - DNA, 501 bp, Homo sapiens
ctaatacctgataggtagtttttcaaccaatgacctgtcctttcctctcccatctagtagtccacagtgtctgtcgttcccatattaatgtccatgtatgctcaatgtttagctctcatttataaatgagaatatgtggcacttggtttttgttcctgttaattcacttaggattatggccttcagctgcatccacactgctacaaagaacatgatttctttatttacagatgcatagtattccatggtatacakgtaccacattttctttatcaaattcaccattgataggcacatgagtggattccatgtcattgctgttgtgaatagtgcggtgatgaacacaggagtgcatgtgtctttttggtagaatgatttatattcctttgggtatatacccagtaatgggattgctggattaaagggtgactctattttcagttctttgagaagtctccagactgctttccacagtggctggactaatttacactcccaaca

SEQ ID NO: 400474 - DNA, 596 bp, Homo sapiens
aaagtgggaggttagacattggaacatacccctaggaaagaggctgaatccaagggactgagcaaaaacagcctgcaagtcccacttccacagcacctcaaaagataagacccactggcttggaattccagccagcccctggtagtagcattgcacctccctgagaaggcgctcctggtgggaggggcaggccacaatctttgctatttgggtgccttagctgctccagtcaggctttggagagtccaagctgaccagggrtggaaaggatccccagcacagcacagctgctctaccaaaacgtggccagggtgcttttttaagcagtttcccaatcctgttcctcctcacttggcaggacctcccaactagggtctccatccacctcctacaggtgtctttgggctggcaacagcaccgtatgtccctgggatgaagctcccagagggaaaggcaggctgccatctttgttgttttgcagccttccctggtgatacctccaggtactggaaaatccgaagtgacaagggacgggagcaggcccccagaatactgcagcagccctatagaaaagtggccaaactgttatatgtggt

SEQ ID NO: 400475 - DNA, 566 bp, Homo sapiens
tggcagtcttgctccaaaactcacactctttaccatagtgttgctctactgtcattggaaaagaattaagtatttgccccaggcttatagatccttctttagatctggttctttggttttcagaattcaagattagaaatgccatgttgtagtcatggaaaaagaatgatcaagtagctcccatgttgggctgtttttgtgggggggtcattgggtgttgaagaaataacttctgagagggggaaattgccccccccgcccccgactggatattcatctgagctttattgagtcccagctatggccctgacttttgattgtggccctccctaatgccagccccctctttgacttatatgttagggacctaaacttctgtcattttggaccttgcaagttttaaaattagtatcattcaaaagttatcatcagctagatgtcagctataactacatttacttttatrgggtattttcaaaatcccctaatgcttgatgtcctgtggtaggactaaaaagtttagaaaaactaatgacattagtctttctcaccttaagaaactcagt

SEQ ID NO: 400476 - DNA, 605 bp, Homo sapiens
ttattcttttgcaacttaaggaaacaaaagctcagactagataaataacttatctaaattaagatacactgatgcaggatcagaatctagttttttgacttcattatgatgctggagcacttcccaatataaggggtgtgtgtgtgtgtgtgtgtgtgttttaattgaaaacagttgaaagttcaaagtgtgtgtgtgtgttttaactgaaaacagttgaaagttcaaagtactgcctatcttgaagatggcggagtagcatcgcaaagagattagtattgagtctctgggccgactttggttgcagtctctgcagcagcagtgatcacttagtgaagagtgcttagggtagttggccaggatcctgaatatcaaaatcttcagcggcagctcccaccagggcttatctcaraaaactgccgatcgcctgggcctggagctcggcaaggcagtgattgagaaattcagcaactaggagacctgtgtggaaattggcaaaagtgtacgtggaaaggatgtctacatcattcagagtggttgtggcaaaatcaatgacaatttaatggtgcctttgatcatgactaatacctgcaagactgcttcag

SEQ ID NO: 400477 - DNA, 570 bp, Homo sapiens
  misc_feature (1)...(570): n = A,T,C or G
cagaaattcagcttaaactaggatagcaagatatgacacatatttagtcctgctaggacctccacatagagccaaaagaacgctagtgactaactacatacagttrtatgtcccttaaccatggggatacattctaaaaaatgcattgttaggtgatttcatcgttgtgtgaacatcatcggatgtccttacataaacctagatggtctagcctactacacacctaggcaatatgatatagcctattgctcataggctataaatttgtgcagcatgtaactgtactaaatatcataaggaaatagtaacacaatggtaagtatttgtgncataggaatttatcagctccgttttatctatgggacactgtcatatatacagtccatcatcgactgaaatgtcattatgtggccatgactgtatttctaaggatgtagtactgctcttcattcctggaatggacctaagaagcagctgaaattattagccaaaatgctatcattagaacagttaaatactaattctcacacaacctgaagcaaatgttttaacagttatgttaatattagg

SEQ ID NO: 400478 - DNA, 541 bp, Homo sapiens
gcctttttcagtagatacaatctgaaaagtaagagagaaaagatactagaacatttctagagttacactcagttattaataattggtgcaactcatcatcatattatgtgactaaagtatctcagagttcaaggwaaatcaggtttataggcttctgtttgactttgtcaggttccaaaagcaggattgtacttagtaaacatatggcttcatcctttaggttatatggtataattgtattaaaagataacatcattcttttattctgactctctcttggtgcatcagtctcccttgttttataactgatatatttcttcctttaccctcagctattatctctctttttcacaatttgtcattgattttaactccacgttttccaaatttggaaaggatgttatggtaagtcactaagctggttcaaaatgctggcagcaataccagtctatccaaagtttcttctacaatatattcccattcatgtagagtcatgttatataggcataaaactagtggtctatcccaaccaccaggcaat

SEQ ID NO: 400479 - DNA, 541 bp, Homo sapiens
gcctttttcagtagatacaatctgaaaagtaagagagaaaagatactagaacatttctagagttacactcagttattaataattggtgcaactcatcatcatattatgtgactaaagtatctcagagttcaaggtaaatcaggtttataggcttctgtttgactttgtcaggttccaaaagcaggattgtacttagtaaacatatggcttcatcctttargttatatggtataattgtattaaaagataacatcattcttttattctgactctctcttggtgcatcagtctcccttgttttataactgatatatttcttcctttaccctcagctattatctctctttttcacaatttgtcattgattttaactccacgttttccaaatttggaaaggatgttatggtaagtcactaagctggttcaaaatgctggcagcaataccagtctatccaaagtttcttctacaatatattcccattcatgtagagtcatgttatataggcataaaactagtggtctatcccaaccaccaggcaat

SEQ ID NO: 400480 - DNA, 650 bp, Homo sapiens
acatatacatctgtatatatttatatatgtgtgcacacacatctatacatatatatttttttacgaaaggagagatttattagtaagaaactggttcatgattgtgaacactggcaagttcaaaatctgtcagggagggcagcaggatggaggcccagggaagagattcagtttgtgcttgaacggaaggtcatctgctggcagaatcccctcttcctaggggaaggtcagtctttttttaaaataaagtattcagtgaattggatgaagcccacccacattatggagctcaatctgctttactcactgtctactgatttgaatgacaatctcatccaaaaaaatattttcacagaaayatatagaataatgtttgacaaaatatctgctactatggtgagaagacttgtgtttcccctaaatttataggtcaaaaccttaacctccaaggtgatgatattagaaggtatggtctttggggaggtgattaggttatgaagatagagccctcaatagtgggattagtgcctttataaaataagcccaggggagctcattttctccttctgctatgtgatgacacagggaaaaggcactctctatgaatcaggaaatgatcctccaccaggcactgagtctgctggtgtgtt

SEQ ID NO: 400481 - DNA, 606 bp, Homo sapiens
ctttcattcttaaaaatgtgttcagtctcttttcctggccattcttcctctggacatgcatatttccaccagttccctccataatttcaacttctctaaatasttggatagcataatcttgtcttatggttttgagcaccaatatatactgatgactcctccaagtatatcttcagcaatcatttatttctgaacctcagtgttaaaaaccgaaataatccctttacatatgctacttgaatgtcaaatagacacctcaaagaatatctgtcctaagctgaattttttctttcttcccccaaaccatgatcttaccctaatgtttttcaactcaatcaataatactcccatttacagagttactcagggcaaaagtctttagagtgatcttcagtttttttctcacactgcactgccacttaaacagcaaatgctttagactatactttcaaaataaacccagaattcaaccaccttttattacctctgtcttatcagcctagtttaagccatcatatcctctcatccagaccatttcagtagttcaagcgtgtcgaacctgtggcccgcgggtgcatgcagcccaggatggctttaaatgcggcc

SEQ ID NO: 400482 - DNA, 540 bp, Homo sapiens
ttatggatgttaatgtcagtcatcatagaaataattagcgatttggggagctacctagcatttgaattcctgtaccatattgagaaattaactcactttatgggtcttagtggaagatagaracactagagaagctgagatccccaggtatttatttatcttccctcacttgcaatggaataaatacacacaacctaagataaacctaacccagaaatttgaaatcaatataaagcattactcaaggcttgggtgacagattctgtggattaaaaacacaggttttggatccacttactagctgtgcaccatgaacaagttaatttactgatcagcacttcaatttcttcagtgtaaaatgggaagaataaccaattcaatggcaattgtaaagctcatatgagttaatatatgtcaagaacttagaacaatatcaaacacagaaataatgctatataaaagttattaatatattagtattcaaattattacctggctcactggagtgaagtatctgttgaagctaagtggttgatgtgt

SEQ ID NO: 400483 - DNA, 540 bp, Homo sapiens
ttatggatgttaatgtcagtcatcatagaaataattagcgatttggggagctacctagcatttgaattcctgtaccatattgagaaattaactcactttatgggtcttagtggaagatagaaacactagagaagctgagatccccaggtatttatttatcttccctcacttgcaatggrataaatacacacaacctaagataaacctaacccagaaatttgaaatcaatataaagcattactcaaggcttgggtgacagattctgtggattaaaaacacaggttttggatccacttactagctgtgcaccatgaacaagttaatttactgatcagcacttcaatttcttcagtgtaaaatgggaagaataaccaattcaatggcaattgtaaagctcatatgagttaatatatgtcaagaacttagaacaatatcaaacacagaaataatgctatataaaagttattaatatattagtattcaaattattacctggctcactggagtgaagtatctgttgaagctaagtggttgatgtgt

SEQ ID NO: 400484 - DNA, 540 bp, Homo sapiens
ttatggatgttaatgtcagtcatcatagaaataattagcgatttggggagctacctagcatttgaattcctgtaccatattgagaaattaactcactttatgggtcttagtggaagatagaaacactagagaagctgagatccccaggtatttatttatcttccctcacttgcaatggaataaatacacacaacctaagataaacctaacccagaaatttgaaatcaatataaagcattactcaaggcttgggtgacagattctgtggattaaaaacacaggttttggatccacttactagctgtgcaccatgaacaagttaatttactgatcagcacttcaatttcttcagtgtaaaatgggaagaataaccaattcaatggcaattgtaaagctcatatgagttaatatatgtcaagaacttagaacaatatcaaacacagwaataatgctatataaaagttattaatatattagtattcaaattattacctggctcactggagtgaagtatctgttgaagctaagtggttgatgtgt

SEQ ID NO: 400485 - DNA, 658 bp, Homo sapiens
aagaacttagaacaatatcaaacacagaaataatgctatataaaagttattaatatattagtattcaaattattacctggctcactggagtgaagtatctgttgaagctaagtggttgatgtgtgaactagtcattgctatgggagagaatgaaagaaataaataacaagtactctagaaagcatgaagtgcagaaggtgaatggcttgatacattcaaaggatggactgaaatccaatgtcttttggttactaaggtacaacagtccctcattgcttacaaaatcaagtgaaactgtattcttttaagtggctaaattatgaagtctgttgaattcattcccctgccatgtctttaatgtgaatgttaaagacaacaattggaaaagttgaaccctgaaaacttggttacttatgagaaaatgtaaaaggtgagtcactttttactgaattcccaatcactggacctctcttgaagattgaagcagattcccctattatgtgtgataagcctatttcaaattgcttgaagactccataattacttattggtgagagttactttgcaagaaaaactacgccaccctacttyccaacttcaaacacttttccttttctccagtacaaacctgaccaattgtgaaattacaatgtaaacg

SEQ ID NO: 400486 - DNA, 622 bp, Homo sapiens
ttctgcccagctcaatgcagcataaggatacatttgaataagtaggtgattgcttataggcaactgcttagggcatgtttttaatgagatatttcatattttaaaataaagcktattataaaatacattttcaaataaagcagttccattttaaatttctaaatgttttgataataaatattagaaagctactattctatgctttttcctcattgtttttgtcacttaatcccaagttctgcctaattcaaaaggatgaagcatagatcaacagcacatcagtgataaatacttccaatacaatttgcttccacattagatattagaatctcttttacagacacttaatttggtacaatcctcaggcaagtctgggctcacagcaatgacagaggttccgatttgttttcctgagtcatctacccttccatctctgtatattttaggacatagggcttatagctgagaggaagtaatctaaatcttttgaaatactcctcttatctgtcaacattcagggtatacacacaaatgaaaaaccacaaataatcacatatatcacaaagtaatgcataaaatgacagttttgtaaaaattggtatttaagcaaccttcaaatgag

SEQ ID NO: 400487 - DNA, 515 bp, Homo sapiens
gtaatgtcatactttatttcccatctttgtattaagactttatcaacataaaacccttaacaaagattttgttgcaactggaaatttacttggtattttctaaaatttaagtcaatgtatcacaccttgaagtcatacaatatcataagaaaattttaatgatggataatgcttttaattactatagtcactttcaacatgacattgatgatatttttatttgcttgtcttctgaatctaatgtatgacctaatagtatgcctctggatagttaaaaatataacaaagagaaaataaatgactgaaagtgataataatatttttagtyatgtattattattttaaggaatgcatttgatatttatatatacctgttcattactgaataaataaactataatttattatttattattaccaaggtaatacacctttgttataaaaaatgctgagcaataagaagaagaaaaagtttacttagagtcccctgaaaaaaagatacccagtggcaaaca

SEQ ID NO: 400488 - DNA, 484 bp, Homo sapiens
caatgactgtgatgaaacaaaaacagaaagttattgtggttgaagcagaggaaacatgggagattatactgaaaataaaatacagtgagactgtattaatccattctcatgctgctaatgaagacatatctgagaacrcctaatttataaagaggaggcggtttaatagactcacagtttcacatggctgggaaagcctcacaatcacaggggaaggtgaaggaggagcaaaggcatatttgacaaggcagcaaggaagagagcatgagcaaaagggaaaaagtcccttataaaaccatcagatcttgtgagaactcactcactatcatgagaacagtatgatggtaactgcctccatgatgaaattacttcccactggatccctcccatgacacatggagatcatgggaactacagataaagatgagatttgggtggggacataaccaaattatatccttctacctctggcccctcccaaatc

SEQ ID NO: 400489 - DNA, 689 bp, Homo sapiens
aaaatgataatgacagaggaactgaccttgaataaataagtaagcacttagtacacaaggagagagcttggcctttaacaacagcaaagacagttcatctttgctaacagaagtgaatatagaaggatacaaccattggtaagtgtgctgatatggtgagtggagcttgagattytctcctgattgctatttcttttttagatgaagttgatataatataaaagaaatcatcttaaacaattcagtggcatttagtaaatttaatttggtgcaataatcacctctacttggaaccctaactaatacaacacctaatactatggatatgataaaaaaaaagaacaaatgttggcacagtaggctgtctacaagcttgaggagcaaggagagccagtccaagtctcaaacatcggacttgaagtccgatgtttgaggggaggaagtatccagcacgggagaaagatgtaggctgagaggctaagccagtcttgcattttcatgtttttctgccttctttatatttgttggcagctgattagattgtgctcaccagattaagggtgagtctgcttccccaagctcattgattcaaatgttactctcctttggcaacactctcacagacacacccaggaacaatactttgcatccttcaacccaatcaagttgacactcagtattaaccatca

SEQ ID NO: 400490 - DNA, 675 bp, Homo sapiens
cctttcaatttatttaaatcttctccaatttctgtcagcaatgttttataatttctagtctacaactctttcaatttctttattaaatttattcttttgtatgctattacttagaattgctggacttgaatttattttcttaattgcctttttagatagctcattgttagtatatgaaaatataactgatttttgagttgtctgcaattttgctaaatttctttaacttgtaatatttttgtggattgtttgaggttttctatgtacaagatcatgtcttctgtgaatatagcttgaattctatttatccgatctggatgtcttttatttcttattcttgcctaattaggctcacagaattttcagtacaataaataacagtgagaaaatagtgtcttattcgtgattccacggggaaaaatgttgtcttttacccatgartatgatgctacctgtgaatttttcataaatattctttattatattgcaaaagtttccttctacagggtttctatacatcttatatacatatacttgtatgtaactacatatatacacatatatagaaacttatacatacatgtttctacatacttctatacatacacatagagtatataagtatatatacatgtatacatatagatacacacatatatatacatacatttgtat

SEQ ID NO: 400491 - DNA, 542 bp, Homo sapiens
gcacctggtcacttgaaagctctgaggaagatgtacaaagagattgatattgttttcatgcctgctaacataacagccattcttcagcccatggttaaaaaaatataaattttatgctttttatttaggaaatacattttgtaagtctgtagctgccctagatagcaattcctttgatggawttaggcaaagtaaattgaaaatctcttgaaaagatttaccactgtagatgcctttaacagtatctgtgacttggccaggcatggtggctcatgcctgtaatcccagcacttatgcgggtggatcacctgaggccaggagtttgtgagcagcctgaccaatatacagtgaaacacagtctctactaaaaatacaaaaattatctgggtgtagtggcacacacctgtagtcctagctacttcggaagctgaggaggagaatcgtttgaacccaggaggtagaagttgtagtgagccgagatcattccactgaacttcagcctgggtgacagagcgagactctgtcaaaaaaaaaaaaaaaaa

SEQ ID NO: 400492 - DNA, 566 bp, Homo sapiens
gcttagcctaaacataaaaatagtataactgtaagcctgaaaaagtcactataagaagctaaggtaaatatatgaatgctataattaatatcctagataaatgagtatgttgcatctatgtaaaagaatgggataccttggggaaaaataaagtataataaagaactttcatatatatatatatacacacacataaatatacatatatatatacatayatatacacacacatatatatgtgtgtgtgtgtgtgtgtgtgtatatatatatcccaaagcagatagtatacaggttagaaaaaagttaaagttgtcattcagaaagttgaacaaaacacaaagatatgaaaatgtgataggaagaaaaggttaaacatcaatccccaaagtaaaatactaaatagagttatacataaaagagggatagagataaaagagggaatgggtagggaaaagttagcagaggtattacaaaaaaaatccagaaatgaaaatgctcatcatgcattcactttgtgaaaaataatgcatatttagacacattattgtaaaatttcaaaatatcaa

SEQ ID NO: 400493 - DNA, 630 bp, Homo sapiens
tcccaaaactcaggacaaccaaaatccattaatttcagattagaaaatatattaagacgtattcattttatcaaacactatacagcaagagaaggaccattctagaactacaggtaatagcatcgattaatatcaaaaaaatattgagtaaaaaatatgtaaaaacaaaagattaggtaatctattatgccctttcatagttcaaacaggcaaaacaaatctatagtgttaggcatcagaatactgttactttcatagagaatgcaatagtgatcagaaagagaaaaaaggcatgtttttgcagtgctattaatattttatttgtataagatttacctagatgttttcatgatgtgatgatcatgtaatgatttgcatattttttgtacatatgttaaatgccaataaaataygtctaaaatatagtaatttttacataaaagaatgaacagagtttctgagtcagataataactatctgcctagaataatgtttggtgaataacaagtaaaagtgttacaggaggaaaataaaggaaagaatgcgaatctaaatagtgaatcatattcaatgacagatcattgagaataaactacccttaaggcttcagtagctaaattctgattataa

SEQ ID NO: 400494 - DNA, 630 bp, Homo sapiens
tcccaaaactcaggacaaccaaaatccattaatttcagattagaaaatatattaagacgtattcattttatcaaacactatacagcaagagaaggaccattctagaactacaggtaatagcatcgattaatatcaaaaaaatattgagtaaaaaatatgtaaaaacaaaagattaggtaatctattatgccctttcatagttcaaacaggcaaaacaaatctatagtgttaggcatcagaatactgttactttcatagagaatgcaatagtgatcagaaagagaaaaaaggcatgtttttgcagtgctattaatattttatttgtataagatttacctagatgttttcatgatgtgatgatcatgtaatgatttgcatattttttgtacatatgttaaatgccaataaaatatgtctaaaatatagtaatttttacataaaagaatgaacagagtttctgagtcagataataactatctgcctagaataatgtttggtgaataacaagtaaaagtgttacargaggaaaataaaggaaagaatgcgaatctaaatagtgaatcatattcaatgacagatcattgagaataaactacccttaaggcttcagtagctaaattctgattataa

SEQ ID NO: 400495 - DNA, 553 bp, Homo sapiens
gatacgtaaattcaccttctagtgttctacctagtaatcattatattttggcagagtctcttaaaatcagtactgttttgaagttgatgctgcttcatcctcagtagtttcgcatcttttgttctttatgtggtgggagacatgaycatggctctgattgtaaatattgctatacatttagataaggtacagattcatcaaaatcttctgggaaatgtaaacgtattgcctagagttttttttagctcattgttgaaaggacttactgaaaaataaaagtgttatcaatacaaaatttgagtatatacctacacaacgtaacaagcagcaaagccatgtcacataaaatactcaagcagttctccgcatattgtatggcaggactacttattttctttttctcctacgtgtttcacatgcatgtatactgttatttctgacaaccatgacatatcagcttaatgcatctcatgggtcaaggtgtgctaaagtatcaccaattaatgtaccaagaggctagcaggagcagcaacattgaatatttctccaccgt

SEQ ID NO: 400496 - DNA, 610 bp, Homo sapiens
atcaatgttcagccatgttaaagtgagaattatattttcttcatatttatcatacacacagatagatgagatcatggtaaaagctgaaagcaccaaatagaagtctactcagccctttttkgctaattttattgctgctcctattactatgactaccaccactattactcataattaatgataaagctagaatagaagctgaatagaaagacatgttgggccaatatctctattctaaggctacttccgaaatattgttatatatggtcatagtgtacataggttaaaccatttttaagcatcaatttctaacaataatattggtaaaatataggaatgaagtataacatttattgatttattttttaaatctatttcctgtatactctattatgaattctgaaagtataaaaattccctagaaaaggcaattcaaataaacacattggcactaaattactttaaatattctttcattctctggcgctgaggtatgaacaagacatcagaccagttgaagtgctgattttaagactaatttcatatatatgttctactataaattgtaattatataaaattataataaattttcatccttaaattaatat

SEQ ID NO: 400497 - DNA, 610 bp, Homo sapiens
atcaatgttcagccatgttaaagtgagaattatattttcttcatatttatcatacacacagatagatgagatcatggtaaaagctgaaagcaccaaatagaagtctactcagccctttttggctaattttattgctgctcctattactatgactaccaccactattactcataattaatgataaagctagaatagaagctgaatagaaagacatgttgggccaatatctctattctaaggctacttccgaaatattgttatatatggtcatagtgtacataggttaaaccatttttaagcatcaatttctaacaataatattggtaaaatataggaatgaagtataacatttattgatttattttttaaatctatttcctgtatactctattatgaattctgaaagtataaaaattccctagaaaaggcaattcaaataaacacattggcactaaattactttaaatattcwttcattctctggcgctgaggtatgaacaagacatcagaccagttgaagtgctgattttaagactaatttcatatatatgttctactataaattgtaattatataaaattataataaattttcatccttaaattaatat

SEQ ID NO: 400498 - DNA, 571 bp, Homo sapiens
atttttgtatttttaatagaggcggggtttcactatgttagcatattttattttttttatggtatatactaagatgttatgtccaagaacctcaaatctatagtgcctcaaacaaaagaaaattttacatctcttaaatatcaaattttaatagtgagcgacctggggctggtagacatctcatgaggacatccagggaatgctgctttctatgttgaaaatgattcctcatctctgagggcttatcctcctccacgtggttgaagctgactcaccagcactacatctgcatttcttcctacttagtggagaaattaaggcatgagagggcaaattcattcctctttaagattgtaatgtagcagctgaagctattatttccactaatatagcaatrgctagagtttagggaaagcttggatagattacttctagccaggcaatccaatagcagagtaatagatgctgctgctaaaatgagcaaggggaaatcagatatagaaggacaattagaaatatctgttaaaatgattatttctcagtaatgttcaccctaatggtaaatgatata

SEQ ID NO: 400499 - DNA, 571 bp, Homo sapiens
atttttgtatttttaatagaggcggggtttcactatgttagcatattttattttttttatggtatatactaagatgttatgtccaagaacctcaaatctatagtgcctcaaacaaaagaaaattttacatctcttaaatatcaaattttaatagtgagcgacctggggctggtagacatctcatgaggacatccagggaatgctgctttctatgttgaaaatgattcctcatctctgagggcttatcctcctccacgtggttgaagctgactcaccagcactacatctgcatttcttcctacttagtggagaaattaaggcatgagagggcaaattcattcctctttaagattgtaatgtagcagctgaagctattatttccactaatatagcaatggctagagtttagggaaagcttggatagattacttctagccaggcaatccaatagcagagtaatagatkctgctgctaaaatgagcaaggggaaatcagatatagaaggacaattagaaatatctgttaaaatgattatttctcagtaatgttcaccctaatggtaaatgatata

SEQ ID NO: 400500 - DNA, 491 bp, Homo sapiens
ccacacacattttggtcctctgttgtgttctgcatcatggaatcttataacatttaaaaaaatcctttaatttgaatggaattccatgggacatgcattcaaaaaacttaaccttatattggatatatgtatattttaatccaataaaagtcaaacacaagggcacttttacatcatacataaatgtaaaagacagtaaaaaactgaggaataaaggcttaaaggaaatcataggaatatacccaaaaattcaagaggtcttaaatcagatgacagtgtccagttttcctgttgtaatctcttttggaataatcttctttctgattttctgtyttttctctactttgttaattattctttatcaaatgtttctttaattttcacaaatggatgtttcagggcctatatgaggatgttccaggagtacagaggcccctctgttacaaatactgcacatttttaagcacagattttactgaaattgtgtagaa

SEQ ID NO: 400501 - DNA, 511 bp, Homo sapiens
ttccattcaatatattcataattttattgtgaaagttccatttataagtctatttcggtatctaaatgtaaaactacaggcatttacgactatttgttcaaccgaagagaaaaatacccagagtacctgttctcatgatgcttgcactctattcaggctagagaaacaagaaagaaaaaaatgcacttactaacagaaggatctagtaagctccagactaaaaaatttaaggcacaatttaatgggagctcaaagacttaaattctctccaaaattacattataatcttttgcttgagaacatagatttgaggctctcaaaatcaacctyttatgaagtaaaatataatcatgtgactcggtttcattcactaaagagtgagcagaaattatgtatgcaatcttctaatctagcccttaaaaaagtgaacaaaactaaagcctaccatactcttgttgttttcatcctctttttatcttttcactagcaaggatggagaggaccccagtaa

SEQ ID NO: 400502 - DNA, 621 bp, Homo sapiens
cctactgcacataattagaaacatttttgaaagacgtttatggaaacctaaatattcacraatgtgaagaggaaatactaaaaatatatcaattctattcaaatatagtacaagatgaaagcatttccaaacaaaaatccaaagtattttgtgagacacttttcaagtttattgtaatatttatatatgtagaaaagacctcaaaatagctaacacattcttgaaggggagggatttcatagggtactttactaaaaatcaacttacttaaacatgttactaactgttaaagatgatcaaaaaatgttttgcttttgatatgggaagaacaggaatgtaaattcactttattgccctggagatatatatgttcagctctcacaggattcttcatcactttggtacattcaagtaatgaaaacatgttaattggacttggtaaacagaaattagtagacagattagatgcctatatatggaccaaagtgtggattgtttgaagtaaaacagtctggggcatgtggtaagaacaaagtcgccatggttgcactctctatcataagaaagcttttggtgagccttagattttggagataggttacgccaaactaagggatactc

SEQ ID NO: 400503 - DNA, 514 bp, Homo sapiens
cctttatagctaatacagttgtgagtttgccctccattgccacagtactggtgttggcacttttatttaagggcttacacatgccctgtgtattgctgtgatataccatataaaattgcctcaggttaaacttcatatttcagcraagaaggttcaatatagatgaatgatgatggaatccagaagaatcaggaactggacttaaaaacatggtggtatagactggtagtgttcagctaaaacttaataacctataggcaggggtgctgacctctaggatggagatatatgagctgaatcaatagctaatatatggtcatatattaccaaaatctataggacattgagccaagagccaaagggaaatgtatgattaggccttttctctatcattcctgctaacccatgtgcagatttttgcttcaaaactataggctccatttgattaaaaatcttggtccagtggctcagtggaaaaataaaaccaaaccaaaacaattattttatgtgtata

SEQ ID NO: 400504 - DNA, 514 bp, Homo sapiens
cctttatagctaatacagttgtgagtttgccctccattgccacagtactggtgttggcacttttatttaagggcttacacatgccctgtgtattgctgtgatataccatataaaattgcctcaggttaaacttcatatttcagcgaagaaggttcaatatagatgaatgatgatggaatccagaagaatcaggaactggacttaaaaacatggtggtatagactggtagtgttcagctaaaacttaataacctatagrcaggggtgctgacctctaggatggagatatatgagctgaatcaatagctaatatatggtcatatattaccaaaatctataggacattgagccaagagccaaagggaaatgtatgattaggccttttctctatcattcctgctaacccatgtgcagatttttgcttcaaaactataggctccatttgattaaaaatcttggtccagtggctcagtggaaaaataaaaccaaaccaaaacaattattttatgtgtata

SEQ ID NO: 400505 - DNA, 621 bp, Homo sapiens
cagtactttgtggaatattacccacaagtttttttctaattaactatatacacataatacatagatactagaggaatacaaaatgtgcaagcatgtattctagtagtttagagtgtttgaacagtcataattaaagttacatgaaarttacatatcaaggcaaagtatgtagtttctgaaaaatataggtacttgtgacttaaagaactcttttgaagatggcataagataatgtgtatgaaattccaacagttatatctatttctttgcagaatatcagggtattggttctctactttcatgctaaaaatgcaaattacctacaactagttgggactcatcgtgcgccttctaactacataaattattaggtgcttgatagactttcatgagagaagaaaggtgaaatctaaaaataaattgctatataaaaaagcctaggtatagcaaaagcaaagacttggaatttctgatttagattgtcactgctgaatgatactgttctttggaacaatgatctcagcacatccactggcattgtcttggaatagtttatttgcagatgtaattaagaatctgaaaatgacattaacctgaattagtttggaccttacatccaat

SEQ ID NO: 400506 - DNA, 592 bp, Homo sapiens
ctcaatactaattttctgtattactccattctcacattgctgtaaagaactaactgagactggataacttatgaagaaaagaagtttaattgactcacagttgtgcatggttggtcaggcttcaggatacttataatcaacggtgggaggtgaaaggaaagcaagcatatcttcacatgtcaaagcaggaggaagacagagaagaaggaagcaccacatacttatcaaacaaccagaccttgtgggaactcactcactatcacagaacagcaagaggaaagtctatcttcatgattcaatacctcccacaaggcccctcctctgacatatggagattaaaatttgagatgagatttgggtggggacacagagccaaaccatatgattatttgttcaaaaagtattattgaattcagatattttaaatgatagctcacaaaagtactgaagaacagatgaatactgaattattagatttygtgtcaatttgaagcaaatcaattttattttgaagagatgtaatatacattaaacaaaaatgtacagattatcttaaatatattaagaaaatcagaaatattatgtgcaagtt

SEQ ID NO: 400507 - DNA, 647 bp, Homo sapiens
acaacctaacatcaaaactaaaagaacaagagaaccaagagcaaacaaataccaaagctagcagaagacaagaaataaccaaaatcagagctgaactgaaaaagatagagatacaaaaaaccattcaaaatatcaatgaattcaggagcttttttttttgaaaaaaataataaaataggctgccagctaaactaataaagaagaaaagagataagattcaaataaacacaatcagaaatgataaggcggatatcaccactgatccacagaaatctaaacaagcattagattattttatgaacacctttgtacatataaactagacaaacattctatgcagaaaaattccaagtaatttatgtagacaaatgtatataaatatttatatgtatctcatcactcctgaagtaatccttctgkgtttttttttcataacatgaatcaacccctttcatattatacatttctttgtttgctacctgtttctctgtttaaaatgcaagctcaatgtctggcatgtagaaaaagactgacaagtattaatttaatttatgagttatttatcttgtaacaatgctcaaatttttttcaaaagagtttatagtagagtttaccattcagtaaaagtatgtacagtcataaatggc

SEQ ID NO: 400508 - DNA, 509 bp, Homo sapiens
ttatagtagagtttaccattcagtaaaagtatgtacagtcataaatggctctatatatagaaaacttatgcagagagagtatggatagatgttttatgtttatttacttttttatgagaaggcattgaaatcctcagattgggccaaagtttgagctgttttttttttttccagtatgttaaaaaagtgctattggcagtaaaagtagtctggttaggtaatgtattaacagtatcctagagtcccaagatgggtctaaaagaaattgtgaaattatattctcttgcaattgaagaagtaaatagcgtttctaaaattatttgaggaaaggaagagccaagatggctttatagacrcagccaaaaagagtttttcctaccaagagaggccacaccatcaagcagactggcacattccaaacagattttcagaaaaaaaggcattgagtaaacacagggagaacacagaccctgaggctgaaaggggagaaagctgggaaccctgtgcag

SEQ ID NO: 400509 - DNA, 494 bp, Homo sapiens
ctgagtttattatctgacttctgttagcagcaccaaaactcacaacaactgggaaaatcttttgcttctgaaaagaatctgagtggcatatcttagcatccaccatatctactcaattatattactttcaaaggaaataaaattattttttaaagtagatgttttgaaaagtcaagtgaagttttgtgttggccaaatcattatgaattccctttaaaattggagaaaatgtgcattgaaaaaaaagaaaatgagaaaagttatkgacagtggacaaaaaattgagaaaattataaataagagaaaaagaattttcagttaagcatcagagattaaccacagttgattgtctctaccttttacaaaatttaaaataaaaatattttcaaacagaaaatttataaagaaaaatttttttcttcacttcaaattttctgtgtctaggctgaggaatgagagataacactaaatcaattaaattaaaaatttgatta

SEQ ID NO: 400510 - DNA, 424 bp, Homo sapiens
cttagccctgtctttttcactcttagtttttggaacagcctgccaagttttggtttatggtttttccattctgccaaaccacctctattttaagtcccacatgaaaggctctctcaggaaggatggtgagattaaatcagaagatgacagtgggatggaggtagtggttgatcctgtcaagccgtagsgctttggccaagatgagatgtaaagatagaggtgagaattgatcactgactgtgcaggagtgaggttaaatgcatcatccacttgagcagggttagaattaagatgtcagacacatcatatgcaggatgataagccaagatctgggaagaataagggtattgggacactcagcgtctatgataattgcctggatacttagggggatgttagttacctaacaaaaagctaacagaaa

SEQ ID NO: 400511 - DNA, 424 bp, Homo sapiens
cttagccctgtctttttcactcttagtttttggaacagcctgccaagttttggtttatggtttttccattctgccaaaccacctctattttaagtcccacatgaaaggctctctcaggaaggatggtgagattaaatcagaagatgacagtgggatggaggtagtggttgatcctgtcaagccgtagcsctttggccaagatgagatgtaaagatagaggtgagaattgatcactgactgtgcaggagtgaggttaaatgcatcatccacttgagcagggttagaattaagatgtcagacacatcatatgcaggatgataagccaagatctgggaagaataagggtattgggacactcagcgtctatgataattgcctggatacttagggggatgttagttacctaacaaaaagctaacagaaa

SEQ ID NO: 400512 - DNA, 505 bp, Homo sapiens
tagacatcatcagtcaagcaccacattctgctttgcttgtgccaggtatagccagtgaggtcttctccacacagtgctctgagaatgctgtacctacaaccagccagctttggcagatgtcgtgggctaaactgtgtttccccccaaatcgtatgttgaagtccttatccccaatacctcaggatcttactttatttgaagatatgatctttgcagyggtaatcaaggtaaaatgaggtcattagggtgagctttaatccaatatggctggattccttataaaaaggggaaatttggagacagatatgaacacagggcgaatatcatgtaaagatgaaggtagagattcacaagccaagaagtgtaaaagccttccggcaaaccaccagaagccaagagagaaggaagcaacagatcttccctcacagccctcagaggaaaccaaccccaatggctgacatcttacccttggacttccagcctctagaaccctgaaacaatcaat

SEQ ID NO: 400513 - DNA, 478 bp, Homo sapiens
ttaattgtcaacttgattggawttaaggatccaaagtattgttcctgggtgtgtccatgagggtgttgctaaaggagattaacatttgagtcagtggactgggagaagcagacccaccctcagtctgtgtgggcaccatctaatcagctggcaactgcctggctagaataaagcaaaaagaagaacgtggaaagactagactggtttagtcttctggcctacatctttctcccatgctggatgtttcctgccctcgaacatcagactgcaagttcttcagcttttggactcttggattcacagcagtggtttgccaggggctcttgggcctttgccacagactgaaggctacactgtcagcttccctacttttgaggttctgggactcagactgatccaccactggcttccttgctcctcaacttgtacacagcctatcatggggctttaccttgtgatcctgtgagtcaattctcct

SEQ ID NO: 400514 - DNA, 478 bp, Homo sapiens
ttaattgtcaacttgattggaattaargatccaaagtattgttcctgggtgtgtccatgagggtgttgctaaaggagattaacatttgagtcagtggactgggagaagcagacccaccctcagtctgtgtgggcaccatctaatcagctggcaactgcctggctagaataaagcaaaaagaagaacgtggaaagactagactggtttagtcttctggcctacatctttctcccatgctggatgtttcctgccctcgaacatcagactgcaagttcttcagcttttggactcttggattcacagcagtggtttgccaggggctcttgggcctttgccacagactgaaggctacactgtcagcttccctacttttgaggttctgggactcagactgatccaccactggcttccttgctcctcaacttgtacacagcctatcatggggctttaccttgtgatcctgtgagtcaattctcct

SEQ ID NO: 400515 - DNA, 478 bp, Homo sapiens
ttaattgtcaacttgattggaattaaggatccaaagtattgttcctgggtgtgtccatgarggtgttgctaaaggagattaacatttgagtcagtggactgggagaagcagacccaccctcagtctgtgtgggcaccatctaatcagctggcaactgcctggctagaataaagcaaaaagaagaacgtggaaagactagactggtttagtcttctggcctacatctttctcccatgctggatgtttcctgccctcgaacatcagactgcaagttcttcagcttttggactcttggattcacagcagtggtttgccaggggctcttgggcctttgccacagactgaaggctacactgtcagcttccctacttttgaggttctgggactcagactgatccaccactggcttccttgctcctcaacttgtacacagcctatcatggggctttaccttgtgatcctgtgagtcaattctcct

SEQ ID NO: 400516 - DNA, 565 bp, Homo sapiens
atgaacaaaagatttgaacagacacttcactgaagaagatatatagatgacaaatgaacacatgaaaatacgctcaatgtcatttgtcattaggaaaatataaataattaaaaccaaaattataaaccaccaaattcttattagaatagctaaaatgaaaaatattaataatactaaatgctggcaaagatgtggagcaactggaattcacaaaggctaawcttgaaaatcaaattatgaaacttaagtagagattgttagaaaattccaaagaacatgattaaggtaagaattaatatgaaagattttgagtttcataaatacagatatctacatgaagacagataatttgcaatttccacaaaatagatatcaattaaaaatttaaaatatggtgattgctatggtttgaatgtgtctctcaaagttcatgtgttggaaatttaatccctaatgcaacattgttgagaggtgggacctttaggacacgattaggtcatgtgggctctgacctcatgaactgattatgttcctatctagagagtggcttcctcattacaagagt

SEQ ID NO: 400517 - DNA, 542 bp, Homo sapiens
acacttaaaattcaacaatatgtaaagaaatgaacaaaagatttgaacagacacttcactgaagaagatatatagatgacaaatgaacacatgaaaatacgctcaatgtcatttgtcattaggaaaatataaataattaaaaccaaaattataaaccaccaaattcttattagaatagctaaaatgaaaaatattaataatactaaatgctggcaaagatgtggagcaactggaattcacaaaggctaatcttgaaaatcaaattatgaaacttaagtagagattgttagaaaattccaaagaacatgattaaggtaagaattaatatgaaagattttgagtttcataaatacagatatctacatgaagacagataatttgcaatttccacaaaatagataycaattaaaaatttaaaatatggtgattgctatggtttgaatgtgtctctcaaagttcatgtgttggaaatttaatccctaatgcaacattgttgagaggtgggacctttaggacacgattaggtcatgtgggctctgacc

SEQ ID NO: 400518 - DNA, 575 bp, Homo sapiens
ggcttcatttactcaacataatgcttttgaggttcagcaatgtaattaggatactagaaatttgtttctttttatttttgagttggattcagtgatttggtgataactgtttaacaactggmtttcaagcaaacaaacaaaaactgagtgttagtgtttgtctattcccatgatgtaaatactctgagggtagccaatttcatgctactaacatgtcctccatcattttgaaaaattactgagaactgaacagctacttcttgtgacccagcatgagctggctccaacacactacaggtcatctcccattgtatgagtatagtacaacttgttttcaataatacaacttttatattattatgactaaagctcttacaaatattcttttgcaagtttttgggtaaaaatacatttccattactcctagataaatacatagaagtagaattggttagtcatagggtacgtataagtttaactttataagaaaaaattgccaaacacttcaaagatattgcaacattttgtactttcaacaaagtctagcagttccagttgctccatatatttgatat

SEQ ID NO: 400519 - DNA, 575 bp, Homo sapiens
ggcttcatttactcaacataatgcttttgaggttcagcaatgtaattaggatactagaaatttgtttctttttatttttgagttggattcagtgatttggtgataactgtttaacaactggatttcaagcaaacaaacaaaaactgagtgttagtgtttgtctattcccatgatgtaaatactctgagggtagccaatttcatgctactaacatgtcctccatcattttgaaaaattactgagaactgaacagctacttcttgtgacccagcatgagctggctccaacacactacaggtcatctcccattgtatgagtatagtacaacttgttttcaataatacaacttttatattattatgactaaagctcttacaaatattcttttgcaagtttttgggtaaaaatacatttccattactcctagataaatacatagaagtagaattggttagtcatagggtacgtrtaagtttaactttataagaaaaaattgccaaacacttcaaagatattgcaacattttgtactttcaacaaagtctagcagttccagttgctccatatatttgatat

SEQ ID NO: 400520 - DNA, 591 bp, Homo sapiens
tggcagcattcctccctctgcaactaagacctctaggccagcatgatgtaatgtcatgggaataggaagcaaaatttttgctagtgggtcactaggggtgatggtgagtggtgccactttcacttccacaccttgattccagcayccatgaatcccggccatgggagaaacggtaccatatattggatgcagattcagaatatatacggccttctgaataactttgccctagccctgcaaagtattgtcaaaaggccatttcaccattctgtcaaaccagctgcttcaggatgatggggagcatggtaagatcagtgaattccatgatcatcagtcctctgctgcacttgtttagccataaagtgagtgccttggtcagaggcaatgctatgtggaatactttgatggtcgataaggaattccatgagtccatggatggtagtcttggcagatatattgcatgcaggataggcaaacctatagccagagtaagtgtctattctgttggagacaaactggtgccctttacatgatggaacaggtcctatttactatattagttcattctcatgctgctataaaggactgtcc

SEQ ID NO: 400521 - DNA, 566 bp, Homo sapiens
ttgtcttgataatctgggtcagtcactgcagccaacactgtaactccctttttagcctgttgacttagaggtaggaggagcccaaagtggccaggtggcaatcttaactttcagtttaatggaatcgttgttgtgtctcttggtggcagcattcctccctctgcaactaagacctctaggccagcatgatgtaatgtcatgggaataggaagcaaaatttttgctagtgggtcactaggggtgatggtgagtggtgccactttcacttccacaccttgattccagcacccatgaatcccggccatgggagaaacggtaccatatattggatgcagattcagaatatatacggccttctgaataactktgccctagccctgcaaagtattgtcaaaaggccatttcaccattctgtcaaaccagctgcttcaggatgatggggagcatggtaagatcagtgaattccatgatcatcagtcctctgctgcacttgtttagccataaagtgagtgccttggtcagaggcaatgctatgtggaatactttgatggtcgataaggaattcc

SEQ ID NO: 400522 - DNA, 609 bp, Homo sapiens
acctagttttatgctttcctttcttcacttaaaatgttataatcagcatttttgcttgactttattgctaatcaaaaacataattttaatagctgtacattttttatttatggatatgcaataataaatatrgcttttctccactgtttcatagatgttttagagtgtatgtaagataaaattacattctctctacctattcctccaattgttctcagtttcattcatttaacaagtcagattaccaaatattgtattttaatttaccttgaatatatcactcctgaatctgctttttacacggtttagtattatttctccttcatttgccattgtgagacctttattttcctatatatctattctttttaatttaggaaatagtttccttatttttaaagttgatagaagcctctgggttcagggaaacagaaaagaaaagaagagtccttcaatatttctctgctttatcagagaagtagttggctctgcattgcaaactgccaaatggttctaggaagcatgtcaagtattgtttttggtttagtattatttctgcagcaacgattaggagtctacattaaaaaaaaggcaaaatgaaaaacattg

SEQ ID NO: 400523 - DNA, 652 bp, Homo sapiens
ttgacacctttttcatcacttctacatctccccagaaacataggcatattctcactcctcactgtagtgtyaccagcatgtcaactgatcaccaacatttgagttgttgggagaaaaccaaagaacacaaccaatacataaatctccctatgacggataattctctcttccagttgctttttcctccagccacttctccagatagacaacaagctcagtgggtgctgctagaatcaaggcatctgcttacccacagtcccctgcactagagctatcagcagtttgtatgtagagcagggaagccagttgatattagctgctccccaaaaccatgcatcctgtcatttctcttcacattgtcacactagtttgaagcccaccactttccagaaagctccacccccagaacttggttgtttatttatggacaacatgctcttggaccctaaaattctggttggagtttgatctgagcaattgttaattgaacagtgtaattggaacagaaaacagagcaacaatctctgccactgtgaaggtcagaaacatgactgccccagaggagctgctgtatttgctgagagtcctgactgtcaggtctttgacactgttcccttggatccagccctcagagaaagagtgcttttccaga

SEQ ID NO: 400524 - DNA, 652 bp, Homo sapiens
ttgacacctttttcatcacttctacatctccccagaaacataggcatattctcactcctcactgtagtgttaccagcatgtcaactgatcaccaacatttgagttgttgggagaaaaccaaagaacacaaccaatacataaatctccctatgacggataattctctcttccagttgctttttcctccagccacttctccagatagacaacaagctcagtgggtgctgctagaatcaaggcatctgcttacccacagtcccctgcactagagctatcagcagtttgtatgtagagcagggaagccagttgatattagctgctccccaaaaccatgcatcctgtcatttctcttcacattgtcacactagtttgaagcccaccactttccagaaagctccayccccagaacttggttgtttatttatggacaacatgctcttggaccctaaaattctggttggagtttgatctgagcaattgttaattgaacagtgtaattggaacagaaaacagagcaacaatctctgccactgtgaaggtcagaaacatgactgccccagaggagctgctgtatttgctgagagtcctgactgtcaggtctttgacactgttcccttggatccagccctcagagaaagagtgcttttccaga

SEQ ID NO: 400525 - DNA, 652 bp, Homo sapiens
ttgacacctttttcatcacttctacatctccccagaaacataggcatattctcactcctcactgtagtgttaccagcatgtcaactgatcaccaacatttgagttgttgggagaaaaccaaagaacacaaccaatacataaatctccctatgacggataattctctcttccagttgctttttcctccagccacttctccagatagacaacaagctcagtgggtgctgctagaatcaaggcatctgcttacccacagtcccctgcactagagctatcagcagtttgtatgtagagcagggaagccagttgatattagctgctccccaaaaccatgcatcctgtcatttctcttcacattgtcacactagtttgaagcccaccactttccagaaagctccacccccagaacttggttgtttatttatggacaacatgctcttggaccctaaaattctggttggagtttgatctgrgcaattgttaattgaacagtgtaattggaacagaaaacagagcaacaatctctgccactgtgaaggtcagaaacatgactgccccagaggagctgctgtatttgctgagagtcctgactgtcaggtctttgacactgttcccttggatccagccctcagagaaagagtgcttttccaga

SEQ ID NO: 400526 - DNA, 557 bp, Homo sapiens
ggggactttcaacttctccagcttttaaatctcgttgactcctttgtttgaaagcattacccgggccttcaggrgtgttgcacacagggtgtgtgcagaattaactatacagactttaaacgactcccttttgctgtcaggctcatgtcttgttccttctttttcttctataccttgtacctaatgtttctgagtctcaaatctttctgagatactggagaggtggaatgcctttttttcctggattatcattttaaattctaattttgtttgtttgtttgtgttttttgaaacagagtcttgctctgtcacccaggctggagtacagcgacgcaatcttagctcactgcaaccttcacctccagagttcaagcaattcttgtgcctcagcctctggagtagctgggactacaggcactcatcaccacgcctggctaatttttgtatttttagtagagacaaggttttaccaagttggctaggctgatctggaactcctgacctctgcctcagcctcccaaagtgctgggattacaggcattgagccactgcacaca

SEQ ID NO: 400527 - DNA, 552 bp, Homo sapiens
tattgctctagtgggaggcagcccaatagaaagggaagactgggagctgggagacctgggttccagttctggtttgcagcaactttctgactaatcattggcaagtcactttactactctggctcacagtttttatacctataaaatgaggaaaataaattatgtatggctccaaatgtgaaattgctgcttggttgcatcagaaggcccrgggactttttaaaatgcagattcctggctgctttccaagacttaacaaatcagaacctttaggagaagagtcagaacttgggaatcaatatttttaatagctgcatagatgattcttgcaaattaatgaaatacagcttgaatactttcagccacagattgtaagctctggctccttcattcaacaacctaatcacaatccatatctccagggcagcaatggagactgtggtggtgtctctggttttgacttagcacaactgttcatcaggatgtatcgcctgggatggttaatgtgtacaaaaaataggtagaaagaataagtaataactactattgata

SEQ ID NO: 400528 - DNA, 589 bp, Homo sapiens
taaacctgtttatgctaatatgcaataactaatttactattgcatcttaatttctgctctcaaaatcttgttttagggatcttctgggttgtggaaatctctgtaagatggttttggtctaagctgcttggttaccaagatgtcagttcaagaactaatgacaattgatattcatgattgtacttgtttcaggcaatccacgctatggttgcttgaaggtcttccaaatggtagccttctctaggcaatattgtccactctgttatgctatcaacgaaagactggcttttctctttggstccacagaaatttattgagataacatcatgagatcattgctatacccagtgcttttagacagggatctgtgagctgcctggaaacacagagccaacaacaggcttcatttgaaatctcacagttgaaatatgtgatatattaaagttcaccttgcaggtgtgagcattcggatcaccaacgctgtgacctcgctgtgtgaacgggagctactacaggaaggaagcttacaaatgagctgcatggatcccacattttgctaaaatcaaataggacctttctcctctttgtt

SEQ ID NO: 400529 - DNA, 549 bp, Homo sapiens
ctcaagagtttccattttaaagcttgcctgtaagtgctgtccaccattcatcatgatcacccctgcccaatcctcactctccttcagacattaaggattttgtttcctaaagttaaactcacgaaagagatatattaaggggaagagaaagaggcaaataccttgagcattgggagaggtgataagaaaacattaggggaaattgttaaggactaggaagaagatggtggcctgaatttctctgaataaggaaaattggtgcagaaatctagggaggtgggacagacctgcctcctagagaacctgggaacccaggaactgaactcagcaattgtagactgtagacaccagggccccaacctggcagtgtgtactttgcccaattttagaaaggcagctctggaatcaatttaatacattatgagttaccatcattcctaggactttcagacaactctggagtggaaggaaggagctccaataataataataataatgtaatgaaacttcctamtagtctagttgtatgagagcttagtgtcagattaa

SEQ ID NO: 400530 - DNA, 585 bp, Homo sapiens
aaaactggggactttcccaagactgcttcttcatctctcacatttaattggtgaccaaatccagttgattctatctgctcaagatctcctgcagctttcttgttgttaccgactgtattcagactctgttgtgtgggatgtttcaagtatttatcattgatgtgttcccaggcttgtcctatttcaatctattctccttgctgcggacaaagcacatctggtcatgttccttttctgtctaaaatccttcaaggtctttcccatcaaacaagctcaagcttcttgccatgttagaccagggaaacgggaatatcattatgtctggagtattgttacacaaaatatctaccttaagagtcaccattaaatggatatatctagggttgcacaaaggccagaaataaattcagagcaaacaacactgacatagcacacayggcccctaacttcctttccagatttatcagttcccttgaagtttcttctctgcatctcatattctagctacctgaactccttgaaggcccctgaatgtgcaatattacctaatgtccctgtgatttttctatctctagaatatctttt

SEQ ID NO: 400531 - DNA, 572 bp, Homo sapiens
ttttgacatcctctgcagtcagctcttgttttcgctttctttgtggtcagaactacctctgctactgaagtgatcctttcaccccaactcccagaacagccatcagcgcctgcttcttgatagtccagagagcaggagaaagtctgcttcactgttgtttgaaataagtaattactagagttcccaaaagtggatgacaaaaaggtaaattgagtagraggtttcactgggtgatgccaaggtctctttctgcagtgcctcttatgattctaggtttagaggcattttattttaaaatctcccattgaccaaaaaaaaaaaaaaaaaaaaaaaaaaaagcaaaaatataagtaaagggcacacacgggctctcacttacattagagagcagtctgtctgccatagtcagaagcaggagtttgagtttctagtcctctggcatgacccctgggatcaccggccatgcagcctggtccccaggttctctgcattccccttgggcacagagctcattgccactttgtgggctcaaggaaccatcatgatttcaagggaggctgggattaaggagt

SEQ ID NO: 400532 - DNA, 416 bp, Homo sapiens
tgaagtgatcctttcaccccaactcccagaacagccatcagcgcctgcttcttgatagtccagagagcaggagaaagtctgcttcactgttgtttgaaataagtaattactagagttcccaaaagtggatgacaaaaaggtaaattgagtaggaggtttcactgggtgatgccaaggtctctttctgcagtgcctcttatgattctaggtttagaggcattttattttaaaatctcccattgmccaaaaaaaaaaaaaaaaaaaaaaaaaaaagcaaaaatataagtaaagggcacacacgggctctcacttacattagagagcagtctgtctgccatagtcagaagcaggagtttgagtttctagtcctctggcatgacccctgggatcaccggccatgcagcctggtccccagg

SEQ ID NO: 400533 - DNA, 600 bp, Homo sapiens
gaggaccaccttaccatgactcatcaggttgggagactgggggacmgtgcattgtcagagagcccacattcagaggtgggatgcttaattcatccttcgatgcattcatcacatagttttaagtatctactacataccaagctgtgtgttatatataatgtatgaagtattgaacaaaacagattcagacttgccctacaggagtctacacttcaatggaaaggaaaaagcaagactcgaactcttctgcttactcccactggatgctccctcctgaagacctcagcatgaatcaggactggaggctgttctgctttcttctcttggtcggtgcctctaggcttacatctcccagagaagctcaaagagacgtttgacttttctaggtaagattcctatgctgagagggaagaaggaagccgggaaagagaaacagagagaaagaacatattgtttctccacagttgaatggactccagagacagtatttctgcagcagcacagaatcccctggtcctcatttgccctgcagtatctcactggagatgggttccacagggtcagacaatccctgtccagcatagtcctgagcctcctggg

SEQ ID NO: 400534 - DNA, 600 bp, Homo sapiens
gaggaccaccttaccatgactcatcaggttgggagactgggggacagtgcattgtcagagagcccacattcagaggtgggatgcttaattcatccttcgatgcattcatcacatagttttaagtatctactacataccaagctgtgtgttatatataatgtatgaagtattgaacaaaacagattcagacttgccctacaggagtctacacttcaatggaaaggaaaaagcaagactcgaactcttctgcttactcccactggatgctccctcctgaagacctcagcatgaatcaggactggaggctgttctgctttcttctcttggtcggtgcctctaggcttacatctcccagagaagctcaaagagacgtttgacttttctaggtaagattcctatgctgagagggaagaaggaagccgggaaagagaaacagagagaaagaacataytgtttctccacagttgaatggactccagagacagtatttctgcagcagcacagaatcccctggtcctcatttgccctgcagtatctcactggagatgggttccacagggtcagacaatccctgtccagcatagtcctgagcctcctggg

SEQ ID NO: 400535 - DNA, 512 bp, Homo sapiens
gacatctgtttcttcttgtcccatggctggtaaactatttccctagatctgtaaatgtgggtgattcatatagttagccattgttccaatgaacctgggacaatttctgcctctttctattattatctcatatcatgagtccaatttgattgaagcttataggacattgaaaaatgcatatataggatggttgcggtggctcatgcctgtaatctcagcactatgagaagccaaggtgagcagatcamttgaagccaggagttcgcaatcagcctgggaagcatggtgaaaccctgtctctactaaaacttagcacagcatggtggggcgtgcctttaaccccaacgactcgggagactgaggtgggaggatcacttgaacctgggaggtgaaggttgcagtgagctgagatctcaccactgcactccagcctgggtgacagagcaagactgtctccaaaaaaaaaaaaaaaagcatgtatatatatatatatatatatatatacacacaca

SEQ ID NO: 400536 - DNA, 656 bp, Homo sapiens
ctgattatgccaaattcatttccaagttattgctcagatacctagtgaagaatagagatatacagtatatgtggcaaaaacgtattaaaatgatcacaacaaaagcctgtttatcaaatattcaaggctgccataattattgagggatagtttcatttaatattatagaaaaacttgttaagatagagccagagctgaatttaattgaagtgtctaaaaatggctgtaattgtgtttctaggttactgttatccctatatgtgctgtgaatgggttatcagagctttcattgctttaaactttttttaaagataatatgcaaaactcaaaaagttcttttcaggtccatgaagttctctgtttgaaggcccttaaaacatagtcaatagttattcaaatactgttcatgatcttaatgatcacaattcttctccttctcctcctcctcctttttcttctcaggacaataggagcrtattttggaaaaattataaagtagttacaaaaaattactctgcaatcaatgtactttccaaaacaaatgatatcatagggagaaaagaaatgcttgcctattttgatattaggtataactaatgtgttagctctatcaaattgtaggttatactctttgcacgtctagactagcagtgtag

SEQ ID NO: 400537 - DNA, 633 bp, Homo sapiens
gtgattatgagtagaattgaacctgtaaaggatgctggagctagctgaatttaaacttcgtcaggttacaatgcaaaaatatcatgacaagagtgtttcatcttgtctattgatgagcacagcacaaagtagaaaatgctcccttttagcgctgactgccaaatttctaaactggtgctctaattacaccctgcaccatgaaggcttgtccatttgcacatcagggtagagcaaatcccgcagcacactggagggttggtgctgtcaaatgaaccaggacagtggttaaatgactctgtcttataatcttttttcctaacattttgtaataaaatttttcagacatatcacaaagttttgaatacctgtatactttccaccctgcwttctaccattaacattttgctccacttgctttatctcctatctatccctctatccatcctgctacctgtggcaatccatcttatttttgagatgcatttcaaagtgaattgcagtgctgttcttctaaatacttcagcttgctctaatggttttgatgaagaaaatggatgcatttctcccaaccaagtctgaaaaagcaatttttgagaggcaaataaaggtggaggaaattattttccgggaaca

SEQ ID NO: 400538 - DNA, 633 bp, Homo sapiens
gtgattatgagtagaattgaacctgtaaaggatgctggagctagctgaatttaaacttcgtcaggttacaatgcaaaaatatcatgacaagagtgtttcatcttgtctattgatgagcacagcacaaagtagaaaatgctcccttttagcgctgactgccaaatttctaaactggtgctctaattacaccctgcaccatgaaggcttgtccatttgcacatcagggtagagcaaatcccgcagcacactggagggttggtgctgtcaaatgaaccaggacagtggttaaatgactctgtcttataatcttttttcctaacattttgtaataaaatttttcagacatatcacaaagttttgaatacctgtatactttccaccctgcattctaccattaacattttgctscacttgctttatctcctatctatccctctatccatcctgctacctgtggcaatccatcttatttttgagatgcatttcaaagtgaattgcagtgctgttcttctaaatacttcagcttgctctaatggttttgatgaagaaaatggatgcatttctcccaaccaagtctgaaaaagcaatttttgagaggcaaataaaggtggaggaaattattttccgggaaca

SEQ ID NO: 400539 - DNA, 624 bp, Homo sapiens
cctgtcttgagtaagttcacagtgtaacaaaatgccctgtctttcaacttgggcttcacctccagaggttcatgtagggcagtccttaaggccagagaataaatatgacatgtctgtctgcagcttcactctaaggctaagctattgagagtattaacaagtcccttcaacatttttatagctaaaacaaatatggatatttcatggaatacaggcaaaatttgcaaggacgtagaaacatttaagagtaaacaaagatcctgactgatattctgtgattccagaggaggaatggctgtttggctcaaacccccagaaggaagcatagcaggtatagatgcaccaggaaagaatgtggggacttacaccacctgagcaggtagagccagtctgggaagggcctcaaatgctatgctgatgaacttgaactttatcccagaggctccgggaagtcacagtgagtgaaccaacacaatgaasctctccaaatagtttcagtcttattggtaggctgttaccaggcattgtctaaaacttgttgaggcagcaaaataaaatggatattgtgctatagatggtgagctaaaaaaacctcccttttggttccaccaaccaaccactaac

SEQ ID NO: 400540 - DNA, 582 bp, Homo sapiens
tgtttaacttgttgtagggtccatttgcagcaagaggcaggaaatagccacaaggaagggacttttgagtaatggaaagtgatcttctctacagtgataagctcaggacattttcttcyaacctgaagtcatagagatagagaaacatttcccatagcagcagcacaagacaaaagacatgtatagggatttaaagaatgtcagggagtgatgactattctatgtggattaatgagctagcagttaggaaagtaattagaaataacaaattctttaaccatatgtatgatgacttctatgcagcatatatatcaaggtttgaactctggagtttacatatgaagagtctgagatatctccacagtgaaatgtcagatgcagtcagtctggcatgggttggcttggggcactgagggtcagacgcttcaggagattgaaaaaagatcagaggcaggcagagatggctcatgagcactcctgcctgagttttagcaaagtccttaaattggtaaggtagttcatgcaatccggacatgatcacttctgaatattgtttgtaaattgctgaacctgtttaagtta

SEQ ID NO: 400541 - DNA, 550 bp, Homo sapiens
gcagtttcatcaaagaacagccgataatgacagataaagagcagcctggcggcttgagcttatgtccgtttcaaggatttactgaatactaatagaacacagcttttgttgagaaaatgcctttgcagtcagtgattgccttgtgtygttaaacctagccaccaattgttttgccccacaggatctgtaatactttaccaaatcagggaaaaatattaattagattttttttaatttaggaagaagttcgactttaagtatgtatttatttattcaatagtgaaaagatttgtgtgtatggtgagtgatttccgtttcgttactatagagtgacacatggtacatgtgggaggcagaatgaaatgatctgtaatcccattctaataaaggcagtttgaagcatatgttattgggccatcccgtacatacacaccctgaactacacaattatgcttttcattacatgttatgttacactttctctatttgtatacattggtttttacctctcaagctgtaatatacatttcacaaggtcatggtcctagta

SEQ ID NO: 400542 - DNA, 593 bp, Homo sapiens
ggtgctaggaaaggccaatttgaagcacatttgctagagaaaaaaagagcaagccaagacagtaaacctgtctatgcctccaaagtggagcagataagccagctgggctacccaaaccccatggtcaggcagaggcaaggcagggagtgaaagaggaakgagcaaagtggtcatgaatctctcatgtagagggacagttcatctctggcagtctttcctccccctgtagggagagagcccggacatgggagcatgaatggtttcgcaacactcaccccagtggggaagagggctgagagaagttctgtcccccatacagacagaggcagaaacaatgggaggagagggacaagtttcctcgctcaacagcaatgccacagctgatggaaagaaaaggactgaaggtcagccttgagacaccctcattcatcccaccttgtgtccagaccagccctaatctctgcttttctgattgacctgccttgacttggagagaacttcccaacgtcttcttcctgcctgtagatctgctcagccttgtctctccatctccctagttgacctgtctgtgcagcagggactctgtagccact

SEQ ID NO: 400543 - DNA, 593 bp, Homo sapiens
ggtgctaggaaaggccaatttgaagcacatttgctagagaaaaaaagagcaagccaagacagtaaacctgtctatgcctccaaagtggagcagataagccagctgggctacccaaaccccatggtcaggcagaggcaaggcagggagtgaaagaggaatgagcaaagtggtcatgaatctctcatgtagagggacagttcatctctggcagtctttcctccccctgtagggagagagcccggacatgggagcatgartggtttcgcaacactcaccccagtggggaagagggctgagagaagttctgtcccccatacagacagaggcagaaacaatgggaggagagggacaagtttcctcgctcaacagcaatgccacagctgatggaaagaaaaggactgaaggtcagccttgagacaccctcattcatcccaccttgtgtccagaccagccctaatctctgcttttctgattgacctgccttgacttggagagaacttcccaacgtcttcttcctgcctgtagatctgctcagccttgtctctccatctccctagttgacctgtctgtgcagcagggactctgtagccact

SEQ ID NO: 400544 - DNA, 593 bp, Homo sapiens
ggtgctaggaaaggccaatttgaagcacatttgctagagaaaaaaagagcaagccaagacagtaaacctgtctatgcctccaaagtggagcagataagccagctgggctacccaaaccccatggtcaggcagaggcaaggcagggagtgaaagaggaatgagcaaagtggtcatgaatctctcatgtagagggacagttcatctctggcagtctttcctccccctgtagggagagagcccggacatgggagcatgaatggtttcscaacactcaccccagtggggaagagggctgagagaagttctgtcccccatacagacagaggcagaaacaatgggaggagagggacaagtttcctcgctcaacagcaatgccacagctgatggaaagaaaaggactgaaggtcagccttgagacaccctcattcatcccaccttgtgtccagaccagccctaatctctgcttttctgattgacctgccttgacttggagagaacttcccaacgtcttcttcctgcctgtagatctgctcagccttgtctctccatctccctagttgacctgtctgtgcagcagggactctgtagccact

SEQ ID NO: 400545 - DNA, 544 bp, Homo sapiens
tcattactaagagtgtcatggacctcttcagaaacgytgggttgagaaaaactgaaatcgatgtctgaatttgctagtggttcatgatggtggcagagatatgtgaagacgctacttgggtttttgcccatgactcacccagcccaggttgaggaaaactgaaatcaacgtctgaattcgccagtggctcatgacagcagtgtagataagtgaagatgcgacttaggtttttgcccatgactcacccagccccggtaaggtgactttcagcctctctccagtgctttgttctcaatagatccagatgatcctcctcagctgtccctacccttggcatggtgagctgtgaactttggtttttcctgtattttccgcagccccctgcacagtggcaatcaatgttgattgaatgatcacatcttcaatggtggcccacagctccctgtggtaaagtgtaaaattctcttgtctaaggtccctcttgtgatgttcctagggtctctgggcgctttttgctgagaagatgtacaagaaacggccaacc

SEQ ID NO: 400546 - DNA, 544 bp, Homo sapiens
tcattactaagagtgtcatggacctcttcagaaacgctgggttgagaaaaactgaaatcgatgtctgaatttgctagtggttcatgatggtggcagagatatgtgaagacgctacttgggtttttgcccatgactcacccagcccaggttgaggaaaactgaaatcaacgtctgaattcgccagtggctcatgacagcagtgtagataagtgaagatgcgacttaggtttttgcccatgactcacccagcccsggtaaggtgactttcagcctctctccagtgctttgttctcaatagatccagatgatcctcctcagctgtccctacccttggcatggtgagctgtgaactttggtttttcctgtattttccgcagccccctgcacagtggcaatcaatgttgattgaatgatcacatcttcaatggtggcccacagctccctgtggtaaagtgtaaaattctcttgtctaaggtccctcttgtgatgttcctagggtctctgggcgctttttgctgagaagatgtacaagaaacggccaacc

SEQ ID NO: 400547 - DNA, 544 bp, Homo sapiens
tcattactaagagtgtcatggacctcttcagaaacgctgggttgagaaaaactgaaatcgatgtctgaatttgctagtggttcatgatggtggcagagatatgtgaagacgctacttgggtttttgcccatgactcacccagcccaggttgaggaaaactgaaatcaacgtctgaattcgccagtggctcatgacagcagtgtagataagtgaagatgcgacttaggtttttgcccatgactcacccagccccggtaaggtgactttcagcctctctccagtgctttgttctcaatagatccagaygatcctcctcagctgtccctacccttggcatggtgagctgtgaactttggtttttcctgtattttccgcagccccctgcacagtggcaatcaatgttgattgaatgatcacatcttcaatggtggcccacagctccctgtggtaaagtgtaaaattctcttgtctaaggtccctcttgtgatgttcctagggtctctgggcgctttttgctgagaagatgtacaagaaacggccaacc

SEQ ID NO: 400548 - DNA, 542 bp, Homo sapiens
atggcccttaggaattatgctgtatctattccacctgtgttctgtcaatggaacaataaagcctggatgacagcacatctgtttacagcatggtttactaaatattttaagcccactgttgagacctactgctcaaaataaacatccctttcaaaatactcattgacaaaatattcattgacaatgcacctgtcacctgagggctctgatggagattaatgttgttttcatgcctgctaacacaacatccatttggtagcccatggatcaaggagtaattctgactttcaagtcttatttcagaaataccttaagcaaggctatagctgccatagatagtgattcctcytatggatctgggcaaagtcaattgataactttttggaaagggttcattattctagatgccattaagaacgtttttgagtcatgagaggaggtaaaaatataaaagttaagaggaatttggaacaaattgatcttagcatttgtggatgattttgaggggtgcaagacttcagtggaggaagtcactgcagatg

SEQ ID NO: 400549 - DNA, 592 bp, Homo sapiens
tggctgagacacacagtgcactgtgatatttagatggacctttgcaataagttttaaagctgtgttyttattatgtaatctattttgtgggctctgttgagaacaactgtccttgtagccattcaagagaagcagagttcaggtaatctcatcctttgctctacctcaaagtggttaaccctctctcctttctgtgcacacattccagtcagcacaaagacacttttcattacctcctaaaaaccacaacatcagtatcttttggatttgtagataaccctaaaatcatcataaagggtctttgaggcatctggtaaagctctctcacagagatgctaattggaaggaggtgctgggcttttacacttaagctctatgtgtatttaaggttgaacaagatataaagtgaaaagagaagagaaagttatctgctctcatgctctcatttctaatgtgagctccaagagagaaattctctatagagcatcttaagacgttttagaggcattcttgacttactccctcctgtaacactttataataatttaggggatgaaaatatgtctcagatagcttgctggattccctaaaa

SEQ ID NO: 400550 - DNA, 474 bp, Homo sapiens
aaccaaaggcttgcagcaatccagggtgcatcattcaagaaaaatggcagaatcacagtaagaacagtgagctttgccatttgactggcttatgcccattgctgcaycatctttacagtagctttgaaaaccaacagcctgcagtcacagtgaaaaccaaaagcctggcagccactggagggggcagaagtggattgaatctccttgaaaccccatacccagacaattgtccttccttgatacgtttggtaattttccagaagatcctatacagaaggttttttattttacctgactcagagcttgagagaatagccttttctctagagaaaacaacaaacagtagcaattgtttactatcatgactgagccagcagtgagtaacagttagggcaaacaataggcaaacaaaataatctcagaaatgtgttaagcaagtggtctatatttcaatagttttgacacatttctggg

SEQ ID NO: 400551 - DNA, 474 bp, Homo sapiens
aaccaaaggcttgcagcaatccagggtgcatcattcaagaaaaatggcagaatcacagtaagaacagtgagctttgccatttgactggcttatgcccattgctgcaccatctttacagtagctttgaaaaccaacagcctgcagtcacagtgaaaaccaaaagcctggcagccactggagggggcagaagtggattgaatctccttgaaaccccatacccagacaattgtccttccttgataygtttggtaattttccagaagatcctatacagaaggttttttattttacctgactcagagcttgagagaatagccttttctctagagaaaacaacaaacagtagcaattgtttactatcatgactgagccagcagtgagtaacagttagggcaaacaataggcaaacaaaataatctcagaaatgtgttaagcaagtggtctatatttcaatagttttgacacatttctggg

SEQ ID NO: 400552 - DNA, 617 bp, Homo sapiens
gcaggagtggtaatgctaatatcagacaaaatagactttgtaaaaaaaaatttttactagagacaaatgaagacattttataaggataaaatatcaacccatcaagaagatataacaattataaacatatttctggstataacagagcccccaaatttatgaaacataaacagaattgaagaaaaaaatatatatctcattaagagttgaagtctttaatacttcattttcaatagtagatagaacaactaggaaggataacagggaatacaaggcttgaattataaagtaatctaagtatagccaatggacatctatagaacaccatactcaagaataacaggatacatatgtttcttctcaattacacataaaatattttgcaggatagaccatactgaaaatgccataaaacaagttaaataaatttaagagggccaaaatcacacaaaagtatgattttctgatcataataaaatgaaattagaaataaataacaaaaggaaattacagaaattcataaatgtgtggaaattaaacaacacacacacaaacaacaaatgggcagaaaaggaaaccacaaatgaaaattaagaaatatgttgatataaattaaa

SEQ ID NO: 400553 - DNA, 617 bp, Homo sapiens
gcaggagtggtaatgctaatatcagacaaaatagactttgtaaaaaaaaatttttactagagacaaatgaagacattttataaggataaaatatcaacccatcaagaagatataacaattataaacatatttctggctataacagagcccccaaatttatgaaacataaacagaattraagaaaaaaatatatatctcattaagagttgaagtctttaatacttcattttcaatagtagatagaacaactaggaaggataacagggaatacaaggcttgaattataaagtaatctaagtatagccaatggacatctatagaacaccatactcaagaataacaggatacatatgtttcttctcaattacacataaaatattttgcaggatagaccatactgaaaatgccataaaacaagttaaataaatttaagagggccaaaatcacacaaaagtatgattttctgatcataataaaatgaaattagaaataaataacaaaaggaaattacagaaattcataaatgtgtggaaattaaacaacacacacacaaacaacaaatgggcagaaaaggaaaccacaaatgaaaattaagaaatatgttgatataaattaaa

SEQ ID NO: 400554 - DNA, 512 bp, Homo sapiens
cttaggagatgccgtaacagcattacttagaaagaaatttataggtgcaaacacttactaaacaagaacttaaatcattaacctaactttccaccttaaggcattagaaaawgtgtatattaatgtgaaacaagaaaaatgatgagaattatacagatcaggagagaaataaataaaatgtagaaaacaagtagtttacctggaccaaccaaaaaaaaattactcttttccaaaaccaggaatgaaaacttgaagatcattaaaaagattagagacatgaaaaagatgaaaaagctataaaaatatataagaaaaagttaaataatgtaaatggaatggaaatttttttgaaagattaaaaactgcctcactgaaggagtagaaaatctgaataaatctataacataacaaagatatggaactgatcatcaaaatttttccacaaataaaagcctaggactcagttgtttcactggtaaattctaacaaacatttaaataataactaacaaa

SEQ ID NO: 400555 - DNA, 600 bp, Homo sapiens
tacatggttggaatgtaataacattaaatttagtggcaactctttagttggcttctggagagggaaatctgaaggagaggctaaaataagccaagcagataagttgagaccctgggatacagtggtaaaaatggagatcaagcaaaataataagattcataaaatgttcttgaagatagttaacttatttattttatttttgtttatttaactctcaataagaggttatcatctattagaaactattttaagtgccttgtaaatattaattcatttaatttgtaaaactccaaaatatttgaataaaaaagaaataaattaaaaatggctacatatttgtgtggttgtagtcagaagagttaattcaatttaaattatatttaagtttaaatataatttaaaacaayttttgccagagaataacctatagttataaacatatagttatagacctgtatggcttgtatgtttaatgagataatctataagaaataactttataaacatcaaacccctgaacaaatgtacaaaatattattattctaattgttcaaaattgaccacacactttagaaacaaatcaaatttaaataaggctgg

SEQ ID NO: 400556 - DNA, 570 bp, Homo sapiens
tgctttcccatatattttcctcccaatgaataaaatctccaagcactttttagtgcttgaagcacactaggggctatacaataaataaataatattatactctgtcccatttttttatggtgtgagtttaaattttccaaaataagatatttgaacattttgtattaaagcaaatagaaattgggaagattcaacatgaccacaaattcatttccagtcctctcatcagaagtgattctatttttcaaccccttgaatctgggctggccttgtaaacagcttagaccaatggaatgagaggaagtgactgtacgtgacttttagcctaagtctaaaaaggcttkgacagtttccatgctaatgctcttgtaacactactgccatgttgtatgaaacctgggctgtcctatcaaaggagttatgtggaagagattatagacttcctactaatggcccacattaacaaccaaactcatgagcgatgccatcttggatcctccagccccagttgcacctccagtgactccttccacatgagtaacacaagacaaaagcagaaaagatcaccca

SEQ ID NO: 400557 - DNA, 570 bp, Homo sapiens
tgctttcccatatattttcctcccaatgaataaaatctccaagcactttttagtgcttgaagcacactaggggctatacaataaataaataatattatactctgtcccatttttttatggtgtgagtttaaattttccaaaataagatatttgaacattttgtattaaagcaaatagaaattgggaagattcaacatgaccacaaattcatttccagtcctctcatcagaagtgattctatttttcaaccccttgaatctgggctggccttgtaaacagcttagaccaatggaatgagaggaagtgactgtacgtgacttttagcctaagtctaaaaaggcttgracagtttccatgctaatgctcttgtaacactactgccatgttgtatgaaacctgggctgtcctatcaaaggagttatgtggaagagattatagacttcctactaatggcccacattaacaaccaaactcatgagcgatgccatcttggatcctccagccccagttgcacctccagtgactccttccacatgagtaacacaagacaaaagcagaaaagatcaccca

SEQ ID NO: 400558 - DNA, 543 bp, Homo sapiens
ttgagtttttaatcacgaggaaaataaaacacttatttcaattaagacaatttttatctagttaaataattttcaggtttttccatttgttttattttctacttttcacatgttccatgtggttatatttaggtaaaagttaagaaacaacgatacataaagaaaaaatatttgaattatttataaaactacttcaaaagaatcatttttaaaataaarttgccttttaaaagggagaaacagtctgaaaaagattgttttcaactcaacagtttttcattttatattctttactatattttttaaagcctaagccacttattttataagatgatactaataacaaatcaaattttcattttatgtatcaattgacctctaaattgagaaatatatatatattaactatattaaacctcaaattttttagttcactaactccctaagccctgaatactgttaaggtactagttttggagaaagaacccttattttaatatcttatttctgtcactatgacctaggaaagttatataactcctg

SEQ ID NO: 400559 - DNA, 543 bp, Homo sapiens
ttgagtttttaatcacgaggaaaataaaacacttatttcaattaagacaatttttatctagttaaataattttcaggtttttccatttgttttattttctacttttcacatgttccatgtggttatatttaggtaaaagttaagaaacaacgatacataaagaaaaaatatttgaattatttataaaactacttcaaaagaatcatttttaaaataaaattgccttttaaaagggagaaacagtctgaaaaagattgttttcaactcaacagtttttcattttatattctttactatattttttaaagcctaagccacttattttataagatgatactaataacaaatcaaattttcattttatgtatcaattgacctctaaattgagaaatatatatatattaactatattaaacctcaaattttttagttcactaactccctaagccctgaataytgttaaggtactagttttggagaaagaacccttattttaatatcttatttctgtcactatgacctaggaaagttatataactcctg

SEQ ID NO: 400560 - DNA, 627 bp, Homo sapiens
atctgcatctacgtttcaaaacttaaataacaacctctgacttctaamcgacttagaaaataactgaaatattatattatttatgtagtgtactcccaatatcaagcattacatttttaaataaatgttttttctgctctttagtacagatgctggtttaacaattcatgcattagatatttggaagtaaattataaattttattattatggagccattaaataaatatgatacattatttttaaataagtacagaatatgtaaaattccatatatctcaatgcagtgtgactgctttttatattgaaaatcttatgatgacttaatacccgagtgtggtttcaagttagtgtgctacaagtgcttctgctatttttgattttccttttaggacttattggaggaagagagagagagagagagagcattcagagcgccagtaaaaaacaaaatcaatgctttgctgctgttgttgctgttgttgggctataaacactctactttggttggttataatgctaccaaaatccacagtacttaatttatctaaccttctgatagtgaatgaacaaaggtaaaaataacaggctagttataaactagtactatggtgatgacattgtgaat

SEQ ID NO: 400561 - DNA, 608 bp, Homo sapiens
aggaaccctgcattgggaagaagcttacaactgacactgtatacagctctggaaaagtaaagtaaaaagtgtgtgtcctgagaaaacttccagctattccggaacatgtccttggccccttctctacacgaacgtcctgcaaacagcctgtcaaggaagaatttattaaaagatgaattatgaaaaaagaaatgaacacaggatctgcagaataataatcagaaagtagctggcacaatataaaaagaccttgctagggaaaatcggagcaagactaagggacaatagtaaaagagggacatgtactaggaaaacattgccataaagaagaacaaacaagtacaaccacaaatattgctgcgagttaaataagtacataaaaatactgaagtatctgactttataaaataaaagtccaaactggaggtacaagaggwgtgattttaaactaaaggcattacttagaaaggcagagagagaaagtatgatgtaatgaagcccatagtgaaagcagttcagaatagattttcatttctgaaaaacaaaatttaaaaatctataattatgtggtagacaacagataagagatttgaaataaaatgcaaatg

SEQ ID NO: 400562 - DNA, 634 bp, Homo sapiens
tggctaatattcctccttgtgaaaccaatgacaataattcagccacaaatraagaccctacgcaaagcttcagccttccgcaaacatctagaaatgaagccaactgatggtactcaaatgtcaccacagttaaagaacatcagtccacacagatgagaaagaaccagtgctaaaactctggcaactctaaaagccaaaatgtcctcttacatataaatgactgtactagctccccagatatggttcttaaccagaataaaatggctgaaatgacagatgtaaaatacagaatttagatggcaacaaaaatcaagattcagaagaaagctgaaatctaatccaaggaatctaaggaatccagtaaaacaatacacaagctgaaagataaagtatctgttttaagaaagaacaaaagtgacctgacagagatgaaaaactaactataagaacttcataaaacaatcagaattattagcagcaaaataaacaaagctgaggaaagaatctctgagcttgaagactggttctttgaattaactcagtcagacaaaagtaaagtaaaaatgtatttgaaaaaataaacaaaatatctcggaagaaatataggactatgtaaagagaccaaatttgtgac

SEQ ID NO: 400563 - DNA, 634 bp, Homo sapiens
tggctaatattcctccttgtgaaaccaatgacaataattcagccacaaatgaagaccctacgcaaagcttcagccttccgcaaacatctagaaatgaagccaactgatggtactcaaatgtcaccacagttaaagaacatcagtccacacagatgagaaagaaccagtgctaaaactctggcaactctaaaagccaaaatgtcctcttacatataaatgactgtactagctccccagatatggttcttaaccagaataaaatggctgaaatgacagatgtaaaatacagaatttagatggcaacaaaaatcaagattcagaagaaagctgaaatctaatccaaggaatctaaggaatccagtaaaacaatacacaagctgaaagataaagtatctgttttaagaaagaacaaaagtgacctgacagagatgaaaaactaactataagaacttcataaaacaatcagaattattagcagcaaaataaacmaagctgaggaaagaatctctgagcttgaagactggttctttgaattaactcagtcagacaaaagtaaagtaaaaatgtatttgaaaaaataaacaaaatatctcggaagaaatataggactatgtaaagagaccaaatttgtgac

SEQ ID NO: 400564 - DNA, 559 bp, Homo sapiens
aaattgaataaggagatggggctgttaagtaagaaacttaagcccacatttcatattggaaccctggatcgttaattataatgtgggttttccaactgtgttccataaagtcctaccaagatgtagtagaaggggccactatatttaaaataaaacaaaaacaaacgtacaacatttttgtttttattataaaaatatacatttaaaaaaataagacaaacttatgaaaaagataccataattccacactatcaatgaactataatttcattaatatgtgtccctctgtcttccttaccccaaaatgggatcaaactattaagaaaaaactttgtagcctacatttttacttaatacatcatgaactgcttyctatgttataaacaatttgtgtaacagttatacattcatacttgtttatccaataaaaaattgcttacagataatttattatattacagatacattcactttccagggatacaatggtaaaccaaagatatgtgttgctgatagtgccaaatcatactagaatttgggacaaaagaactggttgact

SEQ ID NO: 400565 - DNA, 547 bp, Homo sapiens
cagtctacaaccaccagaatttttatgatcctctctgtcatctagctattatctatgtattatctaactctatctaattagcartaagaacattttcccagataaacaaatgtagattttgaattgattgcagaagaagtcagagagggagaaaataattttttttcacaaacataagaacatatatgtatttaaaaatgtgtgagaatgtctgtgtctatgcatgtgtacttattcccaatttttactaattttgtcctataccaatcatgtgcgcttccttgtaacttttcctttacctaaccaaatatgaatgcaccaggaagctctttaattgggagtgggtatgatctccaagtgtgtgggactggtccatatgaattaaaaaatactaaaggaaatagagagctctccacttaaaattagtgctcaaaacagagagtaattaggtttagtagaaaactcagttaaagttgttatgtgactacactattagaattaagaggtaactgagatttcccaagtgataatagataatttgctgttt

SEQ ID NO: 400566 - DNA, 634 bp, Homo sapiens
caccttatctttcctttttctgtctttaatggataatgcatacatgttttacttctattgacagtgtaaaaacatttgaaaataaaatgtgtggagaatctcattgctattcatacaaacaaacrgacaacaaacaacaaaaagtgtgaacaataaaaaataagactaacttcgttatggctgttgactaatggacttgtctaatcaagatacatcaagaagccctgatctaagaactgactagcattatccaagaattttctggatgtggctggagtgtgagaattccacattgattgtgcatatgttttaaaggattgatcttccacaaaaacaaaatagaaataaattacccttatccataagaaacaaattataagcaagattggttttccaaaatccacattagatggaattgtagtgtctgaatggaagtctttactttatgaaaattataattattttgatttttgtccacaatcagcttgaaatgttgcaaaactctgcaggtgctcactgttataacaaaaccatgggaacagatggtgcaaggtaccaggccagctcaagggattaaatgtgaggcttttgaaatttaaaattaaagctgggtgatcttgggaaaacctgcctg

SEQ ID NO: 400567 - DNA, 554 bp, Homo sapiens
acaagcttttgtatgtgttttctcctttccatttcatttagttcagttctgattttggttagttttttcttctgctagccttggggttggtttgtttttgtctttctagttcctttaggtgaaatgtaattttattccttttgtggctattgtgaatgggattgtgttcttgatttagctcagtttgaacatcatttgtgtgtagaaatgctactgatttttgtatgttaactttgartcctgaaactttggtgactttaatttgagacctttctaactttttgatgtgggtgttaagcactataaactttcctcttaatactgctttagctcggatcccagagattctagtatgtttcatctttgttttcattattttcaaataatttcttgatttctgccttaatttcattctttagccaaaagtcattcaggagcaagttgtttaattaccatgtaatttagttgctttgagagatcttcttggtattgatgtcattttttattgcactatggcccaagattgtggtttgtgtgattttgtgttttgggat

SEQ ID NO: 400568 - DNA, 535 bp, Homo sapiens
acaaagattctaccatattctatcaatgaaattcttaattgctggctttattacttatatgaaaagcataaacaattaatcagtattctgattctcttttatacatgtataaatctatttttatgatgattcctatgatgtgtttgagttttaaactaaaactaaaactygtgtagggaatggcaaaaccactcttcagcaccaatttggaaagcataatgattgataatagcatacacacaggcaaagacacacaatctgaaatatagtcaagtatgttagaatgaaaaagtgcctgtctgatgggaagaatggatagggtatggattaaggctggtcagagaaaaggaatatgttaatgatgcccaggagaagaatgaaagggattgctaaatgctctagggaaggaagtcttcagacacatctgaggtgggtaaacttctgactgtaataatttccaacgtaggcatagcttgttctcctgtttacaaaaaagaagtgaaaacactagaaaataggtgttgagggggtgggg

SEQ ID NO: 400569 - DNA, 535 bp, Homo sapiens
acaaagattctaccatattctatcaatgaaattcttaattgctggctttattacttatatgaaaagcataaacaattaatcagtattctgattctcttttatacatgtataaatctatttttatgatgattcctatgatgtgtttgagttttaaactaaaactaaaacttgtgtarggaatggcaaaaccactcttcagcaccaatttggaaagcataatgattgataatagcatacacacaggcaaagacacacaatctgaaatatagtcaagtatgttagaatgaaaaagtgcctgtctgatgggaagaatggatagggtatggattaaggctggtcagagaaaaggaatatgttaatgatgcccaggagaagaatgaaagggattgctaaatgctctagggaaggaagtcttcagacacatctgaggtgggtaaacttctgactgtaataatttccaacgtaggcatagcttgttctcctgtttacaaaaaagaagtgaaaacactagaaaataggtgttgagggggtgggg

SEQ ID NO: 400570 - DNA, 574 bp, Homo sapiens
accatatcttattaaagcacatttaattatttctaagttttaaacaccgatagatgaaggccataattaatgtgcctaccactaaacattttatttactcttgatatattaatggtattatcaagaaaatatgctacagtttcaagtttaacaaaattacatggcaaattatcttttgatgcatcaagcaattgttaatataatggaataaattattttaacacctcagtagtaatggatgggtaaaagaaagtaagcattttaattttcagaatgtttttgcaattacacatttcagaagacagttaaatcaatgatccaagtgtttggaattttagaaacagaaacraaaacaatttagaaaggtgacttgtaggctttgggtttcttacatgcaagagatgtatcaatgtaactgatctcataacagcaaagttctggtaaaaggtttggatgaaaaaaatgctgtttctgaaaattatattttgatgtgctcagtcacacaaactttcaaatttatattttttcttaaaataaaaagattagcatgtacattttatatacatttgattaa

SEQ ID NO: 400571 - DNA, 602 bp, Homo sapiens
tcacaatggcaaagacatggaatcaacctaaatggtatactgaataaagaaaatgtgttacatatgcaccatgaaatactatgcagccataaaaagaatgggatcatcttttttgccacaacatgggtggagctggaggttattatccttagcaatctaattcaggaacagaaaataaatattacatgttctcayttataagtgggagctaaatgatgagatgtcagggacacatagagaggagcaacacatactggtgtctactggagggtgaacggtaggtggagggagagtgtcaggaaaaataactaatgggttctaggcttaatacctaggtggtgaaataatctgtacaacaaacccccatgatacaagtttacctatataacaaatgtgcacatgtactcctgaacttaaaagttaaaaaaacccaccaaaacatgaaacacttaggtataaatctaataaagtatgtacatgtgtaagcaaaaaactatgaaacactgattaaagaaattagagaccaaataaatggagacatgttgtgtttattagaagtcttgatattaagccgttaactgttcccagattgatagcaatat

SEQ ID NO: 400572 - DNA, 602 bp, Homo sapiens
tcacaatggcaaagacatggaatcaacctaaatggtatactgaataaagaaaatgtgttacatatgcaccatgaaatactatgcagccataaaaagaatgggatcatcttttttgccacaacatgggtggagctggaggttattatccttagcaatctaattcaggaacagaaaataaatattacatgttctcatttataagtgggagctaaatgatgagatgtcagggacacatagagaggagcaacacatactggtgtctactggagggtgaamggtaggtggagggagagtgtcaggaaaaataactaatgggttctaggcttaatacctaggtggtgaaataatctgtacaacaaacccccatgatacaagtttacctatataacaaatgtgcacatgtactcctgaacttaaaagttaaaaaaacccaccaaaacatgaaacacttaggtataaatctaataaagtatgtacatgtgtaagcaaaaaactatgaaacactgattaaagaaattagagaccaaataaatggagacatgttgtgtttattagaagtcttgatattaagccgttaactgttcccagattgatagcaatat

SEQ ID NO: 400573 - DNA, 567 bp, Homo sapiens
tttgtagtttgatgttatcctgtttgtttttgcttttgttgtctgtgcttttggggtyatatctcaaaaaatcactgcccagaccattgtcatgaagattttcccctatgctttattctagtatttttaccatttcaggttttacatgtaagtctttaatccattttgatttgatttttgcaactgatataagtatctgatttcattcttctacatgtggatatcgttctcccaacagcagttactgaggagaaaatctttgtcctattgtgcgtcgttttgcatctttgtctaaaatcaattgattgtaaattcctggatttattactaggatttctatactaaaccattggtctatgtgtttttttcatgccagaaccgtgttgttttgactactatagctttgtagtagtatgatgcctttagtcttgttctttttctcaagattgcttgtctatttggcaaccatttgttctatatgaatgtaggattgttttttctatctcagtgaaaacgtcattggaattttgatagggattgcacttaatctacagatcaccttaatat

SEQ ID NO: 400574 - DNA, 566 bp, Homo sapiens
ggatcttctgaccaaaacttggaggaagtgacgaagcaagctgtgctctgacagcagttaagcccaaagcccagaggtgaaaagattcacgcaatgtcaagggaggaattgcagcttcagtgtaataagtgatgggagtgtaataggaaataaggtaatagaaaacacgggaggttttggtggtggtggtggtggtgatggttagctctgtcggacttcataaagccatttttgatggctttagttttcactcagtgaaattagaagccactgattttttttttctctcttagcatattgtatcttatattttaaaaagatcactctggttacaatgctaagaatattcacaggttgggatggggtggagttaaggctaaaagactagtgaggaaggtagtattacagatgacaggggaagatagtttaggccaggattgtggcagcagaattgcaagtgtcagatttttatatgctctggagatgaacccagtagaatttcctggtggattgtgagkggaatgatagtggggtcatggatgatgaagatatttggcttgagaaaa

SEQ ID NO: 400575 - DNA, 532 bp, Homo sapiens
gttgtcttctatgtactgtatataccacctctgtttaatgaaggagatcttctgggtacctctactttttatacatgaaaaagggtggcatggttcctgaaagatgtatgtaaattttttctttcccatatgcccatgtgaatgatcacagggcccttcaggtgaatgccaggaagacagttttggtataatccagtacaggattctttgagagtacctggttgtttcttcatgtaaggaattaatggggctataaactgagtaaagtgtgggaattgggtgaaggcctgtgactaaataatgaaaacatttagactttggtgagactttatattctgtccctacatactcctctttcatctttttatctttttcctctgagctttggggtatttagtcaaaattttcttctaatttatttttattttaggttttattttcccattatactttgaaatctatcatgtgtgtatagttcmtcctaatatcagttgttatgttttcaccttttgacctttttgagaacaggact

SEQ ID NO: 400576 - DNA, 579 bp, Homo sapiens
tatcttctccttcctaccaaattatcctcttttataatcttgtcacattctcttctaaggtgcattcattcatcaaacatttcagaagtgaccatattaaatattggagatacaaaaatgagtaagtgaaattccagttctargatattcccagtacagtggtggaaacaaataatcagttatattaaggtgtactttgatatgtagcaaaggtatataataggtgttctggatggaggacagtgtgccaaacttcctaggattgaggaaacagttgaaaaggagtctcaaaaatatgacctgtgagcctgactcttgaaagataagtggtacaattttctagggaacttaggcaaacacctaagaaaagaaattatagaaggtgtagtacagccaagcaaagttgacacattacaaacacactacttttgtttgaaaatattatttcatctgtatatttgaataatagttgcaatagatacacaattagaaatgcagagttattttccctcagcattggaaaatgtggttccatgctgttttgacttccacttttgatcctgagaagtctcctgtctg

SEQ ID NO: 400577 - DNA, 565 bp, Homo sapiens
cttgagttcagatggatagggtttgtccatgttcaattttgtgagttactgcaagactactttacacgtttttgaaattataatcacaccagcagtttatgaaaattgccgtttctccatattctcactatcatttaatatttttgaaatttaaatgtttactactttggatgcgaaatgaatcacatagtttaaaaactttattttgaaataattttaaaattatagaagtatcrcaagaataaaatgattcctcttatttacccagattcattggttcaccatatttgccttattttttgaatttgtacgtgaatgtatgcatgtgtgtgtattactgtatgtatatatgtaaaatacatatatatacacacacacacatttatacatgcacatatatatatatatatatgcacacacatttttttccttatccatttgagagtaagtacctacactatctcacaacacttcagcatgtatgtcctataaataatgctttctgcataatgatgctacatcaattgaaataaagaaatcaacattgataacactcctaccatcc

SEQ ID NO: 400578 - DNA, 565 bp, Homo sapiens
cttgagttcagatggatagggtttgtccatgttcaattttgtgagttactgcaagactactttacacgtttttgaaattataatcacaccagcagtttatgaaaattgccgtttctccatattctcactatcatttaatatttttgaaatttaaatgtttactactttggatgcgaaatgaatcacatagtttaaaaactttattttgaaataattttaaaattatagaagtatcacaagaataaaatgattcctcttatttacccagattcattggttcaccatatttgccttattttttgaatttgtacgtgaatgtatgcatgtgtgtgtattactgtatgtatatatgtaaaatacatatatatacacacacacacatttatacatgcacatatatatatatatatatgcacacacatttttttccttatccatttgagagtaagtacctacactatctcacaacacttcagcatgtatgtcctrtaaataatgctttctgcataatgatgctacatcaattgaaataaagaaatcaacattgataacactcctaccatcc

SEQ ID NO: 400579 - DNA, 580 bp, Homo sapiens
caaatgcatgaaatttggggtcactcagaagtccatagtctcattcgagacttcagacacaactcattctgaatcaaattttcctccagttgtgagtctgtgaaatcaaaataaattgtctacatccaaaatacaatggtcagacaggcataggatagacaktcacattctaaaagggagcaacaggaaagaagaaagggtaaataggtcccaagtaagtcttgttgatctaaaggaagaaactaagacaacaaacataattttaaagagcttatttgagccaaggtgaggacagctgcctgggaaacacttccaatttgccttgggatgtacttcattcagcctttgttacaaacagatttttaaaggaaaagaggggtacaaataatggcttaatacaaggttgttaggaattatcattagtttgcaaaatgatattggttagtgattagctatacattgttgaactatatggtatgagttatggtgtccagcatgactcttgtcatccacaaggatggctaaagagtagaaatgagagctctcttggtgataccactttgcagactgggaagagatg

SEQ ID NO: 400580 - DNA, 580 bp, Homo sapiens
caaatgcatgaaatttggggtcactcagaagtccatagtctcattcgagacttcagacacaactcattctgaatcaaattttcctccagttgtgagtctgtgaaatcaaaataaattgtctacatccaaaatacaatggtcagacaggcataggatagacagtcacattctaaaagggagcaacaggaaagaagaaagggtaaataggtcccaagtaagtcttgttgatctaaaggaagaaactaagacaacaaayataattttaaagagcttatttgagccaaggtgaggacagctgcctgggaaacacttccaatttgccttgggatgtacttcattcagcctttgttacaaacagatttttaaaggaaaagaggggtacaaataatggcttaatacaaggttgttaggaattatcattagtttgcaaaatgatattggttagtgattagctatacattgttgaactatatggtatgagttatggtgtccagcatgactcttgtcatccacaaggatggctaaagagtagaaatgagagctctcttggtgataccactttgcagactgggaagagatg

SEQ ID NO: 400581 - DNA, 467 bp, Homo sapiens
ttaatacaaggttgttaggaattatcattagtttgcaaaatgatattggttagtgattagctatacattgttgaactatatggtatgagttatggtgtccagcatgactcttgtcatccacaaggatggctaaagagtagaaatgagagctctcttggtgataccactttgcagactgggaagagatggtccctggcatgtgccgaaggtgctctctgaagagaggaaggatsgaatgggttttatgcctcatagggcctgtatcacacaatagtatcataatgttcatcaagttttggggaaaagctgtacatatttatgaggggagctgagcacatgtgcaatgagtaaacatatatgtaacatacatcccatgttcactttgggatggattttagcattaaaatgagatggaatttggctgttcatgttaaaggtgaaccataggacacaaaggaagtttggtt

SEQ ID NO: 400582 - DNA, 467 bp, Homo sapiens
ttaatacaaggttgttaggaattatcattagtttgcaaaatgatattggttagtgattagctatacattgttgaactatatggtatgagttatggtgtccagcatgactcttgtcatccacaaggatggctaaagagtagaaatgagagctctcttggtgataccactttgcagactgggaagagatggtccctggcatgtgccgaaggtgctctctgaagagaggaaggatggaatgggttttatgcctcatagggcctgtatcacacaatagtatcataatgttcatcaagttttggggaaaagctrtacatatttatgaggggagctgagcacatgtgcaatgagtaaacatatatgtaacatacatcccatgttcactttgggatggattttagcattaaaatgagatggaatttggctgttcatgttaaaggtgaaccataggacacaaaggaagtttggtt

SEQ ID NO: 400583 - DNA, 502 bp, Homo sapiens
tccatttttaagattgctggactgtattttctaaggatgtctttaatttgtgcattattaaacttataaccttctgaattattaatttgattrtgcattccttttaggataattcatcatatatttcatctttgataagtcattcttaggaagatggagtgaaaaataaagatatcttttagatttaaaagtagaaattttggccaccagatggagacccagtactgactttttgtgataggttgactatccgagagaagtaaccttaagaatacatgcttaaactgaaatgcatttttttactcctaatttgtatatttctagcaactttactcattagagatattattacctatatcaaggaaggtgtggagtggttagcaagttgtactagagaagaatcatagaatataaagcaaccagaggcgaatgtatttgaagatcagggttcttagctgattctctggtaaagtaaggtcagaagagaacaggctgttgaaga

SEQ ID NO: 400584 - DNA, 502 bp, Homo sapiens
tccatttttaagattgctggactgtattttctaaggatgtctttaatttgtgcattattaaacttataaccttctgaattattaatttgattatgcattccttttaggataattcatcatatatttcatctttgataagtcattcttaggaagatggagtgaaaaataaagatatcttttagatttaaaagtagaaattttggccaccagatggagacccagtactgactttttgtgataggttgactatccgagagaagtaaccttaagaatacatgcttaaactgaaatgcatttttttactcctmatttgtatatttctagcaactttactcattagagatattattacctatatcaaggaaggtgtggagtggttagcaagttgtactagagaagaatcatagaatataaagcaaccagaggcgaatgtatttgaagatcagggttcttagctgattctctggtaaagtaaggtcagaagagaacaggctgttgaaga

SEQ ID NO: 400585 - DNA, 547 bp, Homo sapiens
gattatttcgagtgcttgaccacacacgtgacttagcaaagtatcaagtttactttatacttcctagttcccagattccatcagtatgactctgttaatataatgcactagcatcatgttctgcaaaatgggaaacagtaaaagtccaagtagactagattgttttaccagccctgagaggtggtttaccctgaggcaaaataatgaaagttaacttctgctactgctgagtgagaacaagctgcgttgagtattgttyctttagtggtcagtagaaaaagaatttccagatcacaagctgcatgtcaggtgctaggagttggtttgctttactttagtgaagaggccaccacaactggactggaggcttcaattgacataatcacttgataaagttttccttctctaagacctgtcttggagttaagtaggaaagtgttaggaatttgtacctcagtgacctccaagaatttggtggtggcactaatttttataattctccaaagatatctggtgttcctttaaatgtactatttagatgaaaaga

SEQ ID NO: 400586 - DNA, 622 bp, Homo sapiens
catttacttaaaattaaatggctctgacacaattgtccaacctgaagtacacgactcaatctgttgcatatgagtttgcacatgtatgtgcatatgtgtgtgtatttaacttttaaaatgatgttataatgaaccaccatatttgcgctccacaggctggccatgggaacactgtcccatgcagaagtttttaataagctagtggttcttttccagtgctttaggaaatttttatagaaacatgcactaagtctggaagtagagacttaaaaaaaaaactggccgggcgcggtggctcacgcctgtaatcccagcactttgggaggccgagtcgggctgatcacaaggtcatgagatcaagaccatcctggctaacacggtgaaacccygtttctactaaaaatacaaaaaattaactgggcatggtggcatgcacctgtaggcccagctagttgggaggctgaggcaggggaactgcctgaaccccgggaggcagaggttgcagtgagccgagatcgcgccactgcactccagcctggatgacagagcgtgactccatctcaaaacaaacaaacaaacaaataaaaaacagctcacccaaatccccacagcaaatatatga

SEQ ID NO: 400587 - DNA, 621 bp, Homo sapiens
cttcttttaaggttttatctttatcattgtttttcaccaatttgattgtgatgtgtcttggtgtaattttcttcatgtgtcctgcttagatttcaatgagatttccggatctgaagttttatagttttcatcaagtttttaaagtttcagacattatttcttcaaatgcttttgtttccttcatctttgacattgtcctgcagctcaccaatattccttcctgtttgttttcccattgttttcactctttcattttggatagtttttcttgctatgccctcaaagtaaattaatctttggttctgcagtgtctaatatgctaattatttttagaatatttttcatttcatatcctgtattttcactcctaaaattcaagttgagtcttacttatatcttccttgtgttcatgtttttctctgtcttcttaaagtgtggagttgattttgctgttctaacattcttatttgttaaatttataatctctgccatttctgggattggttgattgatttttgccccctctggctgtgggttgtattttcctgcctgcttacctaactggygatttgccattggattctggtcactgatggttgctggattttatctctttagata

SEQ ID NO: 400588 - DNA, 181 bp, Homo sapiens
cagtcttctaaggtaactattgccctgaaaagaatactcctaagagtaattatgtattctgtgtcttagactatgtttagggaagaaagtttattttaacattgaaattgtttctgtgtgcaaaacactrtgctctctagggacaaagcaggaaaggaaaagggaaaaagttgcgaagaca

SEQ ID NO: 400589 - DNA, 622 bp, Homo sapiens
ggtataacatatatatatatataaagtgcactcatcttcagtgtacaggtcaatgaagtgtttttgtttgttgttgttgttgttgttgtttttgtgtgtgtgtctcacagaaatttgaataatatggaaaaagacacaatggccctacaaaggcaggcttcacaatgctactattttaaacagctgcttatttgttcagtgtttcaggggaatttacacttcagggtaacagacagtaataaatataggcgatgaagaccttttttttttttttttgagatggaatctcgctctgtcacccaggctggagtgcaatggcgtgatctcggctcactacaaactccayctcctgggttcaagcgattcttctgcctcaccctcctgagtagctgggattacaagcgtgtgccatcacacccagctaatttttgtatttttggtagagacagggtttcaccactttagcgaggctggtcttgaactcctgacctcaggtgatccgcccaccttggcctcccaaagtgctgggattacaggcgtaacgtaccgcacctggctaggagacatctttatttataaattggaaactgggcaacagtgaaagggaaggagaaaaggggaa

SEQ ID NO: 400590 - DNA, 580 bp, Homo sapiens
cctgggcagggtttgtgggctgaggacactctctctcattccccttcagtatgtgttacgggcaggggagcctttgcatcccagtctgtcctgcaagcaagggctagggctttaaagagttcctgcacaggccgggcacagtggttcacacctgtaatcccagcactttgggaggccaaggcaagaaggtcacttgagtccaggagtttgagaccagcctggtgaacacagtgagacccagcctctacaaaaaataaaaaataaataaattaaaaaaaawaaataaataaataaataaattagctgggcactgtgatgtgtccctgtagtcccagctactcaggaggctgaggcagtaggatggcttgagcctgggaggtaaagcctgcagtgagctgagatcatgccactgtattccagcctgggtgatagagaaagaccctgtctcagaaaaaaagagttcatgaagtaacctccagtatgtgaaagatgataatcctggcctcaggtccaggtaggccacatagtaaaatggtgacagtaaagatgcctattgcatagccccactaggggatgtaaa

SEQ ID NO: 400591 - DNA, 500 bp, Homo sapiens
ttaattttttggtcttgatcattgtattatggttatttgagttgtcacaagtaggggtgaagagaataatctgtgctatttttgcaacttttctgtaagtctaaaattggttcaatggaaaaagttaaacacaaaggttattttagttagcgggagtgaaggggttgagggttgctggagaggaaaccagcggtacaggtggggctggatccacaggcaaggagtgtgggtctgctttgagggtgaagacgcaccacaggagggcgccacatctggcaatgatgccacctgatcagtgtcttaggaggtcgctctgtggagaatgggatgtagagaggaaaagaaaaggcaaggagactagtgagaaggctgctggggttgtcttgacctagagacaaagagaggcaaycagattttgtatatatttttgggatataggtgacagaactcagtggtggattggttgtagaacgggactgaaagagaatagtaaaggatgg

SEQ ID NO: 400592 - DNA, 601 bp, Homo sapiens
gaaaacagattgcagatgtttggaaacagatgttatcctaatgttaaggcaaaaccatgaatatttatgacaattattgcccagatcaaattacctcgcttaaccagggaggcaggcatgttctaacagctttggccgggacctggtgagggaaagacagaaaagtattgatgaacttttggttgcacttgaattttccttcacctgggatccatttttttttctgtcttcctgtggacctgaaaacagagattggttgttatggaaccaatttagggattttcctgctgctmgtattaattggccaagtcaggattttccatcgtttttttccgcactgtgtcttagagaagggcctgccaaggtctctccaacctaagcagccatgggtacttcccaggctgtaggaggaaggctgggcttctctgcctttctccccgcccacctgccaggacccagggagccagcagaggccaggtggggctcaggggcaagtggaattggcagatgtccctacaggaggttgagagggctccaggctgactcactgccaagcagagctgatttttttcctgccagccaccccggcagaaatgccagc

SEQ ID NO: 400593 - DNA, 607 bp, Homo sapiens
cctgggaggcggaggttgcagtgagccaagatcgtgtcactacactccagtctgggtgacagagtgagactctatcttaaataataataataataatgataagccaggtgcagtggctcacgcctgtaataccagcactttcggaggccaaggtgggcagatcacctgaggtcaggagttcaaaaccagcctggacaaaatggtgaaatcccgtctctactaaaaatacaaaaattagctgggtatggtggtggaygcctgtaatcacagctacttgggaggctgaggcaggggaatcacttgaacccaggaggcggaggttgcagtgaaccaatattgcaccactgcattccagcctggacaatagagtgagattccatctcttaaataaataaataaataatttcttatatttaagtagtaaaatgtggtgttttgttctatgtatacattgtagaaagattcaatcaaggtaattaacgtacctttcaccttaccaacttaacatttttttgaggggagaatattaaaaatctattcttaagcaattttgaaatatacaatatattattattaactgtggtcacaaagtcttattagttgcttg

SEQ ID NO: 400594 - DNA, 538 bp, Homo sapiens
ggtataaccaaaaaagactaaggtgttctaggaggtcacaatgaaggagctgagattttaattaggkatagaccttagtttgttctgtcttgaagagaggaaaagacagaaaaaaaaatggtaaagagtaagaaacacattgttgagttatggtttgggaagaggtggaggagggagggatcagtgtgagcaaagctatcaaaatggaactaagtactttgataaggaaaacagaaatgtgaagttaggaaagagatggacgaaggaagaggagaaaacatatttatgtcatatttatgtcaagaatcatagcttttacaggcataccttggagatattgtgagttcagtctattaagtggtaacagcattgatatggcttggatcttggatttttttgagtgttctcacccaaatttcatgttcaattgtaattcccagtgttgcaggtgggaagtgattggatcatgggggcagttaaaagaaaactttagacaaattaaatttaacagagtttaattgagcaagagaaaaacatt

SEQ ID NO: 400595 - DNA, 538 bp, Homo sapiens
ggtataaccaaaaaagactaaggtgttctaggaggtcacaatgaaggagctgagattttaattaggtatagaccttagtttgttctgtcttgaagagaggaaaagacagaaaaaaaaatggtaaagagtaagaaacacattgttgagttayggtttgggaagaggtggaggagggagggatcagtgtgagcaaagctatcaaaatggaactaagtactttgataaggaaaacagaaatgtgaagttaggaaagagatggacgaaggaagaggagaaaacatatttatgtcatatttatgtcaagaatcatagcttttacaggcataccttggagatattgtgagttcagtctattaagtggtaacagcattgatatggcttggatcttggatttttttgagtgttctcacccaaatttcatgttcaattgtaattcccagtgttgcaggtgggaagtgattggatcatgggggcagttaaaagaaaactttagacaaattaaatttaacagagtttaattgagcaagagaaaaacatt

SEQ ID NO: 400596 - DNA, 550 bp, Homo sapiens
attttacaaatatagaaaatgatactgtgggaattcaagtacatttggaaagtactgttagtaaaaagaacttcagttttgctcaagagaaattaattttttctaaaactcatgggcccccattatcttttctggttaatgctatcttgttatgatataagtcatattaatctccatctatctttatttaagttttacttggccaggctgatgrgatgacaggtcatcttgtagatgtgtcagtgttacaacacactgaaaactatgaaataagatgagcattaacactgagctaattctctactcagcaagtagaaaatgtccatttccatgaaaactgattgtgaaaaatgagaatagtcagttaaggatctagacatagctagtggacagaatctgacatgcactcttgactcagtctcagtttcattttccctgcatgaataggatctgtatttgagaatgataacaaacattttgtataaacctgagaaattatatatatatttgtatgtgtaggtatgtatacatatatgtatgtatatgcgca

SEQ ID NO: 400597 - DNA, 485 bp, Homo sapiens
aaagtaatgttgaatatggagagatggttatagactgactgtcaatagtttcctgttgaggtctattttttatattcttcaagctattggaggatatctttaactaaagatggcctttgtaaaatgtttccaaagaacccgtaagagaaagaaattattatggagtaaggctatgagtcaggggactttttgaactactaaaaatgcaatgtctcctagagaatgtgtgtaatgtaacaaatgaaactgctagaatagagcctgagcatgctaataaaattgctccaagkcttctaactttgaggtagcctaaagaaaatgtcttcattatacatgtgtgggttaccttaaaattaattttaatcatgaattggtaaaaggaaaatcaagtcccccctcaaaatgaatctctgcttgaaacacatgcctctagttaaaagttattctcaataatgctcatatttggaaatacacaatggaatatt

SEQ ID NO: 400598 - DNA, 550 bp, Homo sapiens
aaaggtgttacactttgaaaatgacagtgaaaatgtaaagaattatatgcaacartttaaaggaaaaatcaataaggcttagggattaaatgaatgtaggaaatgaagaaaaatggtgattcaaaatgatactagtactttgagctcaggaaattgcgaaaatggtaacaacctctgacaaaacacagtggttatgatgggaagttctttggaagatgggagtgtgtgaagagttcagtttcaaatgtaatgcttttgagaaatctaagtagaagtgactgactagcactttgagtccgggcacttgagtgaaaggactagattggagataagaatttgggattccctgtaaaggtactagctgtatcttttccatgaaggaaatgtggaggacattagtagagtctaagtaatgagtttggaaaaatattatgtttagaaggtgggaagtgaaagaaagatgggctaagaaagagtgagagctttgatgatgctagtttttttaattaatgagccaatatattatcaattgtcaggacataaatgataa

SEQ ID NO: 400599 - DNA, 590 bp, Homo sapiens
gctaataaaaaagtaacaataaaatttmatttaatcatttagaattataaatatttttgttgctgttattgttttattttgctatattttaaattgggtccaaaataattttagaaaacagtaggagaagctcttttgcccaatgtaggatagccacaggcttacagatacttctttgagtgagatcgaattttagaattttatggtaaattgtttctcaactaaatatacactttagttccaaaaaataatttttagatatatcactaagtgttaagaagtgcttcatgttttataaggtgaacatttattttaagattaataatagaaaaaataagcatctatattgggtacttttatgagtcttaaagaagtaagacttcattcaaatattcatttattgaccaccatatctgtgcccatttctaatatttattctaccttcctctagctgtcctcagctatgtttaacattccttttataaaagaaaatgtaattatttaaaaatctatgtgctgcagtatgtatgcttcctacatcaaaaagcagagtgaacatacatttacaaacatcattgaatgttaataaa

SEQ ID NO: 400600 - DNA, 608 bp, Homo sapiens
gtttgaatgtttgtgcttaggcagatttgaccaattaaaactgccttaggagtacatattacttaaggttttccagagaaacaatacccaaaggatatgtgtcctattatatatataatatattattttatatatatatatatacacatgcacatgtgtgtatgtgtgtgtggtgtgttttargaaaactacaactactctattcaaactagttcagtgttttcttggttaagaaaacactgtgggttttgttactgaaagttactgaaaggttttgttactgaaagtgggttctttacttttagtgaataaaaactattaaatataatgaacaggttaatttttaatgatacttagccctaggcttaaagaaaataatgtggggatttgaataacaaagagtaatgtatgtgcgatgtttgacgtttccctaataaagagaagaacctgtaggatagatgaaaaagaaattgaaatcgagggtgggggacggggggcagagggggaaacataatagctagcctatcttcttcaagttgatccaaaatttgtcagataatttaaagtcaaagtcatatggtgaaaaaattcttcaggctatttatatc

SEQ ID NO: 400601 - DNA, 608 bp, Homo sapiens
gtttgaatgtttgtgcttaggcagatttgaccaattaaaactgccttaggagtacatattacttaaggttttccagagaaacaatacccaaaggatatgtgtcctattatatatataatatattattttatatatatatatatacacatgcacatgtgtgtatgtgtgtgtggtgtgttttaggaaaactacaactactctattcaaactagttcagtgttttcttggttaagaaaacactgtgggttttgttactgaaagttactgaaaggttttgttactgaaagtgggttctttacttttagtgaataaaaactattaaatataatgaacaggttaatttttaatgatacttagccctaggcttaaagaaaataatgtggggatttgaataacaaagagtaatgtatgtgygatgtttgacgtttccctaataaagagaagaacctgtaggatagatgaaaaagaaattgaaatcgagggtgggggacggggggcagagggggaaacataatagctagcctatcttcttcaagttgatccaaaatttgtcagataatttaaagtcaaagtcatatggtgaaaaaattcttcaggctatttatatc

SEQ ID NO: 400602 - DNA, 601 bp, Homo sapiens
ggtgtcatttcagaaggctgcaggcagtttggctggcttgtttgggatgattctgtcccacaggagaagaggtagtggctaccagagtatgcttttcttatgtgcatcttagcagtacaggaagacaacaggaatcatgggtgcacatttgaaatctctgctagcatcacatctactcactgtccaaargtcaaggtaaatcacattcaaaggaagtatggggcctaaatatttgctgaataataaccctatctatgacaggtagagacccttagaatcaagaaaacatttaattattaaatacaattatttttatttattatatttgtttatgactggtttatacctgcttgatgtgccttatatctatgtattcactgggtagtttggaatttccctatcttcagccttatggggaggattttgctgcacactacagatgcattggagtgttgttttatcttagttaggaagaatatagctgtcaatggctgccagggaaaaaggctaatgaaaacactgacagaactttaagtatagccctgctgatgagtggtataatacagaaggttctttttctttttaattttaaaggtaaatc

SEQ ID NO: 400603 - DNA, 586 bp, Homo sapiens
cccagggatcttttcacacacaagtgtggtgaagcatttcagtgaagtcaggtgtctaaaacctttaatgaagggattattgatatgcagagcttccgatcacatccgcccttgttggatcagatcccagaggttgtcaggaaacaacatgagaaagatcagtcaggtactctcctctctctcctcttaactgaggcagggatccggatscctgaaacaaagcttcaaacagccaagcttccttgggacctgaatgctgaaatctcttggtgtcattacacaaaataaagcacacatttttggaaatggctttattgtaatctgtttgttaaaaaaaatggaaaaagcaatgaagaccacggatttgggcttcttcatatttatattcccatcctgctacagctgctaacatcatggcatgatgcttttacaattcacttccctgtcagtaaaattagaaccgcttatatctgctcttcagagttgtttgatatttgagcagaggcatgtaaaacatttcatacaggtcttagcatattataaatgctcaatatattataaccattattggtatatggccacttcc

SEQ ID NO: 400604 - DNA, 586 bp, Homo sapiens
aagcttccttgggacctgaatgctgaaatctcttggtgtcattacacaaaataaagcacacatttttggaaatggctttattgtaatctgtttgttaaaaaaaatggaaaaagcaatgaagaccacggatttgggcttcttcatatttatattcccatcctgctacagctgctaacatcatggcatgatgcttttacaattcacttccctgtcagtaaaattagaaccgcttatatctgctcttcaragttgtttgatatttgagcagaggcatgtaaaacatttcatacaggtcttagcatattataaatgctcaatatattataaccattattggtatatggccacttccccattaatttggtaataaatctccctccaaactctgatccattagcgtcgcaattgtaagatcaggcacgcagggactttgatgggcaagcctagtgaacatgcatcattaagcatttttatgatatgtttgaattgtaacagagccaattccacccttgagtagagacaaccttgctctccccttgaaggggattttggcatacgtatttatttcagctccaccctgtctaca

SEQ ID NO: 400605 - DNA, 586 bp, Homo sapiens
aagcttccttgggacctgaatgctgaaatctcttggtgtcattacacaaaataaagcacacatttttggaaatggctttattgtaatctgtttgttaaaaaaaatggaaaaagcaatgaagaccacggatttgggcttcttcatatttatattcccatcctgctacagctgctaacatcatggcatgatgcttttacaattcacttccctgtcagtaaaattagaaccgcttatatctgctcttcagagttgtttgatatttgagcagaggcatgtaaaacatttcatacaggtcttagcatattataaatgctcaatatattataaccattattggtatatggccacttccccattaatttggtaataaatctccctccaaactctgatccattagcgtcgcaattgtaagatcaggcacrcagggactttgatgggcaagcctagtgaacatgcatcattaagcatttttatgatatgtttgaattgtaacagagccaattccacccttgagtagagacaaccttgctctccccttgaaggggattttggcatacgtatttatttcagctccaccctgtctaca

SEQ ID NO: 400606 - DNA, 593 bp, Homo sapiens
cttatggggatccattttttaagaatcaactttccagcatcaatgtcactttttggagaaacactgatgtactggattattcctgggaaaatgctgataatctgacccctcccttatttttcagccccatatctagatatgcctcatccttcctgcctccataacattctgcaccccccttttctcagatggtttatggtctttggcagtttgtgtatgttactgcttctgctggagatgacattttttgaacaatgtggtggtaccttgatgctgcttaatcatctcaacttctcctgaggcatcagatgctcaatgaagcttttatgactgtggatccccacggtaccctctatactctgtgacagcacctttacaaacgtttattgtccttatttgtcccctctgctttctgagttcttactcattctgaattttcagacccaagcttggcagtgagcacaaagttagtgtttatgagatgttttatgtgtgactgyataaattaaggagtgaaattaacaacagtatgaaaaacatagatacattttttttcctactttagacaaaagagagtaatagttgaaggcagg

SEQ ID NO: 400607 - DNA, 532 bp, Homo sapiens
aaaacatagatacattttttttcctactttagacaaaagagagtaatagttgaaggcagggactttggagtccctgagtagtacctgccttcccatatttagtaactttaaacaarttattataccgaaaaatctggtctggtttctttatctttgaaacctgattaaagtccctctcctcacaagactgttgtgtgcataacataaggtaacacttggaaatgtttttgcatcacagtccccaaactgtgcccaggtgcccctgagtgctagcagcaaactcatagcagagatattttgagtttaaatgtaaggttgcacaacattatttttgatgctgtcatatctttgtgaagctgggttttgatagtggttgtgataaaaagtaagtgtcatgcaaaagtcaacgaggaacaggaaatgaggttggcaatgcccaaactggttttgcgttttgagaaattgtgcgacatctgatacgtgtgcacagattttagtaaatcactgtggatattttttaaatgaaataaaa

SEQ ID NO: 400608 - DNA, 562 bp, Homo sapiens
agagtaatagttgaaggcagggactttggagtccctgagtagtacctgccttcccatatttagtaactttaaacaagttattataccgaaaaatctggtctggtttctttatctttgaaacctgattaaagtccctctcctcacaagactgttgtgtgcataacataaggtaacacttggaaatgtttttgcatcacagtccccaaactgtgcccaggtgcccctgagtgctagcagcaaactcatagcagagatattttgagtttaaatgtaaggttgcacaacattatttttgaygctgtcatatctttgtgaagctgggttttgatagtggttgtgataaaaagtaagtgtcatgcaaaagtcaacgaggaacaggaaatgaggttggcaatgcccaaactggttttgcgttttgagaaattgtgcgacatctgatacgtgtgcacagattttagtaaatcactgtggatattttttaaatgaaataaaaatatttttgttcaatattaatgtatttttcaaattgatactaggttattacaatgtagttatttaggta

SEQ ID NO: 400609 - DNA, 562 bp, Homo sapiens
ctatatcttcaacttcctttcctcaagtacatcctttaaatccacctaatgaaaacccaacccttatacacttgggtgtctgccttcttcatagcctaacccaagatcctgggcactggtggatcctccacagtccccaaacagtcctcaactgttaccgcctcaccctgcaatatttacaccaacttataccaactcacatgcagatgtatgcatcctctgactcccgctttccctccagcacatctcacttacccggaacattctcctttagtcacaccacttctttgagtctcttaaacacattatacttgggtacttctgagcacttttcttcctttgaccttgaaaactcttctactcatactgtaggtcttactttatgtatttattttcccaggaaaccttgtttgatactctaattctggtttaggtgtatgacgtgtgtaattccaaaacatatacatccccatcataatttttagtgcaaaaacaaaggtcagtgttwactaaatctgtgttgaataaatgagtagatgaatgaacaagcaatttagattgt

SEQ ID NO: 400610 - DNA, 559 bp, Homo sapiens
gaatgggtcacgtctggatcacctgcctatccctgccacagatgagattcaccgaaactgcatgattgacagtgaggaaagtgtagttctcaaaagaagctgaaattgctattcattgcaaaaagaaggaatactggaaggtaaaacataacaacgacccaatatcaagcacttacatttttattttttaacaagagaagaccttgagctattacacccattttggaagacagcaaggtacatttacatttctagaaccatctgaatttggcacaagctcttgtcgtggatttcccattgttgctgacactgtgatgtgcatgtcttttcwttcttacacaataaaccaaggtgctagacatttgtcaaacaaaacaaccttaactggtattcaggctctgcatcgggaagcaaacccacatcttcatcttcaatttcatttgactaccagggtggaggagaaaatgtcctcaggcaacaggtaggtgtttacctgcttgtggtctgggtgctcttttggctgggctgcatcgaagcactcgtaataactccactgcgt

SEQ ID NO: 400611 - DNA, 572 bp, Homo sapiens
ttaaaattatcgtggtgcatttactctgagaatatagttggccatttgtatctgtctgtggattcaactatggattgaaaatattagccaaaaaaacaataaaaaacaatacaacaataaaaataatacaaaatacagtataacaactatttacacattatttacaatgtattagctattataagtaatctagagatgatttaaagtacatggaagaatatgtgtaaraattttaaaatactgaaaatatgacaccattttattatataagagacttgagcttccgcagattttggtatctgcaggtgtctgaaccaatgccctgtggatactgacggatgactctatatacatgcagttacatacactttgctgtaagctgctcactacatgattttctaggtgaatgtacctgggaacacacctgagcacaaaatattgttttctagatgaagaagtagaagcttggtcacatctcctccagcctctgttcttccaggtcttctctctgggagaaagagcagcaaactgggagtgagaaaattagaatcttaccacagattgatcattgg

SEQ ID NO: 400612 - DNA, 359 bp, Homo sapiens
gggatagggggaagagaatatgagagaggtctggcctcttctcttccccgtttgtatttctcctccttttcatctatctaatcttgcagaatccttcttaaaattaaacagatgtcctgttctaaccaaaagctagatacacaaagaccaagaaataagtgatgagcttcaggaatgcacttcrggacatgtaaaatagaaaagctttatagtaatgtaatgtgttgattttatttttccccagatacttacaagttaaagaaatataatttaagaaaattacagcacagtctcaggtgacatttaagaattagacaggtgaacttgtttatttttgtggtctgtcaatgcattaaaaa

SEQ ID NO: 400613 - DNA, 589 bp, Homo sapiens
ggataaaatttcaatttaattgttctgtagtactctctatgtggctgaccattattatgaggtcaaatttaaatatagaaacaggattttggagataatctagtctaaccccttcattaaacagatcaggaaatcgaagctcagaagtcaggcagcttgcctaggaacacagcactgattcttcaggtattcaggactcgtttcttctagtgtgtaacactttattttcattcatagatctttcccttagctctctttccaggmggttaagataaactactggatttcaaatggaaattaaggagtaaattaaggagtaaactgaattttgtgcagagaaagaggcactaaaatgtccattgggatatgagacggattaggctagccttggtaaaattgtgaagtggttttccagagaccccaggaatctctaactccatcctactccctcagccaagtgcctcatgccctctccttgactcctgaaaactacaaactacagacaacaaaacttaataacagattgtcacgagacaatctgttattggttccagttttgcactcatgacttcctctatttgagaagttt

SEQ ID NO: 400614 - DNA, 420 bp, Homo sapiens
tgggaccacaggggtagactattagctcagttaatttttaaaacactttttgtagaggtggggtcttactatatttcccaggctggtcttgaactcctgggctcaagcaatcctcctatctcagcctcctaaatgattttctttttcagcttatatcccaagtattcagaaagtttctttgcaaagagaaggccctcaataactatttcttaaggagccaacagttatttacatttcagtgggcactcargtatgtcctcaggccccatcagccccagcctcatttttttttttaattttactttaggttctgagatacatgtgctgaacgtgaaggtttgttacataggtatacatgcgtcatggtggtttgctgcgcctatcagcctgtcatctaggttttaaaccccacatgctttg

SEQ ID NO: 400615 - DNA, 420 bp, Homo sapiens
tgggaccacaggggtagactattagctcagttaatttttaaaacactttttgtagaggtggggtcttactatatttcccaggctggtcttgaactcctgggctcaagcaatcctcctatctcagcctcctaaatgattttctttttcagcttatatcccaagtattcagaaagtttctttgcaaagagaaggccctcaataactatttcttaaggagccaacagttatttacatttcagtgggcactcaggtatgtcctcargccccatcagccccagcctcatttttttttttaattttactttaggttctgagatacatgtgctgaacgtgaaggtttgttacataggtatacatgcgtcatggtggtttgctgcgcctatcagcctgtcatctaggttttaaaccccacatgctttg

SEQ ID NO: 400616 - DNA, 420 bp, Homo sapiens
tgggaccacaggggtagactattagctcagttaatttttaaaacactttttgtagaggtggggtcttactatatttcccaggctggtcttgaactcctgggctcaagcaatcctcctatctcagcctcctaaatgattttctttttcagcttatatcccaagtattcagaaagtttctttgcaaagagaaggccctcaataactatttcttaaggagccaacagttatttacatttcagtgggcactcaggtatgtcctcaggccccatcagccccagcctcatttttttttttaattttactttargttctgagatacatgtgctgaacgtgaaggtttgttacataggtatacatgcgtcatggtggtttgctgcgcctatcagcctgtcatctaggttttaaaccccacatgctttg

SEQ ID NO: 400617 - DNA, 420 bp, Homo sapiens
tgggaccacaggggtagactattagctcagttaatttttaaaacactttttgtagaggtggggtcttactatatttcccaggctggtcttgaactcctgggctcaagcaatcctcctatctcagcctcctaaatgattttctttttcagcttatatcccaagtattcagaaagtttctttgcaaagagaaggccctcaataactatttcttaaggagccaacagttatttacatttcagtgggcactcaggtatgtcctcaggccccatcagccccagcctcatttttttttttaattttactttaggttctgagatacatgtgctgaacgtgaaggtttgttacataggtatacatgcgtcatggtggtttgctgcrcctatcagcctgtcatctaggttttaaaccccacatgctttg

SEQ ID NO: 400618 - DNA, 560 bp, Homo sapiens
ctggggtcttaaactgtttcctgtccatgcttcaggaatggcaggaagaagaggaactcgtgtttaagtatcttagtaggtgttgtcattctgctatctcattaatgccttactrtgggtctgtcagattggtaattacctcaatgttataggtgaagaaactgaatcctagaaaagtaataatttgcccagagtcaaattataattggcattaaatattaaatagtttacaagtgtgatatggtttggctgtgtcccaacccaaatctcatcttgaattgtagctcccattatccccatgtgtcatgggaggcacccagtggaaggtaattaaatcatgtgggcaggcttttcctgtgctgttctcatgatagtgaataagtctcatgagactgatggctttataaaaggcagttcccctgcacactctctctttcctgccaccatgtaagatgtgcctttgttcctccttcaccttctgctatgattgtgaggcgtctccagccatgtggaactatgagtccattaaacctctttttctggccaggcacggtggcgca

SEQ ID NO: 400619 - DNA, 505 bp, Homo sapiens
catcatcaccatcctcattattaataacagaagccaaaatgtcaacactgccagctcttcagtgcggcattctcaagtctgtggaaataaagttgttgtctgataattttattatattaacattcaatttctcagagaatttctcatgaagagtcaaataatcagcaggtcttgacttcagactgtttcaaataatccgtatttgttccaatacaggagttaggtgaggaggagtagttgattagccatggaaaaatacaaaattcagaggcacaaaagaaaaaactggcaggtcctgtttaagcaytggagaaggaaaaagagacactttctatttcagtagtagttctaccactgtgtagaaaagaataatcagcttattaaaatctgaagccaccaaacagtgaaggcaaatcaccaaatatcttatattgctactttgactttttttgaatcactgatgaagaaaatgtgcattatttcctgtctgagtttctggaaatca

SEQ ID NO: 400620 - DNA, 506 bp, Homo sapiens
tcccgacttgtataaacaaaagtggcccattgaaggcactaaattgggtcacattttagcttcctagcactgccaaaactatactcattcgaaattatgcctactttagcattrtaacatatcatctgtatgtctatggatttaatattttagcaaaggttgactactttcttttacctatataaatgtagataaggttgttttttccacactgctttaaatggaaacttccattgtttgggatacatagatgttaatggtacaactgaagattagaaaaaaaaaagccacaaaatattatggacttttatccatgtactggcacccactaaaaaatctgagtaaagctgactctatgcagtaaaaaggaaatacgaaaaaacaagactggaatcaaaactcagattttcttggctctataattagaaggagatttagagaatgtaaggaagattaactttttcaccatgtggattgacgctgtttaatgccacgccacctaaaag

SEQ ID NO: 400621 - DNA, 617 bp, Homo sapiens
acatccccaaaatattacttaatataatcattcttattcactgtatatttaaacacattttttaacaatttagaaacttaaaaagaaaacttccattactgaatcccgacttgtataaacaaaagtggcccattgaaggcactaaattgggtcacattttagcttcctagcactgccaaaactatactcattcgaaattatgcctactttagcattataacatatcatctgtatgtctatggatttaatattttagcaaaggttgactactttcttttacctatataaatgtagataaggttgttttttccacactgctttaaatggaaacttccattgtttgggatacatagatgttaatggtacaactgaagattagaaaaaaaaaagccacaaaatattatggacttttatccatgtactggcacccactawaaaatctgagtaaagctgactctatgcagtaaaaaggaaatacgaaaaaacaagactggaatcaaaactcagattttcttggctctataattagaaggagatttagagaatgtaaggaagattaactttttcaccatgtggattgacgctgtttaatgccacgccacctaaaagcatttagc

SEQ ID NO: 400622 - DNA, 611 bp, Homo sapiens
  misc_feature (1)...(611): n = A,T,C or G
nnnnnnnnnnnnnnnnnnnnnnnnnnnnnnnnnnnnnctgtttttttcatattgtagcaggaagataattacattgaaaaggaaccataggagacacatttgttttggtctgcccagtgtatagcctccctctttaataagaatacctcaggtttcctttggattaccactgctgacttctcagtcactgtggatacagcaaggctaatgccagtcttggctccaggaatcatcatgtgacctaagtcgggataaycacagtatcacctcctctgcactccacatcacatcctccatagaagtaccacctccagtggtacaaagataggctcacctggaattctcctagcacagtagagaaatgggagatctctttctaggaaggttggtgggacagtaacttgtcatcatggagctgccagatcactacattgcaaggactgtccaacacaaatccaacagataagagagcacagctgagagctggaaagtgattgacacctgacgctactgtcctagatccagctgtgctgaggcttatcagccagaccaaagattttcttccattgattataccactttgagttggatttttgttacttgaaaacaaa

SEQ ID NO: 400623 - DNA, 379 bp, Homo sapiens
atctacataattctattctgagtttaatgcatctcctctaatcattttctttccatgcataaaattaaaagtgagccaaawaatggccagatctggcacagaatcccttttgaacaaatgagaatctaataacctggaagatttgtaaagtgattcagatctttgctggtgtctctggaagaatacccaaaggagcattttattccaaaacaaaaaacctaaaaaacaatgactctccttcctcctataaactcctaagagtccccataccagccaacccagtcttccctctctctacttctctctctggttaagctcattattgtgcagatcaaggtaacatttctggatttggaggatctgatgggtatgcaaaagg

SEQ ID NO: 400624 - DNA, 594 bp, Homo sapiens
gacatttttttgtgtgtgagcatttaactttagttttatgaatctgagttttctaaaattcaaaatacaacggatggcctacatgtttttgaaagtaacttcaaaactctaaaatctgaagtttgtaatcttggcattaaaactcaataataaatccttttctataagcatataaataaaattattttctggatcattccattagcttttacagaacacccaaagtttgcttatcactctactactagcttctgtatttcattaacaagcttcagtaggtttctatttaaagattcatagttgttaagacaacaaaaatggctaatttttaggtgcttaactgtcaagygttcaaaaaggggcataacctcagaggactaaagtccaagggacttaggaacagaaatttaggtagacggagacacagcaaaaccctgtcattacataataagtgaggtctaagtaatccatttgtgtgaactttgagttgattcctgctagtctgataaagcaatatttttcagaactatgttaatagcataaaagtaaagataactcagatcacacattgaattgaagaagtcccacatgatc

SEQ ID NO: 400625 - DNA, 486 bp, Homo sapiens
ggtttgctgacaatctctggcattccttggtttgtggaagcatcactctgatctctggtttcatctttacctggcattttccccatgtgtgtctctgtccaaatttccctttgtaataacgacaccagtcacattggattaggggcctaccctcttctagtatgaccttattttacctaattatattgcaatgaccttatttccccatgaggtcacattctgaggtacagggagttaagacttcaacatattaattttggggaggacacaatttaacccataatataacacatgctacaacctgaccccaaacccaactctctaacctaactctgatagttttcttctgtatagtcaaaaaaaaaaaaaaaaaaragagagaagaagaagaagaagcctcctggtttcttctcaggtaaaattattctgctttctttgtccccatcttcactcccactgtctctggctttgtcctgttcctgctga

SEQ ID NO: 400626 - DNA, 649 bp, Homo sapiens
gaatcactgagtatgcagcttccaactgtgttggcctggtgtccccttgaagcatattacaaactgataactaatctgctctccccatctggtctctgcctcactcacagcatctcctgctttccaagttattcacactgaatgtatatccttccagggaaaactaaaaaaatcaacaaatgtgatccaatatggtaagatacctgtgaaaaaatggaataataggatgaaacatgtgaacactctctcactttggtcttataaagcatggaaattggataccctattttgagctcacattacaggagcaattatcccacatttcggagagtcaattatccttgcctgcctacttgattctggtctatccacacctgaaacattctatttaatttaagataattaagttaaataaatgatatasgcaaatggcaaaataaaagtagaaaagaaatagccaatgagtagaacagcagaattagcttttgagagaaggcggaagacttaggatagaaatgcaatgaattcaaatgtacgatttttcttacattttctgcctaatactaaatgtgatatttaatcgactattctgtctttctcaaaaattttaagaatccatttgagacctaggacaattttatactaccct

SEQ ID NO: 400627 - DNA, 649 bp, Homo sapiens
gaatcactgagtatgcagcttccaactgtgttggcctggtgtccccttgaagcatattacaaactgataactaatctgctctccccatctggtctctgcctcactcacagcatctcctgctttccaagttattcacactgaatgtatatccttccagggaaaactaaaaaaatcaacaaatgtgatccaatatggtaagatacctgtgaaaaaatggaataataggatgaaacatgtgaacactctctcactttggtcttataaagcatggaaattggataccctattttgagctcacattacaggagcaattatcccacatttcggagagtcaattatccttgcctgcctacttgattctggtctatccacacctgaaacattctatttaatttaagataattaagttaaataaatgatatacscaaatggcaaaataaaagtagaaaagaaatagccaatgagtagaacagcagaattagcttttgagagaaggcggaagacttaggatagaaatgcaatgaattcaaatgtacgatttttcttacattttctgcctaatactaaatgtgatatttaatcgactattctgtctttctcaaaaattttaagaatccatttgagacctaggacaattttatactaccct

SEQ ID NO: 400628 - DNA, 602 bp, Homo sapiens
ttttaggaaacctgaagccgtcctctccttggaggacttctttgtcattccatatctttcctattgcacgtacactttcctctgccttttctctgtccaactccaaaaaaatccgacatcagtaactcgtatgtaaccatgtcattctgctgttcctcaaaaggatgtttgttttttgtttcagtcttgtctttatgaaagaataatgcattttgcaacattccaagaaattccaggtgacattagaaccaagaggatagatactttgttcagtttgaggccttcytttaatattatgctatattggtaaacataatagcaacctattaggattgatatttatacaagaaagtaatttcatgaacactatttcactatcaaataattctgtgatattataatgacttggctttatttatcaaaatacaaaagcatgagagaagacaatttgtttaaataaaaacaaacaaaaccaaaaactcgaaaccaatatgtcttaaatccaggacatactcttgagtcttcattcatccaacattaattgcacagacatgtattaagcattcaccatattcaaagctctggagatttatactgagata

SEQ ID NO: 400629 - DNA, 547 bp, Homo sapiens
aatcagcacctattaaatatttactacaagataaatgaaatgctatgttctttacgtatattacttccttaactgactgtagcaatttatgatataaacactctaagtcctattttgcaaagaaggctcaaggtttttcagaagacaaataacttgyccaagctcaaactataattcaatggtggaatctgaatttgagcttccaaaatcaaaaagccaagtttttacccatggctatactaccaccacacagatacttcatttttcaaggacattcaattattttgcctgcttttaaattgatataataatcttttggttattcttttaagaatgccatatattcaatatttattttcccatagatttgccataccatctttgtcttatattaattaaattcaggactcattggctagatttctaatttgtcaatattttgataattacagtgactacaggttaatatcagcaaagttacatttcacccccctcacccctgctgcttctcctcccccaataactgtctgttttcactcgtttagat

SEQ ID NO: 400630 - DNA, 551 bp, Homo sapiens
ttgtaacctttcataagaaataaagtctcctttctaaatttataatttggtgatttttcaattgatgtatccataattctgtcattcaaatttaaatactactaaatattttggtgtttttcttccttcattttcttctgaataactttgatatgcttattttttattttaagaataaaatactctatatttgttaaaattgccctctactaatttttaaatgtttgtatccatagaagatatagcatttcccrcaatattcaaaaaatgtaaacattcacctgaattcctatttttcagttctttagttagctaactggttaaatagatattcatcagattttccattttagtttttatatttaagaatcaggaaacattttttaaacttctgcagactaaaagtagcattggatattttcttagtctgggtaagtgttggaaataatcataatcatttaagtgcagattttactatgtaaaccaattaatacatatcctaagtaagataaattacatagtttcctcagaatggggcaggttcaaaaata

SEQ ID NO: 400631 - DNA, 601 bp, Homo sapiens
agacactgtgcctcacccctgtaaatccccatatatatatatatatatatatwgactggggaatagtaggtgcccaataagtggtgactgtttttacctcgtatcttcacttattagtggtaaagtcaccaatggaaacaaagcaggcagagttccagcagactgtgaggaagcagcaggagtcttgagggttcactgctgaatggtcccctgggatagcttgtactgctgtgcaacaaatagtgactcttcccgaccccagcatgagcccagtgcactgccttaccctagtcctctgggatgtgcatttgctgagggaatgtgagtgaacatgacctgagtgtatcccagcacagtttggaatgtgctagatggctaggttcagcctcttgccctccagctctccctcataggaagagcatgtgcaggaagccactgtttctccagcttgggccatgctcctggaagcttggatggctcttactatgccagcttgatgccttgactcagctgtgtctgactttgtcagagaatgtgttggaagatgatgagccagtctgagatcatcgagacattttatatgtgcatggcaaagaataaa

SEQ ID NO: 400632 - DNA, 601 bp, Homo sapiens
agacactgtgcctcacccctgtaaatccccatatatatatatatatatatattgactggggaatagtaggtgcccaataagtggtgactgtttttacctcgtatcttcacttattagtggtaaagtcaccaatggaaacaaagcaggcagagttccagcagactgtgaggaagcagcaggagtcttgagggttcactgctgaatggtcccctgggatagcttgtactgctgtgcaacaaatagtgactcttcccgaccccagcatgagcccagtgcactgccttaccctagtcctctgggatgtgcatttgctgagggaatgtgagtgaacatgacctgagtgtatcccagcacagtttggaatgtgctagatggctwggttcagcctcttgccctccagctctccctcataggaagagcatgtgcaggaagccactgtttctccagcttgggccatgctcctggaagcttggatggctcttactatgccagcttgatgccttgactcagctgtgtctgactttgtcagagaatgtgttggaagatgatgagccagtctgagatcatcgagacattttatatgtgcatggcaaagaataaa

SEQ ID NO: 400633 - DNA, 306 bp, Homo sapiens
taaactcagctattagttctagtgcactcaaaattaaaggtagattttctctttttttwattcaatctggatgatatttattttgtcttcctgcctaattgcactagttaaaaccagctagatccaagaagctttcccttgtggccttagcaggaattcccttcccaagtggagatttggggatatctcccccaagaggaggagttatttcatggtttataggtaccatattttctttatccaatcatccactgatggacactcattttgattccatatcttggccattgtgcatagttctgaaat

SEQ ID NO: 400634 - DNA, 375 bp, Homo sapiens
tttttcaatttggcatttatccctacgaacttccctcttagtcctgttttgctgcattccataaattttggtctgctgtgcttccattttttgtttgtcttaaagtattttytgattcctttaaaaaatttcttttttaacccagtggttgttcaagagtatgttttttaatttccacatacttgtgaattttccagttctcttttcactatttatttatagtttcattctattatggttagaaaaaaaaacacttgctatgatttcagtcttcctaaatttgttagaacttgttttatgacctaacatgttatctatcctagagaaagatccgtgtgcacttgagaggggtgcttattttgttgctgttggatg

SEQ ID NO: 400635 - DNA, 647 bp, Homo sapiens
acttattgttagaaggggcactgttagcttcctcgatctttcagaaatgtgtgctgggaattccagactcggtgttcaatggagtcattcctttgcctcatagcaggaaggaaatccaggccaggccaggcaagactgcaccaggagggagaggcaggtgtcctctacagggcgggaattggggatgagacttcctcacactccccccgtcccacccctgaatatggaaccgcttcctccccctagacttcattttcaccagcagaagttctcacctggggtcagtttaagcttctaacctaagtaaactattaccttcacaaaccctttctccaggtgacatgtcagacaaatcttactgagcctgaycttcacagattatctttgtatgtacaaattacagtctgtcgccgggaccctttgcacgtaaaaaccaaacactgcccccgcaaaacgtccctaggctctaggtacagccccagtaaggacagaacctccccccaacccccctacacaaagtgcacctgcacgtgagtctcctgctttccagggctctgtagcttctcaggatccacattccttccgcagctgttctgagcagctggaggccacctgcagtagagggcaggctgcccgggaaacaccca

SEQ ID NO: 400636 - DNA, 589 bp, Homo sapiens
ccaaaaacaaaaaaaacaaaaaaccctgaatttgggttaatatataaaaaatacttattttgtacaattctcaaagtttggaaatccaagggcaaatggggtacatctggtgaaagcttcttgctctttactgtctgaggcagtggagatcactaggcasgggggctgattgtgctaactctggtctctttctcttcttacaaggccacaagtcttatttgtaggataacccattcattcattacctcttcaattcgtcagtggattaatccattcatgaggcagagccctcatgcctcttaaagggccctgctttcagtactgacacattggggatcaaatttcgttatgagttttggaaggggaaattattcacacttagcaagggctgattaggtacactgcttctgctgaaaataccacactctcagagggaaaatgggaattaggcaaataccatattgtttgcataagtagttaaggcacacacaaccccatttattagttatgttggtgcagatcttcccaaatctagcccctagataccatcaaagttcaactttctaaataaacgtgtaagaatatgcag

SEQ ID NO: 400637 - DNA, 463 bp, Homo sapiens
tatataattttgctcaagtgctttatagaaaagtgtattgcctataactaggcaatcctgtatactttaaatcatctctagattacttataatacctaatgcattgtaaatgctatgaagacaactgttttattgtatttagggaagtatgacaagaaaaaacawctgtacatattcagtacagacacaaccaccatacggctacctacctagtacacattatctacaatataacattttctttttaaaaaacagttatggattggtttcattaaatgacctgcaagcgtgtgttaaccttctgtaaaaccctggttattttctcctggtagcccacacatgatgatgatgaggatgatggtgattgctctgtggtgcctaaagttgcaacatgttgaggtgccaagatatgtggcagtgtcgataagcaatgagatgtcaattaaactagaatcatctgaca

SEQ ID NO: 400638 - DNA, 463 bp, Homo sapiens
tatataattttgctcaagtgctttatagaaaagtgtattgcctataactaggcaatcctgtatactttaaatcatctctagattacttataatacctaatgcattgtaaatgctatgaagacaactgttttattgtatttagggaagtatgacaagaaaaaacaactgtacatattcagtacagacacaaccaccatacggctacctacctagtacacatyatctacaatataacattttctttttaaaaaacagttatggattggtttcattaaatgacctgcaagcgtgtgttaaccttctgtaaaaccctggttattttctcctggtagcccacacatgatgatgatgaggatgatggtgattgctctgtggtgcctaaagttgcaacatgttgaggtgccaagatatgtggcagtgtcgataagcaatgagatgtcaattaaactagaatcatctgaca

SEQ ID NO: 400639 - DNA, 580 bp, Homo sapiens
gcatctacttaaggtacaagaacctatgacacagcaggtattgccaggcagtgatacaaatgagggacacttcaacagaaatgatggagacaaatggttacctacaggagaataatccatcttctgcccagcatctccatatacaatgatcaactaactatagactttccagttttcattaatttttactcagtttgttacctcagcttccattttgartgtggttttgtttttccataccaaaaaaggggttttatgacccttgacacagtttctagttctctatcttctcccagttcttcaatttggttgatccatatgcatcccttataccatcatctcctttcaccacctccctatgggtgcagagtgtgtcaagtcaggtcctcctatcacctggaacatcccccatccccatgctgctcaccgaagtgctcaataaccatgatcccaggagacactacattgttagcttttcaggttcttgcaccacctcagtggggttggttttcctgtccttagggatagttttctcccttcattagtctgagaacatcagaagggaagaatcatttcagtc

SEQ ID NO: 400640 - DNA, 580 bp, Homo sapiens
gcatctacttaaggtacaagaacctatgacacagcaggtattgccaggcagtgatacaaatgagggacacttcaacagaaatgatggagacaaatggttacctacaggagaataatccatcttctgcccagcatctccatatacaatgatcaactaactatagactttccagttttcattaatttttactcagtttgttacctcagcttccattttgaatgtggtttygtttttccataccaaaaaaggggttttatgacccttgacacagtttctagttctctatcttctcccagttcttcaatttggttgatccatatgcatcccttataccatcatctcctttcaccacctccctatgggtgcagagtgtgtcaagtcaggtcctcctatcacctggaacatcccccatccccatgctgctcaccgaagtgctcaataaccatgatcccaggagacactacattgttagcttttcaggttcttgcaccacctcagtggggttggttttcctgtccttagggatagttttctcccttcattagtctgagaacatcagaagggaagaatcatttcagtc

SEQ ID NO: 400641 - DNA, 580 bp, Homo sapiens
gcatctacttaaggtacaagaacctatgacacagcaggtattgccaggcagtgatacaaatgagggacacttcaacagaaatgatggagacaaatggttacctacaggagaataatccatcttctgcccagcatctccatatacaatgatcaactaactatagactttccagttttcattaatttttactcagtttgttacctcagcttccattttgaatgtggttttgtttttccataccaaaaaaggggttttatgacccttgacacagtttctagttctctatcttctcccagttcttcaatttggttgatccatatgcatcccttataccatcatctcctttcaccacctccctatgggtgcagagtgtgtcaagtcaggtcctcctatcacctggaacatcccccatcsccatgctgctcaccgaagtgctcaataaccatgatcccaggagacactacattgttagcttttcaggttcttgcaccacctcagtggggttggttttcctgtccttagggatagttttctcccttcattagtctgagaacatcagaagggaagaatcatttcagtc

SEQ ID NO: 400642 - DNA, 583 bp, Homo sapiens
aaaaacaagatgctgtaaaaaaaaaaagaagcaatcaaaagataagaaagggcttttgaatcttaaaaatagggcagcagawaatttaaaaaacataacaagttggaagacaaaatgaaggaaatctctcagaaagcaaaattaaaagagtaagaaaactgtgggggaaggtaataaaattaaaacatttatcacacattttgattaatagcaggtccagaaaaaaagaagatagaaaagggaggggagaaaacttatcaaaggggggaaaaatacatttttcagaactgaaggacaagaatcttcagattgcaaggccatcaggtgaacaatcctttgagtaaaaaagacccacaccaaagcacattgtcatgaaattccggaacttctaggggagaaaaaaaaaatcctaaaaactttcaaagcaatacaacaggttacagttaaaatattagtaatcagaatagattatctcaatagcattgctgacatctagaaactactagaggtactttcaaaattttgacggataaatcaatttcagcccagacgtctgtacctaaactattagttaacacaaagg

SEQ ID NO: 400643 - DNA, 583 bp, Homo sapiens
aaaaacaagatgctgtaaaaaaaaaaagaagcaatcaaaagataagaaagggcttttgaatcttaaaaatagggcagcagataatttaaaaaacataacaagttggaagacaaaatgaaggaaatctctcagaaagcaaaattaaaagagtaagaaaactgtgggggaaggtaataaaattaaaacatttatcacacattttgattaatagcaggtccagaaaaaaagaagatagaaaagggaggggagaaaacttatcaaaggggggaaaaatacatttttcagaactgaaggacaagaatcttcagattgcaaggccatcaggtgaacaatcctttgagtaaaaaagacccacaccaaagcacattgtcatgaaattccrgaacttctaggggagaaaaaaaaaatcctaaaaactttcaaagcaatacaacaggttacagttaaaatattagtaatcagaatagattatctcaatagcattgctgacatctagaaactactagaggtactttcaaaattttgacggataaatcaatttcagcccagacgtctgtacctaaactattagttaacacaaagg

SEQ ID NO: 400644 - DNA, 640 bp, Homo sapiens
tctgggcatatgcttcttctgaggagacatttttctagctgagtttaatccagtgagttaaaagagggaaagaatgtaaaatggaactctctacttgcagttggacatgcatttgtttttcatcgcaggatgctaggaaagaaacctctctggttgtctaactktttgcctcacctgtctgagggctgaggccctgaggacagcatgcaaatttcaacccccaaccccatcctctcacttcccctcctctattgagcataacttagccgcaacaggatgctacccattcacccgtggaggccttacctgtcggttttcttgatcaggatggctctaaagatgtgctccaggggcgtcttctcccgctcatgggtgggctgcacgaaggggtgcagggccgccagcgagaagccctgctggtacagctccaggagctgggcgggcaggtcacgcagggaggccagcctcactgctgaggacccagggagctccgctggagtggagagaggagaggctcatcaaagacccatcacaacgcccactcagccctgcccaaacccctcttcccttgccctcggggaggatcctctaggtcactgctaaaatgagtttgtcccagtttttactgtcttcaaacaga

SEQ ID NO: 400645 - DNA, 562 bp, Homo sapiens
gttcatccatctaacatctaaaattatctcacataggtcacaaagtcttctcacagccccgcctgagcgaacaccagcagagatctctagggaccaacgctgggccatattactttgtcatcagcaatacctgaatgaacagcagccatttcaggctttccatccaatagaacaattagggaaggaaggtgcccgtctttggaagtggccacctgtattttaaacaccaattctagcctgttcatcatccccacgccaagttgcttttctcagccctcctgcttactcaggaagccatctccagccaggaagtactttcacaccagaaattaggtcttggtgtatagaactggcagtcactagactagtttgtgagttcacaatacaaactttagaaatggagygacacagaggaggttcgtaatggagggaatccggccataaattggggctggggtgggcaggaggtgaactagatgattgggtgttttccagtcctgggcgtcaggggttcaattaaaagctgcagctaccgagggcaagaggataagcaaggttttag

SEQ ID NO: 400646 - DNA, 620 bp, Homo sapiens
gctatttcaggtgcaggagaagaattccaagctgacaggaactccatgtcctcaggggcacctgcccccacaccctagtctgaagaagacagkttttttaatttgttttaactatattgtctgatggaaagataaagcatttggctttgaagagttgaaatcactactttgaaacactacactagtccttattaacattttttaaagaggctggaaaaagttctaaacaaagagtttgaaggaggaagtttgttttattaagagtttggttttttttgtcactttttttcggacgaatcactgacttcctgcccatcaggctactgtataactacagcttgtctatataaccatatacaaacaacagatggcattttatggcccaaagagcttcctttttggacaatagttttggcagagaagggcagaggtgggaaaatcacccctgtgccaaggctgtgggcaaatcctccccgagaggtatcatctgatggacaccttgctccctggtgctctcaggcttagggaaggtcaaaggagcccacagatcatgcccagcccacagccacagactgactcttggctctccaagtcctggtccacaccatccagcagcgagg

SEQ ID NO: 400647 - DNA, 620 bp, Homo sapiens
gctatttcaggtgcaggagaagaattccaagctgacaggaactccatgtcctcaggggcacctgcccccacaccctagtctgaagaagacaggttttttaatttgttttaactatattgtctgatggaaagataaagcatttggctttgaagagttgaaatcactactttgaaacactacactagtccttattaacattttttaaagaggctggaaaaagttctaaacaaagagtttgaaggaggaagtttgttttattaagagtttrgttttttttgtcactttttttcggacgaatcactgacttcctgcccatcaggctactgtataactacagcttgtctatataaccatatacaaacaacagatggcattttatggcccaaagagcttcctttttggacaatagttttggcagagaagggcagaggtgggaaaatcacccctgtgccaaggctgtgggcaaatcctccccgagaggtatcatctgatggacaccttgctccctggtgctctcaggcttagggaaggtcaaaggagcccacagatcatgcccagcccacagccacagactgactcttggctctccaagtcctggtccacaccatccagcagcgagg

SEQ ID NO: 400648 - DNA, 586 bp, Homo sapiens
cagacctcagagctgtctaagtcttagtcaccaagctctaagcagatgacctcagaaaatcttgaggcctctgcaatgataatctaccctcatttgagagtcagttttgccagcacagaggtattctctctaaaggagaagctgccctgacagctctcctcggaagaaccaccctgacattaaatggaaagtcatttttgttccacactgcrcaacctggaaaactgcagttgcaaacatgcagtccagtctttaaatcctagcctgtgctagacataaaataagaatagtagtaattactgtctactgtagacctactatgtctaggcattgagctaggcattttacataaattaaaacaacaaaacgtttcatccttcaatgacggtgcatggtatcattgtctccatttcagatgaggacactggagcccagagacattaaagtcataaaacaagcagtgagtagccagagtgcaaaaccaggtctggcctgggccaaagttcattcttttaatcacaagactcagtggacacatgtcaaagcatcaactacatacatgtctatgggcatgtatgtgtccact

SEQ ID NO: 400649 - DNA, 586 bp, Homo sapiens
cagacctcagagctgtctaagtcttagtcaccaagctctaagcagatgacctcagaaaatcttgaggcctctgcaatgataatctaccctcatttgagagtcagttttgccagcacagaggtattctctctaaaggagaagctgccctgacagctctcctcggaagaaccaccctgacattaaatggaaagtcatttttgttccacactgcacaacctggaaaactgcagttgcaaacatgcagtccagtctttaaatcctagcctgtgctagacataaaataagaatagtagtaattactgtctactgtagacctactatgtctaggcattgagctaggcattttacataaattaaaacaacaaaacgtttcatccttcaatgayggtgcatggtatcattgtctccatttcagatgaggacactggagcccagagacattaaagtcataaaacaagcagtgagtagccagagtgcaaaaccaggtctggcctgggccaaagttcattcttttaatcacaagactcagtggacacatgtcaaagcatcaactacatacatgtctatgggcatgtatgtgtccact

SEQ ID NO: 400650 - DNA, 563 bp, Homo sapiens
aattcacacccccaagaagaggaagcatatttgtagctctgcttatttccttcaaatagattcctggaagtagaattaatgaatgaagggatattaacttttcaaaggcttggcagaggctgccaagttgtttaccaaaaagggtgcgtagtcctttttaactagacgaccacatttagattttatgaagatcaatatttggctagatctaggggccacgactcttacagttctgtcttaccctagtatagacactttcctctttttcagaaagtcatttgacygtgtacttatggctaaagtaaatcctgcttctcattcttgcatttataacctttactgagccagtctcacattcatcatggtggtgggcatgcgatgtattcatcagggttcatccccggctgccagctctcctccactctacactccccttggtgacttcctctactcacatgggtttagctacaaatcagatgttcattattcctaagtgtgaacccctagccctggctttccttgcaagttcagacctacacagaagacgatcacagctgacgggt

SEQ ID NO: 400651 - DNA, 563 bp, Homo sapiens
aattcacacccccaagaagaggaagcatatttgtagctctgcttatttccttcaaatagattcctggaagtagaattaatgaatgaagggatattaacttttcaaaggcttggcagaggctgccaagttgtttaccaaaaagggtgcgtagtcctttttaactagacgaccacatttagattttatgaagatcaatatttggctagatctaggggccacgactcttacagttctgtcttaccctagtatagacactttcctctttttcagaaagtcatttgaccgtgtacttatggctaaagtaaatcctgcttctcattcttgcatttataacctttactgagccagtctcacattcatcatggtggtgggcatgcgatgtattcatcagggttcatccccggctgccagmtctcctccactctacactccccttggtgacttcctctactcacatgggtttagctacaaatcagatgttcattattcctaagtgtgaacccctagccctggctttccttgcaagttcagacctacacagaagacgatcacagctgacgggt

SEQ ID NO: 400652 - DNA, 613 bp, Homo sapiens
gcaattgcagactgaaagtactgtttgtgtatgtgtgtacgtgtgtgtacaccatggttgtccaaagtcacttcctcagaaaatctaaatgggaaatgagtgttatcgatgagttcatttatagccaacagatttcctagtatcatttagaagggagatgaacttttggggtcgccctacctgtctgactctgtgcagatgaggaaactgaggccattgttggagaaagaaatctcccagggccagtcaacctggtagtgccagcccctggaagaatccagagttcttggtgactcaccatggctccacactggccccttgcttcagctttcggtcgtgtaacattgtgttaattgcttcagcttcaggcgtcactcctgtgtaatgaaragaccagaatgtcagcctgtgaagatcatcatgtgttgggacaaagccctcctccatttcgaacaggaagtcacgttctcctggagtgggaaacataactgagaatcgtttctgccttgccaagattccgcatattaatcaggccggttgttccttgtaattctagaatgttctggctgagttctcatcaatgcctcctggtccagtcctcccaccatacacc

SEQ ID NO: 400653 - DNA, 442 bp, Homo sapiens
gtggaatttcctcctggtgaccacttgctgctggctctcctgaatgggtgcagttttgaactgtgctgtatcacagggatgtctatgtggtggtgctttggaaagcagcccctgtgtgcagagatggcagggtgcgctaggaagcctctcctttgacagcaagactacaggccttcacctcagacagccgtttacacccacgctgttttcccagaatttcttttagttgctcagtagtctttctttaatgcatctttaatttccatagattttgccagattgccctctaaaggggttgaacccttttaaagtcttttaaaaattaatttttaattttytaagtgatataggaatatattcttttcatttaaaaatgaaaacaattagggattatggctaaattcacttttgatcaccacccccacacccataccatcaccac

SEQ ID NO: 400654 - DNA, 437 bp, Homo sapiens
tttgtttctcaacttttagaggagtttgtgtttcttttttaagggcatgactcccttacttttatgaattagtctttctctaccttacatcttgcttttcccrctcaagtcctccctgggaaaatggagctccagggttggcaagatgtggacatcccctgctcagccttctgcacaaggtatagtgaaaagaaaaagattagctgtccccagcaggtctttttggtgggtgtgataattttggtgatcttataattctgaaatttttagcatccgtaattgacatgggggctaaattgcaccactcatcagattgtacaaactattaaaaagaagcaaattaccatgtatttgtataaagcagaagaggggaaagcaagtggcctttcttttaaattattgttaagtttcgaactgtattggattttggattttta

SEQ ID NO: 400655 - DNA, 472 bp, Homo sapiens
ccagttaaaccaccttagagtctatttgaggagatcagctcctttgtgagagttgtttttttttattgagccccactgtaatgtctatatttgaattgcctaagaaactcattatagcagagcttattccttgtcaaagatggtcaaaagaaaattagattcagttcattagcttctacctaaaccttgcttaatggggcccatgttgtggttttgttattggatcacaaacatttaacttgatccttcctattcctggcactggcccatattgtcatggcagctgtgctgcccgagggcctctgtggcgtggcctcctcatctcactctccaaaatggctgagccgtgggttctgagacttcattttacattgggaccaarcctgctttgtctgtcatttgttgaagaagtctggccagcctcgagtaggggctgccttatgaagggtaagaaattctggggtgggtaggt

SEQ ID NO: 400656 - DNA, 524 bp, Homo sapiens
tggttttgttattggatcacaaacatttaacttgatccttcctattcctggcactggcccatattgtcatggcagctgtgctgcccgagggcctctgtggcgtggcctcctcatctcactctccaaaatggctgagccgtgggttctgagacttcattttacattgggaccaaacctgctttgtctgtcatttgttgaagaagtctggccagcctcgagtaggggctgccttatgaagggtaagaaattctggggtgggtaggtgggagagagtgggccacttcacagctgtggtggccacatgtctcagattttctggaaccatctagctctaaaatattctctatggttttagaccttaaatcytgaattttggcatggaaaatgaggctcaagtgacgtctgctcacgtgtctcttgcgttagttatctgtataacaggcctcttacatgatatttctaccctcaccaaaaaaggagaaaatgagaagaagatttaggttaaaaaaatatatattccccac

SEQ ID NO: 400657 - DNA, 561 bp, Homo sapiens
tttgatggtgtgatcaaactcctttttttttttttttttttaaagttccagggtgcaagtgcaggatatgcaggcttgttacataggtaaacgtgtgccatgtgtgttgctgctcagatcaggctatcacctaggtatgaagcccagcatccattagctatttttcctgatgctctccctcctcccacacctccaacaggtcccagtgtgtgttgctccccaccatgtgtccatgtgttttcacatgtgttttcaccrttcagctctcccacttgtaagtgagaacatgtggtgtttgattttctgttcctgcgttagtttgctaaggataacagcttccagctccatccatgtccccacaaaggacgtgattcgttcctttttaaggctgcatagcattatggactggataaagaaaatgtggtacaaactcccttcttaagcctgtttcccatgcaggattgtccaagggctgattccttcccactcagcccattttcgttcatcttctgctcaccccctcacaaggaaatccagccctcagccagcctcatccctcca

SEQ ID NO: 400658 - DNA, 502 bp, Homo sapiens
caggcacgcacactttgcatcctcatggatcctgccacactgtcttttcggggacttacaaacccccgcccgtgccttacagtgtgtcccctccctcaggttctcactttataggtcatgcctcggtttaagagcaggtccaggcctccctactgccccgcccaagtgttacttgttagaaaatcatgccggatcacaggcgggcacttccttcctaacctacttaagggctggctgctgattataaccatgaaccgaggacgctgctctctggagccggccccattctcaccacggccatcacwgcctgggcttggcaagggagctctgcaggtccagacagggcggccctctgttcaatcccccattaagcaaagatgcactgggcactctctccttgccaagagctaggccagcaccgggccgatgttgggcagccaccgccccgtccccaaacagtcaccagacagttctgggcacaagagcacacaggaagctcatg

SEQ ID NO: 400659 - DNA, 502 bp, Homo sapiens
caggcacgcacactttgcatcctcatggatcctgccacactgtcttttcggggacttacaaacccccgcccgtgccttacagtgtgtcccctccctcaggttctcactttataggtcatgcctcggtttaagagcaggtccaggcctccctactgccccgcccaagtgttacttgttagaaaatcatgccggatcacaggcgggcacttccttcctaacctacttaagggctggctgctgattataaccatgaaccgaggacgctgctctctggagccggccccattctcaccacggccatcactgcctgggcttggcaagggagctctgcaggtccagacagggcgrccctctgttcaatcccccattaagcaaagatgcactgggcactctctccttgccaagagctaggccagcaccgggccgatgttgggcagccaccgccccgtccccaaacagtcaccagacagttctgggcacaagagcacacaggaagctcatg

SEQ ID NO: 400660 - DNA, 502 bp, Homo sapiens
caggcacgcacactttgcatcctcatggatcctgccacactgtcttttcggggacttacaaacccccgcccgtgccttacagtgtgtcccctccctcaggttctcactttataggtcatgcctcggtttaagagcaggtccaggcctccctactgccccgcccaagtgttacttgttagaaaatcatgccggatcacaggcgggcacttccttcctaacctacttaagggctggctgctgattataaccatgaaccgaggacgctgctctctggagccggccccattctcaccacggccatcactgcctgggcttggcaagggagctctgcaggtccagacagggcggccctctgttcaatcccccattaagcaaagatgcactgggcactctctccttgccaagagctaggccagcacsgggccgatgttgggcagccaccgccccgtccccaaacagtcaccagacagttctgggcacaagagcacacaggaagctcatg

SEQ ID NO: 400661 - DNA, 555 bp, Homo sapiens
accgtactgggatgactttattatctcctgggcatgtttccagaagccagctccgcttactctaaattcaagcagggtgtcctggccaattcccatgtgggcctctctcctatccccccacgcagcgtcctgttggcccagctgctcactgtgggaagagatgatgggttgtccccaccccagtgatcaactgtaaagctcaggacagttcaagggaatcaagccccacattctctgggcttcatgcaggacatcacagccaaacacagccccaggaagaggagccctggtgattttcagaggcctgtgttatgatccaggccagccctgctagctccaggccacattctcccaggaaagtcaccacctctggagcctctccctgccatctgcgcaggaaggctgcggctgtactgagcttttggtggtgtggtgagactcagaggccgaggctggaccctgagcccagcacacagcatgagctcaacacaygccagggcttagggatccttgcacactgactgccatctggggagacgccagaggacagttcca

SEQ ID NO: 400662 - DNA, 528 bp, Homo sapiens
actatgtgaaggattttgccacagggagactgctctggatttcagggggcctgaggcttctcgctaacgggaggcaggaggcagcagagaggagagagaagtctccacgcctggctctgaggatgaagggaggggccccacaccaagaaactcgggtgcccctagaagctggaagaggcacggaagtggatctcccccggagcctccagatggccccagccctacagaccccttcacactctggctggatctgccctggtatytggggaccccagatctcagcgtggcctgactctccgtagtgtctggggaccctgggccttggcacagctggactctccctggtgcctccagatcccgggtcctggcgtggcctgatctcccgggtgcctgcggagcccaggtttcttggtacatcagcagctctgggaggagataggggtggtctcatggagaggtgggggtccaggaaccagcccaggccatgtaccccctgagccttggcctcctcatctctgttggggttgg

SEQ ID NO: 400663 - DNA, 475 bp, Homo sapiens
taaatacggacaaatattatgcagcaataaaaataaaacatatctccttgtgagtttgttgtctcctaaaaaaaattactgtgcttagttcaaggcaggacatggcaaagctttaagagataagaaatctacttcctgtcattcaccagcctggcaagcaagtttttcttgactttctggatttctgtttcttcctctataaaatgaaggggttggaatcaattgttctgtctagaagactggtcttcattccactccatggttctatgaggcgggagctcactgaacatttgtttaaacagccctctctcaatgtgtgttctttcatgaggtggttggctttatatgatttcaatggttggccawactttggaagaaagaaactagcaatttataggttagcatcctttgtcccaaacagcaggattaggcaccggggcgggaatgcaaacatcatgagggtcaaaggtcataa

SEQ ID NO: 400664 - DNA, 557 bp, Homo sapiens
aaggctgtgtgtaaatagaacacatcagatcagaagttcccaactactggtctgtggaggctttgcatcagaatcacctaagatgtgtgttaaaaatacagattcccaaagaccactccagacccaaggaatttcacctgcaggaaaatggttcccaggaatcagaatttttaacacttcctccaggtgatgctgatataccctaaggtttgggactgtctagctgggaacacttaactttccacaggggtgtggcttggtaacagctttctcttagcatcatttaccaacctgtttcatgttcccccacatcccttcccgtcaaaggaatggaatgtggagtggattatctagtattattttacaaytaaggataatgacatgaaacatcctaggtgagtcagtgatgtggccaggaatctcagcttcgctaattagctgttatctagtcagctcagtgtttttgatcacaaacccgatttttgacactggcctttaggtaggcaggcttccctatgggccagggatgtggactcacaaaatactgaaaagcacgg

SEQ ID NO: 400665 - DNA, 566 bp, Homo sapiens
tccacacggcacgcagatatattttttactyggctgctgtgatgacaagtttcagtaaggcattaggcaagtaagtctgaattactcggctaaaatatgggatgtccctggacactcagctccccggagaggatacccgattagccttggcccctctgggggcagggagatgtgtgcagtctaatttccattaggctgacttggaaaggtggggaccaacttggctgagtctctctcgggatttttggaggacggtgtaaaaaacaaaaactggcgacagacctgccactcaatgtcagtcgctaaaatcaaagtcagattttagataagagctccctccttctttattgtctccctcacttaacctctgccttgtttctttttcctcccctctgggactaggagaaggggagagtgggaagaaggagagagagggctttcctttcaagctggtaaccattttagttcaagtctgcaaataaaggttaacctgagagggagcctgagtgagcacaataaatgcccacttgagcttatcaggagctctccctgcactgggaggtctc

SEQ ID NO: 400666 - DNA, 566 bp, Homo sapiens
tccacacggcacgcagatatattttttacttggctgctgtgatgacaagtttcagtaaggcattaggcaagtaagtctgaattactcggctaaaatatgggatgtccctggacactcagctccccggagaggatacccgattagccttggcccctctgggggcaggsagatgtgtgcagtctaatttccattaggctgacttggaaaggtggggaccaacttggctgagtctctctcgggatttttggaggacggtgtaaaaaacaaaaactggcgacagacctgccactcaatgtcagtcgctaaaatcaaagtcagattttagataagagctccctccttctttattgtctccctcacttaacctctgccttgtttctttttcctcccctctgggactaggagaaggggagagtgggaagaaggagagagagggctttcctttcaagctggtaaccattttagttcaagtctgcaaataaaggttaacctgagagggagcctgagtgagcacaataaatgcccacttgagcttatcaggagctctccctgcactgggaggtctc

SEQ ID NO: 400667 - DNA, 557 bp, Homo sapiens
ccagcaagaatagaggtgaagacaagccaccaggactcaggagggaaacgctgaccattagaaacctctgcataagacgttgtaaggaggaaaataaaagagagaaaaacacaaagatttaaacaagaaacctacgaacccagctctggaaagagccacyttctccaaaatggatatgtttcctctcacctgggttttcttagccctctacttttcaagacaccaagtgagaggccaaccaggtaagccactgaaagtttttctatttattgcaacatggtttcccctttaaaagtgaccgctaaagcaggaaggccacgcagaacggcacagaagaaggctccctcagtactcaataatttaaagagagatcccagccggcccttcctacaccaccacggctgctaaaacccaactttcctctcctgctaggagtgtgtgtgtgtgtgtgtgtgtgtgtgtgtgagtgtgttttgaaacagaatttggcggtgttcatatgtcacatatggactgaatcaaaggtttaaaaatactacaaagcctttgcattacag

SEQ ID NO: 400668 - DNA, 576 bp, Homo sapiens
agggtaagtaactttcccaaagtgatacagctagaaagaggaagagccagccttcaaacataggtggtgtggctccrgagcccatgagcctaagctacactatcttgcttctcaaaacacttaacttcctaagggccaagactcagtgttattctttcttgtttatctcccctacttctgctccgccatgcctagcacatttattgagcacctgttattattagtccatgtggtggatacttccatgtacattacttcatgtaatctactacaacctcaagtgccttgtccaatgtcgtacgaatactgacaggaggaacctcaagcctatgatcattccaatccaccatgctgatttcagaaataaaggcactggagttggagccaacaagcctgatttaaggcttagctcttttacttaattcctagctgtatgaattgtgccaatctcttcaccacgtgggcctgttgtttcgcctccaaaatggagatgataaaacccagtgctgtggtttgaatgtttgtcctttctaagacttatgttggtgttttatctccaatgtggcattactaaga

SEQ ID NO: 400669 - DNA, 523 bp, Homo sapiens
gggcgatctttgaccgttctgaattcctggtctacagggaaagggacacttctttttctaatgygtgaaagcctccattgaggtaacccaagctgactgatagttcctagctcactgagaaccttacgggaaaatgacccctaggccaatgacactgtcttctggtcacacatcgatagtcttagactgtttcccaaacctttgtttagggaaagcactcctgtcaaaagaaacctcacacggagccccagtacataaaactgatgatgcggggagcagggggctgctttggaggaccagcctagagtacacttggagacactcatccgggggaaggacaggagtgggtggccagggcctgcagctgattagcccccagaaattcagcaggaccgctccagttttcaggatgccctgcgtccacaattctgaaccagaagcactgtctcggatagggctgtctcccacaatggcaaagatcaacttctttcccaagaaaaaccaggctcagctctccatgggg

SEQ ID NO: 400670 - DNA, 594 bp, Homo sapiens
ataaacttgatggtgtgcactacagaatatgaggaaaaatgaagaccatgttctagtaacatagagccccaamtgctttgcctgcaaaactgagctcagagagagaatgattctcaattgggttaaattagtgaaatcatttgatgaattattaatcttatgttaaccaactgagcccctgataggtgccaggtctgtgaagctgaaacagccatgctggctgtcgtgggctagttgcaattgtctacacctgaatcagcaggggctttccagctaattgtgttaaagggatctacctacacaaggctgtttgttacttgcatgatgttaagacaacccaaacaagaaagatcaataattattttgtcatcaccttactcaaaagtctttattacaaacttaagaagattgtgaagaaagtacatggagaaacctacaaactttcttgatgaatattccaagataagattcaaataaaggtgaaaaagactgttttcttaaatgcagagacttaatgttgtgaagacatcaattctcaaatttacatacagacggccttccatatccatggattccacattcatggattcaacc

SEQ ID NO: 400671 - DNA, 487 bp, Homo sapiens
aaacaaggtttctggaaaggaaagatatatatagtcccttggcaaacagtttggcacataccatataacccagcaattctattcctgagtatagacccgacagaaatcttttcacctgcacaccagaaaaaaaaatatgtaaatgcattcagaacagtaataggcataatagtgamctgaatgtctataaatggggcagtgtttgaaaaactgtggtatatagacacaactgaatatgtgcagcagttgaaatatggtagacacaggtaaatagcaattagcctgagcagaataatattaagtggagaaaagctagtgccagaagattacatgcagcatgacaggctttttatacaaataaaaacaacttgaataaaatatgtacttcctaggaaagcgcatagataagatgaaactatatatctaaaagaaaaagataaacacagacttctgaatatttttctcaagtagaaggaggcaggaggat

SEQ ID NO: 400672 - DNA, 579 bp, Homo sapiens
tataaaacagtgaggctcattttgtacattgacttgagtgtcttcccttttacagtgcacaccttgggaaagcagacacttcaaatgatgctgccattactcaccaaaaaaaaaaaaaaaggagatcctccacaaraacagaaaaccaaacatcacatgttctcactcataagtgagagttgaacaatgagaatacatggacacagggaggggaacatcacacaccaggacctgtcgtggggttgggggcaaggggagggagagcattaggacaaatacctaatgcatgcagggcttaaaacctagatgacgtgttgataggtacagcaaaccaccatggcacatgtatacctatgtaacaaacctgcacattctgcacatgtatcccagaacttaaagtaaaatttaaaaataaaaaaaggagatcctctcttgtggtttttattcacagcctacaaccttctgtgagagtttcaatagcaatttcagagacgttcagaaagcagtaagagagaaattagggaaggaatttagcaaagtaacaattaacataattccaggggctgaagagaaacacaa

SEQ ID NO: 400673 - DNA, 579 bp, Homo sapiens
tataaaacagtgaggctcattttgtacattgacttgagtgtcttcccttttacagtgcacaccttgggaaagcagacacttcaaatgatgctgccattactcaccaaaaaaaaaaaaaaaggagatcctccacaagaacagaaaaccaaacatcacatgttctcactcataagtgagagttgaacaatgagaatacatggacacagggaggggaacatcacacaccaggacctgtcgtggggttgggggcaaggggagggagagcattaggacaaatacctaatgcatgcagggcttaaaacctagatgacgtgttgataggtacagcaaaccaccatggcacatgtatacctatgtaacaaacctgcacattctgcacatgtatcccagaacttaaagtaaaatttaaaaataaaaaaaggagatcctctcttgtggtttttattcacagyctacaaccttctgtgagagtttcaatagcaatttcagagacgttcagaaagcagtaagagagaaattagggaaggaatttagcaaagtaacaattaacataattccaggggctgaagagaaacacaa

SEQ ID NO: 400674 - DNA, 582 bp, Homo sapiens
aatgtttgcccacacaggaccccaatttcttcatctttacaaccagtgtcctggagataagctgtaagggcccatgtaagtctaggaaagcatgacaatccatggcatgatagcactggctatttagttttcatatatttcagacaatacttttcaataatgatgctgtttttatgggaaaggacttctttttctttaaattcccatagagtccaaccggtattggttgaatacataaaagaatggcttttctctctagttttagataatgagagtagttaaccttattagtgggttagatttcagctatgatgttcagcattgtcattgtggggagggcggtgatgtacgtggtgtaagggaaagaatgggatttgggagcccaatcacctagatttgaatcccaccttcaagatcctgactacttagtttttttaacctctttgagcytgagtttcctcactactaatatgatatgaggacaataatgcaactttagagggttgggaagctgagaaataatgtgtacaaagctcctggcaccttaacttgtgtgagtggatatcactcaataaatggtgg

SEQ ID NO: 400675 - DNA, 582 bp, Homo sapiens
aatgtttgcccacacaggaccccaatttcttcatctttacaaccagtgtcctggagataagctgtaagggcccatgtaagtctaggaaagcatgacaatccatggcatgatagcactggctatttagttttcatatatttcagacaatacttttcaataatgatgctgtttttatgggaaaggacttctttttctttaaattcccatagagtccaaccggtattggttgaatacataaaagaatggcttttctctctagttttagataatgagagtagttaaccttattagtgggttagatttcagctatgatgttcagcattgtcattgtggggagggcggtgatgtacgtggtgtaagggaaagaatgggatttgggagcccaatcacctagatttgaatcccaccttcaagatcctgactacttagtttttttaacctctttgagcctgagtttcctcactactaatatgatatgaggacaataatgcaactttagagggttgggaagctgagaartaatgtgtacaaagctcctggcaccttaacttgtgtgagtggatatcactcaataaatggtgg

SEQ ID NO: 400676 - DNA, 527 bp, Homo sapiens
aaatattatcattgaaaatcacgattgttttaagaaaacactgtgtgtagagggcctatctgtgaacataaactcagccagtttgtggaaggaaataaccccattactgctgtktgtagcccacaattccatgtctattgcatcctagtctcatagtgctttctcctaaggcttgcaagagtctcagcactgaatggaatgggcactgtgcagcctgtaagagaaggtcattcctgaagtcagctgctcaggatggaacgagagggagaggaagcaccccaggattaggatgctgaattgaggctagaatggttggggttttatccttctaaaaagggccagaactggtaggagcaaagcttaaaactcaggatgctgaagccatatagcagtccaaatagagagcgtgaaaatagatattggaaagagtgccaaagggtcagaaattggcagagagctaacggagtggagtgcgaggaccaggacgtaactgcaaatgtgtatcatcagcaaacagagctgaaatc

SEQ ID NO: 400677 - DNA, 522 bp, Homo sapiens
taatgtcaacctggcacctcttgttctggggttttcattatccagttgctttacagaatttaattctacgaaaactctaagaggttgacacasttcttcccattgaacagatgagatagccaagtcttaaataagtcaagtagcatatcctaggctagagagctggagggtggtaagacaaagattcagattccagatgctgtttccaaaacttcccattcccccatggtactgtgctccctcacaagccacataaagaacatcagtattgtttttttgtagttgtataatgctattcctcatagaaagcaccatactagacaatgctacttgcatgccagaagccatgcaagacacataagggatgcaagggatgccaacacatacaatctatgcccttgccctccagcttaggtggcaggctggctcagtgacatctactgaaagtgactgctgggataagagtgataggtcaccctgacattttccatgtcccacttttctttcttcaggatgccatct

SEQ ID NO: 400678 - DNA, 581 bp, Homo sapiens
aaacaagatgggaaatgatacattttgtgaaagtcctgacctgatggaaatgtacaagtccaaacacctaccaataagtagaaataggtrtaactcatttatgaaggattttctggaaatgtcttatatataaaattatgtcatctttaaccaaccaaaagatctggatggggagaggtgatgttaatgctgttgattaaagtacactccttttcttaaaaaaaaaagaaaagaaaagaaaaaaagatcaagaaggttaaactaatttactcctagtatttattatctgtggagttgttcaggtaatgagtacaataaaattgaatgcactgtcatctttattgggatgaaggttacattcataagctctgcttgttttaataggtttattgtgcagttgtagacatgtgctattgcattgggatggatatgctttgaatatttttctaattgtagatagtataaaagtcattttctgttagattgcacaaatccattacattatgagaaggatacattattgtaacaggattaatgtgcaacacataaacataatcagtaatattctgtttgataaatta

SEQ ID NO: 400679 - DNA, 509 bp, Homo sapiens
gagtttgaagttaaagatgaacttgtcctctagcagagaggaagagaggagtcctgaaatcagccctgaagaacactcgtctttcccgcccttcccacccagaaactgcacccagctctaaattggaattatcagccaatccacctacaactatttcctaagaacctatgagttaaaaaaagacctggaccatrtctcaacactcttcttagcaacatacaaacacatttacatgaacatcaaaacaatactgtaaatgaaacgcctctataaaatgttcatacaagattcttgtggtagaagaagcacggacaccaaagaacaaaacatttgaatgctagcttctcagccacgtgacctctggcagtttacttcacctcactaaactttatctctgcaatggaaataaaaatgccaccccatatgtgtcatgtgtaaggataaaaagaaatgtaatgagattatgtatgcaaaggtgggcagaaaatgcacgtggactgtagaaggtg

SEQ ID NO: 400680 - DNA, 509 bp, Homo sapiens
gagtttgaagttaaagatgaacttgtcctctagcagagaggaagagaggagtcctgaaatcagccctgaagaacactcgtctttcccgcccttcccacccagaaactgcacccagctctaaattggaattatcagccaatccacctacaactatttcctaagaacctatgagttaaaaaaagacctggaccatatctcaacactcttcttagcaacatacaaacacatttacatgaacatcaaaacaatactgtaaatgaaacgcctctataaaatgttcatacaagattcttgtggtagaagaagcacggacaccaaagaacaaaacatttgaatgctagcttctcagccacgtgacctctggcagtttacttcacctcactaaactttatctctgcaatggaaataaaaatgccaccccatatgtgtcatgtgtaaggataaaawgaaatgtaatgagattatgtatgcaaaggtgggcagaaaatgcacgtggactgtagaaggtg

SEQ ID NO: 400681 - DNA, 509 bp, Homo sapiens
gagtttgaagttaaagatgaacttgtcctctagcagagaggaagagaggagtcctgaaatcagccctgaagaacactcgtctttcccgcccttcccacccagaaactgcacccagctctaaattggaattatcagccaatccacctacaactatttcctaagaacctatgagttaaaaaaagacctggaccatatctcaacactcttcttagcaacatacaaacacatttacatgaacatcaaaacaatactgtaaatgaaacgcctctataaaatgttcatacaagattcttgtggtagaagaagcacggacaccaaagaacaaaacatttgaatgctagcttctcagccacgtgacctctggcagtttacttcacctcactaaactttatctctgcaatggaaataaaaatgccaccccatatgtgtcatgtgtaaggataaaaagaaatktaatgagattatgtatgcaaaggtgggcagaaaatgcacgtggactgtagaaggtg

SEQ ID NO: 400682 - DNA, 569 bp, Homo sapiens
ggagagaaagaatgatttggtaagatttgatggccaaagcacatggagctcaaagcagagaggcaggtcagaggtgactgggctttcaaacctgggtaaccagagaataaaagacagcctcgttatatgcaagaaattaaaatagcatttaaggctgggcgcggtggctcatgcctgtaatcctagcactttggraggccaaggcaggtggatcacgaggtcaggagattgagatcatcctggctaacacagcgaaacctcatctttaccaaaaaaaaaatacaaaaaattagccgggtgtggtggcacgttcctgcagtcccagctactcgggaggctgaggcagaagaatcacttgaacccaggagacggaggttacagtgagccaagattgcaccactgcacaccagcctgggcaacagagcaagactccatctcaatttaaaaaaaaaaaaagcttttaaatctaccattacattcattgcagcagtgtttaaaacattgaacacttcattataacagagaaactcagacaccaacattgacgatctttcttccagtgttgaaga

SEQ ID NO: 400683 - DNA, 569 bp, Homo sapiens
ggagagaaagaatgatttggtaagatttgatggccaaagcacatggagctcaaagcagagaggcaggtcagaggtgactgggctttcaaacctgggtaaccagagaataaaagacagcctcgttatatgcaagaaattaaaatagcatttaaggctgggcgcggtggctcatgcctgtaatcctagcactttggaaggccaaggcaggtggatcacgaggtcaggagattgagatcatcctggctaacacagcgaaacctcatctttaccaaaaaaaaaatacaaaaaattagccgggtgtggtggcacgttcctgyagtcccagctactcgggaggctgaggcagaagaatcacttgaacccaggagacggaggttacagtgagccaagattgcaccactgcacaccagcctgggcaacagagcaagactccatctcaatttaaaaaaaaaaaaagcttttaaatctaccattacattcattgcagcagtgtttaaaacattgaacacttcattataacagagaaactcagacaccaacattgacgatctttcttccagtgttgaaga

SEQ ID NO: 400684 - DNA, 555 bp, Homo sapiens
gccctttggagaacagtgcctccagttaccacgtccaaggctgacacatttcctcaccaccgtggcttgctctcagtggggctggcccagggcatggccagtttccaggttggcatccacctcattctagttggccgctccactgtgtcagtgtgtcagagcatcagctggagtggttcccagaattcatcccgtgctcacagcaaaaccttgaagacttaggtcagccctgaaggccagctgggattgtgaatgttgaagccagcgtccccagtgtgaaggtccagcattccatgaggattcattgagcacatgttgggtaaagcatctcgaggtgcttcagtgtgttgtgaagaggggaattggaaagaggaggagcatgaaggatgcaaaggaaataaatgggatggacctggacttttaggattattcagagggtttagagaaaggatggataatatctgaaatgatacaactcaataaaaagacgccccagttaccagttaccatggctgagaggcrtgcctcaggttacatacgtggctttggaaaaat

SEQ ID NO: 400685 - DNA, 471 bp, Homo sapiens
tggatcacttgaggccaggagttcaaaaccatcctgtccaacatggtgaaaccccacctctactaaaaatacaaaaaaaaaaaaaaattatctgggggtggtggtgcatgactgtaatcccaggtacttggkaggctgaggcaagagaatcgtttgaacccaggaggtggaggttgcagtgagccaagatcgtgccactgcactccagcctgggtgatagagtgagactgtaaaaaaaaaaaaaaaaaaaaaaaattgggtgtttcttcagtatagattgattgcattatgtctttgctcagaccacaagtctggctgtgacattcaggcttctacataatctggcacaaattaatctagctcttctctgtattcccacattacattatttatagtgttattgcatgatctgctttgaactgtgattggctgtgaatgccagcagcctccgtggtgatggccttagggcca

SEQ ID NO: 400686 - DNA, 538 bp, Homo sapiens
acctgtgtcctgaaatcatcatttcaaaccacatagaaaactccagttagatcacaaagataaactttgaccactggaaagaaaacaccyaagagatgcatgtgcaggttagaaccctgcagttaatgagcttttacagatcaatgtgaggatctggccccttgtgatggatttgtgagggagctctccccaaatctcatacccctggcctgtgggcattcaatgcaggcagtaatccctccctcccctaatcacacatttaggctctcattctttcctcatatttctcagaatgagacataaaattcacacatcaccaagagccctgatctattggatgcttctggagaaaaatcaatgtttatccaatgttttggataaatcagtgttaaaggaacaaagggagaactttgatttggttggcagttacaatagccaacacttactggtatgtagtaagtgtaatctaagtgttggcttatttgattactttttgataaatatctaacctcattttcatttctcagaggttcatata

SEQ ID NO: 400687 - DNA, 538 bp, Homo sapiens
acctgtgtcctgaaatcatcatttcaaaccacatagaaaactccagttagatcacaaagataaactttgaccactggaaagaaaacacccaagagatgcatgtgcaggttagaaccctgcagttaatgagcttttacagatcaatgtgaggatctggccccttgtgatggrtttgtgagggagctctccccaaatctcatacccctggcctgtgggcattcaatgcaggcagtaatccctccctcccctaatcacacatttaggctctcattctttcctcatatttctcagaatgagacataaaattcacacatcaccaagagccctgatctattggatgcttctggagaaaaatcaatgtttatccaatgttttggataaatcagtgttaaaggaacaaagggagaactttgatttggttggcagttacaatagccaacacttactggtatgtagtaagtgtaatctaagtgttggcttatttgattactttttgataaatatctaacctcattttcatttctcagaggttcatata

SEQ ID NO: 400688 - DNA, 538 bp, Homo sapiens
acctgtgtcctgaaatcatcatttcaaaccacatagaaaactccagttagatcacaaagataaactttgaccactggaaagaaaacacccaagagatgcatgtgcaggttagaaccctgcagttaatgagcttttacagatcaatgtgaggatctggccccttgtgatggatttgtgagggagctctccccaaatctcatacccctggcctgtgggcattcaatgcaggyagtaatccctccctcccctaatcacacatttaggctctcattctttcctcatatttctcagaatgagacataaaattcacacatcaccaagagccctgatctattggatgcttctggagaaaaatcaatgtttatccaatgttttggataaatcagtgttaaaggaacaaagggagaactttgatttggttggcagttacaatagccaacacttactggtatgtagtaagtgtaatctaagtgttggcttatttgattactttttgataaatatctaacctcattttcatttctcagaggttcatata

SEQ ID NO: 400689 - DNA, 538 bp, Homo sapiens
acctgtgtcctgaaatcatcatttcaaaccacatagaaaactccagttagatcacaaagataaactttgaccactggaaagaaaacacccaagagatgcatgtgcaggttagaaccctgcagttaatgagcttttacagatcaatgtgaggatctggccccttgtgatggatttgtgagggagctctccccaaatctcatacccctggcctgtgggcattcaatgcaggcagtaatccctccctcccctaatcacacatttaggctctcattctttcctcatatttctcagaatgagacataaaattcacacatcaccaagagccctgatctattggatgcttctggagaaaaatcaatgtttatccaatgttttggataaaycagtgttaaaggaacaaagggagaactttgatttggttggcagttacaatagccaacacttactggtatgtagtaagtgtaatctaagtgttggcttatttgattactttttgataaatatctaacctcattttcatttctcagaggttcatata

SEQ ID NO: 400690 - DNA, 564 bp, Homo sapiens
catacatgatagtcctccatatgacagtgatgtgaaggaagggaagccatcaggagataggacttgcttgtttctgaaacctcttgtgacccttgtgtcccttactctgcccaacatataaaaaacactccatcaatatgtattatttctatacacacatatactacrtaaaatgggagtctttcccataccttttgtagcaagattattaaagtctttttattgaccactcttataagggggaggtgaatttcttccttcataaatttttcctaagatttccttttattcttttttgctgtgtgggggtggaaatgtcttgctctgtcacccaggctggaatgcagtgacacaatcttggatcactgcagcctctgtgtcccaggattaagcaatcttccaacttcagatttccaggtagctgggatcataggcaaaacagaaccaattttcaatttttttgtagagatgcgatctcaccatactgcccagcctggtcttgatctcctgagcttgagtgatcctcccacctcagcctctgaaagtgttgctgtgacaggcata

SEQ ID NO: 400691 - DNA, 594 bp, Homo sapiens
actgcagcctctgtgtcccaggattaagcaatcttccaacttcagatttccaggtagctgggatcataggcaaaacagaaccaattttcaatttttttgtagagatgcgatctcaccatactgcccagcctggtcttgatctcctgagcttgagtgatcctcccacctcagcctctgaaagtgttgctgtgacaggcataagccactgcacctggccaagatttctcttaatttccctacaatacttgatttctaattggcagctcacaggttagaattactgtggctttaactgtttcccatgccaatagaagccagggacaacttcccaccccatcatatttcattttctcaaaayctctggacaggtgattcacaaattctctttcttctcatgggagatgggattaaaaacaacattttgaatcttcagggaaaggggttaatttacctttctcaagaagagcttcattgctggaagatttggaaacaaaggatccgggatttaagtgtgagtcaggattatatcatgaaccttcaagaacagtgttccccacatttagaagatgtatccctctgtgaagagtgggcagg

SEQ ID NO: 400692 - DNA, 321 bp, Homo sapiens
atgtccaccacatactccagtcctcctacttgcaaacagtaggttagagaaaaaatctgggatacacattatcccaggaagcttttggggtttagaatgggtgcaacattccctcatgacagaatyggccctcagccttagtggaggtgtcccaggcaatcctccagtatggccaggagcagcccttgcatatcacattaagctttttaaatatatgatgctaacaggattgtctccctacttcataaaattgtttgcttttcctcttgtaacaaagtagcatggaaaaagcagaaattagtctagctcccaatcagtggg

SEQ ID NO: 400693 - DNA, 592 bp, Homo sapiens
taagtaaattagggcatcccatataatggaataacatggctccatcaacaatgatctagacctataaaaatgtccacatattattgtccatgtccaccacatactccagtcctcctacttgcaaacagtaggttagagaaaaaatctgggatacacattatcccaggaagcttttggggtttagaatgggtgcaacattccctcatgacagaatcggccctcagccttagtggaggtgtcccaggcaatcctccagtwtggccaggagcagcccttgcatatcacattaagctttttaaatatatgatgctaacaggattgtctccctacttcataaaattgtttgcttttcctcttgtaacaaagtagcatggaaaaagcagaaattagtctagctcccaatcagtgggagccaactcatttacaaatatagatgcagagatcctaaataaatatgagcatgtcaaatccaatgatttgataaaagcgtaacagactctgctcatatataatttatcctaaatatgcttatcagcttctgcctcataacacacacaagaactgagtagctctaaatacaaatttatttagc

SEQ ID NO: 400694 - DNA, 564 bp, Homo sapiens
ctgcaagttccgcctccaggcttcacgcacgccatcttcctgcctcagcctcctgagtatctgggactacaggcacattccgccacgcccggctaattttttccatttttagtagagacggggtttccccatgttagccaggatggtctcgatctcctgaccttgtgatccgcccacctcggccccctaaagtgctgggattgcaggcgtgagccaccacgcccagcccagtatttgcctttttgtgactggcttattaactttccataatgtccttaaagtttatttgtgttgtagaatgtgtcagaattttcttcctttgtacacttgggtttcttccacttttcggctattgtgaataatgctgttaygaacataggagtacaaatatctcttcaagaccttgctttcaattcttttggacacatacccagaagtggaattgctggatcacatggtaattgtattttcaattttttcaggatctgccattctgttttctatagaagctgccaccatttaacataatgtttttaagttcatttatattattatgcttgtcag

SEQ ID NO: 400695 - DNA, 469 bp, Homo sapiens
tcataattttgtactcaggaaccctggccatgtcactagccaaatggacataacttatggaatacatggacagcatccggttgatatgctccagagaaaaatagcagctaccatagacttcaggaaagacacatcgagcaaatgacaaaartgtgggtttcctaacttcagggagtctaagaatgcagtagaaagtgatgtggagcaaactctttcaaatggaaggaagggatagggaaaggaaaactgttagaggctcttttgaatgttagaggcaacataaaacaatttggatgtgtattctaaataaaatgcaaatgttaagaaggatgtcagctgtgagtgggactcagagaaagagaaacgttttggactacagaggcctgcagtacaagtggatctacaattctgtttagggaatccaatgcctcaggtatctatgagaggcagaattttcctatggagccag

SEQ ID NO: 400696 - DNA, 469 bp, Homo sapiens
tcataattttgtactcaggaaccctggccatgtcactagccaaatggacataacttatggaatacatggacagcatccggttgatatgctccagagaaaaatagcagctaccatagacttcaggaaagacacatcgagcaaatgacaaaaatgtgggtttcctaacttcagggagtctaagaatgcagtagaaagtgatgtggagcaaactctttcaaatggaaggaagggatagggaaaggaaractgttagaggctcttttgaatgttagaggcaacataaaacaatttggatgtgtattctaaataaaatgcaaatgttaagaaggatgtcagctgtgagtgggactcagagaaagagaaacgttttggactacagaggcctgcagtacaagtggatctacaattctgtttagggaatccaatgcctcaggtatctatgagaggcagaattttcctatggagccag

SEQ ID NO: 400697 - DNA, 469 bp, Homo sapiens
tcataattttgtactcaggaaccctggccatgtcactagccaaatggacataacttatggaatacatggacagcatccggttgatatgctccagagaaaaatagcagctaccatagacttcaggaaagacacatcgagcaaatgacaaaaatgtgggtttcctaacttcagggagtctaagaatgcagtagaaagtgatgtggagcaaactctttcaaatggaaggaagggatagggaaaggaaaactgttagaggctcttttgaatgttagaggcaacataaaacaatttggatgtgtattctaaataaaatgcaaatgtyaagaaggatgtcagctgtgagtgggactcagagaaagagaaacgttttggactacagaggcctgcagtacaagtggatctacaattctgtttagggaatccaatgcctcaggtatctatgagaggcagaattttcctatggagccag

SEQ ID NO: 400698 - DNA, 469 bp, Homo sapiens
tcataattttgtactcaggaaccctggccatgtcactagccaaatggacataacttatggaatacatggacagcatccggttgatatgctccagagaaaaatagcagctaccatagacttcaggaaagacacatcgagcaaatgacaaaaatgtgggtttcctaacttcagggagtctaagaatgcagtagaaagtgatgtggagcaaactctttcaaatggaaggaagggatagggaaaggaaaactgttagaggctcttttgaatgttagaggcaacataaaacaatttggatgtgtattctaaataaaatgcaaatgttaagaaggatgtcagctgtgagtgggactcagagaaagagaaacgttttggactacagaggcctgcagtacaagtggatctacaattytgtttagggaatccaatgcctcaggtatctatgagaggcagaattttcctatggagccag

SEQ ID NO: 400699 - DNA, 489 bp, Homo sapiens
tgttatggaaggcccttccttctgaaagtctatttctatcatgttctttccctgtgctgtcaaagggtcacccctttgtacaaaggagaagagaaatccatcaagtaaataaaatttcatttacctttgtaaaaaatayttctaccaattcacgtggaggaccttatggtttggtccgataatcagagatttgaaagaacctgatattgttggccagcagattagaaaagagttattagagagagatggctcaagtgataataactgtgtgccttgtgaatgctcacctaaaccaaagatcactgaagataatgtattttaccataatgttttaatctcaggtaaatgccaattaggagacaaacacttgtttatctcctgattggtattgatttgaattaagctgtctgccatttggagaaatttaaatgctattttaaacacacagtcttgttacttgagttatttatgatcttaagcggctcccct

SEQ ID NO: 400700 - DNA, 608 bp, Homo sapiens
atacaatttttacacacacacacacacacacacatatatatatatatatgcacagttaattttttctatcttttgtagagatgggtttttaccatgttgcctgggctggtcttgaactcctgggctcaagcgctctgcccaccttggcctcccaaagtgctgggattacaggcttgaaacactgcacytgcctggcctgatatatatttcaaaactgatttaatagataaagccttccaacaacaacaataaaaaaaacaatattgagatgaattcattggtggattctactaaacatttaaagagtaaagatgtgaattttaaataaacccagaaacaaaaagagaagggaacacccacccacccccagcttgtctcatgaggccagcattaatctgataataccaaacaagacaaagaaattacaaggaaagaaaactacagatgaatatccttcatgaactaagtgaaaaaatcctgaatacagtagtcccttggtatcggtggggaattgtttcagggacccttatggaaatcaaaatccgtggatgctcaagtctgttatgtaaaatggccataatattctcatgtaaccttttcatatcatc

SEQ ID NO: 400701 - DNA, 608 bp, Homo sapiens
atacaatttttacacacacacacacacacacacatatatatatatatatgcacagttaattttttctatcttttgtagagatgggtttttaccatgttgcctgggctggtcttgaactcctgggctcaagcgctctgcccaccttggcctcccaaagtgctgggattacaggcttgaaacactgcacctgcctggcctgatatatatttcaaaactgatttaatagataaagccttccaacaacaacaataaaaaaamcaatattgagatgaattcattggtggattctactaaacatttaaagagtaaagatgtgaattttaaataaacccagaaacaaaaagagaagggaacacccacccacccccagcttgtctcatgaggccagcattaatctgataataccaaacaagacaaagaaattacaaggaaagaaaactacagatgaatatccttcatgaactaagtgaaaaaatcctgaatacagtagtcccttggtatcggtggggaattgtttcagggacccttatggaaatcaaaatccgtggatgctcaagtctgttatgtaaaatggccataatattctcatgtaaccttttcatatcatc

SEQ ID NO: 400702 - DNA, 608 bp, Homo sapiens
atacaatttttacacacacacacacacacacacatatatatatatatatgcacagttaattttttctatcttttgtagagatgggtttttaccatgttgcctgggctggtcttgaactcctgggctcaagcgctctgcccaccttggcctcccaaagtgctgggattacaggcttgaaacactgcacctgcctggcctgatatatatttcaaaactgatttaatagataaagccttccaacaacaacaataaaaaaaacaatattgagatgaattcattggtggattctactaaacatttaaagagtaaagatgtgaattttaaataaacccagaaacaaaaagagaagggaacacccacccacccccagcttgtctcatgaggccagcrttaatctgataataccaaacaagacaaagaaattacaaggaaagaaaactacagatgaatatccttcatgaactaagtgaaaaaatcctgaatacagtagtcccttggtatcggtggggaattgtttcagggacccttatggaaatcaaaatccgtggatgctcaagtctgttatgtaaaatggccataatattctcatgtaaccttttcatatcatc

SEQ ID NO: 400703 - DNA, 608 bp, Homo sapiens
atacaatttttacacacacacacacacacacacatatatatatatatatgcacagttaattttttctatcttttgtagagatgggtttttaccatgttgcctgggctggtcttgaactcctgggctcaagcgctctgcccaccttggcctcccaaagtgctgggattacaggcttgaaacactgcacctgcctggcctgatatatatttcaaaactgatttaatagataaagccttccaacaacaacaataaaaaaaacaatattgagatgaattcattggtggattctactaaacatttaaagagtaaagatgtgaattttaaataaacccagaaacaaaaagagaagggaacacccacccacccccagcttgtctcatgaggccagcattaatctgataataccaaacaagacaaagaaattacaaggaaagaaaactacagatgaatatccttcatgaactaagtgaaaaaatcctgaatacagtagtmccttggtatcggtggggaattgtttcagggacccttatggaaatcaaaatccgtggatgctcaagtctgttatgtaaaatggccataatattctcatgtaaccttttcatatcatc

SEQ ID NO: 400704 - DNA, 404 bp, Homo sapiens
acaggcgtgagccaccatgcctggccctggatgttttcttcttaaaaagccagttgagaattctaagtgtactcacttaaaaggaaaayttagtttgctataatatttctcatatttgctgtggtgaattcatctctaggaggtttctttgtataattatttcattatctctctaatagttaattctccacatgttttgtaatatttttgcacactcaccttgaatgagaagttctctacatgtcatagtcatataacaaacaaaattcaccctccttcaccactaatcacacttctgtatattccataaaatgtgcatttcttcatggatactctttgaatcatctaaatggagactctttatagaaatattgaatcattaattcttccaactactgtactcc

SEQ ID NO: 400705 - DNA, 404 bp, Homo sapiens
acaggcgtgagccaccatgcctggccctggatgttttcttcttaaaaagccagttgagaattctaagtgtactcacttaaaaggaaaatttagtttgctataatatttctcatatttgytgtggtgaattcatctctaggaggtttctttgtataattatttcattatctctctaatagttaattctccacatgttttgtaatatttttgcacactcaccttgaatgagaagttctctacatgtcatagtcatataacaaacaaaattcaccctccttcaccactaatcacacttctgtatattccataaaatgtgcatttcttcatggatactctttgaatcatctaaatggagactctttatagaaatattgaatcattaattcttccaactactgtactcc

SEQ ID NO: 400706 - DNA, 404 bp, Homo sapiens
acaggcgtgagccaccatgcctggccctggatgttttcttcttaaaaagccagttgagaattctaagtgtactcacttaaaaggaaaatttagtttgctataatatttctcatatttgctgtggtgaattcatctctaggaggtttctttgtataattatttcattatctctctaatagttaattctccacatgttttgtaatatttttgcacactcaccttgaatgagaagttctctacakgtcatagtcatataacaaacaaaattcaccctccttcaccactaatcacacttctgtatattccataaaatgtgcatttcttcatggatactctttgaatcatctaaatggagactctttatagaaatattgaatcattaattcttccaactactgtactcc

SEQ ID NO: 400707 - DNA, 649 bp, Homo sapiens
attacgtgaggaatattgacttgcctctgtttttgtttttaaataacatcagatttggtatcagttatcacttaaaagttatwtgtgagacactttctcagtgtatgtgaccttggctgggaagcattgctttagaggtgcagagatcagagatcagataactttgataagtcggtatgtgcaatggtagaagtattttaaacatgccatgaaaggggatatttcaattcatagcatctatttttggggaaaaggctcccaaatagtattggctcagtcagtcagatcacttgtttggagatagggttggtaatatgactctatgcactgtgcatactcttagattcaagggtccccattcaaggaatttatattatggtagcactcacttaaagatcaagaacaaatggacatgggtgttcactaaagcatacttttgtgaacccaaaagtatgtgagacaggtctcaatccatttagaacatttagtttgccaaggttaagtacgcacctgtgacacagccttaggaggtcctgacgacatgtgcccaaagtggtcagggcacagctcgattttatacattttaggagaaatcaggcatcaaacagtatgtttaagttatacattgcttaagtccagaaaggcagga

SEQ ID NO: 400708 - DNA, 649 bp, Homo sapiens
attacgtgaggaatattgacttgcctctgtttttgtttttaaataacatcagatttggtatcagttatcacttaaaagttatttgtgagacactttctcagtgtatgtgaccttggctgggaagcattgctttagaggtgcagagatcagagatcagataactttgataastcggtatgtgcaatggtagaagtattttaaacatgccatgaaaggggatatttcaattcatagcatctatttttggggaaaaggctcccaaatagtattggctcagtcagtcagatcacttgtttggagatagggttggtaatatgactctatgcactgtgcatactcttagattcaagggtccccattcaaggaatttatattatggtagcactcacttaaagatcaagaacaaatggacatgggtgttcactaaagcatacttttgtgaacccaaaagtatgtgagacaggtctcaatccatttagaacatttagtttgccaaggttaagtacgcacctgtgacacagccttaggaggtcctgacgacatgtgcccaaagtggtcagggcacagctcgattttatacattttaggagaaatcaggcatcaaacagtatgtttaagttatacattgcttaagtccagaaaggcagga

SEQ ID NO: 400709 - DNA, 649 bp, Homo sapiens
attacgtgaggaatattgacttgcctctgtttttgtttttaaataacatcagatttggtatcagttatcacttaaaagttatttgtgagacactttctcagtgtatgtgaccttggctgggaagcattgctttagaggtgcagagatcagagatcagataactttgataagtcggtatgtgcaatggtagaagtattttaaacatgccatgaaaggggatatttcaattcatagcatctatttttggggaaaaggctcccaaatagtattggctcagtcagtcagatcacttgtttggagatagggttggtaatatgactctatgcactgtgcatactcttagattcaagggtccccattcaaggaatttatattatggtagcactcayttaaagatcaagaacaaatggacatgggtgttcactaaagcatacttttgtgaacccaaaagtatgtgagacaggtctcaatccatttagaacatttagtttgccaaggttaagtacgcacctgtgacacagccttaggaggtcctgacgacatgtgcccaaagtggtcagggcacagctcgattttatacattttaggagaaatcaggcatcaaacagtatgtttaagttatacattgcttaagtccagaaaggcagga

SEQ ID NO: 400710 - DNA, 649 bp, Homo sapiens
attacgtgaggaatattgacttgcctctgtttttgtttttaaataacatcagatttggtatcagttatcacttaaaagttatttgtgagacactttctcagtgtatgtgaccttggctgggaagcattgctttagaggtgcagagatcagagatcagataactttgataagtcggtatgtgcaatggtagaagtattttaaacatgccatgaaaggggatatttcaattcatagcatctatttttggggaaaaggctcccaaatagtattggctcagtcagtcagatcacttgtttggagatagggttggtaatatgactctatgcactgtgcatactcttagattcaagggtccccattcaaggaatttatattatggtagcactcacttaaagatcaagaamaaatggacatgggtgttcactaaagcatacttttgtgaacccaaaagtatgtgagacaggtctcaatccatttagaacatttagtttgccaaggttaagtacgcacctgtgacacagccttaggaggtcctgacgacatgtgcccaaagtggtcagggcacagctcgattttatacattttaggagaaatcaggcatcaaacagtatgtttaagttatacattgcttaagtccagaaaggcagga

SEQ ID NO: 400711 - DNA, 635 bp, Homo sapiens
tggtattgtcatcttaacaatattgtcttacaacccgtgaacacagaatgtctttccagttatttccactctctttagtttttttcagcaaagttttgtgttccaccatggttacatttatgcctgaataacttattctttgatgctattataaatggaatttttaaaatgttttcatagttatttacaactaaatagaaatatagctcatttgcctatgtttgttttgcatcctgcctcttttattagttataaatggttttgtgttttgtttggagctttatacccataagatcatgtgtagatataattttacacctattttttatttctaatgtagatgccttttatttctttgtcttgcctaattgctctggctagaactgccagtgctacrttgaatacaagtggcaaatgcaccatccttgtcttgttctagatgttaggaaaacagctttcagtgtttcatcattgatcatgatattaactgttgggtttttgtacatcccattgtcatgttgcagaagatcccttctatgcctagtttattgagtatttttattatagcagggcgttatatttcatcaatgttttttctgcatcaattgaaataataacatgcttattcatttcag

SEQ ID NO: 400712 - DNA, 579 bp, Homo sapiens
aattcaatgcttgaccatttggaattacaatacacttcattcatcaaccacagaacatacactgtagtatcatctgcgtgcagatgagtatactgctcaaagcgatttacagattcaatgcttttcctatcaaactactaatgtcattttgcacaaaatagaaaacatctaaaatttatatggaacctaaaaggagtctgaatagccaagccaaagcaatactaaggctagagacataggctagagacatcatattacatgacttcaaactatcctagaagactatagtwatcaaaacaacatggtactggtagaaaaacagacacatagaccaatggaacagactagagtactagaaactaaggccacatgcctgcaaccatcacatctttaacaaagttgacaaaagtaagcaatgggaaaaagacttttatttaataaataatgcagggataactggctagtcatatgcagaagaataaaactagacccccatatttcaccaaatacaaaaattaacttaagatggattaaagagttaaatgtaaaatctcaagctataagacgcctagaaaaatc

SEQ ID NO: 400713 - DNA, 579 bp, Homo sapiens
aattcaatgcttgaccatttggaattacaatacacttcattcatcaaccacagaacatacactgtagtatcatctgcgtgcagatgagtatactgctcaaagcgatttacagattcaatgcttttcctatcaaactactaatgtcattttgcacaaaatagaaaacatctaaaatttatatggaacctaaaaggagtctgaatagccaagccaaagcaatactaaggctagagacataggctagagacatcatattacatgacttcaaactatcctagaagactatagtaatcaaaacaacatggtactggtagaaaaacagacacatagaccaatggaacagactagagtactagaaactaaggccacatgcctgcaaccatcacatctttaacaaagttgacaaaagtaagcaatgggaaaaagacttttatttaataaataatgcrgggataactggctagtcatatgcagaagaataaaactagacccccatatttcaccaaatacaaaaattaacttaagatggattaaagagttaaatgtaaaatctcaagctataagacgcctagaaaaatc

SEQ ID NO: 400714 - DNA, 579 bp, Homo sapiens
aattcaatgcttgaccatttggaattacaatacacttcattcatcaaccacagaacatacactgtagtatcatctgcgtgcagatgagtatactgctcaaagcgatttacagattcaatgcttttcctatcaaactactaatgtcattttgcacaaaatagaaaacatctaaaatttatatggaacctaaaaggagtctgaatagccaagccaaagcaatactaaggctagagacataggctagagacatcatattacatgacttcaaactatcctagaagactatagtaatcaaaacaacatggtactggtagaaaaacagacacatagaccaatggaacagactagagtactagaaactaaggccacatgcctgcaaccatcacatctttaacaaagttgacaaaagtaagcaatgggaaaaagacttttatttaataaataatgcagggataactggcyagtcatatgcagaagaataaaactagacccccatatttcaccaaatacaaaaattaacttaagatggattaaagagttaaatgtaaaatctcaagctataagacgcctagaaaaatc

SEQ ID NO: 400715 - DNA, 582 bp, Homo sapiens
aatataattttggtgattagaataactttcttctgatgggcctgaatattgttgaaatactttttcaaatctctcatagtatgatattataggctcatcaaaattttgttggcattgctgtattttactccaatcaactactgttttgaaaactaagggaatagtatctagtaaagacttggcagtactgcaggcccattcatgatctgcttcagaaaatttatgcaagtttttcacaatattcctgcagtttacctttgctacccagtcttggcttttctttctgatattaacatgtgaaccaattggtatatgtcagaaaatccagccagagtcataagttcaaatatttagttcaaattctttagcaaattcaatcragttctgaagaggatacaggaattctttacatctttaagttccacttttgaccataatcaataaccaaggcagattctcctctatcagacacagagtattcccagaatggagccagaacagcagaaggtagaggaggaaagagaagtaagtttggacaaggaagttctggcaaaagaaaagaagatgaagaagggggaaaat

SEQ ID NO: 400716 - DNA, 534 bp, Homo sapiens
ctatcactgccagccctttggccatccaaagttgcagctgtctactttttttttttttttttttttttgttgttaagacaaggtctcgctctgtcacccaggctggagtggatatggatgtcctatamctaatcaatctccagctactggacgtttaggtggtttccaatttactaccattataaaacaacactgtagtaaaccatcatacagaaatcattttgcaaatatccgattattttcttaagtttttagaaactgaactgtttagtcaaggtatttaaacatttttaaggcctttgtgacactgctgtcagcaacagatgaggatttcctattctgatgggtggaacttttctaggggtggtaatatctcttacgtgaagtcttgttttgttttgaagatgcaggaagttatataacagagactttccttgctggcacactgtaccaggaaggagacacagcactctatccaccctacttggccagtttggtatttgaatggaaagggcaagtttgtttttgaggtgg

SEQ ID NO: 400717 - DNA, 534 bp, Homo sapiens
ctatcactgccagccctttggccatccaaagttgcagctgtctactttttttttttttttttttttttgttgttaagacaaggtctcgctctgtcacccaggctggagtggatatggatgtcctataactaatcaatctccagctactggacgtttaggtggtttccaatttactaccattataaaacaacactgtagtaaaccatcatacagaaatcattttgcaaatatccgattmttttcttaagtttttagaaactgaactgtttagtcaaggtatttaaacatttttaaggcctttgtgacactgctgtcagcaacagatgaggatttcctattctgatgggtggaacttttctaggggtggtaatatctcttacgtgaagtcttgttttgttttgaagatgcaggaagttatataacagagactttccttgctggcacactgtaccaggaaggagacacagcactctatccaccctacttggccagtttggtatttgaatggaaagggcaagtttgtttttgaggtgg

SEQ ID NO: 400718 - DNA, 526 bp, Homo sapiens
ttacgctatctgtctgaagttcctcatcaaygatgaggataataataattattattattattttacagtggcaagaatgaaataagttaatctaggtaaggaatttagaacaatggctagtgcatagtaaatgctgtgtgttagctattattaatattattatttttacaatgttattttcctgaagcagtggatggcaagtgttttgtttaaaattcattataacctatgagaaatgtaatacatgaaactatttctcttttatgaggagctcaacaatcactgtatgtcataaaaacacagagaaattgttcacaatgatggaatgacaacccgtcataaccagtaagtagatcagccctggaatcagactgcctggctgtgtcctgattcaactcatttttgcctatgtgaccttgggcaagttacttcatggtgcctcaattgttatctaacctctaatttatttaaatgtaatacatattagttacaaatgaaaatcactaagaagagtgtttggcactta

SEQ ID NO: 400719 - DNA, 536 bp, Homo sapiens
acttctttttctagaggagtgaacttaaaaatgtacacacatcacagtgaattgtgactatgttagccaaaaaraaaaaaaagagagtcacattttagtagtcttcaagtgtcatggaaaaggaacatgctggagcctcaaagatgaattcattcattcattccagtttatggtggtctctactctctgccagccactgtgttagatgctaagtatgcctcagtgaatagaaacagagcctttctagcaggggcggtaaacagtatacacagaaacaagtcagcaatgtgtaattattaattggaatcaataatatgataaaagccaatactatagcaggtggtatctggagtgaagggaaaggaggtcagggagacaacagaagcaggcttgtcatgaaggcctggctgaggaagtgacctttaacagacttcaaggagcatgaaccaggcaggaagaggatttcaggcagagggaacaattaaaagctagaattacttttaaaaatttgagtttttaaaagaacatataaatac

SEQ ID NO: 400720 - DNA, 563 bp, Homo sapiens
actctctaagattcaatattactgcattaaaaatttgagcagccatttttttagaaatggagatgtttattctaaaatttacatagaaatgcaaaatgattagaagggtcgataaacactttgaaaaagaacaaaattaaagaatgtgtactatcaatatcaagacaataaagctacagtaatcaaggcagtatgatatgggtataggaaaagacaaataactcagtctaatagaataaagtccagaaataaacatgtacagtcagcaaaagaatcttttcaaaaaacattgctgaaacaactggatatccatatgtggaaaaaaattaacctaaatcccaccacaaaccatatacaaaaattaattctagatgaatcctagacctgtaaatcacctagacgtaaacatagggtaatattttcacaatttgaggtgggccaatatttcttagaatacaaatatttgcaatatatatttacattacaaaaggcttgtatctagaatatgtaaakaactcctacaaatcactaataaaaagacaaatcaattttttaaaatggtc

SEQ ID NO: 400721 - DNA, 629 bp, Homo sapiens
tggctcacatctacaatcccagcactttgggaggctgaagctagaagatggcttgaggtcaggagttcaaaaccagcctgggtgacaaagtgagaccccatgtcaaaaaaataaataaataaagatgatattatcaatrtaagatttagggttggtaaactcaaaagacactaaacaaataatttcctattctgggattaaaataattaaaattaaataattaatttcctattctgggattaaaataatatgatagtattaaaataataatgatatggtgaatatattaacagataattgatcatgagtctctagatactcttcaaggcatgattttattaatcttaactataattctgtgagttagttactattcttctattttacagatatggaaaacacgaggctgggcaaccctgtttatatttctagtaggaacaagtggcttgatggtctgcagttttaaccactattctatactggttctctgctactaacagattattatatatatataatagagattatgctcccaagaactctgtgatatatcttgggaacttcaaagacaatatcatgatactaccattggttctgatggctaatgtttgtgacagagatttataata

SEQ ID NO: 400722 - DNA, 574 bp, Homo sapiens
agatgatattatcaatataagatttagggttggtaaactcaaaagacactaaacaaataatttcctattctgggattaaaataattaaaattaaataattaatttcctattctgggattaaaataatatgatagtattaaaataataatgatatggtgaatatattaacagataattgatcatgagtctctagatactcttcaaggcatgattttattaatcttaactataattctgtgagttagttactattcttctattttacagatatggaaaacacgaggctgggcaaccctgtttatatttctagtaggaacaagtggcttgatggtctgcagttttaaccactattctatactggttctctgctactaacagattattatatatatataatagagattatgctcccaagaactctgtgatatatcttgggaacttcaaagacaatatcatgatactaccattggttctgatggctaatgtttgtgacagagatttataatatttttgagatttagcgcataagttaatargaggaagcatgttttaagtgcttactgtaagccagaca

SEQ ID NO: 400723 - DNA, 554 bp, Homo sapiens
ttaaaaaaaacacttcacaaaagaaaatatagaaatcgtcagtaagtcacgtcagtagkcatcaaggaaatgcagattaaaaccacagatttaccatttcatacctacttaaaaagatttataataccaagttttagtgaggctgttcccctacatttctagtagaaaaagaaatttgtaaaccatttcaaagaatagctagtcagtttttcattgagtcaaacgtatacctattccgtgacaagaaattccacttttttggtatttacccaggtaaactgaaatcatgtcttcaaatatcttggccacaaattttataacaactttattcctaatagcccccaaattcgaaacagccaaaatacccatcatcaactgaatgtataaacatatagtagtctactcagcaatggaatgctgctcaccaataaaaaggaacaacatgaatgcattttttaaactgacaatcaaaggaagccacacacagaagagtatcttctgcatgattccttgtatcaaagttctggaacaggtggcagacataaatacaatgg

SEQ ID NO: 400724 - DNA, 554 bp, Homo sapiens
ttaaaaaaaacacttcacaaaagaaaatatagaaatcgtcagtaagtcacgtcagtaggcatcaaggaaatgcagattaaaaccacagatttaccatttcatacctacttaaaaagatttataataccaagttttagtgaggctgttcccctacatttctagtagaaaaagaaatttgtaaaccatttcaaagaatagctagtcagtttttcattgagtcaaacgtatacctattccgtgacaagaaattccacttttttggtatttacccaggtaaactgaaatcatgtcttcaaatatcttggccacaaattttataacaactttattcctaatagcccccaaattcgaaacagccaaaatacccatcatcaactgaatgtataaacatatagtagtctactcagcaatggaatgctgctcaccaataaaaaggaacaacatgaatgcattttttaaactgacaatcaaaggaagccacacacagaagagtatcttctgcatgattccttgtatcaaagttctrgaacaggtggcagacataaatacaatgg

SEQ ID NO: 400725 - DNA, 554 bp, Homo sapiens
ttaaaaaaaacacttcacaaaagaaaatatagaaatcgtcagtaagtcacgtcagtaggcatcaaggaaatgcagattaaaaccacagatttaccatttcatacctacttaaaaagatttataataccaagttttagtgaggctgttcccctacatttctagtagaaaaagaaatttgtaaaccatttcaaagaatagctagtcagtttttcattgagtcaaacgtatacctattccgtgacaagaaattccacttttttggtatttacccaggtaaactgaaatcatgtcttcaaatatcttggccacaaattttataacaactttattcctaatagcccccaaattcgaaacagccaaaatacccatcatcaactgaatgtataaacatatagtagtctactcagcaatggaatgctgctcaccaataaaaaggaacaacatgaatgcattttttaaactgacaatcaaaggaagccacacacagaagagtatcttctgcatgattccttgtatcaaagttctggaacargtggcagacataaatacaatgg

SEQ ID NO: 400726 - DNA, 525 bp, Homo sapiens
tatcttcagttcaggccccaaagtaatcatgaatctagtgagtctctggatgtggtatgcagatcaggggttataagggatgatttagtttattcagaacttgttttagtctaatagctatgtatttattttaacatgtatttgaaatataaataactatcaccacaaagttgtgatctcattgttattattgcttcagtgaagactaaactaggtattcaggtttactgagtcaattcgatgaaaataaaaataaatcatctgcagataataagcacacacgagcagactcacaaaagtagaacttgaatgtgtgaactttgggaaatactgctctaattaattattataatgttttaaggctttttagactacctatttaaacttcatatttttgcacatgcagtttttgacagctgatatcatttggctgtgtcsccacccaaatctcatcttgaactgtagctcccataaatccccatgttgtgggagggacccaatgggagctaactgaatcatgggggc

SEQ ID NO: 400727 - DNA, 441 bp, Homo sapiens
agttatctttgccgccacgttgctgtggttcccggcaagactgcttgccctgtgcaccctctgcagctcccacctctgggatctatcccctatgatatctcaggggcaaggctctggtggatgaggacagatactaggactggctccctccattaggcctccccaccacagcaccttccccagtgtctcatgtctggactggagtagcgttgggcagacaaattagcccagttcctccgcaggactgtaactagggaatgaaacatcagtctccacttcctgccgtcaccctaaatcctaccagaaatcttgtggggctacccacaarattgagggaggaaaaaatcccctttttccagtagggggagctgcagggaggaaatagtttctttttattaaaaaacccactgtactcccctaaaagcgaactctatctggctc

SEQ ID NO: 400728 - DNA, 596 bp, Homo sapiens
aggctggttcaaatatcaggccccctggttccttcgatgcagctcggcattcacaagaatctcctgcagaaaatcgaagagcaagtatcctttccattccttggatggtgcagcactgggagaagggcctcaggtactggcaggtggctggtgggcatgggtaacccccgccttctctgagcccaggccatgcagctaacattgctcagttggtggtggtaatcagctgaggctttaaatgaaatttccttcatttcagatgaaaccattcttgcagaggagaaaagcagggmacactgcataccctgcaggaatctatctttccctagcacctctgtcctgtaaaactccacagggacacccaacaaacggggcaaggagtcctggaattttctccatgaaggacaggggtctgtagggggctgtcctgggagtcagggaggctgttaaccactagaggtcagggctggggactgatttttttttcctattaggaaagctgaggcacaggaaatattaagcggtgaatgactcactatgttaaaaagccagttactttagtaagatttaggtcttggttttgaaaaagatgtaca

SEQ ID NO: 400729 - DNA, 626 bp, Homo sapiens
gtcggtagttcaagaccagcctggccaacgtggtaaaaccccatctatactgaaactacaaaaattagccagccatygtggcaggcacctgtaatcccagctattcaggaggctgaggcaggcaaattgcttgaactcaggaggcagaggctgctgtgagctgagatcgcaccactgcactccagcctgggtgacagagtgagactccatctccaaaaaaaaaaaaaaagataacagtaataaatccaaatatatcaataatcataataaatgctaatggactaaactaatccattaaaaactataaatttaattttctgtatgcttgaatttctcctaataaaaaaaattttaaagagagattgtcaatctagtgttttttttaaactccacctgtggctgtttgtaagagcacactgaaaacataagaacacacaaaaaagttgaaaataagagcctgataaagatacaccagggaaacactgatcatgagaaaattggtgtacatatagataaaagagactctaatgtaaacatcattaggaataaggaggattgctgtgtaaagatcaatggaataattcgccaggaagatataacagttatctacttgcatgtatctaaat

SEQ ID NO: 400730 - DNA, 626 bp, Homo sapiens
gtcggtagttcaagaccagcctggccaacgtggtaaaaccccatctatactgaaactacaaaaattagccagccattgtggcaggcacctgtaatcccagctattcaggaggctgaggcaggcaaattgcttgaactcaggaggcagaggctgctgtgagctgagatcgcaccactgcactccagcctgggtgacagagtgagactccatctccaaaaaaaaaaaaaaagataacagtaataaatccaaatatatcaataatcrtaataaatgctaatggactaaactaatccattaaaaactataaatttaattttctgtatgcttgaatttctcctaataaaaaaaattttaaagagagattgtcaatctagtgttttttttaaactccacctgtggctgtttgtaagagcacactgaaaacataagaacacacaaaaaagttgaaaataagagcctgataaagatacaccagggaaacactgatcatgagaaaattggtgtacatatagataaaagagactctaatgtaaacatcattaggaataaggaggattgctgtgtaaagatcaatggaataattcgccaggaagatataacagttatctacttgcatgtatctaaat

SEQ ID NO: 400731 - DNA, 602 bp, Homo sapiens
tggccactcctagaataggctccacaggactatgtgtattttttgtatttgttagtttttttttcttattcaattcctaaaatggaagatctacaggtggatagaacgctcactaagtaagtcctcagcttccaaaacctagaggcacactattaccctacacatttagttaagggaaaatggaaaggagaaaaggagggagggaaggaggagacagaggaaagaaagaaaagcaaggcaaggcctggaaagatttgcagaagtaatgacagcttttttctttttttttggagacatagtctcactgtgtcacccaggctggagtacagtggcatgatctcaactcactgcaacctccaggtgccagagattctcctacctcaggatcccgagtagctgggattacaggcacatttttatatttttagtagagatggggttttgccatgttggccaagctggtctygaactcctgacctcaagtgatccgcctgcctgcacctcccaaagtgttgggatcacaggcgtgagccaccgcacctgaccagtaacgacagcttttaatggtgaaaaacagaacaagctgagaaggctacagtgag

SEQ ID NO: 400732 - DNA, 570 bp, Homo sapiens
attcttgacttaaattcaacatttgaccaattggacctaataaatatctatggaacacttcatccttcaaccacagaatactcatttttttctcaatcacacacagaatataccccaagattgaccaccagccaggccataaaataaatcttaataaattcaaaaaaattgaaatcagaccaactgtaccctcagaccacaatggaataaaaactgaaagcaacaagatctcccaaaaccacataattacatgaaaattaaacaacttgcacctgaatgacttgtgtaaacaataaaattgaggcaaaaagaattmtttgaaataaataaaaacagagacacaacattccaaaatcaccaggatgcagcaaaagcagtgttaagggggaattttatagctctaaacatctacatcaagaagttagaaagattccaaattaccaatctaacatcacatgtaaagaacctagtgaacaaactaacccaaaactagaagaaataactaaaatcagaacaaaactgaatgtaattgagactcaaaaatacatataaaaaatcaactgagcaaaa

SEQ ID NO: 400733 - DNA, 489 bp, Homo sapiens
agtagcatttctatatatcaataacattcaggctgagaaccaaatcaagaatgcagtcttatttaaaataggcacaaaaagaatatacctagttatatatctaggaggtaaaagacctctacaaggagaaytacaaaacactgctgaaagaaatcacggatgacacaaatggaaaaatgccccatgctcatgtattggaataatcaatatcattaaaatggccttactacccaaagcaaactacagattcaacactatttctatcaaactaccaatgtagaaaacactattctaaaatttatatagaaccaaaaaagaggctgaatagccaaagtaattctatggaaaaagaacaagttcagagacatcccattaccctgattcaaaccacattaccaggttacattaacccaaacagcatggtactggtacaaaaacagacacatagaccaacggaacagaatagagaacccagaaaaaaaaaaaagc

SEQ ID NO: 400734 - DNA, 316 bp, Homo sapiens
atggaaattttttttaaattcatcttgatgtagccgagaaaggagctgaatgaagtcccataaatttttttttaaaagaaattcaccttagagttcagaggaagtgtggatatctttagtttgagaaggacttatttttaaggagactatgggaaaacttggaaaatargcttggggtgaataatctcttttacttgatgttattcccaaaaggatttcttcctcccactcttccctgaccccatcacctttctctctctttctctctctgtcatctgtaactctgtatctcttcatttttccctttctctctctt

SEQ ID NO: 400735 - DNA, 623 bp, Homo sapiens
tattctagaaagtatacattaaataatgtcacattaattcccagcaaaatctcaaagtggattattaaagatgtggtttgtgtgcactgaaaaaaacctaatgatcttgtgtggagcaataggtctctatatacacatgaaatatattaacaccaataacctsatcttcttttaaatgagaattactaacctgtgttagtgaaatgctacagttgttgattacattggttttgcatgaattcagattgttgatggctttgtgatccctttccttttcttcgtagctttttcctcgccgcaccatcacttcctccatgatgaaactgaactcttggccagagcattgtataggagtataaatacacagtgaacaaacctgagcccctagagggcaaagatggcacttcacttttaaatttttgtgtctctctctaacatgtatatcagtgtgtggtatatttgtgtcaaaatatattgagacttagtaactaggaggatgatgttggataagatccttatatctctggccttcattataattaattaactgatttatttttgagaagaagtgtcactctgtcgtccaggctagagcagagtggtgcagtctttactcacggcaa

SEQ ID NO: 400736 - DNA, 582 bp, Homo sapiens
taatctacctccatatgttggctgatatgtgaatagatcagtgtgtaaatcagagcacaaatatttagtgagaattttccctcactttgtgtaagcttctgatcatggagattcaaagaagtgaaaggcagaatccctagtctcaggaagatgtgacacagataatatcactgttacataaaaaaaaataaacattagaagccacagaacagctgtgtttatcagtcaagtgcagagctcagagattcagtaccttgccttcagaggctaaataggctacagtgaatttctttggtcaaaaagcttctagggcagtctactgggtatgaaggttctgacagagctctgtgacattttgttaactgaggtatgctgactgttttttcagacaggttttagctgccatcttgtgtcccwtcccttcttctctgagaatggctgatccattactcctccttctttattgctccaggaagcttctatctttccatgctgtagcttggtgcttgccccaactaccctgtagattgtgggcctgtttagaagttaaaggtgcatttcttccaatcagctaaaaataga

SEQ ID NO: 400737 - DNA, 625 bp, Homo sapiens
ggagtagtagtacagagatgtgatcgagggctcctggctctgtgttgggctctgccattcacttgctttctgtccttggagcagtcatatcttcctctgggactcagtttgctcatctgtaaaaagagggttttttaytacatgctcactgaagcctcttccagctctaaaggcctctgattcagcaaaactcttattaatgaagctattacaaaaggcttgtgttggattgattatggtggccactgctttcctgggctgtcacagtcctcacttcttccttttcccctcacgtccctgtggtatgttggcataggatgagtcactgccggctgtggcatacatccagaaatggaatgccatcctccttcctggcacagggagggagaagtgcgactttttatatcccctcctattgattaatgacatctacttcataagaattatgattactctggtctcatcaagccacttctaagaatacaaattctatgcatttactgcaacctcaggacaagattgacctcggaaaggctttgggaacactttagaaaacatctcttcctcccactgaaaggttcacaactattgttttcctcttctgactcatctttgaatcagtaaa

SEQ ID NO: 400738 - DNA, 625 bp, Homo sapiens
ggagtagtagtacagagatgtgatcgagggctcctggctctgtgttgggctctgccattcacttgctttctgtccttggagcagtcatatcttcctctgggactcagtttgctcatctgtaaaaagagggttttttattacatgctcactgaagcctcttccagctctaaaggcctctgattcagcaaaactcttattaatgaagctattacaaaaggcttgtgttggattgattatggtggccactgctttcctgggctgtcacagtcctcacttcttccttttcccctcacgtccctgtggtatgttggcataggatgagtcactgccggctrtggcatacatccagaaatggaatgccatcctccttcctggcacagggagggagaagtgcgactttttatatcccctcctattgattaatgacatctacttcataagaattatgattactctggtctcatcaagccacttctaagaatacaaattctatgcatttactgcaacctcaggacaagattgacctcggaaaggctttgggaacactttagaaaacatctcttcctcccactgaaaggttcacaactattgttttcctcttctgactcatctttgaatcagtaaa

SEQ ID NO: 400739 - DNA, 625 bp, Homo sapiens
ggagtagtagtacagagatgtgatcgagggctcctggctctgtgttgggctctgccattcacttgctttctgtccttggagcagtcatatcttcctctgggactcagtttgctcatctgtaaaaagagggttttttattacatgctcactgaagcctcttccagctctaaaggcctctgattcagcaaaactcttattaatgaagctattacaaaaggcttgtgttggattgattatggtggccactgctttcctgggctgtcacagtcctcacttcttccttttcccctcacgtccctgtggtatgttggcataggatgagtcactgccggctgtggcatacatccagaaatggaatgccatcctccttcctggcacagggagggagaagtgygactttttatatcccctcctattgattaatgacatctacttcataagaattatgattactctggtctcatcaagccacttctaagaatacaaattctatgcatttactgcaacctcaggacaagattgacctcggaaaggctttgggaacactttagaaaacatctcttcctcccactgaaaggttcacaactattgttttcctcttctgactcatctttgaatcagtaaa

SEQ ID NO: 400740 - DNA, 535 bp, Homo sapiens
cttaatgatcctcccatctggaatgttcttatcttaaccctcctcccccgcctgccatttgatcagttccttactctcccttgctgtattttccccaaaggggctagtttatttcacaacctatataaagcttttctgtctacattattttttcccttacatgaatatctgtacaacttggcttttkccttttaaaaataatttaattggattatatatcaggtttttctatagttttttttagtatgcacttctcaccttcccactagattggaggtttcttgaggtcaaaagactgcaggcttttaagttaataaatacatatgtattgaactatttttatgattatggtatatagtataatttatttctgtcttttgtactgcacttagcatggatttcaggtgttactgaaactctttgttgacaacaaattgagtagtatatgacatcatctaaaaatctgtaactcttatttgtcaaacaactcaagtagtagggatcatagaggtttgagagcaatttagacgaatgt

SEQ ID NO: 400741 - DNA, 535 bp, Homo sapiens
cttaatgatcctcccatctggaatgttcttatcttaaccctcctcccccgcctgccatttgatcagttccttactctcccttgctgtattttccccaaaggggctagtttatttcacaacctatataaagcttttctgtctacattattttttcccttacatgaatatctgtacaacttggcttttgccttttaaaaataatttaattggattatatatcagrtttttctatagttttttttagtatgcacttctcaccttcccactagattggaggtttcttgaggtcaaaagactgcaggcttttaagttaataaatacatatgtattgaactatttttatgattatggtatatagtataatttatttctgtcttttgtactgcacttagcatggatttcaggtgttactgaaactctttgttgacaacaaattgagtagtatatgacatcatctaaaaatctgtaactcttatttgtcaaacaactcaagtagtagggatcatagaggtttgagagcaatttagacgaatgt

SEQ ID NO: 400742 - DNA, 535 bp, Homo sapiens
cttaatgatcctcccatctggaatgttcttatcttaaccctcctcccccgcctgccatttgatcagttccttactctcccttgctgtattttccccaaaggggctagtttatttcacaacctatataaagcttttctgtctacattattttttcccttacatgaatatctgtacaacttggcttttgccttttaaaaataatttaattggattatatatcaggtttttctatagtttttyttagtatgcacttctcaccttcccactagattggaggtttcttgaggtcaaaagactgcaggcttttaagttaataaatacatatgtattgaactatttttatgattatggtatatagtataatttatttctgtcttttgtactgcacttagcatggatttcaggtgttactgaaactctttgttgacaacaaattgagtagtatatgacatcatctaaaaatctgtaactcttatttgtcaaacaactcaagtagtagggatcatagaggtttgagagcaatttagacgaatgt

SEQ ID NO: 400743 - DNA, 593 bp, Homo sapiens
atttcattgtgatgttacactcacatttagagggcaaatgagtcaggaaataataccaagaaagccttttactttcctttattttactttttcattatgatggacaatagaatatgcaccacatcacatcctcttcctcacaagaatatcagtccccttgaargtaattacagagtctcctggttatagaccccaccacctaatgtaattgctgccaactctaccacctaccatccctttcattggaaatggtcgtgtaataccttgcggctctgtcatctgctgatacaaggtaagatatgttgtatggccctctttattttctgtaaatcatgtgactaaaagcaatggctttggttgcttaacaaaagattgtttcatcttaagctgtgataattttgcactcaggaaaaaaagaattattgtaatgacaaatttaacagcctgggctattagcggctaagtttagatagactttacgctagttactatgtttagacttgaaaatgaaaatattatttcaagatggagtggaaatgctcaccatgcttcttatatgggaaagaaatagttgtttaaatgagtttgaattg

SEQ ID NO: 400744 - DNA, 593 bp, Homo sapiens
atttcattgtgatgttacactcacatttagagggcaaatgagtcaggaaataataccaagaaagccttttactttcctttattttactttttcattatgatggacaatagaatatgcaccacatcacatcctcttcctcacaagaatatcagtccccttgaagrtaattacagagtctcctggttatagaccccaccacctaatgtaattgctgccaactctaccacctaccatccctttcattggaaatggtcgtgtaataccttgcggctctgtcatctgctgatacaaggtaagatatgttgtatggccctctttattttctgtaaatcatgtgactaaaagcaatggctttggttgcttaacaaaagattgtttcatcttaagctgtgataattttgcactcaggaaaaaaagaattattgtaatgacaaatttaacagcctgggctattagcggctaagtttagatagactttacgctagttactatgtttagacttgaaaatgaaaatattatttcaagatggagtggaaatgctcaccatgcttcttatatgggaaagaaatagttgtttaaatgagtttgaattg

SEQ ID NO: 400745 - DNA, 593 bp, Homo sapiens
atttcattgtgatgttacactcacatttagagggcaaatgagtcaggaaataataccaagaaagccttttactttcctttattttactttttcattatgatggacaatagaatatgcaccacatcacatcctcttcctcacaagaatatcagtccccttgaaggtaattacagagyctcctggttatagaccccaccacctaatgtaattgctgccaactctaccacctaccatccctttcattggaaatggtcgtgtaataccttgcggctctgtcatctgctgatacaaggtaagatatgttgtatggccctctttattttctgtaaatcatgtgactaaaagcaatggctttggttgcttaacaaaagattgtttcatcttaagctgtgataattttgcactcaggaaaaaaagaattattgtaatgacaaatttaacagcctgggctattagcggctaagtttagatagactttacgctagttactatgtttagacttgaaaatgaaaatattatttcaagatggagtggaaatgctcaccatgcttcttatatgggaaagaaatagttgtttaaatgagtttgaattg

SEQ ID NO: 400746 - DNA, 566 bp, Homo sapiens
atgcaaaactttcccctacttatagagtaaattaagtggtgataacttcatatgagaaattyatttctatttgttttattctttccagatatctccttttgaaataaaacatttcataatttgaagtacaacatattacttaagagtcagcttgagttggaattccaactttgtgataatttgagagaaaagaggtagaaaaaacactcatagagatggaattccaatgacgacattctcatttactttataattttgctgctgattggccctgattaaaaacaggaaggaagagttcaatttcatcactggtatttatttttgctgatgcccttttaaacttgagcacccattcattctcaccccaagtggttttcaagctgaaactgccaattatccaaaatgtcttcctagtatctaatgtccataccacttggggctcccttatcccataaaactaatttaatgtatgagcttaattacatagaggtagatcaagggccttagaggcaaaaggctaacgagggcattaaatcctgaaccacttaacagctgccccatcactt

SEQ ID NO: 400747 - DNA, 599 bp, Homo sapiens
atggaggttcctggcagtgtctgaaaaatgtagtgacatttttacatttagtgggagtgggagtctaggcaggagacaagtggaaaattagtatcaccaggtaactagtcraattgatgatggagatattttcttgatcatgtttgagacatcttctaagaactctcaaaacataactcttgaaggtttttaaaaatctgaatgtcctgatttggtagattcaggctcaagtatttaaaatttcaagacgagtgtgttaatttcccactaatccagaccaaggtcaaggccctgttagaggaagaaagtcagtgatcgctgactcatggccagcaattagaatgtaggtgctggctctttgctcataaaccacatgatttaggacaattagaggataatgttgcttcgggatttctacatttagcatttgggcctatctcttgttttattatttctttattattctatagttgtagatgtgctttcagaatttactgagcctcagtatttagaataatgtattgctgttaatgtgtttttttagccacaatcttaaacatttccatctttctattacttggaaaccatattagttaata

SEQ ID NO: 400748 - DNA, 549 bp, Homo sapiens
tacatgtgcacaacgtgcaggtttgttgcatatgtatacatgtgccatgtgcgtatgctgcacctattaactcatcatttacattaggtatatctcctaatgctattccccccctcccccaacgtggatgaagctggaaaccctcatgttcttaatcccagcaacatctgctggtcctgaaaagcttgctggctgatacactcagattgttaacataatactaacagtcaaatacttggtgactcatgacctatcaattgactttcagctcttgttctttcagtttaaaactggcaaattaaaaagaaaatacatscaaattctgcaaacagagacagccttttgtcagctggaatcgaatttccttgtagtcttttttcaatgaatttctcaacttttcttcttccagcacactcccttttacctcaatttttgctaaggagtgtttcattttcttctcattcttctcagttgcctaactcttacctatgaagcctctctcaagtctatattttcagtgaagctctcactcactaatgcaatagttgt

SEQ ID NO: 400749 - DNA, 523 bp, Homo sapiens
catagacaagacagtgattagttttatttataggattatggtttacagattatatcaatcagggaataatttatggggaaagtgatataacagtataaaaagagagcacagagagctatgtataaacattaattctttatttgctagcagtgagattctataaactccctaaggctctactttctgatccgtaaaataaaaattacaatgtgtacctcatcacaatgaagattaaataagacaatgtgtggaaaatattgcctgacacataacaagcattcagaaaaaggaaagaagggtggagggaaagaaaaattctgagagaaagagagaacttaacagaaagagagaaaagaagaaaggaaagaagtggaaaagagagaccaaggggtaagtaataaaactgctagagtgttaaatcasttatcattactgtgtaacaaattatcccaaaactttgtgacttaaaacatctattatttcacagtttcagtgggtcaggaatccagttccagtttaactg

SEQ ID NO: 400750 - DNA, 595 bp, Homo sapiens
tttccagctcctctttttattgctaggaagcctcacagaattacaaccagtgaaatattccccttttctcttgggtgataataaatttcccggtggaaaacaaatagttttgcattcttgctatataataactcaaatatttgggcatgttgtagtataacatttttaattgtataatcaagacaagacaatgctttctttgcttaaatatctagctatagatatgtttttatatgcttacaaggaattatatatgtaaaggagacccgtgaaatagcctaatgctttcattttacaggtgaggtataagaggctgaagggctaacaaatttgcccaatttatataattgttggactctaataaaatmatagcttatgtatttttaatgaaaatatcagtactgggtcaggcactctgccagatccttcccacttctagctcatgtaaatcacaaaccaaatatttatgattataccctttacaaatgaagaaactgaggctagataattcatttgctcattgctttaatactgttgcgctccttttatatgtcactatgtgggacacggggtgaaatgtagtgagatgacagac

SEQ ID NO: 400751 - DNA, 383 bp, Homo sapiens
ttatttagataatgagatttgggtgtcttaagatgataatattgagatgaaattttggcctttgagttgaagctgcagtgagttgagaattttgaggatgttaagatcagtttaatgtattttgcatgagggagtgacatggccagagagggccctgttacaggctgaataatgacatctcccctttcccgaaagatgtccgtgtcatagtctccaaaacctgtgaatgaatatgttactttacayggcaaaagagactttacagagatgatttaataattttgagatatagagattatcctagattacccaaatgaaccaaatgtagttacaaaggtccttataagagggtggcagcatggttagaaaaagtgaatgcaatg

SEQ ID NO: 400752 - DNA, 467 bp, Homo sapiens
atttatatattattttcatcatgtgggtttctatctctagagtatttctaaggatacaagtactggtttaaagaatatgtacattttgaatattttaacsaatgttgatgagaaacaaaataaagctatatatttccactagcaatcattgagagtgctggtttttcacactttgctcaatagagtgtcttatcaaaatttttgctctttgacaaataccaaaatggtaattcattgttgttttaatttgcgttcctctttttaagggtaaatatgggtatatttgcatatatttaagatttatttgcctattgtttctgtgacctattaataaaatttgactattttattgagttttcattttgatagacattatttatatattaaataattaaaaccttagtgatatgagttatgaattttcctccagtgtgtgatacatgttttacctgattaacgtgcttatt

SEQ ID NO: 400753 - DNA, 512 bp, Homo sapiens
tttgtctagagagagttctgagataacatataagagatgctggaaaggagacattagcttgatcagttaataaagccagccacacctgttagagggataaggcctagcagaaaatcatttagccaggtccttgtctggcagaaactagatggtttatttatcaaaatgcatttattgagtattcgcccatgcctgccacagcatyaagcaaggggaaagataaagatgaattggtaaagtagagttccttgtcctggtgaaactcagattccagcaagtgtagtaagagttataagaaattgtccccaaaggttattcaagctttaaaaccgtatgcattcctgatttttctgaaggtataaaatctagctacttcagagaaactctttacacccttactaacagtccactttcccccattctcccatataagttcattaagagagatcattgcatagtgatagccttatggatagttagtggtgctgtgggcaggaatggcaagcaaattt

SEQ ID NO: 400754 - DNA, 512 bp, Homo sapiens
tttgtctagagagagttctgagataacatataagagatgctggaaaggagacattagcttgatcagttaataaagccagccacacctgttagagggataaggcctagcagaaaatcatttagccaggtccttgtctggcagaaactagatggtttatttatcaaaatgcatttattgagtattcgcccatgcctgccacagcatcaagcaaggggaaagataaagatgaattggtaaagtagagttccttgtcctggtgaaactcagattccagcaagtgtagtaagagttataagaaattgtcyccaaaggttattcaagctttaaaaccgtatgcattcctgatttttctgaaggtataaaatctagctacttcagagaaactctttacacccttactaacagtccactttcccccattctcccatataagttcattaagagagatcattgcatagtgatagccttatggatagttagtggtgctgtgggcaggaatggcaagcaaattt

SEQ ID NO: 400755 - DNA, 512 bp, Homo sapiens
tttgtctagagagagttctgagataacatataagagatgctggaaaggagacattagcttgatcagttaataaagccagccacacctgttagagggataaggcctagcagaaaatcatttagccaggtccttgtctggcagaaactagatggtttatttatcaaaatgcatttattgagtattcgcccatgcctgccacagcatcaagcaaggggaaagataaagatgaattggtaaagtagagttccttgtcctggtgaaactcagattccagcaagtgtagtaagagttataagaaattgtccccaaaggttattcaagctttaaaacygtatgcattcctgatttttctgaaggtataaaatctagctacttcagagaaactctttacacccttactaacagtccactttcccccattctcccatataagttcattaagagagatcattgcatagtgatagccttatggatagttagtggtgctgtgggcaggaatggcaagcaaattt

SEQ ID NO: 400756 - DNA, 622 bp, Homo sapiens
catgcagttcacagtatgattcgtgctcctatgagaatctaatgctgctgcccatttgacaggaggaggaactcaggtggtaatgctcaccagctgctcacctcctgctgcgcggcccagttcctaacaggccatggacctgtatctgcccgtggcccagggattgggggcccctatgctaaacaacattgtacctatagtcaacaataatgtatcatacactttaaaacctgttaggcagatagatctgatggtaagtgttcttactacaataaaaaaaaaaatacttaaggtagtccattatttccttgagacagagtctscctgtgtcacctaggctagagtacagtggcacagtcctggctcgctgcaacctctgcctcctgggttcaagtgattctcccgcttctgcctactgagtagctgggattacaggtgcctggcaccacacctggctaattttttgtattttttaatatagatggggtttcaccatgttggccaggctagtctcgaacacctgacgtcaagtgatccacccactttggcctcccaaagtgcggggattacaggtgtgagccatcatgctcagcccattatttccattttattgatgagtggt

SEQ ID NO: 400757 - DNA, 646 bp, Homo sapiens
attgttggaagaatatacacaagtttgtatgacattcttagcacagtgcatggcatgtggtcaataagtattttccaaaatcaatattgttatcccaaaaaaactaagtctattatgctgatcaccatggtctattaaatatcacctagattctctgttaacaaagaaaagctgacccacaatgaacatacaggaaataatttaaatttaacacttgaaggcacaccagctacagtcctgtaggaaaggagagctaaggacattgttagaaggaatgacactacatgggggaatattggagtggttaagcatggattgtagagtcatcatctatattagaatcccggctctaacatcaccaattgtatgataaaggccaagacacttaacctttcygtgcttatgatcctcatttgcaaagtagggtggataataatggaatctacttatgggattgagaattaaatgaattcatgcatgtaacatatacagcatactgtctggcacactgtgaatttttaataatttaatttttgtaatgataaaaagtagtattgttgtcagtacagttggggttatgagggtctgctttagccaactgtcagttaaaatgataactgagttcacatctgtttggttttcccca

SEQ ID NO: 400758 - DNA, 456 bp, Homo sapiens
aagacttaattttgtcctcatcttattcccttttattccttcaaataaaacaggaatgggattcaacaggtggcctaggaatggggacaggaatggaaaaggaacataagtggcagagggtggggtracattccaggaggaacaaacagcaagagcaaaagacacatgcaggtctccatctccacttgctcttccttctggctgaggtgccacccacacaaccccacccatcacatccaaagtttgtatttacagtgaagatttgttgatctctctagctaaagttagggtccatctctgatttaatagttcatagtaatttactttataccacattgtgtttctttaatatgatatgtccttctctgtctccccttcagatcctgtttaaagaataatgactatgtgttacattcatttttgaatagtctgtacctagcagagtatctgatacac

SEQ ID NO: 400759 - DNA, 534 bp, Homo sapiens
aaaacacagaagtccaaaatcaaacacagtaatggttttccaggttcattgtgcagtgctcatatttctgcagataatcatgcttaatttagatgtaaacaatatgcagttttcatttcttagtgtgatgggtaaatcattatttaatcagtggattagtcataaaattctatatcgatttataataattgtakatatagttttatatttacaattcatagtttttattaattaaaaaaattactttctagttccaggaagaaagctataagcaggcccttttttcttttataaaagtgagttgattattgagaacacagaccagattcatatcccagagaaagaaatatttggctcttcattaaatgatccaaatagttataagtcagaagtgcccttgcattttagggctggactacccagacacaagaaatcaaaatcctttaaaaatatgtggctacatcctagtctaatcagacctctcaaagtgtttgtgcttacacacaaactactgtgtcaatcaagttgcaactg

SEQ ID NO: 400760 - DNA, 534 bp, Homo sapiens
aaaacacagaagtccaaaatcaaacacagtaatggttttccaggttcattgtgcagtgctcatatttctgcagataatcatgcttaatttagatgtaaacaatatgcagttttcatttcttagtgtgatgggtaaatcattatttaatcagtggattagtcataaaattctatatcgatttataataattgtagatatagttttatatttacaattcatagtttttattaattaaaaaaattactttctagttccaggaagaaagctataagcaggcccttttttcttttataaaagtgagttgattattgagaacacagaccagattcatatcccagagaaagaaatatttggctcttcattaaatgatccaaatagttataagtcagaagtgcccttgcattttagggctggactacccagacacaagaaatcaaaatcctttaaaaatatgtggctacatcctagtctaatcakacctctcaaagtgtttgtgcttacacacaaactactgtgtcaatcaagttgcaactg

SEQ ID NO: 400761 - DNA, 585 bp, Homo sapiens
tgtgagcttgtgaaattaaacaagttatctacttccaaaacgcaatggtggaacagccaaagaatagatagtcccattgtaaaatggtgagaagaaaggagtagcaggccttaagtaagtccaaaacccaacaggcaatattgccagtaggcaatattaaattttaagattcataatctgtcacttcatgtgtcacctcctggacacactggagtggaggttgggcccccaacgactcagacagccctgcctgtatggttttgttgggcttggctcatgcagcaattctcatgggttggagttttgtgcctacagctctcccaggctggaactgaacactagtagctctacacttctggagtctcaggggaggtcccactcccawgggtccactagacattactctagtagggattctctgtggtggctttgatcctgtagttccactggacattatcctagtgggggttctctgcagtggctctgcccctgcaacaagcctctgcctgggcttccagtctatccaccacattatttgaaatttaggtaaaggaagtcatgcctccacaactcttgcattctgca

SEQ ID NO: 400762 - DNA, 494 bp, Homo sapiens
agttactgggccacacccttggttttctctcctaaaaatgctttctcattccctaccacatggccaggctgaaggtccttcaaatctctacattacattgttcttttaattatgaattccatagttgaatcattggttcctcacattttaccatgtgtggttgaaagaagccacgcagcactctgaatgctctcctgcttagatggtttttttatgtcaggtatcctagttcctttttcttaaactctgcttttcacaaagctctttggcatagatgcaattcarccaagttatttgacactttttaactaggctgttctttcctcaagtttccaataccttattcttcatttctatctgagacctcaccagaatggctcttgctgtatatatttccaccagtattcttatccaaagcacttaagtaatctctaagaagtcttagacttttcctacaactctcctcttctgagccctcacaataatttaccttc

SEQ ID NO: 400763 - DNA, 270 bp, Homo sapiens
atccctgtccctcaggattgtttcctgatgtgtcatgtagttcatttggtgaggtcatgttttcctggatgttcctgatgcttgtgtatgtgtgttggtgtctgggccttgaagagttatgtatttattgtcatctccataatctgggcttgcttgcatccatccatcttgggaaggctttccaggtattcaaagaaacttggttgttgtgatccaagtctttggtcactgcagtcattatytgcattaggaggcaccccggcccagtaa

SEQ ID NO: 400764 - DNA, 449 bp, Homo sapiens
ctaggctttctccagcattcacttcaaaattatttcagcctctacccactacccagttccaaagctacatttgcatttctagctatttgtaacatccctatttstctactaccatttttctgccttaatccattttttgcttctctaccagaataccacagacaaggtaatttataatgagcagaagtttgtttctaacagttctcacaggctaggaagtcccacatcaacgtgccagcatctggtgaaggccttctgctgtcttataacatggaggaaataattacattgtagaagggcaaagagggcaacagagaaatcaagaggtgcaaacccactcctgcattgatgacattagtttattcctaagagtggagccctcatgacctaagcacctcttaaaagttctacctcaatactttcacagtggcaattaaatttcaaatttt

SEQ ID NO: 400765 - DNA, 567 bp, Homo sapiens
tttgaactatacttcagacaaaatggacctaacagacacgtgcagagcataccatctaagagcagaacaaactttctcaagtgcayacagaacattctctagaatatatcatatgataatccacaaaaccagtcttaataaattttagaagactgaagtcatctcaagtatcttttccaaccacattggtatgctcattggtattggtataccagatattatcaggagaaaaactggaaaatttacaaatatgtgaaaaataaactatggaacaatcaatggatcaaagaagaaataaaatataaaaccaattcctttttggcattgttataattgcaggagctaatgaaatagaatgattgcctataggacagttggttggggagaaggtgattctgcactttggctctgtctgcaagatccttccagggcagctcatattctcataattcccatataagcactggagaggcttaatgatgataaaagactgatttgggttgtatgcagttaaggatacctataagcaaacatcccactgggaggttacaaatcatgttgaaagcc

SEQ ID NO: 400766 - DNA, 557 bp, Homo sapiens
ttcctttttggcattgttataattgcaggagctaatgaaatagaatgattgcctataggacagttggttggggagaaggtgattctgcactttggctctgtctgcaagatccttccagggcagctcatattctcataattcccatataagcactggagaggcttaatgatgataaaagactgatttgggttgtatgcagttaaggatacctataagcaaacatcccactgggaggttacaaatcatgttgaaagccaagtttgtccccattgacttctgaaaaaaaaattagggacaaggaaaattgattctgtcctactacatcaggcacagtcaagattcttgcttgattttttaacaaggttttcctagatattgaaaagaaagcacacagtgctaaaacccgggttttaagtctcttttcagcaacaggcagaaacmgttatttttttcacagatcctatcatcttattacaatcagctgtggtccatttcattccaatctcagatgtctcattcttttttgcctgttgtccctctgacaaagcaaaagggat

SEQ ID NO: 400767 - DNA, 549 bp, Homo sapiens
ttatagggagagaaactcaacccttttcattagagtgagtaaaactcacactggtatcttgctattgtttaaggagaacaatggatgggtggatgaaagagaatgtcagctggatcaacaaacagctgttccaacagaagtcctgctatcctatacaataaagcagtattaattgctgccttccctggagtctctaaagataytcggtaagtgtacagtaccctgatgaactaaagccaaaagttagggctgatttcgggcttcatcacagtgaacacctcacctccagagagaaagttgtaggcctttaaagcttttgatctcagagaagactccaccgcctttcaaggcaataaattcttgcctcttctccaaatactctaactgaaacttctgctgttgcagtataattcaatgtgtttttttccagacttcaatgaaagcaagaattctcattctgcatgtaattatatcccttataatacccacagcctcctgcaatattactttttctaggccaaataaataattttttttctaaaggcagtt

SEQ ID NO: 400768 - DNA, 549 bp, Homo sapiens
ttatagggagagaaactcaacccttttcattagagtgagtaaaactcacactggtatcttgctattgtttaaggagaacaatggatgggtggatgaaagagaatgtcagctggatcaacaaacagctgttccaacagaagtcctgctatcctatacaataaagcagtattaattgctgccttccctggagtctctaaagatactcggtaagtgtacagtaccctgatgaactaaagccaaaagttagggctgatttcgggcttcatcacrgtgaacacctcacctccagagagaaagttgtaggcctttaaagcttttgatctcagagaagactccaccgcctttcaaggcaataaattcttgcctcttctccaaatactctaactgaaacttctgctgttgcagtataattcaatgtgtttttttccagacttcaatgaaagcaagaattctcattctgcatgtaattatatcccttataatacccacagcctcctgcaatattactttttctaggccaaataaataattttttttctaaaggcagtt

SEQ ID NO: 400769 - DNA, 556 bp, Homo sapiens
tctgttgtttattaattacacagtttaagccgttttgttacagcagcctaaatggactaagacaacccaccagactcaggggattttacaggtgactgctagcaaacacagaacatagaatactattgttatacacattttttctgtgatgctgattgtccaagttggaaattaccttgctttgtggataagattgagctgtggctgcgtgaacttagacatggcctacttaattaagttctcaacccttcaaaaataatattgtggggtcttagagatatgtaactgaatttttgacttcttaaacattttcataaacaagtagttgagccacagttttagttggtaaaaataagtactggctacttcagaggaacatttcttttttcttttattttttttgkttcgaaaagagcaagtgttccagataaatgtgtcctttgttaaccaacttcactaatcaattcataccactggtttcagagcaaaatatttacaaactgcatagaaattaccagaatcagtcatgtggcctaattgtgtcatattagccccc

SEQ ID NO: 400770 - DNA, 607 bp, Homo sapiens
tgtcgcccagcctggagtacagtggcacaatcacagctcactgcagccttgactcctcaagctcaagtgattctcctacttcagtmcccagagtagctgggactataggtatgtgccaccacacctggttaatttaaaaaaaaattgtagagacaaggcctcgccatgtttcctaggctgatctcgaactccagggctcgagtgatcctcctgccttggcctcccaaaatgctgggattgtaggcatgaacccctgcacctggcctgctgacagcttttaagcctgatcaccctttcatcccattctgctccacatctgggcaagctggttagaaagtgtgggtgctgccttctttggtgctgatgggaagttaaaactacataagccccagccagttcaggagagccctcaccccacgctcagcccctaatcacaatagaagccaagcctgtctcctttctctgccctctcaagccagtttcagacattggaagccggacctgctctgcccagaaagcctcattatgtgagtaatcaatcttttcatactcttggtgcatgcgtgtcagcctcattctcaatatttaaaccaaattttgggtagaa

SEQ ID NO: 400771 - DNA, 607 bp, Homo sapiens
tgtcgcccagcctggagtacagtggcacaatcacagctcactgcagccttgactcctcaagctcaagtgattctcctacttcagtccccagagtagctgggactataggtatgtgccaccacacctggttaatttaaaaaaaaattgtagagacaaggcctcgccatgtttcctaggctgatctcgaactccagggctcgagtgatcctcctgccttggcctcccaaaatgctgggattgtaggcatgaacccctgcacctggcctgctgacagcttttaagcctgatcaccctttcatcccattctgctccacatctgggcaagctggttagaaagtgtgggtgctgccttctttggtgctgatgggaagttaaaactacataagccccagccagttcaggagagccctcaccccacgctcagcccctaatcacaatagaagccaagcctrtctcctttctctgccctctcaagccagtttcagacattggaagccggacctgctctgcccagaaagcctcattatgtgagtaatcaatcttttcatactcttggtgcatgcgtgtcagcctcattctcaatatttaaaccaaattttgggtagaa

SEQ ID NO: 400772 - DNA, 581 bp, Homo sapiens
acttagcacagtatgtgaccaaaaaaagtacgatctcaaaaagcattcactattattgttacttccagtggtcaacctcagtgaactataaagcatttactggagagcccacttttgctgttcccactgagtttttaagagtccaagagcaaggagaagtaaatttttgctgtttaagattatactgcatattcatatcacattaattatcagtactgcaagtcctaaggttacagaatattcataatgatgataatttaaatggctactatctattgtccatttgccttggactaggtactggactgatctattgaaatataccaatactatttggataagttttatactttacattttacataaaaggaaactgagactctggaaatttgcatgacttatttaagggtcacatcacagcctcagcaggaaatagcacagcccatctacacgagataatgatgcacccggaaactaacaacagtgaaaarctgttatcaaccctaggctcaaaggagttgggtgaggggcagaggggaggaattatgttatcacaccccagggagagctggagccataga

SEQ ID NO: 400773 - DNA, 576 bp, Homo sapiens
tagcagtcttcttctacaggacaagaatgttggcttytatgactcccttatctaaactaaataatttatttatgctgaattcaactctttaggcagagcttactctttcaaccaattgccaatcaggaaatcttggaatccacctatgacctgaaagcccccactttgagatgtcctgcctttccgggccaaaccaatgtataccttccatgtattgatttatgtctttgcctgcaacttctgtctttctaaaagtataaaaccaagctgtaacccaaccatcttgggcacatgttctcaggacctcctaagactgtgtcacaggccatggcccttaaccttggcaaaataaacctctaaattgattgaaatgtgtctcagatactttctggttcacaaaagcaatagaaagaaaataaatctgaatcgaattcagggtccactactgaaacactttgtgacactgggcaagtttactcagccttcccaagccatggcttcctcatctgtgaagctagaagaattgtcctagagcatatgtctattgtcagaattaagtgacataaaggataaaaa

SEQ ID NO: 400774 - DNA, 576 bp, Homo sapiens
tagcagtcttcttctacaggacaagaatgttggcttctatgactcccttatctaaactaaataatttatttatgctgaattcaactctttaggcagagcttactctttcaaccaattgccaatcaggaaatcttggaatccacctatgacctgaaagcccccacttygagatgtcctgcctttccgggccaaaccaatgtataccttccatgtattgatttatgtctttgcctgcaacttctgtctttctaaaagtataaaaccaagctgtaacccaaccatcttgggcacatgttctcaggacctcctaagactgtgtcacaggccatggcccttaaccttggcaaaataaacctctaaattgattgaaatgtgtctcagatactttctggttcacaaaagcaatagaaagaaaataaatctgaatcgaattcagggtccactactgaaacactttgtgacactgggcaagtttactcagccttcccaagccatggcttcctcatctgtgaagctagaagaattgtcctagagcatatgtctattgtcagaattaagtgacataaaggataaaaa

SEQ ID NO: 400775 - DNA, 594 bp, Homo sapiens
cagcttcagctatgttgttgcctctcatccttctctttgactcctttgcatggtgcctgtcccctagttctcagctcactgtgaaactgatagtccccactgtgcttagcactggagaactgcaggcyagtctgtcactagctgctatttttggggaaagcagccctgccaagccacctgcctcagcccacaccccaaccccaccctcccacacagtagaattctggtgaattcaatattctccatctggctacatggcactcagtagattcaacaaacacctaccatgtgctagaaactcttcaaggccctggagatatagcaatgaaaaagtaggcaatgatgcctgcccttgtagagcttatattctggtaggaaagctatggaaaagagtgaagcagagaagggggataaggtgttatagcataagcatgagcggggattacaactttcaatagggtggtctgagaagaccttatctatacggtgaaatagtatgaaatgtttcacagatttgcatgtcacaataaatgttagttcttaatattattatcggtccaagaaaacataagtttctgacaagctatatactca

SEQ ID NO: 400776 - DNA, 594 bp, Homo sapiens
agatgattgagtcattccagcaaaatggagwttaggggactgatgtcggtaaattggctctttctggccttccctagctatattaataaaaatctcgtgaagccttttaaccctttgcttgtcaagctctgaagcaatccattgccattgccctgcttgaattttccaagagtggaacaaaaagatatctgatcccaagataaaatcccataagtaccatcacgtgttgccaagaaactttcctcttgaaaagcaggaatgaaaattaagtttgtaaaggaaaaacaaatcccagaagcaggaaagcttgccgctggtattttctcaaaaggatcaccttcaatgttagaaaaactagcaactccatttgtatcccctctcccttttctgaagtcattgtcagccaggttttttcctctgttgaggaaagttttagtaattcatttccatgacccctacattatccatatccgcctgatgagttgcctgtcaatcatacaaatgagaaatatctaggacatacaggtcaattctcattattcacagtagttatgatctataaagttgccacaaacactgaattcaagaatacta

SEQ ID NO: 400777 - DNA, 595 bp, Homo sapiens
tttggtaccatctatggtttcaggaatccactgggggtcttggaacatatcccctgtggataagctgggactacagtactcacggtcatgtttctttaccatgaaaaataatggactcctccttgatataccttatcatttatatattgctacttacccagaagccatcatctctgatgcattctgcggagggttcagcatggctggccctcactggggccctactgtgtgcacagcaccataaacacagtgcagtgctgtgggactatagagaagaaaagagagaaagagacaatacagttggagctgggggatggatatgcaaaccactgacaagaatggaaagcagcatgaaatcagttctattacagattcatgcaaggagcaccaygaaatgggctattaactcaatcttggtgaatatacaagcaaattacaatctacgtgaagaaggtagcatttgtgctgaatcttgaaagatttgtagtactttactcttgccactaatctggcttgcttcaaacacaggttatctggcatgataaccagatattctgattcagtcagtctggggtagactgaattttataagcat

SEQ ID NO: 400778 - DNA, 585 bp, Homo sapiens
agaatgctggacctaaagaatcttgggacagtaaaggactgtggtgtgtatgaaagatttgctcaccaactataaagaaactagaggtcctaatcatctccaagacactatctggcaagttatatatttctgaagcctgaattgacatgtacaggtccatcttgtggcactagtaatagcattctcacacacacacacatatgcatacacacacatgcacacacacatgctsgcacacacacacatcaagtatcaatttgcgatcactagtttacatggaaactaggagcttcattggaataaaagcttgaacaatagccagtactatggttcggacatctcagatattcatgatcgagtaggagtcaaagatgcaatggaaaccacagtgaagaaaggaaccgaaaagaaaattcaccaagcagaggaaatcagcaacaagtcctggcaggtcacaaagagagagtttcaggtggtgacctatgcttaaagcctttgttaaatctagctgtctgggcggcatgtgtgatcctggagagaaaggagcctatgtaacaatggaaagagctgttccaccaaaccctg

SEQ ID NO: 400779 - DNA, 367 bp, Homo sapiens
gttatctcattgccttttctgctaaactaactagagtgcattctggatatttgtgaccaagtaccctggctgacrtatgttctttaatagacttcttgccatgtgtagaattgcaccgtaaacaggcagttcaaaaggaaatgtgggtaactgctcctgcctagagaagggagtaaaggagagaaaactctgaatctgaccctctgaacacctctcaatcagttttcctttgattccattgacttgaatcaatcttttattgacttcttgccaaagttgactagttttatgctacccatgtaaattagatgttttcatttatattctcaaggctgacatgactatctgggtgtgtctcatgcccttg

SEQ ID NO: 400780 - DNA, 596 bp, Homo sapiens
atattccatgttgtaagcataccacattttctttatccaatccactattaatgggcacccaggttgatttcatgtgttcactgttgtgagtataatttactcttaattaaatttcttgtattacagcacaacaataataatcttttcagatgagatagtgggaagaaaattgtcagattcaggaaataaaaatatagaacatctaattaaatttgaattttgaataaacaacaaatgatcctttagtatacttcatgcttatactaaatactttatacatataggttggtatcagcatccactgccatgaacagccaagaaggggaagagatggggaggtgggagatgcctggaagctaagggcaagggcaaggtgaggaggaagaaaggtttttcttcctagctacattaattcctaaycaaaagttacttagattttgctaaactactgggttttttcatctttttttgtattttcttaaatgttgttttattgtggtaataacacttaacatgagctctgccctcaaattcttaaatgcacaatatggtattgctgactatatcgtaccacagatctctagagattatttgtc

SEQ ID NO: 400781 - DNA, 547 bp, Homo sapiens
agaattgcaccgtaaacaggcagttcaaaaggaaatgtgggtaactgctcctgcctagagaagggagtaaaggagagaaaactctgaatctgaccctctgaacacctctcaatcagttttcctttgattccattgacttgaatcaatcttttattgacttcttgccaaagttgactagttttatgctacccatgtaaattagatgttttcatttatattctcaaggctgacatgactatctgggtgtgtctcatgcccttgatataatcctcccaactttcgttcagcagacgttacttgagcccctgctataaggcaggcagtgttctaggcattggaaatataataataaacaacagagataagtccttgtcatcataaaatacagkgcagtttaatgatatacgtactacacaaacaataccacaaaaagcaaagcattattaaaattaataaccaataatgtgttagggtgttaaaaaataataacaccaataatgtgtctgagaattattaaggaaaggcgtagggaacaggaggtatattt

SEQ ID NO: 400782 - DNA, 590 bp, Homo sapiens
tttatgtgctcctaggtttttataacacgagcacctttgtgtctttctctgtttgccagccttgtgtgtctccatactcttattctgcttcatttgttgttgggttaaatccaagtctctcaacaacctcatgtttgatgatactaatttctgtttcactgtgtgcttttycatttacaatggccctcttccaattttctacatatttttccattaaatctagctgtcaactcagtatattttatgaaaaataatttgtacattgcttgcccataaatttttataactttctagctggatggcttaaacataatagcctattatatatgctgtttattacctatcttttgaatattcagttcaggggcaatcttattatcctagtcaaaaggtctatatctgcaaatatattatgattttctttatccctttcatacatgagtattaaacttggttcaattttagctttattttcagttttacttgtgcctcctaatcctaatgcagtcctgaatttaagcaggtcttaatttacatagagtgtcttattattaaagttgaatagtctcccaaacctgctttagttgtca

SEQ ID NO: 400783 - DNA, 590 bp, Homo sapiens
tttatgtgctcctaggtttttataacacgagcacctttgtgtctttctctgtttgccagccttgtgtgtctccatactcttattctgcttcatttgttgttgggttaaatccaagtctctcaacaacctcatgtttgatgatactaatttctgtttcactgtgtgcttttccatttacaatggccctcttccaattttctacatatttttccattaaatctagytgtcaactcagtatattttatgaaaaataatttgtacattgcttgcccataaatttttataactttctagctggatggcttaaacataatagcctattatatatgctgtttattacctatcttttgaatattcagttcaggggcaatcttattatcctagtcaaaaggtctatatctgcaaatatattatgattttctttatccctttcatacatgagtattaaacttggttcaattttagctttattttcagttttacttgtgcctcctaatcctaatgcagtcctgaatttaagcaggtcttaatttacatagagtgtcttattattaaagttgaatagtctcccaaacctgctttagttgtca

SEQ ID NO: 400784 - DNA, 505 bp, Homo sapiens
tataaaacatcatgctcagagtgaaaataaatcattataactcaattttaacccaatacttttaggaattttttaatcaagtaaaaaggagcaaagattataggagacttcaataatatgattaatcgttacaaactgatagacatagagaaacttacacccaacgkagaatccacattgatgttgaggaaacatgaaatattcacaaaagtctttgtgtgctaaatttcaaataattaacctcataaagactatgttcatcatgtaattaaattggaatccaacacagagaatttatttagactcatatgcctggaaactaaataacatactattaagtgacctttgggttaaaaagaatactgtaaggaaaatttaaaaatactcagaactgagagacaaggaaataatacatgccaaagcttttggaacatagctaaatgagtacttagagcgaaatttctagtttggaacacatttgccagccaacaagaaagattgaaaa

SEQ ID NO: 400785 - DNA, 541 bp, Homo sapiens
ttttaaacttctataaatgtacactttccattatattcaaagatgataatcaaggatggaactactctgcgtaagtatcaccccatacacatacaaatgccatatcactaaaggtattattattcattctttcttgcattcatttattccacaaatatctattaagcacttctgtgcttaatatttcttaatatttcttaatatttctcttcacctatgctaggtgaagaggaatagaatgataaaataataataatgataataatttcattgttcttacaaactagtatggaagatgattattaaaagcattaggaaaaggaaggaaaaggtttttaggagctctctttytacagacacacacacacacacacacacacacacacacacattaccaaggacgcacaactcggaaagaaccaaaattaatttacattttggtttcatcatttctagtctttggtttatgaaaaagtgtatgtgtgcatatattgtgtataatacatattatatttcatacatagttacatatatatatata

SEQ ID NO: 400786 - DNA, 541 bp, Homo sapiens
ttttaaacttctataaatgtacactttccattatattcaaagatgataatcaaggatggaactactctgcgtaagtatcaccccatacacatacaaatgccatatcactaaaggtattattattcattctttcttgcattcatttattccacaaatatctattaagcacttctgtgcttaatatttcttaatatttcttaatatttctcttcacctatgctaggtgaagaggaatagaatgataaaataataataatgataataatttcattgttcttacaaactagtatggaagatgattattaaaagcattaggaaaaggaaggaaaaggtttttaggagctctctttctacagacacacacacacacacacacacacacacacacacattaccaaggacgcacaactcggaaagaaccaaaattaatttacattttggtttcatcatttctagtctttgrtttatgaaaaagtgtatgtgtgcatatattgtgtataatacatattatatttcatacatagttacatatatatatata

SEQ ID NO: 400787 - DNA, 616 bp, Homo sapiens
gagaagtatcatgatcaggtttatgttgttaaaacctgactatgattgctatgtagagactggaatgcaggcatgttcagtacgtgaagggtaaaaagagaaggtgggtggtgaccatcaaattcagggatccaggggcttgttatcaagtcccagctcttctactaaataatgataatggctatcatttattgagaagtcactgagtgccaggcactgctgcaattattttacctataataacttattttctccttcagaaactctacaagtcaggaatcattactatctccatttaaaaaaaaataaaaagaaaactgaggcacagagaggttatgtactttgctccaaatcacttgggtagtcagttacagagctgggattttaaaccaggcagcctcgtttcagactatctgctaaaccacagtactacactgcctctcatgctctactrcataccccagagaagtcataaaacacagtgtttcccctgccaggtggagaaaacaagggggttgagctgaatcaacacttatttcagaccttctgattccactactatgattttgcctggaaaaccaagattctgaagaagtttttaaaaatttttttagag

SEQ ID NO: 400788 - DNA, 579 bp, Homo sapiens
gtgaagctgctccttcctctgtgtggtttggggaatgggctggtagcaaggaaaaagggttgggtcctacaggcggtgtggccatgagtatatacagggtggcaggtgaatcaatgtagtgctgtgctcttggccaagaagaagaggatagggtagaagacacagctccaaccctgtgtcagtttgaggtagggtatgacaactgactccatcccttgcaggtatgaaaaattagactctacatgctttttggatctgttgtggcaaattacactgaagttattttatccctttactatttatttttgtaatttgcattttcaaagaaaaagatacagtaaaaaaaatgaaatcctgtacaaacaataggtgctataaagcactttaaaaggaaaaacatcattccccagatacttygatgaagaacatgaaagagcaacaaaatttttatagtatataccttattccaaatttttacttgaactcctctaatgaatatgtcaagggaaagcagtgattattttcttttgaatttaaattaatttgtctatttattcaaactctatgcagaaagaaaaa

SEQ ID NO: 400789 - DNA, 579 bp, Homo sapiens
gtgaagctgctccttcctctgtgtggtttggggaatgggctggtagcaaggaaaaagggttgggtcctacaggcggtgtggccatgagtatatacagggtggcaggtgaatcaatgtagtgctgtgctcttggccaagaagaagaggatagggtagaagacacagctccaaccctgtgtcagtttgaggtagggtatgacaactgactccatcccttgcaggtatgaaaaattagactctacatgctttttggatctgttgtggcaaattacactgaagttattttatccctttactatttatttttgtaatttgcattttcaaagaaaaagatacagtaaaaaaaatgaaatcctgtacaaacaataggtgctataaagcactttaaaaggaaaaacatcattccccagatacttcgatgaagaacatgaaagagcaacaaaatttttatagtatataccttattccaaatttttacttgaactcctctaatgaatatgtcaagggaaagcagtgattattttcttttgaatttaaawtaatttgtctatttattcaaactctatgcagaaagaaaaa

SEQ ID NO: 400790 - DNA, 582 bp, Homo sapiens
ctgaaatgccttcaaggtctttttctcattgtcttgtctatcagcacttggcttccttttagtcagtctaataactctagcaaatggttscttgctactctgaagctcccttgaattcctctcctggtaatgctttttgtttctctgccacatggccaggcttctaattttccaaacttttacactctgcttttcctttaaatataacttccaactttaagtcaccactttatgcctgcatctcaatgtaggctgttaaaatcagccaggccacatcttgaatgctttgctgcttagaaatttcttccaccaaataccttaagttatcgttcttaatttcaaacttccacagatctctagggcattaacggaatgcagccacgtttttttgttaagacataacaaaggtgacatttcctccagtttcccccaaaatcctcatttccatctgagacttcatcagcctggatctcactgtccatgttattaatactatcaggattttgctcaaaaccatttaaccagtctctaagaaattccaaagtttccctcatctttctgtcttcttctgagccctccaaa

SEQ ID NO: 400791 - DNA, 585 bp, Homo sapiens
ggattacaacttaatattagatttggagaggacatccaaactatatcacagtaatattcatggtattctgaaacacagttctctagcaaaatcacttgattttttttatttcacagcccttaaagagaatcaaacaagtttataagggaccactagaggtctttgcattagtgatgtatcattgtcactccattaggacttacttcctaatctccaggatgaaactgagcctcctgtgtggcctgaactatcactgatttcgatattgttttagctgttgtctccagtcattgccaccaaggtggggagaatgcaggagccatgtacaccaatttcttattagtatctagattgttaagatctttagtttgacttgcttattggtatattccagttctacttttcgtcatttttatacatgcaactgtgtttcrtataaaaatgggcacttttcatactatggcaccccatttttttctccctcgagtgagttccttgtccatctggtatgccatccagaattttttttttacgaagtggtcattattccccactatttaggattctgggcactgaggaacagat

SEQ ID NO: 400792 - DNA, 521 bp, Homo sapiens
acagggactttttgttcattgatgtaggctctcaataagtatttcttgaataatgaattttaaaattaaggaaagccatttataatgccactactataacaaatatcatctgtcttcatgttctatgcattgtctatttgtaaatataattttacatatttaattatagcacagagacatttacgtgtgtgtatatgtgtgtgtacatattcaactaaatattacatcttaagcattgttcattctgttctacagtcttcagaactattagttttaatgactttgtgaaaaaatactaaattggtgtatataattaaccatccatttattagatgttgtttagattatactttgttcctttattaaccaaccgtttaatctttgactggtaatctaactactttgcacttatttgctcattaggaaaagtatatctagattattactattamgtacaataacatcagtaaagtacccagattatacctgataaataattgtttcctttatattattagttt

SEQ ID NO: 400793 - DNA, 457 bp, Homo sapiens
cagctgcacatttaagccagctgacccaccccaccctgacaagtgagtggccagcaaggccagcccagaatccaccactctttgctgccccccttgtttttgagtctggctcagctccttcctgaggctgggttttatttctacatatcagcctagcttctagccttccaaatacttttgatgttaatttcacagttttcagttatttgagatatacttgaatctgttcctaagccaaactcatttccaccgtaggacctccaccctggctcttctgcaggaatgcactgtggctggatcatcctctagcagcctcrcccttgttattcatctcattcaaatgtttccttccagaggaggctctctctgaccatccaaattaaatgtgccctcttccacagccccaccacaatttatcacatcactcatcttgtcttatccctagcatttgtcaaaa

SEQ ID NO: 400794 - DNA, 478 bp, Homo sapiens
cagggtcttccactttggggcatgcccccttcttgtttaagcatattaggagaggcacgataaccagggatgagagtttggctgtgtctcccatttcatattaccaaccagggaaatatgagcccacaggaaacactacaaaaaaggtatggatagacatacatcttttaaaattattgtccagccttaaaaaaaaaaarctaatattattcagccttaaaaaaaaaacccaaatcctgaaatacgccacatggatgaaccttgaagatgttatgctaaataaaataagccagtcatagaagaacaaatactgcatgattccacttatatgaagtatctaaaacagccaaacatgtagaatcagagagtggaatggtgattgccaggttgtggtgggagtgggaaatgggaagttactaatcaacaggtatatagtttcagtttcaattatgtaagatgagtaagttctggagatctg

SEQ ID NO: 400795 - DNA, 618 bp, Homo sapiens
aaaagcagaatcaagtggcaaaattgggcaaggaaaatatggctgttgaaataagaactccataaatgaatgtattacaatatggctgaacaattagtttgctataagatcaggttaagaaactccttcaaaaagcatcaagatgtaataaaaatattagaaatataaaagagaaaacaagtgatatggaggatagaatggaagtgacaccatgcaaatcaaaggtgcccgtaraaaggaaaaaaaataaataactggaagaaaagaaatatttggaaaaagcataaacaaaaatttgcttgaatttcaggttgagagaaatcattgggtgccgaacaggttagaacacctgaaacattatagacattaagtacataaaaagcaaacagaaaattctagtttccaccgggaagtatcatatcacttaaaaaagaataagaatcagaatgatggtttccagcttcatccatgtccctacaaaggacatgaactcatccttttttaaggctgcatagtattccatggtggatagcattaggagatatacctaatgtaaatgacaagttaatgggtgtagcacaccaacatggcacatgcatacatatgtaacaaacaaat

SEQ ID NO: 400796 - DNA, 558 bp, Homo sapiens
ctgagttctcttggctaaatgtgatacgcatttaaggcccagaacctgctgtttaaaaggttgtggtaaactattttgtataccaaagacttctctgtaataaagtatgtaagtacacatgaacatttgatgtgcacgcacattttaaatcatctgcacattgagattctacacttttctcaagggcacatctctattccgtttttgtaaatttgacttctacctaacaatatgcagttgctgggatttttttttcccyaacaaattcaaaactgctaatttaaaatataaagcgtgtgtttcaattaccacagttttccatttagataggagctacctgattcattccagcaaagagagagattatccctggagaacaaagtcaattcaaaattatttaaaccatttggcaaataaataaaatttaagtaattatttgcttaattgctcagaaatactaagttgttaatgcctatgtgcattaatggtcaaagaaaagcccacacttaccttttgcaatgtttatgagaactgaaagcaaaaccagtttgcttctag

SEQ ID NO: 400797 - DNA, 558 bp, Homo sapiens
ctgagttctcttggctaaatgtgatacgcatttaaggcccagaacctgctgtttaaaaggttgtggtaaactattttgtataccaaagacttctctgtaataaagtatgtaagtacacatgaacatttgatgtgcacgcacattttaaatcatctgcacattgagattctacacttttctcaagggcacatctctattccgtttttgtaaatttgacttctacctaacaatatgcagttgctgggatttttttttccctaacaaattcaaaactgctaatttaaaatataaagygtgtgtttcaattaccacagttttccatttagataggagctacctgattcattccagcaaagagagagattatccctggagaacaaagtcaattcaaaattatttaaaccatttggcaaataaataaaatttaagtaattatttgcttaattgctcagaaatactaagttgttaatgcctatgtgcattaatggtcaaagaaaagcccacacttaccttttgcaatgtttatgagaactgaaagcaaaaccagtttgcttctag

SEQ ID NO: 400798 - DNA, 402 bp, Homo sapiens
tgcttatgtagtacactaaggattgtttggacacaaaaagtaatttttctttttttttttaataaacagcrtgatgttacagactgcagagttaaagaaaagcagacattgacagtttctgatgagcataaacagtaagtgcagtcacaggccaaacttcttgctaggaacagcaagactgggaagaggtcttaaatttagtgatactgttattattctatattctcaatatagtaacacatgcatcttgctgtgtcaaatgctttctgggccatcattaaaaggacattaaaaacgtttttcttctaatgaatgcagtataccacaggacttcaattcactgaatgacaaaatatagagaaataaacttgctacaattaatggggccaaaagggtggttcg

SEQ ID NO: 400799 - DNA, 402 bp, Homo sapiens
tgcttatgtagtacactaaggattgtttggacacaaaaagtaatttttctttttttttttaataaacagcgtgatgttacagactgcagagttaaagaaaagcagacattgacagtttctgatgagcataaacagtaagtgcagtcacrggccaaacttcttgctaggaacagcaagactgggaagaggtcttaaatttagtgatactgttattattctatattctcaatatagtaacacatgcatcttgctgtgtcaaatgctttctgggccatcattaaaaggacattaaaaacgtttttcttctaatgaatgcagtataccacaggacttcaattcactgaatgacaaaatatagagaaataaacttgctacaattaatggggccaaaagggtggttcg

SEQ ID NO: 400800 - DNA, 402 bp, Homo sapiens
tgcttatgtagtacactaaggattgtttggacacaaaaagtaatttttctttttttttttaataaacagcgtgatgttacagactgcagagttaaagaaaagcagacattgacagtttctgatgagcataaacagtaagtgcagtcacaggccaaacttcttgctaggaacagcaagactgggaagaggtcttaaatttagtgatactgttattattctatattctcaatatartaacacatgcatcttgctgtgtcaaatgctttctgggccatcattaaaaggacattaaaaacgtttttcttctaatgaatgcagtataccacaggacttcaattcactgaatgacaaaatatagagaaataaacttgctacaattaatggggccaaaagggtggttcg

SEQ ID NO: 400801 - DNA, 402 bp, Homo sapiens
tgcttatgtagtacactaaggattgtttggacacaaaaagtaatttttctttttttttttaataaacagcgtgatgttacagactgcagagttaaagaaaagcagacattgacagtttctgatgagcataaacagtaagtgcagtcacaggccaaacttcttgctaggaacagcaagactgggaagaggtcttaaatttagtgatactgttattattctatattctcaatatagtaayacatgcatcttgctgtgtcaaatgctttctgggccatcattaaaaggacattaaaaacgtttttcttctaatgaatgcagtataccacaggacttcaattcactgaatgacaaaatatagagaaataaacttgctacaattaatggggccaaaagggtggttcg

SEQ ID NO: 400802 - DNA, 639 bp, Homo sapiens
tgtgtgctattataaataggctgtatggaagagactggggggagattaacactgctttcacactgctattacaataatcaccctaaaatacaaaattgatctgcttaaagcttagtaattccttatgacctatattgatgcttctcaaacttgggttgtataagatcacccaggagacttgataatgtgcaaattatccagaccctagaaattctggttgagtggatccatagtactgggaacctsaattttatttttattttaattttttgaaacaagagtctcactgtgacacccaggctggagtgcagtggctgatcataactcactgcagccttgaactcctgggcttaagtagtcctcccacctccacctcccaaagccttaagattgcaggcatgagccactgtgttgagcctggaacctgaattttaataaggcttccctctcatgatccttacgcatatgatcccaggacaagatgttgaagaacagaccttgggataacatgcagtctcattaatttactgtaattctcacaatttggcatcagccttcttttctgtgctcattttctacatttttttctcatggacaccttacagtctagtcactctgaactgctacatgctcacctag

SEQ ID NO: 400803 - DNA, 591 bp, Homo sapiens
caaagtctatctctccctcttctgtatttccatagcctctattacaacacacatatactaaattacacttcttttcataccttcctcactagaccatgaacctcttgaagtcagggatgccatattttagatcttttatttaatcttagagtaaaagcctggcacaaaataattgcatgctaaatatytgtcaaatcattaacaatccaataaagaaggcaaggagtaattagtcccattttcagtgaggaaaatgatatcttgagaaattaagtatttgcttttaattacccagcttgtaagcgtaggctcaagacttacacataagaaatctggcttcttttctggttttggtctttacagaaaagatagagaataactgtaaaattaccccttccatttttacccacacggctcacatgttcatttaaattaccccctccattttctacccataaagctcacatattagtttatgttttatcattttatgggtaaaggtgttttaataaacttttacatcatattcacactttataaaaataaaataatgcctattcctctagggtatgaacagattgctggatatta

SEQ ID NO: 400804 - DNA, 593 bp, Homo sapiens
tatgtttttatatgtctaagatcagttcgttgtaagtttttggctttatttctaggttctccattctgttccattggtctgtgtgtctgcttttgtgtgtatctgctgttttggtaattatagtttyctggtataatttgaagtccagtaatgtgatgcctccagatttgttctttttgcttagtcttgctttggctattcagactctttttggtcggttttatatgaattttaggatttttttttctaattctgtgaaaaatgatggtgacagtgttttgtagttttccttgaaaagatctttcacccccttggttaagtacattcctaggtatttttttgaagctaaaagggcttgtgttcttaatttgattctcagcttggttgttgttggtgtatagcaatgctgctgatttgtgtacactgattttgtaacctgagactttactgaattcatttatcaaatctaggagtctttttttttatcttttttaagacagagtcttgctctgtcccccaggctagagcgtagtggtgcgatctcagctcactgcaacctccacctcctgggtttaagcaattctcctgcctca

SEQ ID NO: 400805 - DNA, 404 bp, Homo sapiens
ctctttctagcttacagagtgctgccttcttactgtgtcctcatgtggtgaggagagtaacagagtaagttttctgacatctcttctagggacacaaatcccataatggggggtttctactctcatgacctctttttttgttattgttatttttgtattattttgtattttgttatttttgtattgttattttttgttattgttattagagtcttgttctgtcacccaagctggagtacagtggcatgatgatagctcaatgtaacctcaaactcctgggctcaagcgatccctgcctgtcagcctctcaagtagccaggactacagacacatcccaccatgccccactcttttttttttttwtttttagagatggggtcttactatgttgtccagactggtct

SEQ ID NO: 400806 - DNA, 405 bp, Homo sapiens
ctgttaaatggaattctagagatgaagtagcccaggtaaatgtatgtttgagattactagataactgttgtacaaattggtatgtcacttaaattgttttctctcagaaagtccacataaataaatgaaatagactaatagtaatatrgtgtagaaaaaaacacccttaacattatttccatagataaaactaattagaactgtaaattctaaggagattatttatctaaactaattttaaaatcagaagttaaggcagtgttttagatggctcattcacaactatctttcccctttaaatatgatttattgtctttctcatacacagatgtattgcttggtaaaagattggcctccaatcaaacctgaacaggctatggaacttctggactgtaattacccaga

SEQ ID NO: 400807 - DNA, 609 bp, Homo sapiens
ctgggctatatatcctaaatgaaaatatccttaagctgaacaataaacttgagaaaaggtgaaacaatgacaattactaaaataaatccatggactaataactacatacccaataattttccttaaaactttagaaaatatcagaatatctttggcatatagtgcttccaggaggttggaaagatcatttatcaggctaagtagaacccatatactatgcaggaaattacatcctataggaaatcatctgagactaaattacaaccaatgaagtagaatataaaaactgagaagctgcaacactaacacaaagacatgtcaatgtcagttaaatcaaagyggcaaaaaactcacaggcattatggtaactaatgaaataattaatttttctgggtatcaaactttttaaataacacctttctagtatagaatggttttctttccctagaacgcagggcagtgagaaacttcaaattctgcatttcaaacttcagaaagattggcaatgtttgcccattttgtaaaataacagattggggtcactaactcctccctccccaaaaagaaagtttaaaaaattattttttctgggttttcttttgcagagtt

SEQ ID NO: 400808 - DNA, 520 bp, Homo sapiens
catccactgcctatttgtgtgagagtggagattttgcttcttgttctaactgatagcataggaagtacataaaacagcattttgtgattcaatattaggtgctgtcaagataactttatcatgggagaaatttcacatataaacactggtttcccttgtaataacaggctgaatttattaagaaacattttcaagtcttcagcagaagctaatttctaaagctattcttcagtgattgagattggtgatattaattcagaaaaagtttaattttggctttacattcaaaagctcccaataagactttaccacttctaagatattaaactgctatataatagagtaaatcagaacattcagcttccatagctgacagaaattcayggaacactgataatggttaagcccaccagagcaaatgaagttcactattgacactattggttcaatgacacataatgtattcaaatgtttctcacaaagtactggtcacaaatactaacatgaaaggccataaact

SEQ ID NO: 400809 - DNA, 478 bp, Homo sapiens
tggaaaggacgttggtctggagtcactgccacagtcctccaagcgcaaggcaagagactgagaattgaagccccacatgagaaccagccctggcagcatcacgggagccccactttgaatggatatttttctggactgcacatgctgagaaggtggcagggatgtgtactgtagcccgaaatacagaaaacaaggggagcctgctcttgagagcacacrggttgccccatgacgctgtctgggatgtggttctgcgcctctccatccattgctctgtccatagctctgactgccagcctctccagggtgtgtggcctgggagtgagcagccctgtgaacttcagtatggaccttctgtggccagcagccaagtctgcagaaatgagttctggaactcagggcctctctgtctgtctccctctcacacacccccccaggtcaggggacagcgctggcaggatgtcttagcttcgtggga

SEQ ID NO: 400810 - DNA, 588 bp, Homo sapiens
actattattccatctgatttcaatgtatatacttatgatgcttgtcaaacatgcattgcatgcttatttacttgtaagcaccaggacctgcctccagatgtatctcaaaacacaaaacaagaaactttctggaaaggtgcatgtgtagggygggtggaatcctgagtttcactcatgtataaaacagaacctacaacctgagaggaccagtcacttgccttctggctgctggataaaaagcccacacttcttccagcatgcacaatttttgtgagacagctaaagtgttatctcaaaacattttatgtcagcgattgttccacaataactccatggggctattgtacagagtcattgacaagtgaatgtgctgagctgcctgcccagcgcccacatctcgacttaggtgcttattccttagcatgcttgttgtcactgatgtgaaatatacttggtgcattttagaggaaatgtacatgctgtagtggtattcatgaatttaggaattacagatacttcggaagctatcccttgagatgtcaggtatccactaggtgatgagataactggcatatgtagaattactat

SEQ ID NO: 400811 - DNA, 590 bp, Homo sapiens
ccactagctgtgtctgccatgatatatatttgtaataagatgttctcatattgaacctaatgttttcgaaacctcaatacagagaattggaaacacattagtatttttacatacaggcagataaggcagactttatctttgggcaaagacgatacattgatttttgttgttgttgttgctgtttttgagacagggtctcactctgtctcccaggctggagtgcaatggcatgatcacagctcactgcagcctcaatctcccaggctcaactgatccttccatctcagcctcctgaatagctgggaccacagctactgtcagcatgttgtcaagcccagctaatgtttttaacttttttgtagaaacaggatcttaccatcttgcccaggctgatctcaaacttctgggctcaagggatcctcttgtctcagcytcccaaagtactgggattacaagcatgagccaccatgcccggatgacacattgattatgtgaagacaccgtaaaaagactcctataatctaacacaaagaccaagacctcttctgaactgaagaaattctgaatgaagttttgctaaccataggctg

SEQ ID NO: 400812 - DNA, 590 bp, Homo sapiens
ccactagctgtgtctgccatgatatatatttgtaataagatgttctcatattgaacctaatgttttcgaaacctcaatacagagaattggaaacacattagtatttttacatacaggcagataaggcagactttatctttgggcaaagacgatacattgatttttgttgttgttgttgctgtttttgagacagggtctcactctgtctcccaggctggagtgcaatggcatgatcacagctcactgcagcctcaatctcccaggctcaactgatccttccatctcagcctcctgaatagctgggaccacagctactgtcagcatgttgtcaagcccagctaatgtttttaacttttttgtagaaacaggatcttaccatcttgcccaggctgatctcaaacttctgggctcaagggatcctcttgtctcagcctcccaaagtactgggattacaagcatgagccaccatgccyggatgacacattgattatgtgaagacaccgtaaaaagactcctataatctaacacaaagaccaagacctcttctgaactgaagaaattctgaatgaagttttgctaaccataggctg

SEQ ID NO: 400813 - DNA, 586 bp, Homo sapiens
tgggacagatggtagtgtctttaagtctaagtcaaaatgagtaattaaaaaaaaaagagtcagctgtgaaagtaattttgaaggttatagccagcccttgcatttgcatgatgcttggtgctttcccagcaggacaagctccataatttgcagggcccaatacaaatcaaaatgtgggactcttactgaaaaattaagtatttcaagacagtaacagaacattaaaataagggcagagtcattctgagtctggggccccatgcaactgcatagattccacacacccatgaaacccacytgcttccaagcagttttcctctactctttaatttcagagatgagttctggagatggaaaaatccatatgattcatttgcgataaatatctttcttgacttctcagcatggaacacccttcttacttgggggatagagggatttcccattgtgttcatccaggtgagaagcatgattccctctactaggcaaatcctctcccaaccccgagcaaccaggtttagctaattaggtgcttcttcccaggattttgagtcttgagggagaagtgcaaagatgcaggattatt

SEQ ID NO: 400814 - DNA, 586 bp, Homo sapiens
tgggacagatggtagtgtctttaagtctaagtcaaaatgagtaattaaaaaaaaaagagtcagctgtgaaagtaattttgaaggttatagccagcccttgcatttgcatgatgcttggtgctttcccagcaggacaagctccataatttgcagggcccaatacaaatcaaaatgtgggactcttactgaaaaattaagtatttcaagacagtaacagaacattaaaataagggcagagtcattctgagtctggggccccatgcaactgcatagattccacacacccatgaaacccacttgcttccaagcagttttcctctactctttaatttcagagatgagttctggagatggaaaaatccatatgattcatttgsgataaatatctttcttgacttctcagcatggaacacccttcttacttgggggatagagggatttcccattgtgttcatccaggtgagaagcatgattccctctactaggcaaatcctctcccaaccccgagcaaccaggtttagctaattaggtgcttcttcccaggattttgagtcttgagggagaagtgcaaagatgcaggattatt

SEQ ID NO: 400815 - DNA, 614 bp, Homo sapiens
ctcatccaccaaccaggatgctgaatggaacttctccattgagatttcctgagtccccagaagtgaagwcaatgggttctcacacattttaaaaggaggcgttagacacatgaccacagaaatgcccaaatctgcaaaaacctgtgacccttgctcaccgctcacttccaacctacacaagagataagaaattcagagaagattgatcagagaaagctatcccttaaagcaaatgcacagatgtggagcttgtgacagtgtttgtcctcctttttattatttttagaggcagagtctcgctgtgtcacccaggctggaatgcagtggcacaatcatagctcactgcagccttgagctcctgggcccgagggatcctcgcagctcagcctcttgaggagctggggctacagacccacaccattgtgcctaacttgtttctccttcttttctgagaggaaagagaaaagccagggctcctcatcctaaatgaggggaaggggcaggagaatctctggggaggggaaggggtgtccatgggccagtctggtttctgactacgtgctgaatgtctcctaagctgctaaactgtgcacccagggccactacaaggccag

SEQ ID NO: 400816 - DNA, 617 bp, Homo sapiens
ttttcgcctgtttctcctttgctagggtgaaaggaaaataaatcttggggccccaaaatcactaagctaaagggaaaagtcaaactgggaactgcttagggccaacctgcctcccattccattcaaaatcatccctctgttcactgagataaatgcatatctgattgcttcctttggaaaggtttatcagaaactcaaaagaatgcaaccatttgtctcttatctacctatgacctggaagtcttccttgctgttttgagttgtcccgctyttgcttcaagttgtcctgcttttctggacagaaccaatgttcaacttacatatgttgattgatgtctcatgtctccctaaaatgtattaaaccaagctgttctccagccaccttgggagcatgtcatcaggccctcctgaggctgtgtcataggcacacatccttaacctcggcaaaataaactttctaaattgactggacctgtctcagatatttagggttcacactagcgatatgatagaagcatttttctatgtcaataaagatgttatattttaaaatatctctatggaaatgtattatgtggatgaactataattaatttaaacaccacattttttagaca

SEQ ID NO: 400817 - DNA, 617 bp, Homo sapiens
ttttcgcctgtttctcctttgctagggtgaaaggaaaataaatcttggggccccaaaatcactaagctaaagggaaaagtcaaactgggaactgcttagggccaacctgcctcccattccattcaaaatcatccctctgttcactgagataaatgcatatctgattgcttcctttggaaaggtttatcagaaactcaaaagaatgcaaccatttgtctcttatctacctatgacctggaagtcttccttgctgttttgagttgtcccgcttttgcttcaagttgtcctgcttttctggacagaaccaatgttcaacttacatatgttgattgatgtctcatgtctccctaaaatgtattaaaccaagctgttctccagccaccttgggagcatgtcatcaggccctcctgaggctgtgtcataggcacacatccttaacctyggcaaaataaactttctaaattgactggacctgtctcagatatttagggttcacactagcgatatgatagaagcatttttctatgtcaataaagatgttatattttaaaatatctctatggaaatgtattatgtggatgaactataattaatttaaacaccacattttttagaca

SEQ ID NO: 400818 - DNA, 587 bp, Homo sapiens
ggaactttccgtgaaagttctggagacttccattcatcccwcaaaataattcgcataaataaatatcaggctcagatgcaaagtttctttttataatagagaggagacatttgagaaggaactgttgctgtgctgaaatagccactacaatcatgtttttgcctcctctttgacctttctgttctgggaagctcctttgggaaggagtcccttagaaatgtatttccaaaacttatttggtgataagattcacctgggacccttgaataaacaaacaaataaacagaatgagaatcccaggttcatcttctggagctgtgattctgcaggttcaggtgagtattcttacaagtgtccccaggcctgggtaattcttgtggtcagatggactgggggagcctttgcagatcctggagccctggaaatgaactcagcatccaaccctgtcatttaatagttgggaaaaccgagacccagaaaaactgaatgtcttactcaccagctgtcaccagctgaggctaaactgagccttgagttaaggtccaggggccaggaagaagttggaagcaggagtttgatccttgatc

SEQ ID NO: 400819 - DNA, 587 bp, Homo sapiens
ggaactttccgtgaaagttctggagacttccattcatcccacaaaataattcgcataaataaatatcaggctcagatgcaaagtttctttttataatagagaggagacatttgagaaggaactgttgctgtgctgaaatagccactacartcatgtttttgcctcctctttgacctttctgttctgggaagctcctttgggaaggagtcccttagaaatgtatttccaaaacttatttggtgataagattcacctgggacccttgaataaacaaacaaataaacagaatgagaatcccaggttcatcttctggagctgtgattctgcaggttcaggtgagtattcttacaagtgtccccaggcctgggtaattcttgtggtcagatggactgggggagcctttgcagatcctggagccctggaaatgaactcagcatccaaccctgtcatttaatagttgggaaaaccgagacccagaaaaactgaatgtcttactcaccagctgtcaccagctgaggctaaactgagccttgagttaaggtccaggggccaggaagaagttggaagcaggagtttgatccttgatc

SEQ ID NO: 400820 - DNA, 469 bp, Homo sapiens
taatagagaggagacatttgagaaggaactgttgctgtgctgaaatagccactacaatcatgtttttgcctcctctttgacctttctgttctgggaagctcctttgggaaggagtcccttagaaatgtatttccaaaacttatttggtgataagattcacctgggacccttgaataaacaaacaaataaacagaatgagaatcccaggttcatcttctggagctgtgattctgcaggttcaggtgagtattcttacaagtktccccaggcctgggtaattcttgtggtcagatggactgggggagcctttgcagatcctggagccctggaaatgaactcagcatccaaccctgtcatttaatagttgggaaaaccgagacccagaaaaactgaatgtcttactcaccagctgtcaccagctgaggctaaactgagccttgagttaaggtccaggggccaggaagaagtt

SEQ ID NO: 400821 - DNA, 587 bp, Homo sapiens
ggaactttccgtgaaagttctggagacttccattcatcccacaaaataattcgcataaataaatatcaggctcagatgcaaagtttctttttataatagagaggagacatttgagaaggaactgttgctgtgctgaaatagccactacaatcatgtttttgcctcctctttgacctttctgttctgggaagctcctttgggaaggagtcccttagaaatgtatttccaaaacttatttggtgataagattcacctgggacccttgaataaacaaacaaataaacagaatgagaatcccaggttcatcttctggagctgtgattctgcaggttcaggtgagtattcttacaagtgtccccaggcctgggtaattcttgtggtcagatggactgggggagcctttgcagatcctggagccctggaaatgaactcagcatccaaccctgtcatttaatagttgggaaaaccgagacccagaaaawctgaatgtcttactcaccagctgtcaccagctgaggctaaactgagccttgagttaaggtccaggggccaggaagaagttggaagcaggagtttgatccttgatc

SEQ ID NO: 400822 - DNA, 546 bp, Homo sapiens
ctgtctcatcccggccgcattagacccttctgttgcctaatcccaatgcaatttaaaacaaaacaaaacaaaacaaaacaaaacaaaaaacaaaaaaacaatcatttggatccttagtgtgcagcagtascaatgctagtggctgaagcggttgaaaaacagcataaagccatattcgctcccatgtgtacacacaggcatctgctataacgtgaagccactgcaacttcttttctcactgcctattggtcttcccgctctgtgagttacaactcaacctcggagtcttcaccttgctacttagctgagtggtggaaacctgtcagaagtaatcactcggtgtctaagtgtcctcaccaatttgcacttcactcttattcaccacttcttatcttgaattgagaatactgtactctccggcaggcaaaaaaaagacttagggaagaaatgcaccttcaggatggtgtctagcatacagcaggtgtttaatacatgtttgtgatatggatagacagatgaaaggatggatgcacaagctacaaatga

SEQ ID NO: 400823 - DNA, 546 bp, Homo sapiens
ctgtctcatcccggccgcattagacccttctgttgcctaatcccaatgcaatttaaaacaaaacaaaacaaaacaaaacaaaacaaaaaacaaaaaaacaatcatttggatccttagtgtgcagcagtaccaatgctagtggctgaagcggttgaaaaacagcataaagccatattcgctcccatgtgtacacacaggcatctgctataacgtgaagccactgcaacttcttttctcactgcctattggtcttcccgctctgtgagttacaactcamcctcggagtcttcaccttgctacttagctgagtggtggaaacctgtcagaagtaatcactcggtgtctaagtgtcctcaccaatttgcacttcactcttattcaccacttcttatcttgaattgagaatactgtactctccggcaggcaaaaaaaagacttagggaagaaatgcaccttcaggatggtgtctagcatacagcaggtgtttaatacatgtttgtgatatggatagacagatgaaaggatggatgcacaagctacaaatga

SEQ ID NO: 400824 - DNA, 612 bp, Homo sapiens
tcttgatactgatatccatttttattgcattgtggtctgagtgtggttgacatgatttcaattttttttaatttgttgagattgatttatgactgagtatgtggttgatcttagaatatattctaagatgtgcagatgaaaggaatgtatatgctgtggatgttgggtggagtgttcagtagatgtctattaggtgcaattagtcaagtgttgaggttaagtccagagtttctttgttagttttctgccttagtgatctgtctaagactgtcaatggggtgttgaagtctcctactrttagtgtgtgactgtctaattcttttcatacagtaagaagaacttgttttatgaatgtgggtgttccaatgttgggtgtgtgtatgcttagaataagtcattttgttggattgcaccctttatcattatgtactgccctttttgttcttcataattgttattggtttaaagtttgtttttatctgatataagaatagtgactcttgctgttttttgtttgcacggtacatctttccccatccttttactttgagccttttgatattgttacatgtgaaatgggtctcttgaagagataagatggttgggtcttgt

SEQ ID NO: 400825 - DNA, 520 bp, Homo sapiens
tctaacctataaactttgaacaatagcaacccttttaaaaaccctaaaaaactatataaagaagggctggatggagctacatttatatatttacagttatttgtttttcttaaagttttcctcttgatgataattaaatttaaatgtttttttcatagaaaatctggaaaatacacaaaaattaaatagagaagaaaaaagaaaaagatttttgccccactgctcatagaggcaatcatggttaacgtgttgatgtattttcttttccctaagcttggttttcatagtccttggctttgctgttatttatttgctcatcatttgttctcaacagtgccaacgacctcacagacacaggttgtggatagcagcagacatggaggtggaggctgrgcggccagtgatgctgtgagtcaggtgagtcatttctcatctctaggccagacgttttcacaggttggttctcagaatctgagaaaagcagcagaccctctttccacaaatatccacaatagaccca

SEQ ID NO: 400826 - DNA, 612 bp, Homo sapiens
tcttgatactgatatccatttttattgcattgtggtctgagtgtggttgacatgatttcaattttttttaatttgttgagattgatttatgactgagtatgtggttgatcttagaatatattctaagatgtgcagatgaaaggaatgtatatgctgtggatgttgggtggagtgttcagtagatgtctattaggtgcaattagtcaagtgttgaggttaagtccagagtttctttgttagttttctgccttagtgatctgtctaagactgtcaatggggtgttgaagtctcctactgttagtgtgtgactgtctaattcttttcatacagtaagaagaacttgttttatgaatgtgggtgttccaatgttgggtgtgtgtatgcttagaataagtcattttgttggattgcaccctttatcattatgtactgccctttttgttcttcataattgttattggtttaaagtttgtttttatctgatataagaatagtgactcttgctgttttttgtttgcayggtacatctttccccatccttttactttgagccttttgatattgttacatgtgaaatgggtctcttgaagagataagatggttgggtcttgt

SEQ ID NO: 400827 - DNA, 612 bp, Homo sapiens
ggctttaaatgaagtatgcctacaagatctagaaaattacctaaaaaagacaacctaagagttattggccttaaagaggaggtagagaaagagataggggtagaaagattattcagagggataatatcagagaactatccaaacctataaaaaggtatcagtatcaaagtgtaagaatgttagagaacaccaagcagatttcaccctgagaagagtccctcaaggcataatcaaactcccaaaggccaaggacaaagaatcctaaaagcagtaagagaaaagaaacaaataacagacaatgaagttccaatacatctggcagcaagcttttcagtggaaaccggacaggccaggagagagtggcatgacatatttaaagtsgtgaaagtcaaaaacttatactccagaatagtatacacagcaaaaatattcttacagcatgaaggagtaataaagactttcccagacaaacaagtgctgaggaatttcatcaacatcagatctgtcctacaataaatgctaaagacttcaatctgaaagaaaaggacattaatgagcaataagaaaaatcatctgaagataccaaactcactggtaatagtaagtgcacaa

SEQ ID NO: 400828 - DNA, 559 bp, Homo sapiens
aactgtggtgtgtaaactactcttatcttaagtagaaagactaaatgatgaaccaatcaaaaataataactacgacaacttgtcaagacatagacrgcacaataaaatataaggagaaacaacaaagagtttagaagcaaggggaggaagttaaggtgtagagctcttattagttttctttgtttatgtaatcagtgttaagtaattactaacataaaatagtgggttataagaagatagtatttgcaaggctcacgagaacttcaagtcaaagaaacacaatgaatacacaaaaataaaaagcaagctattaaatcataccaccagagaaaattacctttgctaaaaggcagacagggagaaatgaaagaaggaagagaagaccccaaaacaaccaaaaagcaaataaagagcaggagtaagtccttacttatcaataataatattgaattaaatggactaaactctgcaatcaaaagacatagagtgggcgaatggattaaaaaataagacccattggtctattgcctacaataaacatatgtgacctataatgaca

SEQ ID NO: 400829 - DNA, 559 bp, Homo sapiens
aactgtggtgtgtaaactactcttatcttaagtagaaagactaaatgatgaaccaatcaaaaataataactacgacaacttgtcaagacatagacagcacaataaaatataaggagaaacaacaaagagtttagaagcaaggggaggaagttaaggtgtagagctcttattagttttctttgtttatgtaatcagtgttaagtaattactaacataaaatagtgggttataagaagatagtatttgcaaggctcacgagaacttcaagtcaaagaaacacaatgaatacacaaaaataaaaagcaagctattaaatcataccaccaragaaaattacctttgctaaaaggcagacagggagaaatgaaagaaggaagagaagaccccaaaacaaccaaaaagcaaataaagagcaggagtaagtccttacttatcaataataatattgaattaaatggactaaactctgcaatcaaaagacatagagtgggcgaatggattaaaaaataagacccattggtctattgcctacaataaacatatgtgacctataatgaca

SEQ ID NO: 400830 - DNA, 559 bp, Homo sapiens
aactgtggtgtgtaaactactcttatcttaagtagaaagactaaatgatgaaccaatcaaaaataataactacgacaacttgtcaagacatagacagcacaataaaatataaggagaaacaacaaagagtttagaagcaaggggaggaagttaaggtgtagagctcttattagttttctttgtttatgtaatcagtgttaagtaattactaacataaaatagtgggttataagaagatagtatttgcaaggctcacgagaacttcaagtcaaagaaacacaatgaatacacaaaaataaaaagcaagctattaaatcataccaccagagaaaattacctttgctaaaaggmagacagggagaaatgaaagaaggaagagaagaccccaaaacaaccaaaaagcaaataaagagcaggagtaagtccttacttatcaataataatattgaattaaatggactaaactctgcaatcaaaagacatagagtgggcgaatggattaaaaaataagacccattggtctattgcctacaataaacatatgtgacctataatgaca

SEQ ID NO: 400831 - DNA, 275 bp, Homo sapiens
aactgaatgcatatggctttccactaacataaagttgagaaatcataaattgaactgttgttagttgggtactctctgtatgagaatgtgtcctagcgggtagggtttgcaaaattaaacagaccactgcctttgaggcattttcatctggccgatctaacccccatgttgcatgatgaatgtggtggtgtttcagtacttgaagatgaggaaattggctcagagtggttcaggagcctatttttagtcacacagcraatagcaaagctgagatc

SEQ ID NO: 400832 - DNA, 252 bp, Homo sapiens
tccccaaccttcaaccatcccattgcccttctctaaagacaatttgtgtgtccgtgagtatgtgtacgtgtgtgtgtgtatgtgtgtgtgtgtgatagagactgcttgtgtgtccttcccaaggaattcgatatatctatgcagacattagcaaatggatgtttataaagctggatggtttcattacaagagtaactttgtrcaagtgatggaaagttaactatactgccaaaaagaaaggataataaggcc

SEQ ID NO: 400833 - DNA, 252 bp, Homo sapiens
tccccaaccttcaaccatcccattgcccttctctaaagacaatttgtgtgtccgtgagtatgtgtacgtgtgtgtgtgtatgtgtgtgtgtgtgatagagactgcttgtgtgtccttcccaaggaattcgatatatctatgcagacattagcaaatggatgtttataaagctggatggtttcattacaagagtaactttgtacaagtgatggaaagttaactatrctgccaaaaagaaaggataataaggcc

SEQ ID NO: 400834 - DNA, 615 bp, Homo sapiens
tacctccaaactgaaaagatcagtttagatctttaggtgtaattagataaattagatccagtctaacttagattagataagtgcttctcaagctgtaaaggagagtagtactggatgtacacgttctctaagatttttaagtttgggttaattctgatggtaatcttataaaataaatattaacaatattctgtcccatttggaatgaccgccttataatttgtcctaaatttgcattggtattttgggagtcaatgcactacagcaataagagttatgaaatcaggcactcakgccaaagaggtcaaatgactcaaaataatgattttggagttttgtgaagaagaaacacacacacacacacacacacacacacacacacacacaaaagttgagtcagcaatgcacctggagcttgctgccatgccaaattcaaaacatgctagaccatgacaagtcaggctcaccacctgaacatacctgatgttcacaatggggactcttgctctctcttcccagcatgcccagattattttattcactcgtcagattccagatacaagaagtcaaagtgaacttgggagaaaagcaccagtccaagtccactttcacttg

SEQ ID NO: 400835 - DNA, 536 bp, Homo sapiens
gctgcaaatggagccaaaaaggaaaccacccttctaccagggacccttagatcraccccaggaggagccctagatgctgttcccgtaccacgccctctccagcgggaagtagccagaagaagttgttgcccaattccccctaacagcagttagggattccattcctgagggggaaatatgttatacaagacagacagaatttatttaggtagacagttagggtaaagcgagtccccagcagaaacttttcttctaacaaaaagcagctcagaaatagctctctttctaacctcatgcagttcaaagaaatcacttctcttctaacaaagaacagcttgaaagatcaggctgtaaaaacaaacaactcgggcacagaaggacagggggagtcccctgggtaatcaccaaacttcacactcctacaatggaccccagtaaaaaccgtgggccttaataagcacattcctttccctttaagcacactaagatagagaaactaaaagcggattgtggggagatgcctgcagctgcaggaa

SEQ ID NO: 400836 - DNA, 536 bp, Homo sapiens
gctgcaaatggagccaaaaaggaaaccacccttctaccagggacccttagatcgaccccaggaggagccctagatgctgttcccrtaccacgccctctccagcgggaagtagccagaagaagttgttgcccaattccccctaacagcagttagggattccattcctgagggggaaatatgttatacaagacagacagaatttatttaggtagacagttagggtaaagcgagtccccagcagaaacttttcttctaacaaaaagcagctcagaaatagctctctttctaacctcatgcagttcaaagaaatcacttctcttctaacaaagaacagcttgaaagatcaggctgtaaaaacaaacaactcgggcacagaaggacagggggagtcccctgggtaatcaccaaacttcacactcctacaatggaccccagtaaaaaccgtgggccttaataagcacattcctttccctttaagcacactaagatagagaaactaaaagcggattgtggggagatgcctgcagctgcaggaa

SEQ ID NO: 400837 - DNA, 536 bp, Homo sapiens
gctgcaaatggagccaaaaaggaaaccacccttctaccagggacccttagatcgaccccaggaggagccctagatgctgttcccgtaccacgccctctccagcgggaagtagccagaagaagttgttgcccaattccccctaacagcagttagggattccattcctgagggggaaatatgttatacaagacagacagaatttatttaggtagacagttagggtaaagcgagtccccagcagaaacttttcttctaacaaaaagcagctcagaaatagctctctttctaacctcatgcagttcaaagaaatcacttctcttctaacaaagaacagcttgaaagatcaggctgtaaaaacaaacaactcgggcacagaaggacagggggagtcccctgggtaatcaccaaacttcacactcctacaatggaccccagtaaaaaccgtgggccttaataagcacattcctttccctttargcacactaagatagagaaactaaaagcggattgtggggagatgcctgcagctgcaggaa

SEQ ID NO: 400838 - DNA, 441 bp, Homo sapiens
cacaccacatgaaacctattgaatcagaattctccagggttaatgctagggcatatatttgttttgtgttttaatgtttcattagataatgctggtatgcaaccaaagttaaggggaatcaatgctctggtcctctraaaccagcttatgtgcttttttgtattctctgtagttgctagaagtgtgcctggctaggaggtctacagaagattttgtttatgatgaatcagccaagtcaaaaggtaatggcaatggaggagaaaagtacatccttttctaggtcttacagatacattctcaaagtctgttaggtctgcactttattggtgacttaacatacacctgattatgagccataaattagattctggacttatgttcaccttccaccctaaaaagtccttctgcccagaatcaactacctctatctagtactaacac

SEQ ID NO: 400839 - DNA, 437 bp, Homo sapiens
tgcccttcattaatggggtgtatatagtgagtggaagcaaaaaaataacaaatttaggcaatacaaatatgtgcctggcgatataccggcttctggaaatataaaaatagataagattgggcccctgctgtgcattargaaattaaatgtgacctcagctaattgcagcaattgttctgagcacacagaggagggagacactacttccacctggggtaatcagggaagacttctgaggacattatacttggaccacatctggtaaaataacagggaatttttttctttttttttttttttttgagactgagttttgctcttgttgccaggctgaagtgcaatggtgcgatctcagctcaccacaacctccaccttcagggttcaagcgattctcctgcctcagcctcccgagtagctgggattacaggcatgtgcca

SEQ ID NO: 400840 - DNA, 474 bp, Homo sapiens
cccccaagaagaaaagcagtgaacaataaaaaactatttttaataagtgaaaaatctgtgatagaaagttagaaatgtctcaactactgactagggtttcaatgtccttatatatcaatcattgcaagaaaatgtttccagttagttttgacaagaaatgagtgaatatgttcattttactactataacatatccacagtctaagaaattgtgaagctataatttggagtaattatttatattataaccctctcaagtttataaaaggatttataccagagttgttttaaatatagtaaaccctgcaatgcattaaatattgactcaaagattatttcctattttgtcatggatcagatagaaagttgataagaatgattgataatttatcaaaagwaagatctagcaacttggaaaataagaagttacggttcaatgttcaatttcatttacagatacttttctcccagagat

SEQ ID NO: 400841 - DNA, 553 bp, Homo sapiens
agggatagtatattaatttggacttttcttaacctcaaattacagcagcccactccagccaacttaagaaacccaggattcaaggatgtttcatagaatacacggccagagaatcagacaagcctttgaaatgaacaggatttctttaacctctccttccttctgccagtttgttttatttctctctcacattcatcaactctcaccttcctagccacccagaaaccctgatttgtctaatttgtaaacactgtggaaaatatggccaccaaggacatatctaatactraatacccagagaaaagtcaccaatgcctcctaccttccagcttatgtcaaagagataacagctcttgaataaataaccactgttaaacagatgttgtatgtggtaaaagcattgtggcctaggagaactacgttaactaagtagaaagactgtagaaagggcagaacctagtaaagtgtaattgagaaggcaaccaacaggaaggctgctctacttcctttaaaagaagaataacccctgacgaagatgttgccttgtgtagtg

SEQ ID NO: 400842 - DNA, 592 bp, Homo sapiens
aaatcatataagacataatcacgcaataacaatcgcccatgtactacctccccagctaaagaagaagctgacatttttttctcctctgatatatataactgtgacagtttgaaaagtgccttcagggaaggttataagagtctccaaatacaaatccgtgtcacttaaaactggacaacaccttgtggaaactacagaacaaaatgtgtctgcactgacttggaccccattcctcttttttatttttatattttatttattttattttattttttattgagacagtgtctcgctctgtcaccaggctggaatggagtggcgcgatctcgactcactgcaacttctgctgctcaggctcaagcaattcttgtgcctcagcctcctgagtagccgagactacaggtatgtgccaccatgcccagctaaattttttgtatttttagyagagatggggtttcgccatattggccaggctggtctcaaactcctgagctcaagtgatctgcccacttcggcctcccaaagtgctgtgattacatgtgtgagccaccacgcctggccccattccttttatctatgacaatcacctact

SEQ ID NO: 400843 - DNA, 562 bp, Homo sapiens
tgccaaacatgtggtcacatgatcactcatgttttgtcaataatactacgcaatttgagaagctgttaatatccacagctatccactctcctttgaatcctcaattcttcttcccaatattttttatcacaattaagtatctaactctttattcacccattttttacatctatcttaatttaccaaataattttcttttcagagataaattgacatagctatttcctttcattttaagaatatttggcctcaatatggtgatatattcagttyaaaaaacctagaaaaattttctattaaattcaagagatctgcatttactttctttagaaccatcaatgtttaacatttcatgaggatgatgggttcacacagttttataaagctgtcatccatgacattttaaagagatttgacctgagcatttcaagttatgaaaaaaactttgatatttaactaaaatatcatcaaatgggactcgatttaatgtttttatacttaattatttaatatctagacatctctaagcatttacttttctacttcctatccctgtacatca

SEQ ID NO: 400844 - DNA, 547 bp, Homo sapiens
gatttctgaaattgaaaactcagcagaaaggtttcctgataaagaaatgtcctagagtacatagcaaaaagacaaagaaatagaatatagcagattttgattcctaataaataggaggttccaaagaaagaacaaagaaaatggagaagcagaaattatgtatgagctctaaattcctagagttaaaaacagctatgagactttatatttaaagggtcactaagtgccaagcagaatgaaattaaaaagacctacacctagacacgtaataatgtaatctaaaatatctagaatgaagataaaatattaagagcttccagaaaaaaaaatagcctataaataatgagttttggtgtagaagatattttcaatgctcctctgtgccacagccccttgctgcagatctaatttcagaacatctgaaaagcacatttcacataaagggacacctcacagatacagcttctcaactcaagtgcatactgtctttccaggggataattctgggtggcattayatgtgcttcaaaaatcctagcagactaaag

SEQ ID NO: 400845 - DNA, 465 bp, Homo sapiens
ttgtcccatcataaagtagaaaaatcataagttgaaccatcataagttggggaccatctgtagtgattattatctactaaacagatcttatggtatgtattttaggatgtattaatcctattattaactttattttacaagtcagtacacacagagatgtgaagcagtatgcccaagagtrtaaatcgaatacatggcagagccagcattcctactcagtgtgtttagccctcgagtctgtgcttttaatcaatttgctgtactgcctctcaaaatgctactacccccgtctcatataccttacattgcctttaatgaaaaagaaaacaatccagtaaaaaaataattaaacttgataaatttatgcatagatacattctgtgatatggaatgagtgctcgctgcctattttctctaggggtgtttgggagagccccactgaggaaatgacattggaggattaaa

SEQ ID NO: 400846 - DNA, 465 bp, Homo sapiens
ttgtcccatcataaagtagaaaaatcataagttgaaccatcataagttggggaccatctgtagtgattattatctactaaacagatcttatggtatgtattttaggatgtattaatcctattattaactttattttacaagtcagtacacacagagatgtgaagcagtatgcccaagagtgtaaatcgaatacatggcagagccagcattcctactcagtgtgtttagccctcgagtctgtgcttttaatcaatttgctgtactgcctctcaaaatgytactacccccgtctcatataccttacattgcctttaatgaaaaagaaaacaatccagtaaaaaaataattaaacttgataaatttatgcatagatacattctgtgatatggaatgagtgctcgctgcctattttctctaggggtgtttgggagagccccactgaggaaatgacattggaggattaaa

SEQ ID NO: 400847 - DNA, 516 bp, Homo sapiens
gctcatggtgccacatgacctgccccaccaagtttattacaataaatacctttggcagcctaatgctgtcttctttctctctggcacctttcattaatacagtgtcaatgaaaagtatcctcagttataccaagtatttctccagaacattttgggctcatttccaagtccctaatgcctcaccagcaaamtaatatgggattctctacagttaggatactgagctttaaaaaatgtgtatagttcatgtagagtcctctgtggaccaagaaagggaagcctttgttgctagctcttctctcacgccacatttctggagctttcttttagtgccactcccagctcctggtcttcctcctgtcttctcctctcctgttttttccccactgtttctattgtttctattctctgcttcacttctttttcttttctttttttccatcctcagtctgcaatgaagaccttcataacatagctttgcatacttggaagtatatctataggacagattcctta

SEQ ID NO: 400848 - DNA, 350 bp, Homo sapiens
gttataccaagtatttctccagaacattttgggctcatttccaagtccctaatgcctcaccagcaaaataatatgggattctctacagttaggatactgagctttaaaaaatgtgtatagttcatgtagagtcctctgtggaccaagaaagggaagcctttgttgctagctcttctctcacgccacayttctggagctttcttttagtgccactcccagctcctggtcttcctcctgtcttctcctctcctgttttttccccactgtttctattgtttctattctctgcttcacttctttttcttttctttttttccatcctcagtctgcaatgaagaccttcataacat

SEQ ID NO: 400849 - DNA, 601 bp, Homo sapiens
gttgggattacaggcatgagccatcgtgcccggtcctggaatatcttctttctctggccacaattttgtgtcagttgttttgctgccagtgaaacagaaattatatataagtgatcaaatttgtccaaagacttgactctttttatttcctaccaaatgcagggcctagtagttttgcctgcacatttcctacacttccacctgaaaggtgagattctaccaccatctacatgtccctggatttgagaggcagcgacactccctcagcagtgagtttcttgggtgagtgatagagggacagtgcttgaccttgacaattaagcatctgtatgtgtgaccagacggtcttatgcaggcaggacagaggtggaagtaggagtagggagaggagagtgtccccatccctttagctgtttcactcagccaagaagttatgattccaactgtgtacctaattgtaattttgtcctaccttacrtgggctactgaaggaaacatatataaagcaaataatcatgattatgaaatgtaagagcttttagcaggacatgagtagaacttccacattttctcatgttcccatctgtgggaagcggcacaa

SEQ ID NO: 400850 - DNA, 561 bp, Homo sapiens
tgggagggtgccttggaaagcccagcaggcaatatggcagggcccagaggacacatggacagtccagcccaagcctaactctagacaaagtggtctytgcatttacacttgatctgtccaagcttataatagacgaggttctgaaacccactcttggatctatgatggagttgggcagtccgtggaggaataagggccttgagattctgtcaacctttccatttgttaagactcggaaatatactatatttggcattatatcactaggattttaaacatattgataggacagatggtttattgtctctgaggacacaatgttctattgtaagcttgatactctaaaagcttttaatttcagaaaatatatgtttgctctcttgaaatttctgaaagttattaagtaaaagaacataaagagaaaaaactctcaagttaaaaaaagtcaagcattttgattatgcttgtacacaacatgtctcaaggttgttctattctgttacacacaatgggacagctgagctcatgcagttttcagcctcctccctgactcttcccttt

SEQ ID NO: 400851 - DNA, 561 bp, Homo sapiens
tgggagggtgccttggaaagcccagcaggcaatatggcagggcccagaggacacatggacagtccagcccaagcctaactctagacaaagtggtctctgcatttacacttgatctgtccaagcttataatagacgaggttctgaaacccactcttggatctatgatggagttgggcagtccgtggaggaataagggccttgagattctgtcaacctttccatttgttaagactcggaaatatactatatttggcattatatcactaggattttaaacatattgataggacagatggtttattgtctctgaggacacaatgttctattgtaagcttgatactctaaaagcttttaatttcagaaaatatatktttgctctcttgaaatttctgaaagttattaagtaaaagaacataaagagaaaaaactctcaagttaaaaaaagtcaagcattttgattatgcttgtacacaacatgtctcaaggttgttctattctgttacacacaatgggacagctgagctcatgcagttttcagcctcctccctgactcttcccttt

SEQ ID NO: 400852 - DNA, 561 bp, Homo sapiens
tgggagggtgccttggaaagcccagcaggcaatatggcagggcccagaggacacatggacagtccagcccaagcctaactctagacaaagtggtctctgcatttacacttgatctgtccaagcttataatagacgaggttctgaaacccactcttggatctatgatggagttgggcagtccgtggaggaataagggccttgagattctgtcaacctttccatttgttaagactcggaaatatactatatttggcattatatcactaggattttaaacatattgataggacagatggtttattgtctctgaggacacaatgttctattgtaagcttgatactctaaaagcttttaatttcagaaaatatatgtttgctctcttgaaatttctgaaagttattaagtaaaagaacataaagagaaaaaactctyaagttaaaaaaagtcaagcattttgattatgcttgtacacaacatgtctcaaggttgttctattctgttacacacaatgggacagctgagctcatgcagttttcagcctcctccctgactcttcccttt

SEQ ID NO: 400853 - DNA, 561 bp, Homo sapiens
tgggagggtgccttggaaagcccagcaggcaatatggcagggcccagaggacacatggacagtccagcccaagcctaactctagacaaagtggtctctgcatttacacttgatctgtccaagcttataatagacgaggttctgaaacccactcttggatctatgatggagttgggcagtccgtggaggaataagggccttgagattctgtcaacctttccatttgttaagactcggaaatatactatatttggcattatatcactaggattttaaacatattgataggacagatggtttattgtctctgaggacacaatgttctattgtaagcttgatactctaaaagcttttaatttcagaaaatatatgtttgctctcttgaaatttctgaaagttattaagtaaaagaacataaagagaaaaaactctcaagttaaaaaaagtcaagyattttgattatgcttgtacacaacatgtctcaaggttgttctattctgttacacacaatgggacagctgagctcatgcagttttcagcctcctccctgactcttcccttt

SEQ ID NO: 400854 - DNA, 571 bp, Homo sapiens
ggtaaggcaaatagagtggttgcagtattaaaactgtttttagtcaatatcattaaggaaaaacatggttccccacctgcttttaaattgcttctcccaacactgtccacatgttccctaaatgttaatcagactggactatatgctgttacctgattgaggcctatgcttttgctcatggtactttctctgccaggaaaaaactagctagactttgagatcagctagatctacatgttgagtctggatatatttagcttctgagtgactttcagcaattagttaaactatattatcttgaacttccttttctaaggaacaagaaggctaatctttgggccttatagaattattytgaggatgaaatgaaataactgaatgtgcctagcataggacctagtaacctagcaggtattctgtatatgctcattttaaaaaaaattatagtcttcctggcaacacctctaatttcatgacccactttaaaaaaaaactgttattttggactagttttaggcttatagaaaatatgcaaaagtaccaaagagtttctaaattatttttccacctc

SEQ ID NO: 400855 - DNA, 383 bp, Homo sapiens
acgagaaatggagagtgagtgggttcctgctcctggttccacacgcatttctagcctttcagagactggcttaagtgaacatctcccttctttccacacccccactcttttttctgaactagttagaatcagggttttttgtttttctttttttttcacatgcaaactcacatgcaacatttcatgagttttggtagactttgtttttttggagggggagattaccttcagcattccgcttaaaatacctccctmcaggctttcgtctcagccaagtttctccttccttatgagcccggtgtcttcttccagaggcactccataaccctccgccattagaattgggcaatctgcatttcttctcttccactgattgaagcaaa

SEQ ID NO: 400856 - DNA, 383 bp, Homo sapiens
acgagaaatggagagtgagtgggttcctgctcctggttccacacgcatttctagcctttcagagactggcttaagtgaacatctcccttctttccacacccccactcttttttctgaactagttagaatcagggttttttgtttttctttttttttcacatgcaaactcacatgcaacatttcatgagttttggtagactttgtttttttggagggggagattaccttcagcattccgcttaaaatacctccctccaggctttcgtctcagccaagtttctccttccytatgagcccggtgtcttcttccagaggcactccataaccctccgccattagaattgggcaatctgcatttcttctcttccactgattgaagcaaa

SEQ ID NO: 400857 - DNA, 383 bp, Homo sapiens
acgagaaatggagagtgagtgggttcctgctcctggttccacacgcatttctagcctttcagagactggcttaagtgaacatctcccttctttccacacccccactcttttttctgaactagttagaatcagggttttttgtttttctttttttttcacatgcaaactcacatgcaacatttcatgagttttggtagactttgtttttttggagggggagattaccttcagcattccgcttaaaatacctccctccaggctttcgtctcagccaagtttctccttccttatragcccggtgtcttcttccagaggcactccataaccctccgccattagaattgggcaatctgcatttcttctcttccactgattgaagcaaa

SEQ ID NO: 400858 - DNA, 518 bp, Homo sapiens
ttaacaaactcaaggggtattaaagaatctaataaataaattttaaaatgaatgaatgaattgcaaagctttgaagggtaactgttatagcctcgtaagaaacactaactgaggcaacagaaaaaaacttatgaaccaaccatcagtgacatgccacaggttcactgtctgggtggaaacatattcagacccttgcttatacagtcagggggagcttatttgttargtcagttccctgccattacatgccccctgcctgtacaaatgcaggaggaccagctctgacctgttggcccccaggggagatcaaagaacgcccccattgcttctggcattcatgtgcaattgggagttcacaaagaatcatctaggaggctttgaaaacctacagatgcttggaccccttctctactcacagaatcaaaattcccgggctgtggcccacaaacagggcggttcaagaaactccacaggtgatgttgactcaaactcctggcctatgggggcaataatccaga

SEQ ID NO: 400859 - DNA, 518 bp, Homo sapiens
ttaacaaactcaaggggtattaaagaatctaataaataaattttaaaatgaatgaatgaattgcaaagctttgaagggtaactgttatagcctcgtaagaaacactaactgaggcaacagaaaaaaacttatgaaccaaccatcagtgacatgccacaggttcactgtctgggtggaaacatattcagacccttgcttatacagtcagggggagcttatttgttaagtcagttccctgccattacatgccccctgcctgtacaaatgcaggaggaccagctctgacctgttggcccccaggggagatcaaagaacscccccattgcttctggcattcatgtgcaattgggagttcacaaagaatcatctaggaggctttgaaaacctacagatgcttggaccccttctctactcacagaatcaaaattcccgggctgtggcccacaaacagggcggttcaagaaactccacaggtgatgttgactcaaactcctggcctatgggggcaataatccaga

SEQ ID NO: 400860 - DNA, 518 bp, Homo sapiens
ttaacaaactcaaggggtattaaagaatctaataaataaattttaaaatgaatgaatgaattgcaaagctttgaagggtaactgttatagcctcgtaagaaacactaactgaggcaacagaaaaaaacttatgaaccaaccatcagtgacatgccacaggttcactgtctgggtggaaacatattcagacccttgcttatacagtcagggggagcttatttgttaagtcagttccctgccattacatgccccctgcctgtacaaatgcaggaggaccagctctgacctgttggcccccaggggagatcaaagaacgcccccattgcttctggcattcatgtgcaattgggagttcacaaagaatcatctaggaggctttgaaaacctacagatgcttggaccccttctctactcacagaatcaaaattcccgggctgtggcccacaaacagggcggttcaagaaactccacaggtgatgytgactcaaactcctggcctatgggggcaataatccaga

SEQ ID NO: 400861 - DNA, 573 bp, Homo sapiens
cccatcagccacctgtgggggccaaatgggaggtcgacgcsagagctccggaaatcataactcatctcctagatttgggtggtggctttgaagactctgagcctgaggccccagccctgcccactcagctggcacctgctatcttttctgggacaggaagagaccacttggcagtcagcatgaagcgctcagtgacaagagtgctcagcttttgattgccctctctttcagtgatcaaaggcaggactctccctttggattttaaacctctggtgcggttacactcatcccagctagaaaacctggcagagggtcaggacaggccaatggttgcagggagttggttctccccttccttttaggctgcagctgtgtctggaagacccatctttttaggggacacctgtgctgttgcagccagcagccgtacttctagtacactctgctaagaaatcagtcagcacctgctgacgccacttattctttaagagagtgtccgtttactgtcagaagtggcagcataatgccatggttaaaaagacagacactggagccttcgcccgggttcaaatg

SEQ ID NO: 400862 - DNA, 588 bp, Homo sapiens
atttgttcgactgacagctactgcaagaagcaaaccctcacatgcatcattgctttttttttttatgctcaggtgactccagaacaggttttactaatatgtgggcagctctgtgtagtagctcttgccatgttagtgttgctatatttagttcctcctattcaaggttgctatgcttgtcggcatcaagcaggaggagaaaagaccctggtggaaggggcatgggaagtcttgtggaccaggccggaagtggcacctcattggccacagctccgtcccatctctggtagagaaagagagttgagcagtgtgttgggaagaagcagaagcaagctgggtactaacatcctttaaaattagatagtttttttttttttaatgtacttcgagtatgttctaraaagctatttccttggatacctcccttttgcgatgaagaagtggcagctcacagaattgagtgacttgctcagggtcacagagcgtcaggtgacagtgtgtggtctggaatccaggccttatccattaccttgtcccgtactttgtctttccacgagtttttgagtgtggccagcagtcctacctcta

SEQ ID NO: 400863 - DNA, 510 bp, Homo sapiens
tggtttgagttgggagcatgttatgggctgaaaagttacaaactatatccagaaacttctataaaggtatttccttctgatgtgccatcattcctggctcaaaattcacttttctttctacattttctatattcagtaagatatgacctgtctgtgagccaggcctattggtacctgttctgtggtgagcaggcaccagtaggtgacaaggcaggcaagagagagtgtccctggacctaagaaaccaggctgtggacccaaagccatctggaaaagactcmcgggatgtgggacatcactcaaggctcaaggtcagcctggggtccaacagtaaggataagaaccaggacagcaggttccagaaagccaggtcccttcataggaggtcagcctgacctaaacggacaccattttcattattgttattattattattattattattattattattatttctctaagccttcttagcatttgcagtgtatcctgggggaacttgcagttttc

SEQ ID NO: 400864 - DNA, 623 bp, Homo sapiens
ctgctggaaacaggaggcactgctgtctggctccagggggtgcctcaggaccccgttgctgggcttgggtctctcgtattctctttcggagagcatggcctgctcgctttccatggcgggstctgagtgcgggggcagggactgtggaaacccaaacatcaagagggaagagaagaagagtaaggcaccgcagagcagaaagccaccccaccaggctccgatccagcgggggtcgtccggagtgatgtccaggttacctgtaaatggaaagagcacagcttagtggagaaaagaaggctggaccactggggattttgctgagaatctgaatccgctgaacagagagggcaagggctctagaaatgacttgcggtcgggaacactggctgccaggctacgaagcctattgttccacaccagcggttctgtttctctcaaatccggaggctgatcacattccccccttaattttcttgtctaccctgtgtttatatcggtctaaacaaaaacagtgagaagccagacgttctctgaatttaggctaaaactggcttggcagcactgctaaggtgtactgaaagaagcacaaggaaatgtttattgttcagaggtagattttcacc

SEQ ID NO: 400865 - DNA, 623 bp, Homo sapiens
ctgctggaaacaggaggcactgctgtctggctccagggggtgcctcaggaccccgttgctgggcttgggtctctcgtattctctttcggagagcatggcctgctcgctttccatggcgggctctgagtgcgggggcagggactgtggaaacccaaacatcaagagggaagagaagaagagtaaggcaccgcagagcagaaagccaccccaccaggctccgatccagcgggggtcgtccggagtgatgtccaggttacctgtaaatggaaagagcacagcttagtggagaaaagaaggctggaccactggggattttgctgagaatctgaatccgctgaacagagagggcaagggctctagaaatgacttgcggtcgggaacactggctgccaggctacgaagcctattgttccacaccagcggttctgtttctctcaaatccggaggctgatcacattcccyccttaattttcttgtctaccctgtgtttatatcggtctaaacaaaaacagtgagaagccagacgttctctgaatttaggctaaaactggcttggcagcactgctaaggtgtactgaaagaagcacaaggaaatgtttattgttcagaggtagattttcacc

SEQ ID NO: 400866 - DNA, 580 bp, Homo sapiens
aatttgtaatcaatatggcctcgcgggtcccagacttgtctacctgactgtgtacttgtcagctcaacggcagctcatccagtgcttgcttaccttgtcattgctctgagcttgcctrttgcaccctagtggaacataagctccagaatataagtcaatttagtcaaggctgtgcttagcaccgagtagggtctcagtaactaccaatggaataaaacaaatgagttaatgagcgactgaatcatgacccaagaatgcttaagccatagcagggctcaagacttggctcagctctgccgctgaccctttcctcacccgtgactcccagcccaggagcggtgggcttctctctgcctctttgctgcatttctgtaaccacctgtgctgcttgttattgcggttctcaaaacactgggctgcctttgctgacttgcagacctggtcctgtgtgggatggtgagttctctgatggcaccattgtatctttttaatctttttattcccagagatgaaagacaagtgattactagtgcagcttttacaatcagagccctagggaaacagggtcatcatcccgagg

SEQ ID NO: 400867 - DNA, 566 bp, Homo sapiens
tttaaatgcttatagacaaaacactcaccttgacatttgccttttagaagggcaacagcatgataaatccaaaatggaagctaaccttgaagtatggattagaacttaaactgtgaactcctgtggcacagggtagagctccagagagaaaagtcccttaagggattattggaagccatgcacgatggacttatgaaagtctatcaattatcactctggtgccatcccagcaattcttttctatctatttctttttgtcatatttggactcaccattctcagatttactatctttgactttggattacccccaattcaacttatctagctctacacaagcataatgaataaaatyccacttcattatatgtgcatgtaattaattcttgttcctcatccagagctgggctgcgcgggacagcagccactagtcatatgcggctagtctaaattgagatgtgcgtttagttttgtaaagcataaagacttacatgcaaaaacagaatgtgaaatctctcattagtgatttttcttattggttacacatgttgaaatgatatttggga

SEQ ID NO: 400868 - DNA, 617 bp, Homo sapiens
gggtattactattaatattccttgctaggaaaagaatttagcgatctctctcctacttgcacatccgtttatagactctctgcaagaagaaacatatggctctttttgcccaaccctgcaggcaggcagaccttatggttgtcttcctttgttccctaaaaattgccgttattctcttctttttcaaggtgcactgatttcatattgttgaaacacacatgttttacaatcaatttgtacagttaacacaattatcacagtggtcctgaggtgatgtacatccttagcttatgaatataacagaattaagagattaaagacaggcataagaaattataaaagtattatttgggaactgataaatgtccatgaaatcttcaccatttatgttcctctgccatggctccagccagtccctctccatttggggtccctgacttcccacaacaagaaacaataagaggttaaggtggagaagagcaggyaagtccactttataaaggggtcagggaagagctgtctgtggaagcaccattttagctgacacctgaaggatggtctaatttggggaggtgcagggaaaatcattccaggctgaagcagcaagtgcaaaggcc

SEQ ID NO: 400869 - DNA, 617 bp, Homo sapiens
gggtattactattaatattccttgctaggaaaagaatttagcgatctctctcctacttgcacatccgtttatagactctctgcaagaagaaacatatggctctttttgcccaaccctgcaggcaggcagaccttatggttgtcttcctttgttccctaaaaattgccgttattctcttctttttcaaggtgcactgatttcatattgttgaaacacacatgttttacaatcaatttgtacagttaacacaattatcacagtggtcctgaggtgatgtacatccttagcttatgaatataacagaattaagagattaaagacaggcataagaaattataaaagtattatttgggaactgataaatgtccatgaaatcttcaccatttatgttcctctgccatggctccagccagtccctctccatttggggtccctgacttcccacaacaagaaacaataagaggttaaggtggagaagagcaggcaagtccastttataaaggggtcagggaagagctgtctgtggaagcaccattttagctgacacctgaaggatggtctaatttggggaggtgcagggaaaatcattccaggctgaagcagcaagtgcaaaggcc

SEQ ID NO: 400870 - DNA, 561 bp, Homo sapiens
gctcagttgttaaagtctttctgactttttacagaatctgctgtaagttctgaaattgaactctacacaatctagaaaagaggaaatggttacagcttcctcattcctggaaatctttgagaaaataatggacawacaaatgtctgtgtaatcctagtaaaggagtgaaggcctgattaccttttcaggattgtggaaagtcaccggggctggatccatgcatatgatattaaattggtgcaaaggctattgctgtttttgcattaaaagtaattaaaaagtaatggcaaaggccacaataacttttgcaccaaccgaatagagcaggtagtttgtcttcgaatcttgtgttctcaattcccgccttgtcttctctccttagacctccacattcaattccctcaacctgtctccatgtctgctttgccctaataaggcagtaaagcagaagtctgcagagtaacctttaagtttgttacagtgcacaaacatcttcacaatctcagcccatctggtgtctagggcagtatttttttaggaaatagctgtaatcacctctgg

SEQ ID NO: 400871 - DNA, 590 bp, Homo sapiens
aaaaactcatcctattctcaccctgattaactttmtttatttatttatttatttttttttcaaaatggagccatgatctgtcacccaggctggagtgcaatggtgtgatctcagctagctgaaacctctgccttctggattaaaccaattctcctgcctcagcctcctgggtagctgggattacaggtgtataccacaacgcccggctaatttttttatttttaatagagacagggtttcaccatgttggccaggctggtctcgaactcctgacctcgtgatccgccctctttggcctcccaaagtcctgggattacaggcatgagccaccatacccagccactcttgattaacttaatggaaatatttacagagattctttctcttctgggttctaacgtcttatctgtaacctctgcaggtaatacattttccttcctgatgatagcatttctatggttgctttcacttgcaaatcctctaatacttatttattccatttctgattggcattagacataattctcaatttttagtgacagcacttcgtttaacttacatataaatcgactttgccttgaaatgtgaca

SEQ ID NO: 400872 - DNA, 590 bp, Homo sapiens
aaaaactcatcctattctcaccctgattaactttatttatttatttatttatttttttttcaaaatggagccatgatctgtcacccaggctggagtgcaatggtgtgatctcagctagctgaaacctctgccttctggattaaaccaattctcctgcctcagcctcctgggtagctgggattacaggtgtataccacaacgcccggctaatttttttatttttaatagagacagkgtttcaccatgttggccaggctggtctcgaactcctgacctcgtgatccgccctctttggcctcccaaagtcctgggattacaggcatgagccaccatacccagccactcttgattaacttaatggaaatatttacagagattctttctcttctgggttctaacgtcttatctgtaacctctgcaggtaatacattttccttcctgatgatagcatttctatggttgctttcacttgcaaatcctctaatacttatttattccatttctgattggcattagacataattctcaatttttagtgacagcacttcgtttaacttacatataaatcgactttgccttgaaatgtgaca

SEQ ID NO: 400873 - DNA, 590 bp, Homo sapiens
aaaaactcatcctattctcaccctgattaactttatttatttatttatttatttttttttcaaaatggagccatgatctgtcacccaggctggagtgcaatggtgtgatctcagctagctgaaacctctgccttctggattaaaccaattctcctgcctcagcctcctgggtagctgggattacaggtgtataccacaacgcccggctaatttttttatttttaatagagacagggtttcaccatgttggccaggctggtctcgaactcctgacctcgtgatcygccctctttggcctcccaaagtcctgggattacaggcatgagccaccatacccagccactcttgattaacttaatggaaatatttacagagattctttctcttctgggttctaacgtcttatctgtaacctctgcaggtaatacattttccttcctgatgatagcatttctatggttgctttcacttgcaaatcctctaatacttatttattccatttctgattggcattagacataattctcaatttttagtgacagcacttcgtttaacttacatataaatcgactttgccttgaaatgtgaca

SEQ ID NO: 400874 - DNA, 590 bp, Homo sapiens
aaaaactcatcctattctcaccctgattaactttatttatttatttatttatttttttttcaaaatggagccatgatctgtcacccaggctggagtgcaatggtgtgatctcagctagctgaaacctctgccttctggattaaaccaattctcctgcctcagcctcctgggtagctgggattacaggtgtataccacaacgcccggctaatttttttatttttaatagagacagggtttcaccatgttggccaggctggtctcgaactcctgacctcgtgatccgccctctttggcctcccaaagtcctgggattacaggcatgagccaccatacccagccactcttgattaacttaatggaaatatttacagagattctttctcttctgggttctaacgtcttatctgtaacctctgcaggtaatacattttccttcctgatgatagcatttctatggttgctttcacttgcaaatcctctaatacttatttattccatttctgattggcattagacataattctcaatttttagtgacagcacttcktttaacttacatataaatcgactttgccttgaaatgtgaca

SEQ ID NO: 400875 - DNA, 598 bp, Homo sapiens
ggctatttactcttctaccctttaattagcataatcagtgtttccagcagcaaaagcaattggaaaatcgcttgttttgttaggttcattmttctcccttagcgtagtgtggcatcagcatggttattattcttaaattgcctctttaaaacaagagctggtgcttcttacaggcaattcctaactcttgggttttgtagagggtccaaaactctttagaacctataattcaaggaaaggctccactttggttttgcattttgtctggtctctttgggtgacagaatttatgtcacaaggtgcacatgttttggggaggctcatggacagcccatcgctcttgtgctttggtaggaaatatgtgcagttatggggaaggagttagttactcatctagggaacaattgggtagaaagagatggactccctgtatttgaaattcagaactcaagcttggctctaagtgtttccttgctttgctgtgctccacgggaggcactgagcagaaggaagcgagttgcctgagattcctcaaagcccgcagcccttttggaggttacattgttattctcagagcctttatgatacataataaaga

SEQ ID NO: 400876 - DNA, 598 bp, Homo sapiens
ggctatttactcttctaccctttaattagcataatcagtgtttccagcagcaaaagcaattggaaaatcgcttgttttgttaggttcattcttctcccttagcrtagtgtggcatcagcatggttattattcttaaattgcctctttaaaacaagagctggtgcttcttacaggcaattcctaactcttgggttttgtagagggtccaaaactctttagaacctataattcaaggaaaggctccactttggttttgcattttgtctggtctctttgggtgacagaatttatgtcacaaggtgcacatgttttggggaggctcatggacagcccatcgctcttgtgctttggtaggaaatatgtgcagttatggggaaggagttagttactcatctagggaacaattgggtagaaagagatggactccctgtatttgaaattcagaactcaagcttggctctaagtgtttccttgctttgctgtgctccacgggaggcactgagcagaaggaagcgagttgcctgagattcctcaaagcccgcagcccttttggaggttacattgttattctcagagcctttatgatacataataaaga

SEQ ID NO: 400877 - DNA, 598 bp, Homo sapiens
ggctatttactcttctaccctttaattagcataatcagtgtttccagcagcaaaagcaattggaaaatcgcttgttttgttaggttcattcttctcccttagcgtagtgtggcatcagcatggytattattcttaaattgcctctttaaaacaagagctggtgcttcttacaggcaattcctaactcttgggttttgtagagggtccaaaactctttagaacctataattcaaggaaaggctccactttggttttgcattttgtctggtctctttgggtgacagaatttatgtcacaaggtgcacatgttttggggaggctcatggacagcccatcgctcttgtgctttggtaggaaatatgtgcagttatggggaaggagttagttactcatctagggaacaattgggtagaaagagatggactccctgtatttgaaattcagaactcaagcttggctctaagtgtttccttgctttgctgtgctccacgggaggcactgagcagaaggaagcgagttgcctgagattcctcaaagcccgcagcccttttggaggttacattgttattctcagagcctttatgatacataataaaga

SEQ ID NO: 400878 - DNA, 566 bp, Homo sapiens
tcttttcagtgtgggttaggccctactaagtaattgtctttgttgtgctgttatacaacttctgtcctatacaattaagctttcctacagggatgataaagtctttcccttctctagctatacagtattgtctaataattgaggttttaggacctagaagttgctagcttgggccttctgaactggaattatatcaggagctggatcagtagacaccaactctcgggcttccgaaggccatctgtctccgatagtggttcctccgcatacataacaagaagtaacattaagggaattagctacattttctgctaattggagaaacaaattttttgtctttttcggaagttctggtgttggcagattcagctcctcataaaacgtttgaaatactgttttgggagagcacttgtggacctcccctctaattaaaatggcaacttgagggtttaaccctgtcctattgatccccagggttacrcgttctccctttttccaaaggggatctaggggattggtaattattagttctagtgggttacagtgaccggcggcccaggaggggt

SEQ ID NO: 400879 - DNA, 598 bp, Homo sapiens
ggctatttactcttctaccctttaattagcataatcagtgtttccagcagcaaaagcaattggaaaatcgcttgttttgttaggttcattcttctcccttagcgtagtgtggcatcagcatggttattattcttaaattgcctctttaaaacaagagctggtgcttcttacaggcaattcctaactcttgggttttgtagagggtccaaaactctttagaacctataattcaaggaaaggctccactttggttttgcattttgtctggtctctttgggtgacagaatttatgtcacaaggtgcacatgttttggggaggctcatggacagcccatcgctcttgtgctttggtaggaaatatgtgcagttatggggaaggagttagttactcatctagggaacaattgggtagaaagagatggactccctgtatttgaaattcagaactcaagcttggctctaagtgtttccttgctttgctgtgctccacgggagkcactgagcagaaggaagcgagttgcctgagattcctcaaagcccgcagcccttttggaggttacattgttattctcagagcctttatgatacataataaaga

SEQ ID NO: 400880 - DNA, 571 bp, Homo sapiens
gaacagaaagattgttttaatttgctgtcctacttcggtgacctgataaatacactgggaacagtccccattttgagtaaggttagttgaagcccttactgtataagtccaaaatttaagaaaaatgaatctaacgatgagcttcctcgtgcttcggccatgcgtggaccagtcagcttccaggtgtgactggagcagggcttgtcgtcttcttcagggtcactctgcaagggttgtctgggcttggtcttgcctcccaggtttccggcgctgcaggttttacacagctgtggtggttccagactgggattccttctaccttcacagcggtgggagtgctcaggacgacagtctggggtcckttccacagtggacacaaagaggctactttccagtccttgatccacactcgatcacctggggagaaagggtgaactggggagaataaactaacagggcatctctcatttacccaggctgagattgtctgtgtaatttttcctaaagcctgtagctgtcgctgtaactcaatttcacctaatctcagggagtgcctggaagtccccgcaat

SEQ ID NO: 400881 - DNA, 512 bp, Homo sapiens
tacattttaagactcattcaggattagcgttcaccttaaacttgacagactcagagaatgggctggccacgtgctgtgcacaacccttagtgcccttctgtgactaatatttggataattgattgttggaagctcaggaagcctctctctctcagaggggttgaagttaacttctttatttctgaggtagggaagaaaatgasgatgttctgccttttgctagactgaatactgtcttccaaaaattcacattcaccaggaatcccagaatgtgaccttattagaaaataggggcagggcatggtggctcatgcttgtaatcttagcactttgggaggctgaggcaggaggatcacttgaggtcaggagttcgagaccagcctggctagcatggcaaaccctgtctctactaaaaacataaaaattagctaggcatggtggcgtgcacctgtaatcccagctacttcagaggctgaggctgaagaatcacttgaacccaggaggcagagttg

SEQ ID NO: 400882 - DNA, 580 bp, Homo sapiens
ggttagtagtctctgaagggtgattttgtttgattaagctcagctgatgatatgaattccaagcagcaaatgatcactgagtacctgttttgtggaaggaaggcattggtgtacacacrtggaggctgtggacttcatatgttgtacttggtttcagcctttactgaaacaagtgcggacactaaatggcaatggggtccgtttagctgactggatattagctgctcaggctatttttacaaggaccgttctagccacatcaccacatgtagtgccctgtgacgcaaaatgactccattgatggaaatgcttttctcctcttcctctgccttttgccaaggctaagggagctgaaggagacgttaggtaaagggaccgaagaaaatgtaacagacagcagctctaaacagactggcctctaggagacttgctaagaggaggtccttctgggctgagtcaaagctcccattattttggaggttttctggaatcttctgctttgtctgtcattctcccctccctcagggtccatagcagtgtacacattaccttttcaaaagccacttatcactttgcatgg

SEQ ID NO: 400883 - DNA, 549 bp, Homo sapiens
tcaacatgtatgcctctgggggtactcatccacatgccatttaaggatatttccagcatcatcatcttcactaccccaggatggcattttagagtggattacgtgcctgctggatgtgttgtacttgaacgagctagagaaaatgccacactttaagacgaattaagagtctgttcatttagcyggcggctaagaaatggctaacgtttaaagttctctcggcctcgaagaaggggctagattttcttttatactttcgtttagaaaggggaggggggtctagttaaaacaattttacagaagtaggcaaaaaagttaaaaggataaattgttgcaggaaagtaaacagctctaggtctaggggctttaagactattatgaggtgatagacgcggggctttgggcgttatcaattggacgaattcctgggaactgcggatattgctcaccacagtatcttatcagttaattgcattcttcgatgtgctgggcgtcagcttgcacaagttaagtccttgaggaaggggctgtcagtgaaagagccaagat

SEQ ID NO: 400884 - DNA, 564 bp, Homo sapiens
ttattcatttgtgacctgagcgacattcctcttatcatatgataagtaaatttactggtggcactgacagtaggtacttctatcaaccaagtttggattgtaggcattaagcatcctggtgcttttcccaggcaaataggaggataatgatacccaatggaaatgtttatcatcattcctttttcttcaggttgggcagggccacggtcatctgtggggcctggtacccatgcactgttattaacatatacttcaataggattatctatccaagtgactgctcgaattaagggtgggaaaatcacataggcccagtaagtatagttagctgtagcggctcctgaagacatagggagacttaycaccgctgatacaatcattaaatctgcaagtagcatattctctggagtttgtgttacccttgtgttttccaggcttttttcagctaactgtgtcagcttctttagctgggcccaggtcggcggccccactttcttggtggatggcaacttcatctgttcttctgatatcaccatttcgttcaccctgcgagtcgatgatgtt

SEQ ID NO: 400885 - DNA, 533 bp, Homo sapiens
gatattgagtttcaatgacttgttcttttggcccagtgtaagccactwttccgttgctggaaccatcagtaaacaccgtcagagcattttctagaggtttttgtctggtaattttaggtaaaatccaagtagtcaatttcaaaaactggaagatttttgcttttgggtaatgattatcaataattcccacaaaatcagcaagaccaatctgccctgcaccagaattgataaagacttgtctatcctgttccttgtttaaagaaacaatgattttatctgggtcatttccacacaattttactattcatagtcttgcctgaccaattaatgtagccatttgatctaagtacaatgtaaaagtcttaactgtactgtgaggaaggaatgaccactccacaagatctgtattttgaacaataatgcctgttggagaatgtgcagtagcaaaaattaaaagttggagtggggctaagtgatctattctatttacttttgctgactgaaatttttcttcaactaattctatttcttta

SEQ ID NO: 400886 - DNA, 532 bp, Homo sapiens
gggctgtacagagagactggaatagtaatctctgcatgccactgttctaataagtctcggccccataaattaattggaatagaagtaatcataggctgaactgtactmtcttgattatcaggtcctagacaatgtaaaatcctggcactttgatacacttctgaggcagtgcccacaccaacaagtcctgtaacaggcttttgtttaggccaattttttggccattgatttaaggcaatgatagaaacatcagacccagtatccactaatccttcaaattgttttccatgaatagtaactgtacacacagatctattctctgagagctgactagcccaataaacagcttttccagcagtgttggtacttgcaaaccctcctgttctttctgttttgctatccccaattttaatataaggcaagagcagtaattgagcaattctatcacctggattggcactccagggaacagtacagctgatcactaactgaatttcccctttataatctgagtcaattaccccagtatgaa

SEQ ID NO: 400887 - DNA, 630 bp, Homo sapiens
tttgccccattgttatcctggattcctcccagcacacaagctaaccgcaaggctgactgtggacgtactcgggaatctctcatcggctgtactcaatgctcacgttcttagcgtaccttcaccctagagaagggccccacgctgggctccagatgaaggggtggtctgcccctccacacctgtgggtatttctagtcaggtgggatgagagacggagaaaagaaataagacacagagacaaagtatagagaaacatcagtgggtccaggggaccggcactcagcacaccaaggacatgcacaggcaccggcctctgagttccctcagtttttattgattatgattttcattatttcagcaaaaaggaatatactaggaaagcagggtgataataaggaggtcaacaaaaaacatgtgagcaaaagaatctatatcataattaagttcaagggaaggtactatgactggacgtgtacgtargccagatttatgtttctctccacccaaaaatctcagtggagtaaagaataacaaggcagcattgctgcaaacatgtcttgcctcccatcacagggcagcttttctccgatctcagacttaaacaaatgtacaatcgggtttacatcgaga

SEQ ID NO: 400888 - DNA, 561 bp, Homo sapiens
gtaaagaataacaaggcagcattgctgcaaacatgtcttgcctcccatcacagggcagcttttctccgatctcagacttaaacaaatgtacaatcgggtttacatcgagactttgagttcccaggggcaggcaggagacagtggccttcctccatctcaactgcaagaggctttcctcttttactaattcacctcaccacagaccctttatgggtatcgggctggggracagtcaggtctttctcatcccacgaggccatatttcagattatcacatggggagaaaccttggacaataccctgctttcaagggcagaggtccctgcggctttccacagtgtattgtgcccctggtttattgagactagagaatggcaatgacttttaccaagtatactgcttgtaaacatttggttaacaaggcacatcctgcacagccctagatccttcaaaccttgattttatacaacacatgtttttgtgaactccaagttgggtcaaagtggttggggcaaagtggctggggcaaagctacaaatgaacaacatctctgcaaagcaa

SEQ ID NO: 400889 - DNA, 561 bp, Homo sapiens
gtaaagaataacaaggcagcattgctgcaaacatgtcttgcctcccatcacagggcagcttttctccgatctcagacttaaacaaatgtacaatcgggtttacatcgagactttgagttcccaggggcaggcaggagacagtggccttcctccatctcaactgcaagaggctttcctcttttactaattcacctcaccacagaccctttatgggtatcgggctgggggacagtcaggtctttctcatcccacgaggccatatttcagattatcacatggggagaaaccttggacaataccctgctttcaagggcagaggtccctgcggctttccacagtgtattgtgcccctggtttattgagactagagaatggcaatgacttttaccaagtatactgcttgtaaacatttggttaacaaggcacrtcctgcacagccctagatccttcaaaccttgattttatacaacacatgtttttgtgaactccaagttgggtcaaagtggttggggcaaagtggctggggcaaagctacaaatgaacaacatctctgcaaagcaa

SEQ ID NO: 400890 - DNA, 561 bp, Homo sapiens
gtaaagaataacaaggcagcattgctgcaaacatgtcttgcctcccatcacagggcagcttttctccgatctcagacttaaacaaatgtacaatcgggtttacatcgagactttgagttcccaggggcaggcaggagacagtggccttcctccatctcaactgcaagaggctttcctcttttactaattcacctcaccacagaccctttatgggtatcgggctgggggacagtcaggtctttctcatcccacgaggccatatttcagattatcacatggggagaaaccttggacaataccctgctttcaagggcagaggtccctgcggctttccacagtgtattgtgcccctggtttattgagactagagaatggcaatgacttttaccaagtatactgcttgtaaacatttggttaacaaggcacatcctgcacagccctagatccytcaaaccttgattttatacaacacatgtttttgtgaactccaagttgggtcaaagtggttggggcaaagtggctggggcaaagctacaaatgaacaacatctctgcaaagcaa

SEQ ID NO: 400891 - DNA, 564 bp, Homo sapiens
tggtaaaagtattgtccagtcgtttttaagttggtggctgagcttggtaaggtgtgtttttaaaagaccatcagtctgttctacctttcctgaagattgaggactgtaagggatataaaggtttcactgaatactaagagcctgaaaaaatgcttggctgacttgattactaaaggcaggtctgctatcggactgtatagaggtgggaaggccaaactgaggaattatgtctgacagaagagaagaaatgaccgtggtggccttcttagaccctgtgggaaaggcctctacttatccagtgaaagtgtctacctagaccaagaggtattttagtttcctgactcggggcacgttgagtaaagctaatttgccagtcctgggtgggggcaaatccctgagcttgatgtgtagggaagggagggggcctgaagaatccctgaggagtagtagaatagcwgatggaacactgagaagttatttccttgaggatagatttccacgatggaaaggaaatgagaggttctaagaggcgggctagtggcttgtactatagcataccctgct

SEQ ID NO: 400892 - DNA, 551 bp, Homo sapiens
tggcagtaatcaaaattttgcttctggagctcacaggctgctacctagggtgccctcagaacagccacaagacccttgagtttttcttgcctgcagaaaattggtagagaagaaagtgtcaagtggctgcctcttcatggctaactctcctcctgcatatcccagagcagacactgttagctaatttctttatgaaaaaaaaaaccttaaccccaygactccagagacatattagctcctgattcatctttcaggcagtttcttgttgatggttaatcttggtgagggagaccctctcatttttgtcctctgactcttggcagagtagttgaggcctttatcattagcctgaaaatacctaaggaaaagactcacccttgactaggcagaattggccttgcatgtggataggcttccacaagttgcttgccaccaaaattaagctcttcagtcctttaaaagatgtaacactttaaggtgtcatcactaactgagacccagttgtgaaaaactgagctgagtgtttcaagttttaagtacaggtatggggc

SEQ ID NO: 400893 - DNA, 563 bp, Homo sapiens
tctgagactgcttctcagggctcactcagtatatctgagcgcgtctcgccagcgcactggttaaccgagcgattctgcgagattggcagccgcactccaacaatcaggagccacgctgtgccgcaagccccgcccccagctcaaatcctctttccttccccttcgccgctgccgcctggccaacgccacttaccctgtgcaacctcacagggccgggcyttcaacgtcagcactatggctctctcttctgtcgctttctctccttcaccacgcagtctgtgaacagcactttctacactcctcgccggcaagcaggctcgtgtcgagggtagcagattccactggcgattccactggtgctgtgagccatctgctggctttgcacctcttagaatctggtgtttttttgttttttgttttgttttgtttttaatccttttccgggtaaccagaaagggaagctcaattcccttaaccccgagaccactaaaggggcaatacaaaaagaggaaataaatacatttttaagcatacaagagcttcacaatccagtagatcatttt

SEQ ID NO: 400894 - DNA, 530 bp, Homo sapiens
agctctggcacaagacctctgcctccatctgccatgagccaaaacacagcctctgcagcaattggcccagaatagtcagcacktaatcaatgactaccagtatccctcatgttacctccactttcaactcaggaccagcctgaggaaaccaaatttgctcccctaaccaatctcaaaggatacctggcttcaagtgcgcctccccccagcttctccaggccaacagcctccatcagggcccacctgaggcttcccttgccatcaagaagcttcaccactccatatgagtctctgctgaaatgcgagtgatggtggctgactcccctgccctggcacgctctgagtaaatccctccattcgttcccatgtgggctgccgttgggcagtcattcagcagtgcatggtaagcacagactggctgctcagtgctgctgtaggtgctggtgccaagtgtagcatcgctgagactcaactgatctcgtacccactgctcttgcacttcagggcaaattgtacagaggcagcgtcca

SEQ ID NO: 400895 - DNA, 530 bp, Homo sapiens
agctctggcacaagacctctgcctccatctgccatgagccaaaacacagcctctgcagcaattggcccagaatagtcagcacgtaatcaatgactaccagtatccctcatgttacctccactttcaactcaggaccagcctgaggaaaccaaatttgctcccctaaccaatctcaaaggatacctggcttcaagtgsgcctccccccagcttctccaggccaacagcctccatcagggcccacctgaggcttcccttgccatcaagaagcttcaccactccatatgagtctctgctgaaatgcgagtgatggtggctgactcccctgccctggcacgctctgagtaaatccctccattcgttcccatgtgggctgccgttgggcagtcattcagcagtgcatggtaagcacagactggctgctcagtgctgctgtaggtgctggtgccaagtgtagcatcgctgagactcaactgatctcgtacccactgctcttgcacttcagggcaaattgtacagaggcagcgtcca

SEQ ID NO: 400896 - DNA, 495 bp, Homo sapiens
ctaagcgtcctttggctcttagctgatttaagatggcttgggctggggacatgggtgattcaccttttctgcgtgtgcctctgcctctccaggaggctagcctgaggatgttctcatagcgatggcagaggctcccaggcaaaaaggcaagtgcaagcatgcaagtgctttctagactgctgcttttatcawgcatgctaaagttctatattagcagtcaccaaaacaagtcatatggctgatcacatagagagagagagagggctgcacagttgcacggcaaagggtaagagtgcaagagatttgaaaaattgagactatttttgtaacctaccacagtataaaccttccattttttattcaaccattccccatgttagctgctattttggatcttttcagagtgttataagttattattagcaagagtatatattcttacatatctatctttatgcatttgcgtttattttagtggaatgtttaccaaagtga

SEQ ID NO: 400897 - DNA, 606 bp, Homo sapiens
atatttctgaagtttcctgaagagtatttttttataatcatgaatgggtggtgaagtttgtcaatttttttttggaactactaatatgattatgtaacttttgttttgtagccagttgatttaatatattaattgattttcaaatgttgagccaaccttgctktcctgtgataaatccaactaggtcatgtaatataagccttttcataaactgttgaatttgatttgctaatattttgttgagaatttttgcattaatattcatgagagatattagtatgtagtcttctttcttgaaatgtctttgcctggttttgatattaagataacatcagcctcaagtaatgagttagtaaatgtttcttttttttatttttctgaaaaaaagattggagggaattgatgcaatttctttcttaaatatttagtagaattcagcaggaaacctatctgggcctggtgctttatgttttgaaaggttataaactattatttcaatttctctaacagatattgacccattctgacatttttatgttttcttgtgcaattttcaacagattatgtctcttaagatattatttcagttcatctaagttatcaaat

SEQ ID NO: 400898 - DNA, 624 bp, Homo sapiens
ctattacattgatggcattatgctgatttgatcctgtgagaaagaaatagcaaacacactggactgacttattggtgaaacatttgagtaccagaggatgggaaataaattggacaaaaattcagggaccttctacctcagtaaaatttctaggggtccagtggtgtggggactgttgagatattccttctaaggtgaaggataagttgctgcgtttggcccctcctacaaccaagaaaaaggcacaatgcctagtgggcctawttggatttgggaggcaacatattcctaatttgggtgtgttaatctggcccatttattgagtgacccaagaggctgacagttttgagtggggtccagaacaggagaaggctctgcaacaggtccaggctgttgtgcaagctgctctgtcatttaggccatatgacccagcatatccaatggtgcttaaggtgtcagtggcagatagggatgctgtttggagactttttcaggcactcataggtgaatcaaagtggaggcctctaggatttgggaacaaggccattttctgcagatagctactctccttttgagagacagctcttggcctgttactgggctttggtggaaactgaacgttta

SEQ ID NO: 400899 - DNA, 609 bp, Homo sapiens
aagaaatagatgacgtgatatcatatatatacagctctagataacgaaaggaatatgtgtatacatatatatgtgtatatgttgatttatggattgtcttttctgttccattaacctaagtgtctacccttatgaaaataagacttgattgcagtagctttatacttagtcataaaattaaagtttaaattatccaattatagtcatcaattttaataattttgattattttagggcattttaatttttgtatacatttttcaaatcggtaaaatatctacagaaatctgctgagattttcattgrgactacatagaaatgattggcaaattttggggaacattgtcatttaaaaaattgagttttcttatataagaaaataatttatctctctacttattcatatctttagtctgagtaagattattaatttccaatatatagacattgcacatatatggttaactttatgtttaaagctattatagtttgatgctactgtaaattttattcctttgttaattttattttctaattgttcattgctggaacatagacaaacaagtgattgttttatattgaccttgtagtctattatgttgcttaatt

SEQ ID NO: 400900 - DNA, 569 bp, Homo sapiens
tgtcaagaaatagacttttagaaaggcatggcagtgtcacaaccctcagtgatacccgtgtactgaaggcaggatctcaaagtagaaaatgctgtctgaaatgggacttcctgatagtggtggtgtggagaagggactcttgaaacaacaggagccaagtccactgccaacccctggtctgcaggagaaaggctggcayggtgactggaacacgtgtccaccatgaacctgcctcccaggatcctgagcactgtgttcccagaagccaagaaaacagacaatcaacatggatagtatccaatctctatcaccaaaaaattacaaagtgaaaggtcagggggctgaggacagccacgccaacaggaagtcttgatgacccctggcccatgtctcagacctgagcagccatcactgtcctcatctaccagctggaggaaaggccagagccccatgaggaaggacaaaggtggagtcctggggaccaaagacaggcgtcacaagtctcctctcactgtacttcctccgggagctgtgtttctctccatctgctgtccctggaggctctgtgg

SEQ ID NO: 400901 - DNA, 569 bp, Homo sapiens
tgtcaagaaatagacttttagaaaggcatggcagtgtcacaaccctcagtgatacccgtgtactgaaggcaggatctcaaagtagaaaatgctgtctgaaatgggacttcctgatagtggtggtgtggagaagggactcttgaaacaacaggagccaagtccactgccaacccctggtctgcaggagaaaggctggcacggtgactggaacacgtgtccaccatgaacctgcctcccaggatcctgagcacwgtgttcccagaagccaagaaaacagacaatcaacatggatagtatccaatctctatcaccaaaaaattacaaagtgaaaggtcagggggctgaggacagccacgccaacaggaagtcttgatgacccctggcccatgtctcagacctgagcagccatcactgtcctcatctaccagctggaggaaaggccagagccccatgaggaaggacaaaggtggagtcctggggaccaaagacaggcgtcacaagtctcctctcactgtacttcctccgggagctgtgtttctctccatctgctgtccctggaggctctgtgg

SEQ ID NO: 400902 - DNA, 603 bp, Homo sapiens
catataatcttttctcttatcctcccaatgctaaggccttgcaagacccgagtgcaatcccacaatcagcatattgaccttgagcatgacacagagcacttccgtcaccactactgtgatagtcgcaccacttcccttcctctcacacccccttcttagcccctggctatgacaaatctgttttccatttctataactttgccatttcatgaatgttatgtgaatggaatcctacattctcttgggttggctcttctgactcagcgtaatctctgcagctccctccaggttgctgcagatatccgatatccttattaccgaggagtattccatggcattggtgtaccccaggttgtttagcccttaacctattaatgggcttctgatttgtttcccaatatttgtctatagggartaaaatttgtgaacattagttgtgtgaacattagtttttgtttttccagaatacattccagaaatgcaattgctgggttgcctgataactgcatgtatacttttttaaggagatgccacactctttccagggtggctgtgctgctttacagtcccactggtaatgtatgagtgatccagtagatttta

SEQ ID NO: 400903 - DNA, 603 bp, Homo sapiens
catataatcttttctcttatcctcccaatgctaaggccttgcaagacccgagtgcaatcccacaatcagcatattgaccttgagcatgacacagagcacttccgtcaccactactgtgatagtcgcaccacttcccttcctctcacacccccttcttagcccctggctatgacaaatctgttttccatttctataactttgccatttcatgaatgttatgtgaatggaatcctacattctcttgggttggctcttctgactcagcgtaatctctgcagctccctccaggttgctgcagatatccgatatccttattaccgaggagtattccatggcattggtgtaccccaggttgtttagcccttaacctattaatgggcttctgatttgtttcccaatatttgtctatagggaatraaatttgtgaacattagttgtgtgaacattagtttttgtttttccagaatacattccagaaatgcaattgctgggttgcctgataactgcatgtatacttttttaaggagatgccacactctttccagggtggctgtgctgctttacagtcccactggtaatgtatgagtgatccagtagatttta

SEQ ID NO: 400904 - DNA, 361 bp, Homo sapiens
acgtacattgtaatcgaactatgtagattacttgcaacatctactaaatggaggaagaacaattcatgaattaaaggtgtttgtaaaaaacagagaactacagtggatattacactggactgaagtagccatccacgactcakcttccaggcccagctcttccacctattaggtgaatttgcctattacataaacttgcttcctgtgtgagtccattcatgctgctataaccaaatgccacagattggggaacttacagagaaaaggtatttactttctcacatttctagaggttgggaagtcccagatcaaggcattagcatgctgggtgtctggtgaagacccgtttcacataggcagt

SEQ ID NO: 400905 - DNA, 553 bp, Homo sapiens
atacattctttgttaccatcttgtttgcaaagcaggaattgtcccagagctattacgcctcctggttaaattggagagttcaatagtttctctgatccaacatcctaaaggcatccccttggcrgcggatgtgctgcaaatgttccctaatgagttaacatctaagttatgctttatcaattagtcttgctatacgtgaccctcttgtgagtataaaaaatgttttccaaattcactggtacatctaaaggaagattgtttttgttttgtggatgcaagatgtcagcggtgtgaaagggggaaatcacatatcagtttaactctgtaatggttttattttcttaatctgctatttgaagaaatcattttaaaaaaaaacctacactaacttgaaagtctatattagatgttattattcaatgtgacccttgggtgcatttgccaaaaataagtttgattttctacatttgcaaatacgctaaaagtaggaaaattaaaccatccatcttttattataaactttcattcactagacatgtgtaataggcaaggt

SEQ ID NO: 400906 - DNA, 599 bp, Homo sapiens
cttcgcattgcaaatggtcaaaatggtatataaattaaatgagtgttggtgttaacacatcagagagctacatagcctttgttgatagrcagtgtggcagaagctttgaggagtgggtgggagctcacagcaatggcaacaacaacagtgacaccgtaacacagaaccctaaagcacgggaagagcagccttgtattatattgctgtgggcacctgggacctggctctgggtcagttttggaagaagagcgggtgactcttgacttttggacttcacccaagggaggagagaatcagcttggaatgaaaggttgtccacaacctcattacaagtgtattcatcactggtttcctacacacaattttacttaagcaaaagtgctctgttcagtgtcttctgaggccactttctgcttcacctcaagcctcccagtctcctgtccacaggcttcagtcttaactgtgggaaatccagtgcaaaattcttcttctatggtggcctcccagaacataatccgctcacatggctatagtgttttcttcctctcaaacatgatacttaagtctctaccgtatattccattgcatcccactatttc

SEQ ID NO: 400907 - DNA, 488 bp, Homo sapiens
tcaccctttaaatctaagaaaatgtccgtctatgaaatgtaaagtattttaaaactgccagctgcctctctgtctctaccaatgaactttagccatttcattactgtcaaatgcacacagaggagcataaaaggttggttttagaatagctgcttgaggattcttagatataaaggagggctttttaaaatttttcaccatttttaaacaaaccatgggtactcaggttgaattcagtggacatcttctagagccacaggacaactactaagctctcgaaaatgagggacagagctgcctgttagcttcgcattgcaaatggtcaaaatggtatataaattaaatgagtgttggtgttaacacatcagagagctacatagcctttgttgataggcagtktggcagaagctttgaggagtgggtgggagctcacagcaatggcaacaacaacagtgacaccgtaacacagaaccctaaagcacgggaag

SEQ ID NO: 400908 - DNA, 502 bp, Homo sapiens
ccaaattataaacaggacctaaagccatgccaggtaaaagataagccacacacccctatggttaaagaataaactatgttctaagtgccacaaggattttctttttctctagcagctaaacaaacaytgacctcaagataagcaatattaaaacaattatcatccaccactagacatattaactagccctctgtttcacaaaccataactgcagctttgattggactaaagactgatttcagtaattttttactgataacaagatggctgaccatggactggtcctagccagtttacagagggtgtgcactgagtgctttcatgtctcaaaaagactttttgacttatggtgcctaattgtaatacatgtaaatattaattgtccaccccaacttgagcatgggtcatatgtaacatgcaagtttgttaaataggcatgcatcaggacccccttcatgaatattcgtggcccttcctgtgacctcttgaatatgtacattta

SEQ ID NO: 400909 - DNA, 574 bp, Homo sapiens
ccatctgcaaactaagaactcctgggttgctggatcacagtgatggcaaacacgtgcacaatgcttactaactaccaagtgcattttcagtattttaaatatatatgaatgaatcaaatcctcataatgattctaagagtaggtatattcattttccrttgcttccatacaaattagcatatgcttggcagcttaaaacaacacagatttattgttttacagttctgtaggtcagtagcttgagtggggcctcactaggttaagatcaaaatgtctgcagggctgagtttctttctggaggctctagggaagaatccatttccttgctcattcatgtttcacagaattgagtttctcgcagttgtgggactgaggtctccatatgcttgctggttatctgctgaaggctgttctcaacttctagaggctacagtcctcggccaaggcgctcttcttccatgttcatgctttgaacctctcctgcctcttcttttcattgcatctttctgccttactcttctgctttcctcttgcattttgaaggaattgtgtaattagattgggcccacagagg

SEQ ID NO: 400910 - DNA, 574 bp, Homo sapiens
ccatctgcaaactaagaactcctgggttgctggatcacagtgatggcaaacacgtgcacaatgcttactaactaccaagtgcattttcagtattttaaatatatatgaatgaatcaaatcctcataatgattctaagagtaggtatattcattttccattgcttccatacaaattagcatatgcttggcagcttaaaacaacacagatttattgttttacagttctgtaggtcagtagcttgagtggggcctcactaggttaagatcaaaatgtctgcagggctgagtttctttctggaggctctagggaagaatccatttccttgctcattcatgtttcacagrattgagtttctcgcagttgtgggactgaggtctccatatgcttgctggttatctgctgaaggctgttctcaacttctagaggctacagtcctcggccaaggcgctcttcttccatgttcatgctttgaacctctcctgcctcttcttttcattgcatctttctgccttactcttctgctttcctcttgcattttgaaggaattgtgtaattagattgggcccacagagg

SEQ ID NO: 400911 - DNA, 574 bp, Homo sapiens
ccatctgcaaactaagaactcctgggttgctggatcacagtgatggcaaacacgtgcacaatgcttactaactaccaagtgcattttcagtattttaaatatatatgaatgaatcaaatcctcataatgattctaagagtaggtatattcattttccattgcttccatacaaattagcatatgcttggcagcttaaaacaacacagatttattgttttacagttctgtaggtcagtagcttgagtggggcctcactaggttaagatcaaaatgtctgcagggctgagtttctttctggaggctctagggaagaatccatttccttgctcattcatgtttcacagaattgagtttctcgcagttgtgggactgaggtctccatrtgcttgctggttatctgctgaaggctgttctcaacttctagaggctacagtcctcggccaaggcgctcttcttccatgttcatgctttgaacctctcctgcctcttcttttcattgcatctttctgccttactcttctgctttcctcttgcattttgaaggaattgtgtaattagattgggcccacagagg

SEQ ID NO: 400912 - DNA, 586 bp, Homo sapiens
cacttagtttggctacacaacaaggtatgacctgtttcagaaacatttgcattagaatacgtttgtaattaagaaattaaagacattctcctctggcagatagacttgaaacagtggttttattagaggagttatttttgctttctaattacttcctattagcagccacatattccatctatactgtgagttgccccagtgagttctaargcaacagagactcacttcattcatccacctgacccaggacctatgagggagcatgaatgaatctctccaccctcctgcttttatcccctgtctccatcctatagatgtcccttggagtttcataattcagtgtctcaaacccagatggtgaagctcaggagggaggcagccttatttgtttggttcctcaccatgtcttcagcactaagtacagagcttatcctggaaaagggttgtaggcagctcgtgacatagctcccagtggtgcccagatttctcatccacagaaactgtgggttccaatacaataaagggatatggatatggattttaagccaccatggtataagttacttgttgtgcagcaacaggtaac

SEQ ID NO: 400913 - DNA, 531 bp, Homo sapiens
agatgaaatgagataatgcatgtaaagtgtgtcgtataatacttggcatatgttggaaacctaaaaacactcattttcttcttgatatttatctttattttctatttctactccctaatgcatttgtctgttgtacttcctaatgctcatgtccttaatgtctccttggatgatatgtgaagctaatagtttaatggcttagagaagtgattttcaagctgtgagccatgggagctctgtggaggttgggggtggaggtgggggcttggagggaaggaaagccatggggctccagtcctttcattaacaagtttgcttgtctccacatatgccaatgattttgttgagaaaaatgttttcctgggcttcatgggccatttaaattgtgaacccccagggacacagtgcttagcccaagccatcagtgcttgaaaataggcatttctgtcatcgagwttctgtatgttgagatatattttgagataggcttaagggtgaggacatttggctggagtcagcaataagttgcaa

SEQ ID NO: 400914 - DNA, 598 bp, Homo sapiens
tagatgtcaaaatccagagatgcccaagtcccttatataaaatggcataggaggctggatgcggtgactcacacctgtaatcctagcaccttgggaggctgaggctggcagatcacttgaggtcaggagttcaagaccagcctggccaaaatggttgaacttcgtctctactaaaaatacaaaaattagccaggcatggtggtgggcgcctgtaatcccagctactcgagaggctgtgcctggagaattgcttgaacccgggaggcgtaggttgcagtgagtcgagatcayaccactgcactccagcctaggagacagagctaaacactctctcaatcaatcaatcaatcaatcaatcaatcaataaaatatataaaaaataaaacgacatagtatttgcgtataacctatgcacatcctcctaaccactccaaattatctctagattacttataatacttaatacaatttaaatgctatataaataattgttatgttgtattgtttagggactagtgtcaaggaaaaatgtctgtacacactcagtacagacataaccattaatttttttttttctggttattcttgacctgtggtt

SEQ ID NO: 400915 - DNA, 598 bp, Homo sapiens
tagatgtcaaaatccagagatgcccaagtcccttatataaaatggcataggaggctggatgcggtgactcacacctgtaatcctagcaccttgggaggctgaggctggcagatcacttgaggtcaggagttcaagaccagcctggccaaaatggttgaacttcgtctctactaaaaatacaaaaattagccaggcatggtggtgggcgcctgtaatcccagctactcgagaggctgtgcctggagaattgcttgaacccgggaggcgtaggttgcagtgagtcgagatcataccactgcactccagcctaggagacagagctaaacactctctcaatcaatcaatcaatcaatcaatcaatcaataaaatatataaaaaataaaacgacatagtatttgygtataacctatgcacatcctcctaaccactccaaattatctctagattacttataatacttaatacaatttaaatgctatataaataattgttatgttgtattgtttagggactagtgtcaaggaaaaatgtctgtacacactcagtacagacataaccattaatttttttttttctggttattcttgacctgtggtt

SEQ ID NO: 400916 - DNA, 592 bp, Homo sapiens
tctggaaaaggtctcttacctttctgcaaagtataaaaccagcaaagccaaaggaatgttatgttacccaacctggaaatacatccaatagtgtggcttcttctcaggggcaggttaaattgcaaaagtctacaatttcagcaaaatttggatatgtcccaatataaatgctttgtattttcaggatggaagaagggcccaactcttctgtctgggcagctattctgggagtttggagaggacaaactttctaatgaaggaggagagcctgtacaggctaaagtcaaagggataaagtgccagaaaccccaaaggattckgaaggtccttcagttcagacttccataaatgtgaaataaagattcgtaatcctttcccagctaacataaattcaagaagaaaggctttccagaaataatctcatagacttctggaaaaaggaatccctttacttatttattcaaatgtttacttagtatttgccatgtgctgggtaccattctaggtactggggatatagcactgaacaaaataggattcctgctttatgaacttgtattctactatgtgatgaagaatctttgaaattttg

SEQ ID NO: 400917 - DNA, 608 bp, Homo sapiens
aattttttattataaaccactgcgttttggggtggtttgttttgtaatagatatactttttatttgaaaatttttttgaaggtggcaaatttctattaacaatgtccattggtggatgaacaaaaagataccatatacctttctgatcaatattaaatatatatatttaaatataaaaatgmttttctaattagacagcaaatagtatataatattgggtggcacatataactgagttaaaattaacagagttaatactattttctttccattatatagctcaaaaataaagaaaacctattatcaataacagatactatttgtttaacattttctttttctttgtcatcctcatttgcacttttcctatgttcctaattcagtcttctttataactgtatgatgctgatgttattatctctgttttgctaaagacaaaaccgaggtctatagtggttaagtaatttattcaatattacacaaccaggatttaaatcaatgtcttctcattttcaattccaggctgttttacaggaaagtccagccagacccagataatcaaccaaaatccaaatctgaaagtaccattcccagttctgaattctgag

SEQ ID NO: 400918 - DNA, 552 bp, Homo sapiens
atttgccatgtgctgggtaccattctaggtactggggatatagcactgaacaaaataggattcctgctttatgaacttgtattctactatgtgatgaagaatctttgaaattttgttgttcccttccttaatytctcctgacaaagcaagctatggggctccaattacctttgctactaaaggttttcatgagtcacaattttcaggacatgttgccaaaagaaacaaagttgagactgatgtcatgtcaaagataacacatcaaagattactttatgattttatcttattatcaataaaatgataatgccatctatttatttctgaacaagattaacatttatatttctgaatagataatttggattagcttccctatttttcatgaactagacattaatttgtacaaaaaaagaaatatattatggtaaagatgttttaaatattctatgtgaagacaatcaagtttcaattcaatgaaataaactttatgcaaaacagtatgtgtgtgtacatatttgcattttcctaaggagggaacccatagattcc

SEQ ID NO: 400919 - DNA, 552 bp, Homo sapiens
atttgccatgtgctgggtaccattctaggtactggggatatagcactgaacaaaataggattcctgctttatgaacttgtattctactatgtgatgaagaatctttgaaattttgttgttcccttccttaatctctcctgacaaagcaagctatggggctccaattacctttgctactaaaggttttcatgagtcacaattttcaggacatgttgccaaaagaaacaaagttgagactgatgtcatgtcaaagataacacatcaaagattactttatgattttatcttattatcaataaaatgataatgccatctatttatttctgaacaagattaacatttatatttctgaatagataatwtggattagcttccctatttttcatgaactagacattaatttgtacaaaaaaagaaatatattatggtaaagatgttttaaatattctatgtgaagacaatcaagtttcaattcaatgaaataaactttatgcaaaacagtatgtgtgtgtacatatttgcattttcctaaggagggaacccatagattcc

SEQ ID NO: 400920 - DNA, 581 bp, Homo sapiens
tctcataatgccagccccgtgctcttggctacttggtctcataaattcaaactccaatatagtcccaagtttaaaactaagacaagccacccaggtcccaccccagggaaacatttctataataatcaggcaacctacagtcatcaactatgttagagtctatacagaaccacatcaactgaggtacacccttcccagggctatttttatttggtgggagatataaagcccttgccactgtccttgatgtggaacaataggacaagccatacttgcagggtttgccaacactctgagctcagttgaactcaattcaacctaatcttctgtttaatcctgcttcttcttcctgctattgatccttaataaatagcttgcttccttccaaactttttctcaatgcctgtttctggagaacccaaacttctattaaytctgtctcttttgaaaatattaaaaggttagcatttatttatgctgtctttcagaattactgcctctccaaaaccccaggtggccagcatcttcatgctgccaccagttgccccaccaccctaggcagatcacactgcagtttacac

SEQ ID NO: 400921 - DNA, 675 bp, Homo sapiens
aagtttgttgatatcatagacagttaacaaatgtcatggtttgaatgttyatggccccctcaaattcatgttcgaaattctaaccctcaaggtgatggtattaggaggtcaggcctttggaaggttattaggtcatgagggtggactctacatgaatgggattagtaccatgataaaagaggccccacaaagctttctcacctcatccaccatatgaggacctggcaaaaagacgagtgtctaggaatcagaaagtgggccctcaccagccctgaatctgctgacaccatgctcttaaatttcccagactccagaactgtgagaaataaatttctgttgcttataagccagtcagtttatggtcttttatagcagcccaaataagcttaaataagtgaagtccgtaaattaacctccactatgttggctttcctaataagtcattgttctggattacacactctgtcaatgttggctccgtgtctttcctgctcttttctttctttctttttttttttaatggatcatagttattctcttttccacctgtcatgacaagtacatgattcaagcaatatttacgaagtacctgctgcgttcgtcgtctttaatgtaagttatgttcttcaatactgccaacaactctacatggcacacactactataaagtgaaat

SEQ ID NO: 400922 - DNA, 675 bp, Homo sapiens
aagtttgttgatatcatagacagttaacaaatgtcatggtttgaatgtttatggccccctcaaattcatgttcgaaattctaaccctcaaggtgatggtattaggaggtcaggcctttggaaggttattaggtcatgagggtggactctacatgaatgggattagtaccatgataaaagaggccccacaaagctttctcacctcatccaccatatgaggacmtggcaaaaagacgagtgtctaggaatcagaaagtgggccctcaccagccctgaatctgctgacaccatgctcttaaatttcccagactccagaactgtgagaaataaatttctgttgcttataagccagtcagtttatggtcttttatagcagcccaaataagcttaaataagtgaagtccgtaaattaacctccactatgttggctttcctaataagtcattgttctggattacacactctgtcaatgttggctccgtgtctttcctgctcttttctttctttctttttttttttaatggatcatagttattctcttttccacctgtcatgacaagtacatgattcaagcaatatttacgaagtacctgctgcgttcgtcgtctttaatgtaagttatgttcttcaatactgccaacaactctacatggcacacactactataaagtgaaat

SEQ ID NO: 400923 - DNA, 645 bp, Homo sapiens
tttattccttttatatttcttatggataatgtaccttctgatcctgatcaaaagctttaaagatagaaattctgtctctgttattttattcaggctcttattcttagcagagcacaggaaacatagtaggcacgcaagatgtgacttgatgatccagaatgagacgatacattcttttcctaggacacatgcctattgaaaggaaaggaaggacttcattctttcattcttttttttttttttttcttttttgaggcggaatctcactctgtcaccaggctggagtgcagtgttgccatttcagctcactgcaacctctgcctcctgggttcaagtgattctcctgcctcctgagtagctgagactacagatgtgtgccaccacacctgcctaatttttgtatatgagatgatacattcttaacaggagmaagttaaatctgatatccaagttctcattttatgtttttcatgtacaacagtcataattttgtaaatgtttaaattttaatgtggacttgtggatagggtgttaacagagttctagaaatttccccattttctcccagaagtgctctggctttattggagggaacagaagaatccctatgtgaagttggaccattaaaatcaaattgtgacctgg

SEQ ID NO: 400924 - DNA, 506 bp, Homo sapiens
gacaataaaaaattctataattagattatgggtacagttgtacaatttagtgactatactaaaaaaaattatgatatttgaagtatatcttaagatgttaagaaaatactcaagtgggcarctaagaaaccattctgtattttccaaaagtttctgttttgagcccctattctgcccaaagacagtgtactctgattaactcatttttttcaggactaaattcaggcaatttaggattcctcccctctctcttttctccctaaaatgatatctatgtcctcaaggctttacacagattgttggcaagagaagactcttggtccttgattagtgtgctcatgccctcacccgtggaagcctgcttcacaccatcaagtccttgggttaaaccattactccagctgacctcaactggccccaggtcattgcatccttgcttcattcttccctgccttccctcaccctagagcaaaacccagcagatatactagctttccctaccagca

SEQ ID NO: 400925 - DNA, 520 bp, Homo sapiens
agggggaggagaagagccccttctcaactctcaccagtatctaacttctctggtccttttcttgagctggggtagggagggttgttgggggaagagtgaaagtaaaaactggttcaaaagtatccattcaatatctttcttccatgcactctatatacctgggccaaggctttcgaaattagtagtcttaagtatgatgcctcctttctcatacctggtgatatgatttggctgtgtccccacccaaatctcatcttgaattgtagttcccataatccccacatgtcatgggagggacctggtaggaggtaattgaattagaggggtgkttatccccatgctgctgttcttgtgacagtgagtgagttctcatgagatctgatggtttttaaggggcttttcccagtttgcttggcacttcttgctgccgccacgggaagaaggatgtgtttgctttcccttctgccatgattgtaagtttcctgaggcctccccagccatgctgaactgtgagtcaatt

SEQ ID NO: 400926 - DNA, 520 bp, Homo sapiens
agggggaggagaagagccccttctcaactctcaccagtatctaacttctctggtccttttcttgagctggggtagggagggttgttgggggaagagtgaaagtaaaaactggttcaaaagtatccattcaatatctttcttccatgcactctatatacctgggccaaggctttcgaaattagtagtcttaagtatgatgcctcctttctcatacctggtgatatgatttggctgtgtccccacccaaatctcatcttgaattgtagttcccataatccccacatgtcatgggagggacctggtaggaggtaattgaattagaggggtggttatccccatgctgctgttcttgtgacagtgagtgagttctcatgagatctgatggtttttaaggggcttttcccagtttgcttggcacttcttgctgccrccacgggaagaaggatgtgtttgctttcccttctgccatgattgtaagtttcctgaggcctccccagccatgctgaactgtgagtcaatt

SEQ ID NO: 400927 - DNA, 530 bp, Homo sapiens
attccaaatctcatggccccaggaggctctagaaaatataacagaaacaataggaaacaatcttcaatctggcaacctagtatagctattaagaagtgctctgccacatccacgttgcctgaaagagcaaaygcaaatcaatgtccagaagagaggatccctccaatttacacccttccttccaaatccttcctcactactacctccctgccctttcttctgattattagacttatacatggaattttctaaagtgacactgaagttaattctgacttcatctagaaaaagttctaaagatatttttttagtgatcctttctaagaacattagaaatgccatcccgtgatgaaccaatggtgtcatcctactcagcctttttcagtagcaccaagccgtgctttatggaaaatgatggcttccctttgtgacatcaactgcaaaatgttaagggcatatattaatgctatatatattcctaaatttttcaagaacatattttggaattatgttttggaaaattatctaaa

SEQ ID NO: 400928 - DNA, 630 bp, Homo sapiens
gcttgtcatgcataagactatgaaattttctacttttaagcaagatgcagaatttcaccaagaatatagggtgttagagaatatttcagtcatcctaagagatactcttctaggaaaaaaaagggaaacaaatcaaggacaaactgagagtgggaggggtgagaatggaggagatttgaaatagtttctgaattcttttactcccatgagtccagtgttctcctttcatttttctgcaagcctccccaccccaagatacagtgtaattaatgctgcttcaaatagaatgaactgtgcatactacaagtgtttagaaagaagagacctcaggtgggttagtagattgaggagtttcmtggaagaggtaggatttcaaccagttaaagatagtaaaaggtttcaaaagacatggagacgtgggcaaaatattcttcagcatggaagacttaaagttgattcacacaaagcaaatttactatttacaattcctccttcattttaatctttccataggtttgtgtttctgccctccttgatatggaaggagaatcaggacacagagataatgaatttattaagctgagtttttaatccctaactgcagtttatttagccaagaaaataaatgtt

SEQ ID NO: 400929 - DNA, 568 bp, Homo sapiens
ctggggaagggaaagtgtagatgccaacatggtttccttctttgaaggtggatgttggtgtctttcactgagattaggagtataggagacaaagcaagacagttttaaacatgttgagtttcctgaggtggaggcgaagggaatgagagtgttgtaactgaaaatatttcatcaataggatagaataaaggctagaaatcatcacttataattatactgttcaatgttgtaatggaccttggttcttagttgggtttaaggagaaatttctataaaacatcatcagccaagtgtctataattagcacatgcagatttgatgatactcatttgctctctgtagtgctgagaacaacaaatactgtaaacattatatggtggttcccagatctttccctttacctcagtctctggacatgtctatagtccctgtagcctgcatatatttgcaaatcccttgtgcacttctgaataarctcaatatttttggagactctctgttatttaggttgatgtatcttgtgtcataagtgggatctgatgtacaacaccttcggaaggaattgatg

SEQ ID NO: 400930 - DNA, 495 bp, Homo sapiens
attggttagttagaaaccgaaagattttgaaagtaaatgctgtgggaatttagcaaacaagtgggttccaaggggttggaataaatgcaaagcctttggagttcactaaagtgtgaatactttgagggagggaacgacatcctattcacattgatatgcacatcactctgaagaaagtacccagtcccaaagacagtcttcattaaaacttgtttcatatgaacaagctatatagctctccgtacctcaggaacagtgcaagatagccaggaagacacagagagtaccccaatcaggggaacaaggcagagacagcargtaatgttcacagaatattaagcagagcaaatggactccagaagatccttatagggtagcagcaagggatagaagtgagaagggaggggcgggtctggggaggcaggaggttgagttgcagaatccacctccgtgggatttagccagacagttaattttgtagactacacacttgaa

SEQ ID NO: 400931 - DNA, 582 bp, Homo sapiens
actgaccttgtagttggtagaaaackaaacaaaaataagtcaaagcctgcttgaacgatgtttttcctacgtcatttcaatgaaatgtatataccaaggaattaacccctaaccttctttgagcctaaaagagggagaagaaaagggtaaaagagacttattttacattgctatggaaactactttgccccaaatttggtcctcagccttcataagattatttatcaaggacaaaaggaaaatcttaaaggtcttctccaaaatcattggtaagaagctttaacatatgaacaggtgaacttcacttgtctaattttaccagaaatataatttagatccaactgtctttgtataaactgatgaatttatattactgtgttttactgtcatgactaaacttttaaaatgaacgctagaagatttttgtttgtgtgtgtatgtgttcatgtgcatttacccatgtcgtattttgtgtctacatggtaaaatctggcttagtcagccagaaatcccttaagaaattccattcaaactggcttaagataaatgagcactcttataaattaatacttgaaacagcaa

SEQ ID NO: 400932 - DNA, 507 bp, Homo sapiens
ggttgaatgcacctgaataaaccaagataatcttcctctttcaagatccttaaccttaatcatatctacaaactcctttttgccataaaaggtaacatatttacaggttcccataattaggatatagaaactattagtgggccattattctgccttccacagacatacctgaaagagtgaggccagaggtcatcttttatatcaaatagtgttgaatccttaagttttaaaaattatatatataaygggtgcagcacaccaacatggcacatgtatacatatgtaacaaacctgcacattgtgacatgtaccctagaacttaaagtataataataaaaaacaaaagaaattattaatatttcaatgtggataaaagaaaatatgcataaagtttttcttacccccatttgtttaactccagcattcatagtttgtgatttaatatttaggattaaaaaaatggaatgagtttgttttattcaaatccatttcaatacatccaagcaa

SEQ ID NO: 400933 - DNA, 571 bp, Homo sapiens
aacctgactgttagaaggaaaactagcaaacagaaaggaataacatcaacatcaacaaaaaggtcatctacaccaaaacccaatttgtaggtcaccaacatcaaagaccaaaggtagataaaaccacaaagatgggaagaaaccagagcagaaaagctgaaaattctaaaaatcgagtgcctcttctcctccaaaggatctcagctcctcaccagcaacagaacaaagctggacagagaatgactttgacgagttgacagaagtaggcttcagaaggtcggtaataacaaacttctctgagctaaaggaggatgttcaaacccatcacaaagaagctaaaarccttgaaaaaagattagacgaatagctaactagaataaacagtgtagagaagaccttaaatgacctgatggagttgaaaaccatggcacaagaaccttgtgacacatgcacgagcttcaatagctgatttgatcaagtggaagaaagggtatcagtgattgaagatcaaattaataaaatacaatgagaagaaaagattagaggaaaaagagcaaagagaaacaaacaa

SEQ ID NO: 400934 - DNA, 581 bp, Homo sapiens
aactcgctcaatagcagcatcacgttccaacatccttggaatctattgatgtggtttgctgcaggtcagttggatttaggccagatacatagctgatatccattggaagagctcctatgataggctttgtggggccaaggcaagcactgtacccatccatcaatatttctctttctagtgcatcatgtccatcctcacacaaagattattgtaatatcttccatcttaaaaacaasttccatgacctgaaaatttcctttaattactggaccgaatctctgctccctttcataacaaaaatttctcaaaaaaagtctatatgatggcaccattctccttcacttctctttgaaccatctctaatcaaagatttatccccactgctctcaggcttggccagacaattatatgtgtcagaggacagttgaaaacccgagtttatataagggaaatgcgggagtccaaaaaaagacgctcttccttctcagtgctagtaagaaaccttttgtttctggtaaataattttttctatgcctattacaatctcataaatatttatgatcaatctctttgtttattta

SEQ ID NO: 400935 - DNA, 581 bp, Homo sapiens
aactcgctcaatagcagcatcacgttccaacatccttggaatctattgatgtggtttgctgcaggtcagttggatttaggccagatacatagctgatatccattggaagagctcctatgataggctttgtggggccaaggcaagcactgtacccatccatcaatatttctctttctagtgcatcatgtccatcctcacacaaagattattgtaatatcttccatcttaaaaacaacttccatgacctgaaaatttcctttaattactggaccgaatctctgctccctttcataacaaaaatttctcaaaaaaagtctatatgatggcaccattctccttcacttctctttgaaccatctctaatcaaagatttatccccactgctmtcaggcttggccagacaattatatgtgtcagaggacagttgaaaacccgagtttatataagggaaatgcgggagtccaaaaaaagacgctcttccttctcagtgctagtaagaaaccttttgtttctggtaaataattttttctatgcctattacaatctcataaatatttatgatcaatctctttgtttattta

SEQ ID NO: 400936 - DNA, 597 bp, Homo sapiens
ggtcaacattcaggccatgtaagtcaatacccaggtaaggaattccagataaagttgctcagaagagagttatctgagcaaccctatctggaatttgcagttgcctgcaagttttagggactgtacccatggtctgtgtggagtgcatgatggcctctgtggaagtaggctacaccaggcctcacataaatagttatgtgtgtccagaactagccctggaatgctggtttctgtcgcagagctcctgttttaaaacttgaaagctgtgcctaaatccagggttatttcatgtgtgcagaaagtaaagaaatttcgtcattattgttttcattattatggatgcaggatatagrtccttacaatttacttcttagttaaatacatcacaagaccatcttactcataaataagatagtttaccattttacttatagagaaagtttatagcaaaacttgttggacttttctatgacattatgggttgttctgttaagccaatggatgaaatatcattttttaataggaatgcttataaacatttagatgactttctatgttttgagctattaatgtagtgcttttatgcagcattaaata

SEQ ID NO: 400937 - DNA, 597 bp, Homo sapiens
ggtcaacattcaggccatgtaagtcaatacccaggtaaggaattccagataaagttgctcagaagagagttatctgagcaaccctatctggaatttgcagttgcctgcaagttttagggactgtacccatggtctgtgtggagtgcatgatggcctctgtggaagtaggctacaccaggcctcacataaatagttatgtgtgtccagaactagccctggaatgctggtttctgtcgcagagctcctgttttaaaacttgaaagctgtgcctaaatccagggttatttcatgtgtgcagaaagtaaagaaatttcgtcattattgttttcattattatggatgcaggatatagatccttacaatttacttcttagttaaatacatcacaagaccatcttactcataaataagatagtttaccattttacttatagagaaagtttatagcaaaacttgttggacttttctatgacattatgggttgttctgttaagccaatggatgaaataycattttttaataggaatgcttataaacatttagatgactttctatgttttgagctattaatgtagtgcttttatgcagcattaaata

SEQ ID NO: 400938 - DNA, 597 bp, Homo sapiens
ggtcaacattcaggccatgtaagtcaatacccaggtaaggaattccagataaagttgctcagaagagagttatctgagcaaccctatctggaatttgcagttgcctgcaagttttagggactgtacccatggtctgtgtggagtgcatgatggcctctgtggaagtaggctacaccaggcctcacataaatagttatgtgtgtccagaactagccctggaatgctggtttctgtcgcagagctcctgttttaaaacttgaaagctgtgcctaaatccagggttatttcatgtgtgcagaaagtaaagaaatttcgtcattattgttttcattattatggatgcaggatatagatccttacaatttacttcttagttaaatacatcacaagaccatcttactcataaataagatagtttaccattttacttatagagaaagtttatagcaaaacttgttggacttttctatgacattatgggttgttctgttaagccaatggatgaaatatcattttttaataggaatgcttataarcatttagatgactttctatgttttgagctattaatgtagtgcttttatgcagcattaaata

SEQ ID NO: 400939 - DNA, 608 bp, Homo sapiens
attctctctctcacactctacacaaattttattttgttcattgttatatcatcagtatctacaatatagcctgacaagttttagtagcatcataatgactgctctctagtttctgaatatatcatttctactatgtatccacaggtaattctgctctctttgattctgatatgggttggctgtgtccccacccaaatctcatcctgatttgtagttagcataatctccaagtgtkgggggagggacctggagggagataattgaatcatggggtcagttatcctcatgctgttttggtgatagtgagtgagctctctgagatctgatggttttacagtgggttttccccctttacgcagcacttctccttgctgccaccatgtggagaaggatgtgtttgcctcccctttcaccatgattgtaagtttcctgaggcctccccccacgcatgcggcattgcgagccaattaaacctctttcttttataaattacccattctcaggcagttctttatagcagcatgagaatggactaatacagagcttattcagattatctgtaaaatgagagtagtacctgtctgtattggtagcatatctcttggtta

SEQ ID NO: 400940 - DNA, 595 bp, Homo sapiens
tttttattattattacattgtaatatataatgaaataattatataactcaccataatgcagaatcagtgcgagccctgagcttattctcctacaactagatgatcctactgggggtgatgggagacagtgacagatcataaggcattagattctcataaggagcatgcaacctagattcctcrcatgggcagttcacaatagggttcacacttctgtgtgaatataatgccactgctgatctgacaggacgtggagctcagggagtaaggtgagctatggggagcagctgcaaatacagatgaagcttcttttgctcgcctgatgctcactggtccatggcatggggttgaggacccctgttctagtgtagctacaaagctttcatagttctttccatcattgaaagacacctctaaacccaatttgacttttgtcctgtttggtaggccattgaccccaaaactcatgtgtgtaaccccaaagcaccttattattctggccccagtaacaaggcacccctgagtttggaggaagttttatgtgtcagaattctataatgtatctgcttatgttttgacaatgaactgagataac

SEQ ID NO: 400941 - DNA, 595 bp, Homo sapiens
tttttattattattacattgtaatatataatgaaataattatataactcaccataatgcagaatcagtgcgagccctgagcttattctcctacaactagatgatcctactgggggtgatgggagacagtgacagatcataaggcattagattctcataaggagcatgcaacctagattcctcacatgggcagttcacaatagggttcacacttctgtgtgaatataatgccactgctgatctgacaggacgtggagctcagggagtaaggtgagctmtggggagcagctgcaaatacagatgaagcttcttttgctcgcctgatgctcactggtccatggcatggggttgaggacccctgttctagtgtagctacaaagctttcatagttctttccatcattgaaagacacctctaaacccaatttgacttttgtcctgtttggtaggccattgaccccaaaactcatgtgtgtaaccccaaagcaccttattattctggccccagtaacaaggcacccctgagtttggaggaagttttatgtgtcagaattctataatgtatctgcttatgttttgacaatgaactgagataac

SEQ ID NO: 400942 - DNA, 595 bp, Homo sapiens
tttttattattattacattgtaatatataatgaaataattatataactcaccataatgcagaatcagtgcgagccctgagcttattctcctacaactagatgatcctactgggggtgatgggagacagtgacagatcataaggcattagattctcataaggagcatgcaacctagattcctcacatgggcagttcacaatagggttcacacttctgtgtgaatataatgccactgctgatctgacaggacgtggagctcagggagtaaggtgagctatggggagcagctgcaaatacagatgaagcttcttttgctcgcctgatgctcactggtccatggcatggggttgaggacccctgttctagtgtagctacaaagctttcatagttctttccatcwttgaaagacacctctaaacccaatttgacttttgtcctgtttggtaggccattgaccccaaaactcatgtgtgtaaccccaaagcaccttattattctggccccagtaacaaggcacccctgagtttggaggaagttttatgtgtcagaattctataatgtatctgcttatgttttgacaatgaactgagataac

SEQ ID NO: 400943 - DNA, 608 bp, Homo sapiens
attctctctctcacactctacacaaattttattttgttcattgttatatcatcagtatctacaatatagcctgacaagttttagtagcatcataatgactgctctctagtttctgaatatatcatttctactatgtatccacaggtaattctgctctctttgattctgatatgggttggctgtgtccccacccaaatctcatcctgatttgtagttagcataatctccaagtgtggggggagggacctggagggagataattgaatcatggggtcagttatcctcatgctgttttggtgatagtgagtgagctctctgagatctgatggttttacagtgggttttccccctttacgcagcacttctccttgctgccaccatgtggagaaggatgtgtttgcctcccctttcaccatgattgtaagtttcctgaggcctccccccasgcatgcggcattgcgagccaattaaacctctttcttttataaattacccattctcaggcagttctttatagcagcatgagaatggactaatacagagcttattcagattatctgtaaaatgagagtagtacctgtctgtattggtagcatatctcttggtta

SEQ ID NO: 400944 - DNA, 608 bp, Homo sapiens
attctctctctcacactctacacaaattttattttgttcattgttatatcatcagtatctacaatatagcctgacaagttttagtagcatcataatgactgctctctagtttctgaatatatcatttctactatgtatccacaggtaattctgctctctttgattctgatatgggttggctgtgtccccacccaaatctcatcctgatttgtagttagcataatctccaagtgtggggggagggacctggagggagataattgaatcatggggtcagttatcctcatgctgttttggtgatagtgagtgagctctctgagatctgatggttttacagtgggttttccccctttacgcagcacttctccttgctgccaccatgtggagaaggatgtgtttgcctcccctttcaccatgattgtaagtttcctgaggcctccccccacscatgcggcattgcgagccaattaaacctctttcttttataaattacccattctcaggcagttctttatagcagcatgagaatggactaatacagagcttattcagattatctgtaaaatgagagtagtacctgtctgtattggtagcatatctcttggtta

SEQ ID NO: 400945 - DNA, 514 bp, Homo sapiens
tggttctttatccagcttgccattctgtgtcttttaattgggggcagttagcccatttatatttaaggttartattgttatgtgtggatttgattctgtcatcatgatggtagctggttattttgcagacttgtttacatggttgcttcatagtgtcactggtttgtgtgcttcagtgtgtttttctagtggttggtaacagtttttgctttccatatttagtgcttccttcaggacctcttgtaaggcaggtcaggtggtaaaaaatttcctcagcatttgcttacctgcaaaggatcttatttcaaattaaacttcataagtgaaagagaaataagatcctttcagacaaggaaataatgaggaaatgaaatatgaaatttggtgttagaaatttttttctttaaaaatgttgaatattggcccccgatctcttctagcttatagggtttccactgagaagcctgctgagagtggctggaggccctggctgggaggctccagctgggaggac

SEQ ID NO: 400946 - DNA, 516 bp, Homo sapiens
tgtcatcatgatggtagctggttattttgcagacttgtttacatggttgcttcatagtgtcactggtttgtgtgcttcagtgtgtttttctagtggytggtaacagtttttgctttccatatttagtgcttccttcaggacctcttgtaaggcaggtcaggtggtaaaaaatttcctcagcatttgcttacctgcaaaggatcttatttcaaattaaacttcataagtgaaagagaaataagatcctttcagacaaggaaataatgaggaaatgaaatatgaaatttggtgttagaaatttttttctttaaaaatgttgaatattggcccccgatctcttctagcttatagggtttccactgagaagcctgctgagagtggctggaggccctggctgggaggctccagctgggaggacctgtcccatgaagaggagtggattggggtcacacttaaagaagcagtctggccatgccttgacaaaagagctatgtcttggtggggaactgcttctgc

SEQ ID NO: 400947 - DNA, 472 bp, Homo sapiens
ttggcatactgtactacagcccagatctcttggactcaggagatcctcctgcctcagcttcccaagaaactgggaccacaggtgtgcaccaccacactcagctgtaattatataatttttgacatttatgaacgcaattatttttattatattgcccaatgaataacatggtctatttgaaaattattttccaacataaaaattcttttggaaagtaagataacagatctctgtgtagattgaaaaaacaattttttcactctacgcactaattagctgaacattaaaaatagcataagcagaataatttttcctgatacatattaatgtacttaaatcagcktttagctttgtctacttataaattgatacctttagctattcctatttattctatcacttgtattttctaaagaatatattttttcaatatagtttgtttctattgataaaaattgaaactttcaagttt

SEQ ID NO: 400948 - DNA, 537 bp, Homo sapiens
  misc_feature (1)...(537): n = A,T,C or G
tctgttaatggagccaacacattagcatctataaattcactattttttacatgcaaagaaaacctggtattgaaaatcaattcatgaaattaacttaaaaggtgctatcatttgatttgaatgaaaaggcatgcttcacagaaatatattccagctttttcaaatgcatgtattaagtcatcattttaaggcaggttcttcttaaataaatacaaactctgaaagtagatgttgacatatttttagagatttgagtctcgtagttgttatgaggtccatgttattcctatagatccaaaagaggatgttcagtattgaaaaacattttgagcaagttaaatgttcatcatgaactttcttaagaaatggtgattcaggttgattcattaaatatgcacctttttgagctcattactgtttaaaggattcaatatcaanataaatagaaaaccaaacaataaaatcgttgttrgattatacccatatgcaaactaccctagaagagcaatcagactattctagacattctatggcagg

SEQ ID NO: 400949 - DNA, 407 bp, Homo sapiens
aatccattagccaacatcattggttctacctttaaatgcatcttatcacctataatagaaactccttagacccagccacatccatgtcccacctgcatcgctgcaatactctcccaacaataccagytcagtttatgaatggaaataaactcagttaactttcacttaacaatttaatttaataacaatttaattaaattagatgtatgacctaagatacatcaagttgcaataagttatgacattattaagttaaatgtatgacctagtaattaaatgtatatattggtgtgttgtatatatatcatataataatatatggtattaattgtatattaacagactataatatatttgttatatgttataattatatgatatataatgtatatattatgcacacatat

SEQ ID NO: 400950 - DNA, 467 bp, Homo sapiens
ggaaatacatatatatatatatattttttccacttttttgatgtgactcatttcccattgatttttcatttttaataaaatttttctaagcacttcaagggaaaggccattaaatgcttccctgagtgcccataactgaagtaaaaatagaggagcagaatatttccccacatttttcttatacttgaaaaatgttgttgcatatttttgaaatatttatcttagagaaagctcggaagccatgacatggtgggccaatttctctgctctattgttaaggtttttaccattccataaygctgacaaattatcatcttaatttataaatttatttatgttggagttgcagtgcctttgtaacttaccacaatatgctattatgaggactgaatgcttaagctgaaggggtctgagtgtgttactgtaagttgacatgaaaaatctgtgtcagaatggataattttgac

SEQ ID NO: 400951 - DNA, 565 bp, Homo sapiens
ctaatttttaaaaatgaacaaacatgttattgataaatgtattacttggtagaaatggttgttgaatattactgatccttattactctacagagaaagggaaaaactcaattaactaatagcattgtagtctaattgtacacacccatttctgtttctcaaaggataatactaataattatcttagcagaattgaatagcaatatgtctaaaatatcttctacagtagtctatttttaattgctaacaaaggagaaaaaatattgagaattagtatctttttaaacaatgagtaaattgacgttttaaactgcattttaaaattattttctttttaatgatacttctctttttaaggacacaattratgaaaattatgtataaagcattaaatgttttttccagatttgttctttcattgtattacatttataaatttataaaacaaaattttattcaattttgtttaattttacccatgagatactgcatacaaagagagtgtttgcagatattataaccacacggtctctgtaatagaaataatcatttttggtatgcattat

SEQ ID NO: 400952 - DNA, 522 bp, Homo sapiens
aaggattgggtagctcctcttgtaggcaggttgtctggtcgagtgttcagcccttagcagagaggaggccctggaatgggtggctcctctccataggcaagacattctgatgtctctgcagatctctgaagctctcagcagagaggatatttctctctgctggcaagttgtctctgcagctcttcagggaaggctattcctttctgcagctagttctccggtcccatggtctctctgccgtcttcctcctctggccatcctctgcctgctctggctgagtccaaggcttttatggacctcagyggggaggaaatggggccaattagttgatgggcagccatgggcgaacccagaagaggcaccatgagtccccactgtggtccacaggactgacagcccagcaaccagtcttcagacccttcttggcctgaaggtggggccttactggcgaaccacccccttccacccaggaatcaatttgcctcccgctgccattcatggcctaggggcttggctccaatg

SEQ ID NO: 400953 - DNA, 619 bp, Homo sapiens
ttcccagttctaaaggtacatttaagggtaatcttttccctttaagtgagcccttcattacagagaataaatagatacaacataagagaacaaaagaggacagtctcctaaggctacttctgccaccccagaatttggggagcagcggaattataattctcaccrctccaggcacgaaatattcaggatcatggagagaaatggaggcttcttggtattactccagctgcttgtgtgttcagcaaaggtaggagcaatgtcatagactaaacttaggccctataaccccaggctgctgcctcaggaatgaacccgcttttcttccctttatgggataactgagtgtaagcttagcacttatcaagggtggctacacacatataagccaagaaacccaatgacccttccattttacctcaccataaccaattacaccattacaattcagttatgatattttcattgatatttcaattactgcactgtagtaaagttctaccacattcctgataacataagtttacaagctctatggaagttaggagacaacctggtgactaaaggaataaactctcagtccacagtagctttttcttggaaatctacatttcaaaaagga

SEQ ID NO: 400954 - DNA, 524 bp, Homo sapiens
tcccacaagagcacagggaggcgcggatctacagctggtttgggcagctgtagccccactccggagagyagggcttctgcctgctctgtagagcaggaggcctggggtctgcagctgtggttagggtggctgcagtaaccgaggagctccagtcccaatcagaaggggcagggttcccactggctccatggagtgtgcagccacagccacgcttccccactgcaactggcatgatgagcagccactgccatcacagatatttgtctcattttgttatttactagagaaaacataacaatttcttactaaaaattttgaagtataaaaatggaaggagaatgtctaagtcctctggaaataaatggcattgacagtcttcttgatttaatttctgctacttatttcaagaggcatccagatgctttccttaattggatccagttaagatagtcctgatggaaaattcagtatattggccataattattgaattagtgaatcacagacatgattagaaagaaatta

SEQ ID NO: 400955 - DNA, 559 bp, Homo sapiens
gagactgagttttaactcttgttgcccagcctggaatgcaatggcgtggtcttggctcactgcaagtttcacctcccaggttcaagcaattctcttgcctcagccttccaagtagctgggattacaggtgcctgtgaccatgcctggctaatttttgtgttttaagtagagacagggtttcaccatgttgtccaggctgatctcaaactcctgacctcaggtgatccgcccatctcagcctcccaaagggctgggattacaggcgtgagccactgcgcccagcgacaaaggaaagaatcttaaaagccatgaggcaaaagtatcaggtaacctataaaggaaaacctrtcagactaacagcagatttttcagcagaaaccctaaaagctagaagggattggggccctatctttaggcttcttaaacaaaataattatcaacgaagaatttggtatccagcaaaactaagctttgtaaatggaggaaagatagtctttttcagacaaacaaagctgagagaaatcaccactaccaaaccagcactatgggaattgctaaa

SEQ ID NO: 400956 - DNA, 621 bp, Homo sapiens
aaaaagttgcccagtgataggttccagtgctgagatttgcaagattatgggtttgttgaacacccctaggcacgtggcatagagtttggagattgttggcacaaccaacagactagaggcaccatgccagttctctgctctgctgcctgctagatccacccttccagcctcagttgccagtaacagcattaaacttccctgctaatggcacttgccatttaaggaaactttcaaactcacaagaatagtattatgggacatcttatccaggaacaattgttctgctgtctccagttcacctggatggaaagcagcacatgtgtcctgmagaaatgacgaccagtctagagcaataccaaggaacaggcgggttaatggcacttggttgaacttaatgctgtgaattaattccttccagctggtcatttatcctcaggaaatgtcctgattttcaaccactgttttctaaatcttggaacagattatctctcttagaatcttggagctgtcaatgcatggaagcctttatgcggttgtttgggagatattacccaaattttccagatctgggaaaactgtgttttctcctccagtcttgctggcaccaatgaagattcacag

SEQ ID NO: 400957 - DNA, 578 bp, Homo sapiens
ccctgctaatggcacttgccatttaaggaaactttcaaactcacaagaatagtattatgggacatcttatccaggaacaattgttctgctgtctccagttcacctggatggaaagcagcacatgtgtcctgaagaaatgacgaccagtctagagcaataccaaggaacaggcgggttaatggcacttggttgaacttaatgctgtgaattaattccttccagctggtcatttatcctcaggaaatgtcctgattttcaaccactgttttctaaatcttggaacagattatctctcttagaatcttggagctgtcaatgcatggaagcctttatgcggttgtttgggagatattacccaaattttccagatctgggaaaactgtgttttctcctccagtcttgctggcaccaatgaagattcacagcaaatctcatcagctatatttgataactccaaaagaatacatacccgatctaatagttgtttctggtttttttgtttgtttgttgccaatgtgattgctcacatagatrttattctcaacaatttgtatagcttttcttattcaggacacata

SEQ ID NO: 400958 - DNA, 567 bp, Homo sapiens
aaataggtttatattgtataaataacttataaggatggtgtaatgaacagacgggaagatgacataacattagccgaggacaacaataataatgaaaattaagactccgtgtctggctgcastggcttacaactttaatcccagcactctgggaggctgaagcaggaggattgctcatgggaccagtttgagaccagtctgggcaacatagtaagaccccatctccaccaaaaatttaaaaattagccaggtgtggtgacccatgcctaaagtcccaactactcaggaggctaaagtgggaggatcacttgagccccagagtttaagaccacagtgagccaagatcacaacactgcactccagtctgggtggcagagtaagaccctgtcgctaaaaaagaaaaaaaaaaaaaacttaacgtgcacttagtctaaatatttcacctctacagttatttctctatatctgttttctctatgttcccagtaaccctatgcagtaggaaattttattaccccattttgcacagggcaaaacagattaaataacctacctaatgttacacag

SEQ ID NO: 400959 - DNA, 619 bp, Homo sapiens
gccttatatcacgcagctaatgagcagcagagctggaattcctataaataggtttatattgtataaataacttataaggatggtgtaatgaacagacgggaagatgacataacattagccgaggacaacaataataatgaaaattaagactccgtgtctggctgcagtggcttacaactttaatcccagcactctgggaggctgaagcaggaggattgctcatgggaccagtttgagaccagtctgggcaacatagtaagaccccatctccaccaaaaatttaaaaattagccaggtgtggtgacccatgcctaaagtcccaactactcaggaggctaaagtgggaggatcacttgagccccagagtttaagaccacagtgagccaagatcacaacactgcactccagtctgggtggcagagtaagaccctgtcgctaaaaaagaaaaaaaaaaaaaacttaacgtgcacttagtctaaatatttcacctctacagttatttctctatatctgttttctctatgttcccagtaaccctatgcagtaggaaattttattaccccattttgcacagggsaaaacagattaaataacctacctaatgttacacagcaggatt

SEQ ID NO: 400960 - DNA, 596 bp, Homo sapiens
gcaggcactgctctaagagttaggattcagttttcaaggagacaatagtgggcaaagaaataccaatctaatgtcaactaatggcaaatgaatgaagtctaagattcctgaacatgcttgacatttcctaaaccacacattttggttctctatgatctatgatacagggatatatagttgtttcatgaaaggctgtggggcttctcttttgtaaccaccagtcagcawcccaaggaggcagccctgctgacagatgccaggtgtgaaccataaggagcaaagacagatgatttgtctgaaacttaagcatgcccagccttagatctttccattcaaagtttacagtccaaaagcctgactcactaaggcactgaaccaaagaaaataaagacggcaagtgtggatattttctatgaagttttatcccttgcccttctttcctcctcactgaacacctcagtcttaaggaactattttcaattccccaaaacatgttctaggactctgtgtctgcgccacacgtatttgtgaagttatgccctgcaggaagacaggggtttaagtggatctgcaaaacagccaaggagtcagggaat

SEQ ID NO: 400961 - DNA, 433 bp, Homo sapiens
ggtctgcatgcagcatatgcataataaccagcttgtacaatagatggagtgtcttggaaacgatcacctgcatttatgaagtgcttactatgtgtcaggcatcttccaagtgttttacatggatgatctcatttaatcctcatgataaccttgtgaggtaggtcaatttatagcccattttaccacctgggatactgaggcctttcaggggttaagttcctagcccaagttgataatgctagaaaaatggtcaattaaggattatgaacccagtttggtctgacacagaggccgcatcctttatcaccatgctattcagaattcttgtacacacrtacctacggtttttttctcttcttctgttatttcagtattatagagtaaaacttcatgcagcggtaatttttatcttgaccttagacaaataattggt

SEQ ID NO: 400962 - DNA, 594 bp, Homo sapiens
agaagctctgctttcttttcccttttgcttttcaaaattttgtataaaatttaatgtgaacaatagattcaatggctaaaaaaacattaaattgtgcaaaacactcagactcagccatattgttgatatttatttttctgattcatggtttgctttttatctcatgctttgattcatatgagcatatccatgcacactcaatagtttctaagcattttagaaacaaaatgtaatcatactttatattctaagcataacttttttcatgtatcaatttattatggtcatttttgcatgtcagaacatataaaatgattttgtgacattcaataatatgataccacaattgataagtattcagtgctgtatttcaaacaatgcagcaaaagtttttcctatacatactaagtattttttcaggatagattctgagaaacagagcttaatagtctaaggtctgtacatttaagcttttcatagagactttcaagtyacactaataaatagggatctaatttaaaattatactggtagtatgagtcttctctataccaatatcctaggcaaaactgattattaatcaatttaattttt

SEQ ID NO: 400963 - DNA, 569 bp, Homo sapiens
ttaccccaaaatatatttctttgatatattctgaaatggccttgcaaagttgtctctcgtgggggaaaatctatattctgtacccaatccayttccctttccaggtatcttttctgctccaggagagaattaactgagtgtctggcacctttttaattctgataagaaacacttaaaatctattctctctgaagcctgctacctgaaagcttcatctgcataatgaaaaccttggtctccacaatcctccttcttaactcagacactcccgtctattgattccaggtcttcagataaactctttcaaccacttgccaatcaagaaatcttagaatccacccatgacctggaagcccatccccatccccacccctacaccctgtcaccttcaaggtgtcctgcttttctggaccaaaccaatgtacatcttacatgtattgattgatgtctcatgtctctctaaaacatataaaaccaagctgtaacctgagcacctggggcacatgctttcagcacctccttgggctatgtcaccagcatgtccttaaccttggcaaaataaacttcca

SEQ ID NO: 400964 - DNA, 569 bp, Homo sapiens
ttaccccaaaatatatttctttgatatattctgaaatggccttgcaaagttgtctctcgtgggggaaaatctatattctgtacccaatccatttccctttccaggtatcttttctgctccaggagagaattaactgagtgtctggcacctttttaattctgataagaaacacttaaaatctattctctctgaagcctgctacctgaaagcttcatctgcataatgaaaaccttggtctccacaatcctccttcttaactcagacactcccrtctattgattccaggtcttcagataaactctttcaaccacttgccaatcaagaaatcttagaatccacccatgacctggaagcccatccccatccccacccctacaccctgtcaccttcaaggtgtcctgcttttctggaccaaaccaatgtacatcttacatgtattgattgatgtctcatgtctctctaaaacatataaaaccaagctgtaacctgagcacctggggcacatgctttcagcacctccttgggctatgtcaccagcatgtccttaaccttggcaaaataaacttcca

SEQ ID NO: 400965 - DNA, 569 bp, Homo sapiens
ttaccccaaaatatatttctttgatatattctgaaatggccttgcaaagttgtctctcgtgggggaaaatctatattctgtacccaatccatttccctttccaggtatcttttctgctccaggagagaattaactgagtgtctggcacctttttaattctgataagaaacacttaaaatctattctctctgaagcctgctacctgaaagcttcatctgcataatgaaaaccttggtctccacaatcctccttcttaactcagacactcccgtctattgattccaggtcttcagataaactctttcaaccacttgccaatcaagaaatcttwgaatccacccatgacctggaagcccatccccatccccacccctacaccctgtcaccttcaaggtgtcctgcttttctggaccaaaccaatgtacatcttacatgtattgattgatgtctcatgtctctctaaaacatataaaaccaagctgtaacctgagcacctggggcacatgctttcagcacctccttgggctatgtcaccagcatgtccttaaccttggcaaaataaacttcca

SEQ ID NO: 400966 - DNA, 394 bp, Homo sapiens
cacggtggctcaggcctgtaatcctagcactttgggaggcgaagatgggaggactgcttaaaaagtgtycaagtccagcctgggcaacatagtgagacccctgtctctacaaaacataaaaaattagcctgtcatggtggcatgtgactgcagtctcagctactctggagactgaggtgggaggattgcttgagcctgggagatcatggctgcagttagctgtgattgtgccaatatactctagtctcggtgacagaatgagaccccatctctttaaaaaaaaaaaaaaaagcttaagatatgtaagaatctcactaatgaactaattatatagatttttgtaaacataattgtaaataatacaaaaaaagtgttcttttaatcactaaaaaca

SEQ ID NO: 400967 - DNA, 600 bp, Homo sapiens
agagtcttcttgtgtagctctcactcagtattccatattgttttatcttactatgtcatttgtcacaagtaatgaactaatgttgatatagtttttaattgtatgtatttaaagtgtacaatttgatgatgtgataaacatatacattgtgaaataatcatcacaatcaagctaatgaatgtatcatcaactcacatagttactttttttatgataagaaaccttaggatctacttcttagcaaatttcaagtatacattaaagtattgttacctacagtcatcatgctatacgttagatttccagaatgtattcattttgcacaactgaaacttggcaccaattgaccaacatctcttcatattccscctttcgcagcccctcatcaccactatcctcctctctgcttctatgaatttgactattttagattccacatttaagtgagatttgtggaatctaatttgtggaatgtagtatttgtctttctgtgtgtggtctatttcacttagcataatgttctatgagttcattcatgtcacaaatgacagaattttctattttaaaggctgaaaaatattccactgtatgtatatacta

SEQ ID NO: 400968 - DNA, 574 bp, Homo sapiens
tcattggctgaacattgcctccccacaccccaccccctgacccccacttctctctctctctcacaaacacacacacacacacacacactcacacaaacacaatttcactgcctgttgcccatttggagctgattagttcatcccccaacaggtactaaaacattatgagctcaatgagcctgcttaccgcaytgagtaaccccagacttgtatctcagcaagccctgtgctgaaatgtaagtgccaattcccttgctgcttatcataaaattcccatcagttacatgaatatttttaaacacttaactttgatcaatcctttggctttttcctgtgtatgcgtatctgtgtacgcctgtgtctatggtgattcttttattagatgggtcttaaatgtgataggcaataatgcaacaaatctaaaatttctaagtctatgttcagggtcaggactaggatgagacaagaaaggggctaaagtggcaaaattcaagaaggccctcactctactctcagggtacccaaagctttttcactgccagtcccactcatctgaggctctgtaaagtgacat

SEQ ID NO: 400969 - DNA, 574 bp, Homo sapiens
tcattggctgaacattgcctccccacaccccaccccctgacccccacttctctctctctctcacaaacacacacacacacacacacactcacacaaacacaatttcactgcctgttgcccatttggagctgattagttcatcccccaacaggtactaaaacattatgagctcaatgagcctgcttaccgcattgagtaaccccagacttgtatctcagcaagccctgtgctgaaatgtaagtgccaattcccttgctgcttatcataaaattcccatcagttacatgaatatttttaaacacttaactttgatcaatcctttggctttttcctrtgtatgcgtatctgtgtacgcctgtgtctatggtgattcttttattagatgggtcttaaatgtgataggcaataatgcaacaaatctaaaatttctaagtctatgttcagggtcaggactaggatgagacaagaaaggggctaaagtggcaaaattcaagaaggccctcactctactctcagggtacccaaagctttttcactgccagtcccactcatctgaggctctgtaaagtgacat

SEQ ID NO: 400970 - DNA, 566 bp, Homo sapiens
acagactccagatgcagggtacacttcagccacaatttgtgctggttccttatgaacaattcaggcattctaactaataacagtccagtactatctcctggacactgctttttctattgactgaaactcctaggcagaatgctcaaaatatctttctcaacatcttyctctctctcactactgaaatctctctccaaaactagatgttagtatagatggatggatggatggatagacagatacctatcataaaggggaaatatgaattttaaaacaagaaaacaaaagaatggaatacgaagtagcctggatggatttcctttgctaataccaaaaaggcctttaaaatgatgtttaaggttaacacattgtccagaactgcacttctatccctcaagcttcctaaagaagcacccttaatggtctagccctgaaagcatcccccaccctgttgtctgccttccctctctgcaacaacccacctcctccctagcccttgagcagctcagatctattttaatgccaagagagcactgcacagggggtccccactttactggagccaa

SEQ ID NO: 400971 - DNA, 566 bp, Homo sapiens
acagactccagatgcagggtacacttcagccacaatttgtgctggttccttatgaacaattcaggcattctaactaataacagtccagtactatctcctggacactgctttttctattgactgaaactcctaggcagaatgctcaaaatatctttctcaacatcttcctctctctcactactgaaatctctctccaaaactagatgttagtatagatggatggatggatggatagacagatacctatcataaaggggaaatatgaattttaaaacaagaaaacaaaagaatggaatacgaagtagcctggatggatttcctttgctaataccaaaaaggcctttaaaatgatgtttaaggttaacacattgtccagaactgcacttctatccctcaagcttcctaaagaagcacccttaatggtctagccctgaaagcatcccccaccctgttgtctgccttccctctctgcaacaacccacctcctcccyagcccttgagcagctcagatctattttaatgccaagagagcactgcacagggggtccccactttactggagccaa

SEQ ID NO: 400972 - DNA, 566 bp, Homo sapiens
acagactccagatgcagggtacacttcagccacaatttgtgctggttccttatgaacaattcaggcattctaactaataacagtccagtactatctcctggacactgctttttctattgactgaaactcctaggcagaatgctcaaaatatctttctcaacatcttcctctctctcactactgaaatctctctccaaaactagatgttagtatagatggatggatggatggatagacagatacctatcataaaggggaaatatgaattttaaaacaagaaaacaaaagaatggaatacgaagtagcctggatggatttcctttgctaataccaaaaaggcctttaaaatgatgtttaaggttaacacattgtccagaactgcacttctatccctcaagcttcctaaagaagcacccttaatggtctagccctgaaagcatcccccaccctgttgtctgccttccctctctgcaacaacccacctcctccctagcccttgagcagctcagatctattttaaygccaagagagcactgcacagggggtccccactttactggagccaa

SEQ ID NO: 400973 - DNA, 611 bp, Homo sapiens
atacttaatgagtccgataatcagctgtacttctcacaacactaactgtttagtctcaaaaatgaaatgtctcctttctcaaatgaggtgaacctagcttaagaagttagaattaaacaaacaaacaaamaaaagatacagcaggcccatgactctaaatccaatgacacctggagctagaaatcccacttttcagggaccatcatgaaaaattcacgttgtttacttaatagtacaatgagttggctttcttaggatccacttctcaaagcagacaaatttatctgagggatgataagagtattctgacaataagcaataggtgattcttttccactatgaccaacattaactctcaacagatacatttctgaaactgatgtcaatgagaatgtaactgaccctacaaaattagttgtgcaaacagctagttaaaaatttccgttatctcctgtacctaacccaagacctatttttcctacctcttaaatatttcccatcactatgaatgttttgtaaagtgcttagaagagtacctacacatgttgtaggtattatatacttgtttgctaaataaataacatttcttccatttgttcaacctttatctc

SEQ ID NO: 400974 - DNA, 611 bp, Homo sapiens
atacttaatgagtccgataatcagctgtacttctcacaacactaactgtttagtctcaaaaatgaaatgtctcctttctcaaatgaggtgaacctagcttaagaagttagaattaaacaaacaaacaaaaaaaagatacagcaggcccatgactctaaatccaatgacacctggagctagaaatcccacttttcagggaccatcatgaaaarttcacgttgtttacttaatagtacaatgagttggctttcttaggatccacttctcaaagcagacaaatttatctgagggatgataagagtattctgacaataagcaataggtgattcttttccactatgaccaacattaactctcaacagatacatttctgaaactgatgtcaatgagaatgtaactgaccctacaaaattagttgtgcaaacagctagttaaaaatttccgttatctcctgtacctaacccaagacctatttttcctacctcttaaatatttcccatcactatgaatgttttgtaaagtgcttagaagagtacctacacatgttgtaggtattatatacttgtttgctaaataaataacatttcttccatttgttcaacctttatctc

SEQ ID NO: 400975 - DNA, 569 bp, Homo sapiens
tatgtttctagtgccttaagatagctgatgttgattcaaacaacattctgtgctaacagaagtgtggaagagtactggtatctgataaccctgcagagattagaatctatttgtggtcttcttcccccgtcccacaccccgccccccatttatgactaattgcgagaaactttgccagaataacacaaattaccaagaaattcaaggctggtaaattttcatcaaagaaaattaactactgattttacaactgtctgatgtgtgcatgtctagattttctatcttactgattaccattcaagaaaatattcttcatgctattttcaacagcttttwatctatttggattggtctgaagaatcagcatgcaaggaatggcaatgataataatacctcagcattttttttttcatgtaggaatatatacttacagctgctgctccaggactttaacaaggactttatgctaatttcaaaaaacacagaatcctgtagactcaacatagtgtctcaatcagctgcaaaagcagcagcagcagcagcagcagcagaagcagaagcagcagcag

SEQ ID NO: 400976 - DNA, 510 bp, Homo sapiens
tttatccatttacttttaatctatatgtgtctttatattgaaagtgagtttcttgtagacaacatagttatgtcttgtttttttgatccactctgacaatctttcttttaattagtgcatttagaccattgatgtttagagtgattattgatgtagttggtttaatatctacaatatttgttattcttttctatttgttgcccttgttctttgttcctatttttgtcttctactctttttatgccttttgtggttctaattgagcattttatatgattccattttctttccttttttgatatgtgaattatattcctttgttgcttttttaagtggttgctgagagtttgcaatgtgcatttagtggtatagtgttacttttaagttgttagtggtatagtgttacttttaagtggttgcttgagagtttgcaatatacatcagtagtgtgagtaccttattataataaaataatcctaattyctccctcctctccattgtatcattgct

SEQ ID NO: 400977 - DNA, 573 bp, Homo sapiens
agccagcaaatcagatgtatacagtttaatgagaagatgcaaaattacgattcttaggaaaaggacagtgrgtatgtcagtgcagtaacaagtacaaagtaacagtgacacaggattcatgtaattgaaatgattgaagtggacaagttttcatggctttagcagattttagaaaatatatttttaaatacattttttaataaagtagttttgggggtagactaggtatatgttgtctactcgagctatttttatgtataaaatattttggggagacagagtatgtgctctgaatttcaactattgttacatagtgacagggatcatccatctggccctgctcagatgtcaccttgtctgcaagctcttcctctgttctcctaatcccaggtgattgttctttgtttttgctcctgtaaaatcctcttacagtacaagccatggtctgacttacagtatggctgtgtgtatatttcttttattagattgtggagtttgctaaaattaacagaagttagagccctttcatttttactgttgcctaaagtacttgggcagttttaatagcccacc

SEQ ID NO: 400978 - DNA, 573 bp, Homo sapiens
agccagcaaatcagatgtatacagtttaatgagaagatgcaaaattacgattcttaggaaaaggacagtgggtatgtcagtgcagtaacaagtacaaagtaacagtgacrcaggattcatgtaattgaaatgattgaagtggacaagttttcatggctttagcagattttagaaaatatatttttaaatacattttttaataaagtagttttgggggtagactaggtatatgttgtctactcgagctatttttatgtataaaatattttggggagacagagtatgtgctctgaatttcaactattgttacatagtgacagggatcatccatctggccctgctcagatgtcaccttgtctgcaagctcttcctctgttctcctaatcccaggtgattgttctttgtttttgctcctgtaaaatcctcttacagtacaagccatggtctgacttacagtatggctgtgtgtatatttcttttattagattgtggagtttgctaaaattaacagaagttagagccctttcatttttactgttgcctaaagtacttgggcagttttaatagcccacc

SEQ ID NO: 400979 - DNA, 568 bp, Homo sapiens
ctcccgaaacacgggttacttgtttatcttctttcagcctcatgtacagtaaaaatcaaatgagattctgtacttagaggatgtagcatccaataaaaagtaataaaaaccagtcataagaagtatgggtctaggctgggmgcagtggttcacacctgtaattccagcactttgggaggctgaggcgggtgaataacttgaggtcaggagtttgagaccagcctggccaatatggtgaaaccccgtctgtactaaaaataaaaaatcagccggcggtggtggcagatgcctgtaatcccagctactcagtagggtgaggcaggagaatcgcttgagtccgggaggtgaagcctgcagtgagccgagatcattccactgcactccagcctgggtgacagagcgagacttcatctcaaaaaaaaaaaggtataggtctaataaaaggaaattgtttaggtttttagtatcaagagattaaatggatctcaaaatagtttaggtaaggcctttatcttggatcaattttccctatacataaaataaataactgttacaacagataactagc

SEQ ID NO: 400980 - DNA, 569 bp, Homo sapiens
ttctgagttttctacaaagaacacagatgacatgttctcatccttaaactcaagggttgctgctggggtttctagtacttggtggtatccagcaaatccatttaattatagaatacaatatagccacgaaagttatggttacagaataaaagtgttttaaaacattaaaataacaatatacctcaacaaaaaccaggaggtatggagaagtgaggtggtttaatttcctcattgtcaaatctgtttgtcaataaacctctctctctctatgtgtgtgtgtgtgtatatgtgtatacatgtgtatacgtatgcatatgtttatatttaagtttaaagatatcttaagaactattcgctctgtaacaaaaacattatctgaatgtaaaaattaaatcattttcattttagttttttgttctgttaaacaaaattaaccaatataattaatcaaattatatcggctatttgataagctaatataattaatcaaattaatcaaaccattayaattagtttaacttaaaatagcatgtatgatgtgattctttttgtcagtctttctacctact

SEQ ID NO: 400981 - DNA, 545 bp, Homo sapiens
ataataattcaagaaaggaaacctgatcaagttgaacctcttgtttaacagatagggaaacttacagcccagaaatgtttgcccatggataaagctctcactggtaataccaagaccagaaagtaattctcctgttccctaattcaatgctctttctacttttctacctttaaacatctcagtgaatacttgtgtgattaattttatgtgtcaacttggctagtccatggtacccacatgtttggtcaaacattattctagatgtttctgtccagatattttttatatgagattaacacttaaatcagtagactctgagtaaagcagattacyctccaaaagggtgggtttcatccaatcagttgaaggccctgatggagaaagactgaccttttcagaagggggaattctgctagctgactgaattacaactcttccctgggtctccagcctaccccgcagatttttgacttgtcaagcctccactatcacttgggccaatttttaaaaatttaacaatttaacaactctccctttccctgtct

SEQ ID NO: 400982 - DNA, 613 bp, Homo sapiens
ttaagttactcctgagtttgaggaagagtaaggctcatcatttcttttacctctagaaaatgaagtttccttcaaatccatcttaagaacccttagtgtactgacaaatcatgactatatcaaacattattagaaatgaggcccattaataagggcctagtcattttaccaagtttcttcctcagtgggtatttattawatcaggttttgacttatttctggaaatcatattttggatatagtaagagagcagggctctgccaagccagatatgaagcagataagagctatttctgcaggactgatctcaaggtgtcctgtaagcctgacagccaatacacagttccttaaggaacaaaggtcttccttttagtgatcatcttctcacatgagcacacattatttccgagaggactaaccctagggaagggagaagtactatgtaaagagcataacagctgaatagctgttgttcctagatttgtatagaagtgactgattccggttctgccactatgtaactgtatagtcttgaaccaagtttgttctctcattgattcaaaaaaggagttccacttgcacttttcaaaggctccagataccacagtcgatg

SEQ ID NO: 400983 - DNA, 534 bp, Homo sapiens
tatataatgataaaggggtcaatactccaggaagacagaacaattcttacrtatgctcccaacaagacagcatcaaaatatgtgaggcaaaaactgattgaactacaaggagttcactagtatggttagaggcttcaacacccctctatcagaaaaggacagatccagcaggcagaagatcaatcagtaaggacatagttgaactcagtaacaccatcaatcaactggatgtaatggatgtctatttactactacttaaaacaacagcagaatgcacattcttatcaagcttacatgaaacattcacaaagaccacattctgggccataaaaacacactttaaaacatttaaaagaataaacatataatatctattctcaggcctcaaaggaattaaactagaaatcaataataaagatagctcgaaaccttaaaatacttggagattgaacaacacacttctaaataacacatgagtcaaagaagaaatctcaacagaaaatttaaaatattttgaaatatatgaaaatgagg

SEQ ID NO: 400984 - DNA, 534 bp, Homo sapiens
tatataatgataaaggggtcaatactccaggaagacagaacaattcttacatatgctcccaacaagacagcatcaaaatatgtgaggcaaaaactgattgaactacaaggagttcactagtatggttagaggcttcaacacccctctatcagaaaaggacagatccagcaggcagaagatcaatcagtaaggacatagttgaactcagtaacaccatcaatcaactggatgtaatggatgtctatttactactacttaaaacaacagcagaatgcacattcttatcaagcttacatgaaacattcacaaagaccacattctgggccataaaaacacactttaaaacatttaaaagaataaacatrtaatatctattctcaggcctcaaaggaattaaactagaaatcaataataaagatagctcgaaaccttaaaatacttggagattgaacaacacacttctaaataacacatgagtcaaagaagaaatctcaacagaaaatttaaaatattttgaaatatatgaaaatgagg

SEQ ID NO: 400985 - DNA, 572 bp, Homo sapiens
aagctggatgcagcatttttgcacgtgcctagtcattttgctacagtagtcattgcaaacgagtgcctgagacacaaatctcagagaagtcatggttttgagggatcaacttggagaagctgccatctcctccgtccctctgagaacatcctcctagctggtggcattagcattctgcctgcccaggtgaaggcctggcaggttgtaggaagcctcccgtgggagctgascagaccctgaataccccttctgcatcaccccaaattgaatatggttatgcaaacagcctttaacaatccttgtcatctggatctgagatacaactttaatgatttcacatatgtcatcttgccacttgcctgcacccatagatcccctgctgttgtgtgacagtgaccactgtgccgtgcttgtctgttaccctatgaccgaggaggaactgagaagacatatcattcctcaacattatgataaggaaatggggaccagaggagttaagcaatttgcccaaggccatgcagcttgaagtgcatgtgtcagagctgctgcctgtttttgtgttttgttttgtg

SEQ ID NO: 400986 - DNA, 575 bp, Homo sapiens
gggttgctaaagacaatgtgtctcctggaacccttcctcagcaatgttctcgctgaacaccgaaaatacaatgatccactmagaggggcagcttggaactctacagacacctgaattcacagtaagtatgcacaaaggcctgtttgaagaggcaaagagaaatgttgttcataaaccgaatgcgaatcaattatgactcatgaaaaaacattggctattaacttagcagtgggttaattcctgcctccttcccacgcctgcagcgaagggttgctcggtattgactcaacacggccaggaaaggggcagagagagcgaagattctccaatgtccagatagactcaccagacagcccctcgcaacccacccaccctctcagctagggcgggtctccagggattcgtttctaagtacttggcttgtatgcaaggtaaatctgcaggaactatttgtgtgtggcttcccctcatttctccacctgctctgaaagtcaggctgggaagtgtccaatctgacttccaggagacagcagggagggaggcttcagggctcacgtcaagaggccccactatgg

SEQ ID NO: 400987 - DNA, 575 bp, Homo sapiens
gggttgctaaagacaatgtgtctcctggaacccttcctcagcaatgttctcgctgaacaccgaaaatacaatgatccactaagaggggcagcttggaactctacagacacctgaattcacagtaagtatgcacaaaggcctgtttgaagaggcaaagagaaatgttgttcataaaccgaatgcgaatcaattatgactcatgaaaaaacattggctattaacttagcagtgggttaattcctgcctccttcccacgcctgcagcgaagggttgctcggtattgactcaacacggccaggaaaggggcagagagagcgaagattctccaatgtccagatagactcaccagacagcccctcgcaacccacccaccctctcagctagggcgggtctccagggattcgtttctaagtacttggyttgtatgcaaggtaaatctgcaggaactatttgtgtgtggcttcccctcatttctccacctgctctgaaagtcaggctgggaagtgtccaatctgacttccaggagacagcagggagggaggcttcagggctcacgtcaagaggccccactatgg

SEQ ID NO: 400988 - DNA, 422 bp, Homo sapiens
ttggtctgaacaaggaaagcagaaagatgaaaagcccaaagctgggtatccgcatctccgtgccttggacataaatcggtgtacacactataagaaaactggccattggaagggggactgcccagcgctccaaagggggccatcagcacccaaattaatgatggccraaatagccaggcaagcccaagagtgacggggcctgggaccttctgccacaactcccattggacaactagccatatctccgaaggagccctgggtaaccctcgacgtggcaggtaagactgttaacttgcttttggacatgggggctgcttgctctgttttgacccattataatgggattctgtcaccccaaaactgtatggtcacggggatagatggacaagcccataaatgccattttacctatcccttaacaa

SEQ ID NO: 400989 - DNA, 422 bp, Homo sapiens
ttggtctgaacaaggaaagcagaaagatgaaaagcccaaagctgggtatccgcatctccgtgccttggacataaatcggtgtacacactataagaaaactggccattggaagggggactgcccagcgctccaaagggggccatcagcacccaaattaatgatggccgaaatagccaggcaagcccaagagtgacggggcctgggaccttcygccacaactcccattggacaactagccatatctccgaaggagccctgggtaaccctcgacgtggcaggtaagactgttaacttgcttttggacatgggggctgcttgctctgttttgacccattataatgggattctgtcaccccaaaactgtatggtcacggggatagatggacaagcccataaatgccattttacctatcccttaacaa

SEQ ID NO: 400990 - DNA, 529 bp, Homo sapiens
ttatgcatatgatgatatgcttatggaataagacaggtctctcaagctcyatttatttactttcattcttttttcgttttattcctcagactggataacctcagttgtcccatattcaagtttgctgattctttctgctgcctgctcaaatctgctgttaaatctttgggcaggaggattgggttgctcaaatcttacacatttcaaagaaatgtttatcttcaggcctggccattggctggcccctggaaggtagcctctgagcccttggaatattcttcctcatatgagtttctgtatgcccgaagccctgaaccatgctgtatttatggtatttattgtaaacacctgtttttgtatgattaagcccttggctacactgtaccagtttgactggataagtttatcctagaaaagtgatttatgatgaatgcctggttttgctctgtggtgaagactggatggagtctgagtagctgaggtcattcatatgggcactgcatgcctatgtgactgacccccaacaaaa

SEQ ID NO: 400991 - DNA, 587 bp, Homo sapiens
ccagggagggaactacgccaactgaaggaatcaggacctccctgccaagggcagctcttaacccaaaggtcacacacacacttggatatccctcccccagtggacagcccatggcccacactctctgggaaccacaaccaccacccaagcacctccgctttggatgtaatgaggagtggaggcagcataaagaggcctctgcaaaaacacaaaatggcacatgtgcaaggccattcactacagcaatattcaaaagagtgaaagatgggaaacacctagtgcccctcagtaggcatctaactgaatcaaccatgaatgtcatacartggaggactccacagctggtctgatgggcaggaaggtctctacacgctgcatacaggcatcaccagatactactaagtgcaataaataacaaccactgcagaacaatgttcacagcatgtcagcactgcatgggaaaggggggcctggatattatctgaacatgtgtgtgtgtttcttatattttaaaaaaatgaaaatagaagaataaataacaaataaataaaagtggttttctttgggggaaagaaataactagatga

SEQ ID NO: 400992 - DNA, 493 bp, Homo sapiens
tcctgttccttcaaagggtctatggattcttctgactttcctggtatgttcctgtggcagttcttggagcagaagttcatgatgtgagtctccacaggctgctctgtttgtctgagtgagagctgcaagctagtcctgcctcctatccaccatcttaatccaagatgctacgtaacacttttgactgttcaaataattttcaaaaacatcccctcatctaaacctataataaattagacatgattagcttatttaattataccaatcaaatctcttcyatctttatatctactcaatcttggtaactatatcctccttttattttgggattgcctatttgttatcagcactgaagtcagtggatctgcatgaatctggaaaattgcaacaccagcttgctgtggatttggataggaacatcaacatccagtggcaaaaatattgttatcccttgataggatcaatgacctattcagtcaaagagatggagtac

SEQ ID NO: 400993 - DNA, 493 bp, Homo sapiens
tcctgttccttcaaagggtctatggattcttctgactttcctggtatgttcctgtggcagttcttggagcagaagttcatgatgtgagtctccacaggctgctctgtttgtctgagtgagagctgcaagctagtcctgcctcctatccaccatcttaatccaagatgctacgtaacacttttgactgttcaaataattttcaaaaacatcccctcatctaaacctataataaattagacatgattagcttatttaattataccaatcaaatctcttccatctttatatctactcaatcttggtaactatatcctccttttattttgggattgcctatttgttatcagcactgaagtcagtggatctgcatgaatctggaaaattgcaacaccagcttgctgtggatttggataggaacatcaacatccagtggcaaaaayattgttatcccttgataggatcaatgacctattcagtcaaagagatggagtac

SEQ ID NO: 400994 - DNA, 571 bp, Homo sapiens
tcataaaggacattttccaggatctcagtgtgagtatcattgatgcctgggatataacaattgcatatggcacaaataatgtacacccacctcaacatgtagtcggaaatcagattaatatattattaaactatatttgttaaataacacaaaagtctgaaattcattcacttaagtaaaaaaatttattgactgtctactagcaggmcagatgctgtgtttggctctgaattcccaactagcaagagcagagaatctacattatggctgatccataagccaccaattcagctaaatgagatgtttctaatctgggcttccacttaaaaataaaactaaaaatactcatgaaaagagcctacccttcttgatcagagccatacccctcttcaccaatgggaagtcaagacacctatgggtaaaagttctctctgatgcatgaaaactcagagtgataaagtaattttaaaataaaaatttggagaaagcagtcctgtttgtttatttctatcactaaagacaagctctagatgaatttccaagtcagaagagaagtcttgtgaggcaattc

SEQ ID NO: 400995 - DNA, 571 bp, Homo sapiens
tcataaaggacattttccaggatctcagtgtgagtatcattgatgcctgggatataacaattgcatatggcacaaataatgtacacccacctcaacatgtagtcggaaatcagattaatatattattaaactatatttgttaaataacacaaaagtctgaaattcattcacttaagtaaaaaaatttattgactgtctactagcaggccagatgctgtgtttggctctgaattcccaactagcaagagcagagaatctacattatggctgatccataagccaccaattcagctaaatgagatgtttctaatctgggcttccacttaaaaataaaactaaaaatactcatgaaaagagcctacccttcttgatcagagccatacccctcttcaccaatgggaagtcaagacacctatgggtaaaagttctctctgatgcatgaaaactcagagtgataaagtaattttaaaataaawatttggagaaagcagtcctgtttgtttatttctatcactaaagacaagctctagatgaatttccaagtcagaagagaagtcttgtgaggcaattc

SEQ ID NO: 400996 - DNA, 571 bp, Homo sapiens
tcataaaggacattttccaggatctcagtgtgagtatcattgatgcctgggatataacaattgcatatggcacaaataatgtacacccacctcaacatgtagtcggaaatcagattaatatattattaaactatatttgttaaataacacaaaagtctgaaattcattcacttaagtaaaaaaatttattgactgtctactagcaggccagatgctgtgtttggctctgaattcccaactagcaagagcagagaatctacattatggctgatccataagccaccaattcagctaaatgagatgtttctaatctgggcttccacttaaaaataaaactaaaaatactcatgaaaagagcctacccttcttgatcagagccatacccctcttcaccaatgggaagtcaagacacctatgggtaaaagttctctctgatgcatgaaaactcagagtgataaagtaattttaaaataaaaatttggagaaagcagtcctgtttgtttatttctaycactaaagacaagctctagatgaatttccaagtcagaagagaagtcttgtgaggcaattc

SEQ ID NO: 400997 - DNA, 580 bp, Homo sapiens
agacatttcctctttatctcaggattttgcattatctgtatattcttcccaagaaacgcaagcaagagggagaagaactgcattggccaaggccactggtgacttgtccttttacaaacacatagtagttcaattcaaaacttgctaggaagctatagtaattaagacagtatggtgtcagtgaaaagatagacacagaggttgacagaaaaaaaattaagattctctgtatatacccacatgtatatggtcaatgggtttttgatgaaggtgcaaaggcaattcaatgaagaaattttgtcttttcaagaaattatcctggtaaaaggacctgtaggaggtggggyaagatggcagaatagaaggctccaccaatcaccaccctctccacctaccccccgcaaggacaccaatttaacaactatcgacacaaaaaaagcacttttataagaaccaaaaatcagtacctcattttaactccatatcactgaaagaggcactgaagaagtaggaaaaagcaatcttgaattgccaacacaaccccaccatcaacccccagcattggtgacatagtgtggag

SEQ ID NO: 400998 - DNA, 580 bp, Homo sapiens
agacatttcctctttatctcaggattttgcattatctgtatattcttcccaagaaacgcaagcaagagggagaagaactgcattggccaaggccactggtgacttgtccttttacaaacacatagtagttcaattcaaaacttgctaggaagctatagtaattaagacagtatggtgtcagtgaaaagatagacacagaggttgacagaaaaaaaattaagattctctgtatatacccacatgtatatggtcaatgggtttttgatgaaggtgcaaaggcaattcaatgaagaaattttgtcttttcaagaaattatcctggtaaaaggacctgtaggaggtggggcaagatggcagaatagaaggctccaccaatcaccaccctctccacctaccccccgcaaggacaccaatttaacaactatcgacacaaaaraagcacttttataagaaccaaaaatcagtacctcattttaactccatatcactgaaagaggcactgaagaagtaggaaaaagcaatcttgaattgccaacacaaccccaccatcaacccccagcattggtgacatagtgtggag

SEQ ID NO: 400999 - DNA, 591 bp, Homo sapiens
cctagctcccgagtgacatttctggatgcatcttgggtcagaagggaacctgctgcctcgaaggaaaggacccagtcctggcaacagttatcacctgctatctgcagagcacttgcgccttgaataaccggcagcaatacccaggtactatattgagggccttgggtgagcctatgaggcttgctctctataagtaccagctcagccacaatggaggaragcaacaagcagcctcttgaggtccctgattccagcacttgtctcttatacggcatttctggtcctgctctgcaccagacaggagcccattgcactgaagggtcagtaccaggccaggcatcattcaccaaaggctgactgaagagcccttgggccttaagggaacattggtggtagtctggcagtactccctgtgggcctatgacagcagccacaggttgaagtgcctctttggaaaggggaagggaaaagaggggaggactgtgtcttgtggtttcagtgccaactcagccgcagtacagtagaaccattaatatccattgtagtctcaatgctctgcctaggctgctcttgtagcctgccaatgtctgg

SEQ ID NO: 401000 - DNA, 591 bp, Homo sapiens
cctagctcccgagtgacatttctggatgcatcttgggtcagaagggaacctgctgcctcgaaggaaaggacccagtcctggcaacagttatcacctgctatctgcagagcacttgcgccttgaataaccggcagcaatacccaggtactatattgagggccttgggtgagcctatgaggcttgctctctataagtaccagctcagccacaatggaggagagcaacaagcagcctcttgaggtccctgattccagcacttgtctcttatacggcatttctggtcctgctctgcaccagacaggagcccattgcactgaagggtcagtaccaggccaggcatcattcaccaaaggctgactgaagagcccttgggccttaagggaacattggtggtagtctggcagtactccctgtgggcctatgacagcagccacaggttgaagtgcctctttggaaaggggaagggaaaagaggggaggactgtgtcttgtggtttcagtgccaactcagccgcagtacagtagaaccattaatatccattgtagyctcaatgctctgcctaggctgctcttgtagcctgccaatgtctgg

SEQ ID NO: 401001 - DNA, 594 bp, Homo sapiens
aattcctatgctctggaatgatttcaaaaacaatagaaatcaagagatgacttccagcaaaaatgtgagaagctctgtggaccctctccccagtggaacaatcataattgatgcacattataaaacaaacaatgatttaaagtctttggaaattatcccaagggcatacagcaaatgaataaacattttttraagaaaatcttctatatctcagttagaatggaaaaagactggaaattgagccacaaaatccttccatcttctctttccaagcccacaagttagcatgacaaagctctactctggcaggtgcaatcaagaagacttcatcttccctgacttgtcagtcaagaatatcttacctgaagggtaagatatcccttttcattccttccagttgtgtgttgcagaggttctattctacccaagaatggcttagaagtcctggactctctttctctacccagcccctacttatagagcagaagcacttttctaggtttgatggactgagaatacgaagctccaattattctcacttcagctcactggctgagtgtcaccctgagaaatgggccactgtcactgacttca

SEQ ID NO: 401002 - DNA, 491 bp, Homo sapiens
tttatgccccaggaccttgtggggaacaatggagcaatcagccaggaattagtagaggctatccattaggtatgataacaacagatggagagagcttagagaaatcaaaataagacatggtcaaagagagccttgataaaatcactgttatcccaagatgattgtgtgcatgcccaagcctttactttctgaggagcaatatcagagactaygcacttctggagaaatagactactaaaatagcccagcccaattactaaacaaacaagcaggccaagcgcagtggctcacctctgtaatcccagcactgaagtggcccttgtggtaggatcccttgaggctaggagttggaaatcagcctgggaaacagcaagacatcatctctacaaaaaattaaagaagtagccaggcatagtggtgcacacctgtggtcctagctacttaggaggctgaggcaggaggatcacttgaacccaggagttcaaagttac

SEQ ID NO: 401003 - DNA, 601 bp, Homo sapiens
tgctctgtggctatatggaatgaaattagaaattggtaatgaaaataaatttggaaaattcacaaatatataaaattaaacaacacactactaaataatcaaggtgtcaaagaagaaatcacaagggaaatcagaatacactttcagatgaatgaaaatgaaggtataacaaaccaaaacttatgggataaagataaagtagttattagatggaaatttgtggctgttcacacccatattaaaaaagaagaaagatctcaaatcaataacctaacttttcacctaaggacactggaaaatgtagagcaaactaagcataaagcaagcaaaataaataaaatataaaaatcagagcagaaaaatagagaatagaaaaacaggacagaaaaatcattgaaaccaaaaaaaagtcctttcaaaagaccaataaaattgacaaacctgtagctagaataactcagaataaaagagaaaactcaaattactaaaatcaggaataaaagagaaaaaatccctattgtgaaagaaaatagaatctcaggacccctaactctctatgccaaagagaaagttaaayttgggaattgagtcatgcaatact

SEQ ID NO: 401004 - DNA, 571 bp, Homo sapiens
ttcctttttgtaatatgggagatacttgaatgcattttaattcatatggaaaaaggctaatagaagaaaggaggaaataggaaagagaaggtgtggttacacatgtttggcagtgtgacaggaagttgaatggctaagtgattactcttacagttctctaaagccaagaagcttcaggaacacagaaatttaggtattggaggaactgcctccatggatattgaagyctacctggaggatgtcaagacttttagtgattaagactaggagccaagttcttcatgatcttctataaatgagtaaaagaatccagttggtcaaaaagtgacagagaagaggaggattatgtagtaattggtgatagttggtcagatatatcatggagaacaagatatcttagggtcttctgaaaaaatatatatcccttaatatatataaatcttcaaaatatatatatttgaaatgtgtgtgcatatgtgtataaaaccctggttttagtccattcaagctgttctaaaagaataccactgacggaatggcttacaagcaatataaatttactgctgacaat

SEQ ID NO: 401005 - DNA, 588 bp, Homo sapiens
tatgtaatggtaaaagtgacagttcatccaaaatacataacaaccaatacatgtgtgtacatctaatagcagagctacaaaatatttgaagaaaagcatatatcaataaaaagaaaaggaaaaaytcagaatcatagtcaacaacattaacattgttcttagtaattgataaaatatgtagagagaaagtcagtttagcaggttgaatgacggccccctaaaaatgtgtctacctgaaacccctgaatatgacctacagtagtccttaaatctactaaatatatattccaagaccccagtggatgcctgaaaccgcagatagtaccaaacgctatacagtgtaaatgctgtttttttcttgtacataaatatctatgataaagtttaatttataaattaggcacagtaagacattgacaaaaataactaatattaaaatagaacaattataacaacatactgtaataaaagttatataaatatggcttctctctctgtctttctctctctcaaaatatcttattgtactatactcacctatttttggaccatggttgaccatgggtaactaaaatcatgaataaggat

SEQ ID NO: 401006 - DNA, 461 bp, Homo sapiens
ccctcagtcctgtttcttccaatctattctccacactgcacctagactaatgtttttgaaatgcagttatgtcttttactatttcctccttaaaagctttaagatgaccccacggctctaaaggtgaaatttaaactctttaatatktttacaaggactttcctcccttggcagcctcttgtctcacctttatgctgccttgccctctgtccgtcaatggaactccttttatttaacaaatggaccatgtcctctcacctctggcatttcacaagctttggtttacacatcatttcctctaggaaactttccatctccctgagtgaagttctagtcctatatttttccttagcattttgttcttctgcaacataattcttattacattattaattttccagtatatttttaatatcctctgttaagttgtaagctctgcgagcattaagtgttaactactt

SEQ ID NO: 401007 - DNA, 461 bp, Homo sapiens
ccctcagtcctgtttcttccaatctattctccacactgcacctagactaatgtttttgaaatgcagttatgtcttttactatttcctccttaaaagctttaagatgaccccacggctctaaaggtgaaatttaaactctttaatatgtttacaaggactttcctcccttggcagcctcttgtctcacctttatgctgccttgccctctgtccgtcaatggaactccttttatttaacaaatggaccatgtcctctcacctctggcatttcacaagctttggtttacacatcatttcctctaggaaactttccatctccctgagtgaagttctagtcctatatttttccttagcattttgttcttcygcaacataattcttattacattattaattttccagtatatttttaatatcctctgttaagttgtaagctctgcgagcattaagtgttaactactt

SEQ ID NO: 401008 - DNA, 598 bp, Homo sapiens
tgaataactatttgttgaataaaaaaaaataagtaaamtaatacaatctggagaaataattaaagttaagttggtttctttgcagcaggacttctcagaaactttaatatgtatcccttcaagcaagaatagagcatacagcatttcccaaatttatttggccacagaccacttattttatggatcatttaaagagactttggctccccagtttgggagctgctgccatagaaaggctttagttttctgatatgtcttcagagggcaaatttccaggatagcacaatatcctggaaattcaagttcaaatccaatttaagcattatgatgacacagagagctgggcacaactgaccctacatcactacagcctctccctttcacccctacgtcaccttcacttctttacattttcctgatcaaggtatggaaaaatctctttatcccctatggctcagctaaaagaagctgggattttaaaaataaatttttatgaagcaaaggaaaaataatcatggagacataaaggtcttcctgtcttgaaggtctcagaattatgtcttaagtctaagggtggacttaagattctatactctat

SEQ ID NO: 401009 - DNA, 598 bp, Homo sapiens
tgaataactatttgttgaataaaaaaaaataagtaaaataatacaatctggagaaataattaaagttaagttggtttctttgcagcaggacttctcagaaactttaatatgtatcccttcaagcaagaatagagcatacagcatttcccaaatttatttggccacagaccacttattttatggatcatttaaagagactttggytccccagtttgggagctgctgccatagaaaggctttagttttctgatatgtcttcagagggcaaatttccaggatagcacaatatcctggaaattcaagttcaaatccaatttaagcattatgatgacacagagagctgggcacaactgaccctacatcactacagcctctccctttcacccctacgtcaccttcacttctttacattttcctgatcaaggtatggaaaaatctctttatcccctatggctcagctaaaagaagctgggattttaaaaataaatttttatgaagcaaaggaaaaataatcatggagacataaaggtcttcctgtcttgaaggtctcagaattatgtcttaagtctaagggtggacttaagattctatactctat

SEQ ID NO: 401010 - DNA, 598 bp, Homo sapiens
tgaataactatttgttgaataaaaaaaaataagtaaaataatacaatctggagaaataattaaagttaagttggtttctttgcagcaggacttctcagaaactttaatatgtatcccttcaagcaagaatagagcatacagcatttcccaaatttatttggccacagaccacttattttatggatcatttaaagagactttggctccccagtttgggagctgctgccatagaaaggctttagttttctgatatgtcttcagagggcaaatttccaggayagcacaatatcctggaaattcaagttcaaatccaatttaagcattatgatgacacagagagctgggcacaactgaccctacatcactacagcctctccctttcacccctacgtcaccttcacttctttacattttcctgatcaaggtatggaaaaatctctttatcccctatggctcagctaaaagaagctgggattttaaaaataaatttttatgaagcaaaggaaaaataatcatggagacataaaggtcttcctgtcttgaaggtctcagaattatgtcttaagtctaagggtggacttaagattctatactctat

SEQ ID NO: 401011 - DNA, 570 bp, Homo sapiens
ctgtttcatttgtaacatagtaccgttaacccttgaacaacccagatttgaactgcacaaatccacttatattcaaagcattttcaatcaaatgtggatcaaaaatataatattcacaggatgcaaaacctaatatatggagagctgacttttcacatacttgggttccgtggggctgaatgcaggacttaagcatatgctgatttttgtagatgtggtgggggtcctggaaccaatctcccacatatactgagggatgactgtaaatatattttcccacctgggttctctccctcaaccttggctgaagaatcagaaatgttacttcctaggatatttatttcttcaaattaaaaaagtcttyttctttttaagagttttgtggataatcgtgataaaaacataaatgaggagttaccataggagaagacatcacataggtaacacagttgttcactattctgttagtttctattatggtctaattaattatagacccctttttaaaatttaatgcacatacacaattacaaaaacaggagacattaaaatgaattcctttataacatt

SEQ ID NO: 401012 - DNA, 595 bp, Homo sapiens
actgttgtctcagttgttcagtatccattaatgacttgaattctctattttcttckatactgaatcaacgttaggaggcatgtgattaaaaacagttctctgttaataaaggagcaggtgagttggcattcaagtacaagtcttgctgcacacatagctgctgctctcataggagtaatcccaatcttcttttccagtctacaccatggatcgcaaaataatttgtgtaaaaattcttcctgtacagcatgagttttcaatgacaaccagatgcaaaaagtcatcaagtgcttcaggctcttatacatgctgcacagatgccaggaacgtattctcgtccgcatataaatcatttccatctactataaagcaaaatgtgttctagtacatactttttcattcacattatgtgctattgacagtatgtttgtataacagtatcatttgatataggaattttgctgacttacttctgatttagcatcaactatatgtatcattagcttgtggttggctttataagcttcttgccagtgctttgtgttgtaccttttttcactatcaggagtacaatgacaaatgataacttggtaat

SEQ ID NO: 401013 - DNA, 575 bp, Homo sapiens
caacttacacatgcccattcatcctgtccatgtaccccctcggttttcatttaaacctatcacctggctgggtttttaccaatggtgccgttggaagaacagggaagcagctaccaagataggaaactcataatctttatggaagtttcatcagcagcctgattacctggcagcttgtttctcccttcacctactctggatccaaagaaactaggtctttctgcctcttctgcatgtcatgaaaaaagggattctgatgctccatggagatcactccattttctgcacattaattaccccaggaagaggggaggagggatgaagcatgaaataaaagtgctcgggaatataggtgggtatgtttcctgtatcctcccttactcatctctgtcttaattatctggatctcagagatatttatatgtgcttctggcatggtgggacctgggcagagaaattattctgtgccagttttcaaatatttggtcagtgtatatggagagggcaatatgaagactgtgcagtggtacagcagagaaagctccrtgatgcccctaatgtcttgagcaatctag

SEQ ID NO: 401014 - DNA, 649 bp, Homo sapiens
aaaaagaggaggcagtaaaaaggaaactggaaagaaaatggagtctcaaccttttcttcatgcatctagaagattcttattctcacatttcccagaaaattcctatttgatattgtttgactctgtgtccccacccatatctcatctcgaattgtaatccccacatatcaagggagggacctgatgggaggtgattagatcatgggagcagtttcccccatgctgttctcatgatagtgaggaagttctcatgagatctaatggttttataagcatctgacatttccccttctcactctctcttggctgccaccatgtaatacatgcctgcttccccttccaccatgacagtaagtatcytgaggtcttcccagccatgtggaactgtgaatcaattaaacctcttttttttttttaaataaattacccagtctcagggaagttatttatagcaacgtgaaaatgaactaatacactatttacgtttaatttccttatatagtttagggagctctgtttttgttacatgtgtacatggtgacaaaatgtgggcagagacaaaatgtaactttgaagttaactccaagccaagaccctaagatatcctggttttcttgctaaggattcctcacagatccctgaaagaatg

SEQ ID NO: 401015 - DNA, 347 bp, Homo sapiens
aaacacctgtacatgaaagttttcatgcagctttattgataataacccaaactggaaataatgtagatgttcttaagtggatgaagggttaaacagttcatggtacatccatactatggaacagtactcagcaataaaaaggaacaagctgctgatacacaggacttgaataaatcgcaagaggatgatgttgatttttaaaaagcctctcttaaaagtttacatactgtattgtttaattgatgtaacattcatgagatgacaaaattattaaaatggaaaacagataagtgattgtggtggtrgatacataaatcagtgcatataatacaattttatagaactaa

SEQ ID NO: 401016 - DNA, 609 bp, Homo sapiens
ataattctaatataggacaattcccataatccctaaaatgttcccttatctccattgtagtcagttccctcccttgcaacaaataatctgctctctgacattatagtttttgtctttccaataattttgttaaaatgtaattgtatttctgaaggacctcctattaccttcagagctccctgtgagatctgctgaggccacttttgcaactgcatttctgttcaacttctccctctgcttagtcctgcttcctttgctttctcacaagtgtccctgagagcaatctccagaaaacctcctacttgcacatctcagattctgaatttgctgccttggaarcccaacctgtgacactggtttttgacaattttacttttaggtacctaggcatggtatctttatttatcttgatcagtgttcactatgcctattcaatctgaaaagacttgtcattgttcagtccttggactttaaacaatttttttttaaattatctatttcctttaaatttttcttaaaaattctctctgttttctcctattgaatggatttcaaaatatctgcattaatattccctttctgttaattctcctttcatactctctaatt

SEQ ID NO: 401017 - DNA, 563 bp, Homo sapiens
agtgataagtgtccatgaaatcttcacaatttatgtttagagattgcagtaaagacaggcataagaaattataaaagtattaatttggggaactaataaatgtccatgaaatcttcacaatccacattcttgtgccatggcttcagcyggtccctccatttggggtccctgacttcccgcaacagtgcctgtttgtggtgttcctggaaagcatacttctaaagcctgcttattctctcctctctctctggaagtgataacctgccaacctctgagtgctagcaatttgcaaggtattgatttacctgactcttgcactccctcctagaacacacacacacacgttgtaaaacttgtttcttcctttatacaattggatttctcttattttctatgttctgacaatagtccaatttcgatctttgctctagaattttagtgctgtgttttccttttaaaccagttctttcagcactgatatcagctaatgcccctaactcatctctactgatatcagtaataccccaatcccatttctactgacatctgctaatacccaaacc

SEQ ID NO: 401018 - DNA, 627 bp, Homo sapiens
aatcaaaagggaacacctgggctgggcatggtggctcatgcctgtaatcccaacactttgggaggctgaggtgggcggatcatgaggtcaggagatcgagaccatcctggctaacatggtgaaaccctgtctctactaaaaatacaaacaattagctgggcttcctggcccgcgcctgtagtcccagatccttgggaacttgaggcaggagaatcgcttgaacccggaatgtggaggttgcagcgagccaagatagagccactgcactccagcctgggcaatagagtaagactccctctcaaaaacaaacaaacaaacaaacaagccaaaaccaaaaaaaaaaaaaaamcccacaaagaacaccttccttttacatggccctaagcctaaagaaagcaaaaatttctgtgtcttgttgccatgttagtgtgttattgacagcagaaatccatgtcccctatctctttggctaatttgtagtagtgtgtcacaaaatgtcactcttagacctcttctttgatctctaatcagatactcatgtcttctaccttccctctatccagattcctttctttgaattgagtgtctctataggatagattatactacagtaatgaacaaccacaa

SEQ ID NO: 401019 - DNA, 511 bp, Homo sapiens
atctatactatctgaaatgaccactccctagttgcttcagcaggggatagagaccgaagaagcatgcatgggctttttattgcctcatatcaaacttgatatacattacttatggtcacatttcaatggccagaattagctatgtggtcccagccaactgcaaaggagcagaacgtgcagcttctatgtgccaaaaaggaragaacaaaatattggcaaacggttgtactacttctacaatacaccattcgttggttgattccagtggtgagtctcattccaccatgttattatttatgagatgtattttacactaattcaacagacatttattgagttcctaatgtgtcctagtattcctttagacactgaatatatctatacacagatatattagttcagtgatatatcagtaaacaaaagtgacaaaacctacctaccctcatttttaatgggctggacagacaaatttttagctgctaagtgccattagggaaaattaaagcagaaa

SEQ ID NO: 401020 - DNA, 573 bp, Homo sapiens
cagtgcctctcaacctcttccagccccacatgacagcraggctctctgtaaaaggaaaccaattagaaacaaagccaacattcccagcaccctgaggacatggggggattagctaagttctccctggcaagcctgtcccctgagtcttgtaaggctggtagccacgctaactttttaaatggctgattgggggcccagtatttggtttgatttttaaatggagagcagaaggccttgaaataaaaagaaggagttggggtccacttctatactcccccttctatgaatcttcctcggatcccaggtgggctcccataatgaaatggcatttttcatctgggataatacccgaggttcattgtctctctccaaggaaatcaaggacatggacatacaaggagtgagtttaagagcagaggtttaacaggcaaaagaaagagaaaagctctcttctgtagagacaggggatttaagtgggtcttttggtccacagtgaagtgcaggagattttatagatgagcttgaggaggtagtgtctgatttacacagggcaaaaaagattggtcaccccag

SEQ ID NO: 401021 - DNA, 573 bp, Homo sapiens
cagtgcctctcaacctcttccagccccacatgacagcaaggctctctgtaaaaggaaaccaattagaaacaaagccaacaytcccagcaccctgaggacatggggggattagctaagttctccctggcaagcctgtcccctgagtcttgtaaggctggtagccacgctaactttttaaatggctgattgggggcccagtatttggtttgatttttaaatggagagcagaaggccttgaaataaaaagaaggagttggggtccacttctatactcccccttctatgaatcttcctcggatcccaggtgggctcccataatgaaatggcatttttcatctgggataatacccgaggttcattgtctctctccaaggaaatcaaggacatggacatacaaggagtgagtttaagagcagaggtttaacaggcaaaagaaagagaaaagctctcttctgtagagacaggggatttaagtgggtcttttggtccacagtgaagtgcaggagattttatagatgagcttgaggaggtagtgtctgatttacacagggcaaaaaagattggtcaccccag

SEQ ID NO: 401022 - DNA, 531 bp, Homo sapiens
gatgactttagtttcatagaaaagctggaaaatacttaaattttcctccagaaagccattttttttctgggaagaaacatatactcttataacgaacattaatgaacattatttaggaaattcacatcagagaaaaatttttattaaaaaaacagctgttccattaagagaatacttcagtaatmctttttccaccattaccaccaccttaccccctcttaggatacttagaggatagaaggctcttaatacatactgacgggtaatttgatgttttggaagatcctatctcattgattctttggcagaagaaacagttgcaatgaaagagaaatgcaagtttggaatgacatccacaatccccagtgggcatgtctggagaaacacatggaatcctgtctcctgtagtttggctacagtcaaaatgaaggaatgcctgagaggaaaactcatatacctaatgggagattccacgatccgccagtggatggaatacttcaaagccagtatcaacagtatgcctcagtctaa

SEQ ID NO: 401023 - DNA, 531 bp, Homo sapiens
gatgactttagtttcatagaaaagctggaaaatacttaaattttcctccagaaagccattttttttctgggaagaaacatatactcttataacgaacattaatgaacattatttaggaaattcacatcagagaaaaatttttattaaaaaaacagctgttccattaagagaatacttcagtaatactttttccaccattaccaccaccttaccccctcttaggatacttagaggatagarggctcttaatacatactgacgggtaatttgatgttttggaagatcctatctcattgattctttggcagaagaaacagttgcaatgaaagagaaatgcaagtttggaatgacatccacaatccccagtgggcatgtctggagaaacacatggaatcctgtctcctgtagtttggctacagtcaaaatgaaggaatgcctgagaggaaaactcatatacctaatgggagattccacgatccgccagtggatggaatacttcaaagccagtatcaacagtatgcctcagtctaa

SEQ ID NO: 401024 - DNA, 590 bp, Homo sapiens
aggtggtggtggctatgaggtgagtctcctctgcttttggaaataggaaggaagaactgtattttgtggtttgtgtgccagctcagcctcaatacaatagaacaccaggtagacttctaaggtttttgactctagtactcaactgacagatggcacttctggacccacctgggaactgggggacctcaccgccctaaagggaagaaaacaggcctggttggctttgcaccggcttattgtaaagtccccagggccttgcgtaaacataggcagcagccatggagtggctgcaacaggccttgggtaagacccagtgctrtgctggctctaggtctcacccagcacagtcacagtggtagtggccacacgggtgcttgtcatgctacccccagctttaggtggtttagaatggagagagaccctatatgtttgggagaaattaagggaaaaggacaagtctctgcttggtaatccagagaatcttcccagatcctgtccaagaccatcaaggtggtacctctatgagtctgcaagcactgcagcgttatagggattggggtgccctaaagcagttacagcttagatcacaa

SEQ ID NO: 401025 - DNA, 572 bp, Homo sapiens
aataaggcagccacagaaagacaaacatcacatttctcacttatttgtgggatctaaaaattaaaacaattaaagtcatggacacagagagtagaaggatggttaccagaggctggaagggtagcggggagctgggagagaggtgagggatggttaataggtaccaaaaagaaaatacaaagaatgaataagacctagtgtttgacagcacgatagggtgactatagttaatagtaacttaattgtacattttaaaattacttaaaagtataatcgtattgtttgtaactcaaaggataaatgcttgaggggatagctaccccattctccacaatgtgcttatttcacattgcatgcccatatcaaaacatctcatgtacctcataaacttatacacctactatatacccacaaaataaaaataaaagcaaataaataaattttatatgaatgaacaataatttattcaataatcccttactggtggatatatatgttgwttccaaagttgtgctatcattatacaaaacattatacaaagttgtgccatcattatacaaaattggcattag

SEQ ID NO: 401026 - DNA, 543 bp, Homo sapiens
ggaagggacttgccttgtctcaggtgagactatggacttggacttttgaattaacgctagagtgagttaagactttgggagactgttgggaaggcatgattgtgctttgaaatgtgagaaggagatgagatttggcagaggccaggggaggaataatatggtttggctctttgtccccacmcaaatctcatgttgaattgtaatttccagtgttggaggagaggcctaatgggaggtgattgaatcttgggggcggacttctcctttgctgttcttatgttagagttctcatgagatctggttgtttgaaagtctgtaacacttcccctttctctttccctctcctgccatccatgtgaagacgtgcttgcttcccctttgccttctgccatgattgtaagtttcctgaggcctccccagaagcagaagcctgtacagcctgcagaaccattagttgattaattctcttttcttcataaatttcccagtctcagatatgtctttatagcagtatgagaatggactaatacactctgcatctgt

SEQ ID NO: 401027 - DNA, 617 bp, Homo sapiens
gttgatgtgtatgtgtggcctgcagtgagtgtgtgtagatatacatgtgtgtatatatatgtgaatgttcatatatgtgaatatgctatctatcttatatgttcatatatgtgaagctgctatctatcttaagggctttcaagagaaacacagtagatgtgtatgtgtggcaggcagtgaatgtgtatatgtgtgtatgtgtgtgtacataggtgaatgtttatatatgtgaatatacatatatatataggtgaatgtataatatatacataaaagtgaatgttcaaagtttttttttgacaaacccattagggtaaactaccatcaactacagagtrtctgaatattcagaaaatataaggtaaatttattttttaaatagtatgttggtttgagtttcaagtaacatgctcaatatattttttaaccctctaaaggcctttttaagtaaaatacctctgatttaaaacaatgaatccagttgttaagctaaaaaaacttcataaataaattacaaatgtccaagaaagacaggggaaattgcatttgttgcatttttgtgccagaaaaagaggaacaagggataaaggagaagagttggaggagagagagaagag

SEQ ID NO: 401028 - DNA, 347 bp, Homo sapiens
taatgcttgctcatttacataactgtgtattgtgtaaataaagctgtagcattttgcttttcaacagggtagttctactgagatgatawaagctagacaaaggggggtacaggaacttaaactaggtcatattgaattttaatgcatgaagccaactctggtacattttatatggataatgaagaaccgcaaaatgcagtctgtttactgtgcatctgccttccatatttttcaataaacgtattttctacactgaagagtgaagccaatttcagtttcaggctgatttagaaatgttattaaaaataaggatgagcatcttcttaattcttacattaaaatgtaaa

SEQ ID NO: 401029 - DNA, 371 bp, Homo sapiens
attacagcatgttagagaaagttcytcagaaacccccaacacagtcctgcaggatttataaaatttagtagaactggtccagctgccagcaccctatcacccacctgtccaggccttataaagtagtctgaagatgggaggactcactagagtcatgaatttctggtctggttgggagcttctgaatcccaaactaataaagctagaaatggaggtaagaaggggacactgggatttcattccccagttagactactgcaggtcttggcaatttgttcctcacttgtggtcggagggagattgtgttggagcaagaaaggtaagaaggagaagaacctataatctcagtttggcataacaaagttgagtaa

SEQ ID NO: 401030 - DNA, 569 bp, Homo sapiens
aagaacctataatctcagtttggcataacaaagttgagtaagatttctttgggccaacaggatgatttgaaaggtggcctggctcaaatcatgttgttagtgcccaacrtaagaagtctgatcactaggaccttggcagcaagaggctgaagtgtggacctttagtggcacaagctgaggaagggttgtaagaggtcagggaacaagccttatgaagaattcacacattgtccctgagagagtcagacagcatctggacatctgtcactcagaggacaaccataattgtcattaagtacaaaagcatttgcccctttttctcctctaattcctcctcttatccctaacaatggaaagcgcaagaatcagaaagcatggaacacggaagaaagagcagaccatgccccttttcatggttcaacctgagccagaaaaaagggagtgttcaattggataagagcctaaagtttcaaataagaccagactttctgatatctgacaatgtctttgaggaatgagaaagggagattcaacagagtgtacagtcatgtgtcacataatgacatttc

SEQ ID NO: 401031 - DNA, 547 bp, Homo sapiens
gtcttatttttcctgcttctttgaaggcctgataattttttattacacaccagatattgataattttactttgtctgctactgtatattcatgtatttaaaacaatattctggagctttattctaggacatagttaaattactttataacagtttaacaaaacagatttttgttaggtgggaccagattagcctttagggctaattttgcccactagtgagtcaatamccttcagagtgctccacctaatgccccatatataatgccatttttctactctgacaaagggaaacagtaactattactagccttgtgggacctccagggattgttctatctgcccctttcagatggttctttccatggcctagggttgttttctcatatacatgcaatgatcaggactcaggtgaagagatgctgagggaaaggggacctctgaagatctccagaactctctagaccagaagttctctcctctctgattccttgcccaaattctagtttccttggcctctgcaaacccttaattctacctttccaactc

SEQ ID NO: 401032 - DNA, 615 bp, Homo sapiens
cccttttccaccaatactctataggatgtctgcttttagatatttcatgggtatttcaaactcaacatgcctgatactgaatgtataagctgctccacacaggggcctttccaagtagtcctcacgtcaattgatggtattgccagttatatattagaactgtcagcaatgattcttaaattctctctcttacattctgcagttaactaattatcctcatctatcagccttattcaccgtttaaactagcatttattcagcatttactatgtgccactasctcattttaggccctaatctattctctctggattaccatgaaatttctttactgatcttgaccattctagtctctgagcccatgtcttcccttcttccctactccatacctttataatcctcttcacataattatattatgatcttccattaattataattatttatttgcacttaaaaattattaccaggagagattcttgagtcctggaatcatgtcttgatttacctttatgcccaatgtacagaaagccataggtgagcaatacgtttgctgaaataaggaatgtccaattcaaggcagtgctctctagcctcagaaataaaaatataaga

SEQ ID NO: 401033 - DNA, 602 bp, Homo sapiens
agcctaccttctgtatcagtgaactggcaccgatgttagtgaacttgtcagcttttctgagtgagcataaaaaagggcttgtttactagagtttgaatctaatgaacagctttctcttattttgtgtagtttttccagccatttgacttgcagaatagagaaatcatatttcaacttctccgggttgaaaaactgccccttttccaatttgtcaccaagagatgtgaaacagttatttctgaggcagctttattatggaaaatagaatgagtaactcatgtcgctcaaatcaaattcctcagggagtaggttcagtagagattcaaaagctgggagtaagattaaaaactaattttctaggtgaaatgagaaaaggttctttttctttgaaatgaatggctctttatagaggaaacagattcacaaggtacaagtaaaacatttgaattcgggtctcctcaccctctttcctctctagattcagaaaacagcaaagggttttagctttgatacttcaggcaggatgaggtggacrctggcaatggaaaagtcagcctgagagctagggaggaaactgagtctttcttcatctagtcagggaa

SEQ ID NO: 401034 - DNA, 571 bp, Homo sapiens
aaagtcagcctgagagctagggaggaaactgagtctttcttcatctagtcagggaaacttccaggagacaagctttttgcctcaggctgcttcagggactcaggtaccaggttcttactctttatggacctacgtacttactgcctgctcaaaggagactatgtggacattcaggggttggactgcccaggcataagaaagataccaatcctttaaaaatatatttctaaaagccaattataaaaaaattctaatgtatttaaattcaatctgcagccttattacaacgttgttaaagcgggctttatatttaagacctagaggttacaggagaaagtctgttggccataggaagtctcctttaaaaagtggtatcaagctgctctgctctgcctatggagtagccattctttttgcttstttcttaataaacttgctttcacttttttctaaggcagtgttgtcccatctttgggcttccctgggccacactggaagaagaagaattgtcttgggccacacataagttatactaacactaacgatagctgataaactaaaaaaattaaat

SEQ ID NO: 401035 - DNA, 584 bp, Homo sapiens
atgcttgaaatatttatactcttcaccacttcaaaattacagtagatattagacccactgataaatcttatttaatgcattattgctatattactatatcataactaaaaactgacaattggatttcaatagaattcattttctttgaaaagctgtaaatttcattttatagattttatagtttgagaataggcttcactagccagccacaggcatccatggcacaaacagaggttaagaacctctgtgtctgtgcccrtcatttcattctgccctaatatgttacttgctttttctatgttgcttcttttatttactttaaagctgcataatactagtactttaagtaattcccctagtactaataatcttgtttccatttttcattgatacgaatgctacattaggcatcttaatgcataatattttatttttcttgctttgtatttaggattattaccttggtatagaatccgggaagaggaattaactggtctaatggaatacacatcattatggttcttgatttattctatgaagttgccttccaaaagggttctctcaatttaaaaatactgtaagtg

SEQ ID NO: 401036 - DNA, 616 bp, Homo sapiens
gtttataaagtcaaactataaaaatcattgaataaaacctaagaaatgccattctgaacataggccctggcaaagatttcatgacaaaaatgccaaaagcaattgcaacaaaaacgaaaattgacaagttggacctaatttaaactaaagagcttctgcacagcaaaagaaactatcaacaaacaatccatagaatgggagaacatatgtttaaattatgcatctgagaaaggtataatatccaaaatctacaagaaacttaaaaaaattaataagcaaaaaccaagcaatcctattaaaaagtgagcaaaggacacgaacagacactttcaaaagaagacatacaaatggccaataagcatatgaaaaatgctcagcattactaatcactagagaaatgcaaatcaaaaccacaatgagatgccatctcacaccagtcagaatggctagtattaaaaagtcaaaaaaaataacagatgctggcaaggttgtgaagaaaagggaaggaatgcttgtacactaytggtgggaatgtaaattatttcagccactgtggaacgcaatttggagatttctcaaagaacttaaaacagaactaccatttgggtacatgtcc

SEQ ID NO: 401037 - DNA, 621 bp, Homo sapiens
ctctcttttcttccttctcctttcgcctcctctagtttcctttctgtcttgttttcttctcttacttctccttcctcttctcttctttttctctctttcctggcaaatgtcttccacatctatggcttaaattaccaagtgtatatccagtccataccttgcccctgagctccaagctcgcacgtcagactgcttactctgactgtctgtcatacctcaaactcaacacagccaaggctgaacttcagagcttccttcacaacctggcctcttccagcgttcagtaatatccatctaattatgcacatcaacaatctagatgctatccrttctacctccctttccttccacctttaaatcctttccatctccatgtctggtcgatatttctggaatacatcattctctcccaccccaccatcactaccctagtccaagctgccaacgtttctccctgacatctgtaaggcctcctacttagtcactaccctcactctggcacctctcccactgtcctccactctgggccttcaatactatttttaatgcaaatcgtgtcatggcacagaccttgcttaccatcccccttggcgacccctcactctcagcgtaatgacccac

SEQ ID NO: 401038 - DNA, 503 bp, Homo sapiens
ctgcttaagggcagccaccttctccatggctccccagtgcctaggccagttctcagcacacattaggtgctaatacatggaatcagtcagtgaatgaatgagcgaatataaagccattcaaaattcatttcttaaaaagtgtatctattaaagaattgaatctacttgaatgcttctcctcagtgtcattgtggctgaagagacaatgatagcagtaaactcttctaactgataggacacttttgttgggggcatggggtggaccatctttcatatttgctcggctcaggaacattgcatgtgtacagacaccttgacagatcaggagggcctccaaaagcccttccacgtacatagctatcagtgtgactccratatctactggaacaacccaaactctcgacatctgggtaaaagtgaataaaatccctaattccagtgtgtggagccttcaccaggattttgcagaatcccgagggacttccaggggcacggcccaggca

SEQ ID NO: 401039 - DNA, 493 bp, Homo sapiens
caaagagggagcaggcacatcttacatggctggagcaggagcaagagagagaggggggaggtgctatgtacttttaagcaaccagatctcaccataactctattgcaagaacagcatcaagagcatggtgctaaatgattcatgagaaaccgcctccatgatccaatcacctcccaccaggtcccacctccaacactggagattataatttgacatgagttttgggtgaggacacagacccaaaccatatctatttcytaaaagcattggataatggaatccttttgggggaatactcataataataattttttactggaagtactttagggaaagttgattgtaagactaaatccctcacagtggttaatcatgctgcattatttacttgaaattatctaagggagcagatcttagtgtccttacttccctcccgctccctacacacacacgaatggtaactgcttgtggtgaggatgtgttaattaatttg

SEQ ID NO: 401040 - DNA, 544 bp, Homo sapiens
gcaaagtaataccgacgcatttgaggggagggagggtgatgagatgaggtacactgtaaatttaatgaagaaaacacacatgatattgagtgagagttgagttattttgataattgttgggggggtgaaatagaattgtggctggtattttgattcctttttgatgctgttttagtatttttctgaggtttgcctctctagcattattaaagctgttgttcaggattttgatgtctgcactttaatagtttttcttctgaggctggagagagaaagagagagagtgcaaattaattttggagtaagagtgactttagaccctaagcattagaggatttgatatatttgtggtttcaactatttatttgcaaagcaccctgaaagcccttaacacacgatgaatggtcatttttagagacaaaaatttgaatattgattstcgtgaggccggcacagaggagctggtgagtgaacctagccacatccggaacagccactgctctcttaggtcttggtggtttttgctcagttttgagtatgtgat

SEQ ID NO: 401041 - DNA, 355 bp, Homo sapiens
tgtggcccactgctcccactggtcccactactagcttctaagaaagccacccggaagcaccagaatcagccctccaggaaccactaacacggaaaccagtctaagtttctccagacagacaccaggtacatttaccccactgctgtcaccactagggcccaaagactggctcaagtggtgtcccagtccccawcaaaacttaaccacaacttaaagtaataactgtgccctatgccaccaaggaaatcatacataccattgaccctgtgtgctgccaaagaagtcatataaagatcacactaccatgggcacccaaaatcaaagccagattatctttctgaatcaataagacata

SEQ ID NO: 401042 - DNA, 562 bp, Homo sapiens
tataatttatttagtatacctatgtccccaaatttgcatgggacatacatatacttaaaagttatttatctaaaatacacatttaaatgtatcccataaataatcttgtatccctactactttgagatgtaaagtgtcatgaatcttcagttaaagtgagagctttacgataacaactgaggttctgcctcaattctatctcacagtgggctcacttgtctaccttcaggcccacccaacaatcattttcccagactccaatgcttaactgagatttagaaacatggtagagtgacttatacattgggtccctggtctgtggattaataactgtcatagaggtaagggtcaaatgaaaagctatgaaaaagctcttctacacctaagatagtgtaacaaaagcagtactgtactcayagttgatgtcatactcaatggtaaaagattaaaatatttccccctaatatgaggaacaagacaagaatgtctactttcatcactgatatccaacactgtaccccattctagtaaaaaaaaattagacaagaaatttaaacagatg

SEQ ID NO: 401043 - DNA, 503 bp, Homo sapiens
tgagctatgaacagttaacccagtcatctatttttgtagaatgagcaatggtgtcatgtcatggttataggaggaaaagaactagaagtttggagacatcttccagacagaagcatgtgtatggtcatatggaggtgggaacaaaatgatattttcattacacattaaccccatcatgaaagtatagatcatggaaaagacactgaaccattaaatagacattgtgacttggcctttgtcatcagccaccccacaataggcatgatgaatacatgaatggggtgatcatgttgacaaagtcacaggctataaatgggcccaaaaagatgaactcccactaaccaaggcagatctactgacacctctgaatttctccttttyagtaacagagaccaatgctaacacccattatggcactattcctcaaggaaattgactacttggtgagaattacattgggtagcttctaccccaaaaacagtgctactcatcctcaaagctat

SEQ ID NO: 401044 - DNA, 476 bp, Homo sapiens
ttttcattctatcagaacagcaaaggttgcttacatgttagcataatctgttactgagggtgaatgaaaaccaactcttttatattctattggtgggaatggaaatatgggatacctttcataatccctatctgtattggcctagctattctgcatgtgcgtataaccataaamgcagtttatcctccccaaaccctatgaagccagcccttttattatcccatttcatttgtgatataaatacaacaaatataggtaaagcaacttgcccaagattaaaattaggttttgttttttttttggctgaaatttggtcctagtctgacttcacactccaggctcttaatcaaatttaactgcctttctatgaatatttgaggatattcattgtagcagctttatcaatatagtattagatataacataaataccaagcaatatagaatttttttaaaaaattatcttcaagaaatgaa

SEQ ID NO: 401045 - DNA, 476 bp, Homo sapiens
ttttcattctatcagaacagcaaaggttgcttacatgttagcataatctgttactgagggtgaatgaaaaccaactcttttatattctattggtgggaatggaaatatgggatacctttcataatccctatctgtattggcctagctattctgcatgtgcgtataaccataaaakcagtttatcctccccaaaccctatgaagccagcccttttattatcccatttcatttgtgatataaatacaacaaatataggtaaagcaacttgcccaagattaaaattaggttttgttttttttttggctgaaatttggtcctagtctgacttcacactccaggctcttaatcaaatttaactgcctttctatgaatatttgaggatattcattgtagcagctttatcaatatagtattagatataacataaataccaagcaatatagaatttttttaaaaaattatcttcaagaaatgaa

SEQ ID NO: 401046 - DNA, 476 bp, Homo sapiens
ttttcattctatcagaacagcaaaggttgcttacatgttagcataatctgttactgagggtgaatgaaaaccaactcttttatattctattggtgggaatggaaatatgggatacctttcataatccctatctgtattggcctagctattctgcatgtgcgtataaccataaaagcagtttatcctccccaaaccctatgaagccagcccttttattatcccatttcatttgtgatataaatacaacaaatataggtaaagcaacttgcccaagattaaaattaggttttgttttttttttggctgaaatttggtcctagtctgacttcacactccaggctcttaatcaaatttaactgcctttctatgaatatttgaggatattcattgtagcagctttatcaatatagtattagatataacataaataccaagcaatatagaattttttwaaaaaattatcttcaagaaatgaa

SEQ ID NO: 401047 - DNA, 580 bp, Homo sapiens
caacaggatttggaggaggtttgttcagagaaggagattagcacagagcaggcagcttttaaactcaaaagggaaatttataattttactcgcacctccagagttgtccatagctttgtactattgatgacaatgtctgatttggacaccagctggagcagagagccccttcagcccaaggccgtcaggggttgggattcttcccagggaccctttggcccccaaggcagtcttgtttccagtggctgtgcttgtggcagagaggataagccatgggaggcgttttcccatttatcccattggggcgcagtttgccttgcagtggcctggcttcctgtaccaatggcatttacctggaggagtgtccttagggcaacttaaagggggctggtgggcttgcagagcagccaatagttgagcctgcctcctttccstgggtttctccttttccttagccctctcctccttattttgctgttggcttaaaaagactgaaaaggctaactaaccaaggaactcctgcactgggtcccaaggctgacttctgtaacttcctcccaagtcatttttaagccaaaca

SEQ ID NO: 401048 - DNA, 647 bp, Homo sapiens
catttttaagccaaacagtattacaaaggaaaactagttttgtaaggtttgggggaatcaaacttttccagttttgggggaagcatccaaggggcacgtcctatgttatggagatgtgattacccatctgtgaagagagaacagagcagaaaaaggaaaagagtaaaagaaagctttccctctacttgactactatcatgatgggcatcccccatcattctttgggttctggaataaaccagtcttactgtgtacccttggtaccatctcatcacagttacccacttgagaatagatgagatgctggagtgaagcgttggacccctgttcgtccttagggttccagaataactggtcttaccatgtacccctaatgtttcatctctgttctaatggtaatctgttagcctgggaccaacctatatctttgttcaatgagtctcttgcacctgtgtccttgggctggcctatatccttgtctccaagacttyagagtgactctcaccaagagcatttgtgcaataaaatgattatctcttttctcagattccaatttcccacattccttaagtagatgagaattctgtttttcagctaactgccacaagggggctggacttccctccagctcccttcgaatatgacct

SEQ ID NO: 401049 - DNA, 618 bp, Homo sapiens
cgggcacgtaggtggtatttaaagccagatgaatataggacaataaggaaagggaataaaggattatgaaatctaaaatttaatatataaaaataaaatacaaatagagggcaagaagattgaaaatgagcggccaaagagagaaaagggatccgtgactcaaaagctcagagttatatgaagatagactgggccttgtgatggtatcacattctctagagacgtcaagtaggatgaagtttgagaagaagccattagatataacatttaatatgtcagtttcactgattcaatgggtggtatgtttagatgtaaattgaaattaaaaaatgaagacaagaagtttacattcaagatttagctaaggcaaggaaaaagaggagtgttttgtttaaaatgaagaaataaactcatatgtgaaggtgtgctataacttataaacatactacataaatataatttttactggaaaggggtccctatctagaccccaagaaggggttcctggatctcatgcaagaaagaatttgaggcaaatccgtaaagtraaagcaagtttattaagaaagtaaaggaataaagaatggcttctccatcagagcagcggcttgagctgct

SEQ ID NO: 401050 - DNA, 675 bp, Homo sapiens
ggaaaatactaccttattttgcttgggtcaaggtttatgtcattagtgataaaaataatgttgatagcatgtacctgtgaatgatatgttgagagtagcatgttttctctgttgtccttctcccaagaatctataaccacagtcttatcatgggtcaaacatgagacaaacataaattaagggaaattttacaaaacacctgacaagtgccccccaaaactgtcaagggcaacaacaacaaaatagtctaataaatccttatagcctagagaagcctaagaagatataactaaatgcaatatggtatcttagatgggacactagaataaaaaaggacattaggaaaaaactagggaaatccaagtaaagtatgcacttcagctaataacaatgtatcaatattawttcactagttttgacaatatgcaatagtaaggtaagatattaacaatataagaaatagttcatgttagaaaagagttatctgtgccatctttgcaacttttctgtaaatataaaactatttaaaggtttatttaaattttaaaggacaaaaataatattataactaatttccagtaaatgtattaacttaattaaaatctacaatttccctgaaagagagaaactaccaaaatttactcaagaagaaataagaaactaaatagaatgaca

SEQ ID NO: 401051 - DNA, 675 bp, Homo sapiens
ggaaaatactaccttattttgcttgggtcaaggtttatgtcattagtgataaaaataatgttgatagcatgtacctgtgaatgatatgttgagagtagcatgttttctctgttgtccttctcccaagaatctataaccacagtcttatcatgggtcaaacatgagacaaacataaattaagggaaattttacaaaacacctgacaagtgccccccaaaactgtcaagggcaacaacaacaaaatagtctaataaatccttatagcctagagaagcctaagaagatataactaaatgcaatatggtatcttagatgggacactagaataaaaaaggacattaggaaaaaactagggaaatccaagtaaagtatgcacttcagctaataacaatgtatcaatattatttcactagttttgacaatatgcaatagtaaggtaagatattaacaatataagaaatagttcatgttagaaaagagttatctgtgccatctttgcaacttttctgtaaatataaaactatttaaaggtttatttaaattttaaaggacaaaaataatattataactaatttccagtaaatgtattaacttaattaaaayctacaatttccctgaaagagagaaactaccaaaatttactcaagaagaaataagaaactaaatagaatgaca

SEQ ID NO: 401052 - DNA, 458 bp, Homo sapiens
ttaaaattcaacctatttaggaaattatttcatggtaatttttgagcaacttacakttttgtgacatggcagctttcttcctatccaaaatattgggtggtttttattttctcctaaaaattattttgtcttttatttcagttgttttgtagtgtgtcttctttaactttggtcttttcttcacttattcttatatatatgtgtgtgtatatgcatatacgtatgcatatatagatatgtgtatacaaatatgtatatctgtatatatacaatctctacaaatgacctcctgaataagtggtatttggagtaggtagtgacacagctgcttttaactactgtattaatgatttctgaccttctttgtcacattctctttgggcatgtatgtggaaaacaatatgtggtcttcttaatcattccatggtgcgtttttcaaatcctccatctccctacca

SEQ ID NO: 401053 - DNA, 531 bp, Homo sapiens
agataatttttgttaaccccaatagatatagtaatatgtacagttctgatgattaaaaaaaagaaaatattgttataaagtcttctataatcaggaataattatttcatgtaatggtatataaaattgagtacattttggattgtgatttggtaaatacctcaaacaccactaagcatattcagactgtatctacagtgaatatttatatcaactttaattgtcacactgaagattgattaaataggttttggtttatgtcctttctctaagtggaaaaaagatcatttttattaaactgtgattaaaaacaaaactatgcacccattttcatacaaaagtyacaaaatcctagtgtatcaatctgcataatgcattttagatacaatccactagacagctgtattaaaagggcaatttgagcacagacctaaatcatcccttcttctctaaatgcttagtaatgctatacaaaatgtacaaacacacattaaagtacatatttgcatttaataagagaaaagacaaaatg

SEQ ID NO: 401054 - DNA, 505 bp, Homo sapiens
gctagtaccacaggtgttcaccaccaagcctgttggggctttttattttttatacatatgaggtctcactatgttgctcaggcttgtctaaaactcctgggctcaagcaatcctctcaccttggcatcccaaagtgctccatgtaaaccttgaaatcagtttgtggttactaacaaaatagctggccagratttttattgtgattactctgaatctatagatcaagttgagaagaattgacaccctagcaatattgagtctctcaatccaaacatggatcatatccccatttgtttagatattatttattttatcagagtacagtggttttcagcatataatctgtatatatttcattaggattatacctaagcattcatttcttttctaattattataaatgtatatcttactttaaattttaatcgccattgctgacatatatgaaagcatttgacttttatacactaaactcatgttctgcaatcttgctagaccaacgtct

SEQ ID NO: 401055 - DNA, 612 bp, Homo sapiens
aacttatgtttcttccctgacaatctgtataccttttatttcctttccttgtcttattgaactatctaggattcaattcaatagaattctagtacaatttaatttattgcactccctaggatagtacaatgatgaataggagtggtaaaaaataatatccttgccttctctcaatagtagggaaaattgcccagttttttaactgtcaagtataatgtgggctataggttctttgtagatgtcctttatcaattagaggaggtttctctataatacaagttattgagaatttttatcacaaatggctgttggattttgtcaaatgktttttctctatctattgataagatcatgtaatttttctttttcaggctgctgacgtgataaattacattgacttttaacagagtctaaagttggttctctgagatgatcaataaaatgataaaattctacccaagttaaaagcaaacaaacaggagagaagatacaattacaaatataagatgtgaaatgggacattactactcataccctggacagtaaaatgataataaaagaatactttgagaaatgctatgcttacaaatttgataacctaggtgaaatagt

SEQ ID NO: 401056 - DNA, 597 bp, Homo sapiens
ctggttgtccctcccactgccctgcaaggacactgatttaacaactaaaaatcaccttcataagaactaaaaatcaaatgagcactcacagtacctggttttaatttcctatccctgagagaggtactgaagaggtaggaaaaacagtgttgaattaccaatgcaacctcttccctatcccccagcagccatggcatggtgcggagagcatttttgtgcaatggggggaaggagattgcagcaattgtgaggcattaaactcagtgctgccctttacagcagaaaacaaaatctgacccaaatcaggtgatacctgcctatggagggagcatttaaaccagcgctagcaagagaggaatcttcarttccagcggtccaaacttgagttcccgcagtcctcagcattgtaagctaaattgtgctggggccctaaataaatttgaaaggcagtttcagcctccgggactgcaaatcctagtttagtcctagtgctgaacttggttcatagacagtggactcaggggcacatgacatactgaaacagcagctggggtgtctaagggagtgctgtcatcactcctcccctaacccccggct

SEQ ID NO: 401057 - DNA, 208 bp, Homo sapiens
tatatgccaacaaactggaatatctgtaaataatgtaaaaatcctcaggtacatacaactacaaagattgaaccatgaagaaatccaaaacytgaacagaccaataacaagtaacaagatctaagtaaatcaaaagtcttccagtaaagaaaatcctgagacccaatggcttcactgcagaattttaccaaatatttaaagaagaaat

SEQ ID NO: 401058 - DNA, 575 bp, Homo sapiens
attttgtttggaattatattgaatttataccgtaatttgaaagacttaaagtctttgcatagtttatttgtccattccagaaacttttgtctctcttaatttactcatgtcttttgtatctttgaaaacagttttctagttttcctttcttaattttttaaaatttatttttattttttgtagagacagggtcttgctttgttgcccaagctggtcttaaacttctaaccataagcagtcctcctgtcttggcctcccaaagtattgagattacaggcgttagccactgcacccagccactctagttttcttagtacaagtgtacccacttattgttatctctattcctaagtgttttatacttttctgctgttgtaaatgagactttttgtatgttatttccaaatttattatttctttaatttttgtacattgaccttttattgagacaccatattaaactcccttaacctctctctcttttgctttttttgattaattttacctgtagacttagtkctatagtttcaactctatactctcaaagtcagttttgtttcttccttcttaatatt

SEQ ID NO: 401059 - DNA, 593 bp, Homo sapiens
cagcacccattccctagccccctgcctgccaatccatccttaaaaattctagcctctgaattcttgaggagatggctttgagaaatatcttccatcctccttgctcagttgtcttgtgataattaaactctttctttactacaacacctgctgtctcagtgtttggctttatctgtgcagtggacaagaaccctgtcaggtagtaacaatggccgggaaggcccacccagttaaaggctaaagacttttttttttcctttggccatataaggtaacattcccaggttatagggattaggatgtgcctatcttttagaggaccattttttcatcccatgacagcccccaaamtttatactcaccaccaccaacaagaacaaaagacaaaagcagtgcagctcagactcaacttcctcagagggcagtgaagcaagcccctttgagcagggtaagagagcagagaaaagacagttggctcagtttaccaaatatttcaaccacatacagtgtttcagcccatccatatagactggctgcccagacattacatggttgtccttttctttaatcaggctcctataagggagtgatta

SEQ ID NO: 401060 - DNA, 652 bp, Homo sapiens
ttaaaagataaacttaggcatgttacaatgttaaagaattcatttgagcaaacagcaattcatgaattgggcagcaccaaattgcaagtggtttgggctccactgaaggggcctagggggaaagtgcaagaagcagatggcaggggggcttttatctattttattgattaaactagaacagtagccttaaagtccctagttagaggttagttggtggtttctaattggttagacttacatttcattttattgttttcatcaacttgggttttggtttgtttagtagcaaccaaaggcactggagccatctcagcataatggcctcccatttaaattttctttaacaggggaatccttaacaatttggtgggagagcaggcctgagggagaggacgactaccaacaggtcagtcttcatgggagtgaagaytagactacaggaattggggtgtctgatgtctgactccccactgctgactctccattgtcaccctgtggcagcactactgtggagcataagggtacaactatggtcctgtttggggatgaagtagaccagaaggaaatggagattttgtgataaaatgaccagaggccactgagaagaatctgggagcaggagtctggagtgagagctgacaggcaacgacta

SEQ ID NO: 401061 - DNA, 568 bp, Homo sapiens
ttgggatgagtctggatggggaaaaagggaaaagagagaggagaaaggaaaagggtaagaagagaagagatgtacttaggagtaaaataggagacagcttgagtgctccagactctgacttcagcactttcagaaccacttaaaggaaaaaataattaatgtttacacatgtcaaactgaaagacaaaaggaagaaaatgtttcaaagaggtaagaaaagtgtggcagtctgggtggtctggctgaaagaggaaaaacaatgttcttgtcaagttgtgctttgaaggagtcctggtggaatggagtggaacattctgatccaagsctcagacagtgcatgccccactccttatccagtattctaacgtatttgatggctttgttcttttctgtctttcttctgaagttcccaactcagtccacaaatttttctttttagttaaaattaagtccaaaataacaactccccttgtcatttctatattaagcagaaaatgacattctagaaaaatgcttactcattttcaaaaggcttctcatttattgtcctcacaagaactttatttat

SEQ ID NO: 401062 - DNA, 575 bp, Homo sapiens
gactactgcatctgagcaaatgcttactccctatttaattgtacctgtctttacctatttattcagaggagccagctgccctggaccccatcccaatctctgtcaaaggtcactctacttcccaacccaatgtatcccacattcctagaagacagaggctagggagagattagaagagagaggttagratgccaggattaaaaggcagcttgttttcttctttttcacatgtcaaactgttaaatgccattaggccaactcacttcccagcatgtgacaaggacactgctggcagggaacatctcctttctctgaccctcttttgctcttcttaatcctcaaatattgaagtttttatcttcagcaaatgaagaggtaatttaaactgcttacagagagaaaccgaatgggggaaagggtatatgttgttagtaaccccccacagtttaagtgtttttaattgtacatataggttttctgttagaaaatgactagaattttctaaggcagcactgcctaatagaaatatagtgtgagccacacaatataatttttaagtttttagtagtcattaa

SEQ ID NO: 401063 - DNA, 578 bp, Homo sapiens
tacaagtgtacaccatcacacccggccaaattttaaaatttttgtagagacaaggtctcactatgttgcccaggctggtctcctgggctcaagcaatcctcctacctcagcctcccaaagtgctgagattacaggtgtgacccactccacccagtactaagtttttttttttttttttttttttwattaaagctattgtaaacgggattgttttcttgatttcattttcagataggctgttagtgtatagaaatgcagctaatttctttatgttgattttgtgtcctgcaactttactaaatttatgtattagttcttatagatttttggtggagtctttagggttttccatatataagatcatgttatctgcagaggcaatttcaccttaatggaaaagaccaaagtaatttttactcttcctaacctttcatagtaataaatgacatttatcgagagcccaccacacagcaggcactgttctaagcacttcacagggatcatcacatcaaatccccacaataacccttgcggttagcactgccattattatcattttggagatgaggattgcccac

SEQ ID NO: 401064 - DNA, 568 bp, Homo sapiens
aatttcaccttaatggaaaagaccaaagtaatttttactcttcctaacctttcatagtaataaatgacatttatcgagagcccaccacacagcaggcactgttctaagcacttcacagggatcatyacatcaaatccccacaataacccttgcggttagcactgccattattatcattttggagatgaggattgcccaccactctaccagcaagtggcagatctagagtagataggagtgctgtatttggaagagcacgttcctggggtaagagtcacagtcctgccttgttcctgactagtaaatgagactctgaggacctggatggcttcacacaaaagtacagagtaggctgagggctgaaatgaaatcatggttgagatattctagacccctttcatcaagttcttaaaagcccgcactctccttagaataaaaggagtttaaagggagaaacaagcaatagaactattttcttccatttttctaaaattttattattttctagatcaatagtcttatactctcaactcttttaaggaaagaggttataggatattttgtatag

SEQ ID NO: 401065 - DNA, 569 bp, Homo sapiens
ctttggactgggattcacaggatcataagaaatgatacggattaaaaattattttttttataaaattaaataaaaaccaaactttctcctgtcattcgttttattaacatggatttttgtctaaacaatttctgtttgagtaaatgtcaacaatctttccatcatcattgaaagcatattactccaggctagctataaactacctcacattaagtaacatcaccagatcatctgtggtgtttttttcacctatatttataatatcatcatcattatcttctgtaatcctcacacttactatatttgcaacatttcagcaatctccccatcactgaaaatatacaactgcatcactaccaatgatcagtatttctttactatcagcttcttctaacaacttcagccaataaaaacttagtgtaataataaagatwgacataattgttttttcatcaatggccccacatatttctaagtttgtgttggtggttttattttccaacattggagtagcaaaattctgttcctagcatttgttgatgttgacttaataatatcattctgagcat

SEQ ID NO: 401066 - DNA, 574 bp, Homo sapiens
tagatgcagttaagatataccaccagttgactttaagtaaaggagattacccttgatattgttggtggacctcatacaattagttgagggccttaatagcaaaaacagattgttttggggaagratttctaccttaagactgtaacatagaaaccctgcctgaatttccaacctatggaattgccctacagatttcagatttaccagccccccaccaccacagccttctaaatattcacattattttcagtgttcaatttttgcagtgtatagtagcttgcttcataacaaactagtagtatatgttcgcttcattgtcaaatccacttaattaacatatcatcatgatttgcattctttgccctttaaagcgttttcctatttttcattagttcttagtcattgttgcacaggaaatcttctacaacttgccgttctgttttttaagtcatatattgttttgattctgatactgtatttttcaagacagatagcaggatctatcttctgtaataactttacttataatattattgatttcaacaggcacttccttttcttcctttccctctct

SEQ ID NO: 401067 - DNA, 574 bp, Homo sapiens
tagatgcagttaagatataccaccagttgactttaagtaaaggagattacccttgatattgttggtggacctcatacaattagttgagggccttaatagcaaaaacagattgttttggggaaggatttctaccttaagactgtaacatagaaaccctgcctgaatttccaacctatggaattgccctacagatttcagatttaccagccccccaccaccacagccttctaaatattcacattattttcagtgttcaatttttgcagtgtatagtagcttgcttcataacaaactagtagtatatgttcgcttcattgtcaaatccacttaattaacatatcatcatgatttgcattctttgccctttaaagygttttcctatttttcattagttcttagtcattgttgcacaggaaatcttctacaacttgccgttctgttttttaagtcatatattgttttgattctgatactgtatttttcaagacagatagcaggatctatcttctgtaataactttacttataatattattgatttcaacaggcacttccttttcttcctttccctctct

SEQ ID NO: 401068 - DNA, 603 bp, Homo sapiens
acttgccgttctgttttttaagtcatatattgttttgattctgatactgtatttttcaagacagatagcaggatctatcttctgtaataactttacttataatattattgatttcaacaggcacttccttttcttcctttccctctcttcattgttacctataagggcagctttaactcttctcaaagagtgaaattaaccccaaatttcaaaataacaaaaatgtacacagtagacatgatagtgctgggtaggggctctgagacataaccaatggtcaaaaaggtttttgccactatgtgaggttttttcccacactgrcaaaagagcttctgtttttcagagccttttaaattttataattgtggagaaaggattatgaatctgtacctgtctcctgctaaaatgtcacacattttgaaatgtacttgtccttgtttgactaagcattaagacaaagtgttctctgcaacgagagctcttcttgccacccacttgtgttacacatagtacattaatgaggtgactgtgatctcatcctcctggcttgccttccttggctcagattccagagaagcagccgtcaggtcctccagatccttt

SEQ ID NO: 401069 - DNA, 558 bp, Homo sapiens
ggatactggagatgagaaatgaaattgggtgaggcttgaacatgagtcaagctttgtatttaccttggtagtgacaggaaaacactggcagtttttaaggagtcatatgacatgatcagggctgagctttcaaaaaaattaacctggcaagatatggaaatgggatrgatagaatgagagagtgattgagatgggacaggaaagcaagaggtcatcgcagtaatccaggtgaggggctatgaagtctgtgatggagaattggtggtggctgtggatggtaggaaagactgtgaaggaaattagggagtggctcctacagggcttagacctgcaacgatgtgagacaagagagatttctgagggtcaagcctcgctgactggggagatcataatgccattgcagaaatgggaaatagtggaagaggagctagttgaagattgacacattgtaaacttgaagttcaacttgatatctggatttgcaactagatagccgtgtcaggatagaggaaggacctagagataaagggcaaagttgcctatttccattgcttagac

SEQ ID NO: 401070 - DNA, 558 bp, Homo sapiens
ggatactggagatgagaaatgaaattgggtgaggcttgaacatgagtcaagctttgtatttaccttggtagtgacaggaaaacactggcagtttttaaggagtcatatgacatgatcagggctgagctttcaaaaaaattaacctggcaagatatggaaatgggatggayagaatgagagagtgattgagatgggacaggaaagcaagaggtcatcgcagtaatccaggtgaggggctatgaagtctgtgatggagaattggtggtggctgtggatggtaggaaagactgtgaaggaaattagggagtggctcctacagggcttagacctgcaacgatgtgagacaagagagatttctgagggtcaagcctcgctgactggggagatcataatgccattgcagaaatgggaaatagtggaagaggagctagttgaagattgacacattgtaaacttgaagttcaacttgatatctggatttgcaactagatagccgtgtcaggatagaggaaggacctagagataaagggcaaagttgcctatttccattgcttagac

SEQ ID NO: 401071 - DNA, 662 bp, Homo sapiens
taactttttaccctttgacttctgtctcttcatctccccacccctgttctattctgtttctatgcatttgagctttgtttttctttttagattgcacataaatgagatcatatagtactcttctttccatgtctggcttatttcacttagcataacgtcctctaggttcaaccatgtcacaaatggcaagatctctcttttttaaggctgaatcatattccattgtagacatgtrccataaattctttatctattcattcatcaatggacacttaggttgtttccatatcttggttattgtttctagatcttggatattgtgaattatgctgcaataaattatgctgcataattataatgcataaacatgggggtggtaatttcatttcctttggttatgcacccatagatagattgctggatatatggtatttctatttttagctttgaggagcctctgttctgttttccatattgattatactaatttacattcccaccaaccatgtacaaaggtctccttttctccacactcttgccaaaaattgcctcatctttttgataatagccattttaaacaggtgtgaaatgatattgcactgtggttttgatttgtatatccttgatgattagtgatgttaccaccaaggaatgcttttatc

SEQ ID NO: 401072 - DNA, 553 bp, Homo sapiens
aggattgagacagatgaacatcagtggagggaccagaagaatcaagtggacaggttagagataaacttgagactggcatgactgaagaggttagcaaaatgacacccagaatagccaagtaggggatgtcaaaagtctgaggatgtaactgtggaagatagatgcaacaggaacgtcttaagatcagacctgaaaggagtaacaaacagatgttactcttatttctgggcactggtttcaacaattcccctgccattaaattcctggaatatggctgctgttgacttattccccttttcctagaatttcagaaagtatgtgaattgcagaatagacaccattaccaaagagttttctggaaaagaaaacaacatttgcaagtagcatgcaacaaagatcaagtcaatgtttttgtagaagccaaaattgcttgaaccccaaaatgttatctgaatacttaycccattcacatggctgatctttaccctccatgtctcctcacccaccatttatggagggacctcccctgtgtgcttggttgctggacttattt

SEQ ID NO: 401073 - DNA, 592 bp, Homo sapiens
tgagggaggaagtacaggagaggggaggaggaygacgatgggcaatgttcatatctccctttgtggtcttggtatctccttcaaagtattcaggaaatgcaagtaaagaatgtaaattattaaaaaatttctttgactgtgacactgccctgaggctgagcagagagatggctccataaattgaatagatctttgctaaaccaactaaataaccctgatttctagtctggttgatgaaatccagtcttgttccattatcattacaccttgtatataacatgggtgacacaagccacagctcatcagaccaaggacagacatttacaggtctttggttgattcttgtccttgaagtcttcaggacatggggtgctccttgctatttcttacttgccacaagtggaaatggtttcttaataattattccagaaaattctcacaatcccataaaggaagagtaatactgatacaatttcactcatctatcaccattatgtatgctaaaaaataaaagaaagaaagttttaaaccatgactgtcacaaacctcttttgtcattaaaaaagcactgttatgaaaatcaacattgtat

SEQ ID NO: 401074 - DNA, 597 bp, Homo sapiens
ggggaggggtgattctgagtctcacacaggatctgtcatttagattttactttagattcctatctgagccctagagtaagagaagattgaaaaaaaaagtgagtaatccactaaaagagcttttgagcagatgcagcatcctcatgcagtttctgttgttttgggcacagcaggaggcagcacctttagctcacacaacagggtccttgacatctggcaccgctgtaggctttgttggagaccaggagcactgctaatacctttgtctttttggtggaggcagcaaagagaggacacatcacacagcaagcccctggaaaaggaggaggaaatggccgggcgcagtgtttcacacctgtaatcccagcactttgggaggccgaggtaggcagatcacctgaggtcaggagttcaagaccagcctggccaacatggcaaaaccccatctctactaaaaaatgcaaaaattagctgggcgtggtggcaggctcctataatcccagctagtygggaggctgaggcaggaagaattgctgaacctgggaggtggaggttacagtaagccaagatcgcgccactgcgctccagacagagcga

SEQ ID NO: 401075 - DNA, 511 bp, Homo sapiens
attatagaagtaaatgaaggttctttttggcatgctggcaaaaaaagaaacaaacaaacaacaacaaagccatgatagaaatccttggttctragattatcagtatcctctccatgcatactatctctttacattcttcttcctttcttcagctttcccatgaccaatgataaagcacagattttggatactagtcaaataaactggacagaaagtaataaagttttttctgccatcgtctcccagaagagtgaagaaatgaggaaaacacagtgaaacctcattatacagcatcttcctacagatgtagtgggaccaatcccctccccacacgcatagcaccccgttataacacaaagcagagatccccctggcattctatcagagttctgatggatgtatttttctgaaggatgtctaggcagtgtgacttggcattctgcccagggagtgagggatgtatgtgtgtgtgtgtgtgtgtgtgtgtgtgggtgggtgggtgtgtgggtgt

SEQ ID NO: 401076 - DNA, 511 bp, Homo sapiens
attatagaagtaaatgaaggttctttttggcatgctggcaaaaaaagaaacaaacaaacaacaacaaagccatgatagaaatccttggttctgagattatcagtatcctctccatgcatactatctctttacattcttcttcctttcttcagctttcccatgaccaatgataaagcacagattttggatactagtcaaataaactggacagaaagtaataaagttttttctgccatcgtctcccagaagagtgaagaaatgaggaaaacacagtgaaacctcattatacagcatcttcctacagatgtagtgggaccaatcccctccccacacgcatagcaccccgttataacacaaagcagagatccccctggcattctatcagagttctgatggatgtatttttctgaaggatgtctaggcagtgtgacttggcattctgcccagggagtgagggatgtatgtrtgtgtgtgtgtgtgtgtgtgtgtgggtgggtgggtgtgtgggtgt

SEQ ID NO: 401077 - DNA, 570 bp, Homo sapiens
ctttctctagtttctatccctggctgcggaaccagcccatccctttcctaaagaggcttctctgttgctacatatcaatgcagaaaccattgacgtgcttctgtgtcagcaataatgctctgtctttcctacctcattcaaggatcccaggattmtttttgaacaagaaagaaaggtttattagtcctccccacacttcaatgcggcaaggagtcagtattattttgaatgaggcccagaatgaactcagcagattcatagaactggtcagagtggcaggtgaatcaaaagttgagttacaggccaggtgtggtggctcatgcctgtaatcccagccctttgggaggctgaggtgggaggattgcttgagtccaggagttagagaccagcctgggcaacatagtgaaaacttgtctctgaaacaacaacaacaaaaattaaaaaattagctgagcatggtggcacttacctgtagtcttagctactcaggaggctgaggtgggaggattgcttgagcccaggaggttgaagctgcagtgagccatgctcacaccactgcagagtgagatc

SEQ ID NO: 401078 - DNA, 570 bp, Homo sapiens
ctttctctagtttctatccctggctgcggaaccagcccatccctttcctaaagaggcttctctgttgctacatatcaatgcagaaaccattgacgtgcttctgtgtcagcaataatgctctgtctttcctacctcattcaaggatcccaggattatttttgaacaagaaagaaaggtttattagtcctccccacacttcaatgcggcaaggagtcagtattattttgaatgaggcccagaatgaactcagcagattcatagaactggtcagagtggcaggtgaatcaaaagttgagttacaggccaggtgtggtggctcatgcctgtaatcccagccctttggkaggctgaggtgggaggattgcttgagtccaggagttagagaccagcctgggcaacatagtgaaaacttgtctctgaaacaacaacaacaaaaattaaaaaattagctgagcatggtggcacttacctgtagtcttagctactcaggaggctgaggtgggaggattgcttgagcccaggaggttgaagctgcagtgagccatgctcacaccactgcagagtgagatc

SEQ ID NO: 401079 - DNA, 554 bp, Homo sapiens
tggtgggtgggagagggtagggccacgggtcaaagtgctctgaagaggtatcagcaatatccactacacccaccccaccccagcctttctgtctatcttgatcttttggtgcagttcaaggacggtggaacagattcttgaagacatttcctcttaaatgttctaattgggagagggagtgcctgtctcactcactttggtatctgacatctatcatagcgtcccctccatttaaacagaggcaggaggagttccattctaacatcctctcattctgaagtgtgctcargtttttcttttacactagtgaccataaagctcaatgccttaatcccacaggccagaacccagaaaagtgagtaatctcaattctcaaaacaatgtttagtggtttccctggtcgctatgatagatttttgctgttcagactcttcctctcaacagacagcattagagatgtagctggggagagaaggatgcattctgtgtccatgaaatagaatagagtcacccggaacaaacccacaagtttatcataaaaaagcaagcgcatt

SEQ ID NO: 401080 - DNA, 514 bp, Homo sapiens
gggcaatcagttcatcttccaccaaagtacatgctgatatcttaaaacttcaggttggcttttttccaatataacatacatcatgctgttaaaccagtcacagggtagggcatttatttatgtccaattgatttttcactttagagtggccagctgaaatcttatctacatttaaatatgaacatttaaagtyctctgacctgtaaaattttaaatgatgtcagatgaatactgggaaaagtattttccatatatgctagcacagcattttgttattttttattgtgtagcttaacatattaaatttcatttatctccttttcctatcctttagaccaggggtgtctaatcttttggtttccctgggccacattggaagatgaagaattgttggggacacacataaaatgcactaacaccaacgacagctgatgtgctttaaaaaatcgcaaaaaatgctcatactgttttaagaaggtttatgaatttgtgttgggcagcattcaaagctgtc

SEQ ID NO: 401081 - DNA, 538 bp, Homo sapiens
ttactttttgaattttacacctgtacatgctattgttaatgcacattcatttatagaacacaaagactttataattgtaatgtttaacacacatatatttgaaatgggtacattgacattgagatattttgtaaattaaaaaactgatcatgtgagaaatattttctttaaggaatcaaaaattctcttcaatggagagagaggacaataaatrataaacatactaagtcatatgatagaagttgacaaacaatatgcaaaacataaagcaaaatagaatcagaagtgtcagggtgtgttctggtagtgagattgaacttttaaatattgtagtcaggttaaaggttattgaggtaacagttgagactttcattatagttatatgcagatttcacatataataaaatctacctatatacaaatatatagagagacatatatgtgtctatatgtgtattatatatcagatatatcacatatctggataccattataatgaaaatatgcctaactatcaaaaaactcaagaccttctttt

SEQ ID NO: 401082 - DNA, 594 bp, Homo sapiens
tatcctcttacaacccccaagaaaccacagtagagtataagaagttaataggacgtttggtggactattactctcagatcaaataaatatgtaaaatatttastattagaaattaattattaaaaattaaagactattaaaaatcaccaaagacataaataaataagcaactgcaagtaagagtcagcagaacaacaaacagattaagagtctaatgatttcagatattggaattataagagatatacagtataaaataaatatgtataaaatttagatacaaaagatgaaatcacagaaatgagcaagtaccaagaaagtaacaatatgacaagactgacttgaaaaagaacctaaagagatattttagaatttaaaaatagaaatgttgggaagcttccaaattggtgaacacatctctgtgccagtagagtgcctaccccaactccatggggacagaagctcctgcactcaggacccttctagatttcccctgtgtgcctttttatcaaattgttcatttatatcatttataagaaactggtaaacatttaaaaaaacagaaatgttgaagttaaaattccatggataaga

SEQ ID NO: 401083 - DNA, 546 bp, Homo sapiens
tttaaaagaaaaagcagtgtgaacgtcctgtgaattttgattagtatttctattatactcctgctttccctgcccagaatttaggyattcatggttgagatcctgaagaaaacattttctgctgagcagaagcaatttaataattgcctcccttcattgtaagttttttatttcttccttatgtctgattaatcccccaatataaacttcaattaattgagcagctctgcaaaatatatgaataaaacaccacatattaagatattatatcttttgtaaaatcttttttgagttggcaagtagttttgtgttgaattatctatacataactttacattatttaaagagggaaaatgagtaggagtatttttattccatggcataataaggcaaggaatagccattccacccatgttgcctatatatattccaatagtgttgaaatatagatttcattttctccttattaaaaacatgaagtgtttaaaaaatacatctaaaagaaggaggctgtgcctttgtctgactaccgcaaaaatagccttg

SEQ ID NO: 401084 - DNA, 573 bp, Homo sapiens
agtatgtaaatcaaacaacatattggttaagaataacacacataacggataaaactttttctttaaaggcatgtaataatatacttaaaatttgtgatagtggttaccttttttggtaagacagggagatggaataggtaggtcatgaacattggtaatgtttttaatttgataggtaagttttattattttatacttttaaatttatatgccaatatattcttttgtatgtatcaaatacaacattttttaaaagaaaaagcagtgtgaacgtcctgtgaattttgattagtatttctattatactcctgctttccctgcccagaatttaggtattcatggttgagaycctgaagaaaacattttctgctgagcagaagcaatttaataattgcctcccttcattgtaagttttttatttcttccttatgtctgattaatcccccaatataaacttcaattaattgagcagctctgcaaaatatatgaataaaacaccacatattaagatattatatcttttgtaaaatcttttttgagttggcaagtagttttgtgttgaattatctatac

SEQ ID NO: 401085 - DNA, 624 bp, Homo sapiens
atgtttttaatttgataggtaagttttattattttatacttttaaatttatatgccaatatattcttttgtatgtatcaaatacaacattttttaaaagaaaaagcagtgtgaacgtcctgtgaattttgattagtatttctattatactcctgctttccctgcccagaatttaggtattcatggttgagatcctgaagaaaacattttctgctragcagaagcaatttaataattgcctcccttcattgtaagttttttatttcttccttatgtctgattaatcccccaatataaacttcaattaattgagcagctctgcaaaatatatgaataaaacaccacatattaagatattatatcttttgtaaaatcttttttgagttggcaagtagttttgtgttgaattatctatacataactttacattatttaaagagggaaaatgagtaggagtatttttattccatggcataataaggcaaggaatagccattccacccatgttgcctatatatattccaatagtgttgaaatatagatttcattttctccttattaaaaacatgaagtgtttaaaaaatacatctaaaagaaggaggctgtgcctttgtctgactaccgc

SEQ ID NO: 401086 - DNA, 546 bp, Homo sapiens
tttaaaagaaaaagcagtgtgaacgtcctgtgaattttgattagtatttctattatactcctgctttccctgcccagaatttaggtattcatggttgagatcctgaagaaaacattttctgctgagcagaagcaatttaataattgcctcccttcattgtaagttttttatttcttccttatgtctgattaatcccccaatataaacttcaattaattgagcagctctgcaaaatatatgaataaaacaccacatattaagatattatatcttttgtaaaatcttttttgagttggcaartagttttgtgttgaattatctatacataactttacattatttaaagagggaaaatgagtaggagtatttttattccatggcataataaggcaaggaatagccattccacccatgttgcctatatatattccaatagtgttgaaatatagatttcattttctccttattaaaaacatgaagtgtttaaaaaatacatctaaaagaaggaggctgtgcctttgtctgactaccgcaaaaatagccttg

SEQ ID NO: 401087 - DNA, 553 bp, Homo sapiens
tgtatacattgtcttacagtacagactcagatttaccagagaacatataagaaggtgatgctactgcaatgatataaatatgacaaactgtacactagatgacaactggtttcactacaaaaaaagatcgttctcagtactagatacaactcagttcaattagtgaacccgacgactaactttcttaacagtcacaaacttttctacacttacactctactgctccgaaaagaggtatccaaaaaacccttcgtaagagtaacgatccctgaaactgcccttgatagctgctctgcgaaacgtacaggyacagcgagtgcctgctggcaaatgccaaatgaagcggagggggtgaagaagtaagtagggggagtgagcaggtatgaaagcgataggccgggaagcgacaagcctgtcaactttgctgtccggggaagtcgaaacctaagtttcatccctgtctgaaaaagtcttcccggaacaatctttccctaaatccaaagctactggccaccgagctccagccagacctccgtccctttccaacatcctt

SEQ ID NO: 401088 - DNA, 549 bp, Homo sapiens
tttccatatcactagccttccagggccaactcaagagagagaaactaacactttagtagcacatagatacaccttgagttgtctgtcacagatgctctgatgagaatgccacaacctaatgattacacagacaatcattagctccttcttccytgaagattccaacttctatcaaaagtactttatgaggaacatttaaagattacactgcatcaaaaagagactttcttaaagaagccaaatcatttttcctcttttgaacattttaaatataagttatacataataaaagagttgatccctcacacataatcacactttgttccagaaatcttaaagtcttaaaggaaaatgtgtattattataccagaagtcttgaagtgacttgaactggacaatgtggtattattatacccagaagccttagtatcttaaagtcttaaggtctctgtctatacagagagaactttcctagagcaccagtcttactcgatggtaagtaacgtaaacaatttttacattgcaacatgcatatatgtgtatataaat

SEQ ID NO: 401089 - DNA, 549 bp, Homo sapiens
tttccatatcactagccttccagggccaactcaagagagagaaactaacactttagtagcacatagatacaccttgagttgtctgtcacagatgctctgatgagaatgccacaacctaatgattacacagacaatcattagctccttcttccctgragattccaacttctatcaaaagtactttatgaggaacatttaaagattacactgcatcaaaaagagactttcttaaagaagccaaatcatttttcctcttttgaacattttaaatataagttatacataataaaagagttgatccctcacacataatcacactttgttccagaaatcttaaagtcttaaaggaaaatgtgtattattataccagaagtcttgaagtgacttgaactggacaatgtggtattattatacccagaagccttagtatcttaaagtcttaaggtctctgtctatacagagagaactttcctagagcaccagtcttactcgatggtaagtaacgtaaacaatttttacattgcaacatgcatatatgtgtatataaat

SEQ ID NO: 401090 - DNA, 619 bp, Homo sapiens
agtgacttgaactggacaatgtggtattattatacccagaagccttagtatcttaaagtcttaaggtctctgtctatacagagagaactttcctagagcaccagtcttactcgatggtaagtaacgtaaacaatttttacaytgcaacatgcatatatgtgtatataaatatatgttattgagtggaatgtaaaattcatataagttttataacaaaaaataggtgattttatggaaatattgaccaatattggaattgcaagtgaaattatatttgaagattaaacaagtctttggagaaataaatcacaccaccacctctctctgctactgtttaaaggaaggtccagctttacagtggatcatatgaaattaacaatcttttccatacagatatactttaaaaaatccaaactctcagttcaagagtaagtttaagcgtatgttaccaagcaaaattgtaccttggcctcatttcaataatactgatcagaaagctattccattcctgatgatactatgatcatcaatcaacaaataccaactgggcctggtactactagcatgctgagtgcaacgagcacaccaatctgataagtctgctgctgctggtgctact

SEQ ID NO: 401091 - DNA, 636 bp, Homo sapiens
ctctgtctatacagagagaactttcctagagcaccagtcttactcgatggtaagtaacgtaaacaatttttacattgcaacatgcatatatgtgtatataaatatatgttattgagtggaatgtaaaattcatataagttttataacaaaaaataggtgattttatggaaatattgaccaatattggaattgcaagtgaaattatatttgaagattaaacaagtctttggagaaataaatcacaccaccacctctctctgctactgtttaaaggaaggtccagctttacagtggatcatatgaaattaacaatcttttccatacagatatactttaaaaaatccaaactctcagttcaagagtaagtttaagcgtatgttaccaagcaaaattgtaccttggcctcatttcaataatactgatcagaaagctattccattcctgatgatactatgatcatcaatcaacaaataccaactgggcctggtactactagcatgctgagtgcaacgagcacrccaatctgataagtctgctgctgctggtgctactgctgctatcatttgctggcagcctacagcaagagacatggccctgaaatgtgttgcttaaagagaagatccaggaaactataaa

SEQ ID NO: 401092 - DNA, 533 bp, Homo sapiens
ctcatcaataggaggacagggtccttactgctcattgactctcatgaactatgttmaagctgctcctgcaagtaatacagactgcctgctagggagctggggtttggggttgggtagatgatactgaactaagagctgaaattcaccaaaataagttcagttttctgtccaagccttcccttgaaagttgcaagcctttaatagactccacagttccaaaatagttacaagagataggttttgacagtgcaattgtttttccaggtggggagatagattcctggtgcttcctattccaccatctttttagaatcctccagcagtacttcatttatttttattgcagaataatattccattgtatagatatataacatttatccattcatcatttgatggacatttgagtcatttccacttttggctaccaatcatgctgctatatcccaaccaggcaagagaaagaaataaagggcatccacattggtaaagaggaaatcaaactgttgctgtttgtcagtgacataatcata

SEQ ID NO: 401093 - DNA, 533 bp, Homo sapiens
ctcatcaataggaggacagggtccttactgctcattgactctcatgaactatgttaaagctgctcctgcaagtaatacagactgcctgctagggagctggggtttggggttgggtagatgatactgaactaagagctgaaattcaccaaaataagttcagttttctgtccaagccttcccttgaaagttgcaagcctttaatagactccacagttccaaaatagttacaagagataggttttgacagtgcaattgtttttccaggtggggagayagattcctggtgcttcctattccaccatctttttagaatcctccagcagtacttcatttatttttattgcagaataatattccattgtatagatatataacatttatccattcatcatttgatggacatttgagtcatttccacttttggctaccaatcatgctgctatatcccaaccaggcaagagaaagaaataaagggcatccacattggtaaagaggaaatcaaactgttgctgtttgtcagtgacataatcata

SEQ ID NO: 401094 - DNA, 561 bp, Homo sapiens
agggggttaaattgaaagaatatagttgctatttctagaaatcgagcaaacactgcagcttatataggctgcttagtccagtgtctctcagaagggagtttccatcccttcttgccacagttaaggagagtgtctaagagcagatctggagtcaagctgcctgggttcacctctgtttataagctgtgtgatcttggcaaatttctttttttttwaaatattaaatgtttatgggtacatagtagatatatatatttatggggttcatgagatagtttgatacaggcatgcaatgtgaaataagcatatcatggtgaatgtgctctgtcccctcaagcatttatccttttgatacatttatccttttgatatccttttgttacaaacaatgcagttacactctttaagttattttaaaatgtacaattaagttattattggctacagtcaccctactctgctatcaaatattaggtcttagtcattctttttaattttattttttttgtacctgttattcacccccaccttccctacagcctcccactactcttcccaact

SEQ ID NO: 401095 - DNA, 637 bp, Homo sapiens
atggcttaatggtacttcattgtgtatatgtaccacatgttctttattcatctgttgatggacatttaggttgctttcaaatcttagctattgtaaacagtgctgcaacaaacataggagtgcagatatctcttcaatatactgattcccttttatttgggtatataccctgcagtgggattgctggatcatttttagttctgtgagaaaccttcaaactgttctccatagtggttgttttaatttacattcctaacaacagtgtacaagggtsccctgttctccacatcctcaccagcattttttattgcctgtcttttggataagagccattttaactgggataagatgatatctcattgtagttttgatgacatttctctgatgatcagtgatgttgaacaccttttcatatgcttattttccatttgtatgtcttcttttaagaaatatctattcagatcttttgcccattttgtagctggattattagatttcttcctgtagagttgtttgagttccttaggtgttctggttattaatcccttgtcagattggtagtttgcaaatattttctcccattctgtgggttgtctcttcactttgttgattgttttatttgctgtgcagaaggttt

SEQ ID NO: 401096 - DNA, 567 bp, Homo sapiens
gtttgtggttacaaaagtgtatataatttttttttagttttttaattgtaacgtgtaaaatttaccattttaaatattttttaaatgtacaatgcagtagcattaagtagactgacattgttgtacaaccatcatcactgtttatctccagaacatttttgtcatcccaatctctaattctatacccactaaataaaaacttcccattctacactctctccagtccctgataaccactattctgctttccatctctacaaatttgtctcttctaggaactcatataaatggaatcatttgacatttgactttttgtgtctgacttatttcacttagtataatattctaaaggttcatctacattgtagcatcaaatttcattccttaaggctgaatagtatttcttcacatgtatataccagattttgtttatctattcatccatcgatggacactgtgttacatccaccttttggctattgtgaataatgcagctgtgaacactgttgtacaaatacctattctagtttytgctttcttttgggaatctacctagaagcagaattg

SEQ ID NO: 401097 - DNA, 548 bp, Homo sapiens
atgaccgtccaaagatgtctacattctaattcccgaaacctgggaatttattacattatgtagctaaggggaattaaggtagcagattggattatgattagctgactttaaaataggtagattatcctggattatccaagtaaatccagtgtagacacatgtattcttaaatgcaaaagagggagactgaagagtcagtgtcaccgtgatgtgacatgagaaaaatttgagtggccatttctggctttgaagatggaagaggcacatgagcaaaagaacatggacagcttctagaagttggaaaatgcggaaaatagaytttctcctacagctccagaaaagcacacagccctgctgacatcttgattttagtcagggagacccattttggacttctgacctccaaaactataagataatacatttatgttgttttaagccaccatatttgtgataatttattacagcaacaaaaggaaattaatacacctaggaaatcattcattcacccatccattctttcattcaacaaatcttatgtgtttcct

SEQ ID NO: 401098 - DNA, 548 bp, Homo sapiens
atgaccgtccaaagatgtctacattctaattcccgaaacctgggaatttattacattatgtagctaaggggaattaaggtagcagattggattatgattagctgactttaaaataggtagattatcctggattatccaagtaaatccagtgtagacacatgtattcttaaatgcaaaagagggagactgaagagtcagtgtcaccgtgatgtgacatgagaaaaatttgagtggccatttctggctttgaagatggaagaggcacatgagcaaaagaacatggacagcttctagaagttggaaaatgcggaaaatagattttctcctacagctccagaaaagcacacagccctgctgacatcttgattttagtcagggagacccattttggrcttctgacctccaaaactataagataatacatttatgttgttttaagccaccatatttgtgataatttattacagcaacaaaaggaaattaatacacctaggaaatcattcattcacccatccattctttcattcaacaaatcttatgtgtttcct

SEQ ID NO: 401099 - DNA, 643 bp, Homo sapiens
ttattatttctcttaatcaaagaatacattttgagcatcaagatcttgaatttcttctctagatttcaccaattaggttgctggaatccgaggtgccttgcaggtagagccttctggaagattagaatgagaacacttaaaggggacgctttagagcaccaaagtcccagaaatccaagaacctttaactcaagatcagtaacccagtgaaaaactccaagaagtgatccccaaaatactcaacggtcttactttttttccatcccttctgaaagtgctcattaaaagsaatctattttcctccaataaatgggtagttggcacagctgccttcctaaggagcagccacttcgaattcaatttgagacaatgagttactaactttttgagtaatggattgagaagccctagttggccattgctgccatgaatccccctcactcccaattagaaattgcctatattttacatcaaaccctggtttagaccgctagccattcttaaagctctgtaggcaggtaagtattcctttcataccaactctgatgaattggtagtagatgcttggaggtagtaattgggctaagcagcaaagaattccaagaagcaacgtgtgttgggagagaggactgggaggaagagg

SEQ ID NO: 401100 - DNA, 556 bp, Homo sapiens
  misc_feature (1)...(556): n = A,T,C or G
gctttagacttatggagaaactgcaataatgaagctgagtccctatatacactctactcagtttcctttaaggtaaaaatcttatataacsatgggacaattatcaaatatcaattatgaattatcattgcaattttcaatactaagaaattaacataggcacaatgtcattaaccaaactgaatatttaatcagatttcccaaatgtttcccataatgtcttttttctattccaagatccaatccaggatacggtattgcatttagttttcatgtctcttgatctcctcttgtctgtaatgtttcttcagtgtctttcattatcttgacacttggaagagcactggttggatttttgcagaaagcccctctatttggatttctctgatattttctcatgattagactcaacttatgtatttgagagagaataccacagagctgatggccctcctttatcatattaaggatacataacattaatgtgtcntaattctggtgatgctagcctttaataatttggttaagctgttttttgtcatatttctccactgta

SEQ ID NO: 401101 - DNA, 556 bp, Homo sapiens
  misc_feature (1)...(556): n = A,T,C or G
gctttagacttatggagaaactgcaataatgaagctgagtccctatatacactctactcagtttcctttaaggtaaaaatcttatataaccatgggacaattatcaaatatcaattatgaattatcattgcaattttcaatactaagaaattaacataggcacaatgtcattaaccaaactgaatatttaatcagatttcccaaatgtttcccataatgtcttttttctattccaagatccaatccaggatayggtattgcatttagttttcatgtctcttgatctcctcttgtctgtaatgtttcttcagtgtctttcattatcttgacacttggaagagcactggttggatttttgcagaaagcccctctatttggatttctctgatattttctcatgattagactcaacttatgtatttgagagagaataccacagagctgatggccctcctttatcatattaaggatacataacattaatgtgtcntaattctggtgatgctagcctttaataatttggttaagctgttttttgtcatatttctccactgta

SEQ ID NO: 401102 - DNA, 547 bp, Homo sapiens
acaatctttatcttccccattctgctatcttttcttacatttatttttgtacccacaaaagaacaaaaaataaaagctctgcttcctttggatctcaattttttaaaagtcaaaacccagtacttcctttactcatatttcctccctgtctcaatcttctctcttagtgttgatatgtacaaagatgtgctctatacagtaagaaaacatcaaaaatttaatcgcaattcttgttgatagttcaaagaaataagaaaattttttataaatgactatgttttatcaaytctggatgccagtcgtttttataaaattgtcaaagcaactagtatatggatatgatagactatttataattatgtttcacaaggataaaactggaactcacagatcatataatcattgactcagctataaaaagatttagagataatctcttcctgtgccctatgacattaggttactttccaaggtcacctattgcagagacatggttaaaactcaagtattcagatttgcagtgtagggttcatccttttctactatg

SEQ ID NO: 401103 - DNA, 540 bp, Homo sapiens
ctcttcccaaaccaatcaaaggcccatttattgagaggtaaccagataaaataaaatggttgtaaaccaaacactccctggtggttcctcgtaggaagccatgcttccccagcttcaagcctttctatgaattctatccaaaacagggttggatcagattcttactgagatcctacttgacttaatccytggcttggggttactagggaattaagacatattcaaaggaaaagaaaaggaaaaaataagcagctggagtttgtgtgcttgggtatgcttctatgtatgtatacacaatagtttaagcctggctaagacttttatgattcatgtcatttcttgtatacagacttcatctcagttcttagtggtttttcagtaacaaggtatttgcttagcagggaaaataagtgtttctccctgtgattgccaaactggtgttggtctctctgcagagcacatttcctcatcaagaactcaggccctctaaataggacagagcaacaagtattggcatgcagacaaaaacctgcagagagt

SEQ ID NO: 401104 - DNA, 331 bp, Homo sapiens
gaaaattcacagtactttgggtctaaccaggaaatgtgattgcagaatactgagactggaagtartatcttgcacattgtgttgatcgttgtaaaatctgagttggattaattatgcagacttgggatgaaaatacttttgatgcataggacttcccaagaggccagctttctgttatgtatctggtacttcactgtttaactcatttaactcctgaaaaaaaaattcatgccaaaacatttctgttttctttaactgaccatgtcaatttccaccttatccgcagtaatgttctcaaatattaaacttgactgcttaacctgtgtcaaaa

SEQ ID NO: 401105 - DNA, 571 bp, Homo sapiens
tttgtttacctattagatatccaaacgttgacatttgtgaaatatggtaatacagtacagatcgcaaatgacagccagtgtgatctggaaacctgctagaaatgtggtctgaattagtattattttggccctgaaaatatgccattygtatcttttcatttctaacactaattacatataataattctaggttttagtgttaaaaagaacccttcatgtatagggtactatagacctattcagttcatatgccagccctaattaaaacctatctgagaattcattaaaatctggcccaactgcttaacatctcttacagcactcacctttagatgagaaacactgtaccctccattttttccttttcagtttttgttgtctaattaatggaaaccattaatttggagggatgaattaaaaatggagtgaatagtataggctttgtgcaactctctaaagattttctatgccataatcaaggggaaaaatgcttattgcaaatgtcctgagctgacggaactgtatatttagaatcattaagtctgtggtaactagtgaaaataaaatgtat

SEQ ID NO: 401106 - DNA, 536 bp, Homo sapiens
ggacttagttgaagaataattctagtagacattataaataatatgatagaaatactgagttttttgctattcagtgataaccaaaagaaaatatgactcactgagtaattgagaaagaaaatgtgtctatactttccatgagggcagaagtgtgagcactagtctttttacaactataccaaagttgtttgccttacattccagaatataactgtgagaaggagtccacagacaaaagcccgactcctgtgggtaataattatcaaggtgattcacaaaagagccattgccttagctttgcacaggtcatctattagaggctaaaactaacattctgcattattcctttaaagagaatgaacaaattttactccttgttggtttgtcctgggaattctccatcaaggaattttagagatgtttaggatggaaatatttagtttcttctcttggttctatctttagtcataaggaatacaytctttgtatgcagaaagtctcccagtagatttacatttaaatctctgtccagaaac

SEQ ID NO: 401107 - DNA, 503 bp, Homo sapiens
atttctttttagtgctgaataatattccaccgtctttatatgccttagtttatttattcattcacctactgaaagacatcttggttgcttccaagtttttgcaattatgaataaagctactataaacatatgtgtgaagaattttgtgcagacataatttttcaactccttaaggtaaataccaaggagtgcaaatttctggatcatatgtttagttttacaagaaattgccaaactgtcttccaaagtggctgtacaattttgcatgtctaccaggaatgaataagagttccaggaatgawtaagagttcctgttgcttcacattctcttcagcatttggtgttgtcagtgttctagatttcggccattctagtaagtgtgtagtggtatctcactgttgctttaagttgaatttccctgatgccatatgatgtggaacatcttttcacatgattatttgacatggtatattttttctggtgagatgtttgttaaattctta

SEQ ID NO: 401108 - DNA, 671 bp, Homo sapiens
tcagatgtatatgctcaagatttgtttaacagggaaggaggcagtggtgtgtgggtcccttttgctcatgtgaatcttacaggtatgggtatggctctcaagttcacagtgctggttactgcttgctgatctcaacagtctaaagcagtttttttttccagaggcaacagttttgtgatggacttcctaaattatccagcttctttatattggccaaagtagtagtttccttgatgagaaaggatacagtgttctgggagctaattcyggttagcctagatagagcctgttatcacagccctttccaaaacaattttgtcaactctaatgccttgtaaaaagtcactttctgcttatgagaccagagcagtttctgcaatttgactcccagctgaactgtttcaagtttgagattctgaaatcagggtttgaggtactgaatatttttgaatggtcttcaaagttatcattccatttcccagagttcttttccaaacagtgcaataactttctacccacattgtcattcagtaactcacagaatcagattcttcatccaatttttagctatattatccaaatatccttgtcaccatgtagcatgaactacctatatcccttcttctattatattatgaacagatgcaccctgacttccctgacttcaaaca

SEQ ID NO: 401109 - DNA, 583 bp, Homo sapiens
tgaggcaaatattccctttctctgtctcaggcaacttagggagcaggaataatggcatatattcagcgaattgggagctctttcatgaggttttaaatctcccaggtagattggaggttatttattaaaacaaccaasgtaatagcagtggcccaaacagtttcaggctgagattccagttttctaattcgtggccctccagtgtttccttgttccctgcccattcttaggctgcttcaccaggctcttattgatgttgtaactcctaggatagttttctaataaatcccgttttgtgtaagttattcgtgatggtttctgttgtttcccacacaaaaacactgattgatagagtattttttcctactctaaaaaagagaaaatgaagccatggaaaggttgtgttactaatacatggctgtgttaataataatccacatagatagtaactagtagagtcatgatttaatgtcaagtctttcagaccacaaaatctgttcttctgcttaaacagagcttttttcttttttcttttttcttttttttccttcttaaacagagttgtctcactaagcccaaattt

SEQ ID NO: 401110 - DNA, 514 bp, Homo sapiens
tccatatgtataagccagtttttatttcttacattctgaaatttctttttaaaaatggaccagattatatttcaatacatgcttgaggattgtgacttatagatcttggcagtttacaatcacctagtgcagagaaggcaaagatgtaccatgtgttctgcyattctccttcctcttttccttgcacatagttatatatatatggcacataattatatataacatatataattatatataaaatgtatatatggtatataatatgtatatataattgtatatgttatatatattattattatatatatattagtgtttaccatatgctgggaattattataggcactcaaaatgtgacaaagaacacaaagttcctgacctcacgattgcttataatcccatgaggatagaaatattataaacttatcccagtatcatttcttcctgagccctgacacagccacatgatccttcttaacctttgcagtagatgttcactaccaatcaataagac

SEQ ID NO: 401111 - DNA, 514 bp, Homo sapiens
tccatatgtataagccagtttttatttcttacattctgaaatttctttttaaaaatggaccagattatatttcaatacatgcttgaggattgtgacttatagatcttggcagtttacaatcacctagtgcagagaaggcaaagatgtaccatgtgttctgccattctccttcctcttttccttgcacatagttatatatatatggcacataattatatataacatatataattatatataaaatgtatatatkgtatataatatgtatatataattgtatatgttatatatattattattatatatatattagtgtttaccatatgctgggaattattataggcactcaaaatgtgacaaagaacacaaagttcctgacctcacgattgcttataatcccatgaggatagaaatattataaacttatcccagtatcatttcttcctgagccctgacacagccacatgatccttcttaacctttgcagtagatgttcactaccaatcaataagac

SEQ ID NO: 401112 - DNA, 582 bp, Homo sapiens
aaacatcttgctatgtgtatggaactctattgacttttttgtccaactttctgaaggcaaaatacgttgaaataaacaaggaggaaataaaagtgattctayttaaacttcagattatcataaacatgaatatataactagatgtgccctatggttatttggtcatgtaagaaaacattttaaatggtccattttcaaagcatgataaatctaagtaccggcagccacccggcaaacgtaacaaactgcattgctcatgcacccagaaggtcacgaaaagggaacagaatgtagaggaggggtcagcccataaaagggaagaaagtttcactatcaggaaattgaaacataagcaagaaaggggacctgggtataaccttataagggggataatgaaacttaggcaacgtccaggaagattgcaaccccatagtactcgaccaatgaggaactggggaagggacttgcatgctaggagataaattacctggtgtaactgccccaggtgtgcctgcctactagacacctgatcttgcaagatcgccattaaaagtctcacttccgctgtttttcatgtctctc

SEQ ID NO: 401113 - DNA, 582 bp, Homo sapiens
aaacatcttgctatgtgtatggaactctattgacttttttgtccaactttctgaaggcaaaatacgttgaaataaacaaggaggaaataaaagtgattctacttaaacttcagattatcataaacatgaatatataactagatgtgccctatggttatttggtcatgtaagaaaacattttaaatggtccattttcaaagcatgataaatctaagtaccggcagccacccrgcaaacgtaacaaactgcattgctcatgcacccagaaggtcacgaaaagggaacagaatgtagaggaggggtcagcccataaaagggaagaaagtttcactatcaggaaattgaaacataagcaagaaaggggacctgggtataaccttataagggggataatgaaacttaggcaacgtccaggaagattgcaaccccatagtactcgaccaatgaggaactggggaagggacttgcatgctaggagataaattacctggtgtaactgccccaggtgtgcctgcctactagacacctgatcttgcaagatcgccattaaaagtctcacttccgctgtttttcatgtctctc

SEQ ID NO: 401114 - DNA, 637 bp, Homo sapiens
catttgaaacagattctgacttgtcaagaatatataaagcataagttatgacttcaggaccttcatttcttcagaacttatgatcataaatgatataaatccacttacttcaatctattttcagtgtgtccaatattttcataactatatccactttatctctgctttaactctctggcagtaatattaggaaatatgagatctgtgctgagttattttacattctctttttccacttatgtagaagcagtaaatggggtagtttgcaaatctaatatttattatctcctgaatacttttgtgagaattttcatttactattttcatttggataacattttttaaagctttgtttgaaacaactggaacttttagtagtttgattttattcacagagtaaattattttcccacctgcctttatgttcttttgcttagttatatattgccaaatccttctcctttgtatcttgctcagcagattgmacattcttttaaaagcttttgtttatcatttataccgctctttcaatcctgctataaccacatactctttaaatccttgcctaaccaaactgttccctggaggccttcaacaaattcacaattaatgaagggtgagtttcatttatagctgc

SEQ ID NO: 401115 - DNA, 560 bp, Homo sapiens
caagtattatacagtgtgctagggtacaaagataaataagacagcatatgctttctagtgggcacacaacaaactatttaaaataaaaataaatataggataacataaaaacttaaaattttaccaaaaaataaagaaggcatataggtgtttaaaagtggtgatgatagtagtatgtatgcattgagtacatgccagacaaaattttaagtgatttaaacacattaacccttttaatattcacaacaactcagagaagttggcagtactattattatcatcattactaaagaaaagtaaactaggcatatggaaactgagtacctgtacaaagtgacacagatagtaagtgccatagccagagttcaaatccagagggtctggactctggagcctgtgtacttaatacttaagcagtgattcttataaagtattgggtaaggggtggccctcagtgtgactgagtagaaaagaaagcctgcaggacttgaggaacaagaacaatgtaggttaagacctgcattatytactgtcagtttcctatataaagaggtgcccta

SEQ ID NO: 401116 - DNA, 583 bp, Homo sapiens
tatagcaagtgttcaacaaacttcagttgaaatctattgaatgcatgtctaatctgtgccagggcttacataccaggatctggagtgcacacttgaataataaggatgcttccaatgatctatacttctttcctcatttatatggtaaaatggtaaaagtaagctatgttataaatcacccattcctttatgaatttaacagtattgtgggacaatcatttctactgtccaagtccaaatggtggagcagacagtctttgagtttttttagcctcgtcatcctttgccactcatgtgttgtgaggagcccccaagttcagcacagattagcttctccatctatgatcatttcattctcattcttattgatataccttcccagccactcatagatattttcagttatgttgatctataaatggcataatattttacaattgacactatgttgtgtccttaagagtaccttcccttattaggtcccagtgctgccatttcctggaagcagcattcctttaaaggatctttcctaactcacacttgctcctgrcaaggttcagagttgacttctttgttacttacc

SEQ ID NO: 401117 - DNA, 652 bp, Homo sapiens
actctattcctaacttttaaaatataacttatattatgtcattcctttcctcagagctctccagatgttccccctttcacttagagtaaaacagtctacaaaaccctacatggtctcataccgtcatatttctgccttcattttctattttttttttctgtttgccactcttcttcaatcaaactgggctttgtgctattcctagaaaatgcaatgcctggyggactctgtcttgttgccttaaatatactggctgtttccctgtctgcaacataacttcccccaaatatccacatggcctctcactgacttctccaagtctttgcaaagatgtccccaatgggtgtgccctatcctgactatccgctttccagctgcatcccacctaccactcttaatttcccatccctgattaatgattaattcatttctttatctcacttatatagaataattattgtattttaattgtctttgccctcctcaactaaaatgtaaatttcatcgttagtgcttcatccatgactttgtccccagcacctaatacaggcagtatatagttagctgtcaattatttgctgaattaatgcacatttgatgctaatgaattaataacacttaggcccacaggaactaagggaagtacatatgt

SEQ ID NO: 401118 - DNA, 566 bp, Homo sapiens
tgagataaacctaataaaaataacttctatttgccttacgcggtttgaagacttgctattttgcggcttttaaaagtaataaatatcaaaacattgttattccataataaacaatgtcaaaatcctctaatgacatgaattcttatggaagattaaataaatgagaattaaaaatggaaaagagcataaaaattatcttagtcatatcatttgatgctggggtttgtttaaaatggtgattgctttcttgacaagtgtatgtatattttttaatcaaaaaagattttgtgagccgggtaaacatatttcttcactattttccaccacctaacagtttgttctactttgtttagaaagattatctgtggcaggtgctttttttgcctgctatgttaaaaaaaattctatacatgctagatgtttstcatcaactcagcccaaaatacctttttgtcactatttccaaagctagttctttaatattaatatagttctgctttggcaacaacaaagatgaatagctattggtggtgtgggttttgtttctgtctttgactatttagtgt

SEQ ID NO: 401119 - DNA, 564 bp, Homo sapiens
agaatactatgtttagcatttacctattttagaacagtcctagtatttttattcgatacacatgtgtacacagacacaccagtaactgtgtcttttaatagcaaaatcaatggtatgagggagtgtcatttcctacagagcaaagtaaaatgggacaaaagagaaagacatatattcatcttgggaaaaagatatacattcatctatgaaaaaacaattaaacagagacaatctttggcttattgggaaagaaaacactgataaagtaatacaagaaaagtacaagatcacagcatttttttattcctcattccctcaggcttcctacaggttttaagctttatgtatttttttttttwaaaatccaagagtgaagtattgttgtctgactattaagatatctgctcagtctctttgtaagtaatttgatctttgtaagatcaaaggccaaaatgtacacagaaaacaactataatgaagcagcaataatctactaagtgaacataaggcctcaaacaaaagggccacggagtttcaagcaagagatttaccttctacaaaccc

SEQ ID NO: 401120 - DNA, 564 bp, Homo sapiens
agaatactatgtttagcatttacctattttagaacagtcctagtatttttattcgatacacatgtgtacacagacacaccagtaactgtgtcttttaatagcaaaatcaatggtatgagggagtgtcatttcctacagagcaaagtaaaatgggacaaaagagaaagacatatattcatcttgggaaaaagatatacattcatctatgaaaaaacaattaaacagagacaatctttggcttattgggaaagaaaacactgataaagtaatacaagaaaagtacaagatcacagcatttttttattcctcattccctcaggcttcctacaggttttaagctttatgtattttttttttttaaaatccaagagtgaagyattgttgtctgactattaagatatctgctcagtctctttgtaagtaatttgatctttgtaagatcaaaggccaaaatgtacacagaaaacaactataatgaagcagcaataatctactaagtgaacataaggcctcaaacaaaagggccacggagtttcaagcaagagatttaccttctacaaaccc

SEQ ID NO: 401121 - DNA, 660 bp, Homo sapiens
ttcttatacttctttgcaagttcattacaatgttataaratatgtaagtatttaatttcatttattctgactggtattgaatgtgcactttcaatcttagtacttatatgtttaattctgggaaagtctcaactgttatcttatcaggtattactttcctgttattccattttcttctggtgaaatttcttttagacaagtgctaaagcctttaaaactaccctctgtttttcttaactacacatatattcagatacatacatttttaaaattattttatcactttcgctctgaatttctctcatggttcacttttttctgtcccattgtttcatagttaactttatcccatctttaatcttttaatttttcagtgttagaacatccaattattgtatatttacgttttatataatattttatatgtatacttttaattttatttctgcctatttatgttttataatttctttttactttattgaatggaagtctaagtgatacctgggtctgaattctcactgagagaatataaacatactctcttctcatgtatcagaatggagcaaaagtagattttgtttcccaccacccatctatcatacagtgtaaggaaaggtttctgatgcatcaccttttctaaacaaatggagaccaagg

SEQ ID NO: 401122 - DNA, 563 bp, Homo sapiens
aattttgtagtagacatatttctatttcaatcaataccgttccattatgttagccaatatcccttccatctcttactatttctatcactgcctgtacagactcaatgatagatcttaaagtaaaaagactcaaagagatcgtagagatcatccaatctcaaatgtttagttgtatatttcccataaatgttggttctagtgaaaactaaactgaaaggggatttcagtatgagagaacaacatgtgatcagaagacttttgatractgcagagattagaagtttgcccagaaagtctggaacacaggggaggtaaaagggaagaatagagaataagataagaaagacagctgggttcagcctctggaaggtcaggaatgccagactgagaaggaataccgggacgttgttctgttgtgaagaagggactgtggaatactggctcctcaaacgtcactgacacaatctgttgatcaagacagtgctgagtctgtggcttttctgggtaacataggagactgccttaactgatttggtattgttttgggcagggaagttaaggtc

SEQ ID NO: 401123 - DNA, 617 bp, Homo sapiens
taaaatatctaatacttattgagaagccctttacacaagatacactaagtatcatattatctgatataatattcaaaacaatcttacaagatagatgcagtttttaagatccttgttttataattgagaagagcaaggcttacagagattaagaaaattgcccatcagggcttgaagaccaaggtgaagaaacgtagctgcctagggtacaaaatgtaagatgggagtcacttgcagagctgtgagtaagaacctacttaaattttgtgccctggccctaggtgacttgtttgccttaccttaactcaggccctgtcgtccatatcacagaaacaatgtctgaaacaactgaagcagtctagtctgactgcagagcttgtacttggaccgatgtcaacaacactatcccaccacagaaatgctattggtattgatcaattcacagttcacratatgtaattttttgagaaaaaaatttccaacctgaaatatgtgttgttcattcatttattcaactaacattagttatctactataataccaattctgtgcttacttagtaatatgtactttgaagggacagaaaatatatggtgctgacttttatagcactaaaa

SEQ ID NO: 401124 - DNA, 565 bp, Homo sapiens
tgtcagagacacatggaactgatggaaactaagaratactgaggcatgaaagctgataaagaaaaagttaaagtcatttagctaacaaatgaccaagtgctgtgttcaatataaatatatgtcaaagatgtatttgattaacattcagagaaggatctagaaatatatgtcctgtgttaccatgaagaagtcagattccttaattcagtcattcatccacttaatggatatgtattatgtgccatatatgccagacactgtgaaaggaactggactcacaaagttaatagagatggaatcccaacctccaagatgcttatggattactggtatgatcaaagccatatcaaaattgaccagcaaagagacaatctaaatgaaattatacagaaatagaatgcaacttgacattcaaaaataaatatttaattaggacctgctatgtgaaaagtataactatagtgggcactacataggttactgttaaatctgcagccttctgctagttatcaaagagcctacaagtgatgtgagtttgcaaagcacaaacacacagtaggttaaa

SEQ ID NO: 401125 - DNA, 420 bp, Homo sapiens
  misc_feature (1)...(420): n = A,T,C or G
tcagtgggtgctgtgtgaactacacaagcagagcctgaataaaaatggaatacctcagcagacaccagtgtttgaagatgatcatgtctgtgcatgagatggcacaaagaacacggaagcaaacaagaacacacaaaggactaaatagtgttccaagtgtcctaactcccaacatcatggctctagaatgacataccaggaagaagctcgtagygttgggataggctggagtggggatagaattggnggattttanacagactcagtttgaacccataacactanatgtaccctagattgactgatatgctttntcatattacaaataattcaagacttanaatgaaaattttacttggtgatcaaataataaatgtcttgccagctgaaggatggcagagggaagagtggagaagggac

SEQ ID NO: 401126 - DNA, 612 bp, Homo sapiens
cacattacagtctgggtcatgtaggagatttctgtgtttgaaaagaagaaagtttctaaattttggctcggagaaatatccagctacatatatgtgcctttatgcttatgacatctccaacgtgagcatgcatacaggtacmgacatttttaggtgagctaacaaagcaaacaccagttattcaggcaatgagcctaaagagacctaaagtacagagggtaagaaacagtgaaagctaaaatatagatgaagaggaacttcaacatggctgccgtgtgagcttcctgctcccttactggcatttctttgatatgggattttcaaagcaggtgctgttcttattgcaatcacattgtcacactccattatgaggaagcaattaagcccataataagttaaaaggtgatgttttgtatttttttttaaatctcacataattgttgatttgttagcttttgaaaacagataggaatttttcaattacaccctgcaaaataccttttctcattctgagtgtttaaaggcaaatatatcttggatccagtgcttttgtgtttacaaatctggatatgatttagtaagctttaaagagatagtaagcacacagtaagg

SEQ ID NO: 401127 - DNA, 500 bp, Homo sapiens
tagacggaagaatatgttcttccaaagaagagagtcagtgactagaaaattatgagaaaaaaagtaagtagtgctaacttactgaggtatgagtgtgttccaagaagtaaggtgaatattcaccacggttaaaataaatgagcgctcaagtgaaatgaagactgaaaatgctcccttagcattagtttactggtaatcattgatgaggcaagattggggaagaatatggcggacactaaatgagatgacaggatttgaacatgtgcaaatgaattttgtttttcttcagaattttctgtaaaaagaagagayttgagagtgatgatgtggagaaaacgaatcagtggggaggaaagcttgaagtagggcgagaaaggatgggctttggtaggtgaagagattatttcttctcctgtaataggcaggatggaggagaaggtgagcgcaagtgggtttgcagacagtgtagcaggtcattgaggggcctgatgatggctttt

SEQ ID NO: 401128 - DNA, 569 bp, Homo sapiens
tatccttcttatatccctttgtcttaaaaaaaaaaaaaagtgtaacaaggagatattaatatttaacatcttttctctctttggtgaaggcagaaaataatcatctgtcttttctaatttaaagattaaaaaattacacccaagtgcaattatgtattatgtagcccaaacctttttataatgatatgtttctaasaatacatcagaatgtatggttgcttttcttatgcttgctttctttaagtcttacatgtaaacaaacacagaattttagaatttttttttggcaattagaatgatgccaaatgttcctattaattgtgaatataagtgaagttagtgtgaaatggaaaatgtatgttagaacacatgtatttaaatgtggcttattttattagcagttactcttagatactagtgtgctaggaagtagagaagttactgtgaaaaccaattgacacacttattgtttttaaactatacctttgctattcaggaatataaggttctcttaatcctttttccatttttcaagttttcaagccctgacctcgagcttgaatagtaag

SEQ ID NO: 401129 - DNA, 593 bp, Homo sapiens
  misc_feature (1)...(593): n = A,T,C or G
taaattaataattcttactctcttagcaaaatgtttctaatgtcttaataatcttaaygataacaattgtagcaatagaaaatgcatatagtgcatacagttgatacatgtgatatcatttaatactaaaaacaaacaaaacccctgtgggtgaggtcccacttttacttggattttctagtgcagaaactgtggataaagaagttgtgtcactcccctacattcatgtaacttaagtgaagtctagttgggattcaaacccagtgtgcctctgacattgatggtcccaaccacagcagtctggcaccccttatctataagaacaagtgtcagcaccaggcagctttccctgttaacaaggagcatggtgctatgagtgaatagacagtccttatttgaagagtgaaagaacccctaaaactctcacaaatagactttacaatttgtaagagttgcatttgtcttaaagatgttactataaatttagtggtagagctacctacaaaaataatgtaagcattttaaaaaatattttaaatataataggcatgtgtntatttgcgagtctaagcacttagaatcattcaagaata

SEQ ID NO: 401130 - DNA, 593 bp, Homo sapiens
  misc_feature (1)...(593): n = A,T,C or G
taaattaataattcttactctcttagcaaaatgtttctaatgtcttaataatcttaacgataacaattgtagcaatagaaaatgcatatagtgcatacagttgatayatgtgatatcatttaatactaaaaacaaacaaaacccctgtgggtgaggtcccacttttacttggattttctagtgcagaaactgtggataaagaagttgtgtcactcccctacattcatgtaacttaagtgaagtctagttgggattcaaacccagtgtgcctctgacattgatggtcccaaccacagcagtctggcaccccttatctataagaacaagtgtcagcaccaggcagctttccctgttaacaaggagcatggtgctatgagtgaatagacagtccttatttgaagagtgaaagaacccctaaaactctcacaaatagactttacaatttgtaagagttgcatttgtcttaaagatgttactataaatttagtggtagagctacctacaaaaataatgtaagcattttaaaaaatattttaaatataataggcatgtgtntatttgcgagtctaagcacttagaatcattcaagaata

SEQ ID NO: 401131 - DNA, 593 bp, Homo sapiens
  misc_feature (1)...(593): n = A,T,C or G
taaattaataattcttactctcttagcaaaatgtttctaatgtcttaataatcttaacgataacaattgtagcaatagaaaatgcatatagtgcatacagttgatacakgtgatatcatttaatactaaaaacaaacaaaacccctgtgggtgaggtcccacttttacttggattttctagtgcagaaactgtggataaagaagttgtgtcactcccctacattcatgtaacttaagtgaagtctagttgggattcaaacccagtgtgcctctgacattgatggtcccaaccacagcagtctggcaccccttatctataagaacaagtgtcagcaccaggcagctttccctgttaacaaggagcatggtgctatgagtgaatagacagtccttatttgaagagtgaaagaacccctaaaactctcacaaatagactttacaatttgtaagagttgcatttgtcttaaagatgttactataaatttagtggtagagctacctacaaaaataatgtaagcattttaaaaaatattttaaatataataggcatgtgtntatttgcgagtctaagcacttagaatcattcaagaata

SEQ ID NO: 401132 - DNA, 593 bp, Homo sapiens
  misc_feature (1)...(593): n = A,T,C or G
taaattaataattcttactctcttagcaaaatgtttctaatgtcttaataatcttaacgataacaattgtagcaatagaaaatgcatatagtgcatacagttgatacatgtgatatcayttaatactaaaaacaaacaaaacccctgtgggtgaggtcccacttttacttggattttctagtgcagaaactgtggataaagaagttgtgtcactcccctacattcatgtaacttaagtgaagtctagttgggattcaaacccagtgtgcctctgacattgatggtcccaaccacagcagtctggcaccccttatctataagaacaagtgtcagcaccaggcagctttccctgttaacaaggagcatggtgctatgagtgaatagacagtccttatttgaagagtgaaagaacccctaaaactctcacaaatagactttacaatttgtaagagttgcatttgtcttaaagatgttactataaatttagtggtagagctacctacaaaaataatgtaagcattttaaaaaatattttaaatataataggcatgtgtntatttgcgagtctaagcacttagaatcattcaagaata

SEQ ID NO: 401133 - DNA, 581 bp, Homo sapiens
  misc_feature (1)...(581): n = A,T,C or G
agttgcatgatgaaatcttgcaccattctgcagggtacatgaattgtccctttgtctagagtctacctggtacttgcccttagtcactaacatctgctcctgayatccaactatggacatctttcggactcgatgatccaggatcacccaaagcagataatccttcctctggaatattgtcagagggtcaacagtagcctaacattcacttcctcccatcacataggcattttgtcgtcttactttctcacaagaaggatgctgagtagagtacactaagatatttagagagagagagaccacattcacataagttttattacagtatattgctataattgttatattttattataagttattggtaatattttactgtacctaatttataaattaagctttatcataattatgtatgcatcaaaaaaaacatatatatggttcagtattatccgcagtttcaggcatctgcanggagccttgaaacataacctttagggataagaagagactaccatacaattatcaacctcagaaaagttacgattagtgcaatattaatacagtatctatacattaat

SEQ ID NO: 401134 - DNA, 620 bp, Homo sapiens
accctgctggtagaggagagttggaagcgaacctttggtggggccctaatgctaagtaccccatgccaggtcaggaatatattaaaccaaaaagccaggaagtggttaacatattctcagattctaaaatacaaagccataataatagaaaaaaaatcatttggtcataacaatgaatacttgcctgaatcctgccagtttcctatggaaaggagaggggaacgaaagacatcagaccataactgcttagatatgataaaatacaaaaccaaagttagaccagaccttagggaagctccactacatgatgggataaggctgtttgtgaatgggtcatccaaagtgatggataaaaaacaaaaacaaaaacaaaaacaaaaaaaaccataatggttatgctgtcattgatgaaaataaacactgtttacgtgggaaaggtaaattacctaatggctagtcagcccaaacctgtaagttatgtgttcttaaccaggccctaaagctccttgaaggtcaagatgatactatatatactgattctaaatgtgcctatggagtggtrcacacttaaaaaaatctggacaaagcagggtctaataaataggaggggaaaagaattc

SEQ ID NO: 401135 - DNA, 524 bp, Homo sapiens
aataatttagaatgcacaattggcataaggagatttggatttgcattataaatatatagcctgctattactggcaacttcctggtcataattattttcatctcttttctttttattgatatatagagcctgctctgcataatctcatacattgtgttctgatactttatacatttccagatgtcaacattatcagatggyaagcccattgtctactaaggtcaatacaaaatatttaataactgggtgttcagctcaaaatggagagtggaggttaaaaacagggaaaggaaaaaagaaaggaagttttatgaagttaggaaaattttttttttttagtgttttggttaaattgaaaaaatattttctattttgtgaggattattatagggaaaactttgtggttcagtggggagttttgcattgactacagcacacttattcgggttgattcttatcccatgggacttgttttgcaactatgaaaagaaattcttatctaaaaacaatatagatattctgaca

SEQ ID NO: 401136 - DNA, 573 bp, Homo sapiens
agttctcatgttgcatgactactctttcagtctttgttggataatctactttgtccatttcgctgctttatagtgccattcctcaggtctccaccttgggacttactttcttctcattttacattcygtccctaggctttctaactttcactacatcaaattagaagaataagactcaaggctagattaggtcctggactaaagcaatgttagtaggattagagaataatggagtgtttaaaaattgttccaggacactatggaagtaggagtgaaggcaaaacaagaatctaagataaatcactgttttccttttggtcataatttctgagagctgtatcgctagaagaaatttgcgataaaaaaatgatggattcagttttagatatgttgttaatcttgaaggaattagatagcactaaccaactatgtataattgttttagtgggttttgcctatagagaattacttacaacacatcatcaatgatcataaaaattaattaagaggctgaaactctcttcccattaaaaataatagagaagtatgcttaagcatcaagctggtaatact

SEQ ID NO: 401137 - DNA, 641 bp, Homo sapiens
catccacctgggtaatctgattcttatctttcattgtctttgagatattttaaaactctttragttgtagatatctcatagtaacataaaaataatgcctatctatagacatgcaaatcgtgtcttgtctggtagaggttcaatagacttttttcaacaatctattaatatctccaatggaaagcgtgtttgcctccgtttgtataatctttcaatattcctgatctataaatgtgtgtgtgttttgcattctctttcgactggttgtataatttgcttggttcactcataaatgcatgaatggaatacaatttttaacttgtgtttgtatctgcataattgtcatagaatgcatataaatatgttctccttcaggtgttttcatgttcaaccaatgaattatagccatttaataaattcttattttgagtagcacatatacactcaatttattaaatgagtcagcaggctactttattttgaatattgcttatgtgtataacactaaggaaagagtaggcagacaagagcaaggcatgatatctgtcctagaggaagagagaatctcattagggccttaactatattttatgtatgtattatttgtatatatttggctgtttgtggatatttgcataata

SEQ ID NO: 401138 - DNA, 640 bp, Homo sapiens
tgacttcatgtgctttgaagtgttcagagaatgaaatggtgacacttgtaacgaaagcaaaaaattccttttcaagtgttagtgtaatgctgccctttgagaaaggataagagaaatgtgtataggttcattagaaagttaacagtttcttaccacagctgttaagttgtgggtgacatgaatgctaggtacaactaaatttttctttgtgtttttagaaacagttagatctttgtttctttacttgaaaaggcactttaattaatgtgagctcatatgagcacagtgtgcctcctcacagtagctaaaaacagattcatcttcygtctcccagcttcttttcactcagtagctgtacaaaagcctagcacgaaactcattaattaccccaatccacctttacagtcttcttagccattcccatctttaatcctggctgtacatttttctttaatctctgatccctaataactaatcagaaattaggccttgacatccttctgtaatttcataccatgaaatatcttatattcttccctaaatcatctgctttgagtagcctagctctgtcattattctagctgtgacccttcccatgtgaccaggggtatggaaccaagggaatgtccctattcaaaac

SEQ ID NO: 401139 - DNA, 516 bp, Homo sapiens
tctgttataatttttacttacagttactgatggggattgggactttatttggatcttcacataagcctacaatttgcatagtcagaaaagaattacagaatgtctaggaggaaagtaagacaatgttatgaagcagagatggcttcaaggatggtacgaagctgtgattttggtgggagtgtaarctgaatgataccttcagtttatgcttgctggtaatgagaggcttgattccatagaacagaagttgtggaagactactaggtcagaattagaagtttggagttggaatacaactcctcctttcttattgtgcaattttcaatatggttgttgtgataatcacattcaataatgcaggtgaaattccccagcacattgagtagcaatagtaagagctcaaaaatcattagctatatctgaacaggattagaaaaaaagtgaggcttccttgagtctttaatgtacatgcaatatgattcaacgttatgtaaaagctatattaaaactcaagaa

SEQ ID NO: 401140 - DNA, 571 bp, Homo sapiens
gaaattatgttacaaatacaacattaagtctagcagaattttcaggctaacctgtgtgtgttaggagtgggttgcaaatatgttgagagtgggaacaaaagagtgatgaatgaccaaaagatataatttcacaaaacttacgagctttccctgaaacagttgtaaaaatgattcctttttygtattttttgaaggactccacttaaaagcagactgctctagttggttcttgatatctaatctatctggagagcactggtctaataaatacatacctgttgtcttccaaaatctatctcaaatattattctcctcagaagatctctaaacctctcagctggaagagtttgtttttagttactctcagctctattacaaactattcatttgtatttatcatatgacctttttactttctaacatcatttaaaattaattatgcacacttgatctttctcttaccagataatgggctatatccatgaaaatttctaggaaacccacccttgccattcctaaatacaaagatgttcttagtatatagttgggaaaagaaatgtgagtttattaa

SEQ ID NO: 401141 - DNA, 546 bp, Homo sapiens
ctttatcttaacttaaacattcctttttatgaacttcaagtttttagacatagctttgttccttcaatcatttgcaaattaaagaatctctgaatccatctatgacctgtaagccctggcttccgtatattctgacttttttgggccaaaccaatgaatgacctccatgtattgattcatgagtttgcctgtaacgtttgcttccctaaattgtataaaacagagttgcattctgactgcctagtgaccacttactcaaggcttcttgggtttatcttttctccaggctgtgctctctcatattgaattagaataaacctctttgaacaatttaaaagagtttgatttgttctatcatcatatttaaagaaggtaattcttcaagtgacttcctaaaacaaaatctctctccctactgttttatttcttgttcatctgccttcacctgtagcagttttttctttccccaatgtcatagtcaactggttcattcatcaaaccaaacctcyctttaaatggaggcccatgcaatctctgagctcctaa

SEQ ID NO: 401142 - DNA, 610 bp, Homo sapiens
ctgaaaacatgaaaaggctccatgattgttttaactcatcatgcagcaaaactcattgatttagactaattaagtaggacaggtgtggtgactcatgcctgaattgctagcactttggaaggcctaggtgggaggattgcttgaggccaggaatttgagaccagcctgggcaacatggtgggaacatggctctacacaccacagtataactctttaatgaaagccataaattacatagcattttaaaaaayagtgtttatgtcatgtgaagcaggaagtttgtgtttaaataacataacatcaacaagctactagtgtcttttcacttctatccccttgatgggtagagtttatgtaatatgactgacggaaaagagagaactaactggttgtgcaagtagagtctcagaagattgaggagaataaaacaaatgatagaatggcattctcttcctttctatcgcctaggattgaggaggtaggaagtgatgaaaaggtttacaaaagattttgtgacacattgaacataaaaggtggcatatatttactagggaatttattctcccctattccaggaaaaaaaacagtgctctcataccctttgtctagt

SEQ ID NO: 401143 - DNA, 610 bp, Homo sapiens
ctgaaaacatgaaaaggctccatgattgttttaactcatcatgcagcaaaactcattgatttagactaattaagtaggacaggtgtggtgactcatgcctgaattgctagcactttggaaggcctaggtgggaggattgcttgaggccaggaatttgagaccagcctgggcaacatggtgggaacatggctctacacaccacagtataactctttaatgaaagccataaattacatagcattttaaaaaacagtgtttatgtcatgtgaarcaggaagtttgtgtttaaataacataacatcaacaagctactagtgtcttttcacttctatccccttgatgggtagagtttatgtaatatgactgacggaaaagagagaactaactggttgtgcaagtagagtctcagaagattgaggagaataaaacaaatgatagaatggcattctcttcctttctatcgcctaggattgaggaggtaggaagtgatgaaaaggtttacaaaagattttgtgacacattgaacataaaaggtggcatatatttactagggaatttattctcccctattccaggaaaaaaaacagtgctctcataccctttgtctagt

SEQ ID NO: 401144 - DNA, 525 bp, Homo sapiens
gaaattctgcaatttaataattgagtggtggctttagtggaatttatctaatttatagactctggactgagaggaagaccacaaggatcattatattagcttcctccagatactgggatctttctccagagaaagtacctctgaatttagggaagagcctacagaagcatgatcatttatcctttcttgaacatcttccttctttctccattacatagtacagatctttataacatttaaatgaggctggaactgggagggggttatacatgtggcgaattgttcctttcttgtgctaagttacatttaacatmcaattgaaatccaaactggagccatttatatatatttaggctctatttctcatggtatccaactggggaccacggcattaatacattttcttaagatcctctaaggtgcagttctccttgtctttctatgttatcccaaaggaccacgactactgaaatggagtccaggcaactctaaattaatccatgtctttggattgcatattggcta

SEQ ID NO: 401145 - DNA, 597 bp, Homo sapiens
ccctggtaataatgtagaactttctcctcttcactgtgctctcggtaagttaagttttgagggctaccaggaaaaagcgcaaaagagggaacacaggatatggtagatgaagagtcagtgattcacaggttgccagcctttgcaaagtgtcttccatttcatcataattgggcacattttgcccaccagtatgaacttataaacagtgaattgagatccaggaggcaaagtgctgatttcagataaaactcagacctctgagaaacaaacacctgtgttgctgtaagcctgtaagaaggtcacaaatacaattcgtatgatctagggaatacagtattagtgggayagtaattgcttctatgggacacagaaaagatttctaagacttcaaaatactggtgcaacaatgtcccacttacattttggagaatatttttctgtgtgtctctaatagtaatctgtataagccaaaactgggctagggaagtccaaccaggaactaagaattgtaaaagcggttgtcagtctcctgagccacatcccacatggagcgaagatttgattttatggaatgattgatgagcagttcatatgtag

SEQ ID NO: 401146 - DNA, 597 bp, Homo sapiens
ccctggtaataatgtagaactttctcctcttcactgtgctctcggtaagttaagttttgagggctaccaggaaaaagcgcaaaagagggaacacaggatatggtagatgaagagtcagtgattcacaggttgccagcctttgcaaagtgtcttccatttcatcataattgggcacattttgcccaccagtatgaacttataaacagtgaattgagatccaggaggcaaagtgctgatttcagataaaactcagacctctgagaaacaaacacctgtgttgctgtaagcctgtaagaaggtcacaaatacaattcgtatgatctagggaatacagtattagtgggacagtaattgcttctatgggacacagaaaagatttctaagacttcaaaatactggtgcaacaatgtcccacttacattttggagaatatttttctgtgtgtctctaatagtaatctgtataagccaaaactgggctagggaagtccaaccaggaactaagaattgtaaaagcggttgtcagtctcctgagccacatmccacatggagcgaagatttgattttatggaatgattgatgagcagttcatatgtag

SEQ ID NO: 401147 - DNA, 565 bp, Homo sapiens
tttggtgattttgtaaaaggggtcaggttcacgagttatctaatcataaacaatgttttttttccagctattgtatatgtgtgtgtgtgtgtatgtagaagtcaaaaataagacttcgttgtatttctcaatttcaccaagccttttcctcctgtacttggacttttgtattcactattctctttgcctgggatctccttcccctccaaccccatttttctgcaatgggcttgagtttcagcgtaaatgtcatgcttctagaggggccttctctaaccacctgtttaaaatgtcaccccacsctgattcacatatgtaaaccatttcctgtttcaattccttgtttattttcttcatagcatttttttaaatgttaaatattcttaatgatgctcatgtttctcctttgctaatagtttaccccaaagtaagcttcacgatgtcagaaaacttctatgacaagtttgctgctgtgtgtagaatgcttcaataaatatgtgctataagaatgtatgaatttgagagatatttattagagaattgagttgtatttggaagaagttta

SEQ ID NO: 401148 - DNA, 534 bp, Homo sapiens
cttcacaaactttaatataaatacgagtcatctggggggtcctgttaaaatgccgatacgaattcagtatgttggcgtcagacatgagagtttgcatttctaataaaatcctaagtcaggtgaattacagtaggtggaccaatgtgataaagaacattggacacacttagcataggattttaacaaccatattattgttttcgttattatttttgtttttttttcagttgcaagtgagcttttatttagagacgtctcaaatccgaaattcatttaattattttcccagcttagcttatattatcactgtcaactactcccaatagagaagtttgtgttcacagaaaacacagactaaggcaaaagcaggccttaaatatcttccaaattaatttcttcattttatttatcargacatttttctagtcctacatgtgattgggaataagaacatagtggaatcattagagatcacttttctgtgtgtttttcagggtagattaagtctaagtaaataggagttccttaaatagt

SEQ ID NO: 401149 - DNA, 506 bp, Homo sapiens
tattttgaaacttggagtgagatctggtcttgtaaaattaaaactgtgtttcataaaaaagatttaaaaatagaataaggatctgcctgggcctttctggacacacaatgaaaacatccagaagacaagaaaacgacacaggtgggatcattacattgccccaggcgcaaatgctttctgtcttaaaattttgaattctttccagttacaagttctgaactttctggcatctgccgcataaatgcatcacagagtttggcagaggtaaagggaagcattaattttgcatggaaatcactttagagatcttggtttaatttttcttgaaggactacataagcaacttgagtgatataaaagtctaaaacttgcagrcttgcttggcagaatgaatctaacaaggaagaccttcttttaaaaaatgcccaaatattaagatattaaaattcacagaaatgggaaaatgttctaacttctatataaaacccagagtaatgtttataaac

SEQ ID NO: 401150 - DNA, 606 bp, Homo sapiens
taggcagggcaaagtctgcatataagtagacsctgcagttcaaacctgtgctgttcaaaggtcagctgtagatgctagttaaaaaagacacatattcacaaaagatacctttttagtggaaattcctttattgacaaccctctagtcatatataattctgagaaacagcagcatgagtattaggctaccaagcaattggttgtcttttctaaacatagtatgcagtttcccactccttgccttagaaaataatgttccctctgcctagaatatgcgttgcctctttccttgcctggcaaccttctagttatctttcaaaaccccccttaaatatcatcacctctgtaaggacattcctgtcccctaggcagaattagtcacttcctcctcccaatctgcctgtgtgaaagcccatatagtactcctgtactccattgtgaggtcccctaaataggtgccatctgtttagccccagcttcagaagtgctaggtgctccaaccgttaagagaatgaatgagttaatgaataatacagaaaccccaaaatggtcaaaagtccagatttttgacaagaatgatgggctaacatccttcccttacctaacc

SEQ ID NO: 401151 - DNA, 500 bp, Homo sapiens
tcaatccatgctagtctgtacgatctgaaaaaaaaaaaaaaaaaaaaaaaaaarggttctatagtcaaataagctttagaaatgttaaggaggttgatttattctaggactactacttaaaagactttggcttttaatatactcatgtttattgtgaatcttcaagacaaggccatggtgtgcaaataaactctagtttcgcaggcttacttggctgtagtcccctaatatgatgatgttacaaaaacaaacaaagcaaaacaaaacaaaacaaaaaacaattctctaggaacccttgctcttgggctttctctctggaaggactttctttctaaatcattcctcttggtgatttaggtgatatcctcatttggagacctacagaatatcatatgaaattctgtgttagttgtatcatttttttcccagtaaaaattatattttgcttagcatcagaacagtaaaatataccagatatttaagtcatctaatcagataat

SEQ ID NO: 401152 - DNA, 599 bp, Homo sapiens
gtcatcatgaacacagtgtacacttgaatggtgatggagaggaagaggggctgcagagatttagaacaggaagcagatggatgtacaagatattttgtttgcctcaggatttttgcctaagcccttgaagacatctggtatgccactagaaatcacctgaagctaaaatttaccagattgttggtatcttgaaaagctaccaaaattagtttgcaaggctctacccatcagcttcttacagtctgcctctagaaatctcatctataccaatccagtccaatttctcgaggtaagtctgtttcccaaaattcacttatttgcatactacttttataattcttgtcatatgtatacatcaccatattgttttttaaattgttagaaatgattttatttaaatattccaaataattaaaaaatttgagattaacttcagacaacgtaacattaatcatttaaagcatacagtcrttgatatttagtgtattcacagtgttgcaaccaccaattctctagtttcaaaagtgtttcatcacccgataaagacaccccatacctattaagtaatcattcctcattctcccatttataaaagacac

SEQ ID NO: 401153 - DNA, 561 bp, Homo sapiens
taaaatacagtaaaatattttaaacactcaggacccagaacaaatacgtttgctgaatgattgtaagaatgcttgatgtttggctgcaaagctatgaatttccttgcctttccacaatttaaaatatctaccttctcacaaatcttaaaagttagacctatcctgctgttatatrtaattcattttctactaacattgttctttttttgtttgttttttgagatggagtctcactctgtttgccaggctggagtgcagtggcacaatctcggctcactgcaatctccgcctcccaggttcaagccattctcctgcctcagcctcctgagtagctgggattacaggcacacactaccatgcccagctaatttttgtatttttggtagagatgggatttcaccatgttggccagcatggtcttgatctcttgacctcgtgatccacccgcctcggcctcccaaagtgctgggataacaggcgtgagccattgcccctggcctaacgtccttcttttataacatctaaagtagttagaattgacttatttcccataattttaaa

SEQ ID NO: 401154 - DNA, 561 bp, Homo sapiens
taaaatacagtaaaatattttaaacactcaggacccagaacaaatacgtttgctgaatgattgtaagaatgcttgatgtttggctgcaaagctatgaatttccttgcctttccacaatttaaaatatctaccttctcacaaatcttaaaagttagacctatcctgctgttatatataattcattttctactaacattgttctttttttgtttgttttttgagatggagtctcactctgtttgccaggctggagtgcagtggcacaatctcggctcactgcaatctccgcctcccaggttcaagccattctcctgcctcagcctcctgagtagctgggattacaggcrcacactaccatgcccagctaatttttgtatttttggtagagatgggatttcaccatgttggccagcatggtcttgatctcttgacctcgtgatccacccgcctcggcctcccaaagtgctgggataacaggcgtgagccattgcccctggcctaacgtccttcttttataacatctaaagtagttagaattgacttatttcccataattttaaa

SEQ ID NO: 401155 - DNA, 589 bp, Homo sapiens
ttcaacgatttgcattttagaaaatgttttgaataacttgctaatacttaaaaaagtacttctgtgaagttttacctcctcagtgtttgytatttttatctaatcctatttttcatagtaactcattgtgaaatgtttatctgtgcatttaataggttaacaaggaggaaaaagcagaaaaataatgttttttttccatagtcagaagagagaagaaatatggaagaatagtgaggcagtggcaggcccattctaattcttttttaaaaaggtgggcatggagaaagtggatcaagggtgaaataaaagaagaggaactggcagatgtcacacaatagccgtaggatccatttgcaagcatttgtaaaaaatgacccccaagtactgaataagtctttgagggttagaattcccaatagttggtagaagtaagaaccagagactttaaaaaaaatcaaattgaatataacttttactccaggatgcaatggtgaggaaagttaggctgaacatgccgtattaaaaactttcactggcaatggcaacacatagatactgggagcatagaggaagggttgctaacattact

SEQ ID NO: 401156 - DNA, 589 bp, Homo sapiens
ttcaacgatttgcattttagaaaatgttttgaataacttgctaatacttaaaaaagtacttctgtgaagttttacctcctcagtgtttgctatttttatctaatcctatttttcatagtaactcattgtgaaatgtttatctgtgcatttaataggttaacaaggaggaaaaagcagaaaaataatgttttttttccatagtcagaagagagaagaaatatggaagaatagtgaggcagtggcaggcccattctaattcttttttaaaaaggtgggcatggagaaagtggatcaagggtgaaataaaagaagaggaactggcagatgtcacacaatagccgtaggatccatttgcaagcatttgtaaaaaatgacccccaagtactgaataaktctttgagggttagaattcccaatagttggtagaagtaagaaccagagactttaaaaaaaatcaaattgaatataacttttactccaggatgcaatggtgaggaaagttaggctgaacatgccgtattaaaaactttcactggcaatggcaacacatagatactgggagcatagaggaagggttgctaacattact

SEQ ID NO: 401157 - DNA, 522 bp, Homo sapiens
aagagctattgtggaaaattgtgagcctgtctctgctaggtcttggcctataaagaactggctggctttataggctgatgtaatcttggtcataggccagcattgctggctcataaaatatatgtgtatgtgctggcctactgtcttacagagggctaaataagcattatacttaggtctgcctgactcaagttctgtgagatttggaggaagatgttgcttggaygatcaggggaggcttcacaatggaaataatgttttagattgaggttgaaagatgaatggaagtccaggaaagtagctaaatgaaaataattccaggcatcagtaagatttcatacccagctgtaaatcccagaagccttaaagtggtcaaagcaaggcagaaataagcagaagcagtgaacagaataaactgtaggctgttaccttttaggctaacagacacacacacacacatactcacacacgcatgcacctgcacgcacacacacacacacacacacacacacacattttaaa

SEQ ID NO: 401158 - DNA, 597 bp, Homo sapiens
agttgcctgataaaagacaatgtaatatattgaagctagaaccctacagtgggtaatgaggaattttagacagacatttgattacagccaccagtaaatatatataaagtaaaaataaaggcatttggctgatctaaaatgtaataccaatcagtcagcacctgtgattcttttacttatattttttgggtttttttaaaacaaatttcagcccaattttcttgagtcattatctctctgcagcagcagaggaagggcctgtacctgcctaccaatgacctggtgtccttatatctaccccaagagcagggatactagctgtgtccaaatgggttctgaattctacagactcatcaacatgaggcaaggaatcactgaaaaccacttttgtctcctttaggagaatgacatatctttagtattttcgtgcttattcttctatatctacatatgcaaagctttccttaacagtaaagggtamatatgcatagtgggaagagatcagaactttacaagtgaaggagagcaacttcagaaatgaattattttctttgctttattacttttaccaagacagaaagtattgtattgagagat

SEQ ID NO: 401159 - DNA, 538 bp, Homo sapiens
aataatacgttatcaatgttaaattcatggctatccaccaggcatggtaacttgtrcctggtagtcccagctactagggagactgaggcagaaggattgcttgagcccagggattctaatccagcctgggcatcaaagcaagaccctgtctcttaaaaaagaaaattatgattatgtatgaaaatgcattgttattaggaacacctcactgaagaatttaggagtaaaagagcatgacgtttacaacttactttcaaaagctgaaaactaaacacacatatatgtaatttatatgcatatgcatatatatatgagtgtgtatatacaggtgggataggaaggtgggttagtttgtgttagttgagggaggaatggaggagggaaaaggaaggaaggggtaaggtgaaaataaagcaatgagacaaaatgttagcaattggtaaatctgaaaaagaagtataaagaagctttacaccccttttaatttacagctattctttaagtttaaaattataccaaaataaataattttattaag

SEQ ID NO: 401160 - DNA, 576 bp, Homo sapiens
ttagctactttgaggagaagggaaataagcttatgattaaayacagaaaggggatagagagagaaagagagagaacaggaattagagattagaggcagggtgactaaatgggataagacagggtcaggggacattctgacagaggaagaactaggtgaaacttgcacagactcctcctacaaccatctaggatccctagaggatgctggatgttggagacagggtcattgtccctagattggtggtggtagttgggggatagaagggagtagatacattccacactcttcacctcaccaggaagccctggcatccaggaatctgtgaccaagatggacccagccccataagaactgctcagaagaaacctggtgaggtccctgctggctccattagccagtggcccagtgacccagagcatgcttctccagaaaccacgtgtccttcttagtcagaattgttgcctctcagagacttcgggggccctggacaggccctccacccttggtctggcagcagagcccaatcaaaggcagttgctgggctgtgggccgtggaggcttggccaggtcctgc

SEQ ID NO: 401161 - DNA, 562 bp, Homo sapiens
tagagagagaaagagagagaacaggaattagagattagaggcagggtgactaaatgggataagacagggtcaggggacattctgacagaggaagaactaggtgaaacttgcacagactcctcctacaaccatctaggatccctagaggatgctggatgttggagacagggtcattgtccctagattggtggtggtagttgggggatagaagggagtagatacattccacactcttcacctcamcaggaagccctggcatccaggaatctgtgaccaagatggacccagccccataagaactgctcagaagaaacctggtgaggtccctgctggctccattagccagtggcccagtgacccagagcatgcttctccagaaaccacgtgtccttcttagtcagaattgttgcctctcagagacttcgggggccctggacaggccctccacccttggtctggcagcagagcccaatcaaaggcagttgctgggctgtgggccgtggaggcttggccaggtcctgctgtgtccagtgagtcaagcacaacctgcagccggcagaat

SEQ ID NO: 401162 - DNA, 604 bp, Homo sapiens
agagggagagaaattaggtttctgttatcatccagaatagatcacagtgaaaccagaaagaaaaggatggaataatatgtgtgtgtgagagagagagagagagagatacatagatagatgatagataagataatagacataatatatatatcacaaaaaacaaatgtgtccatatatatacacataggctatgtatgttatatattataataattaggttagtatctattgtatacatactatatgtatacatactacatatatacatattacatatataatatatacatattacatatataatatatatacatattacayatataatatatacacatattacatatacacatttgtttctataatagaaatttgaagaactaatttttagaatcaacatagggaagaaagcaaactgctaggaaaggataatcccaaattgtgaaactgaatgagctgcataaaggttgccactgacaaaaagggactcctgcaggttggagctgatgaggcaagaagatgaatgtgtttggaagcagttgaatgttataagagatattcatacagtttaattattatcatctggaaacacagtgggagggag

SEQ ID NO: 401163 - DNA, 560 bp, Homo sapiens
gctgttgaacttttccttgggaggctctgggagaggcttggagatttggcaacaaggttacatcaggtcatattattcagacctttctgatagcagatttcctgggaggctggtatctttgattggcctgtcatttccaggctttgatagtgtggaaagagcagtgagaggttagtcaagtaacaatgcttctagacttagtgactagctaagtgaccttrgataattcatatccactctctggactccagttttcttctctgtaaaatgaagggcttatgcagaagtttcctcatagttatgttatcagaagtttagcaatacagcaaacatttattgagcatctactgtgtttaagacgttgaactaaatgctgcaaatgaaaaggtgaatcacaactagtggtatcttctgagttttcagagactagagggaaaagcagatactgatggtgttaacacaatgtgtatgctgtgttagaagtctataccatccattattctatgaaatattctccatgtattcatgcacatggataaactggcttttgaatccatgga

SEQ ID NO: 401164 - DNA, 571 bp, Homo sapiens
tttggcttttgaattttaaatagattcattgattttaaataaatcgatcacaataaattttgcataagaaagaaatcctaaataaaaagaattccactccaactctacaaaagagttgtcttctataatgaagacccaatgagagccagctgtggtcaaaatgtcttcagttgttgtcctggtagcaaatggaaattgtccttccttcaactwctcttacctctcctcatctgaacattttcacaggtgcttactggcatcccaaattgctctccatggcaaagtctttcaggacaaaatctaggcgtttatgagatgagtagctggaagtgatatgttctcaatgttccctgctgggttttaaaaaattatgtttttttttccgctaagcacctacctggaagacctgatattaaccttatttcaactcttgatcccaatgattaaaaatataattgctatcagtatagttattacaacaaaacttcgctgtcatcaacttggttgtatactgtaattttatccaaaataacacatttgtagagagttgtagatgtttttagacataaga

SEQ ID NO: 401165 - DNA, 558 bp, Homo sapiens
tgttccaagaggcaagaaataggagtggaagctgctgatcctttgaaggcctggtccaagaagctggcacaacatttttactgtattttattagtcaagccataacagagcttatcttatctagaatgtaggtatagagacatggactgtacctctagggagagagactatcaaaaaatttgtggctattttaaagctttccattcaagggagaggtcttttgaataaaagatttattcaacaacaaaggcaacctacactagctgcctatayaagttaacctactcttcttgtcagacatttgatgaaaataaatgcagaaaagaatgatcaaggtggacaaaaagaataacgctggaggaaacataactcatacaagttgtcaaaaataacttttctactctaatatgaattaaattctaattaacccacaattatccccaaatatactagagaggatattaaatccatgaaataagcataggttgctattacaaaaaaaagttgagatctaagaacaaaaaaggattccgggaatttatgtatttaattgctaaa

SEQ ID NO: 401166 - DNA, 471 bp, Homo sapiens
caacatgagctatttatccccttgactccatttgaatactttgcctaaactgacttcctggattctggtcctgtgccctaaggacttagttatggtatttctgtggcctcactggttttgaagtgatatgtcaacaaactgcttttcttccatgagctccctaggttttaactctgttgtgcattactgagatttattcctagcttattaatgataatgaccacagtagtaaaagtgacagctatcatttattgagttcttttgtgtatcatgcaatttagaaataaattctcacactgtccgtgataattgggtattattattttctttttatgagtgacgaaactgaagcgaagtgggagaaamataaaactttcccaaggacctctcctttttttaacatgctacattggggttagcatgtcaaaaacccataccccttctcccctcatatcaccactcgctctctct

SEQ ID NO: 401167 - DNA, 570 bp, Homo sapiens
tataataactcttatcttttaagcctccccacataattcagtcacattttcacagtttactattctttgtccaattcagtataaagcaactgactctagatgcttttttggtcttcatttctttatgagggtacctgcgccatgtaaaatgtgtattaaataaatgtgtatgcttttctcttgttaatctattttatctcaatttaattcttgaacctagccaggaccctaagaggatggaagtagaatttttctacacctatagtatatacatacaagcatatatatacacacagacatacacagagtttgtaagagaatttgtatatatatgcaaatatatgtatacatgcatgtatgcacatatacacatgtatatgcacatacatgcatgtgtatatatgtgtatacacatatacataggcacatacatgtgtatacatatgtatgtrtatatacacataaattccaactgttaaaaactgatgtaagcccatttgttctgtcagaaattatttcctggatgctatctgcagtgtccagtacttggaagtaggtgaggggctattg

SEQ ID NO: 401168 - DNA, 570 bp, Homo sapiens
tataataactcttatcttttaagcctccccacataattcagtcacattttcacagtttactattctttgtccaattcagtataaagcaactgactctagatgcttttttggtcttcatttctttatgagggtacctgcgccatgtaaaatgtgtattaaataaatgtgtatgcttttctcttgttaatctattttatctcaatttaattcttgaacctagccaggaccctaagaggatggaagtagaatttttctacacctatagtatatacatacaagcatatatatacacacagacatacacagagtttgtaagagaatttgtatatatatgcaaatatatgtatacatgcatgtatgcacatatacacatgtatatgcacatacatgcatgtgtatatatgtgtatacacatatacataggcacatacatgtgtatacatatgtatgtatatatacacataaattccaactgttaaaaactgatgtaagcccatttgktctgtcagaaattatttcctggatgctatctgcagtgtccagtacttggaagtaggtgaggggctattg

SEQ ID NO: 401169 - DNA, 556 bp, Homo sapiens
acagacaaatactgagagaattcrccattaccaagccaccactacaagaactgctaaaaggagctctaaatcttgaaacaaatccttgaaacacagcaaaacagaacctctttaaagcataaatcacacaagacttacaaaacaaaatacaaattaaaaagcaaatacaaaaaacaaccaaaaaaaaacaatgtgtacaggcaacaaagagcatgatgaatgcaatggtacttcacatttcaatactaacattgactgtaaaagacctaaatgctccacttaaaagaaccacagaatggataagaactcaccaaccatctatctgctgctgagactcacctaacacataaggactcatagaaacttaaagtaaaggggtggaaaaaggcacttcatgcaaatggacaccaaaagcgagcaggggtagttattcttatatcagacaaaacaaatgttaaagcaacagcatctaaaagagacaaagagggacattatataatggtaaaaggccttgtccagcaggaaaatatcacagtcctaaacatataagcaccta

SEQ ID NO: 401170 - DNA, 556 bp, Homo sapiens
acagacaaatactgagagaattcaccattaccaagccaccactacaagaactgctaaaaggagctctaaatcttgaaacaaatccttgaaacacagcaaaacagaacctctttaaagcataaatcacacargacttacaaaacaaaatacaaattaaaaagcaaatacaaaaaacaaccaaaaaaaaacaatgtgtacaggcaacaaagagcatgatgaatgcaatggtacttcacatttcaatactaacattgactgtaaaagacctaaatgctccacttaaaagaaccacagaatggataagaactcaccaaccatctatctgctgctgagactcacctaacacataaggactcatagaaacttaaagtaaaggggtggaaaaaggcacttcatgcaaatggacaccaaaagcgagcaggggtagttattcttatatcagacaaaacaaatgttaaagcaacagcatctaaaagagacaaagagggacattatataatggtaaaaggccttgtccagcaggaaaatatcacagtcctaaacatataagcaccta

SEQ ID NO: 401171 - DNA, 675 bp, Homo sapiens
accatttgagggctacatgaggagagagaaagttgagatttgggagttacaaattcaggcaagtgaacctgaacctcatatagggcatggtcttcagagtccaaaaaaaaaaaaaaagcagcagcagcagctacccatggaagcttcttgcctctgacccagtccacttttccagtctacatcggggccttagcttcttaaaagctgctctggcagcagaactgtgcacctgggaagacatgctcaatcatgcctgcatatgtgctgacccatgggtcagatataatatgatgccaggtgtattttgggaaaaagggaagaaaagggataaactgaactagcctttggggcttattactacaggggagctggatgaggaggtacttaggagatgattcaccttggaagaagctggggaaagtgtttagggagacgaggaagactgagaaatctctgccttcccagaactcagcaacccagctcttatgtgatgtggagaagcagcaatgctggtgattcatgaacaggaggaggaaaggacttgaaagggaccagcatctacaatctagttcrccagcttgcactgaatcttactgaatacaacctgctagttataacagagaaggccagggtgagaactaactattcaagagagcaagattctgtaatcttccc

SEQ ID NO: 401172 - DNA, 604 bp, Homo sapiens
aaactacttttaaaacgatcatctcattcagcgtttccaatacagccataaaactttagtcctaacagaaaggttaagccacgtgttccagactacacagttaagtatcagactggacctaaacccagccatatggagtcttaagcactacaaaatccataatcctctcattaacataacccacttacaggaccaaggaattagtaatatttttttcttatttgaatttaaagtatcttaaattcacaatatcctggcaaattcagtaaataattactaagaatctagtagctatgaggcactgataaattttttaaaaaggaaaaggaaagaaatgtttgtgtaagggatcttataaaagaacaaactaataaccataggaagctgcttgtatatttctayaatgtttatatttactgattagaaaatgtggtttgtttgactgtccttttttcctacacatatgtaaatatgcattttttaataaaactgagaagagagtttctatcccattctgtagtctgcttctttttcatataacatagatttccggggaggggagagggatagcattaggagatataactaatgctaaatgacgagt

SEQ ID NO: 401173 - DNA, 539 bp, Homo sapiens
ggcagggcacaataaagtcacagagggcatttgtgggagtataactgagaaaatatggttagtttctgcttgctgttataataacaatcacctgagttgctcttatgataacaagcacctgagattacccagagatagccagtgtgtgttggtttatttcttccagtcttttttctttgcctccatacattttctaaaaccaaaaatcgggatcayacgatatcgtttattgtacatatttcccatctattttccctacacctttataaagtctttaaaaagtcagacaacagtagcaaaattatttagaaaataaatttgggtgtacctggaagacataaggcaatttaatgctattaattttctgtaaaggtgaaggcaactgtataattgtccaaggactaacattaaggactattacagtgctttgcaaatcagttagttttacttgccgcattttgttgacagaagtgaggcactgcagcatatgagagctttacactccatttccatcctatgcagaatgcagggggtgtgag

SEQ ID NO: 401174 - DNA, 539 bp, Homo sapiens
ggcagggcacaataaagtcacagagggcatttgtgggagtataactgagaaaatatggttagtttctgcttgctgttataataacaatcacctgagttgctcttatgataacaagcacctgagattacccagagatagccagtgtgtgttggtttatttcttccagtcttttttctttgcctccatacattttctaaaaccaaaaatcgggatcacaygatatcgtttattgtacatatttcccatctattttccctacacctttataaagtctttaaaaagtcagacaacagtagcaaaattatttagaaaataaatttgggtgtacctggaagacataaggcaatttaatgctattaattttctgtaaaggtgaaggcaactgtataattgtccaaggactaacattaaggactattacagtgctttgcaaatcagttagttttacttgccgcattttgttgacagaagtgaggcactgcagcatatgagagctttacactccatttccatcctatgcagaatgcagggggtgtgag

SEQ ID NO: 401175 - DNA, 539 bp, Homo sapiens
ggcagggcacaataaagtcacagagggcatttgtgggagtataactgagaaaatatggttagtttctgcttgctgttataataacaatcacctgagttgctcttatgataacaagcacctgagattacccagagatagccagtgtgtgttggtttatttcttccagtcttttttctttgcctccatacattttctaaaaccaaaaatcgggatcacacgatatcgtttatkgtacatatttcccatctattttccctacacctttataaagtctttaaaaagtcagacaacagtagcaaaattatttagaaaataaatttgggtgtacctggaagacataaggcaatttaatgctattaattttctgtaaaggtgaaggcaactgtataattgtccaaggactaacattaaggactattacagtgctttgcaaatcagttagttttacttgccgcattttgttgacagaagtgaggcactgcagcatatgagagctttacactccatttccatcctatgcagaatgcagggggtgtgag

SEQ ID NO: 401176 - DNA, 619 bp, Homo sapiens
ctaaatgccaatcaatggcagattggataaagaaagtgtggtacatatacaccatggaatactatgcagtcataaaaagaatgagatcrtgtccttcgctggaacttagatggagctggagggcatcattcttagctaactaatgcaggaacagaaacccaaatactgcatgttctcacttaaaaatgggagctgaatgatgagagcacatggacacatagaggggaacaacagacactggggtctaccagaaggtggagggtgggaggagaaatagcatcaggaaaaatagctaataggttctaggctgaatacctgggtgatgaaataatctgtacaataaacccccatgacatgagtttacatatacgacaaactgcacatgtactcctgaacttaaaataaaacttaaaaaatgtgtaccttcatttctccctcctaccctttttgctattgttttaatcattatatttcttcatgtctaatgaatttcacagtgttatcttataattattttttaacaaattagaaaattcaaaaatataagtaatatattatccacatattagccttatccactgtctttattcctttgtgtagatttaggtattcatggggt

SEQ ID NO: 401177 - DNA, 619 bp, Homo sapiens
ctaaatgccaatcaatggcagattggataaagaaagtgtggtacatatacaccatggaatactatgcagtcataaaaagaatgagatcgtgtccttcgctggaacttagatggagctggagggcatcattcttagctaactaatgcaggaacagaaacccaaatactgcatgttctcacttaaaaatgggagctgaatgatgagagcacatggacacatagaggggaacaacagacactggggtctaccagaaggtggagggtgggaggagaaatagcatcaggaaaaatagctaataggttctaggctgaatacctgggtgatgaaataatctgtacaataaacccccatgacatgagtttacatataygacaaactgcacatgtactcctgaacttaaaataaaacttaaaaaatgtgtaccttcatttctccctcctaccctttttgctattgttttaatcattatatttcttcatgtctaatgaatttcacagtgttatcttataattattttttaacaaattagaaaattcaaaaatataagtaatatattatccacatattagccttatccactgtctttattcctttgtgtagatttaggtattcatggggt

SEQ ID NO: 401178 - DNA, 553 bp, Homo sapiens
gcaatctccgcctcccaggctcaagcgatcctcccacctcagcctcccaagtagctgggactacaggtgcacaccaccatgcccagttattattattactttttgtatttttgttagagatgagttttcgctatgttgcccaggctatgttgaagtattttagacaacactacagatgacatataacacaacacaaaaaggcaataagtaaaaattctccttccaatgcycgattcttactctctcaatccccttttcacaattgctctttttaaaaatcagcctatgcatatacaacttacatatacatgtccttctgtctcacaaatgatcacttattaaatgtactaaactgcatctttctactttaatatatctgtgaagaagagtttcataaaccacctcactggtttatgaactagttgcctaatatttcactgaatagttacatcataatttatttaaaacatgttttttgatgaacatctagttttctgcagttatttgcagttataagcattgctgcaatgaacagctttgcatatgccatggt

SEQ ID NO: 401179 - DNA, 577 bp, Homo sapiens
tatgctgtattttattgggcactcagaccaaccttgatgcaacgtggaaggagatgtaatccttgtgacactccactagagtgtcagtaccaggattttggatcactgggggccagcttggagactgcctaccacaattgggctggaccaagcacagcaaactcattagcaagatttaatatcctcttcttggttggcttttgtttattgctcatcttccatcacttggatctctcatttcatgctgtcgcaataataagttacttgtagttccccaaatacaccatgctattttattgctgtgcttggtccggcccaactgtggtagccagcttccaagatggttagggatggggkactcaggaaggatgggagaaaagaattacaaaagaccactaggaaactttcaggagtggtagatatattcattatcttgatttcggagatgattttatgtgtgtatatgcacaccaaaactaatcaatttgtacaattaaatatgtgcagtttattatttgtccatcatgcctcaataaagctgctttactaaaaataaaaagaattaaagtgatagaac

SEQ ID NO: 401180 - DNA, 577 bp, Homo sapiens
tatgctgtattttattgggcactcagaccaaccttgatgcaacgtggaaggagatgtaatccttgtgacactccactagagtgtcagtaccaggattttggatcactgggggccagcttggagactgcctaccacaattgggctggaccaagcacagcaaactcattagcaagatttaatatcctcttcttggttggcttttgtttattgctcatcttccatcacttggatctctcatttcatgctgtcgcaataataagttacttgtagttccccaaatacaccatgctattttattgctgtgcttggtccggcccaactgtggtagccagcttccaagatggttagggatggggtactcaggaaggatgggagaaawgaattacaaaagaccactaggaaactttcaggagtggtagatatattcattatcttgatttcggagatgattttatgtgtgtatatgcacaccaaaactaatcaatttgtacaattaaatatgtgcagtttattatttgtccatcatgcctcaataaagctgctttactaaaaataaaaagaattaaagtgatagaac

SEQ ID NO: 401181 - DNA, 602 bp, Homo sapiens
gctttatatgtgcttatattggggggaacaccctaaaatgtgtttagtataaaagggtcatatatgtgtacctttttctctttctgattttattgaaatataatctacatatgtcataagtttacccatttcaagtgtataattccctaattttaagtatatttataaagttgtacacacatcactataatctcattatagaatatttcattttcccaaaaagaagtcctgtacccattagcagtcatgcagcattctcgctaccacccgctcctggtaaccactaaactactttctctttctagatttgcccattctgaatatctgatatcaacggaatcgtacaatatgtggtcttttgtgattgacttctttcacttagcatgttttcaacgttcaatcatgttgtaatccatgtacaagtttttgtgtagtcatttttaaaagaatttttaataattttaaaagaattatttagagactctgtcacccaggctggagtgcagtggcrcaattatagctcagagcagcctcaaactcctgggctcaagcgatcctccctcttcagccttctgagtagctaaggctacaggtgcacacca

SEQ ID NO: 401182 - DNA, 513 bp, Homo sapiens
aaaaaacccctcttcatggactacagaatgttagggaaagaagcatttctctgtaacaattacgaaaatctaaactaaaatagatagaagtttgtacctagatattgtatatccctawagcttattcctggagatccattataaaattcgtatgtacatgcaagtaattcataataaaacaacacattgaggcataaaacaccttggaaactccaagtcttctggacagcttaccagatgaaccactacctttcagtaagggcctgtagatccctgtgaaggaaattttggtgaaaaagctcaatatttcaggatataggatttacattcaaaaagcggaaaaacataaatagaatgtttcatttctaaagcaccataatggagctgggaggtggaagtctttctaatccaagaaaaaaagtcaacagagcagtcaccaactattccctgattatcactccatcagacactggatgaggcctgagctttccagccaccgtgccatagttcctg

SEQ ID NO: 401183 - DNA, 513 bp, Homo sapiens
aaaaaacccctcttcatggactacagaatgttagggaaagaagcatttctctgtaacaattacgaaaatctaaactaaaatagatagaagtttgtacctagatattgtatatccctaaagcttattcctggagatccattataaaattcgtatgtacatgcaagtaattcataataaaacaacacattgaggcrtaaaacaccttggaaactccaagtcttctggacagcttaccagatgaaccactacctttcagtaagggcctgtagatccctgtgaaggaaattttggtgaaaaagctcaatatttcaggatataggatttacattcaaaaagcggaaaaacataaatagaatgtttcatttctaaagcaccataatggagctgggaggtggaagtctttctaatccaagaaaaaaagtcaacagagcagtcaccaactattccctgattatcactccatcagacactggatgaggcctgagctttccagccaccgtgccatagttcctg

SEQ ID NO: 401184 - DNA, 545 bp, Homo sapiens
ataaatgtttactaataaattatacataaactatatacatatatatgctataatacctatgttatatacattataaaatatatgcagcaataaaaatacagaacaatgaaatacaaataaatgtacatagaagtttgaatatttttacccataacccgtgagccatctctaccagactgctgggttagagctcacagcaggcaggccatgtkgagaattcagttttgatgcagaggtccatttaacttgtatcttttggggttagggttaccacataaaaatacagaacacccagttatatgtgacatacttagactacaattttatttatttttcacctgaaattcaaacctaattgagcatcctgcgttgtttatttattgacaccaactctagtcactgtccaaatgcctgtgtttcctcctaatccttcctgcttattcctttccccaactccctcaccaggtctgcaattgttgtctattggcacagggctgacaggtataagccatgtgctttagtataataatttctttaaatgatat

SEQ ID NO: 401185 - DNA, 528 bp, Homo sapiens
tgaaggtcatgggggccaaaattatgcgtcccacactggtgaaacttrcaataaagtatgctccccaaccccaccaaaataaaagatctctcgactagcaatcagaagaccatattccagtttcagctctacggccagctcatttgttgatgaaaatggcttgccacgttcctgcttggggactagtttctggtaattgtaaagagcaagagtctgagcagatgccatgtaaagtctcttacttctccaaaattatgtaactttgtttctccaatagtgaaaggctacatacaacccattatcaaatccacagtgcaaactgtatcttgtggttttcagtgaattgcccagttattgtcagcaccaccactggggtcagagctgtgggatgctgtcaacttatatatgagctgtgttttaaaatagatgacatgggaagtattatgatatactaagcatattaaatagtttcctttagaaattcaccgagtaagagtgcaattgagtcattcaaactaaatgtttgag

SEQ ID NO: 401186 - DNA, 560 bp, Homo sapiens
gtggccatctatatgactgatttttgaattccctgttaagtaaatcacattctccttttcactacagttggtttctagagatttactttgttcttttatttggaacacattaccttgtttcttaattttttttttgattttctgggttggtgtctgcacattagataagacaaccacctctcccagaatgaaatatgatcccaaatcaacttagggtaagcctggataaagttgatttattctgacatcctgggtgaagctaaaaagaatcttctcctggaggaaagccacatttcccaagaattttaacttttctttaaaaaaaaaatctcacaaggcataaaattcattaaaaattcacaaggcataccaagagatagaaacaagcggaaaagcagacaacagaaacagtcacatagctgatccaggcattaaaattatattgactgtattttaaaataactgactattatgttcaataaagagataaaaagagagagaaaaatggtgaagaggyggcaagattaacttgcagctcctacttggacaggcagacagca

SEQ ID NO: 401187 - DNA, 500 bp, Homo sapiens
atggcttttcatgaatggggtgtcccattaccatgaaaaacaccaaagctagctagctacccacacagcatagatagtagccatctctatgcttaaactaaagaatcatgcttcaataaactgagctacttattcacagacagggttgaaytgactctggttcacactgtccaaattcatgaaggaaaatttccatttgcctatggaaatacaaacctgtctgatttataatttgcagttgccatcatgatataatataagcttacaaagtagagtttgcttgatattccagatctcttccaaccaaaccgatacattaatgtttcactctttgctggagtttactttaaaagcctccctttcccttcaacattatcaatctttcctactcatctctgtttaataggtttaagaacaacttgggcaatatttggattactattacatttctttttaaattattcagttcatgctccaagtggaaaatcggtagtgtcttt

SEQ ID NO: 401188 - DNA, 486 bp, Homo sapiens
cctagcacgaattggtttacaatcctggtggactcctacagagctaataaatccagaaatattacttggatggaaacatatgataatcacatgatgactttttaaatacattccgtagtctcatgtataaaaataaaaaacgtgcagggcttagatatcccttcattgtatcaaattaaattggatttaatgcctggtggtgtgtcatccagctcagacccatttgcacaaggctgtggagtrcagagctggttcagatgaatgaatagctttctcatgacttcacccccactctgctgtctcttttcctgtcctttgtattgtaatggaggacagctgtggcagtgaagtgaatattaactaaccccagtgcctcagcagattgtgactttaatcctggcaaataccactaaaatcaaaatttaattacactcagagtagctctgttaatgcctaaaaaatatttaacaattagtggttggctta

SEQ ID NO: 401189 - DNA, 387 bp, Homo sapiens
acccccgtgtttattgcagcactactcacaatagccaagagatgaacacaaatattcttcagcagaagaaaggataaagcaaatgtggtctatatgcactatggaatactgtttaaccattagaaagaatgaaatccttccatctgtggcaacatggatgaacctggaggacattatgttaagtgaaataagccagaaaaacaaataccacatgatctcactaataaacggaatcttaaaaagttgatctcatgcaagtagagattatagaagagtgattaccagaggcttaggaggggtggaggaaagagtgattragtacaaagttacagttaggtaggaagaatatattccagtgttctattacatagtagggagactatagtt

SEQ ID NO: 401190 - DNA, 516 bp, Homo sapiens
ttgtatcttcttaacagaaaggtattttataaaggcaaggtaatttttggatcaatctaattatacaaaccaatttmctctccctgtaaacaacctccattcttaaaattaacatatctttgttcatttttagacgcgttctgcatctattctccccctccttttctaaaaatgtctataactggtaatgaggcccagaaaaagatttctcttttctagaacctcttagacttttatcatttctcattgagcctccgtttatgcagttcaccctatcctgggatcgggtcctgcttctaaacagaacatactgttcttctgttaagtgaaccaaatctaaggtgctgtggccatgtagaggggccaaatttgtgctgaatggattcatttctctgccaattgcttggaatatcaggtctgtggtattagggagatactgctgttaaacatctttatctgtaaacatctgtatccaaaaacgctacttcatgcactaagtgaacttactacaacctc

SEQ ID NO: 401191 - DNA, 388 bp, Homo sapiens
gttttcttctccagcacatcccacattttttatagttccttctccaggtgtctggaaaagggcaaagaactaatgagcaattctctttctttctttccttctttctttctttctttctttctttctttctttctttctttctttctttctttctttctttctttctttctttctctktctttctccccactactttggctttctttgtgattgatcagaaaatgattcactcttagccccaaaagtttccttctgtggtcacaataatagtggcaggtctggcataggagtatgttaaagtaggctgtccacaagagccctactgttatacggacctatgcggcacttatggttctagccatcccacagtgtcataatgttcagacaa

SEQ ID NO: 401192 - DNA, 621 bp, Homo sapiens
tgcaacttacccgacttcctcccccaggttaccattagccagttccttttttgggcagtgggaactaaacccagtacacttatttctctcacagcactccccacatttattatactacagatgcttttcagcttataatggggctacatcccaataaacccaacaaaagttgaaaataccgttaagtgaaaaatgcatttaatacacctaggctaccttaaacctactcagatcacttacrttagcttacagttgggcaaactcatctaacacaaagcctattttataataaagtgttgaatgtctcatgtaatttattgaatactgtactgattgtatggatacttgaagtactgtttctaccgaatgtgtatagcttttgcacaatcctaaagttgaaaaactggaagtcaaaccatcattatgttcaggcccatctgtatatctgaccccctactagactagctccttgagggaaatgccaaagccctccagcatttagcaccggccttgcatatctaatagaggttcatagttcactgaaatggggttgggggcaagagtagccagaaattggccttctatttcctacttactgatcatgggtcagcttagctgggg

SEQ ID NO: 401193 - DNA, 570 bp, Homo sapiens
cctgactacggatatatggggccaccagggtgcatgggtgcatgtctgctcagcctagccctggaagtgagcactgccggccacagatcctgggaaaggtggtagtaacccagaagatgtagccttgaagggaggatacctatcaaaatgccaaagctgcagggacacgaagacggttgaaaattcaacctrtgtatactagatccttccagtttgatggtttggtcattcttcttcatgattataccatggagaattttctgtgacaagggtggtcatggaagtaagtgagtgatcccctggtttctcattccttaaagcagtggttcgcaaagtatggcacaagaccagcagcatcagcagcctttgggaacttgttagaaacgaaaattctcaatcccatcccagatctgctgaatcagaaactctaatgagaggacccggcaatccacgttttaataagccctcctggtgattctgatgcacactaaattcaactgttttaaagggaaagccctttatagtattggagttcccacactgagaggctttggggccaaaataagaagg

SEQ ID NO: 401194 - DNA, 575 bp, Homo sapiens
ggagtattctgagcacgtcctccacttaggggtattgaggaaggggatgggctaccaagactccctctgcatctttgccatgtctgggctctgttttgtccccaggcctgtcccacacccagagcaaaacatttgacagagacacatggaggcagcctccagggcatctcaacttagccaataaaacaagccattagccaggcacgatggcacacacctgtaatcccagcactttggggggctgagtcagaaggatagcttgagctcagaagttcgagaccagcttgggcaacatggcaaaaccccgtctctactaaaaatgcaaaaattagccaggcgtgatggggcatgcctgtagtcccagctactcaggaggctaaggtgggagaatcgctcaaaaccagggaagttgagcctgcagtgaggcgtgatcatgccactccatcccaggagacagagtaagaccctgtctcmaaaaaaaaaaaaaaaaccattgaacttttaggttacttttctcattatcacagagtagcggaagccctagataccttcaccccatccgggatgctcaccct

SEQ ID NO: 401195 - DNA, 536 bp, Homo sapiens
gattgcggctgcaatggggctttcttttctgaggttttttagccttgaggttatcctttttcaccttgccaccagcatcagccttcttggctctgagttttttctctttagtatctggcttctcaaccttttcacccgccatcttgaaagatgggaaagagagctatgtacaagatatttttacattgttattgtcagtaacctcttccttctcttcaggaaagttgagaaaggagtgacaagatgccatctgcaggcattcttctgccctgcctcaggctattttcaccatattgtttcccaccttggcactcccttccccaaaccctctgcaaagagataaaagaacagatgyacactcctccctctgcaaggtcagctaaaagccttgtatcccaatcacgatgatggcagctaccgtggttgtgatacatatcagctaagcctggctgaagtaggtatgcaactggcaacacaagacaaaagctctctgagcctggcaggaagcataagtgatagtcagataaactcatttt

SEQ ID NO: 401196 - DNA, 536 bp, Homo sapiens
gattgcggctgcaatggggctttcttttctgaggttttttagccttgaggttatcctttttcaccttgccaccagcatcagccttcttggctctgagttttttctctttagtatctggcttctcaaccttttcacccgccatcttgaaagatgggaaagagagctatgtacaagatatttttacattgttattgtcagtaacctcttccttctcttcaggaaagttgagaaaggagtgacaagatgccatctgcaggcattcttctgccctgcctcaggctattttcaccatattgtttcccaccttggcactcccttccccaaaccctctgcaaagagataaaagaacagatgcacactcctcccyctgcaaggtcagctaaaagccttgtatcccaatcacgatgatggcagctaccgtggttgtgatacatatcagctaagcctggctgaagtaggtatgcaactggcaacacaagacaaaagctctctgagcctggcaggaagcataagtgatagtcagataaactcatttt

SEQ ID NO: 401197 - DNA, 596 bp, Homo sapiens
caagatgacacttctttcaaaaacatctaaataatatatgaacccttcaagactcatcatgcaggctacataggcttttgggtcttaaaggaaattttacatattaaaagaactcactgataattaaatcaacatttatgctgtactcaagaagaaagacagtaaaatggaagaaatttcckgagatcactccctcctcacagaacagtttccaccagtcctttagcaaatatatcactcttttgttagctacagataaattcttggtcttctttgcttgtgttttcacccttttattctgtctggagggcttagtttgtttttcatgacagcatttgagatttctaagctgcggcagtagtgccagcccataccgtgcacagtaagtgaagaagaaacaatctggctgttgtttttaacactttccaaacagtaacttgtttctcctgcttgatttttgtccctggacatccagcagtgcaataatcaattcaccaaatataagacagactttctcttcatctttcactcctgcaaatttggcaaattgagatgaatatttacaattcaaaggaaagttttgttttttaatgatg

SEQ ID NO: 401198 - DNA, 312 bp, Homo sapiens
gaaatctttgaatgaaatctacgacttgcaaacccctgctctaacaagtcctgtctttttgggctaaaccaacgtatagcctacatgtrttgatttatatctctgcctgtaacttctgtcaacctaaaatgtataaaatcaagctgcaaaccaaccaccttggacacacattctcaggacttcctgaggctgtgttatgggtcatggtcctcacattgggctcagaataaatctctgtaaatattttacagagtttggcttttttcatcaacactcttaatttgtatttggccagatgagttctatagaaac

SEQ ID NO: 401199 - DNA, 560 bp, Homo sapiens
cctaccatgtggtagaacagtaaaacctattttctggggaggaataactaagacaacaggaaaaatgcttatgaagacattttagagaccttcacaggagtgccttccatcacagacctggaggtctaggaggaaggaatggttttgtgggtgaggctgagggccttgcttccctgtgcaaccttgggacactgctttcttcatcccagctgctgcagctctagctgcagctaaaagggccccagatacatcttakgccactgccccagaggctacaaacccaaaactgccaaggcttccacatagtgttaagcctgcaggtgcacagagggtaagagttgaggcttggaagcctctgcccggatttcagaggatgtatggaaaagcctgtatgtccaggcagaagtctgctgcaggggtggagagctcatggagaatctctactatgtcagtgtggaggggaaatgtggaggtagaatcccctcacagagccccaactgggaaactgcctagtggagctatgagaagacagctaccatcctccagatgtcagaatagta

SEQ ID NO: 401200 - DNA, 586 bp, Homo sapiens
aaaatgtactttgagcatagaaaatggcaaacatgaatatagtattgaaagactgactttatcaaacaataaaaataatggtatgtatacttgatgaagctgaaaactaatgatgaaatgacttctgttttaggacagaataggtcaggacaacagatcactcttgctacaaaactggacaaagccagataaattacaacaacatttctaaagactcagagaacttcagaagcaacaaactaaaaatccagaaagaagaaacacttttatgtgaacgagaatttttatttttccttctcctgggggtattttctgattctaggtgcttgctaagaatctggcgtgacccatcagagagcctcagctacgcaaaagagaaactagcataacttttagtgattctacagggctggtgtgacaaactggaaacctgaggggctgcaaaygtacaactgcttttcctcacagaacatttgctaagttttgatgctatacaggaggctgggaaactaggccaaaagcttatgaaagacaaagtgaaatctccagattcttgcgcaagtggactgattgaaaaatattgctc

SEQ ID NO: 401201 - DNA, 608 bp, Homo sapiens
gtggggatttagggttgggaatccatgtttctaytgggatcaggagtaatgtagaactccgaaaagacgaactgagtgggtcccagaagaaaacaaaagagaaaagcgtttggttgagatattctatttagtcaggagttggatacccctgcagtagttgggctctcttgtatcccattggtctctgtggccatttccgttttatgaaggataatcaacaggcaagaggagttatgagaaagatgaagacagagataatagaccaatatttctaattgtttaaataaatttatttccattcaaaggatttattcatgttgctaaaattatcctgacttgcatatttactgttgagtaaactaaataacttttaaaaagagtgactgaagttagccttacctagttattactcaattaatacacaacacatctttgggatattttcaagataactaccttcaactgtccttatgaatataatttgcaaacttaaatgagtttgcagtctgaactttttgatggattctcactctttttaaagtagctatcaaataacttaaggaaggctgcatactggcattcaactgtattcagttgaaattgcttgc

SEQ ID NO: 401202 - DNA, 612 bp, Homo sapiens
cagttattctgaatatgtccatttcttcccatctgtgggtaggaccaaaccatcccctctgcagcatgagctactccaacagcccattaactgtctctgcttccctgcttccagtttgtcccacaaatccattctccatagagtagccctcgacatctttgtaaattgtaaattaaagcattttactctcatgctcatattatctaagaggcttccctctgcacttaaaataaaatccaaagtgaatcccatctaccactgccaatctctccagcctcagctcctgcacctccctctctctctcatatgctacttccaacactggcattctgtctgctccaggcttctttccatcttctctttaggccttyatacacgctgttcttcctgtgcatgcgcatatatttgcatggctgaatcttttcctgttccagattaaatctcgtcatttagaggagctaaagagtgattatacattgtaaagtatgcctccctctttacgttttattttcttatgtcttataaatatagcatgcatcatttgattatattttatattttttgtctctctaccctcagaataaaaatcctttttaataaatagaagggact

SEQ ID NO: 401203 - DNA, 608 bp, Homo sapiens
ttaccaccaccaactatcagctatcagccaactatcagccaactctgaatgcagtgattcttatatagtccttcaagtacatttgaaaaaaccctctgctatgatacacagtatctcctaaaatagtgttaattaaatttcacatgcacacattcatctacagacagtgataaaaagcagattctgactcagtgggtctgaggtaggtcctgagatcctgcatttctaacaagctcagaagtggtgccaatgtggtcagtccaagaatcacactgtgactagccgggacctattactgtgccagcaatcttgtgattaagatgttacagattaattctttttcataaaaaagtttacaagctaaagaaagaaatggagatatagccaggatgctttgggaggaggaagtatatgaagggagaagccagggaaagcttacttagaaagggactcttgagctgagatttgaaaraaacagtctgattcagtcgcatgatcttcagaaatttactactaatataagaaaaaaaccaaatactaaaacaagtaatttaaggcatattataactaatacaggcaaatactgtagatcttcaaggaaaaggagt

SEQ ID NO: 401204 - DNA, 591 bp, Homo sapiens
tgtttgacctccaagattcctaatctaaataactagtaccagaacctacttagtcgcctaagctagaaacttctctctcttcctcacttccttgtccctgttaaggaattaccaagcactgtccattttatctccactttatctcctaaatacttttcaaatataccttttcttccctcctgtacttactactgccctagttcaagtcttttttcacctggaatactgaagtagtattggtctttcttcgcccaacccgtgtccacaaaattcatcctctacaatgcaaatggaacaaatatctctcaattgtattactttctttctgaccacgaaaggatccccttagtgtggcaggtggggcttttgataatctcgccgctgatttgcatggtttagcctcttcacttatcactatagatctcaagatttatattctgacaatatagagtggctgtcatttcctgaacacaccacagtattgtctacatcttccttcaaaagtggaaatgctccccagagcaggtattgcttggttaaayactattcctcttccaagctcagccaaggcaattctcctctcctaggaca

SEQ ID NO: 401205 - DNA, 568 bp, Homo sapiens
actcaaaataaaataactcctgagtcttttctcttggcaatatcattgaacaactagagactataatacaagttttcaaaaatgtattgagggagaaatcaagcaatttaatttgttttcaaaaatacttaaaataccctaaaggaattaaagtgtcttttttgcagctggatatttctctcatataatataagrgacaatttaataccagaaaatcagaattgatgagggatgagggggcaagtgtatgtgtgtagggtgtgagaatagtgcttacctttgattttaatgtgagccctttttataatttcatttagcatgtaatggctaaatcacaattagctttttcattctgaagacaacttgttaagtagttagagccaattagtaatctcaatagatttttttcattcttttttgtgctattttaaatatgttgttatgcttaatgtctgtggacattttatgcttcctttacaatgatgacttactattctataaatgtgcctttgccatatagtataataatgataatttgggaaatttcactggaattatgtttcagggt

SEQ ID NO: 401206 - DNA, 568 bp, Homo sapiens
actcaaaataaaataactcctgagtcttttctcttggcaatatcattgaacaactagagactataatacaagttttcaaaaatgtattgagggagaaatcaagcaatttaatttgttttcaaaaatacttaaaataccctaaaggaattaaagtgtcttttttgcagctggatatttctctcatataatataagagacaatttaataccagaaaatcagaattgatgagggatgagggggcaagtgtatgtgtgtagggtgtgagaatagtgcttacctttgattttaatgtgagccctttttataatttcatttagcatgtaatggctaaatcacaattagctttttcattctgaagacaacttgttaagtagttagagccaattagtaatctcaatagatttttttcattcttttttgtgctattttaaatatgttgttatgcttaatgtctgtggacattttatgcttcctttacaatgatgacttactattctataaatgtgcctttgccatatagtatmataatgataatttgggaaatttcactggaattatgtttcagggt

SEQ ID NO: 401207 - DNA, 572 bp, Homo sapiens
taaatcaacaaatacatccagccatatcargcataaacgagatagcccggggccttaacatactgtgactgtcaatttcacattgctttcaatatataaatttcagtagctgaacattaccacttacataattttagggtatccataaaaaatagctgtatgttctacttaagtgtctgggtggtttgttaatcactgcaaccagccttcctctgtctaaacgtgctttgttctaaagcccagcacatcatactttgccctcacttcatgctgttctcctcctgtgctttgcccccaaatccccttctttaactcccttttgcacaggtgacagtagtctttggcattgaactaaacattttaagatggtgaagcataaccaaagatgatttcgaagaagaaaaaaacttacccaagatattatcaccattttgtcaaattttactctataaataaatatttatttcatttatttgttttttccccaaactactgttataacagtgctgcagaaagtctccttttgcatatttccttacatatttttttacttctctaagataaatttccaa

SEQ ID NO: 401208 - DNA, 605 bp, Homo sapiens
attgtcttcttcctcaggaacaccaattattcttaagtttggtcatttaacataatcccagactttttggagcctttgttcatatatttttattcctttttctttgtctttgattgggttaatttgaagaccttgtctttgagctctgaatttccttcttctacttgttcaattttattgctgagaatttccagagcatttttcatttctaaaagtatgtcyataatttcctgagtttttgattgttttttctttctgctgttctgtttccttgaatatttctcctttcaattcttatatcagtttttggatttccttgcattgtgctttgtctttctctggtgcctccctgattggcttaataactaacctcctggattctttttcaggtaaatcaaggatttcttcttggtttggatccattgctagtgaactagtgtgatttttgaggggtgtttaagagccttgtttaggcgtattaccagggttggtttttggttccttctcattttggtatgctctgtgacagggaatgcctagagctgaaggctgttcagattcttttgtaccacgtggtgttcgcttgatgtagtactcctccccct

SEQ ID NO: 401209 - DNA, 553 bp, Homo sapiens
gggcactaatccaattcatgagggccctactctcattatctaatcatgtctcaaatgccctacttcctactgtcattacattggggttcaggatttcaacacataaagttagaggaggatacaaacattcaggccatagtagtrttgtatgtaaaatgtcattgccatacccaaggacatccagattttctcaagtgttatcttctatgaattttacagatttatgttttataataagtctatgatctattttgagttaatttttgtgatgggtgtaaggtctatgttgagactcttttttttcctttttgcatgttgatgtccagttgttttagcatcatttgttgaaaagcctatctttgctccactgtattgcctttggtcctttgtttaagatcagttgactatacataagtctattctgttcctgtctgtctattctttcattagtacttgtgtcttgaatactgtagttttatagtaaagtcttggagtcaggtagtgtcacttctttgactttgttcttcttctgtattgtgttagctatactagg

SEQ ID NO: 401210 - DNA, 540 bp, Homo sapiens
cctcccaaagtgctgggattacaggtgtgagccacmgtgcccagccaagaatcgaaatagctttgaggcaatgcagtgaagacatactgggcctgtaactggggtgtctgcacacctacactgctgaccacactggatattccagaaagccttttcttcctgtaataccccagcagcatcctgtagggagaaagcttaacattgtgctcagtttaagggagagtatcttaaaggaatctgttgtttgtcacagtgcatatcttaaagggagcatttgactgggatataataaactgaaaactggcagagtaggcattaagaaaataggatgattcagtcagttgagtcagccaacttctatcatccactactctgatactagtgcaataggctcatgcatgaaacagcaatagtgtgaggaatggcgtttacacgggttccgcttcactaagagtgccactgttcaacatttaacctgccagcaaaagagaccaatattgtaccccagtatggtaccatcccttgaagagaccaaatagt

SEQ ID NO: 401211 - DNA, 503 bp, Homo sapiens
accagattaaaaggaattttgaggggaaaaaaagcagaaatgattaaaattgatttaaaggaaattttaccacactaatataactttaaagctatccttctgctcacaaaaccttgagtaaatttccatattattccttcttgcttcttttttgttgttgtttttgagacacagtttcgctctgtctcccaggctggagtgcagcagcgtgatctcagatcactgcaacctccaccctctgggtttgagtgattctcctgcctcagcctcctgagcagctgggattacaggcaagtaccaccacactcagctaatttttatatttttagtagagacggagtttcaccatgttggccaggctggtctcgaactcctgatctcaagtgatccattcgcctcagtctcccaaagtgctgggattayaggcatgagccactgtgcctagcctccttcttcctttgtaaattagatatttggcaacataaaatcaattcattaggcca

SEQ ID NO: 401212 - DNA, 544 bp, Homo sapiens
ttcacaccaacactggcaatttaccagcacattagtatgtagtcctttatgagtgagaaattaatgagcagaaataactttaccattattatttatttttaagagtacaagagtaaaagttgaactgccatcttgtgaaaattgttaaatagtcattaagtggattastaattaaaactcttccacaacttgctatgtaaataaatactgaagtagaatttgacttagttcaatttagaattttctttttatggttctccataaatgtatggttttaaaaacaaagaatggatcttactacaaattgcgtattatgttaatcatgccaatctgtgcataactggtaactggtatagacacattatttataagaaatgtcaaaaaatgacttttgttttcacttcctcaatatttttatatcacaaaatagaaaaagtagtaataattgggtttattttattcatataatttttagtgagttgtgcaataaggattagactaaatgctaagcaaataaaactcataatttcctgtcattctagtg

SEQ ID NO: 401213 - DNA, 592 bp, Homo sapiens
ctttgcttgcccttctcagacattccttggagccaatatcctagagcctaaaatccactcaagataattcacttactgtcaargcagcagttatatccccaagagtttccataaataagtcattgaatgcattcatttccagaagatatgctcagctagaacctggttctttcttcaagacagtgcaaatattgcctcaaaattgaagagctaattcactacagaacaactattggaaaacctgaggcagaaagaaaacatttagtatatgaacattgaagtagattgtaaatacctgtttacttgcagattcattgctgtcttccagacccgcatttgcaaccacggggcaggagagggagagagagaatccccaaaccagggaaggaataaaagccggtgggccctacacacagttccttgcaatttccccgggaaagaggtgcactgcttctagagaagtaagggagggccaggatcagtattagacctatttcgtcctctccagctgatgtgcattcaccttttctttgtatagccttactgaaagtgaaagtaacaatccctatcacctgtcattcaaataaatata

SEQ ID NO: 401214 - DNA, 584 bp, Homo sapiens
taaaaggaggtgtagttttataaatcgcagaagataaatgtgatactgagtagaaacaaaaaaatatagataggtatctaacacctaattcctaaatgattcttctttattctacaaaacctgttatctttctgcagttcagaaattgtaaagatgtacaaaatgacagatacacctcactggaaattagtccttacaggaacatttagcagtaatatacttttgcttctttaggagaacactgaaactagcagagtgtggacttatcagtaggtaagtggtttkcacaaagtagtaagctttattttatgtagaaaaaaatagacaatacatcctttgctagttctgatgtctaagtgtagacagaacagcaagaatgtggactgtgctgtctttataagtgttagtgttcattgcaagtgctggtaaaacctccttaataggaattaattaatgtggtgcatgcatgaagactgcatgccaaaatccatccattgttgtgcttgtctctttgataaatgaatgagtaaaaggtgattaactctaggtcagctcattgaattgtagtttgagcaaagcttaga

SEQ ID NO: 401215 - DNA, 553 bp, Homo sapiens
ttggggttaccttcccctgtaatatttttcatgcttcccagcactaatggcatgttaaattccataaagaaggattaaacatttttgtcctattattttgagaagaagaatgtagaaagagaagacactgtctgattaattttcaatccaggaaattataggaaatgatattaaatgtgagacctaggtacacaaaacatgtaaagcactgaacctaagtagctttagcacatagttccctggattattattttttatatacttgttgaaaaaatattaagctcagttaagtcatrtagggaagtaatttgcaagcctgtacttattgatgatcatgatgtttacaatattaaaaattacaaagcaccttcaacaaaatataagttctgttcatcaataatttacacttaaatgccaaaatcaacatgtctatattgtaaaataatgataacaggaagaagaggaagaagcagcagcaatggtattattacaaaaagccaggctgtatcttaggagctaaaaataatttcccatttatcaaaagaacacttaa

SEQ ID NO: 401216 - DNA, 553 bp, Homo sapiens
ttggggttaccttcccctgtaatatttttcatgcttcccagcactaatggcatgttaaattccataaagaaggattaaacatttttgtcctattattttgagaagaagaatgtagaaagagaagacactgtctgattaattttcaatccaggaaattataggaaatgatattaaatgtgagacctaggtacacaaaacatgtaaagcactgaacctaagtagctttagcacatagttccctggattattattttttatatacttgttgaaaaaatattaagctcagttaagtcatgtagggaagtaatttgcaagcctgtacttattgatgatcatgatgtttacaatattaaaaattacaaagcaccttcaacaaaatataagttctrttcatcaataatttacacttaaatgccaaaatcaacatgtctatattgtaaaataatgataacaggaagaagaggaagaagcagcagcaatggtattattacaaaaagccaggctgtatcttaggagctaaaaataatttcccatttatcaaaagaacacttaa

SEQ ID NO: 401217 - DNA, 553 bp, Homo sapiens
ttggggttaccttcccctgtaatatttttcatgcttcccagcactaatggcatgttaaattccataaagaaggattaaacatttttgtcctattattttgagaagaagaatgtagaaagagaagacactgtctgattaattttcaatccaggaaattataggaaatgatattaaatgtgagacctaggtacacaaaacatgtaaagcactgaacctaagtagctttagcacatagttccctggattattattttttatatacttgttgaaaaaatattaagctcagttaagtcatgtagggaagtaatttgcaagcctgtacttattgatgatcatgatgtttacaatattaaaaattacaaagcaccttcaacaaaatataagttctgttcatcaataatttacacttaaatgccaaaatcaayatgtctatattgtaaaataatgataacaggaagaagaggaagaagcagcagcaatggtattattacaaaaagccaggctgtatcttaggagctaaaaataatttcccatttatcaaaagaacacttaa

SEQ ID NO: 401218 - DNA, 553 bp, Homo sapiens
ttggggttaccttcccctgtaatatttttcatgcttcccagcactaatggcatgttaaattccataaagaaggattaaacatttttgtcctattattttgagaagaagaatgtagaaagagaagacactgtctgattaattttcaatccaggaaattataggaaatgatattaaatgtgagacctaggtacacaaaacatgtaaagcactgaacctaagtagctttagcacatagttccctggattattattttttatatacttgttgaaaaaatattaagctcagttaagtcatgtagggaagtaatttgcaagcctgtacttattgatgatcatgatgtttacaatattaaaaattacaaagcaccttcaacaaaatataagttctgttcatcaataatttacacttaaatgccaaaatcaacatgtctatattgtaaaataatgataacaggaagaagaggaagaagcagcagcaatggtattattacaaamagccaggctgtatcttaggagctaaaaataatttcccatttatcaaaagaacacttaa

SEQ ID NO: 401219 - DNA, 561 bp, Homo sapiens
atggatatatgaacctttggattcaatctttccaaacatatttctgactagaaggaatttggttttattttcatccagctaacgtgaaataaaattgtcctttcaaaatatttctgcgaaaattggtgcatccagatgacaggtgctaattgaaaagtatatgaaccatttgcaaagtagcacagagaggactgattgtttcacttgatcaggtcctcagctctgggcactcttggctttttgttctgataatgcatctgccaccatgctatccttgggcagctactggggagtgtcagccatgccatacacctttgtagctctggggacaaaattaggcctttcctctttggagatatacctgtgctccaaaagttcattaatataaatactgacaacagtcacwcacccaagggggttcttcagaagaaatttgcagagtacaagaaaccatgcaatattcaagacctagggcctcacatgaagcaaatattttagcctgatccatactaagggataatctagaatggggttttaggatccctgcactttaatgacatc

SEQ ID NO: 401220 - DNA, 423 bp, Homo sapiens
gaacagaagggaatattagtttttgactcagaaattatctcagactaagctctaactggatttacctaggcattcacaaatgcaatacacattctcctctcaaagtcacttttacttctgctggtttaggcttctctgtgcaccttgatttcttttgtcatgcttkccacattcattccagccaaggttaattctcgcctttcaacatccactaagcttatttttaatttttgaactattagaatatatgataattgtcttttattgaaatatccattttaaaaagtatgcatcctgaagaaagggatcttgctttaattctaggtatcgcttataagaaaattgatgtgcttttattcacttactaattattaataatgactaatacactcctcaagctaagtcaggaccactgattcaatg

SEQ ID NO: 401221 - DNA, 423 bp, Homo sapiens
gaacagaagggaatattagtttttgactcagaaattatctcagactaagctctaactggatttacctaggcattcacaaatgcaatacacattctcctctcaaagtcacttttacttctgctggtttaggcttctctgtgcaccttgatttcttttgtcatgcttgccacattcattccagccaaggttaattctcgcctttcaacatccactaagcttatttttaatttttgaactattagaatatatgakaattgtcttttattgaaatatccattttaaaaagtatgcatcctgaagaaagggatcttgctttaattctaggtatcgcttataagaaaattgatgtgcttttattcacttactaattattaataatgactaatacactcctcaagctaagtcaggaccactgattcaatg

SEQ ID NO: 401222 - DNA, 488 bp, Homo sapiens
actggacaatattgatacaaaacacaaaaatgcagtatttcacattagcttttaggctacctgattgaaatgaccttttaaaactcttgtggagtctgataattgaacttagctaccaataatggaaagtatcatgatttaaagaggacagaatgttgtattttgtctacaagaaaaaatatattttctgtctacagaggagtataattaagatttagtagaggaaaaaccagtgataattgtcatattcctctctttcactctcagcatccaaatgatcactcaaaatggtcattttttaaattggtgcagtgcaactaagagctattttaggartggttatttccataaaattctattctattttcttcagtcttactgaaaatggtgctttctgtctaaaccatcaaggtgttaaaacatattaggacaggttgaaacccaatgagagcaagtgacacattttaacaagattttataggtcactg

SEQ ID NO: 401223 - DNA, 631 bp, Homo sapiens
tcttggtaaaaatgatcatcaccttgccatgtagtctccaattagtgctttaaagaaaaagtgagatgatagacaaaattcagccagtgtgtggagtactgtcaygtaactcagaagaaaacatgagtttctattccatgatgtgaaaggtctaagggcatttcaaaaggtattaatctaccagggaatgagtaataggattatttaactgggtatctatgaaggactttaaattctttgccaaaaactccaacacataagaacacatgcaaaagaagaaatggctataattttggtgaacattggcaggattatcttacaatgggaattaataatctgtggaccattgaggcgatgcctggtttttctcaaccagaagcatggaggaaaatgacaccactgcagctacatctgtagagaatatgctttgacttttccttatattttcacaactaaaattgactgctagaatagggtaatgaatccctttctggatctgagtcatatttatgacaatagaacctactaaggctcataagaatttcagcttggaatgattctgttcttctaagtaggaattatcttaacatgtattcacaaaacaaatcagccagggtggttttgcctaata

SEQ ID NO: 401224 - DNA, 498 bp, Homo sapiens
tactgaaaagagccgcatgcttcatgaaatagttatccaacctccttggcctactgctgcttcatgaatgctgccagaataggggaaagtttgtgactgaagttaaaggggggttggtttcacygctatactagtgtaattattaaaatgcgaacacactcaaattaaatacaccagaaagaaaatcattctatggagctcagtttcctaagaaataatgagaccaatttgcttttatatgaaaacactccagtttgtgatatcttcatacactgctggtgggagtgttcaacagtacaatgttcttagaggacaactcagcaatatatacattggttcggcttgtatgaatttgtacataaaaatatgcttttacacatgtgaaacgatatttttacaagattttaaaatgttatccatttgtaatacttaaaatgctgaaaaaattaaaatacccatcattagggtctgctaccctcataacatgtagcagatgca

SEQ ID NO: 401225 - DNA, 624 bp, Homo sapiens
  misc_feature (1)...(624): n = A,T,C or G
ttttcttcccaccttatgaaatatctttgcaatacctgttttttaaagatcaaatgaacacagttctggagcctagacgagtagctgtctaaccttactctgcgtaatagggctaaaatttcaactctatttctctgctgatgctctatgggatttggagcccccaaagcctgattttattcctaattaacagtaatgaacagatgacatacttttcctttgaacacctctgtcgggaaaatgtccaatcagcaagagctacaagcaatagacaaattccctttctctgacytcatttacatgcttaagtacacagagactccccctgcctttagtttggggtgcggggggaaagaagtaggtcaagacattgaggctttatgcattacctttagaatgtggtgaaggctgaaagtcatggctccaaccagagtttccagagcaatgtgggttactttcatattcatcacacataaggccaataccctcctagcagtattagtttagttctacatttaggcacaactcacaaaacagcaaagatgcctataattgtacccattaagagacttataatagaaaatactatgtgctatgtcatcacactnnnnnnnnnnnnnnnnn

SEQ ID NO: 401226 - DNA, 624 bp, Homo sapiens
  misc_feature (1)...(624): n = A,T,C or G
ttttcttcccaccttatgaaatatctttgcaatacctgttttttaaagatcaaatgaacacagttctggagcctagacgagtagctgtctaaccttactctgcgtaatagggctaaaatttcaactctatttctctgctgatgctctatgggatttggagcccccaaagcctgattttattcctaattaacagtaatgaacagatgacatacttttcctttgaacacctctgtcgggaaaatgtccaatcagcaagagctacaagcaatagacaaattccctttctctgacttcatttacatgcttaagtacacagagactccccctgcctttagtttggggtgcggggggaaagaagtaggtcaagacattgaggctttatgcattacctttagaatgtggtgaaggctgaaagtcatggctccaaccagagtttccagagcaatgtgggttactttcatattcatcacacataaggccaataccctcctagcagtattagtttagttctacatttaggcacaactcacaaaacagcaaagatrcctataattgtacccattaagagacttataatagaaaatactatgtgctatgtcatcacactnnnnnnnnnnnnnnnnn

SEQ ID NO: 401227 - DNA, 620 bp, Homo sapiens
ggtagttatctgtatagcagtgtacattgtgtctaagtcttattttttaggaattgctcaatgtttctgctatgcttaaacaaaaataacaaattatttatttacagtatctgaaaacagtaacaacagagacatttatagatttatgatactttgtattctgttataaaaataaaataaatcagaaatagcaaatagtaatttattcatttatgtgtttattaaaaaagcatttactatatgctaagaactgaagacaggttgtataaaatgacttctctgttctggtgaagttcattgtgaaggagaatgacacctaaatcagcgatacaacaaagcatcaaggagggacacctgatccagcctggggtggagaggaggtagagtttaggaaagattttctggagaaggaatggtatttgatccaaccctgaaggatgaggtacatcctgccttgttgggacaggctgatccatgttgtttgatgagtaaaatatcagaacttgctggccaaaggtgcatcatcactcatcactgaagacacaggaataatgratctgttttatttccagagttactttattaaaatactaaactctcctgggaaagtttaaattaca

SEQ ID NO: 401228 - DNA, 494 bp, Homo sapiens
ttcttgtacctttcaatagtgggaggagagaaggaaatccatcactactggaaaatatgctctgtactctatcaactctgttgamcctcagcataaaatattttaaagcatttccctaacaaacaactctagttagacaatctgtatcataaccactacttttatctatgagacccctctgtctcttagaacatagtggtcatgggtactggtagcccatatgatgcctttaggaaaatagaaaaaaagcaaatctccaaaaccctctacttctgcctattgaaaattttcatgatttttgtcagaacaagacatttgcttgatatttcctagaaaattgtcatattaaatatgcaactccattgtgaaaacagtataaatggtgccaccttaacaagtgtacaacttgcacaaacatccatggcatccttttagtaagatgtaggaaatgattaggttttgggttaagacggagactcaacacatttggaccc

SEQ ID NO: 401229 - DNA, 284 bp, Homo sapiens
acagatttttttttttaatcacttccacccctggatctctctcttcctggacttcaaataagataatgtctgttaaatgaagtgaccaatgtgaaacatattttgaaaatcataaagtgcttttaaaatgtgagcattatttatayaacggttacttctaatttggcttaccctcaataggggtcttaaatatccagtgtgtaagattttcgttccctataatacctcatatgctatgggcattaggtaaatatttcttgattagttgttataaatcgaatgtc

SEQ ID NO: 401230 - DNA, 545 bp, Homo sapiens
atgtatacttttagctaaaacacctaaatacatttgattttgcagctgtctcattctgttcttttatttttcatgggttaaatagtactctctctttaagtakttttacatgttaggtgacatttttattgaagtaaattgatattaaataaaaagtacttttctcaatgactgagtagacattcaacaaaatgtggatccctggtccttatttcggccctgaaaatgtctgttttggttatgtagcatacttaaaataattatttaaggaatgtgtgatctagagatattgtttgaaaatatagatttgcttattagtattgtcaagttgagaaaataatggggtaaaaggtaggactaaaacaatattcaagttttttgtttaatatgaattatggagtctgtgtagaatattagctaatgcatctgtagaaaacaattactacctaaagaaacttcctgtcgaactttttacagatttatttttatagcacagttacaaaatgttgtacatagaaatatattcagtgtaactgacacaaact

SEQ ID NO: 401231 - DNA, 553 bp, Homo sapiens
ttgtttaaactgcctgtgatgttataatcagggaatatttttagatcttattgaacatgctatttacatatagggytctctcccttcttgttctttcttgccaactgtcccttgcctaagtgtgcccacttcagcctcacgtcaattctgcaaaggctaacatattcccttacatagattgaaactttctgaaaaagaaaaccaatcagcatgtacaggtctgctcaattattggttgctctggatccttgctacatgaacaataatataattaacttcggagtagattagcttctaactcataacataagtatatgaataaaaggttactttttgaaagcctataattcttcaaatgtcatcttgtagccaacacgaaacattcaggcaattatgtttctattaataaatgtaacaggaatataacacttccttcagtgaaagtttacagtgaaagccaggtacccagatgaatattaaaagtaaagcatttgtaagtaaggggaacctttattctttctacaaccttttccagatgctgttgttaatttga

SEQ ID NO: 401232 - DNA, 599 bp, Homo sapiens
gtacagattagtttcatatacatctgcctcactagactgtacattcttatgggtgagggctgaccatgctctcttgttcactgtattcctaccccttacacagcacctcacacctagcaagttctcaatatgtattggctgactgtatgaacaaatgaagttcctaccaaatggagacccaaagattaaagcatctccctgacaagaaacaatctctctctctgtagaaggcccatacccttgatcactcttagaagtctcagcagcctctccttcatattaatctcttatgaatttgttracagaagctttatgcctaaatcatttctgaacaatctgcagggcttaatgtattgctgtacatcctgagagcaccaaatgaataaatttatcaagaaccacatcgtccaggaagaagtagatctgacactaaaacttgttttcacctctatttttctttatcgcccaaagatggtggcagtgggagcgagggatagtatgactccaccactggtaaactggactcttctcccacaatggtggccagtcctggtctaatgaggaaggagagcccacatgtaatggtgcagccaaagctc

SEQ ID NO: 401233 - DNA, 563 bp, Homo sapiens
tgctgcagcatctaactacattctttcctggaagtcagctaggaatttctaatcaccagtgatgcagtgatcagaggaaattttaaactcaaactcataaataacacatgtgaatatattgtcagtgacttatcttgttaatgctaaacttagttaaggataaaagtttgtttgttttatgtcttgaagagtcttactaaaaggcaaacatttattttcaataattttgacaaatatagtcagatacaaagggcactcctcagtcctcattttcacacaaattttttaaaaccctgtgctcaaattcgcagagctaacaatttcaattagaaactgaagttggtctagtatagatgccttattattattatactcagcataaaggcattccatatatcagaaagtctcaattgctttgctaaagtatgtccctatatgatgcaactataaataaaacctataagtaaaagtaaaacattaataacttataagagcagatctttgactttttttttagacaacagtctcatggaacaaaygtgttatctggcaagtctgtgccc

SEQ ID NO: 401234 - DNA, 573 bp, Homo sapiens
aatttgtggataattagtaacaacgttgagtctttgaatctctgagcacagcatctctcttcatttacttaagtcttctttggttactttcatcaatgctttttagtttccagtatgcaaatattccatatattttattagatttatggctaagtatttaatgtttttaatactactatgcatggtacatttaaaaaattcaacttctaattgtttactattattatatagaaataaatctgatttttctgtattgactttgtatcctaaaactttgttacactcattcattatttttttccaacttccatccatgcttgaatccttgaattagcattctgttagatctattcattgatggccagttttttgttttggtgacagtgtctgaatttcttttcatagttattttaaatttcctgtctgatagtatgtgcctggttttgttaattattttatctcatggtttgttttctcttgtaacttttttttttwaatttgggatatgacatatagaatgggaaagactgagttaaatggaatttatgcctaaaaatgagcatgcctcttcaa

SEQ ID NO: 401235 - DNA, 565 bp, Homo sapiens
gccttgtatgtattataaattaggcaatgtattctcttagtttttgatttgtgaccctaaaaaggcagattaaaaacagacactttattaacgaatatccactcactactgagaactgacccatagacaggaagtcttctatttcacctcaatacatatattcccagaaaactgatcagagattcctttaggaagtgttctaacaggcagtttcatgccttttattgatgactttccatcaataaaatcaaatatatgatataaaaggaagaacaaagctgtaaatctcaaacaatttaaaagagtaaaaccacgttccatacaaaatggcatgaatgcagcacacacacagattaaacaatgtgccacgagatagcacatraaggtataagccaattgtgtcgtaaattaaaaagaaatgtgaaaaaaacaaagcaatccagagtaatctgttccatcctccatctccattgtgaggagggtggccatttccttttgctttacatttccatgtggaagcatctccttagagtaactcccccagcgtgctggccccttactcact

SEQ ID NO: 401236 - DNA, 559 bp, Homo sapiens
tgttttattaattttatagctagagttaatttgtcttgtaaaaagaaagcactaaaggctcatgaatatcattcagaataaatattaatcattccttaaaatggtgatcttaaaactgaggcaaaccactagctggatagctctgatcagctgccatatattgtaaaaagagtcttcctaacaagtttggcaggggttataatcacttgcctttggttacatcgtatgtggtttgcatgagtacttttactcccatattttgtgtatgaaatcatttaacttaggtagcactatcccattcaacttcarttcatattaaaactttctcttcaaggcatttctctaataattaaacattcttataaatatggacaatccgaacacatggcatacaaaagtgtgtaggtgggcaaactaaaatggaaacttatttatttatttatttatttttgagatggggtctcactctgtcacccaggttggagcgcagtggctcaatcttggctcactgtaacctccagctcccaggctcaagtgattttcctaagtcaatctcctg

SEQ ID NO: 401237 - DNA, 581 bp, Homo sapiens
tgttcaggtataggaagtagtgatagttcatcagagttttaaaaatatgaacataaagccctttccttttgccacagggatttgagcttgggagttcctaatgggattggatggggaaaatatgagatgtttccttgaagtaaattaacagtttctaattttatgcgatattttggatttccattgactcagtggtttctagccatattactagtcatcttcatttaaagttttccataaagtcttcctaaaattactgtcttatataaatgcatgtgaatattttcttttgtttttaggtgagactgcctgtttccctcttcctttaagtagttggtaatgagagacctctgagggtttttctaattctttaaatattatagtcagttatcttgttcaatgataatagtgtatagatgaggccagatggtgccagaagtggagtttgtatctttgtttggcttttttaatactsccaccttttttttaaagagatttttctaactcatttcccagtaatccatctcttgtgtgcaattctgagctagttaaattcagagttgcctttttaaaaataatct

SEQ ID NO: 401238 - DNA, 573 bp, Homo sapiens
tttttaatgtcttcatgaacacctacatgatggtagtcatgcttttagcatcttttgattgggccaaatatataatttgtgtaagttcragacaagaaaatttgcattttcttaattacagcacacttaaatatgtttggaaaatgtcattacatgtgtttacaggtcttatttaatacagtcaacaaacaatacttggttcatgtgaacttatggaccctttacaaaaactccaaaggttggaagttgctgaactgtaccctccaatcccttcactttgcagagaagaaaaatcagggtccagagagatgcagtgattggtccaaggttttgtggttactggaagaactagactacaatttatgtcttctgggtttccactcctacaggctccccaaggaggattaggaaaagatgcccaaacacttgtttcatttaggaaattaacagctgtggatatcaatggaagatgctgactttttttaaagtacaagaaagatgggaccccaatgtggaagccgaaactggcagggcctggcacatattgttcaataaatagagcacacagaagca

SEQ ID NO: 401239 - DNA, 573 bp, Homo sapiens
tttttaatgtcttcatgaacacctacatgatggtagtcatgcttttagcatcttttgattgggccaaatatataatttgtgtaagttcgagacaagaaaatttgcattttcttaattacagcacacttaaatatgtttggaaaatgtcattacatgtgtttacaggtcttatttaatacagtcaacaaacaatacttggttcatgtgaacttatggaccctttacaaaaactccaaaggttggaagttgytgaactgtaccctccaatcccttcactttgcagagaagaaaaatcagggtccagagagatgcagtgattggtccaaggttttgtggttactggaagaactagactacaatttatgtcttctgggtttccactcctacaggctccccaaggaggattaggaaaagatgcccaaacacttgtttcatttaggaaattaacagctgtggatatcaatggaagatgctgactttttttaaagtacaagaaagatgggaccccaatgtggaagccgaaactggcagggcctggcacatattgttcaataaatagagcacacagaagca

SEQ ID NO: 401240 - DNA, 548 bp, Homo sapiens
attatttatggtagttcaattcccactcccctctactctccccacccctatagctttctgtaatacctgtttaaggggctgatcttcggttcctgtggaccatccctctggcaggaagtgggcacaagtagatgtcctctttaccagtgtgtcctaagtaaagtaatattgatatgaacaattacataatttttccttggtctttttttcccttgtataataggagttatctctaagctaattaagatggtgcatattccaaaacaaaattgtatctatatyataagtataaactatcctgcagcacaaacacccatttcacaaacacatttgcatatcttccccacctccatgaaattattacttgagtcccacggaactcacttttgtgcagagccaacgtaaatttctaaggaaaagtgaaacttgttgcatgtattaaaagaaaaacttcagacaaatttaacagagtttatctgaacaaagaatgattgatgaattgggcagcactcagaaccagaagaggttcagagagctacacccaggag

SEQ ID NO: 401241 - DNA, 526 bp, Homo sapiens
gaatttaagctgagaattgcaggaatttctctatatgttggggagtcctcagattatatccaaaacacatgaggcactagayagattcattataagcacaagcagaaaaaaaagtcacatatgaatttgcactaaggcagcattcggtggctcactcctgtagtcctagcacttcgggaggccaaggcaggtggatcatctgagctctggagacctgcctgggccacatggggaaaccccatctttacaaaaaaatacaaaaaattagccgggcatagtggtgcatgcctgtagtccccaccactcaggaagctgaagtgggagaatgacctgagccctggaggtcaaggctgtagtgagccgagatcagaccgctgaactccagcctgggcaatggtgtgagaccctgtctcaaataaataaataaaatttacactagggaaccttacatatagccaaagattttaatatgtggtacagagttgtaagctctctctctgagtgctggctcctacatagcagagag

SEQ ID NO: 401242 - DNA, 526 bp, Homo sapiens
gaatttaagctgagaattgcaggaatttctctatatgttggggagtcctcagattatatccaaaacacatgaggcactagacagattcattataagcacaagcagaaaaaaaagtcacatatgaatttgcactaaggcagcattcggtggctcactcctgtagtcctagcacttcgggaggccaaggcaggtggatcatctgagctctggagacctgcctgggccacatggggaaaccccatctttacaaaaaaatacaaaaaattagccgggcatagtggtgcatgcctgtagtccccaccactcaggaagctgaagtgggagaatgacctgagccctggaggtcaaggctgtagtgagccgagatcagaccgctgaactccagcctgggcaatggkgtgagaccctgtctcaaataaataaataaaatttacactagggaaccttacatatagccaaagattttaatatgtggtacagagttgtaagctctctctctgagtgctggctcctacatagcagagag

SEQ ID NO: 401243 - DNA, 622 bp, Homo sapiens
gggacccagcgggttgcctctgctggcttgggtggcctgcttttattcccttatttggccccacccacatcctgctgatcggtctattttacagagcgctaattggtccattttacagagtgctgattggtccattttacagagtgctgattggtgcgtttacagtcctttagctagacacagagtgctgattggtgcatttacaatcctttcactagacacaaaagttctccaagtccccacccaacccagaagcccagccggcttcacctctcacttgtgtgtatgtgaggggacaagtatatgagagaaggaagaaaaaagagatgagagagaatgatgaagcaactaaagcaaaatataaatcattggtacatctaggcaatgggtatatggaaattctttgtacaattttggcaactttttratacttttaaaattatattgaaataaaagaaaatgatggctgcttgaaccacagtggtaggggtgcctgtcataagaaacagtcagatttctgaacatatttcaaaagtagagtccaaaggatttgctgacagcttggctttggggtgtgaaagacaggcatcaaagaggactccaaggtttggaaccaaagcaa

SEQ ID NO: 401244 - DNA, 618 bp, Homo sapiens
tattcattccacacaaaaccctggggaagcgtggactctcaggaatcaagtgtgttcataacatccccagaacwaacattattgtttaatgatgctggaaggaaacatttcctttatatacccaggttcctatgtgaacatgagcttcttcaatcatatagcaaggggatttttggctgagataatctagttaaattaagtgtattaccactgttctttttctcctcttcttaaaagagaataattaaatgcaaggttatatttatcaaagaaaacatactaatcagaaattctgaaaattaagattcccatagcaaattacctccttcacaaaatgtaccaggaaaattttcaggaaattcacttttcagagccaaaatcagagatctgaattgcttatgtggaatattagtgttcccattcaatattgttcagattttttgaaacacagtttatttcttattgaaaaatagtgatgccttagaatattgtttaatttaatcagagaaacaacttttaggaatatcttgaatactgaggaaaaaaaatactggctaattacatatttcccaaaaagctttgtaaaagatgagtagaaaatgatttaatattcattca

SEQ ID NO: 401245 - DNA, 618 bp, Homo sapiens
tattcattccacacaaaaccctggggaagcgtggactctcaggaatcaagtgtgttcataacatccccagaacaaacattattgtttaatgatgctggaaggaaacatttcctttatatacccaggttcctatgtgaacatgagcttcttcaatcatatagcaaggggatttttggctgagataatctagttaaattaagtgtattaccactgttctttttctcctcttcttaaaagagaataattaaatgcaaggttatatttatcaaagaaaacatactaatcagaaattctgaaaattaagattcccatagcaaattacctccttcacaaaatgtaccaggaaaattttcaggaaattcacttttcagagccaaaatcagagatctgaattgcttatgtggaatattagtgttcccattcaatattgttcagattttttgaaacacagtttayttcttattgaaaaatagtgatgccttagaatattgtttaatttaatcagagaaacaacttttaggaatatcttgaatactgaggaaaaaaaatactggctaattacatatttcccaaaaagctttgtaaaagatgagtagaaaatgatttaatattcattca

SEQ ID NO: 401246 - DNA, 525 bp, Homo sapiens
tcatagtggtgggcacctggggtaaagataaatttggaaagttgatctggggacaactgttccctggcccttgagccatatcttttatatcttgagargcagaagggttcaggctctggggagtgaacctcagctcaattactcactaacttacatcacaggtgactctaggtaagtaactggagctttttgtgcctgtttcctcattggtaaaatgttgagatctacgtcacaaaatcaaagggaagattaagtgagttaatatttgtgaagctcttagaactctgatgtcataattcaggaaacatttgataaatataagctgcaattaattatcctcattactagtatttctatcatcttcctccactctctagtttggcaacatgtactatcataatgtgttattcttgttctttgcctttcctgctattcccaaaataagctgccaggaagttatgcttcttccttgtactgagtctttccaatacttcctttctctcccagggctcctttgctagttta

SEQ ID NO: 401247 - DNA, 528 bp, Homo sapiens
agatagcccatggagacagttcatacagggcaagttcttgagaaacaaagaagggtagagaagtgtagaagtggatcaggaggagtaaacaggagacattcagcataattgtaataataaatataaatctatgatgaccctatagtttcacaactgcacaaccaaacatagcagccctaccactgacttatggccatgcctaccgccacctctaaccagtgttacattcccatccccctaaccttcaccaccagggccaagacttgacccaagggaggttttgtgcaaattagaaaaagrcacagctttcctcaagatacttgacttccatttgatggaaaattattggaacatacagtgtttgttagaataagccatctcaaggccatctaccataaagcatttacaattatcaacatacaaatctactatgcctacaatgtgaatgtggcccatgacttcagtatggcagcatgaggagtgccatagactcactccccaaagaaacaagcaaaattggaggaaact

SEQ ID NO: 401248 - DNA, 528 bp, Homo sapiens
agatagcccatggagacagttcatacagggcaagttcttgagaaacaaagaagggtagagaagtgtagaagtggatcaggaggagtaaacaggagacattcagcataattgtaataataaatataaatctatgatgaccctatagtttcacaactgcacaaccaaacatagcagccctaccactgacttatggccatgcctaccgccacctctaaccagtgttacattcccatccccctaaccttcaccaccagggccaagacttgacccaagggaggttttgtgcaaattagaaaaagacacagctttcctcaagatacttgacttccatttgatggaaaattattggaayatacagtgtttgttagaataagccatctcaaggccatctaccataaagcatttacaattatcaacatacaaatctactatgcctacaatgtgaatgtggcccatgacttcagtatggcagcatgaggagtgccatagactcactccccaaagaaacaagcaaaattggaggaaact

SEQ ID NO: 401249 - DNA, 528 bp, Homo sapiens
agatagcccatggagacagttcatacagggcaagttcttgagaaacaaagaagggtagagaagtgtagaagtggatcaggaggagtaaacaggagacattcagcataattgtaataataaatataaatctatgatgaccctatagtttcacaactgcacaaccaaacatagcagccctaccactgacttatggccatgcctaccgccacctctaaccagtgttacattcccatccccctaaccttcaccaccagggccaagacttgacccaagggaggttttgtgcaaattagaaaaagacacagctttcctcaagatacttgacttccatttgatggaaaattattggaacatacagtgtttgttagaataagccatctcaaggccatctaccataaagcatttacaattatcaacatacaaatctrctatgcctacaatgtgaatgtggcccatgacttcagtatggcagcatgaggagtgccatagactcactccccaaagaaacaagcaaaattggaggaaact

SEQ ID NO: 401250 - DNA, 543 bp, Homo sapiens
atcttttcatgacatttatttttttagaaagtaccttgtaaattaaaggcccctcttcctaggtgctcaccctttgtgctttgctagcttgattgacatttacgcttttacagctattcagtatttctcgttattttgcccaggacctacagtgtcctgagaagaaaccagtaatttagaaggtaagcattcaagataaagtattattgccaaattgtaaaaagttgggatgcatttctacttttttttttaacatcaaaaaagggcctgaaagaagtaaatttcccttccaaaattgacacataaatctgtttttgcttttgctcaaaatgatgaaataatctagagaaggcaaaaataaataagttctcacagtggcaatactcgaggtcattgtagagatctgaagtcattgttgctttaaccttggcttggggcattagtgtgactcttagytaagccataagattcccagctcttttattcctcagatatttagcaattttacacctcatgcaaatatgtaccctggaggaaagttgc

SEQ ID NO: 401251 - DNA, 391 bp, Homo sapiens
  misc_feature (1)...(391): n = A,T,C or G
nnnnnnnnnnnnnnnnnctcagtaaaggcttatagttatatcaaaagatagagatacatttaaatcttaatgaatgtagtccaattcaatttcacaaggacagtttttcttgaatataggagggcatttgcctatggagaaaataatgtgacatgaattaatcattatcaatggcaaatgatcgttaaatacagacattcagcagacaacagcagatggaaggcaatggttctgtctatcttgttggttatttttctcattcatgtggttacttcatgacattctgaggttctgtaccttgaaagaatcctttctcttwgttttcagcagctttaatcttccatcaaccttgcatctcctttgaggtctagagtggtctcctcatgctttt

SEQ ID NO: 401252 - DNA, 629 bp, Homo sapiens
aatacacaaacatatgctgtatacattattcttgtatccttttgaagagcctataactcctgacttggttggctgtgcatcgaggaaagaaatatactcaggcggggtatggtggctcacgcctgtaatcccagcactttgggaggctgaagcaggcagatcacctgaggtcaggagtttgagaccagcctggccgacatggtgaaaccccgtctctagtaaaaatacaaaacttagccgggtgtggtggtgcatgcctgtaatcccagctacttggaaggctgagacagaagaatcgcttgaacctggcatgcagaggttgcagtgaactgagattgcaccactgcactctagcctgggtgacaaggtgagactctgtctttaaaaaagaaaagaaaagaaaagaaaaatacatctttcaaggattatgagatactggatctgagctaagatcaattcctggagatccagaaygccattgtggtccaccaatcaattgaagtgtaatgaagatgaagtgaaagtagatctttaagtccatcctgtggttaggatctccattcgcaagtgtatagctggaatagatattctgggaaactgaaccacagcataaagaagggccaggtggg

SEQ ID NO: 401253 - DNA, 629 bp, Homo sapiens
aatacacaaacatatgctgtatacattattcttgtatccttttgaagagcctataactcctgacttggttggctgtgcatcgaggaaagaaatatactcaggcggggtatggtggctcacgcctgtaatcccagcactttgggaggctgaagcaggcagatcacctgaggtcaggagtttgagaccagcctggccgacatggtgaaaccccgtctctagtaaaaatacaaaacttagccgggtgtggtggtgcatgcctgtaatcccagctacttggaaggctgagacagaagaatcgcttgaacctggcatgcagaggttgcagtgaactgagattgcaccactgcactctagcctgggtgacaaggtgagactctgtctttaaaaaagaaaagaaaagaaaagaaaaatacatctttcaaggattatgagatactggatctgagctaagatcaattcctggagatccagaacgccattgtggtccaccaatcaattgaagtgtaatgaagatgaagtgaaagtagatctttaagtccatcctgtggttaggatctccattcgcaagtgtatagctggaatagatatkctgggaaactgaaccacagcataaagaagggccaggtggg

SEQ ID NO: 401254 - DNA, 634 bp, Homo sapiens
  misc_feature (1)...(634): n = A,T,C or G
ggaatgatggagataggacccaccattaaaacccaaaagattcaagagggtttattcttatctcatccttattgaattcacctatttattctatgcaaaaggaagataggccttgaaaaatgatgttggcttattgcaaactagatcagatggtaatgtcaaatgctctttctgttcctaaagtaatcttattactgaagcaaaccaacagatcctggtacctagtatacatctgtcaatctgacaaactttttctttctcaataaccataactaaccagaagcaatttgctttcacctggaagaagtacaccatcaccatctgatctcagggttatgtytgttctctgactttttcataatgtatccacagagaccttgatcatttcaccgtgggcatagaccanatgttgatagtagttgacagtagttaccctagatcccttggtangacacaggagtaccagagaataggagataaaaatcgaagacttgctcccatatccaaagttcatcagctctagttttctgggacatatcaggggaactccaaaagtgcagaaatgtgctgcatcatgacccattggcccgaggatgtgactctttngaccttagaggcatagataccatattca

SEQ ID NO: 401255 - DNA, 514 bp, Homo sapiens
tttgtctcattcagtatccgtgtcaactccctcctagtgttccttcctctactgcagaggctgcgaagctcaaagttgtgtcacccctattccttagagctaagatatgaatgtgatttaggatccaccaatcatatacactcaccaggtaaagacattaacctgtgtggcaccaagacctggctgttgaaatagacatttcctgcaacggcaaaaaaaattactttctcaatcacagtgggaaaatggtgatcctagaccttacaaattattcctgggagcttagctagaacatcatccaccaccattataatgattttgaaagactcttaacacagtgataaatataatacccttctgattaatttactgagatggcytcttttgtctgcaactaaatgctaatctgttgagtaactggtcccaaccaagtactgagtaacactctgaaagtgggaatctgggattagatcctgttaatatcaaaggacaagacactgtagttcacagtatg

SEQ ID NO: 401256 - DNA, 552 bp, Homo sapiens
tgataaatataatacccttctgattaatttactgagatggcctcttttgtctgcaactaaatgctaatctgttgagtaactggtcccaaccaagtactgagtaacactctgaaagtgggaatctgggattagatcctgttaatatcaaaggacaagacactgtagttcacagtatgcaatgacaaaacattcacataaattgtcatctgtggtcacctgggaaggcgaagccctggacaactgagtgcctatttacacaacccagtgccatcagaaataggaatgcaggggctgtgggatgatggactagagccttctaatcagctagagagcttaaagaaagacatgctgcattcaggscatggtcagaggaccctaaaataatctcttttcttgtagcaggcctagaataacccaaaattggagcagaatctgggcctgatggttgttaaattatagtaattgacagtctcacaatgtctcttatataaatgttagagaattgactgcaaatggaggaatcccaagaatcagcatagggaattttgggtg

SEQ ID NO: 401257 - DNA, 605 bp, Homo sapiens
ctggtttcaatgcttcctccatgggcgggcatcagctgagtttggccgagttttgtcttctgttataataaggcagcactgagtttaaggcctcacaattgctgtgctctccctcttcccagcacacagaaacactctgcaacatgctgctactgtcragagatggggaaagggtagcactggtgaatcaagactcttttctacctcttcagtgcctctttcagtaatggaaagttaaaaccagatactgtgagtgttcacctgatttttgattcttataaaggagctttattttgtagatagttgctaagttggtgtaattgccagggagatgatcagtggagccttctattctgccatcttgctccaaccattagcaacttgagctttttaacaaaataatatgatcactggaatacaggaggcattcttccttcccattgccaccttgtaggattgcctattgcagagttttaactgtaagaaagtgttctgtggagaccataaaagagtagtattggaaatgtttgctcccctctgaaccagacaaatgtatcaccattcttattcctcgatcaaagggcagaattgagcttcatgcattt

SEQ ID NO: 401258 - DNA, 573 bp, Homo sapiens
ttctattactttcaggcttcataatgtaagatagattaaaactaggattttctaaaccaaaaacagagacataatataatttatcgaacttaatcttatacatctttcaaagtgtggtgctttctctgctatttagcacacaacaacaataacaaaataccaagaagtaaatgtaatgaagaatgttcatcacctgaatgaatgaagatacaacattctactgtgcrcctttgatatagtttggctctgtgtccccacccaaatctcaccttgaattgtaataatccttacctgttgtgggagggacctggtgggaggtgatggaattatgggggcaggtttttctcatgctgttgtcatgatagcaaataagtctcatgagttctgatggttttatacaggggagttcccctgcacatccctctcttgcctgccaccatgtaaggcatgactttgcttctcatttacctccagccatgattgtgaggcctccccaaccatgtggaactgtcagttaattaagcctctttcttttataaatgaccgagtctcaggtaatttattagcagtgtg

SEQ ID NO: 401259 - DNA, 599 bp, Homo sapiens
  misc_feature (1)...(599): n = A,T,C or G
nnnnnnnnatggacattttaacgacatggattcttccaaaccatgaacataaaatatctttacattttygatgtcttcttcaatttctttcattagtgttttacagtttttattatagagattgttcacttctttggttaagttaattcctaattctatttgtggccattattaatgggattacgttttttgttgttgtttttattttttgagatggagtctcgcactgtcacccaggctggagtgcagtggcacgatcttgactcactgcaacttctgcctcctgggttcaagtggttctcctgcctcagcctcccgagtagctgggattacaggtgcccaccaccacgcccggctaattttttgtatctttagtagagatggggtttcactatgttcggcaggctggtctcaaactcctgacctcgtgatccacctgcctcggcctcccaacatgctgggattacaggcgtgagccaccacacctggctgggattacttttatttctttttcagattgttccttgttggcatgtagaaatgctattgatttttgtatgttgattttgtatccggcaacttcattgaatgtgtttatc

SEQ ID NO: 401260 - DNA, 617 bp, Homo sapiens
ttacccagatgtataggtcgttatcagatgctgagattcagggtctaccattgtggaaataaacacacagaaaatgagggctgtgaaaataagacaaaaaataatcctggaagattgcccaggcaataattaagcaaaataattgaaaaatataaaagacttaaaatttgttacaaatacgaataaaccattttaatgaagtccagggtccccgatttctcagtataaaaaacagggattacaattcattgaaaatcagaagaggaaaaaaaamcctaatgtgtatagtgcttataatccatgcgttgtccatattcaatcttatttaatcttcactctcaattctgaggaggattttatcttcttcacttaatggaagaaaacagagaattggaggaggtggtaacttcctccaattgtattccaactgggtaaccccagttggaatatgctggagagagggcatgaacttaccctatttggttgcagatcctatacatgtctttaacaaatctttaacaaataacatgcaatcccatgggctccaaaaattatatttggctctgaaaatgattcattctcaatttatcgtagttttatattctcaatgcaaccat

SEQ ID NO: 401261 - DNA, 418 bp, Homo sapiens
tttccattgatggatttctgacaaactatttttcctaactcatctttgtgttctaataaaatttgtaccttgacgtacctaataccccaggtttgggccaggcctgttatgtcgccytctcacccagttctacaggtttcttatcaccttccccatcttcaagctcacaaaaatcctgtaaagaggaccgaccaaggaaataggcctattaaataggtgactttttaaaatgggagaatttggtaccgattcagaaaaagacttgatgacaatgttacttgttgaacaaaggttatcccaaactaagcagatcaaactggaatgcagaaaggagcaggctccccctctaggaatttctgttggttagaatgttcctgagcttagcatctctatgtatggtctccagagttaatgtacc

SEQ ID NO: 401262 - DNA, 418 bp, Homo sapiens
tttccattgatggatttctgacaaactatttttcctaactcatctttgtgttctaataaaatttgtaccttgacgtacctaataccccaggtttgggccaggcctgttatgtcgccctctcacccagttctacaggtttcttatcaccttccccatcttcaagctcacaaaaatcctrtaaagaggaccgaccaaggaaataggcctattaaataggtgactttttaaaatgggagaatttggtaccgattcagaaaaagacttgatgacaatgttacttgttgaacaaaggttatcccaaactaagcagatcaaactggaatgcagaaaggagcaggctccccctctaggaatttctgttggttagaatgttcctgagcttagcatctctatgtatggtctccagagttaatgtacc

SEQ ID NO: 401263 - DNA, 541 bp, Homo sapiens
gttgagctgtgtcatttaaagggtccattctatttcatatgggaagaaaataaagaatttctcataatcttagtaacaaatgtattagttgaaatgaaaagactaagactaaaaagagatacacagtaaaggtggaatagatgtggagcagaacagaaaggaataaaatcagttagacatttatatatgaggaatatgtgctcctctctggaacctctttgatgggaatgtaagacagacagaggcaccctgtttgctggyttggagaagactggctttcctcctgaagcattagaatgtgactggggtgagagatggccctgagcccgggggtgaatgaagcaaagttcaacagtgagcaaagaggaactaggtaatttttccctcctgtgctacccagaaaaaagttgactctacagactgctcgtggtcttggtcacattttttaatgtttctcctccaaggaggtatttggaaaaagaagataagtcatgtttgattcctttatgatagttgaggcagtgcttgctcaaaattaaca

SEQ ID NO: 401264 - DNA, 607 bp, Homo sapiens
atacaaagtacatgcagattagtaactgtctgtaacctatttgttactaatctgtgacaaaataactgtagaaattgagttagaatgtgttaaatgttacagaaatttgacaaagtaattccatgtctgtctaagctaataataacaartaggcttgtattttgaatggctttacttattttcttttttagaaaacatacttattgcattttaccaaaggaagatacagaaatagaatagaaaatttagaaaacctggattttcccccagttggtttgagaagcactggtctttaaggtacacacttaaagaatatcaaaaagttgacaacttaagactgaaaataatgtgtcgggcaaacataagtcaacagaaagttggagtagtgaatatttctcacaaaatagaattcaaggcaaaaaggtatcataaagcacaaaatatgttacttactggtcaaagaaacaatggagtaaaagtaacatacctgcacctcacaatattgttttagactatgtaacgcagtaatcttatttacaatagccacactgcaaaaaccctagcaatacatctaaccaagatctctacaagggaaactacaaaacac

SEQ ID NO: 401265 - DNA, 620 bp, Homo sapiens
agaactgagtcccattgcccacaatagtgaccaactaaatattgtaaatattttatacattcttctctcattcccaacacctattcccaaagagttatgtccccsagtagattacctttatccaagcctttgaatcagcctttgaatcagaggcttgcttaaaggtaatttattggaggacataattcccaattcagcctaaaataagagatttatgataatcaggcaacaaataaaattttgaacaaagtctatcttagagcagaggcagagcagaggcagtagaaacagaaccattctgtaattgtttcccattttctggaatacagagttatgatagatgaactcagccaccaacataatcctcacattagctccctggctcacagaatagggataatacatttaaaatggtgaaataaaagtaattatatcaccatttcctaaaaatttaaagcaaaattacatctctgggtttattccaaggatctgtgtgcatcatccaagatttgaaagatgaaggagtgatgactgtggtcagttccctcatttaatatttcagtatagttaaagtagataacaaagctaatttatatagtctatgtcatctggcatataat

SEQ ID NO: 401266 - DNA, 599 bp, Homo sapiens
gagaaaggtatagccatttttgaaatgggattaaaaaaaaaaaacctctctctcctacagccccttatattgctagcaattacatctttgggggtctgataattctctggtcagtaacagtgctgtcatatgtaccttaaccctgatctgaaagaatcagtgggttgctaagaggatatttcagccaaaccagacgagtattttgaagtgttacattctggtgaccccaatcactcagccttcaagacagggaagtttggttccttgaaagtcaggacctgcacactttctttgaccaaacagggtgacttaggggcamaattgggtcaaatcattcaatgctgctttgaacctgcctctccttatcttccctatcttcttctgtatattcttcaattcttttgctaggaatccttgaaagcatgtctactctggcctttgaaagagaatatgtcgggtaactagatcatctttttgaaaaaaacctttaaaaatgcctttagttgaatagtaacaatagtagaaaataattccagatgaaaaacaggatgttgcctgtttcatagaatcccatattcataaaagttcatacatacgtt

SEQ ID NO: 401267 - DNA, 599 bp, Homo sapiens
gagaaaggtatagccatttttgaaatgggattaaaaaaaaaaaacctctctctcctacagccccttatattgctagcaattacatctttgggggtctgataattctctggtcagtaacagtgctgtcatatgtaccttaaccctgatctgaaagaatcagtgggttgctaagaggatatttcagccaaaccagacgagtattttgaagtgttacattctggtgaccccaatcactcagccttcaagacagggaagtttggttccttgaaagtcaggacctgcacactttctttgaccaaacagggtgacttaggggcaaaattgggtcaaatcattcaatgctgctttgaacctgcctctccttatcttccctatcttcttctgtatattcttcaattcttttgctaggaatccttgaaagcatgtctactctggcctttgaaagagaatatgtcgggtaactagatcatctttttgaaaaaaacctttaaaaatgcctttagttgaatagtaacaatagtagaaaataattccagatgaaawacaggatgttgcctgtttcatagaatcccatattcataaaagttcatacatacgtt

SEQ ID NO: 401268 - DNA, 586 bp, Homo sapiens
agtaatatgcctcttatttttctctaaaattaaaggttatcctttagcagataacctgctaaagatgctgtttttgtgactgaccatatcacttctttaatgctagggagatagccaaggcaaattttgcagtcaagatcagaactgtgagaaaatgctatttattcattctcstataaattatgtatcatttcatttcaactgggctgaagttgcttttgttctaattttttaacctttttattgtgaagtacactgtacatacaaaaaaaagctgtacaatgaaaagatgtacaactcaatgatttttcatacaccaaacacctgtgcactgcatcgagaattaatacattgtctgtgctccacatgtgcacccttgtttcctttcccaaacactaccacatcctttttctcaaagacaatcagtgtcctgagttttacggtcattgcttttcttgtatttttatacctaagcatgcatccccaaaaacaatagtttacttttgcttgtttttttcaaagtttatataaacggaattatacagtatatcttcttttgtgcctggattttttttcacttcatatt

SEQ ID NO: 401269 - DNA, 586 bp, Homo sapiens
agtaatatgcctcttatttttctctaaaattaaaggttatcctttagcagataacctgctaaagatgctgtttttgtgactgaccatatcacttctttaatgctagggagatagccaaggcaaattttgcagtcaagatcagaactgtgagaaaatgctatttattcattctcgtataaattatgtatcatttcatttcaactgggctgaagttgcttttgttctaattttttaacctttttattgtgaagtacactgtacatacaaaaaaaagctgtacaatgaaaagatgtacaactcaatgatttttcatacaccaaacacctgtgcactgcatcgagaattaatacattgtctgtgctccacatgtgcacccttgtttcctttcccaawcactaccacatcctttttctcaaagacaatcagtgtcctgagttttacggtcattgcttttcttgtatttttatacctaagcatgcatccccaaaaacaatagtttacttttgcttgtttttttcaaagtttatataaacggaattatacagtatatcttcttttgtgcctggattttttttcacttcatatt

SEQ ID NO: 401270 - DNA, 551 bp, Homo sapiens
gaattggcaatacctattccatatgttatttatttatgagacctgcttatccagaactcacagcccaattattactctagccagagaccttatttctagattcatgttttctcttggtgtacaactgtaaaccacaagtgaagtttctaatgttgacaaggtgtatccattagttccactaaaatgctctaaccaccggagctcattgatttttagtttcatatatctttaatgaggagattaaatacttgtttaggaagcagagcctagcttaagtggtgttttttcctayagcatgtacagttgaagacctccataatctctcccataggtcatgccatggaatgagctttttcacactaaaacacaaagctacaaatatttctataagtatacaaatatatgcatattataattatttttttacaaagcatcagaataaccacaggagagacaaaaatatttctacttgtctggtatctgggtatatcttctagaatgttgattattaattctccataaatgcctagcaaaatactatgtccagcttt

SEQ ID NO: 401271 - DNA, 564 bp, Homo sapiens
ggcaaagtattcatttccctgtcactattgtcttcaccgaagaattaaatgatggatagcacatatcgaacaaatattgtaaaacagtacaactaagaagttgttgttgtcgttgttgttttcttctgtttggtttcaartatatgaaaaataattagcaaaaatagaaaaatgtactgtcaagctttttttctgtcaacttttacactattttcctcaagtatctccccaatttttattccttccttatctcaatcttaaattcataatgcaacatcaatatttcatttgttaaccaatttaagaataaaacttctagttattcctaaactagcaacgtgatttttacttatatagaaggggctaaaaaaaaaagcaacattaatttattcaaccagtattgacttgcctatcatgagattcgttctaattgctggaaagacaaatccagcggagtcattccatcatcaggtgcccgtttagagggtgaggcaaggcggacaaatctgaggatctgaggaatgcagaacagatacataaaggaagaatgaatggcaatggagg

SEQ ID NO: 401272 - DNA, 551 bp, Homo sapiens
actcaggcagatgcgaatggagagagcaccctggaaagctgtgtcagatgactcagtggccttggtgaaaatcaatataatgatgttaaacacgyatgtgaaaagtatgaatgaaattattttgtaaaatatgtgagtggatacagcaatattccccagtaatatatttaatatagtcaactttaatatgaaagtataactaaatcaacaaaacactgtaagtagacatttgacaattttatctacactcctaagatctttatatatattcaatttgtccaaaaatgacttcaggatttttatcagaaatatcaaggatgatcttatattcagggttagtcttatgtcagagcatatattaattttttaaaaccaggttaaatttgactgtgccagttttagctacgagaggcagacatatctctaggcagacagggatgggtccccagtgaaatccaaccttcaacccaaagatagtttaaagcctgaaaactgagctgtggttctggatagagcccacagctggagtgagacttaccctctctctctct

SEQ ID NO: 401273 - DNA, 555 bp, Homo sapiens
cctccaaaaaattcatgacatgctgatktgtatatgggtcatttattgactgtaatcataggacttgtgttactctgttgaaattcaatattgaatatattgatgttaaaaaatctgcagtcttggtttattggccttatcatatttattttttaaaaccttagagtcttcattaataactgtaattaaggagaaaaattataataccaactttgttttccagctatttttcatagtaaacaaaacagaggtacaccaaagacatgtaaaaagcgattgaactgcattttaaggagaggcttgatatttcataaatgtctttaataaaatacatctgtaaaatgtgaaattattttataattctaggcacagatcatacaatctttgagagtaaaaggatggatcaagaccacaggaaagaagggatgaagctgtggagagtgaggatgaggaacattgcagatgactggaggccagctccctgaccttcccctactgccactgctgcaggccctggtcaggggaagtaaaactgacactagctgtttatcatgc

SEQ ID NO: 401274 - DNA, 487 bp, Homo sapiens
ggttctgggccctgaagtatgaacaaaggtgagtgaggcaaaaatgtgacctgtgtaaggatcactaagggaaccatccttagacccttagagtcacaggaagtttatactttggccttgggagcaggtaatgatacttaaatgaacacatttgtccatagtctatgaatgactcagccatgagcctcagtgcttatgattactgtggaattggtgccagcttggcctcatcaagaatgctaaatgtaatgtaattttaatgacttccattgtattcraggcttccttgctaagatccagcatcacattgcacatttaaactacctgggtatactaatgaagattaattgttcattgattaaggaaggatgaatcaccctattactgatgtgaactttcctttctgaagtaaaagtgtattgagcttcaaaatattggctcagatatggtgaaaggctctatttaattgtcttccattttattttac

SEQ ID NO: 401275 - DNA, 487 bp, Homo sapiens
ggttctgggccctgaagtatgaacaaaggtgagtgaggcaaaaatgtgacctgtgtaaggatcactaagggaaccatccttagacccttagagtcacaggaagtttatactttggccttgggagcaggtaatgatacttaaatgaacacatttgtccatagtctatgaatgactcagccatgagcctcagtgcttatgattactgtggaattggtgccagcttggcctcatcaagaatgctaaatgtaatgtaattttaatgacttccattgtattcgaggcttccttgctaagatccagcatcacattgcacatttaaactacctgggtatactaatgaagattaattgttcattgattaaggaaggatgaatcaccctattactgatgtgaactttccttyctgaagtaaaagtgtattgagcttcaaaatattggctcagatatggtgaaaggctctatttaattgtcttccattttattttac

SEQ ID NO: 401276 - DNA, 572 bp, Homo sapiens
tatttatatttaatataaatggacttaatcctccaaataaaaaggagactatatgttatttataatagataaatttttaatatagtggtacagataggttaacaatgctaaagtagaattcaagaaaagagttttaccagtaggacctgtatgtgtatttatttatataattatatttatgtttatatttattatgagaaattggcttattcaattttgggagcaggttaatcaaatgcaaagtctgtagaggttgcagtcaggaagggaagataatgaacaagttcaaatcttaccagcatggmataaggcttgttgtccatagctaatctagaagaaaatatccatgggaaacaataataactgcagacccagtggctgtctgaaatttcccccttagggaagacctaagctctctgttaaaagccttccaactgattaagtcaggcccacctcaaatgaatactctccattttgattaatttaagattagctaagtagacattttagttccatctgtaaaatcccttcatagtagcacctacatcactgtctgactgaaaaagtcgaag

SEQ ID NO: 401277 - DNA, 452 bp, Homo sapiens
gctcctaactgtagaatcaggcaaaatgccatgttgatgtgtgcagtcatgtagtcaactaactcaagattacccttgtgstgttttcctttccagaattattcactgtctcagattcagataggaagggaattcagtgtctttcatttctgagttgcacccataggtgatacactgtaggtgacctttatatctttttgtttccccaaatgctagcctgatgacatctgtcccttgggagagcactagtagattttttttctggagaaactcttgagagttgctcagttttggtgattagttagaaagctctccgtgggctcagacggaagctttcctttgcaagacatcacaagtgtaggagttgtctccttttatttgggggaaataaccatcaggggcaagtcttcatttctatggtgtcctggatgcttctctatttcctgctttct

SEQ ID NO: 401278 - DNA, 452 bp, Homo sapiens
gctcctaactgtagaatcaggcaaaatgccatgttgatgtgtgcagtcatgtagtcaactaactcaagattacccttgtggtgttttcctttccagaattattcactgtctcagattcagataggaagggaattcagtgtctttcatttctgagttgcacccataggtgatacactgtaggtgacctttatatctttttgtttccccaaatgctagcctgatgacatctgtcccttgggagagcactagtagattttttttctggagaaactcttgagagttgctcagttttggtgmttagttagaaagctctccgtgggctcagacggaagctttcctttgcaagacatcacaagtgtaggagttgtctccttttatttgggggaaataaccatcaggggcaagtcttcatttctatggtgtcctggatgcttctctatttcctgctttct

SEQ ID NO: 401279 - DNA, 570 bp, Homo sapiens
ggtgaggcaagagaatcctgtggctcgagatagggggttctcattgagacaagggacaatayaagggggaagagagacacaaaagaggaggaaacagacgccaaagtccaattttgattttgttcttggatttgtctaatgctggccttgaacacagttctcgtaagttctatcaaatagtactgaagataaatactactcctttcaaaatttagttgagtttctttgtttgataaaatactggtaagtggaacacccatggaaccagaggcaggagattagctgtcacttaagagctgtcagcatctttccaattattttattaaatgagggacagttaatggtatctaaaatttctctgccttataaaatgcaaaaacgtatccattcagttctatgaactccaaattaaattggacagccctaggattatacttcctattgtctgcatgtacaaattgataaacattttataatatgaatttgtgaatttttgggtcacaattctgagttaggttaaaaccattttgcaaaaactattgtcacctgcaggctccttgcaataggaca

SEQ ID NO: 401280 - DNA, 570 bp, Homo sapiens
ggtgaggcaagagaatcctgtggctcgagatagggggttctcattgagacaagggacaatacaagggggaagagagacacaaaagaggaggaaacagacgccaaagtccaattttgattttgttcttggatttgtctaatgctggccttgaacacagttctcgtaagttctatcaaatagtactgaagataaatactactcctttcaaaatttagttgagtttctttgtttgataaaatactggtaagtggaacacccatggaaccagaggcaggagattagctgtcacttaagagctgtcagcatctttccaattattttattaaatgagggacagttaatggtatctaaaatttctctgccttataaaatgcaaaaacgtatccattcagttctatgaactccaaattaaattggacagccctaggattatacttcctattgtctgcatgtacaaattgataaacattttataatatgaatttgtgaatttttgggtcacaattctgagttaggttaaaaccattttgcaraaactattgtcacctgcaggctccttgcaataggaca

SEQ ID NO: 401281 - DNA, 472 bp, Homo sapiens
tctttgctccataattcatggtttcttatggggaaaagaagttgagtgggatgttttatttttccttgctttggtgattcctctgataaatattcttgcgcttggatgatttaaaaatatatattttataatgaaatatttcaaacatgtagacaactatagagaataatataataaaaatccatggacccataacacaattttatcaaatcttaacattgcactttaggggtctgtgtgtgtgtgtgtgtgtgtgtgtgtgtgtgtatgtgtgctttaagaaaataaatctcatagatatagttgaggattactatgtattccttttctatccttatttkttctctgtctcctcaaaggaaatggttatcatgagttcatgcatataaatgttttctgattgtttttgactacatacttttatgactatgaacaacatatatgctattttacaggtttttttaaccttttg

SEQ ID NO: 401282 - DNA, 594 bp, Homo sapiens
tgctgaccacagaataagcatgcaattaatgttatctcttataattatctgtaaaatgtacagaatatgcagggaatgggtttagagactcatgctaacaagcatttataaacacatacaattatcttggtgttaagggaaggtatcacagaatgacatctttgtcatctagtgccattggttttgrtcattatttaaggtatgactgaatcacctgccccctgagagttcttcctggggagtccctcctgaaagtctttcttagagattgtccccagttgtgagacaatctctagatgactgtctccttttgctttactatgttaacccctagtcagaaacataatttcaatgagacagattcctagttttagtagaaaattagggctttttgaaaaccactttaaatacccaaagtgaaaaatatccaagtgacctgaaaaagaagtcaacatacttttcaaaaatctcagtttttctctgtttacagaaatgggaaatctggctgcagaagataccttttttctaaaatgcataagcctatcttgtagaataattggattcatagcttagacctagcagcattgtttccct

SEQ ID NO: 401283 - DNA, 611 bp, Homo sapiens
gggttaaagcacactttggcaccacttggctgtgtgatcttataccagtaacaaactctgagtttcaacagtccacctgtcaatcctggatagcaattttaacttgcatgtttagtgtgaggtttaactaagataattatgcatgaaagtgttgcggaaactgtaaagctcttgtaagtgtctgttactcttggagagaaaacagttctctgttccttttctctcatcttccaactcccatactcacacatacacacaaacatacttgctccaaactttgtcaaggccataaacaccttcattaccacccactggtgcacaagttgcattgtatacctataggcaacaccaccagccctgagacctgcatgccaacaattgactcatgcatgtagttatagtcagcaaaattctgatggcaaatagaacttaatgccgttactgaagataagatattttaatttctaaaatggaaaactttcaatatacctcccagggttctctttgattcagaagctagccaaggaaattrgaagagagttttactagcaaaagaaccaaaaataacttgtaaatatattttgaacaagactttcaatctataatcatgt

SEQ ID NO: 401284 - DNA, 618 bp, Homo sapiens
atatccaaacacatactaggctttcccttcggttactatggatgaattactgtgctcttatctaaggccaggcctcatcttgagcactggatccacccatctgtgctgcattaagaatccagtaatgaatcctttgtctttcctgtatcatcaaattttccctctctattggattgttccctatggtattcaaatgtgcttacatttctatcttaaaacacactcctccacccatctctcttccctagctctgactacattcctctgttctcatttacagctccttaagctgggtatacacgttggtctctgagtcctcttccactttctcatgtacccattttaggttttcatcctcacaattccaccaaacagctctcatcaatggcagctctttgttgccagatccagtcatcaatttccagtcttcattttacttacttgatttgaataattcacaatgtgaatcactttttccttcctgaataccttcttcatttggcttcctaaatatccctcactcttggttctgttcttgcttaactgtctgctctttctgggtctctccaacctctaaaattggratgcctagggctcattttcttttcttctttctct

SEQ ID NO: 401285 - DNA, 604 bp, Homo sapiens
ttctgtttttcatgctggaaactttctttggctagtggtcattggctctctggtcatttttaagattggggtctcaaagctgattgggacctttgaataaatgggtaagtgtgcaggtgatttggtgaggctatttcactctgggaaacaccagagttggtacctttagatctttttcttagcaagtcagaacctctagggaataactttccagtttctgctttgaaggtataaacctggttgctagaagcagaggagggaaggaactgctcacattgcagagtgtcaacttttacttattctcatttccagttttgtatcttttccttccatgtgtcttgtgccccttagttgggagaccttttggttcaccttctctagagggctaaacctctagtcttctgccaggatgaagaagaarccttctcacgctactaacaggaaataaattatgaggatctacttgttcctgaaatagagttttaatcagtaccatattttggctcttaactttccctctgcttttggtatctggtactaccaaatcctgagccttcctgtgacatcaaaatatagttgctgtgttctctccttctttttctga

SEQ ID NO: 401286 - DNA, 537 bp, Homo sapiens
caagctggagggttgtaacaaatgtattctgaagggcacaataaaaatcaagagagtttaccatagtgagactatgaagctctggctgaatatgacccagaatgcatttttaaaagaatttcttaaactccatgataattccatcctttgaaaatcacaaatcctttatcatcrcaacctatgacactgtgctcatctgtggaaataaaaagggtcaaggaaaatccccacttcatgatcattgtaggggaagcttattataattcactacattcaggaatatcacataccataggattgttagctactccatctcaatgctaaaccaaaccaaaccaaaatgaaacaaaaacagcttgaaaaattcaatagcaaatcagcacagaaaaagaaaatgtttacatttttatcaaatgttcaatttgactacaaagtgctactttggagatctgggctactcaaagtagccacctggctccctcagtggcatgttggttacaggtccctgtgagatgaggaaactgcaacaaatacagt

SEQ ID NO: 401287 - DNA, 560 bp, Homo sapiens
ttttaaatcattgtaactaagctcaaacccatttttatgaatcaaaataggaaccattacaatcaatactttttgccaaagagaaataagtttgcttattcctgtagcataaaaatccctgctttgggattggatgaactcttggaaagcattttctgcattctgctggttgtggaagtgttttccctgcaaaaagttgtcgagatgcttgaagaagtggtagtcggttggtgagaggtcaggtgaatatgayggatgaggcaaaacttcgtagcccaatttgttcaacttttgaagcattggttgtgcaaagcatggtcaggagttgttgtggagaagaattgggccccttctgttgatcaatgctggctgcaagcgatgcagtttttggagcatttcatcaatttgctgagcatacttctcagatgtaatggtttaatagggattcaaaaaactgtagtggatcagacctgcagcagaccaccaaacagtgagcatgtcctttttttggtgcaattttggctttgggaagtgctttggagcttcttctcaatccaatc

SEQ ID NO: 401288 - DNA, 438 bp, Homo sapiens
ttccagagaagccaaagggcagcaggaggttatgggaagcagggtaccaggaagcagccaaaggagcagagacccagtcatatggctgtacatgcacagaagaggaaggaaaccaaggcaagagagctcagggagaagcacagtggagaagaatggggaggagatcagagttctcacctgtggagaagctgaaagtgatgacagcagaaagcaaaagtagagtacaccatcaattaacctcaaattttgctaagagggtctactgggcctttcatatgtagagacgagcttttgaccagtggttctcaaagtgtggtcccctgtccagcagcatgaacattacctggaaacttgttgaaaggctaattcttgggccccatgccacacccartggatcagagattctgaggatggggcccagcaaaatgttttaacaaa

SEQ ID NO: 401289 - DNA, 372 bp, Homo sapiens
tagtggtggatagggttactactgtgcgaagacaaattaggggaaagtctactgaatggtgagacctcctcccagctcccattttccccaggactcctatactactaggagtcaggtctgtgctccccaagaagaagaatggaagatattagcagggtgggaatcagatcagcccaaagaagaactggggtgtcccaatgaaacaggccagccagacctggcctgttattatttggctgggctctagctgcaaagcccaacaggcagcaagcactgacyttgcataaggaactttcaatcagcaactggatagttttatttttaaatgtgactagacaccccaggatcactggatatctgtttaaagtaaac

SEQ ID NO: 401290 - DNA, 631 bp, Homo sapiens
ggggaaagtctactgaatggtgagacctcctcccagctcccattttccccaggactcctatactactaggagtcaggtctgtgctccccaagaagaagaatggaagatattagcagggtgggaatcagatcagcccaaagaagaactggggtgtcccaatgaaacaggccagccagacctggcctgttattatttggctgggctctagctgcaaagcccaacaggcagcaagcactgaccttgcataaggaactttsaatcagcaactggatagttttatttttaaatgtgactagacaccccaggatcactggatatctgtttaaagtaaaccaatagggaggggaagggtactcagaagaaatagggacaatggaagaaggaaatgtaaaatgaaaacctgtcatggatatcctcagggatataatagattgcatcaatgaaataaaaatagaaaggaacattcagacaactaaaaattaaaattaaaaataaaaagagaactcttaaaaattaaaaaattgatactagagatgaaaagatgactaatagagatgtaaacaaaatttaaaaactctccaagaaatacaacaaaattaagaaaagaaaactagaaatgaaaaaataaaaa

SEQ ID NO: 401291 - DNA, 612 bp, Homo sapiens
acttgtatcagctgttcaacaacaccaacaacaaacagcaggctttcagtctcaacctgctgtgctgccttttgatgaaaagggtactgtgcactgyggcatcatgccaatgctcaaaaagtttagattttgggacatttcagactttggatttttggattagggatgctcaacatgcattagtaaattttttttttgagcctggcaccatttatatgggtgtgtcaaattgaacacataaattatgtctttatgatatcttatgtctttatgatctgtgtacttttctatatgaatgttaactgctaataaaattcttttgaggaaaagagtattatgtgccaggcatagggaagaatgggtcacagtgaggaaggtctactgcttgttgcatgaactatttgaatgcttctcttttcacacaaaccaggtagcattataggataacagtgtaaatgatacattttaagaatttatccaatggagaaaaaaatcagacaagtttaaaagtacatgcacaaagatgtattctgtagctaaacattgaagctactaaaatgtccatgagtcaaagattagttaaataaatgacagaagagtcacacagtggag

SEQ ID NO: 401292 - DNA, 635 bp, Homo sapiens
gcatataatcctaggttgacacttacttttgtcagcattttgcagatgttattctgctgtttgatacctttaattgaggttattgagaatgccgttgtgaatctaattgccatttagatgactttgcttttcttctttggatgttttcaatgtctttattttattttatttttttggtgttttgcacatttctgagtctttcttattcagaaataattctggattatgtcttcagatttgtctttcagttcatattctctcttgagctgtatctaatactatgttgaacttgtccactgagtttttattttcacacattcttttgttcatttacagaaattctattttttcttctttaaatctgcttagtcatttttgatgatctcagttccttgcaaatattttctgttctctttttcaatctgtaaacattttttaaacttattttttaattactttaaatttcatatggagccaaaaaagagccagcatagctaagacaatcctaagcaaaaagaacaaagctggaggcatcatgctgcctgacttcaaactgtactacaaggctacagtaaccaaaacrgcatggtactggtaccaaaacagatatatagaccaaagaaacagggcagagg

SEQ ID NO: 401293 - DNA, 577 bp, Homo sapiens
tttaaatgatatttaactctggtggacacttgcagctgcctgttaaatatctccccacttcctccttgctgtmagaagccagatttttatcaagggcaggaacattcccctaaatacttgcttatgaagccttttttgcagttaggagtgtgttgcagttgtagccaatgaaataaagacggaatttgtcccaggttttgaggctttcctgataaaaagagacagatgcagctggcactgtttatcccttttctagcttcctgtttccctaaaggcatgttcttctggagctgcagcagctatcttgtgaccttgaggtgaagtgcatcaggtaacagcccagagcatagcaaactctggccttgatgtctttgagctgctggcaatgccagcaacccactatgtccaagattctcatgggtgaacgctacttatttaaactggaatagggtttctgttacttgcagtcaaatgcataataatcaaaccccaggttcatattgaatttcttgcccattgggatcaccataagaataatgtagagtaagatatttcagtgattcctgaataagttaaa

SEQ ID NO: 401294 - DNA, 607 bp, Homo sapiens
agtgcatggcacctcccccttctctcttgctcctactctgaccatgtgttgtgtgtgctcccccttcaccttctgccatgattgtaagtttcctgagatcttcccagaagctgagcagatgccagcatcatgcttcctgtgtagcctgtagagccatgaaccgattaaacctcttttctttataaatactcagtctcaggtatttattgcaatgcgagaacrgcctaatacaaggtgggagagctttgtggtttgcggctttgtcttctctgctttgagctgagttatgtgacaaaattcatatccctcaactacactccctcctgcaggctctattccatggcttccattctcaatgagtttctaaaatgtattacctccccttcaggccaagggtggtaactcctttttttttgtagttagtttctaggtactttaacatcttttatcagttccttatccccgtccacattttatgaacattccttgaaccacttgagttggattctgttttctgttggtattctgtctgatacagtattctatacctgaatttctaatatggacattaatttatttggtgaaaagcataaaatatattttcaaa

SEQ ID NO: 401295 - DNA, 533 bp, Homo sapiens
agggagaagtgtccaatgggtggatcaaaggccaagtaatgcccacttgacttaggtcagctattcaacctgatattttagtaaaaacttttagaattgttttaaaaggcaacaagcccaattagaccacttgtatgtgttggtatgattaactgcgtcactacctgtcagcagggaatttaaagttttctcamaatgggaagactgagttcacttgtcacatatggggcacttgccattaaagtaagaaaagatagcttcaagttgatttctttttaaatgctaaaatcaaagattgctatgctatactgcataattccataggagaatatgtgctgtgatctgcataggtcatgttcatggtatgatgaagataataagctttctttgtagtcctgaccttaaccactgccagtttttgccaaaaatggaacttaatcttcttaccaaatcactcttcttcttgaactttctgtgctcatcatgcaagtcttcttggacttcctgtgctcataatctattcagttgcccat

SEQ ID NO: 401296 - DNA, 563 bp, Homo sapiens
ctgaagaatagaagaaaggtatttagggcaatgaaatcccaatctcttgagggattcgtggatttgaataaatatgaatcatgcattagctttctgtgactcctttttctttacctactgactagaagacagtattcctgtcttaatccgttttgtgctgctgtaacaaaacaccagggactgggtaacttataaagaacagaaatgtattttctcrgagttttggaagctgagaagtccaagatcaagatgccagcaggtttggttgtctggtgagggctgctgttttccaagatggcaccatccaagacaagctgcacctcgctgagagtacacatggtgtgtcttcacagggcagaaggcaagctgactgaaggcagcatgaagcctctttataagggtcttaattccattcatgagggaggacccctcctggcataatcacctcttaaaggccccacctcttaatactgttgcattgggaatgaagattcaatatgaattattatgaaggggatgaaaacattcaaaccatagcaattgcccatgaatccatcattggc

SEQ ID NO: 401297 - DNA, 563 bp, Homo sapiens
ctgaagaatagaagaaaggtatttagggcaatgaaatcccaatctcttgagggattcgtggatttgaataaatatgaatcatgcattagctttctgtgactcctttttctttacctactgactagaagacagtattcctgtcttaatccgttttgtgctgctgtaacaaaacaccagggactgggtaacttataaagaacagaaatgtattttctcagagttttggaagctgagaagtccaagatcaagatgccagcaggtttggttgtctggtgagggctgctgttttccaagatggcaccatccaagacaagctgcacctcgctgagagtacacatggtgtgtcttcacagggcagaaggcaagctgactgaaggcagcatgaagcctctttataagggtcttaattccattcatgagggaggacycctcctggcataatcacctcttaaaggccccacctcttaatactgttgcattgggaatgaagattcaatatgaattattatgaaggggatgaaaacattcaaaccatagcaattgcccatgaatccatcattggc

SEQ ID NO: 401298 - DNA, 470 bp, Homo sapiens
tacatgctacccttactcaaagctgactcagccatccatagagttgcctatttgagaaccgcctttacttatcagtacaatgctttgggagagtagagttttgtgtgaactctcattatgagtccttcaattggcatgataaaaaccaaagccacgttaaggaaataaactgcatctatctgctatcgcacattgasaacattgaattagagggccatgttatgcgaagaaaggtggggagatggagattctgaatcgtccattgggtgatgtgagacaaaagataaaaatgaacaatctttttaatttactttttaatctaaatgaatgatcagaaaatacactcagagtttttccatagtactttggtggataaaaattatagaaatgacaaattaatagcttggtatcagtgctttattttaagaatcaattccagcgcaggccattaggttgctttgggttcggcc

SEQ ID NO: 401299 - DNA, 611 bp, Homo sapiens
ggcttatttaagaatactgtctttgtccattcagctgctgtaatgaaatactatagatagattgggtagtttctaaatgaaagaaatttatttctcacagttctggaggtggggaagtccaagatcaaggtgctgtctgacttggtgtctggtgagggcccccctcctgtttcacagatggcaccttcttgcaatatcctcacatggtggaagcgggtgaacaagctccctgaagcctcatttacaagggcactaatcccattcatgagggtggagccctcatgccctaatcacctcccacaggcctcaccccctagaccatcacctgtgggggtagggtcaggatttcaacatgtaaatcgcagaaggacacaactttcagaccataacagctactacctgagaaggtgggaggtttgggatccaggtaaattttcacratgctaaatttccttcccagtttcagactagatgaaatatgaaggaaagcaattaagcaaagaatgtgtatcaaggagtcaaatatttcatgaaaaagccagtggcagcaagtatcaatatttgctttccagagtaaacatctcagaggacgtatctggagcaaggcggga

SEQ ID NO: 401300 - DNA, 611 bp, Homo sapiens
ggcttatttaagaatactgtctttgtccattcagctgctgtaatgaaatactatagatagattgggtagtttctaaatgaaagaaatttatttctcacagttctggaggtggggaagtccaagatcaaggtgctgtctgacttggtgtctggtgagggcccccctcctgtttcacagatggcaccttcttgcaatatcctcacatggtggaagcgggtgaacaagctccctgaagcctcatttacaagggcactaatcccattcatgagggtggagccctcatgccctaatcacctcccacaggcctcaccccctagaccatcacctgtgggggtagggtcaggatttcaacatgtaaatcgcagaaggacacaactttcagaccataacagctactacctgagaaggtgggaggtttgggatccaggtaaattttcacaatgctaaatttccttcccagtttcagactagatgaaatatgaaggaargcaattaagcaaagaatgtgtatcaaggagtcaaatatttcatgaaaaagccagtggcagcaagtatcaatatttgctttccagagtaaacatctcagaggacgtatctggagcaaggcggga

SEQ ID NO: 401301 - DNA, 517 bp, Homo sapiens
tgttttgaaatatgtatacattatagaatggttaaatgaagctaattagcatatgcattacctcacatacttattctttcgtggcgagaacacttaaaatctacttgcttatcaagtttcaactctacatcacattgttaataagtataatcaccatgtgattatagatctcttgaactcattcctcttgtctaactgcaatttggtatcctgtgaccaatgtctccctatttccaccctctctccagccctggtaaccactattctactctctgcttctgtaagtctgaattttctcatttttacatgcaagtgagatcaygtagtatttatctttctgcgcctggcttatttcagttaacgtaatgtcctccagattcatccatgttgttgcaaatgacaggatttttaaggctaaataatatttctgtatgtattatatacatacacacatacattttgcaatccattcatcccttgatggatacttagattgattccttatcttgcctactgt

SEQ ID NO: 401302 - DNA, 662 bp, Homo sapiens
tatacccagtagtgggattgctggagcctatgttagttctactgtcaattttttgaggaatctctatactgtttttcataatggctgtgctaatttatatctcctttaatttttaatggttactttagggtctgtccaaggaggtagcaacactacccctcagttaaacaattgaatctaaaaaaatgtgattatcaaagtaatgattaaaatgtaaaatgagctaaaaaataaaaagattgtcaattttagtcataaagatatatgtttgtagtgttttacagcttacaaataattttctgttgaatcagatttttggataaatgaaagtggttatttttgacagctaaggaattcagggcgtggatactgtawtataaacttattcaactccctctgatatttgactttcagttaattaataacccagcactttaaatttacactggtttctcaactgccatttctaggtaaaaactgattttcaaggtagaaatttgattttcatgtattaatcataagcatgcactcatgctaatgaattatttactaccctagaatcttagaaaaataacttgactaacctatatttatttgttttatatacgatctactttaaactttttcattgataaaatgaaaagtaaagaatttttgtaaac

SEQ ID NO: 401303 - DNA, 484 bp, Homo sapiens
ttgttttacagctaatttagcccattctaaggcaagactcctctgagggctcttaccaatgatccgtgtatcgtgataaggcctctccatcctggyagatgggaatatgaactactccaagccttgtgagtactccagtaattgttcaggctacttcttttcagtagttctttattcagtctcatggagtttcacttacaaggactcagtgggactgaaggggactcccttgtagatctccagggatgtccctctacacaggttcttctcctcctatactgtgtctgttacattctggcagccttgacattccaaacactgatctccatctcctcaagtcagtgatattgccaggctctgtttgtgtaccctgatatagtttggctctgtgtccccacccaaatctcaccttgaattgtaataatccccatgtgtcagggtgggaccaggtagaggtaactgaatcatagggtggttcctccat

SEQ ID NO: 401304 - DNA, 632 bp, Homo sapiens
actcccttgtagatctccagggatgtccctctacacaggttcttctcctcctatactgtgtctgttacattctggcagccttgacattccaaacactgatctccatctcctcaagtcagtgatattgccaggctctgtttgtgtaccctgatatagtttggctctgtgtccccacccaaatctcaccttgaattgtaataatccccatgtgtcagggtgggaccaggtagaggtaactgaatcatagggtggttcctccatgctgttcttgtcttaaggagtgagtctcacaagatctgatggttttataagcatctggcatttcccctgcttacactcactctgttctgccaccctgtgaggaaggtgcctgcttctcctttgccttcctccatgattgcaagtttcctgagtcctccccagccatgtggaattgtgagtcaattaaacctctttcctttataaattacccagtctttkgtatttcttcatagcagtgtaagaactaactaatacatatatcaacccctattctgtgctatgtccttgaaactgtctccaggtgaggcaatcacaggctcaccttattttttattttctttcagggattatagttttatcctgactgagct

SEQ ID NO: 401305 - DNA, 530 bp, Homo sapiens
tgcagcttataattattgcatcttcttctgactggcagcctgggttggtgggtactacatacttgctacaagaatgatgtaaagccctagcagaggagttagaatttagagggtgcacattatttgtgcaggaaaactatttcccagggagcaacaagccaggcaatagctggctgatgccacagcttccctggaaaatgagaaaagtacaaagggcggtcttttgcatcagtcttctggcaggagggcctcaccagggatcccacagacatggagaatcaagctgattaaggcycagtaaaattctaggacacccaactttcttccaattgccttactggcccatgcatgatgaatcagtccacctgatgataatgtcttacttcttgaattgcaaaatatgctgaaataaagaaaaagaacaaaagcagacagctactctcaggctcttcaacctgcagcagattttatggctttccaaataattttaaaatgttaattgactaattgctcttatttatcatcttttc

SEQ ID NO: 401306 - DNA, 597 bp, Homo sapiens
cttacctttgcacatttccacgtgagcaaacacacagctcttcccagaaaatcagaaagattgcatcttagattcacacctgcaggtggtaaggttttctcagaggctatatagaaacactgcatttcccaggggcttggagaaaagcaattttaaaatagtttgagatttttttctgggaggcggcacttggtgaccacacctaaaagtttatttgtcatgtgttgattcatttgttcattcaatgcgttattttctaagagctttayatgtactacctctgacgacacagacaaatcaagtgagacattttcccccaagtatcttacagtacaaacaggggaaagaattttcctagaatcaccttaaatccaccccttggtccttttcagagcatgttcacatcacttttctccttggatgccatcaaaacaggcaaggctggcattattctcctcctcaatgggggaggaagccaaggtctacccagactgtgctgttggttgttggtggagcctgtaccaggatctctcaccagctgtgtgactcagggcaaattacccaactgctctgggcctcagtttcatcatctgtaac

SEQ ID NO: 401307 - DNA, 526 bp, Homo sapiens
aaaataattgtcaagtccttggcagggaatgagggtcagggtacagggacaggattctaaagtttctgtttatatgcaggatatcctcccattctgtgttaatattaaacttcataacattaatccattttaataagtttgtattgcaaggatttagggacatgrggagtcatattttccagagggttagttcttgagtaagcttgaaaattaaacttacatatgatgagacttcactgcttgaaagtgcctgacacacagtaggagctcaataaatgttttagatacttgtttttactaatatatctatttttatgactgattataaggaaactcatttatttttcatgaatttatcaaaaatttgttgtttgatacattctttgtttagcttttactttatgccaggtccaacaccagaggattaaaaaaatgtgcagttcttaagaattttaaagtctaatggggaaaataaaattgtatagacaattactgcccagtgacatacgtgtgagagaagcccaca

SEQ ID NO: 401308 - DNA, 602 bp, Homo sapiens
cgcctgcacctcccgtccccaattccctggcagcagcttcatggcacagagagagaatctgtgtgcttaagggaggcagagcacagtgattacaggattttgcactggaactcagtcctgccctgtcacagtggaaagcaacatggggcagaactctgccagagcccatggaggaggcatttatactagccctagccatgggtaaatcttctgtctcaatggttgggacctgagtaccaacaaggcctgccaccgttggctaaagggctctgggtttctaaacaaatttgcaaggcagtctaggcaacaaagactgcaattcctgggcaagtactggtgccatgctgggatcaaagccagtggacttggggaatatgtgacctagtgagacaccagctggggtagccaagggagggcttgtgttaccccttccccaaccccagacagtgcagcttatagctctgggagagactccttccctctctctttgaggagagaagaggggagagtaaagagkattttgtcttacaacttggataccaactcagtcatagtaggataagaaatgaggcagagtcctgaggcccccattccaggcccta

SEQ ID NO: 401309 - DNA, 498 bp, Homo sapiens
tgtgggccttgagccacactcagtgctgggctggctttgagtctaacccagcacagtcccagtgatggtggccacagggctgctcgtatcacccctccaccagcacagagagagagagagagactccatttgttttggggagagtaaggacagagaacaagagtctctgcctgataatccagagaattcttctagatcttatccaagaccactaaggcagtacctctacaagcctgcaagagtcacagcattactgagcttggggtgccccttaaagcagatacagcttcagtgaccaaagacttacatcacaacacccaggtccttttgaatacctggaaagccttcccaagaaagataggtacaaacaagctcccagactgcaaagactataataaataccgaactctttaatgcccayacatcaaagatcatccacagacatcaagaccatgcaggaaaacatgacctcaccagacaaactaaatgaagcaccag

SEQ ID NO: 401310 - DNA, 568 bp, Homo sapiens
cagcctcactaattatcagggaaatgcaaatcaaaaccgcaatgcaataccaccttactcctgcaagaatggcctttaattaaaaaaaaaaaaaagatgttggcatggatgtggtgaaaagggaacactttcacactgctggtgggaatgcaaactagtacaaccactgtggaaaacagtgtggagattccttaaagaactaaaagtaggtctaccatttgatccagcaatccccctattgggtatccayccagaggaaaagaagtcattatacgaaaaagatacttgcacatgcatgtttatagcagaacaattcacaatttcaaaaatatgtaaccagctcaaatgccaatcaatcaacaagtggataaagagaatgttgtatatattttctggaatactactcagccataaaaaggaatgaaataatggcattcatagcaacctggatggaattagagaccattattctgagtgaagtaactcaggaatggaaaaccaagcatcgtatgttctcactcataagtgggagctaatctatgaggacataaaggcttaaaaatgtttc

SEQ ID NO: 401311 - DNA, 674 bp, Homo sapiens
tgtttgaggtggtggatatcctaaataccctaatttaatcattatacattgtatgcatgtatcaaaatatcacatgcacctcataaatatatacaatcatgtatcaataagaaattttaactaaaaatgattacataaactaaactacaattacataaccacagaaaactagcatgaaagtggttatttactttgaaaaaaaaagagagaaatttagaactttataaaggaaataaaatgaaaataggccacaatgaacagttgacacaaagctgagaggaattgagtacatgacctcgaaggagtctcctaaaactaagaggtgggtcagaaagctggcaagctctaatgcttagactcacacaagtccatgtgtgaaattagacttttgacctccaggcagtggtcttcaacccaacgggaatgcccacccttgggaggagagcaaatgactttccatgaggcccttacatttcttgtaaggaaattaatttttatattctcaatttccaactgtwctttttcctaagattgatctgccaagtctgtgattggttggctcttcccacctccttttaaaattcccttttttattaatgacaaacaaacctctcatccattctaaatcctattaatgtggatttcccagggcacaaagcgaagggacaattcca

SEQ ID NO: 401312 - DNA, 562 bp, Homo sapiens
agatagtttagtagaggttcaacttttcattctgattagatcttattatttttgagggtaaagactatgttttttactctttgtatcactcagggtacctggtcctgtgttgacatgtatttgatctccttaattacttggccaacaatacagttgttaagttgacacccaaaatgataaaattagaaaatcataaaaaatttgaattatatctacttgttttagtaattttaggtaatctaatctaatttgtatatttgacaggtgaggaaattgtgtcccaggtaatttaagtgcttcatttgmgattatatagacgttcatttattctttaagatactgctactatcttacctttggaatatctacaggtaacatttaacaggtaccaatacctcttcctatttttcctaaggaaagacaaagattagatgccacctattttaggcatttgtggttatacattactcctacttttagttcttataatcagcatgagggatatttattatgaacccaatcttgaactgaaagcttggtttttactgaattcactatagaa

SEQ ID NO: 401313 - DNA, 562 bp, Homo sapiens
agatagtttagtagaggttcaacttttcattctgattagatcttattatttttgagggtaaagactatgttttttactctttgtatcactcagggtacctggtcctgtgttgacatgtatttgatctccttaattacttggccaacaatacagttgttaagttgacacccaaaatgataaaattagaaaatcataaaaaatttgaattatatctacttgttttagtaattttaggtaatctaatctaatttgtatatttgacaggtgaggaaattgtgtcccaggtaatttaagtgcttcatttgagattatatagacrttcatttattctttaagatactgctactatcttacctttggaatatctacaggtaacatttaacaggtaccaatacctcttcctatttttcctaaggaaagacaaagattagatgccacctattttaggcatttgtggttatacattactcctacttttagttcttataatcagcatgagggatatttattatgaacccaatcttgaactgaaagcttggtttttactgaattcactatagaa

SEQ ID NO: 401314 - DNA, 490 bp, Homo sapiens
gttcataaaatttaaaaatggcataagtgctatgtctatgagttgtcaagataactgagaaaaaagtttttaaaacattaggattaaatttcatttacttaaaaatatgattcattagcaaatacaggaaatattgacttctaggtcatagaactgtaggaggattttaagtttagtggaagttgatgtagattcttattacctgcgccattgtcscagagctccaatgttacttgatgtccctcttcattttctataatggctgttacattgattcccagaacaggaagaaacccttgactgactcatgcataaacaatcactgggctagggtaatgagctgtattttgactcatgtgagcagttgcaattactgggagtgtggtagggcttcttgctcgagtggtcattgtcacagttagcaattgagatttggtatgattgtttcgaacgctgtaagtccaagtgcctgtctgaaacattaaaaaaa

SEQ ID NO: 401315 - DNA, 676 bp, Homo sapiens
ataatgaaaaagccaggttattaattatagaatgtcatatctttatacatatatatatatatttttttttttttttgagatggagttttgctcttgttgcccatgctggagtgyaatgacacagtcttggctcactgcaacctccacttcccagcttctagtgattctcttgcctcagcctcccaagtagctgggattacaggcgcccaccaccatgcctggctaatttttatattttagtagatatggggtttcaccatgttggccaggctggtcttgaactcttgacctcaggtgatctgcctgcctctgcttcccaaagtgctgggattaggcgtgagccaccatgcctggcccatatcttaatatatttaaaataagaataaacctgttcttcttactcaggatttcctgccttcttaaactaacacatttcatcacaaatagacactatgaggaaagttgagatgtagtattaatcaatggcctggataagactagcaatctccattttgaggcaaagagaggtcagtgaaggaagtagttttctgtttttgtggcttaaaacatgacagtaaataggcttaaatgaaagttaggttggaaggaattcaaatgagtactggaggcaattgggtatagtgctccaaaggtgctcccaattttttgagttcac

SEQ ID NO: 401316 - DNA, 676 bp, Homo sapiens
ataatgaaaaagccaggttattaattatagaatgtcatatctttatacatatatatatatatttttttttttttttgagatggagttttgctcttgttgcccatgctggagtgcaatgacacagtcttggctcactgcaacctccacytcccagcttctagtgattctcttgcctcagcctcccaagtagctgggattacaggcgcccaccaccatgcctggctaatttttatattttagtagatatggggtttcaccatgttggccaggctggtcttgaactcttgacctcaggtgatctgcctgcctctgcttcccaaagtgctgggattaggcgtgagccaccatgcctggcccatatcttaatatatttaaaataagaataaacctgttcttcttactcaggatttcctgccttcttaaactaacacatttcatcacaaatagacactatgaggaaagttgagatgtagtattaatcaatggcctggataagactagcaatctccattttgaggcaaagagaggtcagtgaaggaagtagttttctgtttttgtggcttaaaacatgacagtaaataggcttaaatgaaagttaggttggaaggaattcaaatgagtactggaggcaattgggtatagtgctccaaaggtgctcccaattttttgagttcac

SEQ ID NO: 401317 - DNA, 676 bp, Homo sapiens
ataatgaaaaagccaggttattaattatagaatgtcatatctttatacatatatatatatatttttttttttttttgagatggagttttgctcttgttgcccatgctggagtgcaatgacacagtcttggctcactgcaacctccacttcccagcttctagtgattctcttgcctcagcctcccaagtagctgggattacaggcgcccaccaccatgcctggctaatttttatattttagtagatatggggtttcaccatgttggccaggctggtcttgaactcttgacctcaggtgatctgcctgcctctgcttcccaaagtgctgggattaggcgtgagccaccatgcctggcccatatcttaatatatttaaaataagaataaacctgttcttcttactcaggatttcctgccttcttaaactaacacatttcatcacaaatagacactatgaggaaagttgagatgtagtattaatcaatgkcctggataagactagcaatctccattttgaggcaaagagaggtcagtgaaggaagtagttttctgtttttgtggcttaaaacatgacagtaaataggcttaaatgaaagttaggttggaaggaattcaaatgagtactggaggcaattgggtatagtgctccaaaggtgctcccaattttttgagttcac

SEQ ID NO: 401318 - DNA, 564 bp, Homo sapiens
cacaatgcccagccaaatttaacaattaggtacacagaaaaaacacctcataagaacaaaaaatcaggtgaactctcacagtacctggctttaactatattatccctgaaagaggcactgaagagatagaaaaagcaatcttgaatcactgatgccacccccatcccaaccctagctgtggtggctgggtgcagagagtgtctctgggcactgggggaaggagagcatagcaattgtgaggaattgaactcagttctgtcctgatagagcataaaggaaaactggaccaaactcagctgacacccacccatgaagggagcattaaaatcagcccttgccagagaggaattgtaggtcccagagatcggaacttaagttcccacaaacctcaccactgagggctggagtactctgrgtctctgagtaaacttgaaaggcagtctaggccataagaactgcaactcttaggtgagttctagtgctgaactgggcccagagacagtggactgggggggcatgtgacatactgagaaaccagcttgggcaactaagggagtgctggca

SEQ ID NO: 401319 - DNA, 626 bp, Homo sapiens
agccataacacccctcaatgtgactacatggagagaggtcctttaaggaggtagttaaggttaaataaggtcatcagatggggccctaatccaataggacttgtgtattttatttttattattttttagactcagtttcgctctgttgcccaggctagagtgcagtggcatgatctcagctcactgcaacctccacctccctgsttcaagcgattctcctgcctcagcctctcaagtagctgggattacaggtgcccgccatgacactcagctaatttttttgtattttcagtagagacagggtttctccttgttggtcaggctggtctcgaacttctgacctcaggtgatccgctcaccttggcctcccaaagtgctaggattacaggcatgagccaccatgcctggccaatttcttattcgttaggtctcaacttcagtgtcctcttccactcatggtattgagcaggattctgccctcctcttcctgctaccactggcccccttgagcacctacatttctgtttccttcctaacacttatcatgatttgtaaacatgcatttgctttcatttatctgcctttcccaccagaccataaactctacaagaacagattggtctgtg

SEQ ID NO: 401320 - DNA, 502 bp, Homo sapiens
atgctcttgaactcctgaggtcaagcaatcctccctccttggcctcacaaaatactgggattacaggcatgagctaccrtatccagccccttttccttctttcttcttcttcattttcttttttttaaaataagcctgagttcctgaaccttgctgctttattttttgagatggagtcttgctctgttgcccaggctggagtacagtggcgcgatcttggctcactgcaacctccacttccctggttcaagcaattctcctgcctcagcctcccaagtcacggggattacaggcgtgcaccaccatgccaggctaattttttgtatttttagtagagacagggtttcaccatgctggccaggctggtcttgaacttctgatcttgggatccacccaccttggcctccccaagtgctgggattacaggcatgagccactgtgcccagcttgaaccttgcttctaaccaatagaatatggcgcaggtaatgggatgtcacttcc

SEQ ID NO: 401321 - DNA, 502 bp, Homo sapiens
atgctcttgaactcctgaggtcaagcaatcctccctccttggcctcacaaaatactgggattacaggcatgagctaccatatccagccccttttccttctttcttcttcttcattttcttttttttaaaataagcctgagttcctgaaccttgctgctttattttttgagatggagtcttgctctgttgcccaggctggagtacagtggcgcgatcttggctcactgcaacctccacttccctggttcaagcaattctcctgcctcagcctcccaagtcacggggattacaggcrtgcaccaccatgccaggctaattttttgtatttttagtagagacagggtttcaccatgctggccaggctggtcttgaacttctgatcttgggatccacccaccttggcctccccaagtgctgggattacaggcatgagccactgtgcccagcttgaaccttgcttctaaccaatagaatatggcgcaggtaatgggatgtcacttcc

SEQ ID NO: 401322 - DNA, 618 bp, Homo sapiens
gaaattgaattggttttttaagctacccagtttgtggtaatttgttacggcagccctaggaaattaatacagatgttcataatattgcttttttctgttgtgaaaacctgaaaataacataactatctgccaataagggattatacaaattataatatatccatataatgtaatattatgtgataatttaaaaaaattgtgatctctatagattaaagaagacaatgacatattgtttttaaaaaggttatagaacccagatcactaatctttggggaatcctgagtcttggtctgagtaatgtggaggcagcgcagtcgtcagaaaaaaaattttttctcttgtgtttatataataaatagctgtttgaaaaactttttttgcatgtattaaggcaattgaggaaatttttatgcyatttaatgacaataaatcataaaactattgtattgttagcggtggaagagatccaagttactggcagtgaatccatatgggtccacagcaacttcagtccttgcctcctcagaagaaagaattcgactgagggccatacagcagaaaaagagactgaggcaattttcagatcaggagtggaagcttatttaaaaggtttta

SEQ ID NO: 401323 - DNA, 631 bp, Homo sapiens
attttattttctaccattcatctttttaatactttagttttcagttataaagacaatatagcaacattgtagaaaatatggaaaaagggggaaatccattatttaacctgcttaaatgtttattcttaatttcttggttagggaaccctcaccaactatagttttaccaagtcatgattgatgaaaacatagttttataattgtggtcgttatcaatttattacttcttagctctgagttcaacattcattgcatggttggtgaaaatagacctgagccctttgaatattttcctttgacaactggctggatgttaaattttgtcaatagagggcgccagagagacattgcaagaggaagagattttccttcctggttctggtgtgctggcttggcaacttctctggcgccagctcttgcagtccaagtggcttaatagcttctggctcctacagtgctgaggcttccccagtgcccacctcttaaagcttggtcagcttctggtgccaggctattgcagaacgtggctgtcagcagcacctagtggtcagtagcatcccctgcccacctacctcyccgctctatgggattagctttagctggcaccctagagggcagagttctgacaagt

SEQ ID NO: 401324 - DNA, 577 bp, Homo sapiens
ttgtttaatttctgtgtgtttgtatagtttccagagttcctttggtagtgatttctagctttattccactgtgatctgagaagatacttaatacgattttgatttttttaaaaattttaagacttattttgtggcctaacatggtatatcttatacagtgttccatgtggtgatgaaaataatatatattctgtagttgttgggtagaatgttctgtaaatatctgaaaagtccatttggtctaaagtccaatgtttctttgctaattttatcttgatgatctatctagtgcggtsagtgatgtgttgaagacccccccccccactattatcatattgctgtatacttctttctttaggtctaataatacttgttttgtgaatttgggtgctctgatgttgggtgcatatatatttaagattgtcatattctcttgcagaattgatacctttatcattatataatgacctttgtcctttttttttttttactgtttttgatttaaagtctattttatctgatataagtatagttattcctgtgcacttttgatttctgttttcatagaatgtctttt

SEQ ID NO: 401325 - DNA, 577 bp, Homo sapiens
tagccactgtgcacagccaggcacactggctactgcagcagggcrggcagctccagaagccagcataggcactggctccatgtaagcctgcggtttgatcagatacaccgtaagcatcttccactgtgggcacccccatctggacaaggggaatgcagtggtgcctggaaactgggagatgccagaaaccaccaagcccccaaaagggtgtcacagccctggctcgcggagcccctaggtctgggctccctgaagggccacagctcttctctccttcttatctcctgcaatgtggcaagctggggagagggatatgtttcagccctgtttgtgttacatctctttcagcccaccatttggcaagtcctaagttcttgtcctgcatccaggaagaatgaggtatgcggacaactggagggtgaacaaggtggaaaggagctttattgagtgacagaacagctcttgggagacccaaagtgggtggctcctatctgcaggcaggtcatcccagtgaatgtccagctctcagtggagaggagacccagagtgggcagctcctattcgcaggtaggtcctc

SEQ ID NO: 401326 - DNA, 577 bp, Homo sapiens
tagccactgtgcacagccaggcacactggctactgcagcagggcaggcagctccagaagccagcataggcactggctccatgtaagcctgcggtttgatcagatacaccgtaagcatcttccactgtgggcacccccatctggacaaggggaatgcagtggtgcctggaaactgggagatgccagaaaccaccaagcccccaaaagggtgtcacagccctggctcrcggagcccctaggtctgggctccctgaagggccacagctcttctctccttcttatctcctgcaatgtggcaagctggggagagggatatgtttcagccctgtttgtgttacatctctttcagcccaccatttggcaagtcctaagttcttgtcctgcatccaggaagaatgaggtatgcggacaactggagggtgaacaaggtggaaaggagctttattgagtgacagaacagctcttgggagacccaaagtgggtggctcctatctgcaggcaggtcatcccagtgaatgtccagctctcagtggagaggagacccagagtgggcagctcctattcgcaggtaggtcctc

SEQ ID NO: 401327 - DNA, 441 bp, Homo sapiens
gctaaggtttccaggataagaaattctgccttaagtttgcagcatcagctcctgcctgagtttctagggtgtgggaggtggggacgggggcagttaaagctttattttgggaggtctacttgattccttactttggtggactttccatttctccttttctccctcccttctttcttctttgatttgtttttaaattcaggatttttagatgttttctgtgggaggttcaattagattatctatatgtcacatatccttaagctgatgcttttgcacatgctgttggcttgtcgtttgtcatttgtaactgcattctctgagtcagtggatatctctttaaatcttgactgattacttyttagagaattaggtgctttttttgtttccctttgaggactttttattgactaaagcataaagaccaaattttaacatggcatg

SEQ ID NO: 401328 - DNA, 441 bp, Homo sapiens
gctaaggtttccaggataagaaattctgccttaagtttgcagcatcagctcctgcctgagtttctagggtgtgggaggtggggacgggggcagttaaagctttattttgggaggtctacttgattccttactttggtggactttccatttctccttttctccctcccttctttcttctttgatttgtttttaaattcaggatttttagatgttttctgtgggaggttcaattagattatctatatgtcacatatccttaagctgatgcttttgcacatgctgttggcttgtcgtttgtcatttgtaactgcattctctgagtcagtggatatctctttaaatcttgactgattactttttagagaattaggtgctttttttgtttccctttgaggactttytattgactaaagcataaagaccaaattttaacatggcatg

SEQ ID NO: 401329 - DNA, 617 bp, Homo sapiens
actatacaactagaagtgtacctcacttttctggtaagcgtcttgttaaactatattgtagaatacagaaactgtatctgaaaacttttatggcacaatatgaaaatctttatctaaatttgtacacattattcacttgggaaaggaaaattatggaatttaagctatttagatcctatctaaattggctacagggttttgagatcacaaaagttaataaacaacattattgtaacttcccagaaattatactctatattgatrtcataaaatttataatcttctacattattaaaatatcctagtaatataaatgtatcagttatattaatccactatgaggtaaatataaatttaaaaataaatcaaacaatgaaattttaaaagtacttacatgcagtacacaaatatgcaacagctgtatatcattgggagttcatccaatagctgtaagaaacaaagatagataacaggcttgaatatcatggagcagcaattattatgcaaatcaaaataaaacatcaaaatgattaagattttcagctcttagaccaggcacagaggctcacacctgtaatcccagcactctgggaggccaaggttggaagatcgcttga

SEQ ID NO: 401330 - DNA, 617 bp, Homo sapiens
actatacaactagaagtgtacctcacttttctggtaagcgtcttgttaaactatattgtagaatacagaaactgtatctgaaaacttttatggcacaatatgaaaatctttatctaaatttgtacacattattcacttgggaaaggaaaattatggaatttaagctatttagatcctatctaaattggctacagggttttgagatcacaaaagttaataaacaacattattgtaacttcccagaaattatactctatattgatatcataaaatttataatcttctacattattaaaatatcctagtaatataaatgtatcagttatattaakccactatgaggtaaatataaatttaaaaataaatcaaacaatgaaattttaaaagtacttacatgcagtacacaaatatgcaacagctgtatatcattgggagttcatccaatagctgtaagaaacaaagatagataacaggcttgaatatcatggagcagcaattattatgcaaatcaaaataaaacatcaaaatgattaagattttcagctcttagaccaggcacagaggctcacacctgtaatcccagcactctgggaggccaaggttggaagatcgcttga

SEQ ID NO: 401331 - DNA, 617 bp, Homo sapiens
actatacaactagaagtgtacctcacttttctggtaagcgtcttgttaaactatattgtagaatacagaaactgtatctgaaaacttttatggcacaatatgaaaatctttatctaaatttgtacacattattcacttgggaaaggaaaattatggaatttaagctatttagatcctatctaaattggctacagggttttgagatcacaaaagttaataaacaacattattgtaacttcccagaaattatactctatattgatatcataaaatttataatcttctacattattaaaatatcctagtaatataaatgtatcagttatattaatccactatgaggtaaatataaatttaaaaataaatcaaacaatgaaattktaaaagtacttacatgcagtacacaaatatgcaacagctgtatatcattgggagttcatccaatagctgtaagaaacaaagatagataacaggcttgaatatcatggagcagcaattattatgcaaatcaaaataaaacatcaaaatgattaagattttcagctcttagaccaggcacagaggctcacacctgtaatcccagcactctgggaggccaaggttggaagatcgcttga

SEQ ID NO: 401332 - DNA, 603 bp, Homo sapiens
aaaattaaagagagctgtcgacgatggccttgttttgaatatttataaaattcattagatattagagaccttaaaaatcctatagttaaaaaaaaattgtttttgtctttcttaaacctacttgactagggaattccttttacatagtacctccaaggaaggctgttaatgtcacaaagaattagtatttcatgaaagattatttgggaaatgggtataatctttaggcattcatgaaaattaaataagaaataacattcatgagattaccttaaatagggcctggccacacaacaggtgttcaataaataagtagtatgatttgtgggtttgttttttttttcttttttattaaacttttagtwtctagataactgtaaaaatgcatacatttgtaaaaaataatagatcccagtatcctttaccaatctcctccatttgtaacatcttacaaaactatattacaatatcaaaaccaaggcttgatatgaatacagtcaagatacaaaacatttccatcatcagaaggatgtctatgttgcccttttataaccagacctacttccctcctgccccacctcactcctcactccctgtccttaa

SEQ ID NO: 401333 - DNA, 269 bp, Homo sapiens
aagtgacacagccttatttctgatgtgtagaaatttctagtagtctggataaaagatcagaccaaccacaacattgccttaagccaaggcctaatccagatcaaggccccaactcacttcagttctgtgaaggctgacagaagtgaggaagctgcagaagaaaagtttgaagctagcagaggttggttcatgaggcttaaggaaaraagccatctccataacataaaagtgcaaggtgaagctgcagcaagttatccagaagatctagc

SEQ ID NO: 401334 - DNA, 613 bp, Homo sapiens
atgtgtgcctataattaaattgtatatttaagatttgtgcatttcagtgtctgattaccacctcaattttacttcaaaaaaaggaagtgattgaaagaccatttatggtatgtttcagtttgtgttattgtgttttgatcatacatggttccagtactcatcccattcattgtgaatcttcatggttccagtaattctaatattgacccagagtgccagttaattaggcttaaagcaaaagagatgaaatagggaattcagacctgatgagcttgctcagggatttatgtgtggtgaacagcaagtgttttggaatacatggttagtgtatctgttaactgaaccatgaatggaaccatggaatgtgtattgtttatcttttgacattggtgtagggaataaaacaagactccttggttgttggaaccctcacccctacttgcatacggcttttctggattttcccagaaagatatatttttcttcctcaagtacccayagaaatttgtaccatttttctgtgccttgcattttaattatatctgtgtcatatcacccctcctagttggtgtggctaaaaggctaaactctgctcactatctctgccacccat

SEQ ID NO: 401335 - DNA, 365 bp, Homo sapiens
tttttaaaataacttctttttggaccaaaaaaaaaaaaaccccattaatatcataagaccctgcaattgccatagtaatcccttgtctgataatactcattggggtaacaaaaacactagggattgttttatatctcagmatccaagtacagcaactattgatctgaaattctatacttgagatcaatccaactgggtcacctgcaggttatttcatggggatttaacccactgactgcaaagatttaattccctggaaatgacttgtactgaaggcattattagtactgtaaatgtgaactcagtagaaaagcacagccagggagttttatgataggtgatgcaatcttgtggctagaggcctg

SEQ ID NO: 401336 - DNA, 601 bp, Homo sapiens
ggaggaaggcccagtctcatactggactgtctttttgggccagacttccattttacatgtatcagtggacctgagtttagtttctgccactttttattaaattgaaccagtttaactcgagtgcggttttgctaaattttggaatcaaaatttatcacagatattatgtgataaaatgtatcacaaaatatctgtagtgacatccattagttaacatcatttgagttttctattatgcgtttatgggcatttgtctcatagttgggctctttacatccatgaattgtgatagttctttgtattctaacaatgagccactttatgggtttttgtctgtcatttatgtgtgtttttatgttccacttagattttttttcatatctgagaacctcagtttacactgaagcccacctcagataagtctgcctaatactatatctcagtgctttacttttaccagaccttaatgactytctctatattttatacctctcttgaagtgaaaatctaccaatttgttccaaataatgtaattcatctacctttatgtaggtaaaatattctttttattaaagcaggcatgacaggacctaagttataa

SEQ ID NO: 401337 - DNA, 546 bp, Homo sapiens
caacaaatatttattaaacacctacttctactactggtgttacaaccatgactactactttacatagttttgtattgctttaaattgtttttacaaacctcatctcatttactacagtgaaattacctactgctttgaaggagcttagagactcataaagtagattaaatcaattgtcagaaaaactgggctttaaagaacttgtctacgatggtaccggctactgtagtattttagatgattttggtgaactctcagttgattttaggtaaaagattcatctgcacaaatgtatatttatctttcattgtattttttattacaatctaatattttttaaaagctaagaaaatgcaatgaaaataacattttaaaaagtgtcagctatatgaatgatattcyttaatgcatgtcacatttaaaatatgacctatttttaaagtacattgtatatgtcacaagccagatttggtcacaggccatggtttgctaatctctgtcctaaagcaatatggtagttctgaacgtttggctgaagaacatgga

SEQ ID NO: 401338 - DNA, 527 bp, Homo sapiens
ctctaaaacatgggtttctgctttccactacctttctcaaaaatctttaatggagtttccctgcctgcagcataaaatttaacccatctgcagtattgaattctccgcaattaattagttaatttattgaccaagaatttactgagtcccttttctgtggaaagttctgtgataggcaggaggataaraaattactgctttgctttcagggattcacaatactggattaactgtatctgctctcctttgtttcctactgctgtctccaaaatcattgctgccttcaaccccaattcctcactttccacaaaacagcagcctggtctcagggctggagtcagtgcttggctggagccaacattccctggctggctctccaaactccatatactcttaatgcctccttcatgaaggcctcccaaacactgcatttttgtctctcccttctgtagaacatttattgtcttcatcattcattgtgctgctagatcacatgtgctcacatgttcttctctagttcagggaat

SEQ ID NO: 401339 - DNA, 597 bp, Homo sapiens
tgcggagggacttaggggtcatggtaaaaatctgggacttatttctaagggtgatggaaatcatttctttgggttcgagcaggagaatgacactgttrgcatttagagatgatagaaatgtttgtataatgtatctacatacaactttgagaaaatgcactttatataattctgtatctggcatttttcacttctaacaggaataattcctatgacttatatatgtaatatatatcacttcatcattaccttatatggaagagaatgaattgtgccatatgctttcgtggtataagtgagataaataaataaaaccttcccatgtactcttcctccacattttggagtatttttttaggcagtggttccccatttaggagcaatattgtaccctgtcccaagccccacccctccacctatgagagatttggcaatatctggagacagttttgattgtcatgagcaggtggggtgggaaattgctactggtgtctaatgggtagaggcaaaggatcctgctaaacattttgtaatgcacaggcagctctgatgacaaagaattatctagccccaaatggcaataaagctgcagatgaa

SEQ ID NO: 401340 - DNA, 584 bp, Homo sapiens
tctcctgccctctttcctatttagagtgtatacttttatgtttgtttgtttaacccattttattttgtacagcaaaactaatacatggtcttttgggaaaaaaaaagtactaatcagaactattgaaaagtaaaaagtaaaaacctcccctgtttcctagtcaaatttcttcataactataattaacagatgggtgttccttctggatgtttttctactcatctatccatctacctattttatatatatttatatatatatacacacacacttrtatataaataatttttttcctttttagaaaagatgaaataaaaaatacataatgtgctataatttgcttttccccccttaactatatatcacgggcatgtttccaagtcagtacatataaaaatacctcattcttttaaaaaagttgttatatttcatagtatggaaataccttaatttatctaaccatttctctgctggttggtttttaggttgcttcttctaattctttgctattacagacaatgctacagtgaaatccttgcatatgtagatttctaagtttctttatgtcttaagagtaacttttc

SEQ ID NO: 401341 - DNA, 584 bp, Homo sapiens
tctcctgccctctttcctatttagagtgtatacttttatgtttgtttgtttaacccattttattttgtacagcaaaactaatacatggtcttttgggaaaaaaaaagtactaatcagaactattgaaaagtaaaaagtaaaaacctcccctgtttcctagtcaaatttcttcataactataattaacagatgggtgttccttctggatgtttttctactcatctatccatctacctattttatatatatttatatatatatacacacacacttgtatataaataatttttttcctttttagaaaagatgaaataaaaaatacataatgtgctataatttgcttttccccccttaactatatatcacgggcatgtttccaagtcagtacatataaaaatacctcattcttttaaaaaagttgttatatttcatagtatggaaataccttaatttatctaaccatttctctgctggttggtttttaggttgcttcttctaattctttgctattacagacaatgctacagtraaatccttgcatatgtagatttctaagtttctttatgtcttaagagtaacttttc

SEQ ID NO: 401342 - DNA, 453 bp, Homo sapiens
gcaaatctaaaagacattcagaggtcagatttaagggatgagatgagattctgtgtctgattcttcttgtggctatctccccctgcccctcaaaacctaccgagttgagaactgatcttgatgatgaatttgtttttaatagaccctgagcaggaagtgaactgaggtggaaaaaatgttcttattatttgagggagaaccatagccactcttcacctctcagctgggtcagctgatgccagaatgttcttcacgtaccaattaaatgcaatgtgagatatatatatatatagctagatatatagatagatatatagatatagagcacctactgcatgccaagcaaatgtgcaggaccaaaaaaggcaataaaaagttttkattttcattggaatttaagtttcatgtcttgctgctgaatgcctttaacatgcctggcacagtttagatgtt

SEQ ID NO: 401343 - DNA, 632 bp, Homo sapiens
tgaaccaggctccgtgctaagccctgtacctgggatatcttatttaagcctcagaactcttatctccaggtaggtgctaatatcacaccctttttcaagayaagtaaatggaggcctcaggtaaaataacttacccaagggcccagaacaaggaagcagctggctaagatggagccccaagtttatctggctttgtcagatgcctgtactttctaccaccacactaacttgcagaaaggtggagaatgtacaaacagaggaacctccaatgcactttgaaagtacaaggcaggacaagctcaactctgtctgaaagagccagaaaaggcttcctgtgtagatgtttggggtaagtttggcctctaccttcctgtttaaatacacttcacagctggcaagaggtggaagtggaagaaaataaaagccaatgtgcagacattcctagaggacatatttgaattcaacattagaactttctgataattattgtagagtaaaaatagaaggggctatttgggaagtagtaagttctccaccattagaggtatgaagagggaaactgaactatcatgctgaggatacttgagagattgaggcacagggttggtagttggattagatcaggggtaacc

SEQ ID NO: 401344 - DNA, 567 bp, Homo sapiens
gttcatgctttatttatccaacagcctgtgtatctatttttacaaagaaaaatactagaaggttttatcgcaaatcaggaagcactattatctcagcatgctaggattactaatgactttctacctcttcattttgcttaaccatatttttgaaatgtttagccatgcatatgtattacttttatatatacaaagacacgtgtttttaaagagagaatgaaagctcaagatagcacaagagataataaaagaagaactagayatttaatgagttcaagttggattacattctacaatacagaaagaacttgcagatgtgattacaaaaccactgtcagcaatcttagagaaatcagagactgggagcaaggccagggaattggagacaggaatatgttattccagttttcaaacatgagaaaaatgtggattctagaaactataaggcagtgtatctagcattcataatcttgttattatatacattttatgaacatttaggaaaatgagttcagccagagatggatgggagcgtgcagaggttcaagtcatcctgggataacttta

SEQ ID NO: 401345 - DNA, 534 bp, Homo sapiens
ttggtaactttgttgaaaatcaattgaccatagaygtttgggtttatttctgaacacttattttttttccattggcccatatgtctgttgtcctgctgataccatagtgttttgattactgttgctctgtagtaagttttgaaatcagaaaatgtgagttcttcaacttttaaaatactgttttgtctacttggggctcgtcacgtttccatatgaaattgaggattggcatttccattcctgcaagaagaccattggaattctgagagggatgcactgaatctgtaggtcactttggagaatactggtatcttaacaacattgaatcttccaatctattaacatggaacatctttccatttaatcaggtcttctttaatttttttttcagcaatgttttgtagttttatgtatataagtctttcccctccttggataaatgtattcttaagtattttatacttttgcatactatcatcaaaaggattttttttcctttttaaattcttcatttccagcatatagaaacacaac

SEQ ID NO: 401346 - DNA, 534 bp, Homo sapiens
ttggtaactttgttgaaaatcaattgaccatagatgtttgggtttatttctgaacacttattttttttccattggcccatatgtctgttgtcctgctgataccatagtgttttgattactgttgctctgtagtaagttttgaaatcagaaaatgtgagttcttcaacttttaaaatactgttttgtctacttggggctcgtcacgtttccatatgaaattgaggattggcatttccattcctgcaagaagaccattggaattctgagagggatgcactgaatctgtaggtcactttggagaatactggtatcttaacaacattgaatcttccaawctattaacatggaacatctttccatttaatcaggtcttctttaatttttttttcagcaatgttttgtagttttatgtatataagtctttcccctccttggataaatgtattcttaagtattttatacttttgcatactatcatcaaaaggattttttttcctttttaaattcttcatttccagcatatagaaacacaac

SEQ ID NO: 401347 - DNA, 534 bp, Homo sapiens
ttggtaactttgttgaaaatcaattgaccatagatgtttgggtttatttctgaacacttattttttttccattggcccatatgtctgttgtcctgctgataccatagtgttttgattactgttgctctgtagtaagttttgaaatcagaaaatgtgagttcttcaacttttaaaatactgttttgtctacttggggctcgtcacgtttccatatgaaattgaggattggcatttccattcctgcaagaagaccattggaattctgagagggatgcactgaatctgtaggtcactttggagaatactggtatcttaacaacattgaatcttccaatctattaacatggaacatctttccatttaatcaggtcttctttaatttttttttcagcaatgttttgtagttttatgtatataagtctttcmcctccttggataaatgtattcttaagtattttatacttttgcatactatcatcaaaaggattttttttcctttttaaattcttcatttccagcatatagaaacacaac

SEQ ID NO: 401348 - DNA, 379 bp, Homo sapiens
ttaacaacattgaatcttccaatctattaacatggaacatctttccatttaatcaggtcttctttaatttttttttcagcaatgttttgtagttttatgtatataagtctttcccctccttggataaatgtattcttaagtattttatacttttgcataytatcatcaaaaggattttttttcctttttaaattcttcatttccagcatatagaaacacaactgattgttctgtgttaagtatgtaccccacgacttgttcagattttgttctcctgatatctgttagttctttatccctggattctttcagctctttgaaaatattaatgcagctaatttacagtctttttctggtatgttcaatgtttgggtttctt

SEQ ID NO: 401349 - DNA, 504 bp, Homo sapiens
ttattttccaggattatagaaaaatgtattaatattttcactgctttttgtggcttattccaatcagaagagtcatcagtagcatttaaacccaaattaattttgtttccatttatccactcatccaacatttattttttcactcatcttagtgtgtttcaggcactgtgctgaatcatgaagacaccatggtgaataaaacagacattgtctcctccctcacagagcttatactccagtragagagacagagagaaactaagtagataactccacaaatacataattgctaattctcgaaagtgctaccaaggaaactaataaggagataaaataacaaaagggcagagggtgaggttgggaagtctctacaggggtgatagttaagctgaaactcaaaggaacagaagaaaagaaaggccatgaccctatttatttttattctgatttcttctttggtcccaactttttttgagttcaaaccctgtattccataggaaatta

SEQ ID NO: 401350 - DNA, 578 bp, Homo sapiens
gaactgtatatttctatgtaacatcatataccatactaattttcacttgcgttctcaatataatttatctttttgggaattgggcattgaactacattaagtagtttcagtatctccccttgaatatgttgagggaatcttttgaaatcaactttgtactgtcatttcattttcttttcgtatacagctaagatttattgagtgcttactgtgagccagacaatgtgataagtgttttaagtgaatgatctattttaatgctttttaaaaatcaacaytgacttagtaatagtgttttccctttattaaagatgaagaaactgagttcagaaaagtgaactgacttaccaaggttactcaaccagtaagtgttgaaatcataactaaactgtagctgtgtttgaccacacagccttgcttacaactcacaaaagacttgagttccattcccagctttgaactttatagaccaagtaattcttgacctccccaggcatcttcatccttatttataaaatgaaggtaatagtgcctcccttccaaagttggggtactaagacttgtgagaaattacttcc

SEQ ID NO: 401351 - DNA, 583 bp, Homo sapiens
ttgaaggggctcacagtaatctttttgctttatttccaagtttgggataatttttcttagtatctttgcccctactacattgttatttttatcccaattattggaatggtcttcctaattttgaatgggattttttatgacctatgattctcttttctgacaaagcgccaagaacagcaaaatggacgttttttttgttttgagacggagtctcgctctgtcgcccaggctggagtgcagtggcacaatctcagctcactgcaygctccgcctcccaagttcatgccattctcctgcctcagcctcccgagtagctgggactacaggtgcctgccaccacgcccggctaattttttttgtatttttagtagagacagggtttcaccgtgttagccagggtggtcttgatctcctgacctcgtgagccgcccgtcttggcctcccaaagtgctgggattacaggcttgagccaccgcgcccggccagcaaaatggacttaatgcaaatcaacctgcatgggccatgcattctttggaaactctaatgcaatgttcctgaaagcagagagatgccactaagaaat

SEQ ID NO: 401352 - DNA, 539 bp, Homo sapiens
ttaatcagctgtaaaatgaagataataaaagtatctacctcataggattgttgtgaagattaaatgagtgtgtgcttttgcatgaatgtgcacatgagtgtatatgtatataaatgtatayacatgtgtatatgtgtatgcatatttttgtgtaaatatgtgtatgcatatacatatatattcatatatattttagaacatttcttgaaaatacttaatgcttggtaagtgggagctcttactatttgtaagtgtttatttcagggttcttaacaaaacaactatgaggttcttgctgtcctggagtttaccatctagtaggaacagcagagaataaatcattaaacaaataataattacaaaccatgtcaagaattgtaaaggaaatgaatgggctgaaacaacagagaacaacaaaggagaagccacctagaaagcatcttagagggggtgacatttaagctaaaacaagaagagaagaggaggaatgccagcatgcaaagggagaaggaggagactgttccacgcaaaggaaagca

SEQ ID NO: 401353 - DNA, 539 bp, Homo sapiens
ttaatcagctgtaaaatgaagataataaaagtatctacctcataggattgttgtgaagattaaatgagtgtgtgcttttgcatgaatgtgcacatgagtgtatatgtatataaatgtatacacatgtgtatatgtgtatgcatatttttgtgtaaatatgtgtatgcatatacatatatattcatatatattttagaacatttcttgaaaatacttaatgcttggtaagtgggagctcttactatttgtaagtgtttatttcagggttcttaacaaaacaactatgaggytcttgctgtcctggagtttaccatctagtaggaacagcagagaataaatcattaaacaaataataattacaaaccatgtcaagaattgtaaaggaaatgaatgggctgaaacaacagagaacaacaaaggagaagccacctagaaagcatcttagagggggtgacatttaagctaaaacaagaagagaagaggaggaatgccagcatgcaaagggagaaggaggagactgttccacgcaaaggaaagca

SEQ ID NO: 401354 - DNA, 625 bp, Homo sapiens
acaggatcccttagagttcagcctacattccaggagccaaaaagatttgaaaaccagtcactctgtccagccgtttaagggtagcatgaaactttcaagaggtaatgcctcggcagtgagaacttatttcaataaatagaaaaataatttggaagattccagtgaaaatactgtgctgtgtgtcagatgccaaagaagagccgccacaaaattcccactctttctgacagctaacyataatgcaggatttactaatatctactgtagaatgaatgcacaacaaatcttgccatgaaaatgccagaaaattaaagtgatttttggcacgtaagtgtgttataacctaaatggctaaagacatcgggtaaatgcccttgtgtgtttttgtttgggtctaccatctatacagtcagggtgtctcactgtgataagaattctaccccagtgcaattgcagattctactgcagcagaatcagattggtttcttaacaacaacaaaaaccaaaacaataattgtttttagaataacaaatcaatatcatcttaaacacaaattaagccagctctcctgagaacatgagcaatgatatgggaagagattagacagtttgggaaatcatagga

SEQ ID NO: 401355 - DNA, 625 bp, Homo sapiens
acaggatcccttagagttcagcctacattccaggagccaaaaagatttgaaaaccagtcactctgtccagccgtttaagggtagcatgaaactttcaagaggtaatgcctcggcagtgagaacttatttcaataaatagaaaaataatttggaagattccagtgaaaatactgtgctgtgtgtcagatgccaaagaagagccgccacaaaattcccactctttctgacagctaactataatgcaggatttactaatatctactgtagaatgaatgcacaacaaatcttgccatgaaaatgccagaaaattaaagtgatttttggcacgtaagtgtgttataacctaaatggctaaagacatcgggtaaatgcccttgtgtgtttttgtttgggtctaccatctatacagtcagggtgtctcactgtgataagaattctaccccagtgcaattgcagattctactgcagcagaatcagattggtttcttaacaacaacaaaaaccaaaacaataattgyttttagaataacaaatcaatatcatcttaaacacaaattaagccagctctcctgagaacatgagcaatgatatgggaagagattagacagtttgggaaatcatagga

SEQ ID NO: 401356 - DNA, 488 bp, Homo sapiens
aattaagccagctctcctgagaacatgagcaatgatatgggaagagattagacagtttgggaaatcataggacccccccatagactataccatagagtctgatgcaacttgcacatgcagaataactgcaacttgggccaattttcagcttaaggaatttttattrgtaacatcctattgccagataccatggaagactgagctaaacattgtgttacttgcaacctaccatatgttgtgccattagcctgggctccagagttaacccatatattttagtctgttccaattctaggaaattggcagcaatcacaatcagaaggattctgattttcactggaagacagatttgggtgatgccaagtactttttaaatattatcactgccagtggaaggaagaaaattgcagatagagtagaagtttctgctttcatgctgaaaaaacagaacattaagatatgaacaagactagaatagttaggtgcta

SEQ ID NO: 401357 - DNA, 488 bp, Homo sapiens
aattaagccagctctcctgagaacatgagcaatgatatgggaagagattagacagtttgggaaatcataggacccccccatagactataccatagagtctgatgcaacttgcacatgcagaataactgcaacttgggccaattttcagcttaaggaatttttattagtaacatcctattgccagataccatggaagactgagctaaacattgtgttacttgcaacctaccatatgttgtgccattagcctgggctccagagttaacccatatattttagtctgttccaattctaggaaattggsagcaatcacaatcagaaggattctgattttcactggaagacagatttgggtgatgccaagtactttttaaatattatcactgccagtggaaggaagaaaattgcagatagagtagaagtttctgctttcatgctgaaaaaacagaacattaagatatgaacaagactagaatagttaggtgcta

SEQ ID NO: 401358 - DNA, 644 bp, Homo sapiens
ttgaagctgtcaggaacagagtcggctttcaagattggaatgtcaaagtagagtcttcttttcctcagaccagaaggggcttggttgggtaagagtttccagatctaaatggagacaggactgggatataggagcttgtacggataaacaacacaaacaccttgggtaagtgatacaccaagagagatcaaaatagggtaggaacacgatcctaaagctatgtgagatacgaagccaagagaccctgtctacaggctgayatgtattgcaatcagaggccacctacactcaagaaaattctaaatgatgtaataggttgtggacactttcttgtaaaaatgatcgatatttttttcttatagggataaagcttaaaagcatgggatgtatctccattaggaaatatgaagtgagttggtatattacaggtaggttagactgacataattataaaactgggctgattttacataaagaagaacttgattcctaaaggtgttgaaggacaatatggggacagttattgaagtgttcaggtgctgtcctttgtagtctgtagcctattaaaataatacacaactgaacacagacccaaggaaaggggttctactcatcgctcgaatgtaaactctaacaagataagg

SEQ ID NO: 401359 - DNA, 644 bp, Homo sapiens
ttgaagctgtcaggaacagagtcggctttcaagattggaatgtcaaagtagagtcttcttttcctcagaccagaaggggcttggttgggtaagagtttccagatctaaatggagacaggactgggatataggagcttgtacggataaacaacacaaacaccttgggtaagtgatacaccaagagagatcaaaatagggtaggaacacgatcctaaagctatgtgagatacgaagccaagagaccctgtctacaggctgacatgtattgcaaycagaggccacctacactcaagaaaattctaaatgatgtaataggttgtggacactttcttgtaaaaatgatcgatatttttttcttatagggataaagcttaaaagcatgggatgtatctccattaggaaatatgaagtgagttggtatattacaggtaggttagactgacataattataaaactgggctgattttacataaagaagaacttgattcctaaaggtgttgaaggacaatatggggacagttattgaagtgttcaggtgctgtcctttgtagtctgtagcctattaaaataatacacaactgaacacagacccaaggaaaggggttctactcatcgctcgaatgtaaactctaacaagataagg

SEQ ID NO: 401360 - DNA, 458 bp, Homo sapiens
caaaagcaaaaacttttgctactgacaaagcaccaataaaaaataagtcaagtcaaagattgaaagaaaatattcacartgaacatcatagagttgtatctggactataagaagaacttttatgactcaataatataaagacaactacatttttaagaggagcaaaagatttgaacatacacttcacagaagaatataagggtcagtaaacactaaaagatactcaacatcatagtcaccatagaaacgcaattttaaaccacaatgagataccactacacacctactaaaatagctaaaatgtaaaaaggcagatattaccaagatttggagaggttttaggagtactggaaatgtcatacatgggtagtgagagtgtaaaatagtataaacatcttagaacacaatttggtagtttcttataaagttaaagacatgcttatcatataactcaccaa

SEQ ID NO: 401361 - DNA, 458 bp, Homo sapiens
caaaagcaaaaacttttgctactgacaaagcaccaataaaaaataagtcaagtcaaagattgaaagaaaatattcacagtgaacatcatagagttgtatctggactataagaagaacttttatgactcaataatataaagacaactacatttttaagaggagcaaaagatttgaacatacacttcacagaagaatataagggtcagtaaacactaaaagatactcaacatcatagtcaccatagaaacgcaattttaaaccacaatgagataccactacacacctactaaaatagctaaaatgtaaaaaggcagatattaccaagatttggagaggttttaggagtactggaaatgtcatacatgggtagtgagagtgtaaaatagtataaacrtcttagaacacaatttggtagtttcttataaagttaaagacatgcttatcatataactcaccaa

SEQ ID NO: 401362 - DNA, 540 bp, Homo sapiens
ttatggtgttattattgagattcatataatacagcctattcaattggacaattggaatattgttatacacagttaatcaacagactctgtataagtgataaggcctcagagaagaagaatattagagctcaactccagcacgatragtcgttaacacccttgggaatgtatagctgttaaacaaaacaaggagaccatattgccctgtgaattcaaagggatctaatgggaatttcagagtaaatttattttaaggtatgtaggaagcctaatcatttaaagtgctttttctattccgaagcaactcatcccaccacatcttttcatttagtactgatcagtttccttaaaagattagaaggtgaaatgatgcactccaaaaagagtgatccttcttaatattttgcatttaaaactcctttcacagcctcctacgaatctgtattagctctcctgtcacaacttaatgtatatcttttggcctcagaaaatttgggggtgtttaggatgtttgttttacactagtaaaacctatctaaa

SEQ ID NO: 401363 - DNA, 562 bp, Homo sapiens
aacaaggcgacatgctgaaaacatttgcaggcctggaaaataactggtttaataattcaagatgcttttaagttacacaaaactacaaaaaaacaaataaacctccattcccaaagtgatgttatatgtgagccactcgtgaaatgaaagaaacagagcttaaagtctgatgcaaattcagctttgtgaaactcttaaacaactgacaaagaaatttaccaccccacaccacatcccaaatggactaatggaaatattcttttcatgacttcaaaatatttagatgaaaagtgaaatatttagtcaataccctagatgtattttcatctgggtatcatgcatctgagtgtttccaaggggattttccaagtgttcctaggatatacatcagggtgtctcaaccctggcactagtagcactagtaatgctttggactggataattctttgttgagggagttgtctcctgcaargtgggatatttagcagcatttttagtttctactcatgagacaccagtagcactccccaagttgtgacaaccaaaaatgtctccagatatt

SEQ ID NO: 401364 - DNA, 604 bp, Homo sapiens
tgagacaccagtagcactccccaagttgtgacaaccaaaaatgtctccagatattgctaaatgcaaaattgccaggagctaagaatatacttcatttttactcattaaatcccaaatgcatcctatgaaatactgtttctgttatgatcctatttgttccaactttataaataactaaatgtggcttagaatgcattaagtgacctgtttgatttcacagtctactaaagacaggacttcaacagagcctacactctttgtcctaacactgtaggcacwcacaatttgacttaaacaatactgtagatgctctatggtctaagagttccaaacatacagaaataaacactttcttcaaagaatcacagaatgactctattcaaatgtcttctcagttcaaagatgtacattggaagtcaggaaggaccacacagatgtccatgcctggatgtgggtagctgagccatatgtaattgcttcaatttgctgcttattacttgtacattctttcagttacctgagtggatagctaagtctaaagagcccatcagatccatcataaagcagatggtgtaaacactagttgacagtaaacatattgtga

SEQ ID NO: 401365 - DNA, 604 bp, Homo sapiens
tgagacaccagtagcactccccaagttgtgacaaccaaaaatgtctccagatattgctaaatgcaaaattgccaggagctaagaatatacttcatttttactcattaaatcccaaatgcatcctatgaaatactgtttctgttatgatcctatttgttccaactttataaataactaaatgtggcttagaatgcattaagtgacctgtttgatttcacagtctactaaagacaggacttcaacagagcctacactctttgtcctaacactgtaggcactcacaatttgacttaaacaatactgtagatgctctatggtctaagagttccaaacatacagaaataaacactttcttcaaagaatcacagaatgactctattcaaatgtcttctcagttcaaagatgtacattggaagtcaggaaggaccacacagwtgtccatgcctggatgtgggtagctgagccatatgtaattgcttcaatttgctgcttattacttgtacattctttcagttacctgagtggatagctaagtctaaagagcccatcagatccatcataaagcagatggtgtaaacactagttgacagtaaacatattgtga

SEQ ID NO: 401366 - DNA, 543 bp, Homo sapiens
ctacaggttactctttttctttttctttttttgccttaaaggaaattaaccaattttgcatctaaatttgcaaccttgttccaggatttttaactgactaaatatatatcagttttttatatcttcctttaaaccagctttgtcatcatgctgtgtcctctcttccttgctactgagttaaagaaatccttgacatgtgctcaccatatatgtgagaggatcatgtttctaactttttaaaaattatactctgacaaagggattgaacagatgcaccyggtaggaatttgatttaaataggttctaaattcaatattgggcagattgttctcttggcaaaatttatataagtgcttcttggcttttccaacaactcagcagtatggcacagagattgagtccagactttgaaaagctgggtcaaggtccacagaggctactgtcaggatgatacacaagaaagtagtagaaacaaactaaaagagaaagagtggaggggggtggaaacttttctttctctttttttttttttttttttccgag

SEQ ID NO: 401367 - DNA, 558 bp, Homo sapiens
gaaatcaagcacatctgaaccaaaggaactgaccatgatttccacagtatgaaggaggaattgtgcccctaaaagatgccgggcagtcttggttccgaagagaatggaaaaaactattatgtatgaatgtacataacagcattagtcacaatagccaaaaggtaaaacaatgcaaatgtccatcaattgatgaattatggcatatttatacaatggaatattgttcaaccattaaaaggaatgaagtactgaatctataacatgcttgaaccttgaaaacattatgctatatgaaagtagccagtcacaagaggctacgtattctttgtccacttatatgaaatgttagastaggctaatgcatagaaacaggaaatagtgattgcgaggggcttggaggagagggaatgaagagtaatggttaatgggtatggagctgctttttgggatgatgaaaacgttctagaattcaatagtggtgacagttgcacaattcggtgaatattctaaaaaccactgaacctgtatttaaaagggtaaattttagggcatgtgaat

SEQ ID NO: 401368 - DNA, 665 bp, Homo sapiens
ggggaggaagtattgtttcagaatttgaggaaggaaggcagaaatcctccaacttgtctctcccaccttctcatttccttgtcagggttgttttctagctgaactcaacttgaagctagctggccaaggagagcgtgagatgcagtctacaggtgtcagcctcccagggcaagagataggtgaaccattactctagagagagagagagaataactatgttttaaaaacctggagtcaaatatatrgttaattacccattcactcctggtggttgaaattctctttaaataggaggcctgtcatggttctgagttctggcaacctccttcccttcattagtaaatgctgccattaaaacaacaacctaagcaagttggagaataggcaaaggcaacttgagctacttaatttcaaaactccagctttttgaacagcactaaagtctgtttctcatagaaggcaaattagttaatttcaaatgtggtctgtgaatatcaacagaccacccaaatgtttacatattttataccgtccttctagtgggtttcaaaaaaataatttaaaacccagctagtttgagagaaaaagggggcactcatgcatataaattgtctgcattaagggccagttccatattaaaacaacattaattattcatttagtga

SEQ ID NO: 401369 - DNA, 422 bp, Homo sapiens
gaggttattcctctccccaggggaagagccaatgagatgactggaagagaagcattgctcccatacttctccttcctgaggggtggggtgtgaagccctccctctctgctgaacattgagcagaaggaaggcaaggtttactttccccatattctattatttgacatagttggcctccaacaacctgacctctgcaggtccctgtatctacctggagagaaagagctttgtcatattcatcagtatatgcttccattctatagggccacacactgggctttgcatccagytggcactcaagcagtgcttgatgggtttgaagatgagcatctttctctgagatattgtgttcttattggattaaatagtgaggggctgctgcctggtagcaatatactggccctgagtgggaagtgcgaatg

SEQ ID NO: 401370 - DNA, 636 bp, Homo sapiens
ggccacacactgggctttgcatccagctggcactcaagcagtgcttgatgggtttgaagatgagcatctttctctgagatattgtgttcttattggattaaatagtgaggggctgctgcctggtagcaatatactggccctgagtgggaagtgcgaatgaggtccccttggtctaccccctttctctgggccctctggccatctgcatcctgatttacaccctgaaattttaggaaaccggaagctaactaaaactttcttagcgcagggcaaacactttctacattggctttcctcacttgtgcctttttcctgatctagaatgttgggcttctctggcagaagcagaaataaataattgagaaaaagcttattatcagatgaacacattatgcattgatttgttcctgcatgtgtattctcataagttaggtttaattaaatgtacaatatagtggaaggattaagtgaaatatgggatagcaactgggcaggatattaggaggtcacggacattagtaaatcggaagaytgagtagctacacagaaagcattcacaaaatgatactgagtaaagcctagcactgaactgtagtaatagtaatactacaatcctaacatgagtcatacacgttt

SEQ ID NO: 401371 - DNA, 600 bp, Homo sapiens
gagcttcccttgggagcaactgaagtccgtgttgtgactgcattataattcagcatctccttctgcccagttctccttcgtgcaacctcccactgagcttcatctcaagagaattcttcccctcaaccctatgccctccccctgcaaatctccacctcagagccaggaatattttggatttcaaatatttttggattttggaacatttgaattatacttatgggttgagtatccctaatctgaaaatctgaaatccaaaatgctccagtgagcattccctttgagcaccatgctggtgctcacaatgtttcagattttacagcatttcagattttggattttcagattagggatgctccacctatattgttaaacaaaatataacaggattaaaaagaaaaaaaaatctaagcacagtcctatccccttcacaggtttgatttatctgcrttttcttacactctgtatccacgtgtattcatttcttcttccactccttcattctatcagtgtttattaagcactttatatttctcagtcagtggtttaggccaggaatggacaaatattttccataatgggccggatagtaaaaggtgt

SEQ ID NO: 401372 - DNA, 608 bp, Homo sapiens
tactatttaatttctgtttaaataaaaataagaaatcaggtggttataaaacaagagagaaatacatgaatggaactagttgatttaatttagcgttgtgcaaataaaacaaccatatgaaaaaaacagcaaggaaatcatggcctaacacagttccctagggaaaagaagcagaatagacaatggaaatgtrtaccattcattcattttttcattcattaaatcagttctgaatacttagtaaaaggcccagggctaggatcaaaaccaaaataaatagctttcgttgttgattttgaatttccatcttgccaggtacagccttgactcattgttgaaagtagttgtagagccagcaggttggatgccaaggagaagagaagaggtgtgctttatgtatgggttccatggagctccagtggcacaatcagttagtgcacggtccttacatgtatggattctctgcaatttgctacaagaaaaacaaataattactgcatcaaaatttccacattgagtttacctgcctatgtccaagccaacggcaagagaaatgccattcagaaaaagttctccatccagtagcatcattgatcaactcaccaaaa

SEQ ID NO: 401373 - DNA, 608 bp, Homo sapiens
tactatttaatttctgtttaaataaaaataagaaatcaggtggttataaaacaagagagaaatacatgaatggaactagttgatttaatttagcgttgtgcaaataaaacaaccatatgaaaaaaacagcaaggaaatcatggcctaacacagttccctagggaaaagaagcagaatagacaatggaaatgtgtaccattcattcattttttcattcattaaatcagttctgaatacttagtaaaaggcccagggctaggatcaaaaccaaaataaatagctttcgttgttgattttgaatttccatcttgccaggtacagccttgactcattgttgaaagtagttgtagagccagcaggttggatgccaaggagaagagaagaggtgtgctttatgtatgggttccatggagctccastggcacaatcagttagtgcacggtccttacatgtatggattctctgcaatttgctacaagaaaaacaaataattactgcatcaaaatttccacattgagtttacctgcctatgtccaagccaacggcaagagaaatgccattcagaaaaagttctccatccagtagcatcattgatcaactcaccaaaa

SEQ ID NO: 401374 - DNA, 570 bp, Homo sapiens
taaagcatgggcaaaggacctgaatagacatcttcctaaagaagacatgaaaatggccaaaaggtacgtgaaaaggtgctcattatcactaatcatcagggaaatgcaaattaaaaccacaaagaaatatccttttacacctatgagggtaactactatgaaaatgacaggagataacaagtgttggtgagggtgtagagaaaagacagtgcttgtgcactgttggtgggaatgtagattcatgcagccattatggaaaacagtatggacattcttcaaaaaattaaaagtagaactaccatgcaatccagcaatcccagttctggatatatacctccaaaaaatgaaaccaccatctcagaaggcatctgtgcccacatgttcgatgcagcattattcacaatagtaaagacatggaaacaaccagtgtctgccaacagatgaatgaaaaaattgtcayacacacacacacacacacacacacacacacacacacacaatggtatgttattaagccttaaaaaataataagatactgccatttgtgacaacatggatgacctggaagac

SEQ ID NO: 401375 - DNA, 550 bp, Homo sapiens
ttaaagttgtttgttcccttataatcatgtgggaccaccaccacatatccaattcattattgccacatagctgtatttgttgaatgattgattcaatgaatgaatgaatgaattaattaattaaaaaagttgaccttgaggtaatcaaagggataaatattaaatatttttgcccatcactgtagcaaagcttttttttaaaggagtaatatgcaatgagtatagtaaatgcatgtagtgaaaaggactttctcatgcaaattgatgggcatgtgaattgtgaaaagcaattggtcaacaacatgaactgtgatgtgatagaaactttaactgcttacctccttctggtgcatgggtggaccacgctttctcacccaatcccactgccttgaaggcagacagggttgtgtaamaagttccgcctacggggtatgagtgagtatttaggaaccttcctgtgaagatgtaattggagaggaggcttggttgagacggtggaaccaaagcactgaaaagtctggactgctaaggacagcagcttcagagagta

SEQ ID NO: 401376 - DNA, 600 bp, Homo sapiens
tgtaccatagtgtgtttagctatcacctgttgaaggacatctgggttgtttacagtttwtgggctactaccagaaaaacagccatgaacacttgtgtgataaacacctaggagtatttatccagagaaatggaaacatgtttacacaaaaatataggagagatacagaagagatacagttataggagagatacagtttatccacattgacactggcatttggtgttgtcactatttcttattttagccattctgttgcatagtgatatttcattgtgattttaattcacatttcctaatgactaatgatgttgaacatattttcaaatgcgtatttgccatccatatatcctcttcagtaaagtgtttcttcatgtcgttttcacattttctgattgtattgcttttgttttattttttagtgttaggttttgagagatttttatgtatctagctactagcccttcgtcagatatgtggtttgtaaatattttcttgctctctgaagcttgtcttttcactctcataatgggccattttacacagcaagagttttaaattttgatgaaatctaaccattaatattttcttttatgggtca

SEQ ID NO: 401377 - DNA, 614 bp, Homo sapiens
acatctgggttgtttacagtttttgggctactaccagaaaaacagccatgaacacttgtgtgataaacacctaggagtatttatccagagaaatggaaacatgtttacacaaaaatataggagagatacagaagagatacagttataggagagatacagtttatccacattgacactggcatttggtgttgtcactatttcttattttagccattctgttgcatagtgatatttcattgtgattttaattcacatttcctaatgactaatgatgttgaacatattttcaaatgcgtatttgccatccatatatcctcttcagtaaagtgtttcttcatgtcgttttcacattttctgattgtattgcttttgttttattttttagtgttaggttttgagagatttttatgtatctagctactagcccttygtcagatatgtggtttgtaaatattttcttgctctctgaagcttgtcttttcactctcataatgggccattttacacagcaagagttttaaattttgatgaaatctaaccattaatattttcttttatgggtcagacttttgatggcaaatctaagaactttttgcctagccctagatacctat

SEQ ID NO: 401378 - DNA, 571 bp, Homo sapiens
ttttcaatttcataatgaactttaataaaatagatttgttttctgtcagtgaaaatatttaggctaawtttccagaaaaatttcaccttcatttaataactgcattgttgaccaaaacttctgattaccttatttcgcaaatgtaaaaataaaataaaataagaaaagacaaataaaggaaaaagtcaagaaaggtatacttgagaataaggcagaaatcttccagaaaatccagactgttcatacacaatactttaacataaatattaggaaagtaacaatgctagacatttgtttttcctatattaagctatatacactagaaatgagcctaaattattaattagactatattacagacttaaacatataaagagcctcaagttccaatttggcacacatttttattttcaaagactggataaaagaagttaacctaccaattacataacgaacttatagacatattcattcacatggtgtaatattagaaaaaaaaaaaaaaacccaaggagaagccctacctttccattaagtatttccaagccacttattttagagctttaaaagt

SEQ ID NO: 401379 - DNA, 603 bp, Homo sapiens
ttaggccagcttcgtacatggatgtctcagttgtatggtcttcacacatgtccctctcccttctctaggtatatataatgctggacctagcacatattcctggatcttcctcagtggaagaactcctcttgcccctccctgtatcccccttcctgttttattcctcacttgtactgaactttaccagtggcttcagcctagagtttcgattcccttccccatgtagcttaagacttttgtaacatcagagagataaagaaaatgagtctgggtgaatttttacagtgaccaytgttcctctcccactgccagctccacagatgagacttctcataatccattttgatcttctctgtggactccttttggatttccagaaggaaaagcctaaaagagaatgtgaacctctccctgcatctctagccgttatgggcttctcactctcacaccaggtcacagtcagacttcagcaactcattagtctagtttattcttactagtttacatccgggtctgcagcttccattctgtgcaggcacttgccatcttgtttctccctattggcctgctgtcactcttgattttgggttagtcatggtgcca

SEQ ID NO: 401380 - DNA, 603 bp, Homo sapiens
ttaggccagcttcgtacatggatgtctcagttgtatggtcttcacacatgtccctctcccttctctaggtatatataatgctggacctagcacatattcctggatcttcctcagtggaagaactcctcttgcccctccctgtatcccccttcctgttttattcctcacttgtactgaactttaccagtggcttcagcctagagtttcgattcccttccccatgtagcttaagacttttgtaacatcagagagataaagaaaatgagtctgggtgaatttttacagtgaccattgttcctctcccactgccagctccacagrtgagacttctcataatccattttgatcttctctgtggactccttttggatttccagaaggaaaagcctaaaagagaatgtgaacctctccctgcatctctagccgttatgggcttctcactctcacaccaggtcacagtcagacttcagcaactcattagtctagtttattcttactagtttacatccgggtctgcagcttccattctgtgcaggcacttgccatcttgtttctccctattggcctgctgtcactcttgattttgggttagtcatggtgcca

SEQ ID NO: 401381 - DNA, 603 bp, Homo sapiens
ttaggccagcttcgtacatggatgtctcagttgtatggtcttcacacatgtccctctcccttctctaggtatatataatgctggacctagcacatattcctggatcttcctcagtggaagaactcctcttgcccctccctgtatcccccttcctgttttattcctcacttgtactgaactttaccagtggcttcagcctagagtttcgattcccttccccatgtagcttaagacttttgtaacatcagagagataaagaaaatgagtctgggtgaatttttacagtgaccattgttcctctcccactgccagctccacagatgagacttctcataatccattttgatcttctctgtggactccttttggatttccagaaggaaaagcctaaaagagaatgtgaacctctccctgyatctctagccgttatgggcttctcactctcacaccaggtcacagtcagacttcagcaactcattagtctagtttattcttactagtttacatccgggtctgcagcttccattctgtgcaggcacttgccatcttgtttctccctattggcctgctgtcactcttgattttgggttagtcatggtgcca

SEQ ID NO: 401382 - DNA, 594 bp, Homo sapiens
ccaattatcttgatgctcttcatgcctgaccagaatatttgctgatttgtgttgcttgcaatgtgaagcaacttaaatctacattcctaaagaggtcggaatctcctgctaccacgctattgctaggtctgattggcgcaattgtcgaatcacaattatggatatagaaacaatacatggcttcaaagtgactctctcaacttccaggtatactttactgccttcaacagattgtaacaactatttcttcatgattaatcaggactaataagacctttcttggcctgctggtctgctgaaatgaagaacacaaatgatcaggtggcagccttagcttttgttttagtgggatgtttattccrtccattaatagacttgctcctccatgaaaacctgaacctctagtccagtaggcacataactacagaaattatccaaatgggtacttctttgattacctggttctgagacacctgcattctacctaacaaacataactcagtaccatatgatagccataggctcaaagagtcttgaaattgttcagggtttaatcaccaagccaatgtcttagttgtactttaggagtccatg

SEQ ID NO: 401383 - DNA, 637 bp, Homo sapiens
tttctcgtatttgtagttaacaaaataaatattttagaatcatgaggagttgttgaattttatcgaaagtttattctacagctataaaaaatcatataatttttctgcttttctcaattaatgtggtaaagcataggctgagaaatacctttgtatttctgaaacaatctgagtaaatcaactacatttttagtgcagtttgaaattcacagcaaaattgagcagaatacccatatacccactgcccaaacacctgtacaacttttcctactatcagtatccccccatcagagtggtactttttttttttttttacgatcaatacacctacagagacacaccatcatccaaaggccatattttacattaaggttcactcttggggtgtacatattatgagtttggacaaaagtataaaggcatgtattcaacactgtagtgtcatacagagtagtttcactgctgtaaaaatcttctgttctgtgtctgtttatgtcacatttcccactaacctctgtcaaccaacccctgatccttttattgtatccatagttttgcctttttcagaaggtcrtatagttgaaatcatacagtatgtaacttttacaaatttccttctttcacttagtaatgtgca

SEQ ID NO: 401384 - DNA, 472 bp, Homo sapiens
aataatttccactgagttctacccartggaaaaacatgtttactgtgacagtctttcatttttcttaatataaagatgtaaattcagattttcaagtcaagtattctgttattttataattacccttttcaaagaggttctatagataaaatatgtcattattttcaaactaaatttttctattgatggcaggtatgcttccttatatcttttatgtcctgttagaatatactttgtgaaataatccatttacagtagtattgcaagataaattaacctgataaatactgcgtgtaatctaagaaaataaggaaaaccacaacatttaattgggagataatacatacctggaggtaatatgcaattccttatttgggaaaactgagcattataaaggtgttcattactttaaaatataaatttaaaatttagtctacatataatttacagattattggaatggtgccttcaa

SEQ ID NO: 401385 - DNA, 465 bp, Homo sapiens
cctgtatgatttgattgatatatttactttgattttacagattacaaatagatggataaggcctgtttgcctttcttatataatgaaaacttaaaacyttacattggttactaagattgttaatcttattacacatgccttcacctgtttttatacactttattgctgggataggagtacatttttaaaaattaacccttcacaatatattttaatgtttgctcactttgtagaaataaaatcctatttgcatgcaaataaaacattattttaaaaattatatattgtttcaaatgttcaattttaaataaataatatctttacaaaatggttcaataaccacaatagtcaaaagaaacagtaaaataagtccagagtgaaaaaaaatttatttgcttctggtatggttctttcttgacatttaattggatttcttataagggagttttacttttagtatgccca

SEQ ID NO: 401386 - DNA, 601 bp, Homo sapiens
cctataacatcttgtcaggattgaacaattcaggatttcagaattaaacaatatacaagggaaagcaaacatgggcttattgattctgaatttctttttatagcacaaaaatatattggtcaaaatcccttttagaattttaattcatcatggtttttcccatctagctttaccgaacgttggaaaagtcccaggtatgtttgacaatgagataagtttatcaatattaatacattmatagtcaaggtagtgagtctagcagctattgaagcatgacttgcactgtaatcctttatgccaaagaattataccacttaactttactatagaaaactagattttaataagtatcaccttcattagtaaaaataagtaataatttattcttttgacgagaatttgaaatatacaagaccccttgcaagtattgtaacagttaacagttaagccaagattcctgtggagtatattattattattattgctactcagttttccagatgaaagaaaaaggagcaccattgtcacaaattacttggttaatgtcagaattccactaaggtactgatataaaattctagatagcaaaatacacttaaag

SEQ ID NO: 401387 - DNA, 601 bp, Homo sapiens
cctataacatcttgtcaggattgaacaattcaggatttcagaattaaacaatatacaagggaaagcaaacatgggcttattgattctgaatttctttttatagcacaaaaatatattggtcaaaatcccttttagaattttaattcatcatggtttttcccatctagctttaccgaacgttggaaaagtcccaggtatgtttgacaatgagataagtttatcaatattaatacattcatagtcaaggtagtgagtctagcagctattgaagcatgacttgcactgtaatcctttatgccaaagaattataccacttaactttactatagaaaactagattttaataagtatcaccttcattagtaaaaataagtaataatttattctttygacgagaatttgaaatatacaagaccccttgcaagtattgtaacagttaacagttaagccaagattcctgtggagtatattattattattattgctactcagttttccagatgaaagaaaaaggagcaccattgtcacaaattacttggttaatgtcagaattccactaaggtactgatataaaattctagatagcaaaatacacttaaag

SEQ ID NO: 401388 - DNA, 553 bp, Homo sapiens
tttgaactaccaaattatacccaagttgaattaaataatcagaatagtcctataactatgttttaaattcaatttttagtttaatacattccataaaagaaatatctaggcctacttatttttactggaaaattttaccagatatttaagaaagcattaatatcactcctatacaatatcctctggaaaatagcaagtaaaggacacttttcaattcattttatgagaacaatattttattaatcccaaaactayataaaaacaaaaacaccaatttcagatcaatatcctgcattaagacagacataaaaattctcaacaaattattagcaaataaaaaacagcactatatacaaaaaataacccatgacctatgttattccaggaaagcaaaactgattcagtattcaagaataaatcaatgtaactcaccttattaacttgttgaagtagaaaaaactcattatcttatcaaatgatgcaggaaaaaaatgtatttgacaaaatttaacacccaacaaatctttggaattaggaagtatatgtaaaccaa

SEQ ID NO: 401389 - DNA, 609 bp, Homo sapiens
cttgaagctctaagtattctacaaaaagatcagttggggctggacataactgaaaaattgtggaagaatttcaggaaggagatttcacactgtgataatttacatgtttgtagaagacttgaaggagggacaagaaacatgggttacatggtttaaaccatatcacaattagagctttttgatcaaggagaaagctttgtcaagacccttctcctggtattattcaaaagccttatgttgttctgctcagctaattttgattaagctcccaaatataaccctagcaccatccatatatgctttccattaaaatcatattaatgaatctatgaaatagtgatcatagttatgcttgcaaartatcaataggaaggaaataaactaaaggtaatttgtagaatttcatttaaaaaaatagagcatatcttaacaatggactgcatatcccatgccatctatatacttacataaatactatatttatgtgaacttatgtgaaaagaaacaaggatcactgaagtgtgccacctctccttccatgtagataactagaaataatagacaagaaaatgattagagagatgcatatttgtctacaaaatatcaagg

SEQ ID NO: 401390 - DNA, 631 bp, Homo sapiens
atcttgccatgccaggaagtaaggatggacacaatggtggagacattttaaagagatataggatccacctgaaagaactttcagtgtccaaagctggaagaatatgagcaataaaataactcatatagttgtattataatgtaaaatatagaataaatgcacatgatgtggcttggctctgtgtccccacccgaatctcatcttgtaaytcccatgattcccacgtgttgtgggagggacccagtaggagataattgaatcatgggggcaagtctttcctatgctgtcctcgtgatagtgaataagtctcatgaaatctgatggttttaaaaatgggagtttccctgcacaagctctctttaccttctgccatccatgtaagatgtgacttgctccttcttgtcttccaccatgattgtgaggactccccagccatgtggaactgtaaatccattaaacttctctttgtaaatttcccagtctcaggtatgtctttcttattagcatgaaaacagactaataaagcatatgagtccatattaatacaaataaatgactaaataaataaatagaataagaggacataggcaaatccgtgtaaaataattccaaaaatttatataggtactct

SEQ ID NO: 401391 - DNA, 633 bp, Homo sapiens
ggggagaatagcctgacattcttcctgcttcacaatattctggtaatgcatttcattggccaaatcagaagccagagggtaagaccatctagtttataccttaacaaatgtctgccttctgggtagagaccaaggtggagaaagctaagacatggctctacggaggcgaaggaagactgatcataatacttagaaaacagmgaacttttttgtcctcaatctatagtattttaagatcatagttttaaggtgaacaatttctctttatcaggaaaatatagcgattgcaattacatatgcaggcaacatcagagtacctaaatatataaagcaaatattaaatgatctgtagagaaatataggtggcaatacaataatagtaggggacttcaataccccactttcagcaatgactagagcatccagaaaaaaatcaacaaagaaacactggacttcagctacactttagaccaataggatctaacagacatacacagaacatcccatctaacaaatacagaatacacattcttctcaagtacacatggaatgttattcaggataggtaatttagccaaaaaacaagtctttacaaatttatgagaattaaaatgatatcaattatcttttcta

SEQ ID NO: 401392 - DNA, 566 bp, Homo sapiens
cctgaaggctccagctaggatttccagtactatgttgtatatcagcragtaaagtgggcagttttgccttgttccagttcttagagggaatgctttcaacttctctcctctcactttaatgttgaccatgtgtttatcatatatgagtcttattattttgaggtatgttccttccttgcctagtttgtttggggtatttatcatgaagtgatgctagattttattgaaagctttttttgcatttattgagctagtcatagggtttttgtttttaattccatgtggtgaatcacatttactaatttgcatatggtgagtcatccttgcacccttggaataaaacacacttgattgtggtgtattatatttttgatgtgcttttagattcagtatgctagtttcattgaagattatgacatttattttcttcaagaatattggccagaagttttcttttttgttgtgtcctcaactgattttcgtatcaggttaatactggcttcatcgagtcagtctgggaggattctttccccctcaactttttggaaaagtttcagtaggattgc

SEQ ID NO: 401393 - DNA, 566 bp, Homo sapiens
cctgaaggctccagctaggatttccagtactatgttgtatatcagcaagtaaagtgggcagttttgccttgttccagttcttagagggaatgctttcaacttctctcctctcactttaatgttgaccatgtgtttatcatatatgagtcttattattttgaggtatgttccttccttgcctagtttgtttggggtatttatcatgaagtgatgctagattttattgaaagctttttttgcatttattgagctagtcatagggtttttgtttttaattccatgtggtgaatcacatttactaatttgcatatggtgagtcatccttgcacccttggaataaaacacacttgattgtggtgtattatatttttgatgtgcttttagattcagtatgctagtttcattgaagattatgacatttattttcttcaagaatattggccagaagttttcttttttgttgtgtcctcaactgattttcgtatcaggttaatactggcttcatmgagtcagtctgggaggattctttccccctcaactttttggaaaagtttcagtaggattgc

SEQ ID NO: 401394 - DNA, 592 bp, Homo sapiens
tgttctagcaagttttaaacagagaagagtaaatatttaagtaattcttccaaattcattagaaactgtagaggtaaaatcsactagctaaatagattatgccagacaatgtctgacgtaatcataaagttctggcttcaagaagaatgatggttatacatctgaaacatcagctatgcataatggtgcattagtgtagacagagcagtgacagagaataaatcaaaggcacactttcagatgggaataaaattttgtggaataaattcaggtcagatagcttttagcagtttctgttttcagaacttactacctaaaaaatcagtcaaattgtctagaattgcttggcagatgcactgagaataatttccctatctttcaactagcctgatgatttgacattaatgcagaagcaaatttaggtatatcaaaatagttctatctgaaattttatcttttatgtatacatccctgatgaattttagaatctttggaaatataatttttgctgtagtaaaatatggttaatgatcatcattacaaatctagaattaacttgtttccatatgttttttagccaatgatcataaat

SEQ ID NO: 401395 - DNA, 592 bp, Homo sapiens
tgttctagcaagttttaaacagagaagagtaaatatttaagtaattcttccaaattcattagaaactgtagaggtaaaatccactagctaaatagattatgccagacaatgtctgacgtaatcataaagttctggcttcaagaagaatgatggttatacatctgaaacatcagctatgcataatggtgcattagtgtagayagagcagtgacagagaataaatcaaaggcacactttcagatgggaataaaattttgtggaataaattcaggtcagatagcttttagcagtttctgttttcagaacttactacctaaaaaatcagtcaaattgtctagaattgcttggcagatgcactgagaataatttccctatctttcaactagcctgatgatttgacattaatgcagaagcaaatttaggtatatcaaaatagttctatctgaaattttatcttttatgtatacatccctgatgaattttagaatctttggaaatataatttttgctgtagtaaaatatggttaatgatcatcattacaaatctagaattaacttgtttccatatgttttttagccaatgatcataaat

SEQ ID NO: 401396 - DNA, 570 bp, Homo sapiens
gtaagcaaatctgaagagatacgtcattctctgctgttccttaaggagagcaggtctactggttcaataactattaattttgatatttgctattaagaatcccattattggttctcatatgtaatatataatatatgccttcaaatctattatttataaattataatcraaaatttttgttttccatctaccactttttatttctcaaaactcagttgaaaaatttagaggagtgctatttgttgagttttccgtaactgcaacatgccctatagatgaaaaaaaaaataggtttcatattttcccatctctattttaagcacctccttcctctgggtttctatattatggcctatctgctatcatgtaaatccaaagcttgaataaattttatgcattaagaaaataataagcatatatttcctaaagtgcatttatcatgaacaagcatctgttaacccctaaaatatgtgtgccaaacattctaaatggtcttgcataaataacaatgtttgggatgagaaataaacacaaagatgaatgaatagaggaatcaatataggagaaaac

SEQ ID NO: 401397 - DNA, 570 bp, Homo sapiens
gtaagcaaatctgaagagatacgtcattctctgctgttccttaaggagagcaggtctactggttcaataactattaattttgatatttgctattaagaatcccattattggttctcatatgtaatatataatatatgccttcaaatctattatttataaattataatcgaaaatttttgttttccatctaccactttttatttctcaaaactcagttgaaaaatttagaggagtgctatttgttgagttttccgtaactgcaacatgccctatagatgaaaaaaaaaataggtttcatattttcccatctctattttaagcacctccttcctctgggttyctatattatggcctatctgctatcatgtaaatccaaagcttgaataaattttatgcattaagaaaataataagcatatatttcctaaagtgcatttatcatgaacaagcatctgttaacccctaaaatatgtgtgccaaacattctaaatggtcttgcataaataacaatgtttgggatgagaaataaacacaaagatgaatgaatagaggaatcaatataggagaaaac

SEQ ID NO: 401398 - DNA, 570 bp, Homo sapiens
gtaagcaaatctgaagagatacgtcattctctgctgttccttaaggagagcaggtctactggttcaataactattaattttgatatttgctattaagaatcccattattggttctcatatgtaatatataatatatgccttcaaatctattatttataaattataatcgaaaatttttgttttccatctaccactttttatttctcaaaactcagttgaaaaatttagaggagtgctatttgttgagttttccgtaactgcaacatgccctatagatgaaaaaaaaaataggtttcatattttcccatctctattttaagcacctccttcctctgggtttctatattatggcctatctgctatcatgtwaatccaaagcttgaataaattttatgcattaagaaaataataagcatatatttcctaaagtgcatttatcatgaacaagcatctgttaacccctaaaatatgtgtgccaaacattctaaatggtcttgcataaataacaatgtttgggatgagaaataaacacaaagatgaatgaatagaggaatcaatataggagaaaac

SEQ ID NO: 401399 - DNA, 570 bp, Homo sapiens
gtaagcaaatctgaagagatacgtcattctctgctgttccttaaggagagcaggtctactggttcaataactattaattttgatatttgctattaagaatcccattattggttctcatatgtaatatataatatatgccttcaaatctattatttataaattataatcgaaaatttttgttttccatctaccactttttatttctcaaaactcagttgaaaaatttagaggagtgctatttgttgagttttccgtaactgcaacatgccctatagatgaaaaaaaaaataggtttcatattttcccatctctattttaagcacctccttcctctgggtttctatattatggcctatctgctatcatgtaaatccaaagcttgaataaattttatgcattaagaaaataataagcatatatttcctaaagtgcatttatcatgaacaagcatctgttaacccctaaaatatgtgtgccaaacattctaaatggtcttgcataaataacaatgtttgggatgagaaataaacacaaagatgwatgaatagaggaatcaatataggagaaaac

SEQ ID NO: 401400 - DNA, 521 bp, Homo sapiens
ttacactcctgccaacagtgtaagaggttttcattatctccataccctggccaatacttgttagctcttgtctttttgataataactatcttaacaggcatagaggtgatatttcattgtgatttagatttgcatttccttgataattagtgatcttgaacacctttttatatgcctgttggcaatattaatgtcttccttgaaaaaaaagtctattcaggtcctgctatggtttgaactttctccccaaaaatcatgtttaagtttaatggccattgtgatggtattaagaggttggacgattaacatgtgattagatcatgtgagctctgccatcatgaatgggttagcaccattatctagggaataggttagttatagcaggaatgagtttctgattaaaygcataagttgagcctgccttccttcctctctctctctctccccgcacccccgtctttctcactctctctcatgctctttcctttatgtcttctgtcatagcataatgcagcaagaat

SEQ ID NO: 401401 - DNA, 517 bp, Homo sapiens
agttatgtaaatctttcaaattttaacacagtacaagatatgaaaagttcacatttattaatctcattacctatctcattaaaaaagtttcaagtatgtgaaattgccaagcacacagtagaaaatayaagatttccaaaattttaattgttgctcaagagctcacgttgtattaatggtaatgaagactgccatttgcttttcttgaggagtcagtctctcacttgttcatgttcccaaaactatctgacaaatatcaaagtctaaataatcatgttatttttctttcacttatcaagtaaaagttacattccataaaaacaatggctggttcacccagccactcaaaatagtccacaaattattttctctgggccaatcatcataatatgtactcagcattaagttactttaggcatgctccctatttcttcacacagaatattaaacatgcataaatcagtggtagatacctttaaaaataacaattttaaatttatcatttaaggcatttatt

SEQ ID NO: 401402 - DNA, 517 bp, Homo sapiens
agttatgtaaatctttcaaattttaacacagtacaagatatgaaaagttcacatttattaatctcattacctatctcattaaaaaagtttcaagtatgtgaaattgccaagcacacagtagaaaatataagatttccaaaattttaattgttgctcaagagctcacgttgtattaatggtaatgaagactgccatttgcttttcttgaggagtcagtctctcacttgttcatgttcccaaaactatctgacaaatatcaaagtctaaataatcatgttatttttctttcacttatcaagtaaaagttacattccataaaaacaatggctggttcacccagccactcaaaatagtccacaaattattttctctgggmcaatcatcataatatgtactcagcattaagttactttaggcatgctccctatttcttcacacagaatattaaacatgcataaatcagtggtagatacctttaaaaataacaattttaaatttatcatttaaggcatttatt

SEQ ID NO: 401403 - DNA, 547 bp, Homo sapiens
agaaggaaagaaagcatgaaggagaggggggagagggaacaagcaagacaaaagagaatagtaagttcaggtgggttagattcaacttctgtcacataaagtcagcatttttcatctgaaggtggcaatctttaaacaagaatccttgtarcctctatgtggatgtgattaggttacttttttactttaattgactgggagttgtatttttatcaatttatctgctatcacaatatttcctctgcctctttgcattcagtttaaatccatttatttattggggttggacatgtcaactcctatagattaatttgccttcattaaaatggcaattcggagttaattatagtaaaatctcatagagattataagacggaatttagaattatatttgacttaaactatcactgaaaatgaaatctaaatagtttcgctaaatgattacatgggaattatatgcagaagttttgtcgtaactcagtcttagtagtgaggcctattgatacagtgagtgtaatatttgcccaaaaagtttcaacaccatgtt

SEQ ID NO: 401404 - DNA, 509 bp, Homo sapiens
ttaccattactttcagacctttcctgtgtaccagttagaaaatwcgtattttattgcataagagaaaataatcacacatagtttgtacactaattgaaattaaaaattaacagtaaaggatttctttgtcttttgtttttttcactcttagttattactctgaaaaatcttctttcctaagaacactaatataattgcttattttctacctatttgtctatctacatataaatcttcaaaataatagtactaatattattagtattaacatgatcaacaaatgctgtttaatattttatttcagctcctttttaaccttgatatatcccaggaaagatgtacagtcaagtcatacataacaacatctgagaaaaatccccaatatgtctgccagaccagtccatgttacacagcctgagtggctggctgcacttttttatcctttctttcttttaacttttattttagatttcgggggtacatgtgaaggtttgctatataggtaaact

SEQ ID NO: 401405 - DNA, 509 bp, Homo sapiens
ttaccattactttcagacctttcctgtgtaccagttagaaaattygtattttattgcataagagaaaataatcacacatagtttgtacactaattgaaattaaaaattaacagtaaaggatttctttgtcttttgtttttttcactcttagttattactctgaaaaatcttctttcctaagaacactaatataattgcttattttctacctatttgtctatctacatataaatcttcaaaataatagtactaatattattagtattaacatgatcaacaaatgctgtttaatattttatttcagctcctttttaaccttgatatatcccaggaaagatgtacagtcaagtcatacataacaacatctgagaaaaatccccaatatgtctgccagaccagtccatgttacacagcctgagtggctggctgcacttttttatcctttctttcttttaacttttattttagatttcgggggtacatgtgaaggtttgctatataggtaaact

SEQ ID NO: 401406 - DNA, 509 bp, Homo sapiens
ttaccattactttcagacctttcctgtgtaccagttagaaaattcgtattttattgcataagagaaaataatcacacatagtttgtacactaattgaaattaaaaattaacagtaaaggatttctttgtcttttgtttttttcactcttagttattactctgaaaaatcttctttcctaagaacactaatataattgcttattttctacctatttgtctatctacatataaatcttcaaaataatagtactaatattattagtattaacatgatcaacaaatgctgtttaatattttatttcagctcctttttaaccttgatatatcccaggaaagatgtacagtcaagtcatacataacaacatctgagaaaaatccccaayatgtctgccagaccagtccatgttacacagcctgagtggctggctgcacttttttatcctttctttcttttaacttttattttagatttcgggggtacatgtgaaggtttgctatataggtaaact

SEQ ID NO: 401407 - DNA, 615 bp, Homo sapiens
  misc_feature (1)...(615): n = A,T,C or G
tttgacttattctcttcttattttgatgtttttttatttctttctcttgcctgagtgctctagctagcagtggtgagagaagccatccttgtcttgttccagttttcaaggggaatgcttccagattttgcttcaatcagtatgatgttggctgtaggttggtcatagattattattgttattattactcttattattttgaagtatgttctttcattttcttgtttgctaagagtttttaacatgcaascctgctgaattttattgaaagccttttctgcgtctattgagataattgtgtggattttgtttttagttctgtttatgtgatgaaccacgtttattgactttcatatgttgaaccaaccttgcatttcagggatagaagctgacttgatagtggtggatttgctttttgatgtgctgctggtttcaatttgctagttttttgttgaagattactgcattgatgttcatgatagatattggtctaaagttttttttgtttgtttttgtgactctgccaggtcttggtgtcaggataatgctggtcttatagaatgagttggggaggagttcgtcttccattttttggnnnnnnnnnnnnnnnnnnnn

SEQ ID NO: 401408 - DNA, 615 bp, Homo sapiens
  misc_feature (1)...(615): n = A,T,C or G
tttgacttattctcttcttattttgatgtttttttatttctttctcttgcctgagtgctctagctagcagtggtgagagaagccatccttgtcttgttccagttttcaaggggaatgcttccagattttgcttcaatcagtatgatgttggctgtaggttggtcatagattattattgttattattactcttattattttgaagtatgttctttcattttcttgtttgctaagagtttttaacatgcaagcctgctgaattttattgaaarccttttctgcgtctattgagataattgtgtggattttgtttttagttctgtttatgtgatgaaccacgtttattgactttcatatgttgaaccaaccttgcatttcagggatagaagctgacttgatagtggtggatttgctttttgatgtgctgctggtttcaatttgctagttttttgttgaagattactgcattgatgttcatgatagatattggtctaaagttttttttgtttgtttttgtgactctgccaggtcttggtgtcaggataatgctggtcttatagaatgagttggggaggagttcgtcttccattttttggnnnnnnnnnnnnnnnnnnnn

SEQ ID NO: 401409 - DNA, 615 bp, Homo sapiens
  misc_feature (1)...(615): n = A,T,C or G
tttgacttattctcttcttattttgatgtttttttatttctttctcttgcctgagtgctctagctagcagtggtgagagaagccatccttgtcttgttccagttttcaaggggaatgcttccagattttgcttcaatcagtatgatgttggctgtaggttggtcatagattattattgttattattactcttattattttgaagtatgttctttcattttcttgtttgctaagagtttttaacatgcaagcctgctgaattttattgaaagccttttctgcgtctattgagataattgtgtggattttgtttttagttctgtttatgtgatgaaccacgtttattgaytttcatatgttgaaccaaccttgcatttcagggatagaagctgacttgatagtggtggatttgctttttgatgtgctgctggtttcaatttgctagttttttgttgaagattactgcattgatgttcatgatagatattggtctaaagttttttttgtttgtttttgtgactctgccaggtcttggtgtcaggataatgctggtcttatagaatgagttggggaggagttcgtcttccattttttggnnnnnnnnnnnnnnnnnnnn

SEQ ID NO: 401410 - DNA, 615 bp, Homo sapiens
  misc_feature (1)...(615): n = A,T,C or G
tttgacttattctcttcttattttgatgtttttttatttctttctcttgcctgagtgctctagctagcagtggtgagagaagccatccttgtcttgttccagttttcaaggggaatgcttccagattttgcttcaatcagtatgatgttggctgtaggttggtcatagattattattgttattattactcttattattttgaagtatgttctttcattttcttgtttgctaagagtttttaacatgcaagcctgctgaattttattgaaagccttttctgcgtctattgagataattgtgtggattttgtttttagttctgtttatgtgatgaaccacgtttattgactttcatatgttgaaccaaccttgcatttcagggatagaagctgacttgatagtggtggatttgctttttgatgtgctgctggtttcaatttgctagttttttgttgaagattactgcattgatgttcatgatagatattggtctaaagttttttttktttgtttttgtgactctgccaggtcttggtgtcaggataatgctggtcttatagaatgagttggggaggagttcgtcttccattttttggnnnnnnnnnnnnnnnnnnnn

SEQ ID NO: 401411 - DNA, 494 bp, Homo sapiens
tgcaaataatttctcttagtctgtgggttgtctcttcactttgtttatctcttcaaatattttagttaatttaaggcatgggaaggaggttagtcaccttgaatatttggcaactccacttcccaaattaatgcaattaygaaaaagtctcttgattatctttccaggttttcttagagttctctacacaataatatgtaatgatatctctatacaatgatatgtattgtatttaagatatgattgtatgatttgtatatgctccagtcgaatataagatactatggaatatttatccatgataccacttccaattaaaaataacataatattttggctgtcataaatatacatttgtgctataattacaatttccaggactaacactcttagtagtttccatgtgaaatcactgccctcattgatcttgcattctagtggagtgatggaattttctctgaaaatgctattccacctctaccacttgatagctg

SEQ ID NO: 401412 - DNA, 633 bp, Homo sapiens
aatatagtcatagttcaaaaacatgtaaacacaaagtcagcatgattttaagagttagtgaaatataaaaagtaaaaatacacttgccattgacagtaagactattcactattgaacggcacagctgcagtgacattagaaactagaagaggaaatggaactatgtacaatacttcgttctgaatcgaacaacagttacacaatcatcataataaaccaatttttaattttcaacttttaggatcaaactgtgcagaaagcaaaacacagttaactatttgtaacataataggatataaatattatcagtcttaaagtgaaaattaatgtgaggatagaggcactaacatgcttctctcacaaaatagaaattggaaacatgatgtttatagttgttaaaatttggacatttcagtaggttttctaaaaaagtaacaagaaaaattaattgaaagtttttaggatattaaaatkatcaagaattggaataaagaaggtgggaggggagttgagggtagagaaataagttaatagctcatctatcacaagccaaggacaatagaaaaatatctatagtcgatgaatcagaaaataacagtataaacatatgtgttagctatgtgaaggcaagca

SEQ ID NO: 401413 - DNA, 515 bp, Homo sapiens
atgccttttttggctgagagaaaatccttggaagggatacttctatgatacatcagcagctattattctcagcacctggggtaaaaagcatctttactctgaaaggggacttaaacagtacactacaacttccattgcagttcaccctttgtgtctcttagagcctttgtttccaataataaatttacttcttctggaaatagatttttcaggtctcatttcctgagggaaaattattattgagacttacacaagcctttcttccctggcttcagctggtctcagggccacaaatgatatgcataatcttcctcctstgctaccctttctagattcccctcaacttcaactataacttcccctagtcaagagagacaacttttcttctgaaaagctgattctctagggcatgattcccctctccagttaaggctgctatggtcatgtatttattgtcaaaattgggcagatattttgtggttcctcaaaaagctaaacagaattaccatgtgacc

SEQ ID NO: 401414 - DNA, 515 bp, Homo sapiens
atgccttttttggctgagagaaaatccttggaagggatacttctatgatacatcagcagctattattctcagcacctggggtaaaaagcatctttactctgaaaggggacttaaacagtacactacaacttccattgcagttcaccctttgtgtctcttagagcctttgtttccaataataaatttacttcttctggaaatagatttttcaggtctcatttcctgagggaaaattattattgagacttacacaagcctttcttccctggcttcagctggtctcagggccacaaatgatatgcataatcttcctcctgtgctaccctttctagattcccctcaacttcaactataacttcccctagtcaagagagacaasttttcttctgaaaagctgattctctagggcatgattcccctctccagttaaggctgctatggtcatgtatttattgtcaaaattgggcagatattttgtggttcctcaaaaagctaaacagaattaccatgtgacc

SEQ ID NO: 401415 - DNA, 515 bp, Homo sapiens
atgccttttttggctgagagaaaatccttggaagggatacttctatgatacatcagcagctattattctcagcacctggggtaaaaagcatctttactctgaaaggggacttaaacagtacactacaacttccattgcagttcaccctttgtgtctcttagagcctttgtttccaataataaatttacttcttctggaaatagatttttcaggtctcatttcctgagggaaaattattattgagacttacacaagcctttcttccctggcttcagctggtctcagggccacaaatgatatgcataatcttcctcctgtgctaccctttctagattcccctcaacttcaactataacttcccctagtcaagagagacaacttttcttctgaaaagctgattctctagggcatgattcccctctccagttaaggctgctatggtcaygtatttattgtcaaaattgggcagatattttgtggttcctcaaaaagctaaacagaattaccatgtgacc

SEQ ID NO: 401416 - DNA, 578 bp, Homo sapiens
tagcttctgtaacatgcctcaattttccatttcttcatatcctttcctgtagagttccttgttayaatataatgttatgcagaataccatattagtggatcaaacactctatgcactaaaatactagcaaaaactgaggctctgtgggaaaggaaatgctagcaaaaattgaggctctaaagaatgtgtgaactccaatcatgacgaattactgtccttttcagaatgtaggttagtctctgtagttaatttggcattaagtatctaagaggtatattcctatatcagaaatttagtattgatttctattgctagcaagatgaataattagcagcagcattaactaggtcattcttggtgagtagaaacccaagctattcatgcacccattgtgctagctcaggaagggttgctgatagagtctgaacattaactggctggagcattctatttattaatgcctctttcatggtgagcatctctggtagagatttgtgatggctaattttatttgtcaatttggctgggccacagtactcagatatgtggtcaaatatttttctgatgtttctgtgaga

SEQ ID NO: 401417 - DNA, 578 bp, Homo sapiens
tagcttctgtaacatgcctcaattttccatttcttcatatcctttcctgtagagttccttgttacaatataatgttatgcagaataccatattagtggatcaaacactctatgcactaaaatactagcaaaaactgaggctctgtgggaaaggaaatgctagcaaaaattgaggctctaaagaatgtgtgaactccaatcatgacgaattacygtccttttcagaatgtaggttagtctctgtagttaatttggcattaagtatctaagaggtatattcctatatcagaaatttagtattgatttctattgctagcaagatgaataattagcagcagcattaactaggtcattcttggtgagtagaaacccaagctattcatgcacccattgtgctagctcaggaagggttgctgatagagtctgaacattaactggctggagcattctatttattaatgcctctttcatggtgagcatctctggtagagatttgtgatggctaattttatttgtcaatttggctgggccacagtactcagatatgtggtcaaatatttttctgatgtttctgtgaga

SEQ ID NO: 401418 - DNA, 578 bp, Homo sapiens
tagcttctgtaacatgcctcaattttccatttcttcatatcctttcctgtagagttccttgttacaatataatgttatgcagaataccatattagtggatcaaacactctatgcactaaaatactagcaaaaactgaggctctgtgggaaaggaaatgctagcaaaaattgaggctctaaagaatgtgtgaactccaatcatgacgaattactgtccttttcagaatgtaggttagtctctgtagttaatttggcattaagtatctaagaggtatattcctatatcagaaatttagtattgatttctattgctagcaagatgaataattagcagcagcattaactaggtcattcttggtgagtagaaacccaagctattcatgcacccattgtgctagctcaggaagggttgctgatagagtctgaacattaactggctggagcattctatttattaatgcctctttcatggtgagcatctctggtagagatttgtgatggctaattttatttgtcaatttkgctgggccacagtactcagatatgtggtcaaatatttttctgatgtttctgtgaga

SEQ ID NO: 401419 - DNA, 563 bp, Homo sapiens
gtttgtgtctagattccatgtttttttgcatataagtatccagtttttccagcaccatttgttgaaaaacctatctttgttccattgttctacctgtgttcccttgtctcagatcagtggatttgatctgaagtgtagaaatattgaaatatttatatgtctattggtctatttgtctattcttttccaataccacactgtcttggatactgttgctttgtaataattcttgatgtttggtggtgacaatcctcagactttattgtctttcagtattgagtaggccacttggggtcttttgcctcttcatataaactttagaatcaatttgtcaacatccaacaagtaacttgctaaaattttgtttgcaatggtatgaaatgtttttcatttatttagctcttgtttgatatgttttatcagaattttatagtttcactcctacagatcttagacatattttgttggatatatacctaagtattttagtttttcagkgctaatgtaaattataatgtatttttaatttcaaattccactggctcatagttagtatctagaaa

SEQ ID NO: 401420 - DNA, 617 bp, Homo sapiens
gtgggatgtaaagattaaataagttaaagtatgttaaaatcttacaaatttgcttataacataaaaagagatgcagaaaaactagctgctttaccaccaccattactaccatcactgttactaccactaccgctgctctaatgctactattatatagccaagtgtaattttaaaaagctctggaggtagaatcaggacaactaaaactgccytaactagatgcgtaacttcaggtaagtcaaagaattcttagcctccaggataaactgggtgacataaaatttttttttcagccctacaattatataaatatatatgagaaattatgattatgcaataattagaaaaaagatttattgacataagaagaaaattatagtgcaaagagtatgtttgttactaaaatttgaatttcaattagttatgtagagtgcaaagagagataaataactaatgacctaagaggttagttattaatatacctaaaaattatagaaaatacctcagaaacttccttgagttgtccttcaataactataaattgttttctatgatttaatggtgtttaataattaggcccttaattatttgacctacctctctctttaggcttgttt

SEQ ID NO: 401421 - DNA, 617 bp, Homo sapiens
gtgggatgtaaagattaaataagttaaagtatgttaaaatcttacaaatttgcttataacataaaaagagatgcagaaaaactagctgctttaccaccaccattactaccatcactgttactaccactaccgctgctctaatgctactattatatagccaagtgtaattttaaaaagctctggaggtagaatcaggacaactaaaactgccctaactagatgcgtaacttcaggtaagtcaaagaattcttagcctccaggataaactgggtgacataaaatttttttttcagccctacaattatataaatatatatgagaaattatgattatgcaataattagaaaaaagatwtattgacataagaagaaaattatagtgcaaagagtatgtttgttactaaaatttgaatttcaattagttatgtagagtgcaaagagagataaataactaatgacctaagaggttagttattaatatacctaaaaattatagaaaatacctcagaaacttccttgagttgtccttcaataactataaattgttttctatgatttaatggtgtttaataattaggcccttaattatttgacctacctctctctttaggcttgttt

SEQ ID NO: 401422 - DNA, 617 bp, Homo sapiens
gtgggatgtaaagattaaataagttaaagtatgttaaaatcttacaaatttgcttataacataaaaagagatgcagaaaaactagctgctttaccaccaccattactaccatcactgttactaccactaccgctgctctaatgctactattatatagccaagtgtaattttaaaaagctctggaggtagaatcaggacaactaaaactgccctaactagatgcgtaacttcaggtaagtcaaagaattcttagcctccaggataaactgggtgacataaaatttttttttcagccctacaattatataaatatatatgagaaattatgattatgcaataattagaaaaaagatttattgacataagaagaaaattatagtgcaaagagtaygtttgttactaaaatttgaatttcaattagttatgtagagtgcaaagagagataaataactaatgacctaagaggttagttattaatatacctaaaaattatagaaaatacctcagaaacttccttgagttgtccttcaataactataaattgttttctatgatttaatggtgtttaataattaggcccttaattatttgacctacctctctctttaggcttgttt

SEQ ID NO: 401423 - DNA, 634 bp, Homo sapiens
gtgtgacttacttctaacaaaaataatatggcaaagataactggatgtgtttctttatccttcttatcttaatagaattactctagatattctctctgctggattgctgaagttagcaatcatgttgggaaatcctccaaagccaggaactgtagattattctaagaatgacaagcagcctctagtaactttaggagatctctaggagctcacatggtctacagcagaagtcaggaaacaatcaatggtccttactctcacagccgcaaggaaatacattctgtcaacaatctgattaagcttggaaatggattctttctgagtaaagtctccaaatgagaatgcagtccagccaggaccttgattgcagtattgcagaggtcctagttaagctgtctgtaagactcctgactcataraatctgtgggttcataaatgtgtgttgtttgagctacaaaattagtggtagtttttaacatagaaaattcatagacacaaaaagcaggttgctttactacatcctaatctacatcagaatttagcatccagtaaccacccagctgttcaagtcatcattgtttgtaacttgaacatctaatccattaaaaagaatttgtcagttctacctatagca

SEQ ID NO: 401424 - DNA, 534 bp, Homo sapiens
ataattattataaacatgtatatacaaggtaatttattatttttcacttgaaccatttatgtgtaaatatgtttttatatatttatgcccaaatatatataaaccactaacttgctctcatttttatgtatattatatatatcatatatcatatgtattatatacatcatatgtactgtatatatgtacagatgtacagtttataatcccctgcctgtttaacatgttaacataaatatgcttgtttttaaattattttaatatttgcataatattcaaccaaatggtacatcaaaattaatcatctgtattttctgtcytctttgtatattatgcagttccttattcttttcatttgaatttttcctagcttccaagacacatattcaagttaatctcttctgtaaatgattaaattttccatgtttccaaacctatacttttctgtctttaatataagttttaaaaatatgattgcattttgtttactttacaatcttatatggttagtttgcacagtcctctcttcttgag

SEQ ID NO: 401425 - DNA, 534 bp, Homo sapiens
ataattattataaacatgtatatacaaggtaatttattatttttcacttgaaccatttatgtgtaaatatgtttttatatatttatgcccaaatatatataaaccactaacttgctctcatttttatgtatattatatatatcatatatcatatgtattatatacatcatatgtactgtatatatgtacagatgtacagtttataatcccctgcctgtttaacatgttaacataaatatgcttgtttttaaattattttaatatttgcataatattcaaccaaatggtacatcaaaattaatcatctgtattttctgtcctctttgtatattatgcagttccttattcttttcatttgaatttttcctagcttccaagacacatattcaagttaatctcttctgtaaatgattaaattttccatgtttccaaacctatacttttctgtctttaatataagttttaaaaatatgattgcattttgtttactttacaatcttatatgrttagtttgcacagtcctctcttcttgag

SEQ ID NO: 401426 - DNA, 621 bp, Homo sapiens
acttaaacaagaatctaaaatggtcaaagggagcaccttccaatgtagctaagtaagctcctaccagagtcctctcttctgcaggtaacaaatgttaactasaaaaagagtggaataacaataaattgagggcattgggtagtaaaagctaaagtaggtcaattctagaagaagggttgatacccataaaaagggaatgacatgagtgagctccattttgatggctttttgccttaagcattccaaaggtggcactatatagaacagcaaaaattctgatagaaagcccacagatttttcagcttaatggaatagagggcagatttcaggtcaaccagagccacaggcaaatgaaagcagtggaaggagccgcacatgataaacactgctcaaatcttaggctgattcttgaatcatgcttatgtgagacagactcagctaagggaaaattagcctacctgagatgtgagctgttgcccaagaaatggtgttttctgagtctgaccaaattattaataattgcttgctcctataaaagattcagtgtttttagaataatataaaagaatccaaaatctacacaatataatatttacaatgcccaggattaaatccaagatt

SEQ ID NO: 401427 - DNA, 621 bp, Homo sapiens
acttaaacaagaatctaaaatggtcaaagggagcaccttccaatgtagctaagtaagctcctaccagagtcctctcttctgcaggtaacaaatgttaactacaaaaagagtggaataacaataaattgagggcattgggtagtaaaagctaaagtaggtcaattctagaagaagggttgatacccataaaaagggartgacatgagtgagctccattttgatggctttttgccttaagcattccaaaggtggcactatatagaacagcaaaaattctgatagaaagcccacagatttttcagcttaatggaatagagggcagatttcaggtcaaccagagccacaggcaaatgaaagcagtggaaggagccgcacatgataaacactgctcaaatcttaggctgattcttgaatcatgcttatgtgagacagactcagctaagggaaaattagcctacctgagatgtgagctgttgcccaagaaatggtgttttctgagtctgaccaaattattaataattgcttgctcctataaaagattcagtgtttttagaataatataaaagaatccaaaatctacacaatataatatttacaatgcccaggattaaatccaagatt

SEQ ID NO: 401428 - DNA, 621 bp, Homo sapiens
acttaaacaagaatctaaaatggtcaaagggagcaccttccaatgtagctaagtaagctcctaccagagtcctctcttctgcaggtaacaaatgttaactacaaaaagagtggaataacaataaattgagggcattgggtagtaaaagctaaagtaggtcaattctagaagaagggttgatacccataaaaagggaatgacatgagtgagctccattttgatggctttttgccttaagcattccaaaggtggcactatatagaacagcaaaaattctgatagaaagcccacagatttttcagcttaatggaatasagggcagatttcaggtcaaccagagccacaggcaaatgaaagcagtggaaggagccgcacatgataaacactgctcaaatcttaggctgattcttgaatcatgcttatgtgagacagactcagctaagggaaaattagcctacctgagatgtgagctgttgcccaagaaatggtgttttctgagtctgaccaaattattaataattgcttgctcctataaaagattcagtgtttttagaataatataaaagaatccaaaatctacacaatataatatttacaatgcccaggattaaatccaagatt

SEQ ID NO: 401429 - DNA, 615 bp, Homo sapiens
aagaatacagtctgtaaaaggggaaaaagaagaataacttcacaatatgagaaacctggcaaatgatacctcaaccaggtgatcaaggtcaacataagtcatcttaatagtatatacacttgatawgttgtaatggggaatggtcttcctctcaaaagcccattacttgagtctaattataagaaaaacacacaaattccaatgaaggacatcctagaaaatacctgaccaatactcaacaatgtcaatatcaaacataaaaaaggtctgataaactgtcacagccaagatcctaagacatgagctctaaatgtagactggaattaaggataggattctggaacagatagggaactttgggtaacaatgaagaagatatgctcaggtttgccttttctgtgacatcttccatgactgtcccaaggtaaaggaccatttttctctctgtgaccaagaatccctgtcatcattcagcagtgatcatatgccatgctgcatgatttatcatcagtcaattgttctatcctgcaattaaattacttggtagagagctgtggataagttacgtagctctttgtacttcaggtgtttagcacagttccttgaataagggaa

SEQ ID NO: 401430 - DNA, 612 bp, Homo sapiens
ccatataaatcaactaatttatagttgtaatcccagagtcataataaatgatctaacttatattcagcaaaggactgatccaaacagctaaaaaatcgggttgcataatatggtttgagaaatttttaatggatcagaatctgtcctttattagtttattgagaataaattagttaagtttcaatttgtttcacattaaattaatgcccttctctataacttgaaagggacagcgaggtaagttaaaaatttatatttcttaaaaatagatccacaaaacagcctttaagaagaatgaatttggtgagacagaaaaatatgaaaatgttaaggaagtgttctaaaatgtctgacttcaccatagcagcttaagctctgaaattatctggttcattaaaaaattaagtctttttaatgaaagcygaagactaaacaaataatcttttctttttgtctttattcatttacctggcataaaattgaaaacaaaaggaactgctttgattaatgacctctgctaatccttttagtagaatacatgatgatatttcttaaattttatatcactaacaaattaagtttgtgttaataataaatgtcactcacatgaaa

SEQ ID NO: 401431 - DNA, 572 bp, Homo sapiens
agggtttctggaggatattcttaattctaatccctactagaaatgcatacatatttcagccaaatatttttactaagatctttttttgctaaaatcccaaatatcatcttcaayaagtgtttttataaaacaaagttttaaaaaattccttgtctctatcattattttgaatgttttgccaaatgtagatgctgcaacatataagacctattaaaatttcattcaattacagaatataactttaaccaattaaaaatgttatctaaatcaaaagctattactatttgtcacaagtcaatttgttctaaaacacaattataacactcaaaaaattattttttatgctgtttgaatgctaattattgagtttattccatttctaccttactcttgtgggattaaatttcagtttcttcctgtatgcaaattagttttaaataactatatttcactataaactatgcaggtttttagattattgtgtttcatttattatttttattaagcatttctaactgaatttgaactgaagagaagcaaaattcatatagctcatttataaaaaagattca

SEQ ID NO: 401432 - DNA, 447 bp, Homo sapiens
tttgaactgaagagaagcaaaattcatatagctcatttataaaaaagattcagtatcatttttagagtgacttacaaagcaatcctttgacagctcaaatatttctaaaatctaattaataataagcagcaaagaaagagttcatacctccatggttaaggaggcttttgttttttgtttgtgttcaatgtcaatcttgaytcaaatttttcatagttcagttactcttaatgtgtatataaaaacattttcaatttatcaatgatagcttctactttgatccataaaaagtattaatgcaacctttttggatctgatatgaattatgtgttaaaatttgtgaaccttaagtttttatactacgaaaattacttttactaggacaacgaaagttattttttatgagcactacaaaataaataagttaatctttaatattgaatttat

SEQ ID NO: 401433 - DNA, 393 bp, Homo sapiens
tttactacattcttatcaggtacaatgcttcaaactttgaacttttgtttcattaaattttctcagcagtcctgtaaaggggttatgaaaaaataacaattggttgaacattaatgctgaccttaaattactgttatggccccactagtgtttacagcaaatatttattctattaactattagtgtgcctatttttaaattgaggaagctaaggctaagcggtgtygagtaacttgacccaaattatacagtttgtaagtgaaagtgttagaaagcatttgatagcagttctgcctgactagcaccattgtattttctaagaatgccccattacatttttggaaaaataattccatgaatatgcaatctgcaaggtcattttattttatttta

SEQ ID NO: 401434 - DNA, 604 bp, Homo sapiens
tgatactatatgtagttaatttatttttaacatgttctycgtccttattatattagtttgataattatcttaagcccctcaactttgtacaacacttaaaatttaaggcatagagcaaattaaagaaattgtattggtgtcaggtctctataaagaactttcaaggggagaaaatttatttgtggaatacattgtctgaggaaatcaaagaatattttcaaaaataatgaaagctccagaattattattctttttgcctctcaaacatagaatagaatagaaagttatacaatagaaagtgaatagaagagagactaaagggaaggaagagttgaaggaaggatcaaaaagagatgataaggcaagaggacagatgagaaaagagaacaagatcatggtctctgaatcttcaacactgaagaacggtgaccttaagcatgcttcctgtccactgttaagacttaaccaaatattgagcccactcctatcactcttgccctgcagaaatcatagatatatttggacgtagcatacagtaaaagaaagaagcaacaaaaattaacctatactcagcagtaaggaaactatacttccagacaatcag

SEQ ID NO: 401435 - DNA, 604 bp, Homo sapiens
tgatactatatgtagttaatttatttttaacatgttcttcgtccttattatattagtttgataattatcttaagcccctcaactttgtacaacacttaaaatttaaggcatagagcaaattaaagaaattgtattggtgtcaggtctctataaagaactttcaaggggagaaaatttatttgtggaatacattgtctgaggaaatcaaagaatattttcaaaaayaatgaaagctccagaattattattctttttgcctctcaaacatagaatagaatagaaagttatacaatagaaagtgaatagaagagagactaaagggaaggaagagttgaaggaaggatcaaaaagagatgataaggcaagaggacagatgagaaaagagaacaagatcatggtctctgaatcttcaacactgaagaacggtgaccttaagcatgcttcctgtccactgttaagacttaaccaaatattgagcccactcctatcactcttgccctgcagaaatcatagatatatttggacgtagcatacagtaaaagaaagaagcaacaaaaattaacctatactcagcagtaaggaaactatacttccagacaatcag

SEQ ID NO: 401436 - DNA, 604 bp, Homo sapiens
tgatactatatgtagttaatttatttttaacatgttcttcgtccttattatattagtttgataattatcttaagcccctcaactttgtacaacacttaaaatttaaggcatagagcaaattaaagaaattgtattggtgtcaggtctctataaagaactttcaaggggagaaaatttatttgtggaatacattgtctgaggaaatcaaagaatattttcaaaaataatgaargctccagaattattattctttttgcctctcaaacatagaatagaatagaaagttatacaatagaaagtgaatagaagagagactaaagggaaggaagagttgaaggaaggatcaaaaagagatgataaggcaagaggacagatgagaaaagagaacaagatcatggtctctgaatcttcaacactgaagaacggtgaccttaagcatgcttcctgtccactgttaagacttaaccaaatattgagcccactcctatcactcttgccctgcagaaatcatagatatatttggacgtagcatacagtaaaagaaagaagcaacaaaaattaacctatactcagcagtaaggaaactatacttccagacaatcag

SEQ ID NO: 401437 - DNA, 572 bp, Homo sapiens
catggtatatatataccacattttctttatccacaatcaaatactacatattctcacttataagtgggawctaaatgatgagaacgaatggacacatacaatggaacaacacacactggagcctttcagagggtggagggtggagggagaggatcagaaaaaaataactaatgggcactaggcttaatacctgggtgatgaaataatctgtacaacaaacccttatgacagaagtttacctatgtaacaaacctatacttgtaattctgaatttaaaataaaagttaaaaataataacacacacacaaactctttgatgatggcttctgaaatattttacctaaaatgactacctgatagttaggtcttacaatccctttgtaatttatcttgggtaactatcttaatccattttgtatttctgtaacaaaacttctgatactgggtaatttataaagaaaataagtttatatggctcataattctggagactgagaggttcaagaatcatggtgctggcacctcattgacctctggtaagggccacatgctgtttcacaacatgacaaagc

SEQ ID NO: 401438 - DNA, 480 bp, Homo sapiens
ttttccctagattggtacatgttataaagaaaaataatattagcattttctgaaataatacaaaatagcaaatggatcttaacctctataatggttttcctatcaataaaggtaaagtgcagaaaataatcaaattataaaataaatacttcagtggagaatctgggccrgaatattgttggcacaaattaagggtggttttcttcttctaatatgtttaatgtctctgtaattgttcagtccaatagttcacttaggatgcaatctttatgatgaaatatgaatgatcttgtttctcatatctttatgtgtaagtaggggtctttaactgagtggcttaatgtctttaatattttttgatattaccacgaagaaatattcaaaataagaatcagcttggaaaacgcactgtgaacctttccaaggtggatagtcacacaggtaatcaatttgataatcaaaaatcaatttgaaagtcac

SEQ ID NO: 401439 - DNA, 350 bp, Homo sapiens
gaaggaaaaatatgttggttttggtatttttcaaaatayacattttttaaaagtaaaagtctgacgttactgacaagttatagggaagatgctgaacaaataagcttgatctatcgtttgaatgcaaaatggcacagctactttggaagacagtttggcagtttctttcaaaggtttacataggttggtcacggtggctcaagcttgtactctcagcactttggaaggccaagacgagtggatcagttgaggccaggagtttgagaccaacctggccaacatgatgaaaccctgtctcttcaaaaaataccaaaataagccaggcgtggtggcgcatgtctgtggagggt

SEQ ID NO: 401440 - DNA, 535 bp, Homo sapiens
gtttatttcaggtctgttttattgtaattctgagggactcattccaaattgccaggagatttgatgagctagttcttagaataaaaaatagttagtattgtccaaagcaggatccaaaagttaaggccactctggaagattttagctctgggatgaattgatgcttagtcttstttctgctagatggatgtctgaggctctttatattttaataaaatagtttcaaattattttcccagctccatcaggattgattttatttcaatgggttggcaatagattataaaatatcttccttctgtttgtataactgaatgttttgtaaactcttagtgttaatttaccagttattacaaatctttcagttatcaagtaagttattacaaaaatcgtaataaattgtctgtgaattaaatgtaacaagttgtaagagtttgttgagtattgcatgtttgtaccctgctgaaaagtgaagctgctctagaaactataattcttggcaatgatgcaaaattcgtaaggatgcaaaattcgt

SEQ ID NO: 401441 - DNA, 580 bp, Homo sapiens
aactatagaaagacttgattgagctgaggccctgtattttggtgtacatgatctagacagatatttaagttcttaagactttagcatgtaaattctttgtaaaaagcaatattttgcaatttaaaaacaatgcatcattagtcattagaaaaatgcaaatcaaaacgaaaatgagatactatttaatactgaatggctatgatcaaaaagccataataacaaatgttgacgaggatgtagaaaaattggaactaacactgctggtgggaatttaaaatggtacattcaactttggaatgcagctttagaaawgctttggaatgccatttagaatgacaatttctcaaaaggttaaaaatagaattaccatattacctaaaaatttcactcctggatatatacctgatatttgaaaagttatgtccacactgaaaacttctacctgaatcttgatgacagcattattcataggtgcccaaaagtggaaacaacccaaatgcccattagctgccaaacggctaaacaaaaatgtagtatatccatacaatgaagtattattcagcaataaaaggtgttagat

SEQ ID NO: 401442 - DNA, 613 bp, Homo sapiens
gtgacaaatgagtgtatattgtattcttgaaaaatgctaagggattggacacgaagtaattttttgccataaaaatgataactatgtgagataatgcatatgagaattatctaggtttagtcattctgcaatgactwtatacttcaaaacatcatgtcatactaggtgaatttatctgtcaatttaaaacaaaaaaaaaattggaattgctgtataacttggattagacccagaactatagtataaggaagttctgactctgcctgaaggcatgcctcattgggacctgtgggcagaagtaggattgccaaacgcctacacatgagtcttaattaagtgtcttacttagaaagtaacaccctctacccaactactttttaaagtatataaaaatgttcttgattttgtaagtgcagcatacctattttaggttttcttgtcaggatttacaatcatgtactccttcagcattatcaaacacctgattgtgaaacatagggttcatggaggattgtctgaagggcatggtcctcagatattcagctatgcctacatgtccttaacctagaatcaatgattttttatgatgtacatgtgtagttttcagacacac

SEQ ID NO: 401443 - DNA, 622 bp, Homo sapiens
ggcatggtcttcagattttcagctatgcctaggtttctttaacctagaatcaatggtttttagaatgtacttgagtaggtttcagatggcccttcaagcccctggatagggcttgatacactgatgaaagcatgcatgccaaatattttaaatatttcaagaaaagagtatataacttcaattagattatcatttgaaagattactacatgttattcacctgctaacgcttttcaaatctctgtatctatggcctagatatttcaaaaatcattattcgctgttctgtaatcaagtaattgatgaaaagaataggaacagttgagtactaagattaaagaccagtagttccctatattcacaacagaatcacttgggtgcttttttttaaaagatacaccatcacattgtgtcctttgcatatggaatgaaaaaagtatggtgaaaactgktaactgtatgtttcagaaaacgtttcatgttgttcttatggactaagaaacattgattcatgccatgaacctaagaacaaaatggtaccttgtcaatattcagaaaagggacagccaataatattatttatattatcatttagtggtagccatcaaaacccttgatgtgca

SEQ ID NO: 401444 - DNA, 458 bp, Homo sapiens
aagtgccttggtctgggacaatgaagctcagcaatcactgaaggacaggtcagcaaatcatcatctgtttgcatatttataaggggtcacaaagacataagttatttcaaacccttactgggacttaaaattaccactttaaaatagggaagacaaatggactaacttgaaaatgaattggtaatgacatactacagtggaacacaagtttttaaaaataatccctaatattattttcattgtgctgaattttctcgaakcatctaatgattattaattataagacagtcaacataatacaaatgtctaacatgattaaatgttatttatgaaaaatatgccatgtcattggcatttttaaacaagctataatgaaaagttataaatatattttcaaataatacatacatgatccttttaagtaaataatctctcagaccaggtaaaggggtagatta

SEQ ID NO: 401445 - DNA, 590 bp, Homo sapiens
aaacatatctcaaattctaatcatggtcaggcacacacwtctttagaaataaacagaaaatcagtaaattattacgttgaattctgttttcttttgtgttttgcctattgttaaaaaatctacaattgacatgtattaccattgcagatgaacataaatgttatatttcaaaaaacattccccttattcttttaatagatttaattcttctaattaaaaattttaaatatactaacagtttaaaaaaatttctttcctttaaaaataattgagtggctactgggttttttcacatacagtccagtcacccccaggagaggataatttgggaatgcctggacaatatgattaagtttgcatacaacagaataacaaaaggaacaatataagagtgacttacgaaagacagatgttcatctctttttcacataataggcacaaataaatttaatcattttccttatataaattgaatttggaattaagcaatccagggcatgtattacatatttatcatcttgatccaaaatgatggctggagcaccagccatcatatcaaactccaaggaagaggaagggaaaaaagaata

SEQ ID NO: 401446 - DNA, 619 bp, Homo sapiens
tgcaagtaccaatgaaatgggagagttccctgattccttttgcagaatgtgcgacagggacgactttttgggtgcaaaaacagaactgcctgtcctcatttagggcagcaggtcttcaggcttgagggcggggcctttgccagggaaccaccctcttctacccaaaatttccctgtctcctgtccatatcaccgattcatacctttaagcatgtatggcctatgaaaaaaattgartgttcacttagtacacttcctgtgttttccataactacttgtgtaaccaaatcaagtaataagtttatgtaaaacttacatttgttaaagttcataggtatgtcttttacttatatgtgacctaaggcaactgcttctcaatattaattttgcccatggtgtgaacatatcttttcctaaggcatctatagagaatataagaagcaggcacagtcctcatcctggagaagataaaaggctaatagtactatttaaatgtaagcatcaacacaactctagaataaaataagtgagatatctatacccgtatctacatctatatctatctatccatccgtctatctaaccagggacaaatagctccaacattaaaacaagcacaa

SEQ ID NO: 401447 - DNA, 635 bp, Homo sapiens
tatattttaaaataacctttctttctccttctctctgtcttttcctctgaaatatctgtaatgtgtatgttggcgtgcttgttggcgccccacaattcycataggttttctttaagctttttaattattttttctttttattcttctgactgaataattttaagtgacgtgtttatgcatttgccaattgtttcttctgcttgatcaagtgtgctgttaagctatctatttaattttcactttagttattgcattcttcagctccaacatatatgtttggttattttttatgatttctgtctgttgatattctctattcatatatcatttttctgattttgtgtagttgtttatctgtattgtcttgtaaatcacctatctcctttaagataattattttgaattatttgtctggcaattcataggtctccgtttctttagggtcagttacaagagttttctttttcctttggtttgtcatatttccccaatgtttgttccttctagatttgcactggtgtctgtatatttcaagaaacagctgcattccctgtactttactgactgattttgacaggaaagccctttgccaaattagcccagctaaataatctgggagcctttcaaaacctttc

SEQ ID NO: 401448 - DNA, 635 bp, Homo sapiens
tatattttaaaataacctttctttctccttctctctgtcttttcctctgaaatatctgtaatgtgtatgttggcgtgcttgttggcgccccacaattcccatagkttttctttaagctttttaattattttttctttttattcttctgactgaataattttaagtgacgtgtttatgcatttgccaattgtttcttctgcttgatcaagtgtgctgttaagctatctatttaattttcactttagttattgcattcttcagctccaacatatatgtttggttattttttatgatttctgtctgttgatattctctattcatatatcatttttctgattttgtgtagttgtttatctgtattgtcttgtaaatcacctatctcctttaagataattattttgaattatttgtctggcaattcataggtctccgtttctttagggtcagttacaagagttttctttttcctttggtttgtcatatttccccaatgtttgttccttctagatttgcactggtgtctgtatatttcaagaaacagctgcattccctgtactttactgactgattttgacaggaaagccctttgccaaattagcccagctaaataatctgggagcctttcaaaacctttc

SEQ ID NO: 401449 - DNA, 369 bp, Homo sapiens
gggaagattttctctacatttctcacctgcagtcctgccccactgcactgttatgtatttcttcttcattttatagatatgatggaccattaaggcatataagaaaaagagtgcagtgaggcacatttaraaagatagctggtaatggtgcagagagcatattaaaaagaaaaaatatgacaaccagaagattagttacaaagtatattagtcagaataggctaggctatgctgtggtaacaaataaaccctgacatttcagaagttgttcccatcatctctgacttatagaagacatttcctctccctttttgaagctgtagcatctggaacacattcaacctgaaagactgatggggcaggaagaaa

SEQ ID NO: 401450 - DNA, 369 bp, Homo sapiens
gggaagattttctctacatttctcacctgcagtcctgccccactgcactgttatgtatttcttcttcattttatagatatgatggaccattaaggcatataagaaaaagagtgcagtgaggcacatttagaaagatagctggtaatggtgcagagagcayattaaaaagaaaaaatatgacaaccagaagattagttacaaagtatattagtcagaataggctaggctatgctgtggtaacaaataaaccctgacatttcagaagttgttcccatcatctctgacttatagaagacatttcctctccctttttgaagctgtagcatctggaacacattcaacctgaaagactgatggggcaggaagaaa

SEQ ID NO: 401451 - DNA, 286 bp, Homo sapiens
atctgtttaaaacctatttggctgcagaatattctaagaggcagaacactgaactaggagtactatgtaattttttttaggatggtgatttttttttttgcaggatgatttttaccataagaagtacaggtctattataatgtcagtctagtgccaaagaatgactggggggattacwgaaaatgtgttagaaatttatctggtaatcaattagagtgtacaattgaaacaacattcttacctaaactgcattgagggtgctcattcaagtagggcaatgactatg

SEQ ID NO: 401452 - DNA, 286 bp, Homo sapiens
atctgtttaaaacctatttggctgcagaatattctaagaggcagaacactgaactaggagtactatgtaattttttttaggatggtgatttttttttttgcaggatgatttttaccataagaagtacaggtctattataatgtcagtctagtgccaaagaatgactggggggattactgaaaatgtgttagaaatttatcwggtaatcaattagagtgtacaattgaaacaacattcttacctaaactgcattgagggtgctcattcaagtagggcaatgactatg

SEQ ID NO: 401453 - DNA, 468 bp, Homo sapiens
tctattataatgtcagtctagtgccaaagaatgactggggggattactgaaaatgtgttagaaatttatctggtaatcaattagagtgtacaattgaaacaacattcttacctaaactgcattgagggtgctcattcaagtagggcaatgactatggatttttctayatcatgaaataccattattctaactctgtaaaaactgctcaggattttaaaattttattttagtcttttaattcccttgaatatggtgttcatccccaaatttctaattttatatgtgtgtcatgaacctggacatagaacattaggaatgtgtggtgcagggtcaggagagaaacaccttaaagatgggagtctgaagacaaatcacatttgaatgttgatatggtttggctctatgtccctacacttgaattgtaataatccccacatgttgtgagagggaccaattggaaggtaattg

SEQ ID NO: 401454 - DNA, 468 bp, Homo sapiens
tctattataatgtcagtctagtgccaaagaatgactggggggattactgaaaatgtgttagaaatttatctggtaatcaattagagtgtacaattgaaacaacattcttacctaaactgcattgagggtgctcattcaagtagggcaatgactatggatttttctatatcatgaaataccattattctaactctgtaaaaactgctcaggattttaaaattttattttagtcttttaattcccttgaatatggtgttcatccccaaatttctaattttatatgtgtgtcatgaacctggacatagaacattaggaatrtgtggtgcagggtcaggagagaaacaccttaaagatgggagtctgaagacaaatcacatttgaatgttgatatggtttggctctatgtccctacacttgaattgtaataatccccacatgttgtgagagggaccaattggaaggtaattg

SEQ ID NO: 401455 - DNA, 468 bp, Homo sapiens
tctattataatgtcagtctagtgccaaagaatgactggggggattactgaaaatgtgttagaaatttatctggtaatcaattagagtgtacaattgaaacaacattcttacctaaactgcattgagggtgctcattcaagtagggcaatgactatggatttttctatatcatgaaataccattattctaactctgtaaaaactgctcaggattttaaaattttattttagtcttttaattcccttgaatatggtgttcatccccaaatttctaattttatatgtgtgtcatgaacctggacatagaacattaggaatgtgtggtgcagrgtcaggagagaaacaccttaaagatgggagtctgaagacaaatcacatttgaatgttgatatggtttggctctatgtccctacacttgaattgtaataatccccacatgttgtgagagggaccaattggaaggtaattg

SEQ ID NO: 401456 - DNA, 468 bp, Homo sapiens
tctattataatgtcagtctagtgccaaagaatgactggggggattactgaaaatgtgttagaaatttatctggtaatcaattagagtgtacaattgaaacaacattcttacctaaactgcattgagggtgctcattcaagtagggcaatgactatggatttttctatatcatgaaataccattattctaactctgtaaaaactgctcaggattttaaaattttattttagtcttttaattcccttgaatatggtgttcatccccaaatttctaattttatatgtgtgtcatgaacctggacatagaacattaggaatgtgtggtgcagggtcaggagagaaacrccttaaagatgggagtctgaagacaaatcacatttgaatgttgatatggtttggctctatgtccctacacttgaattgtaataatccccacatgttgtgagagggaccaattggaaggtaattg

SEQ ID NO: 401457 - DNA, 514 bp, Homo sapiens
aaggggaaagataagaaagatgtcaactgatgaatgcacgaaacatcttgtaccaagtccactgcttggagagacgactagaagccttgctagagctgtttcagtggaaagcagaggtagggaagtgtctamgccagagagcagtgaaatgatctgtgactatagcacatttttaataagtttagctgtgttgtacagaaagcagagataaaatttcctccataattttcccttattccataccattgtaaatctttttggaatacaagtgattcactttgtccagaagcaatggagtcagcaaaagaaaaacagtcatgtttagagcaaagaggtacgcagagcacatatgtctggttggataatgcacagatccatagggagccctaattcaataatatagctaatgctcaatgtccttctctttctttaaacaaagtaagaaatagatagactaatgtgttttttgtttccttattcacattccaagctggcaacatgtactttatacttt

SEQ ID NO: 401458 - DNA, 514 bp, Homo sapiens
aaggggaaagataagaaagatgtcaactgatgaatgcacgaaacatcttgtaccaagtccactgcttggagagacgactagaagccttgctagagctgtttcagtggaaagcagaggtagggaagtgtctacgccagagagcagtgaaatgatctgtgactatagcacatttttaataagtttagctgtgttgtacagaaagcagagataaaatttcctccataattttcccttattccataccattgtaaatctttttggaatacaagtgattcactttgtccagaagcaatggagtcagcaaaagaaaaacagtcatgtttagagcaaagaggtacgcagagcacatatgtctggttggataatgcacagrtccatagggagccctaattcaataatatagctaatgctcaatgtccttctctttctttaaacaaagtaagaaatagatagactaatgtgttttttgtttccttattcacattccaagctggcaacatgtactttatacttt

SEQ ID NO: 401459 - DNA, 589 bp, Homo sapiens
agatccatagggagccctaattcaataatatagctaatgctcaatgtccttctctttctttaaacaaagtaagaaatagatagactaatgtgttttttgtttccttattcacattccaagctggcaacatgtactttatactttttcctaccccaaatactaaactttctataaatgtccatttaaaagtcaatgaaggaaatgttcacaartaaatatggaaattgtcaagttttgattatgctacaaatcaggatccccttagcagctgtttcttttcccttacacagaaacatctcttggatatgtatttgtcatggaactcatttcatatttcttcttctaagtaaataacaatgtgacaatcatttccatcttcccacagagtcagcatgccagcatcagcggtcaaagctcgagcactcgggcttaccatgctgtcaattagacataacatgtattgccagtactgaaaatgctttcccttatttttgcaataaaaggggatgtttacaaaatgttgattgtatgtagaaaagtggtatcagcagccatgttttcaacataaatgctttctattagtcaagca

SEQ ID NO: 401460 - DNA, 589 bp, Homo sapiens
agatccatagggagccctaattcaataatatagctaatgctcaatgtccttctctttctttaaacaaagtaagaaatagatagactaatgtgttttttgtttccttattcacattccaagctggcaacatgtactttatactttttcctaccccaaatactaaactttctataaatgtccatttaaaagtcaatgaaggaaatgttcacaaataaatatggaaattgtcaagttttgattatgctacaaatcaggatccccttagcagctgtttcttttcccttacacagaaacatctcttggatatgtatttgtcatggaactcatttcatatttcttcttctaagtaaataacaatgtgacaatcatttccatcttcccacagagtcagcatgccagcatcagcggtcaaagctcgagcactcgggcttaccatgctgtcaattagacataacatgtattgccagtactgaaaatgctttcccttatttttgcaataaaaggggatgtttacaaaatgttgaytgtatgtagaaaagtggtatcagcagccatgttttcaacataaatgctttctattagtcaagca

SEQ ID NO: 401461 - DNA, 657 bp, Homo sapiens
aaaaactcatccacaagtctgaccccatcctcatttcaaaccccacacgttagctttgcctgattgtaatatttactcttttgtgtcttttggtmaacttgatgcttgtgaaattcattcatgctgttatgtatagtggtgttttgttattatcatgggtataaggcatttcattgtgtaaacatataatttttgcttattctactgttgaggggtcttggatcatttccagatagaggctactatgaatagcatgatagtgaatatttgattatatggctgttgttgaatatacatacatatatatttatgtgtatatatatagatatgcacatacatgtgtatgtatatatagatatatgcatacatacatatgtgtatatgcgtatatatatgcatacatagatgtaaatgtatatatcatagatatatatgaatgcatatgtatatacacacatacacatatatgtatgtatattcactatatatattcaacaacacacatatatatctctctttttaaatgtaatattttataaatataatctctatttgttgaacctctgtaaaatgacttatctgcctttaatgtattatttcttgcccataatataagaaattaatttacttgaaattattctcaataatctaaaaaat

SEQ ID NO: 401462 - DNA, 581 bp, Homo sapiens
gttagaagtggcattagaaccatcaaggtaatttaagatgagcttagccttatcttaatttgaaggaaatcaggttaccagcttacaatctttcaaaactctttatgttgtacattcaacagacatgttgaacgttaaccatgtgcagcatgctctgtagaatatataaaagtgaatttttaaacagtgagcrtctctcaatgtccaacttaataaatatttattaagtgagaataagttaggaatattaactcattcaataattgattatttgaaactcactatgtgcctggccctatgctgtgtcttatagatacagtcattctgctatcaaaaacatttcattgtggggaaagaccttttttaggttctcaaggaacatgtactctaaaagagagataagataaatggaaaaataactatattaaaatcaaatgtgaataaaaaggcctgaatgctagagaattagtcaagattcaccaataagatatatatacatagagaacatacctaggatatatctatatataatataggggatatatataatacatatagaatgcacacacacatatacatac

SEQ ID NO: 401463 - DNA, 642 bp, Homo sapiens
gtctacgtatatatacatatatatacactgtctgtgtaaatatatgtcctgcatacatatatatattctctctgtatatatatctatatatgtatacagaatatatacacatatatatacacatattctgagaatatatatgtataaagagaatatagatattgtrtagatatatgtacagagagaataggtatatagaatatataggtatatatgtggacattgagtgtatatatatatacatatatgcttatatatagtcatgagtcacttaataatgttccaataaatgtgtcattaggcaatgtagtcattgtgtgaacatcatagagtgttcttccacaaacttatgaatatggtatagcctattgctcctaggctacaaatctgtacagcacattactatattaaatacttaggcaattgtaagataatagtgagcatctgcatatataaacatagaaagggtacaataaatataaaagataaaaaatggtgcatctgtattgggcacatgctatgaatggagtttgtagaactagaagtcattctgatgagtcaatgtgtgagtgataagtgaatgaaggcctaggacattgctatacacttgcagctacacttaggctacattagattaaaaat

SEQ ID NO: 401464 - DNA, 642 bp, Homo sapiens
gtctacgtatatatacatatatatacactgtctgtgtaaatatatgtcctgcatacatatatatattctctctgtatatatatctatatatgtatacagaatatatacacatatatatacacatattctgagaatatatatgtataaagagaatatagatattgtgtagatatatgtacagagagaataggtatatagaatatataggtatatatgtggacattgagtgtatatatatatacatatatgcttatatrtagtcatgagtcacttaataatgttccaataaatgtgtcattaggcaatgtagtcattgtgtgaacatcatagagtgttcttccacaaacttatgaatatggtatagcctattgctcctaggctacaaatctgtacagcacattactatattaaatacttaggcaattgtaagataatagtgagcatctgcatatataaacatagaaagggtacaataaatataaaagataaaaaatggtgcatctgtattgggcacatgctatgaatggagtttgtagaactagaagtcattctgatgagtcaatgtgtgagtgataagtgaatgaaggcctaggacattgctatacacttgcagctacacttaggctacattagattaaaaat

SEQ ID NO: 401465 - DNA, 642 bp, Homo sapiens
gtctacgtatatatacatatatatacactgtctgtgtaaatatatgtcctgcatacatatatatattctctctgtatatatatctatatatgtatacagaatatatacacatatatatacacatattctgagaatatatatgtataaagagaatatagatattgtgtagatatatgtacagagagaataggtatatagaatatataggtatatatgtggacattgagtgtatatatatatacatatatgcttatatatagtcatgagtcacttaataatgttccaataaatgtgtcattaggcaatgtagtcattgtgtgaacatcatagagtgttcttccacaaacttatgaatatggtatagcctattgctcytaggctacaaatctgtacagcacattactatattaaatacttaggcaattgtaagataatagtgagcatctgcatatataaacatagaaagggtacaataaatataaaagataaaaaatggtgcatctgtattgggcacatgctatgaatggagtttgtagaactagaagtcattctgatgagtcaatgtgtgagtgataagtgaatgaaggcctaggacattgctatacacttgcagctacacttaggctacattagattaaaaat

SEQ ID NO: 401466 - DNA, 534 bp, Homo sapiens
tgcccaacacatagatagcatgccttaggagtgtgaggcaccatcttaggctttttccctttaaccctaaagaatagatattattatcccagttttaaacataaggaaagacatgggcattttcttttccaaccagttgcccatcttcaaagttaatgcttttcccactaatgcaggtcaaagaagcaaatatttttacatcacctcatctcatttctctckctatatccttggtactcactggtaggaccagtctgggcattactgtgagaggcacgtttcatatgtggtctcggagaccaggaaagcctaaatattcaatgatgctgtactaaaatttcatttcttgatgggtttcgtcattggaatgggtattccaggaacttacaagttcataagtaatgtagcaggtagtcagaataaaacattagccaaaacattggagaaattgatatgattcataaagggccacagcccttgctctgtccttattacttattttccctccttgatccctgagatgggctccactat

SEQ ID NO: 401467 - DNA, 610 bp, Homo sapiens
tttgtttatggtttttaacatgaagagatgttgaattttatcgaaagccttttctgcatctagtgagatgataatatgatttttgyttttagctttgttttgtgatgaaatgcatttatcaatatgtgtatgttgaaccaagctttcatccaaggaatgaagcctacttaattgtgatggattcacctttttatgtgctgctgaattcagtttgctagtattttgctgaagatttttgtgtctatgtccatcagggatattggcctgaagttttcttttatagttttgcctttgccaagatttagtatcagaataattctgggctcaagaatgtgttgggaaggagtctctcccactgaacattttggaataatttcagtagattggtaccagctcttctttgtatatctggtagaattcagctgtgaatccatctggtccagggctttttttgggtggtagggtacgtattactgattcagtttcaaaacttgttattagtctctttatgattgcagttttttcttggttcaatcttcaaaagttgtatatttccaggaatttattcattttttctaggttttctagtttgtgcacatacacatgttca

SEQ ID NO: 401468 - DNA, 610 bp, Homo sapiens
tttgtttatggtttttaacatgaagagatgttgaattttatcgaaagccttttctgcatctagtgagatgataatatgatttttgtttttagctttgttttgtgatgaaatgcatttatcratatgtgtatgttgaaccaagctttcatccaaggaatgaagcctacttaattgtgatggattcacctttttatgtgctgctgaattcagtttgctagtattttgctgaagatttttgtgtctatgtccatcagggatattggcctgaagttttcttttatagttttgcctttgccaagatttagtatcagaataattctgggctcaagaatgtgttgggaaggagtctctcccactgaacattttggaataatttcagtagattggtaccagctcttctttgtatatctggtagaattcagctgtgaatccatctggtccagggctttttttgggtggtagggtacgtattactgattcagtttcaaaacttgttattagtctctttatgattgcagttttttcttggttcaatcttcaaaagttgtatatttccaggaatttattcattttttctaggttttctagtttgtgcacatacacatgttca

SEQ ID NO: 401469 - DNA, 610 bp, Homo sapiens
tttgtttatggtttttaacatgaagagatgttgaattttatcgaaagccttttctgcatctagtgagatgataatatgatttttgtttttagctttgttttgtgatgaaatgcatttatcaatatgtgtatgttgaaccaagctttcatccaaggaatgaagcctacttaattgtgatggattcacctttttatgtgctgctgaattcagtttgctagtattttgctgaagatttttgtgtctatgtccatcagggatattggcctgaagttttcttttatagttttgcctttgccaagatttagtatcagaataattctgggctcaagaatgtgttgggaaggagtctctcccactgaacattttggaataatttcagtagattrgtaccagctcttctttgtatatctggtagaattcagctgtgaatccatctggtccagggctttttttgggtggtagggtacgtattactgattcagtttcaaaacttgttattagtctctttatgattgcagttttttcttggttcaatcttcaaaagttgtatatttccaggaatttattcattttttctaggttttctagtttgtgcacatacacatgttca

SEQ ID NO: 401470 - DNA, 495 bp, Homo sapiens
tctttttttctctttattagtctagctagcagtctattaatatttgttattcttttaagaaaacaacttttggcttcatttatcttttrtatgggttttcacgtctcaatgttgttcagctcagctctgattttagttatatcttttcttttgctaacgttggggttggtttgcttctgttttttctagtacatctaggtgtgatgttagttttttaatttgagatctttctaccttcttgatataggcatatagtgctataaactttcctcttgctgcttgaactgtgtttcagagattctggtatcgtgtatctttgttttcattagtttttttttttaatttctgccataattttacccaacagtctttcaatagcaggttgtttaatttccacatggttttgagagatcttcttggtattggtctttatgtttatggcactgtgatctcagagtgtggttggtaacatttcatttttttaaaatttgttga

SEQ ID NO: 401471 - DNA, 495 bp, Homo sapiens
tctttttttctctttattagtctagctagcagtctattaatatttgttattcttttaagaaaacaacttttggcttcatttatcttttatatgggttttcacgtctcaatgktgttcagctcagctctgattttagttatatcttttcttttgctaacgttggggttggtttgcttctgttttttctagtacatctaggtgtgatgttagttttttaatttgagatctttctaccttcttgatataggcatatagtgctataaactttcctcttgctgcttgaactgtgtttcagagattctggtatcgtgtatctttgttttcattagtttttttttttaatttctgccataattttacccaacagtctttcaatagcaggttgtttaatttccacatggttttgagagatcttcttggtattggtctttatgtttatggcactgtgatctcagagtgtggttggtaacatttcatttttttaaaatttgttga

SEQ ID NO: 401472 - DNA, 647 bp, Homo sapiens
ggacctcttctaaggcaggtcttgtagtaaaaacttcccttagcattttcttgtataaaaagggctttatttctccttttcttataaagcttaatatgactggatatgaaattcttagttgaaatttctttcctttactgaaaatgaatataggcctccaatctcttccggcttgtaagatttctactgaaaggtctactgttagactgattatatgacctgctccttttctctagctgactttaagattttttaaattttgtattgaccttgaaaaatgtgatgagtatgtgtcttgggatggccatcttgtatagtatctcacagagggtctctgaatttcctaaatgtgtatgttgatctctctagataagttggggaaattttcattgacaatgtcctcaataatttttccaagttgcttkctctctcatctcctttaagactcccaatgagtcatatgtttgatctatttacataagcccatatttctcagaggttttgttcattattttctcttcttttttctttatgtttgtctgcctgcattgattcaaaagagtagtcttcaagctatgttattctttcgtcagcttggtctattctgttgttaatgcttccagttatattaggacatttttgtagtc

SEQ ID NO: 401473 - DNA, 567 bp, Homo sapiens
aaagatctgcttgaagtgtcctggtctacttcgtgttctggtctctcttagtgggacaagctcttcctagctgcatctagttgtccatcttggcttccattcagtttatatttttaaacacagaatcactttaccccactaaatacaagttcaaaaagtgttaacagagtatgagtttagtcattaatcattagccagttggtgtgtccataccaacttacatttagtaaaacaggtttataaagggtatatataatcaattttggattaacaatattgctgtcagttatagtaaaaataatttcttattatcttactgttatggactcaatatttttgtctacccaaaatttatatgttgaaattctaactcccaatgtaatagtattagaaagtggggtcttgggatataattaggttataaaaccctcacaaatgggattagtgcttgtgatggttaattttaygtgtcaccttgactgagctaggagatggacaatagctatcaaaacattatttctgagtgtgtttatgagggagattccagaagatattggcatttaaatt

SEQ ID NO: 401474 - DNA, 424 bp, Homo sapiens
gactaaaccttgaatatttttaatagcacagtcagaaaaagcaaatgggcacttgtacccagtgataaaattccagagacagcattatasaaggagtcaaacagtgttattgcataaaaagtgccatatttcaagaaagtgacaatactgtgctctggaaattggttttggatgacttgaatcttgtcttcagtgatgataaaagcaatgatgttgactataaatttgaacaattgcaataaaatagattcacaaaatatgagttgaaataacaatttttaaaattcaaatactactttacataaaacattgtcttacacaagagttcatatcatattattatgagaatacatttgcatattttaaacatacctattaaaacataaaatatcagatttgccaaaaatttatttttgtatattct

SEQ ID NO: 401475 - DNA, 617 bp, Homo sapiens
gttcacatagaaattttaagtaaataatagtaaccatggtgcataaataaggcaaaactcatgcaggtactgtttaaataattgtagttaagcaagcattgaggtctgaaataagagtatagccatagcacttctcaaacttgaatttaaccaactggggatcagttagcagaaacattatgattcaataggcctgaaatggactgtaggatctgagattctgaacttccaataagttccaagatggtgttggatgcaatctcactatttctgcagatgctttgtatggcaagtttctaagaaaaaatgtccccacaagaccttcaactactgcatacagaaactcctcttacagctcttcctgatccaaccaaggtcaccaggaaattacatgtggcatgagatcaacactcaatactagtaattattgcctgtccattttctctacatcaatggttcttaaaatttagygttttttagaatcacctgaagtatttgttaagccacaggttgctgagctcactcacatagtttctatttgagtaggtctcaagagtgcctgagaattttcatttctaacaagttttagaatgtgacgttgcttgcccaggaactgg

SEQ ID NO: 401476 - DNA, 571 bp, Homo sapiens
aaataataaattatatacaattttgtttctcttttttccacctatcattatatatctccagaatttgtacccatgaatggggacaattttaacaacttttgaccacttgcgcaaaaaaaaaaaaaacaaaaaacaaaacaaaacaaaacaaaaaaaccaaaaaactctttcatgtccacttcacaaaaraaaacagcattgtgaattgtgattactcccagggactgtattttatcttcagtggctgcctgattttacccccacaattaaagttgaaggaatcctgaaaaaaaacaaaaacaaaaaaagaaaacatgtattgagatattcttttcaaagacattttagttaacagagtaaaattccatcatgaaaagcaagatttgcaaacatcagtactattgatattttggactggataatttattgttgtaggggactatactcttgtgcattgtaaaatgtttgccagcatccctggactcaaccactagatctccctgctccctagatgtaataaccaaaaacaactccagacattgccagatgtcctcatgggtacagaattctc

SEQ ID NO: 401477 - DNA, 518 bp, Homo sapiens
gcttataagaaggtaaaatgaactgtttggctttctatatttctgtcttgaatcttgagccaagatcgcaccattgtactccagcttggagacgaaaagcaaaactccatctcaaaaaataaaaatatcrcaatagtaggatcttatttaaaaagctgttaggaagataaatagaaaaatactcatagagtgtgttatgacaatgcctggactgataaacagtaacagccaaataaataaactctatttaagcacagagaaaggctggtgtggctaaagcctcttggatgatggggagggagataggaggtgcagtagtagatgaagaagtaagggaacagatcatacagtcttgtaggacagggtcatttggattttgagtgcaaagaaaagtagctggagggtttgaagtataaatgcagcatgatctgacttattcttatgaaagatctgtctgctttgcaagagaagatagagtacaagtgacagtagtacaagtgttaactgctgtagtccag

SEQ ID NO: 401478 - DNA, 601 bp, Homo sapiens
taagttaatctaaagaatataatgaaattagaatttgtttcatgtggcctgagacttgtacccatgatgtcctaattctaccactgatggtataaatacacttccctggctaatagagagagggtactttgctcatcattttcagattcccagtgaatgcttacattgcctagtataccagttttgaagtgtgatctttaaaaaaatactcattttctgcatagtgttaagaatgcatttctctgtgcctggagtcatgaacctgacacagttaacgcagtgaaatctaccatacatttaatcagaggtacttaatttgattttctaaaattaagcagagaatcagtttgccattaggtctgagaattactgcatttctgaagttactccgcataccccaaaagggctttattggatatgaataataacaacctacaaatatgttgatgataatgagcatctaartgttctgcaaagaaaaaaagacaaagaaaatccctgacaagcatgaatgttgacgcatgatggcaagaatttttaaaatttatgaatattacaacatgaaaaaataattatgaataataaaaatctgttacaataa

SEQ ID NO: 401479 - DNA, 601 bp, Homo sapiens
taagttaatctaaagaatataatgaaattagaatttgtttcatgtggcctgagacttgtacccatgatgtcctaattctaccactgatggtataaatacacttccctggctaatagagagagggtactttgctcatcattttcagattcccagtgaatgcttacattgcctagtataccagttttgaagtgtgatctttaaaaaaatactcattttctgcatagtgttaagaatgcatttctctgtgcctggagtcatgaacctgacacagttaacgcagtgaaatctaccatacatttaatcagaggtacttaatttgattttctaaaattaagcagagaatcagtttgccattaggtctgagaattactgcatttctgaagttactccgcataccccaaaagggctttattggatatgaataataacaacctacaaatatgttgatgataatgagcatctaaatgttctgcaaagaaaaaaagacaaagaaaatccctgacaagcatgaatgttgacgcatgatggcaagaatttttaaaatttatgaatawtacaacatgaaaaaataattatgaataataaaaatctgttacaataa

SEQ ID NO: 401480 - DNA, 528 bp, Homo sapiens
tcttactgtcccacagctcagttccttcttttctttcacccagatccccctcactcactagctcccacgcttctgtttgctctctgtggtggtcctcctgcttgaggttatcaagtgactgtgcacacagctggaaacctctttccccgcctccagacccccagactccccagatcagagttcccrgatcacctctgggaatccccagggcaaggaggatggttttctttccctcttttttccttttgaggatgtgcctctacttataagaaaaatgcctctaggccgaacagaggcctgcaggaatttgcttttaaagaaaagagaaaacagtaagacaagagggaagttctttactggcagcatttctcctctgggcaaacagctccagtttgaagttcccagggcagaaccacagggctgagtttaaggcaccattacatattcaactatggacagaaagtcagatagaaaatttgctgggatttgggatggtctcattcactgaaatttttttttcagtgtttt

SEQ ID NO: 401481 - DNA, 632 bp, Homo sapiens
tggggacactgagataactatactgctatagcttctggtcttagggtacaaagaatctacagagagagccacaggaaatcctcaactattctaataaaaatacrtgttcaaaaacaagaattgaagcaagagaagaatgatcagtaagggcttcatgaaagaagaaaccattgagtttacttttacaatgaaatatctttggggagaaaatgttggaaacttgacgctgatgttgaacaacatgttaaaaattggccaacatcaaccagtttgtttaatgagtttgtttaacttccttttagctaggtctacattgagtttaacatgaaattgtggaaagaggcctaactttttatggtgtccactatttggacctgggtgggcatacgatccaagacctcttattgttcaaaagtttctcagcttgatcctaatctcttttacttaaagtttactaattgtagatattaatcatatctgaaaaatacctttacagttcacttgttttatgaaacaactgtttatggctgtatcttctgcatttagcacatggctaggttcatggtgggtgctcagtaaatacttgatctagaaaggagtagtaaatgaataattaaatagtttattgggtg

SEQ ID NO: 401482 - DNA, 632 bp, Homo sapiens
tggggacactgagataactatactgctatagcttctggtcttagggtacaaagaatctacagagagagccacaggaaatcctcaactattctaataaaaatacatgttcaaaaacaagaattgaagcaagagaagaatgatcagtaagggcttcatgaaagaagaaaccattgagtttacttttacaatgaaatatctttggggagaaaatgttggaaacttgackctgatgttgaacaacatgttaaaaattggccaacatcaaccagtttgtttaatgagtttgtttaacttccttttagctaggtctacattgagtttaacatgaaattgtggaaagaggcctaactttttatggtgtccactatttggacctgggtgggcatacgatccaagacctcttattgttcaaaagtttctcagcttgatcctaatctcttttacttaaagtttactaattgtagatattaatcatatctgaaaaatacctttacagttcacttgttttatgaaacaactgtttatggctgtatcttctgcatttagcacatggctaggttcatggtgggtgctcagtaaatacttgatctagaaaggagtagtaaatgaataattaaatagtttattgggtg

SEQ ID NO: 401483 - DNA, 604 bp, Homo sapiens
atagttcttatgagctgccaattgctttttaaacccattcttttaaactcatttatacactctgtttttaaaattgcattctaggggtttctcgattcctaaaactgcacttttccaccaacttttatctcctcagataaattgggttcacattatgactctgcactttatttgcttcgatattggacaagtcccttaatctcatgaagatcagttttctctcatataaaatgaggatagtgtcacccacctctcattatgctgggaagacagaattgtcttttcctagctctctatgactatggagtgtattataaatttgtaacattttccactctcatttttcagaacaatgcaatagtacaataaagaaagagaaggcaagggagttcatggtatagagaagataatgattatacctgttgggcacttcaacgtaaaaaaagagggggagtaaatcaaatggatttttgggcatgctggaggtgaaatgctagtgagtaagctggaaaaaaggagatgctagtcaaagaggrgtattcatggaatgaagaccatggaaagatcaccatagctggaaatggtaatgttgacatatagctat

SEQ ID NO: 401484 - DNA, 609 bp, Homo sapiens
aagtataaaaggtaatatagaagaaaaacttgctcgtgggtttagggatataagtttgctaggctggaggattatggatgtatatgcttttaatcatggaagattataaacatacaatcaaaaatttttattaaaaaatataaatagcttctgaacaactgttggaatttgaaattgaagcagtgagctccaagggcaatgtagttttcttaacaataatagcttctatttgatgagaatttttattttgccagacacaataataagcaaatttaattcattacttttcattcttataacaatcttaagagacacatataatctccaatttgatgttgaagaaactgaagtgcaaagaatktaacaaactagccatgggtcacaaaatataaagtagtgaaacaaagtttgacttcaggcctcacaaatgctaagacacatgccctttttgctaactacctcttagagcctgtgtgagactacaataatcatgatgataatagctatgatagatgtttttccatgtgcagactctgtttcaaacccttcgcatataataacatatttaatctttgtagcaccctcatgaagaaactgagaaacagaagt

SEQ ID NO: 401485 - DNA, 627 bp, Homo sapiens
aggagaaagcaaaccaagttggcacattaccaaatggccacggcctccctgcaaacatagcaccagaatcttatggaatggatcacgtggattagagaagccacatggacacactgtgttttgaaacagtcttaggaaaagcaagggagagatttgtcaggtgcttttcacctcttgtttttcaytggtctacttttgcccaagggacagtaacttccccatattatgggtggtgttactcagtgcctcctatatctgggaaagccagagtcttcataaattcaataaggttaaaccttttcactggaagtcctggctcatgataaaaaggggaagacacaggccataccaatgcctggcacttattccagatgagaatgggcctgaaagcagtgtgaggagatatattatcaggaactagtggccagatctctgcattaagaaagtggtaaaggaaattgctatggccatatacttggtctggtctacccttctttcctgccttgctttgctttcactctttcttgatgtcctggaatgaaaaccccaatgatgtattagtatataagctttggtgtttctgtgtttttctaggcaacttgagtacaataggcagccacaaatatc

SEQ ID NO: 401486 - DNA, 627 bp, Homo sapiens
  misc_feature (1)...(627): n = A,T,C or G
gtgtattttaaacatttcaatgctttccttgaagtcttttangcatcctataagatcatcttaatgcgattcatgttgtggactgctgtggcaacaactaacaggaaagtaaaaactactgcaatgtggaaaagttgtatgcggtgtgtgaaaataaaaagtgtgtattcatgacaagataccaattacactgaaactagttgaattttttaagtagatttttaaatttgaggactggcagagaccttttacatcttgtgkgcattttacaggtaaagcaaatagaagcctgaaaagagaattgatttgcattaggctccccagaggagtagtcccagaattggatccagagctccaatagcctaactcccaacatagtgtacttttcaaaaccaaagaaaaagctccaactctaagatggaacagtgatggaaatgtccaccattcaatatgattttaaacataataatggtgtgtgtgtgtgtgtgtgtgtgtgtgtgtaacgagaaagactgagataaatagtcttcaggtttagactgaagtgtgtgctggtgtgctgaacactctgctaggcattttacatagattaacccatctctttaacgatgtcataaggaggtatta

SEQ ID NO: 401487 - DNA, 601 bp, Homo sapiens
tccttgtctgtaaaatgaggtactaacagtttccatctcataaggtggttgtgaggattaaattagttaataaatgaaaggcacttagaaaaagcatttgacatctacaaagaaattcatctttgcaataatttttctgctcaaaaatccctatcagtgaagttaaatacaatcatttatttagccgtgcactacaggactgcagctcccaccaggcttcttttgtgcctctatcttacttttttattccagccagctgaacccttttaaggccctccagtatggtgacatctttctactcttgtggttttagtgttggcagagtttgttgcctgaaagccttcctctggttactttttccttgcaggctcagatctcagctgaatgtcagcaactcaaagcagartctcctgacccccgtgttccctcaccacaatgccatgatgcctcactcgaaggccttgcttccttcacagcatgtatcccagtgcacagttattttattatttgtttattttatttcttctgcttccctagtaaattataagccccatgaagttagaaaacttttctgccctttacacaacttttcaaaaacgaa

SEQ ID NO: 401488 - DNA, 562 bp, Homo sapiens
cctcttaactacagtgttgtcataccctacacaattcagaggagaatggggtttggtaaagaggggagacttcttaaagaatattgatttggactgggctttgagggacctgatagatccttggaatttagccaatcttccccctacaatgatatctcacagtagaacattgtgacagagagtttctttcttatgtttcctgtacatgttcatgctcatgtttagcaaatttggagtggcctctttattcttattcatccatctacttctgttgtcagatcagattttatggtggtarcccaaaacatttctttcgcaggatattaaagattggcaccagagtatgcctgtgacttgttctgatttctggtgtgaagccatgtttatccactacaccagacaactagctcatagccattgttttatttagccctcagttttcatggtggccctcagtgatggttggagagtcaaggtaaatctcacgcccatgtttcctactgcatgcaggtcacacatcattcagtgcacatgaactcatttcttatggctaattttatac

SEQ ID NO: 401489 - DNA, 618 bp, Homo sapiens
gttgttgtttgtacttgtaaagaggatacaccacagcacccaccttggaccatttggtgastctggctcatgtatagagttgcaatccacacccgtgaaggttcagcctctaattcaacactgtgacggagagaagaatgctttgaaagtggttgtgaaaagtctagtgaacatctggggatttttgactggccaaattttatgtttgttcctctgatttttccactgaagaactcacctttccattctacaaagtcctggtggaactgtcctctgatttttccactgaagaactcacctttccattctacaaagtcctggtggaactgtcaatcaagatgccactttttccctggcaaatggattacatgagttcaacttctggttagttactatagctcccagaaagtgcattttgagtcatgtgactaaaaaatgcacgccataggcagctctcttaggaaaattcattatttcctgctacgcccacctgaggactcctctgataaatgtttttccacctttcctttgattctgtgagatgcctcaaattctcaatgaacaatatgcagtctctcgatttttctttctttcactttgattagtcagatttatttt

SEQ ID NO: 401490 - DNA, 526 bp, Homo sapiens
aaaacattaataagtgcatagatttttagaaatttcacttaaaaaaagtacattaaataaaaactacagcactaccattttatagatttgaaatagtaatagcatagtggtcatattaatttccctttttcattcctcactccttagacaaatttcaacatatttttttctctaacaatttcaataagataggcttggatgatagccatgaacaatgctgagttttcaggttttgggagagaggatggtaaaatacaggctgaagggtactagatgagaaygtatctggctgcttttaaagtgtagattaaggaagatagttgcatataaatttattttgctttgttgtagctgatacgcacaaacacctttgtcctttatacctggccttctattttattaatacataaaaagtttaattttataattaaataagttaccaccctggtctgtgattattctcacagttttagaaaagacatagaaaaatacaaattcccacatggaataatttcattcaagtgga

SEQ ID NO: 401491 - DNA, 613 bp, Homo sapiens
atttattgtacaggtgaaaataaagcagacttttgttttggagatttttagctaaaattgctccactccttttaaaaatttaatttgttttagatgagagaatacaaatacacatataccacacccccagtcttcaaactaacagaaaccaatgtattaattcatttttacactactgataaagacatacacatgactgggaagaaaaggaagtttaatttgacttacagttccacatggctggggaggtcccataatcattgctgagggaaaaagacacttcttacatggtggcagcaagacaaaatgaggaagaagcaaaagcagaaacacytgataaactcatcagatctcgtgagacttattcactatcataagaatagcatgggaaagaccggcccccctgattcaattacctcccactgggtccttccagcgggatttctgggaaatataattttgtgggaattctgggaaatacaatttaagttgagatttgggtggagacacagtcaaaccatatcagccatatagaaggtgagaaattaaaatatcaaattaaaaattcaatgaatgatagatctcaaggttggaaagagtcttaacaggcatc

SEQ ID NO: 401492 - DNA, 530 bp, Homo sapiens
gcaactattaataccaatataaattaaaaggaaaaagtttgaataaatccccaacagaaaaggctggcagtacaaatgtaagtacataccatatcaaggaaatgtgaatatatggtcactctatgtatctatgtatctgtgtatctatctatctatctatctatctatctatctatctatctatctttctatctacatcaccactcattatccatctccagtttatgaataaagaagcataagactatcttggagctatctggggaggtttcatcatgctagtagaaggtactcccccattgtctctttttttctaacaccatttcttcagttaccccmggtccaaactaaaatgaagataacaacagggtgcctcttaaagagattggtgtgcttatcagaagggacactgacatcaagttttatttgctgagttatacaattttaaaggtcaaccttgttctgctactagatgagagcatgttgagtattttctttgcaaaatttgcctagtagttttggttatataa

SEQ ID NO: 401493 - DNA, 576 bp, Homo sapiens
ctaaataaacaaaaactcaagttttatcaaaacgtaaagaaagctgagctagagttttcttaaaataatataaccaaaaagttctgtcttccagttttggggcctcagtaggaagataaatagctaaggggattgaataaataaaraattgaagtcttagtgttaagctttactgtactttagaaaattcctagaaataagagtctgtttacatatgtaactgacaagataagctataggacctagttcaagtattacactggaaaggggaggcatgatgaaggaaagaaagaaagaagcaaattgctttctgcttgcacacctaagcgcagcactttcaatatactagagatagacatataatatgttgaaaagtatttaggataggctatcaacatttttttaaaaatttgagtacagaagtaggaaaggccattttatcttgaaatcatcatagacatttaggttgtttccacattttggctgttgtgaataatgctgccatgaacatgggaatgcagatatctctttgagatcctgatttcaattctttttgaaatatatccagaaatggga

SEQ ID NO: 401494 - DNA, 573 bp, Homo sapiens
ttccaagttttaatgttctctttctcttttaattgtaagttccaactttaggtcatttctttgctcccatatctaattataggttattagaagccaccacatcacatcttgagtgctttgctgcttagaaatattttcagccagatacgctgaatcatcactcttaagttcagccttccacaaagtcctaggacatggacacaatgcatgcagtcaagtcctttgctacatcataacaagggtgacctatgctcccaataagtttctcatttctatctgagacctcstcagcatggcctttactatccatattacaatcagcattttggtaacagccacttacgtggcctttaataaaatccaaacattccctcacctttctgtcttcttctgagccgtccaaattttccaacctctgcccattatccagttccaaatctgctgccacaatttcaggtatctttatagctacatcccctcctcagaactgattttatttcttaatccatttgtgtcactaaaggaataactgaggctggataatttataaagaaaacatttttttttggtcat

SEQ ID NO: 401495 - DNA, 560 bp, Homo sapiens
ataatacaatttttgataaagaaaaaattgcctgaaatgtagcaattctacaggttttacagcaatttggaagttacatccaattaaaattaaatataatcatttaattaagactagaatacatcttgaatattaagttaatatatacattttttttgctctaggagagttgtctacaattatgttgatcaaatgttattgatgtttccagtaattaggatttgggagattaaccaaaaccacccttcccacatttatggaaagcatagctttttaaaattaaataatgagcaagtaaaagaatatatattattttgttcatatactttgcccactttttcatggggttgtttttttcttgtaaatttaagtttcttgtagaatctggatattagctctttgtcagatgggtagattgcaaaaattttctcccattctgtaggctgcctgtttactctgacgatagtttcttttgctatgtagaagctccttagtttaattagatcccatttgccaattgtggtttttgttgcaatkgcttttggtgttttagtcataaa

SEQ ID NO: 401496 - DNA, 501 bp, Homo sapiens
acatgtgccatgctggtgcactgcacccacyaactcgtcatctagccttaggtatatctcccaatgctatccctcccccctccccccaccccaccacagtccccagagtgtgatattccccttcatgtgtccatgtgatctcattgttcaattataattaagttattattgattacagtcacactgttgtgctatcaaatagtaggtcttattcattctttctatttttttgtacccattaaccatctctggctcctccctccccatcagctccccactacgcttcccagcctctgcaaaccatctttctactctctatgtccatgagttcaattgttttgatttttagagcccataaataagtgagaacatgcaatgtttctcttttttgcctggcttatttcacttaatgtaatgacttctagttccatccatgttgttacaaatatggatctcattattttttcatggctgaatagtactcattattttttatggctc

SEQ ID NO: 401497 - DNA, 588 bp, Homo sapiens
tatgatctcatctacaagctttatggtttagcatttcatatttaaatttacaatgccyccaaaattgatattagtatatggcatgagatagggtcaagactattaatttttccataggttatgtagttgtcttggcaccttcattgaaagcacagtgctgtccccgctggtctggtcttaacttaattgtccatataagtgagagtgtctttctgaactctataatctgtgatattgatttgactatttgtgtttgtctagcatgttattttaactactcttataataaagatagttaactgcttagctactttatagtgtcttgatattcagtagtatatgtgtcccctaattttgttctcctttaagattgtctaggtccagagttgccgaagcttttctgtaaagggacaaataataaataaaggtgatattgtggggcacacagtatagttatgctgtcatagttattcaactctgccattgtagctcaaaagcagccatagacaatatgcaaaagatgggtgtgacaaatttacaaaataaacagcaggtccaaatttggcccacagactgtggtctgcataa

SEQ ID NO: 401498 - DNA, 588 bp, Homo sapiens
tatgatctcatctacaagctttatggtttagcatttcatatttaaatttacaatgcccccaaaattgatattagtatatggcatgagatagggtcaagactattaatttttccataggttatgtagttgwcttggcaccttcattgaaagcacagtgctgtccccgctggtctggtcttaacttaattgtccatataagtgagagtgtctttctgaactctataatctgtgatattgatttgactatttgtgtttgtctagcatgttattttaactactcttataataaagatagttaactgcttagctactttatagtgtcttgatattcagtagtatatgtgtcccctaattttgttctcctttaagattgtctaggtccagagttgccgaagcttttctgtaaagggacaaataataaataaaggtgatattgtggggcacacagtatagttatgctgtcatagttattcaactctgccattgtagctcaaaagcagccatagacaatatgcaaaagatgggtgtgacaaatttacaaaataaacagcaggtccaaatttggcccacagactgtggtctgcataa

SEQ ID NO: 401499 - DNA, 443 bp, Homo sapiens
gatgccaaggcttgaggtttgcatcctttaaggccgtggcccgagttctctgttggttcctttcagccacagcaggagtggtgaggatgcagggcaccaagtccctaggctgcaccattcaatatggtagccactccccacctacatgcagcctagggactctgggcctggcctgcaaaaccactttttcctcctaggcctccasgcctgtaatgggagaaactgctgtgaaaacctctgacatgccctggagatattttcctcattgtcttggtgattaacattcagctccttgttacttatgcaaatttctggaggctgcttgtatttcccctcagaaaatgagattttcttttctattgcatggtcaggctgcaaattttccaaacttttatgtggtgtttccctttcaaaactgaatgctttaacagcacccaagtcac

SEQ ID NO: 401500 - DNA, 591 bp, Homo sapiens
atgacttaaatcaagcagctggagaaagcagaaatgcttctaggcataaaaatatgttttaattgtcttgctaatataaatgtgagacctataaacactttgttcaaggaatcagcaggtgagttgtctctttcttactttctttgtagcttttatcacaaagctcgttctgccaattgatctttagagaaaaaataasaaatgaagccaggttcatcttgttaatggtttatattgtgaaagagtttttagagaaacagtattatatatacatagagagagaatatgtgtatatatatagatataatatgtatatatatatgatttataatagacctgaacattcattaattttaacagctatgccacattttgtgtactttctcaagctgaattgtgtctaatgatgtcaaattatgtaatgggaagagaaaaataaattcaggcacccagatacaggaacatgataaacttttattttattggagtttgttatataaactaagactgacttgtgtccattcacacattttgttaatgtaaatatatggccaatattcttaattggaattggaaaaaagggtatatgtc

SEQ ID NO: 401501 - DNA, 594 bp, Homo sapiens
aatcattttttattaagcagcaatttaacatcattttaatttaattttctattgtaaagcaaaaagagataaataacattgcatttcatcagcacttgctcccaataactcccatgctcagcaagaaataaatattgagataattgcagtacatttcatttataaacaaggtaacagaggccccctttttccacagtgaaaggtcctcaacagcagcgctattggaccactaaatactctctatccagcaggtcttcatgatgcttccattagagtatggtgtatctgaaaagttcaaccttaccttggtttagcactgcttctctcatgtggctggttcktatagcctcagtgtaaaggctgccgaggaattccttaagcatcatgggggatatcgtggccattaaaaaagaactatgttactaactttttcaacatatgtggattttagtaacttggaaagcaaagaatgcggtaatatttcaattaaattctgtggatataaagcctttactcacttttgttttgctttattttattgaatgaagttaccaagtttataaacccgtagtacatcgtgacctaccttacaca

SEQ ID NO: 401502 - DNA, 544 bp, Homo sapiens
tgattattatttattaatttgatatgcgttcagttgtccaacatggtaaactcattttcactcttgccctttgaaatatgagggtttaatgaaagcatccacataattctaaattacatgatgataaaaacatttttcttcttagccaacagtgtgttctttgatttagaaacagtggaccgttaagactggagtagataaagtggattaggtcaaggaaggggatggaaaggaaacatgaattgaacaacaaagtaatgtaatgtatccttttaaaattatcttgaaaaaataaatgtaattttgaatatttatcacaggtatggattttatttttattatatttcaaagagatacttagtagtaataactggatatccaaagccktcttttatatctactttttttttttttttggttttgtaaatgtatcctgcagactttttctttttacaggtttgccacatgggtatattacctaaggctgcagtttaggcttctaatatacccgtcacccaagttgtgaacatagtacccggtaagt

SEQ ID NO: 401503 - DNA, 544 bp, Homo sapiens
tgattattatttattaatttgatatgcgttcagttgtccaacatggtaaactcattttcactcttgccctttgaaatatgagggtttaatgaaagcatccacataattctaaattacatgatgataaaaacatttttcttcttagccaacagtgtgttctttgatttagaaacagtggaccgttaagactggagtagataaagtggattaggtcaaggaaggggatggaaaggaaacatgaattgaacaacaaagtaatgtaatgtatccttttaaaattatcttgaaaaaataaatgtaattttgaatatttatcacaggtatggattttatttttattatatttcaaagagatacttagtagtaataactggatatccaaagcctycttttatatctactttttttttttttttggttttgtaaatgtatcctgcagactttttctttttacaggtttgccacatgggtatattacctaaggctgcagtttaggcttctaatatacccgtcacccaagttgtgaacatagtacccggtaagt

SEQ ID NO: 401504 - DNA, 544 bp, Homo sapiens
tgattattatttattaatttgatatgcgttcagttgtccaacatggtaaactcattttcactcttgccctttgaaatatgagggtttaatgaaagcatccacataattctaaattacatgatgataaaaacatttttcttcttagccaacagtgtgttctttgatttagaaacagtggaccgttaagactggagtagataaagtggattaggtcaaggaaggggatggaaaggaaacatgaattgaacaacaaagtaatgtaatgtatccttttaaaattatcttgaaaaaataaatgtaattttgaatatttatcacaggtatggattttatttttattatatttcaaagagatacttagtagtaataactggatatccaaagccttcttttatatctactttttttttttttttggttttgtaaatgtatcctgcagactttttctttttacaggtttgccacatgggtatattacctaaggctgcagtttaggcttctaatayacccgtcacccaagttgtgaacatagtacccggtaagt

SEQ ID NO: 401505 - DNA, 549 bp, Homo sapiens
catccttgacttgctagtttcttctattgacaactttaggattcacttgataaatatggaagagaagtgtccccaaatgtaccatatactgccttcaacatcctcataaactttcaagtggcatgcccctttcttagtaataaggggtgaaagaggcaataacttgtatttaacttcacaaaggagcattctagcatacttctgacacccaaaatgttgactaatttagcaaatgactgaatcctcatggagtttatatcctaccatttccatgttcataagtatctgactagggcatacaaaatacttaccacatactgcttatcatgttcagttagcatgatatcattcatgcagcagayaaggatgatatcccacagaacattaaaacaatcaatgacccaacagactatattgtgacagaccacaggggtgttactttagtgatcaagatagtgaatgtgcactactttctttcccataaattagcaaactactttcaattccctttattgataaatttgaaaagaacaagtgtgaaaggctggg

SEQ ID NO: 401506 - DNA, 549 bp, Homo sapiens
catccttgacttgctagtttcttctattgacaactttaggattcacttgataaatatggaagagaagtgtccccaaatgtaccatatactgccttcaacatcctcataaactttcaagtggcatgcccctttcttagtaataaggggtgaaagaggcaataacttgtatttaacttcacaaaggagcattctagcatacttctgacacccaaaatgttgactaatttagcaaatgactgaatcctcatggagtttatatcctaccatttccatgttcataagtatctgactagggcatacaaaatacttaccacatactgcttatcatgttcagttagcatgatatcattcatgcagcagacaaggatgatatcccacagaacattaaaayaatcaatgacccaacagactatattgtgacagaccacaggggtgttactttagtgatcaagatagtgaatgtgcactactttctttcccataaattagcaaactactttcaattccctttattgataaatttgaaaagaacaagtgtgaaaggctggg

SEQ ID NO: 401507 - DNA, 562 bp, Homo sapiens
tttctattttggtttagtaacatagggatacaaattacatcaacttcaaaacatttaatattcagttctgagtaaggcaacttggaaagtaaggcacatttacatttcagttcaactatttaactaatatttaatgaatctactgtgaaaaaagtacaatgctgagcagagaggagattgcaaggaaaacaaaacaacccctactgggtagttttccaaataaattgagacattgaacataatcacaaaactatgataggatgataaaacaatatgacagactcaaataamatccattggtattcaccggaaaataactagctcatctttgaggccgaataatattttggcatacagaaatacagaaggcaaggcattcagatagagagaatggagtcaagtattcacatgtcatgagtaatttatagagtagttaattgttcagtgtgtttggtacacagccagcactaatgttagattgtggcccccttgtggggaactttgaaggctaagatgagaagcgtggacctcattcatcaggaaagccaatggagatactaac

SEQ ID NO: 401508 - DNA, 592 bp, Homo sapiens
ttagtgccactttttttccttctcccagcaaccatggtgatattttcatgcatttatcattgcacacaaacaaaattccttagcatgatcttcaagaatctatacgaacctagcacctgcctacttttctcaatcttatgttagattcttcacatactcactatgctcctgaagactaaggaaactaatgagataaaaggactttcagagtcacaaggcrtggaggtaaaatgatcttgaagctcactgaaaactgaatgatttggggttggggggcacctcttatgtgacaacagatctctcagtggtatcagccaaaccttggggcaccattggtggtaatatctttcatgaaacaagaagagtgtaattattctgttatacacttggtcatttttgatggtcataataatcataatcaacctagtacactgtgaacagaatttcttgttgattataataatcataatcatttgaattgattgactttaatactcacaggagttctttggggtgggtactcatcattttttacagataaggacactgaggctctgagaggttagtgatcttctcaagttcacacagttta

SEQ ID NO: 401509 - DNA, 560 bp, Homo sapiens
gcatgcctgtaatctcagctacttgggagactgaggcaggagaatcgtttgaacctgggaggtagaggttgtggtgacccgagatcgtgccattgtactccagcctcrgcaacaagagcgaaactccatctcaaaataaataaataaataaataaaatctgtttttataatttttttctcaactctagtatgtgcatgctatccactttttttaaaaaaagtttttaaatacagtaattttagttattttaaattttctgtttcatagttccatagttccatatttggatcatatatggacctggttttattgattccaatatatcttgccagcatattgtttttctcacttcattgttctgtaattttttgatagatactggacattgtgtctgagacaatatagatgaaaataaatattgcttatgtgtgaaatgaacatgtctctttatgctagacttttagcctggcagattgagttaatctagtcagggtttgagcaagatttaggttttgctgttgcaatgatttggggacaccattggtttaaatgttttcta

SEQ ID NO: 401510 - DNA, 534 bp, Homo sapiens
taccagtctacagtggtcatttttaccagagggaaagygatacaatttattaaataatatgtttatagccataaaatccctagcaattgttcagctttctgattttatagatgaagaaaatgaaccagaaagtttgagtctctagaggagtgtgtgtgtgtgtgtgtgtgtaaattttttaaacatgggttatatacattgtatatatatcatatgtataatatagacatgcagaatataatatatggatatatgcatgaatatttatacacacacacataaatacaaatttatggagactcaaccttttggggatgtgtttctccatgtatatttacacacacatatatgtttgtgtgtgtgtgaagcagaaagaacggtaattcataccttcgtcttctagaacagtcctttattttcactgcagaattgctatataatcttaaaataaactgctttaatgctgttgatagattcctcattaatagagctaataattttctacccttagtaaaataacttttcaatagagta

SEQ ID NO: 401511 - DNA, 571 bp, Homo sapiens
agaattcttaaatgacaactttttctttctagcctcataccagtctacagtggtcatttttaccagagggaaagtgatacaatttattaaataatatgtttatagccataaaatccctagcaattgttcagctttctgattttatagatgaagaaaatgaaccagaaagtttgagtctctagaggagtgtgtgtgtgtgtgtgtgtgtaaattttttaaacatgggttatatacattgtatatatatcatatgtataatatagacatgyagaatataatatatggatatatgcatgaatatttatacacacacacataaatacaaatttatggagactcaaccttttggggatgtgtttctccatgtatatttacacacacatatatgtttgtgtgtgtgtgaagcagaaagaacggtaattcataccttcgtcttctagaacagtcctttattttcactgcagaattgctatataatcttaaaataaactgctttaatgctgttgatagattcctcattaatagagctaataattttctacccttagtaaaataacttttcaatagagta

SEQ ID NO: 401512 - DNA, 553 bp, Homo sapiens
acagtcctttattttcactgcagaattgctatataatcttaaaataaactgctttaatgctgttgatagattcctcattaatagagctaataattttctacccttagtaaaataacttttcaatagagtagtgattcttactttggagcctaagwagcttctacaactaaaagtttttcatttaacttccttctgacttctctggtagcttgcacataattgagaattatgtcaataattctgagcagatgttatgtctgtctctgtgtgttttgtgaatattgtcatgtttctgcagtgagaagaaaggataagtttcttctactgacattcagagggctggtgccagtgttaactctaatttcatcatttctatctgattgccactgtcagtacctcatattactaaatcaccaactgagaagagttcttattgccagcaaatggccacgatgtagaataatccatacacagtgggtttatcctgaagtaatcttagaaatatttttggctgctgaagatactgaatctttaccctgcaataaactatgtt

SEQ ID NO: 401513 - DNA, 553 bp, Homo sapiens
acagtcctttattttcactgcagaattgctatataatcttaaaataaactgctttaatgctgttgatagattcctcattaatagagctaataattttctacccttagtaaaataacttttcaatagagtagtgattcttactttggagcctaagaagcttctacaactaaaagtttttcatttaacttccttctgacttctctggtagcttgcacataattgagaattatgtcaataattctgagcagatgttatgtctgtctctgtgtgttttgtgaatattgtcatgtttctgcagtgagaagaaaggataagtttcttctactgacattcagagggctggtgccagtgttaactctaatttcatcatttctatctgattgccactgtcagtacctcatattactaartcaccaactgagaagagttcttattgccagcaaatggccacgatgtagaataatccatacacagtgggtttatcctgaagtaatcttagaaatatttttggctgctgaagatactgaatctttaccctgcaataaactatgtt

SEQ ID NO: 401514 - DNA, 386 bp, Homo sapiens
ttgtttctaatttatgaagtattaggaggagaattattttagaaataaatgtgaaatataataatataaaaatgaaatatttatatgtataaaatgtagtagcacaaaaagctacagaaaaaccatgtaatgatattaacaaacaaaatgcctctatgagaaagcttttgtttgatcggaaaactcatttaattacagtgctctttatataataaaaacgtgacataagcatcatgagaagaaagtagaatatttaaaagataaattatttctgtgcctacaaaaatstgatcaaaatttgtgtgaaaactcaccttccacaggcaaatgcacaatagacatatgtacaataaatatactgttggagctatgttctctttcctaac

SEQ ID NO: 401515 - DNA, 616 bp, Homo sapiens
  misc_feature (1)...(616): n = A,T,C or G
tttcaccacccaggtattaagcttagtagccattggttatttttcctgatcctctcccctcctcntaccttccaccctccaataggcccattgtgtgttgttcccctctatgtgtccatgtgttctcatcatttagctcccacttataagtgagaacatgctgtattttcctgagttagtttgctaaggataatagcctccagctccatccatgtccctgcaaagaacataatctcattctttcttatggctgcatagtattccaaggtgaatatgtaccacattttcagtacttttttattatgtttagatgtctcacatttatgaaaggctacttttaaacatatgtgtgtgtgtgtatatatatatatacatatatatatatttgtatttagttgttccttaaatagtcttttctgagcataaagtcacctccctctcccatattatcttcaactacccatccttccagttatttatagagatacatattggatttgttgatatggagaaacagacagtatgtctccttaagcamctctactagagttatgccatttttaagtgctttactgtgtcatttttttacatgtattagactttaacattccatctt

SEQ ID NO: 401516 - DNA, 554 bp, Homo sapiens
tctctgccacatgaataaagagaacagaatggaatactatttagcattgtttcggcaaattgtcactgaagacataaatactttgacatattttctttcataaggaaagcaacagaaaggcataaaattacttaaatatgtaattcaaaaaaataaagatcatggtaaaattaatagcataacaaaggaaaaatattaacattaaatgaatgaaggacagaactaaatctagttagacaagagataattgcaaatatttcaagcatcaatacaaatgtcaaaaactttatatatacttacataagtatacatttacaattattcacttatttactactttttaaagtacaaattatactctagctctaaaatgccaaattaastaaactcaattaaattaactaaactacaattttcatagagaattgggaaaggaaagaagagagaacgttaatggctgcttaattcctgataccaaggaggaggtatttaaaatgctgttggatagaaatctagaattgatcaaatcaaaaccaaagtgaaacaaaaggcat

SEQ ID NO: 401517 - DNA, 559 bp, Homo sapiens
aagttacccagtctcaggtattcagttataggagcaaaaaaatggactaggacattctgttaggtccatttggtcaaacgggcaattcaaaattagaattttcttattttttttgtcttgttgatttatttatttttaaaagtggggtactgaaacccaatactaatattttatttctatttctcccttccattaatatttgttttatgtatttaggtgcttctctgctgggtgcatagatatttataatggttatttcctattgacaaattgacccctttatcattaaataatgaccatttgtctcttgcaatttttgacttgaagtctttttatcagatataagtatagtcacccctgttctctttcagttaccatttacatggaatatcttctttcatccttttccattcagctcatgtgtacctttaaagcttaagttggtctcttgtagacagcatatcgttagatttttttttttttwaattcactcaaccattctgtcttttgattggggaatttaattcatttcaactcaaggttacctttgataggtgag

SEQ ID NO: 401518 - DNA, 631 bp, Homo sapiens
tttcatcttttttatgttaaataagctttctgaacatttatctgtctcttctccttccataattttcataatgtgaatgaatatctgtttgctcaatggtgtctcataagtcctctaggatttcttcactctttatcattcttttttctttttatccctctgamcaagtcatttcaaaagacctaccttcaagttcacaacttttccttgcttgatctagtctgctcttgaagctctcaacagtatatttgttttattaattaaattatttagctccaagatttctaatttttttatgtatgtacctctttgttgagtttcttattcagatgatgagttattttcctgattttaatgcattatctatttgtatccttttatatctcactgagtttccttatgattattaatttgaactttttttcaggcaattcataaatttctatttttgggaagtatattactaaagaggtatgtgtttctttggtggtgtcaggtttctttcctttttatatttcttacatgccttttgttgatgtttgcacacctgatggtgcagtcaccacctcctttacagagtggctttcattggagaagactttcacctgtagttggccctgaaggtgccagt

SEQ ID NO: 401519 - DNA, 631 bp, Homo sapiens
tttcatcttttttatgttaaataagctttctgaacatttatctgtctcttctccttccataattttcataatgtgaatgaatatctgtttgctcaatggtgtctcataagtcctctaggatttcttcactctttatcattcttttttctttttatccctctgaacaagtcatttcaaaagacctaccttcaagttcacaacttttccttgcttgatctagtctgctcttgaagctctcaacagtatatttgttttattaattaaattatttagctccaagatttctratttttttatgtatgtacctctttgttgagtttcttattcagatgatgagttattttcctgattttaatgcattatctatttgtatccttttatatctcactgagtttccttatgattattaatttgaactttttttcaggcaattcataaatttctatttttgggaagtatattactaaagaggtatgtgtttctttggtggtgtcaggtttctttcctttttatatttcttacatgccttttgttgatgtttgcacacctgatggtgcagtcaccacctcctttacagagtggctttcattggagaagactttcacctgtagttggccctgaaggtgccagt

SEQ ID NO: 401520 - DNA, 631 bp, Homo sapiens
tttcatcttttttatgttaaataagctttctgaacatttatctgtctcttctccttccataattttcataatgtgaatgaatatctgtttgctcaatggtgtctcataagtcctctaggatttcttcactctttatcattcttttttctttttatccctctgaacaagtcatttcaaaagacctaccttcaagttcacaacttttccttgcttgatctagtctgctcttgaagctctcaacagtatatttgttttattaattaaattatttagctccaagatttctamtttttttatgtatgtacctctttgttgagtttcttattcagatgatgagttattttcctgattttaatgcattatctatttgtatccttttatatctcactgagtttccttatgattattaatttgaactttttttcaggcaattcataaatttctatttttgggaagtatattactaaagaggtatgtgtttctttggtggtgtcaggtttctttcctttttatatttcttacatgccttttgttgatgtttgcacacctgatggtgcagtcaccacctcctttacagagtggctttcattggagaagactttcacctgtagttggccctgaaggtgccagt

SEQ ID NO: 401521 - DNA, 651 bp, Homo sapiens
aaggtatagaatatattccatattacttattgtcatagtgtgccaagctaataaattaaaaattattaatgttgaaacttaaaaaaatraaaagatctttgccaagttgagagaagtggatttggacttgcccaagcactaagaagcagaaacatttattatgtgcttccatcactttgtgtgagggatacgtggtggtatggatataggctgtaacttataacagatgccaaagtagaaatagatttggaatttataaaaatcttacatttaaaggaaatattttgctggttgtattgtatcagcaatttaaatatatttcctaataccgttgtaaggaggaatattttgaaagtgcttaattcatgaaaaaaaatatgttaacaaaatggatataaattctatttatggccaggagtctgctttggggaaccccaccctcactcacagcccagactgagatccattaaggaacctgacctgcaggggcttgtgtttctgctacttccccatggactaaaggatagtgctgttcactgtagtaagacaaatatatttcctgttaattttttttactgtaaataagatggcttttcttaaatgtaaatagggatgtttcatttatttaaataaaattttagaaattggcat

SEQ ID NO: 401522 - DNA, 559 bp, Homo sapiens
atcaagttataatcaagatcttggtgtttctgccttatcagagttaagtaccttgttaacaggagcccgtaaggacagggaaaagagcaggtgtttgaaattatatayctatagaatgttaaattcctggtgagcttccatttagttacgtaaaaggcccacataaaactagccagcaccattggttacagaaggaataaaatatttggcaaaatatttgcaaatatttgccaggtaagatcagagagctaaatatatacatgttatagcaatgtgaacaaaagtaaagaaatgaaagatcaaagaggataatcaaccaaatgtgcaaataatctgaaaatcaaaattcaaacttaattttgtataacaaaacatcctctaaatagaactaatccatctgtacatttttcaaaaaatctctttattttttggagaaggaattgtgtaatcgtctttggaattattctattattaataatttctaataagaaatgctattcaaaagttctcttttatcttttcaaaaagatgaaatttattttattttaaacaacaaaag

SEQ ID NO: 401523 - DNA, 559 bp, Homo sapiens
atcaagttataatcaagatcttggtgtttctgccttatcagagttaagtaccttgttaacaggagcccgtaaggacagggaaaagagcaggtgtttgaaattatatacctatagaatgttaaattcctggtgagcttccatttagttacgtaaaaggcccacataaaactagccagcaccattggttacagaaggaataaaatatttggcaaaatakttgcaaatatttgccaggtaagatcagagagctaaatatatacatgttatagcaatgtgaacaaaagtaaagaaatgaaagatcaaagaggataatcaaccaaatgtgcaaataatctgaaaatcaaaattcaaacttaattttgtataacaaaacatcctctaaatagaactaatccatctgtacatttttcaaaaaatctctttattttttggagaaggaattgtgtaatcgtctttggaattattctattattaataatttctaataagaaatgctattcaaaagttctcttttatcttttcaaaaagatgaaatttattttattttaaacaacaaaag

SEQ ID NO: 401524 - DNA, 559 bp, Homo sapiens
atcaagttataatcaagatcttggtgtttctgccttatcagagttaagtaccttgttaacaggagcccgtaaggacagggaaaagagcaggtgtttgaaattatatacctatagaatgttaaattcctggtgagcttccatttagttacgtaaaaggcccacataaaactagccagcaccattggttacagaaggaataaaatatttggcaaaatatttgcaaatatttgccaggtaagatcagagagctaaatatatacatgttatagyaatgtgaacaaaagtaaagaaatgaaagatcaaagaggataatcaaccaaatgtgcaaataatctgaaaatcaaaattcaaacttaattttgtataacaaaacatcctctaaatagaactaatccatctgtacatttttcaaaaaatctctttattttttggagaaggaattgtgtaatcgtctttggaattattctattattaataatttctaataagaaatgctattcaaaagttctcttttatcttttcaaaaagatgaaatttattttattttaaacaacaaaag

SEQ ID NO: 401525 - DNA, 596 bp, Homo sapiens
tgaatacaaaaactcttagaactaaaacaaaattcacaattttaatgtaagattgcatttccctattttaataattgacaggataaattaaaaattagtaaggatatagaagccttgaacaaaatgcccacctaactttacctaattgacatttagactaaygctccaacccaaaaagaacagacgacacattctcttcaaatctacatggaaggttttctaaaatagactgtgttctgggccttaagaaaagtcttcataaatttgtaatgattcaggttatacaaactattttagttgaccatatggaaataagtgagaaatcaatgacagaaatatacctgaaaattcacaatacatatttgaaaactaaataacctattttaaataatgtaaccatgggtcacaagataaaccaaaagggaaaagataaagttaaacataacatattaacatttataaccttccagaaaatcaaaatggaggatatatttttcaatttattctgtgaagtcagaatcatcctgacattaaaaccagacaaggacattataagaaaactacagaacaatgactctaataaatgtaaatataaa

SEQ ID NO: 401526 - DNA, 596 bp, Homo sapiens
tgaatacaaaaactcttagaactaaaacaaaattcacaattttaatgtaagattgcatttccctattttaataattgacaggataaattaaaaattagtaaggatatagaagccttgaacaaaatgcccacctaactttacctaattgacatttagactaacgctccaacccaaaaagaacagacgacacattctcttcaaatctacatggaaggttttctaaaatagactgtgttctgggccttaagaaaagtcttcataaatttgtaatgattcaggttatacaaactattttagttgaccatatggaaataagtgagaaatcaatgacagaaatatayctgaaaattcacaatacatatttgaaaactaaataacctattttaaataatgtaaccatgggtcacaagataaaccaaaagggaaaagataaagttaaacataacatattaacatttataaccttccagaaaatcaaaatggaggatatatttttcaatttattctgtgaagtcagaatcatcctgacattaaaaccagacaaggacattataagaaaactacagaacaatgactctaataaatgtaaatataaa

SEQ ID NO: 401527 - DNA, 606 bp, Homo sapiens
ttttattacaggaatgaatgttgacttacacttcaaagttcaatcaatataattcacaattttaacaaactaataaaggaaatccatataatcctttcaacacgagcaggaaagtaagtgacataaccccaaatccactgatgatacaaattcttaccaactaggaattaaaaaaaaaaattcctcaacctaataaaggtcaactatgaaaaacctagatatagcatcatacataatgataaaagactgaatgcctttttcctgaggtcaggaataacacaagatatcttcttttaaatcctctatcactgcactggaagttctgacaagtgcaattagacatggaaaagaaataaatgcatccagatggaaaaggaagaagaaataatctttatttgcaagtgaaataaatgtttatgcagaaaatctgrtggaatatttaaaaaattttaaaactaataagtgaatctagcaaagttgtaagattaaagaaaaacaatattaaagattagttttatttatgtgtactagtaatggacagatattgaaattttaaaatgcttttacagtagcacaaaaatgaaattcttcaaaatgaatctaata

SEQ ID NO: 401528 - DNA, 606 bp, Homo sapiens
ttttattacaggaatgaatgttgacttacacttcaaagttcaatcaatataattcacaattttaacaaactaataaaggaaatccatataatcctttcaacacgagcaggaaagtaagtgacataaccccaaatccactgatgatacaaattcttaccaactaggaattaaaaaaaaaaattcctcaacctaataaaggtcaactatgaaaaacctagatatagcatcatacataatgataaaagactgaatgcctttttcctgaggtcaggaataacacaagatatcttcttttaaatcctctatcactgcactggaagttctgacaagtgcaattagacatggaaaagaaataaatgcatccagatggaaaaggaagaagaaataatctttatttgcaagtgaaataaatgtttatgcagaaaatctggtggaatatttaaaaaattttaaaactmataagtgaatctagcaaagttgtaagattaaagaaaaacaatattaaagattagttttatttatgtgtactagtaatggacagatattgaaattttaaaatgcttttacagtagcacaaaaatgaaattcttcaaaatgaatctaata

SEQ ID NO: 401529 - DNA, 577 bp, Homo sapiens
ttatcttgattatgctcaaaatattggtataaagttactttaaacttcaaatgaaatatcagacaccaaagtcttgagatattttgygagaaaatattcttaataaaacagtaacgttatgatgaaattgctactctattttttaattagaattcaatatattatatagagaactacatttctaggatctcccaaattgtaaaacttatgctattaaatttaacatgttattcagcaaccaagttgttattactattttctctcggcagtagctccatcatattctgcacagtataaaaaccttatttactgtggtgctttaagttgcctcttctgcttctacagcagttttgaaaatgactcagcataaactctttctaaacctattcttagtgatcctgtagtacttctgacctgctctgcttcggaggtacaagacaaaactgaggatttgcaagttcttgtaaagaagggtcttgagtctctggcagtatatttgatctttgctttcctgactaaagatgtatcctttgtaataaaactctctgtatgcaccaagctttggtaaaaatacaag

SEQ ID NO: 401530 - DNA, 594 bp, Homo sapiens
ataattaattacaataattgttatataataatatattacatattgcaacaattatatatcatatgataaataattgatattattatattatattaattatatatgtattgctatatatayatatattcctatattttttgtgggcatttggtggagtcctatgaaaaagagcttgagagtgagcgtcaccctcaattattctgaagttgtcagctattttcagggagtaaactggcccacacgtgacctttaagaattcatgaaaatttaattgtttttttctgacttctttttatgacagcaacttttcctcccctactgtgtagatacagaagcaatccatatattctgtcttactaaacttgcatatttttagaattcagttcagtggcagaatatatggataacttcactacttcagattgcccttcaagccaaaagcctaggaagacttctcctatctctttttccttcaagttcaccgcatccatgttgctgccactaactcagaaaactttcataaaagcatgaaagatttctttggattagaaagaggaaagttggcaatgatgactacgttataaaattaaagtg

SEQ ID NO: 401531 - DNA, 594 bp, Homo sapiens
ataattaattacaataattgttatataataatatattacatattgcaacaattatatatcatatgataaataattgatattattatattatattaattatatatgtattgctatatatacatatattcctatattttttgtgggcatttggtggagtcctatgaaaaagagcttgagagtgagcgtcaccctcaattattctgaagttgtcagctattttcagggagtaaactggcccacacrtgacctttaagaattcatgaaaatttaattgtttttttctgacttctttttatgacagcaacttttcctcccctactgtgtagatacagaagcaatccatatattctgtcttactaaacttgcatatttttagaattcagttcagtggcagaatatatggataacttcactacttcagattgcccttcaagccaaaagcctaggaagacttctcctatctctttttccttcaagttcaccgcatccatgttgctgccactaactcagaaaactttcataaaagcatgaaagatttctttggattagaaagaggaaagttggcaatgatgactacgttataaaattaaagtg

SEQ ID NO: 401532 - DNA, 669 bp, Homo sapiens
attttgattcatacaccatggttctaattttctgtaacagagtaaagattctaaagttttcatgaaaataggaaaacaagaaaagagaaaatgagcattgtgtcatggagaaaaacaccacaatcacacactggttacttggctctcaacctaccattctgttatttcacttcagttaagtatcactttccaatgattgctataaatattttattcctaataaacactacaccttgcgtgatgcaggcaaatcccttgaaacagggcttaacctaaagtgaatgatcagtaagtggtagcaattgtaataattaaggggaatgaagtcattgtacaatattaaagttccaatgattgtcatacaatgattttatgtatatatacatatatatatgtatatatatatgtatatatatatgtatatatatatgtatatatatatgtrtatatatataatcacaatgcagggtataaaatttattcagactaaatatagatctcaggactgtagttttctagtgtaatcaactgaaaccacctttatttttttcaaaatcccacaccatggtgcctttatgttcagaatgtgttcatgataaagttagttttctattttgcttttctgcagatgattaggattttgttttcctgggggaagttggccatgag

SEQ ID NO: 401533 - DNA, 584 bp, Homo sapiens
acaaaactgtgtctcccaaaagagacagttaattcttaacaaattgtcaaagacaatttttggacggaacacatgctgtgcctgtgacatacacatgaccactgagcacctctggcatcctctcagcttccacactgctaacattggcaatgtctcaagagccttagaaaacacagctggaggcaaaaatacattgtggacattttatttaggagatgaaaatktaggtcaatgagagtgaggatggagaaaaatgaggaagagaatgatgggataaatggaaagaaatttattacatggcctcactgcttcacaaaatgtaaacagataccacagatgtgtccagcttgcctcagagctatcttcagacaggctctccagtaagccacatctcagaagaggccacgggaatgagaaaggacatagaatttatccgttaggctctgccgtcttctgtttctccttggccaaagcccattctgtaggaagttaactcccacgcacttggggtttgaacattctaggctctctgatatttcatttcagtgtggaaatggcatgaggaggccaaactagccagggac

SEQ ID NO: 401534 - DNA, 584 bp, Homo sapiens
acaaaactgtgtctcccaaaagagacagttaattcttaacaaattgtcaaagacaatttttggacggaacacatgctgtgcctgtgacatacacatgaccactgagcacctctggcatcctctcagcttccacactgctaacattggcaatgtctcaagagccttagaaaacacagctggaggcaaaaatacattgtggacattttatttaggagatgaaaatgtaggtcaatgagagtgaggatggagaaaaatgaggaagagaatgatgggataaatggraagaaatttattacatggcctcactgcttcacaaaatgtaaacagataccacagatgtgtccagcttgcctcagagctatcttcagacaggctctccagtaagccacatctcagaagaggccacgggaatgagaaaggacatagaatttatccgttaggctctgccgtcttctgtttctccttggccaaagcccattctgtaggaagttaactcccacgcacttggggtttgaacattctaggctctctgatatttcatttcagtgtggaaatggcatgaggaggccaaactagccagggac

SEQ ID NO: 401535 - DNA, 584 bp, Homo sapiens
acaaaactgtgtctcccaaaagagacagttaattcttaacaaattgtcaaagacaatttttggacggaacacatgctgtgcctgtgacatacacatgaccactgagcacctctggcatcctctcagcttccacactgctaacattggcaatgtctcaagagccttagaaaacacagctggaggcaaaaatacattgtggacattttatttaggagatgaaaatgtaggtcaatgagagtgaggatggagaaaaatgaggaagagaatgatgggataaatggaaagaaatttattacatggcctcactgcttcacaaaatgtaaacagataccacagatgtgtccagcttgcctcagagctatcttcagacaggctctccagtaagccacatctcagaagaggccacgggaatgagaaaggacatagaatttatccgttaggctctgccgtcttctrtttctccttggccaaagcccattctgtaggaagttaactcccacgcacttggggtttgaacattctaggctctctgatatttcatttcagtgtggaaatggcatgaggaggccaaactagccagggac

SEQ ID NO: 401536 - DNA, 333 bp, Homo sapiens
tggattagatctggcgtctccactggagcagaaaaatagtcttactatgtggccgtgatttggtraatgttttctttcattagtcaagaggatacatataattttaccttcaaggtaaggatatcagtaatctcactgtctcgcctcaaggcaatgttatcaaggcaatgttgactcttctgccttcacaacatatttacattctgcgaaacagcccactgcaccatcatattgatgatatcatgcttatctgacctggtgaacagagatgtttttaaaagtctgtataaaaacagcatacactttctacaatttataaagaaacaaagttct

SEQ ID NO: 401537 - DNA, 333 bp, Homo sapiens
tggattagatctggcgtctccactggagcagaaaaatagtcttactatgtggccgtgatttggtaaatgttttctttcattagtcaagaggatacatataattttaccttcaaggtaaggatatcagtaatctcactgtctcgcctcaaggcaatgttatcaaggcaatgttgactcttctgccttcacaacatatttacattctgygaaacagcccactgcaccatcatattgatgatatcatgcttatctgacctggtgaacagagatgtttttaaaagtctgtataaaaacagcatacactttctacaatttataaagaaacaaagttct

SEQ ID NO: 401538 - DNA, 604 bp, Homo sapiens
tatttaaccaagtgcaaggttaacttgttttaaccaattattcccaaaccaaattcagttcaccgctgtgctgatttagaaatgaaacaaggggagcctgagataacaagatggagaacatttgtctacaccaatcactgagctaatcttaacactttaggatagcagcacagagctcagctttcctgagagatcaacagggtacctgcctatggtgctagctgagggacaggctgcaggtcactcactacttgggaaacattgagaggaaagaatgaagtcagcgtctacaccccaagtgcaatgactggtcccctttaaatgtccatctcttgaaaacgtcaccaaacaatgtctataagcctgagcatcgccctttcttctttgtgtgcaagacagttttgttctgtttgctttttttgatccttgaacatatttcatttcttgagcagaaacagagaaacagttttgatctggcctaaagacagtcacaggatcgtgcctttaatgcaatattaggtaatactttctaataatgaatacrttcattaaataagaatgtatagtgcaggaaaaataaaaatatctcagtcttttactcaca

SEQ ID NO: 401539 - DNA, 606 bp, Homo sapiens
aggggaaagctctcactgaagtgatcctaggctcccatatgttttatgggctgaattgtatctctctaaaatttataagtcacagacgtaaccccagcacctcagaatgtgactgtatttggagacagggcatttaaagaggtgattaagttaaaatgaactctctgggatgggccctaatccaatctgaccagtgtccttagggaataccaagcacctattaagcagaataaaataatgtcccttgtggcaaaatggatacagctggaggccattatcctaagcaaactaacacgggaatagaaaaccaactaccacatgttttcactcataagtgggagttaaacattgggtacacatgracataaagttggcaacaatagacactggggactactgggggtggagggagggctaaaggttgaaaaactaattgttaggtacaatgcttcgtacctgggtgacaggtcacttgtactccaaacctcagcttcatgcaatacatccatgtaacaaacctgtacatgcacctccaaatctaaaataaaagttgaaaaagaaagaccaaaggagatttgatcacaaaaggagacaccagggtcattc

SEQ ID NO: 401540 - DNA, 613 bp, Homo sapiens
aactgttagtgtaaaattaatgctttacacctttctcaatgtgtagtttggaaaacataaaatatatagaatatactatactatatatatatataaaatatattttatatataggattctggaagctggatgcaaagggtgttgggaggtctcactacttagaaaacaagtttaggttaaacccttcctttttcagtaggtatcctctcaatctgctgtacttggtgtcctgaaatttacattccaatagtttaagcattgatttaattccaatttaatttatgataaaagagtattcgcttcatggttaagtagaataagttaaaacaatctatatatttagtttcagtttatattaatgttcaagccatattgatattttcctttttttttttttccagatgaaagatttgtgcctttaattccaggactttctgggattttcgattggaaatggtttggttcattwggcttctcatttaagtgctttcgtttggtcctttttcttctgttaaacccatttactttcatcttcaaaaatgttagatatctcctgtgttgtgattgtctcacctgttcttgtttttcttgttcttcttctctactgagtttg

SEQ ID NO: 401541 - DNA, 631 bp, Homo sapiens
ttgtatatgctttagaaacagttggaattatgcactgtcctattgcaagtgggctacacagattgcactcgagtttcttttcttagctggttgccatgtctttacccaggagagaatttagcaactgcttcaaggtataggtaagtaccaaaaaacatcagggctgaccagataagcctattgtagaaataaaattaatctatttcaacactccctggaatttatgaacaattttcagtaacataatctcaagcgtgtagcattggaattcccacacataagaaaggtggatattgaagagattacttagaaaagtaaaagggatgcgatcatatttaaactctgagtttgttgaatattttatgctacttatattcaatacagcaagaatctggagtgactagaacaacataaacgtagraaatggtttctggaggaaggagattactctgaggaccctactgaagtatataatactactactaaataaatagacattttcatagaagcagagttctgatgctttacttataataatctcaagcaaataaaattgaaaacaaatggcaaatgttagtgaattataatgataagtattctcttattatcaggcattttgccaggctctcat

SEQ ID NO: 401542 - DNA, 559 bp, Homo sapiens
gttgcttttacatcctagtaataagaccttttggtaaatatacacatgctatttcctaccagattggaaatggagagtccttatcagcaaaaatgcttttagcattatgcataaattttgcaggcctagctagctgaagaatactgataaactgtgtaaataacggtatataaaaaatggagatattctgtaactaaatgtgttctatgttagccatatattctcatgcattactcaacataaactttacgtgtttagtcctaatatgggagaaataatactgtggggagatgcattagatggtcagagaccactctaaagaaagaataatttgttccatgtgattgcccatatcctttgaatcgttaataaaacatgttactgagtacagtatattgttattcaaatcagtgtgagtctgatttgataattgaacctttattagtaccacaaattgccactataagcaagattgtctttcartctatgaatcctaattgctaaggcactttcaacatgaaaacagaggagatagaaaatgttgacaaattaatatcag

SEQ ID NO: 401543 - DNA, 561 bp, Homo sapiens
aattgactctgtagataaacacagagtctgaagcataaggaaagctaacaacagatcctattgtctgtttttgacagcccagacaaaagatcatcataacccacgtttttatgattaatggaaagaatcctcctgcttccttggccaccatggaagacaatatattcaatctcaragtaggttagctaagatcattgatgacctgagcgctatggctagctaactataatacaattttaatttaattaattttaaaacaaagtattctgttacatggttagaacaccttacagagaaatgccaacagaagcttaatgatgatttgctagcaagcgctgatcagaataatcattgtatttcaaatctgaatcacaaaaatcacatctagatgtcagggaaattaaaaaaaaaagatcaaaatatttctatcctacagactctttaattgaagaaaaatgtaaattccatttttatcattattaacaagtccattggaagtgttgcaggcaaatgacttggaaatgatgccaggcacaataggtcgaacctcagtttgtttgc

SEQ ID NO: 401544 - DNA, 561 bp, Homo sapiens
aattgactctgtagataaacacagagtctgaagcataaggaaagctaacaacagatcctattgtctgtttttgacagcccagacaaaagatcatcataacccacgtttttatgattaatggaaagaatcctcctgcttccttggccaccatggaagacaatatattcaatctcagagtaggttagytaagatcattgatgacctgagcgctatggctagctaactataatacaattttaatttaattaattttaaaacaaagtattctgttacatggttagaacaccttacagagaaatgccaacagaagcttaatgatgatttgctagcaagcgctgatcagaataatcattgtatttcaaatctgaatcacaaaaatcacatctagatgtcagggaaattaaaaaaaaaagatcaaaatatttctatcctacagactctttaattgaagaaaaatgtaaattccatttttatcattattaacaagtccattggaagtgttgcaggcaaatgacttggaaatgatgccaggcacaataggtcgaacctcagtttgtttgc

SEQ ID NO: 401545 - DNA, 513 bp, Homo sapiens
caatctcagagtaggttagctaagatcattgatgacctgagcgctatggctagctaactataatacaattttaatttaattaattttaaaacaaagtattctgttacatggttagaacaccttacagagaaatgccaacagaagcttaatgatgatttgctagcaagcgctgatcagaataatcattgtatttcaaatctgaatcacaaaaatcacatctagatgtcagggaaattaaaaaaaaaagatcaaaatatttctatcctacagactctttaattgaagaaaaatgtaaattccatttttatcattattaacaagtccattggaagtgttgcaggcaaatgacttggaaatgatgccaggcacaataggtcgaacctcagtttgtttgcagggtctcagtccttttctacaaaagsgatgtggaagatgccctccagcaagatcaagatcagacccagaaaactttcagggggaaggaagccttccagagaaggctgcaaatgccct

SEQ ID NO: 401546 - DNA, 551 bp, Homo sapiens
tacttccttcttaattcttctcaatttcaatatactcatggatgtttcttcatgcaactgatatacttttttttcctttagttcctttcctctaataatcttgtccttctcttccatcctataacaactaatttcttctataataaatgtcctgtgtctggtcattaccactgtatgcacctgctccacctgctctgtaatactacctcatcaccattatcttctatcttttcagctcattttctttagtactctgattctgagatatttcaaacccactggaatagagcctgtcatcttttcactgactattgttcatttggtagtttctttttccycattgccaagcttttcacctcttctctttttacatattggtttgcagggaggggcaggggagagccaaaaaaaatttaaaccacaaacctggttaaattaagttctccactacattgcacctgtgactctttcagtagaatgtgagaggaggaaaactcacaagaccactaattgattctacttaaaatttatgactataaaccccatgaatt

SEQ ID NO: 401547 - DNA, 551 bp, Homo sapiens
tacttccttcttaattcttctcaatttcaatatactcatggatgtttcttcatgcaactgatatacttttttttcctttagttcctttcctctaataatcttgtccttctcttccatcctataacaactaatttcttctataataaatgtcctgtgtctggtcattaccactgtatgcacctgctccacctgctctgtaatactacctcatcaccattatcttctatcttttcagctcattttctttagtactctgattctgagatatttcaaacccactggaatagagcctgtcatcttttcactgactattgttcatttggtagtttctttttcctcattgccaagcttttcacctcttctctttttacatattggyttgcagggaggggcaggggagagccaaaaaaaatttaaaccacaaacctggttaaattaagttctccactacattgcacctgtgactctttcagtagaatgtgagaggaggaaaactcacaagaccactaattgattctacttaaaatttatgactataaaccccatgaatt

SEQ ID NO: 401548 - DNA, 522 bp, Homo sapiens
ccaacaccaaaacatgtaccgggggcttgacctcttctgtatttacatctcacgtgctctttacctaagatttgctttacttttgacataaactgatattcacattcaagttttaattcagatgtcttatgtttttcaatcttcagaarcattttgtttccttgccaataattagtgcttacatgcaaatatgtatttttcttacatgaacttataaagaggcattgcaatggttaatatgttatctatttcttgttctgattattatttaacatctatttgtggcttatagcaataggtagagctattttatatacctggaatttaggttgagaaaatgccaaaatttcaaaaaatattaaaagagctagtgattattccacaatttttatgacagtgtttgaaatctaatgttgagaagaattaagacctagatatagtcaatagttactgtttcttaatataaacaggggcatacatgatttccatttacatttcactagccagaaaatgcacatggtc

SEQ ID NO: 401549 - DNA, 522 bp, Homo sapiens
ccaacaccaaaacatgtaccgggggcttgacctcttctgtatttacatctcacgtgctctttacctaagatttgctttacttttgacataaactgatattcacattcaagttttaattcagatgtcttatgtttttcaatcttcagaagcwttttgtttccttgccaataattagtgcttacatgcaaatatgtatttttcttacatgaacttataaagaggcattgcaatggttaatatgttatctatttcttgttctgattattatttaacatctatttgtggcttatagcaataggtagagctattttatatacctggaatttaggttgagaaaatgccaaaatttcaaaaaatattaaaagagctagtgattattccacaatttttatgacagtgtttgaaatctaatgttgagaagaattaagacctagatatagtcaatagttactgtttcttaatataaacaggggcatacatgatttccatttacatttcactagccagaaaatgcacatggtc

SEQ ID NO: 401550 - DNA, 522 bp, Homo sapiens
ccaacaccaaaacatgtaccgggggcttgacctcttctgtatttacatctcacgtgctctttacctaagatttgctttacttttgacataaactgatattcacattcaagttttaattcagatgtcttatgtttttcaatcttcagaagcattttgtttccttgccaataattagtgcttacatgcaaatatgtatttttcttacatgaacttataaagaggcattgcaatrgttaatatgttatctatttcttgttctgattattatttaacatctatttgtggcttatagcaataggtagagctattttatatacctggaatttaggttgagaaaatgccaaaatttcaaaaaatattaaaagagctagtgattattccacaatttttatgacagtgtttgaaatctaatgttgagaagaattaagacctagatatagtcaatagttactgtttcttaatataaacaggggcatacatgatttccatttacatttcactagccagaaaatgcacatggtc

SEQ ID NO: 401551 - DNA, 522 bp, Homo sapiens
ccaacaccaaaacatgtaccgggggcttgacctcttctgtatttacatctcacgtgctctttacctaagatttgctttacttttgacataaactgatattcacattcaagttttaattcagatgtcttatgtttttcaatcttcagaagcattttgtttccttgccaataattagtgcttacatgcaaatatgtatttttcttacatgaacttataaagaggcattgcaatggttaatatgttatctatttcttgttctgattattatttaacatctatttgtggcttatagcaataggtagagctattttatatacctggaatttaggttgagaaaatgccaaaatttcaaaaaatattaaaagagctagtgattattccacaatttttatgacagtgtttgaaatctaatgttgagaagaattaagacctagatatagtcaatagttactgtttcttaatataaayaggggcatacatgatttccatttacatttcactagccagaaaatgcacatggtc

SEQ ID NO: 401552 - DNA, 559 bp, Homo sapiens
gacatgcgttcattttcttgggtgcatatcaatgggaataatttatgaatcacaggccagatgatccttcctttttaagaaactggaaaatgctttccaaactggtataccaattgacctttttgtcctctatgtagaaaactttcagtttttccatatctcttgtatcacttggcatggttcaataagctttatactttcagcctatctagtaggtgtgtagtgatattgtaattttaatttgcatatctttaataagtattgatgtggatgtatttctatgttcttatttgctrcctacatatctatttggggggggtgtttctgctcaaatattatgctcatttttaactgtttagctattttcttatttttaaattttgagaattttgtgtatattttagatccaagttctttattagatatagaattcacaaatatttttccagtatgtggctggtattttcattcttagtttcttttgaagagcagaagttttaaatgtattgatttgttcttttaaggattatgctttttgtaatatctgagaaatcttggc

SEQ ID NO: 401553 - DNA, 598 bp, Homo sapiens
ggtgaaatgctacaatcagactgcatgtagtaaataaaggcagctatagtactgttcttccaaagtataataaagagaatttatttgcatgttatgaagatttcttttggaaagatccttataatttgattgacatttgtacaatttatctgaatgtacttaattcttaccaaatacatatgcataattggcaatgtacacatcaaatttgataattttaatatctcaactaaagaggaataatgcattgaaaatatccatgttaatattacaacaggtttctttcaaactgaaattagtatgctcacctaatctagaaacgttacaaactgcacaatgagtctaaataagcatttacaatttcatagcttaatcttgccttttgaagctggttatttcttggataaagaagggcattagtctacaacaggcagatgcacttytaatgtaatgctcatttactttaaggagttcattaaatttgccagatactccgaagttctcataaggatacatttagctcacagatataatacttgtttgttgttcatgagaaactacagagaaaaacatagttatgcatggacttgaattgttg

SEQ ID NO: 401554 - DNA, 465 bp, Homo sapiens
tctgcttaatctccttctttctgatctcactttaacctcttaataatttatcaaaatagactgtgatatttaccatttccagataagagtctatacattattaagttaaataatttactcttgaagtttgaaaattcctgaaataatattattccaaactgtgaactgctatgttattgttagtgttaccttcrtgatgatataaaaattgactacgcacttctgcttctctcttctcccatgaggcgtcaggcttgatgctgttttacccatcctagctttctgcagggtcaacattgctcatgctaccaactcttcagccaatctgaaggtctaggattcccaaccactccaccctgtcaactgacatgattccaggattcccctgcctttacgttaatctattgcaacaccactctctcaactgacactgcaatataacctcttattcaggcttcctgccac

SEQ ID NO: 401555 - DNA, 516 bp, Homo sapiens
gcattaattagcatgctaaaagacactcctgccagcaccacggcagcttacaaatgccatggcaacatcagcaagttaccccatatggtctaaaaaggagaggaaccctcagttccaggaattgcccaccccttcccgggaaaactcacaaataacaccccttatttagcatataatcaagaaataaccataaaaaatagccaaacagcagccctcagaactgccctgcctatggagtagccattctttattcctttactttcttaataaacttgctmtcactttactctatggatttgcctcaaattctttcttgtgtaagatccaagaatcctctcttggggtccggatcagtaacagctttaccatcacgtagttctgtgactttatgcctgttactaaaccttttcatctccccaaactcactctggcaaaaggggaaaacaatacctgacacatggagtaatgaggactgaatgaaataccacaccaagtcctggataaacattcagtgag

SEQ ID NO: 401556 - DNA, 587 bp, Homo sapiens
cccaacattctctgttaaaattagattgtactccagccaaagaacagatttcaatggcacttagatatatctcttataattgttaagaacatgtgcatggtcaacaaatatttctgaccgttgttgatttggtggatatttaaaaagatttagaaaatttactaagaaagaaaaatggaataaatatacaaactgtagaggacagtcacaggaccttgggaaggtggatggtcccctactaagattttggggtcccaaagtacaagctgtagcaaaactggacttgtgctagtcaacatcttgtttattttgtgcaaagctgccatctcaatttcacacacacgcaaaagcaaaaaacaaaataacggagcttgacttatctactaaaagctaatctatcctgaaagaatgtgttaaaattactcccagtaagagctgacacagtataaaagctgtaatttcccaactaccatcagtatgtgagattttgggaaagtcgatagaagcaaaggatgatttagtagctstatcaggaacatagttttcatatccacaaattgctacagaatcatggagtgtcactggct

SEQ ID NO: 401557 - DNA, 498 bp, Homo sapiens
taacaggaaccctcacctttaagttgctctaagctttgaactgtcggctctgaggcacttggccctggaagccctgatgtgagtggaagagaagggaaatgctgtggctagtgggtgagtgggtgactctcgtggctaggaactttggtggctcggaaaagggcacatccaggagctaggaggtggggttggggctgggtttactgggagaaatgggaagtatggcacaacagacttcagaaaataggatgtcaatgatgggaaagactcaggcagacaggggcttccaagttagaggagagcttggcagctggggatgcaggggtggtggctgttcactgcctgcatgggtcacctgaagtcaaatgcttgtaagcccaggtctgcccttatctcagcctttgtcatcaccgttagcttgagagcagggactgtgttgctcacttcctctgaccctcccrccatgcttctgacctgcgcacacacctggcgaaagag

SEQ ID NO: 401558 - DNA, 566 bp, Homo sapiens
cgttccagtcctggctgggtatgacctaaccaaatcataagaatttccaaatgccttggtttcttcccccacttggcaaaatgaaggcagaagagtcataagcccatctcaactgcattgtggagtgggtatcagagagaaacacaagtaaagtaccccttcctggagtacggtgcattgatcttaggtaggaggtgggggaaatgtgagtacgtgtttacaaataaagaccctgctagtgagaacagcagatgcagttagagttaggctctgcctgctgcttgtacccatcagtgtccattgcctcytctttcctcattcatgaagggacctgattcagcctttaccctcccaagtgctgttgtgggtggtatctcgtccatctaaaggaagtctgcaggcccctctaagaaagtttgctgccctactagataaagctgggtatccatgaagggtcacatggaaatagatcctggaaagggagataactgcatttccagactgatcttgagagaggagaagcaaagtgcatttgtgtcttactgatccagcatctttggaggagt

SEQ ID NO: 401559 - DNA, 576 bp, Homo sapiens
tgcttcagttaaggtctctttttttttaaaataattgggcagattgattccaggttcagactttctatctgggttgtttctgcttctcagatgttctccctttgccctccttcttaaatggcatctggagtagaggaagcctygatgtcctcatagcagtgggccagagcatcctggccttgagtgcttctcctgagtccttgcccttttgtcatcatgcatcctgctggcattcagggctggagttcacagctactgtgactcagtcttgaggtctcttggcacagtcactggcagactggtctctaccctctgagtcttggcctcaccctgcatcctgtacctggcctgggtggtctaccctgccatttagctatgaagcccccatccctgtctccatggcagcctcatggctggacccttccaccctcaatcttcagctctattacatgtctctcattggatccttgcatgccacatggaagtcaagtgactcttgtgagtgctctctggggcccctgttgatcagaactctacacaccaccattttctgtctactggggacatctcatgttg

SEQ ID NO: 401560 - DNA, 581 bp, Homo sapiens
tactaccctcattctaatagcctctcattccacatgtggcatgatcttccgaatttcaatcctgacctctctcatgcctcacctgtccagaccaaagagtcctagtgttcacaggtgtcttttcagtgacagcccgcttctcatctgatcaggccattgccctactccacaagacgtgcccactctctgaaagaaacgctgacactgcacagccagtgaaaagcagagacaggcctactccaggctcaggtaccagacctgagggctccttcctgcttttcttcagcattttgggaggcagtacacggcaaagacagatgcagagacctgcatgcgatcctgactcagtccatttctagctgtgtgacttggggcaagtcaatgaacctctttargtctcagttttctcatctataaaatggagataataaagcacttactggccagggctgttacgaggtttaaaggagatattctatgtagctcactgagaactctgcctggtccatggtaagtaatcaatatctgttattatcttcaccatcacccagtgcccttcatctcttctggggagaatttgc

SEQ ID NO: 401561 - DNA, 536 bp, Homo sapiens
tggttgggggggaaatgctgacccaattgggtgttctcaggcattaatccttcctaggtctggaatgtcattaaaattatctggagctgcattcttctcctttttgtatatcttacataatccaagagtctttcaataataagctttaaaaaattatttttgagacatcaaacacttgccaattgattttgtctttttcagaagtcagaaagttctgggtattttccagttctatgtctagttataactagacccatttcccytctaatagcacttgaaaccagaatagtactatttccagctaattttcctgtgcttcagaaggagttattgtttcattttgatgttgcagatgttctaactcaaaggaacgaggaagtcagattcgctggcaagtttatattttgtggtttaagtagaagtgagctaattctcaaaaaatggggagccactccaaaaggttctaagtcttattttctgcattggcctaattgtcacttgtattgtgtgggtgatggcacttgctacaagtcatg

SEQ ID NO: 401562 - DNA, 569 bp, Homo sapiens
aagggctctgaggctggactgcagaggatttccaggcattcctgcaaaggactaggaatcccaagatctccagcccacagacacccagaagcagcatcctacctgcaaagctatagaggactcccaagagttagagatagcaggcagctggaggtgagaggaggcagtcaacaacaaggataagcacttagtgagtcactggattcaaatgcaactcccagttcaccccactgtcctacctgagcccatgggggcgaactcaccatgcccgcacacctccagcatccagcaacagaaatagcatgctagataagggggaagcagagcaagggatgcatggagcacmtccctccctcatggaccacctccctccctcatggacctccggagcacctataacaaatcactcgcctgcttcacatgtttaatctctttttcctgaggcttctgtgagcacacaaaaggagctgaccgggcttgggccaacagctattgagaagttcctctcaacaccacaaggaccttttccatttccagacgtcaccattcactgaacatgccagcagcag

SEQ ID NO: 401563 - DNA, 566 bp, Homo sapiens
tacccaattattcctaaatcctttcactcagtttcagctccaataaaactgataacaatgctaactcataatgtgattttcactccagtctcatgaaactgctctataaaagcatgcccagcaacttcacaaaattcttccagattgtggtattatatcatgggaaaacagaataaacyttcatctattcaaaatcaagcaagcacagaaaaccactcatcaggaaaatctgaggattcacttcatcaacaggaagatggtggcagggaagtcttgcatttgtaagttttaagattatcaattgtcgaaacatttgaagaaggcatgggtaatttttttgtttttgagatagggtctcactctgtcacccaggctggagtgcagtggcacaatctcagctcactgcagcctctacctcctaggctcaagcgatcctcacacctcatcctcttgagtagctgggactacaggtgtgtgccaccatgcctggataattttttatgtttttggtagagacagaattttgtcatgttgcccaagctggtcttgaactcctgagcacaagc

SEQ ID NO: 401564 - DNA, 566 bp, Homo sapiens
tacccaattattcctaaatcctttcactcagtttcagctccaataaaactgataacaatgctaactcataatgtgattttcactccagtctcatgaaactgctctataaaagcatgcccagcaacttcacaaaattcttccagattgtggtattatatcatgggaaaacagaataaaccttcatctattcaaaatcaagcaagcacagaaaaccactcatcaggaaaatctgaggattcacttcatcaacaggaagatggtggcagggaagtcttgcatttgtaagttttaagattatcaattgtcraaacatttgaagaaggcatgggtaatttttttgtttttgagatagggtctcactctgtcacccaggctggagtgcagtggcacaatctcagctcactgcagcctctacctcctaggctcaagcgatcctcacacctcatcctcttgagtagctgggactacaggtgtgtgccaccatgcctggataattttttatgtttttggtagagacagaattttgtcatgttgcccaagctggtcttgaactcctgagcacaagc

SEQ ID NO: 401565 - DNA, 540 bp, Homo sapiens
gctagcacagaagggtcagcctgctgaaatgcattgggagcaagtgcaatgaaactgaaagatggtcagggaagtccgcctccctctggctccatcaactcagaataagcaagaatgtttgataccactaggataatatttwttgggcatgtgtagcgtatactattaaaaggctcataattttgaacctttgagagaattttggcaagatctgggctgaagcttatctttgccctctttatgacgtttgaaaattaaaaatgtgttaccattgaagtagataaatttaagaaaaataatgactacattacagcatacgattaataactaattataggtcattttattgaaacaatacattctattaggaggtattttgttttactagatcaagttatcatatgcactaagtaaaagatatattgcaaaaatactttgtaaactctgaagtactaaaaatgctgaggttacatacttacaagcaataaaattagttatattttaaaatactttaataattgcaaaaataaaaaatcaata

SEQ ID NO: 401566 - DNA, 540 bp, Homo sapiens
gctagcacagaagggtcagcctgctgaaatgcattgggagcaagtgcaatgaaactgaaagatggtcagggaagtccgcctccctctggctccatcaactcagaataagcaagaatgtttgataccactaggataatatttattgggcatgtgtagcgtatactattaaraggctcataattttgaacctttgagagaattttggcaagatctgggctgaagcttatctttgccctctttatgacgtttgaaaattaaaaatgtgttaccattgaagtagataaatttaagaaaaataatgactacattacagcatacgattaataactaattataggtcattttattgaaacaatacattctattaggaggtattttgttttactagatcaagttatcatatgcactaagtaaaagatatattgcaaaaatactttgtaaactctgaagtactaaaaatgctgaggttacatacttacaagcaataaaattagttatattttaaaatactttaataattgcaaaaataaaaaatcaata

SEQ ID NO: 401567 - DNA, 506 bp, Homo sapiens
aatcacctataaaggaaatcccatgagactaacatcagacttctcagcataagccttrtgaaagaagagattgggggcctatttatttttcacctcattaaagaaaaaaaaaagtcagccaagaattttatatcctgccaaactaagcttcataaattaaagagaaatagtctttcctagacaagcaaatgctaagggagtttattaccactagaccagtcctacaagaaatgctcaaaggagttctaaacatggaaatgaaaggacaatactagtcatcataaaagtacatgtaagtagaaagctcacagaacctatacagcaattatacaattgagactccaaggcaactagctaacaaaattctaacaagaacaaaacctcacatgtcaatactaaccttgaatgtaaatggcctgaatacacctcttaaaagacatagctggcaaaacaaaacccaaccatctggtgcctacaagagaccaacctaatagctaaaggcacct

SEQ ID NO: 401568 - DNA, 583 bp, Homo sapiens
gcacatggcacatatttgtcacttaaaacacaaaaataattgctaacagtctttgagtccttactatgcagaggtcactgtgttttaagtatttttcatatgtgagctcatttaattctcaggacaactctttgagtgggttcagttatgattccatttttcagatgcataaagtccagatgagggtaratagatgacttgctctgagtcccacaggtagcaagtaaatggcagagccgtgctggatcccagggccatttgactttaaagacaacgttcctatgttctgtgcagcactttctccctaatgaatatttattttaaataagtgttatttctactgattttgatggctatttgcttgggtcccccacccccagtttccattagtcattaaatgcttatctgagattaatatttagataaatattgctaatttttaataaacagttcattggaaaatattttctttatttaatgttacaggcgaaatcctatcaaaaataaaactcctagccaggtacggtggcccatgcccgtaatcccagcattttgggaggccaaagcgggaggagtgcttgac

SEQ ID NO: 401569 - DNA, 541 bp, Homo sapiens
ttgggtggggcagctccctgctccccattctctactgtctggggtgcatggctgagtctgccgcatgtatgcacagtgtccaacagccattaacaatggaatgagccaagggtgggaatgagccacagcagctgcctgagccccaagggatcccatgcagctggcggtattccctgccaggcacccatggagtctccccctcccccagccagggagtccaaccccatcagacagcaattaagcttctctctagggtggaggaactatttgcgtaagaataagaggtttttcccccaggcatccctttttcttctccactycatcagcagttaacttttaaatgagtttatttttccttttagaagacattttcctaggctaggaatgataaggatcattatcataatttagtccacctatttatgtggactaattatgtttatattctctgtaaagttttaattgtgaaaaaggatttgtgaggttggtcttaagctgtagccaatgtggtatgctttgcatgtctgtgtggtcagtagca

SEQ ID NO: 401570 - DNA, 541 bp, Homo sapiens
ttgggtggggcagctccctgctccccattctctactgtctggggtgcatggctgagtctgccgcatgtatgcacagtgtccaacagccattaacaatggaatgagccaagggtgggaatgagccacagcagctgcctgagccccaagggatcccatgcagctggcggtattccctgccaggcacccatggagtctccccctcccccagccagggagtccaaccccatcagacagcaattaagcttctctctagggtggaggaactatttgcgtaagaataagaggtttttcccccaggcatccctttttcttctccacttcatcagcagttaacttttaaatgagtttatttttccttttagaagacattttcytaggctaggaatgataaggatcattatcataatttagtccacctatttatgtggactaattatgtttatattctctgtaaagttttaattgtgaaaaaggatttgtgaggttggtcttaagctgtagccaatgtggtatgctttgcatgtctgtgtggtcagtagca

SEQ ID NO: 401571 - DNA, 445 bp, Homo sapiens
ctaacaggccgattgaattctgttaaaaaaaaaaaaactttgtggtaaaagtcttcaacatatcacaaaagatttttgatcctcagtcaattacccatttatttgaaaacagtcaatacaattgaattccagtgaaataaaaggagttggatagtcccttggaggttgtgacaayagagggttaaatttttactctggggctcaaagtccagaataccatctgcttagtccacctctttctgttcctatttttaatgcattgttctttctgaacatgaataacatttctgtgctaataaatctgcattgctgcaggtaaatgattattagttcatcaaaagggagaaaaagcaccttagcaaagaagagagttttatttcatccaggttattcattattgatcagaaaacaagagctatcccattaattctgtgaaattccaact

SEQ ID NO: 401572 - DNA, 530 bp, Homo sapiens
aggagatgtatacattttttaaaagttaataataacattaaaaaaggaaagtgacattgtgcgggaagaagaaattaggtcttctatggactgaattttatcccttcaaaattcatatattgaagtcctagctcccaatgtgactatatttggagacaggtctttaggaggtagttaaggttaaacgagggcataagggtggggccctaatcctgtatgactggtggccttatgaccttattatggaaggaagagrtctctctctctctccctctctttctctctctctctgtgtgaacgtgcaccaaagaaaggcatgtgaccatgttgcaagacgacaaatgtgtgcaagccagaaagacagccttcaccagggaaccgaattagccagcaccttgatttttgacttcccagcctccagaactgtgagaaatagatttctgttgtttaagccacccaggctacgatcttttgttacagcagcctgagcagactaacgcgaaggcttaggcctggatgtgctcagggcc

SEQ ID NO: 401573 - DNA, 530 bp, Homo sapiens
aggagatgtatacattttttaaaagttaataataacattaaaaaaggaaagtgacattgtgcgggaagaagaaattaggtcttctatggactgaattttatcccttcaaaattcatatattgaagtcctagctcccaatgtgactatatttggagacaggtctttaggaggtagttaaggttaaacgagggcataagggtggggccctaatcctgtatgactggtggccttatgaccttattatggaaggaagagatctctctctctctccctctctttctctctctctctgtgtgaacgtgcaccaaagaaaggcatgtgaccatgttgcaagacgacaaatgtgtgcaagccagaaagacagccttcaccagggaaccgaattagccagcaccttgatttttgacttcccagcctccagaactgtgagaaataratttctgttgtttaagccacccaggctacgatcttttgttacagcagcctgagcagactaacgcgaaggcttaggcctggatgtgctcagggcc

SEQ ID NO: 401574 - DNA, 590 bp, Homo sapiens
tctggatttgaattccaactgtcccctcttaccaccaccaaatttctaccagtatgatcttcactaagttgacatcaacagtctgcactttggtttcttcatcagtgaagataataatctacccaaccctagggttttgtatggtttaagtgagacaatgtgtctagagggtttatgacgtgctctctccatgtaagtactaacactctgggtgactgtgtaagaggtggtgtttgtttgggttttagctcttcataaaccaaccacaggaagatgtggtgacttgatacgagcaaatgcttgtgyggaatactttttcaaaccattccttgggtgtattagaacctaaccataaacaatatgaaaagccccacctttcaaaaaatttgatgttatttggatccttttgactgtactatttttaacttagctgatgaatgatattcacattcgagatgcttatcccatttaggtattatttgaagagcttggaaaagcagtaaatgatggcttatattttaagaattaattttgtatttatcatgacagtcatatgcagagcccttggcaagccttatggaagagatgca

SEQ ID NO: 401575 - DNA, 590 bp, Homo sapiens
tctggatttgaattccaactgtcccctcttaccaccaccaaatttctaccagtatgatcttcactaagttgacatcaacagtctgcactttggtttcttcatcagtgaagataataatctacccaaccctagggttttgtatggtttaagtgagacaatgtgtctagagggtttatgacgtgctctctccatgtaagtactaacactctgggtgactgtgtaagaggtggtgtttgtttgggttttagctcttcataaaccaaccacaggaagatgtggtgacttgatacgagcaaatgcttgtgtggaatactttttcaaaccattccttgggtgtattagaacctaaccataaacaatatgaaaagccccacctttcaaaaaatttgatgttatttggatccttttgactgtactatttttaacttagctgatgaatgatattcacattcgagatgcttatcccatttaggtattatttgaagagcttggaaaagcartaaatgatggcttatattttaagaattaattttgtatttatcatgacagtcatatgcagagcccttggcaagccttatggaagagatgca

SEQ ID NO: 401576 - DNA, 643 bp, Homo sapiens
caattaggggtttggatactgttggattcagtgtrttttgatgtcctctggttcaaggctcagggcgtgctgacccccttcctacatgatcaaaatagttaagcaacatcttctgccagcttggtttctgggctatgagtccttacaaacttctcaccttcaccatctgataggcgttaggaaagtaagctgacttttgcacctcgattttgtctgtgatcagattattgaaatagcattacctaggtagcttgcagtgccatactcaggcatttgtgcacccaattttatccatgtaagatgtaagatagagggagaacttgggcagggctaagccagggtgttcagtagaaacacctgtactcaatgctagatagagatcccgtagcagagagatgcctttgcagtggtgccccacctccgcaagtcccccagggaaggatgtgcctgtgggtggaggcagcaggaggctccatgacccgctactacttcccagaacttttgatactaacagagcttgtcctctccgttgggatgatttacagagccccctcagcagggctcccttcacttaaaagcagcaactcttgatttacccatgcctgcacccctctacccagggtcagaagaataactaatgggt

SEQ ID NO: 401577 - DNA, 643 bp, Homo sapiens
caattaggggtttggatactgttggattcagtgtattttgatgtcctctggttcaaggctcagggcgtgctgacccccttcctacatgatcaaaatagttaagcaacatcttctgccagcttggtttctgggctatgagtccttacaaacttctcaccttcaccatctgataggcgttaggaaagtaagctgacttttgcacctcgattttgtctktgatcagattattgaaatagcattacctaggtagcttgcagtgccatactcaggcatttgtgcacccaattttatccatgtaagatgtaagatagagggagaacttgggcagggctaagccagggtgttcagtagaaacacctgtactcaatgctagatagagatcccgtagcagagagatgcctttgcagtggtgccccacctccgcaagtcccccagggaaggatgtgcctgtgggtggaggcagcaggaggctccatgacccgctactacttcccagaacttttgatactaacagagcttgtcctctccgttgggatgatttacagagccccctcagcagggctcccttcacttaaaagcagcaactcttgatttacccatgcctgcacccctctacccagggtcagaagaataactaatgggt

SEQ ID NO: 401578 - DNA, 643 bp, Homo sapiens
caattaggggtttggatactgttggattcagtgtattttgatgtcctctggttcaaggctcagggcgtgctgacccccttcctacatgatcaaaatagttaagcaacatcttctgccagcttggtttctgggctatgagtccttacaaacttctcaccttcaccatctgataggcgttaggaaagtaagctgacttttgcacctcgattttgtctgtgatcagattattgaaatagcattacctaggtagcttgcagtgccatactcaggcatttgtgcacccaattttatccatgtaagatgtaagatagagggagaacttgggcagggctaagccagggtgttcagtagaaacacctgtactcaatgctagatagagatccygtagcagagagatgcctttgcagtggtgccccacctccgcaagtcccccagggaaggatgtgcctgtgggtggaggcagcaggaggctccatgacccgctactacttcccagaacttttgatactaacagagcttgtcctctccgttgggatgatttacagagccccctcagcagggctcccttcacttaaaagcagcaactcttgatttacccatgcctgcacccctctacccagggtcagaagaataactaatgggt

SEQ ID NO: 401579 - DNA, 581 bp, Homo sapiens
acatctaagttacatctgcttttaactctgtgtgccatgtacatctaaattcctctcaggtagtgtccaaggagacagagctgtatcaaatgtactaaggaactaaggggaccaagaggaatcaattccaagagaaaggaatcttaatggagaaatctgtgagccctgaagggagaactgtcaccagtgtccagcagacttccagggagatagactttcctgggtggtaagtcaagacaccttggtcagacttgcaaaaagaagactgtagaaagccgaaggaagacaggaacagaccagcaacacccagcagtgcatggctggtcacaccactggggcaggcagggggtcacgatggtggggtgagtggtccatactaattgtaagtcacatcaggagactgccgattgagcatcctgcttggtgactatagagagactgtgaaactttaggttaactacttctgtctgttgctgaaaatacrttcatttgagctatcctatcttttcattctttttgagatttacttgaaatttaggaatttgtatcagcctatttcattctgtagtgcagatattaac

SEQ ID NO: 401580 - DNA, 497 bp, Homo sapiens
ctccgttggtcctttggcatgtattttcccttactgcagcaagaaaaataaatccaatttcttattcccctctacctcctcctcttcttcctccttcctgtaggtgctcccctgtttgtccttaggtggcaacgttaccactaaagaagtaacatctctcagtagacagagagacagacaaacagatacatcaacatagatggatagatagagatatatgctcacttctatagatagaaagacaggtatccatgtgtagagagagaaacacttttagaaagagaaagacatactttgactttcaaatcgttccagttctctctctacagctctgtgactcacttcagatctcacagtcaccctttactcacgccaataactttaacaacagtaacacgatggtagagcacttactatgtgtcaggaacattctaagccttctgcatgtattaaatcatgtgaycaccacagtaaccttatggaaaaaaagtgatgct

SEQ ID NO: 401581 - DNA, 589 bp, Homo sapiens
ttcctagtttgcttccattgccttcatcaatgaaagtaatctttagacctgccatgtttgatccaactctgttaaaaattcttaaaactcaactcccttgagtttaaatctcttggtctaaactaatgagcttcctgggaatttgtcagaaaggtcacaaggctgcattaatgtgtgacagtgaagaatggcacaggctccaaaaggtagaatttggcatacactaccttgattttcaaaaggggaggaagataaagtctacaaaccacagtctggcaatctcgacgcacgtatcccagaacagatgaggaatctgcttagattcactgtaaacaagccatgctgggctcatctcctttgtctgtagaggttttctttaggtagaccagtgtaaggctgcaggcagacaagattaagtcttttgtatccttgggcatgagaagaatatttggggatagaatgtaataaatctactaagttcatttgtaactggtaagggaccrtatctaaggaagtgctgctcatgaagccatgtcatccagcagagggatctgcatgagttttccatcatagtctgaccctatttaaa

SEQ ID NO: 401582 - DNA, 617 bp, Homo sapiens
ttggggagctatggcattatcctgcacacatatcatgtcctggcctgggaaagtgatgatgatgatattttcccacaaaatagacaataacatcatgaaagtgccttgttcattttctagcataaaatatatatcaaagcagtggggtttagtaggcatacgtagatttaaaagctcctcagaaggcagggaatgatttcttcaayagaaaaaaaaactaccccaaaaggagaatctcaatactttggttgatagtaaattaagaatccctcaagaaattcagtaggagagggaaaagataagtcaccaatgggaaatatatttgtcacaatataacaggcaaaggactcatgtccagagtgcatgaaggatttctacaaataaaataaagaatccaacagaaaaatgaagaagagaaaggaataggaacttcatttttaaaaaagagaaaagaaaaaggaagtaaggaaaaacaaatgaacatccaaatggccagaaagcatataaaaatgcccaacctcataaaccatcagacaaatgtgatccacaatgagaagccaatacacaccgaccagcacggctaaaattaagaagactgttaataccaagtgttggtg

SEQ ID NO: 401583 - DNA, 617 bp, Homo sapiens
ttggggagctatggcattatcctgcacacatatcatgtcctggcctgggaaagtgatgatgatgatattttcccacaaaatagacaataacatcatgaaagtgccttgttcattttctagcataaaatatatatcaaagcagtggggtttagtaggcatacgtagatttaaaagctcctcagaaggcagggaatgatttcttcaacagaaaaaaaaactaccccaaaaggagaatctcaatactttggttgatagtaaattaagaatccctcaagaaattcagtaggagagggaaaagataagtcaccaatgggaaatatatttgtcacaatataacaggcaaaggactcatgtccagagtgcatgaaggatttctacaaataaaataaagaatccaacagaaaaatgaagaagagaaaggaataggaacttcatttttaaaaaagagaaaagaaaaaggaagtaaggaaaaacaaatgarcatccaaatggccagaaagcatataaaaatgcccaacctcataaaccatcagacaaatgtgatccacaatgagaagccaatacacaccgaccagcacggctaaaattaagaagactgttaataccaagtgttggtg

SEQ ID NO: 401584 - DNA, 596 bp, Homo sapiens
ctgacctgcctcttcctgcatgtagcaagccataaagactcctctggggtggcacccccacacaagggcaagaagagagcccttagcactggagactggggattgggggcagcaactgacccaagtaaatgtacttcatgaagtaagccttgttgccattgattttatattcccgcatatcacctagaggctcccctggaaatttactgcccctagccagattctgcttggccttgtcatttcttctcaaatttatcattctgtctaaaaagtacaaaagcatcttgctttggctacttcagacttcactaacttgggaagatccccatgtacctttaatactaatayaatttgtatgcttttctcttgttaatatgcttgatttcaatttggtttctagatccagctgaggagcccatgtaagagctaagtggggttggaggtgatctctgggtccctgcagaacgtggcacagagtccggggccctccctcactgactgggaaattgcttattctggagatactgcagctaagacccgggacctctgacctaagccagcaaaggcagggttcttactgctagccttccaggtct

SEQ ID NO: 401585 - DNA, 567 bp, Homo sapiens
tggtgacctggggagctgacagtgcttttcaggcacacctggggtaactcttatttcccaaatgggttggcagattgttgtgggtgccaggtctttgatggactggatctagacacgaataaatagcctgctgggattttgattyggattgtagtcaatctatattgaatctgtgttttaagagtataacctcttaacaatattgagtcttctcactcatgaacaacatatatctccccatttatttatggcttctttaatttatcatagcaatgttttacagttttctgtgtacaggccttttacattttttgtcagatttgttcctaagtactttacattttgcatgctattgtaaatgttgttaatttttttattttaatttcttcattttttacttgacaaatacaaattttatctattcatagtgtacaatatgatattttgcaatatgtatacattttgggatggttaatccaaccaataatatatgcattacattttaattttcaattaagttacaaagctctcattaaacaatttttgtacactaatttgtcctgaaac

SEQ ID NO: 401586 - DNA, 603 bp, Homo sapiens
cttttgtttctggtgacctggggagctgacagtgcttttcaggcacacctggggtaactcttatttcccaaatgggttggcagattgttgtgggtgccaggtctttgatggactggatctagacacgaataaatagcctgctgggattttgattcggattgtagtcaatctatattgaatctgtgttttaagagtataacctcttaacaatattgagtcttctcactcatgaacaacatatatctccccatttatttatggcttctttaatttatcatagcaatgttttacagttttctgtgtacaggccttttacattttttgtcagatttgttcctaagtactttacattttkcatgctattgtaaatgttgttaatttttttattttaatttcttcattttttacttgacaaatacaaattttatctattcatagtgtacaatatgatattttgcaatatgtatacattttgggatggttaatccaaccaataatatatgcattacattttaattttcaattaagttacaaagctctcattaaacaatttttgtacactaatttgtcctgaaaccttgataaacacacttattaacttct

SEQ ID NO: 401587 - DNA, 461 bp, Homo sapiens
agagagtcctttgcatggccaccttggagacagagtgagtttctgttttattggtgtgtagtggcaacagaaatatgataatctgctgacctgaaggcatgctggtgcagtcagtgctattgctcacctaacccactcatgttcctcttgcagatcagggaaacttcacctccctgccagtagcaggagccacaggactgagtccttgtcggtatgatgtgggcagaagctcacgctgccgctttggggyttggctcacagaactgtctcctgtgtaatccccatttcttttctccatcgtggcagccttggaggcctcttgttgaaagaaagggcacaggtaaatggaagaagccaaatctgcgggttgactttagagagcctctgtctcacctgtggcccagggaagctggaataggaattttctgggatggcaactgctataaaattctttgtcttaa

SEQ ID NO: 401588 - DNA, 637 bp, Homo sapiens
aaaatgctcacaggaggtcatttttctgcaggggtggagccaaccaaagtcaaagaagattgttgtatcttttcacagctcttctctgagaacgaagccacacaacgatagaatcttgaagaagaagctaggaatgggagatggcaacaatccctgtcactggaacactggyctctctggacaagtcaccagtttggcacccctccccttatgcctgtaccgatggcatggtgctatatcctgcctgggctctggcctctgctctgtcctccctcttgctctgtctcccctgtttctgaggggccttgatgtttcttgatctgtctgaatgtcttcaacaaagaccacttcccagtcctccagggcgacacttcctggagatccgtgtcatgattgtttctccctccaaacctgtttctgcttgattagccagggttgatgatcctggggctcttggcttccatacgtatctcagacagggaagctagcttggtctccatgtttcacctcatgggtgagtggattgcctagaatgagcagtaggtgactgtgactggccttgtcttctagggcagggacatgtcgcatttcctctgcacttcctgtctcattcttgagaaacatcctcccctctgct

SEQ ID NO: 401589 - DNA, 637 bp, Homo sapiens
aaaatgctcacaggaggtcatttttctgcaggggtggagccaaccaaagtcaaagaagattgttgtatcttttcacagctcttctctgagaacgaagccacacaacgatagaatcttgaagaagaagctaggaatgggagatggcaacaatccctgtcactggaacactggtctctctggacaagtcaccagtttggcacccctccccttatgcctgtaccgatggcatggtgctatatcctgcctgggctctggcctctgctctgtcctccctcttgctctgtctcccctgtttctgaggggccttgatgtttcttgatctgtctgaatgtcttcaacaaagaccacttcccagtcctccrgggcgacacttcctggagatccgtgtcatgattgtttctccctccaaacctgtttctgcttgattagccagggttgatgatcctggggctcttggcttccatacgtatctcagacagggaagctagcttggtctccatgtttcacctcatgggtgagtggattgcctagaatgagcagtaggtgactgtgactggccttgtcttctagggcagggacatgtcgcatttcctctgcacttcctgtctcattcttgagaaacatcctcccctctgct

SEQ ID NO: 401590 - DNA, 589 bp, Homo sapiens
ggcacaggtccttcaaagtctgctggtccccagcacttgggtttgttgtgcttgtcagacccatgtctgcctaagcaaactgtgctgtgggtccctgaaacaaaaaaacaaaagggatgggtacccctctcacctcgttttatgtcctgagagcttggctgtgtgaccaaggaggatgcctctctggtctctgccatcggaggggcacagagtgtggctctgtgccaggcagcagtctgaccagactggggactcaagacacatgagacccaggtggcactctctctgtctgtatgtgtcaagcgctcacggagttttgttgtaagaygccaattcataagggctttcttcatcttatccttgttgccctgattagtgctgggagactcctattccagcatcacctgcccagtgtcacagtgagtggacctgaggctgaaggtgtctcagcttccatgggagactggaggcgtggtctgcacaaacactctccctacctgcacatggcaatgtaagtctttgctttcttcatccatctctgagagtgaatttttggatcacgggctgcctcttctgcacctactgcagg

SEQ ID NO: 401591 - DNA, 624 bp, Homo sapiens
tcacaaaactgtatgtgtggaaaacattttattagtacctgaccaatcaagaatgtctatatttttatatacagtatatcattaagaatatcagttgaagtcatctgatttcattgtaagaagtgtttttcttttctcaaaaatctttaatgaagcccaagtccttgactcaggcctacacaacttgactctacctggttcctgcagatctctctcattatgtgtatttttttccttttcttttatcccataaaacaagtagcttttatctttccaaagttgggactttgcacttgctgggccttatttttagaatgttcctccccaacaactgcacataaatkcctctctcttagcattcaatgcccatcttaattactcactctttgatgacaacctcttaaaccaccaaacacaaactaaccctgtctctccattaaggtttatttgcatcacaggactttgactattataggaccaacaggtttgtttgcccactgatcaattacactgagttagcaggatttgcagcaggaaagagttccgtgatcatagggtgccaagtgaagagatgggaggagactctcaaatctatttccccaaaaagttctgggttcagtattt

SEQ ID NO: 401592 - DNA, 580 bp, Homo sapiens
ggcccttcctattactaaagagggtcgtcaaaaacccaggagaatccacaagacctccaaggaggccacaagacatcagaagagacaygagacatcagaacatccaaggagttcacaagacctcaggagaggtcacaagacatccaaggaggccaggaaatagggagaagacaaagggggtgccagttgcacaaataaaacttaccaacaatgtttttcacaaccagaaactgtttctatgcacaagtgacttatgtgccccattgataggcaaggcagcagagacagtctagttcactggagctaagtggccatttgggcttatccctgggtccatcccaataatgacagaacactgagccttaggcaaatgcccacaaactgctcctgactaggcttgccataatttcttacaggatcaacaagttcatatgtccgatatgcagtaacaaaccaattatactgacccagaagggtttgcagcggagaaagagtttaatggtcacagggcaccaagcaaagagatgggagaagaccctcaaatccatctccccaaggagtttgtagctggagtttttaa

SEQ ID NO: 401593 - DNA, 580 bp, Homo sapiens
ggcccttcctattactaaagagggtcgtcaaaaacccaggagaatccacaagacctccaaggaggccacaagacatcagaagagacatgagacatcagaacatccaaggagttcacaagacctcaggagaggycacaagacatccaaggaggccaggaaatagggagaagacaaagggggtgccagttgcacaaataaaacttaccaacaatgtttttcacaaccagaaactgtttctatgcacaagtgacttatgtgccccattgataggcaaggcagcagagacagtctagttcactggagctaagtggccatttgggcttatccctgggtccatcccaataatgacagaacactgagccttaggcaaatgcccacaaactgctcctgactaggcttgccataatttcttacaggatcaacaagttcatatgtccgatatgcagtaacaaaccaattatactgacccagaagggtttgcagcggagaaagagtttaatggtcacagggcaccaagcaaagagatgggagaagaccctcaaatccatctccccaaggagtttgtagctggagtttttaa

SEQ ID NO: 401594 - DNA, 580 bp, Homo sapiens
ggcccttcctattactaaagagggtcgtcaaaaacccaggagaatccacaagacctccaaggaggccacaagacatcagaagagacatgagacatcagaacatccaaggagttcacaagacctcaggagaggtcacaagacatccaaggaggccaggaaatagggagaagacaaagggggtgccagttgcacaaataaaacttaccaacaatgtttttcamaaccagaaactgtttctatgcacaagtgacttatgtgccccattgataggcaaggcagcagagacagtctagttcactggagctaagtggccatttgggcttatccctgggtccatcccaataatgacagaacactgagccttaggcaaatgcccacaaactgctcctgactaggcttgccataatttcttacaggatcaacaagttcatatgtccgatatgcagtaacaaaccaattatactgacccagaagggtttgcagcggagaaagagtttaatggtcacagggcaccaagcaaagagatgggagaagaccctcaaatccatctccccaaggagtttgtagctggagtttttaa

SEQ ID NO: 401595 - DNA, 584 bp, Homo sapiens
tccctttcctttttcttgtcacttctctataaatttactcctcaccaacaaagaacactttgtcgaagatgctctataagctgacattcaaagccacctctttgagaactactcattctctgggtgtctcccatatatatgaaataatatgctaatgaatgtctgttattctcttattaatcagtatgtgtatcaggggtcctttccgacttaatgcctatgatagttgaaaaaaaaatccccagtaggggaaactagacagaacttaagccacacatgtgtgtcctaagacagaggataagaaaagtccttagtatccatggagattttccctggattaattaaagctaagaagatttccaagaaactacctaggatttcttcctgcatgaatcaactaagccccatgcctctatacctgggacaggctggcacctggagtataaggttaatgttaagaatataaggcagtggctttgggacaagaaacctactactcactcctttacagttttacagagaggaaattgtactcrctcagacattacctatgcctggacatgagcacaacagccaaagagaaa

SEQ ID NO: 401596 - DNA, 640 bp, Homo sapiens
cgacttaatgcctatgatagttgaaaaaaaaatccccagtaggggaaactagacagaacttaagccacacatgtgtgtcctaagacagaggataagaaaagtccttagtatccatggagattttccctggattaattaaagctaagaagatttccaagaaactacctaggatttcttcctgcatgaatcaactaagccccatgcctctatacctgggacaggctggcacctggagtataaggttaatgttaagaatataaggcagtggctttgggacaagaaacctactactcactcctttacagttttacagagaggaaattgtactcgctcagacattacctatgcctggacatgagcacaacagccaaagagaaactggaaaatacaaacaaaaacaaaaacaaaaacaaaaacaaaaccctactttctcttagtacttgggccagaccttgattacaacaccatggccatctggagcagatctcttcccaycagtactcaaggctaaggttcaggaatcaatgtaaagcattctacttgtcacccttgaatctagaagagctataagttggtgcaaaagtgattgcggtttttgccatttaaagtaatgccattactacataatggttttgccatt

SEQ ID NO: 401597 - DNA, 554 bp, Homo sapiens
tatgaaacaaacaaagttagacatgggaaggaaaatgatcaccccattgctatgttcatcatgtcttattctcactattttaggagtgtcaaggtggcgtttaggcaccgtgtgactcctttaccgtgaatcaccctctgcaacccccaggtgcaggctgctaattattctcttcaaattttctccaggagttccctgtttctctgtcttggatatatatttggctctgcatggtagaccaggagcaccagaactgagacattaaaatcttttgagttaaatagtattaggagattattttcacaggcgcctttaaaaatagatgtatccaattactgtaattctaatttttcaaatgctagtccttttgacaagttgcagctctgtttaccagctcttgtargagtctcatgatttcccccaaaagagcagcatgaagctgaaattgtaagtttatcaaagcaaattgcatgcattttccaaaggcaaattgcagaccaaagccatttgtagatgaatagaaaactacatgaaagagaacactctgctgtgtt

SEQ ID NO: 401598 - DNA, 577 bp, Homo sapiens
caaggttgcagagcaaagggaatgcttatacatagttggtgggaatttaaatgacttcggtccctgtagaaagcagtttagggatttctcaaaaaactaaaaatagtactacaatttgacccagcaatccctttactggttatgtaagtggaaaataaattgtcctgtcagaaagacacttgctcttacatgtttattgcagcactattcagaatagcaaagacaaggaatcactggataaagtaaatgtggtacatatacaccatggaatacaatgcaactatgaaaaataataaaatcatgtcttttgcagcaacacagctataactggaggccattatcctaagcaaattaacacagaaagacaaaaccaaatattgcatattatcacttataattgggagctaaactttgcctacacatggacataaggayggcaacaacagtcactcgggacttctaaaggtaggaggtaggtggggagaagagttgaaaaacttcctattgaatgacaagatcagtagaagtccaaacctcagcatcacacaatatactccataacaaacctacacatgtg

SEQ ID NO: 401599 - DNA, 569 bp, Homo sapiens
aatggtcttcagcctcaaataycaaaggtagataaatccatgaagatgaggaaaaatcactggaaaaatgctgaaaatttaaagaaccagaatacctgttttcgtccaaatgattgcaactcctctccagcaagggcacaaaactggacaagaaatattttgattaattgacagaagtaggcttctgagctaaaggagcatgttctaacccaatgcaaggaagctaagaaccttgacaaaagttacaggaactgctaactagaataaccagtttagagaacaaaataaatgacctgatggagctgaaaaacacagcacaagaacttcctgaagcatacacaagtattaatagccaaaatgatcaagcagaagaaaagatttcagggattgaagatcaacttaataaaataaggagtgaagacaagattagagaaaaaagattgaaaaggaacaaacaaagcctccaagaaatatgggactatgtaaaaagactaaacctacgatagattggggtccctgaaagtgagaagaagaatggaaccaagttggaaaacgcacttcaggatatt

SEQ ID NO: 401600 - DNA, 569 bp, Homo sapiens
aatggtcttcagcctcaaataccaaaggtagataaatccatgaagatgaggaaaaatcactggaaaaatgctgaaaatttaaaraaccagaatacctgttttcgtccaaatgattgcaactcctctccagcaagggcacaaaactggacaagaaatattttgattaattgacagaagtaggcttctgagctaaaggagcatgttctaacccaatgcaaggaagctaagaaccttgacaaaagttacaggaactgctaactagaataaccagtttagagaacaaaataaatgacctgatggagctgaaaaacacagcacaagaacttcctgaagcatacacaagtattaatagccaaaatgatcaagcagaagaaaagatttcagggattgaagatcaacttaataaaataaggagtgaagacaagattagagaaaaaagattgaaaaggaacaaacaaagcctccaagaaatatgggactatgtaaaaagactaaacctacgatagattggggtccctgaaagtgagaagaagaatggaaccaagttggaaaacgcacttcaggatatt

SEQ ID NO: 401601 - DNA, 612 bp, Homo sapiens
aaggagtgcatatttcacacttacagatcaaggttctgcaatatgtatcacaagctttcaaaataatctttctttttattactgaaaatagtcattaaatccacttcgataggtttatcccaagaaagtaatcagaaatacacattaagatttatgtgtaatgatagtcaactcagtattatttataatagaaaaaaataaaaccatataaatatcaaaaaatagagaagtagggtaaataatttacagtatatctccagcatggaaaattaygcaatcatcaaaagctatactctgaaaattattttataacctaaaatatttttagaagttaaataaagcaatgcataaggttttatatgcagaaaaatctcaattttgcaaatgtatggatataaataaagatatcctgtggatgtcataatttactggccttggaagtcttgatttcctttgtgtcaaattacaattgcccaagtgctcatcaactgttactgaaagaatccttgtttttgaccacaagttaatctcctcagtcacccccaggttgcctagtaaatggttccatatcttaaattcatcccagcttacacttgtctacctacttctttc

SEQ ID NO: 401602 - DNA, 529 bp, Homo sapiens
ttttcccttagatttttccttcttttcttaattgatgcataataattgtacatatttatgggtatattgtgatattttaatacatataatatttaataatcaaatcagggctattatcatacctatgacctyaaatacttaacctttctttatgttgcaaatattcaaaattctttcttctagctatttgaaaatatatagtaaattactgttaactatagtcatcctactgtggtgtagaacactcgaacttatttctcttgtctaactgtaatattttacccattacctaacctctccttatttctccatctctcctgtccatcttaccctctggtaaccactattcaacactctactataacattaattttttagttcctacatatgagtgagaaaatgtggtatttgtctttctgtttgtcttacttcacctaatataatgtcttccatgctcatttacgttgccgcaaatttcaagatttcattctttttatggctgaataatattcaattgtgtatatatacc

SEQ ID NO: 401603 - DNA, 583 bp, Homo sapiens
agactgtctcaaaaaaaaaaaaaaaagtcattcattaatgacttaacaaagaattgttgatgactgaagccacrattttatcataatttcataatttttaaatctactaaatatatgttatatatacacataatatatatgcatgtatatacatacatacacaaaaacatacacacaaacatatatacatacagagagacagagtttcctcttcccactggtggtgtaggcatgatttctgtgctcgcctagcccagattctcctcatgcttcaaattctgatccatcacacagtgatgtttccagttggatccagagtcccgactagtaatcgtagagctttcctagtttttggtgtgctgtgtctcttgcacttcccatggggtagaatacaactacaaaatgggtctccagtttattaggttaaacatgtattccctcaatggtactttaaccattccacttcaaaagtgaactttatcttcatcgtttactatcactcaagcccaatactgaggaaataacatccccattccatctctgcctgtgccacaaatttccatcaatcatttccccttaattc

SEQ ID NO: 401604 - DNA, 583 bp, Homo sapiens
agactgtctcaaaaaaaaaaaaaaaagtcattcattaatgacttaacaaagaattgttgatgactgaagccacaattttatcataatttcataatttttaaatctactaaatatatgttatatatacacataatatatatgcrtgtatatacatacatacacaaaaacatacacacaaacatatatacatacagagagacagagtttcctcttcccactggtggtgtaggcatgatttctgtgctcgcctagcccagattctcctcatgcttcaaattctgatccatcacacagtgatgtttccagttggatccagagtcccgactagtaatcgtagagctttcctagtttttggtgtgctgtgtctcttgcacttcccatggggtagaatacaactacaaaatgggtctccagtttattaggttaaacatgtattccctcaatggtactttaaccattccacttcaaaagtgaactttatcttcatcgtttactatcactcaagcccaatactgaggaaataacatccccattccatctctgcctgtgccacaaatttccatcaatcatttccccttaattc

SEQ ID NO: 401605 - DNA, 583 bp, Homo sapiens
agactgtctcaaaaaaaaaaaaaaaagtcattcattaatgacttaacaaagaattgttgatgactgaagccacaattttatcataatttcataatttttaaatctactaaatatatgttatatatacacataatatatatgcatgtatatacatacatacacaaaaacatacacacaaacatatatacatacagagagacagagtttcctcttcccastggtggtgtaggcatgatttctgtgctcgcctagcccagattctcctcatgcttcaaattctgatccatcacacagtgatgtttccagttggatccagagtcccgactagtaatcgtagagctttcctagtttttggtgtgctgtgtctcttgcacttcccatggggtagaatacaactacaaaatgggtctccagtttattaggttaaacatgtattccctcaatggtactttaaccattccacttcaaaagtgaactttatcttcatcgtttactatcactcaagcccaatactgaggaaataacatccccattccatctctgcctgtgccacaaatttccatcaatcatttccccttaattc

SEQ ID NO: 401606 - DNA, 562 bp, Homo sapiens
  misc_feature (1)...(562): n = A,T,C or G
nnnnnnnnnnnnnnnnnnnnnnnnncataaactcaagtgtaatagaattgggcttgttatgaataataaaagaccctcctttaaactttataattttgaagctatttcaggaatgggagaaaaaacaattattctttgaaaaaaggtattcctcttattcctataactcaggaatttgcaagagttttacaagttctgtgatgggaaccagggacaaagaccaaatatctrtttcttatatcacaagttttcaaaaaccaattaatacattatttattcatttattcatgtatagatagatggttactgtcaaaaataaacactttgtgtttataggtaatgcagcaattacaatatatagggcacgaatgaagcttcacaggtgtcaagactcgaaatcttatagactaagttctttggccagaatgcaatacaattggaaatcagtgataaaagagccacttcaaatttttattttagacaattaagtaagaaatcaaagagattttgaaaagtattagaatattatgagctgttatatgatactatatttgaaaactta

SEQ ID NO: 401607 - DNA, 566 bp, Homo sapiens
tgcatgatggaatactatgcagacataaaaaacaataagattatgtcttttacattgttgatggaagtgtaaattagttcgattgtggaaagcagcatggattcctaaaagagctaaagtacagaacaaccatttgacccagcaatcccattactggaaatatactcagaagcatataaattattctattgtaaagaacacgcgtgcaaatgttcaytgcagcactattcaggagagcaaagatatgaaatcaacctatgcccatcaatgacagattggataaagaaaatgtggtacatatacactatagaacagtagacagccataaaaaacaagatcatgtcttttgcaggaacatggaaggagctgaaggcctattcttagcaatctaatgcaagaacagaaaaccaaataccacattatcacttacaagtgggagctaaattataaaatcctatgaacccaaaaatgaaacaacagacagtagggtcttcttgagggtggcggctaggaggctagagaggagcagcaaaggtaagtattgggtactgggcttaatacctgga

SEQ ID NO: 401608 - DNA, 556 bp, Homo sapiens
tagtttgacttcttctcttcctatttgaatgttctttatttctttctcttgcctgattgctctggctagaatttmcaataatatgttgaataggagtagtgagagaaggcatacttgtcttgtgctggttttcgatggaatgcttccaggatttgccaatctattataatgttgactgtgggtttgtcatatatggctcttatcattttgaggtatatcattctgtgatggttaatattgaatgtcaacttgattggattaaaagattcaaagtattgttcctgggtgtgtctgtgaaggcgttgtcaaaggagattaacattttgagtcaggggactggtagaggaagacctaccctcaatttgggtgggtatcatctaatgagatgccagcatggctagaaaaaaaagcaggtgaaagaatgtgaaaggactagacttgctgagtctcctggctttcatcttggtcctgtgctggatgcttcctgctgttgaacatcaaactccaagttcttcagcttttggacccatggacttacaccagtgatttgccagag

SEQ ID NO: 401609 - DNA, 556 bp, Homo sapiens
tagtttgacttcttctcttcctatttgaatgttctttatttctttctcttgcctgattgctctggctagaatttacaataatatgttgaataggagtagtgagagaaggcatacttgtcttgtgctggttttcgatggaatgcttccaggatttgccaatctattataatgttgactgtgggtttgtcatatatggctcttatcattttgaggtatatcattctgtgatggttaatattgaatgtcaacttgattggattaaaagattcaaagtattgttcctgggtgtgtctgtgaaggcgttgtcaaaggagattaacattttgagtcaggggactggtagaggaagacctaccctcaatttgggtgggtatcatctaatgagatgccagcatggctagaaaaaaaagcaggtgaaagaatgtgaaaggactagacttgctgagtctcctggctttcatcttggtcctgtgctggatgcttcctgctgttgaacatcaaactccaagtwcttcagcttttggacccatggacttacaccagtgatttgccagag

SEQ ID NO: 401610 - DNA, 571 bp, Homo sapiens
gacttttctttttttggttggtaggctatttattactcatttatttttggagttcattattggtctgttctctgaatcaatttcttctggttcagtcttgtgatggtgtgtctccagaaattcatccatctcctctaggttttctagtttgtgtgcatagaagtgcacgtagtagtttctgatggttatttttatttctgtgagatcagtggtaatattctcttcattatttctaattgtatttttttttgcatcttctctcttttcttctttttttcttctagctagcagcctatctatcttattaattttttccaaaaactaactcctgaatttgttgatcttttgagtggtttttcatgtcttgattttcttcagttcagttctgattttggttatttcttgtcttctgctagcatgatttgctcttgcttctgtaattctttcagttatggtgttaggttgttaatctgagatttttctaactttttgatgtgggaacttagtgctataaatttccctcttaacaccaccttcacygtgtccccgaaattctagcatgttgtaccct

SEQ ID NO: 401611 - DNA, 597 bp, Homo sapiens
ttgggagattcacctggcatctcagagtcaggcttctcatcagtaaaattggggcaatttagagacatttgttacaaggattaaattagagaagcagttaaattgctttagcagcaatatgagtaacatggcaatgtttaatacatattatttgcaattataatttcatcagtttattagtaaaattatatctcattattgccatttctagcaatcacccagtctttctcatcactgggctctcacccaggcatttgcagtcctggaatccatggaaaagctcaccctcatccctggtgacaggcatgttggacagctactttccagcatattatcacttgagaactatcacttgagagtcccctgctcagaaagatctcttcagatgccattttgcattaactgtcagaggctttataatccttaaaacagtcttgctacatgctatgagatatattttagayatattttctcatttgatacatacaaactgtgtaagattttgtgttcatacatataaagaaaccaaacttcaataggattaaataacatatctatgggttatggaactagtattaaaatctgttcgtgataact

SEQ ID NO: 401612 - DNA, 520 bp, Homo sapiens
acttgagtataagttgtgaagaatatgaaaactgaggtccacatagataaacccgaatggcctatgggaaaagcccatgaaacctcctggcacagaaaagtgaggtttccaggttaagttccagatytttgttgaaaataatgacaatttttattgtctttgttgaagataagtccagtagaggaaattctactcaggctgtctcatagtaagtgattctagcacagaaaatagcacagtgcctagctcacagaatatgatcaataaaaaatatgtagtgactgatgcttgctggtaattaatcctcagttgcaattaaaacacacaacaacttcatcaagtatttacccatcgtaattttttgggcctggaaatggagacttttgagaggctaatgacacatccaacatctcatagttactagcagatttcatgttctaaacaaattgttctgacctgtcaggcaacaaggaggtagtaaattagccttaagatcattatgttacttgagtgtcataca

SEQ ID NO: 401613 - DNA, 573 bp, Homo sapiens
ccaaatctttccttcatgatggcaaagggatgggtcacaccttaaatttcttcccagtctccatgctatagccacactctatggggaaaaatagccggggggggcgggggtcattccattacttgaaatgaaagacaccattctaaagaaatttcaaatttctttacattattaatacattattaaccctatacatgtttagcaatatctttctcaaagttagtaaaaggaatgcaccattattttgtgagaggggctgtggaaaacagttcttgcttattggacatatctgatggggagaggtcagaggtgttaatgtaaccagagcatgtgcttctcttatacagtgggatccacgagggggatagatgactggttgtctggtgaatgcagtgttacttttattaggccataaaaaggaaagtttcaaggccaactaattgtattgtttgtcatagcagtgtccctgtaaaaggagcatattttccaacctcggcctgggaagatgcaacatgaactgtcacwaaaattaaggaaacatctctaaatcaaactaatttagactaaatttag

SEQ ID NO: 401614 - DNA, 579 bp, Homo sapiens
gaactgtcactaaaattaaggaaacatctctaaatcaaactaatttagactaaatttagactacatttagtcatcaggtagtttatggtgaccccattctctgcatgtgctgaaaaactatggctgtccatctctcatagcctgggcaggtttgcacaaaatgtatttgtgctagaaatccagaaaaacaaactaccacacaccagcataaaaattgaagctcagaaaagtgaattgaagtcctcagagcatcagttttcttactggttgtatccattttctggacttgccataaaagttgccacaaacttggtggcttaaaatcagaggaatgtgtcgtcttaatggtttttgaggccagaagtccaaaatcaaagtgtcatcagagtcacactctctccgaaggctctaggggagaatccttccttgctcctcttggctttgggtggctcctgagagtcctcasctgtgacagcctcactccagtctatgcctccattttcacgtgtccctctttcctgtgtctgtgtgtccactcctattcttataaggactccatttattaaatttaggggccac

SEQ ID NO: 401615 - DNA, 383 bp, Homo sapiens
acaaccagtagctatcacaaacagtgataaaaagaatgagcttcacacatgatttttcattaacttcttgggaatataaacctaggaatgggcttgttggtaacagggtgtacacatatgcaatgtaacttctgtcagctgctctccagatcaaccttatcagtttgcatccattctggtcactgccacacacaccactccatccataacaatgcttggtataattcaaagctctattttttcctaagatgcatctcctaatatgtataargcaatatcgcagttttctattggtgaggatgagtatcttttcatataattctagatatttaggtttgttctctgtatttccttgtgttcttcttatggatttgtagaatttc

SEQ ID NO: 401616 - DNA, 383 bp, Homo sapiens
acaaccagtagctatcacaaacagtgataaaaagaatgagcttcacacatgatttttcattaacttcttgggaatataaacctaggaatgggcttgttggtaacagggtgtacacatatgcaatgtaacttctgtcagctgctctccagatcaaccttatcagtttgcatccattctggtcactgccacacacaccactccatccataacaatgcttggtataattcaaagctctattttttcctaagatgcatctcctaatatgtataaggcaatatcgcagttttctattggtgaggatgagtatcttttcatayaattctagatatttaggtttgttctctgtatttccttgtgttcttcttatggatttgtagaatttc

SEQ ID NO: 401617 - DNA, 634 bp, Homo sapiens
gaaaacatcacccatatcacaggacctgccactggaatttcctagtatggggtccctgagaaagtcacagaagtgcctgatgtaataagcaaagtcagttctagacagccacataactaagagtactggcggctactgtgstggaactagtcacaaagtctgtgttcttccctttaatcccttctcatctccctgaggagtcaaatatgaactatatgcaaggtgccagggacaagaagcagaagcattagaatttaccttcagatctgtctcaaaagcccactaagaaccccttagtaactccatataaatcgtcatacatccactggcaagtctctcttctaaaatgatattcagctatgcctcctttctaacaagatggagtaatgatgaaagataggaggggactcctaaaaattcaagaaagtgtatggagcctcactcattgcacactggagttacttggctacacgtctgtctcccaaggtgaaggtgaacctggtgagagcaggaccagcatctgactcatccctaagtttcaacacatggcacatgatagaccctcatttcatcacgaattaacttctttaaagtaaaatttctgtctaaattgaggcacgtactatctcctttg

SEQ ID NO: 401618 - DNA, 634 bp, Homo sapiens
gaaaacatcacccatatcacaggacctgccactggaatttcctagtatggggtccctgagaaagtcacagaagtgcctgatgtaataagcaaagtcagttctagacagccacataactaagagtactggcggctactgtgctggaactagtcacaaagtctgtgttcttccctttaatcccttctcatctccctgaggagtcaaatatgaactatatgcaaggtgccagggacaagaagcagaagcattagaatttaccttcagatctgtctcaaaagcccactaagaaccccttagtaactccatataaatcgtcatacatccactggcaagtctctcttctaaaatgatattcagctatgcctcctttctaacaagatggagtaatgatgaaagataggaggggactcctaaaaattcaagaaagtgtatggagcctcactcattgcacactggasttacttggctacacgtctgtctcccaaggtgaaggtgaacctggtgagagcaggaccagcatctgactcatccctaagtttcaacacatggcacatgatagaccctcatttcatcacgaattaacttctttaaagtaaaatttctgtctaaattgaggcacgtactatctcctttg

SEQ ID NO: 401619 - DNA, 572 bp, Homo sapiens
ttactttgatagtttcagtcatatatattacctaagttgtttttattttattaggttgcatactacagagctcagagactatattaaagtccttataccaatatataaacactaacttytaaaagtaaaagacaaactttataaaaacttaatttgactctcttctgaagctcactttctaattttctaaagtaaaatatttcacttaactttttataaagtaaaacaaaaaataaaatttaaaatgctccttttgtattgcataaagacatatttagagtataaaaggattgaaccacataaatgtaaacatgggtttaatatttttttagcaaacaaaatataaattaaatcggtagttattttcatagggtcaagtattaaatatatttttttgaaaactgcttacaatattactttggatgtatgaagcaataaacaaataaaaatagaattagattcttagtgagaatctattcttagaggaaatgggtattttcccaggatttttagatgtttataatttggatgtctcccagtattcatccctttcctatccctggaacatcagt

SEQ ID NO: 401620 - DNA, 558 bp, Homo sapiens
ggttttaggaaacaggccatgtgtattgtgacgtacagtcctggaaagaaaaatgatcaatctgtgtatttgccttttaactagttgtagacaagttggccacatccttggcacattaatgaattctgtcatgtctcatctccactgctctcttattatatgaattcagttctccgtttggcaataaaaataaagtcgctgatttaagtttctactttcaagctagggctcakggtccttaataatcaagagactggatccatacggagaacaaaaagttttgtaatgtgatttgtaatgtgtaacttgaactagatatttaaagggaattttctgtaagattattcacagagacatattcttgcaaatgttttcttttagatagtgtgtgatcctacacctttatgaaactgctttttccttcttctaaattccagatatatgcaggaatttagaatgttattgaaaatagaggctttcacatttattcacagatagatttaaattacagttattaaaaacttgatcaataccaaaacatgtgagttgggcatttga

SEQ ID NO: 401621 - DNA, 556 bp, Homo sapiens
aactgtagatttgtatcagtgccccgtcttctgacagtaagcagcccctcaataaatttttctccaaatcctatttaaatacttctgaagacacagaaaaagtaaagttgtatcactaacaaaaatgaagacttwtggatatgcttttaaaataactttgaagggattcccattaacctgaagacaacaatgctgaactgaggaaagccaggtacttataaagcttttcatcacagtgtagttccttctagcttaagaggccaaaggaaaacattttcctctattatgctctctgcctccgatatgagacatgagatatattggcatataattggaaatagttataatcagccaatcatctgagaccagatcaagtaccctataacgaatccacatgatggagcactatatggctcccaaagtcatgttgctgatgaggcaggtgcatcgggttgttaggagcccagtctctagagttatccctggattgtatcttctcctcattactcgttgaaccagatatttgttgtacactgtcctcatttgtaaatgccta

SEQ ID NO: 401622 - DNA, 610 bp, Homo sapiens
catgggctttgaaaagcaggcaggctctaaatggctaacaatctctttatttgagctatgcttgaaactactgagcgtgaaaaaatttgcatttggtacaggtgagctgttgtgtgcacaagtttttcagtggatatctgttttcatttcccttaagcatatacctaggagtggacactaggttgtaagatacttctgtattttaccatctgagaaactgccacactgtgttccaaagtggctgcaccattttccattcccatgagcaatatwtgaggtttctgacttccccgtatccttgccaacacttgtttttctctgaagtttttgattctagtaatcctagtcagtgtggtatctcactgtggctttgatttgcatttcccttatggctagtgatgtcgaatgtgttattatttgcttactggacttttgtgtattaactttggaaaaacatctgtttagatttttgccccattttataattaggttatttttccttttgttattgagttgttagagcttctttgtttttgttttattttgttttcgagacagagtctcgcttcatcgtcgtccaggctgcagtgtagtggcatgatcttggctc

SEQ ID NO: 401623 - DNA, 551 bp, Homo sapiens
gtaacctaaaaataaatccttatttttttttcaacaataggctttatttttttaagagcagttttagattcacagcaaaattggggtggaaggtacagagatttcctacataccacttgcctcccatatgcagagcctccctaactatcaacaccatgcaccagagtggtacaattgttctagtaatagatcctgacacatcatcatcacccaatgtatattaagtgaacactaatgtaaactgtgtacattctacaggttttgagaaatgcataatgacatgttcccatcattatagtatcatacaggacagtttcactgccctaragatcctgtgcgctctgcccattcagccctttttcttcacccccctggccaccgctggtctttttactgtctccataattttaccttctcctgaatatcatatagttgaaatcatacactatgtagccttttcagattggtttttttacttaataataatcttaaaatctttagcttttaaaatattaagtagtgttgaaatacgttaagaaatatgaatatat

SEQ ID NO: 401624 - DNA, 622 bp, Homo sapiens
tacaaaaactagatttctatttcctttatgaggattcatgggtgacattcattttaagtattgctgcttaggatagctagcacctcctgagaaactagctcattctattgtgtgctttattctggctactaagaagtaagaatccaattttcgatccactccatagtagtcaagatccttggttgcaagtgatagaaatccaactcaaactgacttgaagaaaaagggagatagattggtkcagaaaggctcagaaagcaaccttaacattatcaacattttaggcttgatgattctttgttagaggggtaagaggccatcctgagcattttagaatgtttaggagcatccctggactctactgagtggatgccaatagtaccattcccccagttgtgacaaccaaaaatggctccagacgttaccaaatgtcccttgggggatgaaattgtggtcagctgacagccacgggtttagataactgagaagtccaggtatttaaatagcttcaaacaggatcacattcatattcaaatgtaaaggccccagagcaggctcctattctaccagctcaacaactctgagggttgtggtggggtgagagaatacctctttctgcata

SEQ ID NO: 401625 - DNA, 389 bp, Homo sapiens
ataacctattaaatttaatgttttatgcctcataaacctggtggtgttcttttgttggtggttgttgctgttggtctaagtgcatatttgccatgsatttgtatagattcctctagctaagatgggctagctattagagttaccatacaccaccaaatttcagtattaggccacatttgaattacatggtggaaggctttaatctaaaagggtttaagtctttaaattcaagtgtacgatcacctagaactcagagacatatagttagtattcgtccaataagatccattgactaaaaagttttgtttgatttggtcacttctcagactattggttcttgaatgaaaacattggaatcaatcattataacactaatgatgctggttata

SEQ ID NO: 401626 - DNA, 389 bp, Homo sapiens
ataacctattaaatttaatgttttatgcctcataaacctggtggtgttcttttgttggtggttgttgctgttggtctaagtgcatatttgccatggatttgtatagattcctctagctaagatgggctagctattagagttaccatacaccaccaaatttcagtattaggccacatttgaattacatggyggaaggctttaatctaaaagggtttaagtctttaaattcaagtgtacgatcacctagaactcagagacatatagttagtattcgtccaataagatccattgactaaaaagttttgtttgatttggtcacttctcagactattggttcttgaatgaaaacattggaatcaatcattataacactaatgatgctggttata

SEQ ID NO: 401627 - DNA, 525 bp, Homo sapiens
aagtgttctatagtctatcagttcctttagtcagattctgtgtcacaactttattttcttaaatagagaaagctagccttataggagccattttaaatgaataaaacatagtgttctgtatagcaaattctattttaaataacacgatctggccgttttctggttggcctaaataattgtgaccattactaatttgcaaggagatacaatagagttaatatgtttatcactaaatgaaacttgatggaaatcagttattcttagattcccaaggcctctcaggatcttgcaagaccaaactgagaactatgaattatcttgtaaatatgtagaaagatcagasagttcaaacatttagtcgatgaaataccagctaaatcaacttttactaaattttagaattgacatagggatgtacagtcctaactagcaaacaacaacagcagcaacaataaagttataaacaaacacacacaaaaaggcgggggtgaagaaatggataagtatatctttaattctaccata

SEQ ID NO: 401628 - DNA, 525 bp, Homo sapiens
aagtgttctatagtctatcagttcctttagtcagattctgtgtcacaactttattttcttaaatagagaaagctagccttataggagccattttaaatgaataaaacatagtgttctgtatagcaaattctattttaaataacacgatctggccgttttctggttggcctaaataattgtgaccattactaatttgcaaggagatacaatagagttaatatgtttatcactaaatgaaacttgatggaaatcagttattcttagattcccaaggcctctcaggatcttgcaagaccaaactgagaactatgaattatcttgtaaatatgtagaaagatcagagagttcaaacatttagtcgatgaaataccagctaaatcaacttytactaaattttagaattgacatagggatgtacagtcctaactagcaaacaacaacagcagcaacaataaagttataaacaaacacacacaaaaaggcgggggtgaagaaatggataagtatatctttaattctaccata

SEQ ID NO: 401629 - DNA, 525 bp, Homo sapiens
aagtgttctatagtctatcagttcctttagtcagattctgtgtcacaactttattttcttaaatagagaaagctagccttataggagccattttaaatgaataaaacatagtgttctgtatagcaaattctattttaaataacacgatctggccgttttctggttggcctaaataattgtgaccattactaatttgcaaggagatacaatagagttaatatgtttatcactaaatgaaacttgatggaaatcagttattcttagattcccaaggcctctcaggatcttgcaagaccaaactgagaactatgaattatcttgtaaatatgtagaaagatcagagagttcaaacatttagtcgatgaaataccagctaaatcaacttttactaaattttagaattgacatagggatgtacagtcctaactagcaaacaacaacagcagcaacaatraagttataaacaaacacacacaaaaaggcgggggtgaagaaatggataagtatatctttaattctaccata

SEQ ID NO: 401630 - DNA, 630 bp, Homo sapiens
tatgtagaaagatcagagagttcaaacatttagtcgatgaaataccagctaaatcaacttttactaaattttagaattgacatagggatgtacagtcctaactagcaaacaacaacagcagcaacaataaagttataaacaaacacacacaaaaaggcgggggtgaagaaatggataagtatatctttaattctaccataaatctggctcctattccgtgacagctactgggatgagtgcttttttacgttctctcatttaatcttcaggacaaccgtgaaagtggatattattatagccatactggtgagactcaaatgctggcagtgtccagcatgcagtaggcacctagtgaataacaataaatatgaagccctctcttctactgaaattccctcctcccccaaaatgataactaatgcctttktcaggatagctacttctgcaatgaggatgatagtttgacacttattgatggggcttttctcttttttctttccaacctagcatattactttcttcctgactgtcctgagacctccacctgcctaagaacattggaggagaaaaagatttgtctcagaacagtgaaaaattaaaaaaaatacagcttctgatatttaaaatatc

SEQ ID NO: 401631 - DNA, 599 bp, Homo sapiens
cagtaatcctcatgctgtatttgcacaccacagttctcacgagggtaatataactcatactcctagtaggcactcacttggtgtgtgagttgaactgtttaaagcagtctggatggaacatgcccattgctctggaacatgctctgtccagctatggcacgttccacaacaataccaggaaatctattggcatgctgactctgcccctgaaagcattcaactggttcttccaagccagcctgtgcagcttcatacggctatataatagcagttgcatggaatagccatagttctaactcggaagaccgttgaggggactctaatttttggaagaaccaagtgaagataatgtctctatttacagcctgcctgcttttgtctcatagtccayagtaacagctaggaaaagcaatggcagaaaaaacttagtaccatcattctgtgaattttctttaagatccagaagggtgaaaatagggcattttatctaagctcaacccgtagatcaacatacatcagttgttatgacactgaacagaaaattcaaacacagtaaaatgtgtgtaggtatgactttagctagagtgagtgttgtctct

SEQ ID NO: 401632 - DNA, 571 bp, Homo sapiens
gctggtgaaataacactgcctgataaaagacattacagctctctgaatgggccaggataacctgtacctcaccccagtgagcacagtactttyactctttctggttaacaggatgggactctttgttaattattcatctgtttcttacctatagcccactgcaacaataaacagtaatattggtaaccctttgttgtttcttgactctaggtttgcttcatggatgttcagaaacatggaagatatttttgtagagaaaaaaatgtcatcagggtaattactttatgggtcttgagaccctgagactagccactgcactttgaagcaagatgttttcttaatgaggaacttattttcagtgtctcaaagtcataaaaattaacactgacccctccctatattttacactgtctctgtgttgtgcttgcctaaatatgttgccagtagatttatattctaataacttgatttttaattagtgagaaaccaaggcagtactagttaaatgtctcagaaagcattgcagatgactctaaatgccttatgatataaataccttgagtaaaatgaa

SEQ ID NO: 401633 - DNA, 607 bp, Homo sapiens
attctcaaaatcagtactatataaaagttaaagttatatatatgtatataatatatgcacatatatatataaagtatacatacacatatatgtgtgtgtgtgtatgtgtgtgcaatgtttatggactttagccctgaaaatgaaatcaagtgagtaatcaattttatacacacacatatatataatcaatatatatgtgtgtatatgtatatatatgtgtataatgatggtcattgtattttttctttgcatgtttacctgtgactctctcttagaccccagatatgcagaaaatgtattcttcagattttcagacattttgctaaacaaatctcatttgtatagaattagaattatttattccaaagaaattctaaatgtgracctaaatctctgctttttgtcaggtcttgcagtcatgcaatatttgatgacctaaaacacttttttctttgcttgctctctccctcctgtctcggctcccatctcacatttctctcataaacccagaggaggaaagtagaatttttcgaggtgatttttttacaacttttataattacttcaatttcattgtgaacataggcctgattgtctaaaaaagtctg

SEQ ID NO: 401634 - DNA, 600 bp, Homo sapiens
tctaaaaaagtctgtgctgctaagttgaaaataatattgaaggatgattattcaggacagcctatgtccttcagacgcatcattatccagtcaaaagaaaattttactatttcagcttaattgtaattagtaacaaaatcactaatcatgtggtctttttgtggaatatgtgcgtgctggttttttccctcttctgctcagggacaacccagctcagggaatcaataggcaaacagcacattcactccttttactgaatatcccatttgtttgtttttggtttctggggtatgtcattttttgaggaggagatgaaagtttgctctgagatcttcattcagaggagttgtcaaattataacttattttcttttccttatcccaggacaccaataaggagacaagtgggttcagtatggaaagtcttctatctatttggttccatagatattacctttctctctcttgstatccctggaaaaattccataaagttaaaaacatctatattgaggaggggcattaaataaatgactgggttaccaaaatctatcttttaatatgaggttcactgtaatcataaggagacatagtattaaagc

SEQ ID NO: 401635 - DNA, 622 bp, Homo sapiens
ttagctcctccaacatacgtttgactttcaccaccaccgtttgttcttaccatcacttgtgtcagctttgtcttcatgcccccatgagctggtcttgtttgtgggacttatggtgtgggggcaattgagggacccaccctgtgaagaagaatggaagtgtgattttcttgaggtttgagtataggactggagattaggaaatgtgcatgtttaaactcaattctgccaggtaaatartttgtcaaaatatagtttaaagtttatgcaaatattctttttctctcttcattgtaaacagctataaatgttctgctaacatatcttagtagggagataatactagttcattctactaaattcaccaggtttcttagtgcctcttaaattctgttttggggactaaggttactatgaagagagacttggaggtaggggggaagctagtcatagttagtgtcaattattctacttaaaattatgtaaatataactctggggcattgctttccaatgggatttgtgctgtaacaataggttaattcaatcttgattaaatctagtcctggttaccatattaactaagaagacatatttaaacaaattatctaagtcctaaccaggct

SEQ ID NO: 401636 - DNA, 622 bp, Homo sapiens
ttagctcctccaacatacgtttgactttcaccaccaccgtttgttcttaccatcacttgtgtcagctttgtcttcatgcccccatgagctggtcttgtttgtgggacttatggtgtgggggcaattgagggacccaccctgtgaagaagaatggaagtgtgattttcttgaggtttgagtataggactggagattaggaaatgtgcatgtttaaactcaattctgccaggtaaataatttgtcaaaatatagtttaaagtttatgcaaatattctttttctctcttcattgtaaacagctataaatgttctgctaacatatcttagtagggagataatactagttyattctactaaattcaccaggtttcttagtgcctcttaaattctgttttggggactaaggttactatgaagagagacttggaggtaggggggaagctagtcatagttagtgtcaattattctacttaaaattatgtaaatataactctggggcattgctttccaatgggatttgtgctgtaacaataggttaattcaatcttgattaaatctagtcctggttaccatattaactaagaagacatatttaaacaaattatctaagtcctaaccaggct

SEQ ID NO: 401637 - DNA, 378 bp, Homo sapiens
taacttgccaaatagcatatgatgggaccatacactgaaaaaggaagtattatctgcttttgtgctggaacagtcgtggttaagataagtccattgctgagtgaggaagcattccgataaggcatgacagtagtccatattttctcacagtccccagatgtgctactgtgttttagaattagacctgaagagacaataaatgactgtgatggctcaatgtaagttaaagcaccaatcattccttttcaatcattccagtcttgtcttctccaaaaattctctacagggtgcaggtaaaatattttaaaaatgtaaaattgatcatggcactcacctagttaaamgcattcaaaaagtccccaatactgtcagtgtaaa

SEQ ID NO: 401638 - DNA, 561 bp, Homo sapiens
ttaaacgcattcaaaaagtccccaatactgtcagtgtaaaacccaaagcattctacaaagtcctctgcaattgccctcattgctccagtcgcaactgggaccactaccctgcttgtcccaccctactgcagcattggcaagttacctgatatcctgaggtctcttttgcttctataccttggcttatatcatattctcctctctgaacactctatctccagcccttggatgagctaattaccagcagtcttttaagactcaacccaactacattcctccttggggaaaaatttcctctctttattctttctcacttctctccagttgttgggggtacccgggtatatgattcccgattccctttttctgtgaaactgtagtagagttctctgtttacacatttgtatttcccragtcctcccattcatttgtgaattttcaaggccacgaataatgtcttgttatcacttttagtataatctcaataaatactacttgaaaaaatgaaatgttcctgtgacgctcttctaaacctgtcttttatatatcaaactaaggttc

SEQ ID NO: 401639 - DNA, 647 bp, Homo sapiens
gtagtgtgccctcactgttcttggcttgacgactgctgcacatgactaagggagggacccttcacagcaggattacaaggttttgttcattgtcctcagctccctcccaaacatctacaattactcatgcagcaaatttgattgcaattttattgcactatcaagttcttaatttcaaacaacattctaaaatttattttttgcacaaacttggattgctttttgcacccttagaattgatattaggagtatatattcccaactcttcaggttctttaaagaaaaataagatacttttacagaaaatatgtgaatatctaaactataggggcaaaggaggtggttctaacaaaagatactccaagaacacctttgttrtgttgagagcgcaactaaatatttagcaagaacggtttattgccattgacctgattctattatgcctttcaattcatctgatctacaatactcccttcatgtagtgaagtccacgtgcagaatgaatgtgttcagttcataggaacataaaactataactatgtccaattgtattccataatgagaatagtcataaatatgaagtcagtcaagacattcaattattgacccctttcctttgaagtaaagtgatattttaattgtccaat

SEQ ID NO: 401640 - DNA, 383 bp, Homo sapiens
taactcccagagctctcaatcttttgtttctatgtacagaaatatgcaaaatgttcatggtagaaattagagggaatcttgtcttttgtgactgaatagtaaaagayactttgaattttttgagagcgtgtcctcaaaagaaaatatgggaatcagtatattctattggtttattattatttcaataaattaatactcggatgaagaggtaggtctgactactttatgaattattgtagaaaagaaaacttcaaatactccaaggagcttgaattattggcttaattatagagttctttaatgcaattccctcattttgtgtgtgtgtgttttaatgacgcatgaaccttttgtgtgttctctagtagttaaaagcaggcagg

SEQ ID NO: 401641 - DNA, 591 bp, Homo sapiens
caaacatgttcaaaaatctttcttttatgagtgaaataggattttgtgaatttgctactcagaactttgcaatggaattggtgttcaggactagaaaaaagtagagtagttcttgtgtttatataagcgcttcattcattcatccatctgttcatacatccagccacccatgaatgcactgaacacaaattagctgggcatctctctatttcaggctctgggtactatgcttgagtttcctattctctcaatgggcagtgccatattgtactttctcccttcattcatcatacagcatcttttgcttatttgtttgtttgccttgtgcatgccagcatatcagctgtattstaaagcacctctgtctttttttgaagaggtatgagcatcgtccagactgatatatcaccccccatcccctcaccccattctagctgttgtccaaatagtaaaacaatggtcaaggtacagcaatatcacagaaaggtgaaggcctgagttgccatgctttgaatggacagcatttctaagaggcagtcaatagaagagagacagatggctcactaaacactgaagaagacgctagaccca

SEQ ID NO: 401642 - DNA, 596 bp, Homo sapiens
tattttgcctgctttccctattacctcttcccaaatcgtctaggtaatatgtccacccagagttggggaaacacatttatggcaacagatctgataacctacatgaaaagtatacattatatgaaaaacacaacttacccaaaaagaaataagaaattagccctgtatgtattaaagaattggaattcattatatatattttaatcccacaaagaaaatgctaggattagctgatgtcaacagtgaattctttccatttaagaaaaagaacaataccaatcttatamaaattattttggaaaatagaggtgaaaaaataattcccaaattattttatgagaacaacataacataaaagcttaatgaagacactgcaaataaataaatttacagaataatatccctcataaacataggcccaacaatgcttaacaaaatattagcaaattaaatttagtaatatataaaaagggtaatatatcatgatcaagtagtgtttgtcctagaaatttcaagttgttttaatacatgaaaatcatgttaagagaacaaaagagactggctatatgatcatttcagaaggtgtagaaaagcat

SEQ ID NO: 401643 - DNA, 596 bp, Homo sapiens
tattttgcctgctttccctattacctcttcccaaatcgtctaggtaatatgtccacccagagttggggaaacacatttatggcaacagatctgataacctacatgaaaagtatacattatatgaaaaacacaacttacccaaaaagaaataagaaattagccctgtatgtattaaagaattggaattcattatatatattttaatcccacaaagaaaatgctaggattagctgatgtcaacagtgaattctttccatttaagaaaaagaacaataccaatcttataaaaattmttttggaaaatagaggtgaaaaaataattcccaaattattttatgagaacaacataacataaaagcttaatgaagacactgcaaataaataaatttacagaataatatccctcataaacataggcccaacaatgcttaacaaaatattagcaaattaaatttagtaatatataaaaagggtaatatatcatgatcaagtagtgtttgtcctagaaatttcaagttgttttaatacatgaaaatcatgttaagagaacaaaagagactggctatatgatcatttcagaaggtgtagaaaagcat

SEQ ID NO: 401644 - DNA, 596 bp, Homo sapiens
tattttgcctgctttccctattacctcttcccaaatcgtctaggtaatatgtccacccagagttggggaaacacatttatggcaacagatctgataacctacatgaaaagtatacattatatgaaaaacacaacttacccaaaaagaaataagaaattagccctgtatgtattaaagaattggaattcattatatatattttaatcccacaaagaaaatgctaggattagctgatgtcaacagtgaattctttccatttaagaaaaagaacaataccaatcttataaaaattattttggaaaatagaggtgaaaaaawaattcccaaattattttatgagaacaacataacataaaagcttaatgaagacactgcaaataaataaatttacagaataatatccctcataaacataggcccaacaatgcttaacaaaatattagcaaattaaatttagtaatatataaaaagggtaatatatcatgatcaagtagtgtttgtcctagaaatttcaagttgttttaatacatgaaaatcatgttaagagaacaaaagagactggctatatgatcatttcagaaggtgtagaaaagcat

SEQ ID NO: 401645 - DNA, 596 bp, Homo sapiens
tattttgcctgctttccctattacctcttcccaaatcgtctaggtaatatgtccacccagagttggggaaacacatttatggcaacagatctgataacctacatgaaaagtatacattatatgaaaaacacaacttacccaaaaagaaataagaaattagccctgtatgtattaaagaattggaattcattatatatattttaatcccacaaagaaaatgctaggattagctgatgtcaacagtgaattctttccatttaagaaaaagaacaataccaatcttataaaaattattttggaaaatagaggtgaaaaaataattcccaaattattttatgagaacaacataayataaaagcttaatgaagacactgcaaataaataaatttacagaataatatccctcataaacataggcccaacaatgcttaacaaaatattagcaaattaaatttagtaatatataaaaagggtaatatatcatgatcaagtagtgtttgtcctagaaatttcaagttgttttaatacatgaaaatcatgttaagagaacaaaagagactggctatatgatcatttcagaaggtgtagaaaagcat

SEQ ID NO: 401646 - DNA, 588 bp, Homo sapiens
cattttcagatgatattgtttatgtagaaaatcaggccacatatggtggctcacctctataatcccaacacttcaggaggccaaggcagaaggatcayttgagctcaggacttcaagaccagcctgggcaacatagagagatctcatctctacagaataattaaaaaattaacagggcatgttagcctgcacctgtagtcccagctactcaggagactgaggtgggaggatggtttgagtctagcaggtcgaggccacagtgagccataatcataccactgcactccagcctgggcaacagagtgagaccttgtttcaaaaattaaaaaagaaattcaattgtatttgtatatgctagcagcaaacaattgaagaatgaaataaattcatttatcatgatgtcaaaaatataaaatagctagaaataaatttaacaaaagatatttaagaacttctaccctaaaaactataaaatattatgatggaatctaaaaacaacacaaatggagatatgtaccatgttcctggattggcagattcgtattattaagatacagtttattttaaagtattatatcaatgctaatt

SEQ ID NO: 401647 - DNA, 603 bp, Homo sapiens
atttgacaaaaatcaacacccattcattaaaaaaaaaatcaatgaaaaccatgaatagaagaaaacctcctcaacctgtaaagcatacctacaaaaaaaaaaacaaacaaaaaaaaaccatagctagcatcatacttaacggcaaaaaaaattagaaataagtcaaggataggcaagaaataaatatatctgtttgcattttcagatgatattgtttatgtagaaaatcaggccacatatggtggctcacctctataatcccaacacttcaggaggccaaggcagaaggatcatttgagctcagkacttcaagaccagcctgggcaacatagagagatctcatctctacagaataattaaaaaattaacagggcatgttagcctgcacctgtagtcccagctactcaggagactgaggtgggaggatggtttgagtctagcaggtcgaggccacagtgagccataatcataccactgcactccagcctgggcaacagagtgagaccttgtttcaaaaattaaaaaagaaattcaattgtatttgtatatgctagcagcaaacaattgaagaatgaaataaattcatttatcatgatgtcaaaa

SEQ ID NO: 401648 - DNA, 603 bp, Homo sapiens
atttgacaaaaatcaacacccattcattaaaaaaaaaatcaatgaaaaccatgaatagaagaaaacctcctcaacctgtaaagcatacctacaaaaaaaaaaacaaacaaaaaaaaaccatagctagcatcatacttaacggcaaaaaaaattagaaataagtcaaggataggcaagaaataaatatatctgtttgcattttcagatgatattgtttatgtagaaaatcaggccacatatggtggctcacctctataatcccaacacttcaggaggccaaggcagaaggatcatttgagctcaggacttcaagaccagcctgggcaacatagagagatctcatctctacagaataattaaaaaattaacagggcatgttagcctgcacctgtagtcccagctactcaggagactgaggtgggaggatggtttgagwctagcaggtcgaggccacagtgagccataatcataccactgcactccagcctgggcaacagagtgagaccttgtttcaaaaattaaaaaagaaattcaattgtatttgtatatgctagcagcaaacaattgaagaatgaaataaattcatttatcatgatgtcaaaa

SEQ ID NO: 401649 - DNA, 559 bp, Homo sapiens
tgtttgtattaggagaagctaggttaagaggcatgtgggaattctgtcaaatttttgtgaatttcctataacattaaaaatatttcaaaataaaaagtttttaaaatgtcaattatctcaaaattgattgatagattcaatgcagaccatttataatcccatagactttttttagaaattaaactggttctaaaatttacatgaaattcgaagcacttaaaatatttaaagcaatcttgacaaaaggaacatagttggaggatttacaccacctgattccaagacctgctattaaagctacagtaatcaagacagtgtggctctgccataaggatagacaaatagacaaatggaacagaagagagagcccagacataaatccacagttatacagttatttgctttttgacaaaggcaccaaagcagtccaaatgagaaaaaaaaaaatgtatttttagcacatggtgttgaaataactggctactgatatggggaaaaaaaaaaaaacaacttcaggcccwaacttataccatacatacaaatacatttgagatggaac

SEQ ID NO: 401650 - DNA, 559 bp, Homo sapiens
tgtttgtattaggagaagctaggttaagaggcatgtgggaattctgtcaaatttttgtgaatttcctataacattaaaaatatttcaaaataaaaagtttttaaaatgtcaattatctcaaaattgattgatagattcaatgcagaccatttataatcccatagactttttttagaaattaaactggttctaaaatttacatgaaattcgaagcacttaaaatatttaaagcaatcttgacaaaaggaacatagttggaggatttacaccacctgattccaagacctgctattaaagctacagtaatcaagacagtgtggctctgccataaggatagacaaatagacaaatggaacagaagagagagcccagacataaatccacagttatacagttatttgctttttgacaaaggcaccaaagcagtccaaatgagaaaaaaaaaaatgtatttttagcacatggtgttgaaataactggctactgatatggggaaaaaaaaaaaaacaacttcaggcccaamcttataccatacatacaaatacatttgagatggaac

SEQ ID NO: 401651 - DNA, 631 bp, Homo sapiens
gacaagtgtccaggccaaagcaagcagtcaggataggaatattaatttatttgtgaggacagtagtattagggggaaaaaaagaggagcacatgcaaagacatgatatgctatcatttaaaatcccatgatacaccaaaaccaaaattaaataaaccaagctaaaaatcttctgcaaaacaaaggaaacaatcaatgaaatgaaacagcagcctatggatagggaaaatatatttgcaaactatrtatctgataaggggtgaatatccaaaatttccttttaaaactcatacaactcaaaagtagaaaaacaaatgcctcagtttaaaaatgggaaaaggacctgaatagacatttctatgaagaagacaaaaatgtgtcctacaggtatgtgaaaagttgctcaacatcattaatcatcaggaaaatgcaaatgaaagccactatgagataccaaatcacatgttaggatagctattatcaaaaagccagaagataacaaatgttgacaagagtgtggagataaaagaaccttgtaagtatttgtgaaaatgtaggttggtgcagccattgtggaaaacagtatggaggtttctaaagaaattaaagatagaactactgtatcacccagc

SEQ ID NO: 401652 - DNA, 631 bp, Homo sapiens
gacaagtgtccaggccaaagcaagcagtcaggataggaatattaatttatttgtgaggacagtagtattagggggaaaaaaagaggagcacatgcaaagacatgatatgctatcatttaaaatcccatgatacaccaaaaccaaaattaaataaaccaagctaaaaatcttctgcaaaacaaaggaaacaatcaatgaaatgaaacagcagcctatggatagggaaaatatatttgcaaactatgtatctgataaggggtgaatatccaaaatttccttttaaaactcatacaactcaaaartagaaaaacaaatgcctcagtttaaaaatgggaaaaggacctgaatagacatttctatgaagaagacaaaaatgtgtcctacaggtatgtgaaaagttgctcaacatcattaatcatcaggaaaatgcaaatgaaagccactatgagataccaaatcacatgttaggatagctattatcaaaaagccagaagataacaaatgttgacaagagtgtggagataaaagaaccttgtaagtatttgtgaaaatgtaggttggtgcagccattgtggaaaacagtatggaggtttctaaagaaattaaagatagaactactgtatcacccagc

SEQ ID NO: 401653 - DNA, 557 bp, Homo sapiens
gaatcacattacatcatgttgcataccttaaatatatataataaaatttattttaaaaaaaataattaataaaaaggtagaatatactgcttccccacagttaaatgatccagagtgatagagaaggrgagaaacttatctttgacagcaactattaatatatccttccctcctggctttttgctctaattgtctaccctactaacaaaacctacttccctgcttcagctaaaaaggttatttcattactgttatgtatattatgtactgatatgtacattattggttaacacttagggtatatgcctccccattcccagagcatttaacacaatccaaagccagtaggtaacagatggcttaggtatgagtagtgaaaggtttttggatcagactaggattcagagagatgtgaggaaattttcaaatttgccattgctcccagtatcccaaataaaagaagatgtgacaagatatctctgtgattgagcaataaacaaaagagagattataatagaagctcatagaaagttgtcctgggagtgaagagaactaag

SEQ ID NO: 401654 - DNA, 559 bp, Homo sapiens
caattaataattttttctaaccatgttgtttattttaagtgcatgagaaggatgtaatatattcaactttgaaggaaaaaatgttcagagacaacttggacagacagaagccaaaccatagcttgacataaattgcttggcatataagaaaatcctgaarcaaggacaaatcaggatctatcagagcaaatacagaagactggcgagaaaaaatggttttgtaacttccaaagctacatagtccaatgttctaccataaattgtactataggaaattgatttcagtgcttaacactgtcaaatatcctttcttttggaggtgaaaaaagactcaggcttagggacagtaactagctgcttaacaacggagcagatactgtaatggcaacctcaagacttttgcttagaaccattgtgaacatttcacacatttgccttctcaattcaagaaccagccaacatttctgctcttttgaaacttgttttacatattggagttctagcctattggtccttcttgctttccaggtttttcaaactaatattgtttcgtacttaa

SEQ ID NO: 401655 - DNA, 577 bp, Homo sapiens
tctgacaggcaatataatatagaggaaaacccaaagggatgactagggcttgtatggaggctctgatatctactccctgtatgatctttggtgaatcacttaaccaccctgatatatagttttatcagctgtaaaatgaaatatttgggtaacatggcccctaaaatttcttcagtgaattttcaaagttcagtgctgcatcacctctttttarattgtgtggtttctgtgaggcatacttttcccaaatcagccctggtttgcgtttgtttcaaatagaatcatagacttaacatatgcgtgtcccagaaccaggaagaacaaaacaccttttctcacttatgcatagatatgtgcataagcaggcaaactgcaaagttctgcttgggctatacaactattgagaatatggaccaggttggaggatctataagggatttcaacctctctgtaatattttttaaaattataatacactttgaggagaagaatgtttgtcttagagttgacagaaggcaatcaataaagtaggaagttatttcatgattgtcttggcagacatttgatcaacagtagc

SEQ ID NO: 401656 - DNA, 577 bp, Homo sapiens
tctgacaggcaatataatatagaggaaaacccaaagggatgactagggcttgtatggaggctctgatatctactccctgtatgatctttggtgaatcacttaaccaccctgatatatagttttatcagctgtaaaatgaaatatttgggtaacatggcccctaaaatttcttcagtgaattttcaaagttcagtgctgcatcacctctttttagattgtgtggtttctgtgaggcatacttttcccaaatcagccctggtttgcgtttgtttcaaatagaatcatagacttaacatatgcgtgtcccagaaccaggaagaacaaaacaccttttctcacttatgcatagatatgtgcataagcaggcaaactgcaaagttctgcttgggctatacaactattgagaatatggamcaggttggaggatctataagggatttcaacctctctgtaatattttttaaaattataatacactttgaggagaagaatgtttgtcttagagttgacagaaggcaatcaataaagtaggaagttatttcatgattgtcttggcagacatttgatcaacagtagc

SEQ ID NO: 401657 - DNA, 580 bp, Homo sapiens
taattagtaatgggccttattaagagactggatccccaatctagaggattttgtaggtttcctgaagatgttatttttatttaactgggtatatattaagtgctgctttgtgtgtgtgcatgcgtgttcatgtgtgttgagatgttagattaggaaggagacaaggatcattgagcaatgatacaatctcatccttagatctcaaccacatagaaaattctcaaatacatttytaagagtcccgttggcactaagcaatatgcataagttattactaaatataatactactataccacttttaattataacagttttgcaaacagttaactaacccttaagagcaactgcagttttgccaaaatatatgtgtgtgtgtctttattgctatacctgattatacagagaatgcatatttataaatatgcacacatcacgtaagtaaagaagcaaaacaaaacgaatgtctcaggccaggcccagtgggtggcagatacccgtaatcccagtactttaggggcctgaggcaggtgggtaacttgagccctggaatttgagaccagcctgggcaacatgacaaa

SEQ ID NO: 401658 - DNA, 580 bp, Homo sapiens
taattagtaatgggccttattaagagactggatccccaatctagaggattttgtaggtttcctgaagatgttatttttatttaactgggtatatattaagtgctgctttgtgtgtgtgcatgcgtgttcatgtgtgttgagatgttagattaggaaggagacaaggatcattgagcaatgatacaatctcatccttagatctcaaccacatagaaaattctcaaatacatttctaagagtcccrttggcactaagcaatatgcataagttattactaaatataatactactataccacttttaattataacagttttgcaaacagttaactaacccttaagagcaactgcagttttgccaaaatatatgtgtgtgtgtctttattgctatacctgattatacagagaatgcatatttataaatatgcacacatcacgtaagtaaagaagcaaaacaaaacgaatgtctcaggccaggcccagtgggtggcagatacccgtaatcccagtactttaggggcctgaggcaggtgggtaacttgagccctggaatttgagaccagcctgggcaacatgacaaa

SEQ ID NO: 401659 - DNA, 580 bp, Homo sapiens
taattagtaatgggccttattaagagactggatccccaatctagaggattttgtaggtttcctgaagatgttatttttatttaactgggtatatattaagtgctgctttgtgtgtgtgcatgcgtgttcatgtgtgttgagatgttagattaggaaggagacaaggatcattgagcaatgatacaatctcatccttagatctcaaccacatagaaaattctcaaatacatttctaagagtcccgttggcactaagcaatatgcataagttattactaaatataatactactataccacttttaattataacagttttgcaaacagttaactaacccttaagagcaactgcagttttgccaaaatatatgtgtgtgtgtctttattgctatacctgattatacagagaatgcatatttataaatatgcacacatcacgtaagtaaagaagcaaaacaaaacgaatgtctcaggccaggcccagtgggtggcagataccygtaatcccagtactttaggggcctgaggcaggtgggtaacttgagccctggaatttgagaccagcctgggcaacatgacaaa

SEQ ID NO: 401660 - DNA, 494 bp, Homo sapiens
caaaggtgccactacctgtacaatgattttctcaatgccacccatcaacccccaaccctgtatttgtttgtttgtttgagacaggttcctgctctgtcccccaggctggagtgcaatggcatgatcacaacttgctgcagcatcaacckccaaggctcaaacaattctcccacctcaggccctagagtagctgggactacaggtgcgtgccaccatgcctggttaatttgttgttgttgtattttttgtagatgaagggttttgcaatgttgcccaggctggtctcgaactgctgagctctaaccatcctcccaccttggcctcccagagtgctgggattacaggcatgagccaccatgcctgatccaaacctgtattctgatcttgagacaggaaaagttgctgaagaactgccatgaacacattgaaatccatcacaaagcccatcatcacgaggttaaagcagtttggttggggcttttggtagggaccca

SEQ ID NO: 401661 - DNA, 402 bp, Homo sapiens
cacgttctcactcataagtgggagatgaacaatgagaacacatggacacagaggggggaacttcacacaccggggcctgtttgggggtggggagataggggagggatagcattaggagaaatacctaatgtargtggcaggttgatgggtgcagcaaaccaccatggcatgtgtatacctgtataacaaacttgcacattctacacgtgtatcccagaacttaaagtataataaaaagaaaaaagaaaaagaagattttgttttcttttttttaagacagagtcttgctctgtcacccaggctagagtgcagtggcaccatcgtagttcactgtagcctcagttttacaggcttaagcaatcctcctgcttcaacctcccaagtatttgggactacaggcac

SEQ ID NO: 401662 - DNA, 596 bp, Homo sapiens
actccacgactcctctgtctcttggttccctggtcactttattgktccactctttcctggttccttgacctgttttatctctccagcctctaaacgttggatgcttcaaggctcaatcctcaaagtttttctttctttttttctatttacactcactctctagtgatttcattcatgcccatgtctttaaatacccttcatgcactgattactcccaaatgcacctctccagccttcacagttcctccaattagtatatccgtatatcagctgccagcttgacatcacctcatgaacgtctaacagacaattcaagtttacacatgtacgaaatccaacttttgattactttctccaaatttattatccaatcttccccatctcaatatatcatattccaatagattgtattttatcagttacttaccccaaaaatcttgaagtcattttcgactcctcttttctctgtctctcttccttggtccaagccacaatcatacctctgtattactgtctcctggcttccaaactcattctttcatagtctattctcctcacaggagaaaaagcaatcctttgaaatcacactggagctc

SEQ ID NO: 401663 - DNA, 564 bp, Homo sapiens
cacataaacttaatgagattccaacataaaatcctgagtttaagtattcaactacttacttctcatcagatttattctaaggagataacttgttttactgtttataattacacaaaatatcaagtatatacmgattatttcttaatttaaaaatattaatagtatggttttgagtttttttaagttttttatgttaaattcaaatactctaaaagttgatagatgcttgacataaaaaaaggaattaacattgcagttaatggaggtaattaaatactgctatttggactaagatgttgaggaaattcttacccatgaccttgatgagatacactgacctctatttataatttctatatcagaggttccataactcactaaagaagtgacatctttgcccacttcgctgggttctagttaaacacattacctcattcttctgtcgactcacagaattctggagtgcttgtcctgtgtgatcatttgattcaatttggcattgtaattcctaatttaggcaagtaaatattccttttaactttaagtaattttaaatttaaataa

SEQ ID NO: 401664 - DNA, 543 bp, Homo sapiens
ttaaacacattacctcattcttctgtcsactcacagaattctggagtgcttgtcctgtgtgatcatttgattcaatttggcattgtaattcctaatttaggcaagtaaatattccttttaactttaagtaattttaaatttaaataattttcaaatggattgtcccattttttgtatccttgggaatatatgattgatatggatatttgaatacttcattaaattttaatttaatagctttgtcttgctagtgatcacaatttatgaggtttttctaatgatatgtccccttcattcctcttacagatttacttgacattctttaatttctatgttgttcgttggaataacaaatgagttaaaaatatcaatatgatggtgtaacaagattcaatgagtatgttttattttctgtagaataagattagcttttctattttgtgtaatattataaacttatggcttttcatacatttgatgtttttccatcaaccctaattaatcttctcctcttggtgcttatactataacaattttggctag

SEQ ID NO: 401665 - DNA, 531 bp, Homo sapiens
atacatttgatgtttttccatcaaccctaattaatcttctcctcttggtgcttatactataacaattttggctagtggggatccttgcaaggttggtagttgtgcccatttgatatggccccaataatctttgaaaaatatcttgttctaatgagcaggctcattttgtccctgctccagatttgagwttggtaatttcttcagattaatcccaggtttcagtagggggaaaaaaggcaccagagataataatctaatgatgtgactaggctctaagataaatcatggtaaaacattacttttgggctatatcaccgaaccaagctaagaaaatagatgtgtattgatgtttactctttagttctaacaacagagtatttctacacttttaattctaaacaattatatctatttccctttaaatgaaaatatcagtcattttggaaagtaaataaaagtgcttatttatctttaacaaaaatttcaaaataataataccagaataatgtaaatagcaatactgctgagtga

SEQ ID NO: 401666 - DNA, 531 bp, Homo sapiens
atacatttgatgtttttccatcaaccctaattaatcttctcctcttggtgcttatactataacaattttggctagtggggatccttgcaaggttggtagttgtgcccatttgatatggccccaataatctttgaaaaatatcttgttctaatgagcaggctcattttgtccctgctccagatttgagtttggtaatttcttcagattaatcccaggtttcagtagggggaaaaaaggcaccagagataataatctaatgatgtgactaggctctaagataaatcatggtaaaacattacttttgggctatatcaccgaaccaagctaagaaaatagatgtgtattgatgtttactctttagttctaacaacagagtatttctacacttttaattctaaacaattatatctatttccctttaaatgaaaatatcagtcattttggaaagtaaayaaaagtgcttatttatctttaacaaaaatttcaaaataataataccagaataatgtaaatagcaatactgctgagtga

SEQ ID NO: 401667 - DNA, 460 bp, Homo sapiens
aatcaaaaggcaaagtcatgaagaaataggaattaagagatatccattaagaagatgccagaaaccaaccttacccagggagaggagggaatttgaaagggtgaggagagaggtccttgagktattaagtacctgtgatgacgtgtggggagaagcagtgtgcagcaggggcttcccagtgtctctaaaccaacaccatcctttgctaatactagggacagcctgggaggtgagtcgccactgacccacctccagtatcattcaacacactgtgggacatgcttaagctgtgatggcaactcagctagttgccagacgaacaggacctgttcaaaatgcttatgggttgtccttcatagctgatacccatctgtgtcctaaaatgcagcccttttgaatcattctacatggtccacctctcttttaaaggcccaggtactgtcagttctctgacagtgag

SEQ ID NO: 401668 - DNA, 454 bp, Homo sapiens
atctataaattgctttgggcagtattgccattttcatgatattgattcttcatatccatgagcatggaatgtttttccatctgtttgtgtcctctctgacttccttgagcagttggaaaacacacttcagaaaagcttatagtttgaacttgaatttcctatctagttattaggtgaaatcaatgcttttctaatgatgttagattcacacacaaaacaaatttattagctggcttcatttgaagctgttctgactacctatatgccaccmccaaaaaaaaaaaaaaaaaaaaaaaaaaagaacaaaacaaaacagaaccttggaggagaaaaccacaaagacaaaattcagtactgactgtcaaggtagtatgatgcttccatttcaattatgtccaagaaacttccaaagtaatgtctcattaaccaattgagccatagagaagaagttaaa

SEQ ID NO: 401669 - DNA, 579 bp, Homo sapiens
tcaagtccttatctttgtgtccaactattaagtcagtgttttctttccaggcccccttcaggttgagtgtccctggacactgaggagccagagttctggcctgggctggttccttccttcttcccccacctcactctgaagygcacccccaatttagttgcttagttttctcagtctcagaaacaacagtctcaggctgattccctgggtcctaaagataactctccttactgctttaatttctactccctgttcttagcctgggccctgatatagtttcaatgactttaacttttgataactctcattatacaagtaacagctgcccaacagaaaagaaattttggaagaaaacagaaatataaagaagaaaattaaaatcacccataatctcaccaccctcagacaaccacttttaaacatttatgcttattttttccagatattttttgatgggttcaaatcatgactcagctctcattacctgagtgatttgtgggggcaaaactgaactttatttggacttagtttcttcctttgggaaacagaatggtaatatctactttacagggtgacgga

SEQ ID NO: 401670 - DNA, 639 bp, Homo sapiens
cctgctagcccagggaagtggctcaatcctgaactaatatctatattctctatcacatttatggcatatcatagttcaaaatacttttatttaaattatttaatttgtttctttatgtaccacctcctatgaaagtgattgagagaggcttatatgaacacatacaatacaacaagagttaaagaaaatagatgaaacacgtggaatacagacaatataacgaaattgtgataagatcatttcacaaaggatatatgataargttctgaatcataagttggtagaaggattaaaatttggctctgaactttctaaaggatggaacaaagagagaagcatgatcattacaaaaagtaccgagcattctttaccaataacttggaaaaggaaaaaaggaacaacttaccaagcactttgtctaggttctctcattcaaacctcacataccctgaacagtgggcctgtctttcctacagatggcagagatcagtgatttctggagctgttatggagatggttaatatgtggaagtagctccctctttgtcttgcataaaggagggaactgctgctggtctttaaatgaatcttttcactgagaaggattcagaaagaatctaaaaaattcttttcagagaca

SEQ ID NO: 401671 - DNA, 532 bp, Homo sapiens
tattcttgttaatctctttgtgtttaaacttcatcacagatatgtatgtataggaaaagaaaagacatcggatacatggggtttggtactatttgcagttttaggcatctactgggcatgatccactgatcaatggtcttggaacgtgtctgccatggataaggggagtctactgtattgattctgattaatgcctgagaatgggatgttatttcattcacacggaagcctttttcctttcttccattctttcttcctttttaaaaaaatctccttcagaaaaaaaagcaaccctggatatatgagacagggggcagggtgacacaggggaaataaaccacagtcctttacctggatctactcagaagactctgtagctactatttccccaacatgtaccatgccatgtatttatttgaatastcatgtccttgtgactcaaagttgatgttctacaggtcgtgggaggtccaggatcctgactcttgggaggcagttgcagttcagaactggctttctcttgtggttcttt

SEQ ID NO: 401672 - DNA, 615 bp, Homo sapiens
caaggtgcgggcctgtggaaatggtgcaagggatgctgagctcttcatattgacctcacccttctccccagtacttcccagcctagctgagctaaaggccacatggaggtttattcagctgtagttactgccatcaacattctgagaacaacaaattaacatgttaaattctgytctccagcccccaagccaccggagaacagaacgcattcttaaagtcttagtttttccaaaccaccaagccaggttcacttttcaaagcactcattttatcagcaaaactccactctcacaaagcccagggctttcagaacacagcccaacctagcttgacatttgcactcccaaatgccttcacagctttccttcccacaggttctctccacaagatctctgaccaaaacacgggggctctcactattgtcagaatatgccctgtgctctcccacgtccttacttccactcatggcttcactggcctgcaatgaccacccttccttttcaccaacagaattctttcaattcagcactgcctcttccatgagccttcctttaacaacctgactccactgagatttcatttttaaaaaaatcctccagtgcttatgaccatcc

SEQ ID NO: 401673 - DNA, 505 bp, Homo sapiens
tcttaaactacatattctaattcagtcattttttcggggaagggcttgagattctactttacttttatttatttttttcgagacagggtcttgctctgtcacccagggtgtaatgcagtggcaagatcatggctcactgcagccttgacctcccaggctcaaatgatcctcctgcctcagcttcccgagtagctgggaccacaggcatgtgccatcacaacgaactaatttttatttatttttgyagacagggtcttgccatgttgcctaggaggacctcaaactcctgggctcaagcaatcctcccaccttggcctcccaaagtgctgggattacagacgtgagccactgtacccagcccaagattgtacatttctaacaaggtcccagataatgctatcactgctggctcatgggccacacttggtgagcaaagctgcaggtcatcacatcctcatggtcttatgaggactctatttcacaagtgaggaaggtgagcctcaga

SEQ ID NO: 401674 - DNA, 580 bp, Homo sapiens
ccagagagattgggaagagtctgccaagggtgtgttctactcactctcctcttttctttcatctccactgagctggaggcagttatcctgtcccccacgtcacattcctactcccgtttcccatgcctggacccaggttgggcaaactcttcctgtaaagaaccagacaggaactattttaggctctgtgtgccatatggtctcagtcacaactactcatctctgcctctgyagcacgaaagcaattagcaacaatatgtcaacaaacatatgtgaccccatgaaaactttatttattatggatacggaaacctgaaaataatgtctttcttttgattttttccccaatcattaaaaaacgtaaaaactactcttaggtcgcaaggttaagccattctcagctgagcagtggcaggctggatttggcttgtgacctacagttggccaatccctgattcccaaaatgtattcctcagggatgtgggcaaatacttatgggaaatgctggattaaacagagttaagaagcatcagacatttccaggacgggctagcacatgccagggctctctaactgacct

SEQ ID NO: 401675 - DNA, 580 bp, Homo sapiens
ccagagagattgggaagagtctgccaagggtgtgttctactcactctcctcttttctttcatctccactgagctggaggcagttatcctgtcccccacgtcacattcctactcccgtttcccatgcctggacccaggttgggcaaactcttcctgtaaagaaccagacaggaactattttaggctctgtgtgccatatggtctcagtcacaactactcatctctgcctctgcagcacgaaagcaattagcaacaatatgtcaacaaacatatgtgaccccatgaaaactttatttattatggatacggaaacctgaaaataatgtctttcttttgattttttccccaatcattaaaaaacgtaaaaactactcttaggtcgcaaggttaagccattctcagctkagcagtggcaggctggatttggcttgtgacctacagttggccaatccctgattcccaaaatgtattcctcagggatgtgggcaaatacttatgggaaatgctggattaaacagagttaagaagcatcagacatttccaggacgggctagcacatgccagggctctctaactgacct

SEQ ID NO: 401676 - DNA, 607 bp, Homo sapiens
tcctctgtttttaaaactccccttttgatttttttgggccagagccaatttkatttaaaaaaaaaaatctctaaatgaaagggcatcaaaaagaccgcatttcagttatttccccaaacctcaagttcattctccttttgttcttcctgcagcaaatgaaggatcagctggacaacttgttgttaaaggagtccttgctggaggactttaaggtgagagcaggggcggggtgctgggggagtgtgcagcatgattaagggaagggagactctgcttcctgattgcagggaattgggtttgtttccttcgctttgaaaaggagaagtgggaagatgttaactcagcacatccagcagccagagggtttacaaagggctcagtccttcggggaggcttctggtgaaggaggatcgctagaaccaagctgtcctcttaagctagttgcagcagcccctcctcccagccacctccgccaatctctcactcacctttggctcctgcccttagggttacctgggttgccaagccttgtctgagatgatccagttttacctggaggaggtgatgccccaagctgagaaccaagacccagacatcaaggcgcatg

SEQ ID NO: 401677 - DNA, 607 bp, Homo sapiens
tcctctgtttttaaaactccccttttgatttttttgggccagagccaattttatttaaaaaaaaaaatctctaaatgaaagggcatcaaaaagaccgcatttcagttatttccccaaacctcaagttcattctccttttgttcttcctgcagcaaatgaaggatcagctggacaacttgttgttaaaggagtccttgctggaggactttaaggtgagagcaggggcggggtgctgggggagtgtgcagcatgattaagggaagggagrctctgcttcctgattgcagggaattgggtttgtttccttcgctttgaaaaggagaagtgggaagatgttaactcagcacatccagcagccagagggtttacaaagggctcagtccttcggggaggcttctggtgaaggaggatcgctagaaccaagctgtcctcttaagctagttgcagcagcccctcctcccagccacctccgccaatctctcactcacctttggctcctgcccttagggttacctgggttgccaagccttgtctgagatgatccagttttacctggaggaggtgatgccccaagctgagaaccaagacccagacatcaaggcgcatg

SEQ ID NO: 401678 - DNA, 625 bp, Homo sapiens
ctgtcatcatctttacccctgcctctgctaggggttgcaagaagcttaagtgttgtcagtgcatcttgtttttcttgagaggcctccaattaagctaatagaggaaaagtggatatcagagagctagacttggtggaaagggtgagctcttatagacatggatggagactgtaatataagaagaatttgaaatgaaacattctgatttctagcatcttgaccctctgcccctcatttaatttttacttctaaagtgttgatgtgtgccttctgttggcagttctgctctctatctctggccctatttagacaaaactactratgatgtatgtgctagaaaaattgaaaaaaaaaaaaaactactggagagcgattgagctgccaggtgcatctggtcctgccactgagcacagctgtcgtgcgccaattacctgtgatgactacgattagctgtcagtcagttggcttagtttacactaagcatctgcatgtgttaagatttcacttgatccataatcatttcagatgaacttgaatgcttgcgttctcatttgctataaattggacccttcaaatatcgctacagatactgctaacattatatagtgtttatatagtcctttaa

SEQ ID NO: 401679 - DNA, 498 bp, Homo sapiens
agtattttaatctcttatgcaaacttctgtcggttagtggtcaaagtagtgctgccaattcttgcctactaggaacaaaggaagtgctaaaaggtatttgtggcctattgaagaatctctttttctctttgtttgcagttgcactsgatgtttaattttgttttatgataatggcagttcatgactcttgctttctttaaagactgcagaaaatgaattgtagttttgttgtgctcctagttggataatgaacagaacaattagctgcttgctgacttaatttcccagtgacctcttggaccatctttagaacagcttctgagcccatggtcatgggtgttttcaggtataaattgctagtgcatggaaggaaaagcctctttcaaaatttaacttccatacgttcatttcatggagacccagcctgagctatgaagacaaaatgccatcatcatttcttctaggatttcgtctgaatcacaattgtaaagctatttg

SEQ ID NO: 401680 - DNA, 498 bp, Homo sapiens
agtattttaatctcttatgcaaacttctgtcggttagtggtcaaagtagtgctgccaattcttgcctactaggaacaaaggaagtgctaaaaggtatttgtggcctattgaagaatctctttttctctttgtttgcagttgcactcsatgtttaattttgttttatgataatggcagttcatgactcttgctttctttaaagactgcagaaaatgaattgtagttttgttgtgctcctagttggataatgaacagaacaattagctgcttgctgacttaatttcccagtgacctcttggaccatctttagaacagcttctgagcccatggtcatgggtgttttcaggtataaattgctagtgcatggaaggaaaagcctctttcaaaatttaacttccatacgttcatttcatggagacccagcctgagctatgaagacaaaatgccatcatcatttcttctaggatttcgtctgaatcacaattgtaaagctatttg

SEQ ID NO: 401681 - DNA, 572 bp, Homo sapiens
cacaacactaaaggtaagatatgaacttgatccttgaaggtggagagggatgaatagatacatctgccaggttgacaaagtaggcaccgcagagagctaaaatacttcagatacagggcatagcaccaatgaagcattgagaatgagagcttaaggtttcctttgaaggtagattttgtctgaggctgccttgtttcctccatagtacttagcacartggtaaaaacaagctacgcactcagtaatgcttattagatgaaggaaatgccattttctactaagcgtccaaatttaaagaggcaaggaagccatttttccaaattggcttttaaataaagatgaagatctacaattaggaggttaaaggggcatttattagtaaatgagtaaatccattgattatagggaagcaattattaacccaggatgccaagccaagaaagcaaaaggttgtgccaaattaacaaatttactacctaataaagctaaaataagattaaccaagcacattcaataaaagccagtaaactgccacataattagactcaaaagttaacaaatgccagtaggca

SEQ ID NO: 401682 - DNA, 562 bp, Homo sapiens
taatagtattttcaactgataagaaagggtttattaagccaatttacgtctttatcagctcagtctttttgcaggctttaatgcaattcctggagcattataattgagaaagaaggatagctgttcattttggaagtgtctggaatgttgattagaatcatactatatgcaaaaccaagattgtattgactgtcaatgtcctttaaagaagtcaaacctggctcctcattttgcagaaggtgacacccttgcttcattctaaattggttaaaggaaactaacatgtgttgagcatgtggcaaatgccagtggtatttacttgtttccacatttattcctcaaagatattrcatgaggtaagttgtcatctttattttacacacaagttaattgggtcacagtgatgctaaatcttatgcccaagttcatattgctaatgcctggatatgaagctagggaaacctgctttcgatgttcattatcttgcctgattttgtgataaaagctcttttcacatagtgattgtgaagaggactgtcagtcatgcttgcattacaagaca

SEQ ID NO: 401683 - DNA, 562 bp, Homo sapiens
taatagtattttcaactgataagaaagggtttattaagccaatttacgtctttatcagctcagtctttttgcaggctttaatgcaattcctggagcattataattgagaaagaaggatagctgttcattttggaagtgtctggaatgttgattagaatcatactatatgcaaaaccaagattgtattgactgtcaatgtcctttaaagaagtcaaacctggctcctcattttgcagaaggtgacacccttgcttcattctaaattggttaaaggaaactaacatgtgttgagcatgtggcaaatgccagtggtatttacttgtttccacatttattcctcaaagatattacatgaggtaagttgtcatytttattttacacacaagttaattgggtcacagtgatgctaaatcttatgcccaagttcatattgctaatgcctggatatgaagctagggaaacctgctttcgatgttcattatcttgcctgattttgtgataaaagctcttttcacatagtgattgtgaagaggactgtcagtcatgcttgcattacaagaca

SEQ ID NO: 401684 - DNA, 554 bp, Homo sapiens
agcaatttatttaactttgagattataccaaagcatctgggttctggggtttattttgaatacaattaagaaaatagaatgcattcaaaatttccttggatttacttaatatgaggtctgtgttttagatttcttacaagaatagttcagagttttcagtagttatttgctaaacctcaggttctctgcatcagaaaggctaccctgatgaccatccagtgagttagtagaagtcagatgtgcagatcttggtggccctacaatgtttgcccatccatatactaatgccttttggtcacttattttttttccttccttttaactttttctttagtgctactaacttcaatcttagaagtgtactaaragctcaggcaccagatagtccttttgatgcagggtgggtgagctccaaagtggagcttagcctacgggagttcttggctttgcccaggaaagaactcaagtgtaagccagaggtagaagaaaacagctttattgaagaggcagttttacagctctgtggctgctcccataaagcagggataccctgt

SEQ ID NO: 401685 - DNA, 569 bp, Homo sapiens
caactctgtgttttcaagttttactcatctttttgcatatttcagtagtttagtgccttttattgcagagtagtattctatttttttatataccacgatttatttagtgattctccttttgatggagatggaatgccatgaacattaatgtataaatcttttgctgtgcatagatttcagtttttcttatggaataactaggactggatattcatttatcttttaattgaaacaattagattttttacttctacacccaattgctactttttcaaataatcatgaataatttataaatttataaattttatattattttctttggctgacaattttarttttctttgttatttctgaaattatgttgaaatattcttttatattctgtattccagtattttaatacttgatgcattttcaatattgaggtaaattttatatactttcagtatttaagtttggtttggcttttttactacttttggatctcatttgtgttggcttttcctactgacttagttgtgatttttgaaaataagattatacttgtgacattactggtgcaaatc

SEQ ID NO: 401686 - DNA, 519 bp, Homo sapiens
atcactatctaacataatattatagaaaatctgtttatttctgtttatctcactaaaatgtgaaggccatgagggcagagattttccttgtttctcttttttttctaacgccctgtatggcagagtaagtatgtaaaattattcaatggatgaatcaattgttctcatttaatctttacccaaagaagttccaattttactagtaaaaggaaacatgttaggccaggtgttgtccctcacacctgtaatctcagcactttgggaggccaaagcaggaggatcccttgagcccttgagttcgagatcagcctgtgtaacatagtgagaccctgtctckgaaaaaagaaaaagaaaagaaaacagaagaaaagtaacaggggaagggaagggaaaagaaaccatagcaggaaggttgaataactggtgaaggtcactaatttgaaagttcagtctaatatttaaacctaaataaatctctttgattataaaaccaataattttgagatttatttcataata

SEQ ID NO: 401687 - DNA, 613 bp, Homo sapiens
taccgggtgttcaaatagcattgacataatattttaatgttttatttgtttgaatttagaaatataattcatagaaaagcttatatcacagagatttaccttcattgtgacttataaattctcttaagaaaataaattgtccaaaatcaacaatgactcattttcaagctaagagttaggttctaggctgctgattcttatattcttgtattctatttcaaatggacacagtggcaggagtacggggcttatagcaggaagccccgtatgtgagtcttaccaattggcaactccaatagtttatagaaccagagcaaatagactggcttgacagagtggtaagataacatttcctttggttaacatcaatgaagctttccagctcacgttcaaaatctagaacacttagtttgataaaaatgtcactaacgtagaccatgggaaaaaatcagactgaatccatatagtaatattccatgacattaaaaaaaattacaggagcttagttaggaaacarcatatttctctggtttgtatgtgtaaatgtcagaaaataggtatttaagggcttccacagttcaggaaatttctctgagtaaatacaacatacaag

SEQ ID NO: 401688 - DNA, 579 bp, Homo sapiens
gtattcagttacagcagtaaaaaatgaactaagatacccaccctaaatgtgtttttcttgcccccaaagaagaataatatctaatattgccatattcaaaagccaaatcacaccttggctcaaaaaactgagattttggggtcctggattttattcccaagatcttcccaccaggtaagtttccatgtcatctctcatgtgtctatactattacttctagtaaaccaaactttatgattgcaaatcaggagaataaaataataatgacaaagtattctgattttaattaatacatgttgatatacatgctttaaaaatgtattctccagtgagttttaataattggcaacatctgaattttattgagatccctacaayaggcaaagctcttagagagtttgaggtcacataataatgagctaacataacacatagatagcaaactccatctttcatacaactcacgaaaaatgcaaatacaaaacttaacacaccgcagtcttgcagccaccactggtgattttcacttcagaccttttgatgacaagttctcaccattacagagaacacaacaggaat

SEQ ID NO: 401689 - DNA, 579 bp, Homo sapiens
gtattcagttacagcagtaaaaaatgaactaagatacccaccctaaatgtgtttttcttgcccccaaagaagaataatatctaatattgccatattcaaaagccaaatcacaccttggctcaaaaaactgagattttggggtcctggattttattcccaagatcttcccaccaggtaagtttccatgtcatctctcatgtgtctatactattacttctagtaaaccaaactttatgattgcaaatcaggagaataaaataataatgacaaagtattctgattttaattaatacatgttgatatacatgctttaaaaatgtattctccagtgagttttaataattggcaacatctgaattttattgagatccctacaataggcaaagctcttagagagtttgaggtcacataataatgagctaacataacacatagatagcaaactccatctttcatacaactcacgaaaaatgcaaatayaaaacttaacacaccgcagtcttgcagccaccactggtgattttcacttcagaccttttgatgacaagttctcaccattacagagaacacaacaggaat

SEQ ID NO: 401690 - DNA, 535 bp, Homo sapiens
actatggtattttggttactatagctctgcagtataatatgaagtcaagtaatgtgatgtctgtagctttgtttttattgattaagatgtttttgggttattcagggtcttttttgttgcatmtgaattttaggatgattttttttctaattctgtgaaaaatgatgtggggtatttttatagagatcatattgaatctgtgattgttttggtagtatggccattttaatggtccacaatttttgtttgttttcttttttaatgtgtccttgtttggtttggtatcggggtgatatggccttacagagtgagtgatgcagaataccctccttcttattttttggaacagtttcaggtggattagtattagttcttctttgcatgtttggtagaatttggctgtgaatccatctggtcctcggcttttctctattggagaatttttattactgattcaatctcactgctcattattgatctgtttaattttctacttctttcccacacaagcttgaaaagttgtatttttccaaga

SEQ ID NO: 401691 - DNA, 482 bp, Homo sapiens
tttaatgtcgacttctgtgcctctggttaaaaaaaaaagtcacttatttttgaatttactttaaactgggggtggkgttgggggggatgggaggctttttactgaagttgtgactatgatgttggttgagtagagccttatggctttgcttctgcatgaccaaagcagtgaagtctctgtatgatttcttcagttacatatcattaatggtgtctgtggttgtcttggtgtgttattggtgaagcctgtggtgaagtgctggggactggaatgccagatgtgcatgtcttcagattttagtgatagcagtggtgcgataagcatgtttatccatgtcccctagggcagggtatgttgacatctgtattggctgatacaggtatgatctaggaagttgatccttaggcctctcaatggctttcttatatgtcagttttaataacaatgtactggacaggtgagtgggggctcaagttcctagg

SEQ ID NO: 401692 - DNA, 592 bp, Homo sapiens
caatggctttcttatatgtcagttttaataacaatgtactggacaggtgagtgggggctcaagttcctaggcagctagcatggcatgggaaatggaaatagcaatggtgatgagatgctcttctgggttccaagcactgtgcattcatgtttgcacaggttgcaatgggctgtttgggctggcctgcaggccagtaagtggttttcacaggtaaaagcttgctgaagtgctagcagtattgtgattctacccaacctctctccctaaggaggagtgcttgggtgtcgcaggtgatggattgagttgtggaatccccaggaaccaggatgwcatactatgacttagaaggagtaaagccagatggagctgtaccagccatacttgtgctcaagccacccaatggtaagtgcatgcatcagctatggtgagtgagagcaatgtgatcctcagccactggcagaatgctagggtaagtgttgaggtcctgccatggggaaggttggtctagtcctagcagccacatcgttggctggctggtggtggacttatgtcaaagtcctggtcagggcttagtccattgtccttgctattg

SEQ ID NO: 401693 - DNA, 508 bp, Homo sapiens
ctgcttcctggcctgtcctggccatgcaggctgcctgttttccctcttcttcctagttgtgggtgtttcctgttattttctgttgaactttcttgtttcttcttaggtaatgtaatcaaagtgggattgcctacacactactttggttcttctatgtgggtgaggcatgcttgaaatgtttctagacagacatcttaaaacaaaaacaaaaaacagcacaatactttaattgctgtggctcttctgggtaagaagtgaaagaatcttttcatttttcttacaccagttagaaatagtcagtaattttacatagaatttgctgagaaataaagtcataaaacaaaaagaaaaatatatgatggtagaaattgtggcaacaaagaaytaattctccaacttaaaatattgccttattaaatggtttgttcatcccacatccttcatgaacaataactcttagccagcactctgcattagaataatagaagaatgagataagcaattttgt

SEQ ID NO: 401694 - DNA, 573 bp, Homo sapiens
aaaaacagcacaatactttaattgctgtggctcttctgggtaagaagtgaaagaatcttttcatttttcttacaccagttagaaatagtcagtaattttacatagaatttgctgagaaataaagtcataaaacaaaaagaaaaatatatgatggtagaaattgtggcaacaaagaactaattctccaacttaaaatattgccttattaaatggtttgttcatcccacatccttcatgaacaataactcttagccagcactctgcattagaataatagaagaatgagataagcaattttgttagtgtgatgtttaagaggagattaccatagtctaggtgtagtttactttggccaaaattacttcttacacaaaattcctattttagcttcaactctgtctgaaaaattcactagaaaccctttagcttttcattccctactttctggagaggttgtcttccctagtcagkttcctcagtaaaacaaattataggtagtggatgaaaaaagagagcccccatccaattctcatgagcttaagaagacaggaataagcaacaaaagatctgatt

SEQ ID NO: 401695 - DNA, 541 bp, Homo sapiens
  misc_feature (1)...(541): n = A,T,C or G
gcttactctgtgtgcctgtaaaagctgaagacactcaacatcagcctacgaaagcagcttcaaagggagctgtaccctgcaaagccacaggggtggagctacccaaatttaggggagcacacctcttgcattagcataacctgaatgtgagacatggagtcaaagaagatcattttggaacttttaggtttgatgactgctcttttggattttggagttgcaaggggcctgtgctnnntgttttggccaattttccccactgaatgygggtgtatttacccaatgcctgtacccccattgtatctaggaagtaattatcttgcttttgattttacaggctcataggcagaagggacttgttttttcttaaatgaaacttagaacttggatttttgggttaatgctggaatcagttaagactgtgggggactgttggaagggcatgatcgtgtttttaaatgtgaggacatgaaatttgggaggggccagaggtggaattatatggtttgtctctgtgtcccacccaaatctcaccttgaat

SEQ ID NO: 401696 - DNA, 213 bp, Homo sapiens
atgtgatgaaaatgttttgaatagctgaggtcagaaagacagcccaggatgaaatcgctaaaatgcctcatatgttatggtaaactatgaactatggttgaactatgaacatatcataaaggatatatgcaacaacatgctgtgaacagatgaatatttcagaaagtttacmctgacggccatgaggataaattatttgaagaaggcaaaatt

SEQ ID NO: 401697 - DNA, 604 bp, Homo sapiens
cacagtttctatagaaaattctyttatttatacaccctggaatttcaacctcattttaaacaacagcactgttatgcacttgctaacctgtaccaactgcctttctaaacatttcttcactgttatttttataataatgtttttacctaagtcagcatttacataactgaaaacatttactgaagcagtggctttctaaagctatacttacagagataaattcagtttggactcaaggagagacaaattcatagagataaatttattggacttgaggagatctaaaagaggtcatatagatcatcctcctgtttctaggcaacccaaaaaaagataaccatcttgtttcagaaatctctccataaaaggaagttccacagtcttttctccagcaaccttttcttgtgtctaattaccattacagttaggaacttcttgttctaatctctctggacatgtagaacagctggtaaccacactccttataatgactgttcataaatcttcagatctgtttaagtcatattcattatctttctccagaccaactgtattccatgtttagtagttaattttatatattttcaatattcaacgaccaggt

SEQ ID NO: 401698 - DNA, 527 bp, Homo sapiens
accacttctcctatgctctctttagattttgagtaagtaatcagtaagttaaaataagatggcttcattccaatattatccaatctgatcttgaatatgcatttaagagacactatacttttagtttacctctctgtacaataaaattttatcatttttgtgctttctatttttgtcaatattgtaactttttacacataataatcattgtagcctattatcagctcttcatagaagttattacattgamagccacatctcagcttaaacaaatattatttttggggggcttggtatcaacaccatccatttctcatattaactctgaacaagagagcaaaatactaaaattcagtctatcatggttctttttttttctgtaatcagatactaacattctcatcaatatgagacagggaaaaaagcataacaaaattaatactgtatttttgcttaggcacaggattaggatttaaaattctaaagttcaaatccttctttcaaaatagaaagttgcaagtgatatc

SEQ ID NO: 401699 - DNA, 565 bp, Homo sapiens
tagtggttgggtgaatgaatacactatgggtggttttgtgggggatgatgggatatttctgtatagttacaaggctagtaatcacactaattgttcaacactaattgtttaacatgtaayacgtgttcaaatttgctgaactgtataccacaaaagcctattccaccatatgacaatttaaatggtattttaagttgtgcatgataatttgacaaatgaagaagtgaatacatttaaatttgtttgttaaatgtaaaggatattcttgtccagtagcacacatttcgtgcttccagggtagtttgctttatttaagatttaatcaagatcacttttcattctatgcggttataccatggcttcttgatggtctactaagctggtaaaactcagaaaatttatcagcttctcctcgaagcacctcaggaatcttctttgggtctcttcagcaaatttaccctgcccctcatttaggttacctctttgtcctctagacacttttatcacagcaaccgtagtaattttttttgttaaactattaaatctcatcaaggaaaaaatcatg

SEQ ID NO: 401700 - DNA, 485 bp, Homo sapiens
gttcaaatttgctgaactgtataccacaaaagcctattccaccatatgacaatttaaatggtattttaagttgtgcatgataatttgacaaatgaagaagtgaatacatttaaatttgtttgttaaatgtaaaggatattcttgtccagtagcacacatttcgtgcttccagggtagtttgctttatttaagatttaatcaagatcacttttcattctatgcggttataccatggcttcttgatggtctactaagctggtaaaactcagaaaatktatcagcttctcctcgaagcacctcaggaatcttctttgggtctcttcagcaaatttaccctgcccctcatttaggttacctctttgtcctctagacacttttatcacagcaaccgtagtaattttttttgttaaactattaaatctcatcaaggaaaaaatcatgtcttaaatacctttcatcatcattttgtagcaaagactttggta

SEQ ID NO: 401701 - DNA, 485 bp, Homo sapiens
gttcaaatttgctgaactgtataccacaaaagcctattccaccatatgacaatttaaatggtattttaagttgtgcatgataatttgacaaatgaagaagtgaatacatttaaatttgtttgttaaatgtaaaggatattcttgtccagtagcacacatttcgtgcttccagggtagtttgctttatttaagatttaatcaagatcacttttcattctatgcggttataccatggcttcttgatggtctactaagctggtaaaactcagaaaattyatcagcttctcctcgaagcacctcaggaatcttctttgggtctcttcagcaaatttaccctgcccctcatttaggttacctctttgtcctctagacacttttatcacagcaaccgtagtaattttttttgttaaactattaaatctcatcaaggaaaaaatcatgtcttaaatacctttcatcatcattttgtagcaaagactttggta

SEQ ID NO: 401702 - DNA, 485 bp, Homo sapiens
gttcaaatttgctgaactgtataccacaaaagcctattccaccatatgacaatttaaatggtattttaagttgtgcatgataatttgacaaatgaagaagtgaatacatttaaatttgtttgttaaatgtaaaggatattcttgtccagtagcacacatttcgtgcttccagggtagtttgctttatttaagatttaatcaagatcacttttcattctatgcggttataccatggcttcttgatggtctactaagctggtaaaactcagaaaatttatcagcttctcctcgaagcacctcaggaatcttctttgggtctcttcagcaaatttacccwgcccctcatttaggttacctctttgtcctctagacacttttatcacagcaaccgtagtaattttttttgttaaactattaaatctcatcaaggaaaaaatcatgtcttaaatacctttcatcatcattttgtagcaaagactttggta

SEQ ID NO: 401703 - DNA, 531 bp, Homo sapiens
acttaggttgattcttttgtcttggctttcttaataatgctgcagtgaacatggaagtgcaggtatctcttcaatatactggttgtactctttcttcacattttttgctattccttgttatctttaatccttaaaaaggaaggaaatcctgccatttgcaacaacgtggaggacactatgttaagtgaaagaagtcaggtatgcacagaaagacaaatgccacacratcccacttacattgggattcgaaaacaagtctaactggtagaagaagagaacagaatgctggttaccagaggctgaggcaaatggaaaagagagaatggggaaatattactcaaagggtacctagtttcagttatacaggaagaatagtttttgagatacattgcacagcagcaagcatatagttagtaatgatgtattgcatacatcaaaataacagagtaaatttcaaacatctcacttccgaaaacaacaggtaactgaagtgatggccatgttaattagttgcatttaatcattccatat

SEQ ID NO: 401704 - DNA, 537 bp, Homo sapiens
acaggttccagccctagatttgccactaaacagctgtaggagagctttgagttactagcttgtcctctcaagatctcacttcccatctcccaaaaacatatatgagcaaacccatgaacctctaaattgggcaagtttttctgartcatatctgcttcatatgtatatttagctagcaacaatacctgcactagacgcactagttagatgcttaactgcaagcaataaaattaacacttaatgatttgagttgaaaaaaagaaaaagaaatttaagtgaatgctttgggcacctgacagagtaagtcaccaacaggccgagaagacctaaataagaaaatgggcaaaaaacagaaagaaagaaaagactatgacagatgaaccacagctcaaataatgccacagaacctgctgctactactgaccctggaattccatggcttgtatgactgtgcgccttcagtgggggcagaacagtgctgctgactctgagagtgctgcgggtgctgccgctcccactgcaagaggcttctccact

SEQ ID NO: 401705 - DNA, 527 bp, Homo sapiens
cacgagatataggcaaaagtttcctcatttctcaggtcaaaacggttccacttagattgtgggtttgtttatattttatgttctaataatatgaacctattaatatgaatctcattcctaagaaaagtaataattagataagtatattttaatatgactagagtttaagctatgcccatcttattgaaaaatgctgttttttgtctctctcagacacaagcakttccagctggtgtttttgtcgttccctaacccagtcttaaagcaaggcccactgaagctcccactgtccagaaagagtccataaccctaaaaacaatgagctactagattttattaaagagagagtgtatggggagagaaagaagcatttggcacagaacatcatgtaacacaatgtcttaaatattccatttttctcttctcccaagtgtctctggactcaaaattgaattattccttcttcacctacccctgtgagcaaccccaaacagtcctaaaccagctttccaggaagtagaattttt

SEQ ID NO: 401706 - DNA, 546 bp, Homo sapiens
ctactatattattactcacatggctattgcaagggaagacccttgcctggttatgatgtcatatttttcttgtgagttctcagtatcttatgttcatctgcccataaacagagcaacatttacaaataaaagaggatttattctgcttttgctccaagaatatagcttaagattttttctccatgtccaacatgaacagatcaaatgaatagcaaatatacaaaaactccaacatattgatgggggaaagatgaaggtagtatgttttaagataaaagacagtgcgggttatagctctgataaatagataatgaaatacaggattacagagagctgatacaaggctagagaataaaaactagagaataaaatattaaccaaaccagatgtaacttcaaacaccaactacttaatcataaattccagtgtagtcccatatctsgttgagggctcctgcaacacaaatggaaattaaatgcttgctataatcgagatataagctgtggggcatggaagagaaagtaacttatcctgaatgagaggtca

SEQ ID NO: 401707 - DNA, 555 bp, Homo sapiens
ctctttgaacaagattatgacaaaaagagagttgatatactctgaggtaggacagtaaaagtatatttctggccttgccagctgaaggcaaattgctccttggggaggccttatggacaggaatggagaaaaaggcatttgccaaatcaatggctgcataccagataccaggagatgtgttaatttgctgaagcaatgaaactacatctggtatagcagctgcaattgtagtcaccacttggttaagcttgcaataatctactgtcattcctcaagatcctatgccttctgcataggcaaaataggagagttgaacagggatatggtgggtatcaccaccgctgcatctttaaaatcctccatggtggcactaatctccacagtccctccagagatgccatattggttttkatttactatttttctaggtggagacagctctaatggtttccatttggcctttcccaccgtaatagccctcaccctaccagtcagggagccaatgtgggggttctgccagctgctaagtatgtctctgccaatcacacattctga

SEQ ID NO: 401708 - DNA, 614 bp, Homo sapiens
tgtggtgggctggatcttgaagatgggggctgtccgtaactttgctctgggaaactagggaaaatggtctggcacactggggcaaaataataaggctttgataagacaataaaagagatctggggatgggggagattttaagccacaatcaaaatgtcataaccacgaagaatagattgattaggtggactacattaaaatgacaagtttatgtccatcaagagatatcattaatgagtgaaaaagaaagccatacaatgggagaagatacttgcaacatgtaaactgacaaaaggctttcattcagaatacgtacagaatgyctacaaatcagtaaagaaacaaacaacccaatacaaaaatgggcaaaagactgtattcttttgctacattatctttattcattttatttatctatagtgttctgttgcatggactcaccataattattctaatgttgatggacttgttggtaatttctcacatttggctatgaatctttccattaacattccaatgcatacctcttggtgcataaacaccttttttgtggcatgtatatctgggagaagcacttaaaaatgggtccactgaacatacgaaaagttacaaac

SEQ ID NO: 401709 - DNA, 556 bp, Homo sapiens
ttcttctttcaacttttggcttcagaatgaattacaccaccagctttcttggttctccagcttctagacagtatatcatgggacttctaggcctccataatcacatgagctaattcccataataaatttcctcttctatatttatctatattctactagttctacttcttaagaaaacccagaccgataatacacagtgagttggttattattaatatgtcaatagcacctgatcacaatagaaaagacttgccaaactgaaaagtaaaatgggtttatttatatattatttttctgatacagcctcattaagagatcagggagctttacttaacacaaattgccagcaagttaaagttaagaagaataagtactaagaatctcaggattatctttcaaaatrctaatcatcatagaaatatcacaatgtaagtgaaagagaaaattttcttccagggcactcaggtctggttacttgcttatcatgggggaagagagaaaggcagtagttcaagtggtccttcgaattcattcccagtaaacgtcaggcaccaga

SEQ ID NO: 401710 - DNA, 599 bp, Homo sapiens
gtgctttaaggtaacaatatyctttggctgacttaaatgcctgtggtcgactgttataaaagactaaaatgaaaatgttcccactattattgtcaatcttaacacagagcttgtgcagaaggtccctatacatctccaggttcacggtatgttcttttagtcctgataatgacttcgtaagaagcattgcacttacaagacttgtttgaggaaacttactagagctccactaacagtctcataaggaggcagccatcacagcattaaatagcatgtgagggtaagaatgagtttttaactgctttgtaagaaaatggaaaaagtcaataaagatatatttctttagaaaatggggatctaccatatttgtgttggttttattttcatggccagtctaaaggtggttgtttattacatagtaataaatcattattatacaatgctggttctggtagtgtattttaaattttgtcagaaattttagattgtgaatattttaaaaaaacaataagaaaaatttccaaaaattcccaaaatgaaccaggtatcccttagaaaattattctattgagaaatctatggggaggataggaaaaaat

SEQ ID NO: 401711 - DNA, 599 bp, Homo sapiens
gtgctttaaggtaacaatattctttggctgacttaaatgcctgtggtcgactgttataaaagactaaaatgaaaatgttcccactattattgtcaatcttaacacagagcttgtgcagaaggtccctatacatctccaggttcacggtatgttcttttagtcctgataatgacttcgtaagaagcattgcacttacaagacttgtttgaggaaacttactagagctccactaacagtctcataaggaggcagccatcacagcattaaatagcatgtgagggtaagaatgagtttttaactgctttgtaagaaaatggaaaaagtcaataaagatatatttctttagaaaatggggatctacyatatttgtgttggttttattttcatggccagtctaaaggtggttgtttattacatagtaataaatcattattatacaatgctggttctggtagtgtattttaaattttgtcagaaattttagattgtgaatattttaaaaaaacaataagaaaaatttccaaaaattcccaaaatgaaccaggtatcccttagaaaattattctattgagaaatctatggggaggataggaaaaaat

SEQ ID NO: 401712 - DNA, 622 bp, Homo sapiens
gcaataagattaatacatctccactggtacacagaagggaaaatttaactcttattgtgaaaatgtttcacagaccaagtgttgaaggttaacagggtgtagaggggaggaaatttgaaaaagtatcttttaaggagactatgtggtgtttactggcgctttgggccaggcattgttctaagacttttactgtattaactcatttatcttctcagtaaccctatcaagtgatcactcttattatcagcatttttcaagataacataggkcatggaaaggtgaagtaatttaccccatgagccttttgcaggactaggatctgaactcagaaagtctagctccagagctcacagctttaactgcttcactctattgcctcccatatgactgttcacaagtgataataagtgatagggtcatcaaaccatgacaaaaaataaatatgatgattggatatcagttcaatatttgcttatatacaaatccaactgatttttaaattgctcacagatggcttatataaatttatttttctgaatacttcattttggatttctaattctacacactgtagattgcacatgttttgatagaataaggacaattataagagttaatatca

SEQ ID NO: 401713 - DNA, 526 bp, Homo sapiens
gttaagtaacccaccaggtctcacataatatataagagtgaaagcaccatgggtagaggtaatctgctgttgctgctggcttttcaccgctagtccgtggatgtatgggctgagcaggggggaaggaacctcacatgcaaagtcagaaaataataggcctgaggttagttcatttgcccactgcctgctagcctactgagtcatcatgtgtgacctgggaagaatgaaaactgtagaatgtcacaaattgaagactacctatgaccaagcagaaaataccaatttacatgtgaaaagattatcctctgttgacacttcaaaacaagacagtaattgttccgctaaagactgtgtgcacttaggaggcattagcagccattaataagtaacactctccttgtatttctcctgtacactgaaatttcayaccaggaagcaacacttagctccttcaaataaattcccatctaatttggaacttagaccaataaatatttagactgtatattttaggataaatgtaaag

SEQ ID NO: 401714 - DNA, 562 bp, Homo sapiens
agattaactagtatcttgttacaacctcagaagggtagatagacgtcgaggctccccactgtctttgctgacatggctgagatggagccagagttgttctstagtgcttggctacaatacagaagatgctgtctgatcttttctgtcttactaggttgcccttttcttgatccttttactaaaaagagtaggcttttgtttgggctttttgtttgtttgttcatttgtgtttgttgatgttttcacatcgcaaattttgtcaactccaagtctggaatatgagtggcaaaaagaaaacccagggaactcactatatgtcattacctaggtcccgagatttctagctgctctttcatcctaacaattttcaggttcttctcatgtttgttttatgtataatgtccaggatttttagttgtagttaacagaaggaataggaaaaagtacatctacttcatttcccctgacacagaattcctctcttttttatttagaattacattttataaatagataaaatgtattagcatttgaatttctttatctttatttccttttatag

SEQ ID NO: 401715 - DNA, 562 bp, Homo sapiens
agattaactagtatcttgttacaacctcagaagggtagatagacgtcgaggctccccactgtctttgctgacatggctgagatggagccagagttgttctgtagtgcttggctacaatacagaagatgctgtctgatcttttctgtcttactaggttgcccttttcttgatccttttactaaaaagagtaggcttttgtttgggctttttgtttgtttgttcatttgtgtttgttgatgttttcacatcgcaaattttgtcaactccaagtctggaatatgagtggcaaaaagaaaacccagggaactcactatatgtcattacctrggtcccgagatttctagctgctctttcatcctaacaattttcaggttcttctcatgtttgttttatgtataatgtccaggatttttagttgtagttaacagaaggaataggaaaaagtacatctacttcatttcccctgacacagaattcctctcttttttatttagaattacattttataaatagataaaatgtattagcatttgaatttctttatctttatttccttttatag

SEQ ID NO: 401716 - DNA, 562 bp, Homo sapiens
agattaactagtatcttgttacaacctcagaagggtagatagacgtcgaggctccccactgtctttgctgacatggctgagatggagccagagttgttctgtagtgcttggctacaatacagaagatgctgtctgatcttttctgtcttactaggttgcccttttcttgatccttttactaaaaagagtaggcttttgtttgggctttttgtttgtttgttcatttgtgtttgttgatgttttcacatcgcaaattttgtcaactccaagtctggaatatgagtggcaaaaagaaaacccagggaactcactatatgtcattacctaggtcccgagatttctagctgctctttcatcctaacaattttcaggttcttctcatgtttgttttatgtataatgtccaggatttttagttgtagttaacagaaggaataggaaaaagtacatctacttcatytcccctgacacagaattcctctcttttttatttagaattacattttataaatagataaaatgtattagcatttgaatttctttatctttatttccttttatag

SEQ ID NO: 401717 - DNA, 493 bp, Homo sapiens
actaactactttcttaaatgggctgaaatattgcagaggcactttatgaaaagaggcatatgaatgacatkacaaggtgcaaaatatcattattcacctgggaattgaaaactaaaatgcaatgaaatatcactatacaccgttagagtggctaatatttaaaaaaataattgacagtagcaaatgtttgtgggaatttgaagcaactacaggttttatacattgctgtagtaacattataatattaaacaactaatttggaacacagtttagcagttccttaaagagttaaacatatatttaccatatgagttagcaatttttctcctagacatttacccccaaatgaaaatatctgtccaccaaaaagatgtgtttgtgaattttaatagtaaatttatttataatatccaaacctggaaacaaactaaatgttcatagtagataaatggataaacaaattatggtatagccatacaatagaatattattc

SEQ ID NO: 401718 - DNA, 493 bp, Homo sapiens
actaactactttcttaaatgggctgaaatattgcagaggcactttatgaaaagaggcatatgaatgacatgacaaggtgcaaaatatcattattcacctgggaattgaaaactaaaatgcaatgaaatatcactatacaccgttagagtggctaatatttaaaaaaataattgacagtagcaaatgtttgtgggaatttgaagcaactacaggttttatacattgctgtagtaacattataatattaaacaactaatttggaacacagtttrgcagttccttaaagagttaaacatatatttaccatatgagttagcaatttttctcctagacatttacccccaaatgaaaatatctgtccaccaaaaagatgtgtttgtgaattttaatagtaaatttatttataatatccaaacctggaaacaaactaaatgttcatagtagataaatggataaacaaattatggtatagccatacaatagaatattattc

SEQ ID NO: 401719 - DNA, 573 bp, Homo sapiens
tctttgtttttatccttacccttattccaattggcagttacatgtacttctttaaagcgattaatgagactgccaagtaaaaagggctccctggagaatcttcagccagcctgagcactgggagaatggggtgaagacttgggaattcacaccatttgctggggagaggagcctggcctctcttgttcttgggtggtaacctgggatttggccagtgaggtggagaacgctttttcctttcaacccaataaattccacccttttcacccttcaaagtatctgtgtgcctaatctttcctggtcatgtaataagtacctggattttcctacaacaaatgcactgccgataaagctatacaatattaagcaccctccctaaaggctcagggaccatcacagaagagaagagcgtgtgacattgtaagagctgtattaggagggtggagtgtagtgktcaaagcttcatcttggaagctactatgccatgttggcttctggttaactcctgttccagaaagcctctaaaatttccagttttatctattcttccttgtgtaagaacaagttcctacc

SEQ ID NO: 401720 - DNA, 564 bp, Homo sapiens
tttttctttactcagtacatgctgcaatttacagaagtacctgaaaatttaagaacttcctgaaggtaaattctccctaacagaagacagtttcagggagagagataccaaggaagggagagaagctgcagaaataagccacaattgcctgactgccattctcattttccttttaaattaactacctaggaaatctgtattcaacaaccgggcaaaaaataaatgaataaacagtccaccccagagtattcaaggaataaccgcagtcataagttcagtaacttgcttaccaaattcttcccggctggtggtgatcggagccattttttactgcgtgttctgtccgaggtgctgaagggaaaactgcctggctggattcacttgcctggatctcaagcgccggctttcggagcgctgaaaacaacagcgcagagcccagggcaccagctcctggaacagggaggaggcaaagagggaggtccactcgccctcgcacagtgatttgccacctcggttcctgtkttggctcttctgagaagctcgtctccgagactccagacgtgg

SEQ ID NO: 401721 - DNA, 575 bp, Homo sapiens
atttctgtgaagaattaaaacttttaatgtacgtaaattacttatatcagtgccagtcatatagaaagctccaaacatgtcagttattagtattataagtataattgttactattttcattattaccaatatttaataaaataattacagaaaataattagctagaaattggttagtagtgaaagctgaaacccttattttctaagaaattttcattaattttcactaattattttatttttatgtgttttattttttagaggtgatgtctcactaygttgacctggctggtctcaaactcctggcctcaggcgatctttctgccttggtctaccaaacactggggttacaggcatgagccaccacccccagctacactactttttctttagttcaaaataatatctcctatgtttgaactattctgattttattataaatatacacaattgtgtatggaatgatatgttaccttaccttatcttttcatctctcttacgtattttaatgcctagagatgtcctcaactttgctatttccttaaaggctgggctttttctcatgcttcctttgca

SEQ ID NO: 401722 - DNA, 575 bp, Homo sapiens
tatttttaaaagattctttttaagcaatgccaaatggggccatcgatttttatttcaaactaagcaactaaaataaagtctattcyctgataaaaatgaagaattcccttttcagctgataaggcacagagtgtttatctttggatggtcatagaaagaagttggctttggctatccatctgcttttatgaggttttgttaacacaaagggacaatgaggctgaaagtggcttttaacttaactgatccttatcgtatctgacatcctttcatgaaggaaaataaaagtcaggtggatgttaaattagatgcacatttctaaaataaaaacaaatgtgggaaatggtaggtttctcctttcattctcaggagctatatgagaatgaatgttgcttgtgacttcaacaaataaagttcactttatctccctggctttgatggcatgtgcttagcacagcacatgagcaagggaagaaacaaaggcattatttccaaatcaatccatttaaaaaccctccttgacaatcatctcagtggtccatgttgtcttctgtagccaaagactgtgatatagt

SEQ ID NO: 401723 - DNA, 575 bp, Homo sapiens
tatttttaaaagattctttttaagcaatgccaaatggggccatcgatttttatttcaaactaagcaactaaaataaagtctattccctgataaaaatgaagaattcccttttcagctgataaggcacagagtgtttatctttggatggtcatagaaagaagttggctttggctatccatctgcttttatgaggttttgttaacacaaagggacaatgaggctgaaagtggcttttaacttaactgatccttatcgtatctgacatcctttcatgaaggaaaataaaagtcaggtggatgttaaattagatgcacatttctaaaataaaaacaaatgtgggaaatggtaggtttctcctttcattctcaggagctatatgagaatgaatgttgcttgtgayttcaacaaataaagttcactttatctccctggctttgatggcatgtgcttagcacagcacatgagcaagggaagaaacaaaggcattatttccaaatcaatccatttaaaaaccctccttgacaatcatctcagtggtccatgttgtcttctgtagccaaagactgtgatatagt

SEQ ID NO: 401724 - DNA, 575 bp, Homo sapiens
tatttttaaaagattctttttaagcaatgccaaatggggccatcgatttttatttcaaactaagcaactaaaataaagtctattccctgataaaaatgaagaattcccttttcagctgataaggcacagagtgtttatctttggatggtcatagaaagaagttggctttggctatccatctgcttttatgaggttttgttaacacaaagggacaatgaggctgaaagtggcttttaacttaactgatccttatcgtatctgacatcctttcatgaaggaaaataaaagtcaggtggatgttaaattagatgcacatttctaaaataaaaacaaatgtgggaaatggtaggtttctcctttcattctcaggagctatatgagaatgaatgttgcttgtgacttcaacaaataaagttcactttatctccctggctttgatggcatgygcttagcacagcacatgagcaagggaagaaacaaaggcattatttccaaatcaatccatttaaaaaccctccttgacaatcatctcagtggtccatgttgtcttctgtagccaaagactgtgatatagt

SEQ ID NO: 401725 - DNA, 540 bp, Homo sapiens
tatttttcttagctttctcttttattgacattctcacctgctgtaacttttaatcaagtgacttggtttctagccttcttatcatcctggctattcccctgtggatttgacttaatatatcaatattcttgtaaatamtttatccagaactgaacactgtactacagatatgagcagatgaatatagaatataggaaagcctgacttagatagtatttttattaatgtaaattaatgctggttttcatagcagtcatattgtgtgacttgtagtcaacaaaagtcgagatttgttttcaatctgatctgctgatatgtactttcagatactttaaagaatctaagtataagagttaacattatttctacttaaattttaactcgtcttttgggccctacatttcctaattacatgtgctgtatacttatgaccctgccttctaggactttaactaaagcattgattgcaaatgtcatgggcaattgccatagacagaattttcaaataaaataaatcactccatatttccttgtcaatag

SEQ ID NO: 401726 - DNA, 503 bp, Homo sapiens
tttaatttatagtgaatgctaacacttaaaatataatgctattagatttctccttttgtagaagaatgatatgcgactgagtaaaggaaattcctccttctgtgatctatgtctgataatggtgtcaaatgaaaacaaakctagacttaggttaacgagaaactttattcaaaaaggctatcacaatgctccaagcttaggatctgcaagcatttcaaaatcaaacataaaaaggcttttctttataaggagggtcaagcagggctagcaagagccttcaagcagaaactggcaagcaagtggaggtgaaccgacagcatggtcatggtggtctcacagaaagtatttttagctgtagtcagctgattcttaaagagagctgttaataggggatcttttgtgttttagtgcttgctcagacttagggccagtcaaagtttagggacctgcggagagcagagaagcctaactaaagtttggtcaagctgagtcagtgagcaact

SEQ ID NO: 401727 - DNA, 606 bp, Homo sapiens
gctttataaaatacactgtctagaggaggagcgagagctaaacacagagcttaacatttattgagagcttcctgtgtattgagtgctgtgtcaaatatattatttaatttaaataataacactgtgatattgctgtgaatatttcatgagtagctctaggacacaagggtgagttttttttggaggaagtgtaataaatacacccatgtctcaaacacggcatttccacacctaaattgcaaagctgttctgatgtaagtatagacagtactactggccaatccagaaatctgaaagaacatatagagatggttctgaattcaacaattatttttaaaaatgcttctgagtgtccagcaccatcaaagtgggagtgggtattaaataatgatctaagaacatatgaaggtgagaattcatgacaccayggactagagtagctcaaaaacataaatgaatgaactgaagtaggaagagaaaagaaggagtcatgtttataaggtaagggaaaagagaagcttggaaaggctttgggtaaatacatgttttctttatagagtctcctaactttataactttttatctgtcaatttttcattttcaata

SEQ ID NO: 401728 - DNA, 606 bp, Homo sapiens
gctttataaaatacactgtctagaggaggagcgagagctaaacacagagcttaacatttattgagagcttcctgtgtattgagtgctgtgtcaaatatattatttaatttaaataataacactgtgatattgctgtgaatatttcatgagtagctctaggacacaagggtgagttttttttggaggaagtgtaataaatacacccatgtctcaaacacggcatttccacacctaaattgcaaagctgttctgatgtaagtatagacagtactactggccaatccagaaatctgaaagaacatatagagatggttctgaattcaacaattatttttaaaaatgcttctgagtgtccagcaccatcaaagtgggagtgggtattaaataatgatctaagaacatatgaaggtgagaattcatgacaccacggactagagtagctcaaaaacataaatgaatgaactgaagtaggaagagaaaagaaggagtcatgtttrtaaggtaagggaaaagagaagcttggaaaggctttgggtaaatacatgttttctttatagagtctcctaactttataactttttatctgtcaatttttcattttcaata

SEQ ID NO: 401729 - DNA, 623 bp, Homo sapiens
tgctcttgtggcatttacattccctttgaggtgagacaataaacaaatagatcrtaaatcaagtgagtaaatgtactatgaagagaaataaagcaggttgtggaaacagtgtgacaagggtgggcattattttaggtgagctttgagcaatggcctgaatgaagtgaggattgaaccatctggtgtctggggaagatcagcactagcagaagaacatgcaagtataagggttgcgcctcaaatcaccttggctcatcatagcacagtggtggtgctggactggacaaagtggaggtaaaggcagaggtaatcagatcagatcacacgaagactgacaagtcactttcactacccggtcttcaaagatgggcccagggttccagcctgctgggaggaaggtggactctcaaccttgtaaactgaatctgggctgggcttggtacatatttcactagatatgaggtagcagaagtgacactgaacccattagttctgggcctacatttctagtaggcctgaaagtttctgttagtgggctgtgagagccctgcatctccagataaggtgtccagttacactgctggggaggccatgtagagagaaagaggcattgagacgacaca

SEQ ID NO: 401730 - DNA, 623 bp, Homo sapiens
tgctcttgtggcatttacattccctttgaggtgagacaataaacaaatagatcgtaaatcaagtgagtaaatgtactatgaagagaaataaagcaggttgtggaaacagtgtgacaagggtgggcattattttaggtgagctttgagcaatggcctgaatgaagtgaggattgaaccatctggtgtctggggaagatcagcactagcagaagaacatgcaagtatragggttgcgcctcaaatcaccttggctcatcatagcacagtggtggtgctggactggacaaagtggaggtaaaggcagaggtaatcagatcagatcacacgaagactgacaagtcactttcactacccggtcttcaaagatgggcccagggttccagcctgctgggaggaaggtggactctcaaccttgtaaactgaatctgggctgggcttggtacatatttcactagatatgaggtagcagaagtgacactgaacccattagttctgggcctacatttctagtaggcctgaaagtttctgttagtgggctgtgagagccctgcatctccagataaggtgtccagttacactgctggggaggccatgtagagagaaagaggcattgagacgacaca

SEQ ID NO: 401731 - DNA, 623 bp, Homo sapiens
tgctcttgtggcatttacattccctttgaggtgagacaataaacaaatagatcgtaaatcaagtgagtaaatgtactatgaagagaaataaagcaggttgtggaaacagtgtgacaagggtgggcattattttaggtgagctttgagcaatggcctgaatgaagtgaggattgaaccatctggtgtctggggaagatcagcactagcagaagaacatgcaagtataagggttgcgcctcaaatcaccttgkctcatcatagcacagtggtggtgctggactggacaaagtggaggtaaaggcagaggtaatcagatcagatcacacgaagactgacaagtcactttcactacccggtcttcaaagatgggcccagggttccagcctgctgggaggaaggtggactctcaaccttgtaaactgaatctgggctgggcttggtacatatttcactagatatgaggtagcagaagtgacactgaacccattagttctgggcctacatttctagtaggcctgaaagtttctgttagtgggctgtgagagccctgcatctccagataaggtgtccagttacactgctggggaggccatgtagagagaaagaggcattgagacgacaca

SEQ ID NO: 401732 - DNA, 579 bp, Homo sapiens
tgcacattgttattctaactatcatggaaatataaaatatttgaatctttggttaaaaaatgccaccttttattaatttttatttttttaaatgttttaactgctccttctttcacacaaaagcatgttcattattttattcaaacagaaatattaactgaggatttacaaagtgctagccacagtaaataagacatgtggtttgctctcattaaacctatagtgtagcactctgtatattcctggctaaggcatctgtccaaagtctcattggtgcttcttttgaggtgcactaggccagaccttgaagaagtcttgcaagtattactttagtctcctactttcaagccttaatcagagtcagaaattatcaggcctacttcayctttttttaccttgtccattcatctgtaactttcagctctatagagttgaggcctttgcaaaataagttgtatctatgcagttccatatccatgagggcaagaattagatctttcctgtttatatggcattcctagctcatgagactgttcctgtaacatagtagatcctcagtaagtatttgtttaatatagc

SEQ ID NO: 401733 - DNA, 579 bp, Homo sapiens
tgcacattgttattctaactatcatggaaatataaaatatttgaatctttggttaaaaaatgccaccttttattaatttttatttttttaaatgttttaactgctccttctttcacacaaaagcatgttcattattttattcaaacagaaatattaactgaggatttacaaagtgctagccacagtaaataagacatgtggtttgctctcattaaacctatagtgtagcactctgtatattcctggctaaggcatctgtccaaagtctcattggtgcttcttttgaggtgcactaggccagaccttgaagaagtcttgcaagtattactttagtctcctactttcaagccttaatcagagtcagaaattatcaggcctacttcacctttttttaccttgtccattcatctgtaactttcagctctatagagttgaggcctttgcaaaataagttgtatctatgcagttccatatccatgagggcaagaattagatctttcytgtttatatggcattcctagctcatgagactgttcctgtaacatagtagatcctcagtaagtatttgtttaatatagc

SEQ ID NO: 401734 - DNA, 582 bp, Homo sapiens
ttcacaccatcaaaaattctagccctaatcctgagggaggtaaaaggcaaatatgactctctaatggcttcacactgcgtgagccactgttgcatgtcaatgccaagtctagatccctttcttcctgggttttgaataggggtaaaaggaagtgggtgagtgccactattgatgtctatccaaagcctgatctctgacaccatagataaaagcattttagacatctgttttatccaagatagaactatttgccaggtcctggcatcaatgtcactaaacagagatgggtaagtacagatgtaagctgctgacttccccaaatgracctacctcttgtattgcagaaaatttctttccctcattgctatatcatttctttatcctgctcctaaatatatgtatgtgtaagtttttccccctctatcagccccaatttccactaaatcgctaaatcctattcccatgcagtgcatcaccttacccagtacctctcccttttttctgcccctacactattcttgatcaaatggatcactaatacatgccttccaccctctctacctgcctacaacccagtggtct

SEQ ID NO: 401735 - DNA, 589 bp, Homo sapiens
tacctttaatgttggtatattggcatgtagtgtgtaagcttttattatctgaatgtttaatttttgaggtgaagccttttctataatatctgattcatacagtgctgatgttgtttttcacataatatatagatatttaagtattcagctattctaactataatactacaacccccggcaggaaccattgatacagccgtttcattcatcagaatgtttcttcagctatactgtatatgttcaaaataataagtttatggtactattgatttyattattgtttgtaagaacaaaaagttagcatctttcaatgtcttaatgtagcttttcaaaatggaaaagaacagaaaatctctttacatcttaatatggaatgcactccaaagtacacagaaaactatttccccatatttctaagatagacgaagaaaaaaaatacacacacacacacttgcatgtgtacaaaaactctgggagcataaacagaaaactagaagtgatggtttacatgctggagaatgggaagtaggtggacaggaaaaaaaaatgagtggggaaattttcactgaaaactttatattttcaagtc

SEQ ID NO: 401736 - DNA, 449 bp, Homo sapiens
ttcttgctgtgctacttaaaggcagcatctgggaagacacggtaaattctttttggggttatgttcatctggcagcacagcaaggtggtttgagataaattttggagccaaactgcctgaatttcaatcctaaccttatgaatrgggacaagtcacttcaacaatttacccatcaatggcctcttttgtggaataagaggtaatataaatgcctacatcacagggtactagaatggattaagaggatttagaatggtgcctggcacagagaaagtgtaatagatgttagcattcagacatttgtactgtttcctctgtcttctgtttccttgctattatgttacatttgcttaaaagtggctgaatttctagcatgccacgtgcagttgagaggacaagatgctgcatctttgctgctgcaacttatgttttgctgtgcgctgcattgc

SEQ ID NO: 401737 - DNA, 449 bp, Homo sapiens
ttcttgctgtgctacttaaaggcagcatctgggaagacacggtaaattctttttggggttatgttcatctggcagcacagcaaggtggtttgagataaattttggagccaaactgcctgaatttcaatcctaaccttatgaatggggacaagtcacttcaacaatttacccatcaatggcctcttttgtggaataagaggtaatataaatgcctacatcacagggtactagaatggattaagaggatttaraatggtgcctggcacagagaaagtgtaatagatgttagcattcagacatttgtactgtttcctctgtcttctgtttccttgctattatgttacatttgcttaaaagtggctgaatttctagcatgccacgtgcagttgagaggacaagatgctgcatctttgctgctgcaacttatgttttgctgtgcgctgcattgc

SEQ ID NO: 401738 - DNA, 547 bp, Homo sapiens
aattagttaaggatactggtgaaaggaagtttattttacaaaatagaaatcaatgctggtgcttgtactacattcttttaaccattcccagctctataaccacctggaagttggtgagagacatgmattgtgattatttcaaaatgctggattaaatcaatgattttcaaacttgagttatctgtgttgaatgaccatacattccagttttcccaggagagatctgatttatgcctggcctgacctaaaaattattatttttgttccctttcacattcagaagtgtctcagtgaaataataaattacaataatacataatacatacaaaatacataataaattatgccctatttatggattgttgagaaaaaacgataaaaggtaaggtatgcaaaaataaaggtaagcaaaatcaacaaatgcttataattcttatacaacattatgaacaaaataaatgcacaaataagataaaggctagttggcaaaattgattctaataacacatatttctttgtcagagatcatggtattttgctgatacta

SEQ ID NO: 401739 - DNA, 547 bp, Homo sapiens
aattagttaaggatactggtgaaaggaagtttattttacaaaatagaaatcaatgctggtgcttgtactacattcttttaaccattcccagctctataaccacctggaagttggtgagagacatgcattgtgattatttcaaaatgctggattaaatcaatgattttcaaacttgagttatctgtgttgaatgaccatacattccagttttcccaggagagatctgatttatgcctggcctgacctaaaaattattatttttgttccctttcacattcagaagtgtctcartgaaataataaattacaataatacataatacatacaaaatacataataaattatgccctatttatggattgttgagaaaaaacgataaaaggtaaggtatgcaaaaataaaggtaagcaaaatcaacaaatgcttataattcttatacaacattatgaacaaaataaatgcacaaataagataaaggctagttggcaaaattgattctaataacacatatttctttgtcagagatcatggtattttgctgatacta

SEQ ID NO: 401740 - DNA, 624 bp, Homo sapiens
cttttgtactataaaatactaagtcttacttattctttcaaactatttttcttgtacccattcattatactcacctcccattttaccccttctaattatcctttccagcctctggtaaccttccttctgccatctcygtgtgttcaactgttttgatttttagaccccacaaataattgagaacatgcaatgtttgtctttctttgcctggcttatttcacttagttccattcatgttgttgcaactgactgaatcttatttatttatggctgaataaaactccattgtgtataagtaccatgttttttcttttatatatttatgggttgatggacatttagtttgcttcaaagtcttggctgttgtgaacagtgttgcaacaacatgggagtacagatctttcttcaatatactgtattcctttttcttagatacatacccagcagtgggattgctggatcatatgctagctctgtttttagttttttgaggtatttccaaactgttctctgtagtggttgtactaatttacattccaaccaacagtgaatgaaggttctcttttcttcatagcctttccaacatttgttattgcctgtcttttggataaaagccattttaac

SEQ ID NO: 401741 - DNA, 624 bp, Homo sapiens
cttttgtactataaaatactaagtcttacttattctttcaaactatttttcttgtacccattcattatactcacctcccattttaccccttctaattatcctttccagcctctggtaaccttccttctgccatctctgtgtgttcaactgttttgatttttagaycccacaaataattgagaacatgcaatgtttgtctttctttgcctggcttatttcacttagttccattcatgttgttgcaactgactgaatcttatttatttatggctgaataaaactccattgtgtataagtaccatgttttttcttttatatatttatgggttgatggacatttagtttgcttcaaagtcttggctgttgtgaacagtgttgcaacaacatgggagtacagatctttcttcaatatactgtattcctttttcttagatacatacccagcagtgggattgctggatcatatgctagctctgtttttagttttttgaggtatttccaaactgttctctgtagtggttgtactaatttacattccaaccaacagtgaatgaaggttctcttttcttcatagcctttccaacatttgttattgcctgtcttttggataaaagccattttaac

SEQ ID NO: 401742 - DNA, 441 bp, Homo sapiens
aaatgttgttaaagatccaagtcctacactcagggtccccaagagctggcttgttgctctactccactgtggtcaagctggtagctaaggtgaaggacaaagttccctttacttttaatttttcctctgcttttctaaaacagaaggagtctttcactgtaaccaccacagcaacagtgttggagtcacacctgatgtcmgcatgtctcagagcccaaagcccatggcatacccatgggttctacctgggtgttgttgctggttattctgggtccaagcgctctttagtcagtgagagatgagtccttctagactttctttcaaggcagcaggttctcttttggcccagggtatctagaaatgtcatccatgagctggggcttagaatggggacctcacaactctacccagtgccgtatcctactgtggctgagctggtat

SEQ ID NO: 401743 - DNA, 572 bp, Homo sapiens
gcaatggcaggaaaagatgaccccaaccatattttatctattcttaaccttgatgttaaacacctttgcagtgtgagaaaaaagtgacaggagagtttatgactatgccgtgttctccaaagaaacccagccttgcagagccaggcctgtgagtgcagtatagtagagggaagattcaaatcctgaacatctgtgttttaccaagcactttacatatactgtttcatgaaagcctgcaaggtagttatgcattgcacaagatgaggaaaccaagttgcagaataacttgcycaatgtcacctaaccaataatggagaatgatgaagttaaaatcatgatgtgtctgttggcaaagtttgtacattttctagccatgctaagctgcctcttggttggtaagattcctagttaaatgaatagaggtcattttctgaagttaatgagaacttggagtaaagaaaaagaataaaatattatgacagaaaggatgcttacataaaataagggagctgtctacacagcaagattaactcatcaaagtataataataacgaacaagaaaaaggtttgag

SEQ ID NO: 401744 - DNA, 572 bp, Homo sapiens
gcaatggcaggaaaagatgaccccaaccatattttatctattcttaaccttgatgttaaacacctttgcagtgtgagaaaaaagtgacaggagagtttatgactatgccgtgttctccaaagaaacccagccttgcagagccaggcctgtgagtgcagtatagtagagggaagattcaaatcctgaacatctgtgttttaccaagcactttacatatactgtttcatgaaagcctgcaaggtagttatgcattgcacaagatgaggaaaccaagttgcagaataacttgctcaatgtcacctaaccaataatggagaatgatgaagttmaaatcatgatgtgtctgttggcaaagtttgtacattttctagccatgctaagctgcctcttggttggtaagattcctagttaaatgaatagaggtcattttctgaagttaatgagaacttggagtaaagaaaaagaataaaatattatgacagaaaggatgcttacataaaataagggagctgtctacacagcaagattaactcatcaaagtataataataacgaacaagaaaaaggtttgag

SEQ ID NO: 401745 - DNA, 407 bp, Homo sapiens
cctacatatctgttaccacttttgggaatttcctgactgcaggatttcacagtgggaagtggccattctttacagtagagaggagctctctgtatttagccatctttaagctcacagactggaaccctcgtctgttgacttgtaagcctgtatggaacatatcatgttattggtaacattttcacctctcagaggttatttcaaatcacaacacaacaaaaggagcagtcttgtgtaccttgagtgaaattttattkcatcccactttgcttctagtgcactgatgacaaatttagccttttcgttttcattgtaaggggagagctgtcaatttaaaagagatggcagtcatgttccaaaggtcaggcacaatttctgagagtattgtatgcctaagatttaagaca

SEQ ID NO: 401746 - DNA, 549 bp, Homo sapiens
tttattgcatcccactttgcttctagtgcactgatgacaaatttagccttttcgttttcattgtaaggggagagctgtcaatttaaaagagatggcagtcatgttccaaaggtcaggcacaatttctgagagtattgtatgcctaagatttaagacagaagatcctgaatgtagttttctttaagctatttttctccagttgggcttttctaaattaagaaatttaataaaagctaaaattagagtccaaatttrgtttttcagctgtttattcatattttttgatgtgattatgactaattagggacacaggccttaaaaatgcccaaccattaaatttttaagtacatttatgaaaggcattccagattgaaagcaggatgacatgaggaaatagtatgttgactggttcttccaatttactattggacagtaaaaaatccaaataatttcttagagaattgtaggaaatcctgtattctaggtctattttcttttattctaagatgcaaaagtaaaagaatcttgactaaaggtgcataagtcatc

SEQ ID NO: 401747 - DNA, 462 bp, Homo sapiens
atcatgtagaaaataaatagtatcatgcttgaagttcttcattagcgcctgtagctatcaagtaataggaacactgtaatggtgttctgagcttagttactatgatctctggggagttcaaagtaatttgcaggtggaaaattaaatgatgcagttcaggataaaattgaatcccaaataattgttagagaattaaaatgcaatcgaaccagaaatcctaatcaggtttgaatcaaagcatgttcatactgaactgtgatgaaaacaatcaatgtatactttggatgtcatttttgtcctataagagcctcatgacatgtatttatagcttgtctcattgcaataattttggaatgcggcartagaatgaaaagcagaaaaggcttttcgactgattagttctgtaaatcttcagactgccttttcctcattggggccgaatccttacacattaccacccat

SEQ ID NO: 401748 - DNA, 576 bp, Homo sapiens
acatggcttcctgtcatagaacatattagtttatcagtctgttcctcaatccgactgataggttgtttgcaggaggataaatgatttatatagttctcaatggagtaataacaggaccatctgtggaaagcatcaatgagtcattgacaaggtttggtagctgagaagccttcaactaatctgatctccttgtaatcatctaggtgtctccgaaatgagtacagattattataatagattttcatgaagtttagacagtttatctctttctctctgcctgtctcactttctctccccacccccatcggcttatctgcatattatgcagcccacgtttactttctcmcccctctctgtctatttatattgattatcccaattatggaatctaatggaaggtgtggaaattttgttgaatatggtatgggaattataataacttagttttcattcaaacgtgcatttttcttattttttcattttctgtttcgttgttagcagtgatttggaagtagaatatacaaaaatacagctcagagcaagaaggaacatttggaaattatgcaaaaattgcat

SEQ ID NO: 401749 - DNA, 586 bp, Homo sapiens
tatgtgcttgctgtattatttaggagtatttttttcaaccctagcagagaaaaaaaaacacagtaggatggaggaaactcaggagacatgataagaatagataataagtaggttactaactggtgagacacattactcatagatagaataaatggagcacatgtgtttcgaatacagacaaaaataatggaacaatcaagaatatcttatacgtagaaaagaatagaaatgccaagtaaaatttaaatatagagagcagattatgacagctccagattgacaacttatgtatatattttgttgttgttatatatatacacatatatgtatatatatttattgttatatatatgcatatatatgtgtgtgtatatatatatatatatttgttgttgtttacatgaaattcagatttaacttagtgtgtacatttcatctggaaaatataaacttatgatacacattatgatctattctggccccatacagataaatcctagagctgctaggcacattagttagggwgctacatgtgtagcaagtgtcgttgtaagtctatttctgcaatagagcaagtgtgtcatgt

SEQ ID NO: 401750 - DNA, 581 bp, Homo sapiens
ttaaggaagcctcattatgaactgatctctcttaccaatttactaacagtattataatgaacaaatattttaatctgtcagagctttagtgtctttatcttcaaaacagaaacctaacatatgtagttttyatgaaattcaaatgagatgatgtaaactcagtgtctgggaataccatccatagcaaacaattagatattagaaagttcacatgaaaccctctctctactaaaaatacaaaattagccgggtgtcatgggcgcctataattccagctactcaggagactgatgcacgagaattccttgaacctgggaggaggagtgttcagtaagcccagatggcagcattgcacttcagcctgggcaacaagagcgaaactcaaaaaaaaaaacaaaagaaaaaaaagaaaaaaggaaggaaggaagagagggagggagggagggagggagaaagaaagaaagaaaaagagagagaaagaaagaaagaaaaagaaacaaagaaagagagagagagaaagttcactcatttgtcaagtacctttcaagtaagagagaaatggagctgggggtcttggctat

SEQ ID NO: 401751 - DNA, 600 bp, Homo sapiens
attcatgagtcctttacatttttctttattccaatatcacarttttcaaagttatcagaacgtgtatttgagagtgcctgtcagagtcctatagcttaatataaaccatcttttgaaaaggattaaaacaagacaacaattgtctgtgaataacaaaatgtccagggtagttacagttagaaacataattgacaaagaagtctcattacctttgtagttaacaataacttaacataacaaccttaattatgattgatagcatatacttagacattagaattttagaaatcccagtaaattttggaacgtatattagcattattcacaaaaatataacctaaaaagaaggtacatcattttggcaatttcacacacttaaatatgtctaataatcctgtttacctctcttttctggaagttttaggggccctctgaactatccaaaaatccaggcattaggaaagacagttttgaaactgaagtttgattttaggaagcctgtttaatatgtttaaagcacttgatattataaaatacaattccagatttattttgccaaaatgatggctcacaaattttaaagaagcaaaaacctttata

SEQ ID NO: 401752 - DNA, 600 bp, Homo sapiens
attcatgagtcctttacatttttctttattccaatatcacagttttcaaagttatcagaacgtgtatttgagagtgcctgtcagagtcctatagcttaatataaaccatcttttgaaaaggattaaaacaagacaacaattgtctgtgaataacaaaatgtccagggtagttacagttagaaacataattgacaaagaagtctcattacctttgtagttaacaataacttaacataacaaccttaattatgattgatagcatatacttagacattagaattttagaaatcccagtaaattttggaacgtatattagcattattcacaaaaatataacctaaaaagamggtacatcattttggcaatttcacacacttaaatatgtctaataatcctgtttacctctcttttctggaagttttaggggccctctgaactatccaaaaatccaggcattaggaaagacagttttgaaactgaagtttgattttaggaagcctgtttaatatgtttaaagcacttgatattataaaatacaattccagatttattttgccaaaatgatggctcacaaattttaaagaagcaaaaacctttata

SEQ ID NO: 401753 - DNA, 600 bp, Homo sapiens
attcatgagtcctttacatttttctttattccaatatcacagttttcaaagttatcagaacgtgtatttgagagtgcctgtcagagtcctatagcttaatataaaccatcttttgaaaaggattaaaacaagacaacaattgtctgtgaataacaaaatgtccagggtagttacagttagaaacataattgacaaagaagtctcattacctttgtagttaacaataacttaacataacaaccttaattatgattgatagcatatacttagacattagaattttagaaatcccagtaaattttggaacgtatattagcattattcacaaaaatataacctaaaaagaakgtacatcattttggcaatttcacacacttaaatatgtctaataatcctgtttacctctcttttctggaagttttaggggccctctgaactatccaaaaatccaggcattaggaaagacagttttgaaactgaagtttgattttaggaagcctgtttaatatgtttaaagcacttgatattataaaatacaattccagatttattttgccaaaatgatggctcacaaattttaaagaagcaaaaacctttata

SEQ ID NO: 401754 - DNA, 493 bp, Homo sapiens
aaaaatttacatttccatgccttctcataaccttttacaaaaaaaaacacattttactgttcttagataccatgcatgtaaatctatttccagtagtgtcaattacatgttataatggtaactcagcaatttttaactttaatgtaaaacctggaaggttgttttaattgtgtcctaagtgtagccaaggtttaacttttccagcataattaagggcatggttagtttcatatgtccacaggccttaccagttgtaaagytggcaagtcaaatagttatcaaaaccaaaaaagcagtttgtaaccttaagaccattagcaaaccttgcatctgacctgcagaatttagtccaactatttacattttaatgagtttgtaaccttaagaccattagcaaaccttgcatctgacctgcagaatttagtccaactatttacattttaatgacacctgcattttaccaataatctttaaggctgtttttatttctcaa

SEQ ID NO: 401755 - DNA, 493 bp, Homo sapiens
aaaaatttacatttccatgccttctcataaccttttacaaaaaaaaacacattttactgttcttagataccatgcatgtaaatctatttccagtagtgtcaattacatgttataatggtaactcagcaatttttaactttaatgtaaaacctggaaggttgttttaattgtgtcctaagtgtagccaaggtttaacttttccagcataattaagggcatggttagtttcatatgtccacaggccttaccagttgtaaagttggcaagtcaaatagttatcaaaaccaaaraagcagtttgtaaccttaagaccattagcaaaccttgcatctgacctgcagaatttagtccaactatttacattttaatgagtttgtaaccttaagaccattagcaaaccttgcatctgacctgcagaatttagtccaactatttacattttaatgacacctgcattttaccaataatctttaaggctgtttttatttctcaa

SEQ ID NO: 401756 - DNA, 504 bp, Homo sapiens
  misc_feature (1)...(504): n = A,T,C or G
aaaaaaaactttaaaagttaactgctgatgcagtgtataagagaaaagaaaagaagaacagttttaaaatgcctggggaagaacctcttattctcatgcaagtggttcctccaccagggagattagtttaattactgtccaatggagttgaaccccttggctggagaagaggaagtattgggcagttcatggcagggactaccagccagccacccaggattccctgggccatgcggcgtntcccagcagggaggrgagggtgatagtgagctgctgctacttgcaggttactcttgaaaaaggaagggaaaagccatggagactgaggttgaccttccagactcccgggagcaatggggatgggggcactatttcccctatccacagaagtctgagaatgaaaaggcttagaagtgacagtgagagattctgagtccccatttcactcaccacttttcaagtcccactttgggcaccaaaaatatttcaggacttttccttagt

SEQ ID NO: 401757 - DNA, 531 bp, Homo sapiens
tcctgctggtgcacttcctgccttgcagtttaaattccaggttccacatgggaagaggaggggccaggttcttccctgctgcaaatggcatgaacttctgtggctccaccccagtgcmcaggccagttagagttttaccatggaggccttcccacctagctgtctcagcaaggggaagttttgggggactaagccctcaatctaggatctgatgctgtctctacatagattgtgtcagaatcgaattgaattagaggacacttggctagtgtctcctggagaatctgtggaagaattacttgtatgtagggaaaaaccccacattatctggtaacagaagtattctgagttgtattgagggtgagagcagaaaaacactgctttttgccttatatcagacctttattttccacatgcgcttgttctattgtgcacattttgatgttttgtttcctcttatcccccctgcttcagattggatattttattttatatgttatttagattgccactctcctcctcagctgtttc

SEQ ID NO: 401758 - DNA, 531 bp, Homo sapiens
tcctgctggtgcacttcctgccttgcagtttaaattccaggttccacatgggaagaggaggggccaggttcttccctgctgcaaatggcatgaacttctgtggctccaccccagtgcccaggccagttagagttttaccatggaggcyttcccacctagctgtctcagcaaggggaagttttgggggactaagccctcaatctaggatctgatgctgtctctacatagattgtgtcagaatcgaattgaattagaggacacttggctagtgtctcctggagaatctgtggaagaattacttgtatgtagggaaaaaccccacattatctggtaacagaagtattctgagttgtattgagggtgagagcagaaaaacactgctttttgccttatatcagacctttattttccacatgcgcttgttctattgtgcacattttgatgttttgtttcctcttatcccccctgcttcagattggatattttattttatatgttatttagattgccactctcctcctcagctgtttc

SEQ ID NO: 401759 - DNA, 531 bp, Homo sapiens
tcctgctggtgcacttcctgccttgcagtttaaattccaggttccacatgggaagaggaggggccaggttcttccctgctgcaaatggcatgaacttctgtggctccaccccagtgcccaggccagttagagttttaccatggaggccttcccacctagctgtctcagcaaggggaagttttgggggactaagccctcaatctaggatctgatgctgtctctacatagattgtgtcagaatcgaattgaattagaggacactyggctagtgtctcctggagaatctgtggaagaattacttgtatgtagggaaaaaccccacattatctggtaacagaagtattctgagttgtattgagggtgagagcagaaaaacactgctttttgccttatatcagacctttattttccacatgcgcttgttctattgtgcacattttgatgttttgtttcctcttatcccccctgcttcagattggatattttattttatatgttatttagattgccactctcctcctcagctgtttc

SEQ ID NO: 401760 - DNA, 625 bp, Homo sapiens
ttttgggggactaagccctcaatctaggatctgatgctgtctctacatagattgtgtcagaatcgaattgaattagaggacacttggctagtgtctcctggagaatctgtggaagaattacttgtatgtagggaaaaaccccacattatctggtaacagaagtattctgagttgtattgagggtgagagcagaaaaacactgctttttgccttatatcagacctttattttccacatgcgcttgttctattgtgcacattttgatgttttgtttcctcttatcccccctgcttcagattggatattttattttatatgttatttagattgccactctcctcctcagctgtttcattttgtggaataagtaaatatttctggaatcttaaccctatttcattgacctataaatctatctatgccagtaccatattttctkgattattgttgttttttaggaacttgtttcttaaataaacttgaactagggatagtttgctatagtttctttcaaggattggactaattaaaaattgaatatactcttgaggaatgcttttttacaattaatgtatgaatgaagggctttagagacccctcaatgaaatctttggatgtttacctt

SEQ ID NO: 401761 - DNA, 525 bp, Homo sapiens
aaatctaccaagtctgctgtcccaaataacgaaagagagacatgtgaaactcatgcactctctgcactctcccctgatttagagatgagtttctgcaccaaatataaaactgtgcatggattattccactgtccaagtgctgatttttgagatttttcaggagcctactttcccatcatatttttttaagcctatccataattgcaacacggtatcacatacataagaggagcgtggatagttatatattgcactctggaggttagcctcaacagaacaagagaaatgaataacctaaggaaaagagcattctgtatattgtaaattatctaagcactcctcttcaggaaactaagagtggggaacaggcagcatggggaaactgaractcagacagattcacacatgtgcaaataagcaaccagaaaagaagcttctgaaaaatgttgtggcacaagaaaaagaatgttatcacaatgacgaggaaaaacagacctctgaaaaatcttacaattctatgatttt

SEQ ID NO: 401762 - DNA, 564 bp, Homo sapiens
gaataacctaaggaaaagagcattctgtatattgtaaattatctaagcactcctcttcaggaaactaagagtggggaacaggcagcatggggaaactgaaactcagacagattcacacatgtgsaaataagcaaccagaaaagaagcttctgaaaaatgttgtggcacaagaaaaagaatgttatcacaatgacgaggaaaaacagacctctgaaaaatcttacaattctatgatttttgctccaaaaatatttacttaaaatatttacaagttcttaatagtatataagagtatggcctctatagaaaagtaaaaacttgttttaaaatagaatttttatagaaaagtagaacgtgatataaagagaaggcttgcagatgaaggtacagtagtgggagaagatacaatgtaacactcataaagtaatacttgttattttagtgtctggactggcatatatgattctcagtaaatatcagctattacatttaataaaagattaaaaatagggtgtactattggaaaatgcaaagacacctctgttgcactaatggagtttaaac

SEQ ID NO: 401763 - DNA, 564 bp, Homo sapiens
gaataacctaaggaaaagagcattctgtatattgtaaattatctaagcactcctcttcaggaaactaagagtggggaacaggcagcatggggaaactgaaactcagacagattcacacatgtgcaaataagcaaccagaaaagaagcttctgaaaaatgttgtggcacaagaaaaagaatgttatcacaatgacgaggaaaaacagacctctgaaaaatcttacaattctatgatttttgctccaaaaatatttacttaaaatatttayaagttcttaatagtatataagagtatggcctctatagaaaagtaaaaacttgttttaaaatagaatttttatagaaaagtagaacgtgatataaagagaaggcttgcagatgaaggtacagtagtgggagaagatacaatgtaacactcataaagtaatacttgttattttagtgtctggactggcatatatgattctcagtaaatatcagctattacatttaataaaagattaaaaatagggtgtactattggaaaatgcaaagacacctctgttgcactaatggagtttaaac

SEQ ID NO: 401764 - DNA, 513 bp, Homo sapiens
agtgtagtgagtggatttgggtggttaatctcaatctccagtgggagaaggcatttggcaactctaagaaaataacgtaggctaaatgttagacaaattaaaaagtragacaaagtccttattgagattggtagttattgattcattgtgagtctaagtacacatgttaagcctctaaagagtcaaaagtgctgctgatgtattattgggtttgcagaagaacaatcaggatgcaagagagaaagaattactatcccaggaattacagccttcagttctcttcaggctctggaaggaatgatgtttaatgactgaggcagaaatatcattgtctattagaaacttaaagtaaggaataagagtctaccaacttgaagcccagctggatttcttatagacagcagcactggaaaactcggactttcaaatgaggaaaggattcactgaatgtaacttatctaagttattggccatgaacaactttagcagaaattgtcttatgaattactttga

SEQ ID NO: 401765 - DNA, 539 bp, Homo sapiens
ggttcaattctaagctctgccatttactacagggatgaatcactatgttttagaaattytgttatatattttaaaaatctataaaatcaaataacactcaacatagactataaaaatatagctggttgtttttagtctaaaatatgacacaaatgtatggtatatggttttgctattaatattttgaaaagactataatgtattgaaataaatttggtttatttgtaatttcttcccatttgttttagatttactgtgtgcagcaatagagaacaatcttcctcaaaaataaatatttaaatgattggcggcagttatcctccttcagcttagttttgtcacttggaggccctcagttactgccaggtttcctctttggagacacactccttatcatattgcttaccttcctttgtgtgtttcatattcaatttgtcagtgacactcttaaagtggggagctggaaggaagcataacactcctagtatcactgagcactcatggatacagtgagatgactcttcttggagccagagtat

SEQ ID NO: 401766 - DNA, 539 bp, Homo sapiens
ggttcaattctaagctctgccatttactacagggatgaatcactatgttttagaaattttgttatatattttaaaaatctataaaatcaaataacactcaacatagactataaaaatatagctggttgtttttagtctaaaatatgacacaaatgtatggtatatggttttgctattaatattttgaaaagactataatgtattgaaataaatttggtttatttgtaatttcttcccatttgttttagatttactgtgtgcagcaatagagaacaatcttcctcaaaaataaatatttaaatgattggcggcagttatcctccttcagcttagttttgtcacttggaggccctcagttactgccaggtttcctctttggagacacactccttatcatattgcttaccttcctttgtgtgtttcatattcaatttgtcagtgacactcttaaagtggggagctggaaggaagcataacactcctrgtatcactgagcactcatggatacagtgagatgactcttcttggagccagagtat

SEQ ID NO: 401767 - DNA, 598 bp, Homo sapiens
gattttctttctgttttttctttttctttttcattcatgtcatgccctgtaaatttgcaaggggtatctttaaagtaaggtgagagtaggtcagctataaaacattcaagaaataaccccagctgcccccttccatcagcaatggcaaggaaagcacttagcgtttctgcctcagtggagcatcagactgcagttgcagccgaggaaacatgtggctttctgaggcaaaagttcaggttggattctctggattgtgactttgagattaataagccccccagggagctccactggagatgattttggctataggaaagttttctttaaatcaggaaaacaggcttcgtagagtaaagccatctccactcaagctgtcactgtaacagaaaatagactgtcacttccagctgccaacacaaggctttgggggaacactccacattcagaartgtttagattttcagttgaatacggttgattttcataaagtgaccaaaatctgcatgctgctctcgccaatcctgtacttcaaaaaaccatataaaacagttaaataaataagcaaagaaaatagaaattaaccttacgtgcaaaaagt

SEQ ID NO: 401768 - DNA, 505 bp, Homo sapiens
tttcactatgagacacaggaattctggcctaagttgtcccagctcttcaaggacagcaagaatccaagtttccccacgcgtcacctgaagccccaacttctggaaacgccctcctttcctcgcctctacgagctgcgagagcagaacacgcagcgcgggcgctactggtgtcgccgctaaagccaaagaggcgactggaagctcaggctgttcggcggcctcggggcgaccacaggccaggccctggtcctgatccacgaaccaaggcgcctcctctcccccaggaagtgagctacygcgcccctcggagcacccaggcgagccgggcaccgggatgaacgctctacattcggcgcccagccccgggacgccgcccagcgcacggctccggctgagcacccgggcaggcggtagctgcggggaagaggggcggttccctgagcttcggagccccaaggccgggtccaggcgggacagaggaaggcgcaagcccagcacgctgtcc

SEQ ID NO: 401769 - DNA, 534 bp, Homo sapiens
ccacttagtcctccgttcatagggcccaatagcttcctatcaagcatctcaaaatctttctgacacctggatttcaagattttccattacttaatgcatcctcttgaaagtatccccacacttttccactacccatcagcgggatgccattcagtaatggaagctacattccatgagagcaagaacctcatctgtatctctgtgcctgaaggagcctgacacatagtatttaataagtactcaataaaaatctgctttatgaaaatagccttatttgttcactacctatcttactagttcctgagatatttgaaaagttatctattctattagagtgtcagcaaaattctgggatgctgagatcctgtagagttatagccttggtttggttcagttacttttcaaagttccagctaaatcctaaggcattcacaagggtgaggtgcaggtgtctgaatatttggrcattaataagccagatagcactattctgtggctttccaaggtcaattaaattctttcccccagtgagaa

SEQ ID NO: 401770 - DNA, 575 bp, Homo sapiens
tctacatctgagtgccccccaaacccagcagtcatgctgtgagcaaagaaattacattactagtgtgattctagttgatccacaatttcttggttgtgctgtttccttgggagagtcaaaggaaggtgaccaagggtggccccctccactctattccccaggccatgaagcagtaggcaggggccaggagtggattttaaaggcaaagttctcagacccactaggatcatgaactggtaaactctcctcaagctcccaaggacagaggatttgggtctttgttggttttggcccacagccacagaactgaaagtctgaatctggattctctcaaaaggacagtgacataaacctctatgaggcaggaaaatagggtctggaggcagggaacctaaggctstttcgctctgacttcctagaaccaaaatgaaaagaaaaccctaactttccatgtctaagtaacaaagaaccagaggctactacatctgaccttttctgtgaggcagatgggaaattggctgtctgcaacaagtaagactgattgctggtcaagtcttcatttgcaaagaagtata

SEQ ID NO: 401771 - DNA, 629 bp, Homo sapiens
gagggacaattagcatggtgtgggcagacaaagagctcagaccttgctcacaactatggtggcaggggtactgtacaagaagacaatccccttgggctctacagattgaaatgcccccgactcaagtgggcacctttttcttttatttatttatttatttattttgagacagagtctcactctctcactctgttgtccaggcaggagtattgtggtgtgatcttagctcaccataacctctgcctcccgggttcaagygattctcatgcctcagcctctgaggtagctgggattataggcgcccgccacaacaccagctaatttttgtattttagtagagatggggtttctccatgttggccaggctggtcttgaactcctgaattcaagtgatccacccaccttaacctcccaaagtgttgggattacaggcatgagccattgcgcccagcccagtaagcacctttccatgacatctcctagggattccgacgcaagccagctaacaaaaatcaaatgaaaacttggtggtgatggtggtttttcccctctaaattatgtccatgatagggtacatttgttctcatatctttgaatgcactgaaatatccgggggaaacaataaaaat

SEQ ID NO: 401772 - DNA, 635 bp, Homo sapiens
atgtgctttcttcattcaatacttgaacccctaactctcaacacatgacctaaaaatactgcaccatgagacactggtttccacttcaacattatgctcttccttagctcaagtctggaaaagacttccattccctcatccaaggctaacctctaaccagcaagtttccttcatcaatcattaagaattttttgtcgagtacctatcatgtgccaggcattcttgcaggcacttggggatacagcggcagagatgatttctcttctggagcttatattctagatgcagtgagatagacaataagtgagtcctgtatgtaatatcagggaataataaatgatagaaaaataaggaagaagcttgagaacaggggccaggggatgccggcgtgacctcataagaggtgatcctggagagattcctaatgaagagaaaggtgagagagcgcccccaactttaagccaggaagaaacatccagcaagaagcatggagctggagaagccgggggtaggagaaccagattrtgacatggaagccagtggaagggttccaaagagaaagcaatgacctggccaaatgctgaggagagcctgtagaagatgacaactaaagagttagccactggattgtacca

SEQ ID NO: 401773 - DNA, 561 bp, Homo sapiens
ttcaatatcctttttccttttttttttttttttttgaggcaaagtctctctctgtctccaggctggactgcagtggtgcgatctcagctcacggcagcctccgcctcctgggattcaaacaattctcctgcctcagcctcctgagtagctgggactacaggcgcccrccaccacgcccagttaatttttgtatttttagtagagacggggcttcaccgtgttggccaggatgatcttgatctcctgacttcatgatccacccgcctcggcctcccaaagtgctgcgattacaggggtgagccattgcacccagccccttttccctttttttttaaaaaaaacatgacattacatttacgtaagcacttttcctatttttctacagggtagtccttttcagcttctaagagctctttaaactagtaaagccctgccataatgcacctaaaaaactgagatataaaatgtgtagtaacacattttccttaacatgaatgaaaaagtgttttttcagtcagtctgtattttcacaaaaaggacaaacataaaagattcagaaac

SEQ ID NO: 401774 - DNA, 561 bp, Homo sapiens
ttcaatatcctttttccttttttttttttttttttgaggcaaagtctctctctgtctccaggctggactgcagtggtgcgatctcagctcacggcagcctccgcctcctgggattcaaacaattctcctgcctcagcctcctgagtagctgggactacaggcgcccaccaccacgcccagttaatttttgtatttttagtagagacggggcttcaccgtgttggccaggatgatcttgatctcctgacttcatgatccacccgcctcggcctcccaaagtgctgcgattacaggggtgagccattrcacccagccccttttccctttttttttaaaaaaaacatgacattacatttacgtaagcacttttcctatttttctacagggtagtccttttcagcttctaagagctctttaaactagtaaagccctgccataatgcacctaaaaaactgagatataaaatgtgtagtaacacattttccttaacatgaatgaaaaagtgttttttcagtcagtctgtattttcacaaaaaggacaaacataaaagattcagaaac

SEQ ID NO: 401775 - DNA, 561 bp, Homo sapiens
ttcaatatcctttttccttttttttttttttttttgaggcaaagtctctctctgtctccaggctggactgcagtggtgcgatctcagctcacggcagcctccgcctcctgggattcaaacaattctcctgcctcagcctcctgagtagctgggactacaggcgcccaccaccacgcccagttaatttttgtatttttagtagagacggggcttcaccgtgttggccaggatgatcttgatctcctgacttcatgatccacccgcctcggcctcccaaagtgctgcgattacaggggtgagccattgcacccagccccttttccctttttttttaaaaaaaacatgacattacatttacgtaagcacttttccyatttttctacagggtagtccttttcagcttctaagagctctttaaactagtaaagccctgccataatgcacctaaaaaactgagatataaaatgtgtagtaacacattttccttaacatgaatgaaaaagtgttttttcagtcagtctgtattttcacaaaaaggacaaacataaaagattcagaaac

SEQ ID NO: 401776 - DNA, 659 bp, Homo sapiens
ggacaggtaatatactgcacaattccagggagccccagacccatagtccagaatttttacactcttgttttttttcaagataactccttttttcttattgtataaataatacatattcttgggggaaaggtggaaagtagtgaaaagttcaaagtacataaaaataatctgtaggccgggcaaggtggctcacgcctgtaatcccagcactttgggmggctgaggtgggcagatcacctgaggtcaggagttcgagaccaacctcaacatggagaaaccccgtctctactaaaaatacaaaattagccaggcgtgggggtgcatgcttgtaatcccagctactcgggaggctaagacaggagaattgcttgaacctgggaggtggaggttgcggtgagccaagaccgcaccattacaccccagcctgggcaacaagagtgaaactccatctcaaaaaataataataataataataataataatctataatcacactcaactggcaatagcatctgcctacatatggatctggttcctttcagttcttttagaaacatatatttgctaagtgtattaaataaaacaatttcattggttaatatctgctagagtcttcagctccctcccaaagcccaactataaccaggacctacagaaag

SEQ ID NO: 401777 - DNA, 659 bp, Homo sapiens
ggacaggtaatatactgcacaattccagggagccccagacccatagtccagaatttttacactcttgttttttttcaagataactccttttttcttattgtataaataatacatattcttgggggaaaggtggaaagtagtgaaaagttcaaagtacataaaaataatctgtaggccgggcaaggtggctcacgcctgtaatcccagcactttgggcrgctgaggtgggcagatcacctgaggtcaggagttcgagaccaacctcaacatggagaaaccccgtctctactaaaaatacaaaattagccaggcgtgggggtgcatgcttgtaatcccagctactcgggaggctaagacaggagaattgcttgaacctgggaggtggaggttgcggtgagccaagaccgcaccattacaccccagcctgggcaacaagagtgaaactccatctcaaaaaataataataataataataataataatctataatcacactcaactggcaatagcatctgcctacatatggatctggttcctttcagttcttttagaaacatatatttgctaagtgtattaaataaaacaatttcattggttaatatctgctagagtcttcagctccctcccaaagcccaactataaccaggacctacagaaag

SEQ ID NO: 401778 - DNA, 659 bp, Homo sapiens
ggacaggtaatatactgcacaattccagggagccccagacccatagtccagaatttttacactcttgttttttttcaagataactccttttttcttattgtataaataatacatattcttgggggaaaggtggaaagtagtgaaaagttcaaagtacataaaaataatctgtaggccgggcaaggtggctcacgcctgtaatcccagcactttgggcggctgaggtgggcagatcacctgaggtcaggagttcgagaccaacctcaacatggagaaaccccgtctctactaaaaatacaaaattagccaggcgtgggggtgcatgcttgtaatcccagctactcgggaggctaagrcaggagaattgcttgaacctgggaggtggaggttgcggtgagccaagaccgcaccattacaccccagcctgggcaacaagagtgaaactccatctcaaaaaataataataataataataataataatctataatcacactcaactggcaatagcatctgcctacatatggatctggttcctttcagttcttttagaaacatatatttgctaagtgtattaaataaaacaatttcattggttaatatctgctagagtcttcagctccctcccaaagcccaactataaccaggacctacagaaag

SEQ ID NO: 401779 - DNA, 566 bp, Homo sapiens
agtgtggattctttcagctgtacagttccttcaggtgtatttgatctaattcaagcagggcattcccttccaacactcctgaaagatggtcacacaggcagtggctgacaatgccgcgggccccagcatgtttggagctcatcaatgtgaagtgactcattccctctgtgttcaactctgtaggaatttcttatattgggctgaagtcagcctctatgccttacatgaattggtcttagttctgctatttgaagctccacagagtgactaatctttttccttcatgacaatctttcaggaatttgaagagttgttatgtcatctcatctcaaaatcatctccaaggaaagctaccccagcattttctatcacctataatagtacctggatgtggttttcagactcttcaacctcctggttaccctcctaaaagcacttcctctgcctcagtgtcccacttaaaaagtgtgtgacttggaattggatacagcacttcagagcaatgggcagtgggactaccccgatattatayacacagagaaaatatttaatgaactctataattt

SEQ ID NO: 401780 - DNA, 575 bp, Homo sapiens
accaccttgcctccaaataataaaattacattttgaggtgtacattaaatgcccctgtacatatcttatgaaagttaagacttccgtatatcttttccaggaacacaatttaacccttaacaaaagtcatctatcaaaccacttccttcaaggataagaaactaatttatgtcggaaaaaagttttataaattaagaatttatgcatgttattttatttgtccctagtaaggcaaaatgtgacctaaaagaagatgaagaacatatatattcattaatctcttgatatttttaggtttttttgttgttgttactatgccagaattatgagacaagctcctaggagcccttctttctatttctaacagatggaactgtacagcaattctatctcttagagaaaataaaataaaagcagtggttcaacagaaaagcaagaagaccaagrttattggttaaacgtaaaaggctccaatgaatacaaaagcaatgagtcactcatagtccatcatgtacttagagatgaaccatcaaaaaaatgtgtaggtcacttcatgctgactttgttgtcagcat

SEQ ID NO: 401781 - DNA, 583 bp, Homo sapiens
atgcaagctgtggcaatttattttaataccttactccacataatagaagataaygatgataacaggtagaagactattttctccaaataggactgttggccaaagtaggcattggcctgctaaagtcacacctgctgactgtcttcagtgaatgacattggtgtcctaaaataaacaacttaaagttcaatgtaattttgaaataatttaactcctaaaaataatattagcaattgggggcattatggacccttggaggaatctgatgaaaactgaacactcttcaccaaaaatggtgcatgtcacagtcatataaaagcttgcataacatttcagggtctaaatgggctgcctgttttataccccttcttttaggtgatgtttctatattattagaagatacactgtggaacaaaatatgatcataagaagaagtatcattttgaggaatttgacatagcacataactacttccactggaaaccatgttgaggaatctgggctcctttcaaagttaaatttctctgtgataaccttgctatgcttttgaaaattaccctaaggaccaggtataacacttagt

SEQ ID NO: 401782 - DNA, 510 bp, Homo sapiens
gtttgtagttctccttgaagaggtccttcacatcccttgtaaattggattcctaggtatttcattctctttgtagcaattgtgaatgggagttcactcatgatttggctctctrtttgtctgttattggtgtataggggtacttgtgatttttgcacattgattttgtatcctgagactttgctgaagttgcttatcagcttaaggagatttggggctgagacaatggggttttctaaatatacaatcactatttttaatgtcacattgcctgatgatttatgcttcacttatctgaaaattttattctaatacgatcccattctattctgatgacatcaaataatatatctttctgtgtactatttgaaaacaattccagtttatgaacagctttaaatgtgctatttccctaattaatacacgttatgaaaaaaataacttctcaaatttcatcaaattagagtttgtttcacatatcccctctttaattaaaggggctgtattcaca

SEQ ID NO: 401783 - DNA, 510 bp, Homo sapiens
gtttgtagttctccttgaagaggtccttcacatcccttgtaaattggattcctaggtatttcattctctttgtagcaattgtgaatgggagttcactcatgatttggctctctatytgtctgttattggtgtataggggtacttgtgatttttgcacattgattttgtatcctgagactttgctgaagttgcttatcagcttaaggagatttggggctgagacaatggggttttctaaatatacaatcactatttttaatgtcacattgcctgatgatttatgcttcacttatctgaaaattttattctaatacgatcccattctattctgatgacatcaaataatatatctttctgtgtactatttgaaaacaattccagtttatgaacagctttaaatgtgctatttccctaattaatacacgttatgaaaaaaataacttctcaaatttcatcaaattagagtttgtttcacatatcccctctttaattaaaggggctgtattcaca

SEQ ID NO: 401784 - DNA, 594 bp, Homo sapiens
tcaaagaagctctaaattctcttagaaatctggaaaagcaaactggagcagctatacatgaaaattgtgtgcactacttactaccaaaaagacctgttaaaattcaggcttatgttactgcattgtcctttctaaatttttctggggagggtggtatgaagaaattaaacttttcattctgcgaataaatatgcagaaatcatttcctagaatttatataaacattatgaccaaccaaagagtcaaaggattagacctacttaatatatgmaaggtgtttttcttaataagatgcagtagagttcaatatttctctctatttttaatgattacaaagtctttattactcccttgaaaatagattatagagtggttaatatgttactttcagtttatttttattcttcttagctaaggaaatagtatttaaagaaataattatctatgagaaaaagtgtttacatttaatatgactaaatctaaataaatgttccaaaaataagtagaatttattgtttctgaaaaccatttttttcagtttgtaactaatatattttctactatattgtgcattgggattgtgatattttacac

SEQ ID NO: 401785 - DNA, 321 bp, Homo sapiens
catatccgtctcctggattaaccatagcttgttattaactaacagtgaaagatgaaatattagatatgttctgaggagtcaaataaagtacacgacatgaaaacaaaaaacaataaggcatgttagaacacatctcttttcaagcctcatcccatattctatcactataagaaagaatttcctgctttccaaactaacagtgcttagtgaagagaacattktatgtcccatgtaaaaagtaaacctagcaaacaaaagttacctcttaagaccctgagtgtatggatatcaccctgttcaaggaaaggcaaaatgtgaata

SEQ ID NO: 401786 - DNA, 546 bp, Homo sapiens
ggtactcagggtcagtgtttagaatatcaattattattgaacagaaaatatttaatactactgcataataatgattatgatcaagacaatgcccagtaacagatgacacagaatatattttcactcttattcactagtgtgtctgtaaaaatgtggtagtatgggaaacaaaaagacaacctataattcacatacaagtaccaacgttatataatttaatttactaaaacataaactagaaaataagtaacctgggatagattcatggcaacagtgaactgaaagggatgccttcagaaagggcatcagtgaatrgcagattgttttagcataaaacaattgttttatttctagctaatgggactgttctgagtgattggatagtgatgaacaagacagacaaatctctgttttcctggagttcactttctgtaacagggaagatgtatagtaaataagcaaaaaagaaaataccatataatcagggcggagacaaagtatttcagatccagctgagaagtgagaaaaatgtggatgtcgtgctgg

SEQ ID NO: 401787 - DNA, 584 bp, Homo sapiens
gtattttgccatttccagaatgtgagggttcccttcttttccaatatcacatttaccagtttgttaaccactcaggtgtttatgcagagcactatgcagtttttcttttggctgggtgtatctcactatctcacttgcctccgtgactcattccacagcactgtagtcctgttaattcttaaattctgttctatgtttgtggagtcacactgaatttgccagaggaattttgttaaggatgtttctatggagagaagagtacctcagtttccttcccagatgtgtacggtatctttcaaaggccctgaccgggactaggatgctaagackctgaccagggagccgctctaggtgccctctggtgggcagactggagctaaggacactgaaagaagtccaatcagactgaaattgtatcacttcagcaagcagagaagaaaattcaggcattcatgagcttaccatagccagagcctggtctatagatttcgctcagcaaaggtcccaggaagcaggcctgaaagccactggaggaggggggccgcacctgaaatctcatttgcagctgttacggaccctgtcat

SEQ ID NO: 401788 - DNA, 584 bp, Homo sapiens
gtattttgccatttccagaatgtgagggttcccttcttttccaatatcacatttaccagtttgttaaccactcaggtgtttatgcagagcactatgcagtttttcttttggctgggtgtatctcactatctcacttgcctccgtgactcattccacagcactgtagtcctgttaattcttaaattctgttctatgtttgtggagtcacactgaatttgccagaggaattttgttaaggatgtttctatggagagaagagtacctcagtttccttcccagatgtgtacggtatctttcaaaggccctgaccgggactaggatgctaagacgctgaccagggagccgctctaggtgccctctggtgggcagactggagctaaggacactgaaagaagtccaatcagactgaaaytgtatcacttcagcaagcagagaagaaaattcaggcattcatgagcttaccatagccagagcctggtctatagatttcgctcagcaaaggtcccaggaagcaggcctgaaagccactggaggaggggggccgcacctgaaatctcatttgcagctgttacggaccctgtcat

SEQ ID NO: 401789 - DNA, 624 bp, Homo sapiens
aatatctagtatccatgaagttmatgaaaacagtgtgattcatatggcatggacttttggtaccaaatatttgaagtctttattttggaactgagtggagagtaaattccatctgagtgtactttacagcaacaccaccaagagaattctgcattcttatctaaactttgagacatcagaaagtagtagataaattatatttgaaaataactaactgctaactgaatttttaacttgcatttttacaacatgaatgtaaaaatgcaagtttaaaaattatgtacctgatacatatctagatgtagatgaaaaaaatctggcctagtttaattgttattatagccactatttctatgatcaactgttaactacaaactttcacctaattttcttttaagaacatatattatttttcatagtttatttcctaacattcacatcaaagaagagaaaacaattatacatagcatcagggagtgatcagatataatttgttcaacaatgggacctggctacctgcctgtagaagagcagatggaattctacaaatgactttcactgtagggtcccttgacacacattatgagccaaataaatagtgtgacacccaatccaatgagtatc

SEQ ID NO: 401790 - DNA, 613 bp, Homo sapiens
ctctctctgactctctctgggtctctatttctttctgtctcagtttcccttcttcccagttctcttcacactttcaaaagacacttcaacccaatacatttggaagtttgaagaataatggttaagtttttatttttgaaatatactagaatccttagctcccaaataatggctgctatttattttttcaccaattgagtgttaggtgagaagaatacttagcttttaatattaaaactactatatgatttaatcrtcaggtaatgtgttattttgcaactgtgtattttgctttgatgacatcaagaacaatagagtagattcatgtgcctaaaatttatgtaagtatgttacatgtacattgacaacagtatgctttcttgtacaattttcactgagcagatttgcaggtctgattttttaaaaggaaaattttcacatctctacttccaaaatcaaggacacacttgtaaaaaacgtatgcactaggttgcctttacgctgcagtctatcctataggcttatatgtatgtgtgtgttcttctccaattcgttaattaacttatgtaagtattagttgatgtagttcaatttcatctgaaatgcagaaaaa

SEQ ID NO: 401791 - DNA, 613 bp, Homo sapiens
ctctctctgactctctctgggtctctatttctttctgtctcagtttcccttcttcccagttctcttcacactttcaaaagacacttcaacccaatacatttggaagtttgaagaataatggttaagtttttatttttgaaatatactagaatccttagctcccaaataatggctgctatttattttttcaccaattgagtgttaggtgagaagaatacttagcttttaatattaaaactactatatgatttaatcgtcaggtaatgtgttattttgcaactgtgtattttgctttgatgacatcaagaacaatagagtagattcatgtgcctaaaatttatgtaagtatgttacatgtacattgacaacagtatgctttcttgtacaattttcactgagcagatttgcaggtctgattttttaaaaggaaaattttcacatctctacttccaaaatcaaggacacacttgtaaaaaacgtatgcactaggttgcctttacgctgcagtctatcctataggcttatatgtatgtgtgtgttmttctccaattcgttaattaacttatgtaagtattagttgatgtagttcaatttcatctgaaatgcagaaaaa

SEQ ID NO: 401792 - DNA, 555 bp, Homo sapiens
aaaaacctttgaacttgcttcctattgtgatggtatattgaattyacagcttttttctgaagaaccagggggctagcctaggtggagtgtttcctggatgtgaggtggatgggcagacaaggtcagggtcctcatgccagagcttggtcaggtaggcataaactgggtcagacaaaagccacaaggtgtctgccagtataaacaagttttaggtgtgagggtcacctggccatagtcatgtatcaggaaactaaccataaggccatctgcgaagtaaaaggagtatcccaggaaagcatactataaacactcaagtccaacaccccttcatttgcccttagagcagggttgctggcttctttggaactagaactgcaatttggctgggagcttttgaaacactaacatatagtaccgtttaatatttcaacattgaatgacacaaaattttaaaagagagataaaataacatatctaaaagtgtgcacagttataaagaaaattactagctatatttatatttagcagtgatagaagagatattttagtaattat

SEQ ID NO: 401793 - DNA, 555 bp, Homo sapiens
aaaaacctttgaacttgcttcctattgtgatggtatattgaattcacagcttttttctgaagaaccagggggctagcctaggtggagtgtttcctggatgtgaggtggatgggcagacaaggtcagggtcctcatgccagagcttggtcaggtaggcataaactgggtcagacaaaagccacaaggtgtctgccagtataaacaagttttaggtgtgagggtcacctggccatagtcatgtatcaggaaactaaccataaggccatctgcgaagtaaaaggagtatcccaggaaagcatactataaacactcaagtccaacaccccttcatttgcccttagagcagggttgctggcttctttggaactagaactgcaatttggctgggagcttttgaaacactaacatatagtaccgtttaatatttcaacattgaatgacacaaaattttaaaagagagataaaataacatatctaaaartgtgcacagttataaagaaaattactagctatatttatatttagcagtgatagaagagatattttagtaattat

SEQ ID NO: 401794 - DNA, 517 bp, Homo sapiens
gtggtgggcacctgtggttccagcaacttgggaggctgaggtgagaggatcacttgagcttgtgaggtccaggctgcagtgcgccatgatcatgccactgcactccagcttgggtgacagagtgagacattatcttaaaaackaataataaaacaacacctatttgtgggttacacaagttatattgttatgtttaacttatgaaataagaacttgaccaaaccaaagtggatttaactttatgggacagtttcattttgtaattttaatataagccatgagagcaataaaaaaaaaatgtttacctactgcctgcctatgcccttctcaagacaatactaccaaaacaggcatatttcataatcatcatttcagtccttggcttatgagagctcttcttcatgtattcaagactatggagacctcccatcctcactgcaactctttgaaggttaatcaaaatgtgcaaaatgtgtatttttcacaacactaaattcagcttcatatagggaggtgt

SEQ ID NO: 401795 - DNA, 647 bp, Homo sapiens
aagaacttgaccaaaccaaagtggatttaactttatgggacagtttcattttgtaattttaatataagccatgagagcaataaaaaaaaaatgtttacctactgcctgcctatgcccttctcaagacaatactaccaaaacaggcatatttcataatcatcatttcagtccttggcttatgagagctcttcttcatgtattcaagactatggagacctcccatcctcactgcaaytctttgaaggttaatcaaaatgtgcaaaatgtgtatttttcacaacactaaattcagcttcatatagggaggtgtgtggcctttttaataacctctctttggacaaaattactatcaaagttcattcctcactggaagcctgttaaatgagcaggtgcagtattgttctttagcagcaagattgaagatccagcagcacaacagtacaaaatttatggtctaagatttctcacagaaattatgcaaacattgcctgctccctttatatctgcaaagtgaaatctagtttcttagagtggtgcacacagaattttatggcatttagtttggaaaaaaaaaatgaacagtcacaattcattactttctaacttttcctgagacagaatacaaacttcatgaaatatattgtgtc

SEQ ID NO: 401796 - DNA, 538 bp, Homo sapiens
agggaaggctgctttgttagtatttgatgaggtaaaatctaggtttcccacatattttccatcaacaaaggagaggctaattactgcccagcagggttaagggtcctggatcccaatttacactcatccttttctggcatctacacaaagatgctagggagtttggcgtgttgacaagattctctgcttcactacaatttattcaggctcctgaaccttctcctaagtccatatgtgcacttcctttaaaatatagttttagcaaaaatctacattttgctagcaaaaacctctatccttaatatctgatcatctttgatstctgatccagtccctcatcctccactattctctaagtgatgtaagccctgttaggttggtttggccagaatccttcttacacctcatgtttcctcttagtaattttccatccactgaccctgctctactccttggcttgtcatgcaatgggatcatgtaatgatctggaatacagtcttcccaaccatgcgttaacaagtgttattaaatattattt

SEQ ID NO: 401797 - DNA, 522 bp, Homo sapiens
tcagtgagaacatcgttgagctcatcattcagctggatataactgacaactactttatccaacaatagcagattataatttttttttcaagctcgcacataacattcaccaaaatagaggacattctgggccatgaaacacactttaacaaatgtaaaagtataaaaatcatacaatatctgctcttacaccagagtggaattaagttaaaaattaataacygaaagagagctggaaaatccccctaaatacttgaagattaaacaatagacttctaaataacacgtgggttaaagaagaaatttcaagaacaaattttaaatattttgaaataatgaaaatgaaaatacaacatcaaaatttgtgggatgcaacaaaagaatatactacaaaagaaaaaagatctaaaaatcaacaatctgagcttgcacattagaaaacttgagagagaaagtaaattcaaagtcagcaaaagaagataaataagaaaaatacagcataaataagtgaaaatgaaacaag

SEQ ID NO: 401798 - DNA, 453 bp, Homo sapiens
tgctatgtggaaatactattttagcctaattcagaatatggtacttatattttaggtgcctatattaatttattttttaaagtttttacctcaagatttttcttgatatacttttggaaatataatatccaattactatgacttcataaaaaaktactagaaatttattggtgtaaaactgttatagtttgagcatccctaaatccaaaaatctgtaattcaaaatgctccaaaacccagaactttttgaacactgacatgactccacaagtggaaaactccacacctaacctcatgcgatgggtcacagtcagaatgcaggcacacaactatgaagatgatgtcattaacactgcaggaaaagtgcctatagatgacatggcaaaaaaatgtgtgatgtgcttacgaagcactagagcagtatgtatgtatgataggacaagaaaccatgtc

SEQ ID NO: 401799 - DNA, 575 bp, Homo sapiens
accgtggtagctgagcttcaatcattcatagaaatatcctcttaaccatgttaattatccacaaatgtgtttactcagagcttctgttgtttattctttactaaataaatgcctggagtgcgagctgctcagggccggccacagtgacaaatctctcttggtgtgcaggcggtcagacactcagctggactagcaaaatggaatatctgcatgtcagtgtacgttttattcatccgctattttggtcagggtctgcagacagaccccacagctaatgtcctcttgtgaagagcaatacctcacagatggaaatggaaatgctagtcatccctttaagtagaatattattcattcttatctyggaaggcaaaagatttcctgcttttcatcccaatgaagtgagtagggagaaaataatttctattcacaaatccccaaatgcttgggaaggccatcctttcactggtcagactttggagttatcagaattatacttaaattgatggagggtagacacttgcctctaattactgccgtgttacataactctaatataagcatagcatgggagtgta

SEQ ID NO: 401800 - DNA, 638 bp, Homo sapiens
tgtgtgtgccttctaagtgttttggctgttcttgtaggggattcttctttttcttatagatttctaaaagctcattatatactctagattctaatcttttgtcagtgatgcatttttttttacaaatatctaattaccctatctatggattgtctttttcattgattcatgtttgtcttatggtatagagactttttaacatgctttatttagaataactatttctcctcttttataatgacatgtttagaaaatctcatctaattttttttttttttaaataaggtgtctgtcaccaaggctagagtgcagtggcatgattatggcttactgcrgcctccacctctcatactcaaacaatcttcctgctttagtcccaggtagttgggactgcaagtgaacaccaccacacctggctaactttttatatttttttgtagagatgggatctcactatgttacccaggctgggattgaacttcgggactcaagcaataggcctcccaaattgctgggatttcaggtgtgagccaccatgcctggccttatcctgtttttgtataatgaattgttttacccatattttcttctaagtatgtatcattttgtttttcatatttagttaatgtacatacccc

SEQ ID NO: 401801 - DNA, 601 bp, Homo sapiens
tttttataaaagaatgttttcctatattttattggaaaatacctaaaaatgaaatttctattatttaatttaatacaactttagattctaaattatgacaaatttgtctacaagtattatcccattacatttacctaattattttattttaatcacttacctagattatattgaaaactgtgatagtcattatttaaaattctgaaactcaccattgcgaaattctgagacaatgaaaaagatatgacctaactgacccgattttgcttctaacctccattctgtccttgtrcattcctggtgtagactgaactaactttgggaggaaaatagtttatagtttagctttgaaacaaagatgctaacagtcccttcccaaaacaaaccttactgcctgtgcactagactgccaaaagctgcaagattagaagttatggtaatcttactgaattaaagatgtagctatttttattaaaccaatatcaatatcttatttattaaagattacacaagcaaagatcattgtgtcttgggctgggtttatagttttgtaaccactatgccattttgacacctcataatatttagcagggataagtat

SEQ ID NO: 401802 - DNA, 601 bp, Homo sapiens
tttttataaaagaatgttttcctatattttattggaaaatacctaaaaatgaaatttctattatttaatttaatacaactttagattctaaattatgacaaatttgtctacaagtattatcccattacatttacctaattattttattttaatcacttacctagattatattgaaaactgtgatagtcattatttaaaattctgaaactcaccattgcgaaattctgagacaatgaaaaagatatgacctaactgacccgattttgcttctaacctccattctgtccttgtacattcctggtgtagactgaactaactttgggaggaaaatagtttatagtttagctttgaaacaaagatgctaacagtcccttcccaaaacaaaccttactgcctgtgcactagactgccaaaagctgcaagattagaagttatggtaatcttactgaattaaagatgtagctatttttattaaaccaatatcaatatcttatttattaaagattacacaagcaaagatcattgtgtcttgggctgggtttatagttttgtaaccactatgccattttgacacctcatartatttagcagggataagtat

SEQ ID NO: 401803 - DNA, 638 bp, Homo sapiens
tgtgtgtgccttctaagtgttttggctgttcttgtaggggattcttctttttcttatagatttctaaaagctcattatatactctagattctaatcttttgtcagtgatgcatttttttttacaaatatctaattaccctatctatggattgtctttttcattgattcatgtttgtcttatggtatagagactttttaacatgctttatttagaataactatttctcctcttttataatgacatgtttagaaaatctcatctaattttttttttttttaaataaggtgtctgtcaccaaggctagagtgcagtggcatgattatggcttactgcggcctccacctctcatactcaaacaatcttcctgctttagtcccaggtagttgggactgcaagtgmacaccaccacacctggctaactttttatatttttttgtagagatgggatctcactatgttacccaggctgggattgaacttcgggactcaagcaataggcctcccaaattgctgggatttcaggtgtgagccaccatgcctggccttatcctgtttttgtataatgaattgttttacccatattttcttctaagtatgtatcattttgtttttcatatttagttaatgtacatacccc

SEQ ID NO: 401804 - DNA, 638 bp, Homo sapiens
tgtgtgtgccttctaagtgttttggctgttcttgtaggggattcttctttttcttatagatttctaaaagctcattatatactctagattctaatcttttgtcagtgatgcatttttttttacaaatatctaattaccctatctatggattgtctttttcattgattcatgtttgtcttatggtatagagactttttaacatgctttatttagaataactatttctcctcttttataatgacatgtttagaaaatctcatctaattttttttttttttaaataaggtgtctgtcaccaaggctagagtgcagtggcatgattatggcttactgcggcctccacctctcatactcaaacaatcttcctgctttagtcccaggtagttgggactgcaagtgaacaccaccacacctggctaactttttatatttttttgtagagatgggatctcactatgttacccaggctgggattgaacttcrggactcaagcaataggcctcccaaattgctgggatttcaggtgtgagccaccatgcctggccttatcctgtttttgtataatgaattgttttacccatattttcttctaagtatgtatcattttgtttttcatatttagttaatgtacatacccc

SEQ ID NO: 401805 - DNA, 587 bp, Homo sapiens
ctcttgggcttacctattacatgccagtcacttcgtttttcttgctattctgtgaattcaccttgtttgyttctgccttaaagcctttcctcctggtatttcctcttcctgtaatgtttttttcttttcttgacatacatcatctgtcttaccattcagatatcaaatgctacctcctaaaacaagatttatttcttgacctctgaatccaaagtagccaccaaagtagtcactctctaatatatcacctaattttgttgtcctgtgtattacttattatcacatgataattttcttattacttgtttaataggtttttttttttgtttctattcaccaaccagaatatgctacgctccatgaaggaagggaactagcctgtcttcctcattattgtgctgtcagtgtctaaaaccatgtgtaaattagggaagaaagtcagtacaaatactgagagtaaagtaaatacagtttaaaactgcttcctttttgtgcataaatatggatattttccagtatattttatgtaattaaagtctaataaaatatgagagttgaaatatgaacatgcttccatgggaatagtt

SEQ ID NO: 401806 - DNA, 587 bp, Homo sapiens
ctcttgggcttacctattacatgccagtcacttcgtttttcttgctattctgtgaattcaccttgtttgtttctgccttaaagcctttcctcctggtatttcctcttcctgtaatgtttttttyttttcttgacatacatcatctgtcttaccattcagatatcaaatgctacctcctaaaacaagatttatttcttgacctctgaatccaaagtagccaccaaagtagtcactctctaatatatcacctaattttgttgtcctgtgtattacttattatcacatgataattttcttattacttgtttaataggtttttttttttgtttctattcaccaaccagaatatgctacgctccatgaaggaagggaactagcctgtcttcctcattattgtgctgtcagtgtctaaaaccatgtgtaaattagggaagaaagtcagtacaaatactgagagtaaagtaaatacagtttaaaactgcttcctttttgtgcataaatatggatattttccagtatattttatgtaattaaagtctaataaaatatgagagttgaaatatgaacatgcttccatgggaatagtt

SEQ ID NO: 401807 - DNA, 587 bp, Homo sapiens
ctcttgggcttacctattacatgccagtcacttcgtttttcttgctattctgtgaattcaccttgtttgtttctgccttaaagcctttcctcctggtatttcctcttcctgtaatgtttttttcttttcttgacatacatcatctgtcttaccattcagatatcaaatgctacctcctaaaacaagatttatttcttgacctctgaatccaaagtagccaccaaagtagtcactctctaatatatcacctaattttgttgtcctgtgtattacttattatcacatgataattttcttattacttgtttaataggtttttttttttstttctattcaccaaccagaatatgctacgctccatgaaggaagggaactagcctgtcttcctcattattgtgctgtcagtgtctaaaaccatgtgtaaattagggaagaaagtcagtacaaatactgagagtaaagtaaatacagtttaaaactgcttcctttttgtgcataaatatggatattttccagtatattttatgtaattaaagtctaataaaatatgagagttgaaatatgaacatgcttccatgggaatagtt

SEQ ID NO: 401808 - DNA, 587 bp, Homo sapiens
ctcttgggcttacctattacatgccagtcacttcgtttttcttgctattctgtgaattcaccttgtttgtttctgccttaaagcctttcctcctggtatttcctcttcctgtaatgtttttttcttttcttgacatacatcatctgtcttaccattcagatatcaaatgctacctcctaaaacaagatttatttcttgacctctgaatccaaagtagccaccaaagtagtcactctctaatatatcacctaattttgttgtcctgtgtattacttattatcacatgataattttcttattacttgtttaataggtttttttttttgtttctattcaccaaccagaatatgctacgctccatgaaggaagggaactagcctgtcttcctcattattgtgctgtcagygtctaaaaccatgtgtaaattagggaagaaagtcagtacaaatactgagagtaaagtaaatacagtttaaaactgcttcctttttgtgcataaatatggatattttccagtatattttatgtaattaaagtctaataaaatatgagagttgaaatatgaacatgcttccatgggaatagtt

SEQ ID NO: 401809 - DNA, 570 bp, Homo sapiens
gtttatcagcttaagaagcttttgggctgaaacaatggggttttctatatataggatcataacatctgcaarcagagatagttcgactgcctttcttcttatttggatttcctttatctctttctcttgcttccaatactattagaagtggtaagagaaggcattgttgtcttgggcctgttttcaagaggaatgcttccagctctttggccattttgtatgatgtgggtttgtcatcaatggctcttattattttggggtatgttccttcaattttagttcattgagagttgtgaacacgaatgagtattgaaatttatcaaaagccttttctgcatctattaagataatcacgtggttttgtctttagttctgttcatgtgatgaatcacctttattgatttgtgtaggttgaaccaaccttgcattccagggataaagcctacttgattatggtgaataagctttttgatgtgctactggattcagtttgccagtgttttgctgaggatctttgcattcatgttcatcaaggatattggctgaaatttcctttttgtgtgtgtgtct

SEQ ID NO: 401810 - DNA, 570 bp, Homo sapiens
gtttatcagcttaagaagcttttgggctgaaacaatggggttttctatatataggatcataacatctgcaagcagagatagttcgactgcctttcttcttatttggatttcctttatytctttctcttgcttccaatactattagaagtggtaagagaaggcattgttgtcttgggcctgttttcaagaggaatgcttccagctctttggccattttgtatgatgtgggtttgtcatcaatggctcttattattttggggtatgttccttcaattttagttcattgagagttgtgaacacgaatgagtattgaaatttatcaaaagccttttctgcatctattaagataatcacgtggttttgtctttagttctgttcatgtgatgaatcacctttattgatttgtgtaggttgaaccaaccttgcattccagggataaagcctacttgattatggtgaataagctttttgatgtgctactggattcagtttgccagtgttttgctgaggatctttgcattcatgttcatcaaggatattggctgaaatttcctttttgtgtgtgtgtct

SEQ ID NO: 401811 - DNA, 666 bp, Homo sapiens
aaatacattagagaacaacctatgaaagcaagagtcattgttcattacatgttctaaccagaagttagaaaataaaccacacagctggatagagaggtacacttctgtgctcatgtcaccaatattctttatggtatgcttctctcctttcttttccttgtgccacttttatctttttgtatttcccaattaatcttttcatttcaaataatctgaagctactggggccaagaaaaattttcaagaattatagtaccatcaaaattttcctgaggtactaagcaaatggccactgtgtggacaccatcctctckgggaattcactgaagtgtgaattcaatgactgtgaggctcacagagacacaggcagtgtagatgccacctgtgcattgtgatgggaggaaaaacagactttataacatggtgcaaaatattccaggtaagaaaagatcatctatttctggaagttattcagatacggttgataaaatccaatgaaagatccagacaatagtcagtatataacatattataatcataagttctcacaaggactgagctagaaacagggtgtggagtgagtctgagaagagaaacaatggaagaataaaagtttataaggctgcccttatttcaagattcagtaatactgttttggttttattg

SEQ ID NO: 401812 - DNA, 561 bp, Homo sapiens
cctggccaatacaagcaagagttcatctggtgtgagttacatattttttctgaacttaattctttctaaaaatataaaaactwattatttgggaacagccaatatgtttgctatataaagaatcttaagtccaagctgtgtcacttccattaaggattgaagaacaggaaaggagacagtttcgatctcccaagccctttcactaagatcatttctacagagttgaattgaaagtactttctactgagatcccagatggatctattattggaatattaatgtcatatggattgtctcagttttggcatcatgataagctttctttatatcacaattcagttgatttatgtcctaatcaccctgtggcagggccattattaagtggatgcaggaatgtgatacagttcagctcaagttaaccttgcttcacaatagtgacatgagttaatttaattcctgtcaccagactccgcaaggggtatattgcacattacctctcgttattgcagctgcgagtcattatctccaaatcgcccttcgtaaaacctatatgtgtccctt

SEQ ID NO: 401813 - DNA, 561 bp, Homo sapiens
cctggccaatacaagcaagagttcatctggtgtgagttacatattttttctgaacttaattctttctaaaaatataaaaacttattatttgggaacagccaatatgtttgctatataaagaatcttaagtccaagctgtgtcacttccattaaggattgaagaacaggaaaggagacagtttcgatctcccaagccctttcactaagatcatttctacagagttgaattgaaagtactttctactgagatcccagatggatctattattggaatattaatgtcatatggattgtctcagttttggcatcatgataagctttctttatatcacaattcagttgatttatgtcctaatcaccctgtggcagggccattattaagtggatgcaggaatgtgatacagttcagctcaagttaaccttgcttcacaatagtgacatgagttaatttaattcctgtcaccagactccgcaaggggtatattgcacattacctctcrttattgcagctgcgagtcattatctccaaatcgcccttcgtaaaacctatatgtgtccctt

SEQ ID NO: 401814 - DNA, 584 bp, Homo sapiens
cattatgagtaataacagcattgctatctttttctcatagtggaacatattaaattagctgggtatggcacattttaaataaaatatgaagmgatggtttctgaacctgaaagaagggttgattttgggtttaaaatatacagcacatgcactgattggaaaataaacaaatttttaagttcctcttcagtccacattactctaaatattcatcattaagtcactattcactcacagtaacccacgaattttataatgcacatttaatcaatttttacgtagagaggaaaagcacaaaagcttttgtcagaggccctacataccctaaagatggccttgagcagcatgctgaatgtctgtcttttcatttctattctcattcctcactatatctcaatatttaaattagttgtacttaaattcatgaaaaatagatgggcaacaattgatgtctctgtataaggatgtgattggagagtgaggtggttggtatgggaagtgtcgcctgcatctgatcatgttgggtctggaaatactatatatcatttagaaagttgattaaagtactttaggaagttaatata

SEQ ID NO: 401815 - DNA, 584 bp, Homo sapiens
cattatgagtaataacagcattgctatctttttctcatagtggaacatattaaattagctgggtatggcacattttaaataaaatatgaagagatggtttctgaacctgaaagaagggttgattttgggtttaaaatatacagcacatgcactgattggaaaataaacaaatttttaagttcctcttcagtccacattactctaaatattcatcattaagtcactattcactcacagtaacccacgaattttataatgcacatttaatcaatttttacgtagagaggaaaagcacaaaagcttttgtcagaggccctacataccctaaagatggccttgagcagcatgctgaatgtctgtcttttcatttctattctcattcctcactatatctcaatatttaaattagttgtacttaaattcatgaaaaatagatgggcaacaattgatgtctctgtataaggatgtgattggagagtgaggtggttggtatgggaagtgtcgcctgcatctgatcatgttgggtcyggaaatactatatatcatttagaaagttgattaaagtactttaggaagttaatata

SEQ ID NO: 401816 - DNA, 577 bp, Homo sapiens
agtgactacatcacatattttatttgtattacatgacccttctcctcacaattattttggaaaggcatatgcatattgcattttgttagctcacttctaagaacacagttctcctgaggccaatgttactgtttcaatttagtattggcattattttatatgtccaaacttggcccaggtgagcaagcaaattttttgtatataagccaatgcatgttcaaaatgcaaattatgtatttgaacataaaggtatttatatatataatatagtatataatatataatataatatacacacatatataatatttatgtttattagtatatgaaagatagttattacaggttacaatcatatttcctatgtaagtttatcttttttttttttttttgagacaaggtctcactcagtcacytaggctggggtgcagtggccaatcacagcccaacgtagcctcgacttcctgggctcaggtgatcctcccacctcagcttccttagtagctaggactataggtgcctgccactatgcctggccaatttttgtagagatggggtttcagcttgtttccaaggc

SEQ ID NO: 401817 - DNA, 577 bp, Homo sapiens
agtgactacatcacatattttatttgtattacatgacccttctcctcacaattattttggaaaggcatatgcatattgcattttgttagctcacttctaagaacacagttctcctgaggccaatgttactgtttcaatttagtattggcattattttatatgtccaaacttggcccaggtgagcaagcaaattttttgtatataagccaatgcatgttcaaaatgcaaattatgtatttgaacataaaggtatttatatatataatatagtatataatatataatataatatacacacatatataatatttatgtttattagtatatgaaagatagttattacaggttacaatcatatttcctatgtaagtttatcttttttttttttttttgagacaaggtctcactcagtcacctaggctggggtgcagtggccaatcacagcccaacgtagcctcgacttcctgggctcaggtgatcctcccacctcagcttcyttagtagctaggactataggtgcctgccactatgcctggccaatttttgtagagatggggtttcagcttgtttccaaggc

SEQ ID NO: 401818 - DNA, 565 bp, Homo sapiens
gctcttcctatgagcatcaatacaacatcctaggttttgagtctgttgactttcttacttttaaaatctcttctccatcatatgtaagctcacttatttgcatgattgtaaccaagtcatagctgttatgaataactgcacaaaaatcaaaatctcaaaatatcaaaatctcaactccggcaacttctcctctgaccatacttctatatttttaattcctaataatcccatttcagtatacttcattttactgyggtctttaatctgttaatcctactagttttttgttgttaattacggctggaatcatataagttatcttccaaatgaagacgcttttaagaagaaagggaacactcaaactattcaaaattatatgattacttgaaacacttgcttattaatcaacaaataggattcattatattgatagacctctaaacagttttttatacctaaatgtagtattattattttatatccaggcaaaaattttaaatgtaatgttgattctctgaatattaaaaatagtatatgagaaatattaccccattattgattcaca

SEQ ID NO: 401819 - DNA, 479 bp, Homo sapiens
attttactgcggtctttaatctgttaatcctactagttttttgttgttaattacggctggaatcatataagttatcttccaaatgaagacgcttttaagaagaaagggaacactcaaactattcaaaattatatgattacttgaaacacttgcttattaatcaamaaataggattcattatattgatagacctctaaacagttttttatacctaaatgtagtattattattttatatccaggcaaaaattttaaatgtaatgttgattctctgaatattaaaaatagtatatgagaaatattaccccattattgattcacatatactttaatcagtttcctagccatacttaaagcaatggacaagtaatatccactataaaattaggatattttttccagtagagtttatttttctttaaataatgttacttctagttttcttcaaatttccattttatgcttaattagtttaaaatt

SEQ ID NO: 401820 - DNA, 601 bp, Homo sapiens
ataatgctgcctcagagctcacgttcttgagcactacatcacattttcttgaatgtattccttgtacaatcttaaatcctttttaataaattataaatcaggaaagaaaaaaatgtatayatgtatgtgaattctaatcattactgtatcatactatagtataggatctttttgttttgttttattttggttttgacacagggttttgctctttcacctaggctgaagtgcagtggcatgatcatggctcactgcagccttcatctcccaggctcaagcgatcctgcaacctcagcctcccgagtagctgggattacaggtgcatgccactgttcctagctaatttttatttatttatttttatcttctggagaaatagggtcttactattgcccagctggtcttgaacccttgggctcaagcgatcctccttcatcggcttattaaagtactgggattacaggtgagagctaccgcactcagtcacatatgattttcttatactggagtaaaacacaaaaagtatgagaaatcaacacaaatgaagatcagtaaacacatttgtcagtgcaaaagaaacctagaaaaattttcaaaattg

SEQ ID NO: 401821 - DNA, 508 bp, Homo sapiens
tttcatatggtggtacacagggttatacatatgtaaacatacatggttctatatactgaacatgtgtgcgtgaacatttgtagtagaatatatgtacatgtgtgtatattgtgtgtgtgtgtatgtgtgtgtgttatacttgagtcaaacatctttgtaaaatatatacagtcagacctccctatcaatgggttccgcatccatggattcaaccaactgtggattgaaaatatttgcccattccatttgcctcttaataagaaagaataaactataatttttggagaatataaaaggaaaaaaatggraaaagcatggttctgccagtgctaaacatgtatagtctttttttcttatcattgtttcttaaacaatatagcataacagctattttatagaatttacattgtattagatattaaaattaatctaacgattaaagtatgtggaaaaatgtgggtaagtcatatgcaaatactacatcattttatataagaaacttgagcat

SEQ ID NO: 401822 - DNA, 630 bp, Homo sapiens
tcaaatccaaacagcctgactctgtagatcatggttttagcctctagactcccctcatgcatttcgtttctccctgttaggttgttcctctcctactatcacctcatgctgatatatgayggtggcatatggctacttcagtggtgaggacactgaagcctagcaaggtcacgtgttccagggtctcactgatgcccgggaacaagggagagaagagatttgaggagcagtggtcacaactccagaggattacatctaataaaatgttttatttgtgaaggcaatgagagaccttcacagcagatgcaaagatccagcaaaaagataggctgaagagcactggccagctatgggaaaataaaaattccaacagggaactgcctgcagtttctgcctccagcttcatgttcagaagtgggacccatagattatttggctagaacaacattcttcacataaacactaacgaaaaagtactcaacttatgggtccagtgaaaataagaatgtaaaagtaagtaaatcagaggaaaatgcattgcaagtaaataccttattttaaataacagtgggctaaaatagtgtgtagcatattgtaaagctaacttgtaaatttcaacactatttttga

SEQ ID NO: 401823 - DNA, 600 bp, Homo sapiens
tattgcctaggaaagcttgggagcacagagatttcctaccacacaaaggaggagtctgcctcccactaactttggtgtctcgagtctcaaaggagcctaacatatttacctagggcaygtttaaggaagaaaaggagaagtgtggctgtacaataaatgaggctgatgtgtgaatacttcctatgacccaatgataagggctacaaaggaagtggaacagaatttgttttctttttttgaggtactattcaagaaccaactaatcaactagtagcatgtaaggagcatagaggaagaagctgaagtttaattttggattcctaagacttgggaaacatcacagagatgcataatagacagacatcttcatgggtaaagacactaaagaaaagaaaaatgtaaaataatttttcaacataccatagagaaagatgtgataaaatctcttacctcacttctaacaagaaactactaatcatctcagaaaaataagatctgtctggaagatcagtgagagaaatacatcacaatacaaaatgaaactacaaagtgattgaaattagaaaagagagttctaaaaatggagaatacattaagaag

SEQ ID NO: 401824 - DNA, 600 bp, Homo sapiens
tattgcctaggaaagcttgggagcacagagatttcctaccacacaaaggaggagtctgcctcccactaactttggtgtctcgagtctcaaaggagcctaacatatttacctagggcatgtttaaggaagaaaaggagaagtgtggctgtacaataaatgaggctgatgtgtgaatacttcctatgacccaatgatamgggctacaaaggaagtggaacagaatttgttttctttttttgaggtactattcaagaaccaactaatcaactagtagcatgtaaggagcatagaggaagaagctgaagtttaattttggattcctaagacttgggaaacatcacagagatgcataatagacagacatcttcatgggtaaagacactaaagaaaagaaaaatgtaaaataatttttcaacataccatagagaaagatgtgataaaatctcttacctcacttctaacaagaaactactaatcatctcagaaaaataagatctgtctggaagatcagtgagagaaatacatcacaatacaaaatgaaactacaaagtgattgaaattagaaaagagagttctaaaaatggagaatacattaagaag

SEQ ID NO: 401825 - DNA, 600 bp, Homo sapiens
tattgcctaggaaagcttgggagcacagagatttcctaccacacaaaggaggagtctgcctcccactaactttggtgtctcgagtctcaaaggagcctaacatatttacctagggcatgtttaaggaagaaaaggagaagtgtggctgtacaataaatgaggctgatgtgtgaatacttcctatgacccaatgataagggctacaaaggaagtggaacaraatttgttttctttttttgaggtactattcaagaaccaactaatcaactagtagcatgtaaggagcatagaggaagaagctgaagtttaattttggattcctaagacttgggaaacatcacagagatgcataatagacagacatcttcatgggtaaagacactaaagaaaagaaaaatgtaaaataatttttcaacataccatagagaaagatgtgataaaatctcttacctcacttctaacaagaaactactaatcatctcagaaaaataagatctgtctggaagatcagtgagagaaatacatcacaatacaaaatgaaactacaaagtgattgaaattagaaaagagagttctaaaaatggagaatacattaagaag

SEQ ID NO: 401826 - DNA, 217 bp, Homo sapiens
aaatggattagttttatgttgctgcagtaacatattaccaaaaatgtggaggcttaraacaatacaaacttatcatctttacacttttgtgagttaaaagcctgacacaggtctcagtgggttaaaatcaagttgtgtgcaggactgggttcctttctggatgctctaggagagaagaatctgtttcttgtcctatttcagctcctagaggctgctg

SEQ ID NO: 401827 - DNA, 550 bp, Homo sapiens
catccaccttgtacttatgaaaacgcttatatattttcttccttttcaatgggagaaaaggtacatccactttgaaaaatggtctgcccatttctcacacaactaacacatattatcttatgacccagaaattctactcctaggaattcaactaagaggagtaaaagtgtatgtctaataaaacacctgtgcaagaatagtcatagcagctttattcataatcacccaaacgtggattcagtccatgtgagaatcaacagaacaaaatgtagtacatgcatataccataytattattcagcaataaaaaggaataatacaggcaacaataagataattatggtgagtggaaaaagccgtacataagttacatatgtatataattccacttatttgaatttttagagcagacaaaactaataaatggtgaaaaaaatcaggtggttgcctctggcaggaagtaggcaggtagattaggaaggggtacaaggaaagtagctgaggtgatgctaacagtgtgtatattttgatgagagtgaggatacatcagt

SEQ ID NO: 401828 - DNA, 519 bp, Homo sapiens
taacaatagttatttctcagtagtaagatgacataatttttttttcctaatttgctttttttttttttttttttcaatttttccgattaacacattgtaacaagaaaaaaaatgcaagctattaaactgggtaaggtgacacatcccctaaataaacttgagtagtttttgcagataaaagcccatattagatttcaaatttgacatcaggagttcaatgacaaaatgatattaggatcataaatttaaataagccacaaaacattaaaaataagagtgactttggagggcatttagcggacgcctttatttcacagtaggaagaccctccccccagtactaattccagaagccttaagtgctgatctctgcatagttccctctacccccatraatgtactcatttattctccagacaaaatgatgcaacatatctacgtttggaaactagaccacattctccaaagtggaagtaatccagactgtgatcaagacacaaccaacagttaagctttcagc

SEQ ID NO: 401829 - DNA, 519 bp, Homo sapiens
taacaatagttatttctcagtagtaagatgacataatttttttttcctaatttgctttttttttttttttttttcaatttttccgattaacacattgtaacaagaaaaaaaatgcaagctattaaactgggtaaggtgacacatcccctaaataaacttgagtagtttttgcagataaaagcccatattagatttcaaatttgacatcaggagttcaatgacaaaatgatattaggatcataaatttaaataagccacaaaacattaaaaataagagtgactttggagggcatttagcggacgcctttatttcacagtaggaagaccctccccccagtactaattccagaagccttaagtgctgatctctgcatagttccctctacccccataaatgtactcatttattctccagacaaaatgatgcaacatatctacgtttggaaactagaccacattctccaaagtggaagtaatmcagactgtgatcaagacacaaccaacagttaagctttcagc

SEQ ID NO: 401830 - DNA, 426 bp, Homo sapiens
agggggtagctttaggggtccttacccaagaacacggaggtcaccagcaacccatggatctcctatcaaaagttttagatccagtaacctgtggatggcctgaatgtttcaatccattgcgataccgccttgttaactaaagaaagcagaaaactaacctttgggggaaagttagttgtaaacatgccccatcaggttagagccatcttaaattaaaaggcaggaagrtggcttactgacttgagaattttaaagtatgaagctatcctgttagaaagagatgatttaacactaaccactgataattcacttaacccagaggtttcctgactggagatccaaatctaaagagacctgagcatgagtgtttagatttaatgatcatacaaaagttaggcctgatttaagagagaccccttacaaaac

SEQ ID NO: 401831 - DNA, 471 bp, Homo sapiens
aaataaaatacaaaataagtaagaacacaaagctttcaatttaataaccacttaaagctctttactggtttaagagaawtacaaggcccatttttttagaatcacctggactctctaagccttgcaaatgaagctgaatttctcacttgatacttggctctcacttgcagtcatgaaaaccaagaatttgttatgtcactgtgtattgcttgttacctgaaatccacactaggctgggatcaagggttgaatctttcatgattttctccataacctgtgtgcttcttatcccacaccaaactaagctttttttctagagctctgcaatttacagttagtatatgagagcagttctcaaaaatgtagtctctggactagcagctccagcagcacctgggaacttcttataaatacacattctcaggccccaccctggacctgatgaatcagaaactctggagtagggctcag

SEQ ID NO: 401832 - DNA, 471 bp, Homo sapiens
aaataaaatacaaaataagtaagaacacaaagctttcaatttaataaccacttaaagctctttactggtttaagagaaatacaaggcccatttttytagaatcacctggactctctaagccttgcaaatgaagctgaatttctcacttgatacttggctctcacttgcagtcatgaaaaccaagaatttgttatgtcactgtgtattgcttgttacctgaaatccacactaggctgggatcaagggttgaatctttcatgattttctccataacctgtgtgcttcttatcccacaccaaactaagctttttttctagagctctgcaatttacagttagtatatgagagcagttctcaaaaatgtagtctctggactagcagctccagcagcacctgggaacttcttataaatacacattctcaggccccaccctggacctgatgaatcagaaactctggagtagggctcag

SEQ ID NO: 401833 - DNA, 471 bp, Homo sapiens
aaataaaatacaaaataagtaagaacacaaagctttcaatttaataaccacttaaagctctttactggtttaagagaaatacaaggcccatttttttagaatcacctggactctctaagccttgcaaatgaagctgaatttctcacttgatacttggctctcacttgcagtcatgaaaaccaagaatttgttatgtcactgtgtattgcttgttacctgaaatccacactaggctgggatcaagggttgaatctttcatgattttctccataacctgtgtgcttcttatcccacaccaaactaagctttttttctagagctctgcaayttacagttagtatatgagagcagttctcaaaaatgtagtctctggactagcagctccagcagcacctgggaacttcttataaatacacattctcaggccccaccctggacctgatgaatcagaaactctggagtagggctcag

SEQ ID NO: 401834 - DNA, 669 bp, Homo sapiens
catgtcggcactcaaacagttttggattttgaagcatttcagattttggattttcagatgagggatgctgtattatcttctgaatgaggccactcattcaggaaagcccagagcttggggacatggagctgcagaccaaagaggtgatttctgtagtggctttcagtgcggaagggccyacaaagcggtttaaagcaagccacaaaataggaaacccaatatttagctaatggaactctgataaaacctgctcaagatgtctgtctctactaattcagatggagccaagccaaagcatcattattattttaaaaaggcaccaatccctctgcaaaagcactgaattatatcatgatacaatcatcaattgtaccatgaatcaccatcagcggtggtcttttagggatatgaagaaggggttttcacaatacatcgcatgacacaccatcttccaaatctctaaacatttctctccacagcccagtcctctccatagttgtccaaatccctccctcttttctcttgttgtctccaaaactcaaaaccatgctctgactttctatatcctgccctccccttctaggaccacgtgggaagtcccctgcttccccagggtgtcccctccgtcccttctgggatcagtcatctttcctcaaatggaccagttcg

SEQ ID NO: 401835 - DNA, 669 bp, Homo sapiens
catgtcggcactcaaacagttttggattttgaagcatttcagattttggattttcagatgagggatgctgtattatcttctgaatgaggccactcattcaggaaagcccagagcttggggacatggagctgcagaccaaagaggtgatttctgtagtggctttcagtgcggaagggcccacaaagcggtttaaagcaagccacaaaataggaaacccaatatttagctaatggaactctgataaaacctgctcaagatgtctgtctctactaattcagatggagccaagccaaagcatcattattattttaaaaaggcaccaatccctctgcaaaagcactgaattatatcatgatacaatcatcaattgtaccatgaatcaccatcagcggtggtcttttagggatatgaagaaggggttttcacaatacatcgcatgacacaccatcttccaaatctctaaacatttctctccacagcccagtcctctccatagttgtccaaatccctccctcttttctcttgttgtctccaaaactcaaaaccatgctctgactttctatatcctgccctccccttctwggaccacgtgggaagtcccctgcttccccagggtgtcccctccgtcccttctgggatcagtcatctttcctcaaatggaccagttcg

SEQ ID NO: 401836 - DNA, 480 bp, Homo sapiens
attccgatttagaaatctgtccccgcttttggtgaaattcttattttttttagagtcagaatcttcactgttgcccagttgtctccccgggacccaagcsgtcttcccacctcagcctcccacagtactggaattacaggcgtgagccaccccacccagctggtgaaattattaaaatggtagtgaaaactctgcctccattgtgaaattggaaaaaaattagaaattttagaaaaaagtacgccctttggagctaggtagagttcagatccccacatttccattgagtagttgcatagcctctcagagcttcagcttcctactccttaagggttagtaacatgctttgcagtgttgttaggaatcagtgaaactgtgtgagatacttaactgcagtatctaacatggagtaggtagctatttcctggtagctgtaatgataataattttgatacgtttttacatgacttaagcattctg

SEQ ID NO: 401837 - DNA, 480 bp, Homo sapiens
attccgatttagaaatctgtccccgcttttggtgaaattcttattttttttagagtcagaatcttcactgttgcccagttgtctccccgggacccaagcggtcytcccacctcagcctcccacagtactggaattacaggcgtgagccaccccacccagctggtgaaattattaaaatggtagtgaaaactctgcctccattgtgaaattggaaaaaaattagaaattttagaaaaaagtacgccctttggagctaggtagagttcagatccccacatttccattgagtagttgcatagcctctcagagcttcagcttcctactccttaagggttagtaacatgctttgcagtgttgttaggaatcagtgaaactgtgtgagatacttaactgcagtatctaacatggagtaggtagctatttcctggtagctgtaatgataataattttgatacgtttttacatgacttaagcattctg

SEQ ID NO: 401838 - DNA, 480 bp, Homo sapiens
attccgatttagaaatctgtccccgcttttggtgaaattcttattttttttagagtcagaatcttcactgttgcccagttgtctccccgggacccaagcggtcttcccacctcagcctcccacagtactggaattacaggcgtgagccaccccacccagctggtgaaattattaaaatkgtagtgaaaactctgcctccattgtgaaattggaaaaaaattagaaattttagaaaaaagtacgccctttggagctaggtagagttcagatccccacatttccattgagtagttgcatagcctctcagagcttcagcttcctactccttaagggttagtaacatgctttgcagtgttgttaggaatcagtgaaactgtgtgagatacttaactgcagtatctaacatggagtaggtagctatttcctggtagctgtaatgataataattttgatacgtttttacatgacttaagcattctg

SEQ ID NO: 401839 - DNA, 543 bp, Homo sapiens
ttacatagatgtgcttcataccacctcaaaagaattaaaatagtaacatcaaagattattgatcatagatcattataacagatataagaataatgaaaaagtttgaaatattgtaagaattaccaaacagtgacacaaaggtatgaagtgaacacatactcttggaaaaatggtgtcaatatactttttgatgcagggttgctgcaaactctcaatttagaaaaaatgtgatatttgtgaagtgcaataacatgaaatgcaataaagcaaggtatgcctgtatatcaaaagctggtgagctgaaggctgatatcaacaacaaaaatggaaaaccccttactcaatttctacatattagccatattttcagatccagaagccagtaaatgaagaaaaagtcctttaacttataagaagactgagctcttggcagttaaagatggctgactagttgtagctagtgtgcatcactctcaccrggataaaatgaagtagcaagtgaatagtagctcttcaagggtattgtctaagagaccacatgta

SEQ ID NO: 401840 - DNA, 603 bp, Homo sapiens
cctgaccacttccttcagggcctgaggtcagcccaacccaactagccaacactaccatgaccaacacccattcacgcaggcccaatggtggagccccccatacaagatgcagcagtactgccacatcagagaacaggtgagcctcaaagctaactgtatsaggttgagtggcaaggttatgccctgaaaccacttccagagagagttgcaaaaccagcattccctgtgtagatagattacagagtgtgtctgaaataggagtcatgagacttggaacaagggtgattataaggaaacaggccacattcctgtctatctaggaagaggagctggtgcagccccctaactctacctctccccaccacacacactcacacacatacacgcacacacacatacacctcaatgcacttcatcaggagatttgacctggtgcttaaactcaacattgggacattcatggtcaagccagggacttcatctttgcccagccgtgtctctccattcacatggaaaaggatgcttaaggaaccaggtatgtcactgtccagcccttcacctggaaaaacagagagcacctcgtagtaaacaaatattagatcc

SEQ ID NO: 401841 - DNA, 603 bp, Homo sapiens
cctgaccacttccttcagggcctgaggtcagcccaacccaactagccaacactaccatgaccaacacccattcacgcaggcccaatggtggagccccccatacaagatgcagcagtactgccacatcagagaacaggtgagcctcaaagctaactgtatgaggttgagtggcaaggttatgccctgaaaccacttccagagagagttgcaaaaccagcattccctgtgtagatagattacagagtgtgtctgaaataggagtcatgagacttggaacaagggtgattataaggaaacaggccacattcctgtctatctaggaagaggagctggtgcagccccctaactctacctctccccaccacacacactcacacacatacacgcacacacacatacacctcaatgcacttcatcaggagatttgacctggtgcttaaactcaacattgggacattcatggtcaagccagggacttcatctttgcccagccgtgtctctccattcacatggaaaaggatgcttaaggaaccaggtatgtcactgtccagcccttcacctggaaaaacagagagcacctcrtagtaaacaaatattagatcc

SEQ ID NO: 401842 - DNA, 580 bp, Homo sapiens
tcctggactagagagattcacaaccaaattctaccagatgtatacagatgggctggtaccaatcctactgaaactattccaaaataattgaagaggagggccatgtccctaactcattctataaatccagcatcattttgatgccaaaatcaggcaaagaaacaagaaaactataggccaatctccctgacgaacataaacacagaaattctcaagaaaacagtaacaaactgaatccagtagaatatcaaaaagttagttcaccacatatacaattcaataaatgtgattcaccacattaacataattaaaaacaaaaacaaacaaacaaaccatggtcatctccaaagacacagaaaaaagcttttgataaaatccaacatcccttcatgattaaaaccctcaacaaagtaggcatcaagraagattcctcaaaataatgagtcatctatgactaacacacagacattacactcactgggcaaaagctgagagcacgccccttaagaattggaacaagacaaggctgcccactccaactgctcctattcaacatagtattagaaatgctaaccagaac

SEQ ID NO: 401843 - DNA, 516 bp, Homo sapiens
tgaaatctttcatatcaatttcttcccagaaacagatttttcatttttacagctttaggctgaagaaaaactatagtaaccaagcaataggcaataaaaagctaaaatatttatatctgcttctgtattatgtgccaatttgcagaaaataatgcagaaaatacacagaagtgttttcaattccatgcttcttattcaataaatatttgctggagtggattaccaatttttctcaaaactcttataattttcccaagaaccatcaaactcagtcatatagactcatatagacaatgctaaacaaatcatgtatgcaccaatggtttttttataattctatatagaatcatagttattcatatttaagcttgatgtcaatttctgttatattattctaagcttctcccaattaattttttgtatttgcagttatagaaaaatgcttatagttctagaagttacggaaaaaatgacagcyacatatttggagcaaaagaggggtgcgattaacaagtg

SEQ ID NO: 401844 - DNA, 567 bp, Homo sapiens
gggtgttgtggggcctcctccagccaagatttcagaggtcactggcaaggattggccactcctggcctatttatctcactccttctcagcttcccccatcttcagcccagagtctgcatcctgcctctgtccactctcaatgcctttctttcaaakatctgttcagagtgtgccagtcttcttgatggtctggtctcttggtaggtgatggacttcctggctgcatctagtcggctatctcagctcccaatatcaggctgtttcatcttcaatgaaaatttgttattttgtttagcctctttcatcagtgattttagctaaatcttctggataacttgctacagattctacatcagtacttgcggcttcacattgcacttctatattatggatatggcttttctccttaaatgttatgaaccaagctctgctagcttcgaacttttcttctgtagattccttacctctcagccttcacagaattagagagttaggatcttactttggattaggttttaactaaagggcatgttgtgattttaactttctccatgtcagcaataagac

SEQ ID NO: 401845 - DNA, 587 bp, Homo sapiens
atttccatttttacttgtttcaaatttccttttacattttttcttactatctttgtcgatgcaaaggtaatttaaaagtatgttctttaatttacatgtatttgttaaattttcaaagtttcrtttcttattgtagttttattcctttatgttctaaaaagatatttgatatgatttaaattaaaaaaatatttaaacttgttttgtggcctaatatatggtctgtcccagagaatgtttgcatgtgctgatgagaagactgtgtattctgctactgtttgataaaaggtttagtaaataaatttctgttaggtccatttaatctacagtgcaaatttagtctcacagttctttgcttattttctctctaaataatctgtccaatgctgaaagtgtagtgtagaaagtcccaactattaatgtattagtgtctatctctcccatatatatatgtatgtgtgtgtatatatatatatatatatatatctatatatatagatagatatacacacacatacatatatatatatatataaacatacacacacacacacgcacatcttccaatgttgactgtgtgtatgtgt

SEQ ID NO: 401846 - DNA, 587 bp, Homo sapiens
atttccatttttacttgtttcaaatttccttttacattttttcttactatctttgtcgatgcaaaggtaatttaaaagtatgttctttaatttacatgtatttgttaaattttcaaagtttcatttcttattgtagttttattcctttatgttctaaaaagatatttgatatgatttaaattaaaaaaatatttaaacttgttttgtggcctaatatatggtctgtcccagagaatgtttgcatgtgctgatgagaagactgtgtattctgctactgtttgataaaaggtttagtaaataaatttctgttaggtccatttaatctacagtgcaaatttagtctcacagttctttgcttattttctctctaaataatctgtccaatgctgaaagtgtagtgtagaaagtcccaactattaatgtattagtgtctatctctcccatatatatatgtatgtgtgtgtatatatatatatatmtatatatctatatatatagatagatatacacacacatacatatatatatatatataaacatacacacacacacacgcacatcttccaatgttgactgtgtgtatgtgt

SEQ ID NO: 401847 - DNA, 622 bp, Homo sapiens
atttctgttaggtccatttaatctacagtgcaaatttagtctcacagttctttgcttattttctctctaaataatctgtccaatgctgaaagtgtagtgtagaaagtcccaactattaatgtattagtgtctatctctcccatatatatatgtatgtgtgtgtatatatatatatatatatatatctatatatatagatagatatacacacacatacatatatatatatatataaacatacacacacacacacgcacatcttccaatgttgactgtgtgtatgtgtgtgtttacaattgttataatgtcttcgtgattttgcccatttkttattatgtaatgacccttacgtcactttttatgtttttgacaaaagagtgttttgtctaatataggtataaacattctacatgcttctgttttctgtttgtgtggaatattttcttttcatccatttcatttcagtctatttctgtctttacacataaagtaaacgtcttgtcagcaacatacagctagatttctcttttaatccatttagccagtctatatctatatcaaattatgtaaactcaaggttgttattaatacatgaggacttactactgtcattttgttaatt

SEQ ID NO: 401848 - DNA, 465 bp, Homo sapiens
ggtctccagcttggaattacccaccccatgtttactgtccaaccctgaaattgagtagtccaccatacgtcatcccagctggggcagggtgatgccctacagtaacttgtatctggttcagggcaaagatatttatccacctgtgagagttgtctctgattttccagatttgcacaaggtaagacctggcaggcatcacatcttataatctggagtgctaccatcttggttacattaattrccaacctgactgggtagggaggagtcccccaccagtttccattttgaccttctgctctttgtatagtagcatatcctagccatattaacttccagaaatgggaccagcccatgttttctttttagatttttctcagaattaacttaagagttccttaggtgacccatgcactttccactggtcttttttcctccctcccggggtctgttttatcagttccttga

SEQ ID NO: 401849 - DNA, 409 bp, Homo sapiens
tactgttttgcacctatcatcttttgaaatctrtgttgtggtaggtatcagcagctcttccatttaatgttgagtagttttattgtacagttacactaaaatgtgtttattcattcacctgttaaatggaaaaatagccaattataaataaaactgttgtgaagtttcctgtacgagcctcagtgtagatacctatatgttttcatttattttgcatcaatgcctaggagtggactggtgaatcaattctgctcaaaggtatgtttaactttatgaaaactgacaaactattttccaaagaggtcttaccacttaacttgctgccagcagtttgtgagaatgtcagttactccacatcttaccccatacttggtgttatcagtcttttaaattttagcccttctagttg

SEQ ID NO: 401850 - DNA, 548 bp, Homo sapiens
agtctctcttcctcgattttttttttttttgtgggggaatagtttcaataggattggtaccagctcttcttcatatgtctggtcaaatttggccatgagtccatttggtccagggcttttgctgcttggcaggctttttgttgctgattaaattatggaactcattattggtctgttcagggtttcaggttcttcctggttcaatcttgggaggttgtatatttccaggaatttatyagtttcttctaggtttctagtatgtgtgcatagaggttcttgtaattgtctctgagggttttttgtatttctgtggggtcagtggtaatgtcccctttgtcatttctaattgtgtttcttcagatcttctctctcattttctttactaatgtagctggcagtctatcaatcttattctccccaagaaccaacttttagtttcattgatcttttgtatagttttttgcatctcaatttcattcaattcagctttgattttggttatttattttcttccactaactttgagattggtttgctcttttctcatt

SEQ ID NO: 401851 - DNA, 534 bp, Homo sapiens
ttatctgactatactgactctgtttttcccttctactctcccccttgttcaatatggctatagccacactggcccattattattttgctaacataaaaatcaaatatttcttctgatggggacactcttctcctcygtcattccacagctcctttttatgttacttcatcttcttgtggttttgtttgtttttgtttttgataatcttatcttttcagtgatgctgtgccttactgacatttgccatgtagtaaaggtaattggccaaacagcacctcagaatcaacctgctggaacaatgctcatctgagaaaactcacagaaaaaaaaaaaaaagactagtagcaatagtcctctgtttataaactattctagagaaacacttcaagacaatgtaaaaccagaaaacagagtctttgaaaagtaccttgacatttgaatggtgaagctacgtgattagggagcaacagtctttcccccagtgggattaaagagcagcatgataaagcaacttcacataaaagagcctttgtt

SEQ ID NO: 401852 - DNA, 534 bp, Homo sapiens
ttatctgactatactgactctgtttttcccttctactctcccccttgttcaatatggctatagccacactggcccattattattttgctaacataaaaatcaaatatttcttctgatggggacactcttctcctctgtcattccacagctcctttttatgttacttcatcttcttgtggttttgtttgtttttgtttttgataatcttatcttttcagtgatgctgtgccttactgacatttgccatgtagtaaaggtaattggycaaacagcacctcagaatcaacctgctggaacaatgctcatctgagaaaactcacagaaaaaaaaaaaaaagactagtagcaatagtcctctgtttataaactattctagagaaacacttcaagacaatgtaaaaccagaaaacagagtctttgaaaagtaccttgacatttgaatggtgaagctacgtgattagggagcaacagtctttcccccagtgggattaaagagcagcatgataaagcaacttcacataaaagagcctttgtt

SEQ ID NO: 401853 - DNA, 577 bp, Homo sapiens
taatgagcttaaaacccaccaacttacttaatattgtgatagtgcttcacttcccagtactcactaacatttttcctgctttattgttctccaaaagacttacttactatctgccatatgataggttttaattaattgcttattgactttctcctccactatactataagctccattaagtgagcaatttgaatcagttttgttcaccactctatccccagagccgagaatggtgcctggcactagtaagatatcaatacatttttgttgaatgtaagtaattaaataaaaattaaatgaaagtataaaaaagaaggattgaatgaatactcccaaagatttaccttggactgtgcattggtgtgcatataaagcaagtcatgctgggacattgtcagtactaaatatctcacttgtgtttgattgaagtgatacagagaagaagagaaaatatygataatactattgacataacaattaaagggaatgggaatagtagtaattataaaagttatgaagttggtttacttctttcacctgcattagaaatcataaagaaatagaatggcttagatta

SEQ ID NO: 401854 - DNA, 619 bp, Homo sapiens
tttataatgagaacaagaataaccatcagagagttgacattgagattgacacactgcggaggaagagaatataagctgtatactatctgtataataagggaactctccctgagacagtgtgtatggaaccttgtagcttgcaaatgatagtggcttagaggaaataaggagaacatttcagaattaccttgacaaagttttgaaaaagggatctggggactgtgaaaggtagatgtgtatatattagaatagagtattttataatttgagtgttgcccagaaacgccacaggaatattttaagtaaaacattaaggtatgttaataacatgaaagaacctggcatcatcaagaagttcagcagtagatatcttatttggcagggttgtgcataggaccacttgccatggaacattgaatactgaagatagaaatctggaggagaaaaggcagttgcaaacatttaaaccttaggaaaaaagtgatacrattacaaaagttagtaagaccaaagttaaaccaggagactttgacatggaggaatctatactgatggctaatagactaagatctttgagaaaaaaaatacattggcaggaaatgttatttttcaatttaca

SEQ ID NO: 401855 - DNA, 536 bp, Homo sapiens
agaatttcaatctagcaagtaaatacaactcactgaaccaggaactcaatggggagaggaaaatggaaagttttgtgagtgacaataggtgaaggcctttgagaaataagatggagagatcagagcatcacactgcctaagaccaatagatattaagctgatcttccctcctgcccaggcgagyttgtttcaaggacaaagtgtatgtcagcattgtggtaatgtgaattgtttggcctctagttgttctgcaattgtggacagaggacctgatgactggttttgttgagattgagtctattcttcttgtaactgattgggttccgagactcctatacatttcttaaagactccaagcaagaacttctttcaaggtcacggctatgactttgtactcatatatgtgattgtaggtaagtccctttcttattaaagggttaatattatcatctctaaaatgagatcaagaagagttaccttgaaaggccgttatgcggatcagttggtataaagtgtgtgaaaatacctcaccctat

SEQ ID NO: 401856 - DNA, 536 bp, Homo sapiens
agaatttcaatctagcaagtaaatacaactcactgaaccaggaactcaatggggagaggaaaatggaaagttttgtgagtgacaataggtgaaggcctttgagaaataagatggagagatcagagcatcacactgcctaagaccaatagatattaagctgatcttccctcctgcccaggcgagtttgtttcaaggacaaagtgtatgtcagcattgtggtaatgtgaattgtttggcctctagttgttctgcaattgtggacagaggacctgatgactggttttgttgagattgagtctattmttcttgtaactgattgggttccgagactcctatacatttcttaaagactccaagcaagaacttctttcaaggtcacggctatgactttgtactcatatatgtgattgtaggtaagtccctttcttattaaagggttaatattatcatctctaaaatgagatcaagaagagttaccttgaaaggccgttatgcggatcagttggtataaagtgtgtgaaaatacctcaccctat

SEQ ID NO: 401857 - DNA, 639 bp, Homo sapiens
tgatgtatttagttttcattctcttttacagatgaaataaaccaagcctgagagaaggcaaataaattggctaaagttatagtaccagttagaaaacaaagcagatatccaatacccagtctatccatagtcaacatttagggaaattgctgtattctcctttgtcagatgttgaaaaaggtatttcctttgatatgaaacacccagggagacatggaaataaagtaagcggatatgtatgaaagttattttttaaaaaaatctaaattgcttggcacggaaaccataggtagtgtatcttgaccacatccaaagcagcttatcattcaaaggagatatccaataagtacttgtgtatgaatttgcctttgactgtgaattgaacagaagktcaacgagaagcaaacaagtgggttaaagtagtttggggtgggcttttttaaaacttaatttttttattttatatgtttaagatgtataataagatgttttgatatacttgatatacatatactaagtaattactgtagtcgagtaaattaacatgtctacatctcatataataatcttccttttttctttctttttttggtgataagaatactgaaaaactactctgttgttaaattaccagtacac

SEQ ID NO: 401858 - DNA, 434 bp, Homo sapiens
tctttgtgattgtaggactgaggttcctgtttttttgcagggtactgggctcacttcctgctcctagaggccacctgaatttcttttccttttcatttcactctccatctttactccagccatagcactttgagtccttcttgtgtttcaaatatttctcacatcctcttctgtgctcttctgtcttttaacaggctgtgtaattagatcaggctcacctygataatctccaaactctaaggtcaactgactaaagccctaaattacaactgcaaagttcctctacaacagtccctagattagtgcttgattgaatagccggggactggggatcctggagggagaggggcaattcttggaattctgcctaccacatagttgcactctctatgtcctagaatttcttaaaacatagtatgttgtgatcatgctaa

SEQ ID NO: 401859 - DNA, 434 bp, Homo sapiens
tctttgtgattgtaggactgaggttcctgtttttttgcagggtactgggctcacttcctgctcctagaggccacctgaatttcttttccttttcatttcactctccatctttactccagccatagcactttgagtccttcttgtgtttcaaatatttctcacatcctcttctgtgctcttctgtcttttaacaggctgtgtaattagatcaggctcaccttgataatctccaaactctaaggtcaactgactaaagccctaaattacaactgcaaagttcctctacaacagtccctagattagtgcttgattgaatagccggggaytggggatcctggagggagaggggcaattcttggaattctgcctaccacatagttgcactctctatgtcctagaatttcttaaaacatagtatgttgtgatcatgctaa

SEQ ID NO: 401860 - DNA, 623 bp, Homo sapiens
ccctttgtttaaggctgtcttttcaagggtgtttataatgtaaacaatcctagaagatacaaattgtgcctttctctagaacaaagaacaggtttatttactatccagtttaataaatttagtgttttcctccttggcaaattttgtgcaggttggcttgcaactcaacacaaaatatttacatttccaaaacagggggtttctctcctgtaacaacgccttgcatgtgtatatgtagtcatcccctgcccctcttcatgttgccttatgggaactggggcttggggaacttgagtaaaagtgatgatattctggctactgtactgctattgccgcgagtaataaactgtcctttgactctgactsaagagtctcatgttttctgccagcatccataaaagcatgacaggctaacttgttagcttgcaagtagaataaagtctcagacctaccatggttcttgatagaatgaaatatctacaaaataagttccctgtgttagcaaaataaatcaattatgtgtatgctcattttcaaggagaattctgtaaacatgattttcacacctatgcagaagtggcttagtgtaatgggactagtgttaggattatggtgaggacaca

SEQ ID NO: 401861 - DNA, 590 bp, Homo sapiens
aaggacccgtgggactataaaaagcgatctaacatttgtgtttttggagtattggaatgaaatgagaaagagtgtgggactaaaaaatatccaaaaagacatggctgaaaactttataaatttggtaaaagaaagaaatctatagattcaagaagctaaacaaacaaaaaaaggataaattcaaatawagccatgtcaagacacattatattaaaatttatgaaaaccaaagacagaaaaatcttgaaaacaataatagaaacacttaatctattaacaaaaagtaattcaaatgacagtagatttctcaccaacaaccacagaggcagggaggcagtgacacaatatttttcaagttctgagagaaaagaactgccagtccagaatcctatattcagagaaaatatctttcagaaataaaaggaaaatcagatagagagaaactaagaaaatttgtcaccagtacacctactctaaaagaattgctaacaaaatttctctaaacacaaaagaaaaggtaaaataagacatactggaacatcagggaggaaaaataaacacagaagacaaaaatataggtcaatacaatg

SEQ ID NO: 401862 - DNA, 532 bp, Homo sapiens
gaagaactcaacagcactatcaaccaacagaatctaattgacatttataggacactgtacccagcaacagcagaaaacacattcttctcaagtacccatggaacacataacaagataaaccatattatgggtcataaaacaaactgtaatatatttaaaakaattgatatcatatagagtgtattctttgaccacaatgaaattgaatttgaaattaataccattaagataaaagaatcttcaaacacatggaaactaaaaggcacacatttaattgctccatagttctaaaatgaaatatcaaataacgtttaaaaacacattaaagtgtaaatgaaaatgaaagtttgacatcaaaatttgcatgacacagtaaaagcagtgctgtgagagaaatttatagcactaaacatatatatcaggtgagagaaaaagtgaagtaacctgattaaatataggcaatagacatttctttattaatcaggttggatatcataatctgatttttaaaatgacctgaaaagtgctgcaa

SEQ ID NO: 401863 - DNA, 532 bp, Homo sapiens
gaagaactcaacagcactatcaaccaacagaatctaattgacatttataggacactgtacccagcaacagcagaaaacacattcttctcaagtacccatggaacacataacaagataaaccatattatgggtcataaaacaaactgtaatatatttaaaagaattgatatcatatagagtgtattctttgaccacaatgaaattgaatttgaaatyaataccattaagataaaagaatcttcaaacacatggaaactaaaaggcacacatttaattgctccatagttctaaaatgaaatatcaaataacgtttaaaaacacattaaagtgtaaatgaaaatgaaagtttgacatcaaaatttgcatgacacagtaaaagcagtgctgtgagagaaatttatagcactaaacatatatatcaggtgagagaaaaagtgaagtaacctgattaaatataggcaatagacatttctttattaatcaggttggatatcataatctgatttttaaaatgacctgaaaagtgctgcaa

SEQ ID NO: 401864 - DNA, 490 bp, Homo sapiens
ataaagacatgaggtgatgaatgagctaactaccctgatatagtttggacatttgtcctctccaaatcttatgctgaaatgtcattcccaatgttgtaagtgagacttggtggaaggtagtgtattatgagggtggatccctcatgaatgacttggcaccttccgcttggtgatgaatgagttcttartcacatgaaatagttcacacaagatctggttgtttaaaagtctaggacctcctgtctctctctctctctcttgctccctttcacaccatgtgatactccagcttccccttccccttctgccactattgaaagctttccgaggctcccaccagaagccaagcagatgttgttcacagcctatagaaccatgagtcaaataaacttcttttctttaaattacccagcttcaggtatttctttataccaatgcaaaaatggcctagtacataccctgatttgatcagcatacaacacatatacaa

SEQ ID NO: 401865 - DNA, 481 bp, Homo sapiens
ctaatttcataataatataaakctatggtgtaaagcatcagcaagcactctgtgatttattaccaataattgcttattatttacattttaattctttttaaatgctaatatagatgaaaacatagaaggcgccatgcccccattagttataaagaacctttcctaactctgaatacaaaattacttgacatcaaatactgtcagtattaatttaaaaagtactatatagcacacaatagcattgttatattttattttattttattttcaaaatcatgaatcagcaacatcattggacttgttgagttttcagagcacattttttattcttattgcgtaaatgatcctttttttttttttttttttttttttttgcctttcatggttgccttcttaaggcacatcaaaatccacgtagtaagccgcctgcttctagtgttgatgaagtgtttgcaggtacaacgggaaaaatgcctaatgt

SEQ ID NO: 401866 - DNA, 560 bp, Homo sapiens
tacacacttgctctattggagagactcggggatgtgtaacttgacaaagctgaagcttgactgaagaacagctatgggatgaatgaattaattaattaatatgagcagaggatatttgaggccagaataggtgtcatcagcatgtggctgaattwaaaacctcatgaaaattaagtatccatgcctgctgactatatgctgaacatttagtggctcctgcatacttacatatagtggatatttagcttgtaaatatctcccagtacttctactcctttctgtttaatacacatgccctatttccacattacctatctcatactttaacatatcacatgcattctgcccatatctaacaaaagttttgctactacttatctaccttgaatattctgaagtttttgcttgtgtttggcaaactgaaaatgtattgattaatgcacaaatacattatagatacaaaaaaaatcccaaagcaggctaatgatagtttggcccccaaatcacctataacattcctactctctggtgcagcacatgaatcaggccttccaatggga

SEQ ID NO: 401867 - DNA, 560 bp, Homo sapiens
tacacacttgctctattggagagactcggggatgtgtaacttgacaaagctgaagcttgactgaagaacagctatgggatgaatgaattaattaattaatatgagcagaggatatttgaggccagaataggtgtcatcagcatgtggctgaatttaaaacctcatgaaaattaagtatccatgcctgctgactatatgctgaacatttagtggctcctgcatacttacatatagtggatatttagcttgtaaatatctcccagtacttctactcctttctgtttaatacacatgccctatttccacattacctatctcatactttaacatatcacatgcattctgcccatatctaacaaaagttttgctactacttatctaccttgaatattctgaagtttttgcttgtgtttggcaaactgaaaatgtattgattaatgcacaaatacattatagatacaaaaaaaatcccaaagcaggctaatgatagtttggcccccaaatcacctataacattcctactcyctggtgcagcacatgaatcaggccttccaatggga

SEQ ID NO: 401868 - DNA, 585 bp, Homo sapiens
tttttgttacactattcagaccatgactattctttcagcggtctccatgttcattgacacattctggttttcaatgagcaacttcaaatgcatcaaacaggtttgtatctatctgaattccaaaaatgatacatttaaaatcatttccataggcttctctggccgaatagacatcaaaattttctgccggctgccactgagaatggaatgccttttaatactataggaacacakgtcttggcaataaaaaccctgatcacacaaaagacacataaatattctgtaataaacttttgctgtggcttgaaagatatgggggaaaaataaatacgattttgaaaaactagacaggaacattttgaataagtaatatttaaaatgagaaaaggtaattttgagaggtagatactggagacaggggattgattacttaaagaaaaaaataaataaatgaaagcatgatggttttgaggttgtttccaaagaaaaattgataaatttttatacatctgaaaattgtggagggagggacatttgaatatgatttctacacagatggtgttacggcagccattgacctaacca

SEQ ID NO: 401869 - DNA, 458 bp, Homo sapiens
aaattataggtatgtatgtgcctaataacaaagcactaaaatacataaagtaaaaactgacagaaatgaagagagaaatagaaaacaacgatagctgaagcaacattctactttcaatgatggatagaccaggcaaaatatcaataagaacatagaaatgaacaacaacacatatatcaattatatataactgatatttatagaatgttccacactgaaaagtgcagaaagtatattattctcaagtacacatgrgatattttctggtataggtcatacactgcctccagaaataagcctcaatacatttaagataacagaaatattacctagtgtgttctctaacaattgaactgaatgtgaaatcaataacagaaagaaatttggaacgcttacaatatttggaaataaaataatgcaactattttatttataaaataaaataactaaagaggaag

SEQ ID NO: 401870 - DNA, 458 bp, Homo sapiens
aaattataggtatgtatgtgcctaataacaaagcactaaaatacataaagtaaaaactgacagaaatgaagagagaaatagaaaacaacgatagctgaagcaacattctactttcaatgatggatagaccaggcaaaatatcaataagaacatagaaatgaacaacaacacatatatcaattatatataactgatatttatagaatgttccacactgaaaagtgcagaaagtatattattctcaagtacacatgggatattttctrgtataggtcatacactgcctccagaaataagcctcaatacatttaagataacagaaatattacctagtgtgttctctaacaattgaactgaatgtgaaatcaataacagaaagaaatttggaacgcttacaatatttggaaataaaataatgcaactattttatttataaaataaaataactaaagaggaag

SEQ ID NO: 401871 - DNA, 458 bp, Homo sapiens
aaattataggtatgtatgtgcctaataacaaagcactaaaatacataaagtaaaaactgacagaaatgaagagagaaatagaaaacaacgatagctgaagcaacattctactttcaatgatggatagaccaggcaaaatatcaataagaacatagaaatgaacaacaacacatatatcaattatatataactgatatttatagaatgttccacactgaaaagtgcagaaagtatattattctcaagtacacatgggatattttctggtataggtcatacactrcctccagaaataagcctcaatacatttaagataacagaaatattacctagtgtgttctctaacaattgaactgaatgtgaaatcaataacagaaagaaatttggaacgcttacaatatttggaaataaaataatgcaactattttatttataaaataaaataactaaagaggaag

SEQ ID NO: 401872 - DNA, 554 bp, Homo sapiens
ttagagttcaacaggagtccaaagactcctggtctttctttgtgtgagccrgttgatttgcatcctttccaggctacataaacacagaagcccacagggcaatccagctgtgtgtattacctgagccgtggggagggatgctgtgtgatcaccattacctgtgagaaacttgccttactatcttcttcctactgtttttgctgtacttacccagcagttgccaattagatgggcctcacaagagtaaaaatcgtcaggtcaactgtggttacaacaagaatccttgcatggagatgccataattttagacgcacctatcatggtggaggaaaggtgacctttgggatgattgtgtctcactgctttacagttgggaaagcaggtcaaaagacaataaattacttgtccaagatcccatggtaagattgttccagaagcacatacataagctgtctgtactacacctatcctgaaattgtgctctctctgcaaggccattttctctagcaatttgcaagaactgtaggaatgttcttgctcaaatatgaagcatg

SEQ ID NO: 401873 - DNA, 604 bp, Homo sapiens
tggtccgtctttgaatatatagaaaaacagttcttattaatattttactaaatgtaatcaactgatgctatgtatttccagtttcaaatgagttgaacataattcctttaaaaagagtggcttgaaaagagtatcagaatgagtcaagtgacctgcatttctcttccgagctctattccaaacaaatcacaagcaacaataggttgtttttgtacaatttcagaatttgtcaatatctgtggtctcagttgaatgtttctggaagccgaatcagacacacagcartcaaaatcaccagggaatgctttttcagcattttatacctgcattctccaatcctctaatccccaagtaactacagaacatcaaggacagtgttggtgtggaatgtgacatgcacatttttaaaccagtctctaaggaattctaatttacacccttaacccctggaaaagataatcttcgagatttttaaaagcctattttaatagacttgtgagcacttcaagctctaagtcagaagataaaataatatatagaataagtgagcctttacaaagctcatttttaccaaattactgttcactttaccaagttaccctac

SEQ ID NO: 401874 - DNA, 498 bp, Homo sapiens
tcatgattctataaccagaaaactaaaaacaccacacatggacatgaaaagtgtttgagagaatacataaatacagttaagttttgggttacacagtaaacatataagaattagtgacattacactaacaacaagccatctgaaaaataaattgagaaaacaatcccatttatagtagcataaaatagagtcaaatacttaaaagtaaaccaaagatataaaatacttccatamtgaaacatacagaacactgatgaaagagattagaggagacacaaacaaatggagaaacaattttgtgttaatggattggaagacttaatattgttaaaatgcccatactactccaaatattctagatattcaattctatctccaccaatcccaaatgctttatctatagcaaaagaaaacacaattttaaaatttatacggaaccacaaaagtcctagaatagccaaaacaatctttgggaaaaccaataaagctggagacatt

SEQ ID NO: 401875 - DNA, 552 bp, Homo sapiens
aactcctgtgaaaaaactatggaaaagtgcaaaggcatgccaggttttctaggattccagttggttataaaccatggctcagtcttgtgcacatttgaaattgatgggcaaattacagtaaagtaaaaattcagagctcaaatgagtttatctgaaaacataaaattaaaagttctctgtctgtctttattttcttttctgcctgctttgtatctttcataaaccactgagtttgtattgctatctcatgactagaatttcaaagcaaaacctatagcatctttgtattgtctgtatgtgcatttagataaatttatatgtatgcacatgtattgtgttatatatcatgttcatatggtactaaactggcttataattaaaagaacactcataaataaagttcaaatatttttcaagttcatgtgacttaaatcattrattaaaaagctggctttaaaattattgataaaataaaaatagaaatgtctccagaattgtcagcatatatttttgtctgggcttactgatgattttatatgttcctcttctaga

SEQ ID NO: 401876 - DNA, 372 bp, Homo sapiens
gctgttaaatctcatggcctttatcttttgacattttatcatattttgcctaaggagatttatagaattgtgctatgattttgtgccatgctttaactgtaatgttgtgctgtggtttggctccaacacttgatttcctcctatgtctcttctatgcatgaactcaggctgttctgcacattaaaagggcccagttatttattggatgagtaactgttgctttcttcctctcctccctckctctcttccttcccgccctactttctgtatacttatctctaaacaaatggtttatggatctctgcccacccctctgcatgggtgacttccacgggcagggaccgtgcagtactttggtcttcctgccatgtt

SEQ ID NO: 401877 - DNA, 630 bp, Homo sapiens
tgcaacagattaacaggcttcccttgtcaagaggttgttcaagtttttacccaacatcatatttgcctcatcaagacttttctctttttatttttttatgagcaataatcaaggtcaagtttcagtatgtttcagcatggcctgtctctgctgcagtaggaaagagattattwactaaattactaaaggaaatggccaatatggatggacagagataggaaagcagcttagaaatatttctggagtttgccaaaccccagtgggcgaagagagtatagggattgataatggaaacttaattgatattcaggcattcttctctaacttggggtttaatatcctggcacgaacagctagagctagctttgatacactgctggaaggcctcattaaagcttaaaaaaagtggtggcatattgaaaataaagtgaagattacagagcagccttggtagaatattgatgagcagataaaaaggcccaaataataggtcacattaaaatctatttatgatgtaacaacagagaattcaccaaatgaccacattctctgagaaggcccaaagagtctccctttagtcacaacaaaaatgtgctagttaggaaggtactagcattgttgagaagctac

SEQ ID NO: 401878 - DNA, 630 bp, Homo sapiens
tgcaacagattaacaggcttcccttgtcaagaggttgttcaagtttttacccaacatcatatttgcctcatcaagacttttctctttttatttttttatgagcaataatcaaggtcaagtttcagtatgtttcagcatggcctgtctctgctgcagtaggaaagagattattaactaaattactaaaggaaatggccaatatggatggacagagataggaaagcagcttagaaatatttctggagtttgccaaaccccagtgggygaagagagtatagggattgataatggaaacttaattgatattcaggcattcttctctaacttggggtttaatatcctggcacgaacagctagagctagctttgatacactgctggaaggcctcattaaagcttaaaaaaagtggtggcatattgaaaataaagtgaagattacagagcagccttggtagaatattgatgagcagataaaaaggcccaaataataggtcacattaaaatctatttatgatgtaacaacagagaattcaccaaatgaccacattctctgagaaggcccaaagagtctccctttagtcacaacaaaaatgtgctagttaggaaggtactagcattgttgagaagctac

SEQ ID NO: 401879 - DNA, 538 bp, Homo sapiens
atccagtatggtacttgcaatttctcacataactgaatggagctccaagagggtaaattctatatcgccaaggcccacgcattgtctgatatatggaaaacatctggcaaatagaactaactagttctgtgatgttttccttatttactaagccctatgtagtgactccaagttttaagagccgagcaaaatcttggccaactttaattctaattattttaaaaccagaaatgaagacaaattttayggcacatgagagttcagtctgaggttatgtgcatttccattgccctttgtcctttaatcaaatgataataaacaataatcagataatacccacaataaacctagccatctgctaccggaaaggggttctgatccagaccccaagagagggttcctggatctcgcgcaagaaagaattcagggcgagtccatagagtaaagtgaaagcaagtttattaagaaagtaaaggaataaaataatggctattccataggcagagcagcagcttgagctgttggcctaagaatattt

SEQ ID NO: 401880 - DNA, 578 bp, Homo sapiens
cgtctctactaaaaatacaaaaattatccagscatggtggtgagcacctgtaatcccagctactcgggaagctgaggcagaagaatcgcttgaacctgggaggcagaggttgcagtaagcagggatcacaccactgcactccagcctgggagcctgggcaacagagcatgactccatctcaaaaaaaaaaaaaaaaaaaaagaaactattctgtacctcaaatgtggtggttcatatatgaacacatgattgtgcattcatcaaaacccatagctatccaccatagagttaatttactcgatgtaaatttaaaaatgaagataaatacaaaacgtctaatgggttggtttggtaaaaggaaatgcctgttttagtttagtttaataatgaatgcctataattatgatgtccagatctgctgatgatcttgcagataaaagcattatggcatctatggcattgatgggtacaagaggaagagtaagaaaatgagaaatgagattgttatgtatggatcactagtatgacgtgggcttttttcttcttgaggcttttaatatgcttgactgatttatctt

SEQ ID NO: 401881 - DNA, 500 bp, Homo sapiens
cataaaatctaccaagattaaacctggatgaaatagaaaaccttgacaaaccaagaatgtgtgacaagtttgaagctgtaataaaaggtctcccctcaaagaaaagctcaggacctgatggcttcactgctgaattctaccaaatatttgaggaagaaccaataccaatgctactcaagtcctgcaatataaagaagaggagggcacacatccaaactctttatatgatgctaagattaccctgatwtcaaaaccagaaaaagacacaacaacaacaacaacaaaagaaacctacaagccaatgtcactgatgaacatagatgcagaaatcctcatttaaatactagcaaaccaaattcaataacacattaaaaagatcattcaccatgatcaattggcattcatccctgggatgcgaggatgattcaacaaacacaaatcaataatgaaacattacattaacagaaccaagaacaaaaatcttatgatcattttaatag

SEQ ID NO: 401882 - DNA, 389 bp, Homo sapiens
atatatattagcaattataaattgacattccatgcatgcatatttttctttcatttatactttacaattccctttaataaagagtatcaatttctaaagttataatattatataagttcattttctagaaaagctatatagcatcacttgtcaaaaattgaatttttataatttgactgaaataaccaatataataaataataagtgaaggacaattttgtctttttaaagctaagaacaggtacaaagtgcaatattgtagttaatacatcaaaaagaaatacaggtcaastgttagagcctaatctattataaaggttttgtaattatagaagcagaagtacatttgaaaaatatatctactgagagtaatttaatgtcaagtgtca

SEQ ID NO: 401883 - DNA, 432 bp, Homo sapiens
ttctcttaaaacatgaaactaggaggggtgacataaaaataaattcctatatttctgggagaactgattattttgtagccatgatagtaagtagccaataaaaccagttagatacctatttaaccaatcaattacagctctgtagtyacagaaatatcaaaattcggtatgattctctcaccaatgacaaatttttctcagtgaacacgcttgggaagccaacaaatcagtaagagcatctcatttttttaaaaaaatccaccaatcaggagtagattcacaccaaagactggactcctagtgccaacgtattagccactgtctcatctaagtaagtacacttctacagctgactttagttaactcatgcttctgaaaatctatgaatctctgaatgtaaatcacctcaaaagtcatttgggttactttact

SEQ ID NO: 401884 - DNA, 612 bp, Homo sapiens
aaggacctcttatccttgacagttccttcaataccctaacaggaccatctgctacaatcttctctgcaaatcagaccaggagcaaaaaaatgcagttcaataacatgtttattccaaccattcattttaatggaagttgggaaatttccttccctgttctcatgtttctgagatatatatgttttttaaacagctataataaagttgtttgacctgtctctagatacatttgaaaaggataaggaaggcatttttaaaatttttgtctcttttaattacacttggcttttattactattgtctagttaaagcaatcaagaatagcagctttgagactcgaaactgatcaacagctaatttgttcttggtagtttctacttccttttttccctggggcagtaaatctcactgctttgatttgaagacagagaattccaaggaatatttaaraagatattagaaaacatttttgggatatcataacctccttatatgtatcacctcatctgcggaattcaattaacaatagtgcccaccttagaaaacaatcaaaatcattaatggagtacctggcggttagtatttataacaataaagaaagtaggaaatgag

SEQ ID NO: 401885 - DNA, 525 bp, Homo sapiens
cctccagttgtaagtattttgagatatatttttctttaaaataaatattagcagatttttaatagacaagtctattctagtcaatatacattgactgctgtctgcattctagtcggtatacatctgcatcctaaaaccatgcactttcttctctaatcaagctgcatcttkccacatgaaaagccttagcagtatgattcccatatcagaagagtctacatttgaaaatcatacaagttttagaaaatttaagatttatgggtggtatacgggataattcatgcaagagaagctcaggagtgaaccaggaagtatagacacttcaagaactggagaactggagatgcctagagacagctttctgccagcacattcgcttttaacctcatgtttcctctttctgagtgccatcttcagtctctcaaactgacatgctttgtactcatagacatatgaatccataactagagagatttaggaaaactccagggaaagattctgatcacatgatgaatgctgctgcag

SEQ ID NO: 401886 - DNA, 525 bp, Homo sapiens
cctccagttgtaagtattttgagatatatttttctttaaaataaatattagcagatttttaatagacaagtctattctagtcaatatacattgactgctgtctgcattctagtcggtatacatctgcatcctaaaaccatgcactttcttctctaatcaagctgcatctttccacatgaaaagccttagcagtatgattcccatatcagaagagtctacatttgaaaatcatacaagttttagaaaatttaagatttatgggtggtatacgggataattcatgcaagagaagctcaggagtgaaccaggaagtayagacacttcaagaactggagaactggagatgcctagagacagctttctgccagcacattcgcttttaacctcatgtttcctctttctgagtgccatcttcagtctctcaaactgacatgctttgtactcatagacatatgaatccataactagagagatttaggaaaactccagggaaagattctgatcacatgatgaatgctgctgcag

SEQ ID NO: 401887 - DNA, 578 bp, Homo sapiens
cagtaaatgtagagagcatgagaagtgtttataaaatgccgcacgactaaattgtataactcctttttaggtcaggtaagtttgatcacatttcaattggaaaagtatgaatttctattatggtctcacatttattttcttcccccctgctaatccaaaagcatgacgtttggaaaaggctaatctattagctttttaaaggatgaattggagagtggaccagaattggagagtggaratatctgtttcaacaaataggtattgaattcttcttattttttagatcaaatgcaagttgtttatgtacatttaatcagaacgagcaatgttaagttgctgttagggccttatgattccaaagaacgtattctgcatcacataggtcagcaaattatggttcacaagcaaaatctggcctgctgcctgtttctggaactaaagtggcttttggtgacacagcaacactcattcatttacatattgtgtatagctgcttctgtgcaacaatgatgagttgagtagttgcaacagtgtatggctcataaccctaaaatattttaattctgatgctttacaga

SEQ ID NO: 401888 - DNA, 581 bp, Homo sapiens
ttctggttgtgtgtccagttgacatgattctagatgaggaaagaataaaaatatctagagaaaggatcagcaagacttgaatcactgaattaaccagatacaaatgacaaatgtaaaaggaattatagggatagaaggaataacaaaaagataggatgccaaataaacaagatgcagtatggtagaggaaggtgtttccttgggctccatattgatttgattttttttttcaaaaagtttgtactaaatatttgcaaagagtcttatgyaggtgcacagtcaaagacagacgtgcaggttctttgagctgaaaatgcatgtagaaattagctagtactaagagttttattctataggaaaagaattaaggttaagagagattatatgacctgtaaaattcacatagatggcaaaatcatggttgattcctggtaagaacatcaactataggaacaaaagtaatttataagcaaactgatcagcattttattatgatagttaatcacacacagagcatgcttcagtagatgagtatttttcacataacataaatttttataatttatcatacatgatgaagc

SEQ ID NO: 401889 - DNA, 581 bp, Homo sapiens
ttctggttgtgtgtccagttgacatgattctagatgaggaaagaataaaaatatctagagaaaggatcagcaagacttgaatcactgaattaaccagatacaaatgacaaatgtaaaaggaattatagggatagaaggaataacaaaaagataggatgccaaataaacaagatgcagtatggtagaggaaggtgtttccttgggctccatattgatttgattttttttttcaaaaagtttgtactaaatatttgcaaagagtcttatgcakgtgcacagtcaaagacagacgtgcaggttctttgagctgaaaatgcatgtagaaattagctagtactaagagttttattctataggaaaagaattaaggttaagagagattatatgacctgtaaaattcacatagatggcaaaatcatggttgattcctggtaagaacatcaactataggaacaaaagtaatttataagcaaactgatcagcattttattatgatagttaatcacacacagagcatgcttcagtagatgagtatttttcacataacataaatttttataatttatcatacatgatgaagc

SEQ ID NO: 401890 - DNA, 551 bp, Homo sapiens
atattttaagcaatccatctttttctcccttagcctgatgatgtattatattaatatatcattaaagagacagctttcagaaatgatgtattagtacaacacatcactggagaaatagtgaagatgcgtgactcattacagttcatgctagtccttgaaaaaggggacttattttattgaatgagtttcttaaatgtaaaggaccacagcagggcatatctgaccaccaataaattatcccaagtagttaaaaattaaaatatacagaaaaatttrgcaaagtgtgataattagaattttgtctttgatagcagtcaaagattatggagggattcttcttaaaactgagggatgaagtcaatgacactgaaacaattttcaaatctctctaatttactacctgtcattctttaataggatttaaatgaggaagacagtgctttatcaattctgtttctttaacatcactaatgtgtcatatttgtaagtctcaggccttatgtagaaatccatgacataaaaataacataacttactactatttgcattac

SEQ ID NO: 401891 - DNA, 548 bp, Homo sapiens
aatcaaatatgtgaacatctccataaaatgtatcaatttcataaaattaagaactaggtatrtaaattagagatcaaaggggtaatttacttactgactcaagagaaaaggtgtttccctaagagcttcgctaacaaacccacatctaacagagaatggttagggtaaattgttacttattgtatagatgttatataattacttgttgacacttgtataaattttatttaaaaacttgtacaaataatttcactaattagtcaaaaataggaaatattttataagaaatgaatctttataatgttgaatatgtgcagataaaatgtctatttggctgaaaaatatattttaattacttgtgaactttttcaaatgtttcctgatagtatttgtacagtgttttcttaaagtgttgtaacttgtagaatgatggcatttgctctaaatctatctctgtgatttactgatcaaaggtaattcagctttctagttagaggaaatcaaattcaacatattgctttcattctgtaggtgatctaaagagaagg

SEQ ID NO: 401892 - DNA, 548 bp, Homo sapiens
aatcaaatatgtgaacatctccataaaatgtatcaatttcataaaattaagaactaggtatataaattagagatcaaaggggtaatttacttactgactcaagagaaaaggtgtttccctaagagcttcgctaacaaacccacatctaacagagaatggttagggtaaattgttacttattgtatagatgttatataattacttgttgacacttgtataaattttatttaaaaacttgtacaaataatttcactaattagtcaaaaataggaaatattttataagaaatgaatctttataatgttgaatatgtgcagataaaatgtctatttggctgaaaaatatattttaattacttgtgaactttttcaaatgtttcctgatagtatttgtacagtgttttcttaaagtgttgtaacttgtagaatgatggcatttgctctaaatmtatctctgtgatttactgatcaaaggtaattcagctttctagttagaggaaatcaaattcaacatattgctttcattctgtaggtgatctaaagagaagg

SEQ ID NO: 401893 - DNA, 501 bp, Homo sapiens
ggaacaaatttgactcagcaaattcccttcattggggccctcccaacctggatgggacagtgcttcttcttggctaaaatcaactcatatttcaagtgtagttttgcctttctttcctgttcctagtgcttcagcaccaaaatccaagtagttttacagagtatttgagcccccagcatggattctgttcaactcttcactgaaccaggcaggagacctactgtctcagtatatttggtgtttttataaagaaatatctgaggctgggtaatgtataaagaaaagaggtttctttggtttatggttctgcaggctgtacaagaagcaggtgccaacatatacttctggtgagggtttcaggcagcttcaactcatggtgcaaggtgaaggggaaccattatgtgcagagatyacatggtgagagaggaagcaggagagaggggagggaggtgccaggctgttttaacagccagccctcatgaaaactaatagagtgagaat

SEQ ID NO: 401894 - DNA, 562 bp, Homo sapiens
caatcaaaaacatattatttactttaagatgtaatggctgtacaggcattgggtagacattcccatcctaaaagcgagaagttggccaaaagaaaggagtaataagccccatgcaagccccaaacccagcaaggcagacattaaatcttaaagtttcaaaataacttgcttcctgggctttactaggtactgctgtagtagaggatttctgaagaggctcttctcttctggmaggctactgctgggcacctatgcattccaatacatcctctgaaatctcagcggaagtcaccaagcttccattctgggcaactctgaagacaataccacatggctgccaagacttactgcttttgttctttggagcagtgcccaaaatacacctggggatatttgagctgaggctgaagcctgagtggtggggatataagtggcagcatcctgaggcagagcagggcagcagcacctcagtcctgcccttgaaaccattctgtctttctgggccagagggtctgttatgggagagaaagcactgaatatttctgaaatgtttttggaagct

SEQ ID NO: 401895 - DNA, 520 bp, Homo sapiens
gtacaggcattgggtagacattcccatcctaaaagcgagaagttggccaaaagaaaggagtaataagccccatgcaagccccaaacccagcaaggcagacattaaatcttaaagtttcaaaataacttgcttcctgggctttactaggtactgctgtagtagaggatttctgaagaggctcttctcttctggaaggctactgctgggcacctatgcattccaatacatcctctgaaatctcagcggaagtcaccaagcttccattctgggcaactctgaagacaataccacatggctgccaagacttactgcttttgttctttggagcagtgcccaaaatacacctggggatatttgagctgaggctgaagcctgagtggtggggatataagtggcagcatcctgaggcagagcagggcagcagcacctcagtcctgcccttgaaaccattctgtctttctgggccagagggtctgttatgggagagaaagmactgaatatttctgaaatgtttttggaa

SEQ ID NO: 401896 - DNA, 269 bp, Homo sapiens
gaagagcgttaggaaaattttcctggacatctgaatgaaggttgcagtggatgtagacgtgtgctcatggatggatccagtaagttggatgaactcatatttgaacactgctatgatctgaatgtttgtatctctcccaaaatctattgaatgcaagtccccactgtacttgaaggtgtggccttttgaagctgctttgcccttttcactatgtgagaatgaagtgaaaagatgcygcctatgaatgaggaaatggacccctttctcct

SEQ ID NO: 401897 - DNA, 552 bp, Homo sapiens
tccttccctcagaaaataaaataatgacatcaacatctcaacaaaaacaacaatagtagtggtagttgtagtaacagcagtagaacgactaatagtttcataatattcataataacagaatgtaatagtaacagtaaataacttatatgtgcagaatttaacaatatttttatatatttaagcatattagttatctgtggaagagaatcttacctcaagttatatgtcaaatactgccaaaatgtaagggctcagatatgtgcataaaactgataacagacccacgagggtttatgccaagtcataagtaaagagttaagagaagttgaaggtctctyttcagactgtggataacatttctttctgatctacagcagccactcatttggttactgagtgaaaaaaaaatgcaatgattatttctgctgaagacatgtattatggaaattaagtatcacaaattattttacattatatattagtggataagcccaagaaataaaaagtcttacaaattatcaagtcagatgctttgagaatcatttatatcca

SEQ ID NO: 401898 - DNA, 552 bp, Homo sapiens
tccttccctcagaaaataaaataatgacatcaacatctcaacaaaaacaacaatagtagtggtagttgtagtaacagcagtagaacgactaatagtttcataatattcataataacagaatgtaatagtaacagtaaataacttatatgtgcagaatttaacaatatttttatatatttaagcatattagttatctgtggaagagaatcttacctcaagttatatgtcaaatactgccaaaatgtaagggctcagatatgtgcataaaactgataacagacccacgagggtttatgccaagtcataagtaaagagttaagagaagttgaaggtctcttttcagactgtggataacatttctttctgatctacagcagccactcatttggttactgagtgaaaaaaaaatgcaatgattatttctgctgaagacatgtattatggaaattaagtatcacaaattattttacattatatattagtggataagcccaagaaataaaaagtctyacaaattatcaagtcagatgctttgagaatcatttatatcca

SEQ ID NO: 401899 - DNA, 581 bp, Homo sapiens
tgctgtcttaagtaattactgaaaatatttttaaagttttgcattgttcttttaattctctctcatttctatggttgtactatattttcatttcctgagcttatagccattatataactctctctcctttcctttaactctgttgtctstcttatgcttaattataattcaactcatattcctgcttaatatggagctatgttatagaagagagatctggaggtatattttaaaacaattttaggagctagatcctcttcagtccttcttttccaagattatcaatattatagaggacaaaacacctcagttttggctcttctcaaattgctcccatgtgttttccagtgagtactttggatatattggtattttctatacaagtttgtcagacagcaactctcatttttatttcctcagataacagtaatatgcaagacttattggtcatttggtttgttactgactcacttgtattttaaggtcctgtgatatcttttgaacctacttttattaatattattattgtatcagatatcaactcttgtattttatttctcagatatgactcaatggatata

SEQ ID NO: 401900 - DNA, 552 bp, Homo sapiens
tcttgtaagtgtcttatacaatccaggtttgtccattcagatctgtttgtgtccttatgatcatgcttctttctaactctacagagcctttgaattttgtgtgaataatatgcctttacttcttacctgagacataggcatacaaatccaattaagcatgcaagttccttcaagttggtgaccagtcacaattttaagaggattagtggaactcactacagtcttctttgctgcagctcttctcaagaccctgatagtcataacacycttccacaacctatttaaggcctcctttactttcacccagaatttctgttgctctgagctgcttgactggtgatatgacatcatccttgagaggtttgtactgttagctaccttgccttgttaacaaatgttggctgcaacttatcattttccattctttctgggcatgactatatcaataaatgcctcggaaggtttctaaggtccagaaatgcttcttcctttcctcactgtgtacagaaaactatagcacactttggtaaacagagttcattgcccaatcat

SEQ ID NO: 401901 - DNA, 552 bp, Homo sapiens
tcttgtaagtgtcttatacaatccaggtttgtccattcagatctgtttgtgtccttatgatcatgcttctttctaactctacagagcctttgaattttgtgtgaataatatgcctttacttcttacctgagacataggcatacaaatccaattaagcatgcaagttccttcaagttggtgaccagtcacaattttaagaggattagtggaactcactacagtcttctttgctgcagctcttctcaagaccctgatagtcataacactcttccacaacctatttaaggcctcctttactttcacccagaatttctgttgctctgagctgcttgactggtgatatgacatcatccttgagaggtttgtaytgttagctaccttgccttgttaacaaatgttggctgcaacttatcattttccattctttctgggcatgactatatcaataaatgcctcggaaggtttctaaggtccagaaatgcttcttcctttcctcactgtgtacagaaaactatagcacactttggtaaacagagttcattgcccaatcat

SEQ ID NO: 401902 - DNA, 618 bp, Homo sapiens
agacatacatatatgtgtttgtatgtatacagacattaagatatgttaatttgtatataataatagttaataataatatacaaattagtgtgatatatatcacacatattcactaatttatgtcattatttattacaattattattatatattgttttttcatccaatatatatataaacccttgaggttatttcatcattattataccactttttggtcataaaatctatcctcttctctgaagtggtgtcatttgtgagacactgcataaacaaatcattcttgarccttagatagtggggaatgtggaggcattgcatgagtgtcttagtctgcgccgccataacaggataccatggattgggtgggtggcttaaaccacaaacatgtatttctcatgttctgcaacatggaaccaagatcaggtttttggtgagggctttcatcttggtttacagatagctgtcttctcactatatcctcaggtggcacagagagagagctctgattctttcatctcctcataagggcaccaatcccaacatgggggccctaccacaatggcctcatctaaatctaattatcttgcaagggcttaacctacaaatatcatcata

SEQ ID NO: 401903 - DNA, 647 bp, Homo sapiens
tgaaatttagtcatctagtgctgcatgacaaattatcctcgatcttaaactctgataacaacaaaaccttattatctcaacaatctttggtcagcaatccaagcatgacttcattgtgtgcctctgsgtcaaggtctgtcatgaggatgtattgcaagcattgactgggactgcagtgtgatttgactgttcaacttcggggaggatccaggtcctaagttggtcctttaccacttgagcctttccccagggctgcctaatgcagctggattcccagagagagagagaaatctaagggagatgagggggtgcatgcccaaacaaaaccagtcttttaattacctgttctctaaagtgacatcacgtttgtatcttccctgtgctgtttatgacacacgagttaataaaccctcgaaacacttacaaaaggggtacataaggcatgaataccacgatgtgaaaactaggaagtggcaatcattgaattccatcttagatgctgcctaccacaccgtttatgtataattacaattgctatgtgatagagcaaatgccaccagtgtatccttctttgagtgtatcttgactatctttgcttttttttttgctattttacgtaatgttaataagtttaccaagttaaaaaa

SEQ ID NO: 401904 - DNA, 647 bp, Homo sapiens
tgaaatttagtcatctagtgctgcatgacaaattatcctcgatcttaaactctgataacaacaaaaccttattatctcaacaatctttggtcagcaatccaagcatgacttcattgtgtgcctctgcstcaaggtctgtcatgaggatgtattgcaagcattgactgggactgcagtgtgatttgactgttcaacttcggggaggatccaggtcctaagttggtcctttaccacttgagcctttccccagggctgcctaatgcagctggattcccagagagagagagaaatctaagggagatgagggggtgcatgcccaaacaaaaccagtcttttaattacctgttctctaaagtgacatcacgtttgtatcttccctgtgctgtttatgacacacgagttaataaaccctcgaaacacttacaaaaggggtacataaggcatgaataccacgatgtgaaaactaggaagtggcaatcattgaattccatcttagatgctgcctaccacaccgtttatgtataattacaattgctatgtgatagagcaaatgccaccagtgtatccttctttgagtgtatcttgactatctttgcttttttttttgctattttacgtaatgttaataagtttaccaagttaaaaaa

SEQ ID NO: 401905 - DNA, 600 bp, Homo sapiens
tcacattgtgtgttagattaattcattaattgttcagttatgaatgtaactgtatagccttttatttaacgtctagtagttgctgtcctctcttctaagcactgggcataaagagttgaacaaaacagacaagtatttctacctttttacaatttatattcttttgatagagtgagagaatgtaaacaaattgaataacawgtgtagtacattagatggtgaaaagcactatcaaagtggagagccaatgagtagggaaagagaataattttaaatatggtggttatgcctctttcacaggttacatttgacaaaagacttgaagttgatgagtaagtcaggtaaatactagaggagagaacatttaagatagacagcctaggaattaacacgtcctgaaggtttgggcaggcttggtttgatttaaaagattggggaggcccatgtgatcaggatcagagacccagtggaagatgacactcagatttgagttggaagctgtttcctgatcatccctgtcatccatttttatagccattcattcttctttgagtgagataagaaatctatgaatgatttttgagcaaaaggaaaacataa

SEQ ID NO: 401906 - DNA, 600 bp, Homo sapiens
tcacattgtgtgttagattaattcattaattgttcagttatgaatgtaactgtatagccttttatttaacgtctagtagttgctgtcctctcttctaagcactgggcataaagagttgaacaaaacagacaagtatttctacctttttacaatttatattcttttgatagagtgagagaatgtaaacaaattgaataacatgtgtagtacattagatggtgaaaagcactatcaaagtggagagccaatgagtagggaaagagaataattttaaatatggtggttatgcctctttcacaggttacatttgacaaaagacttgaagttgatragtaagtcaggtaaatactagaggagagaacatttaagatagacagcctaggaattaacacgtcctgaaggtttgggcaggcttggtttgatttaaaagattggggaggcccatgtgatcaggatcagagacccagtggaagatgacactcagatttgagttggaagctgtttcctgatcatccctgtcatccatttttatagccattcattcttctttgagtgagataagaaatctatgaatgatttttgagcaaaaggaaaacataa

SEQ ID NO: 401907 - DNA, 580 bp, Homo sapiens
tactttgtgttaatcattcatccaaaaggatttcatatattcttgaaaaggccatagacttctagatccattattgttgttctcagcatcactgtaatgtaataaatcattagagtatttgtgtgtgtgtgagtattcacactattgaagcctcaataaaatggtctataaacttgaatcaatgttgaacatgtttaacttggagtgcaytttatcactaaaggaaaattttcgggattaggataaagttagtcgaaaatgtgaaggaaataaattaaaaatttcagctattaccgaatatattgaaataaattattcagtcacccacttgaaaacaaaaaattttgattctcaaagacatcaacatatttcagctatttttattgaattcatttagaacaattacattgaaaagtagaactggctatttcattttcctacagggaataaaaaggtaatattaagataagttaaagatattatgtctccttctttccattactgaaaatatttgctctgtattagacaagaagccttttattatgcttttatgtcttctctaaaaggagcttgtcacaca

SEQ ID NO: 401908 - DNA, 531 bp, Homo sapiens
aacaaaaaattttgattctcaaagacatcaacatatttcagctatttttattgaattcatttagaacaattacattgaaaagtagaactggctatttcattttcctacagggaataaaaaggtaatattaagataagttaaagatattatgtctccttctttccattactgaaaatatttgctctgtattagacaagaagccttttattatgcttttaygtcttctctaaaaggagcttgtcacacaaaaatgtctcatgtttataattatggtcttaacaatggaatatttaaatctttttcatatgtaatacttctaataatccatatacacaacaatttgaagccagaaattgatactgttcttaaaatatattgcaaaatgcacaggccaaaaaattcaacttgactttatgtattagtccatttccacgctgctgataaagacagacctgagactgggaagaaaaagaggtttaatggacttacagtttcacatggctggggaggcctcacaatcatggtggaagg

SEQ ID NO: 401909 - DNA, 521 bp, Homo sapiens
acaagcaagcctcttctgcctatgagcctataaaatcaaaagcaagttagttacttcctagagacaatggaggtacaggcattggataaacacagccattccaaatgggagacattggccaaaacaaaggggttacaggccccatgcaagtccaaaatccaggagggcagtcaaatcttaaagctccaaaatgatctcctttgactccatgtctcacatccaggtcacgctgatgcaagaggagggtacccatggttttaggcagctccaccattgtggttctgcaggatagagcctccctcccagctgctttcatgggttggtgttgagtgtctatggcttctccagcsacacggtgcaagctgtaggtgcaagctgtaggtggatctaccattctgggatctggaggacagtggcccacttctcacagctccactaggcagtgcccagtagggactccgtgtggggtccaaccccacatttcccttccacactgccctgtcagaggttctccatgagaa

SEQ ID NO: 401910 - DNA, 573 bp, Homo sapiens
tgcaacaacataatgcacttgccttggaatttttattttctcctcttagtaactagatgcctttttttctgcaaacagcagaaattgaaagacagaaattgaagacagaatacatctaaaaattatttccactagttgaaaccctgttaatcaagacaatagaggatacatactgggaaatgaactattttttcaatattacttttacaaagtttagatattctagttttatagaaatgttgctatcacaaaattttcccaaagtggtaaaatttctcattatacccagcacatcatatataaacatggtcatgctcttaaagagttgagaaaggcaatctgctggggtgtagcagaatttctgagtggagcaatgtccagactgtcatctcagagcactgccgatggtaatcacaaaggcattrctaattaatttcaaggtccttgtggatgaaattcattcattcattcatttttttttttttactgagctcttccttcgtatatggattctttcaacaaatatttatggagcctctgccatgtgacatgcaattccatagtctagggaat

SEQ ID NO: 401911 - DNA, 573 bp, Homo sapiens
tgcaacaacataatgcacttgccttggaatttttattttctcctcttagtaactagatgcctttttttctgcaaacagcagaaattgaaagacagaaattgaagacagaatacatctaaaaattatttccactagttgaaaccctgttaatcaagacaatagaggatacatactgggaaatgaactattttttcaatattacttttacaaagtttagatattctagttttatagaaatgttgctatcacaaaattttcccaaagtggtaaaatttctcattatacccagcacatcatatataaacatggtcatgctcttaaagagttgagaaaggcaatctgctggggtgtagcagaatttctgagtggagcaatgtccagactgtcatctcagagcactgccgatggtaatcacaaaggcattactaattaatttcaaggtccttgtggatgaaattcattcattcattcatttttttttttttactgarctcttccttcgtatatggattctttcaacaaatatttatggagcctctgccatgtgacatgcaattccatagtctagggaat

SEQ ID NO: 401912 - DNA, 564 bp, Homo sapiens
aaaaaaggaagaagcagaggtgaggacctggtactttgcttttctatggagacatctgctgtttgttaagcttcacaggatgtgaggtaaagaagccaaagggaaagtaaaagaaaaaaaataaagaggaatttttaggagatatatgttgttaaggggactaatattggagttcagaactctgaaaagarggtggtttttaatataaataaataaataaatgaacaaataaataaataaaacttaaaattgaaataccaaattgagtatggatcccataaggaaatatttaaggagtgcaaaataaactggagatagcccaaacgttgtaagattgcaattcagaaaggagtcactggaatgtgatgatctgcccctttgctcctagggagaagatagaattgagagaatgtttacatttgaattttcctcatgcacaatatcttgcattcattaaaacatttcaagattaatgagtaatgccaaacaaaagatcaaggtgtaaaacagaaaatggctaggtgcgctggctcacgcctgtaatcccagcactttgggaggcca

SEQ ID NO: 401913 - DNA, 553 bp, Homo sapiens
attacgtctgcctccaacactggggacaaaattcaacataacatttcaatgggacaaacatctggactatagcacctggtttgaggctatataattataaagacagaagttaagtgtgtgctatgtttagaagtttcctgggctggtttgctacacatatattttactgaattcataaagattattctggtttaaacattacrtgccatcttgcattgaataaaccatgtttcaaatttagagttcatatagattacagctttcccaggatacttctgggattttttttttttttttagaaattgttccagcataatcattaattgtaatggtccctcttttactccctagagtatagtttgagtgctagattacctgatcactaaattgctctaggatttattcactctctcaaatgtcccaagtttcacacatcaccataagcatgaccaactgcttccatggcacaattatgtggctacaattctctggagaagagaatcgtgctacagttatctgtacaagacccctccattaatgaactctcacttgt

SEQ ID NO: 401914 - DNA, 447 bp, Homo sapiens
caccatgttgcataatatgtctctttaacttatttctcttatctaactgaaattttgtcttaaaaatatctttttatattttaaattttacttattttataaataaaattttagtttttaattcaactcttattttaaatacagggatacatgtgcaggcttgttacatgagyatattaaacccaggttgtgagcatagtattcaataggtaatttttcaatccacacccctctccttcacttcctcctctagtagccacagtatcttttgttcccatgtttaagtccatgtgtgctctatgtttagctcccacttataagtgagaatgtgtggtatttggttttctgtcccctcattaattcacttaggattatgggctccagttcagtccatgttgctgtgaaggacacaatttattctttttttggctttatagtattccatgt

SEQ ID NO: 401915 - DNA, 577 bp, Homo sapiens
attataaaaacaaagaataataaaaacatttattaggctaagtataagtaggtatagtgtstaagttattacacataaactgtcagtgactttgcagaaagactgcacttttaggtcataacatacacaaacactagcttaaatagattgttttaggaggacatgtcttcatttatataagagatatcaccatgtattatcaaagacttgagtatatgttcttggattagatttccagaaatgtgaatattctttaaccccaaaaagtcagaatacaaagataattagatataatcgggtattgaattctgatcaaatattaataaaacagcattagttactaatgtttagaactaatgtttattgagaaaacattaacttatttaatcttcacaaaaaaccaacatagtgccatatattacagtttcctaacaagcacacattgtttagtagaatattgatatattaatagagtttgacttccacagttatagaaatagatcatactgtttacaggaaaattaacatatatttgacacagtgacatgtaagacaactcaaatattaaataaaaaga

SEQ ID NO: 401916 - DNA, 566 bp, Homo sapiens
aagaaagtactctcaattttaactttaaacagggaatgcagatctaagtgtgaagacaccactgagtggaatttgtatctgagaaaaacaaacaatagacatcattccttttatgaacttacaaatctatgattattaacattaacacaaaggcaagtggaagaggagctatggtaaaataacagtattcagcccaacagtgtctgacacaggtgcagggttatttttcataagcagcagcaccagcacattccagctcttgctttaattagtggtattagtgtctagttaatgcctatcttatcttccaaataccactcccctggcagcacagccattcatttttgtatgcttctccctrtgaagtagagtaatttctgttacagcaactataaattgtcagaatacaaatcactatataatattgaaaaatgaaaattatactttacagtctaatgagaggtcctaaaatcctctgtaacttttgcaagttttctgatcattccttttcctgttaatacaacttggtgaaaataactgactggcatagactggtgttgatgaaa

SEQ ID NO: 401917 - DNA, 570 bp, Homo sapiens
ggtaaaataacagtattcagcccaacagtgtctgacacaggtgcagggttatttttcataagcagcagcaccagcacattccagctcttgctttaattagtggtattagtgtctagttaatgcctatcttatcttccaaataccactcccctggcagcacagccattcatttttgtatgcttctccctgtgaagtagagtaatttctgttacagcaactataaattgtcagaatacaaatcactatataatattgaaaaatgaaaattatactttacagtctaatgagaggtcctaaaatcctctgtaacttttgcaagttttctgatcattccttttcctgttaatacaacttggtgaaaataactgactggcatagactggtgttgatgaaaacwttttgttctgtctgactagtaaacacttttctgatgagattctacttttatctgttgcttccaaaatgatatgtgtaacttggcttgaatcattttttaaaggaaatttcttgtataaataattattggtattggacacccccgagggtcagtggacatttcagtggtcatct

SEQ ID NO: 401918 - DNA, 526 bp, Homo sapiens
gataacctcactgaacacagtttctagaattaattgcttacatttgcatcctttgtattttgtaagtagttaggatttacacaaacagaatcttgaaatgttcattcaaatatgtgtaattgcttgtctatttccactggcttaaatttcaagaatactattcagtgataggagacttgcttatggattgacttttatcttgacatttcattgtgaactatcttagtattatataaaatagatattttacagaatgtgtttgtaattttatataaaatttttctatcataaacatatttagttacattttataaatttaagatattcacaatatgatcttcatttagcttattattctggttgactgtattagtaggttactttttataaattcatgtattccaattataattaataatatgtcatagaaaatactgtaaaactctgctagcttcaggtttgtaatatatttaaaattatgtgtwaatatttattaatgattggtttgcaaagtttttgtgctcca

SEQ ID NO: 401919 - DNA, 510 bp, Homo sapiens
ttgaacaccaagataggctgaaagtgaggcctcttgtgccaaacaattagctgagttgtgaatgcaagggaaaagttattgaaataaattaaaattgctacttcagtgaacacatgaatgataagaaagcacacagcctgctttggtatctggataaatcaaaccaaccacaacacttacttaagccaaagcctaatccagagcaaggccctaacactctttaattctaaaagcctaggtgagatgaagaagctgcagaagagtttgaagctagcagaggtttattcatgaagtttaaggaaagaagctgtctctaaaacataaaagtgaaaggtaaagcagtaagtgctgatagacaagctgcagtaagttatccagaagatctaaaggaaataattatgaaggtggctacactaaataacakgcttttactgtaaacaaaacagccttctattggaagatgtcattttggactttcatagcaagaggagagaagtccatgcctggctt

SEQ ID NO: 401920 - DNA, 584 bp, Homo sapiens
gataggaagcaagagagataggggagatgccaggctctttgtattgatcagctttcgcaggaactaatggagaaagaactcactgattacyatgaggatggcactaagccattcatgaggggctgtccccataacccaaacaccttcattaggccgcatcgccaagattagggatcaaatttcaacatgaggtttgctgaatgatatggtttagctctgtgtcagcacccaaatctcaccttgaattgtaatccctgtaaacccctcatgtcaagcggaggaccaggtgaatgtaactgaatcatgagggtggtttctccatgctgttcttatgataatgagtgagtctcatgagatccgatggttttataagggtctggcatttcccctgcttgcactcattctctctcccactgccctgtgaagaggtgccttctgtcatgattgtaagtttcctaaggcctccccagccatgtgtaactgtcaggcacttgagtgtagagtaaggatgatggattatagtggaggttgtttttattttaaatgaaattgagggaaattttatagctctgtgtgtgtgtgtg

SEQ ID NO: 401921 - DNA, 584 bp, Homo sapiens
gataggaagcaagagagataggggagatgccaggctctttgtattgatcagctttcgcaggaactaatggagaaagaactcactgattactatgaggatggcactaagccattcatgaggggctgtccccataacccaaacaccttcattaggccgcatcgccaagattagggatcaaatttcaacatgaggtttgctgaatgatatggtttagctctgtgtcagcacccaaatctcaccttgaattgtaatccctgtaawcccctcatgtcaagcggaggaccaggtgaatgtaactgaatcatgagggtggtttctccatgctgttcttatgataatgagtgagtctcatgagatccgatggttttataagggtctggcatttcccctgcttgcactcattctctctcccactgccctgtgaagaggtgccttctgtcatgattgtaagtttcctaaggcctccccagccatgtgtaactgtcaggcacttgagtgtagagtaaggatgatggattatagtggaggttgtttttattttaaatgaaattgagggaaattttatagctctgtgtgtgtgtgtg

SEQ ID NO: 401922 - DNA, 584 bp, Homo sapiens
gataggaagcaagagagataggggagatgccaggctctttgtattgatcagctttcgcaggaactaatggagaaagaactcactgattactatgaggatggcactaagccattcatgaggggctgtccccataacccaaacaccttcattaggccgcatcgccaagattagggatcaaatttcaacatgaggtttgctgaatgatatggtttagctctgtgtcagcacccaaatctcaccttgaattgtaatccctgtaaacccctcatgtcaagcggaggaccaggtgaatgtaactgaatcatgagggtggtttctccatgctgttcttatgataatgagtgagtctcatgagatccgatggttttataagggtctggcatttcccctgcttgcactcattctctctcccactgccctgtgaagaggtgccttctgtcatgattgtaagyttcctaaggcctccccagccatgtgtaactgtcaggcacttgagtgtagagtaaggatgatggattatagtggaggttgtttttattttaaatgaaattgagggaaattttatagctctgtgtgtgtgtgtg

SEQ ID NO: 401923 - DNA, 585 bp, Homo sapiens
ataaaaatattgattgttttgctaacatataaaaaattaaaatccatgtacatctcctagatgtttatataaatcagcttatctgaactttttcatctgtttctgaaactgttatataaaatgagatgagtatacyattatactttctagctgtcaatataaatcttaagacaaaaaagtaacagtaaaaatataaattaaatataataaaatataaattttatattgggtgccaacatttatcatgaattatatctacatgatataatgaattaaatctacatttatcatgaattacgtctacatgaattatatctatcatgaattatatctacattaaatgttatactttcagagagaagactactgaatattgtatcagttattcttaaattttaaacgtttcataatttaattgttggattttctttatgacccaaataatctcccttaccttaataacttcgcttatatatttattcttgattcttatttgaaccccactatacttatgattagcccatgactctgctctctaatacttatgactggctcctagaatgctctagggagcaatgttcttac

SEQ ID NO: 401924 - DNA, 550 bp, Homo sapiens
ctatttaagcaacatttatgtaagcattttacttttaatttaaaatctataggaacatatttaatatgtattaattatttatttagaagttgaagaaaagtattatctctatttacaaaataaaaagtagagaaaacatacatgactactacccaggttgtattaatctttgctgataagacaaacaaatgagaaacaaaaaaagaaagtttgcccaacttgagtatctaatttcattgactatgtggtttttttaaaattataactggaaaaagttgaattaaaataaggagtcctgggtttttttttccttaaggtaccatagaagtattgatggttaatgtaaatatagttaagcgcacacacacacacacacacacacacacacacacacayatacatatacgcacattatacttccattgatttcaagtatatagttagagaaattagctgcatggcttattgaaatttgttttttattctttgcatcaattatcttcataacattagatgtgaattagtttgattagtttgatgaaatgttcag

SEQ ID NO: 401925 - DNA, 617 bp, Homo sapiens
atgcagggcctaaaactaaaattacttctttatctctattctgtttctaatttctgtttttaactacataatttatcgaagtttgttagagaaattccaaatgaatagagcaacagtggaaattgcatgggtgaagtgagacagacatcccccatgtattactccaaaacagtaaatatccctgactgtgcccccaaaataaaggaacttcataaccctagactcccaacaaacttgtgtgttttaacttagagttttcacaaaaagtaattaattataaggaaataattcataggcttctatctgaacttcaaaaataataatttaacataaacataatattttaaaatatatatctcatgattatataataacatattcttccattaacaycctcctttagagttgttatgagcttgtttgtttcctctgtaacaaaagttccatccctgctcctgggataaccagagaaacacatgttatggagaaccaaagctacctatttgaaagacaaatgcatagcacaacaccaggcgaggacacaggctgcattgcaggttctaacagctcaccccaccaagctcggtggggcagttcacaagccgccatgcactgct

SEQ ID NO: 401926 - DNA, 556 bp, Homo sapiens
aaataattcataggcttctatctgaacttcaaaaataataatttaacataaacataatattttaaaatatatatctcatgattatataataacatattcttccattaacaccctcctttagagttgttatgagcttgtttgtttcctctgtaacaaaagttccatccctgctcctgggataaccagagaaacacatgttatggagaaccaaagctacctatttgaaagacaaatgcatagcacaacaccaggcgaggacacaggctgcattgcaggttctaacagctcaccccaccaagctcggtggggcagttcacaagccgccatgcactgctggtgccttgcattggcatacatttgcctctctcccgtggcttatgttcacatcctgctccttaactgtgctcatgatggatattgctcaatacttccgggactgagtgtactcctgattttagtactttttgaaatmattcacttagtgtcaataaaatataactttactttgtaatatttatattatagaaaaaagtacaggtgaaactacatgatttag

SEQ ID NO: 401927 - DNA, 577 bp, Homo sapiens
caaactattatttgttctaattaacctgaggtttcctgtcatatggtgtgctttctcagaggaaaaaaatttgtacattgtcttctggaagagaaatgtgctcaaargtatcgtattttcccaagcaaacattaagaaaagtcttaacaataattacagggaatggtaaacacaactacatggatagtgctgtcaaagtcacaaattcattcattaataagtactctggaagttacattgctcctgtaagaaagcaaaacaagattttattaaaaattagaaaactttggttaaagaaaagagaagcatcatttttttctcatcaaaatataactaaattctttgagtttgacaattgtaaagtattctgtaaagttttgtaggttttatgttatttagatataatatctgaatataattttaattgtttatacattatttaaaccttaaaaacaatgtcaatgtaaacattattcatggatcacagaactaaaagagctcaatcttgttggaaaactcacttattttcagttgttggcttatctttatatcactttttacaaataaataagtttta

SEQ ID NO: 401928 - DNA, 577 bp, Homo sapiens
caaactattatttgttctaattaacctgaggtttcctgtcatatggtgtgctttctcagaggaaaaaaatttgtacattgtcttctggaagagaaatgtgctcaaaartatcgtattttcccaagcaaacattaagaaaagtcttaacaataattacagggaatggtaaacacaactacatggatagtgctgtcaaagtcacaaattcattcattaataagtactctggaagttacattgctcctgtaagaaagcaaaacaagattttattaaaaattagaaaactttggttaaagaaaagagaagcatcatttttttctcatcaaaatataactaaattctttgagtttgacaattgtaaagtattctgtaaagttttgtaggttttatgttatttagatataatatctgaatataattttaattgtttatacattatttaaaccttaaaaacaatgtcaatgtaaacattattcatggatcacagaactaaaagagctcaatcttgttggaaaactcacttattttcagttgttggcttatctttatatcactttttacaaataaataagtttta

SEQ ID NO: 401929 - DNA, 533 bp, Homo sapiens
tttgataattaagagtaatttataggctttccacctttcctgtttccagtggcaagcctccagatgccttctggactagcacactgcagtgtgaagtggcaacgaaacaagccctcaataagagtgctcaaattcctaagttatttctatcaaatacatgtgttgttaagtaattgttatattttggttttatttagcatattctttttagtagggatattaaactgtatttgatgatagtttgtgtttatgcattttcttcatgggaacataaagaatctaactttgacagaactggagaataaatatctgtaataataatttaatgatatctgcacttgtatttctatttcctgagggtttaggcagatagatctttgagaaacatatagtgcagatcttttcagcatttgtatctcttatagatgatcrttttattattgctgtggttgtcaaactaattattttcccacatccacaactcaaaatatggcatgttttaagatgatgataattagtatagttttacattt

SEQ ID NO: 401930 - DNA, 538 bp, Homo sapiens
tatgtattcaccttcaccatctagatcctaactagttgccagcaaaaactttattaagtacatcagcaacacaaactgatttgctactgggcaatcttagagtctgctgctcacctgctatgtctcaaccagctcattaagtcctctaatgtttgtagccttgattctggatcttctttcttgatctccttttcttctgrcttcacagaacagaaaatgactcaaattactgtatggacaataaataattattttttaatatcagtttggacaataattgaaatcagaaactaacaggaattaggttattgaaacagatttggtgttcatttttattcactggaaatctgcttcattttgcaggtttcctcaggttgtacttgttaacccatttcatactttttgctaaatatcccagagatggtaagtgcttagtcctgaaccttttataaggtattaggatctgggcaattttccttagagagacagctgagaatagttacatactgtgaagtacacattcataaaattaataaga

SEQ ID NO: 401931 - DNA, 571 bp, Homo sapiens
agctttttgctatgtttaatttttactttttaaagctattttgttaaaaattacgacacacacacacattagcttaggcctacccaaggtaaggctcatcaatatcactgccttccatctccaaatcttgtcccactagaagtctgcaggggtaataayaggcatgctgctatcatctcctgtaacaatgagttcttctaaaatgccacctaaacaacctgcctgaggctattttacagttaatttttttataagtaggaagagtacactctaaaagaaagatacaatgtctagtatagtaaacacataaagcagtaacacagtttattattcagtattatgtactgtgtataattgtatcttatacagttagtagtgcagcacgttaatttacaccagcatcaccacagacccctgaataatgcattgcgctatgatgttacaatcgctacaaagtcattaagccatagaaatgtttttgctccttttcaatcttatgagaccgacaccctataggtggtccattgttgaccaaaatgtccttaggaagcacatgactgtatatagtgta

SEQ ID NO: 401932 - DNA, 566 bp, Homo sapiens
agggtggtttgcgcttcttatcacataatttacccatatctttagacctgttctgtcctgatctcaaacaaaccaccttaactgaaaagtttattgtttcaatttctgcttaactttgtcactattgactctaatattgccactttttgatgggctgacataattgcatagtaacttgatgttccatgttcaaatgctcagtattaagcctgtaccaagttgaggagttatttttaaaacgagtgattaattctctgatgcagaaatcacagccttgtttcagaatcttaaaatattgtacttttactctattactgaagcttgttcagggaaaaacatccacatttttgacagatactaycagacacgagatctgcagggttacatggcccaagtgttaatgcagcttgtaacatactctcaccatgctgcagaacctactgttgctctggacccctcttgaaactgtcagcttttaaatctatcaaactgtttacagtagtattccaaaatacattataccatctctacaatccaaagaggctcactaagtgcagtggtaggag

SEQ ID NO: 401933 - DNA, 589 bp, Homo sapiens
tatatgaaatagatcaactttttgaaaaacaggattttccaaatgaattcaggaagatatagaaacataaatagtcctatattcagaaaatttactgattcaataatttatactattgtcttaaaaagttaattgtcagttgctataataccttaaggaagaactaatgtcaattttatagaaactgttttagagaatagagaaaagggaacattttcaagaaattgtatgmggctagcatattactaatactaaaaccttacaaaaacagtagaaagtaaacttatctcttttatgaatattatcttcatgaatataaatgaatatgaattcattctgtcatgaatataaaatcaaatattttaagcaaaatgaacaattggaagtcagtatatgtaagaagataatatataatggaaaggtttacgttatggctaggttgaatttagcaatttttagcagaactactatacatattagcaatatagaacacaaaatcatctaatgatttttattaggtgtgaaataatgtaaaaaatttgataaaattcaacatctgtgtatggaaattctcttagcacactaaaat

SEQ ID NO: 401934 - DNA, 589 bp, Homo sapiens
tatatgaaatagatcaactttttgaaaaacaggattttccaaatgaattcaggaagatatagaaacataaatagtcctatattcagaaaatttactgattcaataatttatactattgtcttaaaaagttaattgtcagttgctataataccttaaggaagaactaatgtcaattttatagaaactgttttagagaatagagaaaagggaacattttcaagaaattgtatgcggctagcatattaytaatactaaaaccttacaaaaacagtagaaagtaaacttatctcttttatgaatattatcttcatgaatataaatgaatatgaattcattctgtcatgaatataaaatcaaatattttaagcaaaatgaacaattggaagtcagtatatgtaagaagataatatataatggaaaggtttacgttatggctaggttgaatttagcaatttttagcagaactactatacatattagcaatatagaacacaaaatcatctaatgatttttattaggtgtgaaataatgtaaaaaatttgataaaattcaacatctgtgtatggaaattctcttagcacactaaaat

SEQ ID NO: 401935 - DNA, 589 bp, Homo sapiens
tatatgaaatagatcaactttttgaaaaacaggattttccaaatgaattcaggaagatatagaaacataaatagtcctatattcagaaaatttactgattcaataatttatactattgtcttaaaaagttaattgtcagttgctataataccttaaggaagaactaatgtcaattttatagaaactgttttagagaatagagaaaagggaacattttcaagaaattgtatgcggctagcatattactaatactaaaaccttacaaaaacagtagaaagtaaacttatctcttttatgaatattatcttcatgaatataaatgaatatgaattcattctgtcatgaatataaaatcaaatattttaagcaaaatgaacaattggaagtcagtatatgtaagaagataatatataatggaaaggtttacgttatggctaggttgaatttagcaatttttagcagaactactatacatattagcaatatagaacacaaaatcwtctaatgatttttattaggtgtgaaataatgtaaaaaatttgataaaattcaacatctgtgtatggaaattctcttagcacactaaaat

SEQ ID NO: 401936 - DNA, 611 bp, Homo sapiens
tggaagacatgttggcagttttctacaaaatgaaatgctcttatgaaatgatccaacatttacaccctttaatagccactcaaatgggttgaaaagttacacccatacaaaaacttttgtcagcgcactcctgaaagcactttttatcatgacattaatccatttatgagggtggatctctcatggcctaatcacctcttaaacatcccacctgctaatatactgttacaatggcaattaaatgtgaacatgagttctggagaaaacaaacattcaaactagaggagtcaccatctgcgaaaattgatcctgtgctcatttcatgacctcagcatttcactcataggtaaattctcaacagaactaaataaatatctagaatatgtattagaatgttcacataagctttattcataatgacattaaaatatacttccactttacccactgmaagcatttatgttttcataacattatgctacagtagtacttagtaattttgaaaatgttttgaaaaattagcaagactcctttcagtctaaatcaacttcagtctttatatttaatttaccaggcatattaaacagtgaacacttacatataaataaccc

SEQ ID NO: 401937 - DNA, 562 bp, Homo sapiens
ttgtctagttagagagaaatacttatttcctgtaactactttgtttaaagcttttatatatgatgtcatttagttggaggacaaaacaatagtgttacaacagaattcttaatgttttagtgccatttacaatgaratgtcacaatctgaaacttactttgatttataagcagttctcaagctttatttttcaacaagttccttccacttatctcttgtgtttctctgtaatgttgatgtgcaatgtatgtgtatcaagcaaagagtataaaaataaaatcttttgggtaaaaatttctcacaatatactttccaatatattatgttcacaagtagtttgttataagattctttcttttttttcctgttgcataaagcagaaaatattgtataaaaagcagtgaactatcatttacatttttctccaaattacaatatttagagagccttaggaactttaatggtactgcttacctgatgtgctcatagtaatctgtttattatagtgttgcttaaactactgctgatttacatgttaacaggcatattatttaatcaatga

SEQ ID NO: 401938 - DNA, 580 bp, Homo sapiens
cctctgcttggcccattgtatgttgggtgtgttaggagcagataactattagaacagacatttcttcaaagaagatatacaaatggctaataagcacatgacaagatgctcagtgtcattagtcactgggggaatgcaaattaaaaccacaatgagataccactgcataccaactaaaatgcacaaaatcaaagccactgacaataccaagagttgatgaggacgtgaagagaygagaatactcatgtgaagagactggaatattggtaatggggatacaaaatggaacagccagtttggaaaagagtttgatgattttttaagttaaaaataaatttaccacacaacccactcttagatatccatccaaaagaaatgaaaaacatatgtccgaataaaaatttgcaatgaacttccaaaacagcaacattcataatagccaaatactgaaaacaatccaaatatccattaactggtgaatggataaacaaaatgtggtatactcatcaatgaaataccactcaggaacacgaaggaatgaactactgatacaagaaacaatatgaacttcaaaaacaat

SEQ ID NO: 401939 - DNA, 639 bp, Homo sapiens
tacttattttaatttttcaaaaagaactttattagaaagaaaaagaaaactaaatgaaaaaaaatgagatgcttaacaaaactagaaaaaggtgagcacagatccataaacactttaagacttcgtatttccaactacttactttaaaatggcacacttgattttaaaacttaaaaataaaaacaaatttaaaaatcgtacatttaaatcattgtttattaatatatctctgacttagaacactcaatatttaaatttcattaaaattaaatgttaaaatataagctgttatccatttttgtttattaaaaaggacaacccaaactgttcaatattacctgacaaacagaaacttgtgaaattaaaagatgtcattacaaagcctcactcattaaaagaaagaaaaagagaaatgtgactaaattgtcagaaagctgacttactgggggagaaaaaagcctaaatggccyaaggaccattattttcaaagctgctccatcccagttacaaatagttgccacttggcctcatcttagtaaatacctaagagtgacatttaattagcacattaatgttgaaaattaatgagtagctaagaggttttatatgtgtgaaatgttgtattttattgtgtactct

SEQ ID NO: 401940 - DNA, 606 bp, Homo sapiens
atttaatttgtgttcacttgtctccagctcacccagtacccaggctggtaatccctctgggcttgaaccttttgctcgtgctggatttggttcatcaaaatagatggactgattttttaaaattagaaaaattattctttcaaaatgtactataataaaccactaaaatttccatcaagtttcaagtttgaaaacagcctttcaaatactcaaattcaattacattcaaacatttaaaaaattaaatgtacattgaattatgagatattaaaatacattaagtgataacatatttacattttagttgcactctactgtctaagaaatacaataaacagaagtacataacagataaatctgatagtaatgtttatattacwaaaggaatattagttaaatatgaaaagttaaatacaaagtttttaattatgtgccatcctatctctttctgtaatcactaactactttacatacacaaaaaaagaaatcagtgggatgagaaacacaaacagtgcaacccaggaattaaaattaggaatcccttgataaggtgggaacagcagagtgaaaaacctgggatttagttctggccacactgctaactag

SEQ ID NO: 401941 - DNA, 445 bp, Homo sapiens
ttctcttgcctgactgctctagctaggacttccaatactatgctgaataacagcggtgaaagtggtcaaccttgttgtattccagatcttaaaggaaaggctttcagtttttccccatccagtacaatactagctatgggtctgtcatatatgaattttattatgttgaggactgttactttgatacccagttttttttagggtttttatcataaagggatgttgaattttatcaaatgcttttccagcattarttgaaatgatcatacagtttttgtccaccattgtgttatgatttatcacatggattgatttgcatctgttgaaccatccttgcatccctgggataaatcctagttggtcatgatgaatgatctttttaatatattgttgaattctgcttgcaagtattttgctgaggatttttgcattaatgttcatcagg

SEQ ID NO: 401942 - DNA, 535 bp, Homo sapiens
tgtaaacacagcaatcagcaccctgtgtctagctcagggtttgtgaatgcaccgatcgacactctgtatctagctgctctggtgccagatttgtctcctggagagaggcatgggcacctgtggtctccccgcctcctggcctccccttgggtgcccttatgcagaaagggtcccggccccaggcttgcttggctttggggactgttttaaaagggacatgaagaaagaagaagccagagaatggtccttggccactctggatggagtgtccgctgagcagtaggaagagaactgtccctggctygtctccttccctgagtgactgttgattcacagttctctctccaaggggacatgggcctgtcctaatgctgccttaggggcttggctccagctgaccctggggtctgcaggtcaccacctgcccctgtgcctggctttgaatttcctaacatccagagtgccctgggagtacagtgtccagcccgttgtgtgtagtaaaccgggagctgagcagaagaggaacgacagagtc

SEQ ID NO: 401943 - DNA, 527 bp, Homo sapiens
tgataagaaattcaccccaacccttcctttcccaggacagtcagactggctttggaaatgattaaaagttgatctgggcctgggcagaagggcatggctgttrgccaaagctgaactgcattcatcttcaaagacttaagagaagcagccccttctaccctcagccaccaggaccattctgtcacattctgtgggaggctcctgctaatggaatgaggccactcacagagcttggtcaattagctcttgctgaaaactgctaacgtggaactttggtaagtatggcatgcagggagtggtgtatcatcccatcatcccagcactttgggagttcaaggcgggaggattgcttaagcccaggagcttgagaccagcattggcaacaaagtgagatcccatctctacaaaaaaaaaaaaaaaaaaaaaaaagtcagcctggtgtggtggaatgtgcctgttgtcccagctacttaggaggctgaggcaggagggatcccttgagcccaggaggttgaggctgcagtgac

SEQ ID NO: 401944 - DNA, 527 bp, Homo sapiens
tgataagaaattcaccccaacccttcctttcccaggacagtcagactggctttggaaatgattaaaagttgatctgggcctgggcagaagggcatggctgttagccaaagctgaactgcattcatcttcaaagacttaagagaagcagccccttctaccctcagccaccaggaccattctgtcacattctgtgggaggctcctgctaatggaatgaggccactcacagagcttggtcaattagctyttgctgaaaactgctaacgtggaactttggtaagtatggcatgcagggagtggtgtatcatcccatcatcccagcactttgggagttcaaggcgggaggattgcttaagcccaggagcttgagaccagcattggcaacaaagtgagatcccatctctacaaaaaaaaaaaaaaaaaaaaaaaagtcagcctggtgtggtggaatgtgcctgttgtcccagctacttaggaggctgaggcaggagggatcccttgagcccaggaggttgaggctgcagtgac

SEQ ID NO: 401945 - DNA, 527 bp, Homo sapiens
tgataagaaattcaccccaacccttcctttcccaggacagtcagactggctttggaaatgattaaaagttgatctgggcctgggcagaagggcatggctgttagccaaagctgaactgcattcatcttcaaagacttaagagaagcagccccttctaccctcagccaccaggaccattctgtcacattctgtgggaggctcctgctaatggaatgaggccactcacagagcttggtcaattagctcttgctgaaaactgctaacgtggaactttggtaagtatkgcatgcagggagtggtgtatcatcccatcatcccagcactttgggagttcaaggcgggaggattgcttaagcccaggagcttgagaccagcattggcaacaaagtgagatcccatctctacaaaaaaaaaaaaaaaaaaaaaaaagtcagcctggtgtggtggaatgtgcctgttgtcccagctacttaggaggctgaggcaggagggatcccttgagcccaggaggttgaggctgcagtgac

SEQ ID NO: 401946 - DNA, 528 bp, Homo sapiens
gaagttacaaaggttacactcctgttcaaccaatcagagactagggtgaagttacaaagttmtacttctattgaaacgaagatgtggccagcaatcagtctgattggttgtggacagcagccattcagaggctggagtgaagttacaaagtggcaaacaaagactggaccttcaatcaatctgattggttgtggacagccaatttcccatctgcctagcagaaaaggtgagggggttgcaaagggagtagcctgtggtccttttgttacttaggcatggaaaggtagggttctgccttcaatttagttctaggaagtcggtgtgaaacaggcttaggttccctgtgtccagaccctattctcctgcctcaatattggtatcacccaatgatcacccagtgaccataaccaaggaggatttagcaatgggattttgttacttgtaacagggaaccagcagggacagttcccaaggcagtgtgtctctgagctgggcactgggtcaaattttagaagcataggctaacga

SEQ ID NO: 401947 - DNA, 528 bp, Homo sapiens
gaagttacaaaggttacactcctgttcaaccaatcagagactagggtgaagttacaaagttatacttctattgaaacgaagatgtggccagcaatcagtctgattggttgtggacagcagccattcagaggctggagtgaagttacaaagtggcaaacaaagactggaccttcaatcaatctgattggttgtggacagccaatttcccatctgcctagcagaaaaggtgagggggttgcaaagggagtagcctgtggtccttttgttacttaggcatggaaaggtagggttctgccttcaatttagttctaggaagtcggtgtgaaacagscttaggttccctgtgtccagaccctattctcctgcctcaatattggtatcacccaatgatcacccagtgaccataaccaaggaggatttagcaatgggattttgttacttgtaacagggaaccagcagggacagttcccaaggcagtgtgtctctgagctgggcactgggtcaaattttagaagcataggctaacga

SEQ ID NO: 401948 - DNA, 608 bp, Homo sapiens
attgttcagttaaaagaatttttaaatttccttcttgatttcatccttgacccaaagatcattcaagagcagattacttaattatcatgtatagttttgaggattctttttggagttaatttccagttctatttagctgtggtctgaaaggatacttgatacaatttcaattttcttatatttattgagacttgttttgttgcctatcatatggtttatcttggagaatgttccatgtacttacraaaaggatgtatattctgcagttgttgggtggaatgttctgtaaatatctgttgtgttcatttgttttagagtacagattaagtccattttttttgttgttgactttctgtcttgatgacctctctagtgctgtcagtggaatattgaagtcccttactattattatgttgccatctatttcatttattgggtctagtagtaattattttataaatttgggaactctagtgttaggtgcatatatatttaagattgtgatattttcctgctggacgaatccttttatcattatataatgtccctctttgtctttttaaacccttgttgccttaaagtttgttttgccttatataagaatagct

SEQ ID NO: 401949 - DNA, 608 bp, Homo sapiens
attgttcagttaaaagaatttttaaatttccttcttgatttcatccttgacccaaagatcattcaagagcagattacttaattatcatgtatagttttgaggattctttttggagttaatttccagttctatttagctgtggtctgaaaggatacttgatacaatttcaattttcttatatttattgagacttgttttgttgcctatcatatggtttatcttggagaatgttccatgtacttacgaaaaggatgtatattctgcagttgttgggtggaatgttctgtaaatatctgttgtgttcatttgttttagagtacagattaagtccattttttttgttgttgactttctgtcttgatgacctctctagtgctgtcagtggaatattgaagtcccttactattattatgttgccatctatttcatttattgggtctagtagtaattattttataaatttgggaactctagtgttaggtgcatatatatttaagattgtgatattttcctgctggacgaatscttttatcattatataatgtccctctttgtctttttaaacccttgttgccttaaagtttgttttgccttatataagaatagct

SEQ ID NO: 401950 - DNA, 586 bp, Homo sapiens
ttgtgagagggacccagtggacgataattgaatcatggggcaggttccctcatactgttctcatggtagtgaataagtcccatgagatctgatggttttataagaggagacccctttcatttggatctcattttcttctcttgccagccaccatgtgagatgtgcmttttgccttccatcataattatgaggttctccccagccatgtggaactgtgagtccactaaacctctttcttttgtaaattgcccagtcctgggtatgtctttatcagcagcatgaaaatggactaatacactctctatgttgcactgcctggagttggggaaaggatgatgtgcgtacttaaaactatctgctctactctctttaatacatattttcttcttcttatgctacaatcaagtattgtgatctttctctcactctttctctctcgataatctgtcctctagacttaattatacagaattttgtcatatcaagattctacagcacaatgtcctcaagctttttagaagctcttttgtggagctagaaagatccactacacaccttcagaggtcttagaaaagggtgtcacagc

SEQ ID NO: 401951 - DNA, 528 bp, Homo sapiens
ctgccaccataattttgaacttacaaccccccaaactgtgagataataaatttgttctctgaagccaaccagtttgttattttgtaaaagctgacccaacaaaccaatacagacgattagacaataaactagagagataaattactatacatacaggaggcatgtaaccttgccctgagtttcatacctggataagataaagtcctgtccctttcagtattatttaatgaggctatatttgctttgctcccttgggactccttctggggagccatgaattctttgcaatatttgatagatagtggaggcacggttcttaagcaaaaattactattgctcttaccctaattgatatggtttggcwgtgtcctcacccaaatctcatcttgaattgtaatccccgtaatccccacatgtcacagaagggactaggtgggaggtaattgaatcatgggggctgttttccccatgctgttcttgtgatagtgaattttcatgagacctgatggctttgtaagcatctggcat

SEQ ID NO: 401952 - DNA, 532 bp, Homo sapiens
attcatggtaaaattttagattctttatattacttgaagatactttaatgctgatgtgaataaattttaagtcacatttttctgttccaagaagcaggttaacagacaaaattttaaaaaataataattcacaaatcagtagaacttgatttgagtcctgactgtcagttatttgttttgtgatttggaacaggctgcttaattggtttaccctaagattgagcatctataaaaatatgctaattgcagtagccttatgaggaattaaaaagtttatatttgataccatttcattatttagaaataattctcaaaagccatagaatctgctgatcaaagtaacttttttagaaatcaaaagtaaagcacaaatattaaatttgcctgggaagwttatatatgaatgatacatatataacataaaatattatttataacaacattttaatcaatttgaatgtaattttgatatttttaataaaaactaagtaaggtttacaaagtgaagtaaatcattgcttattggaaaaca

SEQ ID NO: 401953 - DNA, 684 bp, Homo sapiens
ctagtttcttaaatgatagtaatggttgtacaacaaaaacactgaatagtacacattaaaagctatagtattatgatatgtgtattaaaactcaataaagtagttaaaactgagtatttgctaaattctaagttttaaatagtcaatgaacaatttgttcatgttcacatgttatcaaagctttattttctctggatcagtgagaaattatggggctaaactctgaaagtaaaagaaaatctagaaagttgagtccattacttgaaactaagaagttaaactgagcttttaaaacctcattggtatgaaaagaaatgtacatgtcatggtttatacagcaaatggaaaaaataattattattggacttggtttgagacctctagtttacaccataattataaaactggaatttaaataaacyatctctagtgactaaaattctgtttaaattatgttattccttcatgagattaaataattttacaatgttgatgatgttagtctatttgtctgctagacatgaattgaagtctctgaagtaagatttcatcatccagaaaattaaattttatgtaatttgttatatcaagtgtgtggcacttaaccaaacctaactagaaatacaaagagagaaaacaattgaccaaaagtcaagagcattcaatagaaataactgaaatagg

SEQ ID NO: 401954 - DNA, 561 bp, Homo sapiens
aactattcttcttcattcaaatagcagacaagataggtaactttatcacagaactgagatgttacaaaatagaaaaaataatagtaaaataaaaataatacaaaaaaatacaatgaaatatattggggaaacctgcccccagtatttcaacttaggttctttctattttccataagtgttgaccagctgagaaataaagagagatagtataaagagaggaattttacagctgggccaccaggggtgacatcacatatcggtaattgtgatgcctgcctgagccttaaaccagcaagtttttattaaggttttcaaaaggggagggggtgtaagaacagggagtagatacaaaggtcacatgcttcaaagggcaaaaagcagagccactaatagggtctaacaaagatcacatgcttctaagggaacaggacaaagggcaaaagcagaactactgataagggtccaacaaagatcacaagtctaagggcaaaagcagaaccactgataagggtctatgttcagcggtgcaygtattgtcttgataaacatcttaaacaacag

SEQ ID NO: 401955 - DNA, 581 bp, Homo sapiens
ttgctaacacaataaaaagatagacaagcatgcatttttttctctaagcacagtatgacttgtataacataatgttttgtatgtcatattttctttttattggcaaaattttgatacctcattttgtaatgttcaaagtactattatgtgcagtaaaaaactggaaacaattcaaattttcatcaatggtataaataatatctgccctatagtatattagttaatagtaattgagtggccttgttttctgcctttgtcttgttgtgctgacaccrcccagctctcatcaactcatgataccaaacaccatgtcttcatggtgttgaagttgatgtggaaattgctgaacaatttgtgactatcaagaacatgttagaagatttgggaatggttgatggagatgttgactcatctcctttaccaagtgttaattcagcaatcttaaaaaaaaaataagtcatttagtggtgtagccaccacaaagatggttctcctccttctgaagataacaggaacaaagaaaagtgaacaggtgatatccctgtttgggaacaggaatttctgaaaatttgaccaaggaa

SEQ ID NO: 401956 - DNA, 617 bp, Homo sapiens
gtttgcattttgttttaattattttaagtaaacagactattaaataatgttggcaatttagaaaatctgtctcctgacaaaacaacaactaatatacatatatatatatatatatatatatatatacattttttttttgagacagtctcgctgtgttgcccaggctggagtgcagtggtgcaatcttggctcactgcaacctctgcctcccgggttcaagcaattctcctgcctcagcctcccaagtagctgggactacaggcacatgccatcatgcctggctaatttttgtatttttagtagagacagggttttaccacgttggacaggctggtcttgaactcctgaccttgtgatccatccacctcagcctctcaaagtgatgtgattacaggcgtgagccaccatgcccggccacgaatatattttattgatttgaatatatatatatgtatattcgtatagtatataatatgtgtgtgtgtgtgtgtgtgtrtatatacatatgtatcatggaaattgtgcaatgaacatagagaaaatgtttttgatttttatccaatgaaactatggtgtagaaatttaatagatattcagaaaaaggttagttcatggtt

SEQ ID NO: 401957 - DNA, 570 bp, Homo sapiens
gttttttcccattactttcttctcccaaacagtcatatgctttcataaacattccaggggttataagtataaagagagcagttcaagtataactaaacagtggcagtcaaaataaagcatcattatagagttttagatcaaataatatcaataatattgcctgataattaagcatatgctgggaacatgagcattgtgttaattcttgaattttagtgaaggacagaaatagcagtccttgtgaagtgaaagtttaagtgaaacaaagtttccatttagtctgaaacaaatgactatctagagatttaacaaagtaagaaagtaactttgtgtgtctttctgataagataattaaagtaattaaaactactagctagtagcaaatattttattgattctttttataaggaatatttaagatgattcatgtgcacccaaaaaagtctcagatttaagggatgttatagaacagactgaaggctacacctctgattggttccataatagytaggaggaaatcacatagctttttaaattaagtggtgcttcttattcactcttctttaagag

SEQ ID NO: 401958 - DNA, 558 bp, Homo sapiens
ctgtagtttttttcactgtttttatgtccttgtctggttttagtttcatggtgatactggcttcataggacaatttagggaggattccatctttctttctcgtttggaatagttkcagtaagattggtaccaattcttctttgaatgtctgagggaattcaaccatgaatccacctggtcctggactttattttgttggcaaattttttttgttactgttttaattttgctacttcttattggtctgttcagagtttctatttcttcctgatttattctaggagggttatatgtttccaggaatgtgtccctctccttagattttctagtttgtgtgcataaaggtgttcatagtagccttgaatgatctcttgcatttctgtggtattggttgaaacatcttgcattttgtttctaattgaacttatttggatcttctatcttttctttgttaatcatgctaatgttctatcaattttgtttatcttttcaaaaaataagctttttgtttcatttatccatggttacaattttatttatttatgctctgatttttgt

SEQ ID NO: 401959 - DNA, 541 bp, Homo sapiens
tctttgttaatcatgctaatgttctatcaattttgtttatcttttcaaaaaataagctttttgtttcatttatccatggttacaattttatttatttatgctctgatttttgttatttcatttcttctgctgggtttggatttggtttgttttgtttcactaattccttggggtatgaccttagattgcctatcagtgctcttttagactttttagtgtatttaatgctataaactttcctcttagcaccccttttactgtatcttagaggtgtgataggttgtgtcatcattattgttcagttaaaagaatttttaaatttccttcttgatttcatccttgacccaaagatcattcaagagcagattacttaattatcatgtatagttttgargattctttttggagttaatttccagttctatttagctgtggtctgaaaggatacttgatacaatttcaattttcttatatttattgagacttgttttgttgcctatcatatggtttatcttggagaatgttccatgtacttacgaaa

SEQ ID NO: 401960 - DNA, 590 bp, Homo sapiens
tgggaagatataataatcctaaatatataagcacccaacactggaacacccagaatgataatgcaaatactacttaatatggtttggctctatatccacacccaaatctcatccagagttgtaatccccacatgtcaagtaagggacttgctcagaggtgactggatcatgggggtggtctccctcatgctgttcttgtgatagtgagttctcatgagagctgatggctttaaagtgtagcactttcaccttctctctctctcctgataccttgtaagatgtgccctgctttctcttcaccttccaccatgatcataagtttcctgaggcctccccaaccatgcagaactgtgagtcaattaaatttatttmtttataaattatacagtctcaggtgttattttatagcattgtgaaaacagataacacagagaattggtaccagcagagtaggctgctgctataaagaaaatctgaaaatgtagaattgactttggaactgggtaatgggcagaggttggaacagtttgaggggctcagaagaagacagaaagatgtgggaaggtttggaacttcctagaaacttgttg

SEQ ID NO: 401961 - DNA, 545 bp, Homo sapiens
atgaggagccaatgttaatcatcactgacaatggggaaaatgtctccagggcatttcagagatcttcaaggcagcccctttcatcacaggcccagaggcctaggaggaaaaaatagtttttgtgggtcaggctcagagccccactgctctgtgcagccttgggatttggtgctctgtgtcccagctgaaagctccagccatggctataagaggccaacacacagttcaggccgttgcttcagagagtgcaagcaccaagtcttggtggtttacacatggtgttggagggaaaaatggttttgtggggcaggctcagggccccactgctctgtgcagctttgagacttggtgctctgcatcccagccaaaagttccagcatgggtaaaagaggccaatgtacagctcaggccattgcttcatagagtgcaagctccaagccttygtggcttacatgtggttttgggcctgcaggtgcacagaagacaagagttgaagtttgagaaccttcacctagatttcagtggatgtatggaaattcctggat

SEQ ID NO: 401962 - DNA, 606 bp, Homo sapiens
atgctcttgtactttcctccttaaaaaaaaggcgaaacaaaaattttgaccaatgtcccccttcagctaccacattatttctctactctgcttaacaagtatgtttcttcaccttatcaattaagctacctccactttatcacttgaaatatcctgatgtctagatgctgggattccttagactatggtcctgggccctcttatgttctaatcattcactctctccccggaagatcatattaattcctgggggttttaaatacatctctatgccaacaacttttaaacttatatttcgggcctgtatttccctctgagttctrtctaccttctttacatttccatttgtctaggattctgatatttcaagtcacaatatctgactttgaactagaactcttccaagtattcttttcctccaggatttttcatcttccttaggatagtgtatttccttttcttcatgtctagaaaaaaactgaataatattcaaacccaagttaacttaaaagatatagtttagaagaaataaaaatggtcttaaaaagaacatctcaagaatctattatctaaaataaaattagacaatatttaaaaatcaatgaa

SEQ ID NO: 401963 - DNA, 590 bp, Homo sapiens
gtcttctgtcctaagaaaaaagaggataaactgtagtcccagccactccggaggctgaggcaggagaatggcatgaacccgggaggcggagcttgtaatgagtcgagatggcgccactgcactccagcctgggcgacagagcaagactccatctaaaaaaaaaaaaaaaaaaaaaaaaaaaagaggataaaatttaggactcactatacggacggaaattgaagggaaaaatctctggaaggtgaagccataaaagctgcatataaacaccacatacatccttgtctgatgtctaatctacatatgcatcatgattttaaggcgaatgccatagctggaagactgaaacaactgagcagaggttccaacttttttcaattaggtgagagttgagtttgagttcagccaagttaactgcataacatgtaagaaatcgatacacttcaaaaggaaagcttttcttaraattttattcttgaaaagctgaaagtaacagcacacagcaaataatatacaatcttcagagtatatatgtgacaacatagatcaatatttgatgttgacccttgatcagacaggacatccattac

SEQ ID NO: 401964 - DNA, 497 bp, Homo sapiens
cctacacctaggctacatggcatagcctgttgttgttaagctacagacctgtgaagcatattactgcactaaatactgtaggcaattttaacaaatagtaagcatttgtgtatctaagcatttttaagcatacgaaaagtacacaaaatacagtatacaagattttaaaaatggtatacctgtataaggcacttaccataaatggagcctgcaggaatctggctgagtcagtgaatgaatggtgattgaatgtgaaggcctagaatattactgaacactactgtagacttcataaacactgtatatttaggctacactaaatttatttaaaaataaagtaattgaactataacattatgatgactacaccatcactaggagayagaaaattgtcagctcctttaccttcttacaggatcaccacattatatgcaatctatcattgaccaaaacatctttatgcactgcctgagtgtacttgaatatatttctggacc

SEQ ID NO: 401965 - DNA, 613 bp, Homo sapiens
aaaattataaatataaaaaaattgacaaattgagcattcagatagtaaagatatcatggattctttaaaagccttcatatatatgtttattatcgtgacatttgcttcgtttggaaataccacttaaattacttattactgagggtaaattatatatatttttgtcaaaggtcatttctgcatttacattttttaaaactatagaaacaaatctatatagcataattcatttttttaaagaaaatgaatttagaattcttcatcctccaagtaaaacatgttggaataccttgccatatttgaaaacataattttaactcttgcaatatatttatacacaattataaagtytcatggagcatgaagcaggcaaaaataaatcagcaaaatcttatctatacagtgcatttctcttatttatgaaaatgcacacgaatatacctctttgctgatgttgtgttcatctattttttctcttgaaaaacataaatgaaaatttaccttttaagtaataaatcatcaaatgtatgtacgtgataacatttgccagcaatattaccttcggaaaacaatacaattcattttataatcttcatataagtaaaagtaaatc

SEQ ID NO: 401966 - DNA, 613 bp, Homo sapiens
aaaattataaatataaaaaaattgacaaattgagcattcagatagtaaagatatcatggattctttaaaagccttcatatatatgtttattatcgtgacatttgcttcgtttggaaataccacttaaattacttattactgagggtaaattatatatatttttgtcaaaggtcatttctgcatttacattttttaaaactatagaaacaaatctatatagcataattcatttttttaaagaaaatgaatttagaattcttcatcctccaagtaaaacatgttggaataccttgccatatttgaaaacataattttaactcttgcaatatatttatacacaattataaagtctcatggagcatgaagcaggcaaaaataaatcagcaaaatcttatctatacagtgcatttytcttatttatgaaaatgcacacgaatatacctctttgctgatgttgtgttcatctattttttctcttgaaaaacataaatgaaaatttaccttttaagtaataaatcatcaaatgtatgtacgtgataacatttgccagcaatattaccttcggaaaacaatacaattcattttataatcttcatataagtaaaagtaaatc

SEQ ID NO: 401967 - DNA, 613 bp, Homo sapiens
aaaattataaatataaaaaaattgacaaattgagcattcagatagtaaagatatcatggattctttaaaagccttcatatatatgtttattatcgtgacatttgcttcgtttggaaataccacttaaattacttattactgagggtaaattatatatatttttgtcaaaggtcatttctgcatttacattttttaaaactatagaaacaaatctatatagcataattcatttttttaaagaaaatgaatttagaattcttcatcctccaagtaaaacatgttggaataccttgccatatttgaaaacataattttaactcttgcaatatatttatacacaattataaagtctcatggagcatgaagcaggcaaaaataaatcagcaaaatcttatctatacagtgcatttctcttatttatgaaaatgcacacgaatatacctctttgctgatrttgtgttcatctattttttctcttgaaaaacataaatgaaaatttaccttttaagtaataaatcatcaaatgtatgtacgtgataacatttgccagcaatattaccttcggaaaacaatacaattcattttataatcttcatataagtaaaagtaaatc

SEQ ID NO: 401968 - DNA, 563 bp, Homo sapiens
tggaaagaagtctctactaaaaatacaaaaaattagccgggcgcggtggcgggcgcctgtagtcccagctactcgggaggctgaggcaggagaatggcatgaacccgggaagcggagcttgcagtgagccgagattgcgccactgcagtccgcagtccggcctgggcgacagagcgagactccgtctcaaaaaaaaaaaaaaaaaaaaaaaaactggaaagaaactgtgtagcaaccagaatagtgaaagaatttaaaactttgaggctggagagaaacccaaactgtgtcttcaaatatttaasgaatttcctcgtagaatagatattagattatttctatgtggatctggaagaaaaagcaaaaaccaataggtggaaactataaagacatattaaaaatgaaatagactgcttcatagagattaatttcccattagtgaattcaggcaagacaaacttaggacagagaactagataagaggccataaatccccacatgtcaatttatattaggtttttgttgactagacccactttttttttttgcttatatatgtcaag

SEQ ID NO: 401969 - DNA, 582 bp, Homo sapiens
tagaaagaagctcgccattttccctgtcccaacgccaaacactgggttaatattttgtctgagaaaacaagcaagccgtagaacagagaacttcaaaggccactttaaagaaaggaacttcatttgtagcaaaatgcaaaaaagtcaggcactggagcactctcaggaggacatctaggtaaaaagcagttgacaagtgatgaacacattcatgtgaaatatgagctattcttagagaagctagcttgttggaaagaaatggagaaatagacagcttgcaagagcccttctggtgtcagaacaaatctcaaacactgacctttggaactacaccttcaagkagcctaaatttgattggattagtgtgtggaacaatttatgccctgggatattactgtaaacagtagagcaatgagccagcaattgctggagcttaacatctggtgtggtaaggagagataaagagagtcctgtcgaacctagaataactctgggcttaccaaagggtgtgtcctctgaaaagcaacatcacgcagacttcactaaaacaacccagccagttactaaacaagtaaagaagaa

SEQ ID NO: 401970 - DNA, 576 bp, Homo sapiens
tacaatacattatctaaattgttcagtttccagaaaaaaaaaatgagacattcaaagaaacatgaaaggatgagccaaatactagaaaaaaagcaagcaacaaaaactgctggtgagaaacaacagaaattgtgtataatagataaatacttcaaagtagcccttataaatatgttcaaagagctaaagaaaaccattattaaagaagtaaactatgatgaaagtgttacattagatagrgaagatcaacaaaaacatggaaattatttgaaaaatagaaaaatctgaaactgaaaagtgtaataactaaaatgaagcatttaccagaggggctcattagtagattttaacaggcagaggaaagaattagaaaatttgaagacattaatgaggaaaaataaacaaagattcagaggaaatgtatacacaggttgagtatcccttatccaaaatgcttgggaacagaagtgtttcagatttcagatttttttaaattgtagaatatttgcatatacataatgagatatcttggagaggagacccaagtgtaaacacaaaatttatttatgtttcata

SEQ ID NO: 401971 - DNA, 540 bp, Homo sapiens
aaggagtgaatgaataatgtggtaaaaaagaatgccaaagtccctttgcctaaaacatttcttcatagaactggaactcctgaataatattgctcatttcatagctcttaattccccatcacagcagccaggtcctgggagaatggaatataaaaagataggaagccacatagattccagtttgaggacaggtccttgggaaactggaaaaaaacaaacaaacaatgaagaccccaagatattagagtggcagaaaaaggrgagagaaaaaagctgtaaccacctgcctgtgttaattattttgcccccagttgtggccagtgagagatttttttcccttcacttctcagggaaacactttggaaggcttgttctgcagcaaggacctcagaaacaaaggagacatatgcaagttcacgaaaatgaaatcagtgtttaattactaaatattctacctctaaaattaaaggaaaaaagcttaaataattcagtttgatttggtctcattagtctgatttcctagtatttagccttaattat

SEQ ID NO: 401972 - DNA, 540 bp, Homo sapiens
aaggagtgaatgaataatgtggtaaaaaagaatgccaaagtccctttgcctaaaacatttcttcatagaactggaactcctgaataatattgctcatttcatagctcttaattccccatcacagcagccaggtcctgggagaatggaatataaaaagataggaagccacatagattccagtttgaggacaggtccttgggaaactggaaaaaaacaaacaaacaatgaagaccccaagatattagagtggcagaaaaaggagagagaaaaaagctgtaaccacctgcctgtgttaattattttgcccccagttgtggccagtgagagattttttycccttcacttctcagggaaacactttggaaggcttgttctgcagcaaggacctcagaaacaaaggagacatatgcaagttcacgaaaatgaaatcagtgtttaattactaaatattctacctctaaaattaaaggaaaaaagcttaaataattcagtttgatttggtctcattagtctgatttcctagtatttagccttaattat

SEQ ID NO: 401973 - DNA, 373 bp, Homo sapiens
gatgaatcatgctgtatccccaggcactctgccaggttatttacattcatcacttcatgaaacttcactctaaccatattttgtagayattagtattattccctttatggatcaggaaagtgatggtaattaacttgcctaaggacacagagttggtagatatcagagaagggattataagaacccagaactattttactcgaaagtttctgctacacatccactgcttcttccagtgtaaagatgtagcactcaactgtaatggacatattaactgtgattcattaatgatgattaattaactctcctgtatccaaacaatgtcagttacaatcagaaactcctataatcagataataaatcaaatttacct

SEQ ID NO: 401974 - DNA, 373 bp, Homo sapiens
gatgaatcatgctgtatccccaggcactctgccaggttatttacattcatcacttcatgaaacttcactctaaccatattttgtagatattrgtattattccctttatggatcaggaaagtgatggtaattaacttgcctaaggacacagagttggtagatatcagagaagggattataagaacccagaactattttactcgaaagtttctgctacacatccactgcttcttccagtgtaaagatgtagcactcaactgtaatggacatattaactgtgattcattaatgatgattaattaactctcctgtatccaaacaatgtcagttacaatcagaaactcctataatcagataataaatcaaatttacct

SEQ ID NO: 401975 - DNA, 642 bp, Homo sapiens
tccacctggctttatcttggtaatgttctgaaatacatgcaatgaacaacttgacattgtttgatgttcttaattctttacagccatctctatgggtggtcwtaatagataagatcaatcagaaatgatcatattatgaaatgtaaatcacttcacatgacttatctggaaaatgtccttgtactttacttgcaccatctcaagttccaagagccaaaaacatatacatgctcatggaggagaatttcctttctgattttagaacagtctgaaatggagtgaaaaaatgaaaaagaagggggagcttacaaataacaaaaatgtatatcccaagtgaaaattagaatgtctatggaactagtagcagtaacaacagtagacgaaagataggctgtagatgtgaagaagatgtctacaagggaagcacaagactccaaatgctcttgctactaaaacgcagattcaagctttaccatctgtaatactctgctgccaagtacatctatggccactgctactatctaaaatgaggatatatattaagaaatcatcaaaaaggactgcatagcagaaacttttctgatatcaagggatcaacttaactacaattatatgcaagtgccaatttcctctggagtaaac

SEQ ID NO: 401976 - DNA, 608 bp, Homo sapiens
cctggtcaggtcctgaccacaaccccttttagatggggcatttggggatgggggtgagggtcctgatggatcccctgcagagcctcttgattcccagaatcttcagattatatctgaacaaggaaaacctttttaatcacttacattttgttgagcargagctgtgtgcttattccccagctgagtctgtgctgaacaagtgctcacaattacagtccatggagggtgagcaagggttctcaaaataggcactcagactacaagactagccccatgccctgtactcccctccatgctctgtcccctctgcctcaccagaccctcctgaagcccatttccaaaacctgcagtggacacagaggggttcagggccagatccctggaggcgacgggcttcctccaccatggcgagcatgtggtcaggactgctggggaccccacggtctggccaggacatatactgtagctggtacacagaacgggactcctgaaacacagaaaaagatgagcaaaagacttaggaaaaaaaagaaaaaagcattaattggccatctactatacaccaggcccacttctaggcatcttccatttatgtctaccagacaata

SEQ ID NO: 401977 - DNA, 608 bp, Homo sapiens
cctggtcaggtcctgaccacaaccccttttagatggggcatttggggatgggggtgagggtcctgatggatcccctgcagagcctcttgattcccagaatcttcagattatatctgaacaaggaaaacctttttaatcacttacattttgttgagcaasagctgtgtgcttattccccagctgagtctgtgctgaacaagtgctcacaattacagtccatggagggtgagcaagggttctcaaaataggcactcagactacaagactagccccatgccctgtactcccctccatgctctgtcccctctgcctcaccagaccctcctgaagcccatttccaaaacctgcagtggacacagaggggttcagggccagatccctggaggcgacgggcttcctccaccatggcgagcatgtggtcaggactgctggggaccccacggtctggccaggacatatactgtagctggtacacagaacgggactcctgaaacacagaaaaagatgagcaaaagacttaggaaaaaaaagaaaaaagcattaattggccatctactatacaccaggcccacttctaggcatcttccatttatgtctaccagacaata

SEQ ID NO: 401978 - DNA, 491 bp, Homo sapiens
aacttcagagtgactccgaattcatgcgagagacatgttttgatcattgaaagaactgctatttgaaaactgcagatctctgcttccttcttgaacagtgccattgtttacctttatcctaaaataaaggatgcattgtctttccagttgatattttgatacagaagaaatgtacatgatacatcwtctaaagaatatgaagtcttacagaattctaggacaacagaatgaaaagggagattatgatatgataatagcctctgctttcagacttattaatcccccatttgtgtccacatttccaagcataacttcccattagcagttcaactaatagtcactcagggtaagcaattagttttatggctagctgttctctgctccacagaaaaattaagagctgttgaaggatgcaatctactagtaaagcaacaaaattaaaagattaggtagagataagtaaaatagttgcatgtaattttaggcttatg

SEQ ID NO: 401979 - DNA, 496 bp, Homo sapiens
ctgtggccacataggttaacatatatgcatgtggatgtgtgtatatccatgaatatatgcctataaaattttgggttgaaatgagatcccttgtctattaatacttaacacacggtacttctgaaacaaggccctaaaatcaagggaagacgatgacttgttattaactctcatgcttaccaattaacaactcaagcaaatgctagctttctccccagatttaatcattcctttctttctttttttttttttttttaactttgcttggtttcagaatcctctaggagtcctaccatgaaaccttcatgtccacggcttaatattttataccatcytgttgtcaaacactttttaaggcttacttctacagagtaccctcttcctaactactgactttagcattgacctgcatcttgctaggcaattgctgtccatagttggaaaaggtcgtagtgaaaaagattatgtgccatggtcaagaacttgtaaaaatttc

SEQ ID NO: 401980 - DNA, 432 bp, Homo sapiens
acgctctcagccagttgatgtaggagtcaactagtggtgaatgccccaccaaatgatgctgagtccatttgtttcaaatatttaagtaaggggaagaactagaaaatcacttcttcatattttctgaagtgataatacttgtattagaatatgaatggtgttgaaagtatgatgtccaagaatatgccctgaaaatcttcccagtttttkatgtgctaatcttaaaattcttaaggagtgctgactacattgtgactataatttaggtgtttctcttgggaaattgcattttaacaaatatctttgaaataatcttgttgtactgtagcattctggttataagattttcaaagaacaatagatttattagactaagaattttgtgaattaaatcaagagactgtcatgaaaaattgcagtgtttggttttgt

SEQ ID NO: 401981 - DNA, 593 bp, Homo sapiens
actataaatacctgaattatctgctcacttacttattttctgtctaaattcaccagaaggcaaactccttggaactggaattttgccaattctattaatttgcatattctctgcatttagaacagtgcccggcacatagatatccaataaatatctgccaaaatgatcaataaataaatattaaaatagaagatggtgtgctacactgtatctgtataagctatgaactaaatacagcttcatatacaagctactcattacattctgttaatttgcatcatttggacctttaatacctccattattttctatatacaatgctgttaacaacttgtaaaacttaatacagttaataactttttaatgagatcaccaatcttaccaatgctaatactgttctttagctttggatccaaaagctataagaatggtaccatcttttcctgtgccttacacttcatctgccatttgattttcatgttggaagagtcctacaagcacccaaggcagmaaaacctttatatgagcatggatgacatcatgaccctagtataggtcatttaaaataacttttgccagttttagacacagag

SEQ ID NO: 401982 - DNA, 593 bp, Homo sapiens
actataaatacctgaattatctgctcacttacttattttctgtctaaattcaccagaaggcaaactccttggaactggaattttgccaattctattaatttgcatattctctgcatttagaacagtgcccggcacatagatatccaataaatatctgccaaaatgatcaataaataaatattaaaatagaagatggtgtgctacactgtatctgtataagctatgaactaaatacagcttcatatacaagctactcattacattctgttaatttgcatcatttggacctttaatacctccattattttctatatacaatgctgttaacaacttgtaaaacttaatacagttaataactttttaatgagatcaccaatcttaccaatgctaatactgttctttagctttggatccaaaagctataagaatggtaccatcttttcctgtgccttacacttcatctgccatttgattttcatgttggaagagtcctacaagcacccaaggcagcaaaacctttatatgagcatggwtgacatcatgaccctagtataggtcatttaaaataacttttgccagttttagacacagag

SEQ ID NO: 401983 - DNA, 565 bp, Homo sapiens
ccagggtttcagaagttatttggatgaaacagctaaaacctcaaaagaagaatgaatgctgagctgctttctaaataaagatattgtgacacacaaagcaataggcatgatttaacataggtcaaaatatgactgtgaccctggcatacacaacatcttaaaattcttctttgatggatggaaaagcattttcctagacccatgacattacaaactgccattctatataaattcagctgtaaaattatttttagtatgtatattctcctccaagacttaatcaattcctctctcaatgcttacagatgttttcattgagctaaggtagataaattcatagactatgtgctagaatgttaattatagtttttctttatagctcctgggtgatcatgccttaactcatctatgaaaaattacattttggccagatgaaaatttgatgtccctgggaaaatgggatttatacaactaagacaaaatcctaaactgcccatctgagatgccaaagcctcatttataatatttgctggrgaggggggcaattagcttggggggaaagact

SEQ ID NO: 401984 - DNA, 522 bp, Homo sapiens
tgattcagtgtttgaaattttgattgaatgtggtttggtgatttatagcaagaaagagaagatgacatcaaaagtttgggtgtgaaattgaaattatctaaatttgaatgttttaaaccaatttgtttttttgtaagcactttctactctcaagaagagaattttaatttgggagtaataagaaaaagtcataggctaagctttctgtaagaaatatggacttaagaaaaagctttgaaaatgtagcctaatagcacggccccagtggcaaactctttttcagtaaaagattcatttttaatcttttgcagtgtatctctatagatacacagcacacacacamacatatatatatatatatatatatacatgtgtataagtaaaatataacatttattaaaaacttgggaattttgtattaaaggcttcttgagtttgaaagggtggtcagaaaaataaaacaataaaaatgattgttaactttattttaaaaaatatgtttctcttttactctgaactggt

SEQ ID NO: 401985 - DNA, 567 bp, Homo sapiens
gtgaattatattgaaaacactttattaaaactatttgacatttcaagtaaactttattaaaaactacagatgactgaatttacgtggtcaatattctacctactgacaaatccaaagcatagatcagcatatcttgtatcagtccaatgtctcctccaaaaatttaattttatttggatatgtaaattcaatgctatgatggaccttgggacttgtaaattttacatagaaaacaatatttggttcagaccaattcttaagytatgtccaattgccaaggcaatgcccatagtaattgaagaaatatactgtgagttactcattatatatttaagatataaatgttcttgtctgttcttacaaacagcttacttacatagagttttaatgagatataagtcatatcccataacattcacttactttaagtgttcaattcaatggttcatatattatttacgttatgccaccactactacagtttcattttaagatgttttcatcactctataaagaaagattgtgattatttatgatcactatccattcctgccccagccctaagta

SEQ ID NO: 401986 - DNA, 545 bp, Homo sapiens
atgtacagctttgtttgaaaactacatcaaaggtctaaatttgatgccataaaccacttctttaccccaggaaagatatattgtatctgaagatttttcttaatttttctcactcaaatactgccatttacatggatgtccatgttctgacatgactttgtaggaamactgacctttcctccacatggaaagaggtagagagaagttgtgttaggtcattctcatgttgcaataaagaaatacctgagactgggtaatttataaagaaaagaggtcctacaggctgtacaggaagcatggcatgggcatttgcttggcttctgaggaagcctcggggagcttttattcataatggaacgtgaagcaggagcagatgattcacatggccagagtaggagcaagagagagagagtgagagagagagagagagagagagagagagagagagagagagaggagggtcacacacacattttaaataaccagatctctagagaactcactcaccattgtgaagaaagcaccaagccatgagagatctgcct

SEQ ID NO: 401987 - DNA, 545 bp, Homo sapiens
atgtacagctttgtttgaaaactacatcaaaggtctaaatttgatgccataaaccacttctttaccccaggaaagatatattgtatctgaagatttttcttaatttttctcactcaaatactgccatttacatggatgtccatgttctgacatgactttgtaggaacactgacctttcctccacatggaaagaggtagagagaagttgtgttaggtcattctcatgttgcaataaagaaatacctgagactgggtaatttawaaagaaaagaggtcctacaggctgtacaggaagcatggcatgggcatttgcttggcttctgaggaagcctcggggagcttttattcataatggaacgtgaagcaggagcagatgattcacatggccagagtaggagcaagagagagagagtgagagagagagagagagagagagagagagagagagagagagaggagggtcacacacacattttaaataaccagatctctagagaactcactcaccattgtgaagaaagcaccaagccatgagagatctgcct

SEQ ID NO: 401988 - DNA, 521 bp, Homo sapiens
ttataaagaaaagaggtcctacaggctgtacaggaagcatggcatgggcatttgcttggcttctgaggaagcctcggggagcttttattcataatggaacgtgaagcaggagcagatgattcacatggccagagtaggagcaagagagagagagtgagagagagagagagagagagagagagagagagagagagagaggagggtcacacacacattttaaataaccagatctcwagagaactcactcaccattgtgaagaaagcaccaagccatgagagatctgcctccatgacccagaacctcccaccaggccccacctccaacactggggttccatttcagcatgagatttggtggggacacagatccaaaccatatcataggtctaaaatattgacaacagaatatatcatactgatatattctgtgagctgcagaaatcaatgtgagctgcagtatgccgtggggatagtattgttacacaggcatactttgttttattgtgcttcattttattgag

SEQ ID NO: 401989 - DNA, 431 bp, Homo sapiens
attgtgaatttttaaattgtttacagagactgatttttgctttgttgcycagactggtctcagacttctaatttcaagcaatgccccctgctcagcctcccaaaatgctgagaatacaggcctgagccactgtgcccagcctaatttattattgaagaaagaattgttttaaataaatttagtgtagcctaagtatacagcatttatgaggtctacagaggtacagtgcaactttgtagcctaggagcaataggctacaccatacagtgtaggtccttaataggctctgcacctaggtttgtgtaagtacattctgtgttcacacaagaacaaaacagcctaacaatgcatttcttggaatgtatcaccattgttaaacaacacatgatggtggaggtttactttaagtcatgttctcagattcagcttta

SEQ ID NO: 401990 - DNA, 431 bp, Homo sapiens
attgtgaatttttaaattgtttacagagactgatttttgctttgttgcccagactggtctcagacttctaatttcaagcaatgccccctgctcagcctcccaaaatgctgagaatacaggcctgagccactgtgcccagcctaatttattattgaagaaagaattgttttaaataaatttagtgtagcctaagtatacagcatttatgaggtctacagaggtacagtgcaactttgtagcctaggagcaataggctacaccatacagtgtaggtccttaataggctctgcacctaggtttgtgtaagtacattctgtgttcacacaagaacaaaacagcctaacaatgcatttcttggaatgtatcaccaytgttaaacaacacatgatggtggaggtttactttaagtcatgttctcagattcagcttta

SEQ ID NO: 401991 - DNA, 496 bp, Homo sapiens
gtcttcctccatgattatcatagagggaaagagtgcatggagactcatatcagcaatgaaatgctttagctgggaagtgacccatgtcactgctggttgcttctggaccagaaacagttgcacattgctacctggatggaagggtaacaaaggctaaccattccagaaacctggaaagggaagataaatgcatatgtgtgagtactacgggctgtaccatagctgtcaaagacaaataaaactaatttatgtatgtttttgcagtctctttaaattatatcatttttcacatagaatagagtcactatgttkaaggcaaattttcagtcagcccattgaatataatatttttccttaaaaagtcataaaccattctgatgtgctttgcaggagtgtatttcaatgtcatttataaccaataaagagcgtttttgattcagtgaagtaaaagttatctattcagtttctatttaatctgtcaaaataacaaccggca

SEQ ID NO: 401992 - DNA, 625 bp, Homo sapiens
tcatgctttgcagatggctttggtcactgctggcaagtattgtcaaatggggttttccatgcatrtttgatggacaactccacgtttcaactcagactacagaaaatactgtctaatcaagtgaagcggattatgagttccaaatccataataggtgcctcttctgcttctaggaagaatttcatcttatgatattggataacagtcaatactgaattaaacattgactattagctggtgattttataagacatgttttaagacatgctcacacaataccacagttgtcctactttctctctgaaacaacgagtcaagggtggagcagtcccagaacagaacatggtactgatgattagcaatactgtaccgtacacttaaaatgttaaggagtgaagctcatggtatgtgttcttaccacaagaagaagaaaatgaaatagtgatctcagaatcatttccctgattgcaaccatctttgtgcatccgtagagtgacagcttgatggtgacaatgagggtgcaccctggctcaaataggaagggaatacttcatcaaagatggaattttcactgcattgtaaattaaaagccttggataatgtctcaaaatgtgggtgatcttat

SEQ ID NO: 401993 - DNA, 449 bp, Homo sapiens
catttccactgatattgcagaaatccaaaggatcatcagtggttactaggaacaactatatgccaataaattggaaagtctagaagcaatggataaattgctagacacatacaacctatgaagactgaaccccaaagaaatccaaagcatgaacagatcagtaacacgtaatgagtttgaagctgcaataaaaagttttccagtaaagaaaagtccaagccccatggtttcactgctgaattctaccaaacatttaaataagaactaataccaatcctaytagaactgttctggaaaatagaaaatgagggaatacttccaaattcattctacaaggacagtgttactctgatatcaaaaccagaaaaagacacataaaaaaaataatacaatccaatatctctgatgaacattaatgcaaaaatctccaacaaaatactagctaactg

SEQ ID NO: 401994 - DNA, 571 bp, Homo sapiens
aaataaagccaattcccaaagattatataccgtaagattccatttatccagcattcttgatttgccaacattgtaaaagcagcagaaagagtagaaattgccagaggttacagagtgtgggggtggaatgaaagacattgtrgctatacagggatgattgttgtggtaatagaaatgtcctgtatcttgactgtattaataccaatatactggttgtgatattgtactatagttttgcaagttttattattagaggaaactgggtaaaaaagaaatggaatctcttggttatttcttacaactgccacggaacctacaattatctcaaattaaaaagctttattataaaaaacaaaaacatgatttctcaataagttcagaaaaatcatttgatagataatatcccctgttcatataaagagccttagaaaattagctagaaaaaaaaacttcttttatctaatacaaacatcatgtactgataaaattttggaagattttcctataaggtccacaataaagcaagtgtggtgctatcataattctgtttaatattgtacttgtggtacga

SEQ ID NO: 401995 - DNA, 571 bp, Homo sapiens
aaataaagccaattcccaaagattatataccgtaagattccatttatccagcattcttgatttgccaacattgtaaaagcagcagaaagagtagaaattgccagaggttacagagtgtgggggtggaatgaaagacattgtggctatacagggatgattgttgtggtaatagaaatgtcctgtatcttgactgtattaataccaatatactggttgtgatattgtactatagttttgcaagttttattattagaggaaactgggtaaaaaagaaatggaatctcttggttatttcttacaactgccacggaacctacaattatctcaaattaaaaagctttattataaaaaacaaaaacatgatttctcaataagttcagaaaaatcatttgatagataatatcccctgttcatataaagagccttagaaaattagctagaaaaaaaaacttcttttatctaatacaaacatcatgtactgataaaattttggaagmttttcctataaggtccacaataaagcaagtgtggtgctatcataattctgtttaatattgtacttgtggtacga

SEQ ID NO: 401996 - DNA, 578 bp, Homo sapiens
gtcagtattgggtcctttaagagctacttggtcataccagaggcaaaaatctcttgttagactatttttacccaattctcttaaggtaaagaaaacaaaaataacagtgatgycttatgttccactaatttaaatatagcatataacgtatttttaaaatcaattttatatttgcctccataaagtaaattatcccttagaagaaaggtttaataaaaattacaagtgttactagctcaatgatttctcatattacctctaatcttgcctttagttaacaatatttgtctaaccatcattgatattttggcttgttaacctcagaatatgtccagtgacgtcttatcaaccactatttataaagaggactgggaatcagccttttaagttctttcaattaaatccactctaaattcagtgcaattggctttcatttgtttattttgttttgttctctctaatgatttacatacagatgcgtgggcagtagatttttttttaagatgtgcagtattttcaaaatatctctattaggaagttataaatttacatttattggttgaatatgtaaacagtat

SEQ ID NO: 401997 - DNA, 550 bp, Homo sapiens
actggagtaagatggacccctaatccacatgtctggtgttcttaaagatgatcgccatgtgaggagagacacatggtgaaattcacatgtgatgattaggggagaaactggagttatgaagcttcaaccaaacaatactaaagattgccaaaaaacccatcagaagctatgaagtgtcaagaaaagatattcctgaaaattttagagggattgtgaccttgatgatacgttgatttcagacttctagctctcaaaactgtgagamaaaaaaaaattgtttgtttaagccacacaatttatggtactttgttatggtaccctagaaaactaatatagtagcctcgcaaaaatcagttaaccctaggtgtatgggtttatttctgaagtttcagttctattatattgatccgtatgtcaccttcatgttagtagtacagtgttttgattatggtagctttctagtaggttttgaaatcaaaaaacctgagtcctccaaatttgttgatctttttcaaaattgttttggctattctttgttgcttgcattttc

SEQ ID NO: 401998 - DNA, 533 bp, Homo sapiens
tcatggatttgcctcagaggcattgacccatataaccaaattccaagacactagttaataatccaggattctaagttagcatttcaacataggagtcacatctggcttgaaaacttgaagtctagcttcccaaaccatttttgataggaaagttgcctgaggaggccaaaagattatttacatattcatatgcaaatattaccatggagcaccatgctacaaaggagatgaaactttttggaattccggttctaatagatcgtatgatatcctaatgtacagtcttcttccactcaggaatattgctagggaaataactgctgcattcagcmaaaaaccagatcatttgcttccctgagaaaattagaaaaacactaatgttcttgatcttgtgaccccaccactctagaagattgaatttatttggttgaaccacgtaacatttccattttttggtcaaaaatgatcaaatatcatcaacaccatatggtcaaaaccaatatatacttcctaactctaaactgtgccatgac

SEQ ID NO: 401999 - DNA, 533 bp, Homo sapiens
tcatggatttgcctcagaggcattgacccatataaccaaattccaagacactagttaataatccaggattctaagttagcatttcaacataggagtcacatctggcttgaaaacttgaagtctagcttcccaaaccatttttgataggaaagttgcctgaggaggccaaaagattatttacatattcatatgcaaatattaccatggagcaccatgctacaaaggagatgaaactttttggaattccggttctaatagatcgtatgatatcctaatgtacagtcttcttccactcaggaatattgctagggaaataactgctgcattcagccaaaaaccagatcatttgcttccctgagaaaattagaaaaacactaatgttcttgatcttgtgaccccaccactctagaagattgaatttatttggttgaaccacrtaacatttccattttttggtcaaaaatgatcaaatatcatcaacaccatatggtcaaaaccaatatatacttcctaactctaaactgtgccatgac

SEQ ID NO: 402000 - DNA, 586 bp, Homo sapiens
ttaaaactgtctatatgtgtagatgtgtggcagctttttgcttcggaaatagatgtatatgtaatatatgttatacaagtgataaaatttattaaatatttgtgaaataaattataaaaatagctgtttaaatgaaaaataatttttcaagaatacagtagaaattatgttaaaaagacataaatatgttggtcttagattggtattattattgaatacacttaattttagacttttaaacttttaccttgcacaggaagtctatttacctgtgatagaccaccttgaaacaatatgaggaaaaaaggtttatctgatattagtagtgttatctctcatagtaaagaaaataaatccagtttcrgggagatttgtgggaggaatagtatctttgtgatgcacttccccaagcatgctcacgtacgtacatatcagccagtcatttgataggggtcgcccccaagaaggtggcatgccgtaccacaaggtggctttcaacaaccgagggaaaatcctggagcagcatttaactgaggaagtcagcctccaaaaccctagtagccgagggatggagtgtgtctgggag

SEQ ID NO: 402001 - DNA, 586 bp, Homo sapiens
ttaaaactgtctatatgtgtagatgtgtggcagctttttgcttcggaaatagatgtatatgtaatatatgttatacaagtgataaaatttattaaatatttgtgaaataaattataaaaatagctgtttaaatgaaaaataatttttcaagaatacagtagaaattatgttaaaaagacataaatatgttggtcttagattggtattattattgaatacacttaattttagacttttaaacttttaccttgcacaggaagtctatttacctgtgatagaccaccttgaaacaatatgaggaaaaaaggtttatctgatattagtagtgttatctctcatagtaaagaaaataaatccagtttcagggagatttgtgggaggaatagtatctttgtgaygcacttccccaagcatgctcacgtacgtacatatcagccagtcatttgataggggtcgcccccaagaaggtggcatgccgtaccacaaggtggctttcaacaaccgagggaaaatcctggagcagcatttaactgaggaagtcagcctccaaaaccctagtagccgagggatggagtgtgtctgggag

SEQ ID NO: 402002 - DNA, 586 bp, Homo sapiens
ttaaaactgtctatatgtgtagatgtgtggcagctttttgcttcggaaatagatgtatatgtaatatatgttatacaagtgataaaatttattaaatatttgtgaaataaattataaaaatagctgtttaaatgaaaaataatttttcaagaatacagtagaaattatgttaaaaagacataaatatgttggtcttagattggtattattattgaatacacttaattttagacttttaaacttttaccttgcacaggaagtctatttacctgtgatagaccaccttgaaacaatatgaggaaaaaaggtttatctgatattagtagtgttatctctcatagtaaagaaaataaatccagtttcagggagatttgtgggaggaatagtatctttgtgatgcacttccccaagcatgctcacgtacrtacatatcagccagtcatttgataggggtcgcccccaagaaggtggcatgccgtaccacaaggtggctttcaacaaccgagggaaaatcctggagcagcatttaactgaggaagtcagcctccaaaaccctagtagccgagggatggagtgtgtctgggag

SEQ ID NO: 402003 - DNA, 403 bp, Homo sapiens
ctttagtgctataaaaaattagcaaagtcaagtgaagctggggtggtgtgtacagtgcttgagcttgccccatttctcatctttgactttagtttctgacttaaattgaaatagacgattaatatttacatcattgtttatagtttatgaagcaattttagacacattacctcatttgkctataaagttgtacagtagaaaaagcattccattttacaatcagacagttcagattgagagaggaaaggcatgtaaggtattcagatctcataatcaatcagggactcaacctcagatcctctgattcctacttcagcccatattctatggcacttaaaatactgccatttattctagtatttcatgcctattagaacatcatgtgatttgacatgaaaacaaa

SEQ ID NO: 402004 - DNA, 403 bp, Homo sapiens
ctttagtgctataaaaaattagcaaagtcaagtgaagctggggtggtgtgtacagtgcttgagcttgccccatttctcatctttgactttagtttctgacttaaattgaaatagacgattaatatttacatcattgtttatagtttatgaagcaattttagacacattacctcatttgtctataaagttgtacagtagaaaaagcattccattttayaatcagacagttcagattgagagaggaaaggcatgtaaggtattcagatctcataatcaatcagggactcaacctcagatcctctgattcctacttcagcccatattctatggcacttaaaatactgccatttattctagtatttcatgcctattagaacatcatgtgatttgacatgaaaacaaa

SEQ ID NO: 402005 - DNA, 641 bp, Homo sapiens
gcagtttaatttgccttcaataaattaggaaagtatactttgtggatgcacatcagaacattccgtgcctttacaattttgcattccttttktctggactttctgaaaagcttctctctaggctctcagtaagcagatttgctaataaataaactctctgcatctcagtgtgctacatgtagagtgagagaaccacccgccaacacccaggtattttaaaatcccaactcaaagactaagaagtcatgaagcccccggtagtactcactatccaagaatggtaacagataaggacatgttaataatcagaaccagatgtgatgctcagctgataggcacctggcactcacttaggtcgttaatattcagaatattccagcaaaaactgctcaaacagtcttctgtagttttactctgtggtgaagccattctagaggctgagtatagagttttagtgatgtattctgtggcattttaaataccatcttgtttcttccccttcgtattatcagccctccctccacaccttccttggctacctccactatctgctggttcctgaaaccacatttctatcttacaagttaatcgggctggaatgctctctgacttccatttctcaagctccctcagtcacaact

SEQ ID NO: 402006 - DNA, 641 bp, Homo sapiens
gcagtttaatttgccttcaataaattaggaaagtatactttgtggatgcacatcagaacattccgtgcctttacaattttgcattccttttttctggactttctgaaaagcttctctcyaggctctcagtaagcagatttgctaataaataaactctctgcatctcagtgtgctacatgtagagtgagagaaccacccgccaacacccaggtattttaaaatcccaactcaaagactaagaagtcatgaagcccccggtagtactcactatccaagaatggtaacagataaggacatgttaataatcagaaccagatgtgatgctcagctgataggcacctggcactcacttaggtcgttaatattcagaatattccagcaaaaactgctcaaacagtcttctgtagttttactctgtggtgaagccattctagaggctgagtatagagttttagtgatgtattctgtggcattttaaataccatcttgtttcttccccttcgtattatcagccctccctccacaccttccttggctacctccactatctgctggttcctgaaaccacatttctatcttacaagttaatcgggctggaatgctctctgacttccatttctcaagctccctcagtcacaact

SEQ ID NO: 402007 - DNA, 641 bp, Homo sapiens
gcagtttaatttgccttcaataaattaggaaagtatactttgtggatgcacatcagaacattccgtgcctttacaattttgcattccttttttctggactttctgaaaagcttctctctaggctctcagtaagcagatttgctaataaataaactctctgcatctcagtgtgctacatgtagagtgagagaaccacccgccaacacccaggtattttaaaatcccaactcaaagactaagaagtcatgaagcccccggtagtactcactatccaagaatggtaacagataaggacatgttaataatcagaaccagatgtgatgctcagctgataggcacctggcactcacttaggtcgttaatattcagaatattccagcaaaaactgctcaaacagtcttctgtagttttactmtgtggtgaagccattctagaggctgagtatagagttttagtgatgtattctgtggcattttaaataccatcttgtttcttccccttcgtattatcagccctccctccacaccttccttggctacctccactatctgctggttcctgaaaccacatttctatcttacaagttaatcgggctggaatgctctctgacttccatttctcaagctccctcagtcacaact

SEQ ID NO: 402008 - DNA, 539 bp, Homo sapiens
ttaaatattttaattaaggaagggacaaggcttatgtaaggtgaaccatgtatgctgttttatttactatttatatattattacatttctttgtatctcaggatcctaaattayaaaataagtggatatgacttgattcttagattcttccagttctgaaattctctagagccattaaaatatggagaaaaacattggctacaatcataattgatggactgatgacagtaattttatacagagggtgcattcaaattctcaaatcaatgctaatgactcaatagataagacagataattgatatgacgaaataagtcatgcaaacatgactagaattcaaacacagtaatatggtaccattttctgaatgatgaacatttaaaaaatatagcaaattctagtactaaaaattgatatgctcatcaattattgattacagtgcagttactagttatcttttggaaagaaatttaaagaattttcaaaatattttaatttcagggaaaaactacaagctccaactagcatgagaaaagaaa

SEQ ID NO: 402009 - DNA, 595 bp, Homo sapiens
ctatttatgtaaatatttaaatattttaattaaggaagggacaaggcttatgtaaggtgaaccatgtatgctgttttatttactatttatatattattacatttctttgtatctcaggatcctaaattataaaataagtggatatgacttgattcttagattcttccagttctgaaattctctagagccattaaaatatggagaaaaacattggctacaatcataattgatggactgatgacagtaattttatacagagggtgcattcaaattctcaaatcaatgctaatgactcaatagataagacagataattgatatgackaaataagtcatgcaaacatgactagaattcaaacacagtaatatggtaccattttctgaatgatgaacatttaaaaaatatagcaaattctagtactaaaaattgatatgctcatcaattattgattacagtgcagttactagttatcttttggaaagaaatttaaagaattttcaaaatattttaatttcagggaaaaactacaagctccaactagcatgagaaaagaaagtgggatgatcatgggtagttattagagtcatgaggctcc

SEQ ID NO: 402010 - DNA, 381 bp, Homo sapiens
ctacttcttgggcaaccttcattaaaaagctctaccctattaccacaatgttccttagtgctcatattttgtactttactttcccaatagattataaatcctttaagggcagaggattatattttatcckctagtaggctccatggtacctgacgaagcactgcacagattttagagtctgcccaaactgtctaaccacactgtttcctcagtagctattggaccagaaagtgaataggtgttcattatacttccctgactcatatgacttaataccacttgtccacatgtgtagcacttacatgctgaacaactgtgggtgagacctacaattagagcaaagatgaggagatagaacatcaacatcaggcagcggtcccc

SEQ ID NO: 402011 - DNA, 271 bp, Homo sapiens
tacatgctgaacaactgtgggtgagacctacaattagagcaaagatgaggagatagaacatcaacatcaggcagcggtccccaatctttttcgcaccaggaactggtttcacggaagacaattttttccatggtagaggagagsgagtcaggggatgcttttgggatgaaactgctccacctcagatcatcaggcattggattcttataaggagtgtgcaacctagattcctcacatgtgagctcatgaaagaattggtgtttctatgaaa

SEQ ID NO: 402012 - DNA, 592 bp, Homo sapiens
ttgaaattatctagttagacaaaaatgaaaaaaaaacctaaaaataataaacaaagcctacatgacatgtagggcaccataaacaaaatattcaaatttttggtagcccagaaggcaaagagaaataaatagaaaacatattaatgaaataatagctgacgactttgcaagtctagcaagagatttagackttcagataaaggaagctcagaaatgcccaaatatatacaattcaaaaacatcttctccatggtacattctaatcaaactgtcaaaagtcaaagacaaagagaaaattttagaaacagtgaaataaaatcacctagtcacttacaagacaacctccatgagattaacagcaggtttctcagcagacaccttacaagacaggggaaaataggatgatatattcaagatgctgaaagaaaaagaaaaaaaaaatgctagtcaaggatactataaccagaaaagttacccttcataaataaaggagaaataaattcttttccagatgaacaaaagctgagagagttaatcacaagactgaccctacaagaaatatttaaaggaatcccacacatggaagaaaaag

SEQ ID NO: 402013 - DNA, 530 bp, Homo sapiens
ctaacattgctgtaacactgtaatctacaaaccttactcaggtttcaccagtggtcccagcagtgtcctttaragcaaaagaataaacttgttttcttgttcaaaacctaacccagggtcacacattgcatttagttgtcatttctttttagtctcatttaatctggaatggttgctttattctttgtttcttatgaccttgatacttttgaacagtgcgatcaagtgattttgtagactctcccttaattggggcttgtttgtgtcctcaggattagattcaggttatgcatttttggcagaaaatcacaggaaacacatgatgtgtcccattactggtgatgtgcattctgataagttggttaaggtttctctggcaggtttctccactgtaaagttactctttttttttcctctttgtaattaatactacctcatgttaagactatgttttaactgtaaatattctgcttctcatcaaaatgaacatctactgatgattcttgcctgaatcaattattgactgtgat

SEQ ID NO: 402014 - DNA, 530 bp, Homo sapiens
ctaacattgctgtaacactgtaatctacaaaccttactcaggtttcaccagtggtcccagcagtgtcctttaaagcaaaagaataaacttgttttcttgttcaaaacctaacccagggtcacacattgcatttagttgtcatttctttttagtctcatttaatctggaatggytgctttattctttgtttcttatgaccttgatacttttgaacagtgcgatcaagtgattttgtagactctcccttaattggggcttgtttgtgtcctcaggattagattcaggttatgcatttttggcagaaaatcacaggaaacacatgatgtgtcccattactggtgatgtgcattctgataagttggttaaggtttctctggcaggtttctccactgtaaagttactctttttttttcctctttgtaattaatactacctcatgttaagactatgttttaactgtaaatattctgcttctcatcaaaatgaacatctactgatgattcttgcctgaatcaattattgactgtgat

SEQ ID NO: 402015 - DNA, 606 bp, Homo sapiens
taatctgttgctaccaacaatgtgtttccaactaggaagcatctgatttcaaactaaactgtaaaaccaggagcagcttscccgttggttagaaataaggtttctaaatcccctaagttatgaacactgagatttttttcccaaaaaaaatctgtgttttcagaaatataacaaaaaaaactggaatagagccaccgtctcagaaatacctcaaaactccctagttgccaaattattttaatacaaattgatcaaagcatccccaaccagaactcaggttgtaagcattctgaacctaaaagcacaaaatggtttagcatttataagaaatttctatttttatacaatcttgactgcttaggtttcaaaaaatgtcaatgtcaggctgttagcaccaacaagatcatcccagtccaataaatagagaactgttgaagaacggaaatgagcacttaaaatgaggcaatcaaagccacaaaatagaaactgcagatttgaactccaagaagcaggcatgaatgttaggctagttagttagaagagctgaaagggatatcatctgccagaattagtgtctcaatttagtgaaaaaagaaaatctatctg

SEQ ID NO: 402016 - DNA, 606 bp, Homo sapiens
taatctgttgctaccaacaatgtgtttccaactaggaagcatctgatttcaaactaaactgtaaaaccaggagcagcttccccgttggttagaaataaggtttctaaatcccctaagttatgaacactgagatttttttcccaaaaaaaatctgtgttttcagaaatataacaaaaaaaactggaatagagccaccgtctcagaaatacctcaaaactccctagttgccaaattattttaatacaaattgatcaaagcatccccaaccagaactcaggytgtaagcattctgaacctaaaagcacaaaatggtttagcatttataagaaatttctatttttatacaatcttgactgcttaggtttcaaaaaatgtcaatgtcaggctgttagcaccaacaagatcatcccagtccaataaatagagaactgttgaagaacggaaatgagcacttaaaatgaggcaatcaaagccacaaaatagaaactgcagatttgaactccaagaagcaggcatgaatgttaggctagttagttagaagagctgaaagggatatcatctgccagaattagtgtctcaatttagtgaaaaaagaaaatctatctg

SEQ ID NO: 402017 - DNA, 595 bp, Homo sapiens
gttaactatcacatacaaatcacatgcaaatayagttaccacttattttagttacctattctcaatatacagaaaaatgccacaaatctaggaggccattcgtttcaaatgaccggaatccttagacctcacaccaacaagccaccatgtgctggggatggtatcgcctgactaaatgtagccttgcagtccattcttgtaagtattagagagaaaaagagagagagcgtcatctctggaaagtgtgaagtcagggaattccctactaggaagcatttccataaagcaccccaaaatgacttgatgcaaacaccacacctagtggtgtcactggagtaagcatcatattacttcaaattgcttttacctaggtttattaagggattttgctctcatggtgagatctaatttgtaatggatataaaccaggaaatgagatttgcactaaagccaatgaagtaggaatgtacttattctctaaagcagcaaagatagtctcactgtcacagagcagttataggatatgttgctttccatactaatggttaataccacttggaaatgatttacccttcaaaaataaattcaaggtttt

SEQ ID NO: 402018 - DNA, 595 bp, Homo sapiens
gttaactatcacatacaaatcacatgcaaatacagttaccacttattttagttacctattctcaatatacagaaaaatgccacaaatctaggaggccattcgtttcaaatgaccggaatccttagacctcacaccaacaagccaccatgtgctggggatggtatcgcctgactaaatgtagccttgcagtccattcttgtaagtattagagagaaaaagagagagagcgtcatctctggaaagtgtgaagtcagggaattccctactaggaagcawttccataaagcaccccaaaatgacttgatgcaaacaccacacctagtggtgtcactggagtaagcatcatattacttcaaattgcttttacctaggtttattaagggattttgctctcatggtgagatctaatttgtaatggatataaaccaggaaatgagatttgcactaaagccaatgaagtaggaatgtacttattctctaaagcagcaaagatagtctcactgtcacagagcagttataggatatgttgctttccatactaatggttaataccacttggaaatgatttacccttcaaaaataaattcaaggtttt

SEQ ID NO: 402019 - DNA, 595 bp, Homo sapiens
gttaactatcacatacaaatcacatgcaaatacagttaccacttattttagttacctattctcaatatacagaaaaatgccacaaatctaggaggccattcgtttcaaatgaccggaatccttagacctcacaccaacaagccaccatgtgctggggatggtatcgcctgactaaatgtagccttgcagtccattcttgtaagtattagagagaaaaagagagagagcgtcatctctggaaagtgtgaagtcagggaattccctactaggaagcatttccataaagcaccccaaaatgacttgatgcaaacaccacacctagtggtgwcactggagtaagcatcatattacttcaaattgcttttacctaggtttattaagggattttgctctcatggtgagatctaatttgtaatggatataaaccaggaaatgagatttgcactaaagccaatgaagtaggaatgtacttattctctaaagcagcaaagatagtctcactgtcacagagcagttataggatatgttgctttccatactaatggttaataccacttggaaatgatttacccttcaaaaataaattcaaggtttt

SEQ ID NO: 402020 - DNA, 595 bp, Homo sapiens
gttaactatcacatacaaatcacatgcaaatacagttaccacttattttagttacctattctcaatatacagaaaaatgccacaaatctaggaggccattcgtttcaaatgaccggaatccttagacctcacaccaacaagccaccatgtgctggggatggtatcgcctgactaaatgtagccttgcagtccattcttgtaagtattagagagaaaaagagagagagcgtcatctctggaaagtgtgaagtcagggaattccctactaggaagcatttccataaagcaccccaaaatgacttgatgcaaacaccacacctagtggtgtcactggartaagcatcatattacttcaaattgcttttacctaggtttattaagggattttgctctcatggtgagatctaatttgtaatggatataaaccaggaaatgagatttgcactaaagccaatgaagtaggaatgtacttattctctaaagcagcaaagatagtctcactgtcacagagcagttataggatatgttgctttccatactaatggttaataccacttggaaatgatttacccttcaaaaataaattcaaggtttt

SEQ ID NO: 402021 - DNA, 615 bp, Homo sapiens
aggccattcgtttcaaatgaccggaatccttagacctcacaccaacaagccaccatgtgctggggatggtatcgcctgactaaatgtagccttgcagtccattcttgtaagtattagagagaaaaagagagagagcgtcatctctggaaagtgtgaagtcagggaattccctactaggaagcatttccataaagcaccccaaaatgacttgatgcaaacaccacacctagtggtgtcactggagtaagcatcatattacttcaaattgcttttacctaggtttattaagggattttgctctcatggtgagatctaatttgtaatggatataaaccaggaaatgagatttgcactaaagccaatgaagtaggaatgtacttattctctaaagcagcaaagatagtctcactgtcacagagcagttataggatatgttgctttccatactaatggttaataccacttggaaatgatttacccttcaaaaataaattcaaggttttcccctgtaatgcctcttrcctggattcaaacatgctttaatgaggaataagagaaacggtgaaactatgaataaccctgggccttgtatcattacattagaaacactgctct

SEQ ID NO: 402022 - DNA, 645 bp, Homo sapiens
gacttcagtgttgcttattttccttccaaggaacctctaatattctctactttcagaactccaatcaaattagccagaaagagcaaacgaagccaataaatccaggagggcaatagatctgattttaacccttgtttcacatgcacaattgtcttcagagaaaagctgaagaaagtaccccctcacctccatgccccaatgctccttttctctgacttcaagtgggcctctgatgctgcccacatttccctcaccaggtttctttcctttccaaracatctgtaaaactttctgcaccttcttccttctcccaccactaccagtggatgaccttatagatttctgctccatgagaaacagaagccatttgacagcaccctcagcaagagctaacattttagctcctaacaagagctagtgggcaactgatccaagcagtttacatatgtttatcatgtcatttcgtgttcaacacaatcctattagttataacttgataactaaggtttcataactggcctatggttgcacagcttgtaaaaggcagagtcagaactcagacccagtactgtctaatgtttgagctcttcaacactccatcactgcctgtcatcttccttctaatatatccacaaattcacctgc

SEQ ID NO: 402023 - DNA, 645 bp, Homo sapiens
gacttcagtgttgcttattttccttccaaggaacctctaatattctctactttcagaactccaatcaaattagccagaaagagcaaacgaagccaataaatccaggagggcaatagatctgattttaacccttgtttcacatgcacaattgtcttcagagaaaagctgaagaaagtaccccctcacctccatgccccaatgctccttttctctgacttcaagtgggcctctgatgctgcccacatttccctcaccaggtttctttcctttccaaaacatctgtaaaactttctgcaccttcttccttctcccaccactaccagtggatgaccttatagatttctgctccatgagaaacagaagccatttgacagcaccctcagcaagagctaacattttagctcctaacaagagctagtgggcaactgatccaagcagtttacatatgtttatcatgtcatttcgtgttcaacacaatcctattagttataacttgataactaaggtttcataactggcctatggttgcacagcttgyaaaaggcagagtcagaactcagacccagtactgtctaatgtttgagctcttcaacactccatcactgcctgtcatcttccttctaatatatccacaaattcacctgc

SEQ ID NO: 402024 - DNA, 513 bp, Homo sapiens
aaactttttaataacatcttatcaagtgttccatttgtgataaagaacttaatgagccacatcaagatgaaaatcaagaaaaatatttagctgaaacactactttgtcctttatcaaacaaaatggctagataaatctcaaagtattaaggtggtcattttttttatttgacttaattttaagtgcttttcatttcccaaatcaaacataaatagggcagccctaaatttgttgcttcacatgggattctgcccccacaaaaatgtaaaataacttccagattttccagtaaaatatactaagccaaacattttgagcaacttgtccactaaaataactttaaaactattttctcaartacctacctattttttcttttgatcctccagcaagtagattgatattttctcctggtaacaattctaattgctcggtacatttgacaaattttccagactcaaagctgcttaatgatctgtaattaaaatattggttagcttgtattcctatgca

SEQ ID NO: 402025 - DNA, 513 bp, Homo sapiens
aaactttttaataacatcttatcaagtgttccatttgtgataaagaacttaatgagccacatcaagatgaaaatcaagaaaaatatttagctgaaacactactttgtcctttatcaaacaaaatggctagataaatctcaaagtattaaggtggtcattttttttatttgacttaattttaagtgcttttcatttcccaaatcaaacataaatagggcagccctaaatttgttgcttcacatgggattctgcccccacaaaaatgtaaaataacttccagattttccagtaaaatatactaagccaaacattttgagcaacttgtccactaaaataactttaaaactattttctcaagtacctacctattttttcttttgaycctccagcaagtagattgatattttctcctggtaacaattctaattgctcggtacatttgacaaattttccagactcaaagctgcttaatgatctgtaattaaaatattggttagcttgtattcctatgca

SEQ ID NO: 402026 - DNA, 485 bp, Homo sapiens
agggcagccctaaatttgttgcttcacatgggattctgcccccacaaaaatgtaaaataacttccagattttccagtaaaatatactaagccaaacattttgagcaacttgtccactaaaataactttaaaactattttctcaagtacctacctattttttcttttgatcctccagcaagtagattgatattttctcctggtaacaattctaattgctcggtacattygacaaattttccagactcaaagctgcttaatgatctgtaattaaaatattggttagcttgtattcctatgcagcctgtggaaccattaaaaaaaacaaacaaacaaaaacagaacaaatcctaggaagacagcaaagtacacagcacttttctgacaaaattccttccacgaggatgccattattttggtttttatgttgcagatgtgactaccacttaattagtactcaaattggagtggcaaaccagaaagtcac

SEQ ID NO: 402027 - DNA, 485 bp, Homo sapiens
agggcagccctaaatttgttgcttcacatgggattctgcccccacaaaaatgtaaaataacttccagattttccagtaaaatatactaagccaaacattttgagcaacttgtccactaaaataactttaaaactattttctcaagtacctacctattttttcttttgatcctccagcaagtagattgatattttctcctggtaacaattctaattgctcggtacatttgacaaattttccagactcaaagctgcttaatgatctgtaattaaaatattggttagcttgtattcctatgcagcctgtggaaccattaaaaaaaacaaacaaacaaaaacagaacaaatcctaggaagacagcaaagtacacagcacttttctgacaaaattccttccacgaggatgccattattttggtttttatgttgmagatgtgactaccacttaattagtactcaaattggagtggcaaaccagaaagtcac

SEQ ID NO: 402028 - DNA, 550 bp, Homo sapiens
cctcaggggaagagtcagtcggtttggacagcacactttttctggattcacctgaaagtattttataaaataagaagagagagattcagatcaattagaaatatttcaaagagcacagaaacctaaaaacatgataagaacatcagtacgaaatatattactataacttttgctttatttaaaaatactgaatgctcaccattcagacaatgtttcaggctggcactcttacacccagcactggctaaggtgagcaccgatttgtcaaagctggagatgcagcaatcaacacctgtcatggcacacaggtgttcctggtactccacagaggccttttcaaacctgaaaagcaaattgaagcagtcttatttctttatttatctaactacttactttttttttttgagatgaagttttgctcttcttgcccaggctggagtgcaatggcactgtctcagctcartgcaacctctgcctcccgtgtacaagcgattctcctgcctcagcctcctgagtagctgggattacaggcgctcgccaccatgcccgg

SEQ ID NO: 402029 - DNA, 550 bp, Homo sapiens
cctcaggggaagagtcagtcggtttggacagcacactttttctggattcacctgaaagtattttataaaataagaagagagagattcagatcaattagaaatatttcaaagagcacagaaacctaaaaacatgataagaacatcagtacgaaatatattactataacttttgctttatttaaaaatactgaatgctcaccattcagacaatgtttcaggctggcactcttacacccagcactggctaaggtgagcaccgatttgtcaaagctggagatgcagcaatcaacacctgtcatggcacacaggtgttcctggtactccacagaggccttttcaaacctgaaaagcaaattgaagcagtcttatttctttatttatctaactacttactttttttttttgagatgaagttttgctcttcttgcccaggctggagtgcaatggcactgtctcagctcagtgcaacctctgcctccygtgtacaagcgattctcctgcctcagcctcctgagtagctgggattacaggcgctcgccaccatgcccgg

SEQ ID NO: 402030 - DNA, 550 bp, Homo sapiens
cctcaggggaagagtcagtcggtttggacagcacactttttctggattcacctgaaagtattttataaaataagaagagagagattcagatcaattagaaatatttcaaagagcacagaaacctaaaaacatgataagaacatcagtacgaaatatattactataacttttgctttatttaaaaatactgaatgctcaccattcagacaatgtttcaggctggcactcttacacccagcactggctaaggtgagcaccgatttgtcaaagctggagatgcagcaatcaacacctgtcatggcacacaggtgttcctggtactccacagaggccttttcaaacctgaaaagcaaattgaagcagtcttatttctttatttatctaactacttactttttttttttgagatgaagttttgctcttcttgcccaggctggagtgcaatggcactgtctcagctcagtgcaacctctgcctcccgkgtacaagcgattctcctgcctcagcctcctgagtagctgggattacaggcgctcgccaccatgcccgg

SEQ ID NO: 402031 - DNA, 409 bp, Homo sapiens
agtgaattgtgcagcttcccatatggcccactgccaaaggatagcatctgtcttcaggagattgcgtggaattgttgactggtcacgcttatccagtctctggcagmtatagaacagtctttccaaccaattgtccttcctgggaaaagtagtttcatatttaaaagacaatgacaacttcattttaataatgaaaaaaaaatgcaaggggaatgggaataaggaactgtaattttccctactccaaaaaaaggcaaaacctatgaaattgagaagcattatgtccccccctctcattttgaggtcttgtatagttaacaggatgaggtacagtgtggaaggatgattagggtaaacggctcatgccagtcaggaatgaaactcattcaatgcaactaagcatctctag

SEQ ID NO: 402032 - DNA, 601 bp, Homo sapiens
agtaggcttttaacaaatactcaaaaaatcacagttcttaggcatttaaggaacagagttggaacaaaatcaagattcaaaattatttctctaagccttctttgggccacagtctacaaagagattggggaagtaggctgtcagaactttaatggttctgaaataaccgaaaatgatgtaactggaacactttcattttacaagattacagtgttacattttctaaagaaactgtcatttgccttctraactagaaacagggatttgtaaaataatgtgcagtgatggcgtggaaaactaaccagcagcactcctgaaacgctgccttcgtgttcccctgggactgctcgcctcaccccaaaactatttctactgccttccccttccatgctacaactagtctccaaaggtagttttctctactaacaaagcaaacagatcatatgaacggacatcagactttcttaggagatttctgaaaattctctcttctggggaaataaattgtgagcatttcgattcaaacattcctgaaagaataaccaggcaaccaaaacactcagtgacctaactgtggtgggctggtcacttcaaacttaac

SEQ ID NO: 402033 - DNA, 601 bp, Homo sapiens
agtaggcttttaacaaatactcaaaaaatcacagttcttaggcatttaaggaacagagttggaacaaaatcaagattcaaaattatttctctaagccttctttgggccacagtctacaaagagattggggaagtaggctgtcagaactttaatggttctgaaataaccgaaaatgatgtaactggaacactttcattttacaagattacagtgttacattttctaaagaaactgtcatttgccttctaaactagaaacagggatttgtaaaataatgtgcagtgatggcrtggaaaactaaccagcagcactcctgaaacgctgccttcgtgttcccctgggactgctcgcctcaccccaaaactatttctactgccttccccttccatgctacaactagtctccaaaggtagttttctctactaacaaagcaaacagatcatatgaacggacatcagactttcttaggagatttctgaaaattctctcttctggggaaataaattgtgagcatttcgattcaaacattcctgaaagaataaccaggcaaccaaaacactcagtgacctaactgtggtgggctggtcacttcaaacttaac

SEQ ID NO: 402034 - DNA, 397 bp, Homo sapiens
tgaaatttagggtttcatttctcaagggtctcctttaaacaaacaaacagttatgatttcaaagtagacatgtgcctttaacaccatttttaaaaattaccarccttagcaaaggtgtagaaaaaacttgttctcaagcactgtccgtggaagaattagtaaaacatttctagaaaacctgttaccgtcttaacaaacttttaaacacatgtagcaattctacttccaggaacttatctatttgccaagacatatatgcaaggatcttccctatagggttgtgtataaaggaaaaatcagacagactatgccaggaaccctctgaaagagaagagtcaactgtggagggggcacctgtgaatgaatcctgcggagttgctaacagagcagacttaca

SEQ ID NO: 402035 - DNA, 576 bp, Homo sapiens
gtgggagacaggcagaacttcccaggggaggaaaagatagaggactaaggagcaacaggaaaaatataaaccttccaagaatatccaggggcctactattagtggaataatggctcaagctaatgattattcattcacccttttattcaaccaatattaactgagtgccacctacatgctaagtacagtccagccaatgtgcaccagtgcaggaaaaccaattgtgcacattccttcccaactccacgtttagtcatgtcatgttggtagtttgaagtcagccatggtaggaatattggcaccatagtaattggcaaatgctacaaatcagaacttttttcccctcaaagagttggtttgccactaaccmctggccagccactcttttggatactgagaaaagagcaatgagcaaaacagacaaggttataaccctagaagagcatatgttatagaagggaaagatcaaagaattgattgattgattgattgattgattcacaagctattttcgaatggtgaatagggctaggaagacaagaaaaaggggtgactgataggctgcagaggttggga

SEQ ID NO: 402036 - DNA, 645 bp, Homo sapiens
gaaatggtcgaaaggccagacccgagaaagccctggctcacagagttgacttctccatgaaaagtttatggaataactacactaacttaaagataagttcctgcttaggcttatcatctcatgcaatatattgaggtattgggaggctatgaggcactgtctcttaaaatgtgagtatgttaacctgaaaaataaatttatttggtatatcagggactatcaatatctgagcatagaaaacattttgctaggcatcaaccaggaatggaactctaaggaattagaataagcaaacattaatggaagggggtcagaaayatttggatggaatgagttactgcagtaggagttcaggcaagcaagggaagagtaagcaatcaatgaggaagtatgaggaacaggacttctagatgtgactaaataatatattaaccatacctccatattaccttccagtttacaaagtgttttcatgtattaaaaaattttgtttatgaccatcctgtaaagaaacgtgtagtatcagaagtgtaataattagcaaaatgtctcaagtcaaatttttctgcttttaaattcctttttaatcacttcctatctttgtgagtttagacaaaaaaaatttagcctttctggatttcagtg

SEQ ID NO: 402037 - DNA, 615 bp, Homo sapiens
catctcatgcaatatattgaggtattgggaggctatgaggcactgtctcttaaaatgtgagtatgttaacctgaaaaataaatttatttggtatatcagggactatcaatatctgagcatagaaaacattttgctaggcatcaaccaggaatggaactctaaggaattagaataagcaaacattaatggaagggggtcagaaacatttggatggaatgagttactgcagtaggagttcaggcaagcaagggaagagtaagcaatcaatgaggaagtatgaggaacaggacttctagatgtgactaaataatatattaaccrtacctccatattaccttccagtttacaaagtgttttcatgtattaaaaaattttgtttatgaccatcctgtaaagaaacgtgtagtatcagaagtgtaataattagcaaaatgtctcaagtcaaatttttctgcttttaaattcctttttaatcacttcctatctttgtgagtttagacaaaaaaaatttagcctttctggatttcagtgccctgtctgtgtagtaggaacaatgataatgcttacctcatggggctataacaaaactcaataaaatgaatgcaaaatatttag

SEQ ID NO: 402038 - DNA, 645 bp, Homo sapiens
gaaatggtcgaaaggccagacccgagaaagccctggctcacagagttgacttctccatgaaaagtttatggaataactacactaacttaaagataagttcctgcttaggcttatcatctcatgcaatatattgaggtattgggaggctatgaggcactgtctcttaaaatgtgagtatgttaacctgaaaaataaatttatttggtatatcagggactatcaatatctgagcatagaaaacattttgctaggcatcaaccaggaatggaactctaaggaattagaataagcaaacattaatggaagggggtcagaaacatttggatggaatgagttactgcagtaggagttcaggcaagcaagggaagagtaagcaatcaatgaggaagtatgaggaacaggacttctagatgtgactaaataatatattaaccatacctccatattaccttccagtttacaaagtgttttcatgtattaaaaaattttgtttatgaccatcctgtaaagaaacgtgtastatcagaagtgtaataattagcaaaatgtctcaagtcaaatttttctgcttttaaattcctttttaatcacttcctatctttgtgagtttagacaaaaaaaatttagcctttctggatttcagtg

SEQ ID NO: 402039 - DNA, 542 bp, Homo sapiens
ccgagcagacactgagttctcctcatcactctagggtttagatctgtgttttaacatccttgttggcactggaatccctggcttcctgcttccttggagctgccttagaggcaagagtcccctggagtacaaacagggamaccacaagcatgacattgctctgccatttgcaccaccagcttccctttgggaaaatccaagaagaataaagtaaacaaagatatcctgattcttggagccagtcagatgatgccctaaaagatgagactggttgcaggcaaaggactacctgatctatagactcttcattgaccctccagctacttgtgcagtgttgagtatattacagctatccaacatagcttgctaaatactctatcagatcttttattccatacacacatagaatatatgcatgtatatattacgattataagaaaaaaaccagtggtgatattatctgcttttgccaaataagaatgtacaaactctacagcaatttgtgaccaagaataccatagccagcattctcatttcccctc

SEQ ID NO: 402040 - DNA, 542 bp, Homo sapiens
ccgagcagacactgagttctcctcatcactctagggtttagatctgtgttttaacatccttgttggcactggaatccctggcttcctgcttccttggagctgccttagaggcaagagtcccctggagtacaaacagggacaccacaagcatgacattgctctgccatttgcaccaccagcttccctttgggaaaatccaagaagaataaagtaaacaaagatatcctgattcttggagccagtcagrtgatgccctaaaagatgagactggttgcaggcaaaggactacctgatctatagactcttcattgaccctccagctacttgtgcagtgttgagtatattacagctatccaacatagcttgctaaatactctatcagatcttttattccatacacacatagaatatatgcatgtatatattacgattataagaaaaaaaccagtggtgatattatctgcttttgccaaataagaatgtacaaactctacagcaatttgtgaccaagaataccatagccagcattctcatttcccctc

SEQ ID NO: 402041 - DNA, 560 bp, Homo sapiens
tatgaacccaggtgctaagagatagttctatttccatggaaacaaataccttaatgtttttttaactgacatttaaattgagmtaggtagggccatgcatgtctatggtccttaccaagaagtctcaaagtgcacatatgtagcctaacttctttgtaatcccatagatcaagctgcatctagggttactcctaccattctacacttatgcccaagaagactgatgagaaaagaaactagaaatacgtcctaggtctttgctaatatagatagatcatttttcttatttcaaaggcctctctacacagtactttttcctccaggctgttctctcccttgtatactagctcttcctcaatcaccttttaaatcatgtaactagggcagaattcttgccctgcaagtgctatatactaaccacatagatgatgctactgcatttgccactacagttacagataggaattgttaagctcatgggtaaatacaatgagatataaagggcatgactctattaccaacatcaaatgagcagaaagtctttatgcacacaagttagc

SEQ ID NO: 402042 - DNA, 520 bp, Homo sapiens
catagttgccaattgcagtgcttttgccatttataattcatctagatacaactactaattagctactgttggtaaacttagatgtgtkcacaagtcaatgccttactggtctggttcttcttatttgctgatttttatagttacagacatatcaaaaaaaaaacatcatttggatggtttctattcaagaagctaaatattcctcaattagagtatctaatgagaaaagccagtttaacactaaatgcagtcatcctatttgggaactggcatatttgggtaaatagaaatgtttcatacacctgtatctctgccaccagatgttggtgactgaagtctcaatgtaacagaaatgttgatgcctgattagggaaaattactcaattttaaatgatttcatttagactttagtttatgacagaaacttttaatcaactgccccaattcccccccccccctttttttttttttttttttttttttttttgctaaaaatcctaaattaaattcagagcaatat

SEQ ID NO: 402043 - DNA, 520 bp, Homo sapiens
catagttgccaattgcagtgcttttgccatttataattcatctagatacaactactaattagctactgttggtaaacttagatgtgttcacaagtcaatgccttactggtctggttcttcttatttgctgatttttatagttacagacatatcaaaaaaaaaacatcatttggatggtttctattcaagaagctaaatattcctcaattagagtatctaatgagaaaagccagtttaacactaaatgcagtcatcctatttgggaactggcatatttgggtaaatagaaatgtttcatacacctgtatctctgccaccagatgttggtgactgaagtctcaatgtaacagaaatgttgatgcctgattagggaaaattactcaattttaaatgatttcatttagactttagtttatgacagaaactttwaatcaactgccccaattcccccccccccctttttttttttttttttttttttttttttgctaaaaatcctaaattaaattcagagcaatat

SEQ ID NO: 402044 - DNA, 578 bp, Homo sapiens
ctggtctggttcttcttatttgctgatttttatagttacagacatatcaaaaaaaaaacatcatttggatggtttctattcaagaagctaaatattcctcaattagagtatctaatgagaaaagccagtttaacactaaatgcagtcatcctatttgggaactggcatatttgggtaaatagaaatgtttcatacacctgtatctctgccaccagatgttggtgactgaagtctcaatgtaacagaaatgttgatgcctgattagggaaaattactcaattttaaatgatttcatttagactttagtttatgacagaaacttttaatcaactgccccaattccccccmccccctttttttttttttttttttttttttttttgctaaaaatcctaaattaaattcagagcaatattgtacttaggtaaaaactttatttttttcactcccttttgcaccaacaggtggccccagtactttgctataatcaatgggtagaagtgacaatctgctgaagttttctggaaaagcttttgatttactgatgaaagaaggcaaacatctctgtatttgataga

SEQ ID NO: 402045 - DNA, 435 bp, Homo sapiens
tcaatgaatagtatgtgaatataacttgtaacacaatgtggctatgaatttttaacatgatttctccaacacagtgagagatattgcattgacattttaataaatgtacaaaatggattaaccatttcatgatccatgtatgaaacattagtttgtagattatttttgtaaaactgaaacctttrtaactttccttaagacttagttagcttctaggccattattcctgcctcctttgtctccttttctctaatagatttctattctttagctgtagaaatgtatatcaaaatcagctttgactacataaaactgcttggcgttgtgtaagtaatatatactcacagaattattgtaagcatcaaatggcataatgtatgtgaaagtgttttgtaaaatttaaatgttatgcaaatgtgagtggttattattgtt

SEQ ID NO: 402046 - DNA, 435 bp, Homo sapiens
tcaatgaatagtatgtgaatataacttgtaacacaatgtggctatgaatttttaacatgatttctccaacacagtgagagatattgcattgacattttaataaatgtacaaaatggattaaccatttcatgatccatgtatgaaacattagtttgtagattatttttgtaaaactgaaacctttataactttccttaagacttagttagcttctaggccattattcctgcctcctttgtctccttttctctaatagatttctattctttagctgtagaaatgtatatcaaaatcagctttgactacataaaactgcttggcgttgtgtaagtaatayatactcacagaattattgtaagcatcaaatggcataatgtatgtgaaagtgttttgtaaaatttaaatgttatgcaaatgtgagtggttattattgtt

SEQ ID NO: 402047 - DNA, 435 bp, Homo sapiens
tcaatgaatagtatgtgaatataacttgtaacacaatgtggctatgaatttttaacatgatttctccaacacagtgagagatattgcattgacattttaataaatgtacaaaatggattaaccatttcatgatccatgtatgaaacattagtttgtagattatttttgtaaaactgaaacctttataactttccttaagacttagttagcttctaggccattattcctgcctcctttgtctccttttctctaatagatttctattctttagctgtagaaatgtatatcaaaatcagctttgactacataaaactgcttggcgttgtgtaagtaatatatactcacagaattattgtaagcatcaaatggcataawgtatgtgaaagtgttttgtaaaatttaaatgttatgcaaatgtgagtggttattattgtt

SEQ ID NO: 402048 - DNA, 599 bp, Homo sapiens
tagattatttttgtaaaactgaaacctttataactttccttaagacttagttagcttctaggccattattcctgcctcctttgtctccttttctctaatagatttctattctttagctgtagaaatgtatatcaaaatcagctttgactacataaaactgcttggcgttgtgtaagtaatatatactcacagaattattgtaagcatcaaatggcataatgtatgtgaaagtgttttgtaaaatttaaatgttatgcaaatgtgagtggttattattgytgctaacttctgtaactgtgcacagtggtcattaggtaacaggcactgtgctaagtgccttgcatatattatcttgtttaacataattctctcaataatactatcaagtgagtattattatcctagttatgcagaagaggaaaataagtcttaaagaagttaaggaacttggccagtgttatgcagctactaaatgatgaagaggtaaaacctgatgccaaatcaatataatgtcatataattaagaaccaaatatagatgaaattttgtattagttgccatttgggattatcattaccacttttctcttccaaaagcat

SEQ ID NO: 402049 - DNA, 563 bp, Homo sapiens
gaaaaaaagttaagcatggttacttgacagaattgtataggaaatactcaggagacaatgacaaccagtggtgtccaagggcagcaagacacatggactagcactgtccatcagactcatgatcaaaaacttcctgctatactaatgaagtgtctggcttaaggattcaatgtgtcagcacatcatcctttcttttattatttcttttcttccccaggagaaaacaaaggaaagcctgctcacctctacaggaaccatgcacgacaattttattttaaaaggtaaatttataagaaaaatgtgtgacaccaaatgtgtggagagagttggaaagtgagcagcttgtcagccaaaactataacaaagtagctaatgaatagcagccttctaatgagtaaagtgacaaaagaaagtagcaattgggttgaaaacgcaatgatagtcaagtgacccgtaatagaataatctgaatcctaatctttaytataaaaactacagaataaagagatgtgagctttgatttccactttccacagctggactaaatttttttttcccttcct

SEQ ID NO: 402050 - DNA, 712 bp, Homo sapiens
ggagttgaattattgggtcatatgtaattccatgtataacttctagaagaagcattgcagtttttcacactgactgcatcattgtacatttccacaataagctccattttgaaactagaaaattggtatttattcatattaatgtgggtaggtataaaatggtgacttttatttttcctacccaagtattggtaaagaaagagtttcatgaattctggcatcttctgtgacagagacaatttttagctttatatttaaaggttaagttacaggttggggaactagtgaaaggtttaggtgttgcaggctatataatgaaatgaaatgaaatgaaacatagggctggggtagtcatgaatagggcatacagtgatcagaccagagtaatttaccaccactatagcttgaaatggttctgaaatggcataaaggaaagaaacattagaaaacattgattagaggaatattataayggggagcttaaacagagtatcacaacttgctaaacaatattaaaataagtagagagcccagatataaaccagtatcagttttgttaacttaaagctatgaatagccaaaatgcccacccctagtactgattcattgttttgaatgcttaacacctaaacagtgaatacacttatttggaacgttttgtattaatgaaaattagagtatctcattatcaaacattttcatctatcaatgc

SEQ ID NO: 402051 - DNA, 660 bp, Homo sapiens
gttttctcatctcttcttccccagtccccctcctctgttttcttttgtatcaaagtactaagagtcatacttagcactttttattttccaccagttttcttttctcttgccttcttttattttattttgctttctgtcagcttctggaagactgagaatcaaggatgtgtgaagagattgtccaataacatgaaagcagaaacacagcaaaggggtcactgagttttgagaggactgctgttgcattcatgcatattactggcattctttcacttaaataaaatgtattaygtttatttctttaaaaaatatcaacaatctgtggtttgattgcccttcctcacctcaagtctttgtctttctggcatccaatgctcatttctccatctgctttttcttatactgtttctctttcctggataactggcctccctcttctctatttaatactcctttcagtataaatctccctcattttatatgattttgctaatgaataataataataaaatagaaattgcgtattgctttacagggtaagattttttttatgttcacattttatctgactcttgaaataattccaaaagacacatattactgtaattcccaatttgcagatgagaaaaccaagcccaggccccaattacatggaactat

SEQ ID NO: 402052 - DNA, 660 bp, Homo sapiens
gttttctcatctcttcttccccagtccccctcctctgttttcttttgtatcaaagtactaagagtcatacttagcactttttattttccaccagttttcttttctcttgccttcttttattttattttgctttctgtcagcttctggaagactgagaatcaaggatgtgtgaagagattgtccaataacatgaaagcagaaacacagcaaaggggtcactgagttttgagaggactgctgttgcattcatgcatattactggcattctttcacttaaataaaatgtattatgtttatttctttaaaaaatatcaacaatctgtggtttgattgcccttcctcacctcargtctttgtctttctggcatccaatgctcatttctccatctgctttttcttatactgtttctctttcctggataactggcctccctcttctctatttaatactcctttcagtataaatctccctcattttatatgattttgctaatgaataataataataaaatagaaattgcgtattgctttacagggtaagattttttttatgttcacattttatctgactcttgaaataattccaaaagacacatattactgtaattcccaatttgcagatgagaaaaccaagcccaggccccaattacatggaactat

SEQ ID NO: 402053 - DNA, 660 bp, Homo sapiens
gttttctcatctcttcttccccagtccccctcctctgttttcttttgtatcaaagtactaagagtcatacttagcactttttattttccaccagttttcttttctcttgccttcttttattttattttgctttctgtcagcttctggaagactgagaatcaaggatgtgtgaagagattgtccaataacatgaaagcagaaacacagcaaaggggtcactgagttttgagaggactgctgttgcattcatgcatattactggcattctttcacttaaataaaatgtattatgtttatttctttaaaaaatatcaacaatctgtggtttgattgcccttcctcacctcaagtctttgtctttctggyatccaatgctcatttctccatctgctttttcttatactgtttctctttcctggataactggcctccctcttctctatttaatactcctttcagtataaatctccctcattttatatgattttgctaatgaataataataataaaatagaaattgcgtattgctttacagggtaagattttttttatgttcacattttatctgactcttgaaataattccaaaagacacatattactgtaattcccaatttgcagatgagaaaaccaagcccaggccccaattacatggaactat

SEQ ID NO: 402054 - DNA, 660 bp, Homo sapiens
gttttctcatctcttcttccccagtccccctcctctgttttcttttgtatcaaagtactaagagtcatacttagcactttttattttccaccagttttcttttctcttgccttcttttattttattttgctttctgtcagcttctggaagactgagaatcaaggatgtgtgaagagattgtccaataacatgaaagcagaaacacagcaaaggggtcactgagttttgagaggactgctgttgcattcatgcatattactggcattctttcacttaaataaaatgtattatgtttatttctttaaaaaatatcaacaatctgtggtttgattgcccttcctcacctcaagtctttgtctttctggcatccaatgctcatttctccatctgctttttcttatactgtttctctttcctggataactggcctccctcttctctatttaatactcctttcagtataaatctccctcattttatatgattttgctaatgaataatamtaataaaatagaaattgcgtattgctttacagggtaagattttttttatgttcacattttatctgactcttgaaataattccaaaagacacatattactgtaattcccaatttgcagatgagaaaaccaagcccaggccccaattacatggaactat

SEQ ID NO: 402055 - DNA, 578 bp, Homo sapiens
gaattatcatcaaaatagtgttatataaatgccatttaactctggggagcaggatagatttaaggccacatagaaagtgcgagaaaagtgtttcagggcattgcaaaaattcaggattctggtatgagcacctcctttatggagatagatgtgaaaataatggagcaggaagagaaatagcagttgttagtgaatggattaaacataatgggtgggaaaagtgaagtcaaaataactcaaactcaataacaatcaataaaagcagttgtgttggttaatactgagtgccaacatgactggattgaaagatgcaaagtattgatgctgggtgtgtctgtgagggtgttgtcaaagaagattaacatttgagtcagtgggctggggaaggcagatccacccttaatctggtgggcacaatctaatcggctgccagcagatataaacaggcagaaaaatgtgaaaagctgagactggcctagcctcccagcctacatcttcctcctgtgctggacgcctcytgccctcaatcactggacaccaggttcttcagttttgagatttgactgggtctccttgct

SEQ ID NO: 402056 - DNA, 576 bp, Homo sapiens
atattacttgtagtatgcagttacagggacttgtttgctgaagatcttactccagtttgatattaaaatgggaaaaactcagtatgttttttcctctatggttaactacagacccaaaatraagtatattaactggtgcattgggatagcgtatgattaaaatcaaaacaaaaattcattttggctgagtagattcaactcggggggaattaaaacttctttcattctgtcatgtctaccactgtgactaaattagctgtggtgtccctaattcagtgtttgtaacttttagtcattaattctacagctgaggatttgatcaaccttgcagaaatttgaatcagttcttaatagaataaaaaataatacttctatctctgcagcagagaaactccatgaacacagtaggtgctcaaaaatacttgttctatttctgagattatcaataaagattttgaaattccaccctgtttaactgttatacctaaaatcaaagaaacacaatacaaagggagctgtttcttttccctaatattgaagataatgcatcatgctagaagaaaaattctaacatca

SEQ ID NO: 402057 - DNA, 575 bp, Homo sapiens
agcttagactattgcaatacccttttacattttgactcatcttcctgaatgactttccaccaacccagtttcttaaaacatagatctaaaacttatactattcttattttctccatcagtcatgagaaaatgtccagaccctatattcttgatctgggcctccagttttgtctccatcagcatagatacttatatcctataattccaccagaacatatccagctgtttcagcatctggaatttttcacatattcctcccctataatgcccttctttctcttattttctccacttgataaccaasaaagtacctttcaaatttttatttaagagggtttcttttttttttatactttaagttttagggtacatgtgcacaacatgccggtttgttacatatgtatacatgtgccatgttggtgtgctgcacccattaactcgtcatttaacattaggtatatcacctaatggtatccctcccccttccccccaccccacaacagaccccgatgtgtgatgttccccttactgtgtccatgagttctcattgttcaattcccacctatgagtgagaa

SEQ ID NO: 402058 - DNA, 584 bp, Homo sapiens
tatacttacactgtctttatgtgtatgtatacacacacacacacacacacacacacacacacacaccccccacacaccatacaggtgtatatatgtatgtctatataaatgtgtatatacatatagatgtgtcacacaccatatatatgtgcatttatacacacatatgtatgaggtataagtgtgacttctttgttcactgctatatccacagcctctagaacagtgcctgatacagtacacactcaataaatattttcttaataaataaatggtcaattgttttagagctatttgcctcttttaacattttaaaaaatttattttcataagttctgatrcactgagaaaactactaaaaatgctgtataatcataaaattgaaaacagaaggactattgtggtagcaaggatgagaaatatcttaggtaattgatcctggaggatttccactaatatttctttcaaaaaaagggagaaatctctttcaaacagcatagatataaggtaacactttcatgatttttagctttagaaaaattgatttttaaaacattttcatcaagactcctacttacatttct

SEQ ID NO: 402059 - DNA, 587 bp, Homo sapiens
caggcaatatgctagattctcagacacacaggatacttgtgtaggtgtacaatattttacataggaaggtctgttttatatgaagcagcatggactgagtctgttgcaaagaatacttagcaaattcatgaattgtgcctgccacattttatgtatcttctcaaaaatataattactttttaggatgtgttagtaaaggaaaatgtgttttcattttagagccatgtttgtattacataagcaagttttcttttccctgcagaccacagagtctggtcggccctacacttactgaaggcagtaataaagccmtcagactttcataaagaaacaattcccttgaggatacgaagtgtgagtttctgtataattcaagaatttactgattgtttcccacctgaactaccctttcaagaatttagcctccaattgcatatacacatgcacatacactcacacacccatatgaactaatttttaaaaagtgttctctggtactgatgagtatcatttcaaaatgctttctcttcccattagacgggattactgagctggagagtggagggtttgtccctttctgaccagga

SEQ ID NO: 402060 - DNA, 583 bp, Homo sapiens
caactctgcaaccatattagttttgcttataagtttcagagtagtgaatgggaaaataatttgcattgcatgaaaagtagtacttacatttagaattttctttcatatcagttttttatatttagaattttaaaattttagtagagaaataagggataggaaattattctagtcccagctgagactcttctatctcattgtatggctgtaccctaagggcatagttascatcacttttctggtcacttcctcctgatatatttgggataagaaagggtttatacctgctcctctcccacatcttcatcttgactatcacttctgcatggcattttctctcctccgtcattctttgtgttgccatggtccactgaacacttgttgctggtacaccagggaagttatgtgtggcagacccctttcagtaaaactgagatcttcaaaatggcctttgcagagagggagtagatagaatggagggcaggtcctctttcatcttacacttgtgggaatagtaatccaaaaaattatatgggcatatatacaataccactgaaatcttgggaaactattttaaaattag

SEQ ID NO: 402061 - DNA, 543 bp, Homo sapiens
cttaggataatggtctccagctgtccaagttgctgcaaaggacaggatctcatttgtttttatggttgtgtagtattccacggtgtatatgtaaaacgttctctttatccagtctaccactgatgggcatttacaatgattccatgtctttgctattgtgaatagtgctgcagtaaacatacacatgtatgtgtctttatggtagaatgatttacattactttgggtatatacccaataattggattgctgtgtcgaayggttgttcagttttaagctatttcagaaatggccaaacaactttccacaatggctgaactaatttacattgcttaatttcttattaattaggtttatactcaattgtggtcattgtgatgagtgctggaatgaatatgcttatgtgtatgtatgtgtatgtgtgtatatatatgtccaaggacacaaagattatacctatttaataacatattttacaaaaatagaaaatcacacaggtatgtatgtatctttatgtgcttttatgactatttctgtgtgaatg

SEQ ID NO: 402062 - DNA, 569 bp, Homo sapiens
ttttacacagaatttaaagtaaagtaaactcttcagataaaatgtctttcgcatggtgtacttgaactctacaaaatccacaggtggttatgctaatgttcaaaggacatcacacatggcctgagatgtaagtgggtctcccctgtacaatcagttctagaacaccaaattacctttatcttcttcttgcttcttttttttaaagtgtatttcacgtcccaatacatagaagaaccaccaaattccatatttcacataaaagtacacgagaccattaaatcttgccttaaactttcatcctttcacmttttgacacacaaaaaagaaaggatttaagtaatgttatttcattagcttctctcctggacaaagatgtctttactgatggagcagaaacgctttgccagcccatattccattgtcttcagaaactattctgaatgggagccactgccattatgtgaataagtcatgcatgatccctgggtatattatcagccccttgtggaacatttttaccaatgatgaaatgttattgttgtcactgtcagactttcagtctttatcag

SEQ ID NO: 402063 - DNA, 443 bp, Homo sapiens
aaaagcataatctttacccagttgtatctggtagtttcctgaacactggagcttaaatttcagacctagtgctgggcrtggtggctcatacctgtaagcccagcactttgggaggccgagacaggcggatcacctgaggtcaggagtttgagaccagccttgccaacatggtgaaaccctatctctactaaaaatacaaaaaaaattagtcgggcatggtggcacacgcctgtaatcccagctacttgggaggctgaggcaggagaattgcttgaacccaggaggcagaggttgcagtgaggcaggactgcaccattgcactctagcttgggtaacaagaatgaaactgtctaaaaaaaaaaaaaaaattcagacctaagacctttgtataactgctccttttccctatgtctccattctttttgcgcacctaattctgactt

SEQ ID NO: 402064 - DNA, 443 bp, Homo sapiens
aaaagcataatctttacccagttgtatctggtagtttcctgaacactggagcttaaatttcagacctagtgctgggcgtggtggctcatacctgtaagcccagcactttgggaggccgagacaggcggatcacctgaggtcaggagtttgagaccagcctkgccaacatggtgaaaccctatctctactaaaaatacaaaaaaaattagtcgggcatggtggcacacgcctgtaatcccagctacttgggaggctgaggcaggagaattgcttgaacccaggaggcagaggttgcagtgaggcaggactgcaccattgcactctagcttgggtaacaagaatgaaactgtctaaaaaaaaaaaaaaaattcagacctaagacctttgtataactgctccttttccctatgtctccattctttttgcgcacctaattctgactt

SEQ ID NO: 402065 - DNA, 551 bp, Homo sapiens
ctgcaccattgcactctagcttgggtaacaagaatgaaactgtctaaaaaaaaaaaaaaaattcagacctaagacctttgtataactgctccttttccctatgtctccattctttttgcgcacctaattctgacttaaagcactttatggattactcagtagctatgctgaaaggtgccacagggtttagagaactggctggaatacatgcataagcatgccaggatgtcagctctccacatttagactggcagattggacacatattatgtgtaattacgcacatattagaatgatgatgacagcycttcagtctcagaggagcatggcagaattggtgtgttcacaaagacagtgtggaagtgaatgggagcagatcctccatggcaatacatcctacatgggaaaacccagggctcaggaaaacattgattttctcttatagacaatgtgtttcaccattttcttttactcttactcatcaaagataaacacatctatcaaaaacctgatggtcctcagaaacatattctctgcaagaaacttctgat

SEQ ID NO: 402066 - DNA, 376 bp, Homo sapiens
aactgctccttttccctatgtctccattctttttgcgcacctaattctgacttaaagcactttatggattactcagtagctatgctgaaaggtgccacagggtttagagaactggctggaatacatgcataagcatgccaggatgtcagctctccacatttagactggcagattggacacatattatgtgtaattacgcacatattagaatgatgatgacagcccttcagtctcagaggagcatggcagaattggtgtgttcacaaagacagtgtggaagtgaatgggagcagatcctccatggcaatasatcctacatgggaaaacccagggctcaggaaaacattgattttctcttatagacaatgtgtttcac

SEQ ID NO: 402067 - DNA, 540 bp, Homo sapiens
attgtttctttttgtattatcattcattctcagacaaaaccttacctattcaaagaaaaaaaaattgaacggttcatatgcatgtgggtagatatatttatataaatatacaaacttgaatctyttattataaaatgtttaacagtaaatattagggataaaatgactcaagggaagaattacatgtgtatgaactcaaaactaagtcccaaggataccttcttgaggtataactaaaaagtaggtcacttctgtttttcctgctcccttgcagccaggctttatacccatgggcatccaaggtctccatagttttcttctttttccccaagccctttgcttgtcagctgcttcagcctccactgcaatagtgcaagatcattatcttttttgctccactctttgaggctttctttttatcagaggtctaatccactattatgagctaactcatgtttatgtctggcactaatttagtcttctaagataaggaacacactaaagtttacataacacccaatcacatttccaacaaaaaat

SEQ ID NO: 402068 - DNA, 575 bp, Homo sapiens
tcctgtctgctttcatactaaataaaataactaaaagcattttcaagataatattgttcatagtttacaattgtttctctaaatgtgagaaagggtctgatttacagcattatgctcctgtgttttcttatcttattaaatgatgcaattttctgcctttgtcaccaaaacagcatctgctagtcacaaaactagaaacacatcttttaattaaatgcttattttattttccctagggacaatgaattatagaattastttctcaagagttactgtttccttttcctttatctcagcccccagtatatattcagtgtgtcctctgaagtaacaaccatcccatctggctgagaagtgatggacacggctccttaaccacactgtaccctctgttcttggcacctctctaccagaaagatatcaacaaattggatggaattcagagaacagtaagaaaaatgattaaagagatggaggcagtgacttatgaggaaagatgaaaaggactaaatctatgtagcttggcaaagcaacaactgaggtggcgtatgaaaactgtctacaagcatttgaag

SEQ ID NO: 402069 - DNA, 575 bp, Homo sapiens
tcctgtctgctttcatactaaataaaataactaaaagcattttcaagataatattgttcatagtttacaattgtttctctaaatgtgagaaagggtctgatttacagcattatgctcctgtgttttcttatcttattaaatgatgcaattttctgcctttgtcaccaaaacagcatctgctagtcacaaaactagaaacacatcttttaattaaatgcttattttattttccctagggacaatgaattatagaattactttctcaagagttactgtttccttttcctttatctcagcccccagtatatattcagtgtgtcctctgaagtaacaaccatcccatctggctgagaagtgatggacacggctccttaaccacactgtaccctctgttcttggcacctctctaccagaaagatatcaacaaattggatggaattcagagaacagtaagaaaaatgattaaagagatggaggcagtgacttatgaggaaagatgaaaaggactaaatctatrtagcttggcaaagcaacaactgaggtggcgtatgaaaactgtctacaagcatttgaag

SEQ ID NO: 402070 - DNA, 526 bp, Homo sapiens
caaaacaaaataacatataccattattttttaatcctcacagcaactctttacattcagttatcaatatcaccattttatgaacaatgaaaggaagaatcaaagaggttaaataactgcccaaattcatccaatcagcaagttagtaaaaggatataaagccaagtcagaaagatttcaaagcccatgatctaaacagccatgcaacactattaatttgtggagttttgaggaatttgggagatgtaatctgattgttaatagtacatgctcttaggataaatgatgatgggaacaggtaggataaactgcataaacctggagactgaagtgataaactgcagaaaaattagagaagatgatgcataggcagtgacaagatggagaggatactcacgtgtgtgataatagataataaccctgggctatggagtatgactcargatttattctggtacaaagcttagttccaagcgagacataatttcacttttttaattacacccatcagaacgctggttaactcc

SEQ ID NO: 402071 - DNA, 487 bp, Homo sapiens
ctgccttggtctcagaggcagtggactgacttcgcatgttcacaacccrgtgcaacaccagctgtgtcaataaagaaagtgcctacatcaaggcagtgcagcttagggagagtatctttccacttgaggaaaggagagggaagggtacagaagactttgtcttgcaacttgggtaccagctctgacactgtaaaataaagcacaaagcagtttctgaaacccctgtttccagaccttggcacttggacagcatttctagacccatcctgggccagaagggaatctactgccctgaagggattgaccacctgctgaataaaaagcccttggccttgaataaatatcagcagtagccaggcagtagtcaccatgagccttgggtgagatccagtactgtgctggcttcaggtttgacccagcatagtgccagctgtggtggtcatgggattgctcatgttacctctgccccaactccaggtagcccagc

SEQ ID NO: 402072 - DNA, 560 bp, Homo sapiens
caacctccattcctgccaccatatccgctttgttcatgtgcccattgggcgatgacaggggtggctgaggaaagaggctgagtggtgtacacagaatgagtcattctatccagttgattattcaactcctcctccactgtggtcacccactggtgagcactaacatgggatacaaatatyttcagtttttgactactcagagagatccatccacatacttcttccccaaatttcattgtcaccaattttccaattatgcttctttcaagtccctgaccatccagccaaaccattggctacagcccatgaatcagaatataattgcacatctgtccatttctccttcaaggcaaagtgcacaaccaggtgcacttctagaagttctgcccactgggaagaattcccttcacggctgtccttcagggatgtcctagaaagcggctgtagtgctgcagctgttcacttttgagtggtgcctgcgtatcgtgcagaaccatctgtgagccaggccctagtcttctcttcctctgtcaactgatcatagggagcaccccatgaga

SEQ ID NO: 402073 - DNA, 554 bp, Homo sapiens
gaaaaatacatggccatgtttacaaatgtaccagaatatacaaagcagtgagcaaagacgtagttttgacggagtagagtttatgttgaaaagaagtggagaaatatagtcaggtgtccttgattgagtgagctattggagggattttgtcaaaggaaagaggaggtggttaaattaccattttattaatattaatctaaaagttgggttgagggtatcttggaagagagagaatataggaaaacaccccctgtttgtgaaagtagctaacagtggcacacacaatcactggcaaatcccaaatatgtattttacagaaaggtaaggcaagggwatcagtgactagagagcgttgtaaacagattttgaggtttttttttttcaatgagaataagtagataagatcctcttaaaaagagctcatgttggaaagagatagctgacaaattgttttcctatcttaatctgaatctagatgtaaggtggtaaggacatgccttgtgttaatggcataagagttttttttttaactgccaggtatgataagtaattta

SEQ ID NO: 402074 - DNA, 560 bp, Homo sapiens
caacctccattcctgccaccatatccgctttgttcatgtgcccattgggcgatgacaggggtggctgaggaaagaggctgagtggtgtacacagaatgagtcattctatccagttgattattcaactcctcctccactgtggtcacccactggtgagcactaacatgggatacaaatattttcagtttttgactactcagagagatccatccacatacttcttccccaaatttcattgtcaccaattttccaattatgcttctttcaagtccctgaccatccagccaaaccattggctacagcccatgaatcagaatataattgcacatctgtccatttctccttcaakgcaaagtgcacaaccaggtgcacttctagaagttctgcccactgggaagaattcccttcacggctgtccttcagggatgtcctagaaagcggctgtagtgctgcagctgttcacttttgagtggtgcctgcgtatcgtgcagaaccatctgtgagccaggccctagtcttctcttcctctgtcaactgatcatagggagcaccccatgaga

SEQ ID NO: 402075 - DNA, 656 bp, Homo sapiens
gtatgtgtgaaagattgatggcaggtcaacaactcaaagtggttggacaccaaagctaagatrgaagctgtgatatttaggaatagagctgaggttgagagatttagcaagggaattacccaagggaccgattagaagttattaaggcaaccctcaatttttcatttgaaatgatttattagagaagaaatattaagggaccaaggaaaaagacagccattagaaaaggagttgaaagactgtttggaagagaaggaagaggaggaggaggctgggagaggaggaaaaagaaggaagaaagaggagaaggaggagggttaagtggaaaagaaaaaggatttggtgtgtgtatgtgtgtgcgcgtgtgtgttgcaattaatctaaaagaatcatcatggtcatgataaatactgtcggttaatcaattctacaaaatttccttttatctttcaattgcctcagcagtagcttaatatttactctacacccacattatactgggtactggtagaaaaatctgtgtgttgttgctggcagtatcccaggatgtatggtgttcaggtagaaccagtaggtgttaattgataattgggctttatggaacaagattacgtttttactgtgcatatttgcctccacaatatcagaaacatgat

SEQ ID NO: 402076 - DNA, 623 bp, Homo sapiens
atgaataagagtatgtgtgaaagattgatggcaggtcaacaactcaaagtggttggacaccaaagctaagatggaagctgtgatatttaggaatagagctgaggttgagagatttagcaagggaattasccaagggaccgattagaagttattaaggcaaccctcaatttttcatttgaaatgatttattagagaagaaatattaagggaccaaggaaaaagacagccattagaaaaggagttgaaagactgtttggaagagaaggaagaggaggaggaggctgggagaggaggaaaaagaaggaagaaagaggagaaggaggagggttaagtggaaaagaaaaaggatttggtgtgtgtatgtgtgtgcgcgtgtgtgttgcaattaatctaaaagaatcatcatggtcatgataaatactgtcggttaatcaattctacaaaatttccttttatctttcaattgcctcagcagtagcttaatatttactctacacccacattatactgggtactggtagaaaaatctgtgtgttgttgctggcagtatcccaggatgtatggtgttcaggtagaaccagtaggtgttaattgataattgggctttatggaacaagattacg

SEQ ID NO: 402077 - DNA, 623 bp, Homo sapiens
atgaataagagtatgtgtgaaagattgatggcaggtcaacaactcaaagtggttggacaccaaagctaagatggaagctgtgatatttaggaatagagctgaggttgagagatttagcaagggaattacccaagggaccgattagaagttattaaggcaaccctcaatttttcatttgaaatgatttattagagaagaaatattaagggaccaaggaaaaagacagccattagaaaaggagttgaaagactgtttrgaagagaaggaagaggaggaggaggctgggagaggaggaaaaagaaggaagaaagaggagaaggaggagggttaagtggaaaagaaaaaggatttggtgtgtgtatgtgtgtgcgcgtgtgtgttgcaattaatctaaaagaatcatcatggtcatgataaatactgtcggttaatcaattctacaaaatttccttttatctttcaattgcctcagcagtagcttaatatttactctacacccacattatactgggtactggtagaaaaatctgtgtgttgttgctggcagtatcccaggatgtatggtgttcaggtagaaccagtaggtgttaattgataattgggctttatggaacaagattacg

SEQ ID NO: 402078 - DNA, 656 bp, Homo sapiens
gtatgtgtgaaagattgatggcaggtcaacaactcaaagtggttggacaccaaagctaagatggaagctgtgatatttaggaatagagctgaggttgagagatttagcaagggaattacccaagggaccgattagaagttattaaggcaaccctcaatttttcatttgaaatgatttattagagaagaaatattaagggaccaaggaaaaagacagccattagaaaaggagttgaaagactgtttggaagagaaggaagaggaggaggaggctgggagaggaggaaaaagaaggaagaaagaggagaaggaggagggttaagtggaaaagaaaaaggatttggtgtgtgtatgtgtgtgcrcgtgtgtgttgcaattaatctaaaagaatcatcatggtcatgataaatactgtcggttaatcaattctacaaaatttccttttatctttcaattgcctcagcagtagcttaatatttactctacacccacattatactgggtactggtagaaaaatctgtgtgttgttgctggcagtatcccaggatgtatggtgttcaggtagaaccagtaggtgttaattgataattgggctttatggaacaagattacgtttttactgtgcatatttgcctccacaatatcagaaacatgat

SEQ ID NO: 402079 - DNA, 623 bp, Homo sapiens
atgaataagagtatgtgtgaaagattgatggcaggtcaacaactcaaagtggttggacaccaaagctaagatggaagctgtgatatttaggaatagagctgaggttgagagatttagcaagggaattacccaagggaccgattagaagttattaaggcaaccctcaatttttcatttgaaatgatttattagagaagaaatattaagggaccaaggaaaaagacagccattagaaaaggagttgaaagactgtttggaagagaaggaagaggaggaggaggctgggagaggaggaaaaagaaggaagaaagaggagaaggaggagggttaagtggaaaagaaaaaggatttggtgtgtgtatgtgtgtgcgygtgtgtgttgcaattaatctaaaagaatcatcatggtcatgataaatactgtcggttaatcaattctacaaaatttccttttatctttcaattgcctcagcagtagcttaatatttactctacacccacattatactgggtactggtagaaaaatctgtgtgttgttgctggcagtatcccaggatgtatggtgttcaggtagaaccagtaggtgttaattgataattgggctttatggaacaagattacg

SEQ ID NO: 402080 - DNA, 549 bp, Homo sapiens
agatacatgtgggctttttctttttcttccctgaaagatgggattaggctgagcagtggtagctgtcagaagctcaaactccctgcctcccagaatgggtacttgtaattaaaagcttagctcaccttatccttccagtttcccaggcgaaaagtcaaagcctgcatttaattgcatatatatgtgtgcatgtttctaaaacaaaagctccaaagagagccagtgctttggaggaaaaaggacaatacacagataaatagttgacacagaatcaaaaatagagagaaacagaaaaggggataatgaaacaacagaaatgcagcacttagttcccctttggtttgttaccacttagaataggaagtacttgtttaccatttctacttagacaagcaacaacaaaaacaacaacaacaaaacaaatatgctatatttgcytgaagatttgccagaaacatatcctattttttggttggtgtatttaatcacagttctgtcagaacatggattggaatgtgacagcaccattctgttgagggaaagtcagca

SEQ ID NO: 402081 - DNA, 611 bp, Homo sapiens
agaatgaaagctactgacttttacttagacttcttaccattcaccaagggcagtatggagcctgacaccagaatcaacacaggcctgaaaagccccagaaagggcaggagaactttccagctgctataagataaggtacttacttagtagcacttcctaaacccaaactgctagtgtgatgtgtctaactgctcggtgtcagtaccttgtcaaagagatggctactacttgatatgtttttaatttgcagctttgtggtrttacttgggaattagaaagccttttaaaattatgtagtcattttcccttaccaaactagttttaatttcctgcaagttgtgtgcaaagtgtacacagggtgaatgtcagtttggtgctcaaaggctagggagaaacatcacgcaggttggcaatttaatcaccaccatccagttcaagattccatcaggcttgtgacttcccaagttctaaccatctattaagctgtacaacttttacaaaggcagaaaggaaagaggggtacatgctgaggaatgatgtattggaattgtaaagctaggacagcacaaaaaccccataaatattcttcttaatgttttactttatatgac

SEQ ID NO: 402082 - DNA, 584 bp, Homo sapiens
gtaattcatttgggaatatgcagaacaactcaattttaataacggatttctattttcaattgctcctgaagacttgctgtttttactcagaacaccaatcacaagagacaacaattcctcctctgtgtgtgcagccaccaagaggaaggagttgctaaaattcctaggctgcccaagtacatccattagcagagaatcaagtctatccacggatttctaaaaggtgtgaactattttacagtrtttatattttaccggatttcaaggggtatttgtaaaaaaataaaggcttacaaagtaagcctttgtaaataaatgatttactagtgtagccactgacccacgatattattccctctgtttttgtaactcagtgaaagctttaaaattctctgagttggggctccagggagtagcctccaatttgttcaaacaaaggaatctacagcaaatcccatgaactcatctgctaaatagtctccaaaatttgatgttcagatgttcttctatggacatgggcatttcagcatgttatggacagcagacttgtctgtggaaatgtagttgctttgattggcagatgt

SEQ ID NO: 402083 - DNA, 618 bp, Homo sapiens
gaaaggaatggaattgaatgaaatgaaatggaatagtatgaaatggaatggaatgaaatggaattgaatggaatggaaaggaatggagtgggatggaatggaaacaaattgaatggaatggaatgacatggaatggaatcaaaggsaatagaatcgaatgaaatagaatctaatggaatggaatggaatggaatggaatggaatggaattgattcaaatggaatgtactcgaatggaatacactcaaatggagtggagtgtaatggaatggaaaggactcgaatattatgggctggaatgaaatggaatcgaatggaatggactcgaatggaataaaatggattggaatggaatggaaaggaatggacttgaatgtaatggagtggaatgtaattgattgtaatggaatggatttgaatggaatggtttcgaatgtaatgttatataacggaacggaatgaaatggaatggaatggaaaggaaaagaatggattggaaaggactcgaatgtagtgggctccattggaatggaatccaatggaatgaaatagaatggaatggaatccaatggaatcgaatacaatggaatggaatccaaaggaatggaatcaaatggaa

SEQ ID NO: 402084 - DNA, 618 bp, Homo sapiens
gaaaggaatggaattgaatgaaatgaaatggaatagtatgaaatggaatggaatgaaatggaattgaatggaatggaaaggaatggagtgggatggaatggaaacaaattgaatggaatggaatgacatggaatggaatcaaagggaatagaatcgaatgaaatagaatctaatggaatggaatggaatggaatggaatggaatggaattgattcaaatggaatgtactcgaatggaatacactcaaatggagtggagtgtaatggaatggaaaggactcgaatattatgggctggaatgaaatggaatcgaatggaatggactcgaatggaataaaatggattrgaatggaatggaaaggaatggacttgaatgtaatggagtggaatgtaattgattgtaatggaatggatttgaatggaatggtttcgaatgtaatgttatataacggaacggaatgaaatggaatggaatggaaaggaaaagaatggattggaaaggactcgaatgtagtgggctccattggaatggaatccaatggaatgaaatagaatggaatggaatccaatggaatcgaatacaatggaatggaatccaaaggaatggaatcaaatggaa

SEQ ID NO: 402085 - DNA, 511 bp, Homo sapiens
ctctaatgcaaatagatctgtgaaccactcctgaatacctatgtccaagcatcttaaagttttatataaggatttcagaaactgatttctgggttgggcatggtggctcgtgtctataatcccagcactttgggacgctgaggcaggtggatcatttgaggtcaggagttcaagaccagcctggccaacaaggygaaaccccatctctaatagaatacaaaaattagcaggtggtaatggcacatgcctgtaatctcagctacttgggaggctgaggcaggagaattgcttgaacctgggaggccgggttgcagtgagccaagatcatgccactgcacttcagtctgggagacagagtaagaccttgtcccaaaaaaaggaaagaaaaggaaactgatttctgcccaaatctccatctgtagccctttccccatctgcagccctttccccatctgcctttttctctggaattactgagctgctggtaatggccccctcaccattcctcttt

SEQ ID NO: 402086 - DNA, 511 bp, Homo sapiens
ctctaatgcaaatagatctgtgaaccactcctgaatacctatgtccaagcatcttaaagttttatataaggatttcagaaactgatttctgggttgggcatggtggctcgtgtctataatcccagcactttgggacgctgaggcaggtggatcatttgaggtcaggagttcaagaccagcctggccaacaaggcgaaaccccatctctaatagaatacaaaaattagcaggtggtaatggcacatgcctgtaatctcagctacttgggaggctgaggcaggagaattrcttgaacctgggaggccgggttgcagtgagccaagatcatgccactgcacttcagtctgggagacagagtaagaccttgtcccaaaaaaaggaaagaaaaggaaactgatttctgcccaaatctccatctgtagccctttccccatctgcagccctttccccatctgcctttttctctggaattactgagctgctggtaatggccccctcaccattcctcttt

SEQ ID NO: 402087 - DNA, 511 bp, Homo sapiens
ctctaatgcaaatagatctgtgaaccactcctgaatacctatgtccaagcatcttaaagttttatataaggatttcagaaactgatttctgggttgggcatggtggctcgtgtctataatcccagcactttgggacgctgaggcaggtggatcatttgaggtcaggagttcaagaccagcctggccaacaaggcgaaaccccatctctaatagaatacaaaaattagcaggtggtaatggcacatgcctgtaatctcagctacttgggaggctgaggcaggagaattgcttgaacctgggaggccgggttgcagtgagccaagatcatgccactgcactycagtctgggagacagagtaagaccttgtcccaaaaaaaggaaagaaaaggaaactgatttctgcccaaatctccatctgtagccctttccccatctgcagccctttccccatctgcctttttctctggaattactgagctgctggtaatggccccctcaccattcctcttt

SEQ ID NO: 402088 - DNA, 511 bp, Homo sapiens
ctctaatgcaaatagatctgtgaaccactcctgaatacctatgtccaagcatcttaaagttttatataaggatttcagaaactgatttctgggttgggcatggtggctcgtgtctataatcccagcactttgggacgctgaggcaggtggatcatttgaggtcaggagttcaagaccagcctggccaacaaggcgaaaccccatctctaatagaatacaaaaattagcaggtggtaatggcacatgcctgtaatctcagctacttgggaggctgaggcaggagaattgcttgaacctgggaggccgggttgcagtgagccaagatcatgccactgcacttcagtctgggagacagagtaagaccttgtcccaaaaaaaggaaagaaaaggaaactgatttctgcccaaatctccatctgtagccctttccccatctgcagccctttccccatctgyctttttctctggaattactgagctgctggtaatggccccctcaccattcctcttt

SEQ ID NO: 402089 - DNA, 563 bp, Homo sapiens
gaccagaaacaggaatccttgcaaagactttccagctgctactggaaaagagctcaaaagagatcaatgtattactctggctactactctttggggacggtgctgggtggtttacttagttgtagctatttgctctgccctacatatagcaaggcccaaattcacctgccattttacctcccacagaaaaaccgctggaaatatcactcctttaagagcttatccgctaggaaccacacctcacattcagagagaagctgaagaaacaccagggaggtgtggcaggctgctgggcagtactatatgatgtgaaaaatatatagaaagaaaaccatcaatgcccttttactaccagaatgttccagtgcttgcccttctccctagtaggggaaaaaaattctttttcacctcacagaaagcaaaactctcttgcwatccctcatgacagaatctagttgtaagtgagtcacatcatcataatacaggctgttatcaaccccatcagtcaaaggaagaggatcagtgaggaacatatgtatttacctatagcattcactgcctgg

SEQ ID NO: 402090 - DNA, 563 bp, Homo sapiens
tctttttttgaggagagaactcagataaaacagatccaagtttcaagctttaacagcagggtcaatttttacgttcatccaaaaaaaacacatccatcaaagtgggtgcatgatgcacttacccattcaattgtgtcaatgtaagcaatgattctgtagttcctctttgttcttycaaaatctgaaataaacaattgaatttatattatatgctaaacctaaagaaaatacatcttgtgcacttgaggccagaagagatagaagtaaaacttattactaatagcctatgagagagtcaactttgggaacactataaaaaactcaaaaaaagtaataaacgcataaaacttacagattaacaggtgctatttcagaattcttctaaataccaagtatcgacatgaccttatcaatatttgcattaccaaccatacaataagaacctgacttctgactatactgagataagggataaatgtgtactttaccttaaatggcaaagtgcatcatgtacccacttcgagattcacaacagggaaaactgatttgaaaaattgttgctt

SEQ ID NO: 402091 - DNA, 549 bp, Homo sapiens
gattgatctataccttgtccagtgcttcaatgtgtgcaccatgggaaagcagtttttctgccagtgaggtgctctcactatacacrgcataatggagagcagtgttgccgtagatatccttaaggtttggattggcgccatgtttcagcagaataacggcacaagcctcttcctggcaatggacagcctgtccgtgttagaccaagaaacagattgtaaattccaagaattcaaaatacacattccacaggtttcaccaactagttacatgtaaatgagatcaatttattttaattctatatatgtaaatcaaatccatgtcatgctgaaatagttggctctaatatacctgtatcaaaggcgttctgttttctttgtcacagatatcaatctggcattttctgttaaccaggagagtgaccacttgcacatggccactggcacaggccaagtgtagagcagttctacgagagtaagaggattttttaagaaactgtagtacaatatctcaaaacatacaatcattcatgtaactgtaaaaattgaata

SEQ ID NO: 402092 - DNA, 549 bp, Homo sapiens
gattgatctataccttgtccagtgcttcaatgtgtgcaccatgggaaagcagtttttctgccagtgaggtgctctcactatacacagcataatggagagcagtgttgccgtagatatccttaaggtttggattggcgccatgtttcagcagaataacggcacaagcctcttcctggcaatggacagcctgtccgtgttagaccaagaaacagattgtaaattccaagaattcaaaatacacattccacaggtttcaccaactagttayatgtaaatgagatcaatttattttaattctatatatgtaaatcaaatccatgtcatgctgaaatagttggctctaatatacctgtatcaaaggcgttctgttttctttgtcacagatatcaatctggcattttctgttaaccaggagagtgaccacttgcacatggccactggcacaggccaagtgtagagcagttctacgagagtaagaggattttttaagaaactgtagtacaatatctcaaaacatacaatcattcatgtaactgtaaaaattgaata

SEQ ID NO: 402093 - DNA, 549 bp, Homo sapiens
gattgatctataccttgtccagtgcttcaatgtgtgcaccatgggaaagcagtttttctgccagtgaggtgctctcactatacacagcataatggagagcagtgttgccgtagatatccttaaggtttggattggcgccatgtttcagcagaataacggcacaagcctcttcctggcaatggacagcctgtccgtgttagaccaagaaacagattgtaaattccaagaattcaaaatacacattccacaggtttcaccaactagttacatgtaaatgagatcaatttattttaattctatatatgtaaatcaaatccatgtcatgctgaaatagttggctctaatatacctgtatcaaaggcgttctgttttctttgtcacagayatcaatctggcattttctgttaaccaggagagtgaccacttgcacatggccactggcacaggccaagtgtagagcagttctacgagagtaagaggattttttaagaaactgtagtacaatatctcaaaacatacaatcattcatgtaactgtaaaaattgaata

SEQ ID NO: 402094 - DNA, 621 bp, Homo sapiens
ttgcagttggcccctcaagtaatgtgtctctataatcatgaaaatctcctgggctacttgcagctcttcctcaagttttaaatatattttaaaattctacctcacaggaagccattcaataaaattctctgaatctgaagtaagtgagttggatttaatagagctaagcctcatccatgactcatgagtatccatgtatcaaacagggctttgtacttatttcaacagcacatattttaaaattggatcaatacagagcagataagcatggctactgcctagggatggcacacaaattcagaaaacattccatattttrcatagtcccaggaaggccatttgactatttgttgagtagctccaaggaagcagtgtgagcaaaaccaaaacaggtgacacgcaatattgaaattgtgattatcgctatgaaactattgatgtatggtgatctctgaaatgggaacagagctgagtaataaggggatgttacatgttgttagtacatgtcttggaaatgagaaaatgtcaacttgcatttccttcatggaactgaaaaacaatcaaagcagggttttgtcttgtctgttagttggagaggaccatggagatccagcagccaag

SEQ ID NO: 402095 - DNA, 621 bp, Homo sapiens
ttgcagttggcccctcaagtaatgtgtctctataatcatgaaaatctcctgggctacttgcagctcttcctcaagttttaaatatattttaaaattctacctcacaggaagccattcaataaaattctctgaatctgaagtaagtgagttggatttaatagagctaagcctcatccatgactcatgagtatccatgtatcaaacagggctttgtacttatttcaacagcacatattttaaaattggatcaatacagagcagataagcatggctactgcctagggatggcacacaaattcagaaaacattccatattttacmtagtcccaggaaggccatttgactatttgttgagtagctccaaggaagcagtgtgagcaaaaccaaaacaggtgacacgcaatattgaaattgtgattatcgctatgaaactattgatgtatggtgatctctgaaatgggaacagagctgagtaataaggggatgttacatgttgttagtacatgtcttggaaatgagaaaatgtcaacttgcatttccttcatggaactgaaaaacaatcaaagcagggttttgtcttgtctgttagttggagaggaccatggagatccagcagccaag

SEQ ID NO: 402096 - DNA, 621 bp, Homo sapiens
ttgcagttggcccctcaagtaatgtgtctctataatcatgaaaatctcctgggctacttgcagctcttcctcaagttttaaatatattttaaaattctacctcacaggaagccattcaataaaattctctgaatctgaagtaagtgagttggatttaatagagctaagcctcatccatgactcatgagtatccatgtatcaaacagggctttgtacttatttcaacagcacatattttaaaattggatcaatacagagcagataagcatggctactgcctagggatggcacacaaattcagaaaacattccatattttacatagtcccaggaaggccatttgactatttgttgagtagctccaaggaagcagtgtgagcaaaaccaaaacaggtgacacgcaatattgaaattgtgattatcgctatgaaactattgatgtatggtgatctctgaaatgggaacagagctgagtaataaggggatgttacatgttgttagtacatgtcttggaaatgagaaaatgtcaacttgyatttccttcatggaactgaaaaacaatcaaagcagggttttgtcttgtctgttagttggagaggaccatggagatccagcagccaag

SEQ ID NO: 402097 - DNA, 562 bp, Homo sapiens
tgctttactatttctctgaacatttaaacatgtaatctcattacatcttccaaacaacttagtgaagtaaggtagcagaatccttattttttagaagaagcctaagagaagcaacttgtctgaagacaaaatacctacagagcgaggtattttggttacagagcgaggacttactctgagtgcaggacactttgcatgatatccagctaactagagttcatttactgagctgtgcktcctccatttatgagtacttcactttcttttcttctttaattataagcttaataagcttgtaaggtttacaaatttgaagtgtatgggacattaaaattctgatattaggtctgatattgcctgaaagggttttggaatttaatatgtttggtaaatattttttatttcagtataaaaatagcaattttatttattacttttgtatacgtagaattcaacaacaaattttggaacataaacagaagatacttaaaaaggagaaatcaggtaagacttctgattgtgaatttcttacttctcttggtggtcctactcttgataagaa

SEQ ID NO: 402098 - DNA, 606 bp, Homo sapiens
tataccaaattggacttgttatacaaatggatcttcgatttcatttttataataaattgtttatatttagtaaayaaataactacagttgacccatgaataatgtgggggtgagggactctgatccctgtgcagttgaaaatctgagtataacttttgattccttcaccttagctactaatagcccacaattgactggaagccttcctgataacataaacagttgatgaacacctattttgtttgtgctgcattattatatactgtgttcgtacaataaaataagctagagaaatgaagctgttagaaaggaaatcatcaggaaaaacatattgacttttcataaagcataagtagtcctgacaaaggtcttcatgatcttcaggttgattaggctgaggaggaagaggagaggtggatcttgctgtctctctgttgcagaggcagaagaaaatctgcatataagtgaatccctgcagttgaaacccttgctgttcaagggtgaactgtattacatattgatttgtgtcactaagaaagtaactatctttagaaccgggaactcagcaatccctttctggtaccgtaaataaatggcaataagaac

SEQ ID NO: 402099 - DNA, 606 bp, Homo sapiens
tataccaaattggacttgttatacaaatggatcttcgatttcatttttataataaattgtttatatttagtaaataaataactacagttgacccatgaataatgtgggggtgagggactctgatccctgtgcagttgaaaatctgagtataacttttgattccttcaccttagctactaatagcccacaattgactggaagccttcctgataacataaacagttgatgaacacctattttgtttgtgctgcattattatatactgtgttcgyacaataaaataagctagagaaatgaagctgttagaaaggaaatcatcaggaaaaacatattgacttttcataaagcataagtagtcctgacaaaggtcttcatgatcttcaggttgattaggctgaggaggaagaggagaggtggatcttgctgtctctctgttgcagaggcagaagaaaatctgcatataagtgaatccctgcagttgaaacccttgctgttcaagggtgaactgtattacatattgatttgtgtcactaagaaagtaactatctttagaaccgggaactcagcaatccctttctggtaccgtaaataaatggcaataagaac

SEQ ID NO: 402100 - DNA, 606 bp, Homo sapiens
tataccaaattggacttgttatacaaatggatcttcgatttcatttttataataaattgtttatatttagtaaataaataactacagttgacccatgaataatgtgggggtgagggactctgatccctgtgcagttgaaaatctgagtataacttttgattccttcaccttagctactaatagcccacaattgactggaagccttcctgataacataaacagttgatgaacacctattttgtttgtgctgcattattatatactgtgttcgtacaataaaataagctagagaaatgaagctgttagaaaggaaatcatcaggaaaaacatattgacttttcataaagcataagtagtcctgacaaaggtcttcatgatcttcaggttgattaggctgaggaggaagaggagaggtggatcttgctgtctctctgttgcagaggcagaagaaaatctgcatataagtgaatccctgcagttgaaacccttgctgttcaagggtgaactgtattacatattgatttgtgtcactaagaaagtaactatctttagaaccgggaactcagcaatccctttctggtaccrtaaataaatggcaataagaac

SEQ ID NO: 402101 - DNA, 554 bp, Homo sapiens
ttttctccagttatacaatttacttgaatgatgcacaattaatcaattattattatcatagtagatggggtctctctatgttgcctaggctagaatacagtgtctattcattggtgmaatcatagctgactgtagccttgaactcctgggctcaagcagtcctcctacctcatcctcctgagtagctgggactacagttttgtgtggttacatctggcctgatacacaattatttatttgtttatttatttttaatacagggtctccctctgttgtcagtactggtgtgcagtggtgccatcttggctcactgcaacttctgcttgctggccttaaatgatcctttcaccttagcctcccaagtagctgggactacaggcatgcactaccacacttggctaattttctttttaagggtttttttgtttgtttgtttgtttgtttaatagatgaggtctcactatattgccgaggctggtctggaacttctgggctcaagtgatcctcctgcctcaacctcccaaaatgcttggatttacaagtgtgagccactg

SEQ ID NO: 402102 - DNA, 554 bp, Homo sapiens
ttttctccagttatacaatttacttgaatgatgcacaattaatcaattattattatcatagtagatggggtctctctatgttgcctaggctagaatacagtgtctattcattggtgcaatcatagctgactgtagccttgaactcctgggctcaagcagtcctcctacctcatcctcctgagtagctgggactacagttttgtgtggttacatctggcctgatacacaattatttatttgtttatttatttttaatacagggtctccctctgttgtcagtactggtgtgcagtggtgccatcttggctcactgcaacttctgcttgctggccttaaatgatcctttcaccttagcctcccaagtagctgggactayaggcatgcactaccacacttggctaattttctttttaagggtttttttgtttgtttgtttgtttgtttaatagatgaggtctcactatattgccgaggctggtctggaacttctgggctcaagtgatcctcctgcctcaacctcccaaaatgcttggatttacaagtgtgagccactg

SEQ ID NO: 402103 - DNA, 554 bp, Homo sapiens
ttttctccagttatacaatttacttgaatgatgcacaattaatcaattattattatcatagtagatggggtctctctatgttgcctaggctagaatacagtgtctattcattggtgcaatcatagctgactgtagccttgaactcctgggctcaagcagtcctcctacctcatcctcctgagtagctgggactacagttttgtgtggttacatctggcctgatacacaattatttatttgtttatttatttttaatacagggtctccctctgttgtcagtactggtgtgcagtggtgccatcttggctcactgcaacttctgcttgctggccttaaatgatcctttcaccttagcctcccaagtagctgggactacaggcatgyactaccacacttggctaattttctttttaagggtttttttgtttgtttgtttgtttgtttaatagatgaggtctcactatattgccgaggctggtctggaacttctgggctcaagtgatcctcctgcctcaacctcccaaaatgcttggatttacaagtgtgagccactg

SEQ ID NO: 402104 - DNA, 554 bp, Homo sapiens
ttttctccagttatacaatttacttgaatgatgcacaattaatcaattattattatcatagtagatggggtctctctatgttgcctaggctagaatacagtgtctattcattggtgcaatcatagctgactgtagccttgaactcctgggctcaagcagtcctcctacctcatcctcctgagtagctgggactacagttttgtgtggttacatctggcctgatacacaattatttatttgtttatttatttttaatacagggtctccctctgttgtcagtactggtgtgcagtggtgccatcttggctcactgcaacttctgcttgctggccttaaatgatcctttcaccttagcctcccaagtagctgggactacaggcatgcactaccacacttggctaattttctttttaagggtttttttgtttgtttgtttgtttgtttaatagatgaggtctcactatattgccgaggcyggtctggaacttctgggctcaagtgatcctcctgcctcaacctcccaaaatgcttggatttacaagtgtgagccactg

SEQ ID NO: 402105 - DNA, 355 bp, Homo sapiens
ttagagtaaatacactgtttctataagcactttagacacagtgagccaytcttctcagggaatggtggaaaccctcccatttccaatttcctaaacaccagccaagggccagccttgcatgcaggcctttctaaggatggatggcagcctcttgcctgctatatgaaatcttttctgcacaacacttgtaaccccaacttaatttttggtgttgttttaaaatttcattttaataacataatattataagataaggtaacttggtactaatttctgttgtatgatccatcttaagttgcagtgctggttacttttttggcttttggtgatgaacagctatttgtatataagttac

SEQ ID NO: 402106 - DNA, 355 bp, Homo sapiens
ttagagtaaatacactgtttctataagcactttagacacagtgagccattcttctcagggaatggtggaaaccctcccatttccaatttcctaaacaccagccaagggccagccttgcatgcaggcctttctaaggatggatggcagcctcttgcctgctatatgaaatcttttctgcacaacacttgtaaccccaacttaatttttggtgttgttttaaaatttcattttaataacataatattataagataaggtaacttggtactaatttctgttgtatgatccatcttaagttgcagtgctggttacttttttgrcttttggtgatgaacagctatttgtatataagttac

SEQ ID NO: 402107 - DNA, 339 bp, Homo sapiens
tcatatcaaagaactggctgtctcaaaaaaaattagccaaagcatctatatgcaacttaatcacatcttattcmctcatgtcagtgaaacttctctctctgaggcctgacagttatcaagtgaaatgagctgctgtggtttaccccaactctagcactccctcctgcctccagtactctccacagcaataacctcttttgtgagactgggcatatgctgaagcaactggaagtgagttgtctcaagtttacttggcttcaactcccaagaccccagcaaatgtctttctttcctccctccgtgtgctttcacaatccctcttcctttgaaaaattgatt

SEQ ID NO: 402108 - DNA, 339 bp, Homo sapiens
tcatatcaaagaactggctgtctcaaaaaaaattagccaaagcatctatatgcaacttaatcacatcttattccctcatgtcagtgaaacttctctctctgaggcctgacagttatcaagtgaaatgagctgctgtggtttaccccaactctagcactccctcctgcctccagtactctccacagcaataacctcttttgtgagactgggcatatgctgaagcaactggaagtgagttgtctcaagtttacttggcttcaactcccaagaccccagcaaatgtctttctttcctccctccgtgtsctttcacaatccctcttcctttgaaaaattgatt

SEQ ID NO: 402109 - DNA, 589 bp, Homo sapiens
aactggttatttgcagcaaaatacatgttattcaattagatgaagtgccttatataaactcttcatggacaactcataaaccacacaaaaattcctttgcaatacacattttgagaacataaatttaaatttctatatttccacaatttatatttttaaatcagatacgatgttgcccaggctgttctcaaactcctgggttcaagcaatcttcctgcctcaaattcccaagtagcagggactacaggtgtacaccaccacactcagttatttttctacaatttttaattttttttgtctcactacagaaccaataatataagtagaaaaacaatctctcrtaaaaacaataggataccaaaataataagtttccaagatcaaaagctatatgctatgtgctgaatatttttgccactaaaaatcaccaggaggatcccatgattactgcaaataatttgatccactgaagatttatacaggcataaatattaagaaagtcacactcgtatgatttaaaagtcaaagtattagtatttatccaaataaaccttaaccaaatttcacatttcctctattggagaaagcat

SEQ ID NO: 402110 - DNA, 589 bp, Homo sapiens
aactggttatttgcagcaaaatacatgttattcaattagatgaagtgccttatataaactcttcatggacaactcataaaccacacaaaaattcctttgcaatacacattttgagaacataaatttaaatttctatatttccacaatttatatttttaaatcagatacgatgttgcccaggctgttctcaaactcctgggttcaagcaatcttcctgcctcaaattcccaagtagcagggactacaggtgtacaccaccacactcagttatttttctacaatttttaattttttttgtctcactacagaaccaataatataagtagaaaaacaatctctcataaaaacaatakgataccaaaataataagtttccaagatcaaaagctatatgctatgtgctgaatatttttgccactaaaaatcaccaggaggatcccatgattactgcaaataatttgatccactgaagatttatacaggcataaatattaagaaagtcacactcgtatgatttaaaagtcaaagtattagtatttatccaaataaaccttaaccaaatttcacatttcctctattggagaaagcat

SEQ ID NO: 402111 - DNA, 589 bp, Homo sapiens
aactggttatttgcagcaaaatacatgttattcaattagatgaagtgccttatataaactcttcatggacaactcataaaccacacaaaaattcctttgcaatacacattttgagaacataaatttaaatttctatatttccacaatttatatttttaaatcagatacgatgttgcccaggctgttctcaaactcctgggttcaagcaatcttcctgcctcaaattcccaagtagcagggactacaggtgtacaccaccacactcagttatttttctacaatttttaattttttttgtctcactacagaaccaataatataagtagaaaaacaatctctcataaaaacaataggataccaaaataataagtttccaagawcaaaagctatatgctatgtgctgaatatttttgccactaaaaatcaccaggaggatcccatgattactgcaaataatttgatccactgaagatttatacaggcataaatattaagaaagtcacactcgtatgatttaaaagtcaaagtattagtatttatccaaataaaccttaaccaaatttcacatttcctctattggagaaagcat

SEQ ID NO: 402112 - DNA, 589 bp, Homo sapiens
aactggttatttgcagcaaaatacatgttattcaattagatgaagtgccttatataaactcttcatggacaactcataaaccacacaaaaattcctttgcaatacacattttgagaacataaatttaaatttctatatttccacaatttatatttttaaatcagatacgatgttgcccaggctgttctcaaactcctgggttcaagcaatcttcctgcctcaaattcccaagtagcagggactacaggtgtacaccaccacactcagttatttttctacaatttttaattttttttgtctcactacagaaccaataatataagtagaaaaacaatctctcataaaaacaataggataccaaaataataagtttccaagatcaaaagctatatgctatgtgctgaatattyttgccactaaaaatcaccaggaggatcccatgattactgcaaataatttgatccactgaagatttatacaggcataaatattaagaaagtcacactcgtatgatttaaaagtcaaagtattagtatttatccaaataaaccttaaccaaatttcacatttcctctattggagaaagcat

SEQ ID NO: 402113 - DNA, 632 bp, Homo sapiens
tgtagagctgttcatatgtgttttatatattaaggtgttccaatgctatgtgcctatatatttacaattgatatatcctcttgataaattgactcatttatcattatataatgactgtttcttttacagtttttgacttaaagtctattttgtatgatataggtatagctacccctgctcttttctagtttctatttgcatggaaagtctttctttcatttatttcctttcaatctatgtgtgtctttaaagctgaagtcagtcttttgtaggcagcatatagatgggttgtgtgtgtgtgtgtgtgtgtgtgtgtgtgcgctcgcacgcatgtaatctattcggccactctatgtcttttgaatagagaatgtagtccatttacatttaacataattattgagaggtaagaacttattattgccattttgttaattgttttctgactgtttggtaggttctttgtttctttcttcctcrtctgttatctttgtgatttatttattttatgtagtggtatgctttgatttctttctctttatcttttgtgtatctaatataggtacttttttgtggttactgttaggcttacataaaatatctgatagttacaataggctattttaatctaa

SEQ ID NO: 402114 - DNA, 628 bp, Homo sapiens
aatgaagagttttatgtggacagcacaaccccagctgcttcaggactgacaaccaaagtaacaggcatggggaacctcacagacaacacaaagctcatctcttttatatttataaggcaacatttcctctatccattcttcagtaccttttccttatcttcctcctgggtctgcatcttagctctaaccaagtggttgtcaactcagtgtgagtgtcggaattacctgtgtagatattcaaatatcacacatgatctattcatgtggtagggccaccataataataccagagactggatggcttaaacaacagaaatttattttctcacagttctggaggctagaaatccaggattaaagtttcaacagattttgtttcttctgacgcttctttccttggcttgtaggtggcsaccttgctctgccctcacatggtcatcccactgggcatgtgcacccctggtgtctctctgtgtgtccatatttcctcttctgacaaggacaatagtcagactggattcaggcacaccctaacagcctcgttttaacttaatcacttctttaaagacccccatgttcacatacagtcacattctgaggtactagagttgagagcttcaacatggga

SEQ ID NO: 402115 - DNA, 568 bp, Homo sapiens
agacctgagtcaccacacccaacctagaatgcatttttgatggggtcatttcttctgctttaaaataatacgagtaataaaggttcagtcacgttttatgtctcatatccatctgacatcagtggagaagtttgctgagaggtcagcatattatactcatattattttgtttgcttatttgtttgttttgtctttactagtgtctcagcaaaaactataaacttacaatgtttgattacttattttatacaatttatcctatcaataaagtgctttaattttgagagtatttkgtcatatagaaattttctcagtattattacttttaaaatgtaatcaacaaccacaaataggacaactgactgcttcaaatactatgtaataaggaaaaatagattaagcccaacaaaatgagaatattttaataacaattttttttcagtctctgagccataaagcaaacgttgactttcactttgatatatcccatatcagcctcttccttaggaagagaaagtccagaatttgacctgcatctctaaatctagacaaatatatttaaaatgaa

SEQ ID NO: 402116 - DNA, 565 bp, Homo sapiens
attgtgagggtatcacgaccttctgcccacccctatcagttcttttttttttttttttttttttttctgaratggagtttcgctcttgttgtccaggctggagtgcaatggcgcgatctcgggctcaccgcaaactttgcctcccaggttcaagcgattctcctgcctcagcctcccgagtagctgagattacaggcatgtgccaccatgcccagctaattttgtatttttagtagagacagggtttctccatgttgatcaggctggtctagaactcccaacctcaggtgattcacccacctcaacctcccaaagtggtgggattacaggcatgagccacctcgcccagctaggaaaaggcttaaaattttaactattgcatttaccacacgatcaggaaagtaaagtggaaacaccagaaatgggagtgcagacagttctgtcattaactcactgtgcaaccttgggtcatgcaaatgttctggtgcttaattccttagctgtaaatagatagtttctattcaatacagcagattattgagtgtgaagatacacacatacacac

SEQ ID NO: 402117 - DNA, 617 bp, Homo sapiens
ttataagccaaagtataaatgattatacatgttcatagtaatgtaaataaatgattgaatagataaatraataggaaagaagagttttttttttttacagaagactttaaataatatatgtatgtagatactcccccctccagaggtggagcttaataccaccacctccgtctaggtgaagtggatggagtgatttgcatccaaagaagaaagatggaaaggaaaacacagtaaatttacagtggcaagcaagaccttaattagccaagtgatgaatattagcatcaccagtgagaaatcatttgataccacacccccctgatatgatggaatgagaaatggcactccacttctgtgatattcttcctagaaatttacaacttcaacctagttatgagtaaaacatctgacaaaccaaaagtggggaattctataaaataagtgaccaatgctctttcaaattttcaaggtcatgaaagataagaaaataatgagaaattgtcagaggcctgaggagactaaagaagcatgcattatggtatactatcagaggtgaataccttactgccccatagaagtgcctccacaactcaagactcatgacatttttacagaaa

SEQ ID NO: 402118 - DNA, 543 bp, Homo sapiens
ggagtaaaccatactgtccaaacaaagcagagttcatggtgtgtgatcacccgagcatgaacatagtgttgctgctaataatgatgatgataatcatgctctcataagaatatgtgcccagtgtatttctgcattttacatttgttattgatcctgtgactgtggagctgctgtttatgttactcctgtctgacactcctktagtttaggtttagttaagaaacattttctgcctgatgtaacaaagtgtcatcctcaatcaacagccccaaggggctgtttctgttactaattttctggtgaatgctttgtcaccagctttcaatttcacttgctggagcaacttgtaaatataacaccatctgagaatgtcaaggcttttctgtttctgttttctggaattcatctatttctagaaatctatctataaccaccagcatttcagtctattttttagcagccacttgcgctgctgtcgatatggagtttatgatgaatggtggcttcatttgagttttcagttgcacatgactggggactgcc

SEQ ID NO: 402119 - DNA, 543 bp, Homo sapiens
ggagtaaaccatactgtccaaacaaagcagagttcatggtgtgtgatcacccgagcatgaacatagtgttgctgctaataatgatgatgataatcatgctctcataagaatatgtgcccagtgtatttctgcattttacatttgttattgatcctgtgactgtggagctgctgtttatgttactcctgtctgacactcctgtagtttagstttagttaagaaacattttctgcctgatgtaacaaagtgtcatcctcaatcaacagccccaaggggctgtttctgttactaattttctggtgaatgctttgtcaccagctttcaatttcacttgctggagcaacttgtaaatataacaccatctgagaatgtcaaggcttttctgtttctgttttctggaattcatctatttctagaaatctatctataaccaccagcatttcagtctattttttagcagccacttgcgctgctgtcgatatggagtttatgatgaatggtggcttcatttgagttttcagttgcacatgactggggactgcc

SEQ ID NO: 402120 - DNA, 517 bp, Homo sapiens
cccagtctcttctcccatgtagggtttcagtggagaggtccactgttagcctgatggggttccctttgtaggtgacctgccctttctctccagttccttttaatattctttctttcwttttgaccttggaaaatctgatgattgtgtgtcttggggatgatcttcttgtgtagaatcttgcagaagttgtttgtatttcctgaatttgattcttggctctgcagcaaagttggggaagtttttattgatgatgtcctgaaatgttctccaagttgtttgttttctcccactgcctttcagggatgccagtgattcatagacttggcctctttacacaatcccatgcctcatggaggttttgttcattcctttttctttatttttgtctgactgtcttatttcagagagccagtcttcaaattctgagattctttccacagcttggtttgttctgctgttaatactcatgactgcatcttgaaattttggtattgtgttattcagctctgtcagatct

SEQ ID NO: 402121 - DNA, 596 bp, Homo sapiens
aataaagctcttttctggatgttttaacagggctgatgctctgtgcagggtctttatttgaagctgacttcctacttttggtttcaaggagggggcatgttagtgaggtatttttggtgttgaagttttgggatgtgatccagtacatggtattagrtatactggtcatttggtagaccttctcggttgtgtgactcctctatgtttcctcaaagttttagccatgttccccctcaatgctctgaaattgtgggttcctctttcccttgagtgctggctgtagatcatggcatggcactcctggactcccactgcagctctggggtgatctcagtgtttatgttccttcccccaacttggaggcatcagaggaagggaccttagtagtggttgtggccaagggtcttttgtttgtctcctgggggctccaccccaaagagatcactcagtgcaatcagcccaggatggaggatggagggtctgtgctgtgggccaaagctggagtttccctgtctggtgatgagtgttggcagggggtggggggatgcaggaggacccatgggagagacactggcctcctccacttgggttgactg

SEQ ID NO: 402122 - DNA, 516 bp, Homo sapiens
agtacatttgtcacaattaatgaaccaatattgatatattataattaaagtagatacttttttgaaawtttttagtttttcccctaatatctttttcattttccagaatctgatccaggataccacattacatttcatcctcatatctccttagactactactaaaagtatatgtataaagtaatagggaccaagacattatgtataaagtaataggaaccaaggaaaataggcctctggggtgggaatttaaattaatggggctagaagttggattgtgttaatgtttgctgttgcaataggtgtcagagtcttaaaattgctctactcatctcatttttatctcgttcttgacttgagattttctaagtaccctccctcagagagaatctatgtcttgaatctcttcccactgtaatccattgttattatactggagccctgttggtgttgcaatgagatgtggaagagagatagcattctataatatcatgattaactcttggtctttcagtg

SEQ ID NO: 402123 - DNA, 534 bp, Homo sapiens
aacagctgataccacagaaatacaatgaattattagagactactatggaagactatacaccaacaaattgggaatcctagaagaaatggataaatttctggacacatacaacttaccaagattgaatcttgaagaaatagaaagcctgagcctatcaataactagtaatgagatcaaagccatataagttccccattgaagaaagaaagctcaagatctgatggcttcactcctgaattctaccaaacatttaaagaagaagctgtctcaattctactcaaattaaaaaaaattaaaatattgaagaggaaggaattatacctaactcatccctgactcattctatgatgccactgttcacctgtaaggacacaagaacaaaagaagactagaggccaatattcctaatgaacatagacatagacatcctcaacaaaatattaatactagcaaacagaattcaacaacacattaaaaaattattcwccataatcaagtcaaatcatttcaggagtgcaaggatggttgtacata

SEQ ID NO: 402124 - DNA, 538 bp, Homo sapiens
cgtgaacccaggaagcggagcttgcagtgagctgagattgcgccactgcagtccacagtccagcctgggcgacagagcgagactccgtctcaaaaaaaaaacgagtctggccactattctgtaagactgctatggtatgtggagggcctgctccagtccctagttacctcatattttccagtatctggaggtatcaacagtgaagtctgcaaaatagcaaagatggcggtcctctcctcactctgggagatctgtcccattgaggtacaaacctgttgctggcctgaacacactggtaggaggtagctggagagtccagttttgaggtcccaaccagtgaggagaaacaggattggggaccctctttaaaaagcagtctggtcacgktttcatacagcagctgagatgtgctggggcactgcttttgtccccagtgagctaggactcttcaaatcccaaaggctggaacaatcaagtcactgaaacagcaaagatggtggcctgccccttcctctgggggcatcatcccagggaggtt

SEQ ID NO: 402125 - DNA, 584 bp, Homo sapiens
cacaataaattaatacaggagtcagtatatgaaatagctgttataaaaaagaaccaagctgatatgatagagctgaaaaacacactataagaactgcataatgaaatcacaagtattaacagcagaatagacccagctgaggtaagaatctcagagctagaagactggctctctgaaataactcagaaaaaaattaaggaaaaagaataaaaaagaatgaacaaaatttcttaaaaatatagaattatgtaaagacgccaaatctacaaatcattgacatccctgaaagcgagggagaaagcaaacaactargaaaacatatttcaggatatcacccatgaaaacttccccaacatcactacagaggccaacattcaaatccgggaaatacaaataacccctgcagggtacaaaagaagaccatcctcaagacacataatcataagaatttccaagatcaaaatgagagaaaaaaatgttaaaggcagctagaaagaaggggaagttcacctaaaatgggaaacccatcaggctaatagtggatgtttcagcagaaaccttacaagctggaagggattaaggag

SEQ ID NO: 402126 - DNA, 572 bp, Homo sapiens
catatatatttgtgattattatacctcttgcttgaatgacccattagtcattatataatgtccttctttgtcttttttttaaaactattcctgaattaaagtctatttttcccaagtataactactccttctcttttggattccatttctatggaatatctttttccatcacttygctttcagtctgtgcgtatctttataggtgaagtgagtttcttgtagacagcatatagttggatcttatttttttatccatttagccactctatcctttaattgaataatttaatataatatatttatattcaaaattattattgatatgtaatggtttattaatgcctttttcttgttttctagatgttttatagattcttccttctttttcctttctggatgtcttttgtggttaagcgattttgtctggtagtatgttttgattccgagctatttattctcatatatgtattataggttttttctttgtggttatcataaggtataccaaaatgtattatagttataacagattattttaactgataacagcttaactttgatcacaaagaaaa

SEQ ID NO: 402127 - DNA, 572 bp, Homo sapiens
catatatatttgtgattattatacctcttgcttgaatgacccattagtcattatataatgtccttctttgtcttttttttaaaactattcctgaattaaagtctatttttcccaagtataactactccttctcttttggattccatttctatggaatatctttttccatcactttgctttcagtctgtgcgtatctttataggtgaagtgagtttcttgtagacagcatatagttggatcttatttttttatccatttagccactctatcctttaattgaataatttaatataatatatttatattcaaaattattattgatatgtaatggtttattaatgcctttttcttgttttctagatgttttatagattcttccttctttttcctttctggatgtcttttgtggttaagcgattttgtctggtagtatgttttgattccgagctatttattctcatatatgtattataggttttttctttgtggttatcataaggtwtaccaaaatgtattatagttataacagattattttaactgataacagcttaactttgatcacaaagaaaa

SEQ ID NO: 402128 - DNA, 571 bp, Homo sapiens
gctttgtaaaaacttcagccagggatttgggccttgccgcagatagtgctccatgcaggaatgtggcatctggaagtgtcttcaatgtggcattgccactaatcagtgcacagagtagccaaatgagttctgcgtaccagtcactgcaatcatcacctcactctttgttcccaattcaccctggtttgttcagctctgctgggcctcataatgactcctgcaagatgggaccagagtgggctccctgaaaagatttccgaccattggagagataaaatgttcacctcccaatccytccactcacctcaaaaatcatgggcttaggatgattatctgtgagtcacattatgctggtttggagaagggattggcataatccaaaatgatggtttatcttattggtcatggttactcctgtttctgtgggatcaagatgtttctctgcttctctttggagttctggtgaattcagggtggtattcttttccttgaatagtttctagctgtatgttcatggggcaagtgatgccatgggatctactatttggccatcttgctgatgtcattctga

SEQ ID NO: 402129 - DNA, 571 bp, Homo sapiens
gctttgtaaaaacttcagccagggatttgggccttgccgcagatagtgctccatgcaggaatgtggcatctggaagtgtcttcaatgtggcattgccactaatcagtgcacagagtagccaaatgagttctgcgtaccagtcactgcaatcatcacctcactctttgttcccaattcaccctggtttgttcagctctgctgggcctcataatgactcctgcaagatgggaccagagtgggctccctgaaaagatttccgaccattggagagataaaatgttcacctcccaatccctycactcacctcaaaaatcatgggcttaggatgattatctgtgagtcacattatgctggtttggagaagggattggcataatccaaaatgatggtttatcttattggtcatggttactcctgtttctgtgggatcaagatgtttctctgcttctctttggagttctggtgaattcagggtggtattcttttccttgaatagtttctagctgtatgttcatggggcaagtgatgccatgggatctactatttggccatcttgctgatgtcattctga

SEQ ID NO: 402130 - DNA, 404 bp, Homo sapiens
ctgttgagaacaattgccctagggataaatgagatgagggaccagagctgattctacctgggtgtaaaggtaataaatggacatttcttacacacctgtgtaaatctgtacaccgagaatctttgttgtttttgatatttatcaacgtttattcactttaggagttgacatgtgactaagaggggacaaaaaccaatgttttaaactaactgcatagtcattttatggatataaatcttagtgtgtttgatttaaatgggttgctgtagaatttggtaagaccttttaagttatgtcagagagaatttgttccagagcaattatgatgcttgcagccaacttaatattcattttcataattattttccaatacatgaaatgytgtaaaaagaccagaacaaatg

SEQ ID NO: 402131 - DNA, 510 bp, Homo sapiens
ggccataaagtttctgccctcgtgaataggttaatgccattattgcaagagtgggttccttataaaaygacaaattcagcccccctttgcctccctcttgcctctcctggcccttccatcatgggatgatgcagcaagaaagtcctcatcagataccagtcttgatcttggacttcccaacctccagaaccatgagtcaatacctttctattcattattaattactaagtctgtcttattgttttatagcagcataaaatggactaagacaggcccagtgtgattgccatcatatctttcaaatatggaaaaaggaggcagaagagttaatgtcagactgatgcaatgtgagaaagactttactggctcttgctggctttgaagatgaaagaaatacatgagccaaggatggtgggcagcctctagaagctggaaaaggcaagaaaatatattatcccccagaagctccagaaggaaccagccccctgacaccttaattttagcccagtg

SEQ ID NO: 402132 - DNA, 483 bp, Homo sapiens
cactcatttttaatcttgtgttgaaatttggycttcaatattagaggtggggcctaatgggaggtgtttgggtcacaaggttgaatccctcatgaatagattaatgtcctccctggggtgggggaagtgagcgagtgagttcttattctatcagttccctctagagctgcttgttaaaaacaaaacaaaaccaaaaacagcctagcgcctcttcccgctctattgcttcctctcttgccatgtgatctctgcatgcactggctctccttcaccttctgccatgagtggaaggagcctgaggtgcagatacttgcaccgtgcttcttctacagcctacagaaccataagccaaacgaatctcttttctttataaattgcccagcctcagatattccttcatagcaacacaaaaaggacttagacaaccatgttacagacatttctatcccctaaacaggttcctctttggccccttctaatcca

SEQ ID NO: 402133 - DNA, 598 bp, Homo sapiens
cagaactataagataataaatttgtgttgttttcagctactaaatttgtatcaatttgttacagaagcaataggaaactaatatgtagaatacaatttatagatcctaagtatatagttgggtaagtcttaacaaacatcttcactcatttttaatcttgtgttgaaatttggccttcaatattagaggtggggcctaatgggaggtgtttgggtcacaaggttgaatccctcatgaatagattaatgtcctccctggggtgggggaagtgagcgagtgagttcttattctatcagttccctctagagctgcttgttaaaaacaaaacaaaaccaaaaacagcctagcgcctcttcccgctctattgcttcctctcttgccatgtgatctctgcaygcactggctctccttcaccttctgccatgagtggaaggagcctgaggtgcagatacttgcaccgtgcttcttctacagcctacagaaccataagccaaacgaatctcttttctttataaattgcccagcctcagatattccttcatagcaacacaaaaaggacttagacaaccatgttacagacatttctatcccctaaaca

SEQ ID NO: 402134 - DNA, 591 bp, Homo sapiens
gctgcttgttaaaaacaaaacaaaaccaaaaacagcctagcgcctcttcccgctctattgcttcctctcttgccatgtgatctctgcatgcactggctctccttcaccttctgccatgagtggaaggagcctgaggtgcagatacttgcaccgtgcttcttctacagcctacagaaccataagccaaacgaatctcttttctttataaattgcccagcctcagatattccttcatagcaacacaaaaaggacttagacaaccatgttacagacatttctatcccctaaacaggttcctctttggccccttctaatccaattatacttcctcaaacagagggaatcacagtttgaattcctatcagattaaattactcttgcctattcttgaacttcatataaatgaaattataaagtattcattcccttgtgtctgacttttttctttcaatatactgattttgatattcatacaagtgaatgtatcagtagttcaaacccttttattgcttagtagtatagcattgtcagcacatatcagatcagtatcatgcctggaattgacastgttgcttctgtcatagtatattg

SEQ ID NO: 402135 - DNA, 524 bp, Homo sapiens
gttttattggtaaacactatagagaagattgagggatagcgttgcagtgcagattatatgtagagagaaaattgacttctataatagacttggctattgggaaaaacaaccatgttggtgttttggaaaaaagcaaccatactggtgatatcagaagaaataaatacacataagtttctgtggggattaaraaaaatatatcttgacaagagacatatcttgtctgatggtggatgtcactatcttctttgtaagaaggctatagtaatgagggcaacattttctccttttcagcagttttcatcttattttctgagggatttttgtggcttaatgcatagtccagctggggaatccttctatgtatggatcccaaaggtccattctgtatgtcaccaactaggatgggttgtcagcatcatgcttagttctcagggatagttctgtcaccctaataacatggtgacacctcacctttatgctaacagaatacaatgtttattgctgcaactcttaaaaaggac

SEQ ID NO: 402136 - DNA, 614 bp, Homo sapiens
aagccaaggaaagttatgacattacaagaaaaagttgaattacttgatatgtaccataggttgaggtctgtagctgcagttgctcaccattttagacaagtggttcaacttgtagacagatgcataaatttatgatatccataaatacattatagtactgtaaatgtattttctcttccttatgattttcctagtaatattttcttttctctagtttgctttattctaagagtagagtatatataacatgcaaagttaaaaaaaaaaaaacctagatgacggattgatgtgttcagcaaaccaccatggcacatgtatacctatgttacaaacctgcacgttctacacatgtatcctagaacttaaagtatactaacaaaaagagtaaggaaaaaagataaaaataaattgtaaataaataacttgtttctacgggcattgcaatacataaaacactaagaatgcctttctgactaatagaatagagacaagaaaayttaaatcaacttccaaagtttatccctggaagaaagcaaattactgagaattaaataatcaatggattgtccctgttccttctgcacatcacttaagacagttttcaatgcctcaca

SEQ ID NO: 402137 - DNA, 524 bp, Homo sapiens
cagttcacactggagatacatgtatacaattgcttatgaaaggtttcaatagagggcagtaaaatgtctttgaggaaggggtgggtatcagtcaggtacctaataggaaactgagtccaactctgataattcaaaaaatattaattaaaagactaccccgctactcctcccatgtgtgcagagggccgaggaaaccaataagggatactgcactcactggcaagagcaggaagccaggaccaattggttttcacatattggttattccctaatcaataagggaaaccaataagggatattgcactcagacactggcaagagcagaaagccagcaccactcccagacctgaaggagcaagagcgagtagggctatcagaatctagtgaaagctagagttgtgggggaagggcctccctctcaacaggaggtacaartgtggatggatgctggcaccagcataaatgcaggcccaagtgggtaaggagcagggaaaatgttccatttttccttccaccagtttaat

SEQ ID NO: 402138 - DNA, 407 bp, Homo sapiens
aagtttgcatcttctagattacagcgcacagatcaatctttcctagttcaacaggggaagaaayccacttgataacctgctttttggcttaccattaactcaggaatggtcatccttgggactctcatacgtgcttacataacagatactgaaagagctggaccaataataaccaatattaaaagcatttgttatggtgtctggctctgttctaggggcttgttatgtattagccagtttaacttttatagtaaccctatgaggtaagtgctattcttatttccctttgacagatgaggaaagagagacagaaattaagcaacatgcccaaggtcagtcttaataaatgtaggatgtgaacccaggtgatctggagccacaatctgtatgattagccactgcacagt

SEQ ID NO: 402139 - DNA, 532 bp, Homo sapiens
actgcctctgcaaattctattgtcaactcccttccttgcataatctgtgccccaacttcctctttgaataagatcctgggcaggtttcacagcctttctcctggagaataaatgccttccagtaactttgaggcataagaacagtcatccttaggtaaataatacatgaggtacagcgtaatattaactttttaaagctccaaacaagcatctcctagcacctagctccccctagctactggcttgtacaggctttgatctggaagaggggccctgatkgtctgcttctctgtttattctaccaattccttctgctccccccagaggcttacccctatggcttcccctctcagagattgtcagtttggaaagaaaagtaggtaaggggggccttccttgcctgcattaagccatttgctcactctggccacactgatgcttaaaactgacttgttctctggggtgggttgctgtgagctctaggagaactccatgatcaggctaacacccagaaatcccctacgcaggttat

SEQ ID NO: 402140 - DNA, 580 bp, Homo sapiens
tggttttcattgtaatgtctcctttttcatctctgattttatttatttgtgtctttttttcttagtctggctaaaggtttgttaactttgtttttcaaaaaaaaaacaaaatttttgtcttgttgatcttttgtattattcttagtttcaacttcatttatttctactttaatacttattatttatttccttttactaatttggggtttggtgttttcttccttttccagttacttgaggtgtatcattatgttrtttatttgaagtctttctactactctgatgttttaggtatttattgccataaacttcccttttagaagtcctttgttgtatccaatcggttttgctacgttttactttcatttctatctgtctcaataaattttttaattgccttcttaatttcttcattgactcatttgttgtcaggagtatgttgtttaacttccacagatttgtacagtttctaatgttccttctgttattgatttctagttttattccattgtggtcagaaaagatatttgatataattttaacttttaaaaatttgtgggttttttttcaactttcattt

SEQ ID NO: 402141 - DNA, 568 bp, Homo sapiens
tagactctgataaatgctacatgacagaagtattacagtagagacattagtactctagtcccaggtctctccctaaattgatatagattacacggtcacttttctggtacttgttttcttttgttctcacgttgttatggggttttttttttgtttgtttggttggtttttgttgttgttgatttttgttttttgtgtttttttgagattgagtctcactctttcaccaggttagagtgcagtggcacaatcttggctcactgcaacctccrcctcctgggttcaagtgattcttctgcctcagcctcccaaatagctgagactacaggtgcatgccgccacacccagctaatttttgtatttttagtagagacagggtctcaccatgttggccaggatggtcttgttctcttgacctcataatcagaccaccttggcctcccaaagtgctaggattacaggcgtgagccaccgcacccagacatgagtttttatgtaaaattttttctaaggaatttaaacctggtttggtgtgaggcaggctccaaatcttcataatttttcacat

SEQ ID NO: 402142 - DNA, 566 bp, Homo sapiens
tgaggagaagaaagtggaagcaaagaaagaagaatccgagaagtctgatrgtgacatgggctttggtctttttgacgaaacctcttttataatgtgttcaataaaaagctgaacttaaaaaaaaaaagtacttgaagaaataatggcttaaaaacatcacaagcatagcaaagatacaaaccttcagttgaagaagctgagagaagcccaaataggataaataagcccaacgaaatgcataccaagccacttaataaacatttgaaaactgcagacaaccacaaaacaaacatcttgaaagcagtcagggaaaaatgacacattaactagaagagaaaaatgattcaaaccacagcagcgttctcatgagaaaaaccgtggatgccagaagaaagtgccacaaaatttttcctttcctgctgaaaagaaagaactgtcaatccgtaatcctctgcccagcaaacatttttcctgaggcataacggggaaatgaaaacattctcagatgaaggaaaactgagagaatttgtcaccagctgacgaactctaacagaatgattaaaagg

SEQ ID NO: 402143 - DNA, 566 bp, Homo sapiens
tgaggagaagaaagtggaagcaaagaaagaagaatccgagaagtctgatagtgacatgggctttggtctttttgacgaaacctcttttataatgtgttcaataaaaagctgaacttaaaaaaaaaaagtacttgaagaaataatggcttaaaaacatcacaagcatagcaaagatayaaaccttcagttgaagaagctgagagaagcccaaataggataaataagcccaacgaaatgcataccaagccacttaataaacatttgaaaactgcagacaaccacaaaacaaacatcttgaaagcagtcagggaaaaatgacacattaactagaagagaaaaatgattcaaaccacagcagcgttctcatgagaaaaaccgtggatgccagaagaaagtgccacaaaatttttcctttcctgctgaaaagaaagaactgtcaatccgtaatcctctgcccagcaaacatttttcctgaggcataacggggaaatgaaaacattctcagatgaaggaaaactgagagaatttgtcaccagctgacgaactctaacagaatgattaaaagg

SEQ ID NO: 402144 - DNA, 617 bp, Homo sapiens
tggtggtaaaatgggcatccttgtcatgttccagatcttagaggaaaggctttcagtttttttgctgttcaatatgatactaactgtgggtttgtcttatatggcttttattatkttgaggtatgttctttttataccctgttttttgagagtttttatcatgaagggatattggattttatcaaatgctttttcagcatcaattgaaataatcatatgttttttatcttttattctattgatatatcacattgattaatttgtgtgtgttgaaccatccttgcattcctaagataaatcccacttggtcatgatgaatgattttttaatatgctattgaatctggtttgatagcattttattgatggttttattggcctgtagttttcttttattgatgtatctttgtctgatttttgcatcagggtaatactggacttgtagaatgagcttggaagtattccctcatcctctattttttggcatagtttgagtaggagtagtattagtttttctttaaatatttggtaaaattcagcagtgatggcatcaggtcctgggcttttatttgctgggagactttttactacagctttgatcttttgtttacttgttac

SEQ ID NO: 402145 - DNA, 617 bp, Homo sapiens
tggtggtaaaatgggcatccttgtcatgttccagatcttagaggaaaggctttcagtttttttgctgttcaatatgatactaactgtgggtttgtcttatatggcttttattattttgaggtatgttctttttataccctgttttttgagagtttttatcatgaagggatattggattttatcaaatgctttttcagcwtcaattgaaataatcatatgttttttatcttttattctattgatatatcacattgattaatttgtgtgtgttgaaccatccttgcattcctaagataaatcccacttggtcatgatgaatgattttttaatatgctattgaatctggtttgatagcattttattgatggttttattggcctgtagttttcttttattgatgtatctttgtctgatttttgcatcagggtaatactggacttgtagaatgagcttggaagtattccctcatcctctattttttggcatagtttgagtaggagtagtattagtttttctttaaatatttggtaaaattcagcagtgatggcatcaggtcctgggcttttatttgctgggagactttttactacagctttgatcttttgtttacttgttac

SEQ ID NO: 402146 - DNA, 617 bp, Homo sapiens
tggtggtaaaatgggcatccttgtcatgttccagatcttagaggaaaggctttcagtttttttgctgttcaatatgatactaactgtgggtttgtcttatatggcttttattattttgaggtatgttctttttataccctgttttttgagagtttttatcatgaagggatattggattttatcaaatgctttttcagcatcaattgaaataatcatatgttttttatcktttattctattgatatatcacattgattaatttgtgtgtgttgaaccatccttgcattcctaagataaatcccacttggtcatgatgaatgattttttaatatgctattgaatctggtttgatagcattttattgatggttttattggcctgtagttttcttttattgatgtatctttgtctgatttttgcatcagggtaatactggacttgtagaatgagcttggaagtattccctcatcctctattttttggcatagtttgagtaggagtagtattagtttttctttaaatatttggtaaaattcagcagtgatggcatcaggtcctgggcttttatttgctgggagactttttactacagctttgatcttttgtttacttgttac

SEQ ID NO: 402147 - DNA, 496 bp, Homo sapiens
ggtagagaaagccatacttttaactatctttaagcctcctcatgctttctaagaaattaatcttctttttctgtttcccgatctcttcccttctgtctgtttcacttggtactagatcagctcttatcattcctcctgcagttgaatccacattctgtttccaggattttacgaatctcaaaaatttgaaagctactgaccattctggaaaataatcagttatgggtgcacttacatatgtaaactttaatatatyacttcacattttaagtggaccttaccattgtttttgcctccttttgtgatataaatgtggggtaacctgatctgctgagggagtagctgtgatccaaacatgtgagttgagtgcccacaaggcagggctgaagccttggaggacctcgcatccatctttagctacaagtcaactggcttctcaaaaacagaacagcctcaacaatttgttgattcaaaacttttaaatatcaatattttt

SEQ ID NO: 402148 - DNA, 561 bp, Homo sapiens
cagtttttgcaatgcaattttattactggaaacaacttcattataggagaatattaggcaactgctctagtgaagtcaaaaggttaatatccacatataaaccacattcctatcttacaattctgcctacttagatttagtaaaatctgaagtagcaaaatagactcagtaaaaatattaaaatatattttttaattctattatattagcaattgtaaatatttcctccaaaaacatgtgtgctgactgtgacgttttcgtcatgtagagtactttcaaggcactggttctaggagttacaatacrgctactagtgaatcttctattgcttcttcctctcttcggtgaccttttaaagttacctgatataccatattcctttctggtttaaatctatctgatcatgcaatatatggtctttgaaaaacaaatgccccacccatgcttatgctcaggaaaacaatttccctgaatattagtcatgtctgatctcccttccctggttattagaggtctggctgaattcaggtgctggacggggtacgagagacccccagctgt

SEQ ID NO: 402149 - DNA, 497 bp, Homo sapiens
catctcaactcccacttccaatagccctctctattctccaccattacactggatatgaagctcagactttcttgagttccccactcataaatcccacgcacacaatgcatccattaatataagagactttataaattatttaaagggaagcataagggagtttacatttcagcaaagtaaacaatttccaactgaacattgaacatctcccttcttaaattagttttcagccatcctaccactatgttatttcctcaggtcccttcaccctgaagtttctctctcctccccyttccctctgtttacctccttagaaagagaacaatgaattccccttgttatgtaagggtatcaacctagccattctcctctgctaccctgagtctagcttctgatttgttctctggtttccttttgtatccctaagtgaattatcaaggtattttcacaaatagggttttttcctccttgagaagaacttgagtgacagctgttaa

SEQ ID NO: 402150 - DNA, 593 bp, Homo sapiens
ggattgatatataaaagtgagttcatgcattcattcattcaacaactatacactgagtgcctaccatgttccactatgctcacaggtttaaacctctagaaagttcctactctgattctatttacccctttagaaagccaaatatttgccatgggtggtagtgagtgaaaacaaaaaaaaaaaattaagccacacattacaggaaagtttacatatttcaaaatgcatataaagtccacataaaaaataatcctatcccagctagctatcacaagcctgtcaaaggagtaaggcaactgtctaccctcagtcccactccctttctctaaaaacaacctggttcttaactgttccaaaaaggcatcttggagttaataaatccaaaacaaaattttgtcatttctccataaacctgtttctactccagcgttcttagttaacagtgtcacctttcaccagttaaaaggttaccttggagccatctttgaattcactcactctctcactgctcatatcctcccatccatcagcaaatcctttctgytctacccccaaaatcccatctaccatcctgtttctcatttctcatcatc

SEQ ID NO: 402151 - DNA, 554 bp, Homo sapiens
ctcagcatttagcatagtcawattgtacatggttgacattaaatttatatttgttaaattatcagaggagtgacaaaggtacaaaatagttatgaatcacactcaacaacatattctaataaaaatgtgtgtacatatacatatattactttaatgtaatattaaagtgtattaatataaattttaataactggacaggtgttaaccaatgccaatttggtcatcacttgttctataacaacagaaacaataataataactactgtttatctagcacttattatgcttcacaaagtataagagctttaaacatattaactcatttaatcctcaaaacaaactgatgaggaatttctatttctatcttaattttaaagatgagactactgaggcaccacgagttgaagaaacttgctcaagttcccacaatcagcaattgacagagcagcaatctgggaccacggcactcaagagcatcccatgccttcaccactatgttatcctgtctttaagaacactgttgaccgtgaaatagaaaaagcaattggttgttt

SEQ ID NO: 402152 - DNA, 562 bp, Homo sapiens
tttctatttctatcttaattttaaagatgagactactgaggcaccacgagttgaagaaacttgctcaagttcccacaatcagcaattgacagagcagcaatctgggaccacggcactcaagagcatcccatgccttcaccactatgttatcctgtctttaagaacactgttgaccgtgaaatagaaaaagcaattggttgtttgtgctattaacatctaaggggtgtatacattttactgggacattctgcatttctaattctgtgtttctaatctgaaaactgaataarcatgccctcatccccaccctcacctacctcccctaaaaagcatacgtatcttagagctcaatgcatttggctagaatatctaataaagaacctatgagggtccaacacaggtaactcaaaaactgatatctctctagaccaacccacattctccccgcatcttttaagttcaaaatcctgccatgaactgctgtaattcccaagcatcctctgatctgaaatgtgtatattacaaagctgccgtgactaatttggtctatatagcaaggtca

SEQ ID NO: 402153 - DNA, 562 bp, Homo sapiens
tttctatttctatcttaattttaaagatgagactactgaggcaccacgagttgaagaaacttgctcaagttcccacaatcagcaattgacagagcagcaatctgggaccacggcactcaagagcatcccatgccttcaccactatgttatcctgtctttaagaacactgttgaccgtgaaatagaaaaagcaattggttgtttgtgctattaacatctaaggggtgtatacattttactgggacattctgcatttctaattctgtgtttctaatctgaaaactgaataagcatgccctcatccccaccctcacctacctcccctaaaaagcatacgtatcttagagctcaatgcatttggctagaatatctaataaagaacctatgagggtccaacacaggtaactcaaaaactgatatctctctagaccaacccacattctcccygcatcttttaagttcaaaatcctgccatgaactgctgtaattcccaagcatcctctgatctgaaatgtgtatattacaaagctgccgtgactaatttggtctatatagcaaggtca

SEQ ID NO: 402154 - DNA, 631 bp, Homo sapiens
cccaggatcttatgctataaattagattttaaacatttagataagatattaaaacactctgaacaataaggaatgtcattgtacaactctatagtttttatttagaaaaatgagtaaaactttcagtttcatgatggcaaaagaaagatacttttgctcttgttacttctttcaaaattccataaccacaaagatgataggaaacaaaaacacaaactccagtttcaatgaaataaagaagtgactgcagtctaacatctgaagatgaaagtagttggaggaaacagcagagagaagaaaagtcaagccagtgactacaagaagcaagctgatttgtccctggaaatgtttaagaaattgagatactggatactttagaagctaaaggtaagggaagttgctaaaatgaatgggtatttagactttccatcattggtgrgctgcagctggcttataccggcttgcaagagttattgttaacgtttctttccaactttgcagtgacctcacattcttagcttgaaatcaatgctagtgaaagtatttacacaacacaaactgcacatgctacaaatcagagttttgctttgttttgtttcagagagctagttgttaaacatttaccagcaca

SEQ ID NO: 402155 - DNA, 535 bp, Homo sapiens
ttacacaacacaaactgcacatgctacaaatcagagttttgctttgttttgtttcagagagctagttgttaaacatttaccagcacaccactgctcccaagttgtaacytctaccacccactagaaatctggggtttattctccagagaatgtgagccataggagcttgagactcaggcacagcagtcaaaaaggagggcaagcaaaagatccactgctgaaaatagagacactgtgtgaaaatctgtatattgatcactaagttccttcaaccccggaatcagcattcaggttgcattcccctgacaggaaactgagaattcttctctgaagagacaaaattgtctcttcagaaaaaagaaaaaagacttatgcagaatgatatgttgagagggcctcagtgaaaaatccggctaacttgtttgatcctcctgcactgaactagtctatgcaagctatctacccagatacgcaaactctaaagaattcattttacaagtaacctttctcaagaagtcactaaaggatatactcc

SEQ ID NO: 402156 - DNA, 550 bp, Homo sapiens
aaatttagacataatcaattatatatggaaaaagtgaggaaaggtataggaagtataaggtttaaatgagtaaaaatcctaacatatcctataaaaagtaaattgatttaacaagaggaatattattttcacatgaggaggtaaataccagaacaaacagttaaaaacgaagtgattcttctagcaaatggcacaaatcaatgaaatgggacaaatcaatgggagaagagagtgaagaaatatgtatgtgtgtgtgtgtgtgtcttatagaagtatttaataattattttcatgtaatactttcaccataatttttaaaatttaaataatcaagaaataatgaaaaataaaaatagtttataaattacagacaactgcagagaatgtgggaattctgattttttttttttttttttttttgagagagggtctcactctgtcactcagactagagcrcagtggcacaatctggctcactgcaacctccacctcctgggcgcaagtgattccaggctcccccacccccgacaatcccacgcatgccactgca

SEQ ID NO: 402157 - DNA, 596 bp, Homo sapiens
tcatcattagataccataatcaaagcctcacttagttatgggccattagacaagagaacctgtgatgaacacatcaaggataaatcaggacagtacttctgaccttatcctttgcaggaagccagaatctttactggggcacccacacttactcatcaaatgttcatgaaagataaaattcatgcgtcccttgtgtatttcaaatttcatttctaaaaaagatcaataaaaaccttttcctttcatagttctcgtcatactttttatttcctgctttgaaatgccaatataactgctatagggagaaattgatttcataattacagggggaaattagcaatgggagcaggcttagagtggtaagaacaagaaccataaattttagtggaatggaagaaataaatcattctttctggaagtttggtggggaaagaatgagaaattcagtggtagtggcaatacggaggaatgaattttctagatggggagatctacgtttgttaaaaggcaaaggggcaagatgcaattttttwaaaaagttaaatggtggtgaaaaggaaaactaaagatggaaatggactgattgaaaagcaaaa

SEQ ID NO: 402158 - DNA, 628 bp, Homo sapiens
gacagctgccagacactgggaactggcataggtgggagatgttggtcaaggggtgcaaagtgtcagatagaataaataagtttgggagatctattgtatagcatggtgactatggtctgtaataayatatggtatagctgaaattcactaagagagattctcttttaacttttacgttcaaggggtacacatgcaggtttgttgtataggtaaattgtgtgtcacaggggttgggtgtacagattattttgtcaccccggtaataagcatggtacccgataggtagtttttcgatcctctcccttctcccaccctctaccctcaaataggttcccgtgtctgttgttcccctttgtgtccatgtgttctcaatgttcagttcccacttataagtgagaatatgcagtatttggttttatgttcctgcattagttcacttaggattatggcctctggctccatctatgttgctgcaaagaacaagatcttgttctttttatggttacatattaatagcatcctatggtgtctatgcaccacattttctttatccagtctaccactgatgggcatttaggttgattccatgtctttgctattgtgaatattgttgtcataagcatacatg

SEQ ID NO: 402159 - DNA, 628 bp, Homo sapiens
gacagctgccagacactgggaactggcataggtgggagatgttggtcaaggggtgcaaagtgtcagatagaataaataagtttgggagatctattgtatagcatggtgactatggtctgtaataacatatggtatagctgaaattcactaagagagattctcttttaacttttacgttcaaggggtacacatgcaggtttgttgtataggtaaattgygtgtcacaggggttgggtgtacagattattttgtcaccccggtaataagcatggtacccgataggtagtttttcgatcctctcccttctcccaccctctaccctcaaataggttcccgtgtctgttgttcccctttgtgtccatgtgttctcaatgttcagttcccacttataagtgagaatatgcagtatttggttttatgttcctgcattagttcacttaggattatggcctctggctccatctatgttgctgcaaagaacaagatcttgttctttttatggttacatattaatagcatcctatggtgtctatgcaccacattttctttatccagtctaccactgatgggcatttaggttgattccatgtctttgctattgtgaatattgttgtcataagcatacatg

SEQ ID NO: 402160 - DNA, 628 bp, Homo sapiens
gacagctgccagacactgggaactggcataggtgggagatgttggtcaaggggtgcaaagtgtcagatagaataaataagtttgggagatctattgtatagcatggtgactatggtctgtaataacatatggtatagctgaaattcactaagagagattctcttttaacttttacgttcaaggggtacacatgcaggtttgttgtataggtaaattgtgtgtcacaggggttgggtgtacagattattttgtcaccccggtaataagcatrgtacccgataggtagtttttcgatcctctcccttctcccaccctctaccctcaaataggttcccgtgtctgttgttcccctttgtgtccatgtgttctcaatgttcagttcccacttataagtgagaatatgcagtatttggttttatgttcctgcattagttcacttaggattatggcctctggctccatctatgttgctgcaaagaacaagatcttgttctttttatggttacatattaatagcatcctatggtgtctatgcaccacattttctttatccagtctaccactgatgggcatttaggttgattccatgtctttgctattgtgaatattgttgtcataagcatacatg

SEQ ID NO: 402161 - DNA, 647 bp, Homo sapiens
gactttactcattgcaaccacatttttctcaataaaaagttactggatgtcacagattagtcaacctttctatttcccacagaaataagctatctgctaattcctatgttatatgctacctacttctaacacctttgcttgctgaccttacagagttttcaraaaatgaaaccagaattaaaagtcaattgacctattgaagtaggaaacaaaggttgtttaatatgattcagtttaaaaaataaagtgcccctcccctcacccaaaaatatgtgaagagtgactatctccacgaagttgagattaagagcaatttttattttctttctatttttctccatttttcaaaatttctacatgataatgactcacttttaacatcagaagaaaacaacagtttaaagtcttactaaattaatcataatttgcaatgattatttgaaacccctatggttttggtttatgtgtagtttttacataataaaattagtactataacatatacattaaaatttgtcccaacctacagaaattgttcctctctaagttaatacaaacttgagcttcgcaggattcctcctgagttgagagcaaagttctttatatagttcaagtacagtgtggaagtaacaccagttaggaaacca

SEQ ID NO: 402162 - DNA, 636 bp, Homo sapiens
tgcattttgtttattcagtgaatgagcctatcatcagtacttgcaaattagctctaattatcagataaaagtgatgtggttattctaattgcctgaaaatcaactgctacaaagactctaagtagtaagcaataattaccatatcatttcataaaggagggyttcttttttttcctgactgaaagtagcacatgctcaagatgaattacaggactggtttaaacttttacttatcttttcacaattcacatcagatccatgccaatggttcccaaattgaaatctccagcccaggactttccatagcaattcaagctgcctgtctgatatctttccttcaatatctattaggccacccaaacttaatatggcaaaatcagaactcttggtaagtctccaaaccagttcctccccaggtctctccctcctcataaatagccctaccatacacccagtttttccaagtccaacacataggaatcctccttgatttatgccttttcttattctcttacaggcagccatcagcaagtcctgtgagctctactctgaaatacatcccaaagccatgacacttctctccttctccactgccactaaccttgtctgagtcaccatcacatctcagttggatga

SEQ ID NO: 402163 - DNA, 208 bp, Homo sapiens
ggatagcaagcaaaagacagagccaaacaaagaagcagataccagcagccagctgggcacacgcccccccattaagtgatttcctcctgtacactggccacccagggcatgaatttaaaatgtatgcctccrcaaaagtaccactgtaccacaccatgaacatggctgacgctgagattgttgactgctcaaatgccagggattccct

SEQ ID NO: 402164 - DNA, 515 bp, Homo sapiens
cacctgaaattaaacaagaatgtttctagtgtgaactttaatttaggcacaccttaccaaatgttgaaatattttcatttacctaatttaggttttagctacttaaagctaagagatacttggataaatttcatggaattcatgagttatcctatttggcctgtgtttctacattgggaaaatgtcaaagaaagcatatcttatatccccaaatatgaagtaatcccaaatataaagcaatctttcccatttctgactyagatgactttcttaaaaatgtgtttatatttaccaaaatatacaaacttttagggatatggactgcatatgatgtttgttacaggatgttaaaatacaaccaattcagccccagtttctgctaaagttcctagcccatagccagcatatttcacagtgaggtgtgaaaggactgcgtaaagattgcagtttcctagattttacccttctcctcatctctactgagggcataaaagtctaggtagttggagattaca

SEQ ID NO: 402165 - DNA, 583 bp, Homo sapiens
atatgcaccacattttctttatccatttgtctcttgatggacacttatgttgtttccaaatataggctattgtgaacagtgttgcagcgaacatgggagtacagatatctctttgatatactgatttcctttcttctgagtatacacctagcagtaggattgctggatcatatgttagctctatttttagttttttgaggaacctccaaaccgttctccatagtggttgyactaatttacaaccactatggattgtaccacctatggatgaaggttcccttttcttcacatccttgtcagcatttgttattgactgaatttggttaaaagccattttaactggggcgagatgatatctcattgtagttttgatttgcatttctttgatgatcaatgatgttgagcatctttttatatgcctgtttgccttttgcatgtcttcttttgagaaatatctattcagatcttttgcccatttaaaagtcagattgttagattttttcctatagagttgtttgagctcttacatactctggttattaatcccttgttagatggacagtttgtgaatattttctcccca

SEQ ID NO: 402166 - DNA, 273 bp, Homo sapiens
tggttgtactaatttacaaccactrtggattgtaccacctatggatgaaggttcccttttcttcacatccttgtcagcatttgttattgactgaatttggttaaaagccattttaactggggcgagatgatatctcattgtagttttgatttgcatttctttgatgatcaatgatgttgagcatctttttatatgcctgtttgccttttgcatgtcttcttttgagaaatatctattcagatcttttgcccatttaaaagtcagattgttaga

SEQ ID NO: 402167 - DNA, 460 bp, Homo sapiens
agggagtgaggtggatcttctctccccaggactttgatctgtgatggcaaagatcggaarggagggaatacggctgctgcgctccacggcaccaagcagtaccctttaatgtgaataagtcttacaccccagagccacgccattagtaacctctgtgctacaaatactcctgtcattatacaaagacactgctttttaaacaaaatcatagtacaatgggaataatagaattttgagaataaacttggtagttgttttacacaacacacaatgtctgtttactgcgaagatacaattcaatgcttattgaaggtttgatgggtgtttaaaaacagccctgttagtaatattcaatattgacagagaagtttcagtgcaccagacactgttatgagcaccctgcaaataaatattagcccactgaatcctcacaaccccatcgaagcaggtactacaatta

SEQ ID NO: 402168 - DNA, 556 bp, Homo sapiens
aacttaattgtattaatgaatatcaaaaccacattgcaggagggtaagggagaactaatccaagtaattttggacacatattttggctataaatcctgaggctaaagacaacagagaatcatagacaaacattgaatgatagtgagtaaatttgttttggacaaaagtacgaattagcaattctgaaactactttctgtatatttcttatcaagtagataagaaacatattgtgaacccrggagcctggtgtctcaccgtaagggaaggggttacaaatatagaaagggacatgggcaaaatgaaacctgcagtgggttagaatgggattggtatatataaactccagtttataatatatatattcagataaagaaatagaggtagattgtgtacacatatgtatgtgtgcatgtgtatgtacatagatgtttttcttaactctgtcctcaatgagatcccaagagcaataatcacatctagtacccagatattggtttctaaataccattcttcactaaaagaaaccaggattccttggaaaagtgtctcattcc

SEQ ID NO: 402169 - DNA, 546 bp, Homo sapiens
ttaagggtgattttcttgagaaacacttggtgacgtctgcagacattttttggttgtcacaactgggagggggctgttattgacatctagtcggtaggagccagggatggttctaaacatcttacaatgcacaagacagtgcccccaccacaaataattatccagcctacaatgtcaatagcactgaggttgacaaaccctgatctaacttgatccacatagaaagcctgaggtagtttgtcagatattacatacataggaagaaacaggggaaggactttaatcaaagccttctccagcccagaaagaagaaatgtatcacagtggttaggagttcatggagtgacacgaagttcaacaatgaatccttgtcccacaacttcctagatgaggattttttttgtttygtttttgtcttttggaaaataccttaaactcttgagcctcagaattctcatgtcgatgatgggaatcacataagaccgcctcacttaaagcaataaactaagcactcagcatgcttaacaattgggaattgttgttgct

SEQ ID NO: 402170 - DNA, 588 bp, Homo sapiens
gtggaaggtgaaatcttttatccttgtgacacctggattatcaagacaggaggaggacaacagtaaaaccatcactcaacaccctgttggtccgggtgctgcatatcatatatcgacttctttgtactttcaacatccctatgcgtgaagtatctttattatccctaattttcacataaagagattgaggcccagagagattgagtaattcagccaaggtcacacagctaagaattctgaaatcagaatttgaactyaggatccctgtgcccacttctgcgctatcctgtctcagagcacaggctttatgttatgtattttttaaaattttattcatttcttatttttcacatcagacgggcaacgtgccaacatcataacaaggtctgagggagacatgtctcacacatgaggatgaaaaccttatgaactacaaaggttcacccttatgaactacaaaaggacccaggctttatttcaaatccgtaactcactccagctccatttttccctgcggagagagagtgtcagtccttggtagacacaaaggttgcagaactatcactggctgatgcccaggtcagtcta

SEQ ID NO: 402171 - DNA, 544 bp, Homo sapiens
aaccccttcctgtcacagaagaaagctaagagatgttggacgcacatatatttatgttaatatatgccaaacactgaaattggaatataacctcctgccaaacacggtgctatcaaagacaaaattgattctgcagcaaaataaacaagggctgttaattcatgagcttgtggtggtgaagcctgttgtctgwcatttcctttcagcaaggattcaagagttctaggaaggagagtctattttatagagtaaaagaggaaatcctgagacgtgtctgactggcaagggtcccatgaagttgggaattctgaaagtggggagagactttccaattggtcttcatgtacatttgacggccctggattagctgcaagtgagcaaggggggcaatttcaggatatttcaaaagaggaagattgttcagtgttataggttgactgtggatcgtcatttcctagaacaagtgggggtcaataaagcactattttaaagcaatgatgcttaggacaagttgcatgccatgataggcatctctcaggacttt

SEQ ID NO: 402172 - DNA, 544 bp, Homo sapiens
aaccccttcctgtcacagaagaaagctaagagatgttggacgcacatatatttatgttaatatatgccaaacactgaaattggaatataacctcctgccaaacacggtgctatcaaagacaaaattgattctgcagcaaaataaacaagggctgttaattcatgagcttgtggtggtgaagcctgttgtctgtcatttcctttcagcaaggattcaagagttctaggaaggagagtctattttatagagtaaaagaggaaatcctgagacgtgtctgactggcaagggtcccatgaagttgggaattctgaaagtggggagagactttccaattggtcttcatgtacatttgacggccctggattagctgcaagtgagcaaggggggcaatttcaggayatttcaaaagaggaagattgttcagtgttataggttgactgtggatcgtcatttcctagaacaagtgggggtcaataaagcactattttaaagcaatgatgcttaggacaagttgcatgccatgataggcatctctcaggacttt

SEQ ID NO: 402173 - DNA, 544 bp, Homo sapiens
aaccccttcctgtcacagaagaaagctaagagatgttggacgcacatatatttatgttaatatatgccaaacactgaaattggaatataacctcctgccaaacacggtgctatcaaagacaaaattgattctgcagcaaaataaacaagggctgttaattcatgagcttgtggtggtgaagcctgttgtctgtcatttcctttcagcaaggattcaagagttctaggaaggagagtctattttatagagtaaaagaggaaatcctgagacgtgtctgactggcaagggtcccatgaagttgggaattctgaaagtggggagagactttccaattggtcttcatgtacatttgacggccctggattagctgcaagtgagcaaggggggcaatttcaggatatttcaaaagaggaagattgttcagtgttataggttgactgtggatcgtcatttcctagaacaagtgggggtcaataaagcactrttttaaagcaatgatgcttaggacaagttgcatgccatgataggcatctctcaggacttt

SEQ ID NO: 402174 - DNA, 507 bp, Homo sapiens
tttgtataagaaagtttgaatatcacctgtttgcctgtctttgctaccccacctcctccaggaagtcttctttgatacccttggccaacactggcccttccttctccctgtgtctcctccccatccttcacctggactacacactttgctccttcatgacgttctggggtcaggctctctcacactcawatcttatttgagaaactggaatagaagctctttcaaaccacactgtgctcctccatgacgttctggggtcaggctctctcacactcaaatgttatttgagaaactggaatataagctctttcaaaccaggcaggcagttgagaaggaggaatatgcttttgcatcaggcacgatgaaggtgcagttcctcacttgtaaactcggctgcctgggcaagtggctccaccggttcaagcctttcttgatgaatgaagtggcagtgacaacccacctccgcccaggagctgctgcagaggcttattgaaatccccaccaggg

SEQ ID NO: 402175 - DNA, 679 bp, Homo sapiens
ctatgtgccaggctctgttctgggtggctgtgaataaagcagagttcctgctagcatggtacctatgttctggtgggagaaaacagaatgcaggcatgcggtgttgggtggtgttgagctctctggagaaagatgatgtgctctgacagaagcctacttcctgaccgtcccagcggaagcagctctcaccccatccctatctgtccccgtctgtccccatscacctccactgcactgtcttcatggctcctcctgctatctccaaaatgatctttgttttttgctgttttctttgcttagtgtctctcttttcctactagactgggcagcccaggaaagagggactttatcttgtttgtccccagtgcccagatcagtatctggaatttgggcgtgcttactaagtatggaatgaatgaatgaatgaatgaagtaggaacaaagtaaaggagttagcaccgcttggagctcaggctgccaaccccctgggtaccccggactcatttctgcatctcgccagggtctctggtctttgtctctcccagggggactcttgcagggtgtgaaggtagccacagagtctggcaaaatacaaactgtcacggtcttctgttgcccgcacagacttcttttggagcagcctcctgtgaattcagaatctggtatgtgtttagccagc

SEQ ID NO: 402176 - DNA, 539 bp, Homo sapiens
aaatccatgtgctgctatgagaaaaagggaaaatagattttaagtaggtcaggcaacactatccacacaccaatgcaccttctgttcacatgagaacacaatccttggcccccagaaaccccttccctttaaatcccatcctactatgttaggatgttagatgyggctaacatcccatccatgttagacgaggctcctgtgcatgctggttagacctgcgatgattctagagccaggcacctggattgaaagccctgcttcaccacttctatcggcacaagggcagtaataagacttacctcaaagggtggttctgagaattaaatgagttagtacatgagtccttagaacaatgtctggggcatagtgagctcctcaggggtagctgctattattctggtgccgtgcaggataagttgaattctatgaataaatgggaaactgtttgccagttttaggagctgtgctggaaattcttcactgagcctccccactccacctcgatccacactgcctttctctgagccttgggaagatga

SEQ ID NO: 402177 - DNA, 539 bp, Homo sapiens
aaatccatgtgctgctatgagaaaaagggaaaatagattttaagtaggtcaggcaacactatccacacaccaatgcaccttctgttcacatgagaacacaatccttggcccccagaaaccccttccctttaaatcccatcctactatgttaggatgttagatgtggctaacatcccatccatgttagacgaggctcctgtgcatgctggttagacctgcgatgattctagagccaggcacctggattgaaagccctgcttcaccacttctatcggcacaagggcagtaataagacttacctcaaagggtggttctgagaattaaatgagttagtayatgagtccttagaacaatgtctggggcatagtgagctcctcaggggtagctgctattattctggtgccgtgcaggataagttgaattctatgaataaatgggaaactgtttgccagttttaggagctgtgctggaaattcttcactgagcctccccactccacctcgatccacactgcctttctctgagccttgggaagatga

SEQ ID NO: 402178 - DNA, 626 bp, Homo sapiens
tataattttaatgtaattaaaatatactttaatacttaaaatcatcgttttaaggaaaaaatattcaagaagcgaataatataagaggatgggcacagatgtgggaataacagtgaagttggcatgagtctcgctgaagtttgggaaccaacactgtattttttcattgcagtagctttagaggtacaagtggtttttggttatagggatgaagtacayggtggtgaagtctgggattttagtgcacctgtcacccaactggcgtacattgtacccaataggtaacttttcatccatgaaccacctctcaccctctccccttccgagtctctagcatccattctagcactctgtatgcctctgtgtatgcatagctaattgcagagatatggaatcgacctaaatgcccatcagccaatgagtgaataaagaacatgtggtgtatatatcatccatatctctccagctgcctccacctatggctgccggttagatcacaggagaaatccacccaggtcacagaatgttggatcatcgaggtccattgctggatcttttctattgggaaattcatggaggacatgcagggagaccttgaatgatgtctcctcactgagaaacccaaa

SEQ ID NO: 402179 - DNA, 635 bp, Homo sapiens
agtgttttatgaagtgagtctgcaaatcttgcaaaagacataggatttcctgaagttcatgaaagtgattttttggtgagctgctccaaccacaaagcctctgaaaatatggcaaagtgaacgtctagtgggcttccaccagctttcaaatgaagaagtgaaaataaaaagagcatgaattaaatatcaaaagatgaagagagggcctgagcaaaactgaggaaacattctaagcctttgccaggaaaaagaaaaaaagatggccttctttacgattgagctacaaaagtcaactataaatagattgatttactgacagtaccatcactccgttttgtaggaaaaagtcaagttgccattttttcactggaagtaacaattttttcactctattctaaaaatgagcacatggttttaattaaaacttatatattgttaaaaggcagatcaaatgcaattattttcataactgtcacttttcaaaagaaagtcccaatcaaagcctgctctgcccactccacttcaacgacttaacaatgacattttactttytgtttgaagtggattcttcctacttttcaatttccagggataatcactggaacatgaggccttcctgcacaatctatgtaacc

SEQ ID NO: 402180 - DNA, 545 bp, Homo sapiens
ttttggctaatataatggatcctctaataatattkaaacataaagcgacatttagtttaaaagtaaattcaaataagtttataacttcaaaacctcattttaaaagacatccattaaaaggttgtcctaacatggagacagggagtaatctaccccttagggtaataggcaggtcttgaggtcaatgtttttaatagatccctgaaacatcaatgtatttcattataaagttaaaaagttattcccagttttgtaacttaccaaccagatgatatactagcaaattctgggaaaataatgtcttatagctacattgaagatacacacaaaatgaatatatatcctttaaatataaaaggctattctagataaatactgaagacctcctcttacctcactgcttctagcaaccatttcctcttaaccctcccttctcttcaccttcacttcctctcttacaggcagggagagaaacagtcaactataaagaaagaaggccaactgcatggcagctctttggctatgataattttttaaattgcttg

SEQ ID NO: 402181 - DNA, 592 bp, Homo sapiens
cagaccctgtttgcatgggtattcaccagctgaggctgcagaacagyaaagattgctgcgtgttccttcctctggaagctttgtcccagagtggcatccatcagatgccagctggaggtctcctgtatgaggtgtctgttgacctgtgctgggaggtgtctcccagtcagaaggcatgggggtcaaggactcacttgaggaggcactttgtcccttagcagagctccagtgctgtgctgggcgatccactgctctcttcagagctggcaggcaggaacgtttaagtttgtggaagctgggcccacagcctcctcttccccaggttttctgtcccaggcagatgggagttctatctataagcccctgcctggggctgctggctttctttcagagatgccctggccagagagcaaagggggtacatcttcaaactgagctttgaagaaactaatgagcattaagcaaggagaagaggccaaaaggctttgccagttaggagaaacaatatgaaaaggggcatagttgaagattaaagtgaggtactagggacaggtaactttaattgcagaatctaaaaggaaagcagggtggg

SEQ ID NO: 402182 - DNA, 517 bp, Homo sapiens
tgagccataatgaagagataaatcagcaaattaatgccaaatgagaacttataaatatgttaaattagcaggcaaagacattaaaaagagttatcataactgaattttatagtttcaaaaagttagagatatggaaatagggggaaaaaggaaaaatgaaacttctagagatgaaaattaaaatatgtgagatgaaaagcttactggattgtatcaatggcagattatacattgcagaataaaatattagtsaacctgaagacataacaatagagaccatctaaaatgaaacatagagagaaaagagactttttttttttttttgagacagagtctcattccatcacccaggctggagtgcagtggtgcaatctcactcactgcaacctctgtttcctgggttcaagcaattgtcatgtctcagtctcccaagtagctggaattacagatatgcaccattatgactgactaatttttgtatttttagtggagacagggttttgccatgttggacaga

SEQ ID NO: 402183 - DNA, 655 bp, Homo sapiens
ggatagggtgttttaagtcagtggagaagagagatggagagaggaaggaaggagggaaagagggaggggaggagagtatgtgtgtttagcacagaaagattttatagatataaaatgttacataaatatatataatatttacttcatattaattgataacaatcctctttttcattggtatatttatatrtttctaagtcattcaggctgtatgtataatgcttatcttaggctaagacagcaaacttgtcaagcttgatttgtaatggcaaaactaccatgctttcatcaggttgactagaaattatttgtgttagaaatagcaaaacattttttgcagtgttttcatttctgttcttgtggtcaccctttcacaatagaaagaaggttcatttcttatttgtctgtgatgtgaggccattgacgattcttaggcttaatttgtactgttgttttttaacataagaatgcattctacaattttaatttttgtgatttaaaacaacttttctaatctgtttttttggtataactaagacgttagtcaggactggagttctgggttccttcaacataccatcttaatatgttgtgtttactgtgatgtttttgagatcatcatttcagatgttcttgtgcctgcttctagaggaat

SEQ ID NO: 402184 - DNA, 615 bp, Homo sapiens
attatttgtgttagaaatagcaaaacattttttgcagtgttttcatttctgttcttgtggtcaccctttcacaatagaaagaaggttcatttcttatttgtctgtgatgtgaggccattgacgattcttaggcttaatttgtactgttgttttttaacataagaatgcattctacaattttaatttttgtgatttaaaacaacttttctaatctgtttttttggtataactaagacgttagtcaggactggagttctgggttccttcaacataccatcttaatatgttgtgtttactgtgatgtttttgagatcatcatttcagatgttcttgtgcctgcttctagaggaattacttttatagctagtctgtattccacaaaggaatattgtatttttatgagctwttcttattgattagaattggttgacaactggactatattttacattagaagatctggtcatcttcatatcatagttaataacctttctgatttattcactgaactgattatacaaaagctgttgtccttgtttttaagttaagcttgcatgtttaggctttctaacagacagttaaaaattagctattcccttttttgtgaaccctgtt

SEQ ID NO: 402185 - DNA, 615 bp, Homo sapiens
attatttgtgttagaaatagcaaaacattttttgcagtgttttcatttctgttcttgtggtcaccctttcacaatagaaagaaggttcatttcttatttgtctgtgatgtgaggccattgacgattcttaggcttaatttgtactgttgttttttaacataagaatgcattctacaattttaatttttgtgatttaaaacaacttttctaatctgtttttttggtataactaagacgttagtcaggactggagttctgggttccttcaacataccatcttaatatgttgtgtttactgtgatgtttttgagatcatcatttcagatgttcttgtgcctgcttctagaggaattacttttatagctagtctgtattccacaaaggaatattgtatttttatgagcttttcttattgattagaattggttgacaactggactrtattttacattagaagatctggtcatcttcatatcatagttaataacctttctgatttattcactgaactgattatacaaaagctgttgtccttgtttttaagttaagcttgcatgtttaggctttctaacagacagttaaaaattagctattcccttttttgtgaaccctgtt

SEQ ID NO: 402186 - DNA, 617 bp, Homo sapiens
ttgtagaccattctcagtattgataatttccagtactcaaactgcttctattgaaattctaatctacctctgagttgttagctctaattagctacatataaatgcatgtaaatatttctaatgttttaattttatttaaataattttgaatagatattagacaagaatcatattgtcttgctttaataaagtatgcatatatgttttatgtgaatgacaacttgtaaattttacggcacagttttttgagacagagtctcactctgtcacccaggctggagtgcagtggcgtgatcagagctcactgcaacctctgcctcctgggttcaagcgattctcctgccttagcctcccgaatagctgggatyacaggtgtgcaccaccatgcctggctaatttttgtatttttagtagagacggggtttcaccatattggccgggctgatctcgaactcctgaccccaagtgatccacctgcctcggccttctaaagtgctgggattacaggcatgagccaccgcgcccagcctacagcacatttttatagccctgtgagttgacggcttggaatcatgaatggctccaacaggattaccatgaatcactgtgacagaaaa

SEQ ID NO: 402187 - DNA, 557 bp, Homo sapiens
acctgttttatgaatctgggtactccaatgttgagtgcatatatatttaagatagttaggttttcttgttagattgagctctttatcattatgcaatgcccttctttgtcctttctgatcattactagtttaaagtctgtttttttctgatataagaatagctaccccagctcttgttttccatttggctaataggcctttctccatctctttattttgtgcctatggctgtcattacttgtgatatgggtctcttgaagaaagtagacaggtgggtcttggcttctttatccaacttgcccctgtatgccttttagtggggcattcagcccattgacattaagggtcaatattgatatgtgaggatttgatcctgtcattgtgctgttagctggttgttatgtagacttgattatayagttgctttatagtgccaatggggttatgtccttatacatgttttggtatctttctttcttttccatgtttagtactccctctaggagatcgtgcagatctagtcgtaacaaagtcctttagcgtttgcttgtctgaaa

SEQ ID NO: 402188 - DNA, 562 bp, Homo sapiens
tgttttccaagttgcttgctctctctctctacttctctttttggaatgccaatgagttgtaggtttggtctctttacctaatcccatatttcttagaggtgttgttttttaaaatttcttttctttatttttatctgcatgcgtgcttaaaggagtggtcttcaagctcttcaattctttcctcagcttggtctattctaccatcagtgcttccaattgtattttgaaattcctgtagtgaatttttcatttctagaagttcagtttgttttattcttaaaatggttatgtagtcttcaaatcttggatcatttcactgttttccttggagtgggtctcaatcaactcttgtaacctgatgagcttccttgccacacagattctgaattctatgtctgacatttcagccatttcaatctggatccattgctaaggagctattgcgatcgtttggaggtaaaaagacactctgcttttagagcttccagaattcttggctggttctttctcatctgtgagcactgatgttcctttmccctttgaagctgccatcctttggatg

SEQ ID NO: 402189 - DNA, 565 bp, Homo sapiens
tttcaataaacatattgcaaatgaatcacatttgaaaatgactagagcagtagttcacaaccactagcgcagatagaccagatgagacctacagatataagaaaaacaaagatttattataattagtaagaaagtgagtcctcatactcattctatcaaggatatctgccaaaaagatgttctctgtgaactsagggagaactaacagacactcaggtactcactatttctcccaagtccccaattccttatcctctgaccagtagcatgttgggaaacagtgagaggcagagaatgtggcacagactcaaaacaagaggatacagatcaagaacgaaacttaacttaaaatattatattcagcccagtcttaggtttgaaaaaatattacgagacactgtcttattcatatgcctctagcacctacaacattaacatcacaaatgtaaatgactaattaataatttttaaaagctggctgtaacacagcttgctgcatcaaactttcaaagagtatcaaagtttcacataaactggtataattatgtctctctacaaaaatgga

SEQ ID NO: 402190 - DNA, 565 bp, Homo sapiens
tttcaataaacatattgcaaatgaatcacatttgaaaatgactagagcagtagttcacaaccactagcgcagatagaccagatgagacctacagatataagaaaaacaaagatttattataattagtaagaaagtgagtcctcatactcattctatcaaggatatctgccaaaaagatgttctctgtgaactgagggagaactaacagacactcaggtactcactatttctcccaagtccccaattccttatcctctgaccagtagcatgttgggaaacagtgagaggcagagaatgtggcacagaytcaaaacaagaggatacagatcaagaacgaaacttaacttaaaatattatattcagcccagtcttaggtttgaaaaaatattacgagacactgtcttattcatatgcctctagcacctacaacattaacatcacaaatgtaaatgactaattaataatttttaaaagctggctgtaacacagcttgctgcatcaaactttcaaagagtatcaaagtttcacataaactggtataattatgtctctctacaaaaatgga

SEQ ID NO: 402191 - DNA, 555 bp, Homo sapiens
ggaaacagtgagaggcagagaatgtggcacagactcaaaacaagaggatacagatcaagaacgaaacttaacttaaaatattatattcagcccagtcttaggtttgaaaaaatattacgagacactgtcttattcatatgcctctagcacctacaacattaacatcacaaatgtaaatgactaattaataatttttaaaagctggctgtaacacagcttgctgcatcaaactttcaaagagtatcaaagtttcacataaactggtataattatgtctctctacaaaaatggaaaaacttctaccctattccatcctctgatcctgctcaactatgagttttgactctagaatatatacattatccatcaatatctggattactacaagcawcttctagcgggtttcttagtattcaattcttccaatctattataaactaatgagagatatgtctttctaatgttttcaccacatcatgcttactcaagtatctacagtagctccttattgcctactaaaaatccacagctactactctatcaaataatcatatc

SEQ ID NO: 402192 - DNA, 555 bp, Homo sapiens
ggaaacagtgagaggcagagaatgtggcacagactcaaaacaagaggatacagatcaagaacgaaacttaacttaaaatattatattcagcccagtcttaggtttgaaaaaatattacgagacactgtcttattcatatgcctctagcacctacaacattaacatcacaaatgtaaatgactaattaataatttttaaaagctggctgtaacacagcttgctgcatcaaactttcaaagagtatcaaagtttcacataaactggtataattatgtctctctacaaaaatggaaaaacttctaccctattccatcctctgatcctgctcaactatgagttttgactctagaatatatacattatccatcaatatctggattactacaagcaacttctagcgggtttcttagtattcaattcttccaatctattataaactaatgagagatatgtctttctaatgttttcaccrcatcatgcttactcaagtatctacagtagctccttattgcctactaaaaatccacagctactactctatcaaataatcatatc

SEQ ID NO: 402193 - DNA, 611 bp, Homo sapiens
tgctaagggttttgttttgctttgctttttaaaatatatatatatactatatgtacatacttgcaggagaaaaggactcattgtatggttagaatgtgatggttttaaaaaaacatggttttcattttttgtgttaaaaattgttagtaaagtccccatgaagtatagcaaatgctatagaaatactagaaggaagcattacctttaatgaaggctggttttaattactaagtaggtgtatgtactgtatgtgtttmtaaaatttatgtttggattctgaattcttattagagtaatttatgatggaattaaaagtcaaaagcaggggtaaactagtacaggaaatggtgagaaattgtggaattagggggaatgattaagaattggaatctgttacatccttttcaagaatacatatataagtgtagataaaaaagtctgagctcatttatggtatatttattaacagccctagcctggtaaaaaacaacattgatttgaacagttttggatattttccagctcctgtttactttgttaaaaccataaaaaaagtaatctggttccttttgacttaaataagacaaagaattcaataccgaggccctgtt

SEQ ID NO: 402194 - DNA, 611 bp, Homo sapiens
tgctaagggttttgttttgctttgctttttaaaatatatatatatactatatgtacatacttgcaggagaaaaggactcattgtatggttagaatgtgatggttttaaaaaaacatggttttcattttttgtgttaaaaattgttagtaaagtccccatgaagtatagcaaatgctatagaaatactagaaggaagcattacctttaatgaaggctggttttaattactaagtaggtgtatgtactgtatgtgtttatmaaatttatgtttggattctgaattcttattagagtaatttatgatggaattaaaagtcaaaagcaggggtaaactagtacaggaaatggtgagaaattgtggaattagggggaatgattaagaattggaatctgttacatccttttcaagaatacatatataagtgtagataaaaaagtctgagctcatttatggtatatttattaacagccctagcctggtaaaaaacaacattgatttgaacagttttggatattttccagctcctgtttactttgttaaaaccataaaaaaagtaatctggttccttttgacttaaataagacaaagaattcaataccgaggccctgtt

SEQ ID NO: 402195 - DNA, 611 bp, Homo sapiens
tgctaagggttttgttttgctttgctttttaaaatatatatatatactatatgtacatacttgcaggagaaaaggactcattgtatggttagaatgtgatggttttaaaaaaacatggttttcattttttgtgttaaaaattgttagtaaagtccccatgaagtatagcaaatgctatagaaatactagaaggaagcattacctttaatgaaggctggttttaattactaagtaggtgtatgtactgtatgtgtttataaaatttatgtttggattctgaattcttattagagtaatttatgatggaattaaaagtcaaaagcaggggtaaactagtacaggaaatggtgagaaattgtggaattagggggaatgattaagaattggaatctgttacatccttttcaagaatacatatataagtgtagataaaaaagtctgagctcatttatggtatatttattaacagccctagcctggtaaaaaacaacatygatttgaacagttttggatattttccagctcctgtttactttgttaaaaccataaaaaaagtaatctggttccttttgacttaaataagacaaagaattcaataccgaggccctgtt

SEQ ID NO: 402196 - DNA, 610 bp, Homo sapiens
tcagtagtaatatttaatcgtgtcatcctgagtaaaagtcactgggaaatcaactccgaattcactgtgggaaagagaagacctttagctttttaaaactaaccagccatcctgcaaccctgagaacctgaagtaagcattcctaagacattcctaagaaaaacatgtgcgaggttktcctcctgagtctcccttcccctgactcctccctctccctcctcctgcactgtccactgaataagtcccagttccaccttgcttccccggcagccagaggggccatctgcagagaaccacaaactccatctcttcaattacccccaattcccagctgctccgggaacacatgagggcagaaaaatggcttgaaatctgtatgcgggagaggttgggaaggttgaagagagcaatttttgtttcacatcattcctttgtataatgttgtatccttctgacaagtccccataatacatcttaacttcaccaattgctgccttaagagaaaacagtgaagacctatctttaatgtcaaaggaacaatgggcgtccttccagaggaggaaaatgacttgctttgaaagagttgaagaagaaaagtgcaaaatgttcc

SEQ ID NO: 402197 - DNA, 458 bp, Homo sapiens
actcaactgtgagctctgtgacagctgggacctttgtctgtcttgatcacggatatactcccagtgcctggcatgtgtttgttgaacaaatgaatagcatgcagaaaacatggaggaagtttacttgaggggagggaggggttttgtcttattcctctctgtactctgatgcctcgcagagagtaggcgttcagtattgaattcaaaaatgaatagaataatcattccacttccaggtatgtatactgaagaactgaaaagagatgtycaaacaaagaattgtacaaaaatgttcatagcaacattattcttaatacacaagatgtgggaacagctcaaatgtccatcaactgatgagtggataaacaaaccgaaataatgggatatagccatgtgataaagtattattcagccataaagaggaatgaagttctgataagtcccataatatggctgaa

SEQ ID NO: 402198 - DNA, 582 bp, Homo sapiens
tactatatgctacaggagattaaggttctttggcccccgcccattaaaggccagcagctawccctagtcactgggacaattcacagctactcctatacatttccataccccccttgtggtgatggtaccactcatggttgagaccaactgtatctagtgcagtaggtgtcagtctctagatatgagtgtatgttgggcttatgctggaagcagctgaaatccagcagtaagaacagaatgagaactgctaactgctgcacagatgggatccccttccacctttggaagagaggttcgggtctagaatgtacaaaggtttgttctgggctccgatctaggaaaacaaaacagcgccaagcaagaaatagtcaccttagcaaggatatcatgctatgcgaattagaatgtcttgagatatctccctttcctacattctacctcagaaaatcccattcactgcccttgtggggagcatctctatgaaccatatgatggcctcttgagctacgtctgattggaccaaagatacgtacctaaaatacaagacgattcattggccagcttgaaccagcaggctaaaga

SEQ ID NO: 402199 - DNA, 582 bp, Homo sapiens
tactatatgctacaggagattaaggttctttggcccccgcccattaaaggccagcagctaaccctagtcactgggacaattcacagctactcctatacatttccataccccccttgtggtgatggtaccactcatggttgagaccaactgtatctagtgcagtaggtgtcagtctctagatatgagtgtatgttgggcttatgctggaagcagcygaaatccagcagtaagaacagaatgagaactgctaactgctgcacagatgggatccccttccacctttggaagagaggttcgggtctagaatgtacaaaggtttgttctgggctccgatctaggaaaacaaaacagcgccaagcaagaaatagtcaccttagcaaggatatcatgctatgcgaattagaatgtcttgagatatctccctttcctacattctacctcagaaaatcccattcactgcccttgtggggagcatctctatgaaccatatgatggcctcttgagctacgtctgattggaccaaagatacgtacctaaaatacaagacgattcattggccagcttgaaccagcaggctaaaga

SEQ ID NO: 402200 - DNA, 582 bp, Homo sapiens
tactatatgctacaggagattaaggttctttggcccccgcccattaaaggccagcagctaaccctagtcactgggacaattcacagctactcctatacatttccataccccccttgtggtgatggtaccactcatggttgagaccaactgtatctagtgcagtaggtgtcagtctctagatatgagtgtatgttgggcttatgctggaagcagctgaaatcyagcagtaagaacagaatgagaactgctaactgctgcacagatgggatccccttccacctttggaagagaggttcgggtctagaatgtacaaaggtttgttctgggctccgatctaggaaaacaaaacagcgccaagcaagaaatagtcaccttagcaaggatatcatgctatgcgaattagaatgtcttgagatatctccctttcctacattctacctcagaaaatcccattcactgcccttgtggggagcatctctatgaaccatatgatggcctcttgagctacgtctgattggaccaaagatacgtacctaaaatacaagacgattcattggccagcttgaaccagcaggctaaaga

SEQ ID NO: 402201 - DNA, 567 bp, Homo sapiens
gtttgtccctagtataaataattaaaatgttttccagtcatacctttctaattatttattaatggttcctaagtcaaaagatcattgctgggattaattacaacagagacacttgttcgcacaaacctaatcctcatttcctatcagaaactacgcatgaatctacagactgaacttcacagaccagactgatcttttacaacaaacagatgccaagcaggatcttctttggtatggagagaattacatcattacttaataatttagacaggagaaaattagctccaaaataagggaatttgggtataaaagcagtttgctaaattattagcaatgctgcaaagcagaaggagtatgagcttggagtcagacaaatgagattgtttgaccctaatccttatttgccgtgtgctcttgagcaatttactgaagttctctgggccccagcttctttataaaatacttaactaatatctatgcagggtggttctaaagattaaaataataataaagaacatcaactacatttttaccatacattaayagagaaagaaagtaaactcccat

SEQ ID NO: 402202 - DNA, 585 bp, Homo sapiens
tttgggttttatacacatttttaagaggtttaaagtatgaagaagaccaaataactttttaaaatctaaatataatggctaataggtgaacaataatgaatatttaagaaagacctcaaacaaagaaamgaattattctgctgctgtcttcctcaagcacatgaagtttctctgagctggtgaatgtttcaattcaggttggtaatgcctgacagagaagtagaaagttagtttccttcagaaggaaaaagaatggattccactttaaagattaaattttgatctgggagctataacagcactgtcaaataattattattgttatttttacaaatctatttcactttaaaacaagttgggaaatttctgacttagtttaaatgagacctcaattctcccaggcctgatctgccacctgaggcaggatctcctgctgaaaaagtgctgtgctgaggcattaaaatggcagctcccactgagagaaataacggagccagaatcttgcagcagagatgctgaacagtaggggaggaagcgaggaagggaagctaatttttccaggcagatctgaatgcttctttctca

SEQ ID NO: 402203 - DNA, 585 bp, Homo sapiens
tttgggttttatacacatttttaagaggtttaaagtatgaagaagaccaaataactttttaaaatctaaatataatggctaataggtgaacaataatgaatatttaagaaagacctcaaacaaagaaaagaattattctgctgctgtcttcctcaagcacatgaagtttctctgagctggtgaatgtttcaattcaggttggtaatgcctgacagagaagtagaaagttagtttccttcagaaggaaaaagaatggattccactttaaagattaaattttgatctgggagctataacagcactgtcaaataattattattgttatttttacaaatctatttcactttaaaacaagttgggaaatttctgacttagtttaaatgagacctcwattctcccaggcctgatctgccacctgaggcaggatctcctgctgaaaaagtgctgtgctgaggcattaaaatggcagctcccactgagagaaataacggagccagaatcttgcagcagagatgctgaacagtaggggaggaagcgaggaagggaagctaatttttccaggcagatctgaatgcttctttctca

SEQ ID NO: 402204 - DNA, 461 bp, Homo sapiens
ttgttaacagcatccacggtagaaggtggaagagagggcaggaaagccagagattgaactcctagcataaagtcctttaataattgacattaatctattcatgaggatggaggcctcatgacctaaacacctcccattaggctccacycttcaacactgtttcattggggattaagttcccaacacatgcttttgggaggatgcattcaaaccatcacaatttgcttctggatttacacttgcatgacaattctacatctgtcatctggtttcataaatcctaatagaattctagatgggaaggtaacatgatctaatccaacaccctcatgttacaaatggagaaactgaggctatgagagcaggaataagttacttttggtgtcagactcaggattggaatcacctcttttgacttccaaactcccatgctctttccattaccaatgtatgctgcctcc

SEQ ID NO: 402205 - DNA, 573 bp, Homo sapiens
tatgaccccacaacaactttctcttgatatgatgtcttgacacttgtatggcttcacatgctgtttatctgcctggaaaacccttaactgaatcccttttgccttgcaaactccttgcaaaatcatttaatgtgtagctgttcaaagatgtaaaaaccattcttagcttgtagtgtagtttagtccttgagagccaaatttggcctatgagttgcagtatgctaaccccttgccataaaggatgagtagagagggtccacactgaggggaaaggccagggagataagccgtggctgatcatggagggctaaaatggcagkcagaaaatctaggacttgactgtggaatcaatggtgaactatcaaagagctttaagcagggaagggacatgatctgatttgtgttttataaaggttcagctagtgcagtagcaaaggaagtctttattcatctgaactataaaaactctatccatccagtcactatcttctgatcccaacatgtgagcgtctcaggtggattccaacaccatctctttttccaaatgaggaattcttggaaagaggtaaccct

SEQ ID NO: 402206 - DNA, 522 bp, Homo sapiens
tgttttccagaagcttttttttttttttttggtcagcttttaaaatgactttaaaagtttattcaacagaagtaatttcattactatttcggggagggaatcaccaactttttggtgcaaacaatgctagccttcttttaagcattaagagcacgacttcttaagaaatgacataagcaataattcgacacctccgtctcccctaaaataatatattttattaatgtgtgcacagctttagcaaattagcctgagataaatgatagagttccactatccagaggcaaaagcagggtctattagaactcatcattgcattttccagaagttttaaagcctatgaggtgggagagccattcagagaggattaaaaaatagatatttggagagtaattaaattaatatgtatttttctcacattgtcgatttgaagttacatcatgtggggtttggaacacagaaatatattacgtgttacttggtttgcaaatraaatgtccatgccttgttcatttaatgaca

SEQ ID NO: 402207 - DNA, 564 bp, Homo sapiens
gctgtgaaagctatgtatgtaagagcaagagttcaaaagtcatgatcaagtgcagaaggggactcctcccttgcttgctacaatggtgggtckatgaactggccaacctttcctttcactgagaccctgggggtattttggaggtagcaactggggtggagctgacctgtgggaaaggaaaatggtcaccttgtcattggtgcaaaggatagaaaagaaggaccccttgtgattgggcaatagaaaaaggagtgagataaagaaagatgtctgaacttgggattccaagctgaatgctgttcaatggatggtgcaaaccttctccacgttccttatacagtctccagtgaaatccatattgttcataaatgctgttgtacaatttaattctataggatagttcagagaagagaacaggaaagaactgatgtcctggttacattctcatggaaccaatataagtagtggtaagaaccccaaaaatctacagttctgaaaatgagttgaaaagttgcgaatggtgttttgcttttagaagtgagtgacagagtattgacccagatt

SEQ ID NO: 402208 - DNA, 564 bp, Homo sapiens
gctgtgaaagctatgtatgtaagagcaagagttcaaaagtcatgatcaagtgcagaaggggactcctcccttgcttgctacaatggtgggtctatgaactggccaacctttcctttcactgagaccctgggggtattttggaggtagcaactggggtggagctgacctgtgggaaaggaaaatggtcaccttgtcattggtgcaaaggatagaaaagaaggaccccttgtgattgggcaatagaaaaaggagtgagataaagaragatgtctgaacttgggattccaagctgaatgctgttcaatggatggtgcaaaccttctccacgttccttatacagtctccagtgaaatccatattgttcataaatgctgttgtacaatttaattctataggatagttcagagaagagaacaggaaagaactgatgtcctggttacattctcatggaaccaatataagtagtggtaagaaccccaaaaatctacagttctgaaaatgagttgaaaagttgcgaatggtgttttgcttttagaagtgagtgacagagtattgacccagatt

SEQ ID NO: 402209 - DNA, 564 bp, Homo sapiens
gctgtgaaagctatgtatgtaagagcaagagttcaaaagtcatgatcaagtgcagaaggggactcctcccttgcttgctacaatggtgggtctatgaactggccaacctttcctttcactgagaccctgggggtattttggaggtagcaactggggtggagctgacctgtgggaaaggaaaatggtcaccttgtcattggtgcaaaggatagaaaagaaggaccccttgtgattgggcaatagaaaaaggagtgagataaagaaagatgtctgaacttgggattccaagctgaatgctgttcaatggatggtgcaaaccttctccacgttccttatacagtctccagtgaaatccatattgttcataaatgctgttgtacaatttaattctataggatagttcagaraagagaacaggaaagaactgatgtcctggttacattctcatggaaccaatataagtagtggtaagaaccccaaaaatctacagttctgaaaatgagttgaaaagttgcgaatggtgttttgcttttagaagtgagtgacagagtattgacccagatt

SEQ ID NO: 402210 - DNA, 564 bp, Homo sapiens
gctgtgaaagctatgtatgtaagagcaagagttcaaaagtcatgatcaagtgcagaaggggactcctcccttgcttgctacaatggtgggtctatgaactggccaacctttcctttcactgagaccctgggggtattttggaggtagcaactggggtggagctgacctgtgggaaaggaaaatggtcaccttgtcattggtgcaaaggatagaaaagaaggaccccttgtgattgggcaatagaaaaaggagtgagataaagaaagatgtctgaacttgggattccaagctgaatgctgttcaatggatggtgcaaaccttctccacgttccttatacagtctccagtgaaatccatattgttcataaatgctgttgtacaatttaattctataggatagttcagagaagagaacaggaaagaactgatgtcctggttacattctcatggaaccaatataagtagtggtaagaaccccaaaaatctayagttctgaaaatgagttgaaaagttgcgaatggtgttttgcttttagaagtgagtgacagagtattgacccagatt

SEQ ID NO: 402211 - DNA, 582 bp, Homo sapiens
atttatcacatatatggtgatgatgatcaccagacaacaaaagggaaggaagcataaggagcagacttttttcctttttccaactagacttagtcttttggccgaggaaagggtaaggcatagtttgccctagaggttaaagaaataataatgttctacatgtacagggtcatttctctgaaacagaggtcagcaaagtctttctgtaaagggtcagacagcaaacattttatgcttggcaggccatatggtgtctgttgcaacaattcaattctgccattgtagcaaaacagcagccatagacaattcgtaaatgaaatgggtgtatctgtgttcaagaaaatcttatttacaatgacaggcactgggccagatttggctcatagagtgtagtttgctgacagctgatctaaatgaaaaacaaacaaacagaacaacaacaamaaaaaacctttatgagcttgaacaaaatcaatgttataagggtaagagggaatctttgccattgttaatgctcacatcttcctgcttcatgacatccatcttttggaggcgtgtacagctacagccatgtgtggggtt

SEQ ID NO: 402212 - DNA, 582 bp, Homo sapiens
atttatcacatatatggtgatgatgatcaccagacaacaaaagggaaggaagcataaggagcagacttttttcctttttccaactagacttagtcttttggccgaggaaagggtaaggcatagtttgccctagaggttaaagaaataataatgttctacatgtacagggtcatttctctgaaacagaggtcagcaaagtctttctgtaaagggtcagacagcaaacattttatgcttggcaggccatatggtgtctgttgcaacaattcaattctgccattgtagcaaaacagcagccatagacaattcgtaaatgaaatgggtgtatctgtgttcaagaaaatcttatttacaatgacaggcactgggccagatttggctcatagagtgtagtttgctgacagctgatctaaatgaaaaacaaacaaacagaacaacaacaaaaaaaaacctttatgagcttgaacaaaatcaatgttataagggtaagagggaatctttgccattgttratgctcacatcttcctgcttcatgacatccatcttttggaggcgtgtacagctacagccatgtgtggggtt

SEQ ID NO: 402213 - DNA, 607 bp, Homo sapiens
gaaccctttatcaatacataatgcccttctttgtcctttttgatcattgttggtttcaagtctgttttgcctaaaataagaatagcaacgcttgctttttttttcttttctgtttgcttgatagatctttctccatctcttcactttgagcctatgggtgtcattgcatatgagacrtgactcttgaagacagtatacagttgggtcttgcttctttatccaacttgccactgtgtcttttaagtgaagcacttagcccacttacattcaaagttaatattgacatgttaggatttgatcctgtcattgtgttcttattaatagctagtttttatgtagatttgattgtatagttgctttataatgtcagtgggctatgtacttaagtatatttttgtggtggcagatattggtctttcatttccatgtttagcactcccttaaggacctttcataaggcagctctcccatggtaatgaattccttagtatttgctggtctgaaaaaggattccatttctctttcacttatgaagcttagtttggccagacatgtaattcctgggtggaacttctaccctgggtgggtggaatgtaggccccaaact

SEQ ID NO: 402214 - DNA, 542 bp, Homo sapiens
tttgctgttaacttgacactgttccctttttatattacctaccccttctctttagctgcctttaagatttttttatttcatgttgactttggagaatctgatgaytatgtgtcttagggatgagtcatcttgtgtagtatctggcaggggttccctgaattttatgatttgcatgccaacctctgtggtgagactgaggaagtttttgtggacaatattctaaaatacgttttccacattgcttgctttctctccatctctttcaggagtgccaatgagtcataagtttggtttctttacataatcccatatttcttggagattttattcaatttccagaagtttaatttggttctttttcaaaatggctatgtaatctttcagttgttaggccattttactgtggtccttggattgggtttcaaccttcttctgcatgttgatgagcttccttgccatccagattatgaactctatgtctatcatttcagccattttagtctggttaagagcaattgctggggaactagtgcagtcatttg

SEQ ID NO: 402215 - DNA, 499 bp, Homo sapiens
aatactgctcctatatatatgatattatattacatccttaagttaataaagtacattcacaagaaacctacagccaacattatacttactggtgaaacactgaatgatttttccctaagatcagaaccaaaataaggatgttctgctctcacyaatcctgttcaaaatcatactgaaggtcatagcttcagtaggcaagaaggcaacaaaaagaaataaaaggcatccatattggaaaattcaaaataaaactggcactatttatgaacaataggattatcatgtagaaaatcctaaggaatccactaaaatgctgctagaactaacaagcacaaagaatgcaaagtcaatatgaaaaaaaccgtatcttatatatagtaacaatgaacaattgcaaattcaaataaaactgtatcatttacattaattagacataaatccaactaaatatggactatatgctgaaaattacaaaaccaatggtaggaaaaattaaaga

SEQ ID NO: 402216 - DNA, 499 bp, Homo sapiens
aatactgctcctatatatatgatattatattacatccttaagttaataaagtacattcacaagaaacctacagccaacattatacttactggtgaaacactgaatgatttttccctaagatcagaaccaaaataaggatgttctgctctcaccaatcctgttcaaaatcatactgaaggtcatagcttyagtaggcaagaaggcaacaaaaagaaataaaaggcatccatattggaaaattcaaaataaaactggcactatttatgaacaataggattatcatgtagaaaatcctaaggaatccactaaaatgctgctagaactaacaagcacaaagaatgcaaagtcaatatgaaaaaaaccgtatcttatatatagtaacaatgaacaattgcaaattcaaataaaactgtatcatttacattaattagacataaatccaactaaatatggactatatgctgaaaattacaaaaccaatggtaggaaaaattaaaga

SEQ ID NO: 402217 - DNA, 499 bp, Homo sapiens
aatactgctcctatatatatgatattatattacatccttaagttaataaagtacattcacaagaaacctacagccaacattatacttactggtgaaacactgaatgatttttccctaagatcagaaccaaaataaggatgttctgctctcaccaatcctgttcaaaatcatactgaaggtcatagcttcagtaggcaagaaggcaacaaaaagaaataaaaggcatccatattggaaaattcaaaataaaactggcactatttatgaacaataggattatcatgtagaaaatcctaaggaatccactaaaatgctgctagaactaacaagcacaaagaatgcaaagtcaatatgaaaaaaaccgtatcttatatatagtaacaatgaacaattgcaaattcaaataaaactgtatcatttacattaattagacayaaatccaactaaatatggactatatgctgaaaattacaaaaccaatggtaggaaaaattaaaga

SEQ ID NO: 402218 - DNA, 572 bp, Homo sapiens
ttcagttataattctaatccaggctgaatcaaggcagttggtatttatacatttttctcacacaaaattatgttttctaataatttacaaaattttaactttctaataattgtttactataacttgtttactataactgttaaatcttgtcactgaggccttcctatagattgaattcttagtgtaatttatacttgcactatttagaacagatagataccattcctaattccagactgccattttgcaaatattaggaaatgctttctctctttactttaattcaaagattaatagtttttgactctttctcagaatcctgtgtttaatagtaagaatcaactctcttcttttcttcctgctcattctcaatctcttgctcttttttctctttgtctctttttctttcacgcatacatacaygcatacagcacacacacacaaacacacacatcctgacctaccacaacctatgggactataatatgcttttatagttcctaccaaggtagttcttgaagccatagaggtactaagccactgtgtattctctgaagatgtgatatgatttg

SEQ ID NO: 402219 - DNA, 625 bp, Homo sapiens
atgctgactactttaacaaacttgtctctgtaaataacagaagaagaaaaaataagaatgtagtgttttgaacataaaaaccacaagaaaaaaacctttaaataaacactgaacattttttaaagaactataagttgtaacaaatttcaatgaactgaaatcatacagagcatgttttctaatcagagtgaaactaaactagaaatcaattacagtagaataactaaaaactccttttgaatatttcttaaaaagtcaattacactagggtcaaataagatctatatagtacatgaygcaaagatgaacttacaataaaaaattaggaaatattgtcaactgatgaaaatacatagtatcaaatttaagttcatattatagaaaaaacaggaagatgaaaaggaaggaaggaacgaagaaaggaagcaggagaggaagaaaattacaaaggaaaacagacaaatccacaataatagctactgtttatttaacagtaatttaacagtttatttaacaataatgcctaatgtctatttaaaggtttttttcctgtggttaacaaacgtgaaggaaggaagaaaagaaggaaggcagaaggaaggtaggaaggaaggaaactaacaat

SEQ ID NO: 402220 - DNA, 625 bp, Homo sapiens
atgctgactactttaacaaacttgtctctgtaaataacagaagaagaaaaaataagaatgtagtgttttgaacataaaaaccacaagaaaaaaacctttaaataaacactgaacattttttaaagaactataagttgtaacaaatttcaatgaactgaaatcatacagagcatgttttctaatcagagtgaaactaaactagaaatcaattacagtagaataactaaaaactccttttgaatatttcttaaaaagtcaattacactagggtcaaataagatctatatagtacatgacgcaaagatgaacttacaataaaaaattaggaaatattgtcaactgatgaaaatacatartatcaaatttaagttcatattatagaaaaaacaggaagatgaaaaggaaggaaggaacgaagaaaggaagcaggagaggaagaaaattacaaaggaaaacagacaaatccacaataatagctactgtttatttaacagtaatttaacagtttatttaacaataatgcctaatgtctatttaaaggtttttttcctgtggttaacaaacgtgaaggaaggaagaaaagaaggaaggcagaaggaaggtaggaaggaaggaaactaacaat

SEQ ID NO: 402221 - DNA, 575 bp, Homo sapiens
caatcctcttatgacactaactctaggatagcatcagattccccagatataagggctaaatctcacattagggctcaagacacactgccccaaaatatgactgtagaacaccagacactgttactccaaaatayatttctttggcatgttttgagctggttattctgagaaaaggcaaacaaaagagtagctctgaaatttacagtttttcaggagcaaaatttacagtaatcaggaagtcaccctatatggtctaaaaaggggaggcatgaataatccacctttgtttagcatatcatcaagaaataaccacaaaaatgggcaaccagcagccctcagctgctatgtctatggagtagccattcttttattcctttactttcctaataaacttgctttcactttattctatggactcgccctgaattctttcttgcatgagatccaagaaccctctcttggggtctggattgggacccctttcctgtaacatgagcaccaccctttcagcacttcaatgttttggagcaaccagaagctcctctaacattattgttcaagaggttttttttaag

SEQ ID NO: 402222 - DNA, 434 bp, Homo sapiens
ccatttccatcatggcctgaactggtgtttccagttaactttggaatgtccttggctgaaaagaggggtccattcagttagttcgggggcttagaattttatttttcatttatagtcaaaaggctcaataaaaaatttttaagcatattaatttgtagaaccctgctgccaaacaaaatgtaaatgtaaatatgtatcagattatctctcaaacaattgaatgtagtaaaccaaatattgactagccaaaagtggtatgattcttaccctgtccattccccaaataygagcaccataaaaggttaactataagactatatttacactctacatcctttttcccccccagttaacatccctgcagtaaccaaaaacatgagctggataaggaggagaagaggagctggccgaatgatttttaagcagaagctgaa

SEQ ID NO: 402223 - DNA, 434 bp, Homo sapiens
ccatttccatcatggcctgaactggtgtttccagttaactttggaatgtccttggctgaaaagaggggtccattcagttagttcgggggcttagaattttatttttcatttatagtcaaaaggctcaataaaaaatttttaagcatattaatttgtagaaccctgctgccaaacaaaatgtaaatgtaaatatgtatcagattatctctcaaacaattgaatgtagtaaaccaaatattgactagccaaaagtggtatgattcttaccctgtccattccccaaatacgagcaccataaaaggttaactataagactatatttacactctacatcctttttcccccccagttaacatccctgcagtaaccaaawacatgagctggataaggaggagaagaggagctggccgaatgatttttaagcagaagctgaa

SEQ ID NO: 402224 - DNA, 578 bp, Homo sapiens
gaaatgaaatccagtgttctgctctgaagtctggctgctacacaacggccaaactttcaacttcctgctatgtttgcatacaaacatatggctggattgtccaccattttcagataacttatttaattttttcaggcagcattcattttgttttgagccacttaaggttctcagtcacttctgttcttgccttttgatcataaattagtttattttcttcaatcaaatttgcccagggttgtcagctgaccccatagtgtgaagtaaggcacctacgcatcaacagtgctttggggttgtatctttctaataaatatattttcaagtttaggatttataggtcttggagctcaaatacgaattattcagtctcttggctctaatgcagaagcaaactaatattccaacaaaagtatacttatgcagtgaaacagcaatgtttttcctatcaaacgtggaaacagataaagcaggwtgggtcccaggcttacttgatgagcgtaggaagagctctgcataaggacaaagctgtcatttccctgcatgaggaagtgacagtaagacatgcctatgtttga

SEQ ID NO: 402225 - DNA, 578 bp, Homo sapiens
gaaatgaaatccagtgttctgctctgaagtctggctgctacacaacggccaaactttcaacttcctgctatgtttgcatacaaacatatggctggattgtccaccattttcagataacttatttaattttttcaggcagcattcattttgttttgagccacttaaggttctcagtcacttctgttcttgccttttgatcataaattagtttattttcttcaatcaaatttgcccagggttgtcagctgaccccatagtgtgaagtaaggcacctacgcatcaacagtgctttggggttgtatctttctaataaatatattttcaagtttaggatttataggtcttggagctcaaatacgaattattcagtctcttggctctaatgcagaagcaaactaatattccaacaaaagtatacttatgcagtgaaacagcaatgtttttcctatcaaacgtggaaacagataaagcaggttgggtcccaggcttacttgatgagcgtaggaagagctctgcataaggayaaagctgtcatttccctgcatgaggaagtgacagtaagacatgcctatgtttga

SEQ ID NO: 402226 - DNA, 627 bp, Homo sapiens
attcttcctacattgatcaaccaaacaagaatatggtaaaaagggaggtaaaatatgtcttctcaatttgtattgtttgcaagttaacattcagtacatacggctaccatggtaataagttaaaatagtcataagatatggtgaaaatttttaaataattcatgtccctaaactatggatgcagaattttaaaggtttctatttatagtctttaagggaacctaggattacacaagagtatccttttatgtgagtacaaattcagaaagtaaagctataaaaaattaatgatgagaaagcaagcctaaatgtgatgttatcttttctctcaaggcaaaacaaaatgattcaagtattattattccccttgtttttctatttataaatagaaacagtgatccagtgttaataactcccactgaacaggtagtccatctgcaaagaccagcacccaggctctcatgacattaagacagaacaaggtgattcacaccagcaaaacagattrtattgtcttcctgcaggagatcattaccctgaggaaaaaagaatgtgtgagaaatcttagttttgatttaaacaaaaaaataagttctaatttatcagtaaaagaagttataaaacatg

SEQ ID NO: 402227 - DNA, 613 bp, Homo sapiens
acctcaacttaataaaagccatatatgacagacccacagctagtattgtactgaatggggaaaaactgaaagctcttcctcctagatctggaacatgacaaggatgcccacttcaaccactgttattctatgaagtactggaaatcttagctagagcaatcagacaagagaaagaaataaagggtatccaaattggaaaataagaagccaaattatccttgtttgcagttgataagatcggattcaaaagcaacaacaaaaaatagtaacatttctatatgccaacatgaacaatatgaaaaaaatctgaaaagtaatcccatttacagtagccacaaataaaattaagtacctagaaatcagcttaactgaagaagtgaaagatctctacaatgaaacctataaaacactgatcaaagaacttggagaggataccaaaaaatggaaagatattccatgttccyggatgggaagaattaatattgctaaaatgtccatactacccaaagcaatctacagattaaatgcaatccctatcaaaataccaacaacattcttcagataaaaagaaaaaccaatcctaaaatttatacagagtcacaaaagacccaga

SEQ ID NO: 402228 - DNA, 636 bp, Homo sapiens
ttaggttactaatttgagatctaacattttgatgtgggcatttaatgttataaacttctctctcaacacttctttggccgtgtcccaaagattttggtatgttgtatcttctcattagtttcaaaaaatttgatttctgccttaatttcattatttacctagaaatcattcaggagcaagttgtttaacttccatgtaattgtatggtgttgagtgattttgttagcattgatttccatttttattgcactgtggttggagagcatggctggtatgattttgtgttttgtttttttaatttgctgaggactgttttatgcctgactgtgtggtcgattttagagtatgtgtcacgtgcagatgagaagaatatatattctgttgtttggggtaaagagctctgaggatgtctcttaggtccatttggtcaagtgttragttccagtcccaaatctctttgctaattttctgcctcagtcatctgtgtaatgctgtcagtggggtgataatgtctcccactactattgtgtggttatctaagtcttttcataggtatctaagaacttgctttatgaatctgggtgcttctgtgttgagtgtttatttaggatacttaggtcctcttgttgaattgag

SEQ ID NO: 402229 - DNA, 636 bp, Homo sapiens
ttaggttactaatttgagatctaacattttgatgtgggcatttaatgttataaacttctctctcaacacttctttggccgtgtcccaaagattttggtatgttgtatcttctcattagtttcaaaaaatttgatttctgccttaatttcattatttacctagaaatcattcaggagcaagttgtttaacttccatgtaattgtatggtgttgagtgattttgttagcattgatttccatttttattgcactgtggttggagagcatggctggtatgattttgtgttttgtttttttaatttgctgaggactgttttatgcctgactgtgtggtcgattttagagtatgtgtcacgtgcagatgagaagaatatatattctgttgtttggggtaaagagctctgaggatgtctcttaggtccatttggtcaagtgttaagttccagtcccaaatctctttgctaattttctgcctcagtcatctgtgtaatgctgtcagtggggtrataatgtctcccactactattgtgtggttatctaagtcttttcataggtatctaagaacttgctttatgaatctgggtgcttctgtgttgagtgtttatttaggatacttaggtcctcttgttgaattgag

SEQ ID NO: 402230 - DNA, 577 bp, Homo sapiens
tataagtgggagctaaaaattgagtgcacatggatacagagaatggaacagatagcagaacctacttgaaggtggaagataagaggaggatgaggattaaaaaatacctgtcaggtactattcttattacctgggtgacaaaatctgtacaccaaacccytgtggcatgcaattaacctatataataaacctgcatatgtacccctgaacctaaaataaaagtttaaaaaagtgaaacaatgctcaactttattaccagaaaaatgaaattaaactacagtggaataacattacatacccaccagaatgtctaaaattttaaatggcagaaaatattgagattttaatgaagatgtggttcatactgctgggaggagtataagttgatataatcactttgaaaaaatggtaatctttaccaaagctgaacataaacatgattcttaggtacattagcttaacagaaatgcacacacatattcaccaaaagatatacaaagaatgtttgtagttacaatattcacagtagccaaaaaccaaaagaactcaaatgtctataaacactagagaaattatg

SEQ ID NO: 402231 - DNA, 592 bp, Homo sapiens
tattctgaaggctagatgccaccagcatagatattatccatggacacagagatttaaaatagacttatagagaaaaaataaatacttaatcctagggcaacacttactaggcactcactaaatacttgataaataaatatgtgaaatttatatgtaatttatatgtatattcaagagtctctaaatcaaacagcttrgtaggggttccagggtctcactatgtgaaggttcaggactaggttcattaatggtcccctaaataattttgaactcttactctccctgattatacctggagtagattctttatcctgcttttagggaagcttggtcagaaaagcctgcaattcccagaacagaacaaagccactgcagaatgaggtgttacatctaaactatctggtcagcgtgagtcacaaagcattacacgaggtatccatcagttatgagtgagttaagcactttgggtaaaacaaaactgaagggatagaaaaaatacagagacacttgaaaatatgtattgtttctgactatttttgatccatgacttgaatctgtgcatgcagatcccagatacagagggccagctaat

SEQ ID NO: 402232 - DNA, 592 bp, Homo sapiens
tattctgaaggctagatgccaccagcatagatattatccatggacacagagatttaaaatagacttatagagaaaaaataaatacttaatcctagggcaacacttactaggcactcactaaatacttgataaataaatatgtgaaatttatatgtaatttatatgtatattcaagagtctctaaatcaaacagcttagtaggggttccaggrtctcactatgtgaaggttcaggactaggttcattaatggtcccctaaataattttgaactcttactctccctgattatacctggagtagattctttatcctgcttttagggaagcttggtcagaaaagcctgcaattcccagaacagaacaaagccactgcagaatgaggtgttacatctaaactatctggtcagcgtgagtcacaaagcattacacgaggtatccatcagttatgagtgagttaagcactttgggtaaaacaaaactgaagggatagaaaaaatacagagacacttgaaaatatgtattgtttctgactatttttgatccatgacttgaatctgtgcatgcagatcccagatacagagggccagctaat

SEQ ID NO: 402233 - DNA, 613 bp, Homo sapiens
tcagattctatgtcttagtctgttaaatactcagaatgctgctttgccttccatgcagacatcttaaaaggaaattatatatatgaaacacttatgaaaatttcataaaatttctaaggatacttccaactcagaactaacgcaaagagaaataatctttaaataatttgatttttaaatttcattgacattcagtgcatttattctaagacattatattaagtgttatctacataattttgtaaccagcatttgtatgtaacctaaactctagaactcatccattacaaatccttaraaggatcactttcacagtttgcctgtaagttggaccatttgcctcatctgccaaggagcagggccatggccctctctatcttcccaggaaaattgcaaggaagtccccataggctatgagtttccactgctcaactgttcctgctgttgctaaactgatcattactgccagtataaagcactggccgttaaatatggctgctgatgtcacaccaagttcacttttattggctgaacaatgtctactcaaaattcatttgttgaagttgtctttcagtacctcagaatgtgactgtccagtcatgcatcacttaat

SEQ ID NO: 402234 - DNA, 586 bp, Homo sapiens
aagttggaccatttgcctcatctgccaaggagcagggccatggccctctctatcttcccaggaaaattgcaaggaagtccccataggctatgagtttccactgctcaactgttcctgctgttgctaaactgatcattactgccagtataaagcactggccgttaaatatggctgctgatgtcacaccaagttcacttttattggctgaacaatgtctactcaaaattcatttgttgaagttgtctttcagtacctcagaatgtgactgtccagtcatgcatcacttaatgatggggatayattctgagaaaggaatcaatatatgatttcatcattgtgtgaacatcctagagtgtacttacacaaacttagatggtaaagcctacacctaggctctatagtgtagcctattgcttccaggctacaaacatgtatagcatgttactaaatacagtaggtattgtagcacaatgataagtatgtgtgtatctaaacatagaaaaggtacagcaaaatatgacataagatgtttaaaaatggtacatctctacacggcactgtataggtccatgaatagagcttgaaa

SEQ ID NO: 402235 - DNA, 578 bp, Homo sapiens
ggataagggcccttggtctatcagaaaatgaacccttgaaatttttgatttctgagattttcttgaagttttctttattatctactatgtgatagatttttagacattctagggatgcttgagaataatgcgtattcactctwtatagaatattgaatctaaataaatcaatcttaattcaaatttaatttgtaaatatttgtcatttttctcttgaactcataatgtttacatatttttatgatactaagtaatgatttataattgttatgtattattgacttaaccccttatctatttaaaaataaatagaccattaatacctttgaagcttttgagtctttaattttataataatgtaatcactgcctttctttttttttgcttctatttgctaatacttatctgcccacacttttattgacatttctctatcatatcattttagaaatgttgttaaccacatatagctgaaatttattttgaactgaatgacagtattttccttttacctgaggaacaggatttagcctatttattactttctgaaataagtgatacacttgatcctctgtttt

SEQ ID NO: 402236 - DNA, 585 bp, Homo sapiens
tatttcagcaatgtcttttaatttgtgagacatcttttatattccacaaacctacacaagtaggttaaatctattaaacagattagaaaatataggcctatgaaattgttatgacttagtttaatcaaataatggaaaagatgcaggaaaaaccatatacattttatgtcatgccctcttatatgcytgaaaaattccattaaaaattaaaatatcaagctcacttttgtgtcctttaggcaccacttagagctcattcctatttgcttttctttgtacattcatcttggcttaaatgatcagcttcatgctaatgacaactgaatcaatctatagcttttggctttatgctctagtctgactctagttttgattccatcaacctaaagtatagtttctaccacctgtcttgttacttcaaactgtcaagttctcgacttgtgccgagtcagactaatcatctggcaccatcattctctctgtcatattaccttaaaaccttgtgaaggctacactattttcaaagagtacaaattcagatgcataaaatgtaacattctttatttttctataatgaaatataat

SEQ ID NO: 402237 - DNA, 585 bp, Homo sapiens
tatttcagcaatgtcttttaatttgtgagacatcttttatattccacaaacctacacaagtaggttaaatctattaaacagattagaaaatataggcctatgaaattgttatgacttagtttaatcaaataatggaaaagatgcaggaaaaaccatatacattttatgtcatgccctcttatatgcttgaaaaattccattaaaaattaaaatatcaagctcacttttgtgtcctttaggcaccacttagagctcattcctatttgcttttctttgtacattcatcttggcttaaatgatcagcttcawgctaatgacaactgaatcaatctatagcttttggctttatgctctagtctgactctagttttgattccatcaacctaaagtatagtttctaccacctgtcttgttacttcaaactgtcaagttctcgacttgtgccgagtcagactaatcatctggcaccatcattctctctgtcatattaccttaaaaccttgtgaaggctacactattttcaaagagtacaaattcagatgcataaaatgtaacattctttatttttctataatgaaatataat

SEQ ID NO: 402238 - DNA, 585 bp, Homo sapiens
tatttcagcaatgtcttttaatttgtgagacatcttttatattccacaaacctacacaagtaggttaaatctattaaacagattagaaaatataggcctatgaaattgttatgacttagtttaatcaaataatggaaaagatgcaggaaaaaccatatacattttatgtcatgccctcttatatgcttgaaaaattccattaaaaattaaaatatcaagctcacttttgtgtcctttaggcaccacttagagctcattcctatttgcttttctttgtacattcatcttggcttaaatgatcagcttcatgctaatgacaactgaatcaatctatagcttttggctttatgctctagtctgactctagttttgattccatcaacctaaagtatagtttctaccacctgtcttgttacttcaaactgtcaagttctcgacttgygccgagtcagactaatcatctggcaccatcattctctctgtcatattaccttaaaaccttgtgaaggctacactattttcaaagagtacaaattcagatgcataaaatgtaacattctttatttttctataatgaaatataat

SEQ ID NO: 402239 - DNA, 585 bp, Homo sapiens
tatttcagcaatgtcttttaatttgtgagacatcttttatattccacaaacctacacaagtaggttaaatctattaaacagattagaaaatataggcctatgaaattgttatgacttagtttaatcaaataatggaaaagatgcaggaaaaaccatatacattttatgtcatgccctcttatatgcttgaaaaattccattaaaaattaaaatatcaagctcacttttgtgtcctttaggcaccacttagagctcattcctatttgcttttctttgtacattcatcttggcttaaatgatcagcttcatgctaatgacaactgaatcaatctatagcttttggctttatgctctagtctgactctagttttgattccatcaacctaaagtatagtttctaccacctgtcttgttacttcaaactgtcaagttctcgacttgtgccragtcagactaatcatctggcaccatcattctctctgtcatattaccttaaaaccttgtgaaggctacactattttcaaagagtacaaattcagatgcataaaatgtaacattctttatttttctataatgaaatataat

SEQ ID NO: 402240 - DNA, 634 bp, Homo sapiens
cacaccaactggttgtcctacagtttaacctgattctgacattaactacccagaattagtgcagaccccacagttgaagagctgattcccacaacccccacttcagatgccagttgcaagtccagggcctaccatacttctgatgaccagctataagtcaggtgttgtcatgaccccttttcagggtcaatatatttgctaaaatggcccacagaactcagagaagctcttttcttactcttactgctgtattataaggtatattataaaggatacagatgaacagccaaatggaaaaggtgcactgggcaaggtatgggaagggaggggtgcagcacttccaygtcctctctgggcatgccatcctccagcaccttgatgtcttcaccaacctagaagctctctgaaccccatgttcagtgtttttatggagcttgcattgttgtattacatagacatcactgagtctccagcccctaatcccctcccagaggtcagggggtggggccaatatcacatgagaggttcctcactgtcagcttccatgcagaagctatctagggacctatcaagagttgccttgttagcataaactcaggtgtgatagaaagaggcttattatgaataataaagg

SEQ ID NO: 402241 - DNA, 536 bp, Homo sapiens
gacagtctagcaatgtaattaagtaaagagagacctagatttgtaagtatagtaactcctgttctatttatttcctcacaatttaaatggaaccgtttaatgtgatatggggcccactaactaattactacaactcataaacttcttatacctcaaagtcattcaagatgtagtgttacatttggttagaaatcaaattatccaaagcaattgtgcacaattattttgtgtgatatgtgcttgatttatatggcatattttagcattgaaratcacatgccagtagattatgattaatgaaatatcatacatcttgataacaataatctacatagattaaatacatgattgcttcacaggcatttacccaagaataacctctggaggcactgtatatagtattgtatctcaggtagacacaaaccataaagatgatccagggagcagagaagccagacatttgtgtgtctctcactcaggtgaagatacagtccatgtaactttaggcaaatagtatctgcttctcatccctcttc

SEQ ID NO: 402242 - DNA, 573 bp, Homo sapiens
tctaagtttttctatttttatatttagaaaacaaactaattcttagtggactcaaccaaaaatcaaagaaattattcagacataaaatacagatttaaagtcactgaagcatgatgaaggatatcaacttcagagtgcacagcaaatatctagcctttggaaagaaagggccacatacatgttaagtaatttaactttaccacttacatatttaactgtttaaatagcctaagtacatttatgataagacatttagcagaagacatttcctcagcttcttcagaaaaaatcctactagtatattatcttaaagtactcaccaaaaaaaaaaaaaaatasaacagagatatatttgtttcctgtctagtgaaaacagcaaaaatctcaacatatggctctcttacctcctcatgaggccatgagcttattgaggaggaagccatttgtcaattatgcttatactctcagaacatagcatagggtccaatatatgggtaaataattttgttgagtcatttaacaaccaaatctggacgatggagattgagccttggcacacattccatcatgtgt

SEQ ID NO: 402243 - DNA, 622 bp, Homo sapiens
atgcattgttgaattagtcaataatcaatcaattataaccaccatgacctttgcacatgagcactacacataaagagctgatagagattattaggaaattagagtttaatttcttattggggtggaagagtaacaaatcatgaagaagtcacactagaaatgtacccttctcaacatttatcataaaatatttttataagcatcaaaaaaacttattaacaagaaaaayaattcggaataaattgttattttgaaagcaattttagagtttttggaataatggaaaatgcctatgcacactacaaggaaatttaccagcaaacacagactttggttcagtcttcatcatatatatttttaaaagcatcaggtagcctacccttacagagaaatttgctctccaattatacacatatataaatgattgctatgtgaatatgatgtttcagtcactatcccaactctatattaagtgactagcccaaagtcacctacaaaattgcttttatatacccaacacatggctgtaaaaccctatatgtgagatattttcttattttcataatcaattttaatgttttatgattattttttaaaatgtcctccaggaatagagcaagta

SEQ ID NO: 402244 - DNA, 622 bp, Homo sapiens
atgcattgttgaattagtcaataatcaatcaattataaccaccatgacctttgcacatgagcactacacataaagagctgatagagattattaggaaattagagtttaatttcttattggggtggaagagtaacaaatcatgaagaagtcacactagaaatgtacccttctcaacatttatcataaaatatttttataagcatcaaaaaaacttattaacaagaaaaacaattcggaataaattrttattttgaaagcaattttagagtttttggaataatggaaaatgcctatgcacactacaaggaaatttaccagcaaacacagactttggttcagtcttcatcatatatatttttaaaagcatcaggtagcctacccttacagagaaatttgctctccaattatacacatatataaatgattgctatgtgaatatgatgtttcagtcactatcccaactctatattaagtgactagcccaaagtcacctacaaaattgcttttatatacccaacacatggctgtaaaaccctatatgtgagatattttcttattttcataatcaattttaatgttttatgattattttttaaaatgtcctccaggaatagagcaagta

SEQ ID NO: 402245 - DNA, 619 bp, Homo sapiens
ttttgtttctaattttgtttttcttaagcttaactcctataggtaggctcatagactgcattcttacccatggtctgtctcctttcacactcaagcctacattttgctatactaacaaatgtgtttttctgctatactaagtgttcatgctgaaatgctgaatacagttccccatagaaatgtgtgtgtatttttacatactttcttttgaaaaatcaacaacaaaatagagcaatataaattctgacacayccacatttccctgacttcataagcttttttctttagcaaaaacagttcaactgaaaaggacttatttgttgaaagttgtagttttagattgatttatgtttcagtaaaagataatatttgttaattggggttcaaatatgtacttttttcttaatgtattacctataattttaatgtaataaacagaaagtattactataagaaatttaaatcttaacctcatttgttttgtaactgaaaatgtaatctattttctttttactgctggctattaactggtagattttgtggatagtgtgactgtttggctacaaacaaaaaatgaaagataaagaactttaaaaagtctaagaatagcgtaagaaaa

SEQ ID NO: 402246 - DNA, 534 bp, Homo sapiens
atatagtctgcaataacttctttcagaaatggtgtatacattttaaaaggagagaatcaatagctgtaagattaaaaaacattattcatctctttctcacagcagggtgactaagcctgctgtcaccaaacatgttacctcactgttccctgatggagttcctttaataggatgagatgaatgcaagtgtttaactattttaacatatcaacaacagaaaataaaagcagctattgaaacaaattatctggcttcccactcattaaatatgtttatgtcattagacagaatgrtactgatgcctaaaagttctatacaggttgagcatccctaatctagaaatcaaaactccaaaatgctctaaattctgaaactgttaaagcactgacatacttaaaggtcatactcaaaggaaaagcttactggagcatttcagatttcatacattcggattagagatactcaacaaataagtatatgcaaacacagcaaacctcatactattgcactttgctttattgtgctttgcaaata

SEQ ID NO: 402247 - DNA, 599 bp, Homo sapiens
ggttttttgtgttttctcttctcactttgaagatacgatttcattatcttcttacttacactgctactatttagaaattctggtctctgtcatttctttttagctaacctatttttttctggttgctttttcgtctttggtattttactgtttcactctaatgtgtaaaaaaaaaaaaaattaacatttcctcttacctgatcacatttgtccctcctgcatctgtatyttcctcattaaaacaatttccaggcatatgtacaccttttcattttattacctatgtctttctatttctttgctgtctctatggctctttctctctgtgtgtttatctcttagtaactttaaatttatgtatttgtttttaaactttagattcaggagtacatgtgaaggtttgttacatatgtagacttgttactggggtttgttgtacagattatttcatcacccaggcattaagcccattacatacccaatagttatctttcagctcttctccctcctcccaccctcaaccctccagcagacccctgtgtctgttgcttccttctttgagttaataattctcatcatttagctcccacttacaagtg

SEQ ID NO: 402248 - DNA, 512 bp, Homo sapiens
gaggaggacaaagaaactcctgaaagaaaaattgtgccatctaggtttaaggagtctggctgggagggtcagatgttatgaggttctgagatttaggaagaagctgcagttcaggatccattagaaagcttctcttamacaccccctgactccaacgcctctttgtgcttctccaaaatctcaaaaagagggaattatgttcttagaggccctctggaagaactggacattaggtaagaaggaatggggagagacaagactatgtgctgcaagtagggatctatcagcccctggggaaagctagaggagggaatgcgcgggactaagtttaggtgaaggccacgctaagggtgactgtatttatttgctagggctgccataggaaaataccacagattgggtggcttatacaatagaaatttactttctcacagttctggaggctagaagtccaggattaaggtgttggcaaggttggtttcttctgaggtttcccttcttggtttgtatgt

SEQ ID NO: 402249 - DNA, 588 bp, Homo sapiens
aggaacttgctgctttcagaggaaggaaccagttgtggcaggatttgcacctgctgactaaatagcccttaagccctgaataaccacctgcgatacccagggagtgcactgtgggccatgggtctcgagatgtacaaaatcaggggagacccatatattctcagctgtggtggctatggtgaaagacttctttttgagaaaagcagagggaaaagtagaggggactttgtcttgcaccctaagtaccaggtcagccacagtaaagtagagcaacaatctgggtcttggggttgctaagtccaggccttggctcttagacagcatttctggacctgccctgggccagaggggagcccacttccctgaagggtgagtccaaggcctcacagcattcatcacaagctgacagaagagcccttgagctttaagcaaatgtcagcactggcctggcaaaatctcccatggaccagtggtggtggtagtcacagagtgacagaggctcctctgcctgtggaaaggggagtamaaataagaagaattttatattgtggtttgagtgccagcttggccgcagtagaatagaacatt

SEQ ID NO: 402250 - DNA, 453 bp, Homo sapiens
acattaactacataaggcaccaggggccaatcctggagaaacagagatatatgacctttcagacagataaaacatagctgttttcacttgagtccagaagttcaagaccaacttggataacatggcaaaaccctatctctaaatataaaaagatataaaaatactcgaagaaattcaagataacacagaraaggaattcagaattctatcaaataaatttaataaagagaatgaaataattaaaaagagtcaagcagtaatgctagagttgaaaaatgcaattgacatgctgaagaatgtatcagaatctctaaatagcagaactgatcaaacataagaaagaattagtagtctggaagacaggctttttgcaaatacatagtcaggagacaaaagaataaggaaaaaagaagcattcctacaaaatctagaaaatagcctcaaaaggacaaa

SEQ ID NO: 402251 - DNA, 487 bp, Homo sapiens
cctaatgtcacaaagaatgtacctcctgtaatattatttataatatcctaaggtgatattacttataatgttacaggtggtgtacacatggtaatattatttgttattttctagaagtttgttacttttaatgtcacagggggtgtacacactgtgatattattcataatatcctaggtagttattacttctaatatcwcagtgggtgtacaccctgtgatatttttcataatattctagggagatattacttctaatatcagtgggtgtacacacatggtgtacactgtgatgatattcatagtatccaagggagaaattactcctaatatcacagttggtgtataccttgtgatattacttgtaatattctaggaagatattactcctaatatcacaatgggtgtacacactgtgatattatttgtaatatcctaggggaatgttactactaatgtcacatgggtgtaaactcgttatattattc

SEQ ID NO: 402252 - DNA, 567 bp, Homo sapiens
gggttgtacatactgtgatattattcataatatcctaagggaatgttactagtaatgtcataggggctgtacaccctgtgrtattattcatactattatagggggatgttactactagcgtcactgtgagtgtacaacctgatattattcctagtatcttaggggatgttactcctaatttcacagtaagtgtacaccatgtgtatacaccctgtgatattactcataattatagggggatgttacctctaatgtcacagtgggtgtacaccatatgtgtacaccctgtgataatattcgtaatattgtttttattatacaggggggagaggatgatattactttcaatatcacagaaggtgtatatccccttgtgatattgtttgtaatatccatgaagggagataatattactcccaaaagagtaaataccctgtgtgtacacccccctgtgatatggtttgtaatatctggtgggggagagggtgatattactcaccatatcgcggggggtgtacacctcctgtgatatggtttgtaacatccagtagggggagagggtgatat

SEQ ID NO: 402253 - DNA, 629 bp, Homo sapiens
aactctcccctcctaagactccccttttgtaatattctgtgcccaagaaggagcgattccttcttgtccctgccaccactcaggatatagcctcactcaggatatagcctatgacttgccgcttagaggtcaaacctacctcttcctttgggtataaagcatgttgattccccatacatctggccaaatgccagctttaagtctcatcttagatggttaccccaaatacttgctgtgaggacaggtgtcaggaaatctgactgtggtggcagctttatcatctagctttaccagaaaaaaatctatattatgattctgtatattatttgtgtctttttttttaygtaatccaaactaagagggatagaggtgggattaatcattaaatatttaatttaaagacatgttcaagatcgccaacattagctgttattattgttatcgatatatggcacagcattaaacaatcaagagatttacagttactactcaaggttagcttaaattgagtcatagactttagatcaatcgtaatgctttgcttgaagttgtctgacacaaaaatcaaatacgcaacagaatgtagtcgaggaggagtcacaaaacctattgaagataacagcagaggt

SEQ ID NO: 402254 - DNA, 463 bp, Homo sapiens
tctatttttttttttagtgagaagaaacaacagaagcagttgagaccagaaagtgggttctctagggttaaggaggcattctgcattctgctggatggctttttaaaaatctttcttccagagtcatcttgyctcattgacaatggtttttgtctttgaagtctctcattctagtccctcaataagcccatgatacattttcaagcatgtcatctataggcatttctgcagtgttaacgtcatcatcatccctattataatcatcttgattcagaaacatttcccctatttcaccatcagttaatacattaatgaaacctcattatcaacgttaaaaacttctgtagtattcacttctttcagctaacagactctgaaggtatatttcttgcatatgtaagaaagtcagacattattttttctcacttgacatatagaatccttcaaagttaccaccttgttc

SEQ ID NO: 402255 - DNA, 573 bp, Homo sapiens
tttttctttaaaagccagggtaaatttaaaaacctataactgaaggtctccgtggccctgtaacactccagtactaccttatcagtgtaaacaaggccgaaagcactgagaccacggacaaccagtagccttcctatcaaaaattcttaacccagtaatccgcggatggcccaaatgcattccattggtagcagcaactgctttgctaacagaagaaagtagaaaaacgtttagtggaaacctcattgtgagcacacctcaccagttcagagctatcctaagtcaaacaaaaaggtagcttactaactcaaatctaaaagtatagggctattctgttaggaaaaaagatttaacattaaccactgaaaattcccttaacccagcaggttttgtaatgagggatttaaattttaattaccatacaaaggcccgatcagacccctaggaggaactcccttcaggacagracaatagatggttcctcctgggtgacgggggagggggtgaaaacacaatgggtatattcagtaattgatagggagactatatatagaagcagagttaagaaaattg

SEQ ID NO: 402256 - DNA, 605 bp, Homo sapiens
atattttgagaactaaacgagaaataactggacttatatagacttagtgacagaagattcctgggagaagaaatagcaagtgagaagatcctaagaggtaaatggtttaggcatgttcatacagaaatcttgagtggcttaaacatagaggatgaagggacaaatgatgtgagatgcgatcagaaatatacccaaggctcagattagtgggttgagttttactcaaatgcaatagaaatccactagagagtttaaaataaagagatgatatgaattatgttttaaaagatcattctggctctggtgttgagaatgatttacagggcactggagaggaagtaggaaggccaggtaagggtagatcaggttaagcatggtagattggacacatgtttaccttggttctctcctgtaattctactaaaatgatagagaagggattaaaaggggawgaactcagaaagaaaaaaagaactaggaatgggaggtaataataactacattatatgcattgagcaggaaaatggaggtttattatctagagagctttgggacatctgactcagttcaggaagatgggtgtcatcttgaacagtgagattaaa

SEQ ID NO: 402257 - DNA, 605 bp, Homo sapiens
atattttgagaactaaacgagaaataactggacttatatagacttagtgacagaagattcctgggagaagaaatagcaagtgagaagatcctaagaggtaaatggtttaggcatgttcatacagaaatcttgagtggcttaaacatagaggatgaagggacaaatgatgtgagatgcgatcagaaatatacccaaggctcagattagtgggttgagttttactcaaatgcaatagaaatccactagagagtttaaaataaagagatgatatgaattatgttttaaaagatcattctggctctggtgttgagaatgatttacagggcactggagaggaagtaggaaggccaggtaagggtagatcaggttaagcatggtagattggacacatgtttaccttggttctctcctgtaattctactaaaatgatagagaagggattaaaaggggatgaactcagaaagaaaaaaagaactaggaatgggaggtaataataactrcattatatgcattgagcaggaaaatggaggtttattatctagagagctttgggacatctgactcagttcaggaagatgggtgtcatcttgaacagtgagattaaa

SEQ ID NO: 402258 - DNA, 523 bp, Homo sapiens
tgcttggtgggggctaacccttggctgagcctaggaacttgaatttttgaatgctgttttactaactgacaaggctgctttgtgagcctgaggcactgagcaacgtttgcctgagctgtttgtaaaaacaatgatttgtggtgaacatctactttccttcagggagtctggaatctcagtaattgtggctggttgcacaggcaaagaatgcctacataatgagcccctaataaaaactctgcactcagtctcaagtgggattatctgggaggaaacaatgccacccagcatgcgttgctrcatttcattgctacagcaggaagtgggtcctgtgtaacaccttgtacctcccacctattctacccctcccactaggcaacccctgggggagagaatgttgggaggctgtgtctgaactcctacagggtctgactgttgtcttttcttcttgcagatcctgatatgaatccatagctgtgaatagaattacctctgtgtcctctgagtcttccaagcaagagaa

SEQ ID NO: 402259 - DNA, 482 bp, Homo sapiens
atcacatatcacaaattagtatcaatactagaaaatacttattttcatcattgcaactcatcacattttaattgcaattttcactatttttaaagcaatagctgatgtaaagaatcatattagttttcacattatatctagatctacacatacatagagtaatatgaatcgtttaatattgtagtatccctccagctgccatcagcaactatagcaaacattgtggtaattcataagtacctccagaactgtgaatgagagaacatgaagagaagaagacagatgctcastgattagtggtactgataaataattcattacacaaaatgcaattatatctgttatgacagaaaagattttagttaatgtgtcctatgaccaagaacttacattgttcaaagcctcctttcactccaaagcagtgtccattcaatgttagtggcataatcctcaaaactttttattgacttttgtttcaaaga

SEQ ID NO: 402260 - DNA, 545 bp, Homo sapiens
gatgacatccttagcctaagattctttgctataaattatttattactacacaactgcaactaatcactttacaaggtttgcccactctgtcaatttttcagaggtataagcatctagacatagatgaatttagtgccaagcccatctttgtgtactttcacctaactgtaatgagccttggtttccctcttgcttgtatcactgggtgatccctgcacacgaccactccctgccatgagtggaagcagcttaaggacctcaccagaagctgagcagatgccagtgcctcacatcttgtatttcacaacttgtcaaactgtaagctaaataaacctcgttccttcrtaaattacgagataggcccaggcttctgtttttcacaaattatccagctttagatattctgcaaaacaaaatgggctaagacatggacatttaagttcacagattatactaaatcagcattgagtgtagaatctcaagtgacatggcaatcaagctcatcagtaaatttattcttatgggttcttgagataggtagagcc

SEQ ID NO: 402261 - DNA, 595 bp, Homo sapiens
gatgaatgaagagtcagggtttgagctcagtctgacaccacagtcaaagttttaaaaagctctgtgccatgctgccaggagtcttcactgttgaacatcaaaagtggaagactcacaaggtaagatcagagaccagaccagagttgaagggtgcacaygtcctactgataacattccctccattcctactctatgtcctctttgtcataagaatatgggtgacttctgatgtgttgagaagagaaaggatctgtaaatcttaggaagtaattgaaatgttgggatgctgtaaaatctttgtgaaggcttttttctccgagtggtctgtcttaggaaaatgtttgattatcttggcttgaaagatgcttataataaaagtgtcctaatattctgctagctgatcctgcactcaagggctcatagtcatggagctaggggtaggaaaagccttctgattagctaacaattattaaattccttattataattattattgaggttttattaccactattattgttcccattaccatccttggtctttcttaatgccatctcttccctaccctcaatccctgatatttcctatataaatc

SEQ ID NO: 402262 - DNA, 556 bp, Homo sapiens
ataagaaggtttgaggctgtggcatataaacacagcacataaacatatatttctatataacataatcttcccacttttactacatatttttactagactgttctggaaaagctatttgtacatatttctttgtgcacacaacgttcctcagctaacggctttgctctgtttttatagaacatgttgtatatggttaaaaaatgtctttcacataagccacatttttcctgtttttgtttacttgtctgtattgcacctcaattagcaaatcgtgcagtcttctctccctgtcataataacataaactatctccattttaggctgttcgatgtaaaacaaaaatccccaaatttccactagatggtgctatgagaatgcaaacttctttggtcagggtatatataaaatcctcagttattgcagcctgttattttggcttgtgaaacaggtctgccccccactaaattagatgcasagggatgatttaatatttagttaagagacgatgcaatatttcccacaagtctctgaggagcccaggcaaaacaatgaagag

SEQ ID NO: 402263 - DNA, 634 bp, Homo sapiens
gcatttgttctacttggcctactctgctttccctttgggttgctctgctccccttgggctgctttgctctccctttgggttctgcctgtcactgaggagtcctcactgcaaaggaatagtgaagcctgtatctaatgtgtaaatgtaggagagtatgattagtaactcactttttttttttttttttttttaaagagatgcccaggaaggcagccagatggcagcatcgttcctacactgtctctgcactcccaaaggcagtttctggccctttactgtagtcaaaggagatcgcgtacagccggtcgtttattggctaggctgtttgtcttttttctctactgcagcatgartcagaacccacagagagaaccagagaggaacaacccgttgattaatgggtcagagagctatgtaagactgtgatctcctattgtccctgtttcacggaacaaatgtgggggatgctacaaagattcaacactaggtagacatctaatgaagctgggttgccatcaatcagttcaaacaggtgtctggaatagctgtgtcttctgtcttttgataaacactgagtacctgcacatacaattccctgggagcttttaaatctcctgatgcccaggctgcaccc

SEQ ID NO: 402264 - DNA, 591 bp, Homo sapiens
tgtttttgccttctgccacatgttcttaggtaccctcaggctacagtccttattttaaaggatatgatagtaagaaagttacatcagccttgatgaaaagctgtgaatttaatcttaggagctcacactgactagagagaatgaaaacattctatcataattgcttgaaaaactgtagaactactcactagagttggatattggtctataaccaaaactccttttgtatggaacaaagtgagtttcatgaaactctttgtaaaagattttctttatcctggaaaatcctatatgtttccatgyaaaattcttaataataggtagaatgaaagctggagggaaatataattgtgacatgtgaagtatgaaatatacttcaacttagtatagaagtataggcttaattctttgcaccaaggggcatctagaaaccatctccagaagctttcggtgataccttattaatccttctctaggtgtaccacttaggaaatgtaaatggtactaaaagaaataatttgttaggtccttaatcccacaaaagttgattaagtcattgtctgtgaataaagactaggtgagaaaattggg

SEQ ID NO: 402265 - DNA, 624 bp, Homo sapiens
ttgtgtaccagacaaaggtttcttggattctgaggatttatttcattactatagatatctctaaggcagcatgacctataaataatttaggcaatctcctacatatggagaaataataattaggaaggggcaaacttttgaaattacagtttagatttagtttagatttaaaattgcacacacagtctccctaacaaaygttaagcacttctgtctgttggagattagcaaagagtttgaggaacttattttacattggatctagtttgtcctttaattggtaaacctcaattccaatggcactacaggttgagtactccttatttgaaatgcttggaagaggagaattgttttggattttgtattttgaatacaggcataccttggagatattgcaggttcagttccagaccactgcaataaatcaaatactgcaataaagcgagtcacactgattttttggtttctaagcacatgtaaaagttatgtttacactataatgtagtctattaagtgtacaatagcatttctttaaatgtacacatcttaatttaaaaatattgttaagaaatgctaacagtcatctgaaattagtgagttgtaattcttttactggtagagtct

SEQ ID NO: 402266 - DNA, 600 bp, Homo sapiens
gattctgaggatttatttcattactatagatatctctaaggcagcatgacctataaataatttaggcaatctcctacatatggagaaataataattaggaaggggcaaacttttgaaattacagtttagatttagtttagatttaaaattgcacacacagtctccctaacaaacgttaagcacttctgtctgttggagattagcaaagagtttgaggaacttattttacattggatctagtttgtcctttaattggtaaacctcaattccaatggcactacaggttgagtactccttatttgaaatgcttggaagaggagaattgttttggatttygtattttgaatacaggcataccttggagatattgcaggttcagttccagaccactgcaataaatcaaatactgcaataaagcgagtcacactgattttttggtttctaagcacatgtaaaagttatgtttacactataatgtagtctattaagtgtacaatagcatttctttaaatgtacacatcttaatttaaaaatattgttaagaaatgctaacagtcatctgaaattagtgagttgtaattcttttactggtagagtctt

SEQ ID NO: 402267 - DNA, 536 bp, Homo sapiens
catgttattacttataatacagtcaataacttaattgctcattttaaaataagtagaaaagtataataggatagttcttaatacaaaggataaattcttgaggggatgcatacacaatttttcattatgtgattattacatattgcatgcttataccaaaacatctcatataccccagaaacgtatacacctactatgtacccacaaaaaaaatttttttagaggaggctaaggagatatgacaactaatgcaacctgtgatctaakattttttttactacaaaggatgttactgacaaatgtaaaaatgtacaggtgtgtagattagaaggtagtgtttggtcaatgttagtttcctgattttgttaactgtcctgtggttttataagagaaggtatttgttttaaagtatttgatatggtttggatttgtggtcccacccaaatctcaggtcgaatttgtaatctccaatgttggaggaggggtctgggggaggtgattggatcacgggagcagatttaccccttgctgttctc

SEQ ID NO: 402268 - DNA, 577 bp, Homo sapiens
tatgtaatatttttgactgacttctcttacttagcataatgtgttcaagattcctacatgttatagcatgtatcagtagttcattacttattatggttgaatgatgtttcattgtatggatatatcatattttatttgtccattcatcagctgatggacatttgagttgtttctgccttttggctgttgtgaacagtgctgcatgaacatctgtattcagctatttgaatacctgttttcaattctttggagcatatacaaggagtggacttgctgtgtgatataactatgtttaaatgtttgagaaaatgctaggctcttttccaaagtgtctgtacaattttacattcttaccagtagtgtatgaaggttctgattcttccacatccttgccaatgcttgttatatttggcacttgattctaaattcctagtggatgcaaaatggtatctcattgyggtttccatttgcattttcctgatgagtaatgttgttgagcaacttttcaagtgctttttggccatttgtacatcttccttggagaaatgcctattcaaatcttttgccaatttttaaa

SEQ ID NO: 402269 - DNA, 417 bp, Homo sapiens
ttttcaacttacagtatcttaaggaagtatttccttcaakttgtagaaatgtctagtttgaaattagatttaaaaaattttaatacttatgataaatgtgaaacacataatttaatgctgaattgatattctgttagaatagctgaagaccacaggcaaaaactggaagcattctttgagaactggaacaagacaaggaatgcccactctcatcactcctattcaacatagtactggaagtcctagccaggacaatcaggcaagagaaagaaataagacatccaaataggaaaagaataaatcaaactatctttcctctgacgacgatatgattctatacctggaaaaccctaaagactctgccaaagaactcctggaacagttaaacaactttaataaagtttcaggatacaaaat

SEQ ID NO: 402270 - DNA, 627 bp, Homo sapiens
ttgtttaaacatcaactgacaggaatataggtaaaattattaagtggtgtaactttggtaccttttaccttttttctttttaaactcattgctttattccacactggaacacactggcagagtattactcgatgattaagaataatcctctcttccttaccatttctcatccttccctcctccagggtttttgtcttaagcttaatgccagagaaggaagtaacttgataagctaaactgaattaacatgcagactttatttgggacctcgctttgaaactcttattttaagtgatgtttggaaatgtaaacccctgatagcaaaggtgacactaggttggtgaagatcaataaaaattcatttatttgttcaggaaaaaatctaattcttaaaaagctacctgttacctaaaacgttttgatgtaatttgagtcatttgtggcttctgctatatccgtgtcatgtttaactatacgtgacatcttctctgttatatccttgtctgttactattttgtatgttaattattgttgctgctgtgattaggtaacaataactttagtcatgtacatagcttaacygataacttataaaactatacttttactcagttttttaagaaaatt

SEQ ID NO: 402271 - DNA, 580 bp, Homo sapiens
ccttaaacaaaggatttttatacaaaggataacgttaggttatttaaaatttctattgaaaaggataaaaagaagaaaccaggcttaaattagagcctggggatgtttatctagacataaaaagagcagtaattgtttatttgttttcttgtttagatcggggatgatagatgtggccctactttaacccgatgacctccattgaccatttctacacaaacattcaatgaactttataggaatatatgtactctagatggaaatgtgtggatttgacattttcggtcctgycttttattgcggcttagaaatgcattccatgttaattcagcaagatggttagtgatcactttccatctgtcagtaagatgctgaaaattaccgagtcacagcattgagccaaaaaaacaaaaccaagtcgatgaataattttgcaatgtcaagaagcagtaaattccagctgtgaaaattgagtagcatgaaaaaagctctggaatttaaggccggcctcaccacctctcaccttacaccagtagctcttggatgatggtcataccgttagccaatagaatcccatgta

SEQ ID NO: 402272 - DNA, 570 bp, Homo sapiens
aaggaagatcagtttcggtgcaaaaataaagcccactgtattccaattagatggctgtgtgatggaattcatgactgtgtggatggcagtgatgaagagaactgtgaaagaggtaaggtatttttgtgtgtgtgtgcctgtaaatgagagaatgaaagttaaggttctgtgcagaatatacagtktatgctagaggcagaggatagaatctttaaataattctctttactcttccaagtttcattacatagcagcctggtctaaatatgcaaaatccagatcattgtcagacagagtataatcccaatctgggcatgacaaacacgaacacagggcaagtgtttactgagtgtctaccatttcagactagatgccgggtcaagtatagggatatgtggagaatacagagaaagtagccaatgaaaccatgactacaaaagtatatcttgaattttctgtatatcctttcctttcacattgcttgccttactctgaaagcataggaacaacatatggcatactcaattgcttacattcatatgctgtatgatatataggttataggttgtg

SEQ ID NO: 402273 - DNA, 497 bp, Homo sapiens
tttggttgcttgtgccattgaacttcagatattttaggcaggtaggtagtattttggaaaagaaaaggctgaaaatactgtgtgaacagtaataacaaaagggcgaactaagaaaaagttacgtttgaccttgagtttttaagtttatttgttccaataaattgtttttttcaggatactcttcagtgtatcaaaaaattatttaaccttgtgttaagtcagttggttatgtacatattttatccagcatattggaaaaaattatactcttaactgttaattttctctgaacagtaatagttgggtatgattctgaactatagtttaccactgaactcttttatattttgtgagcaaaattgtttaaaatttctagcaattatattcactacagctcrtcatttaaaggataactgtttctatacccctagacctgaagagcctcatattaaagtgtcaatattgtagtctaactctattgtttgtttattgctctg

SEQ ID NO: 402274 - DNA, 579 bp, Homo sapiens
caaatcaataaaatcagactctctggggtgggatccaaccatcagtattcattgaagctagtctatgattccaatgagaaaccaaaattaaaaatcactggctcaaaaaactgatataaaacagaacatatatatttccatgttatattacctccagagtaattaatataaaacsctcacaatatgtaatgttttacattaatttatactgttaaatagcattcatatatctcattattccctttttcaagtattataagtatggagaaaacaaatatggaacttgctttcattttaagcatattatcacataatatatgtggtactggtaataaatttgatcctcccagaaaggtaatatgagagacctttaaataggagaattatatgtagtatataatgtaatattattggtgtttgtatatggatgggatatttctgaaaagggattcaaaaatctagcactagggatgcctctgggagcaagacgtggagaagtgaaataaaaaacaacagtgggaatggaatttaagtttctctttagacccaaaggaatctactaactactacaagtaataa

SEQ ID NO: 402275 - DNA, 605 bp, Homo sapiens
acccacagttccataggctgtacaggagacatggctggggaagcctgagaaaacttacaatcatggcagaagggcaaaaaggaagcaaacatgtcttcacatggcagcaggagagagggagtgtaggggggaagtgctacacacttatctcgtgagaactcactcactagcaggagaatagcaagggagaaatccgcccccatgatccaatcacctcccaccagatcactccctcaacactggagattacaattcaacatgagatttgggtggagacacggagccaaaccatatcattactactgcacaatagagtttytgagagtattaaataaaataaaatatataaattgcctctcccgctggcctagttcttgtgcacccaagtgcttaataaatatcacctgtagttactgctgaataattaaaaagacttccttttgaaatgctaattggcagattcttacaataactttatttttcttacaaaagtaaactgaatctcttatggattgagattgttaaaaatgatgattaactttttgagcccatatttaatgatttaactatcacctttgcatctaacgagattcacattaaatatt

SEQ ID NO: 402276 - DNA, 595 bp, Homo sapiens
ttgtaaatattaagtacataagtgttaagtatgtaccatacacacatatacacaaatgaaaatttgacttcagcccttatcgactgtatctagactaggagaaagatgaagcgctgacagttgggtctccaaagtgtactgtaaaatttsaacaggcgattgatatgttcatttgttaaagtaagcaagtagcattcttattcagcattatcgaccgagtgcccagaaggtttacagaggatggagctccggcggaataccatctaggcagacctatgggtgagcactggaggaaatgaatgaaagttactgtgagtggacatgaatgaaagtcactgtaagcggacctggattggagagggtaaagaaaggaattacaataggtaagtgattttgaagaaagaagcagtaagagaagatccatggattttagactccaccccaaaggtaatgtggtgtcttggaagggtaatgtactggcaggggttaaaatggcagcttaaaaaagcagggagactctcagaacttcgtatacattatccaggataggtaagatgatgacccaaaatagagtaatgtgggatgaataaatgtg

SEQ ID NO: 402277 - DNA, 566 bp, Homo sapiens
ggaccgtatggtcactacatttttagtcttttgagaaacctgcatactgttacccaaaatagctgtactaatwtacatttctaccaatgaaatacaagagttttcttttcttcacatcattgctaacacttatatttcttctttttttacaatgcctaacttaacaggtataaggtgatatcttattgtggttttatttgcattttcctgataattagtgatgttgagtattttttaatataccagttggccatttgtataatgttttaaagaaatgcctattcaagtcctcagctcatttttcagtgagtttttttttcttactattgaatattctttatatattttggattttaacccattagcagatgtactgtttgcaaatattttcttccatttcatagattgtctctttactctgttgtttctttttttgtacataagttttttaatttgatgtaattccatttgtctgtgtttgcttttgttgcctgtgtttttggagtcatatccaaacagtttttacccacactaatgtcatggaactttccctctatattttattc

SEQ ID NO: 402278 - DNA, 566 bp, Homo sapiens
ggaccgtatggtcactacatttttagtcttttgagaaacctgcatactgttacccaaaatagctgtactaatttacatttctaccaatgaaatacaagagttttcttttcttcacatcattgctaacacttatatttcttctttttttacaatgcctaacttaacaggtataaggtgatatcttattgtggttttatttgcattttcctgataattagtgatgttgagtattttttaatataccagttggccatttgtataatgttttaaagaaatgcctattcaagtcctcagctcatttttcagtgagtttttttttcttactattgaatattctttatatattttggatwttaacccattagcagatgtactgtttgcaaatattttcttccatttcatagattgtctctttactctgttgtttctttttttgtacataagttttttaatttgatgtaattccatttgtctgtgtttgcttttgttgcctgtgtttttggagtcatatccaaacagtttttacccacactaatgtcatggaactttccctctatattttattc

SEQ ID NO: 402279 - DNA, 432 bp, Homo sapiens
taggcaaataattataaagaaatgaaaagcttggctatagcaaatgttaatgtcagaaaaaaaataactagcatttatcttcagcaatcaataattctgaaatccactcatttatgttccaactaaaatggtccaaactgtttatttttcaagacctatatgtgtaaaggctaatttgagtgttgttatcactttgattaaatgtaagattttctcttacattacaagaatgggctttgaggtttctgaaatcatgccttttaagcagggttgaaagagcaaaacacatctccaaaaaaagttttagatcgtggataagtgtgcatgtaaataagcaagattccttctttcaagcmtaaaatgatacaatttggtgacttaatgcagccaaaaacttgtttcattttcttacctacctcaaagtgacatatt

SEQ ID NO: 402280 - DNA, 606 bp, Homo sapiens
tgtgcattaacaacaaaatttcaaaagataagtgaaaactggtagaactgaagagagaaatagactaatacccagttatagtcagatatttcagtaataacctcataataagtgttagaataagtacacatacacaaaaattcataaggatatggaagacttaaacaatattatcaactaatttgttatcattgaaatgtatagaacagtccacccaagaacatcataagacttttcaaatgcacatggaaaccttatcaaaataggccaaattctagagaataaaaagtactttgatacattttaaaggattcaggttttgcaaagtatatactgtgatcaccaatgaaatcaamttaagacaaacaaaaagctggaatatcccaaatcatttggaaattaaacaatatattctaaataactcctggttcaaaggataaacaaaaagtgaagttaggccaggcatggtggctcattcccataatcccagcactttgagaggccaaagcaagtggatcacttgaggtcaggagttcaagaccatcatggccaacatggtgaaaccctgtctttaataaaattacaaaaattagtcctgcatggtgg

SEQ ID NO: 402281 - DNA, 505 bp, Homo sapiens
gaaagaaacagaacactttgcaaaggttcaccatgttatgccaagtccttatcgtttgactcagttatrtgtctttatggctaagaacagatcttctctagaagcatgggtgtgtttcactatttcacatgtcccatgtcctcagggcttagcaggatgtagagtaggattgcattaagagtggcatgagtgtctaacctattccctcttgcaggatctctatttagaatccatttttatttcagtttgtgtccatacttttcttaacccatgctacattcaaggggaaattctcttatgctcttggagttcacctagttgttacctcttacttctcagcaccaatatttgtatttatctatagttccattatcagttggatatttcatttctaaagtccgaacattgtagtttgttctaccttgacatattctaatttaaataatttgttctgtttttatttaaattatgtaaagaaaacaatgtagaagcaagagaaagagag

SEQ ID NO: 402282 - DNA, 505 bp, Homo sapiens
gaaagaaacagaacactttgcaaaggttcaccatgttatgccaagtccttatcgtttgactcagttatatgtctttatggctaagaacagatcttctctagaagcatgggtgtgtttcactatttcacatgtcccatgtcctcagggcttagcaggatgtagagtaggattgcattaaragtggcatgagtgtctaacctattccctcttgcaggatctctatttagaatccatttttatttcagtttgtgtccatacttttcttaacccatgctacattcaaggggaaattctcttatgctcttggagttcacctagttgttacctcttacttctcagcaccaatatttgtatttatctatagttccattatcagttggatatttcatttctaaagtccgaacattgtagtttgttctaccttgacatattctaatttaaataatttgttctgtttttatttaaattatgtaaagaaaacaatgtagaagcaagagaaagagag

SEQ ID NO: 402283 - DNA, 505 bp, Homo sapiens
gaaagaaacagaacactttgcaaaggttcaccatgttatgccaagtccttatcgtttgactcagttatatgtctttatggctaagaacagatcttctctagaagcatgggtgtgtttcactatttcacatgtcccatgtcctcagggcttagcaggatgtagagtaggattgcattaagagtggcatgagtgtctaacctattccctcttgcaggatctctatttagaatccatttttatttcagtttgtgtccatacttttcttaacccatgctrcattcaaggggaaattctcttatgctcttggagttcacctagttgttacctcttacttctcagcaccaatatttgtatttatctatagttccattatcagttggatatttcatttctaaagtccgaacattgtagtttgttctaccttgacatattctaatttaaataatttgttctgtttttatttaaattatgtaaagaaaacaatgtagaagcaagagaaagagag

SEQ ID NO: 402284 - DNA, 505 bp, Homo sapiens
gaaagaaacagaacactttgcaaaggttcaccatgttatgccaagtccttatcgtttgactcagttatatgtctttatggctaagaacagatcttctctagaagcatgggtgtgtttcactatttcacatgtcccatgtcctcagggcttagcaggatgtagagtaggattgcattaagagtggcatgagtgtctaacctattccctcttgcaggatctctatttagaatccatttttatttcagtttgtgtccatacttttcttaacccatgctacattcaaggggaaattctcttatgctcttggagttcacctagttgttacctcttacttctcagcaccaatatttgtatttatctatagttccattatcarttggatatttcatttctaaagtccgaacattgtagtttgttctaccttgacatattctaatttaaataatttgttctgtttttatttaaattatgtaaagaaaacaatgtagaagcaagagaaagagag

SEQ ID NO: 402285 - DNA, 570 bp, Homo sapiens
  misc_feature (1)...(570): n = A,T,C or G
nnnnnnnnnnnntgattgcataaatcttgtctcaattgggagtttccaaaattagaacctatacccacaaagatatgaatacagaagtatactttggagataattccagaaaccactaataggggagtggggaagtaaaccagggaaaggaagaaacccaatagagggtacattatcaggtatgttgytacaggaacgagattcatcctaccaggaaactctgggagatagtgtagaatcctcaggattacccaaaacaagagacagggctggaatacgtattcatcagctactgtcagtcgttggtttagggctgctctggaagagggtttggagtgattaatggcctgatggggacttccagattgggctcaggcagagttgcatgtgcttgttgttaaaagccatttgcttagtgtggacagaaatggtgaatatcaaggagtgtagatggggcactgacatcatatatttcagatccatacaccagaaaaagtcttcatcacttgagtgttcaagaacctaaggccatctctacatctaagggactctcaacatctcaagatgttg

SEQ ID NO: 402286 - DNA, 579 bp, Homo sapiens
cacataacatcatcgtgcacatcctcctgaaaaatgtattgcacaaaaacaagccttgttgccttgttattaacatcagtagacttatcaacctggattgcatataatagtgattcattaatcttctttgacaattgtaccttaatatcctctgctatttcagcagtttgtcttgttatggttttagtcaaaagaggaaaacatgccaccttttcaactgcagccttttctaaaagttcacarcaaacatccatagtagcaggcaggattaactcttcaccaatagtaaagggcttcttagctttagtaatgtggttagccactaagaatgatgctgtcagtgcggacacatttgatgaagtgttagccttcaataattgcttctgttcttcatgttcattttttatttttcttttgaaaaactccaaaggcttgtcttttaatgcacggtgctttgtctccatgtggcaaagcagttttgaaggtttcctggcttagttgggaagctggttgccacatgttatacaaagcgagtattttcttttaaatgcagttttctttttgttgacagtcctagag

SEQ ID NO: 402287 - DNA, 265 bp, Homo sapiens
acattcccaatggggaacctgaaattccatgtcacaggggaaggccttaaacctcccagagctggaactgatttaragagtggtaaaaaagataaaagtaaaagcagcagtgggaagtgccttggcggtatttccagtctcagtgtaaactaagggaagccattccttattagatctcacagggaacttcaagaaaatctgttaactatctcaagcagtggccatgggttgaaagaagctccgaactgaatttggtaatgtaacc

SEQ ID NO: 402288 - DNA, 575 bp, Homo sapiens
caatttaaacatgcataacattcgagaaataattcagggttacctgagagtaaacctgtcaaaacgattggttgaggagtaaatttaagttaaaattaaaaaaaaaaataagtagattctaacttttaaaattaacatgtcacattacatatccaaagttttgttttttttcttgaaaattaagcctacacggtttggtatatcgaaaccaggctaacattccagaatagaagagccaactacctgctgcaccctcatttaattacatgtgttcagtttgtgtctatcaccwgtgttcccaatgtttatacctaacctatttcaatcatcttacctacataacttctttatataatcattttgcaaccgaaaaggaattgaatttaataaagaaattatgtatctatcagaaagaggatgaagacagtaacaaacacatagaaaagttaagagaagcaaatgacagtgtgtttccagaatcattaggtaagttccttgtggatcaacaggaattttagtctttgaagcagatgtgcatgtatatatgaatgatctatatgatatacacaaaataa

SEQ ID NO: 402289 - DNA, 575 bp, Homo sapiens
caatttaaacatgcataacattcgagaaataattcagggttacctgagagtaaacctgtcaaaacgattggttgaggagtaaatttaagttaaaattaaaaaaaaaaataagtagattctaacttttaaaattaacatgtcacattacatatccaaagttttgttttttttcttgaaaattaagcctacacggtttggtatatcgaaaccaggctaacattccagaatagaagagccaactacctgctgcaccctcatttaattacatgtgttcagtttgtgtctatcaccagtgttcccaatgtttatrcctaacctatttcaatcatcttacctacataacttctttatataatcattttgcaaccgaaaaggaattgaatttaataaagaaattatgtatctatcagaaagaggatgaagacagtaacaaacacatagaaaagttaagagaagcaaatgacagtgtgtttccagaatcattaggtaagttccttgtggatcaacaggaattttagtctttgaagcagatgtgcatgtatatatgaatgatctatatgatatacacaaaataa

SEQ ID NO: 402290 - DNA, 368 bp, Homo sapiens
ctatttgaatacactttatttctttctcttgcctgattgccctggcaagaaattccaattctgtgtggaataggagtggtgagagagggcatctttgtctgtgccagttttcaagggaaatgyttccagcatttgcctattcagtgtgatattggctatgggtttgtcataaatggttattattttgaggtatgaggaacatgaactcttttgttgtctgctctgtgcatagtacctggcagtgtgtggtacaggggaggtacccatgagtatgtagggttaatgaatggtgtgtcagacaaggatactttccagctttgcatccagtaaggagagtatgtagtattacatgagtttgatttcaaact

SEQ ID NO: 402291 - DNA, 602 bp, Homo sapiens
ttcttaccacgtttcaaaaaagccaaaattatttttaacttattactagctttattgtcctttcacatctttaatctgtgacctgctgtgtcatatttttgaaggtataatcatttttcacaatatttgtagtagaagatttatcaattgtcattgcttttattaatccacttaaaatattaaagcttcaatttcaaacttccctggggctttcttttttctttcttaaaatttttacttatttatttttttaccttttaagttcatggatacaagtgcaggtttgctacctagataaacttgtgccatgggggtttgttgtatagatttccattcacgcaaatagacctgtcttgaggttttcttttaagctgtttctgatgacctacctccatgccttcgaaggtatcatgggctattctttcatcccrtaatgcccttgcccacttttccatacagaatttctactcatctttcaagatccacctgaaataaagccttccttggtctccaaccatatatgggagtgatgattcatccttagtttctccagtttttgctctcctggtgtttctctcttacactgttgcttatatttcagg

SEQ ID NO: 402292 - DNA, 602 bp, Homo sapiens
ttcttaccacgtttcaaaaaagccaaaattatttttaacttattactagctttattgtcctttcacatctttaatctgtgacctgctgtgtcatatttttgaaggtataatcatttttcacaatatttgtagtagaagatttatcaattgtcattgcttttattaatccacttaaaatattaaagcttcaatttcaaacttccctggggctttcttttttctttcttaaaatttttacttatttatttttttaccttttaagttcatggatacaagtgcaggtttgctacctagataaacttgtgccatgggggtttgttgtatagatttccattcacgcaaatagacctgtcttgaggttttcttttaagctgtttctgatgacctacctccatgccttcgaaggtatcatgggctattctttcatcccgtaatgcccttgcccacttttccatacagaatttctactcatctttcaagatccacctgaaataaagccttccttggtctccaaccatatatgggagtgatgattcatccttagtttctccagtytttgctctcctggtgtttctctcttacactgttgcttatatttcagg

SEQ ID NO: 402293 - DNA, 639 bp, Homo sapiens
cttaaccaaagaagtgaaagatctctataacaaaaactrcaaaacattgatgaaagaaactgaagaggacacaaaaaattggaaaaatatttcatgctcctggactagaagagttgatattgttaaaatgtctgtattacccaaagaagtgtcaccaatggaggctacagaacagcaaatattgcagaacagcaaatgttgctgcctgatccttcctctgaaagctttgtctcagaggggcacctggctgtatgaggtgtcagtcggctcctgctgggaggtgtctcccagttaggctactaatctaatcttttttcattctttattaatttttattctcatgccttggtatccaatagttataaacctctaacaagactgacaaagagaaaaaaagagaagaccaatttttcctgtcaggaatggaacaagatacatcaccgtaaatgtcaaaagaacagtaagagaacactatcaacaataccatttacataaatttggtaacttagataaaatggacaaattctcccccaaaatccattaattatcacaactcacctgttgtgaagtaaatgacttgaatagccctatgtctattaagaaaattaatttaaaattaaatactccccccaaaaaagg

SEQ ID NO: 402294 - DNA, 639 bp, Homo sapiens
cttaaccaaagaagtgaaagatctctataacaaaaactgcaaaacattgatgaaagaaactgaagaggacacaaaaaattggaaaaatatttcatgctcctggactagaagagttgatattgttaaaatgtctgtattacccaaagaagtgtcaccaatggaggctacagaacagcaaatattgcagaacagcaaatgttgctgcctgatccttcctctgaaagctttgtctcagaggggcacctggctgtatgaggtgtcagtcggctcctgctgggaggtgtctcccagttaggctactaatctaatcttttttcattctttattaatttttattctcatgccttggtatccaatagttataaacctctaacaagactgacaaagagaaaaaaagagaagaccaatttttcctrtcaggaatggaacaagatacatcaccgtaaatgtcaaaagaacagtaagagaacactatcaacaataccatttacataaatttggtaacttagataaaatggacaaattctcccccaaaatccattaattatcacaactcacctgttgtgaagtaaatgacttgaatagccctatgtctattaagaaaattaatttaaaattaaatactccccccaaaaaagg

SEQ ID NO: 402295 - DNA, 507 bp, Homo sapiens
tccttgtaattggaaaactttcattttgacagagaaaatgtgccagtatccctgtgagccttgccacaagccaatgcagaatgccatctggaggatgcatgcccaagtcatgcaacagcctcctgtcgggatgtatcaggaactttgcaacagaacaactaataacatcttaagctccatttgtctagctcgctagtcctcttggcagaggtcataccagcagtggttttgttgatttgctgcatcaaatgtaattaggctaaagcactcactgacagagcctctgataatggcataaaagcctcaggcttaaatttacccattgagtcaaatttaagtggatcaacaaagacatactaatttcatcamtagaacagtaaaacaattatttttaaaggtgcttatttgggacaacaagattttcctttctttggatctcataattgttttattttaattttaattttaatttaatttaatttattttattttactttttagtcgctg

SEQ ID NO: 402296 - DNA, 550 bp, Homo sapiens
aaaaaaaaaaaaagaaaaccaagagcaagttgccaaaatattacacaaggatttctagttttattttctgtttcactgtgattgggtaaaagtaaagatatataaatataagacataaatgcattttattctttggaatctaacatcttcaattaaaaatgaaaaatttctaacaggaaggatcaagagattggraagtagcctaataagtctttaaaatagtgtttctaggaatctgatataccaaaagcaaggagcaataggaaatacagataaaggcaggaaaaggtagattttgttacaacactattgtggtttctgaaggagtttggcctcattgggtgatgcacatcagtgttaatttctaatactcagaaaattagtaacctttgtacccaagaagtgaacattcagagttcaaagaaccacccaccaccccaaatcattcaataattttcactggtgttctactacaagaattataattcacttgtaattatggccaccaaaagaatgttttttttccattttataattcaacaaacacttg

SEQ ID NO: 402297 - DNA, 556 bp, Homo sapiens
taaaattactttaaaagccatgcagaatttataatacctaacaatctaatatttctagcaagatactgcattggaaatgttaggaaacaaataatttagcttgaggcatctctgagcaggtaatattttgaaccattcagtctcaggtctctytcatctcccagtccttcaaagttcttccacctcctttgacctaaatttaatcatttttttttccagtagtctgtggtgactttattagtgatttcataactatgggattacaatttggataaatcagatcttaatgctcactgcccctttgagtaagctgagagaaagaagtgaccctgcaggttttcagaatttttgagcctaattaaaatagcttgctaccttatccttttccctcatctgtacagtaggtagtatggcctggggagaaagaaggctagcgtgttttccacgcaattacttagccctacatgttcctccctattgataatcagaccttgtgagtactttcatcattttataaatataagagagtagactggactccggaaaagaagaggaa

SEQ ID NO: 402298 - DNA, 556 bp, Homo sapiens
taaaattactttaaaagccatgcagaatttataatacctaacaatctaatatttctagcaagatactgcattggaaatgttaggaaacaaataatttagcttgaggcatctctgagcaggtaatattttgaaccattcagtctcaggtctctttcatctcccagtccttcaaagttcttccacctcctttgacctaaatttaatcatttttttttccagtagtctgtggtgactttattagtgatttcataactatgggattacaatttggataaatcagatcttaatgcycactgcccctttgagtaagctgagagaaagaagtgaccctgcaggttttcagaatttttgagcctaattaaaatagcttgctaccttatccttttccctcatctgtacagtaggtagtatggcctggggagaaagaaggctagcgtgttttccacgcaattacttagccctacatgttcctccctattgataatcagaccttgtgagtactttcatcattttataaatataagagagtagactggactccggaaaagaagaggaa

SEQ ID NO: 402299 - DNA, 463 bp, Homo sapiens
aataagaaactgaatttataattcaattttaattattttaaatgtataaatagccacagctaacatttaatgaagtcttgaacccttatcaaggaaggtttctacaggaaaagtttgttaatccttattcttcaagcatccactgaaattaaagccaaacaaatacagtactttgtattctgaattgtctttttaatctggcttttaaaaaagtaggacttgaaaagtattgagatttaatcagtttaaagttgggcctgggtgataaaaataagcagttgtgacattatgggatctctgcggtatagacaaatatgatgggtatgccaatcaggcatatgttattttgcttatgatgttttgtttcttctgcatgaggwttggatggaagctgtgcaaataattctgctaatatttattgaccaattactatgtggcaggcaatagtgtaagtctcaaagca

SEQ ID NO: 402300 - DNA, 624 bp, Homo sapiens
gtctgtaatatttttgatgctaagagattggacacattataaaacaaataactgaaaatcagtgaccttttatactatttatctataaaaccaactttgaattactaaattatcttaccatttttgtttattttggyatatacaccaaaataaaaaatgcagtttttacccattcacatgcagttcttacccattcttgattacagtaatgttttactaaccagaaacaaagtaagatgaaagtccaccacatactactactcctaccataatggtgtaataattggaaaatatatatttatactaggctttattattttattttattaattatggttctctatatagttcttttttgttcagataaccaaatatatttccaaaataaacacttcactgcttgaggtcagtgaacatactattttctttattttagtgtttgtttttctaacttctacttaagtgataattgtgacaatttcttctgactcccgtactgtaaagtacaagctaagactaattcctttatgaaatgtaaaatgtactattttatggatttgttgataactagaatgtaagtttgtattaataaagtgcactggcacttagctatatactttataa

SEQ ID NO: 402301 - DNA, 624 bp, Homo sapiens
gtctgtaatatttttgatgctaagagattggacacattataaaacaaataactgaaaatcagtgaccttttatactatttatctataaaaccaactttgaattactaaattatcttaccatttttgtttattttggtatatacaccaaaataaaaaatgcagtttttacccattcacatgcagttcttacccattcttgattacagtaatgttttactaaccagaaacaaagtaagatgraagtccaccacatactactactcctaccataatggtgtaataattggaaaatatatatttatactaggctttattattttattttattaattatggttctctatatagttcttttttgttcagataaccaaatatatttccaaaataaacacttcactgcttgaggtcagtgaacatactattttctttattttagtgtttgtttttctaacttctacttaagtgataattgtgacaatttcttctgactcccgtactgtaaagtacaagctaagactaattcctttatgaaatgtaaaatgtactattttatggatttgttgataactagaatgtaagtttgtattaataaagtgcactggcacttagctatatactttataa

SEQ ID NO: 402302 - DNA, 611 bp, Homo sapiens
tttaagtcatttatttgacaaccacacattgtcacataagcacacaagaggtttaacatgtaatggccacaaagtaatctctttgttatctatgaagccggtttggaatgtctgactgagtaaaatgagtgcagtatattctgtgtaaactaatagttcaaaatatacatatacccatatccctagttgttagttatacagatatttagttgtaattacaatctaggttttgaattatggtgttaaaccatttggtggcatcacacattagactaaagttttattatctaacccatgtataggcatgaatttagagatactaacaagtattggtatttctcatattgaatatttatggagcccctactatgtgttagacattgcttggtatttagaatataccagtggacaaagtcaggccttgtccactcccatatagtccttcctaacaagggatcaggaagacatgcacattaatttttttattttttacatgggagtctcattatgtttctcaggctggccttgaattcctggactcaagtaatcctcccacctcagcttcccgagtagctggkactacagtcatgcaccaccttggctgactacat

SEQ ID NO: 402303 - DNA, 525 bp, Homo sapiens
agcttccttcaggcatggttatagtgctgttggccacgagttaaatgttaatgaatcaacaatatacactgagaagatgtttttcaacagaaacataaaatggttatgtattaatttacataattaactagaagatcaaaaaaagataatcttttatttcccctargagtaatggttcagtattcgctaattcggtgtttgacaactttatggaacataacaccaccgagaataatgaaaatcaactgtgtttatttttctaaatgtttgataaatcttcctgaaatagagctagcaataatactaatcttattttcaagagtctaaccaaaaaggttacatttcctataaaataactattaacattcataaaaaaatggcagtctgactcctaaacttatagtatgtttgccataacaatattaatcataggacatcaaagtttaatgttccatttactttccaatattactgttaatgctatcttattacatctgtactgcattttacaatttccaaaatgtt

SEQ ID NO: 402304 - DNA, 569 bp, Homo sapiens
ttgactcattttttaggtgaggtcttccccgactacccttgttataactgtaattcaacctcccctttctttctccctcactgcacacactatttcccttccctactttgtttttctccataacacttaccatctaacatacatatatgtgtgtgagaatgtgtgcgtacgcacacacacacacacatatatatatacacttttaaatttttttggtctgtctcctagcaattgaaagtaaactccataagggtaggaattttcgtgtattttattcactgctaatcctaagcacccaaaccaatattccagtgtacacaactaataacttactgaatgaaataaattggatcccttatttctaggggctcataattgagatgatatacatacacaagtaaaacattatatatgtccttaaaaaaaaataaccatggaagaaaaaacatggtgtctcatgcatatttaaaatgatcttcaccatytgagagttctgtgaccacagcaagagtttagcagagggctaaaaagtgctcttcaaacgatgataaaggaatcaggtaaggggt

SEQ ID NO: 402305 - DNA, 624 bp, Homo sapiens
tgcacatacttgtctacagcagctaagtgagggtgaggaacaggtccatctccccacaaagtgtcctcttcagtgcttcaagttagttctcccataagkattttttttatttcaactttataatttagaaacagagggttcatgtgtggatttgttacatgggattattgggtgatgctgaggtttggaatacagatttcatcaccctctccctccactgtctagcagtccacagtgtctgttgctcccatatttatccatgtgtgctcaatgctgaggtgccacttaggagaatatgtggtgttcagttttcttttcctgaattaatttgtttaggattaagaactccagctccatttgttttgctgcaaaggacatgatttcattcttttttatggctgtgtagtattatacattttacatataccacattttatatatccactctaccatcgatgtgcatctgggctgatctttgtctttgccactgtgaataacacagcaataaacatacacacacatgtgtctctttggtagaattatttgtttaccttgtagtgtataccatgtagaaggatagctggttcatataatatctctgttttaagttctttgagaaatctc

SEQ ID NO: 402306 - DNA, 545 bp, Homo sapiens
taagaactccagctccatttgttttgctgcaaaggacatgatttcattcttttttatggctgtgtagtattatacattttacatataccacattttatatatccactctaccatcgatgtgcatctgggctgatctttgtctttgccactgtgaataacacagcaataaacatacacacacatgtgtctctttggtagaattatttgtttaccttgtagtgtataccatgtagaaggatagctggttcatataatatctcygttttaagttctttgagaaatctccagtctgctttccaaagtgggtggactaatttatattcccattaacagtgtgtaagtgttttcttttcaccacagccccatcagtatccactggtttttgactttttagtgataaaaatttgagtggtgtgaggctgcacacctacaaccatatgatatttgataaggctgacaaaaaagcaagaaatgagaaaggaattccctgttccataaatggtactgggacaactagctagccatatgacaaagattcaaactgg

SEQ ID NO: 402307 - DNA, 581 bp, Homo sapiens
gtgtttaacagcacccaagtcacaccttgaatactttgttgcttagaattttttactgccagatacctggtatcatctctctcaagctcaaagttccacaaatctctaaggcagaggcaaaatgccaccagtatctttgctaaagcctaactagagtcaactttgctccagttcccaacaagttcctcgtctccatctgaggccacctcagcctggattttattgttcacatcattatcagcattttggccaaagccattcaacaaatctctagagagtttcaaactttcacacatttttttctgtcttcttctgagccctccaaactgtttcatcctcagtgtgttttccagttccaaattcgcttttatgtttttgagtatcttatcagtagcacttcactcaactgataccaatttactgtattagttgcttttcatgctgctgataaagacktacctgagactgggcatttacaagagaaagaggtttaatagactcacacttccacgttgctggggaagcctcgaaatcatggcagaatgtgaaaggcacatatcacatggtggcatacaagagaa

SEQ ID NO: 402308 - DNA, 617 bp, Homo sapiens
ggtgcaggtgctgctgagggctggctttctgtcatggcctggggcagcctcatcgtcaaatttccccagggaacttctmcagatttacaattctatattaacatttgatgtctctaaatgtaaaacgtttttttttgttcctttgtttttgtaacaagaggaaacaccctcacctccacagaagccagggtgtcactttgggggcagaaataatcctttcatggtcaggatgagagtcctgaggaatctcagggaaacctggagagtgttttccaattagactcagagcagagacctccatgggaatctctgattagaacaggccttgagctctgatgggagccaagagagaggctcacccagggtcagggtccttaaaacctgatggttttcacagctatcccctctcaacttgtaaaactgtgcccatctgactcagactgattcagctgaccctctttctgctgatccattttccatctctgtagacttgattctcacagttccctttcttcttctcttccctgaaaacagaagatgtgttttctgtagtcaaaattccagggcttgggtctgcaggacctgggtaggctgaggggactttctcactcaccatt

SEQ ID NO: 402309 - DNA, 215 bp, Homo sapiens
ttactcttgcttgctacttcgcttgcccccagctcccaccctcagccctgtgactggaatgtgtgccccaccgtcattgtcctgagttgaatgtccctttgtkggggaggtgggggggtagtgtccatccacgaaggagcagaaggagggagccacgggccctgccccaaccgctcgggggaagcccagtgggatttgcatctttctttcccttt

SEQ ID NO: 402310 - DNA, 617 bp, Homo sapiens
ggtgcaggtgctgctgagggctggctttctgtcatggcctggggcagcctcatcgtcaaatttccccagggaacttctccagatttacaattctataytaacatttgatgtctctaaatgtaaaacgtttttttttgttcctttgtttttgtaacaagaggaaacaccctcacctccacagaagccagggtgtcactttgggggcagaaataatcctttcatggtcaggatgagagtcctgaggaatctcagggaaacctggagagtgttttccaattagactcagagcagagacctccatgggaatctctgattagaacaggccttgagctctgatgggagccaagagagaggctcacccagggtcagggtccttaaaacctgatggttttcacagctatcccctctcaacttgtaaaactgtgcccatctgactcagactgattcagctgaccctctttctgctgatccattttccatctctgtagacttgattctcacagttccctttcttcttctcttccctgaaaacagaagatgtgttttctgtagtcaaaattccagggcttgggtctgcaggacctgggtaggctgaggggactttctcactcaccatt

SEQ ID NO: 402311 - DNA, 617 bp, Homo sapiens
ggtgcaggtgctgctgagggctggctttctgtcatggcctggggcagcctcatcgtcaaatttccccagggaacttctccagatttacaattctatattaacatttgatgtctctaaatgkaaaacgtttttttttgttcctttgtttttgtaacaagaggaaacaccctcacctccacagaagccagggtgtcactttgggggcagaaataatcctttcatggtcaggatgagagtcctgaggaatctcagggaaacctggagagtgttttccaattagactcagagcagagacctccatgggaatctctgattagaacaggccttgagctctgatgggagccaagagagaggctcacccagggtcagggtccttaaaacctgatggttttcacagctatcccctctcaacttgtaaaactgtgcccatctgactcagactgattcagctgaccctctttctgctgatccattttccatctctgtagacttgattctcacagttccctttcttcttctcttccctgaaaacagaagatgtgttttctgtagtcaaaattccagggcttgggtctgcaggacctgggtaggctgaggggactttctcactcaccatt

SEQ ID NO: 402312 - DNA, 522 bp, Homo sapiens
ttgctgctctgaccctctgtgccttggtctccccctgccgggcctgctctggcgtgtggcagagacccacctggttctccgtggctggctggcagtcctccagcctgaccccaaatgcccttgggacagccttcttatttttcttgatgatgttgatgccccagggggttttgggggctgcagcactgtcatctgaagtgggggagacagagccagagtgagctggagtatccaggagggtcgcacacattcactgccacattcacacatttggatgtatggggattccatcagagaagaaaccagatgcccagggctgatgggacattgtatggcaagagagaaggcctgaaggggaggatgcttaccccaaaggagaggcccagagcaatgcaaggacttctgtgtggctcgtgggccaaaactacaaggcggaagccatagaactttgtttctktagaaacagggtctctgtcactcaggctgtagtgcagtggtatgatcatagctcaatgcatcctc

SEQ ID NO: 402313 - DNA, 295 bp, Homo sapiens
gtaatgatgccctgcaagaatctgatgacaatgatggtgtttggaaaacttgctgtcttattaggaaattgtgctgtgataaacactttgcactaatcactctcttacatttttacatatttgtgtaaatcatatttttagrggtcaatggtttctccatttacagatggcgaagtaaacccatacgtggaggggctttgtatgtatctaagagctcatacctgaggttagtgagccccagtatctgggcctgtgctcctcatccactggccctatattactccctaacccaact

SEQ ID NO: 402314 - DNA, 295 bp, Homo sapiens
gtaatgatgccctgcaagaatctgatgacaatgatggtgtttggaaaacttgctgtcttattaggaaattgtgctgtgataaacactttgcactaatcactctcttacatttttacatatttgtgtaaatcatatttttaggggtcaatggtttctcyatttacagatggcgaagtaaacccatacgtggaggggctttgtatgtatctaagagctcatacctgaggttagtgagccccagtatctgggcctgtgctcctcatccactggccctatattactccctaacccaact

SEQ ID NO: 402315 - DNA, 295 bp, Homo sapiens
gtaatgatgccctgcaagaatctgatgacaatgatggtgtttggaaaacttgctgtcttattaggaaattgtgctgtgataaacactttgcactaatcactctcttacatttttacatatttgtgtaaatcatatttttaggggtcaatggtttctccatttacagatggygaagtaaacccatacgtggaggggctttgtatgtatctaagagctcatacctgaggttagtgagccccagtatctgggcctgtgctcctcatccactggccctatattactccctaacccaact

SEQ ID NO: 402316 - DNA, 585 bp, Homo sapiens
tgctgcattctagcattcacctaaaaatatggtgagaactagggttcacgaagataaattattaggtgtttctgaaatttagtattttttctatctttatatcacttacttcttgtgcaagttttcatttgtttgctggtaataaattttataaatttcagtttactgataataaacttcacatatttaaagtgtacaattgataaacctgatgtaaccatcctagttatcaaggtgaaccagaaaattctcaaaatttccctctcattcttccatattcctcctcctttcctcttcccttcttctacyatttccccaaatggtaaattctgatcttctttatattgctgtagattcaatttaatttatcagaatttattaaaatggaataacatagtacatattcctgtttgctttattttcctgaacatcaatacttagatattttaccttgttgttatattgcttaagttcagtttttattttccagaatttatataaatgaaattatatggtaaatcttctcatttgtctggtttattttactcagcaaaaatacttagatattttaccttcttgttgcat

SEQ ID NO: 402317 - DNA, 585 bp, Homo sapiens
tgctgcattctagcattcacctaaaaatatggtgagaactagggttcacgaagataaattattaggtgtttctgaaatttagtattttttctatctttatatcacttacttcttgtgcaagttttcatttgtttgctggtaataaattttataaatttcagtttactgataataaacttcacatatttaaagtgtacaattgataaacctgatgtaaccatcctagttatcaaggtgaaccagaaaattctcaaaatttccctctcattcttccatattcctcctcctttcctcttcccttcttctactatttccccaaatggtaaattctgatcttctttatattgctgtagattcaatttaatttatcagaatttattaaaatggaataacatagtacatattcytgtttgctttattttcctgaacatcaatacttagatattttaccttgttgttatattgcttaagttcagtttttattttccagaatttatataaatgaaattatatggtaaatcttctcatttgtctggtttattttactcagcaaaaatacttagatattttaccttcttgttgcat

SEQ ID NO: 402318 - DNA, 585 bp, Homo sapiens
tgctgcattctagcattcacctaaaaatatggtgagaactagggttcacgaagataaattattaggtgtttctgaaatttagtattttttctatctttatatcacttacttcttgtgcaagttttcatttgtttgctggtaataaattttataaatttcagtttactgataataaacttcacatatttaaagtgtacaattgataaacctgatgtaaccatcctagttatcaaggtgaaccagaaaattctcaaaatttccctctcattcttccatattcctcctcctttcctcttcccttcttctactatttccccaaatggtaaattctgatcttctttatattgctgtagattcaatttaatttatcagaatttattaaaatggaataacatagtacatattcctgtttgctttattttcctgaacatcaatacttagatattttaccttgttgttatattgcttaagttcagtttttattttccagaatttatataaatgaaattatatggtaaatcttctcatttgtctggtttattttactcagcaaaartacttagatattttaccttcttgttgcat

SEQ ID NO: 402319 - DNA, 611 bp, Homo sapiens
tgtctttcttcactctctgctaaaatagtcacacataatatctagaagcattaagattaataagtaactaatttgaaaattagaacaagtcccaagtgaagtcaaagttactgtgtggttgacaggaaacatggctggatactaagagtgtgttcacatctgttttatgtagattagcaacatattttatatatcccttaagtaatactttcattgagactcctgatttaacactatttcytgatgaataacacctaaatcataaaggtggaggttattacctaataattcatattactggtacaaactttcacctagggtatattcctatacctgatgtaaaatcagcccagaatggagaagttaattctcttattagagcttgtcaattaactaaaaaccaggattaaatacagatgttctacattagtgtgtaattttgaaatgtgttgcaagcagaggaggttcttatgtctcctagaagccccatcaaaatggacaaaaaaagacacttttaaataaattcctacattatagagacctgacatatgaatttgaaaccaaatgccaacaaaggagaaaacaaacaaataaaacaactagtatggaag

SEQ ID NO: 402320 - DNA, 611 bp, Homo sapiens
tgtctttcttcactctctgctaaaatagtcacacataatatctagaagcattaagattaataagtaactaatttgaaaattagaacaagtcccaagtgaagtcaaagttactgtgtggttgacaggaaacatggctggatactaagagtgtgttcacatctgttttatgtagattagcaacatattttatatatcccttaagtaatactttcattgagactcctgatttaacactatttcttgatgaataacacctaaatcataaaggtggaggttattacctaataattcatattactggtacaaactttcacctagggtatattcctatacctgatgtaaaatcagcccagaatggagaagttaattctcttaytagagcttgtcaattaactaaaaaccaggattaaatacagatgttctacattagtgtgtaattttgaaatgtgttgcaagcagaggaggttcttatgtctcctagaagccccatcaaaatggacaaaaaaagacacttttaaataaattcctacattatagagacctgacatatgaatttgaaaccaaatgccaacaaaggagaaaacaaacaaataaaacaactagtatggaag

SEQ ID NO: 402321 - DNA, 596 bp, Homo sapiens
tattttatatatcccttaagtaatactttcattgagactcctgatttaacactatttcttgatgaataacacctaaatcataaaggtggaggttattacctaataattcatattactggtacaaactttcacctagggtatattcctatacctgatgtaaaatcagcccagaatggagaagttaattctcttattagagcttgtcaattaactaaaaaccaggattaaatacagatgttctacattastgtgtaattttgaaatgtgttgcaagcagaggaggttcttatgtctcctagaagccccatcaaaatggacaaaaaaagacacttttaaataaattcctacattatagagacctgacatatgaatttgaaaccaaatgccaacaaaggagaaaacaaacaaataaaacaactagtatggaagctagaataatgtgatgcaccattacaccaaatattcagtcttaacatggtttttaatattatgtaaacatggaaggtattgccattgttcatatgatacagaatcaatggcactcacaatcatctgaatatattgaaaaatggcaccttcaaataaaaattgtgaaa

SEQ ID NO: 402322 - DNA, 596 bp, Homo sapiens
tattttatatatcccttaagtaatactttcattgagactcctgatttaacactatttcttgatgaataacacctaaatcataaaggtggaggttattacctaataattcatattactggtacaaactttcacctagggtatattcctatacctgatgtaaaatcagcccagaatggagaagttaattctcttattagagcttgtcaattaactaaaaaccaggattaaatacagatgttctacattagtgtgtaattttgaaatgtgttgcaagyagaggaggttcttatgtctcctagaagccccatcaaaatggacaaaaaaagacacttttaaataaattcctacattatagagacctgacatatgaatttgaaaccaaatgccaacaaaggagaaaacaaacaaataaaacaactagtatggaagctagaataatgtgatgcaccattacaccaaatattcagtcttaacatggtttttaatattatgtaaacatggaaggtattgccattgttcatatgatacagaatcaatggcactcacaatcatctgaatatattgaaaaatggcaccttcaaataaaaattgtgaaa

SEQ ID NO: 402323 - DNA, 455 bp, Homo sapiens
acagactatgaaaaaccctgggggagagaaaaggtgggaccccagtgtgggaggagacagggcagtgagtgggagcggccacctcagacgggagataggcttagggagagcttcgcttttacttgcttttctctaaacactgtcctgggcacacccctatggtatactccccacagcgagccggggggcagggaggcaccagtgccrttagtgttggccaggtccatggctgtgacagccgagcatgccccaggccacctgccacccatgggtgccacactgacaacaggggtgtcacatactcagcccagaaaaggaaaatgacaggagaaaggtgttggaggtttcctgatgggcaggaggcgagagctttctcataaaggccaaacaagagacaaaataaagacccccacagtttaatatattttgtaaaatttgagaatcttgaagataaa

SEQ ID NO: 402324 - DNA, 455 bp, Homo sapiens
acagactatgaaaaaccctgggggagagaaaaggtgggaccccagtgtgggaggagacagggcagtgagtgggagcggccacctcagacgggagataggcttagggagagcttcgcttttacttgcttttctctaaacactgtcctgggcacacccctatggtatactccccacagcgagccggggggcagggaggcaccagtgccgttagtgttggccaggtccatggctgtgacagccgagcatgccccaggccacctgccacccatgggtgccacactgacaacagggrtgtcacatactcagcccagaaaaggaaaatgacaggagaaaggtgttggaggtttcctgatgggcaggaggcgagagctttctcataaaggccaaacaagagacaaaataaagacccccacagtttaatatattttgtaaaatttgagaatcttgaagataaa

SEQ ID NO: 402325 - DNA, 455 bp, Homo sapiens
acagactatgaaaaaccctgggggagagaaaaggtgggaccccagtgtgggaggagacagggcagtgagtgggagcggccacctcagacgggagataggcttagggagagcttcgcttttacttgcttttctctaaacactgtcctgggcacacccctatggtatactccccacagcgagccggggggcagggaggcaccagtgccgttagtgttggccaggtccatggctgtgacagccgagcatgccccaggccacctgccacccatgggtgccacactgacaacaggggtgtcacatactcagccmagaaaaggaaaatgacaggagaaaggtgttggaggtttcctgatgggcaggaggcgagagctttctcataaaggccaaacaagagacaaaataaagacccccacagtttaatatattttgtaaaatttgagaatcttgaagataaa

SEQ ID NO: 402326 - DNA, 598 bp, Homo sapiens
tgtcatttattcgattcgtagactgactctgatatgaaacctcaaagttttcatgtacttatggagagagagagaaggagaaagattttatatctgagtcagtccattaagtaaataaatgagaatattttgatttattttcccgttgatgtactttaaatttgtttccattttatgaatattataggcaaagctgtttcaaatatattagtgtaggttttcctatattgtttcatttttgttaagaaaatatgaagtatgtatttcttttttatttttgattactatttatttctattttaaattttactttaagttctgggatacatgtgctgaacatgtaggtttcttacataartacacatgtgccatggtggtttgctgcacctatcaatctgtcatctaggtttgaagcacctcgtgcattaggtatttgtcctaatgctctccctcccctttcctaatgctttttctccccgacacatcccagtgtgtcatgttcccctccttgtgtccatgtgttctcattgttcaactcccacttatgagtgagaacatgtggcgtttggttttctgttcctgtgttagtttgctgagg

SEQ ID NO: 402327 - DNA, 561 bp, Homo sapiens
attctacatgcattacattttcattaaaagtgaaaggcaaataaaattctgtcattaaaaaaagatcttgagacaatttattgtcagcacattcatgcttcagtgcacattttaacaaactttctctgctagtagccatgtgatatacattcaaaacataaayctataggaagaaattaagactacaaaatgagaaaatcaagatgaagtgcagtttttatctttgtaattgctatattatataactgtaaaaggaataaaaaattacatattttatagcatatgtaagtgcaaactgggaataaacaagaaagagtggtgagaaggaggaattcaaagcacacagttacactgtctctgttcttcatatcaaggccatcacagtatctgcattagaatctaattatatacaattcttatagaatctaattatatacacttcttatgcaatctaattatatacaattcttattgtaaaccttatggtaaacaatataatatttataaaagtgaattagattatatgttaatagagaaataaacgtcattgtgaagtgctaa

SEQ ID NO: 402328 - DNA, 569 bp, Homo sapiens
tcagtgagaccgtgcacgtaasggtgcatgtaaaaacttccccttgaatttctccctgttgccacccacaccaaccccaggcctggagtctgctggcccaagctgatgctgcaatctgtgaaggtgaatccagagtctttgcaggaggggctcagtgaaccgctgggctgtacaatttttccccctcagactccaccagtgaacttcacataggacttctgcaaacacagagagaatggactgagaacagccgcatgtggagcagccccagctggacctgattcacaagggccactaatactgagggtgatgagaagggaagcccagatcagtgcagatcccacagtgtggacactgaggaagggcacacacatgggatggctcctcaccagggcctgaaggaacaggggatgagctgcctttcatgaggaggggaggggacatatttccatgtctttctttttgtggtcatgggtgcgccgctcggcattgctcatctgtcctctgtgtctccatttcagggagggcagggtcaaaggattcccgggtctggaggcacagggttaatc

SEQ ID NO: 402329 - DNA, 569 bp, Homo sapiens
tcagtgagaccgtgcacgtaacggtgcatgtaaaaacttccycttgaatttctccctgttgccacccacaccaaccccaggcctggagtctgctggcccaagctgatgctgcaatctgtgaaggtgaatccagagtctttgcaggaggggctcagtgaaccgctgggctgtacaatttttccccctcagactccaccagtgaacttcacataggacttctgcaaacacagagagaatggactgagaacagccgcatgtggagcagccccagctggacctgattcacaagggccactaatactgagggtgatgagaagggaagcccagatcagtgcagatcccacagtgtggacactgaggaagggcacacacatgggatggctcctcaccagggcctgaaggaacaggggatgagctgcctttcatgaggaggggaggggacatatttccatgtctttctttttgtggtcatgggtgcgccgctcggcattgctcatctgtcctctgtgtctccatttcagggagggcagggtcaaaggattcccgggtctggaggcacagggttaatc

SEQ ID NO: 402330 - DNA, 569 bp, Homo sapiens
tcagtgagaccgtgcacgtaacggtgcatgtaaaaacttccccttgaatttctccctgttgccacccacaccaaccccaggcctggagtctgctggcccaagctgatgctgcaatctgtgaaggtgaatccagagtctttgcaggaggggctcagtgaaccgctgggctgtacaatttttccccctcagactccaccagtgaacttcacataggacttctgcaaacacagagagaatggactgagaacagccgcatgtggagcagccccagctggacctgattcacaagggccactaatactgagggtgatgagaagggaagcccagatcagtgcagatcccacrgtgtggacactgaggaagggcacacacatgggatggctcctcaccagggcctgaaggaacaggggatgagctgcctttcatgaggaggggaggggacatatttccatgtctttctttttgtggtcatgggtgcgccgctcggcattgctcatctgtcctctgtgtctccatttcagggagggcagggtcaaaggattcccgggtctggaggcacagggttaatc

SEQ ID NO: 402331 - DNA, 569 bp, Homo sapiens
tcagtgagaccgtgcacgtaacggtgcatgtaaaaacttccccttgaatttctccctgttgccacccacaccaaccccaggcctggagtctgctggcccaagctgatgctgcaatctgtgaaggtgaatccagagtctttgcaggaggggctcagtgaaccgctgggctgtacaatttttccccctcagactccaccagtgaacttcacataggacttctgcaaacacagagagaatggactgagaacagccgcatgtggagcagccccagctggacctgattcacaagggccactaatactgagggtgatgagaagggaagcccagatcagtgcagatcccacagtgtggacactgaggaagggcacacacatgggatggctcctcaccrgggcctgaaggaacaggggatgagctgcctttcatgaggaggggaggggacatatttccatgtctttctttttgtggtcatgggtgcgccgctcggcattgctcatctgtcctctgtgtctccatttcagggagggcagggtcaaaggattcccgggtctggaggcacagggttaatc

SEQ ID NO: 402332 - DNA, 524 bp, Homo sapiens
gaacataaaaatacatttccagagaaaacagacatctctccgtaatcagtacacttagagctggaaaccactgttcctgaccatgtggcaaagttgagttacaatgaaaataatgcagatctacaccttgttagggagggggtttataattatgattatcttgagatcacttttcgcaacatatgtcaacatcagatacatggacttgtgtcaggaaacagtcaatgtggacatatgtgtacttatctgagtgaagagttcacatggggacgtgtttgcttgtctgagacaagagtaaaygtgaggaaatgtctgttttctgaggaaagagtaaatgtaaggacatatgtggtagtctgaggaaagagtccatgtggggacatgtgtgtttgtctgatggaagaatccacatgagtaaaggtgtgtttgtctgacagaagagcccacatgttgacaggtgtgtgtacccatttgagggtaaatgagcattcagggacagggtatgcctgaactcagctgacgtt

SEQ ID NO: 402333 - DNA, 581 bp, Homo sapiens
ggtaaatgagcattcagggacagggtatgcctgaactcagctgacgtttgggaaaaatctttctcaatctaggaaagaaaaggaatcctctgggttacttgcttatcaggaagagaaaacctgggtcaagtagaaaattgatttttttcaaaaaaatatctttagtaaatggaaacatcttatatgtaaatgaggaaaattacttcctcctttgttgcaygcatctcataatatccccacactcccaaatatgttattagataattttgtacagtctgcattttatccaggggttaatgaattcctaaatatatttttaattgtgtatatttaggtttatattgtccatcacaaaattatgagctgggacaaattaattgtgtcttgtctcaaccattgcatatcactaaaatagtcttaactcttcttaaacaaggcctgttttacttatttcacacccactctctaaattcctggaatatcctctctgtttacctgagtatagttttgacttttacagaatttcaaataaatgaaactatacagtgcaattgaaatgacttcactgaagaaagtggaaa

SEQ ID NO: 402334 - DNA, 543 bp, Homo sapiens
ctcccaaatatgttattagataattttgtacagtctgcattttatccaggggttaatgaattcctaaatatatttttaattgtgtatatttaggtttatattgtccatcacaaaattatgagctgggacaaattaattgtgtcttgtctcaaccattgcatatcactaaawtagtcttaactcttcttaaacaaggcctgttttacttatttcacacccactctctaaattcctggaatatcctctctgtttacctgagtatagttttgacttttacagaatttcaaataaatgaaactatacagtgcaattgaaatgacttcactgaagaaagtggaaaatgaggttcctgaagtaagcaactttgaaaatgaggtggttctctaagtttaaattgtaaagaaatcacacataagcactctatctagtagataaacatgtttcctacaagggtacagcattacatttctgaaaccgctatgcatgtgtcctgaaatcgtgcaactaagtaatcaaatggcatatggttggatgggattcctc

SEQ ID NO: 402335 - DNA, 543 bp, Homo sapiens
ctcccaaatatgttattagataattttgtacagtctgcattttatccaggggttaatgaattcctaaatatatttttaattgtgtatatttaggtttatattgtccatcacaaaattatgagctgggacaaattaattgtgtcttgtctcaaccattgcatatcactaaaatagtcttaactcttcttaaacaaggcctgttttacttatttcacacccactctctaaattcctggaatatcctctctgtttacctgagtatagttttgacttttacagaatttcaaataaatgaaactatacastgcaattgaaatgacttcactgaagaaagtggaaaatgaggttcctgaagtaagcaactttgaaaatgaggtggttctctaagtttaaattgtaaagaaatcacacataagcactctatctagtagataaacatgtttcctacaagggtacagcattacatttctgaaaccgctatgcatgtgtcctgaaatcgtgcaactaagtaatcaaatggcatatggttggatgggattcctc

SEQ ID NO: 402336 - DNA, 576 bp, Homo sapiens
caaataaatgaaactatacagtgcaattgaaatgacttcactgaagaaagtggaaaatgaggttcctgaagtaagcaactttgaaaatgaggtggttctctaagtttaaattgtaaagaaatcacacataagcactctatctagtagataaacatgtttcctacaagggtacagcattacatttctgaaaccgctatgcatgtgtcctgaaatcgtgcaactaagtaatcaaatggcatatggttggatgggattcctcactttgtagtggatggttatggacagtcaagaaaggaaggttagaaaggtccatgtggcagcatagttgggtggagagaccagtgtgtgctcatttttaatgtaatcaagttacagaagattagatacataatttcaatgggtccataaacatgattcatataaacatgctcatttactagaacagaaggttgagargtcccagaagtacttataccacattaacaacacacatacccattatcacaatattttattttaacactattctttaaaatcagaaacaagcaatctttatataaatggctaattctatgt

SEQ ID NO: 402337 - DNA, 583 bp, Homo sapiens
aatgaataatgtagcatggatcttcttcagagtatgaaacagacatccataaaccaatrtggatgttaatagatgattaaacaaagaaacgatgggaagaagaacacgtcttcttatagaagtattccaaatatctcaggcagatattcctccaatcaataggtgaaggctaaacactcatgagttgattgtgtcctgagattagagacatggaataaataatcactattagtgtattttataatgagacttcagatataatgccaaatacgtgatctatgaatgaataattttttatgttttttgtctaaatttgtgcacacacacacacacacacacacacacacacacacacatattttttgaaatacccactgataagagagaaaaaggcaaccacagactgggagaaaatacttccaagtcatatatttgttaaatcaattctttcaatttgttaaatgacttttataatcaatatgcaagtaaacttacaactaatgaaaagaaaaccatggagataaaaatgaaccaaatatcaggaaaggcatctcagcaaaaattatataaaaattgtttaata

SEQ ID NO: 402338 - DNA, 583 bp, Homo sapiens
aatgaataatgtagcatggatcttcttcagagtatgaaacagacatccataaaccaatgtggatkttaatagatgattaaacaaagaaacgatgggaagaagaacacgtcttcttatagaagtattccaaatatctcaggcagatattcctccaatcaataggtgaaggctaaacactcatgagttgattgtgtcctgagattagagacatggaataaataatcactattagtgtattttataatgagacttcagatataatgccaaatacgtgatctatgaatgaataattttttatgttttttgtctaaatttgtgcacacacacacacacacacacacacacacacacacacatattttttgaaatacccactgataagagagaaaaaggcaaccacagactgggagaaaatacttccaagtcatatatttgttaaatcaattctttcaatttgttaaatgacttttataatcaatatgcaagtaaacttacaactaatgaaaagaaaaccatggagataaaaatgaaccaaatatcaggaaaggcatctcagcaaaaattatataaaaattgtttaata

SEQ ID NO: 402339 - DNA, 549 bp, Homo sapiens
agtattccaaatatctcaggcagatattcctccaatcaataggtgaaggctaaacaytcatgagttgattgtgtcctgagattagagacatggaataaataatcactattagtgtattttataatgagacttcagatataatgccaaatacgtgatctatgaatgaataattttttatgttttttgtctaaatttgtgcacacacacacacacacacacacacacacacacacacatattttttgaaatacccactgataagagagaaaaaggcaaccacagactgggagaaaatacttccaagtcatatatttgttaaatcaattctttcaatttgttaaatgacttttataatcaatatgcaagtaaacttacaactaatgaaaagaaaaccatggagataaaaatgaaccaaatatcaggaaaggcatctcagcaaaaattatataaaaattgtttaatataaatttttttatttgggacatgtgcatttaaataaatattagatgccattactcacctatcagcatggctaaaactcacaatact

SEQ ID NO: 402340 - DNA, 583 bp, Homo sapiens
aatgaataatgtagcatggatcttcttcagagtatgaaacagacatccataaaccaatgtggatgttaatagatgattaaacaaagaaacgatgggaagaagaacacgtcttcttatagaagtattccaaatatctcaggcagatattcctccaatcaataggtgaaggctaaacactcatgagttgattgtgtcctgagattagagacatggaataaataatcastattagtgtattttataatgagacttcagatataatgccaaatacgtgatctatgaatgaataattttttatgttttttgtctaaatttgtgcacacacacacacacacacacacacacacacacacacatattttttgaaatacccactgataagagagaaaaaggcaaccacagactgggagaaaatacttccaagtcatatatttgttaaatcaattctttcaatttgttaaatgacttttataatcaatatgcaagtaaacttacaactaatgaaaagaaaaccatggagataaaaatgaaccaaatatcaggaaaggcatctcagcaaaaattatataaaaattgtttaata

SEQ ID NO: 402341 - DNA, 583 bp, Homo sapiens
aatgaataatgtagcatggatcttcttcagagtatgaaacagacatccataaaccaatgtggatgttaatagatgattaaacaaagaaacgatgggaagaagaacacgtcttcttatagaagtattccaaatatctcaggcagatattcctccaatcaataggtgaaggctaaacactcatgagttgattgtgtcctgagattagagacatggaataaataatcactattagtgtattttataatgagacttcagatataatgccaaatacrtgatctatgaatgaataattttttatgttttttgtctaaatttgtgcacacacacacacacacacacacacacacacacacacatattttttgaaatacccactgataagagagaaaaaggcaaccacagactgggagaaaatacttccaagtcatatatttgttaaatcaattctttcaatttgttaaatgacttttataatcaatatgcaagtaaacttacaactaatgaaaagaaaaccatggagataaaaatgaaccaaatatcaggaaaggcatctcagcaaaaattatataaaaattgtttaata

SEQ ID NO: 402342 - DNA, 586 bp, Homo sapiens
cactgataagagagaaaaaggcaaccacagactgggagaaaatacttccaagtcatatatttgttaaatcaattctttcaatttgttaaatgacttttataatcaatatgcaagtaaacttacaactaatgaaaagaaaaccatggagataaaaatgaaccaaatatcaggaaaggcatctcagcaaaaattatataaaaattgtttaatataaatttttttatttgggacatgtgcatttaaataaatattagatgccattactcacctatcagcatggctaaaactcacaatactcatgatgataaatggtaacatgaatgtggaaaaacaagaaatgtcatgcattgatggtgggrattcaaaacgttacatgcacaaaatgagattttttggcattttttaaatagagataaaagtagagttaaaatgtgaacttgtgcttgtgttccaaagtatttacaacgttgattcagaaattgatgtttacaaagattgattcagaggaagttctgtatcagatttgttaatgtgattcattctacaatccctgaaatttgcttgcagaataaatgttgtatgaaaa

SEQ ID NO: 402343 - DNA, 596 bp, Homo sapiens
ccactgataagagagaaaaaggcaaccacagactgggagaaaatacttccaagtcatatatttgttaaatcaattctttcaatttgttaaatgacttttataatcaatatgcaagtaaacttacaactaatgaaaagaaaaccatggagataaaaatgaaccaaatatcaggaaaggcatctcagcaaaaattatataaaaattgtttaatataaatttttttatttgggacatgtgcatttaaataaatattagatgccattactcacctatcagcatggctaaaactcacaatactcatgatgataaatggtaacatgaatgtggaaaaacaagaaatgtcatgcattgatggtgggaattcaaaacgttacatgcacaaaatgagattttttggcattwtttaaatagagataaaagtagagttaaaatgtgaacttgtgcttgtgttccaaagtatttacaacgttgattcagaaattgatgtttacaaagattgattcagaggaagttctgtatcagatttgttaatgtgattcattctacaatccctgaaatttgcttgcagaataaatgttgtatgaaaaatatctcaa

SEQ ID NO: 402344 - DNA, 563 bp, Homo sapiens
atttgcatattcataagacaaagcctttcttaactcaaagcccaatccgtgataagaaagggaagataaatgacacatcagccttacaagagtgagatgaagatggtcgaagtcctaatcctgcttgaggaaatgcatgccctgctccatttacaaacatttgtggacagacatcctttcactgaagaataagcccrtatagaacaggctcctcactgtaagcctatatttgattagcatagagaccacctggatcatttttggaaccatcactctccatcacactgagcaggtgccttggtcttttcctggacccatcaggcaccagcacagctcattggtgactctgagaaagtgacgcttatgtcccacatgagtgtccaggagggacctctgagatctactgggtgctcctgagacactgtctccagcacctgactcatgtcctgatcccccaggatcttcaattctattgaacactgttggtttacagatttgccctgtgatgcataattagagctgattttctcatctcacagaaaatgggaatcagaagaagataa

SEQ ID NO: 402345 - DNA, 563 bp, Homo sapiens
atttgcatattcataagacaaagcctttcttaactcaaagcccaatccgtgataagaaagggaagataaatgacacatcagccttacaagagtgagatgaagatggtcgaagtcctaatcctgcttgaggaaatgcatgccctgctccatttacaaacatttgtggacagacatcctttcactgaagaataagcccgtatagaacaggctcctcactgtaagcctatatttgattagcatagagaccacctrgatcatttttggaaccatcactctccatcacactgagcaggtgccttggtcttttcctggacccatcaggcaccagcacagctcattggtgactctgagaaagtgacgcttatgtcccacatgagtgtccaggagggacctctgagatctactgggtgctcctgagacactgtctccagcacctgactcatgtcctgatcccccaggatcttcaattctattgaacactgttggtttacagatttgccctgtgatgcataattagagctgattttctcatctcacagaaaatgggaatcagaagaagataa

SEQ ID NO: 402346 - DNA, 592 bp, Homo sapiens
cttggtcttttcctggacccatcaggcaccagcacagctcattggtgactctgagaaagtgacgcttatgtcccacatgagtgtccaggagggacctctgagatctactgggtgctcctgagacactgtctccagcacctgactcatgtcctgatcccccaggatcttcaattctattgaacactgttggtttacagatttgccctgtgatgcataattagagctgattttctcatctcacagamaatgggaatcagaagaagataaagcaggagtttggagtccattatgaactctctactcccaaagtaattgtcaaggaatttgtgtttagaacaattttgggttatttttgaactccacttattagtattttgtcaagtatttacatactttcagttcatatccacagaccctcacctttccatattgatttctgactcacttggtctgtgcacctgccacactctcagatccactactgccctgtcactcatacaatgtaagcaacattacttaacactgaaatctgaatttcttattcataggaatgaagtttcttcaactaatctgtacccatagaattagtaaa

SEQ ID NO: 402347 - DNA, 577 bp, Homo sapiens
ggtttacagatttgccctgtgatgcataattagagctgattttctcatctcacagaaaatgggaatcagaagaagataaagcaggagtttggagtccattatgaactctctactcccaaagtaattgtcaaggaatttgtgtttagaacaattttgggttatttttgaactccayttattagtattttgtcaagtatttacatactttcagttcatatccacagaccctcacctttccatattgatttctgactcacttggtctgtgcacctgccacactctcagatccactactgccctgtcactcatacaatgtaagcaacattacttaacactgaaatctgaatttcttattcataggaatgaagtttcttcaactaatctgtacccatagaattagtaaaaacatgcccatccttcatattctcactactaagatattatagttctagaaacccacttcaaaaaatagttctcagtgccttaagttatatgaatggttttgatgtgatagaatatttaaagcacgtcagcgactttttgaacagttattttagattgttttttcctgacaaag

SEQ ID NO: 402348 - DNA, 630 bp, Homo sapiens
agatttgccctgtgatgcataattagagctgattttctcatctcacagaaaatgggaatcagaagaagataaagcaggagtttggagtccattatgaactctctactcccaaagtaattgtcaaggaatttgtgtttagaacaattttgggttatttttgaactccacttattagtattttgtcaagtatttacatactttcagttcatatccacagaccctcacctttccatattgatttctgactcacttggtctgtgcacctgccacactctcagatccactactgccctgtcactcayacaatgtaagcaacattacttaacactgaaatctgaatttcttattcataggaatgaagtttcttcaactaatctgtacccatagaattagtaaaaacatgcccatccttcatattctcactactaagatattatagttctagaaacccacttcaaaaaatagttctcagtgccttaagttatatgaatggttttgatgtgatagaatatttaaagcacgtcagcgactttttgaacagttattttagattgttttttcctgacaaaggaaaacccaggccctgagaggaaacttccaccccagctgtgcacctgctccagggctgga

SEQ ID NO: 402349 - DNA, 507 bp, Homo sapiens
aatctgaatttcttattcataggaatgaagtttcttcaactaatctgtacccatagaattagtaaaaacatgcccatccttcatattctcactactaagatattatagttctagaaacccacttcaaaaaatagttctcagtgccttaagttatatgaatggttttgatgtgatagaatayttaaagcacgtcagcgactttttgaacagttattttagattgttttttcctgacaaaggaaaacccaggccctgagaggaaacttccaccccagctgtgcacctgctccagggctggaacctgtgcttggtggctcccaagtgccccctttcacccaggctcttgccttgcaatgaggtttctgtcggggctcacagatattttccttcagagtctctagcccagcatgaagtggctgtgtcctggtttagaattctctgccagtgacaccatatgctgccgacaccatgtcttttaacaattgattaacctcactaaacctactg

SEQ ID NO: 402350 - DNA, 507 bp, Homo sapiens
aatctgaatttcttattcataggaatgaagtttcttcaactaatctgtacccatagaattagtaaaaacatgcccatccttcatattctcactactaagatattatagttctagaaacccacttcaaaaaatagttctcagtgccttaagttatatgaatggttttgatgtgatagaatatytaaagcacgtcagcgactttttgaacagttattttagattgttttttcctgacaaaggaaaacccaggccctgagaggaaacttccaccccagctgtgcacctgctccagggctggaacctgtgcttggtggctcccaagtgccccctttcacccaggctcttgccttgcaatgaggtttctgtcggggctcacagatattttccttcagagtctctagcccagcatgaagtggctgtgtcctggtttagaattctctgccagtgacaccatatgctgccgacaccatgtcttttaacaattgattaacctcactaaacctactg

SEQ ID NO: 402351 - DNA, 507 bp, Homo sapiens
aatctgaatttcttattcataggaatgaagtttcttcaactaatctgtacccatagaattagtaaaaacatgcccatccttcatattctcactactaagatattatagttctagaaacccacttcaaaaaatagttctcagtgccttaagttatatgaatggttttgatgtgatagaatatttaaagcacgtcagcgactttttgaacagttattttagattgttttttcctgacaaaggaaaacccaggccctgagaggaaacttccwccccagctgtgcacctgctccagggctggaacctgtgcttggtggctcccaagtgccccctttcacccaggctcttgccttgcaatgaggtttctgtcggggctcacagatattttccttcagagtctctagcccagcatgaagtggctgtgtcctggtttagaattctctgccagtgacaccatatgctgccgacaccatgtcttttaacaattgattaacctcactaaacctactg

SEQ ID NO: 402352 - DNA, 569 bp, Homo sapiens
tgtcactcatacaatgtaagcaacattacttaacactgaaatctgaatttcttattcataggaatgaagtttcttcaactaatctgtacccatagaattagtaaaaacatgcccatccttcatattctcactactaagatattatagttctagaaacccacttcaaaaaatagttctcagtgccttaagttatatgaatggttttgatgtgatagaatatttaaagcacgtcagcgactttttgaacagttattttagattgttttttcctgacaaaggaaaacccaggccctgagaggaaacttccaccccagctgtgcacctgctccagggctggaacctgtgcttggtggctcccaagtgccccctttcacccaggctcttgccttgcaatgaggtttctgtcggggctcacagatattttccttcagagtctctagcccagcatgaagtggctgtgtcctgrtttagaattctctgccagtgacaccatatgctgccgacaccatgtcttttaacaattgattaacctcactaaacctactgagggatacccacagaaaagattc

SEQ ID NO: 402353 - DNA, 569 bp, Homo sapiens
tgtcactcatacaatgtaagcaacattacttaacactgaaatctgaatttcttattcataggaatgaagtttcttcaactaatctgtacccatagaattagtaaaaacatgcccatccttcatattctcactactaagatattatagttctagaaacccacttcaaaaaatagttctcagtgccttaagttatatgaatggttttgatgtgatagaatatttaaagcacgtcagcgactttttgaacagttattttagattgttttttcctgacaaaggaaaacccaggccctgagaggaaacttccaccccagctgtgcacctgctccagggctggaacctgtgcttggtggctcccaagtgccccctttcacccaggctcttgccttgcaatgaggtttctgtcggggctcacagatattttccttcagagtctctagcccagcatgaagtggctgtgtcctggtttagaattctctgccagtgacaccatatgctgccgacaccatgtcttttaacaattgattarcctcactaaacctactgagggatacccacagaaaagattc

SEQ ID NO: 402354 - DNA, 579 bp, Homo sapiens
catgtcttttaacaattgattaacctcactaaacctactgagggatacccacagaaaagattctatgactcagaagggagtcccttttctgaagcttcacatttcctgaatcagtggacacmtaatgaatacaaaaacttgtaggatttggggaatgcctagtttcttcgttgggctcctgcagttgaatgttgcatctgagaatatctgcaggtacagatacattcagaataaagacacctttgtatatgctattccaataacacatattctcctttcttactattttctagcctataaaagcacctcctacacagacactaggcctaggtttatggcttttttctcttagcgatctaaggcaaacagaatacaagtggagacttgggaagtgcatgaatattttttctcagctaggaaccctgaaaatgccccatgataaaagaatctgaggtcaatggatttgccaagaccttgtcttcaaaaaatttatgtcagaggcttcagattttcctactgtccttgtctttttctctgccattgtctttcagtttccctatgttctcctcctcagataga

SEQ ID NO: 402355 - DNA, 579 bp, Homo sapiens
catgtcttttaacaattgattaacctcactaaacctactgagggatacccacagaaaagattctatgactcagaagggagtcccttttctgaagcttcacatttcctgaatcagtggacacataatgaatacaaaaacttgtaggatttggggaatgcctagtttcttcgttgggctcctgcagttgaatgttgcatctgagaatatctgcaggtacagatacattcagaataaagacacctttgtatatgctattccaataacacatattctcctttcttactattttctagcctataaaagcacctcmtacacagacactaggcctaggtttatggcttttttctcttagcgatctaaggcaaacagaatacaagtggagacttgggaagtgcatgaatattttttctcagctaggaaccctgaaaatgccccatgataaaagaatctgaggtcaatggatttgccaagaccttgtcttcaaaaaatttatgtcagaggcttcagattttcctactgtccttgtctttttctctgccattgtctttcagtttccctatgttctcctcctcagataga

SEQ ID NO: 402356 - DNA, 579 bp, Homo sapiens
catgtcttttaacaattgattaacctcactaaacctactgagggatacccacagaaaagattctatgactcagaagggagtcccttttctgaagcttcacatttcctgaatcagtggacacataatgaatacaaaaacttgtaggatttggggaatgcctagtttcttcgttgggctcctgcagttgaatgttgcatctgagaatatctgcaggtacagatacattcagaataaagacacctttgtatatgctattccaataacacatattctcctttcttactattttctagcctataaaagcacctcctacacagacactaggcctaggtttatggcttttttctcttagcgatctaaggcaaacagaatacaagtggagacttgggaagtgcatgaatattttttctcagctaggaaccctgaaaatgccccatgataaaagaatctgaggtcaatggatttgccaagaccttktcttcaaaaaatttatgtcagaggcttcagattttcctactgtccttgtctttttctctgccattgtctttcagtttccctatgttctcctcctcagataga

SEQ ID NO: 402357 - DNA, 517 bp, Homo sapiens
aattgattcttaataattcaatcatcctttttttctctggrctgtgacctatatgcagagtctccagaaatgaaactgatgctttcccttttctggctataatattataggattatttcagtatcggctaattttatccactttcatgataaaggaaggctgctgggagggtctgtaatggagatggactaccttacccaatacagataagtttctagatatgtctttcccctggatggtctatctggagaaatgtacgtgtgtatttctcagagattaggtctttggatgatttatccaggaaaggatctatgtcgattttcactcgaagaacctggaggttcctggagcaaataagcacaagagtgtgaggtgtggggcctctaagatctctcaccctcacactagttcagacatgccctttatgtttacatagttcagatttacatataacataccacacagccaggctcatctaaattgccacatgctcatttaaactcattggagcagcagc

SEQ ID NO: 402358 - DNA, 517 bp, Homo sapiens
aattgattcttaataattcaatcatcctttttttctctggactgtgacctatatgcagagtctccagaaatgaaactgatgctttcccttttctggctataatattataggattatttcagtatcggctaattttatccactttcatgataaaggaaggctgctgggagggtctgtaatggagatggactaccttacccaatacagataagkttctagatatgtctttcccctggatggtctatctggagaaatgtacgtgtgtatttctcagagattaggtctttggatgatttatccaggaaaggatctatgtcgattttcactcgaagaacctggaggttcctggagcaaataagcacaagagtgtgaggtgtggggcctctaagatctctcaccctcacactagttcagacatgccctttatgtttacatagttcagatttacatataacataccacacagccaggctcatctaaattgccacatgctcatttaaactcattggagcagcagc

SEQ ID NO: 402359 - DNA, 517 bp, Homo sapiens
aattgattcttaataattcaatcatcctttttttctctggactgtgacctatatgcagagtctccagaaatgaaactgatgctttcccttttctggctataatattataggattatttcagtatcggctaattttatccactttcatgataaaggaaggctgctgggagggtctgtaatggagatggactaccttacccaatacagataagtttctagatatgtctttcccctggatggtctatctggagaaatgtacgtgtgtatttctcagagattaggtctttggatgatttatccaggaaaggatctatgtcgattttcactcgaagaacctggaggttcctggagcaaataagcacaagagtgtgaggtgtgggscctctaagatctctcaccctcacactagttcagacatgccctttatgtttacatagttcagatttacatataacataccacacagccaggctcatctaaattgccacatgctcatttaaactcattggagcagcagc

SEQ ID NO: 402360 - DNA, 517 bp, Homo sapiens
aattgattcttaataattcaatcatcctttttttctctggactgtgacctatatgcagagtctccagaaatgaaactgatgctttcccttttctggctataatattataggattatttcagtatcggctaattttatccactttcatgataaaggaaggctgctgggagggtctgtaatggagatggactaccttacccaatacagataagtttctagatatgtctttcccctggatggtctatctggagaaatgtacgtgtgtatttctcagagattaggtctttggatgatttatccaggaaaggatctatgtcgattttcactcgaagaacctggaggttcctggagcaaataagcacaagagtgtgaggtgtggggcctctaagatctctcaccctcacactagttcagacatgccctttatgtttacatagttcagatttacatataacataccacacagccaggcycatctaaattgccacatgctcatttaaactcattggagcagcagc

SEQ ID NO: 402361 - DNA, 461 bp, Homo sapiens
tgaggtgtggggcctctaagatctctcaccctcacactagttcagacatgccctttatgtttacatagttcagatttacatataacataccacacagccaggctcatctaaattgccacatgctcatttaaactcatyggagcagcagctgagtgtaatcatcacattgaactcagagaaacctgggtccaatacactgtttattgtagctcagagaagcatcactgagtcccttgagtggacgtttcttccctgaaagagcttcactaccaagtatactaaagagttgctatggagccactgtggggttggatttctttctgtcagcctgtcatgcagggtgttttgagtgatgcagacctttatacttagatgctaatcattcccagtattgttgaaatggctggccacccccagtcctgtttctcccctccactcacctgaatgtctccaaaaacccc

SEQ ID NO: 402362 - DNA, 513 bp, Homo sapiens
ctggccacccccagtcctstttctcccctccactcacctgaatgtctccaaaaaccccatgaacctaaggattctcttttccatggatgactctgaggattctcaatctggtcagtgccacagtcagaggcagctaatgcaggattctcagtccgctaataagttgagcccataatataggatacatatccaacagtggccaattcatgtcagtgccaatccacatttaattcaaggggcatgattttcagtgcattgaagtttaaaagcttcataattcttaatagaggcacaaactgaatggtttgctgaagaagtgagttcatggttagaagaaagctgactgcacccaggcagagtctctttaagtaaaacacctgaaatgtgatgtcctgaaaccttgtgaaaattcatttccttgagtaaaaaaacaggaaagctattctcaaatcattgggagaaaacttatcagaaattttatgaacacaccagtcgaattccagtaagtcaatc

SEQ ID NO: 402363 - DNA, 513 bp, Homo sapiens
ctggccacccccagtcctgtttctcccctccactcacctgaatgtctccaaaaaccccatgaacctaaggattctcttttccatggatgactctgaggattctcaatctggtcagtgccacagtcagaggcagctaatgcaggattctcagtccgctaatawgttgagcccataatataggatacatatccaacagtggccaattcatgtcagtgccaatccacatttaattcaaggggcatgattttcagtgcattgaagtttaaaagcttcataattcttaatagaggcacaaactgaatggtttgctgaagaagtgagttcatggttagaagaaagctgactgcacccaggcagagtctctttaagtaaaacacctgaaatgtgatgtcctgaaaccttgtgaaaattcatttccttgagtaaaaaaacaggaaagctattctcaaatcattgggagaaaacttatcagaaattttatgaacacaccagtcgaattccagtaagtcaatc

SEQ ID NO: 402364 - DNA, 513 bp, Homo sapiens
ctggccacccccagtcctgtttctcccctccactcacctgaatgtctccaaaaaccccatgaacctaaggattctcttttccatggatgactctgaggattctcaatctggtcagtgccacagtcagaggcagctaatgcaggattctcagtccgctaataagttgagcccataatwtaggatacatatccaacagtggccaattcatgtcagtgccaatccacatttaattcaaggggcatgattttcagtgcattgaagtttaaaagcttcataattcttaatagaggcacaaactgaatggtttgctgaagaagtgagttcatggttagaagaaagctgactgcacccaggcagagtctctttaagtaaaacacctgaaatgtgatgtcctgaaaccttgtgaaaattcatttccttgagtaaaaaaacaggaaagctattctcaaatcattgggagaaaacttatcagaaattttatgaacacaccagtcgaattccagtaagtcaatc

SEQ ID NO: 402365 - DNA, 513 bp, Homo sapiens
ctggccacccccagtcctgtttctcccctccactcacctgaatgtctccaaaaaccccatgaacctaaggattctcttttccatggatgactctgaggattctcaatctggtcagtgccacagtcagaggcagctaatgcaggattctcagtccgctaataagttgagcccataatataggatacatatccaacagtggccaattcatgtcagtgccaatccacatttaattcaaggggcatgattttcagtgcattgaagtttaaaagcttcatmattcttaatagaggcacaaactgaatggtttgctgaagaagtgagttcatggttagaagaaagctgactgcacccaggcagagtctctttaagtaaaacacctgaaatgtgatgtcctgaaaccttgtgaaaattcatttccttgagtaaaaaaacaggaaagctattctcaaatcattgggagaaaacttatcagaaattttatgaacacaccagtcgaattccagtaagtcaatc

SEQ ID NO: 402366 - DNA, 558 bp, Homo sapiens
caaatcattgggagaaaacttatcagaaattttatgaacacaccagtcgaattccagtaagtcaatccttgggtttatgtttcacaactcaagaagcaataaagaaatctacataattggaagsctgctccaacagagagaattttgaactatttaattaatagaccagtattcattcaaagacactctcctatggaatctgcaacttaaacagatctctgcaacctggaaaaattttctcacttatttttctctagacatccataaatgcaaaaacacattttgtgtgtatatgcatgagtgatctatagaaatactttgcatattaatgaaagtttggaaaaatgataacttcatcacttattgtgaactcacacttcactggtttccaaaattctccacctgtgtcatggggcaatgggtgcctctgagaatatgctgattttcagactgaacatgttctccactcctcagttgaattcatggtttctcactcacactgatgtctctgtgaatgaaaacccaacactgatatccagcagattttcctcttacaag

SEQ ID NO: 402367 - DNA, 447 bp, Homo sapiens
caaaaacacattttgtgtgtatatgcatgagtgatctatagaaatactttgcatattaatgaaagtttggaaaaatgataacttcatcacttattgtgaactcacacttcactggtttccaaaattctccacctgtgtcatggggcaatgggtgcctctgagaatatgctgattttcagactgaacatgttctccactcctcasttgaattcatggtttctcactcacactgatgtctctgtgaatgaaaacccaacactgatatccagcagattttcctcttacaagattcatattctctctatctctttctttctctgcatgtctctaactccctatttttctgtgccattactatttattactgaatcatcctgaatcctgtcaacagactccatctcacattctgcaaatattctgccttaaagataattaggggcaaactca

SEQ ID NO: 402368 - DNA, 546 bp, Homo sapiens
tgttctccactcctcagttgaattcwtggtttctcactcacactgatgtctctgtgaatgaaaacccaacactgatatccagcagattttcctcttacaagattcatattctctctatctctttctttctctgcatgtctctaactccctatttttctgtgccattactatttattactgaatcatcctgaatcctgtcaacagactccatctcacattctgcaaatattctgccttaaagataattaggggcaaactcatccttgcccaaggtgggaaaactttctggacttccactaggtttattagagcctcatatgagaaccatgatcaaacactatgtgtttttggattatacctcaaatctaaaactgttcttcgtagtggctatgacattctacattcccatcattaccattatgcaaaacagtgtggtggcttctaaataaattaaaacagacataccatatgaccagcgatccagcttatggaaatatacccaaatgggatgaaattaccaccttgtgaagatacctgctctcctgt

SEQ ID NO: 402369 - DNA, 447 bp, Homo sapiens
caaaaacacattttgtgtgtatatgcatgagtgatctatagaaatactttgcatattaatgaaagtttggaaaaatgataacttcatcacttattgtgaactcacacttcactggtttccaaaattctccacctgtgtcatggggcaatgggtgcctctgagaatatgctgattttcagactgaacatgttctccactcctcagttgaattcatggtttctcactcacactgatgtctctgtgaatgaaaacccaacactgatatccagcagattttcctcttacaagattcatattctctctatctctttctttctctgcatgtctctaactccctatttttctgtgccattactatttattactgaatcatcctgaatcctgycaacagactccatctcacattctgcaaatattctgccttaaagataattaggggcaaactca

SEQ ID NO: 402370 - DNA, 546 bp, Homo sapiens
tgttctccactcctcagttgaattcatggtttctcactcacactgatgtctctgtgaatgaaaacccaacactgatatccagcagattttcctcttacaagattcatattctctctatctctttctttctctgcatgtctctaactccctatttttctgtgccattactatttattactgaatcatcctgaatcctgtcaacagactccatctcacattctgcaaatattctgccttaaagataattaggggcaaactcatccttgcccaaggtgggaaaactttctggacttccactaggtttattagagcctcatatgagaaccatgatcaaacactatgtgtttttggattatacctcaaatctaaaactgttcttcrtagtggctatgacattctacattcccatcattaccattatgcaaaacagtgtggtggcttctaaataaattaaaacagacataccatatgaccagcgatccagcttatggaaatatacccaaatgggatgaaattaccaccttgtgaagatacctgctctcctgt

SEQ ID NO: 402371 - DNA, 536 bp, Homo sapiens
accttgtgaagatacctgctctcctgtgattattgtagcattattcacaacagccaagatatggaaactaagtgtctgtcgatggacaaatggataaagacaatgtggtatgtgtacacaatataacatgattctgccttataaaataaagagatgctgccattttccacaagatgaatggattcccaccacctctagcaatgcattttacccatttcagcccctccctgggagcyggcagatccaggcccagtagtaaggactggttgtgatggagtggccagaaacagtgcaggtgatgcagaggggcagtgcaggctcttcaggtccagggctgactcctgcagctgctcctgggacagggcatgtgagtacatggggaatcagtccctgtcagtcacatgtacctacactcaccccatagacccacatctgagacactcaccctgggggagccgtcaccagtcacaggagaagacagacataatgccatcttcttcgtgaacacaactctgcattccccagacaccttagcc

SEQ ID NO: 402372 - DNA, 536 bp, Homo sapiens
accttgtgaagatacctgctctcctgtgattattgtagcattattcacaacagccaagatatggaaactaagtgtctgtcgatggacaaatggataaagacaatgtggtatgtgtacacaatataacatgattctgccttataaaataaagagatgctgccattttccacaagatgaatggattcccaccacctctagcaatgcattttacccatttcagcccctccctgggagccggcagatccaggcccagtagtaaggactggttgtgatggagtggccagaaacagtgcaggtgatgcagaggggcagtgcaggctcttcaggtccagggctgactcctgcagctgctcctgggacagggcatgtgagtacatggggaatcagtccctgtcagtcacatgtacctacactcaccccatagacccacatctgagacactcaccctgggggagccgtcaccagkcacaggagaagacagacataatgccatcttcttcgtgaacacaactctgcattccccagacaccttagcc

SEQ ID NO: 402373 - DNA, 487 bp, Homo sapiens
attctgccttataaaataaagagatgctgccattttccacaagatgaatggattcccaccacctctagcaatgcattttacccatttcagcccctccctgggagccggcagatccaggcccagtagtaaggactggttgtgatggagtggccagaaacagtgcaggtgatgcagaggggcagtgcaggctcttcaggtccagggctgactcctgcagctgctcctgggacagggcatgtgagtacatggggaatcagtccctgtcagtcacatgtacctacactcaccccatagacccacatctgagacactcaccctgggggagccgtcaccagtcacaggagaagacagacataatgccatcttcttcgtgaacacaactctgcattccccagayaccttagccctgcctgaggggagagctgttagcttccacagtccaaaagcattttataccctggagcctaaaggatagtttggatgtggc

SEQ ID NO: 402374 - DNA, 638 bp, Homo sapiens
tttgccaaaggtactcccactagaacttaacagcccatggtctgcttcctcaagggcaaagacaatatcaccctatgacttgattcatcaaaagcccatgtattttccattttaccttcagcattatactctgatttatcacatgccaatacagcgaagtattttaggggatcratgtgctatgcagaaatattcaacaggatgttaaaaatgtcctaaatagcttctttactgccatcaacttgtaaattatttattttccaagagacatcggagaaaaacagtcacaaacattgtaaaaggggctaattacaattaacaacaaatgcagcagtgactccaggatgtcaatccataggtttattagtgaaaatgaggtgggttacataaattgttttgagagtattttccttgcttgtagagtcaataccaaggttggcatcaatatagggttaaacagtgatttgctgggaagatgtccttgtagatgtgatttttataaggtcatggtggcttctatcaaaggttgtggttaagcagaatccattcatggtcgttcttgttatcaggagtatgtgcatgggaaacctccttcatggtcattcctagttccatttgtcagggttttaacacaagtg

SEQ ID NO: 402375 - DNA, 638 bp, Homo sapiens
tttgccaaaggtactcccactagaacttaacagcccatggtctgcttcctcaagggcaaagacaatatcaccctatgacttgattcatcaaaagcccatgtattttccattttaccttcagcattatactctgatttatcacatgccaatacagcgaagtattttaggggatcgatgtgctatgcagaaatattcaacaggatgttaaaaatgtcctaaatagcttctttactgccatcaacttgtaaattatttattttccaagagacatcggagaaaaacagtcacaaacattgtaaaaggggctaattacaattaacaacaaatgcagcagtgactccaggatgtcaatccataggtttatkagtgaaaatgaggtgggttacataaattgttttgagagtattttccttgcttgtagagtcaataccaaggttggcatcaatatagggttaaacagtgatttgctgggaagatgtccttgtagatgtgatttttataaggtcatggtggcttctatcaaaggttgtggttaagcagaatccattcatggtcgttcttgttatcaggagtatgtgcatgggaaacctccttcatggtcattcctagttccatttgtcagggttttaacacaagtg

SEQ ID NO: 402376 - DNA, 541 bp, Homo sapiens
aatgtcctaaatagcttctttactgccatcaacttgtaaattatttattttccaagagacatcggagaaaaacagtcacaaacattgtaaaaggggctaattacaattaacaacaaatgcagcagtgactccaggatgtcaatccataggtttattagtgaaaatgaggtgggttacataaattgttttgagagtattttccttgcttgtagagtcaataccaaggttggcatcaatatagggttaaacagtgatttkctgggaagatgtccttgtagatgtgatttttataaggtcatggtggcttctatcaaaggttgtggttaagcagaatccattcatggtcgttcttgttatcaggagtatgtgcatgggaaacctccttcatggtcattcctagttccatttgtcagggttttaacacaagtggatctattttgattctgacaactttcacagcctctttctaacactactggtgaggaaggtgactcactctgtggtactttgcacagcacaggataaatttcacatccacatc

SEQ ID NO: 402377 - DNA, 638 bp, Homo sapiens
tttgccaaaggtactcccactagaacttaacagcccatggtctgcttcctcaagggcaaagacaatatcaccctatgacttgattcatcaaaagcccatgtattttccattttaccttcagcattatactctgatttatcacatgccaatacagcgaagtattttaggggatcgatgtgctatgcagaaatattcaacaggatgttaaaaatgtcctaaatagcttctttactgccatcaacttgtaaattatttattttccaagagacatcggagaaaaacagtcacaaacattgtaaaaggggctaattacaattaacaacaaatgcagcagtgactccaggatgtcaatccataggtttattagtgaaaatgaggtgggttacataaattgttttgagagtattttccttgcttgtagagtcaataccaaggttggcatcaatatagggttaaacagtgatttgctgggaagatgtccttgtagawgtgatttttataaggtcatggtggcttctatcaaaggttgtggttaagcagaatccattcatggtcgttcttgttatcaggagtatgtgcatgggaaacctccttcatggtcattcctagttccatttgtcagggttttaacacaagtg

SEQ ID NO: 402378 - DNA, 563 bp, Homo sapiens
aaattgttttgagagtattttccttgcttgtagagtcaataccaaggttggcatcaatatagggttaaacagtgatttgctgggaagatgtccttgtagatgtgatttttataaggtcatggtggcttctatcaaaggttgtggttaagcagaatccattcatggtcgttcttgttatcaggagtatgtgcatgggaaacctccttcatggtcattcctagttccwtttgtcagggttttaacacaagtggatctattttgattctgacaactttcacagcctctttctaacactactggtgaggaaggtgactcactctgtggtactttgcacagcacaggataaatttcacatccacatcccattttgaccacacaagctcatcctcttcactactgttggccacttgcattcccaggtgagtctccacatgacacactggagggtgctgagcaatgggagagaggaaagtcctatcagcctctcccacatggctgcaggagccacagcctgagccccacctcagctgcagggaatgggcttgagacctcgagctttggca

SEQ ID NO: 402379 - DNA, 563 bp, Homo sapiens
aaattgttttgagagtattttccttgcttgtagagtcaataccaaggttggcatcaatatagggttaaacagtgatttgctgggaagatgtccttgtagatgtgatttttataaggtcatggtggcttctatcaaaggttgtggttaagcagaatccattcatggtcgttcttgttatcaggagtatgtgcatgggaaacctccttcatggtcattcctagttccatttgtcagggttttaacacaagtggatctattttgattctgacaactttcacascctctttctaacactactggtgaggaaggtgactcactctgtggtactttgcacagcacaggataaatttcacatccacatcccattttgaccacacaagctcatcctcttcactactgttggccacttgcattcccaggtgagtctccacatgacacactggagggtgctgagcaatgggagagaggaaagtcctatcagcctctcccacatggctgcaggagccacagcctgagccccacctcagctgcagggaatgggcttgagacctcgagctttggca

SEQ ID NO: 402380 - DNA, 563 bp, Homo sapiens
aaattgttttgagagtattttccttgcttgtagagtcaataccaaggttggcatcaatatagggttaaacagtgatttgctgggaagatgtccttgtagatgtgatttttataaggtcatggtggcttctatcaaaggttgtggttaagcagaatccattcatggtcgttcttgttatcaggagtatgtgcatgggaaacctccttcatggtcattcctagttccatttgtcagggttttaacacaagtggatctattttgattctgacaactttcacagcctctttctaacactactggtgaggaaggtgactcactctgtggtactttgcacagcacaggataaatttcacatccacatcccattttgaccacacaagctcatcctcttcactactgttggccacttgcattcccaggtgagtctccacatgacacactggagggtgctgagcaatgggagagagraaagtcctatcagcctctcccacatggctgcaggagccacagcctgagccccacctcagctgcagggaatgggcttgagacctcgagctttggca

SEQ ID NO: 402381 - DNA, 662 bp, Homo sapiens
gtcaggaatgaaaactgtgaggttctacacgacactgaccctggcccagactctattggctgtgatcacaattcctaaagaccgtcctagtcagggaatctcactgaggtttctgtcctgagtctgactggagaagactcaccaggtatccctgagtttcctcaatactctgatcctggtgacaatggttgagggcttttcatctctgtaagcatcaatctgtgttttgtgcataggagaataggttttcatattaaaataatcattttaaaaatatgtagagatgacattggtaagcacagaattctgaacttagagagattccctagagaaactctaaaaagatgaagtcccacatcctgacaggaaaccagcctccatctgcaacttgcctctggsgatgactctgatcagtgggtcctgtgtgccccccgcagctgatttcccccaagcattctgcagagaggtttgtgtctgggctcacactgacttcccctcactgtgtctcttgcacagtaatacacagccatgtcctcggctctcaggctgttcatttgaagatacaaggagttcttggcattgtctctggagatggtgaatcggcccttcacggagtctgcatagtatgtgccaccaccagtaccaatagctgatacccactc

SEQ ID NO: 402382 - DNA, 425 bp, Homo sapiens
ccatctgcaacttgcctctggggatgactctgatcagtgggtcctgtgtgccccccgcagctgatttcccccaagcattctgcagagaggtttgtgtctgggctcacactgacttcccctcactgtgtctcttgcacagtaatacacagccatgtcctcggctctcaggctgttcatttgaagatacaaggagttcttggcattgtctctggagatggtgaatcggcccttcacggagtctgcatagtatgtgccaccaccagyaccaatagctgatacccactccagaccttttcctggagcctggcgaacccagtgcatagcatagctactgaaggtgaatccagagcctgcacaggagagtctcagggaccccccaggatgtaccaagcctcccccagactgcaccagctgaacctcacact

SEQ ID NO: 402383 - DNA, 539 bp, Homo sapiens
cactccagaccttttcctggagcctggcgaacccagtgcatagcatagctactgaaggtgaatccagagcctgcacaggagagtctcagggaccccccaggatgtaccaagcctcccccagactgcaccagctgaacctcacactggacacctgcaaacagagagacacaaaggtcagaaattgccacacatcacatacccactgtttctctcattcatgcccattcacactcaatatctctagttctccatgaatcaccytttaatatagcaacaaggaaaacccagctcagcacaaactccatggtgattcctgtgtgttcagtcctgatcactgaatggaaacacctgggaatcccaaggctggggctccactcccagagctgcagggtcagggctgggctggttttcatcaggagagggagggctctatttgcatgtcacctactatatagcaagctatggggtgggaatcctgaggagagggcagggcccagagtagatgagagcgtcctgggggattttgatgacaaggattg

SEQ ID NO: 402384 - DNA, 539 bp, Homo sapiens
cactccagaccttttcctggagcctggcgaacccagtgcatagcatagctactgaaggtgaatccagagcctgcacaggagagtctcagggaccccccaggatgtaccaagcctcccccagactgcaccagctgaacctcacactggacacctgcaaacagagagacacaaaggtcagaaattgccacacatcacatacccactgtttctctcattcatgcccattcacactcaatatctctagttctccatgaatcaccttttaatatagcaacaaggaaaacccagctcagcacaaactccatggtgattcctgtgtgttcagtcctgatcactgaatggaaacacctgggaatcccaaggctggggctccactcccagagctgcagggtcagggctgggctggttttcatcaggagagggagggctctatttgcatgtcacctactatatagcaagctatggggtgggaatcctgaggaragggcagggcccagagtagatgagagcgtcctgggggattttgatgacaaggattg

SEQ ID NO: 402385 - DNA, 616 bp, Homo sapiens
catcccttttttgtctaaaatttcacttgtttacttgtaatacattttatgagttttaattgacagatgataaaattcacatatttaacctgcacaatagtaaactttgataaagaaaatctctattttcaagaaggtgacaagtcaactcacctcagaattcctcttgctcttttacagacatatttttgtttttctcctcttttcttctaccatttctttataaaagtactgatgttttcatatttctttagactagtttttattctctagaatttataagaatgaaayaatatagtatgtactcttatctatttggcttatttttctcagtagaaataccgagaattaaaccttttatgttgtattgtttattttttaataaataataggtagcatttcagcaaacaaatgtagcataatttgtttttctaagttgctaattggtattcaaacttttcattactttgggtcttactaataaatctgctactcaatttggtaatgtacatagatgataaattatatataaaatatattatttttgcaacaataacacataaacaagagaatgtgctatttggcaaattttctttagcatgtcaaataattgaag

SEQ ID NO: 402386 - DNA, 616 bp, Homo sapiens
catcccttttttgtctaaaatttcacttgtttacttgtaatacattttatgagttttaattgacagatgataaaattcacatatttaacctgcacaatagtaaactttgataaagaaaatctctattttcaagaaggtgacaagtcaactcacctcagaattcctcttgctcttttacagacatatttttgtttttctcctcttttcttctaccatttctttataaaagtactgatgttttcatatttctttagactagtttttattctctagaatttataagaatgaaacaatatagtatgtactcttatctatttggcttatttttctcagtagaaatacygagaattaaaccttttatgttgtattgtttattttttaataaataataggtagcatttcagcaaacaaatgtagcataatttgtttttctaagttgctaattggtattcaaacttttcattactttgggtcttactaataaatctgctactcaatttggtaatgtacatagatgataaattatatataaaatatattatttttgcaacaataacacataaacaagagaatgtgctatttggcaaattttctttagcatgtcaaataattgaag

SEQ ID NO: 402387 - DNA, 566 bp, Homo sapiens
acatagatgataaattatatataaaatatattatttttgcaacaataacacataaacaagagaatgtgctatttggcaaattttctttagcatgtcaaataattgaagttatgaaacaaaaaacaaacttgtaaaccaaagagtatctgagactaatctcaatagatttaggaagttcattttcsaagattaaggacatgcctgtgacaccgcctcagggagtcctgatgatttgtgcccaagcttgtgggcacagcttggttttatacaatttagggaggcatgagacattaatcaatatatgtatataagatgtacattgatttagttcagaaaggcaggacaacttgaagtggggagagggcttctagatcataggtaggtttgagagaaatggttgcattatttgagtttctgattagcctttaactgaatgcacaatttacaggaatagtcacgtaggccttaatctggcttagtgaaataatagagcaaagggagcaatcagatatgcatttgacttacatgagcagagaaatgactctgtctgtctttggcccacaagg

SEQ ID NO: 402388 - DNA, 568 bp, Homo sapiens
acatagatgataaattatatataaaatatattatttttgcaacaataacacataaacaagagaatgtgctatttggcaaattttctttagcatgtcaaataattgaagttatgaaacaaaaaacaaacttgtaaaccaaagagtatctgagactaatctcaatagatttaggaagttcattttcgaagattaaggacatgcctgtgacaccrcctcagggagtcctgatgatttgtgcccaagcttgtgggcacagcttggttttatacaatttagggaggcatgagacattaatcaatatatgtatataagatgtacattgatttagttcagaaaggcaggacaacttgaagtggggagagggcttctagatcataggtaggtttgagagaaatggttgcattatttgagtttctgattagcctttaactgaatgcacaatttacaggaatagtcacgtaggccttaatctggcttagtgaaataatagagcaaagggagcaatcagatatgcatttgacttacatgagcagagaaatgactctgtctgtctttggcccacaaggat

SEQ ID NO: 402389 - DNA, 542 bp, Homo sapiens
atttttacagtaattggctcctaatttgggatctttcctagtgtaaaccaaaggtttctgagacagatctcaatcaaattaaaaytaattttcccaaagttaggacagcctggaagaaaaataaaagtaaccacagaaactgtgtgtggttagtgccattccttaaagacgatttttagggctttcaatatacacagaggaaaagctgggtagaggggaagtttggatggtaagaaaatttacatgtgtaatgaaaaagaagcacatagggaaatataaaattacgtagttctcctgcagtaagtcagcactttcccatgctgttctcatgatagtgaataagtcccattagatctgatagttttatcaaggggagttcccctgcacaaactctctcttgtctgccaccatgtaagatgtcccttgctttcctgacatgattgtgcagcatccccagccatgtggaactataagtccattaaacctcattcctttacaaattacccaggcttggttatgtttttattagtagcaggagaaca

SEQ ID NO: 402390 - DNA, 542 bp, Homo sapiens
atttttacagtaattggctcctaatttgggatctttcctagtgtaaaccaaaggtttctgagacagatctcaatcaaattaaaactaattttcycaaagttaggacagcctggaagaaaaataaaagtaaccacagaaactgtgtgtggttagtgccattccttaaagacgatttttagggctttcaatatacacagaggaaaagctgggtagaggggaagtttggatggtaagaaaatttacatgtgtaatgaaaaagaagcacatagggaaatataaaattacgtagttctcctgcagtaagtcagcactttcccatgctgttctcatgatagtgaataagtcccattagatctgatagttttatcaaggggagttcccctgcacaaactctctcttgtctgccaccatgtaagatgtcccttgctttcctgacatgattgtgcagcatccccagccatgtggaactataagtccattaaacctcattcctttacaaattacccaggcttggttatgtttttattagtagcaggagaaca

SEQ ID NO: 402391 - DNA, 542 bp, Homo sapiens
atttttacagtaattggctcctaatttgggatctttcctagtgtaaaccaaaggtttctgagacagatctcaatcaaattaaaactaattttcccaaagttaggacagcctggaagaaaaataaaagtaaccacagaaactgtgtgtggttagtgccattccttaaagacgatttttagggctttcaatatacacagaggaaaagctgggtagaggggaagtttggatggtaagaaaatttacatgtgtaatgaaaaagaagcacatagggaaatataaaattacgtagttctcctgcagtaagtcagcactttcccatgctgttctcatgatagtgaataagtcccattagatctgatagttttatcaaggggagttcccctgcacaaactctctcttgtctgccaccatgtaagatgtcccttgctttcctgacatgattgtgmagcatccccagccatgtggaactataagtccattaaacctcattcctttacaaattacccaggcttggttatgtttttattagtagcaggagaaca

SEQ ID NO: 402392 - DNA, 542 bp, Homo sapiens
atttttacagtaattggctcctaatttgggatctttcctagtgtaaaccaaaggtttctgagacagatctcaatcaaattaaaactaattttcccaaagttaggacagcctggaagaaaaataaaagtaaccacagaaactgtgtgtggttagtgccattccttaaagacgatttttagggctttcaatatacacagaggaaaagctgggtagaggggaagtttggatggtaagaaaatttacatgtgtaatgaaaaagaagcacatagggaaatataaaattacgtagttctcctgcagtaagtcagcactttcccatgctgttctcatgatagtgaataagtcccattagatctgatagttttatcaaggggagttcccctgcacaaactctctcttgtctgccaccatgtaagatgtcccttgctttcctgacatgattgtgcagcatccccagccatgtggaacyataagtccattaaacctcattcctttacaaattacccaggcttggttatgtttttattagtagcaggagaaca

SEQ ID NO: 402393 - DNA, 578 bp, Homo sapiens
aatccacaatttagtcagacttagtgaatcttcattttttcataartgatactgaagaggaagcaatcagatatgtatctgtctcatgtgggcctcagaggaatgactttgaatagaaagggaggcaggtttgcccaaagccctttccagtaaaacacccttgttttctggaatatcaccgaaggttctttgtgtcgtggctatgaaaatcaaggacacagacacacaaaaggtgaggttggagcagaaatttcatatgtaaaaggaaaacaaaaaagctctctgtcacagaaaggggtcccaaatgggttgctgtgctgcagtaaaatgtaaggatttttataaatgtgctactggggagagggtatcttatcaacataggatgcaaaaacaggaccaggtgtgccatctgcatagagcgaagtctctggcagccccatctcatgcttttattatgcaggtggggacttagcttggtctgctccacgttccttatctccttccaccatgcgtgtgctgaaaaaggagggaggagtttccatgccaggtcccaggtacctccttgcagctgggggcat

SEQ ID NO: 402394 - DNA, 578 bp, Homo sapiens
aatccacaatttagtcagacttagtgaatcttcattttttcataagtgatactgaagaggaagcaatcagatatgtatctgtctcatgtgggcctcagaggaatgactttgaatagaaagggaggcaggtttgcccaaagccctttccagtaaaacacccttgttttctggaatatcaccgaaggttctttgtgtcgtggctatgaaaatcaaggacacagacacrcaaaaggtgaggttggagcagaaatttcatatgtaaaaggaaaacaaaaaagctctctgtcacagaaaggggtcccaaatgggttgctgtgctgcagtaaaatgtaaggatttttataaatgtgctactggggagagggtatcttatcaacataggatgcaaaaacaggaccaggtgtgccatctgcatagagcgaagtctctggcagccccatctcatgcttttattatgcaggtggggacttagcttggtctgctccacgttccttatctccttccaccatgcgtgtgctgaaaaaggagggaggagtttccatgccaggtcccaggtacctccttgcagctgggggcat

SEQ ID NO: 402395 - DNA, 578 bp, Homo sapiens
aatccacaatttagtcagacttagtgaatcttcattttttcataagtgatactgaagaggaagcaatcagatatgtatctgtctcatgtgggcctcagaggaatgactttgaatagaaagggaggcaggtttgcccaaagccctttccagtaaaacacccttgttttctggaatatcaccgaaggttctttgtgtcgtggctatgaaaatcaaggacacagacacacaaaaggtgaggttggagcagaaatttmatatgtaaaaggaaaacaaaaaagctctctgtcacagaaaggggtcccaaatgggttgctgtgctgcagtaaaatgtaaggatttttataaatgtgctactggggagagggtatcttatcaacataggatgcaaaaacaggaccaggtgtgccatctgcatagagcgaagtctctggcagccccatctcatgcttttattatgcaggtggggacttagcttggtctgctccacgttccttatctccttccaccatgcgtgtgctgaaaaaggagggaggagtttccatgccaggtcccaggtacctccttgcagctgggggcat

SEQ ID NO: 402396 - DNA, 547 bp, Homo sapiens
caaaaggtgaggttggagcagaaatttcatatgtaaaaggaaaamaaaaaagctctctgtcacagaaaggggtcccaaatgggttgctgtgctgcagtaaaatgtaaggatttttataaatgtgctactggggagagggtatcttatcaacataggatgcaaaaacaggaccaggtgtgccatctgcatagagcgaagtctctggcagccccatctcatgcttttattatgcaggtggggacttagcttggtctgctccacgttccttatctccttccaccatgcgtgtgctgaaaaaggagggaggagtttccatgccaggtcccaggtacctccttgcagctgggggcatcccaaaccccgtgcaagctaacagctttcctagctcagtgtgaccccagaaaaggaaaggaatgtgttcattaaggcccagtgtttttattgggacccatcctatgtatgtgaactttggtgattacaaacagaaataccctctctgccagagttgtttatctatattttacagcccgatctttcaggctgctct

SEQ ID NO: 402397 - DNA, 578 bp, Homo sapiens
aatccacaatttagtcagacttagtgaatcttcattttttcataagtgatactgaagaggaagcaatcagatatgtatctgtctcatgtgggcctcagaggaatgactttgaatagaaagggaggcaggtttgcccaaagccctttccagtaaaacacccttgttttctggaatatcaccgaaggttctttgtgtcgtggctatgaaaatcaaggacacagacacacaaaaggtgaggttggagcagaaatttcatatgtaaaaggaaaacaaaaaagctctctgtcacagaaaggggtcccaaatgggttgctgtgctgcagtaaaatgtaaggatttttataaatgtgctactggggagagggtatcttatcaacataggrtgcaaaaacaggaccaggtgtgccatctgcatagagcgaagtctctggcagccccatctcatgcttttattatgcaggtggggacttagcttggtctgctccacgttccttatctccttccaccatgcgtgtgctgaaaaaggagggaggagtttccatgccaggtcccaggtacctccttgcagctgggggcat

SEQ ID NO: 402398 - DNA, 547 bp, Homo sapiens
caaaaggtgaggttggagcagaaatttcatatgtaaaaggaaaacaaaaaagctctctgtcacagaaaggggtcccaaatgggttgctgtgctgcagtaaaatgtaaggatttttataaatgtgctactggggagagggtatcttatcaacataggatgcaaaaacaggaccaggtgtgccatctgcatagagcgaagtctctggcagccccatctcatgcttttattatgcaggtggggacttagcttggtctgctccacgttccttatctccttccaccatgcgtgtgctgaaaaaggagggaggagtttccatgccaggtcccaggtacctccttgcagctgggggcatcccaaaccccgtrcaagctaacagctttcctagctcagtgtgaccccagaaaaggaaaggaatgtgttcattaaggcccagtgtttttattgggacccatcctatgtatgtgaactttggtgattacaaacagaaataccctctctgccagagttgtttatctatattttacagcccgatctttcaggctgctct

SEQ ID NO: 402399 - DNA, 547 bp, Homo sapiens
caaaaggtgaggttggagcagaaatttcatatgtaaaaggaaaacaaaaaagctctctgtcacagaaaggggtcccaaatgggttgctgtgctgcagtaaaatgtaaggatttttataaatgtgctactggggagagggtatcttatcaacataggatgcaaaaacaggaccaggtgtgccatctgcatagagcgaagtctctggcagccccatctcatgcttttattatgcaggtggggacttagcttggtctgctccacgttccttatctccttccaccatgcgtgtgctgaaaaaggagggaggagtttccatgccaggtcccaggtacctccttgcagctgggggcatcccaaaccccgtgcaagctaacagctttcctagctcagtgtgaccccagaaaaggaaaggaatgtgytcattaaggcccagtgtttttattgggacccatcctatgtatgtgaactttggtgattacaaacagaaataccctctctgccagagttgtttatctatattttacagcccgatctttcaggctgctct

SEQ ID NO: 402400 - DNA, 565 bp, Homo sapiens
aaagaagttatttttgagctgattcttgttagaagaaaagtttttgccagagackctttcatcctaactatctacctaaataatttctttctatctcctattacaccagctggactcttctctttagcttagtgattttggggtctcaagatttattttctcttcacaataggcaggtacaaaaggagacttcatatgtaattaagttgcttgtattagtccatgttcaggttgctataaggacatacatgaggctgggtaatttataaagaaaaataggtttaattaactcacagttcttcatggctggggaggccacaaaaaacttacaatcatgatgcaaggggtagcaaacacatgctatttcacatgactgcaggagagagaagtgttaagtgaagagggaagcccctcataaaattatcaaatcttgtgataactcactcactaacaggagaaaagcaggaagaaaacagcccgtatgattcaattatttccacctcattccacccttgcaatgtgtgaattattacaataaaaggtgagatttgggtagggacacaga

SEQ ID NO: 402401 - DNA, 565 bp, Homo sapiens
aaagaagttatttttgagctgattcttgttagaagaaaagtttttgccagagacgctttcatcctaactatctacctaaataatttctttctatctcctattacaccagctggactcttctctttagcttagtgattttggggtctcaagatttattttctcttcacaataggcaggtacaaaaggagacttcatatgtaattaagttgcttgtattagtccatgttcaggttgctataaggacatacatgaggctgggtaatttataaagaaaaataggtttaattaactcacagttcttcatggytggggaggccacaaaaaacttacaatcatgatgcaaggggtagcaaacacatgctatttcacatgactgcaggagagagaagtgttaagtgaagagggaagcccctcataaaattatcaaatcttgtgataactcactcactaacaggagaaaagcaggaagaaaacagcccgtatgattcaattatttccacctcattccacccttgcaatgtgtgaattattacaataaaaggtgagatttgggtagggacacaga

SEQ ID NO: 402402 - DNA, 565 bp, Homo sapiens
aaagaagttatttttgagctgattcttgttagaagaaaagtttttgccagagacgctttcatcctaactatctacctaaataatttctttctatctcctattacaccagctggactcttctctttagcttagtgattttggggtctcaagatttattttctcttcacaataggcaggtacaaaaggagacttcatatgtaattaagttgcttgtattagtccatgttcaggttgctataaggacatacatgaggctgggtaatttataaagaaaaataggtttaattaactcacagttcttcatggctggggaggccacaaaaaacttacaatcatgatgcaargggtagcaaacacatgctatttcacatgactgcaggagagagaagtgttaagtgaagagggaagcccctcataaaattatcaaatcttgtgataactcactcactaacaggagaaaagcaggaagaaaacagcccgtatgattcaattatttccacctcattccacccttgcaatgtgtgaattattacaataaaaggtgagatttgggtagggacacaga

SEQ ID NO: 402403 - DNA, 609 bp, Homo sapiens
cttgtgcaaagatacactttaaaattcagtccaaattgtagaagataatataaattgaaaagcgagtggacaaggttaaaatctattaactgatgcactatagtttattttgaaataatatttctctctataattccccaattttattcgagacaaaatcatagtaggaccaatttatttgtaaaatcagttttaggcttatgagacttggcctggtttttttgtataagaggcagcaaaataatcatttaacatattagctctctttttttgttttctattttttgtttgtacataggcaattttattcataaatkgactttgctagaaattttttgtaaggagtcaaagggtagaatctttaaaatcttcaagcccagtcaatattttatctgtgccaccagatagctatgtgaattgggttactttctcttttttcaagtttccaagaaaacttgggagtcctgggtctgtcagaaattaaattgtttacttactacagttcagggccctgtaaaaaaaaaaaaaaaaggtacatgccagttttcccaaggggctttatcagctctccaggttagattcattttataaagtaaatatgaaaatata

SEQ ID NO: 402404 - DNA, 609 bp, Homo sapiens
cttgtgcaaagatacactttaaaattcagtccaaattgtagaagataatataaattgaaaagcgagtggacaaggttaaaatctattaactgatgcactatagtttattttgaaataatatttctctctataattccccaattttattcgagacaaaatcatagtaggaccaatttatttgtaaaatcagttttaggcttatgagacttggcctggtttttttgtataagaggcagcaaaataatcatttaacatattagctctctttttttgttttctattttttgtttgtacataggcaattttattcataaattgactttgctagaaattttttgtaaggagtcaaagggtagaatctttaaaatcttcaagcccagtcaatattttatctgtgccaccagatagctatgtgaattgggttactttctcttttttcaagtttccaagaaaacttgggagtcctgggtctgtcagaaattaaattgtttacttactacagttcagggccctgtaaaaaaaaaaaaaaaaggtacatgccagttttcccaargggctttatcagctctccaggttagattcattttataaagtaaatatgaaaatata

SEQ ID NO: 402405 - DNA, 536 bp, Homo sapiens
attgaggggaaaatttggttacttccgcaataaacagaaattttacataataatcataaacactaccgataaaatatactaagacatatcaaatcacttggatctcatacaattttggaaaatatgctctttgatttatataaatatggtccaattatatagtccacatttatttaaatatagtccaawgttaaaacacttttgcaaatttgacgtagctccctgcatattttaattataccaaataagctgaataagtttaattttggctttggggacctaatatcagaaaagaataatgaggtcaaatgactgcatttagaattttattttgtgaagtttgtcaaatatcaaaagtttacaatgtttgatattacaaaataggattacagattgttgtaatgtaagttatttatttagtccagtgagaactcagtgattttgaaagaaagcaaaaacttttatttttcaaagagaagaattaattttctaaacaataaccccttataagaacagcatgagagaagttaaaactg

SEQ ID NO: 402406 - DNA, 535 bp, Homo sapiens
gctgtcagagtttaaaatttagcaagactcggtgtcttttttatttttattgtatttatttgtttttcctgagacagagtctcacccagactggagtgcagtggtgcaatctcggcttactgtaacctctgcctcccaggttcaagcaattctccctgcctcaggctyccaagcagttgggattacatgcgcccgccaccacgcccagctaatttttgtattttttattaaaatgggattgtgccgttttggccaggctcgtctctaactcctgccctcaggagatccaccctccaaagcctcccaaagtgttgtgtatcctttttagacctaggaatcaaagatcagtaatgtagcagcacaaggcctttaaaagttacgcagatagttacattaacgtaataacattaatttatattttctcaaaatctcagtattcctaagtagttgaaaaacttaaaaacagctacagaggaagtatttcaagaaaatataaaatttgttttatgccatttaccaaatgggaaaaaaaaca

SEQ ID NO: 402407 - DNA, 535 bp, Homo sapiens
gctgtcagagtttaaaatttagcaagactcggtgtcttttttatttttattgtatttatttgtttttcctgagacagagtctcacccagactggagtgcagtggtgcaatctcggcttactgtaacctctgcctcccaggttcaagcaattctccctgcctcaggctcccaagcagttgggattacatgcgcccgccaccacgcccagctaatttttgtattttttattaaaatgggattgtgccgttttggccaggctcgtctctaactcctgccctcaggagatccaccctccaaagcctcccaaagtgttgtgtatcctttttagacctaggaatcaaagatcagtaatgtagcagcacaaggcctttaaaagttacgcagatagttacattaacgtaataacattaatttatattttctcaaaatctcagtattcctaagtagttgaaaaacttaaaaacarctacagaggaagtatttcaagaaaatataaaatttgttttatgccatttaccaaatgggaaaaaaaaca

SEQ ID NO: 402408 - DNA, 606 bp, Homo sapiens
gtaaatgtatttgatattttatttttgtacactctgcattttatcctggggttcatgatgtgctacatcattttataagttgtatatatttagattcatagtttacatcatagaattatgagaattaacaaattgtgtcatgcgttcactactgcagatcataaaaaagtttcactgtttgcaaacagtacctttttctcctaatgcataccctctctctaaatttctagaaaatcctcatatatttatgacatctacagttttgtcttttacagaatgtcaaataaaatgtatacaacatatttcaaataacctcactgaagaaggtgrcacataaagtttctcacctatataacttagaagtcagggtgttctgtaaatctaaagtataaagaaactgcacttaaacacttttttctagtcaataaacatacttccaacaggggtacaagttaacaattctaataccacgatgcatatattctaaattgtacaacaaattgaatgaatggcaaatgatgggaggggttcctcactttgcagtaggtggttatggacaggcaaggaaggaaagcttgaaacattcatgtatcatcatagtagatt

SEQ ID NO: 402409 - DNA, 534 bp, Homo sapiens
ttttacagaatgtcaaataaaatgtatacaacatatttcaaataacctcactgaagaaggtgacacataaagtttctcacctatataacttagaagtcagggtgttctgtaaatctaaagtataaagaaactgcacttaaacacttttttctagtcaataaacatacttccaacaggggtacaagttaacaattctaataccacgatgcatatattctaaattgtacaacaaattgaatgaatggcaaatgatgggaggggttcctcactttgcagtaggtggttatggacaggcaaggaaggaaagcttgaaacattcatgtatcatcatagtagattgtagataccagtgttctaaagtttgaggcaataaacatacagaagattggatacataaatagattagatgggtccattaacatgggttaatatatacatacacattttctaggcctgttagcttagagattctagaaacacttacagtacrttaacaacacacacacccaacatcataattttgtgtgttgatat

SEQ ID NO: 402410 - DNA, 559 bp, Homo sapiens
tattacctcttccttacaattttcttaacattttcttttctctagcttactttattagaatatcatatataatatgtaacatatgttttaattgtttatgttattggtaaggcttctggctatcactaggctattagtagttaagtttttggggagtcataagttatacatggatttttgactgggtgagaggttggcaccccaaaccccaaattgttcaaggatcaactgtacattaaataactttcaaaatttgacagaattgcatggagtaattgataaatatcatatcattataatagaaaatgtttaacacatttctcccagtaaatgacaggtcaagagagaaaataaagttacaactaacacataagcaatgtaatatgaacactttaatgagattgcatttctgtacaagcaaagattacttagacaatatcatcaaaatgtctgggaattaatgcagctaaagatgggcaacatctatgcagcatattatatgcttttattgaaagacacrgaaagaagactaaatgtgattggacaggaggagccaatt

SEQ ID NO: 402411 - DNA, 545 bp, Homo sapiens
ttattggctacttgatttagtcataagcttgaatcattcactgtggtcaggggatgcagtactttgattcmcctggattggggcattttacctctgatttgtaaggagtgtgactggagtatgacatggttaacctgaagggaaatcggtgtgcagttaaagaaaaaggagggatgcatgctgaagagtcacacatcatacagtaatacctcaaatgcaatagctttccagcacattgggtgggagatagtggctgtggcaggcagaataatggcacgccaaagatgtctgtgcctggatccttggaacctgcgagtatgttatgttacatgccaaagggggattaagtttgcagatggaattgaggttgacaatcaaatgaccttaaaatagcgagattatcctggattatcagggtaggagtctttataaatggaagagggaggtgaaagagagagaaccagagaggtggtagcaggaggacttagtcccctgttgctggttctgaggatggaggaagggggaccataagccaggcgatgtcg

SEQ ID NO: 402412 - DNA, 545 bp, Homo sapiens
ttattggctacttgatttagtcataagcttgaatcattcactgtggtcaggggatgcagtactttgattcacctggattggggcattttacctctgatttrtaaggagtgtgactggagtatgacatggttaacctgaagggaaatcggtgtgcagttaaagaaaaaggagggatgcatgctgaagagtcacacatcatacagtaatacctcaaatgcaatagctttccagcacattgggtgggagatagtggctgtggcaggcagaataatggcacgccaaagatgtctgtgcctggatccttggaacctgcgagtatgttatgttacatgccaaagggggattaagtttgcagatggaattgaggttgacaatcaaatgaccttaaaatagcgagattatcctggattatcagggtaggagtctttataaatggaagagggaggtgaaagagagagaaccagagaggtggtagcaggaggacttagtcccctgttgctggttctgaggatggaggaagggggaccataagccaggcgatgtcg

SEQ ID NO: 402413 - DNA, 545 bp, Homo sapiens
ttattggctacttgatttagtcataagcttgaatcattcactgtggtcaggggatgcagtactttgattcacctggattggggcattttacctctgatttgtaaggagtgtgactggagtatgacatggttaacctgaagggaaatcggtgtgcagttaaagaaaaaggagggatgcatgctgaagagtcacacatcatacagtaatacctcaaatgcaatagctttccagcacattggrtgggagatagtggctgtggcaggcagaataatggcacgccaaagatgtctgtgcctggatccttggaacctgcgagtatgttatgttacatgccaaagggggattaagtttgcagatggaattgaggttgacaatcaaatgaccttaaaatagcgagattatcctggattatcagggtaggagtctttataaatggaagagggaggtgaaagagagagaaccagagaggtggtagcaggaggacttagtcccctgttgctggttctgaggatggaggaagggggaccataagccaggcgatgtcg

SEQ ID NO: 402414 - DNA, 546 bp, Homo sapiens
actagggtagtaagtggtagaacctaagtattttcaatctggacctttaaaataattttcctgacagcaatttagacagtattttggtataatttgtataatacttagtagtgagaaattctgtgtggggaatttggacttggtacttgcagcttttcagtgtgaggtgatgagatcttaaaagcaattagaagaaaaggrgttagtttgagagaaattgctaaagaaacagcagtaggacttgaatgatgtcatatgggggaaagttataagacatgtataaaatagctctctagcctgatttgggagaatcagcacatcatgaacagaaatagcgaagtcaggagggcaagccaaataggtgaacattcagtttggtttagatatattaaggatgaagagagagtaagacaagttattctcaatagagaacagagccgttcaggttatagtttaagggaaattttcttttaacctatatttattgagggtttactatttgcagggtatcatgctaaaacacagatatgtgtaaaggcataatga

SEQ ID NO: 402415 - DNA, 546 bp, Homo sapiens
actagggtagtaagtggtagaacctaagtattttcaatctggacctttaaaataattttcctgacagcaatttagacagtattttggtataatttgtataatacttagtagtgagaaattctgtgtggggaatttggacttggtacttgcagcttttcagtgtgaggtgatgagatcttaaaagcaattagaagaaaaggggttagtttgagagaaattgctaaagaaacagcagtaggacttgaatgatgtcatatgggggaaagttataagacatgtataaaatagctctctagcctgatttgggagaatcagcacatcatgaacagaaatagcgaagtcaggagggcaagccaaataggtgaacattcagtttggtttagrtatattaaggatgaagagagagtaagacaagttattctcaatagagaacagagccgttcaggttatagtttaagggaaattttcttttaacctatatttattgagggtttactatttgcagggtatcatgctaaaacacagatatgtgtaaaggcataatga

SEQ ID NO: 402416 - DNA, 546 bp, Homo sapiens
actagggtagtaagtggtagaacctaagtattttcaatctggacctttaaaataattttcctgacagcaatttagacagtattttggtataatttgtataatacttagtagtgagaaattctgtgtggggaatttggacttggtacttgcagcttttcagtgtgaggtgatgagatcttaaaagcaattagaagaaaaggggttagtttgagagaaattgctaaagaaacagcagtaggacttgaatgatgtcatatgggggaaagttataagacatgtataaaatagctctctagcctgatttgggagaatcagcacatcatgaacagaaatagcgaagtcaggagggcaagccaaataggtgaacattcagtttggtttagatatattaaggatgaagagagagtaagacaagttattctcaatagagaacagagccgttcaggttatagtttaagggaamttttcttttaacctatatttattgagggtttactatttgcagggtatcatgctaaaacacagatatgtgtaaaggcataatga

SEQ ID NO: 402417 - DNA, 563 bp, Homo sapiens
taagcactgcttcctctttcccttgaaatggtcagccgatggttagagaaaaagctataactgagattactgggacagccagacactcatgggcctgggtaatgtgtcttgtaagtcagtgtgtgtagcagcttagacaaggcgagtgttctctggttaccggtattactaacttaataagcatcaaacaaattcaactgrcaagacaccctgacacatacaaaatcttgtatgatggtattgggagtaccaagttgaatggggagttctttgtctttaaggactttgtagttaatttgggctatgttttgtcagtacacatacaagggcttgattcatctccttactttggaaactttcccctctgtcactctgcacccgtgacacttgtgctcattctcttatattttgagtttgtttttctctctaaaccagagtttataaaagtattcaccatggaggaagaccaaatcttcctcacaaccttcttggaagaccaagtctgtgtttatactggtgcctagtctagttcagcagggactgcactgtctgtccagttttgg

SEQ ID NO: 402418 - DNA, 563 bp, Homo sapiens
taagcactgcttcctctttcccttgaaatggtcagccgatggttagagaaaaagctataactgagattactgggacagccagacactcatgggcctgggtaatgtgtcttgtaagtcagtgtgtgtagcagcttagacaaggcgagtgttctctggttaccggtattactaacttaataagcatcaaacaaattcaactggcaagacaccctgacacatacaaaatcttgtatgatggtattgggagtaccaagttgaatggggagttctttgtctttaaggactttgtagttaatttgggctatgttttgtcagtacacatacaagggcttgattcatctccttactttggaaactttcccctctgtcactctgcacccgtgacacttgtgctcattctcttatattttgagtttgtttttctctctaaaccagagtttataaaagtattcaccatggaggaagaccaaatcttcctcacaaccttcttggaagaccaagtctgtgtttatactggtgcctagtctagttcagcagggaytgcactgtctgtccagttttgg

SEQ ID NO: 402419 - DNA, 616 bp, Homo sapiens
aattaacacactatttgctaactcaatacagcactatttctggtctacatctttccatgtaagcaatcttgtcaactacaaatgtactatgtacctactatgtgccagtcactataaagtgttagatatcaaaaatgactataatgggagagcttttttattttttccatttaatcttttgaaatgagttgtaaatctgtaaagaaaattattagacttttctmagttgtagctcctgcaaacatggcataagaatggtgcttacttaatcttacagaggaaatcttcaatctacagagttggcaaaataagcagataaaatctggaatgattaacacgtcatcacagcagtagttcttgtgtggttttctagtcataccttcaaatgtaataaattaagtgttcctactttgggctttctcttgctgaaagcagtattgttcactcaagtcaagtgttcattttagagatgttttaccagtgtaaaataactccatcttgtggattatcctgaccatggcattcagatctcacctttcttctttaattttttaaaggtaagactagcatcagcctgatcctttccaacctctgtaatctgtcttgtttcctactg

SEQ ID NO: 402420 - DNA, 427 bp, Homo sapiens
aatctggaatgattaacacgtcatcacagcagtagttcttgtgtggttttctagtcataccttcaaatgtaataaattaagtgttcctactttgggctttctcttgctgaaagcagtattgttcactcaagtcaagtgttcattttagagatgttttaccagtgtaaaataactccatcttgtggattatcctgaccatggcattcagatctcacctttcttctttaattttttaaaggtaagactagcatcagcctgatcctttccaacctctgtaatctgtcttgtttcctactggatattaatcttcacaagcatcccgctatatggcwtaggtatataaaagtgtctgccactcctagtatcatcaatcctatgaccactatggagcttagattttccagcccaccaggaccaatacagctta

SEQ ID NO: 402421 - DNA, 507 bp, Homo sapiens
caataagaaatttcttcccattattaaagtataataagaatctatgtttaaaaatctattcacaamagtaagcgcaagctttagatacttgttaacagcactgtacatgtttttaattatagtaaatcaagtcctggatcagaagctaaacagtacatcagaaggaaaagcttatttcagcaggataatctcctcctacaggtggacaagattatttatacaagtcaatataaattccactaaaaaatgatgcgagaacatacctcttagtctaaaaagtggtaaactacatttattaacaaccaaaaatcaacttcctatattacaccgacctatgtacttgccatatgttgcactctacaacaatgtatcttcgggggctcaggcatttctttaaatttttccatttttgataatttcaacttttattttagattcgggagtacatttgcaggtttgttactttggtatattgcatgatgctgaggtttgaggtacaattgatcc

SEQ ID NO: 402422 - DNA, 507 bp, Homo sapiens
caataagaaatttcttcccattattaaagtataataagaatctatgtttaaaaatctattcacaaaagtaagcgcaagctttagatacttgttaacagcactgtacatgtttttaattatagtaaatcaagtcctggatcagaagctaaacagtacatcagaaggaaaagcttatttcagcaggataatctcctcctacaggtggacaagattatttatacaagtcaatataaattccactaaaaaatgatgcgagaacatacctcttagtctaaaaagtggtaaactacatttattaacaaccaaaaatcaacttcctatattacaccgacctatgtacttgccatatgttgcactctacaacaatgtatcttcgggggctcaggcatttctttaaatttttccatttttgataatttcaacttttattttagattcgggagtacmtttgcaggtttgttactttggtatattgcatgatgctgaggtttgaggtacaattgatcc

SEQ ID NO: 402423 - DNA, 560 bp, Homo sapiens
tggctcgcagcttaaacattattgatatatagaaatgctactaatttttatacattgattttgtatcctgaaacttcattgaaatcatttgtcagtaccagcagctttttgacagagtctttagggtttttttagctctagaatcatatcatgagcaaagagagataatttgactccttctcctatttggatatcttatttctttctcttgcctgatttatctgataaggactcccagtactatgttgaataggagtggtgagagttagcttcctgttcctgttctcaaggggaatgcttccagttcttgactgcttagtatckttgtctcctatgggttggtcatagacagttattaaaattttgaagtatatttctttaatgcttaatttcctgagggtttttttatcatactgggatgttatcaattttatcaacagctctttccacatctattgagatgatcgtatgattttctttctaattctgtttatatggtgaatcaccttttttgatttgtgtttgttgaacaaacctcgcatcccagcaatgaagcctac

SEQ ID NO: 402424 - DNA, 664 bp, Homo sapiens
ttcaaaaaaattgaaataatatcaagcatcttctctaaccacaatggaataaaactagaaattaataacaagtggaattctagaaattatacaaatacatagaaactaaacaatatgctcctgaatgaccagtgggtcaataaagaaattgagaaggaaattgaaaaatttcttgaaacaaatgataatggaaacatgacgtattaaaacctttgagatacacaaaagcagaactaagagggaaatttatagctataagtgtctacatcaaaaaagagaaaaaaytttaaataaacaatctaatgatgcatcttaaagaactagaaatgcaagagcaaagcaaacccaaaattagtagaagaaaaaaaaaataaaggtcggaccagaaataaatgaaattgaaatttaaaagaaaaaatacaaaagatcaacgaaacaaaaaattgggtttttgaaaagtcaaacaaaatgaatgaatctttagccaaactaagaagagaggagatccaaataaataaaatcagaaatgaaaaacagacattacaacaaatagtgcagaaattcaaaggatcattaatggctgccatgagcaactatgtgccaataaattggaaaaactagaaaaatgggcaaattcctagatacatacaacctaccaagattg

SEQ ID NO: 402425 - DNA, 664 bp, Homo sapiens
ttcaaaaaaattgaaataatatcaagcatcttctctaaccacaatggaataaaactagaaattaataacaagtggaattctagaaattatacaaatacatagaaactaaacaatatgctcctgaatgaccagtgggtcaataaagaaattgagaaggaaattgaaaaatttcttgaaacaaatgataatggaaacatgacgtattaaaacctttgagatacacaaaagcagaactaagagggaaatttatagctataagtgtctacatcaaaaaagagaaaaaattttaaataaacaatctaatgatgcatcttaaagaactagaaatgcaagagcaaagcaaacccaaaattagtagaagaaaaaaaaaataaaggtcggaccagaaataaatraaattgaaatttaaaagaaaaaatacaaaagatcaacgaaacaaaaaattgggtttttgaaaagtcaaacaaaatgaatgaatctttagccaaactaagaagagaggagatccaaataaataaaatcagaaatgaaaaacagacattacaacaaatagtgcagaaattcaaaggatcattaatggctgccatgagcaactatgtgccaataaattggaaaaactagaaaaatgggcaaattcctagatacatacaacctaccaagattg

SEQ ID NO: 402426 - DNA, 577 bp, Homo sapiens
gaaaaactgaaactctttcctctaagatctggaaaatgaaaaggctgcccactgtcaccactgttactcaacatagtactaaaagtcctagcttgagcaatcagacaagagaatgatataaagggcatccaaattggaaagaaaaaagtcaaattacccttgtttgcagatgatatgatgttatatttggaaaaacctaaacactccaccaaaaaactattagaaatgataaacaaattcagtaaagttgcaggatacaaaaataacrtataaaaattagtagcatttctatatgccaacagtgaacaatctgaaaaggaaataaaaaagtaatgccatttacaatagccacacataaaattaaataggaattaaccaaagaaataaaagatctctataatgaaaactataaaacactgatgaaataaattgaagaggacaccaaaacataaaaaaatgccatgttcatggatttgaagaatcaatattgttaaaatgtccatactacccaaagcaatctataggttcaatgtaacccctagcaaaataccaatagatgttattcacagaaatagaa

SEQ ID NO: 402427 - DNA, 597 bp, Homo sapiens
gtatcaaaacatctcatgccccccgtaaatatatacacctactatgtacccacaaaaattaaaagtataaataaaaaaataagcttgaccctaaatttacattcattttttctaagagcatgctattcttgaagttttgtttccttggctcagccacttctttttgtctcttctggcttctcctcctgctctccaaaaagtgggtattcttttcacgtgtggaggcagagggtacataggaaatttctgcatccccaatcagcctaaaaatgctcttaaaaatacatcttcaagacatcatacttcagctctcctctccaaacactccttaattctatctattgtctcagcttcagttacctcctttaaaagttccatgtcttccaaattcctgtccctagccatgtactgtctctggagagtacccacgacycccatctcctgtcttctaaacatctctgcctgcacatcctgttgacagttcacatgcaatgtgtcttagataaaatttatgttttctactttacctattctatttcccatatttcttggtcatgccagctcaaaactttccaactcatctttgatcccttacac

SEQ ID NO: 402428 - DNA, 537 bp, Homo sapiens
gaggaaagactattcttctctggctaaaagacttgatacaactctgaacagtttcagatgaggtttatctctataagcagtttaaagcaacagcttagaagttgaatgctttgaaaccaatggtgggaaagactagggaataatccatttattaaatcaatcatcaaaaaattgcttttatataacacctttctacaccacacactactagggacagagcttataaaaatatttttataaaagtaactattgccttcaaggaggaagaatgttgagcagtatccctggcctctaccctctagatacgagtagtactcacccctgtcccaagtgtaaagagcaaaaatggtcccagatgttgacaaatgtcccctcaagagcaaaatcatctccagctgagaaccactgctctctgctcaaacagtgattcccaaacttttgtggacacatgactcatttaaaatgmtagtttaaaatatgggtctctgggccctacattctaaaatttaattcagcaaaactgaggtgggtaccagt

SEQ ID NO: 402429 - DNA, 653 bp, Homo sapiens
ggatttgcaacaatggagggagtaacaaaaaaggctatcactctttgtctaaatctccatgatcagaagcatcagtgatcagggcatggatcccagatatttggagaacaaggccctttttgcccacatttgctcctgcaggttttatgcaagctgctctaggaatatgtgcacagctgcctgccacagggctgagggttggggtactggtaactgctactgtgctaagagctgaagttgactaaaattaactgtaatttattatttgagtcttcccctggaagtggtaagccttcagtagactacagagttccaaaatcctatcatcagacagattctgccagtatgattgttgccttagtggggaaattcttggtgcttcctattctatcacctttttacaatattacctgttacattttaattttataaaatgtttggaatatattaaatttgggtttttttagtgggaataatcaataagcatgaatgaaaacgaatagtggccaaattattctgagttatgatactttgggagagttcagttttttaaaaaagtaagtaccgttgatgacagaagtcaagccttttgtaaaayggtcaaaggaaaggactcatgttgggattgatcacagtgttgttttagaattaga

SEQ ID NO: 402430 - DNA, 588 bp, Homo sapiens
cttatttcaatactccttatcatattttacatttcagatttatggatttttatatgagtatcctgtgctaatttagggtgatgccaaaaaayaataagcatctgtttacagaacattttaaatgtaaattttaaagtggcttaattaaagatgctctggaaattacctattcatcagttaaatatttattgaacactttgttaaatatttgaataatataaaagtaaatggttgccaacgaatcctttataggtttgttggagattatggtttgttggaggaaaaactaaaagcaagtcaatctagaaggtaaaattttttaattgagaaaagtacaaagtgctctgggaacctaaggcccacagtggttaattctgccttggagagctaaggcaagacttggggatacttgaatagggtcttgaagaatgactggaaaagatattttagtcaagagattgaaagtgtatggcaggtactgcagcataaaaaggcacaagggagaagacagatagttctgacaggcatttggaggcaacaggcatgtactggcaaggtttgattttgaaagtactctatcatgtttcc

SEQ ID NO: 402431 - DNA, 610 bp, Homo sapiens
gtggtggggatcagtaggggaggagtggatcagagtgctatggcagaaacaggctgacagcttgatgcccacactgaaaagttttctgttttctgtcttcctcctcygcatgcctgctgtgcagctcagaaagaataaaagaagaaaaggagaaagacagtggcctctgggttgagactgaatgtgtgggaacgtgggcggtaatgtgaggaagagaatggggagatttgtttgctaaaaatctataaaatgaaattttagaaacattgcgcctattgatttctaatttcaccctagggaccaataatcttgatgagatttcccagtaagtttggggttaatgaaacctcgtggaaatcagacaaataaaatcagaaagttacaattaaattccaggcctcaggaacatctgttttaacattccttgtgcttgaatagtgtttactttatttatacttctattatgtcactgattattttgtacttgtctattgtaatatctgtcataacagatattatgagatcatgatttatttaccttttcactccctgtatctagcatgatatctttcaaattgtaggtaaacaataaatgtttgaagaagaaaaa

SEQ ID NO: 402432 - DNA, 557 bp, Homo sapiens
tcagtcaatcaatagagacatatcatccccaatttctggtaatctagcttttatacagccagtttccccttctgacttagaaaaagccaatctgcaaggggatggtagattgtgtcatctctgcccgcatttccttgttatcattaggcctgtctttgtacccagataatcttgaaaagaattcatggcaaatggccaaygcattttcttagaacattatctattatatattgatttaggaaaatacattttggaatgtacaagtgaaggaaattccccatacctgatgacttctattcctctgccaaacagttaatgtaatgaaaaacaaataaataaaaacaatgcaaaacaaaatcggagtgcatgagcataaagatgaaggtttcttccccagaagtgtcatagaggagtgtagtgagttggttcatgaaatttttgagagtatatctctaggtacgcattatcagtatctcctgttaaatgagaaatatttgtcttgttggtttcattcatgagtgcctccttttttcaaatgcataacaagtgttcaggta

SEQ ID NO: 402433 - DNA, 557 bp, Homo sapiens
tcagtcaatcaatagagacatatcatccccaatttctggtaatctagcttttatacagccagtttccccttctgacttagaaaaagccaatctgcaaggggatggtagattgtgtcatctctgcccgcatttccttgttatcattaggcctgtctttgtacccagataatcttgaaaagaattcatggcaaatggccaatgcattttcttagaacattatctattatatattgatttaggaaaatacattttggaatgtacaagtgarggaaattccccatacctgatgacttctattcctctgccaaacagttaatgtaatgaaaaacaaataaataaaaacaatgcaaaacaaaatcggagtgcatgagcataaagatgaaggtttcttccccagaagtgtcatagaggagtgtagtgagttggttcatgaaatttttgagagtatatctctaggtacgcattatcagtatctcctgttaaatgagaaatatttgtcttgttggtttcattcatgagtgcctccttttttcaaatgcataacaagtgttcaggta

SEQ ID NO: 402434 - DNA, 557 bp, Homo sapiens
tcagtcaatcaatagagacatatcatccccaatttctggtaatctagcttttatacagccagtttccccttctgacttagaaaaagccaatctgcaaggggatggtagattgtgtcatctctgcccgcatttccttgttatcattaggcctgtctttgtacccagataatcttgaaaagaattcatggcaaatggccaatgcattttcttagaacattatctattatatattgatttaggaaaatacattttggaatgtacaagtgaaggaaattccccatacctgatgacttctattcctctgccaaacagttaatgtaatgaaaaacaaataaataaaaacaatgcaaaacaaaatyggagtgcatgagcataaagatgaaggtttcttccccagaagtgtcatagaggagtgtagtgagttggttcatgaaatttttgagagtatatctctaggtacgcattatcagtatctcctgttaaatgagaaatatttgtcttgttggtttcattcatgagtgcctccttttttcaaatgcataacaagtgttcaggta

SEQ ID NO: 402435 - DNA, 557 bp, Homo sapiens
tcagtcaatcaatagagacatatcatccccaatttctggtaatctagcttttatacagccagtttccccttctgacttagaaaaagccaatctgcaaggggatggtagattgtgtcatctctgcccgcatttccttgttatcattaggcctgtctttgtacccagataatcttgaaaagaattcatggcaaatggccaatgcattttcttagaacattatctattatatattgatttaggaaaatacattttggaatgtacaagtgaaggaaattccccatacctgatgacttctattcctctgccaaacagttaatgtaatgaaaaacaaataaataaaaacaatgcaaaacaaaatcggagtgcatgagcataaagatgaaggtttcttccccagaagtgtcatagaggagtgtagtgagttggttcatgaaatttttgagagtatatctctaggtaygcattatcagtatctcctgttaaatgagaaatatttgtcttgttggtttcattcatgagtgcctccttttttcaaatgcataacaagtgttcaggta

SEQ ID NO: 402436 - DNA, 535 bp, Homo sapiens
aagcgatctctgaagtgctggcacaaaccactctttgcagctgttttggaagttgccagaagctgggaaaatgtgaagagaccayatgcttctatgtgacttttcttccactcatggaccaaagtaagtctagcattttcccagatgtcagtggacaaactgacccagttgttaggcactgttttcagaaacatcacagccagagtagacataaaattgaaagcataggattatatcctaggatggcattttagtacccaaaaggaaaaaacctctacattaatacagattgttaatgaagcacatatgactactgatgaaatgaccagtggaatataaaagtaagacataactttaatcaattctgataacccatggttttctcacatgagattcgttgaggaatttttatttgcttggatgaacaggattgaaataaagaaatggttgattggacacatgatcctctataggtgaagtactggcaacttgtacaaaaggcctggcaaaatctcagtaggctatcagccctttc

SEQ ID NO: 402437 - DNA, 570 bp, Homo sapiens
cctacaggtgattcttattgtctaccatttgtatttggaatataacacaaggctttctctcaaatcaggagattttgtttgtttagaatggtctatagagctctggaacgtaaatgtaaattttcctttattgaaacagtttgtattgaaaatttatagaaatgatgaagtttgataatgtaattacatctgttagttctgctcagaagccatttctttgtcttctggtattagcatcttgattttcttctgtggayaacttctctcctacctgcaagctgtctggttgggtgaattgacccattcttgtttccaagatttgcatgtgtcccaagcctagccactcagctaacaattattcccttgaagatatatgacccaatgtagtgaaaaggtactttttttcttttggggttgttaaagttggagctatataagattagtacatggagagatcttgaaattaaattgaagccaacgcaaaggaaagtagaggcaagagatgaagaccaagagcgatgggatggagggatagaaagaaagagatagtgatagaatgagaattatcat

SEQ ID NO: 402438 - DNA, 623 bp, Homo sapiens
ccttgaagatatatgacccaatgtagtgaaaaggtactttttttcttttggggttgttaaagttggagctatataagattagtacatggagagatcttgaaattaaattgaagccaacgcaaaggaaagtagagrcaagagatgaagaccaagagcgatgggatggagggatagaaagaaagagatagtgatagaatgagaattatcatatcttgataacagtatttaaccctcccagatccaactgtttctcaaattgacatctagattttcagctacacaagccaataaaatggtattttgttcaagccctcttgaattaggttgtagtcactggctaacaagagtccgggctgataggcaggaatgggggatagggtgctctatcaggagtgaacaatgtgagaaaagacatgaagatgataaagggggggaatggtcaggaatagcaattgtctaaactgaatggagtacatggtatgtatatggaaataatagggaaaaagttgggaaagaaagttgggaaattatagtagaatttatatgatcaagtaatgtattctttgttgcctaggctggcaatatccaacaaaaatataatgtgaagtacatatataatttta

SEQ ID NO: 402439 - DNA, 638 bp, Homo sapiens
gggctaaaaaagcagcagttcaaattctgactctgtgtctctgcctttctgtctttctctctctctctctctctctgtatgtgtgtgtgtgtgggtgtgcatttatgtacatttagaagatacacttaaattagggcacagattttatattagatagatagatattctcaccgaatacatttctaagtatcaattttcttatctataaaaagaactatgataacatacctcataataagtttcaggaattaaattttataatacaagtgaaatattacccagagtgcctcttacataacacattatttaccatttcctcatcctgtcttctaatggcaaagcattcagaaatatatgctgtatggatattagtctttaataaaattagttgggtctcagatgttaatttttgtataattcattcattgcacaaaagcaatttcataataaatgctgttataaaagaactttgagagatttactattttaatatactaaagcaattgattcatacrtaaacaactggatggtgagatgacatataaaattatatggatagagtaaagaattaaattacacgagcaataagagggcatgatggtatataaggtgctaactgctctgcagagattaaaaag

SEQ ID NO: 402440 - DNA, 543 bp, Homo sapiens
acatataaaattatatggatagagtaaagaattaaattacacgagcaataagagggcatgatggtatataaggtgctaactgctctgcagagattaaaaagaaatttactaccaggtattgcagcttatatttgttttctcagctacacaggatcacttgaggccaggagttttagatcagcctagaagatatggcaagactctgtttctaaaaaaatgaaaataaattatccacaagtaatggtgcatccctgtagtcccatgtacttgggaggctgagatrggaggaggtcgaggttacaatgagctgtgactgtgccactgcactctagtctgggcaacagagtgagaccccgtttctttaaaaaaaaaaaaaagaaagaagaaaagaaacttacagaaataaagattattgtggagtgaggcttttaagaaaagccttgagtagaccctggaaggataggtgatacacacacatctatatgggcaataaaatggagggaattttagactagagaaactcttaaattaagttacaaacat

SEQ ID NO: 402441 - DNA, 610 bp, Homo sapiens
catttctactgagcttggagtgaaagaaggagctggccctgaggagacctgtgggcagggtattcaaggaaggattatgagtgcaaaggcagagagaacttggattgctggaagattggagtaaacaaacagtgagactasagcatgaatgagggccagctttttttctaaaatataataaaaactatttactataagacagaatgaagaaaatccacatacaaaatacaagcccatatcttttaattaggttcagcatcataaaattttatttcaatcctggtactgatatcagtaccagtataagaaaaaaataattataaaaactgttacacattcattgaaagcatatatacaggcgattaatacaccctgctcagtaagatgggaccaccaatcttacactgtggctgttgtggcaatgtcaaaatgctgtacaagtttcttattctcgccttcgcagttgggtattggtctatgggccacactttgcatagctggagtaagacaaaggcagacgtaacaccggccatgataagaagtcaaaatttaattctaaatgctagccagataagtcaataataacatgaagaatgatgattaatagtga

SEQ ID NO: 402442 - DNA, 610 bp, Homo sapiens
catttctactgagcttggagtgaaagaaggagctggccctgaggagacctgtgggcagggtattcaaggaaggattatgagtgcaaaggcagagagaacttggattgctggaagattggagtaaacaaacagtgagactacagcatgaatgagggccagctttttttctaaaatataataaaaactatttactataagacagaatgaagaaaatccacatacaaaatacaagcccatatcttttaattaggttcagcatcataaaattttatttcaatcctggtactgatatcagtaccagtataagaaaaaaataattataaaaactgttacacattcattgaaagcatatatacaggcgattaatacaccctgctcagtaagatgggmccaccaatcttacactgtggctgttgtggcaatgtcaaaatgctgtacaagtttcttattctcgccttcgcagttgggtattggtctatgggccacactttgcatagctggagtaagacaaaggcagacgtaacaccggccatgataagaagtcaaaatttaattctaaatgctagccagataagtcaataataacatgaagaatgatgattaatagtga

SEQ ID NO: 402443 - DNA, 455 bp, Homo sapiens
aacatagataaaccttaatataataatatcctgcttgctagatctattcattgaataaccaatatttgaggacccacaagctaccaagcactgttttatgtactagagatacaattggcatcaaaacaaagtctttgctctcatgagggttaatcyagtgacaatgtttactggtcaataactaggtaagtgactcacactaaaccttacaaactgaaacctgaaaatggtgaaaaattatctcttagtaaactagatatctgagagagtaagattagcaactttatttttttaagattgggatgtaatggaatttgcaactgaggaacagaaataggacagatgccccaattccaagaggaatcaggagatggaagatatgccccaattccaagtggggtcgggaaagggaagacagcttaacactaaaggatcacaatgctttttcctcaaat

SEQ ID NO: 402444 - DNA, 455 bp, Homo sapiens
aacatagataaaccttaatataataatatcctgcttgctagatctattcattgaataaccaatatttgaggacccacaagctaccaagcactgttttatgtactagagatacaattggcatcaaaacaaagtctttgctctcatgagggttaatctagtgacaatgtttactggtcaataactaggtaagtgactcacactaaaccttacaaactgaaacctgaaaatggtgaaaaattatctcttagtaaactagatatctgagagartaagattagcaactttatttttttaagattgggatgtaatggaatttgcaactgaggaacagaaataggacagatgccccaattccaagaggaatcaggagatggaagatatgccccaattccaagtggggtcgggaaagggaagacagcttaacactaaaggatcacaatgctttttcctcaaat

SEQ ID NO: 402445 - DNA, 455 bp, Homo sapiens
aacatagataaaccttaatataataatatcctgcttgctagatctattcattgaataaccaatatttgaggacccacaagctaccaagcactgttttatgtactagagatacaattggcatcaaaacaaagtctttgctctcatgagggttaatctagtgacaatgtttactggtcaataactaggtaagtgactcacactaaaccttacaaactgaaacctgaaaatggtgaaaaattatctcttagtaaactagatatctgagagagtaagattagcaactttatttttttaagaytgggatgtaatggaatttgcaactgaggaacagaaataggacagatgccccaattccaagaggaatcaggagatggaagatatgccccaattccaagtggggtcgggaaagggaagacagcttaacactaaaggatcacaatgctttttcctcaaat

SEQ ID NO: 402446 - DNA, 559 bp, Homo sapiens
actcttctgagagcatcgggcttcaccttgagcctccaaagggttgggggcagggccgaaaagaaacagagctgcactcaacttagctttaaaaagaggaggagttgtgcagagggggaggggagaaggcggccggcgcctgcagcctctgcccaggaaaacggagggcaggaaacgtctccagcccccctccccaactgtcaaatcctagcccggccgtrgtactcccaggacacgtgtctactggatctctccctgtccggcccaaggacttcctgaaacccccgcctccggctgcccgaaaaaaccgtgagtcagttcggaggagagaaagctccaggaacccgactctggcggcagcagccagagcgctgggatcccggacccagcgtccagaacttcattcaagcgcccagaccgccctccagaaaggggaagcccagatggcccggcgaggatgggaactggctgcggtttgtcactaggaattgttacgaatgtcgcagactggtgaagccctaggtgtgacaagactgggctcccggagtgggagtcgtaa

SEQ ID NO: 402447 - DNA, 632 bp, Homo sapiens
taattcagcatctatgtctgaaactttaagagatgttacaggaacaacaagatggagatgcatttcaatgaggttgagcagcatcacgtctcattccctcatgactctgtgtgtcaaaggtcattcattcatcatttcaaaagatatttattgccaggtgagagatggtgatggcttaaaagtaaggtagaggaagagccagttgaatacatgcttgattctgactaatgacactaaaataacggccaasaaaaggcaaaacaattcagcagatccaccaagagctggtgaagaggtcacagctgacaagaaatagcaatgaaattttggaagcaattagtaaacaggtaaatgacaatagaaatagcagacaagaaaaagctaaactacattggcagcacgggagagcctcaagaaccagccacttcacagcatagtcccagaaggctcaggaattggaggtaccaaatgcctctgcagcaagggtgcagagcagggctatccatataaggactggttaaaagtctttaaaagaaggagtcaggctcacagacgccctcttctacccatgtagccaggtggccctctttgctccagtaggagtctaaaggattactccatagcagtggttt

SEQ ID NO: 402448 - DNA, 567 bp, Homo sapiens
tagtgttctcaacatgtcaagccttaccgacaatgcaaagcaatagaaactcaaagcaatagaaactgctggtgagatataacctggttcaacccggyggaaatactttggcattaaacatgccaaactaaagttaaatacgcacataatctacattctagcaattccaccactaggcatttaccttagaaaaattctcaaacatatgcgccaaaagatatgtaaaagaatgcttatggcagcactatccttcacaggaaaaatccaggaactaaatatcaatagacagtgcaatgaataaataaattgtggtataatcatacactcgcatatacagcaatgaaaataaatgaattatagatttaattattgacatggatagacctcaaacacatagtgctctaaatacacagatattttaaagaaaagactattccattcatatcaaggtcaaaatcaaacaaaactaaataatatattgttgaggaatacctattagatggtaaaaaactaaaactaaaaaacaaaattcaagacaatgctcatttgcaggagaagagcgagtgg

SEQ ID NO: 402449 - DNA, 567 bp, Homo sapiens
tagtgttctcaacatgtcaagccttaccgacaatgcaaagcaatagaaactcaaagcaatagaaactgctggtgagatataacctggttcaacccggtggaaatactttggcattaaacatgccaaactaaagttaaatacgcacataatctacattctagcaattccaccactaggcatttaccttagaaaaattctcaaacatatgcrccaaaagatatgtaaaagaatgcttatggcagcactatccttcacaggaaaaatccaggaactaaatatcaatagacagtgcaatgaataaataaattgtggtataatcatacactcgcatatacagcaatgaaaataaatgaattatagatttaattattgacatggatagacctcaaacacatagtgctctaaatacacagatattttaaagaaaagactattccattcatatcaaggtcaaaatcaaacaaaactaaataatatattgttgaggaatacctattagatggtaaaaaactaaaactaaaaaacaaaattcaagacaatgctcatttgcaggagaagagcgagtgg

SEQ ID NO: 402450 - DNA, 594 bp, Homo sapiens
aaccattttgaacattaacactcctaacaatacagtctcaaaatattgacctaagcaacaactgacataaattagagagagaaaaaggtaaatcaaaaataccaactgaagatttcaacagacccttcccagaaacaaatagatcaaggagacaaaataaatgaagggaaatgtaaaagatctgaacaacaaaacagtgtttcagcacttacagaactctgcaagtgcacccaaaacgtttgtaaatctaaattgtatattgggtcataaaagaaacctcatcaattttataaaatcagtcttatatcaactaagcttttaaaccatcatgcagtaaaatttgatatcaatgaccaagcaatctttcttaaaactttcawatgcttggaaatgaagtagtatattactaaataattattgagttaaaaattgatataatgaataaaataactagagctaaataataagaaaattatgtcaaatttattatacaaaactaatagttttgggaaggaaatttataaatttgaatacatttattaggaaacaagaaggatcaaaaacaaataagccaaggattaaaaactaattaga

SEQ ID NO: 402451 - DNA, 474 bp, Homo sapiens
gcaccacactatatacccttgaaacaaacatgcacatgtactccctgaatctaaaactgaaattaatattttaaaaagaattttaaagaaatactaaatgaattttaaaaataaaatactttctactttcttgcccaagatctagtcagcatactgccatcagtgaacgttttgtggaatgccaagataatcaagaactctgcagactatctgtggcagagagcaggagaattgacacagctctgaggccacactgtgaagatatactattggcactgctgggtaaaagcaaactgtgactagtggtcccttcaaattggtatgcagaaaaaaatagcatgagccacatcaattactacataccaaatgccagcagttttgctgatttgctccagtaaagacacaacagagccaacagctgcatttkggccacctgaaccagtttatgacagtccacattctccaaaacccatc

SEQ ID NO: 402452 - DNA, 546 bp, Homo sapiens
ccatcatgccctactagttcttgtatttttgtagagatggggtttccccatgttgaccagactggtcttgaactcctgaccccaggtgatccacccacttgagcctcccaaagtgctgggattacaggcatgagccaccatgcccagccatcatctcctttttaaaaaatgtctatgtgaggtggtatggtaggtgttcccaattctttcctcctttttttcttgtgacctccaagtgctttccattagagtacaaggagaattcatcctcatgccctcatgtcgacatcctcatgtcgactttgggtttagccatgtgacttattttgttcaatgcaatgtaaagaaacatgacaccagcagaggcacctctgtgtgcgtttgtgatttgtcttggctctcctgctttctccatccaccttcagaggaacatgctccatgtagctgctgatccaaggagagtgagaagacgtctagaacagacttaaatccaactcacagcctggawctacatgtggctgatcatatctaagcccagtagaacca

SEQ ID NO: 402453 - DNA, 559 bp, Homo sapiens
agaatataacagcccgtggagggtggggggcaagaaatgatgggtactagggagacccagtttcagttatctttgatgattttgagaggcattcagcaccatgaacacgttgttcaaacataaatgagaaaataaactatataagcgatcttcatgaggtttttccacacaaagtgtatttcatatctgtatagatttaactactaacaagctacatccaaggaacttcactactacaagtcttcggagrtatcatcaatatccggcttccaatttccagtctttaagatacttctacattgtgctcctagatttccaggtgccaacatgaagggaacatggagaacctccatggacacagcagagtcagggaggaatcatcgccctcctcaacaggcaggtgaaacccaaacaacccattgagctttgctaaatgctctaggagacagccaacccagcactgtataaagaaaacaagtaaagtaatttagaactctggaaggccaagaatctataaaaagctgtcaattgttgaagtttactggagtggaaagaatgt

SEQ ID NO: 402454 - DNA, 570 bp, Homo sapiens
cctttccccgccccactccaataccttccaactctgtgatagagccaaagggcccagcaagactcccctcaaaatccccccaacttctgtcaacacagaaccctgtgctggaagcaggagggaagggaggaggggagggcacaggcagacgggcctggacaacctcacagagaacctcacgtgttctccacacagccacaagtggcatgaatgtggcacagacagccagcaaacgggacaagctgggaacaaagaagaccttgcagagaacttcttggactgaagaccgaaggccgatgggaatgaggacacccctaatggatgccaacacagagggatgatggcaatccagacagaggcccccaccccttccagcctctgctctctgttaaaatccctgcaacttatacactacctgggggaaggtgaatgtgttaggcttcaaaytgcgatttgggtgtttttagcccaagcactgtgatatcatcatagaattaagttttgctcaatgcagagattccctaaagaaataaaagtagaagtatcatttgattcagcaatcccactact

SEQ ID NO: 402455 - DNA, 524 bp, Homo sapiens
agagaaacaatctgaaaaattagcttagagaggaaggaatatggaggactgcagggtctcacaacaccattcgcagatggattgggcatcgaacattctttgcagactggggtaaatgtacagaatagagtaccasggagggctggccagggagggggctgacccctctgaccatgtgcttccctgtctcttccccactaaggtgggcattgtagggtatagacagccatgccccatgtcctaatgggagagtggaacaagacccagagggcatgcaggacggatgtggtaagtttcatgtgcgtgcgtgtcaatcctaagtgacaagggatcttatcttctctgctccttcctatcaaccctttgtctcaccagatgctcaaacttcccttctctaaactgcaggtcccagttttcaccttcagtagctggtgacattagctgctgggaagtccaccaaagccaggaattcctccaccccttcctcacagggggatttggagacaggaagcaaaggaatccat

SEQ ID NO: 402456 - DNA, 524 bp, Homo sapiens
agagaaacaatctgaaaaattagcttagagaggaaggaatatggaggactgcagggtctcacaacaccattcgcagatggattgggcatcgaacattctttgcagactggggtaaatgtacagaatagagtaccacggagggctggccagggagggggctgacccctctgaccatgtgcttccctgtctcttccccactaaggtgggcattgtaggrtatagacagccatgccccatgtcctaatgggagagtggaacaagacccagagggcatgcaggacggatgtggtaagtttcatgtgcgtgcgtgtcaatcctaagtgacaagggatcttatcttctctgctccttcctatcaaccctttgtctcaccagatgctcaaacttcccttctctaaactgcaggtcccagttttcaccttcagtagctggtgacattagctgctgggaagtccaccaaagccaggaattcctccaccccttcctcacagggggatttggagacaggaagcaaaggaatccat

SEQ ID NO: 402457 - DNA, 620 bp, Homo sapiens
atgcattttggacttctacccttgagaactgtaagatgataaatccgtgttgttttaagccattatgtttktggttatagcagcaataagaaactaacacattcccctgcaacacagcctggcctgaaaaccttcctctcctggccttgtttaaatactgtgggtgaaggaatgtgctaagtcgggtggagttctttgcatttctccagagcttctagcaatgcattgggcacataggagtcattaagttggtatttgtctgtttggtttgatttggcaataagagacaaaaatggtttggtggtctggcattgccaaagctcttgagcaagcataagagtgaactcaagcataagaggccacttggtagtgagctcccgcttgtttaaggtgttcatcttggaatagggtgagaggctattctccaccttgttgttcatgtgtcataagcatccaggaagcccccaaggccacctcggctgcattgactacagctctcggagcccttcccagagcccttccttgttaaatagaaagggtgactctccttgcagtagctcatggagacaagttaaacagtagagaagttgaaaaatcagagaacattactcaatcaacat

SEQ ID NO: 402458 - DNA, 620 bp, Homo sapiens
atgcattttggacttctacccttgagaactgtaagatgataaatccgtgttgttttaagccattatgtttgtggttatagcagcaataagaaactaacacattcccctgcaacacagcctggcctgaaaaccttcctctcctggccttgtttaaatactgtgggtgaaggaatgtgctaagtcgggtggagttctttgcatttctccagagcttctagcaatgcattgggcacataggagtcattaagttggtatttgtctgtttggtttgatttggcaataagagacaaaaatggtttggtggtctggcattgccaaagctcttgagcaagcataagagtgaactcaagcataagaggccacttggtagtgagctcccgcttgtttaaggtgttcatcttggaatagggtgagaggctattctccaccttgttgttcatgtgtcataagcatccaggaagcccccaaggccacctcrgctgcattgactacagctctcggagcccttcccagagcccttccttgttaaatagaaagggtgactctccttgcagtagctcatggagacaagttaaacagtagagaagttgaaaaatcagagaacattactcaatcaacat

SEQ ID NO: 402459 - DNA, 487 bp, Homo sapiens
tttgtagttcaacaatccaagaagggagtaagaccaaacagaaccttccaggtgtcattgcttcctgggtctccctttaagcctgtagaggaaggtgrgcaagagaagagacaaacatggggcagtgacttttcagaaagactccatgaagaggtgatggagaagccaggtggggaagtgaggagggacaagttctcactggcattttgggtgatggcctggcaagatggagggctaaaagaaggcctggtaggaagcccacaacaggttggggatgcttgttatgcagttctgccttttaataaccggcacttgtatcctatgatttaacttctaacttgaattgaacttcactgagatttcaatgtaaccattcccgcttgagctgtgaaggtcagtacaacttgccctggaatgcctttggccttcttgctgccaatacaatcccatcatacctccaaggtgcaggcttgacctcgcttcctcc

SEQ ID NO: 402460 - DNA, 487 bp, Homo sapiens
tttgtagttcaacaatccaagaagggagtaagaccaaacagaaccttccaggtgtcattgcttcctgggtctccctttaagcctgtagaggaaggtgagcaagagaagagacaaacatggggcagygacttttcagaaagactccatgaagaggtgatggagaagccaggtggggaagtgaggagggacaagttctcactggcattttgggtgatggcctggcaagatggagggctaaaagaaggcctggtaggaagcccacaacaggttggggatgcttgttatgcagttctgccttttaataaccggcacttgtatcctatgatttaacttctaacttgaattgaacttcactgagatttcaatgtaaccattcccgcttgagctgtgaaggtcagtacaacttgccctggaatgcctttggccttcttgctgccaatacaatcccatcatacctccaaggtgcaggcttgacctcgcttcctcc

SEQ ID NO: 402461 - DNA, 487 bp, Homo sapiens
tttgtagttcaacaatccaagaagggagtaagaccaaacagaaccttccaggtgtcattgcttcctgggtctccctttaagcctgtagaggaaggtgagcaagagaagagacaaacatggggcagtgamttttcagaaagactccatgaagaggtgatggagaagccaggtggggaagtgaggagggacaagttctcactggcattttgggtgatggcctggcaagatggagggctaaaagaaggcctggtaggaagcccacaacaggttggggatgcttgttatgcagttctgccttttaataaccggcacttgtatcctatgatttaacttctaacttgaattgaacttcactgagatttcaatgtaaccattcccgcttgagctgtgaaggtcagtacaacttgccctggaatgcctttggccttcttgctgccaatacaatcccatcatacctccaaggtgcaggcttgacctcgcttcctcc

SEQ ID NO: 402462 - DNA, 486 bp, Homo sapiens
gcagaagcgaagtttattgatcctccagtcaagattgatggcacaataagagcaggaggcgaagagtgattttgcttttgaaaacgttgatgaataagcactcaggggcaacaaatagctgggctcaccgagtgatggacggtggtgggggaacaagatgcatttttataaatgggtgaaaagagaggaggacttattaaaaaaatgaatgaccacatgtggcagggatatgccagtagggagaagaaagccattgatttatgtgtactactggcatttgaaaattcaataataacattgacaaatgagaggcaaacctggccacaggacagcgctgagcctggaacggagaaagaaaatgccaaggtcagagagaaggaacagaaaaacatgcttatgttggaaagcctttacattaactcatctatataaagacattacaaaaatccctcygcgattagtgcccgactctttgagtcggcagga

SEQ ID NO: 402463 - DNA, 536 bp, Homo sapiens
agaaggtactctggagcagtttccaggaatttggtgccatgttggcttagagaataacgccaaaaggggccttgtgagaattctgtattccacatttttttctgactccagttccagaatccacatatttgtgtttctggctccagttctaacagtcaaggcagagggcgcgtgtcagtgtgtgatgagtgtgcagcaactgtccctggaaggcactgagaaacacccagtaggactctttaaggacaagcaaagtatcttcttcatcttcacattccctcctggccagtacattgctaagacttaaagctttcatttgttaactgaataataaaagtttgtttytctttaaagcattgctagccatgaggcttccaggtattcttgctgggatgaatccttttattttagatattttcttccctaagcttgttcttttctttctttttagatgaggccatcttttattcacatagtaagagcgggattggaatagagagatggggaatgagacagagaggaggcctgccacctcc

SEQ ID NO: 402464 - DNA, 625 bp, Homo sapiens
gggtctatgaaggctgggatgagagtgtgctgtgtcttccgttgctgggcttggcttggtttccccctycccttctctccagtgtatgggcctgagatgcgtggtaggaacttagacattcatggcagagggctagacctgtgacgtcctctgctggtggatatttatgggtatgaatacacaaatgcatactgtaattggctaacattttcccagtgctccatttttgttttgttttgttttgttttaagtagataaacttgtaaaatcctactccaagtatttctttccattgttttggactcaggaataattacaattagtttttatgaacttcataggttctaggaagtccaaagttctataaagtccaaagataattggttggaggttcttttttcaatgagactctcattgcaaataacacccaaatggggcctgtgttattaatgggattttcaaaatagtgaacctttttcccagtgcattcctctcagggcgatggagagctataatgttgacatgggtaattggaggcttaagtatatccttcatataaatctacatgtaagtaaattaaaaaataaatacatgagataaattgacatatttgtatatggagaaa

SEQ ID NO: 402465 - DNA, 625 bp, Homo sapiens
gggtctatgaaggctgggatgagagtgtgctgtgtcttccgttgctgggcttggcttggtttccccctccccttctctccagtgtatgggcctgagatgcgtggtaggaacttagacattcatggcagagggctagacctgtgacrtcctctgctggtggatatttatgggtatgaatacacaaatgcatactgtaattggctaacattttcccagtgctccatttttgttttgttttgttttgttttaagtagataaacttgtaaaatcctactccaagtatttctttccattgttttggactcaggaataattacaattagtttttatgaacttcataggttctaggaagtccaaagttctataaagtccaaagataattggttggaggttcttttttcaatgagactctcattgcaaataacacccaaatggggcctgtgttattaatgggattttcaaaatagtgaacctttttcccagtgcattcctctcagggcgatggagagctataatgttgacatgggtaattggaggcttaagtatatccttcatataaatctacatgtaagtaaattaaaaaataaatacatgagataaattgacatatttgtatatggagaaa

SEQ ID NO: 402466 - DNA, 625 bp, Homo sapiens
gggtctatgaaggctgggatgagagtgtgctgtgtcttccgttgctgggcttggcttggtttccccctccccttctctccagtgtatgggcctgagatgcgtggtaggaacttagacattcatggcagagggctagacctgtgacgtcctctgctggtggatatttatgggtatgaatacacaaatgcatactgtaattggctaacattttcccagtgctccatttttgttttgttttgttttgttttaagtagataaacttgtaaaatcctactccaagtatttctttccattgttttggactcaggaakaattacaattagtttttatgaacttcataggttctaggaagtccaaagttctataaagtccaaagataattggttggaggttcttttttcaatgagactctcattgcaaataacacccaaatggggcctgtgttattaatgggattttcaaaatagtgaacctttttcccagtgcattcctctcagggcgatggagagctataatgttgacatgggtaattggaggcttaagtatatccttcatataaatctacatgtaagtaaattaaaaaataaatacatgagataaattgacatatttgtatatggagaaa

SEQ ID NO: 402467 - DNA, 635 bp, Homo sapiens
cccagtgctccatttttgttttgttttgttttgttttaagtagataaacttgtaaaatcctactccaagtatttctttccattgttttggactcaggaataattacaattagtttttatgaacttcataggttctaggaagtccaaagttctataaagtccaaagataattggttggaggttcttttttcaatgagactctcattgcaaataacacccaaatggggcctgtgttattaatgggattttcaaaatagtgaacstttttcccagtgcattcctctcagggcgatggagagctataatgttgacatgggtaattggaggcttaagtatatccttcatataaatctacatgtaagtaaattaaaaaataaatacatgagataaattgacatatttgtatatggagaaattatccccaggaatgtcaatatgcaatctatttcatctctgccattgatctgctcttatttggggtatagagagggaagagaatagagaaatggggctgttctgaccctgagtctattttctaaaagcagcatagtcaatattaaacttttaaactagtacattgacacgatggttgtctaagtctacagtgaaaaatatcagggaagcattgtgaatgta

SEQ ID NO: 402468 - DNA, 635 bp, Homo sapiens
cccagtgctccatttttgttttgttttgttttgttttaagtagataaacttgtaaaatcctactccaagtatttctttccattgttttggactcaggaataattacaattagtttttatgaacttcataggttctaggaagtccaaagttctataaagtccaaagataattggttggaggttcttttttcaatgagactctcattgcaaataacacccaaatggggcctgtgttattaatgggattttcaaaatagtgaacctttttcccagtkcattcctctcagggcgatggagagctataatgttgacatgggtaattggaggcttaagtatatccttcatataaatctacatgtaagtaaattaaaaaataaatacatgagataaattgacatatttgtatatggagaaattatccccaggaatgtcaatatgcaatctatttcatctctgccattgatctgctcttatttggggtatagagagggaagagaatagagaaatggggctgttctgaccctgagtctattttctaaaagcagcatagtcaatattaaacttttaaactagtacattgacacgatggttgtctaagtctacagtgaaaaatatcagggaagcattgtgaatgta

SEQ ID NO: 402469 - DNA, 635 bp, Homo sapiens
cccagtgctccatttttgttttgttttgttttgttttaagtagataaacttgtaaaatcctactccaagtatttctttccattgttttggactcaggaataattacaattagtttttatgaacttcataggttctaggaagtccaaagttctataaagtccaaagataattggttggaggttcttttttcaatgagactctcattgcaaataacacccaaatggggcctgtgttattaatgggattttcaaaatagtgaacctttttcccagtgcattcctctcagggcgatggagagctataatgttgacatgggtaattggaggcttaagtatatccttcatataaatctacatgtaagtaaattaaaaaataaatacatgagataaattgacatatttgtatatggagaaattatccccaggaatgtcaatatgcaatctatttcatctctgccattgatctgctcttatttggggtatagagagggaagagaatagagaaatggggctgttctgaccctgagtctattttctaaaagcagcatagtcaatattaaacttttaaactagtacattgacaygatggttgtctaagtctacagtgaaaaatatcagggaagcattgtgaatgta

SEQ ID NO: 402470 - DNA, 724 bp, Homo sapiens
gacttcatcattttttccaccaaatctgcacatcttctcacattatctagctctaagatggcacctccacacacccaacccagaaaaccatgttaccctcactcctctcccttcctcaaaacaagacactgaatcaattgtcaggtcctgctggttttattgcctgtatatttcccaactccatgcccacttctattttagttcaggttttattctacatctatttgcagatgtttctgcaaatctgtcctccacattattaccagaataatctacctaaaatgataacgtgtccgtgttacttccttgcatagatccttcagtggaactcctgtattctccagattaagtataaacttcttaacgcaaggctctctgtgatcyggtctttgcctacttacacagtctcatctctcaccacttctactaggcactttacatgccagaatataaaaatatttgcagatcctcatacacatcatgttgttccttgctcttgtggttttgatagaatggttcctcagcctgtaatgtccttcccctctgatctctcttcctctcctcaatcttcacgacctcacccacaccttcctcctcccgtaaatcccagcccagccaccttatagaaagtctttgctcatcagaacacacacacatagatatacatatatatcacccaagctgggtcctgtgtccttccagatgtttccataatacgctgggc

SEQ ID NO: 402471 - DNA, 724 bp, Homo sapiens
gacttcatcattttttccaccaaatctgcacatcttctcacattatctagctctaagatggcacctccacacacccaacccagaaaaccatgttaccctcactcctctcccttcctcaaaacaagacactgaatcaattgtcaggtcctgctggttttattgcctgtatatttcccaactccatgcccacttctattttagttcaggttttattctacatctatttgcagatgtttctgcaaatctgtcctccacattattaccagaataatctacctaaaatgataacgtgtccgtgttacttccttgcatagatccttcagtggaactcctgtattctccagattaagtataaacttcttaacgcaaggctctctgtgatctggtctttgcctacttacacagtctcatctctcaccacttctactaggcactttacatgccagaatataaaaatatttgcagatcctcatacacatcatgttgttccttgctcttgtggttttgatagaatggttcctcagcctgtaatgtccttcccctctgatctctcttcctctcctcaatcttcacgacctcacccacaccttcctcctcccrtaaatcccagcccagccaccttatagaaagtctttgctcatcagaacacacacacatagatatacatatatatcacccaagctgggtcctgtgtccttccagatgtttccataatacgctgggc

SEQ ID NO: 402472 - DNA, 447 bp, Homo sapiens
atatggtaattcagcttgtagactctagcatctgtgagaccttaggtaaattactaaacttctccaagcctcagctgtctcatctataaagtggaattagaatcatgagggtgaaataagctaaagaaagtataacacttgccatatagtaagcacccattatatagaagatgtttttatgtttattattatattattaggaggggcagggcagaagctccrccctccaggatggaatacttgatctctgaggcttttttttttttcatcttaacacatgtatttcaacataactatgcttacaggaatgtactcatattggttagcaaagtgtatattaatttgacttatccaaagcaatttggaccaaaaagttgtacatgcattttgggaggctgaggtgggaggattgcttgagctcaggggtttgatgccagactgggcaac

SEQ ID NO: 402473 - DNA, 508 bp, Homo sapiens
tatatacatgtgtgtgtatayatgtatgtatgtatatgtatgtctgttttgtgttgctataaaggaatacttgaggctgggtaatttataaagaaaagaggtttatttgactcatagttctgtaggctatacaagaagcatggctctggcatctgcatctggtgaggacctcaggctgcgtccattcgtggtggaaagcaaagggcagccaatgtttgcagagatcacatggcaagagaagaagcaaagagagatggggagaggtgccatgctctctttaacaaccatctcttgtgggaaccaatattgtaagaactcactcaatcattcccctgctgccagagaaatcattaacctgttcatgaggggtccacccccatgaccaaaacacctaccattaggtcccacctccaacactggggatctaatttcaacatgagatctggaggggaaaaacatccaaactatagtaatgtatacacatatagatgtaagtgtgtgtgtctat

SEQ ID NO: 402474 - DNA, 578 bp, Homo sapiens
tgtaagtgtgtgtgtctatatgtcttgcaaaatttccatgtattttctttcattttgctaatgcttggaagctctgctagataattccatttgttcttacataatatatgtgatttctttatgttcttttcactatatttaacagtattttgcttccctgaatctacatattgatagcccactctcattttctatcatctaaagaatgatatttggggtagtgaaggacaattgttctcacctgagatttttttacagttgttatagtatctgggytccacctcctcttctgggatataggtgactgtcctattacaagactctttcacctgcagagtgggaaggagtgaaacagcctattcccattggcttcactttaaagtgagtggatgagagcctggggtaccctgaatgccagaatgagaaggactttatcgggaatatcaagtccacactagctgccccagtttatccccgttgatttgttctattacttaaggaaaaatccttccagtccacttttgaccaaggaatgaatacccagttgctgttgaggttgatgaaggagaaagggtagg

SEQ ID NO: 402475 - DNA, 577 bp, Homo sapiens
actcccaaagatgctgagtgatgtgagggagtaaacttcctcatgagacaaaatttgaccagtggaagaaagaagtcaaaaggaggcagcagataaataccttccccttctttcctttaaaagactgttccaagataggatttctccatacggcctttctgagcacatagtgcytgatccaggaagtgcccccgctaacagactttgcctctgagagtgtcatcaggaagcaaaacacattgcatggtgttgctccttctctgccactattccctgtatcttttcctccactcttgctgccctagaattgcatgtcccagttaaaatctgggcttatacaagttggttttgaaagttggttttaaaaatcaattatgccaacagcagcaatttaaaatggtgatgtacacctatattcactaactaggaaagagctgcgagtcataactttggaggtaagttacacttgattgcttctagaaggtaagagtttgaatagttttcattcttcttttagtcagtatgcatttattgttgcacgttctccagtgaatatgtattatagttataaacagaa

SEQ ID NO: 402476 - DNA, 618 bp, Homo sapiens
tgagtacatatttactgactattctttgggaacttggtatgtgctaggaattggggtgataaaactttttaccaatatatggcaaaaagcgatgtgccttaggaagtgcaaaaaaagtgctrtgggaatccacatgtcaaagaggatgaggaaagggcattgtagcagtagggcctttgcaaaggctgtataccctcttcttaaaactgctcacctctcctcttcccaggtctcaattgagaagtcatcgttttaaaacgacaggtctttcccatacctggctaaaatcagtttctcctctacttcctcttcctcagccactactttactttgtccacagcacttagcacaatctgtagttgttctgtttactcatttttacctcctaccttccctattacacttcaggatggcagaaacaagtctaccttgttactggggtgtgccgggcataaagtgtgcgcacacttttttttcttcctgtttttcgagatagggtctcgctctgtcgcccaggctggagcgcagtggcgcgatcgccgctcactgcagcctcgaagtcctgggctcaagcgattctcctccttggcctcccaaagcgctggaatcaggggtgtg

SEQ ID NO: 402477 - DNA, 618 bp, Homo sapiens
tgagtacatatttactgactattctttgggaacttggtatgtgctaggaattggggtgataaaactttttaccaatatatggcaaaaagcgatgtgccttaggaagtgcaaaaaaagtgctgtgggaatccacatgtcaaagaggatgaggaaagggcattgtagcagtagggcctttgcaaaggctgtataccctcttcttaaaactgctcacctctcctcttcccaggtctcaattgagaagtcatcgttttaaaacgacaggtctttcccatacctggctaaaatcagtttctcctctacttcctcttcctcagccactactttactttgtccacagcacttagcacaatctgtagttgttctgtttactcatttttacctcctaccttccctattacacttcaggatggcagaaacaagtctaccttgttactggggtgtgccgggcataaagtgtgcgcacacttttttttcttcctgtttttcgagatagggtctcgctctgtcgcccaggctggagcgcagtggcgcgatcgccgctcaytgcagcctcgaagtcctgggctcaagcgattctcctccttggcctcccaaagcgctggaatcaggggtgtg

SEQ ID NO: 402478 - DNA, 575 bp, Homo sapiens
taaggaagccccttatggctgaaagcaggtggttccaaagcctgtcctacacttgcttctccctcacatcttatgagccagaccactagatcccacagaagaaaaggatcagggaggtaatttttctacagaaaagcactggattcgcataagtgatatatcaagcttctaatgtcctttttatcttttatttgaataatcatttgtataacttkcccatctgtgtgtacattttaaacaaatgaagcagcttcctctcactaacatgttttctcttccttaaaatgacatcctcttctaatttactcaaccctaaaaaccccctcttcaaatacattttctctgttggtttcatgcatctcagagaaaggaaaaaagggttcattttagtaaataagccctggctttaaaaatgctcttactatttcacactccagaaaataaggagatgaacacacacacacacacacacacaaactaattagaattaactaaattttataatatattaagtaataaaattacaatgcaaaaccattgcagcgtccttttgattgctctgaactccacccctc

SEQ ID NO: 402479 - DNA, 575 bp, Homo sapiens
taaggaagccccttatggctgaaagcaggtggttccaaagcctgtcctacacttgcttctccctcacatcttatgagccagaccactagatcccacagaagaaaaggatcagggaggtaatttttctacagaaaagcactggattcgcataagtgatatatcaagcttctaatgtcctttttatcttttatttgaataatcatttgtataacttgcccatctgtgtgtacattttaaacaaatgaagcagcttcctctcactaacatgttttctcttccttaaaatgacatcctcttctaatttactcaaccctaaaaaccccctcttcaaatacattttctctgttggtttcatgcatctcagagaaaggaaaaaagggttcattttagtaaataagccctggctttaaaaatgctcttacyatttcacactccagaaaataaggagatgaacacacacacacacacacacacaaactaattagaattaactaaattttataatatattaagtaataaaattacaatgcaaaaccattgcagcgtccttttgattgctctgaactccacccctc

SEQ ID NO: 402480 - DNA, 602 bp, Homo sapiens
tctcactagggtggggctgctgcctgccgcctgctctccgaactgtcttgcagctggagaagagcagccaaagctcctgcagacttcatgttggaacttcacacattcattccaacaaagaacacagcacgtagcaggagaacatactgcgcttattcttcttagtataagggcagataacctctctatttttatctttaccttcattgaaacaaaaacaagtaaatggaagagcagacgcctcttcataaagctagtcattgtcctattcctctgttctattcactctcaaacgattccattggggacccctgagctgtgaagaaggacagggccctgcctccactttttcatctttctccttaactcggggaagtctggcttttacttccaaccgctcaactgacactgtctttcaaagtttaccratatctagggtggccaaatggggatgcttctgagggtgaaaaaaagatgctactaataattatcctgggacaacaggcgtaaatgcaaacagtctcatcaagaacctcccatctgtatccaaacctctcttcccagcatctttctggagcttccacagcatttaacacggtccc

SEQ ID NO: 402481 - DNA, 572 bp, Homo sapiens
acacacttccaaaatgtataaggttattcgttgcagctcagaaatgaaaaatattagcaataaacatgatctctctcaataagagataaatcaacaatggcacaccccacaaagaagtaagacctctgctccttctccacacagcytgtaaatatcagctgtcctccacactcagtcctagaccttcttccattcctactcttggtggtctcatccattgccagggctttaaatatcttcacagaaattatctcattccagaaaccttataataatcttttttgtcttcctatccctcgttctcttcactaaatgctattaaactacctcaaaattacattttaatagtaaaacagctttattcatgtataactgaaataaactgtacataattgtagtacattatttgataagctttgacacaagtatacattcaaaactaccaccataatcaagataataaacatctccatcatccccgaaagtttcctaatgctcctttgtaatccctctggcccacctctccctactccccaaactagccactgatatgctttccatcatgacagctt

SEQ ID NO: 402482 - DNA, 571 bp, Homo sapiens
atatacaagatgagtaagttccagggatctactgtgtaacttagtgcctacagttaacaacacaatattgtgcaaatttgttaagagggtagatctcatgttaaatcttaacacacacaccccaaacaaacarataaaagccaaaaactatatatatatataaaaaggaaacttttggaggtgatgggtatatttattaccttgattttggtaatggtaacttacgtgtatacatatgtccaaacatgaagactttaattatattccttgttttttgtatgccaattatacctcagtaaaactgggaaaaataagaaagcctggccgggtgcagtggctcatgcctgtaatcctagtactttgggaggccgaggtgggcggatcacttgaggtcaggagtttgagaccagcctgaccagcatggtgaaaccccgtctctactaaaaatataaaaaaattagccaggcatggtggcacgtgcctgtaatcccagctactggggaggctgaggcagaagaattgcttgaagccaggaggtggacgctgcagtgagaagagatcatggcattgc

SEQ ID NO: 402483 - DNA, 571 bp, Homo sapiens
atatacaagatgagtaagttccagggatctactgtgtaacttagtgcctacagttaacaacacaatattgtgcaaatttgttaagagggtagatctcatgttaaatcttaacacacacaccccaaacaaacaaataaaagccaaaaactatatatatatataaaaaggaaacttttggaggtgatgggtatatttattaccttgattttggtaatggtaacttacgtgtatacatatgtccaaacatgaagactttaattatrttccttgttttttgtatgccaattatacctcagtaaaactgggaaaaataagaaagcctggccgggtgcagtggctcatgcctgtaatcctagtactttgggaggccgaggtgggcggatcacttgaggtcaggagtttgagaccagcctgaccagcatggtgaaaccccgtctctactaaaaatataaaaaaattagccaggcatggtggcacgtgcctgtaatcccagctactggggaggctgaggcagaagaattgcttgaagccaggaggtggacgctgcagtgagaagagatcatggcattgc

SEQ ID NO: 402484 - DNA, 620 bp, Homo sapiens
agatcagttttctttatgtcattgaaattctgtgaagatgaaaggagatggcattggtgaaactgctatatgaatggagggcattactgttaaattcagacagggtttaagggcctataatgtcagtgctcatgccttagagggaatcgttttaactgaagacctaatcagagatttaccaagaaaccaaacagcccaagtagttttcaagtgatataagaaatgtttgaaaacctattctagaaaagtgtttctcaatattggctgcatgttggatttacatagagaactttttaaaattcagatgaaatagcacaaccccaacwcaggggattgggcaatatctagaaaatttgcacaagacttttgacctagcaatcccacttccagaactcaatatcagagatacgatggtacatttcccaagggaagtgagcacaaggctatttattgctgtgctatttccaacagtaaatgcccagaaacaacccaagtatccagagaggaaagaattaatttgcccaagacaaaccctgtgcaggctagtctcccagaaaaggaaagggcctcttgtgaagctccctggaaaccactgtgaccctgtgcttaagacaatcaat

SEQ ID NO: 402485 - DNA, 650 bp, Homo sapiens
tacagtatgactgtctctatagaaagataacttttacataaaacaatgtatgttaactcataagctgatggtaatggacagaattcattttaagtacagtggtactcagtagttttttttttaaacaattttgggatataatttacatgtcataaaattcattttatgtgtacaattcaatgatttttgtacatttgccatattatacaaccatcaccacaataaagtttttagaatacttccatccccacatgaagattcctygtgcccatttgccattaatccctatttccatctctagctctaggctactaatctaagtgtatctttataggtatgacatttttgaacctgccatataaattgaattatgaaacaagtggctttttgtgactggcatgtgccatttagcatgatattttcaagcttcatttatgttgtagcatgtatcattacttcatcttgtattgccaaatagtatctcctcatatggatatacctcggtttgcttatccattcactcgttgatgtatacttgggtggttgcaattcttggccattttaaagaaggctgctggtactggtattcaaacaaatttggtcatgatggtgactacaggtagaagctgaaagctattattagcaatact

SEQ ID NO: 402486 - DNA, 650 bp, Homo sapiens
tacagtatgactgtctctatagaaagataacttttacataaaacaatgtatgttaactcataagctgatggtaatggacagaattcattttaagtacagtggtactcagtagttttttttttaaacaattttgggatataatttacatgtcataaaattcattttatgtgtacaattcaatgatttttgtacatttgccatattatacaaccatcaccacaataaagtttttagaatacttccatccccacatgaagattcctcgtgcccatttgccattaatccctatttccatctctagctctaggctactaatctaagtgtatctttataggtatgacatttttgaacctgccatataaattgaattatgaaacaagtggcyttttgtgactggcatgtgccatttagcatgatattttcaagcttcatttatgttgtagcatgtatcattacttcatcttgtattgccaaatagtatctcctcatatggatatacctcggtttgcttatccattcactcgttgatgtatacttgggtggttgcaattcttggccattttaaagaaggctgctggtactggtattcaaacaaatttggtcatgatggtgactacaggtagaagctgaaagctattattagcaatact

SEQ ID NO: 402487 - DNA, 545 bp, Homo sapiens
caatactttattttcaggactaagctactttcctttcgcagaaaacctattaatgtgcttccatagagactaaggtttatgttagaagactcgcataagaataataaggactagattataaataatccttcccatatgccaaccacttgtcaagtgctttatatgcattgtcttaattagtggctaaatgccttaaaaggcattggccgggcacagtggctcacgccagtaatcccaggactttgggaggctaaggcgggtggatcacgaggtcaggagatcgagaccatcctggttaacatggtgaaaccccatctctactaaaaaaatacaaaaaaaaaaaaaattakctggaagtgctggcaagtgcctgtagtcctagctactcaggaggctgaggtaggagaatggcatgaacccgggaggtggagcttgcagtgagctgagatcacgccactgcactccagcctgggcgacaaagcaagactcttgtctcaaaaaaaaaaaaaaaaaagcaaatattatcccataattctgattaaccc

SEQ ID NO: 402488 - DNA, 545 bp, Homo sapiens
caatactttattttcaggactaagctactttcctttcgcagaaaacctattaatgtgcttccatagagactaaggtttatgttagaagactcgcataagaataataaggactagattataaataatccttcccatatgccaaccacttgtcaagtgctttatatgcattgtcttaattagtggctaaatgccttaaaaggcattggccgggcacagtggctcacgccagtaatcccaggactttgggaggctaaggcgggtggatcacgaggtcaggagatcgagaccatcctggttaacatggtgaaaccccatctctactaaaaaaatacaaaaaaaaaaaaaattatctggaagtgctggcaagtgcctgtagtcctagctactcaggaggctgaggtaggagaatggcatgaacccrggaggtggagcttgcagtgagctgagatcacgccactgcactccagcctgggcgacaaagcaagactcttgtctcaaaaaaaaaaaaaaaaaagcaaatattatcccataattctgattaaccc

SEQ ID NO: 402489 - DNA, 669 bp, Homo sapiens
tttagtttttatagaaaccacttacataatttcttcccttgtagaaactgtattgctctttcctgtttatttcttctagttttgtgtatagttgttgaatactgttaaggagttaaatagatatgtagatttttttaagtctatgagagaaactcaaagacagcaatttcagaccacgatggaaataaactaaactctcttgagtcacagcataactgctttgttttctccactatggtaatctgctgagattatctactgagataaaagggaaaatttatacttcttaaatattgtaaacccttgaagatagatcactgatcattttacttcctatactagctagaaaaaagtaaagaggcctggaycaaacaaatataaagaactaaaaggaacaaaattgtccttaccctttgtttatgcctctactagcaccatcttttttcttgctaaaattataaaatcttaatgtggaaaatgtcttcaaccttctccaagatgtttgaatctcctctaccaaataatgggtgtggagcttttgcatgaacacccccacggatgaggaactaaccatctcatcagcctattctattttcaaatcactctttaacaagatattctctattctaggccaaaagcttgaagtttctatccaacagtcctttactt

SEQ ID NO: 402490 - DNA, 606 bp, Homo sapiens
gcattatacttaatctttgaatacatccatgactatttctttaggccagttttattttttataggatagaatttcagagctggaatgayccttaaagattattatgtaaacgtattggccagatggaagaaagggaccagagagtttagtgtcttgccagaggacaaagagaaagcaagagaagcaagtcaaactctccatctattaaaatgtgaccttcccaaagcccaaccacaatttcacacccttccctgaccaacttcacccacactgacctctccttcccctgaaatccaagagcctgcagtgtctgggtcactccttcggcccttggccacaatctttttattcttctactaaatatttagttgctcatccaaccacaagcttcctaaaggtggttctggattttatattcccctgtattctgtagcatagtactatatacatatagataagcatttcacaaatatctgctaaaggactaaagatacctatgaatttccttccaattgcttgccgaaatgtagtatcactgtcaaaagctggggaaagatgtttctttgaagggtaaaagaagtttagctgatgagttagagctctctg

SEQ ID NO: 402491 - DNA, 606 bp, Homo sapiens
gcattatacttaatctttgaatacatccatgactatttctttaggccagttttattttttataggatagaatttcagagctggaatgacccttaaagattattatgtaaacgtattggccagatggaagaaagggaccagagagtttagtgtcttgccagaggacaaagagaaagcaagagaagcaagtcaaactctccatctattaaaatgtgaccttcccaaagcccaaccacaatttcacacccttccctgaccaacttcacccacactgacctctccttcccctgaaatccwagagcctgcagtgtctgggtcactccttcggcccttggccacaatctttttattcttctactaaatatttagttgctcatccaaccacaagcttcctaaaggtggttctggattttatattcccctgtattctgtagcatagtactatatacatatagataagcatttcacaaatatctgctaaaggactaaagatacctatgaatttccttccaattgcttgccgaaatgtagtatcactgtcaaaagctggggaaagatgtttctttgaagggtaaaagaagtttagctgatgagttagagctctctg

SEQ ID NO: 402492 - DNA, 589 bp, Homo sapiens
cattctggccttaggataaaggagaaagtggcaatgtacaaaaacaagcaatctgaattaacaagctaagtaaatagctgaaacgttaccaaaaaatcatgctcttgaaaggaggcagaaacctgacgctgagctccagagcagctggggtgactcagacagtgtcagagacatgggttccaacctcccaccccaagggctgggctgctggcccagatgtgggaatcgcatcagctagaatgcttcaaagctaaaatcaaagaagcaacatctttatgtctttcattagtcaactacctgactagttaaagggtttactgacagacaaccaaattcaccaccatttggtagtaagtgtattttaatgtactgcaattcttggaagactgactaaccatgaaatgcctacctgtgaacacccaatcactcaagactactgctaatttctatgcgacttttgcccyttgtacttagctgtattgttgcacatctcatactggaatgtagtaaaattttatcacaggtctatcacccctagtggacagtggactccttaagggcaagatttacatctagtacaaggcatggt

SEQ ID NO: 402493 - DNA, 551 bp, Homo sapiens
cttttattattacttttagctattctattgattacctttgggtctttaaataaaatacctgtatgtcttcttccatcarctttttttaaatttaatttttaatcgaagaataattgtgcatagcttaaaaacaactcaacctgtactataaaacatatttttaaaaaagtagtgttttgctccatctctcttcattccaaagttccatttaatttttttgcaaccttgtgtgcagaagcttgagttaatcacactcattaaatcacgtgtacactatcatcgttgatttgtgcaacctcttcctgttttatttcattcttgaattctatctccatttctctcttctgatagagagctgctctcatgtttgatatgtacattgaattactttgtctgcactttagaatatgtagtctttgtgtgtgcgtatattagtaatttatataatcatattgtgctataaagattctttttcccatccagcactgtgtttttaagacctatgcacgctgctgtgtgaacatctcattcattcttctaactgctacatg

SEQ ID NO: 402494 - DNA, 532 bp, Homo sapiens
agaggaaagtataaagtatttgagaacatacagattgcatctctgtaccatgaaggttaggaaattttttcccgttggattattttttgtgatcatcccaataatactagtatgataagtgctgttaggattattattttatcttattttgtttttttgaggcagggtctccctctgttgcccaggctggagtgcaggtggcatgataatggctcactgcagcctctacctcctgggctcaagtgatcctcctgcctcagcctcccaagtagctagggctacaggtgtgagccaccttgcctggccaggatcattgttttatagatgagaaaactgaggctcaaagtagttatttacttcaaggtcagttttctacttttgataaaggaarattagctagctgcatacctattctctcataaaaaaacaactagaaaatttgacaaaatatttttaaaatatatttcaagttattggagagctatcaaagcaggaagaacttgaagggccaagatctggaagctgagagatt

SEQ ID NO: 402495 - DNA, 606 bp, Homo sapiens
tgagtttgagaccaacctgggcaacacagcaagatcctgtctctacaaacaatttaaaaaaaactagttgaacaggtagtgcacacctgtagtcctagctattccagaggctgaggtggaaagattgcttaagcctaggaattcaaggttgcagggagctatgaccatgctactgcactccagcctgagtgacagaacaagaacctgtctctaatttaaaaaaaaaaaaaaagacaaaactccctcccatcatggagcttaaatctaatgaggggaaagacagacaacaacaacaacaaaacattacctatggcaaatgacgttaattgctacagagaaataaaaagtagggaaaggagacaggcagtgctggggagggagatggaggcccaggaccagtgtccagctcccatcttcctttgtgagcttctcctctacagcacatcacctttcctaatggaagaaccttaaacttacaagtcccagccaactcaagcagaggcaatgaaacttgctcaagcaacctctcaagcctaygatgaaaaggcaggcaataaacataaatgcactttgtaaactcttaaatgctagtgttaataacattat

SEQ ID NO: 402496 - DNA, 537 bp, Homo sapiens
ggaggaagagagtggtctgtcaggcctgagtgggaaggggaatcttaactgggtcaagaagacacagagaggtgatgtaatatgatcgaaggctggctgggcgcggtggctcacgcctgtaatcccagcactttgggaggccgaggtgggtggatcacgaggtcaggagatagaaaccaccctggctaacacagtgaaaccccatctctactaaaaaaaaaatacaaagtattagcctggcttggtggtagtgggcgcctgtagtcccagctacttgggaggctgaggcaggagaatggcgtgaacccaggaggcagagcttgcagtgagccgagatcrtgtcactgccctccagcctgggcaacagagcaagactttgtttcaaaaaaaaaaaaaaaaaaaaaaaaaaaagattgaaggctatgggcacaaatgaaaagattcttaatacatttgactgcagtaaaatttatgttaaaagtctttataaagtcttctttatattcaaagtctttataaacaaagaaaaaaatggaa

SEQ ID NO: 402497 - DNA, 404 bp, Homo sapiens
atcctcctggttcatccatgttattgcaaatggcaggatctcctttttatggctgaataatattcgtgtgtgtgtgtgtgtgtgtgtgtgtgtgacactttctttattcattcatctgacagtggacacttaggtcgatcccaygtcttggctattacgaataatactgcagtgaacatgggggtgcagatatttcttcaagacactaatttcattactgtgggaaactccccactattttccatactggttgtaacaatttacatacctaccaacagtgtacaaagattcccttttatctatatcctcaccaaaacttaccatttgtctttttgataatagctatcctaacaggtgtaaggtgatatctcactgtggttttgatttgcagctccctgatgact

SEQ ID NO: 402498 - DNA, 618 bp, Homo sapiens
agaatggctgggtagcagccattatatctttggtgccctctacccaataagctccatgagaacaggagccctttcttatcattattatatttcatgcaagaccaagcttgacactaacttgaaggtcttccagatttcttcttcctcagcagaaatctttaaattcactcttattcttttttctctcccttggacatcctttytgggtgtgtgggcctgccctctttctctggtttctggtactgtaaaaaatagaacaggttgggtgcagtggctcatgcctgtaatccaaatattttgggaggccgaggtgggaggatcgctcgagcctgggagtttgagaccagcttgggcaacacagtgagactccatctctacagaaaaaaaaaaaaatcaaaaaattagccaggcatggtggtgcatgcctgtggtcctagctattgtgcaggctgaaatggggggctcctttgagcctaagaggtaaaggttagagtgagttgtgatcacgctattgcactctagcctgggtgacagagtgagatcctgtctcaaaataaataaataaaaatagaacatagtcttcagaccagttctgtcacttacttgctatgagacctt

SEQ ID NO: 402499 - DNA, 628 bp, Homo sapiens
ggagtgaatgctaatgggtatggatttctttttgaggtgatgaaaatattctaaaatttattgcggtgatggttatacaactccttgtgaacatactaaaaatcagtgaaatgtatactttaaaagggtgagtgttatggtatgttaattatataattatatcttttattctttttaaaaaaaagttaaacagagttaccatatgacctagcaattccattcctaggtatatacccaagataaatgaaaacctttgtccacgtgaraatttacacacagaagttcataacagagaaaattggatatgactgatgaatgaacaaccaaaatgtggcatatccatacaatggaatattgttcagcaatagaaagaaatgaggccgggtatggtggctcacacctgtaatcccagcactttgggaggccaaggtgggtggatcacttgaggtcaggagttcaagaccagcctggccaacatggtgaatgaaaccccatctctactaaaaaatacaaaaattagccaggcatggtggcacatgcttgtaaccccagctatgggaggctgaggcagtagaactgcctgaacctggaaggtggaggttgcagtgagccaagatcatgccactgc

SEQ ID NO: 402500 - DNA, 475 bp, Homo sapiens
ttgaaacctttctccagagatgatgtgttttcttttgcctttccagtcacctgagacactgtcatattgagtaattttttaattaaattcatagcctgaggttttcttgatcacccaagttctgtgaatttgggatgcaaatatatgtgaggtccrgcttctggtaatatcttctcagagattctgcaaatcccctccctcagtgtcaaggcaacttttcttgtagccaggtaggggtgggagaagatgggacaagtctacagctggagtgcctttattgtagctcttagggtaagccctgggcttcatagcaatgcccatggcccagattacacctatatgttggcctggttattctttatatatgtcaattcctccatacttttaatcatttttgcatttattcattatttgtagtagtttcaattgactgatcctaataaccagttttccatcttaccagaaacaggacttc

SEQ ID NO: 402501 - DNA, 475 bp, Homo sapiens
ttgaaacctttctccagagatgatgtgttttcttttgcctttccagtcacctgagacactgtcatattgagtaattttttaattaaattcatagcctgaggttttcttgatcacccaagttctgtgaatttgggatgcaaatatatgtgaggtccggcttctggtaatatcttctcagagattctgcaaatcccctccctcagtgtcaaggcaacttttcttgtagccaggtaggggtgggagaagatgggacaagtctacagctggagtgyctttattgtagctcttagggtaagccctgggcttcatagcaatgcccatggcccagattacacctatatgttggcctggttattctttatatatgtcaattcctccatacttttaatcatttttgcatttattcattatttgtagtagtttcaattgactgatcctaataaccagttttccatcttaccagaaacaggacttc

SEQ ID NO: 402502 - DNA, 428 bp, Homo sapiens
gctgctagctgttcccaaatatccattctcctttctccctttaatagtggacttcctaaattttagctgatcactcggtaaccagcactgcgtttcctagcttcccttgtagctacgggtggctgagtgactaactgctggcctgrggaatgcaaattgtaatggatgtgtgacttcgagaattgagcccttcaaggagacaggcgtgccctctgctagctctgtgttcccattctgttgtctaaaacagtgggacagtgggacctggagcagccacgtcagaccaggaggtagaaactgtgtgttaacaatggcagaactggctgggcccggtggctcatgcctgtaaccccagcgctttgggaggctgaggcgagaggatctctcgagctcaggcattcaagaccagcctggggaactcggtgaga

SEQ ID NO: 402503 - DNA, 519 bp, Homo sapiens
ctcaggtagaattgcctaaaccttgaagcaagaggtagttgatcaaacttgactcaaagaacatagtggtatcatgagttcaggggtcagacttcctggaatgttcaggaatgtgatgagtgaggcagaactttagactttgattcaggggtgataaaattcatttttaaggattagtggtaccttacagtggaaatgagaggcttttgcccaaaagcttgtagaagaagttggggaagacgatgggcacagtccctacaccctggcctgggccttgtctacaaggacaagattgctctgctcaggacagaaaatataaaatagtggaagttcttaaaaacatgataggaaatattgggtatcctttatagatttaaggtcactttgttaattttctgaatatgagcagtattctatcaataaycttgattgttcttggaaataccatatgtagtaaatagaattttaaagtataaatttattttttgaatgcactgttaaacagaaaacaatgcattg

SEQ ID NO: 402504 - DNA, 596 bp, Homo sapiens
tactaggaaagtaaaatgtcaccaggtctgagaacagaatgggtgaaagagtgggggctggagcaaggagcataggaaaactctcccccaktgtgtgtttccctgacttacaggaaagaagacaaaatgcagcctaatttgcttctggtcaccaagtatcacaaaggcttctcagctgtcctgataggcacagtcccagcgttgctccaccagggacactgtgggcaggtcactacttctctggcccatgtccctcagtggccactcttacacagcctgttggttccgcaggcttcacaagtactgcaagaccaaggtcaaaagcgaattcttaaccctcaaagggaagtactggccagaagtggactattctctttctctcctcaatcatcccttcaatcatttgacaatattttctggggacctagagtggccagacactaagcagagcacagggacgtgaagatgaacccagaaagatcccttccttggatgtttgtgggtagacgggagggaagcggagcacctctggtcatcacatctcctctgagtcccagcccatcctgcctccccactgccccgcataaacacaggtc

SEQ ID NO: 402505 - DNA, 596 bp, Homo sapiens
tactaggaaagtaaaatgtcaccaggtctgagaacagaatgggtgaaagagtgggggctggagcaaggagcataggaaaactctcccccagtgtgtgtttccctgacttacaggaaagaagacaaaatgcagcctaatttgcttctggtcaccaagtatcacaaaggcttctcagctgtcctgataggcacagtcccagcgttgctccaccagggacactgtgggcaggtcactacttctctggcccatgtccctcagtggycactcttacacagcctgttggttccgcaggcttcacaagtactgcaagaccaaggtcaaaagcgaattcttaaccctcaaagggaagtactggccagaagtggactattctctttctctcctcaatcatcccttcaatcatttgacaatattttctggggacctagagtggccagacactaagcagagcacagggacgtgaagatgaacccagaaagatcccttccttggatgtttgtgggtagacgggagggaagcggagcacctctggtcatcacatctcctctgagtcccagcccatcctgcctccccactgccccgcataaacacaggtc

SEQ ID NO: 402506 - DNA, 596 bp, Homo sapiens
tactaggaaagtaaaatgtcaccaggtctgagaacagaatgggtgaaagagtgggggctggagcaaggagcataggaaaactctcccccagtgtgtgtttccctgacttacaggaaagaagacaaaatgcagcctaatttgcttctggtcaccaagtatcacaaaggcttctcagctgtcctgataggcacagtcccagcgttgctccaccagggacactgtgggcaggtcactacttctctggcccatgtccctcagtggccactcttacacagcctgttggttccgcaggcttcacaagtactgcaagaccaaggtcaaaagcgaattcttaaccctcaaagggaagtactggccagaagtggactattctctttctctcctcaatcatcccttcaatcatttgacaatattttctggggacctagagtggccagacactawgcagagcacagggacgtgaagatgaacccagaaagatcccttccttggatgtttgtgggtagacgggagggaagcggagcacctctggtcatcacatctcctctgagtcccagcccatcctgcctccccactgccccgcataaacacaggtc

SEQ ID NO: 402507 - DNA, 570 bp, Homo sapiens
tcttaaacccagttaagatggtgaattttatgttgtgtgtattttaccacacttttaaaaattggggaaaaaaaccaatgggtattggactgtgtggtattgggacaaaaacagataggccaatgatatagaatggaaatccagaaacagacccacatatgtgggcagactcacacttgatgtacgggacgagttggcattacagcaccatggggaaagaaggcattttcgaaatatagtgctggggcaatagcatatccaattgggaaaaaaatgttacatggtcccagcctcacgccttatgaaacaattaattccaggtggtgtataaatgtaaatctgaaaggcaaaacaataaaagcttttagaatataatataggagaatacattcataaccttaggataggaaaatatttcttaaacaggatacaaagaacgtatatagaaaagaaataaattgataaattgaattacatctaaatgaagaccttytgttcttcaaagacacaataaagaaattaacaaggcaagacacatagtgagagaagatatttgccacacatgtaatt

SEQ ID NO: 402508 - DNA, 599 bp, Homo sapiens
ccccttggccctgacctgcctgggtctcagaggagaggaggccaagtgtattcatctgctagggctgatgtaacaaatgccacaatcaagggggcttggacaacagagcttgattgtctcactgttctggaggcagaagtccacactcaaggtgtcagcagggttggctcsgtctgaggctggtgagggaaggatctgttccagactcttcttggctctgggatggttctcgtctccctgtgtctttgcacttcctcttccctctatgcgtgcccatctctgtgacaagttggtcctttttatgaggacaccagtcacactggatcggagcccacctaatgatctccctttaacttgtttacctctgtaaagaccctatttccaaatcaggtcactttctgaagtgctaggtgttaggattccaacatatattttttggggtggatacagttcaacccttaacaccaaggaaaccctgatgaatggaggaggagttcattggtgcttgacaaggacctttttcaggatccagtcagttcctcagtggacaggctgctaggctaaggctttggccaggaaggtcctagaacttggggagt

SEQ ID NO: 402509 - DNA, 535 bp, Homo sapiens
aggtggtaggattagaatagtgagcaaaaaagtcaaagtaactgcctttgtggagcttgyttcctgattatcaggttacgtaataattatccacacttggatttgcacattcagatttagattactgtaaatacaaagccaccatgtgtgtgaattagagtaatagaaagaaaatcagaaaatctggttttcaatattatctcgatgtgaccttggccttgtcatttaatctctgaaaaaccttttttttttaacctattaaatgtgttggttggtattatcaaaaataaagttctgtaattttgtgtttcctgatagaagaaaaatatgtttgggctcatgtttatagtgtttatatgtggaaagttttcaacaacttaaaaaaaaaaacccacaaaactctaattgcaatcaacagcaaactgagacaggtattgcagtacttaagtaaagtgatgggtagctcttggcaaagttcatgagaaaaatcaccacactgattacaggtattgtaaagggttgtcagaaacagcaa

SEQ ID NO: 402510 - DNA, 496 bp, Homo sapiens
ataaaacagagtctggacttaaatgattcctcctgccaaataataaatgatccttttattggttggatctattaataaatatctatttctctatggatgaagttatgcatagtgtaactttgaaaaaggacccaatgtctaactataaattcatctagactatctatgacactttgccatggatatatttttgttctacacatctgtattctctattctctcctctgcccaaatgctcctaatacaagaaaagaataatcatttatatcagaagttgaggatcactgtgccctgcagaatgtatataatttatttgacattttatcttttctattataatgaatacaaytttaagttttattattattacacatttattttaatgaaaaatttgtgggttcctaaaatactgagagaaatatgtgagctcaggagatttctcatgttcatcaggaggttttgcaaatttgtgcctcagtttatgaggtttcatgat

SEQ ID NO: 402511 - DNA, 590 bp, Homo sapiens
tggccaatactttcaaaccagacactattcctaaccaaaaatatggcaagtatcccaagaacagaattattaatgtaactgtcttgtcattcactgactgaaatatctaatgaggaaaaggcttctattaaatatactataaataagcatttaacatttggagctttaaatgacacaacagggaaacatttgtgtagactgaaatctatttttattgttgattgaatcagcagtttgtaaggctgccaggcaatggatcagtacacttayagaaaaattaaatttaattgtatttattcactgatgaatagaaaccaacccaagacaagtaaaaattgggaaatattttttttattgctcacatcatagcctgagccaaaactgtgttaaattatttaatttgtgtttctcttatattatagcaaatgggagaaaacaaaaaacaaccttcctaaggagtgctgcgtttgggatggcaaataagcattaagtgattaatgcccaatagtgaccaataaataatttagttatctctgcagactttctgttttcttgtaatattttgtttctttagatacataatacacttg

SEQ ID NO: 402512 - DNA, 401 bp, Homo sapiens
aggtttcatgatacttcttttcctttccactccattttcttcatgctggctttccacacagcaccttaatgaataaaatgacaattccagagaatgttaccatcactaggatgacttagtatggaaccctaaccctaatcatctcaaatcgattgacccccagaaacaaaaatcacagggttagtttcttctgttctttcctgctcccagtgatgccttacagacatctctgagaactgggagtctacatgatgtgagayattttcttattaccatcaaaactcattcaaacaatattcgctttaataagttggtgtttacttgccaacaaatatcaataactcacaaccacaaaaaataattaaaaaggaaaagaaaataaaagaaatataggtggttta

SEQ ID NO: 402513 - DNA, 630 bp, Homo sapiens
gaaagatgccaaaacatatttgtctctctggatacctttataatttttttttaatttcaccaaatcaatatttacatattttatattttaatttatacttttcatatgctaaaattatttttataatgcacttaatggcttacaaagattaacacaaatagcaaataaaaaataaatctaaaaatgtaatgaaacgtaccaagaacacaagaaaaagagaaaataagaacaatgagatggagacagaaagagaggcacacaatttacagtcctagagactcacttgtagaagccactgggaattttgaaaatgtcagattgtatctcaataaataactataaaatatgagctcagaatataccatatcccatatcctaagacactgcagtccctcattttggtaaaactattgtttgtcttttctttgccatgtcctgtctttaaaaataaatatcctattgtaatttaataactctctttatctcagctatgctacgtccctcaattagtcccatacccaaatggctcacaaacacacaacactcttttyttaggtccagatccacatattcacctacctatttgacatcttttgttatataacctcaagatatctccactgttattga

SEQ ID NO: 402514 - DNA, 524 bp, Homo sapiens
tttgccataaaaaataaaggggacatctccttttagtgaattatgacaaattttaactgacttatccctcttrgaacttaggagtgtcctactttctcctccaatgacactcccactgagctgacatgtgacacatcctgggaatgcattagaactaaagagaaagttaagactgtgacacatccgttggccctttttttttttttgctaaaggaggaacatccctcctcccttgtctcctcagtccatagctctctgttctcaggatctttttaattctactggccgggaagacatttataggcaaaagcccctgtagagcaacatatccccctctctatcatatatacttctcaaatacctactacatgccagacactgtggctctggggacacactgatcagcaaacaaagcccctgcccttatatgattatagtggggcatgacataaagcaaatgtgttcctaaaaaattccaagttgaacaaatgacattcataccatactttgcgtatggtgcaaac

SEQ ID NO: 402515 - DNA, 603 bp, Homo sapiens
gaaggagaggaattccagctaaacagtgcgttggtatgaaccgtaggctagtgagccatgtgcatgctccagggacagggaaactgaagagagtgcactataggacaccaaatgcagatataatcaaggcttctttctacatgccgcaacatagtcaatttgaaaataagcatatccagaatggtaaagcacttgcgcagtaattcagccatgctccttctaagtatgaaaatctgaatatcaaagcacggtaaggagggaagcaggtgaaaaacaataataaaaacagtgagycagcattttttgaagctatcagaagctcaacagagctgaatctattatgggataagaatggaaagatacaggtggaagaattgacatacagcagcaatatcttaaattaactccttgctattgaacacatgagaaactatagtgaaaagtctcagtgactgattggtttttatgcctagaagagaaagcaaattttgaaagtcctggccctttgcatttaggtccataattagacaattagagctcatgtactacaacaaagctctcaaacaatcatgaaacacagccacactcattttaaaagaagat

SEQ ID NO: 402516 - DNA, 603 bp, Homo sapiens
gaaggagaggaattccagctaaacagtgcgttggtatgaaccgtaggctagtgagccatgtgcatgctccagggacagggaaactgaagagagtgcactataggacaccaaatgcagatataatcaaggcttctttctacatgccgcaacatagtcaatttgaaaataagcatatccagaatggtaaagcacttgcgcagtaattcagccatgctccttctaagtatgaaaatctgaatatcaaagcacggtaaggagggaagcaggtgaaaaacaataataaaaacagtgagtcagcattttttgaagctatcagaagctcaacagagctgaatctattatgggataagaatggaaagatacaggtggaagaattgacatacagcagcaatatcttaaattaactccttgctaytgaacacatgagaaactatagtgaaaagtctcagtgactgattggtttttatgcctagaagagaaagcaaattttgaaagtcctggccctttgcatttaggtccataattagacaattagagctcatgtactacaacaaagctctcaaacaatcatgaaacacagccacactcattttaaaagaagat

SEQ ID NO: 402517 - DNA, 605 bp, Homo sapiens
tgtatgctgggattaatcccacatgaaataatcacaaaatgataccagttagtatgatgcactgctatcctaccwcagccgtgcaaattttaaggacagtcttttttggataaggtcccaccagtagataaactccacaaagtctggccaccagggagggtcaattaccaggactacattgtttctctagttcagatgtgcagaatataagggcagtgtgaagttcagcattacaaaaacagaaagcaatttagtaattagtgaaagtattacatggacaaaacaatagctgggagatttgtttaaaggaataaactaataactttgttcataccaacccatttcaaatatgggaaaataatttttaaacatttaaataaaactagaattaacgaaataccttggatacactggctagacaaaagattcctggtcctgactaacttgagaatttcggcaaataagtcagttaattacaaggagccccgtatgctgaatgcagttgcccaggaaatttgcttaggtcttgcttagtcaaatttgagagacagctcaactaccatacccatggggaaaattgtggacattcttggagtatatgcctt

SEQ ID NO: 402518 - DNA, 605 bp, Homo sapiens
tgtatgctgggattaatcccacatgaaataatcacaaaatgataccagttagtatgatgcactgctatcctaccacagccgtgcaaattttaaggacagtcttttttggataagstcccaccagtagataaactccacaaagtctggccaccagggagggtcaattaccaggactacattgtttctctagttcagatgtgcagaatataagggcagtgtgaagttcagcattacaaaaacagaaagcaatttagtaattagtgaaagtattacatggacaaaacaatagctgggagatttgtttaaaggaataaactaataactttgttcataccaacccatttcaaatatgggaaaataatttttaaacatttaaataaaactagaattaacgaaataccttggatacactggctagacaaaagattcctggtcctgactaacttgagaatttcggcaaataagtcagttaattacaaggagccccgtatgctgaatgcagttgcccaggaaatttgcttaggtcttgcttagtcaaatttgagagacagctcaactaccatacccatggggaaaattgtggacattcttggagtatatgcctt

SEQ ID NO: 402519 - DNA, 658 bp, Homo sapiens
tctaattcatgaaataagcatcataatactactcacctaataggtcccttgagaggattgagtcctcaataaatggtaactgctactattaataaataataacatcggcagattctaacactcagtcatatagacaataacttcaggaaatattctccacaacattacttacttccacattttcacattaaaggtgaggaaaattgatttctgaagttcagtagatagacccaaaatcatcctccaattagctggtggcatagactgaacaagtgaagagacaatgttcaaggtcactagaacttgctgtagcacatgtgaaaattgtagcagaaataaaagtataagaaaagacagtggtttccaaaataacactgacattttcactatagagagatgacaacaaaattagaacatttaaatatttttaaaggatttgttttctcttctatgacaaaaatttgatttkacttttgcattagtgaagcgatatgctttttgaacttgaggttaggtgggtccctacctcgtgtctttgttgctatcagtttgtacaactaaaatctaaatgcctcggtttccttctaggaattatgagctatgcacttaaaattcactgaaattttaaagtgggtatgctctactaacaaaattaata

SEQ ID NO: 402520 - DNA, 506 bp, Homo sapiens
aattttgaatgattcctgggatcctggtaggagaaatatcaatgaagacagaaactagaaagagggatatgttcaaaattgagaagtctaagttgtttcaagaatatcctgctacagtttccctgtctacccaaatgtgcatatgtttgtgcaagctgctgatgttcgtttgttacaaaggtgacatgaataacctaaatttataaaacatctttaaaactggcaaataatacagaatctctatggattacaaataaaacatttactatacatgtaatcatgttttagaaattaaaaataaaytaaaatatgcaaaacaaagattacatataatcccaccacccagggctattttgatttatgccttgccaagactatgtctctgtacctatatacatctacattttttttcttcttcttttaattatactttaagttctgggatacatgtgcagaacatgcaggtgtgttacctaggcatacttgtgccacagtggtttgctgca

SEQ ID NO: 402521 - DNA, 621 bp, Homo sapiens
cctactgtatcacttgattgttgagaagattaagtgaaatcggagtgaaatggattaatatatcattgtctgaaaattgttacactagaaggcaactccttagagcaagggaattttgttgacaaactagcactcttgctgggacatgatacagagttcaatgattaggggctgatttgcttgaggaatgtgaatgaatcatagatgctataattgcccttgttctgtccctaaatgaagaaaaaygaagcagctgtggtcatctacattctcactgtctaatagccacaagtggtctaaatccagactaaaatacaggggactctggttgcatttatatttatcccccagctgtttctgtctccctattttaccaattccaattcaaaatgctcttagccctgaagaatctgaactgcctcagttgtgcactgtcttctgggtttgcagatgccatagaaatgtctgttctgataataatgtactgagggcatcatgcttatttaacctctggtgaggtagttaggaaaatgcttctgatactgggtaagatcctgaataggaggcccatgctttgtgatgccagacctcttgcttttcactgcctttatatacatgata

SEQ ID NO: 402522 - DNA, 621 bp, Homo sapiens
cctactgtatcacttgattgttgagaagattaagtgaaatcggagtgaaatggattaatatatcattgtctgaaaattgttacactagaaggcaactccttagagcaagggaattttgttgacaaactagcactcttgctgggacatgatacagagttcaatgattaggggctgatttgcttgaggaatgtgaatgaatcatagatgctataattgcccttgttctgtccctaaatgaagaaaaatgaagcagctgtggtcatctacattctcactgtctaatagccacaagtggtctaaatccagactaaaatacaggggactctggttgcatttatatttatcccccagctgtttctgtctccctattttaccaattccaattcaaaatgctcttagccctgaagaatctgaactgcctcagttgtgcactgtcttctgggtttgcagatgccatagaaatgtctgttctgataataatgtactgagggcatcatgcttatttaacctctggtgaggtagttaggaaaatgcttctgatactgggtaagatcctgaataggaggcccatgctttgtgatgccagacctcttgcttttyactgcctttatatacatgata

SEQ ID NO: 402523 - DNA, 526 bp, Homo sapiens
ttaaaacaaaccaacaaacagaaatcagtctctcatagcctattttaaaactccctccctgtgttcttaactgttgacttttaaaccaaaaatgccagtcaagaagtacaaagtgatctttagcactgtctagcttaaaatgttgatagttaatatttgaatataaaaaagtataaaaataaataatagacaactcattttagctaacactttggaattaactttgagtagtagaaaactacacaatataaacctgtttttcagtggtttctgctatcaagtgaattgatggattatagtaacctttgttacctggcactcagaatactacttttaagcacaggttcttttaataagaaactaattgatatccataatgtgacccaaataaattgtaaggtccttgaaattaagttctggaaaaaataagcaaattcttargcttattttattttttctgtaattctttaaaaatgagtgatctacatgtcatacatgtatatggtaattctctcctgtatagaat

SEQ ID NO: 402524 - DNA, 658 bp, Homo sapiens
acaataagtgatgtcacagacaaagaatcaagatacacacttctctttaccactgaaaatgttcacctcacatttttatctcaacttaggtgggtgtrtttttgttttttgattttgtttttcctacttatgaaaatagtgccaaagatcttcagttggcactccaaagcacagacaattgcaaccaatgttctagagttacttctgaatattatcctagacaagtagcaggagcactgacatgttttcataagagaataaaagacatacaaagatttattatctggcttcataaatttaaagcaactgtagtgccttgaatgtctttgtataaacttttatatgactctaaaagaagataaaaatctaatagagactttcagaaggtcaaatatgaaagatgatcatgtctaatgaataaattgatttctgctggagtaaataggtcacaattccaaaaagaatctgtattattttttgacagtgcacctaaagtaaaaatgtggctccatattatgtaagattttggtacaatatttaaaattctaaaatcattaagcaattccaacctatacagaagtatgacaccttgggattatctagactatatggctaactcttttaattgtatacagatgttaagtcttacctctgcatg

SEQ ID NO: 402525 - DNA, 658 bp, Homo sapiens
acaataagtgatgtcacagacaaagaatcaagatacacacttctctttaccactgaaaatgttcacctcacatttttatctcaacttaggtgggtgtgtttttgttttttgattttgtttttcctacttatgaaaatagtgccaaagatcttcagttggcactccaaagcacagacaattgcaaccaatgttctagagttacttctgaatattatcctagacaagtagcaggagcactgacatgttttcataagagaataaaagacatacaaagatttattatctggcttcataaatttaaagcaactgtagtgccttgaatgtctttgtataaacttttatatgactctaaaagaagataaaaatctaatagagactttcagaaggtcaaatatgaaagatgatcatgtctaatgaataaattgatttctgctggagtaaataggtcacaattccaaaaagaatctgtattattttttgacagtgcacctaaagtaaaaatgtggctccatattatgtaagattttggtacaatatttaaaattctaaaatcattaagcaattccaacctatacagaagtatgacaccttgkgattatctagactatatggctaactcttttaattgtatacagatgttaagtcttacctctgcatg

SEQ ID NO: 402526 - DNA, 658 bp, Homo sapiens
acaataagtgatgtcacagacaaagaatcaagatacacacttctctttaccactgaaaatgttcacctcacatttttatctcaacttaggtgggtgtgtttttgttttttgattttgtttttcctacttatgaaaatagtgccaaagatcttcagttggcactccaaagcacagacaattgcaaccaatgttctagagttacttctgaatattatcctagacaagtagcaggagcactgacatgttttcataagagaataaaagacatacaaagatttattatctggcttcataaatttaaagcaactgtagtgccttgaatgtctttgtataaacttttatatgactctaaaagaagataaaaatctaatagagactttcagaaggtcaaatatgaaagatgatcatgtctaatgaataaattgatttctgctggagtaaataggtcacaattccaaaaagaatctgtattattttttgacagtgcacctaaagtaaaaatgtggctccatattatgtaagattttggtacaatatttaaaattctaaaatcattaagcaattccaacctatacagaagtatgacaccttgggattatctagactatatggctaactcttttaattktatacagatgttaagtcttacctctgcatg

SEQ ID NO: 402527 - DNA, 509 bp, Homo sapiens
tttttgtttttgtttggtagaggtagcacctcccagtgttgctcaggctgttcttgaactcctggcctcaaggaatcctcctgccttgtcctcccaaagtgctgggattacagatgtgagctgccacacctgcctttcttctcaattttttaatcaatataaattataaaatktggttcacaactaaggttgaaaaatatctagtccttcaccccttaccccttctcattccccaaaccctgtgaatctactgtaaaatgaattcataaaccaagagtcattgcttttttattctactgcttacattttacttggcaaacacagaaagaagttgggtagtacctcatggaagaacaaaaaagaagaaccctggggaacaatttctgggagtatatcataccacatgaaatctggaaaactccttcattctcatctgtcttttttccattctaaatcaacacactaattggataaaattttgcccagttaacttatacttcctgcaaata

SEQ ID NO: 402528 - DNA, 604 bp, Homo sapiens
ggtttgagttcaccacctctcatgagttgaatccaaattgctctctgaaggagaaatcatctactaaattctgttctttcaacaatgaaaacaggcatacctgtcaattttctatataaaaaataccattgtgtttattcactcacgtggattttcagctctgccaattcaatttcttcactgaacctactagtatacgcctcttcaatatagtcacgttcaaataaataagagtaatattctcattgagaaagggatatatacctcagataaattcattgttccctcttaccctctgttgttgataaatttagtttccaaacattctaaagcaatcttttgaaatcatctgttggcttgagtacaaagaacatgaggtccaactaattccaagcatttctttaatatggtaaaggtgttgctttgattgttactctcagccacgaactaccattggatcatttaattccttcaaaagcaattgaaggactggcttcaaacctttcaaaatctgttttcatatctacatatackgagaggaatagagagaagtttctgaataaaataataatactttgcagttctctgaaacttgagagggaac

SEQ ID NO: 402529 - DNA, 553 bp, Homo sapiens
tattctctgtgtggcccaaggcgattcttcttccaatgtggtcaagggaagccaaaagattgggaatcccttgtttagggcatcaagtagtaaatcctgaacctctgggttctgaaacaatgagaattttgatcagggaaatttctgtatcagagagtaaggtccaacctaatggtagcttataaggaataagatgaggacactagcactgaaggtgtagatccaggacttcccaacttgagacagaataaaacttctctagagatgttgtaaaatcattgattcttagactctacccccagtgattctcatttatttgacctggcatgacatccagaaagcctaatttttaacaaacacacagatgattctgataaaycattaggatgcatggagcactatttgagaaatgatgcccagtaataataaaacaagatacaggtgatagaggccagagaagaaaacatgtccaagacatcttcatctgcttcgcagtgtttcccagggctattgtgctctttgacttaaaccgttcatcatgtccttttgctca

SEQ ID NO: 402530 - DNA, 642 bp, Homo sapiens
ttctgcattttccaaacagaatgcgtaactttccttctccctcttacaaaagaaaataattataagacaaactaaggaacaaacagcatgcttctctcttcaaagaaacttggctaagccaagtaattttctgctatagcagaaaatatttatcccaaatctctaacttaaaaataaacttttgagaattcaaagtttaaagcgtgtgtgtgtgtgtgtgtgtgtgtgtgtgtgtgtgtgtgtgtgtggcgtggcgggggcgggtgggtagaaggataggcattgggtttttttctctacattgatgatttaaaaaaaaaawtcttctccaactttggctccagaattaccatgtggaaccaaaggcaaagcccttgattcgcttgaaaaatttagcaggaaagtatctgtagttaattttgggttacacaatgtccttcactgtctgggcatagaaaagctagctagctcatctcatccagaaactctgccatgagtttaaaaaccaaagcacatactttgatattcactctgaaccaagataaagctttaggttgacataataaaagatggagttaacattcctaaaaaaaaaaaaacaaaaactatgaagctgtaggatatatttcagtcttattttgc

SEQ ID NO: 402531 - DNA, 617 bp, Homo sapiens
aataaaaatgacctaatgctatctatcaccttctttgaagaacaatacttcttaataaaaggcatagagatatttatccttcaaattaaaaaaaatcatgtaatttttggttctttcacatgtatgctttcagaagagaaaaaacaaatcatgttaaactttacagtatcaaatgtgataaactaaaagcataattaacttgttctcttaacataatatggttgttttgctagatcccagtatactactttttccacaggccacgtttttcctcagtatgcacaaatgaaaaagagattaaagaatttgtgtgacctacaataaggtcagcttctaattattatgctaattccatgtactagatttaatagatctactacttttctaccagttaataaaatagactctaaawcactatctactatctaagaagggtgccctctcataccttaaaatactctgtttgaatagctgtgaaggatagtaaaatgtcttactattctgttattgatcctgaattttaaacagataaatgccaaccagaattaacttatttcatgcagcaacatctcaactctttatgttttatttttgaaagagccatttttctgaaattc

SEQ ID NO: 402532 - DNA, 579 bp, Homo sapiens
ttttgctgtggttttggaggtcagtttatcaaagtgaggcccttctctaatcatatgcaagaattgaatcaactaaaaaacacatgtttggatggatcatataatttaaaatctggattatgcagtgtagaactgtgaaaaaaaggtgaaaacctgctttctattcttggttcaattaattaagtgtgkgtacctcccaccttttataagcatcttcttaagacaccgttgacattcagtaaacaacacatgttgaaaatatgtaatataaaatatcatagatgatattttatacatctatgaaactgcaaaataatcaaaggtaacaagcatacctatcaccccatacatttttcgagcctctttgtaacctcttgttcccttccaccgattctcctggtaggaggccaacatttatgtgttttctgtcactacagattagtttacaatttctagaatttaagtaattgagataataaagtaagtagacttttttgcctggtttctgtcactcaacataattattttgagattcatctatgatatgcacatcagttgttcattcgctctcattgctca

SEQ ID NO: 402533 - DNA, 622 bp, Homo sapiens
actgatctctcacataggtttgattactaaactactaaatgacttttcttttgtcttttaaaatgaagaggctgctttcatttttataatttaaataattgtaaatggatagtgaatgaatcacctattcattttccttttatggtatattagtttaatatttttggcagagccatatgttttcctgcaatattattttattgttctrttaaactagtacattaatgccattgggaattccgcccccccccaaaaaaaaatcgtcatgatgaatttattgaaatgtagaaaattgtaaaataatgagctgctaaatgacttccttttggttttaccaatttatgtttgtggcttgtcagtcacactttacacacacaaatttgcagcagtaaaaaattctctcacttagggattaccttgtcaggctacatagaacatgatataatcgtttcatactttttattcccctatctaatcactcagaatatttcctaaaaacatgcagtttttcctacttaaaccttttctggtatttattttctttattttcagataatcttttcttgtatcaacttcaggggagagataagaagagaaaagataactagaaatggtcaaaata

SEQ ID NO: 402534 - DNA, 622 bp, Homo sapiens
actgatctctcacataggtttgattactaaactactaaatgacttttcttttgtcttttaaaatgaagaggctgctttcatttttataatttaaataattgtaaatggatagtgaatgaatcacctattcattttccttttatggtatattagtttaatatttttggcagagccatatgttttcctgcaatattattttattgttctattaaactagtacattaatgccattgggaattccscccccccccaaaaaaaaatcgtcatgatgaatttattgaaatgtagaaaattgtaaaataatgagctgctaaatgacttccttttggttttaccaatttatgtttgtggcttgtcagtcacactttacacacacaaatttgcagcagtaaaaaattctctcacttagggattaccttgtcaggctacatagaacatgatataatcgtttcatactttttattcccctatctaatcactcagaatatttcctaaaaacatgcagtttttcctacttaaaccttttctggtatttattttctttattttcagataatcttttcttgtatcaacttcaggggagagataagaagagaaaagataactagaaatggtcaaaata

SEQ ID NO: 402535 - DNA, 641 bp, Homo sapiens
agtgagctcttggaagcctccttaatccttaatgttcttgaggtaggtaataatgtacaacaactttagaacttccccaccatgcataacaatttttctacggcaaaactgawtcagaaatataaatttgggtgccaggagaaaaagttttagctcagaaattgaaatggagcttccctagcttcaagtcactgctagatgctgctatgatctgaacacagaagaggctgggctagttgtcccattggcagtgagaggaagggttctgtcttcttgattactgttttaaaatttccacctgatatggtttagctatgtccccacccaaatttcatcttgaattgtagttcccataatccccacgtgtgatgaaagggacccagtgggatgtaattgaatcatgggggtagttcccccatgctattctcatgatggtgagtaagttctcatgagatctgatgattttacaaggggcttccccctttaatcggttctcgttcttctgtctcctgctgccatgtgaggaaggacatgtttgcttccccttcgaccatgattgtaagttttctgaggcctccccaggcatgctgatctgtgaatcaattaaacctctttcctttataaattacccagtcttgctt

SEQ ID NO: 402536 - DNA, 641 bp, Homo sapiens
agtgagctcttggaagcctccttaatccttaatgttcttgaggtaggtaataatgtacaacaactttagaacttccccaccatgcataacaatttttctacggcaaaactgattcagaaatataaatttgggtgccaggagaaaaagttttagctcagaaattgaaatggagcttccctagcttcaagtcactgctagatgctgctatgatctgaacacagaagaggctgggctagttgtcccattggcagtgagaggaagggttctgtcttcttgattastgttttaaaatttccacctgatatggtttagctatgtccccacccaaatttcatcttgaattgtagttcccataatccccacgtgtgatgaaagggacccagtgggatgtaattgaatcatgggggtagttcccccatgctattctcatgatggtgagtaagttctcatgagatctgatgattttacaaggggcttccccctttaatcggttctcgttcttctgtctcctgctgccatgtgaggaaggacatgtttgcttccccttcgaccatgattgtaagttttctgaggcctccccaggcatgctgatctgtgaatcaattaaacctctttcctttataaattacccagtcttgctt

SEQ ID NO: 402537 - DNA, 641 bp, Homo sapiens
agtgagctcttggaagcctccttaatccttaatgttcttgaggtaggtaataatgtacaacaactttagaacttccccaccatgcataacaatttttctacggcaaaactgattcagaaatataaatttgggtgccaggagaaaaagttttagctcagaaattgaaatggagcttccctagcttcaagtcactgctagatgctgctatgatctgaacacagaagaggctgggctagttgtcccattggcagtgagaggaagggttctgtcttcttgattactgttttaaaatttccacctgatatggtttagctatgtccccacccaaatttcatcttgaattgtagttcccataatccccacrtgtgatgaaagggacccagtgggatgtaattgaatcatgggggtagttcccccatgctattctcatgatggtgagtaagttctcatgagatctgatgattttacaaggggcttccccctttaatcggttctcgttcttctgtctcctgctgccatgtgaggaaggacatgtttgcttccccttcgaccatgattgtaagttttctgaggcctccccaggcatgctgatctgtgaatcaattaaacctctttcctttataaattacccagtcttgctt

SEQ ID NO: 402538 - DNA, 563 bp, Homo sapiens
actatataacccagcaggtatatgtatcaaaaagtaccctggagttagtagactgttttgttgagagttcacttacattacttaaataatggaaatgcttttgaaggattgacaaagatgtaaagaaggcagtaaccatagtttttgtaaaatagctacatgattaagagctcaagagagaacaagaacctcatgatagcaatgtctagtagacaccagaatgaagtttagcacttggaagcttgacggggatccatggcagagtttgtgaatcactgttctactagtctactgctgagtaactttactcagtttgcctcttttctccatatgtgatttttgtgcttttctttgtactacttactgactcctttatctctaattagaatttgtaggagagcctctgattgtttttgtttattaccactattcctgtctgtgcagatcttttatgtgtggtcgcactatgggccataggccaatcaacataagggcaaytcctgaattaggtgacaagcatgggctcatcagcggtgtctctgggggcagcaacagcatttcac

SEQ ID NO: 402539 - DNA, 615 bp, Homo sapiens
tcagttttatctattgaaagcaatagaatcgtacccatttatttgtttaaataaaattgataaaatatggaccaattgaataaagaattggaagttaagcccattcgtattatgattcaaataaacttgtaaatacattcatctttgtatggtttcctcttatactgagacacatttgtcaaaatgtcaacttatcagcaaactagataattattaattcagttctgagttacagtagatttatgctagaaatcggcagttcctggggatgggtgtgtgtgtgtgtgtgtgtgtgtgtgtgtttgtgtttctgtgtatatattgtaaacaaatgttttattcgtaagttattaagctgcataactttaggcaagtaattttacttcttgaaagatcagtttatttatcagtaaaatgacaataataattcctgccttatttaactcacaggttttcgtgagamaaatatgaggaaatttatatttagaaactattgtaaattgtaatattatatattattaatatgctacattaattgtgatagaagggccaatattttcttatttctttcattggtatttatttgtgccaggttaggttttgaaaaattctaat

SEQ ID NO: 402540 - DNA, 534 bp, Homo sapiens
tgagtgccatctggatatctagaaatacctggtgcagaggtcagtctgcatttatctgttactgcaatcatcaaaaaagagttacctggatctgttaaacatatgccattttcttggcaggtacattttagtctttctcccctttccctcattctgtctcactattaggagtttttcttgctttttctggtggtttgccctcaggtacagatgttcttataactgtttgtccttaggaagatctagcttctatcattttgcttagcagcaaaatctaccttatttacaattaaatgaaatgagcaatactaacagtaatagagtgcttgagcaaaacatttgagaatgttgagactgtyaccagtttttgtgtttgtttgtctgttcgttaggtgttacttttctctcactggagatttaacttctgtctcttgtttatatcctattataaagggggaagcagaacaaaacaaaaacggcatcctgataggggaattcagttagatataatggagaatcctgggggaaaaaaaa

SEQ ID NO: 402541 - DNA, 534 bp, Homo sapiens
tgagtgccatctggatatctagaaatacctggtgcagaggtcagtctgcatttatctgttactgcaatcatcaaaaaagagttacctggatctgttaaacatatgccattttcttggcaggtacattttagtctttctcccctttccctcattctgtctcactattaggagtttttcttgctttttctggtggtttgccctcaggtacagatgttcttataactgtttgtccttaggaagatctagcttctatcattttgcttagcagcaaaatctaccttatttacaattaaatgaaatgagcaatactaacagtaatagagtgcttgagcaaaacatttgagaatgttgagactgttaccagtttttgtgtttgtttgtctgttcgttaggtgttacttttctctcactggagatttaacttctgtctcttgtttatatcctattataaagggggaagcagaacaaaacaaaaasggcatcctgataggggaattcagttagatataatggagaatcctgggggaaaaaaaa

SEQ ID NO: 402542 - DNA, 576 bp, Homo sapiens
ataaggtgtgaatattgccagaatattaatttttgggtggatagctaaccaatgcttttgtttccatttaatctttatcatcccatactaggttttaagagaaaagagtttgttggaggctagatcctgctatcattttgtgtttcctgcatggtacatacaggctgcaccatgactgtctgacagtctctgtctttagagaggtttctgcctttagagagatttacaggcactttgagaagataattaacaatactatygtcaattggtagtataggttcttaatgctctaaaggtatatatagagagaactttttgtggtagagctatgagtcaaatttcatggaaaagactactttggacagctttaaagtgtacttcaaacatggagaaatgagaaagagagaaacagacagacatttcataaacaatgaatagcaaaagcatggatatcaggaaagagaaaaccttctttgagggcaattttaactggagaagaaagttctactggatgttttctagggaataatggagactagttgatgagattctgtttcagtggttttcacatttttg

SEQ ID NO: 402543 - DNA, 548 bp, Homo sapiens
ggaaagaggagaacaaagcaaggaacaaaagaataaaaaaggtcwaattaatttgcaacctggagaaaacatgtcagatcttgatgtaaaatagaaaagtctggaaaattgggattttccaatatgcagttatgtggccaattttagagatgcaataaactgagtgtgattaaatggtaaattggactgatcaggtgagccatacttttcttgtgaaaagtagcaagcatggaaaaaaaaaagatacagctctatttccctttacttttccatctgtatctttcatatttttcaaaattaaaaaaaacaccaaactatttttcaagtattaataaagaatcaggaagaacttcatttaaaacatttttgcctgcccttcaaaaaactctttcactgtttcaaggccattgcttctggaacccagatttgttctagcttacagcctaggaataagaatatatactttcctgtcaggatggcttttgagaaactctgagaataaaatctgacccagtccaatctgacaaggttgctgtgcttgtttgaat

SEQ ID NO: 402544 - DNA, 548 bp, Homo sapiens
ggaaagaggagaacaaagcaaggaacaaaagaataaaaaaggtctaattaatttgcarcctggagaaaacatgtcagatcttgatgtaaaatagaaaagtctggaaaattgggattttccaatatgcagttatgtggccaattttagagatgcaataaactgagtgtgattaaatggtaaattggactgatcaggtgagccatacttttcttgtgaaaagtagcaagcatggaaaaaaaaaagatacagctctatttccctttacttttccatctgtatctttcatatttttcaaaattaaaaaaaacaccaaactatttttcaagtattaataaagaatcaggaagaacttcatttaaaacatttttgcctgcccttcaaaaaactctttcactgtttcaaggccattgcttctggaacccagatttgttctagcttacagcctaggaataagaatatatactttcctgtcaggatggcttttgagaaactctgagaataaaatctgacccagtccaatctgacaaggttgctgtgcttgtttgaat

SEQ ID NO: 402545 - DNA, 548 bp, Homo sapiens
ggaaagaggagaacaaagcaaggaacaaaagaataaaaaaggtctaattaatttgcaacctggagaaaacatgtcagatcttgatgtaaaatagaaaagtctggaaaattgggattttccaatatgcagttatgtggccaattttagagatgcaataaactgagtgtgattaaatggtaaattggactgatcaggtgagccatacttttcttgtgaaaagtagcaagcatggaaaaaaaaaagatacagctctatttccctttacttttccatctgtatctttcatatttttcaaaattaaaaaaaacaccaaactatttttcaagtattaataaagaatcaggaagaacttcatttaaaacatttttgcctrcccttcaaaaaactctttcactgtttcaaggccattgcttctggaacccagatttgttctagcttacagcctaggaataagaatatatactttcctgtcaggatggcttttgagaaactctgagaataaaatctgacccagtccaatctgacaaggttgctgtgcttgtttgaat

SEQ ID NO: 402546 - DNA, 603 bp, Homo sapiens
aagtaaatgaaaatgtaatgactaatataaaaattggcacaaacatctattccatgcaacaggaagatgttttcaaaaataatattacattccaaaatgattttccagtggcaatttgcatagtgtgccatttcagtgcacatgtttaacagaattagcagaagagagactgatataagacaacccattttaggatttagaaggctaccacagattaaaaactaaaccaatttctgttcacaggggagaaacatttaggaagccgcaatctacagtaactttgggaggaatctgtccattattractaaattaaaacatgagtcattgaagaaaaagaataaactcaagcaactggctaagtaataatgaaaaataaaataataaaacttggctgaaaaaagataattacagtccacatttcaaataagaaattataaaataaaaacaaataaaacaaattaccttacataagcaagtgatccccatctgccagctcatttgctatgataatgagaacttgttgcattctagttacctaaattatcatatctacttccatctacatataaatatacatctcaatgtaatggaaaagaaatggt

SEQ ID NO: 402547 - DNA, 546 bp, Homo sapiens
tccctaaggacttgtccagtcacaaagcaataatttcatctgggggccaccttacctrtgcccccagagcatggccggctgctcttcctctgtatcccacaacatgctataaataaacacactccacattggcacctggcacactgtattgcaagcatctatttatttgtgtgctcccccattaggctgtgagatccataagaacagagcccaagtatcattcacctttgccctctaagtgcctgcctagcaaagtgcctggcttagattagagctcaataaataaattgttgttaattgcatgaaagatacactttaatcaaaagcacaataataggatatttgtcaggttcatcaaagatgaccatctttaaaaagttatgtagctatcatcaaggctttcctaggtacaagtaaggtgttagcaaatcttttctgtaaaagataagacagtaaatacatccatcttggtggactatggggtctcttttttttaactgctcaactttgccatagccgggcaaaagcagccatagaaaatatata

SEQ ID NO: 402548 - DNA, 563 bp, Homo sapiens
ctcagcaaatgggtgaataaatggatagggcataaggaattctctcaaaaacaaggtgaccacctcccctctgggtttttcttcaccctagtaggcacagtgatgttgcgaattgcatccagtgaccaccagcccctcccctacatggcagaggctggggcttcctgtgcaagagtctatctaaatcagcaaaactttgggaaaaactgtctgtgtctcagctcagcgcccttcctcacaggcagcacagacctaggagtccaacagacgctgctcaaatcatgagtctgtgtctggcctgctctgcaatttccctgtgcttcagtaaaaagaatcaaactatcttacaactaggcggaggacactgaatkaaataacatacataaagtgactggcacacacacagcggccagtaaacatgcatcggtcccctttcctggcccagatgaccagctctaccacctctggggatccagccaagcacctgtctcctgcttcttatccaccctatttttgaaggacagatttgcatttctcagctccactgccaagcaaattacaca

SEQ ID NO: 402549 - DNA, 562 bp, Homo sapiens
atgttatctcagcagcatttgatactattgtcagctccctccctccttgactcataggacatcacatcatactctttgaccactctttttcagtccacttttccagttcattctcttgtatctgccatttttttgtcagaaatcctcaaagtataacgctggcttcttccttccatgccttgtgctttctcctcagctgatagcactcatccccacagtgccacccatcagccacacaccagtgacccccatgtttatctccagccaggaccttacctctgcactttacactgatattcaactgtctgcttgacatccctacttgtaaatctcaagaagattgcaaatgcaaccttttccagggatcattagctctcctctaccaagcttggtcctcagccactgccactactcccagtaaaaggcactaccaatrttcagccacaagccagaaacaaaggaagcatttttcttccttttcctctctttccatttccaaaataccacagggtcctatctccgcttcttctcaaatgcatccatttatttatgttgatctcca

SEQ ID NO: 402550 - DNA, 618 bp, Homo sapiens
gatcttttcaaatcttaaatataattctattgttccctgtttaaaatcatttcattgcttcccatcagtgttgggatgaaggtcaaatgtgtttaatatagattagaaggtccagcatggtctggctcaggcaatcctgaactccctggactgggtcagttatctaaaatgcattcacactgagagaagggcagtagagccactggttaagctcacagccactgaaattagactgcctggaaaggaatcttacctccatcacttgttaggtatgcagcttgggcaatttccttctcttctatgactcttagcttcttatctgttaggtggtgataatcataaatgcctacctcttaagagttgttgagacttgtaggatatgatatctataaagcacttatcacagtgcctggtatatagtagcctttcagtaaactatcttattcatttatarcatgtgcctaagtttttaattatatgtgtgtatatgtaagtgtatatatacacacacaccatatatatatttacacacatatatagtatgtatatgtgtatacatatacacacacatatatatatcatgtgtgcatatgtgtgtatgtatgattgcttcactaa

SEQ ID NO: 402551 - DNA, 618 bp, Homo sapiens
gatcttttcaaatcttaaatataattctattgttccctgtttaaaatcatttcattgcttcccatcagtgttgggatgaaggtcaaatgtgtttaatatagattagaaggtccagcatggtctggctcaggcaatcctgaactccctggactgggtcagttatctaaaatgcattcacactgagagaagggcagtagagccactggttaagctcacagccactgaaattagactgcctggaaaggaatcttacctccatcacttgttaggtatgcagcttgggcaatttccttctcttctatgactcttagcttcttatctgttaggtggtgataatcataaatgcctacctcttaagagttgttgagacttgtaggatatgatatctataaagcacttatcacagtgcctggtatatagtagcctttcagtaaactatcttattcatttataacatgtgcctaagtttttaattatatgtgtgtatatgtaagtgtatatatacacacacaccatatatatatttacacacatatatagtatgtatatgtgtatacatatacacacacatatatatatcatgtgtgcatrtgtgtgtatgtatgattgcttcactaa

SEQ ID NO: 402552 - DNA, 302 bp, Homo sapiens
tatcctgcctcagcctcccaagtagctggggttataggcrtgtgccacaactcctggctaattttttgtatttttagtagagatggggtttcgcctgttggccaggctggtctcaaatgcccgacctcaggtgatccacccacctcggcctcccaaagtgctgggattataggcatgagccaccatgtccagccagtattaagtgttatgagataaaccaacacacttctgaaatgggacagtcctgcagacaggatagagagaaggtttcctgggtaaacaacatttgaaatgttcttaat

SEQ ID NO: 402553 - DNA, 508 bp, Homo sapiens
atatgttttaccacaatttttttgaaaaaagaatttgtagccctataaagctttagaatcactggcctaaatgatttttcaggacaccattaactctattaaggtatgctttccagaaacagatggaggawtgaagacaaaaattacacttaaaaatgcccctattttctccatatttgaaaaggcaggcacaactatcttggtacatctttacttgctacgtgcagcataaataagacacatggagtcaacctgaactcccatcagtgataaactggataaagaaaatgacatgcatatacaccttggaatactatgcagccataagaagaatgagatgatgtcctttgcagggacatggataaagctggaggccattatccttagcaaactaacacaggaagagaaaaccaaatatcgcatattctcacttataagtgggagctaaattatgagaacacatggaaacatagaggggaacaacacacactggggcctagcagagggt

SEQ ID NO: 402554 - DNA, 483 bp, Homo sapiens
ctcccacctcagcctcccaaggtgctgggattacaggcatgagccattgtgcctggcccaaggataggctaactatcctagcagatgctaatgcagctggtgactttaagttgaagccagtgctcatttaccattccaaatgtcccaggacccttaagaattatgcacartctactctgtctatactccctagatggaataataatgtctggacaacagtacatctgtttgcagcatggtttactgaatattttaagtccagggctgagacttactgctaagaaaaaaaaattctttcaaaatattactgctcattaacaacgcacctagtgacccaagagctctgacggaaatgtataatgaaatgaatgttgttttcatgtctgctaacacaacatccattccgtatgtcatagatcaaggagtaactgaatttcaatcttattacttgagaaatacctttcttgaggctataggtgccat

SEQ ID NO: 402555 - DNA, 613 bp, Homo sapiens
tgactgaattgttgcaatctcataataaaatttacatgaataaggtgttgcttcttatggatgaacaaagcaagtggtttcttgaaatggaatttactggtgaagatgctgtgaatattgtagaaatgacaacaaaggattcagcatattacataaacttagttgataaagcaggagcagggttgggaaaatttattccaattttgaaagaagttcttttattggtaaaatactattaaacagcatcatgggttatagagtaatctttcatgaaaggaaaccaaatgatgtgtcaaactattgttcttattttaagaagttgccacagccacctcaaccttcagtgaccaccatcctgattagtcagcagccatccacattgaggcaagaccctccacagcaaaaagactgactcactgaagactcagrtgattgttagcatttttaaacaataaggtatttttaaattaaggtgtgtacattttttagacataatgcaattgcacacacacttatagactgtaatattgtgtaaacataacttttttttttttttagatagggtctccttctgtcagtgaggctggagtgcagtggcatgatcttaacatac

SEQ ID NO: 402556 - DNA, 618 bp, Homo sapiens
tagtctccagctcaatgatgttaagtgattcctccatgccactaaattggaaagtggtgggaactcacattcaaacccaggtctgaccaacttcaaasgccaggaggctgtttccttcattccatggctgctccctcaagagtaactgtgcatggggataagagtaactcttttccaaggttgatcaaggtctctttcaataccgagattctgggacacagattagaagacacagaagaatggcccagccttttccacccaaagacctgttactgaattttgtctccatgtgtctgaagggtacttccccatcatcattttcattcatcctaagaaaggcggctccctgtgtggaggtggtggccgcgaacattttggctgaactgagcagtcaaccttctcatttttgctggaaggatttgagagaatatgggggagatggtacacgagccagtggaggattagtggggttttatgttgttgtgatgaactttatgatgttagtttgtggtttcacatagcctcataaaacaagctggatggtgattatgtcacttcctctgccctcccgacagagaggaggccttctttagtgcctggagtgtttcctgatgctcc

SEQ ID NO: 402557 - DNA, 638 bp, Homo sapiens
gtttggcatcagatttgagtgagatggtttcaaaatgcatggtcccatatgatagtgcgtttgttcttagaagcagctggcatgctaargtgtcatacctagaacgccaaggtccccaaacatttctttctggtatgcgaagggacagagtttgtgtcagacagactgctacctcttggaagggaaatccaggtgagtatgcagtggacgttggcttttatcagtgatcccatcagaatactggtttttatcagtgatcccatcagtgctagtagttgtggtaggtggctcagacaagttcctaaaaaggtagggctgtcgtaggtggctgacattgcttgtggaccacaagatatccatcctgggtgtatgtgaagatgctgtgactgggacataagtggagttcagtgtgtgtactctgtgttgtgccatttccccaggagcaggaaggagccatcgtggatgatgtaatcatgcccctctctcagcctcctggagggtgaataggctgcctttctgaggacagtctgttgttttggatattcacacttgggcaaatgtctgatatttaaaggaccaggagagccaggtgctcagaattccaccatgaatggaaagaacctgaaatagaaatccag

SEQ ID NO: 402558 - DNA, 564 bp, Homo sapiens
cccttcctttttccaagtgacatttgtctcaatctcatctttttttctccttggtgaagaacgttccttctcaagctcaaacaatatttcttgtccttattgtgactcttatgatctcacatgttggatctgaccacamtctctgctaacattattttgcagtttatcttcatcttatatttccctgccctctacacagacatgtgggctctggacagtagagttggcagttaacattgtaaaactgtgtttactgtcaaatgcatgttttgcttcccaactagatggtaaaactcttgcatgcagggactgagattaatacatcttggccccagtttctagttttatgtcccagacatagtagatgatcagcaattgctccaaggaagctatcagaaaacatccctctaaaagatgcagaggtcatgggattgctgggtggtttatatccctgcaagctacgaactcctgagaatctaacctggaagtccaactctgtactgtgtaggggattcccaagggcaggtttgttctgataatgattaatctcctctgcttttggaa

SEQ ID NO: 402559 - DNA, 568 bp, Homo sapiens
ccccacagaagttccacaggttgcaattttctccaacttcaaygtcatttccagtgaattttatccaccctgaaatgcttccagctccccagtgatgttccagtggcctttagatctgagacccagctgctctaccccttaatctggctcagctgaaaaccgtgggggattctccagcctccgaggccaaggcctgcttcatttaaaagaggctttgttgctggtgggtttgacctggcttatgattttattacgtggtctggggcaggctggatacctcagctggctagacagcgggagtgataatcactttttagcttgacttttaaaccttgctgcgctctctttaaattattttctttttaattttgctatgctgtaagcttcagtttacaaattagaaaatgtcaaggtggctgtaaaccccatttgttagcaggtcccaacagtctttgggaggcatacccagcaaactgaagcctataaggttgttatagtaggtagctagtcaggcatgagcagggcaggagaggggtccgcctgaccaggaatgtcaggtaaccaccag

SEQ ID NO: 402560 - DNA, 472 bp, Homo sapiens
ccccacagaagttccacaggttgcaattttctccaacttcaatgtcatttccagtgaattttatccaccctgaaatgcttccagctccccagtgatgttccagtggcctttagatctgagacccagctgctctacccyttaatctggctcagctgaaaaccgtgggggattctccagcctccgaggccaaggcctgcttcatttaaaagaggctttgttgctggtgggtttgacctggcttatgattttattacgtggtctggggcaggctggatacctcagctggctagacagcgggagtgataatcactttttagcttgacttttaaaccttgctgcgctctctttaaattattttctttttaattttgctatgctgtaagcttcagtttacaaattagaaaatgtcaaggtggctgtaaaccccatttgttagcaggtcccaacagtctttgggaggcatacccagcaa

SEQ ID NO: 402561 - DNA, 590 bp, Homo sapiens
ggccattcttacctccctttggctgcaagccaaaagcagtctactctacagttcactgcaccaattctccttggaatagatttttgtggccacctgttagtattcgagcataacctttggggtctcttcactcacctcccaaaccccatctcaaacagctaatcaaagcctcctttccaatgacatacagtgcttaccccacagaagttccacaggttgcaattttctccaacttcaatgtcatttccagtgaattttatccaccctgaaatgcttccagctccccagtgatgttccagtggcctttagatctgagacccagctgctctaccccttaatctggctcagytgaaaaccgtgggggattctccagcctccgaggccaaggcctgcttcatttaaaagaggctttgttgctggtgggtttgacctggcttatgattttattacgtggtctggggcaggctggatacctcagctggctagacagcgggagtgataatcactttttagcttgacttttaaaccttgctgcgctctctttaaattattttctttttaattttgctatgctgtaagcttcagtttac

SEQ ID NO: 402562 - DNA, 584 bp, Homo sapiens
gtacagctccagtaaacacaccgcacctgctcatctcccaagtgctaggaggccactgcacatatggacaacccatgccaagggaagaatcaggggagaagtgacacaagagcccagaagtatgccaatgtataaaaccccaagtcaaaaggtcaaactgcgcacttgtttttcaagtcgcccgcttggccctcttccaagggtgctttccttccttttgttcctactctaaagctttttaataaactttcattcctgctctaaaacttgcctcagtctctccttttgccttatgccccttagttgaattgaattctttcttctgaggaggcagggattgaggttgctgcaggcccatatgaatttgctgctggtaacaaggtcatatgttgaatttctgagagcagctgggtctcagatctaaacaactcaagtgtgttttctcccagtagtaagatatgatgtcatccaggtgtagagaggacccraagactctggagcactgtgtggcctggccatttgtgtagggtaagaagagcaactatgtgcttggagtgcccccaccctcatatccacagcggaca

SEQ ID NO: 402563 - DNA, 568 bp, Homo sapiens
cttggcctccttgacagtcaccaggggcggccctgcagaccatggggaatcctgctttatcattttcttccaaagaccaatgcccttctacagaagggcttcaccactcctaaccacagaagyacctgttgtcagcaaattcagatacaatttggcaagctggaatgattactacgaccttcctggaacaatgattttaaagattttttaaaaaggaaataaaatgtatcattagggctcttcccaaccaaccataggtttcccagtgcccagcatgctgcagttagccgagccaggcctgggaaacgtgcagcttctaaatcaggtcaatgtctggcttggctttggtgcttgccaaactggcccctgctgttgcctcatatactttgtacatccacaaattatcacttcattagacatattgtagcaccactaaaattgtgtacacaaaacgctccattaaagaacttaggtttgttcaggaggaatgagtcatgaagattaaacaaaggccatttctaaaatcctgaattccctggggcagctcagcaggaaattaaattgccct

SEQ ID NO: 402564 - DNA, 655 bp, Homo sapiens
tatttaagaaagaggtattgagtctcatcaatgtgtcaggttctgttctagggacagaggatacagcaaggaggaaaactgatgtgacctctcttctcacagagctcccagtctagtggagaataaagaaattgagcaggaaccagctcttatcacaactcagcttgattagaacaatgttaatggaaataagggatactaagtggtaaggaggcctcatgaacaaagacacaggacctcaagcatggtgttactggattatttcctggtatcaggcagcttagtgcaagaaaattttcctcacaccccaggacacatcctgatactcatcctgaagacccactacaaaacaaacsctaggatccagaagttgaatgaaggtagaacccctctgaattctattcaaagggtttttatcccatgaatgacaaaaactttgttttacaaactgccctgtcctgggcatgagaagagcaagactacaccagacttagcatagagaagttttaccagtctaaggatgaaacagagagaggaaaaggatagcagttggagtatgtaggatgctcagtgttctggtgataccagtgatgaccttgataatcttttgtcaccacctagggcatccatcagaaaaacccctacatgcaagaac

SEQ ID NO: 402565 - DNA, 568 bp, Homo sapiens
aactcagcttgattagaacaatgttaatggaaataagggatactaagtggtaaggaggcctcatgaacaaagacacaggacctcaagcatggtgttactggattatttcctggtatcaggcagcttagtgcaagaaaattttcctcacaccccaggacacatcctgatactcatcctgaagacccactacaaaacaaaccctaggatccagaagttgaatgarggtagaacccctctgaattctattcaaagggtttttatcccatgaatgacaaaaactttgttttacaaactgccctgtcctgggcatgagaagagcaagactacaccagacttagcatagagaagttttaccagtctaaggatgaaacagagagaggaaaaggatagcagttggagtatgtaggatgctcagtgttctggtgataccagtgatgaccttgataatcttttgtcaccacctagggcatccatcagaaaaacccctacatgcaagaaccatcccagaaagcaaaagtcattcaacattttggtctcaggatctcttcacactcaaaaagtatcgatg

SEQ ID NO: 402566 - DNA, 534 bp, Homo sapiens
ctcatttccaggaagtcatgtctctcagtgaaggaagagaacttgttattacaggtggatcacattgttagcagcatttggtaggtcataatatgagaaaaatatgttgtttttgtggataatgaatcatctccagtcactgggtgatatgattaggtttctgtccccacccaaatctcatcttgaattgtaatccttaggtgtcaagggagagggcagacggaaggtgattaaatcatggaggttgtttcccccatgctgctcttttgatagtgagtgagctcccacaagatctgawggttttataaggggctcttcccgctttgcttcggtcacatgctcactctcacctgctgccatgtaagatgtgcctgctttcccttctgccatgattgtaagtttcctgaggcctccccagccaaccagaactgtgagtcaattcaacctcctttatttataaattacccagtcttgggtggtatatttatagcagtgggagaatggactaacacactgggtgaccattattttggc

SEQ ID NO: 402567 - DNA, 489 bp, Homo sapiens
gctctgtgtggcttaattctcctcctcattagtctgccttgcaaattgtagctgcttcagcctcttcaaacttcaatctctcctcagctcagtaagactgcttggattctcccttcccacactatagttcagaaagtgctcccaggcagcagtctggggtaaccatagggttcaccatgtttgtttctacttctctgatttacagttttaaaagcccagtctggctattctgtggagaatagaatgaaggatgccaacagtggaaacacaagaccagttaggacactactaaagtaatccaggtaaggtagggtggagcaatggaggaggtgagaaracgttaggttctggatatactttgaaggtagaacccatagggtttacagatgatttagatgtgagaggtgaaggtcaaggatgattccaaggctttttgacatgggcatctagacgaattgcggcaccatttaaagagatggaggatcgtgg

SEQ ID NO: 402568 - DNA, 489 bp, Homo sapiens
gctctgtgtggcttaattctcctcctcattagtctgccttgcaaattgtagctgcttcagcctcttcaaacttcaatctctcctcagctcagtaagactgcttggattctcccttcccacactatagttcagaaagtgctcccaggcagcagtctggggtaaccatagggttcaccatgtttgtttctacttctctgatttacagttttaaaagcccagtctggctattctgtggagaatagaatgaaggatgccaacagtggaaacacaagaccagttaggacactactaaagtaatccaggtaaggtagggtggagcaatggaggaggtgagaaaacgttaggttctggatatactttgaaggtakaacccatagggtttacagatgatttagatgtgagaggtgaaggtcaaggatgattccaaggctttttgacatgggcatctagacgaattgcggcaccatttaaagagatggaggatcgtgg

SEQ ID NO: 402569 - DNA, 600 bp, Homo sapiens
agaacagaatgtaaatattatcaatcttaacaatataaaagttcaaatgatacaaattgggaagtggaaggcaggaaggagagctaaaaggaaggatagaagtgcaaatgttcccatctttcaaggcggagagtgaaaaaatactattattgaacaagaaataaagtgrttagtttatgacttaaagtttcaaatgatactgatttttaaaatgaaagcatgatataactacatgaaaaggttgagggaagggggatgtaggatggtaaaaccttagatcaatggcagaaattcaataactaatatctaaaattgatcaatcaaaaaacagaaatggaaacatcttattcagagatatggaaattaacaccaaaataaatagtaaaaagattaaaagtggctatcctagggaaaaggacaggagttaggaaagagtgaggcaagaaactgtggctttgtatcacaaaagttctacagtattttgacttgttaaccaggataagttattttataaatttttttttaaattttagtggatttttaagctgtctctgggatcactgacacatttcttttggcccttgtttcacgtacagatcc

SEQ ID NO: 402570 - DNA, 568 bp, Homo sapiens
tttctttctctctctgtctctctctctctgagacaggatcttgctctgtcattcaggctggagtacagtggcacgatcatggctcactgcagccttgacctcccaggctcaagtgatcctcccacctcagcctcccaagcagcagttgggatgactaatttttaatttttttgtagagaatagtctcaccattttctcaggatggtctcaaactgctggtctcaagcgattttcatgcctcagcctccccaaagtgctggggytacaggcataagccactatgcctgcctgctttatctctttaacaagctaagaaattggacaactggaacatgcttttggtatttgtaataacagaaagatgcaagaaagaaaaagaaaagaagagacagagacaaaagaaaaagaaataaagaagagaaggaagcaggcaggctggccgagttcatctagccagagtgagacctgggccagaaattcccaaactgttcagagatggaactcactgggcagttgccctgctctgaggccaaccctttgcataaagctagtgaagctctgggctcta

SEQ ID NO: 402571 - DNA, 567 bp, Homo sapiens
taatttataaagaaaagaggtttaattgactcacagtttcacaagctttacaggaagcttggctgggaaggcctcaggaaacttaaaatcatggcgaacagggaaaaggagggaggcacattttacatagcaggaggaagaaaaagaaggaagaggtactacacacttttaaacaaccagatattatgagaactcactcactatcatgagaacagcaaggagaaagtccaccccccatgatccaatcatctcccaccaggccatttttccaacactggcggttacaatttgacaagagatttttgttctctttgttcattttgttttaaatttaaatgtgctttgccattttcagagaagaaaatgtgtgcattgtgaaatttcaaagtttctgcctaagaggtgtataggagccaagggaataagcagaaaggaatgagtttagataataggtagaaggartgggaacagttggaactttagaggcttttgggtgctattggaaataagtctcgcatttaatttgtgttgttctaaaaccaattttttttcaattttgtatgtaaa

SEQ ID NO: 402572 - DNA, 453 bp, Homo sapiens
actctatgcagcctgaatactgtttccctgggaggaaaaaaatccaaagcataaacttttataagctgttttaattaaaacactctttgtaaagtgatgkatttgaagcaagggaggagaaaggttttctggcaaaagtgtcttttgtggtgtttctttggtgagcaaaaggaactcaactgatgaaaacacaaaagcacaaacattctgtggccagtaaagtgggtggagggggcaatggagacaacctcaggtggggcccagcttgtaacgctggcagggctctgttaatgtgctccataaagggctttggagggcgggaggagcaccaccaacattttaaatgtgaggccaaccataaaacgattcatgattagtccactaaaatgtgtttattggcaaataggaaagagatccctgaaaataagcaggaacaggtgattttcaaggctg

SEQ ID NO: 402573 - DNA, 453 bp, Homo sapiens
actctatgcagcctgaatactgtttccctgggaggaaaaaaatccaaagcataaacttttataagctgttttaattaaaacactctttgtaaagtgatggatttgaagcaagggaggagaaaggttttctggcaaaagtgtcttttgtggtgtttctttggtgagcaaaaggaactcaactgatgaaaacacmaaagcacaaacattctgtggccagtaaagtgggtggagggggcaatggagacaacctcaggtggggcccagcttgtaacgctggcagggctctgttaatgtgctccataaagggctttggagggcgggaggagcaccaccaacattttaaatgtgaggccaaccataaaacgattcatgattagtccactaaaatgtgtttattggcaaataggaaagagatccctgaaaataagcaggaacaggtgattttcaaggctg

SEQ ID NO: 402574 - DNA, 453 bp, Homo sapiens
actctatgcagcctgaatactgtttccctgggaggaaaaaaatccaaagcataaacttttataagctgttttaattaaaacactctttgtaaagtgatggatttgaagcaagggaggagaaaggttttctggcaaaagtgtcttttgtggtgtttctttggtgagcaaaaggaactcaactgatgaaaacacaaaagcacaaacattctgtggccagtaaagtgggtggagggggcaatggagacaacctcaggtggggcccagcttgtaacgctggcagggctctgttaatgtgctccataaagggctttggagggcrggaggagcaccaccaacattttaaatgtgaggccaaccataaaacgattcatgattagtccactaaaatgtgtttattggcaaataggaaagagatccctgaaaataagcaggaacaggtgattttcaaggctg

SEQ ID NO: 402575 - DNA, 562 bp, Homo sapiens
ggaatttcctgagtgacaggagtgagaggagcatcatttacttttcctcagaagccccttttaaccatacttgagtttatgctgatgaggtatctcttggtgggcccatacatagcttcaggatgggaactggttaccagaagatcagccagtgattagatggttgaaattttcagccacaccctctgacctccagggctggagattgattaatcaccagtgaccaatgatgtaatagatcatgcctacaaaatagagactgcagaaaaaacctgggttgaaaaaaaacagttttttcaactgggttcagagagctcctgggctggtgaacacatcaaggtgcagcttggggagtgcatggaagcctcgcacccccatcttcatgccttgccttctgcatctatgctgctcttcctgagttgtagcctttataataaactgacaatagtgagtaaactgttttcccggaggtctgtccagggataagttccatttggttatrgtacataaccctttttatatagttctagacttggccagtgctttttcaccagccacagct

SEQ ID NO: 402576 - DNA, 555 bp, Homo sapiens
ggatttttcttagatattatttatcaagttgagaaagttcccctcaattgctagtttactgagaatttttattataaatgagtgttggattttgtccagtaattmttctgcatctattgatatgatcatgcaattcttcttctttagcctgttgatatgataaattatatcaattaattttgatattttgaatcagccttgcataactaggataaatcccatttggtggcgatatataattctttttatatattgatggatttgatttgctaatattttgttgaggatttttgcatccagacttatgagagatattggtctgtagttttcttttcttgtaatgtccttgactgttttcatatcatagaaatgctagcctcacagaatgagtgaggaagtattttctctttttctatcttctgaaagagatgatacagaattggcataatttcttacttaaatttttagtagaattcaccagttaacccatctgggcctggtgctttctgtttgagaaggttattaattatttattcaattttttaatagatacag

SEQ ID NO: 402577 - DNA, 555 bp, Homo sapiens
ggatttttcttagatattatttatcaagttgagaaagttcccctcaattgctagtttactgagaatttttattataaatgagtgttggattttgtccagtaattattctgcatctattgatatgatcatgcaattcttcttctttagcctgttgatatgataaattatatcaattaattttgatattttgaatcagccttgcataactaggataaatcccatttggtggcgatatataattctttttatatattgatggatttgatttgctaatattttgttgaggatttttgcatccagacttatgagagatattggtctgyagttttcttttcttgtaatgtccttgactgttttcatatcatagaaatgctagcctcacagaatgagtgaggaagtattttctctttttctatcttctgaaagagatgatacagaattggcataatttcttacttaaatttttagtagaattcaccagttaacccatctgggcctggtgctttctgtttgagaaggttattaattatttattcaattttttaatagatacag

SEQ ID NO: 402578 - DNA, 555 bp, Homo sapiens
ggatttttcttagatattatttatcaagttgagaaagttcccctcaattgctagtttactgagaatttttattataaatgagtgttggattttgtccagtaattattctgcatctattgatatgatcatgcaattcttcttctttagcctgttgatatgataaattatatcaattaattttgatattttgaatcagccttgcataactaggataaatcccatttggtggcgatatataattctttttatatattgatggatttgatttgctaatattttgttgaggatttttgcatccagacttatgagagatattggtctgtagttttcttttcttgtaatgtccttgactgttttcatatcatagaaatgctagcctcacagaatsagtgaggaagtattttctctttttctatcttctgaaagagatgatacagaattggcataatttcttacttaaatttttagtagaattcaccagttaacccatctgggcctggtgctttctgtttgagaaggttattaattatttattcaattttttaatagatacag

SEQ ID NO: 402579 - DNA, 555 bp, Homo sapiens
ggatttttcttagatattatttatcaagttgagaaagttcccctcaattgctagtttactgagaatttttattataaatgagtgttggattttgtccagtaattattctgcatctattgatatgatcatgcaattcttcttctttagcctgttgatatgataaattatatcaattaattttgatattttgaatcagccttgcataactaggataaatcccatttggtggcgatatataattctttttatatattgatggatttgatttgctaatattttgttgaggatttttgcatccagacttatgagagatattggtctgtagttttcttttcttgtaatgtccttgactgttttcatatcatagaaatgctagcctcacagaatgagtgaggaagtattttctctttttctatcttctgaaagagatgatacagaattggcataatttcttacttaaatttttagtagaattcaccagttaacccayctgggcctggtgctttctgtttgagaaggttattaattatttattcaattttttaatagatacag

SEQ ID NO: 402580 - DNA, 611 bp, Homo sapiens
taggttggcggggagttcgtgctcaaaactttaaatatttcactttactctcttcttgcttgcttggtttctgagaagttgtatgtaattctaatctttgttcctttataggtaagtttttttttttgcctctggtttctttcaggattctttatctttgattttttgtagtttgaatatgatatgcctaggcattgttttggggtttttgttgttgttgttgttttttaattgtttgaggtttttgttttcgttttgttttgcacttattctgctctatgttctctaagcttcctagatctgtagtttggtgtctggcattaattttggaataattctcaatcatcatcattccaaatatttmtattcctttctctattttccttctggtatttttattacatgtatgtcacaccttttgtaattttcccacaggtattggatatactggggattttttttgtcttttttctctttgatttttagttttagtttgattttcgttttagatctctttgatcttcaagctcagagattctttccttagttgtgtacagtatactaataagcctatcaaaaacattcttcatttctgttataatgtttttcat

SEQ ID NO: 402581 - DNA, 611 bp, Homo sapiens
taggttggcggggagttcgtgctcaaaactttaaatatttcactttactctcttcttgcttgcttggtttctgagaagttgtatgtaattctaatctttgttcctttataggtaagtttttttttttgcctctggtttctttcaggattctttatctttgattttttgtagtttgaatatgatatgcctaggcattgttttggggtttttgttgttgttgttgttttttaattgtttgaggtttttgttttcgttttgttttgcacttattctgctctatgttctctaagcttcctagatctgtagtttggtgtctggcattaattttggaataattctcaatcatcatcattccaaatatttctattcctttctctattttccttctggtattttyattacatgtatgtcacaccttttgtaattttcccacaggtattggatatactggggattttttttgtcttttttctctttgatttttagttttagtttgattttcgttttagatctctttgatcttcaagctcagagattctttccttagttgtgtacagtatactaataagcctatcaaaaacattcttcatttctgttataatgtttttcat

SEQ ID NO: 402582 - DNA, 586 bp, Homo sapiens
tgtcagattcagtgtcaactttttcaaaacataggcaattaaccaaaggcttaaagaatgttagaagcatgtattaaaaaaaggctagatctccacaagaactcaatatttgtgttttaacttgccataggtgcacccacccttccacagtgaagtcatagtcttgaaaaataacagcatttctatcacagaaaggagcagaatggagttagatcctaattcccaaagaattgcaattatttgaactgtctggtggttccctagaaaactgggctggaaaggattttctttatgtaaccttacttagatcttatgcgctgttaaaaacatctacaaaaagagtggttgagagggaatttgaaaaaaaaaattataggcaagtgttgtaaatgttgtgtttgccagatatggtggataacagttggatcaaataacatatattaaccagaaagcttaaaagagcctgctgaaaagcragatgttcacagagattttaaaaatatcagacatattcatggaaatatagacatctataaatatatgtagagctatgcacatgctcaggaaagtatctgtgaaagcccta

SEQ ID NO: 402583 - DNA, 617 bp, Homo sapiens
gactgcagacacgatggggtgtgtgtgtgtgtgtgtgtgtgtgtgtgtgtgtgtgtgtggtagagggaggaggatgtgctgggctacctgtgcacacccctctctctcctgcagcccctgcagccgcatgcctgcactccaggaaccaaaagccagctctgtgccagcgtctcccatgactgctcccagatgccttctgtttcagcagttctggctgctcttggctccggatmccttcttgctattcctccttgaatattcccaacgttcaggcttcagtgtccatgccagcccctccctgacccagccccagatgccctagcctggcatggataccaactccaccacagcctctccagtgcatttcatcccactccctctgatgcatcggtggctcctggcttcagagtactatgtcttcatccagggtcttttaacagtgcaacctgaggcagaagcttcagtgctaccaacttactaatgagtgcagcctcagggaaacaggaaggaggagcagtggactgaggtggggaggcagggcgggcagacctgtgtgccatcactgccgggtagcaagtgtcactgctgtgagtatgtccatgtcaggacaggtgagg

SEQ ID NO: 402584 - DNA, 615 bp, Homo sapiens
tttctgtcttgatgatctgtctagtgctgtcagtggagtattgaagtcccccactatcattgtgttkctgtctatctcatttcttatgtctactagtaattgttttataaatttgggagctccagtgttaggtccatgtatgtttaggattgtcatatttttctgttggatgagacctttaccattatatactgcctgtctttgtctcttttagctactgttgctttaaagtttgttttgtctcatatgagaatagctactgctgctcgcttttggtgtccatttgcatgaaatgcttttttctattccataatcattctgatgcaaaaacaattgtaactctctttctagtgcctacatttcctgtgagccccagttgtgcatagcagaaaatacggaggcatctaggaaaacctaggggcaggaagggctgggagggaataagccctttcaaggtgtttaaagaagagacaaagatgaagaagcaggcatagtttctgaagaggttttttggtttttgttgttgtttgcatttacctaattagttctcaactacagaggcacattagaatcttctggggaatttttaaaataccactgcatgggccacctgtc

SEQ ID NO: 402585 - DNA, 586 bp, Homo sapiens
acttgtttcataacttttctttatttacttctacattgtcttcaatggtaatggaagatacaaggttaatttgtttgttcatccatgcaaccatttgttcattcaattaaacctgtatcattatataattagcctgttccaggcattatactgagctctgggaatacaaagggaaagccaattatattttattacagtgggatgaactgttacatattttgcattgtagtgaagtgggaacaatgtgaataattacagttcaaagcccatgattgtgagattgatgttgatgaatgaactaaacatttcaagattttttcccaagaattttcatgtcagcaatgtgcaaattgggtgaactttaacaaaaagagctttaatactggcaaatggaaattttggattttaaatatctaaaatgcacatggaattttagagctggaaggatccttagaggtcagctrattcaactcattttacagatgaagaaaccaaaatccaaagaacaagccatttgtccaaagtcacacagaaaacattttttcttaacgtttgagtataaagtgttttaataaaatcattatat

SEQ ID NO: 402586 - DNA, 567 bp, Homo sapiens
cacataacatttagtttcacagattcctgcctagagagaaatttgtttcaagatgacttttaccttgagtcttagccatatctaatttagaggatatttatataagacttccgatttgagatttagagttgacactgaaggggttgagacttttggggctattgggatgtaattagtgcattttgcatgttagaagcattctaggccaggagctgaatgctgcagaatgatggtttatgtctcttcaagatgtatatgttgaactcctaacacctaaggtgatggtattaggaggtggggcctttgagaggtgattagatcataaaggtgaggccttcatgaatgggatcagtgccctcctagaagagactccagagagctctytcaccctccatgtggggacacagtgacaagacggctgcttataaaccaggaagtaagctgtcacgagacactgaattctcagcacctggattttggacttccagtcttcataactgtgagaaatgcatttctgttgtttgtaagccactcagtctatggtattctagtatggaagcctgaatg

SEQ ID NO: 402587 - DNA, 569 bp, Homo sapiens
tttggaaagggtgattacatcctcatttcagctctccctcttcctagctttccacatagaattccagggctccatgcagcatttgctggacatgagagggaaaacttttagggcagggatctgccctgggtggggacagaggagtatcctggagtctgggtgtcaggagtgtgagccctgcccagctggccagcccctgtccccatgctgctcgatgcatgatgtttcctgcacaagcttcctttaaagggaagcttccaaagtgactgcagtgaggtccatgctgttgggcatgacagagcagccctggaggtggccaaagagaagcaggcagaggaagcttctccaagcaggcttggaaagatatttcygcatatcactcacgtcactcttgccactagaaggaaaatttctacagtggagtggaagaaaatgactatgctgtgggagagaatggatgcatccagaagagcaaggcaggaggagaaatgagcccattgccagaattttgtgtcttttgaagacatttgccagaattctacttttgaaggctgccccttttgacagtc

SEQ ID NO: 402588 - DNA, 446 bp, Homo sapiens
gtacagaactaaaatgataaaagtcatataacaatggtaccctaaaccacccacctcacagcatagtgcagagatrtcctggcagtgcttctggtgtgtgggatgggggtagaatcccatgcatgagaaggggacaggtcctttcttcacaagaccagtctttgctccagaaatgaatccttatcatgaatccctgacacgttcagtgttttcagttatttttcttggctgtaggaatgtcacaatggactgcagagtgtcatacatagttttcagtaaaatactggacaatagagtttatagtctcccatttaggtacaagcctagacagacaggaacacttttttataattataaaaacacaaatttccttgttttgtggaaataaatcccaactattgaaccttctagttaagagattgacaactctatacttggttcaggat

SEQ ID NO: 402589 - DNA, 614 bp, Homo sapiens
ccacccaggctggagtgcagtggtgtgatgtcagctcactgcaacctctgcttcctggattcaagcaattctcctgcctcagcctcaccagtagctgggattgcaggtgtgcrccaccacacttggcaaattttggtatttttaatagggagtttcttcatgttggccaggctggtcttgaactgctgacctcaggtgatctgcctgccttggcctcccaaagtgctaggattacaggtgcgagccactgcacccagccagtgcaagaatttcataacctgccagactgagcttcataaagaaaggaaaataaggtatttccagacaagaaaatgctaagggaagtcgttacctccagactgactctaaaagaaatgtttaaaggagtttggctcgtgaaaataaaagaatgatacttgctaccataaaagcatacatgaatacaaaatgtacagaacctataaagcaattaaacaattgagactacaaggtaactagctaacactataaaaggaagaaaacctaacacatcaatattaagcttgattgtaaatggctgaaatgctccactgaatagacacaaagtggcaaactggataaaaaaaagaagacac

SEQ ID NO: 402590 - DNA, 538 bp, Homo sapiens
atccctgaggaacattagttacatggccccacatgtgtacgcctgctgttcagggtgtacagcaggcctgggccaaagcactgagggattctgatgtgtgaaactgctcaaacttgactctgaataaayccctctcccttttctcccccacctgatttaccaaccaggacagtctggtgactccttgaggacctgcctaaatggctggtgtccagggtgattgcatggccagaccccgtgtctgcaggcagggaagggtgaaacctgggactgaggacacagagaaagagaagcgcagatagacaggaagggaaagatggaagaggaaggtgagggtacaggaaaatgataacagagggaacacacagtggggaaaagagagaaaggcaatgagaaaggaaagagaacaattaagaagtttctgtgcatgttggggaaattgtgggaaagcagggagagagaaagaccaaaaacacaagtatttcagttagagaaaagggaaaaatagaagaaatagctgcacagaagacggagaatg

SEQ ID NO: 402591 - DNA, 538 bp, Homo sapiens
atccctgaggaacattagttacatggccccacatgtgtacgcctgctgttcagggtgtacagcaggcctgggccaaagcactgagggattctgatgtgtgaaactgctcaaacttgactctgaataaatccctctcccttttctcccccacctgatttaccaaccaggacagtctggtgactccttgaggacctgcctaaatggctggtgtccagggtgattgcatggccagaccccgtgtctgcaggcagggaagggtgaaacctgsgactgaggacacagagaaagagaagcgcagatagacaggaagggaaagatggaagaggaaggtgagggtacaggaaaatgataacagagggaacacacagtggggaaaagagagaaaggcaatgagaaaggaaagagaacaattaagaagtttctgtgcatgttggggaaattgtgggaaagcagggagagagaaagaccaaaaacacaagtatttcagttagagaaaagggaaaaatagaagaaatagctgcacagaagacggagaatg

SEQ ID NO: 402592 - DNA, 558 bp, Homo sapiens
agaaatagctgcacagaagacggagaatgacatgcatratagcctgcagtaggcactggggccggaggacgcagccagggggagggagtccagctgaagcctgaggacagagtgtcagctggcagagaggtggctggcttcacatggtcacctcatatcctctgtgtgtctctcagctcagagcagcccccggctgagttggtggccagcgtggaaacagttgaatttctggatttagagactgatgaccgacatttaagtaagtcctggttctgcctctttcctgtggggactttagccaagtcactggctcctctgagcctgtgtttccaactaccaagtgggaatgacagtgctcactttgcaggatcattaagaacattaaggaaataggagccagggtcaagtaacacccagggtcggcaataaaatgcatgttagctatcattcttgttggccttcacattacatattgattagatcaactgcgtttgcataactcagtttgcagcaagctcagataattaatagaaaaattaatttagtaagaagttttgt

SEQ ID NO: 402593 - DNA, 558 bp, Homo sapiens
agaaatagctgcacagaagacggagaatgacatgcataatagcctgcagtaggcactggggccggaggacgcagccagggggagggagtccagctgaagcctgaggacagagtgtcagctggcagagaggtggctggcttcacatggtcacctcatatcctctgtgtgtctctcagctcagagcagcccccggctgagttggtggccagcgtggaaacagttgaatttctggatttagagactgatgaccgacatttaagtaagtcctggttctgcctctttcctgtggggactttagccaagtcactggctcctctgagcctgtgtttccaactaccaagtgggaatgacagtgctcactttgcaggatcattaagaacattaaggaaataggagccagggtcaagtaacacccagggtcggcaataaaatgcatgttagctatcattcttgttggccttcacattacatattgattagatcaactgcrtttgcataactcagtttgcagcaagctcagataattaatagaaaaattaatttagtaagaagttttgt

SEQ ID NO: 402594 - DNA, 608 bp, Homo sapiens
gatactcattttctctgctccttggagaatgaccttcatctctcagacagcgtctacatggcaatgcctaggcactcacctcatactaggccctgaggggaacagcaatgggtcctcataaggctcatgttaaaagataagataaccccagaaggtctctacctggyctaggttgggtcaaggacttgctgtggaaacaaatcaaacagaatatgcctatttttactccagctaccttgttagagtggtggaggaagaaccattttctagaaggagaagagaggtgcagtgtctttttctggacagaaaaaacaaccacattggtaggatagtctagtgaccttcagacacaaattaccaaggctcctctttcacatcaggccccctgtctgctgctgtttgctctcttacttgcctcattctaattgaagaggctcagctcactgcctaattccatgtctactcagtgctaaccttgatggaaatagtggggggagcatggagatcagctgacccctagagacaggaatgggatgatcactgctgctatttacttcgtaggctcattcttctctacctgaccatgctattttgggacccttcaaaac

SEQ ID NO: 402595 - DNA, 548 bp, Homo sapiens
attcttaacatccttgaagagctgtgacagcagggaagttatgaggatggtctctggtactargttttctggctcaactcccgtctctgacacaagctgcagtactttggacaaattaccccgtttatacctcaattttctcacctataaaacaggaacaaaattaacagcacattcctcattaagacttttgtaaagattaattaaggtaatttatacaaaacacacaggacagcatccaactcatagtaaacactgtatagatgttaatttttacttttaccaacaggacactgtgagagggagagtaaaccacatgggaaacacatcccagaggatctggggtccaagggaccttggacaaaccctcaccccatcacttaccatcagagtgaccccagacaggcccatgacttctttacagtcattgttaaaaactatgaaatgttgatacaaatagttctcagggtttgggaaggtgtgtatatgtatatggcattttgtaagggcttgccacgtaataagcctctaactgatgtcaaatattg

SEQ ID NO: 402596 - DNA, 548 bp, Homo sapiens
attcttaacatccttgaagagctgtgacagcagggaagttatgaggatggtctctggtactaggttttctggctcaactcccgtctctgacacaagctgcagtactttggacaaattaccccgtttatacctcaattttctcayctataaaacaggaacaaaattaacagcacattcctcattaagacttttgtaaagattaattaaggtaatttatacaaaacacacaggacagcatccaactcatagtaaacactgtatagatgttaatttttacttttaccaacaggacactgtgagagggagagtaaaccacatgggaaacacatcccagaggatctggggtccaagggaccttggacaaaccctcaccccatcacttaccatcagagtgaccccagacaggcccatgacttctttacagtcattgttaaaaactatgaaatgttgatacaaatagttctcagggtttgggaaggtgtgtatatgtatatggcattttgtaagggcttgccacgtaataagcctctaactgatgtcaaatattg

SEQ ID NO: 402597 - DNA, 578 bp, Homo sapiens
ccctgggtaactaaaaggctgtaggctgccagcactgagctcactgaaagcttcaattggtacttagtctaaatagtgcattaaagggccacagattccacatggatgtgcaggaaatctggcctctgccaaaagagcctgcaatgtggccaagaaaatgcactgataaaatgggtccttctctgctcatctcatgctgggtcagtcacagacaggaaacctgtaagcccagaagcttgracccagcaattgcataattgcaaacatttggataacagctgaagaaaataaaaacaaaccagtacacaaaactcccagcactcagctcaatattttgcttttctttcatgcatcacacaagcttggattgtagatttttaagttttcacacaacatcctgagatcagaccaggcaagtagaaatccaaaacagaacaatgatgagtaattttatggaatcactaataaaaatctcccaagaagtagaaacccagggccagatgggctcacagcttaattataccaaacacacgaagaactaataccaatctttctgaaattgttctaaaaaatcaagg

SEQ ID NO: 402598 - DNA, 554 bp, Homo sapiens
atcacttgaatccgggaggcggaggttgtagtgagatgagatcacaccactgcactccagcctgagccacagagcaagacactgtctaacaacaacaacaaatagcgccttccttattagatcgtggtgaggattaaayaatattgactgttcagcagtgtcaggtatgctgcaagtgtccgacaaacatcaccctcattgtcactgccttccccacactgggactcttccctccacctaggacactggggagcacaggaacttcaaacagggacacccttaacaagcacagagttcagccctgtcaatttacagacatggtgacagaagcccagaaaaggttggctcagatgtcctgtgtcccagacaaaacccctccactgcctcctatgcagcccctcctgatggctttggcagaaagaagacaggtgcagactttgtcagtcaagtcccatcagacgacaaaggctggctctgcactcagagacagcacatcctccgacagcttccctgtctccttccagagagacccagcccttcttggccattgtcca

SEQ ID NO: 402599 - DNA, 614 bp, Homo sapiens
caattgtctttccttcctctccctgttagctcattatctattacagaaaacaggaacaagagtgtaaccatgccagcacagactttcacaagacaatatctrtctctcagtctcagtcaattttcaaagagcatgatttacaagtgaattcctgttccctgatctatttattctcttcagtaatcatttatcatcctgtaattacctacattcccatctcctcttcccctctgaaatagggctatacaagtatctgggccccattggaatatgggacaatcactctgtggctctcccccaggcacctattaataaatgttcacgcctttcctccaattaatctgccttttgtcagtttatttactagcaagccttcagagggtgaaggggaagtgttgccttggcccctgcatgactacagagacagagattgcagtgaggccactgcagccaaggagtgctggcagccacctgaagtcaggagagccaagggctggtgctccccaagagcctccagaaggagtgcagctctcccaaaatacctcgattttagccccgtgaaagtgctttgaactcaggccatctctactgtgtgaattgttttaaatcaccaa

SEQ ID NO: 402600 - DNA, 614 bp, Homo sapiens
caattgtctttccttcctctccctgttagctcattatctattacagaaaacaggaacaagagtgtaaccatgccagcacagactttcacaagacaatatctatctctcagtctcagtcaattttcaaagagcatsatttacaagtgaattcctgttccctgatctatttattctcttcagtaatcatttatcatcctgtaattacctacattcccatctcctcttcccctctgaaatagggctatacaagtatctgggccccattggaatatgggacaatcactctgtggctctcccccaggcacctattaataaatgttcacgcctttcctccaattaatctgccttttgtcagtttatttactagcaagccttcagagggtgaaggggaagtgttgccttggcccctgcatgactacagagacagagattgcagtgaggccactgcagccaaggagtgctggcagccacctgaagtcaggagagccaagggctggtgctccccaagagcctccagaaggagtgcagctctcccaaaatacctcgattttagccccgtgaaagtgctttgaactcaggccatctctactgtgtgaattgttttaaatcaccaa

SEQ ID NO: 402601 - DNA, 541 bp, Homo sapiens
cgtgtttaggtaggtgaggaaatgcattgaactgatttgcagagaatgagagctccagacccagacagtgagacttcagaacttcatagatgtcaaagcatctttgacatctatgtcccagctctaggacacattcatgataggttcacttacttccaaacccaaagaggatattcttagacacttcctagtttcttcatcttgtaaaagtggttaagtggcttgtccaaggtcttttggctataaattgtagacaaggattcagagccaagtgttctgtccccaagaatgcttttgtctcttttttttaaatagtaacatcatgaggacatctcaggtcatggctggsgagtgctttgtgctctgtaagggactaggaaattgttcacatacttcttcaatattgttcctgctgtgctttttataggataacacattttaactctgtcctcactaccaagactttatataaaatcagctggaatgaattgctggtcaaattcaaaattaatttcatgtcaaagtcttttcctcatgatat

SEQ ID NO: 402602 - DNA, 541 bp, Homo sapiens
cgtgtttaggtaggtgaggaaatgcattgaactgatttgcagagaatgagagctccagacccagacagtgagacttcagaacttcatagatgtcaaagcatctttgacatctatgtcccagctctaggacacattcatgataggttcacttacttccaaacccaaagaggatattcttagacacttcctagtttcttcatcttgtaaaagtggttaagtggcttgtccaaggtcttttggctataaattgtagacaaggattcagagccaagtgttctgtccccaagaatgcttttgtctcttttttttaaatagtaacatcatgaggacatctcaggtcatggctggcgagtgctttgtgctctgtaagggactaggaaattgttcacawacttcttcaatattgttcctgctgtgctttttataggataacacattttaactctgtcctcactaccaagactttatataaaatcagctggaatgaattgctggtcaaattcaaaattaatttcatgtcaaagtcttttcctcatgatat

SEQ ID NO: 402603 - DNA, 428 bp, Homo sapiens
agtttgagaccagcctgaccaacacagtgagacttccttcttacaaataatttttttaattagctgggcatggtgaggcatgcctgtggccccagctactcaggagactaaggtggaagaaccccttgagccaggagattgaggctgcagtgagctgtgattgccycactgcactctagcctgtctcaaaaaaaaaaaaaaaaaaaaagagtgtgaattccttagccagggtggctgagttctctgcaagtcagggtttctcagcctcagcactattgacatttggggccagataattatttgttgtgcgggctgcctgtgctttggaagatgtttagcagtatccccagcctctacccactatataacagtagcattcccccatcccccctgtcgtgagaattaaaagcatcttcagacattgccaa

SEQ ID NO: 402604 - DNA, 586 bp, Homo sapiens
atctaggtggcactgacagaaagataggaacttaaagaacacaactgcaactgcctatttaatttttttgagacagggtctccctctgtaacccaggctggagtgcagtggcgtgaacacagctcgttgtatcatcaacctcctgggctcaagcaatccttctgccacagcctcctaagtagctgggaccacaggggcaccccacacaaacacactcagctaattttatatatttttgtagagatagggtatctgcagccataaaaaagaatgagatcgtgtcttttgtgggaacatgaatggagctggaggccattatccttagcaaactaacgtagaaacagaaaaccaaataccatgtgttctcacttataagtgggagctaaatgatgagaactcatgaacccaaaaaaggatataacagacactggggtctacctgacagtggagggtgggaggagggagaggagcaggaaagrtaactatcgagtactgagcttaatacctgggtgatgaaacaatctgtacaacagacccccgtgacacaaatttacctatgtaacaaaccttcacatgtacccccaaa

SEQ ID NO: 402605 - DNA, 583 bp, Homo sapiens
agtggtcacaagattcctaatctccgcaattgctcctatggataacgttaatattgtaagacccaagattggtgtttgaaatattttccagatcctacattctggtggatcagctggcaccacaaagactggtaaactggttcatctggtcctatgtcccccacccaggaactgactcaatgcaagaggacagctttgattccttatgattttatcctcaatcaaatcaatyagcgttgcctattccctagccccctgcctgccaaaccatccttcaaaaaccctaggctctaaattttcgagcaggctgatttgagtaataatgaaactctggcctcatgtttacctggctttacctgcattaagctccttctctattgccgttctcattctgaagttcaggtaacttggtcttgacccaattaaaaaattgactttcttatgtctccaagaggaaactccatctttttattaaacatttcctcaaatatttagactttttaataaatacaaccagtcttctttttaataaattttagccggttatcaacaatcagttacacaagtattactggcgtcaaaa

SEQ ID NO: 402606 - DNA, 578 bp, Homo sapiens
agactcccattttagcctccgatcccatccactttccaagatctgactttattagaccttaattttagatttatggtcacctcattgtcccatcactaacatatcccatgattttcatttgatcatcagtttgctttgtgtaatttttatagtttaaaacctaaagggggaaaggggatcaggtcacctgtcctatccctacataataaatctatttwcttttgcaaactatccacaccgcaagttcagtaattaaaaactagaaaaatgcataatgtatcttctacagttttgagaaatagttgtcatggagtgaatatgggtgggcaactaggttgtggttacattactgtaatgttttcttcctctaggtttgatgattagagaacggatgaacaactaagcagccctttcataatggtaattgtttgccttattcagtgtcacctgttaggcacacagtactccaaactatgaatattttcctatccttacaacaactactccagatatgtccaaagtgggtaaagagcttggtcaacagcagtggggtttggcaaagctcacttttcaggaca

SEQ ID NO: 402607 - DNA, 534 bp, Homo sapiens
agtttggtaaatatacataacttcaaaataaagccaaaactccttagactgacatttatgattctccactatcttatcactttaccactttatttcccaccacaaccccccatactatttattgttccaagattacatcctgtgcttactgatttrtacattcagagacacatttaaatctgcctggaattttgattcctctttccattaaaatcctacttattctacaaagtgtacttacattttgctttttcgcaaagcctttcctgatctctagattataattagaaactgtgaatcctcataaacctagatttttttgttcatttttatcttgattcttcctccattcctagaaagcatttccacctctcttctgtacaatgtacctaatttcttaattaatatatattgaattgtgtcatggaaaacagacttcagagaatatgaaaattgtctgaacaatatttagcaatcgtacatgagatgagaatcagatactggaaaatacgcctctcaggagagggacaggga

SEQ ID NO: 402608 - DNA, 534 bp, Homo sapiens
agtttggtaaatatacataacttcaaaataaagccaaaactccttagactgacatttatgattctccactatcttatcactttaccactttatttcccaccacaaccccccatactatttattgttccaagattacatcctgtgcttactgatttatacattcagagacacatttaaatctgcctggaattttgattcctctttccattaaaatcctayttattctacaaagtgtacttacattttgctttttcgcaaagcctttcctgatctctagattataattagaaactgtgaatcctcataaacctagatttttttgttcatttttatcttgattcttcctccattcctagaaagcatttccacctctcttctgtacaatgtacctaatttcttaattaatatatattgaattgtgtcatggaaaacagacttcagagaatatgaaaattgtctgaacaatatttagcaatcgtacatgagatgagaatcagatactggaaaatacgcctctcaggagagggacaggga

SEQ ID NO: 402609 - DNA, 562 bp, Homo sapiens
tgtaagcaatgtaactctctgggttataaaatggaaagttttagtaatttaaataacctctttcatgtgaagtaatcacatgatctcatttagaaaccctatttattattatgggccagaggtgcctatccaaagcaagaagaatattttatccagcattttaaattgttttctgagggagaaatattatgttatttagtctttcatatgattakaaatgaaagtcttgatattcatatttctgcttagaaatacaaatatgaattgatacatgagtagcacaactggaagtaaatgatattatttttaaatggtgaatgaaagacaattatgaaagtaaaacatgggtttgggcagggctactgaattggtctaaaaactatttggaaccatttttatacagttttattttataattaacattctatttttgtcagcacatacaaaaagtctcttttatttatttgtttatttgcccacatgtaatctttgagttttcctatattttgttattattttaaaaagtgtctcctgggaatattactatttctgctaaattgaa

SEQ ID NO: 402610 - DNA, 562 bp, Homo sapiens
tgtaagcaatgtaactctctgggttataaaatggaaagttttagtaatttaaataacctctttcatgtgaagtaatcacatgatctcatttagaaaccctatttattattatgggccagaggtgcctatccaaagcaagaagaatattttatccagcattttaaattgttttctgagggagaaatattatgttatttagtctttcatatgattataaatgaaagtcttgatattcatatttctgcttagaaatacaaatatgaattgatacatgagtagcacaactggaagtaaatgatattatttttaaatggtgaatgaaagacaattatgawagtaaaacatgggtttgggcagggctactgaattggtctaaaaactatttggaaccatttttatacagttttattttataattaacattctatttttgtcagcacatacaaaaagtctcttttatttatttgtttatttgcccacatgtaatctttgagttttcctatattttgttattattttaaaaagtgtctcctgggaatattactatttctgctaaattgaa

SEQ ID NO: 402611 - DNA, 626 bp, Homo sapiens
atgaatagcaatacaggacttagaagtgtagataataactttctctaatttgttttaagtatttcacaaagatcatcacatcctagtgagtgataggaaagataaactgatgccttcagcaaaaatatagttcagctcacttgwtgagatatctgttatataactaaagagtttcctaaaacttaatccaaactggcaatgggagaataataagctcaatatttgtgctgatactaggaaagtgaaaggctggttaccactaaatcataaaatgaaaccagatgagaggtatgtaatatctgtattttagttctacttttgatatttttatttgaatattgtagaaattaaattaagtgagaagaacatgatttagaatccacttacaataaacattaagaactagattgggtcttctgcttcagacccagatgtagaaacagggacaagatgtaccctcctgcctgaaacaacaaagaaaaataacataaaatattgtgaaacaatggtttttaagatactgaaaatgaggtattgaacaataatccctgagagactggaagcaagtgaggtgagcactctgatagcgtttcttggaggggtacaagaaggagtaagccaaggag

SEQ ID NO: 402612 - DNA, 626 bp, Homo sapiens
atgaatagcaatacaggacttagaagtgtagataataactttctctaatttgttttaagtatttcacaaagatcatcacatcctagtgagtgataggaaagataaactgatgccttcagcaaaaatatagttcagctcacttgttgagatatctgttatataactaaagagtttcctaaaacttaatccaaactggcaatgggagaataataagctcaatatttgtgctgatactaggaaagtgaaaggctggttaccactaaatcataaaatgaaaccagatgagaggtatgtaatatctgtattttagttctacttttgatatttttatttgaatattgtagaaattaaattaagtgagaagaacatgatttagaatccacttacaataaacattaagaactagattgggtcttctgcttcagacccagatgtagaaacagggacaagatgtaccctcctgcctgaaacaacaaagaaaaataacataaaatattgtgaaacaatggtttttaagatactgaaaatgaggtattgaacaataatccctgaragactggaagcaagtgaggtgagcactctgatagcgtttcttggaggggtacaagaaggagtaagccaaggag

SEQ ID NO: 402613 - DNA, 572 bp, Homo sapiens
aaaacaatatgtttcatattgaatatttgcgttctttctgggagtctagaattggtacattccaggcagaaggtgcttacatgatcagctcccaataaaaaccctgtgtatttgatatctaatgagcttccctgatacacaatattttatccatggttgttgcaatttattgttggaggaattaagcatattctttgtaattcccccaggaaaggactcttggaagcttgtgcctggttttctcccatgtgccttttcccttgcctccttttgctttatacatttttttctgtaataaatcatagtcctggatacaactatatgctgtgtcctgagagtcctcctcrtcaatcactgaacctgggaataatcttggggactgcctatatagtactatttacagtagcaccaacatttttgaaatacctgctggtaatcttaaaaaatatgtgtaggcctttatttctttccaaaatctatgaaacactggtgaaaggaatcaaataataaatatgtagacacatatactgtggtcataaattggaaggcccagtgtttttaagataacaatt

SEQ ID NO: 402614 - DNA, 624 bp, Homo sapiens
tctcttccacttatgagcctgtaaaatcgaaagtaagttaattacatcctagatacaatggggataccagtattgggtaaacacgcccattccaaaygggaaaaattggccaaaacaaaggagctacatgactcaagcaagtcccgaatccaatagggcagtcattaaaccttaaggttacaaaatgatctcctttgactccatgtctcacatcaaggaaacgctgatgcaagagttggggcttccatgttgtgtgcatctctgcttctgtggctttgaagggtactgccttcctcctggctgctttcactggctatcattgagtgtctgtggcttttccaggtgcacagtgcaagctgttggtggatctactattctgggatctggagaataatgaccctcttctcacagatccactaggcagtgccccagtggagactgtgtgggggctccatttccctccctcactgccctaagcagaggctctccatgagggctccacacctgcaacaaacttctgcctggacatccaggtgtttccatacatcatctgacatctaggtggaggttcccacaactgaattcttgaattctgtgcacctacaggcccaacaccatgtataa

SEQ ID NO: 402615 - DNA, 624 bp, Homo sapiens
tctcttccacttatgagcctgtaaaatcgaaagtaagttaattacatcctagatacaatggggataccagtattgggtaaacacgcccattccaaacgggaaaaattggccaaaacaaaggagctacatgactcaagcaagtcccgaatccaatagggcagtcattaaaccttaaggttacaaaatgatctcctttgactccatgtctcacatcaaggaaacgctgatgcaagagttggggcttccatgttgtgtgcatctctgcttctgtggctttgaagggtactgccttcctcctggctgctttcactggctatcattgagtgtctgtggcttttccaggtgcacagtgcaagctgttggtggatctactattctgggatctggagaataatgaccctcttctcacagatccactaggcagtgccccagtggagactgtgtggrggctccatttccctccctcactgccctaagcagaggctctccatgagggctccacacctgcaacaaacttctgcctggacatccaggtgtttccatacatcatctgacatctaggtggaggttcccacaactgaattcttgaattctgtgcacctacaggcccaacaccatgtataa

SEQ ID NO: 402616 - DNA, 610 bp, Homo sapiens
ggaggccagggatttaacaggtagggtatcaaaattttctcaaggtgttaatattaattgaaggtaagaatgttggcagacaaagcacatattgaacacaatttccattcacatgaagagggataaataacattctcttccacatcaccatcatctctcacctgaaataatctcctaactggactcagctttcacctttggacccctgtagtctgtcttaacatgaaacccagagtgatccttctcaatagtaaggattatttaactctctactccaaactctacaaaggtttcccattgccctgagaataaaagcatcaatgctgccaacaacactttatgtgatctgacacttcttccttttctgaaccataacccacctcttacttcttttttaaaatctttacttatgtatttattttttttcaatagcttcaagrgtacaaatggtttttggttacagggatgacttgtatagtagtgaagtctgaggtaatgtacattgtatccaatatgtagtttttttatccctcaccctaccgccctcccactctgagtctttaatgtccattataccattctgtattcctttgcatacccatagcttagc

SEQ ID NO: 402617 - DNA, 610 bp, Homo sapiens
tttaagaaggtgaaaaatgtagaatcacatagtcacaaattattatggtagaaatatttatagattaaagtctgaagatatcagttctagatcatatgacaccaagtaattataatgacactcacaatttagagcttacatgttttcaaaaaaatgatacagtgaatattctaccatagtaatttttgcaaagcaattactaactttatattatattcaggagttatgaaaaaccctttactgctttatttaatctgtttttgaataacaaacaaatcttattatacccactattttatagctatggaattggatgctaacaaagctagtagctagccctagaacatgctactagtaatggtgagcagagaatgaaactcaggcctctgatgctagacctgagctcttaaccaggatgcagccctggttttctaatgctagaaaatatacacgaaaatacttcttctcagtgtatttccccatgagatcattgtttcgattatcacacatatttagatgcagtgtagatactcmtttttctacatgaattgttttcattgcttacatctctaatatctacctacgcagacaaattctacttatcattcaa

SEQ ID NO: 402618 - DNA, 400 bp, Homo sapiens
ttgacatttagattacagataggaattaacaaaatttaaaagatagtaaagggcatataagaaaggagaaatagtatataaaaaccactggggggtagaagaacatagtgttttaggacagcagttggcaaacaattttttaaaaggtacagataagaaatattttaagtgttctgggccatatggcgtctatttcaactgttcagctctactgctgtgccatgcaagcagctgtatataatgcataatttttttagtttaattgcttccttttaatttttttttttttamtttgggttctgggttacatgtgctgaatgtgcaggtttgttacataggtatacatgtgccatggtggtttgctgcacctctcaacctgtcttctaggttttaagccctt

SEQ ID NO: 402619 - DNA, 608 bp, Homo sapiens
tttagtgtaatttatgtgtggcccaaggcaattcttcttccagtgtggcccagggaagccaaaagactagacacccctggcctacaccatttctccaattattaatatcttactttactatggtacatttgtcacaattaatgaaccaatattgatacattagtatgaatgtgagtctatagtwtacttagtttatacctaatatcctttatctctttctggatctcatcccaaataccacacacattacatttagtaattgtgaccccttaggctcctctaggctccaacagtttccttagcctttccttgtcgttgatggtcttaataatttcgaggcacagtgtattttgtaggctgtctctatattggaatttgtctgataatttcctcatgactagaacaaggttatagatttgcagaggaaggccataaagttatacatgacatttttatcatattaaattaagggtacatattctctatataagttttgacttcatattgacctcaatcacatggctgaaatagtgtttgtcatgtttttgcattggtagagttattcttttatttctcttttcatcttgtactctttgggaggaagtcac

SEQ ID NO: 402620 - DNA, 608 bp, Homo sapiens
tttagtgtaatttatgtgtggcccaaggcaattcttcttccagtgtggcccagggaagccaaaagactagacacccctggcctacaccatttctccaattattaatatcttactttactatggtacatttgtcacaattaatgaaccaatattgatacattagtatgaatgtgagtctatagtatacttagtttatacctaatatcctttatctctttctggatctcatcccaaataccacacacattacatytagtaattgtgaccccttaggctcctctaggctccaacagtttccttagcctttccttgtcgttgatggtcttaataatttcgaggcacagtgtattttgtaggctgtctctatattggaatttgtctgataatttcctcatgactagaacaaggttatagatttgcagaggaaggccataaagttatacatgacatttttatcatattaaattaagggtacatattctctatataagttttgacttcatattgacctcaatcacatggctgaaatagtgtttgtcatgtttttgcattggtagagttattcttttatttctcttttcatcttgtactctttgggaggaagtcac

SEQ ID NO: 402621 - DNA, 575 bp, Homo sapiens
taatgcaagaacagaaaaccaaataccacatgttctcacttatgagtgggagctaaacaaccagaacacatgtacacaaagaagggaacaacagacagcagggccttggagagtgtggagggtgggaggagggagaggatcagcaaaaattcctattgggtaatatgyttattgcctaggtgatgaaataagctgtataccagacccccatgacacacagtttacctatataacaaacctgcacaagtagccctgaacctaaaataaaagtttaaaaaataaaattaacaagtaaaattaaattaatagtttggctatatgcatcttttttaaataaaattagacatttaagttgttttaaattgtgaagttatttttactaaggccgttaatatcagatttaagctagtccttgcactaagatgaaaacatagctcaggtcatgagaggtgagttaacgaatccaaaatctggctatggttaccccactaatcaagtttttgttgttatttacagctattatcagtacctgatgttatttaataattttgtccattcgttctaggaggcttttg

SEQ ID NO: 402622 - DNA, 570 bp, Homo sapiens
tgaggctgagactcaaatagaagaggcttggtcaagatactccattcctcccacaggctgtaaaggtaatctagactttcaaattgacaatgtctttctggacaataactactatttttgtaactttaggtatctttaaactacataaagttaatttttggtaagagtttctaaaaggatttctgtggttttgaggagaaacaacacatcttagtmtttaaaaaaattaggtaaaatttatattatgtaaaatatttactaattgagaaaacattggttaatatttggataatttgtctactttccatctattttggcagtactatatgttgaataaatatttgttgccccctaccctccaaatttatatgttaaatcctgactcccaaggtaatagcgttagaaggtacaatctttgtggcgtgattaggttatgaggatatagccctcaggaaaaggattggtgcccttataagagactctaggaagctcatgagcctctttcaccatggaggacatggagaaaacaatgaccatctatgaaccaagaaataggccctcaccagacac

SEQ ID NO: 402623 - DNA, 522 bp, Homo sapiens
tggttcttaaaattttcccctgtcccaccagcatttcttcatatattttggtactgaggagggtaaatctcaggaaagaaacatctagaaagtcatctgagaaaccagtaatggttgartgttctcacaagatggtaatggttttttttttttttggcagataaatgcagaggttggggtggatagcctctcaagcagagaaaacatatacacatagtggcatgataaaacagtgtgtgttagaatgacaaatgtttcaagatgagaatggctttggggatccaaaagataagtatctgaaaatatatgtaggagtcataaaatgcagcggacttttttgctcttctaataagagggtagtttattctgtaaaagacagggagatattgaaggtttttagccaggaagtgaattggtgagagttacaaatctggcttctggaagcagtctatctggcttcaaatgctggattcatctcactagtagtgtgaccatagggaaattaattactatatgtacatc

SEQ ID NO: 402624 - DNA, 590 bp, Homo sapiens
ccaaggttaagctaaaatcattttttattccttgacacttcctgaagtcctcattgaaaggtttaacaacatatgttggcctctcacctcttctccctttttcttgactggactttgaatccccatcatagaaatcgttgagctgaaggcagaggatgtaatgttgagctccttcactcccagatcttagtgctgagaggcaggacagagaaatcccaatgaaaagagtgcaaggaagtgcatcaacagctagtttttctagctagttcctcttgtgccaaggagaaaataaaatttcaattttcccaattattgtgaggcattgatgacatgtggtttttattttaaccaatctttagataytagtgaaattttctcatagtggcagatagttcaatcaccttttcttttcttaataacaggggtaggcactgagtgcagagtgtgatgctgccagtagagtgtcaggtcttgataacaccttttctaaagtgggaatcatgtggtgatggaatgctcccactgaatgatgaacttaaagaacagaagttcaacaggggaagacagtccaaacaaaaaggactggtcca

SEQ ID NO: 402625 - DNA, 590 bp, Homo sapiens
ccaaggttaagctaaaatcattttttattccttgacacttcctgaagtcctcattgaaaggtttaacaacatatgttggcctctcacctcttctccctttttcttgactggactttgaatccccatcatagaaatcgttgagctgaaggcagaggatgtaatgttgagctccttcactcccagatcttagtgctgagaggcaggacagagaaatcccaatgaaaagagtgcaaggaagtgcatcaacagctagtttttctagctagttcctcttgtgccaaggagaaaataaaatttcaattttcccaattattgtgaggcattgatgacatgtggtttttattttaaccaatctttagatattagtgaaattttctcatagtggcagatagttcaatcaccttttcttttcttaataacaggggtaggcactgagtgcagagtgtgatgctgccagtagagtgtcaggtcttgataacaccttttctaaagtgggaatcatgtggtgatggaatgctcccactgaatgatgaacttaaagaacagaarttcaacaggggaagacagtccaaacaaaaaggactggtcca

SEQ ID NO: 402626 - DNA, 552 bp, Homo sapiens
tacgtctttgtattgatctgagacttttagtaaatatttcaatcatttgcttttaggcaccccatatttcccatcctagctcaaagactacacttacaaatttatattcacagtgaatgatcctatacatttctggacactgctgatagatccaggcttaggtttatggtttagatcaggggagtgttctagttatctaatggtggaaaacaagttacctaaaacatatggtattaaacaaccatttactatgctcctggactctgagcgtcagaagtttgaacagggcaaagcaggaatgatgtgtctctactccacratatctgaattcttacttagctcatttggaagattccacagttggtgactatcatcatctgaagccttatttgttcccatgttcaaaggtaaaagaaagaaacagaaatatatttactttttaccatgtgatatggtttggttgtgtctccaagcaaaaatctcatcttgaattataatccccataatgctcataatccccacgtgtcaagagagagaccaggtggaggtaat

SEQ ID NO: 402627 - DNA, 581 bp, Homo sapiens
acccattggtccttaggtcaaaaagaaattggcatattttatgtgtgctgtaaaaaaaatgcacaaattatttcttacagattgtcaccttgtgaatatgtacgtaacctgaaatataaaagcattcagacacattcragtgcagctagtccaaacatggttcaaataacacttatagcagagagggaggagtggaggaaaaacatttttttagagtagggaggtattttactctctttatgagttttgattttcttcactgtcaagaaagcataaagggaccaataaggaattcagcacaatccatcagccatttgttagataataattatatacattgcataggaaaagtgttttttgcctttaagtgattatacatatgtatgtgtgttgcacataaaataaaattaacattgataataagagaaatgataaatattataaagtgacttcattggataaatgactacagacttattataaaataaagttatattttacctgatgccagttccaactctttgaaaacccttagctttcatttgcaattagtagcaattagaatgcctataaatagatcc

SEQ ID NO: 402628 - DNA, 462 bp, Homo sapiens
atgacattcttcaattttacccttaaaataattggccatatagcccccactggccctttcttccccttcctgtagctgagacagaggaaacttggacctgacgtggaggctacatgctgaggatggtgaatctgcctctttggccttggcccatttccctctgaactgcaatttgagagagaaataacctaacttttttagtcactttattctgggatctcttgttacagcagtttcgcctaactagtatggtgtatgaatgayatagaaacacattcatgaaaggaattaaatgtaagtctttctccaaaatgaaatgccaacgatagctggaacaaggataaaataatgaatgataatataatgcttcagaaagtaattctattttatactttaagaagaatttattttcaatactttagtatttagtggcaagatacaacagcctgttttttcactcat

SEQ ID NO: 402629 - DNA, 625 bp, Homo sapiens
aattattacagaaaactaaagaggagggggtgcttccaaactcagtttatgagaccaacattcccctggtttcaaaaccagacaaggatacaataattaaaataaaattacaggctaatatccttgatgaatatagatgaaaaattctaaacaatatattaacaaactgaattcaacagcacattaaaaagatgattccccatgataaagtgtgattcctctcaggaatacaaggatggcttaacatatacaaatcaataaatgtgatacatcacagaaagacaaaaaccatatgaacatttcaatagacacagaaaatcatttaacaaaattcaatatccattcatgatataaactctcaataagttaggtatagaaagtacatatcaatacaaaaaaagtgatatataacaaacctacagctaatgtcatactgagtgaggaaaacttaaagcttttcctgcaaaaactagaatgagaraaggatacccacctttcctactcctactcaacacaatactgcaagtgatagccagagcaattaggcaagaaaaaatataaaaggcatttaaatttgaaaggaggaagtcaaattgtcccagtttgtagataacatgattttata

SEQ ID NO: 402630 - DNA, 589 bp, Homo sapiens
tctacgggtattaaactctttctctattgcaattcccatgtcttaataaattggctctattggmgcaggaggcaagaagaacccattaggtggttacaaatatgggggcttctctgggatagccccttgtagctacctgccacagttcagcagccactcactagcagcggatgtggaggccaacccaagcagctgcttagttcttttagattgaggtctacctctagcactgtctctactggtggtgtactgtcaacccatagatcatagatttaattgcggtggagaaataatcctggaagatgttttgtaatctggtttggtgaatattccaggggctgccaacacctccttccttctcctgatctgttggcctccctagaggaactgtagccctgttatagggactggctagttctctagacctgtcatggtgactgcttgactcttcatagattgtagaaagggccttggtttgaggagattactccacaattggacagagaatagggaacttgtttggaggaatactcttcttgtgtggaatctggtttgcagtcttggtttaaaaggccttctgtttgtcttt

SEQ ID NO: 402631 - DNA, 589 bp, Homo sapiens
tctacgggtattaaactctttctctattgcaattcccatgtcttaataaattggctctattggagcaggaggcaagaagaacccattaggtggttacaaatatgggggcttstctgggatagccccttgtagctacctgccacagttcagcagccactcactagcagcggatgtggaggccaacccaagcagctgcttagttcttttagattgaggtctacctctagcactgtctctactggtggtgtactgtcaacccatagatcatagatttaattgcggtggagaaataatcctggaagatgttttgtaatctggtttggtgaatattccaggggctgccaacacctccttccttctcctgatctgttggcctccctagaggaactgtagccctgttatagggactggctagttctctagacctgtcatggtgactgcttgactcttcatagattgtagaaagggccttggtttgaggagattactccacaattggacagagaatagggaacttgtttggaggaatactcttcttgtgtggaatctggtttgcagtcttggtttaaaaggccttctgtttgtcttt

SEQ ID NO: 402632 - DNA, 510 bp, Homo sapiens
cttctgctcttccatcttgcccagagactgccctttaaaactcctgtttggaggtcatctctccctactttgggtggatccaagattataggggtcaatatggggaagtttgagccttgccaggttgatatttgggcactgagccaggtgactaatgtctrtgttccatcccttgtgttttgctctggctggaatgggaactgttaattcagttccactgtgcagcctgttgggcagcattttataaaattgagggacttttgcctattgttcaatagaatggaaaaagatgattttcttttgtaacacaacttggtccccacagctatggtgcaggaagcagagtcatcaaaagccactgtattcttccagaagctgtagagaaagggaacctagaaacctggcatgctggcaaaagggtaagaatgtcttatcaaccagacttctggcctctctctttctgtgcaaacaggttgagtgaatggtaaaaatcactgtttgtctcctctg

SEQ ID NO: 402633 - DNA, 510 bp, Homo sapiens
cttctgctcttccatcttgcccagagactgccctttaaaactcctgtttggaggtcatctctccctactttgggtggatccaagattataggggtcaatatggggaagtttgagccttgccaggttgatatttgggcactgagccaggtgactaatgtctatgttccatcccktgtgttttgctctggctggaatgggaactgttaattcagttccactgtgcagcctgttgggcagcattttataaaattgagggacttttgcctattgttcaatagaatggaaaaagatgattttcttttgtaacacaacttggtccccacagctatggtgcaggaagcagagtcatcaaaagccactgtattcttccagaagctgtagagaaagggaacctagaaacctggcatgctggcaaaagggtaagaatgtcttatcaaccagacttctggcctctctctttctgtgcaaacaggttgagtgaatggtaaaaatcactgtttgtctcctctg

SEQ ID NO: 402634 - DNA, 510 bp, Homo sapiens
cttctgctcttccatcttgcccagagactgccctttaaaactcctgtttggaggtcatctctccctactttgggtggatccaagattataggggtcaatatggggaagtttgagccttgccaggttgatatttgggcactgagccaggtgactaatgtctatgttccatccctygtgttttgctctggctggaatgggaactgttaattcagttccactgtgcagcctgttgggcagcattttataaaattgagggacttttgcctattgttcaatagaatggaaaaagatgattttcttttgtaacacaacttggtccccacagctatggtgcaggaagcagagtcatcaaaagccactgtattcttccagaagctgtagagaaagggaacctagaaacctggcatgctggcaaaagggtaagaatgtcttatcaaccagacttctggcctctctctttctgtgcaaacaggttgagtgaatggtaaaaatcactgtttgtctcctctg

SEQ ID NO: 402635 - DNA, 510 bp, Homo sapiens
cttctgctcttccatcttgcccagagactgccctttaaaactcctgtttggaggtcatctctccctactttgggtggatccaagattataggggtcaatatggggaagtttgagccttgccaggttgatatttgggcactgagccaggtgactaatgtctatgttccatcccttgtgttttgctctggctggaatgggaactgttaattcagttccactgtgcagcctgttgggcagcattttataaaattgagggacttttgcctattgttcaatagaatggaaaaagrtgattttcttttgtaacacaacttggtccccacagctatggtgcaggaagcagagtcatcaaaagccactgtattcttccagaagctgtagagaaagggaacctagaaacctggcatgctggcaaaagggtaagaatgtcttatcaaccagacttctggcctctctctttctgtgcaaacaggttgagtgaatggtaaaaatcactgtttgtctcctctg

SEQ ID NO: 402636 - DNA, 584 bp, Homo sapiens
gttgagtgaatggtaaaaatcactgtttgtctcctctgcaaggttttgattaataggaaaatggatttgtgagcctcgtcttaggctgtagcaaatctggtgtcctttgtgctataaatttgtctttctgtgtcattctgttataaagaggggtaccacaggataggatagctaggacccctgtaagcctgctgtttgagccaaacctgcagatcggtcagttayaaattttgctgcatatccttgaaataaaaaatgcaaagagattttcctctcatcttgttttgtatccttgaaaacttgactttgtgaccgtatgggagtactttgtcttgatctcagctaactggagggtggcaattttcaggtacatgtaatggctagcctaaaaatttttcttaagcagttaaaatcctttgcaagctcgaaaatgagtactctagactcctgggaagaacaatggtaactgctccatgtggtagctcagtagctaaagcttggccctttcacagtggaacttgggttcagttctcagctcaggaaattattcttttctggtttggtattagtgtgacaacttctga

SEQ ID NO: 402637 - DNA, 584 bp, Homo sapiens
gttgagtgaatggtaaaaatcactgtttgtctcctctgcaaggttttgattaataggaaaatggatttgtgagcctcgtcttaggctgtagcaaatctggtgtcctttgtgctataaatttgtctttctgtgtcattctgttataaagaggggtaccacaggataggatagctaggacccctgtaagcctgctgtttgagccaaacctgcagatcggtcagttacaaattttgctgcatatccttgaaataaaaaatgcaaagagattttcctctcatcttgttttrtatccttgaaaacttgactttgtgaccgtatgggagtactttgtcttgatctcagctaactggagggtggcaattttcaggtacatgtaatggctagcctaaaaatttttcttaagcagttaaaatcctttgcaagctcgaaaatgagtactctagactcctgggaagaacaatggtaactgctccatgtggtagctcagtagctaaagcttggccctttcacagtggaacttgggttcagttctcagctcaggaaattattcttttctggtttggtattagtgtgacaacttctga

SEQ ID NO: 402638 - DNA, 584 bp, Homo sapiens
gttgagtgaatggtaaaaatcactgtttgtctcctctgcaaggttttgattaataggaaaatggatttgtgagcctcgtcttaggctgtagcaaatctggtgtcctttgtgctataaatttgtctttctgtgtcattctgttataaagaggggtaccacaggataggatagctaggacccctgtaagcctgctgtttgagccaaacctgcagatcggtcagttacaaattttgctgcatatccttgaaataaaaaatgcaaagagattttcctctcatcttgttttgtatccttgaaaacttgactttgtgaccgtatgggagtactttgtcttgatctcagctaactggagggtggcaattttcaggtacatgtaatggctagcctaaaaatttttcttaagcagttaaaatcctttgcaagctygaaaatgagtactctagactcctgggaagaacaatggtaactgctccatgtggtagctcagtagctaaagcttggccctttcacagtggaacttgggttcagttctcagctcaggaaattattcttttctggtttggtattagtgtgacaacttctga

SEQ ID NO: 402639 - DNA, 469 bp, Homo sapiens
acttgactttgtgaccgtatgggagtactttgtcttgatctcagctaactggagggtggcaattttcaggtacatgtaatggctagcctaaaaatttttcttaagcagttaaaatcctttgcaagctcgaaaatgagtactctagactcctgggaagaacaatggtaactgctccatgtggtagctcagtagctaaagcttggccctttcacagtggaacttgggttcagttctcagctcaggaaattattcttttctggtttggtattagtgtgacaacttctgatttccwgtattaaattttcctttctttgagctacctttcaggtgattctcaatcttgtaaaaattgattgccgtctctggagacacctcatgtatccttggttaattcataattgtagttaaggtttttataatttcacataggaggttacctttggtaaagttcaaaagccgaaaatatcag

SEQ ID NO: 402640 - DNA, 559 bp, Homo sapiens
ctgtcctggctaaaatctggtaattaaaaatttaaaagaatttttaaaagctctgcagttaaaaccatttaattaaagctgataattgggatatatgggtaaagatattgttttaaagccccttccttccctctgtaaaaactcctcagtcagtagaattctgcccaattctccatttacctctatctgtccctccttcctcttacrtctaatctttttgacttttaagtggaccagaaacttatttacattataaaaggacttttagacatgatttgtaatagttagacaggagatataactttttggggttgctaatgccagttatgggggggatactcagctcttggcacatttaaatcagaaaagcatgcttttggtaacctagaaggtacagaaatgtccttacacccttactgagagataagactcctatgggaaatgagctgattacagaatgagctgattggccttgggttggacactagcgtcaggggaatatccttgcaatgagatgcatggtgaaagcattacatagtctggtcccctagtgttcctc

SEQ ID NO: 402641 - DNA, 562 bp, Homo sapiens
actcttgtgagcaaaattggaagtatattttttctacttaatttctttagaatttaaaaactatttgtaagcgtacttaattcatgacagtatagttcttacataactgcagttaagtatctctattcttctgtaataggacacatttggagacattagttattttcccaaggctttggatggaaatarcatgcttttggatataaacagactgacttaaggaaacaaaggtgacttatagagccaatacaatccccatgggaaaacttttgccctataccttgtctatgcagtccctgtacagggttcctgacttatggtaagcaaagaatgttgcttttggacatatccagcagcattaagttatcttgagacctgaaggggagaggaatccacccaactcatacaagtatttgcaggaacagataaatctgtggttgagctcaaggatttaaaatgtctaatctgagattcctttgaagaaagttccagcaaagccaatttaaaaagcctatatggcaaataattagtcttgctgcattttatgaatataatcaggcca

SEQ ID NO: 402642 - DNA, 562 bp, Homo sapiens
actcttgtgagcaaaattggaagtatattttttctacttaatttctttagaatttaaaaactatttgtaagcgtacttaattcatgacagtatagttcttacataactgcagttaagtatctctattcttctgtaataggacacatttggagacattagttattttcccaaggctttggatggaaataacatgcwtttggatataaacagactgacttaaggaaacaaaggtgacttatagagccaatacaatccccatgggaaaacttttgccctataccttgtctatgcagtccctgtacagggttcctgacttatggtaagcaaagaatgttgcttttggacatatccagcagcattaagttatcttgagacctgaaggggagaggaatccacccaactcatacaagtatttgcaggaacagataaatctgtggttgagctcaaggatttaaaatgtctaatctgagattcctttgaagaaagttccagcaaagccaatttaaaaagcctatatggcaaataattagtcttgctgcattttatgaatataatcaggcca

SEQ ID NO: 402643 - DNA, 562 bp, Homo sapiens
actcttgtgagcaaaattggaagtatattttttctacttaatttctttagaatttaaaaactatttgtaagcgtacttaattcatgacagtatagttcttacataactgcagttaagtatctctattcttctgtaataggacacatttggagacattagttattttcccaaggctttggatggaaataacatgcttttggatataaacagactgacttaaggaaacaaaggtgacttatagagccaatacaatccccatgggaaaacttttgccctataccttgtctatgcagtccctgtacagggttcctgacttatggtaagcaaagaatgttgcttttggacatatccagcagcattaagttatcttgagacctgaaggggagaggaatccacccaactcatacaagtatttgcaggaacagataaatctgtgrttgagctcaaggatttaaaatgtctaatctgagattcctttgaagaaagttccagcaaagccaatttaaaaagcctatatggcaaataattagtcttgctgcattttatgaatataatcaggcca

SEQ ID NO: 402644 - DNA, 618 bp, Homo sapiens
ctgcagttaagtatctctattcttctgtaataggacacatttggagacattagttattttcccaaggctttggatggaaataacatgcttttggatataaacagactgacttaaggaaacaaaggtgacttatagagccaatacaatccccatgggaaaacttttgccctataccttgtctatgcagtccctgtacagggttcctgacttatggtaagcaaagaatgttgcttttggacatatccagcagcattaagttatcttgagacctgaaggggagaggaatccacccaactcatacaagtatttgcaggaacagataaatctgtggttgagctcaaggatttaaaatgtctaatctgagattcctttgaagaaagttccagcaaagccaatttaaaaagcctatatggcaaataattagtcttgctgcattttatgaatataatcaggccaagtataataagactaaaacttattttgccagaaaatgtgtcctactatgatttrtctttagtaaaaatgaggactggagagggaaaaattatgtttcagacaaaaactgcattacagctgtggttatattatactcttgtccattattttttagtttttcta

SEQ ID NO: 402645 - DNA, 561 bp, Homo sapiens
atattttccttacatgtattatgtagtgatagctatataaataataaaatgtactatatactcaagtatagcatgtagttattcattgagagtataggataaataatattatagcgttaaaaacaataatgttaataagcactattaataagtgcctatatgggcattaatttacattatttctaattctgaaaacagcaagacagatatgtatttctgttttacaaaaatgaaactgtggctgaatttttttgtttacttgcctaagaccgctaataagcagcaaaaccgggattcwaatcctttcctgtttggttacaaaattaacatctttcactaagctacatttttttctatttttaagatcatatttgcttcaaatacatgaatttcatattatatttcgtaaacttaatatttacttcaaatacataaaggtcatatttgcttcaaaacataaatttcagagttcacagagaagtggtagctatgtctacatgagatgataaattatttagtttttattcagatgtttgacatataagcagtaaaaagaaaact

SEQ ID NO: 402646 - DNA, 561 bp, Homo sapiens
atattttccttacatgtattatgtagtgatagctatataaataataaaatgtactatatactcaagtatagcatgtagttattcattgagagtataggataaataatattatagcgttaaaaacaataatgttaataagcactattaataagtgcctatatgggcattaatttacattatttctaattctgaaaacagcaagacagatatgtatttctgttttacaaaaatgaaactgtggctgaatttttttgtttacttgcctaagaccgctaataagcagcaaaaccgggattctaatcctttcctgtttggttacaaaattaacatctttcactaagctacatttttttctatttttaagatcatatttgcttcaaatacatgaatttcatattatatttcgtaaacttaatatttacttcaaatacataaagrtcatatttgcttcaaaacataaatttcagagttcacagagaagtggtagctatgtctacatgagatgataaattatttagtttttattcagatgtttgacatataagcagtaaaaagaaaact

SEQ ID NO: 402647 - DNA, 561 bp, Homo sapiens
atattttccttacatgtattatgtagtgatagctatataaataataaaatgtactatatactcaagtatagcatgtagttattcattgagagtataggataaataatattatagcgttaaaaacaataatgttaataagcactattaataagtgcctatatgggcattaatttacattatttctaattctgaaaacagcaagacagatatgtatttctgttttacaaaaatgaaactgtggctgaatttttttgtttacttgcctaagaccgctaataagcagcaaaaccgggattctaatcctttcctgtttggttacaaaattaacatctttcactaagctacatttttttctatttttaagatcatatttgcttcaaatacatgaatttcatattatatttcgtaaacttaatatttacttcaaatacataaaggtcatatttgcttcaaaacataaatttcagagttcacasagaagtggtagctatgtctacatgagatgataaattatttagtttttattcagatgtttgacatataagcagtaaaaagaaaact

SEQ ID NO: 402648 - DNA, 573 bp, Homo sapiens
gctttttagttactccacaaaagagaaggaggataagttcatagttatctcttgtcagacagaccaataaatttttcaaaaaaaatgtgaatgacatatttccaatatgatattgtcttgtacttctttatataagaataaaaaggccaggcgcrgtggctcatgcctgtaatccaagcactttgagaggccgaggcaggtggatcatgaggtcaagagatcaagaccatcctggccaacatggtgaaaccccgactctactaaaaatacaaaaaattagccgggcgtggtggtgggtgcccatagtcccacctacttgggaggctgaggcaggagaatcacttgaacccaggagatagggttaccatgagccgagactgtgccactgcactccagcctggtgacagagcaagactctgtgtcccaaaaaaaaaaaaaaaaaagaaaaagaaaaaagaataaaagtgaacatccagtgtgtccaatttatattctcagtctggttcactgaagttttcaacagtctgtttctttgaaccaaacttcatatattattcaaagtaccctgcacac

SEQ ID NO: 402649 - DNA, 573 bp, Homo sapiens
gctttttagttactccacaaaagagaaggaggataagttcatagttatctcttgtcagacagaccaataaatttttcaaaaaaaatgtgaatgacatatttccaatatgatattgtcttgtacttctttatataagaataaaaaggccaggcgcggtggctcatgcctgtaatccaagcactttgagaggccgaggcaggtggatcatgaggtcaagagatcaagaccatcctggccaacatggtgaaaccccgactctactaaaaatacaaaaaattagccgggcgtggtggtgggtgcccatagtcccacctacttgggaggctgaggcaggagaatcacttgaacccaggagatagggttaccrtgagccgagactgtgccactgcactccagcctggtgacagagcaagactctgtgtcccaaaaaaaaaaaaaaaaaagaaaaagaaaaaagaataaaagtgaacatccagtgtgtccaatttatattctcagtctggttcactgaagttttcaacagtctgtttctttgaaccaaacttcatatattattcaaagtaccctgcacac

SEQ ID NO: 402650 - DNA, 581 bp, Homo sapiens
atagatcctggatatttgacctttgtttgatgcatagtttgtaaacatgttctaccattctgtagtatatctgtttcttctggtgacagtttatcttgctgtgcagaagttccttagtttaattaggtcccacttgtcaatttttgattttgctgtaattgcttttgaagacctagtcataaattctttcccaaggccaatgtccagaatgatatttcacaagatttctaggattcttatagtttgaggtctgatatttagagctttaaaccmtcttgagttaatttttgtgtatggtagaggtctagttcatttttctgcatatgggtagccaagtatcacagcaccatttattgaatagggagtacttttcccattggttatttttgttgactttgtcaaagatcagatggctgtaggtgtgtggctttatttctgggttctctattctgttccattggtctatctctctttgtatacctgtatgatgctcttttggttactgtacacttacagtagtatagtttgaatcaggtaatgtaatgtgtctggctttgttctttttgcttaggactgatttg

SEQ ID NO: 402651 - DNA, 574 bp, Homo sapiens
taaggtataaaaccacttgaacattgcctttatatttgtacttatatattcaaatgcctaagaaaaaaaaaagcctgaaagaatatagacaaatctgggagaacactaaagattggaattggggaaaatggtcaaagttattcttattttatttgtgttgttcaaatttttatgaaagaatataatgtggcaattgtttaattacaaattaaaaggactgcaaaataaatgaatattggcatcagaaaactataggtttgagttgtggctctagcatttattagcatataatcttgaataaatcactttacttcttgtatatcagtttttccatcartagtcttttgtcacagaagtttttttattttaatatatgcagttttatcagtcttttcatgtgattcttgctttttgtttcttattcagtaaatatttccctaccagagagaaaatacaattctatttttttctattggttttaagaccttgcatttcacaattagattttaatcttcatgtaatttatgatggtttgatatagtagacttttatttgcacatgtaaataattcatt

SEQ ID NO: 402652 - DNA, 570 bp, Homo sapiens
ggtcaaatgacacaattctgaagagagggggtgttaacctcccatggagaaaaccttgaccaatgttaggcaagagacaagtaataaattcttcctctcttcctccttattatttggctaatttgagtcatagttttctcacataaacttttggagatttcttgcaagaccatgctacacctgaccagtgatgtctcttctgcttctccccatgaaatagtagagtgataatgaatcatctttcttttattattacaaccctgagattgcactcctcccttaaacactaggactaaaccctgcctcaagctttttttstacacacttctggttaagataacagttactacaattattctcgataagggactgaaaaatacagccacaaaccaaatctggcatgctgcctgttttctcaaaatgttttattgaacacagccatgctcattcattaacatatgtctgtggctgctttcttgctgtaagagtaaagctgagcagttgggatgcaaagcctaaaatgttcactatctggcctttacataaaaagtttgccaactcctgtcctag

SEQ ID NO: 402653 - DNA, 570 bp, Homo sapiens
ggtcaaatgacacaattctgaagagagggggtgttaacctcccatggagaaaaccttgaccaatgttaggcaagagacaagtaataaattcttcctctcttcctccttattatttggctaatttgagtcatagttttctcacataaacttttggagatttcttgcaagaccatgctacacctgaccagtgatgtctcttctgcttctccccatgaaatagtagagtgataatgaatcatctttcttttattattacaaccctgagattgcactcctcccttaaacactaggactaaaccctgcctcaagctttttttgtacacacttctggttaagataacagttactacaattattctcgataagggactgaaaaatacagccacaaaccaaatctggcatgctgcctgttttctcaaaatgttttattgaacacagccatgctcattcattaacatatgtctgtggctgctttcttgctgtaagagtaaagctgagcagttgggmtgcaaagcctaaaatgttcactatctggcctttacataaaaagtttgccaactcctgtcctag

SEQ ID NO: 402654 - DNA, 576 bp, Homo sapiens
atcctaattttccactctattaacttatccattatacatacatttattatattttacccaccagaataaaaatttttcatgacttatcaaattataatgtaaattagtacttgtgctactttctggaaattataaggactgtattagtcagggttctccagagaaacagaatcaataggatatatatctgtatagctatataagaaggaatttattatgcaaattggttcatgtaattatgcaggattagaagttccacaatatgctctctataagctgactaagtaggaaaactgggattgtaatttagtctgtgtttgaaggcctgagaaccagagaagtgggagaggcctgggaaagaaaagtctgaagtcctgagaaccttgagctgatattcaaaagcaggaaaggatagatgtcccagttccagtagagagagcaaattcacctttcgtcttttttgttctatcctaagctcaataaactggataatgtctactcacattggtgagggcagatattcttcactcagyctactaattcaaatggtcatttattctggaaacactttcacag

SEQ ID NO: 402655 - DNA, 539 bp, Homo sapiens
tattaaattactactcccacccaaaagtacaagtcacagatgactttataatggaattttatgaatttttcaaatattagataataccaatgctacatagactgttcttaaaaaaagattgccaagctatggccagtgggacaaatatggcctgcctsttattattttaaataaagttttattggagattgtgtagtctggaaagcctaaaatatttactgtttggcctattacagaaaaactttaccaacccctgttctgagtatagtttcaaaaaagaaaaaaattcaaattgtttttatgaagcaattataagagtgataactaaacctaataaaagttgcataaaaagaaaactggttttattggatgtattaataccaatggaaaaggagtgatatcagcaaagtggcagaataggaagcctgggctttcattcttacaaacacacagattcagctacaattcacatataaattccctttgtgagaaatgacaatgtaattgaaaagtttctgaaccccaggagaacatgaaac

SEQ ID NO: 402656 - DNA, 539 bp, Homo sapiens
tattaaattactactcccacccaaaagtacaagtcacagatgactttataatggaattttatgaatttttcaaatattagataataccaatgctacatagactgttcttaaaaaaagattgccaagctatggccagtgggacaaatatggcctgcctgttattattttaaataaagttttattggagattgtgtagtctggaaagcctaaaatatttactgtttggcctattacagaaaaactttaccaacccctgttctgagtatagtttcaaaaaagaaaaaaattcaaattgtttttatgaagcaattataagagtgataactaaacctaataaaagttgcataaaaagaaaactggttttattggatgtattaataccaatggaaaaggagtgatatcagcaaagtggcagaataggaagcctgggctttcattcttacaaacacacagattcagctacaawtcacatataaattccctttgtgagaaatgacaatgtaattgaaaagtttctgaaccccaggagaacatgaaac

SEQ ID NO: 402657 - DNA, 494 bp, Homo sapiens
ggataaaaaattttccagagagatagcataaagaaaaagaactacaacttctggaaataaaatacacacttagggaaatataaaatgcactggagagtttcaacaatagactagaacaagtagaagaaagaatttcagaggtcagagacaaggcattcaaattaacccaatcagaaaatgaaaaaaaaagaattaaaaaaataaagtctccaagaaatatgagattatgttaaacagccaaacctaaaattaactggtgtcctgaggaagaagaaaaatctaaattttgggaaacatatctgaaggaattattgaggaaaactttgctggccttgatagggatctagacatccaaatacaagaagctcaaataacttatgggaaattcatcacaaaaaaattatcagcaaggcacacaatcatcaggctraacaatgtgactacaacaattactactgaagtcaagatggagaaaagaatcttaagagctgtga

SEQ ID NO: 402658 - DNA, 613 bp, Homo sapiens
gtttgttcttgtttctctagttccttgagatgtgctctttcagactttttgatttaggcatttaatgctgtaagctttttctattagcacagctttgctttatcccaaaggtcttgataagttgtgtaatgattatcatttagtttaaataatttctaaatttaaatcttgatttccttawtaacccaaagataattcaagagcagattatttaatttccatgtatttgttaatgttgaggattccttttaaaataaatttccagttttattccaccatagtctaagactatactttatatgatttagattttcttaaatttattgagacttattttgtggcctatcatatggtctatcttggagaatgttccacgtgctgatgagaagaatgtatattctgcacttgggttgaatgttctgtaaatatgtgttaagtccacttggtctagcatatagtttaagtctactgtttctttgatgtctttctgtcttgatgatctgtgtagtgctgtcagtggagtattgaagtctcccaccattactgtgttgccatctctctcatttcttaggtctagtagtaattgtttcataaattttggagcaccagtgtt

SEQ ID NO: 402659 - DNA, 574 bp, Homo sapiens
ccactccaacatttgttcacaaagggaaaacagacctcaggctcagaacgttagatagaaaatggtatataactagaatttaacaatatggcttttattataagctctttacatttactttttatttatagcaactagtaatagttttacacttaaggtggtgattatagtttcttataccatgtaattaaaagaaaggataaaataatgagtagattaaaagtaagcaataagcaacagatagtacagcatacacatgaatatgacaaaaaatagtgatggtggcacatgaatatgtatcaactgccccaaacaaattaatctcagctctaggctcaaacttatagtgcttttctatctctatttctcctactcctaaaaagcctgttacagtactcactgtgtcagaatcacccaggagaagttaataaacatgagattactggccttgactcagtggtgtccaggaaccagctcttagcagygcagaagagcttactgcgcacatctcttccctactttgttcagtgacatcaaattagtagcttgaaactggtcatgatgggagtactgg

SEQ ID NO: 402660 - DNA, 624 bp, Homo sapiens
ccatctcagccaggggcccaatgtcattgccagatggatagagggtatgaaaaaggataggccccagaagattatgtagcccaattgatggctattccatcaacaatactggtggttcagatggtcctccccttatttgggaataccataaagggttgaaaaaggacccaaatattgcaaaaaagcctcaagaatacactttcataagagactaattaaagatgcaattaagttaagggacttagggcttggmcttgttgccaggacaattcatgcatggtgtcagaacatcctgtcaattagttccataaactgtgccctcctcttcacccccatggccatcacctcctttaaagttcttatctgctcctacctcagctactcgatggccaaactatttggtctccctaccttatggactccttgttgccactatagaccatttcctgtaatgctgtcattacagtcctaaaattcaaacctggccaagctgccttccttcttgaaaaatgttaatgtctccagtagccctaagaagtccataggctccattctgttattcaagatgccaaccaatggttttgacctcacttcctgtgaagctcttcctcatcatgaacatca

SEQ ID NO: 402661 - DNA, 624 bp, Homo sapiens
ccatctcagccaggggcccaatgtcattgccagatggatagagggtatgaaaaaggataggccccagaagattatgtagcccaattgatggctattccatcaacaatactggtggttcagatggtcctccccttatttgggaataccataaagggttgaaaaaggacccaaatattgcaaaaaagcctcaagaatacactttcataagagactaattaaagatgcaattaagttaagggacttagggcttggccttgttgccaggacaattcatgcatggtgtcagaacatcctgtcaattagttccataaactgtgccctcctcttcacccccatggccatcacctcctttaaagttcttatctgctcctacctcagctactcgatggccaaactatttggtctccctaccttatggactccttgttgccactatagaccatttcctgtaatgctgtcattacagtcctaaaattcaaacctggccaagctgccttccttcttgaaaaatgttaatgtctccagtagccctaagaartccataggctccattctgttattcaagatgccaaccaatggttttgacctcacttcctgtgaagctcttcctcatcatgaacatca

SEQ ID NO: 402662 - DNA, 433 bp, Homo sapiens
gagcctcagggtgagaattttagtatatccatgatgttctggccactgtgccaaatgctttgagaatatcacctcatttaatccctacagtaaatctatttcattggtaacatggtaatcctcactttacagatggaaactgagcacagattgattcaacttgcttaagycagctgagctaaataatgatttcctttaatcgcaattttgtcctttcttttgcatttccttgttatcatcaaagtgagttgccagtggaggttgtaactttttctcctgggtatttgtcatgtaattttaatctgactgactgtaagaaggtatgataggcagaaaaatgtcccctgcccccaaccaccaaaagatgcccatgttctaatcccaggacctgtgattatgttgcctgacacagcaaaagagactttgcagatgt

SEQ ID NO: 402663 - DNA, 612 bp, Homo sapiens
gacattgatttagccaagggcattggaaatactatagcagcacccttgtcttctctctagaggttgctgaactgatttgggtaaaataagaaatgatccctcagccttgaacaaaatcaggacaaaattaaatgtttgaacttttaaggagttcatccaacttctcccctgttggttgtacttgcctttggtgtctgcttctaatccccacttgtggccagcttgggggaacatcctgctagaaggcagctctgcctggggtaattctggcctcattcaaaataggaagagccccaggtctcttgagattctcctctccaaagatttcccatctgattstgcagtcctgagagaggagcatttgcaagccttgctatccagtggctgaacttctgcctgctgatcgcactaaggagagccatcagctgtccacagggtctcatgttcctgcttgttagcattgctgaggaaattgatacttctcatcatcttccctgacaccaaatggctttctggtgcctcctcttgggtctgggtggcctttattctacaggcttaaccagggacaattttactaaactctcctgtgcaagccgagcgaagggaagcacg

SEQ ID NO: 402664 - DNA, 632 bp, Homo sapiens
ccatgttgagcagtcacagagccagccattgttgggagacattgggggcattaaggaaaaccacatacaaagccacagctgtcactgctcccatcatcccccacatgtaaggctgctccctccactccctgacccaccaggtatttctctgatgccactgcatatgtgattcccttggcccagggtaatctttgcacatctcttcctacagaatagtcattctgaaagactctgctccaattgcaccttgatcaagaaaacttgtctgaattctcactctgcatactgggagaaccctaagctggcctctattttaacccccagacaaagcctcctacttatttgaagttttgcacayagactctcagatcctcagaacaagaacctttcttcatctctgcatgtccttctaagcgctgttccttgcataaaaaatgaataaacaattttcacgtctaaagcacacacataggtgtgtaaatctgttaaccgttacaaagtgtatcagtttcctgtggctgatgtagcaaagtgccacaaacttcatgatttgagaacaacatacatttgttatcttacagttctggcggccaaagtctgaaacgggtcttatggggataaaagaaggactg

SEQ ID NO: 402665 - DNA, 492 bp, Homo sapiens
actcatagacctcaggagcgaggaggctcctgctcactcagttgtgagttatttggggacagatggaaattaatctgaacccaagggacccactgctccaggaagagggktttttttctgccaaggaaggtttaaggccctgggctgagcaaccattctatcccctcatctagagcaatgcctagcattgagaaagtggttgataattattacaggataaaatgacgttttatccttatttttccagaggagacccaaaaagattaggcaacttgcccaagatcaggacgcaggtaaaaggcatctcaaggctgctaattcaggcctctagacaccaaatccagtcctcatgccccttcctgtggccccatatgcaatgagtgtgctcagtcaaaactggacagcactcagtgtcaagcactgagggacagacacagtgctgtacaaagggggtctctgtctcagcccctcaatcttgaactcaggaagtgg

SEQ ID NO: 402666 - DNA, 492 bp, Homo sapiens
actcatagacctcaggagcgaggaggctcctgctcactcagttgtgagttatttggggacagatggaaattaatctgaacccaagggacccactgctccaggaagaggggtttttttctgccaaggaaggtttaaggccctgggctgagcaaccattctatcccctcatctagagcaatgcctagcattgagaaagtggttgataattattacaggataaaatgacgttttatccttatttttcsagaggagacccaaaaagattaggcaacttgcccaagatcaggacgcaggtaaaaggcatctcaaggctgctaattcaggcctctagacaccaaatccagtcctcatgccccttcctgtggccccatatgcaatgagtgtgctcagtcaaaactggacagcactcagtgtcaagcactgagggacagacacagtgctgtacaaagggggtctctgtctcagcccctcaatcttgaactcaggaagtgg

SEQ ID NO: 402667 - DNA, 538 bp, Homo sapiens
aatcaacggtaataaaaaaaaatcagtaaaccagattttgtggggtgtggagggcatgcagatcaaggcgcaaggtggttgagtttttcatgattcaaaagggaccagtaatagtgtagaagtcaattaccagatcatactttgaactgatgttatattgctatattctaataaaatgtcttatctaaatctttatccttttttacttctcatctatccaactattatgaatattttaatatgttgactaaacaaattggtcataatgatatatagagataaccaattttcaaggaattagattttgaatcwacagtaaaagacattggccataaattggaagaaagaagattagcaaataacttgatttatatatacatatatatatgttttgttaattattatttacagtttcccacataatttaatgtttttggattcaccttaaaatatctcatagtggtatttttttaaaaaaaacgaatattaagttaatggttaatctttcaatcaaagatatcttagaatgaataaataa

SEQ ID NO: 402668 - DNA, 573 bp, Homo sapiens
gaggcaggaggatcacttgagccctggagttcaaggctgcagtgagttatgaacgtgtcactgcactccagcctgggcaacaaagcaaggctctgtctctaaaaataaaatcaaaaataaagcaaagcaaaacacgctgcaacctttagaaatgtcaaaggagaatatttaatgatataggaacaatacatataattatagattgataataaaaagcaggtcatggcccacgcctgtaatcctagcactttgggaggccaaggggcgggtgaggggggggcagatcacatgagttcaggagttcgagaccagcctgaccaacatggtgaaaccctgtttctattaaaaatacaaaaaaattagccaggtgtggtagtgggcacctgtaatcccagctacttgggaggctgaggcagcagaatcgcttgaatccaggaggcagaggttgyggtgagccaagatcgcgccattgcactccagcctgggcaacaacagtggtcacccttgagggaaaaaggcatatgtataacatgaagttactacacacaggtaagcacccccctcccacacaca

SEQ ID NO: 402669 - DNA, 456 bp, Homo sapiens
atcttcatatctatacatgaagatagttaatttgatgtctgagatgcatgggtcctgggcaattgtaacatgtttagcaggattttgaaatcattaggaagacaaagcattgagcttctgagcattcaaggtctaaaggagtgtttcccattaaagcaacacacrtataccacttccattctgctgcaagcccagcctagttggagggaaagtaatggtggtatttatcagttttaagaggacagtagtcatattgcaaatgagcttttgcaacttcattaagagcttggagaccaatttagttaacatactgaagtaattagctataaaagtccaaggatggcatttgggtggaggagaggatggtggacagggaacctctgagtgggaaggcaatggggtctagaggtgccatgtgagaaggcttctggtgatgccaggttgagcatgtcctga

SEQ ID NO: 402670 - DNA, 585 bp, Homo sapiens
tatactttgattttagactttcagctttcagaactgtgagacaataaatttctcttgttttaagccaacaagctggtggtactttgttacagcagccaagggaaactaataaacctgtaaggtagcatattcacaggtttcaaggtggacatcttgtggggaggaagaggtattattctgcctaccatgatagccttaaggggattttgcattttagtaatttccaatgagaagaagtagaaggatgtttggagataattctccatgggtctcaggtttttgcacrtcttgagagtggaagtgtttgatgcctttgttccagactatattttaagaatgtttgtacatcaatagccttgatatatggggataatatctatccctggaacaaaaagatttttttaaaattttttgttttgttttgatttggtttggtggttgttgttgttatttttactgtcagtgtaataaggaaatgtctctctccaaggttacagtcaggcaggcatactgtctgttagaaaagacttaggttccctaagcacgaggctcctcttctacagcacaacccacaacggtgcaggt

SEQ ID NO: 402671 - DNA, 604 bp, Homo sapiens
agattggtaggcttgggccatggggtaagtatatcaatttgtatcagtttgctagggctgccattattaagtaccacagactgagtggttaaacaacagaaatgtatttcctcacagttcaggaggctgtaagtctggctggtttcttctgaggcccctctccttggctcatagatgctgtttcctccatgtgtcttcacatgaccttctctctgtgtgtgtctgtgtcccagtctcctctttttacaaggagaccagtcagactggatgagggcccattctaaaaacctcatttcaacttaattacctctttaaagaccgtgtgtctaaatatggtcacattctgagataggtgttgaagttaggacatgaacacatggattttggggagacacaattcaggtcataacacaattaaaatgtagatgcaaggaaattattaaagatttgaaaaaacrgaatgataatggattattatttgaaaaaaacggaatgataatggattattatgtggtacttcagccagatactgagagtagaaggagcccgtaggcagtgtgatgccacatttcctatgtgcggcagctcagatgttagggagact

SEQ ID NO: 402672 - DNA, 656 bp, Homo sapiens
aaactgctatgcaaaggataacatagctttaaaatatatgaggaaaaggtaacagaactaaaaagaaacagacacacaaaattatagttggagattttaacatacctctctctgggactgtgacaagtggacaaaaaaaccacgaagaatgtaaaagattgagcaacacaaaaarccatctagacttatttgatatatgtagaataattcaaacaacaacgatagaatacaaatttttcatgaccacaaagaacacatatcaacatagaccatattctgggccataaagcaagcctcaacaaatttcaaaaggctgaaatcacatacagtatattgtttgatcacaatggaattgaacttgagatcaaaaggaaaaagaaaactgttagatcaatacatatttggaaaataagaaatacatttctaaatagcctataggtaaaacaaaaaatggaaaagaaattagaaatattttgaactggctcataatgaaaatatatcacatcaaaacctgtgagttgaagttaaagcaatgtttagaggacaatatatagcactaactgcatatattataaaagaataaatgttgataattagcaatttaagtttctgtctcaagaagctggtaaatgaacataaaaaataaaccaaaaatg

SEQ ID NO: 402673 - DNA, 656 bp, Homo sapiens
aaactgctatgcaaaggataacatagctttaaaatatatgaggaaaaggtaacagaactaaaaagaaacagacacacaaaattatagttggagattttaacatacctctctctgggactgtgacaagtggacaaaaaaaccacgaagaatgtaaaagattgagcaacacaaaaaaccatctagacttatttgatatatgtagaataattcaaacaacaaygatagaatacaaatttttcatgaccacaaagaacacatatcaacatagaccatattctgggccataaagcaagcctcaacaaatttcaaaaggctgaaatcacatacagtatattgtttgatcacaatggaattgaacttgagatcaaaaggaaaaagaaaactgttagatcaatacatatttggaaaataagaaatacatttctaaatagcctataggtaaaacaaaaaatggaaaagaaattagaaatattttgaactggctcataatgaaaatatatcacatcaaaacctgtgagttgaagttaaagcaatgtttagaggacaatatatagcactaactgcatatattataaaagaataaatgttgataattagcaatttaagtttctgtctcaagaagctggtaaatgaacataaaaaataaaccaaaaatg

SEQ ID NO: 402674 - DNA, 558 bp, Homo sapiens
ctgctgaattcatcaaacatataaggaagaaatcatattaatcttacaaaagcttttcagaaattataagataaaagaagttttattaactcatgtcatgaagctagcataacctctataccaaaatgtgccatggacattacaaaaaaaaattatagaccaacatgtctcacaaactcagatacaaaaattctgaacaaaatattagcaaatttaatacagtgatatttttaaaagatgatgaagcagaccaatagtgtttattccacaaattaaaaaattcaataatttattcaaaataaataatataattcactayattaattgaataaaagataaaattcatatgatcatctcaaatgatgcccaacaaaccatttgtaaaattcatcacctaatcaggttttaaaaattggcaaaagaggggaatttccttattgtaaaatagaaagtctacaaaatacctatagtaaatattataattgtaaaatattgaatactttcactctgaatttgactaaaacaagaatgttcactaacattacttcaatttacata

SEQ ID NO: 402675 - DNA, 610 bp, Homo sapiens
atccagccagtagaggtttttttttagcctgaacaatattatttttttcaaaaatgtgttgtccacattatgagatttcatattaaaatgcacatttacagtttctcttgaaacaacaggagatctggcaactctgggcctgctttgggcaattcttgcagacactggtgctcaggaggggctgcccttttggacagagcatgcacttgccagctcaccccagtcctcaccactccctattctatcccagtggcctcgttgacttacactagcagtcatatccctagcggtgcattcaagttccttcatgcactgaggatttcttgaggactccttcaactgaatattcattgcctgcttcttgctggcttaaaattagaattaggtttcgttagaaatgacagtctaatggtattagacattmttccattccctcgtttgtctcgtctgactgtgaccacagagcacgtctctgctctccagcctcaaagatgatatgacctctcttcggacatactggctctaagaaaacaaacaaaaacttggtaattggggcttctgcaggaatgtatgttcatttccatcttcctgtaatccactgcattcttta

SEQ ID NO: 402676 - DNA, 544 bp, Homo sapiens
ctttgtaggaaatcctaaggaacctacaaaaaaataaaaaactgtctaggaccgatacatgagtttttaacaaggtttcagtttacaataccaacatacaaaaatcaattgtattttaatatactagcattgaacatgtggaaatcaaaataaaaaaataatggcaatacyaaatgctggtaacgtaacagagaaactggatctcttgaacatttgtggtctaatataaaatggtagagtcactctggaagctccttcgggccagaccctgggcattgtatttaatttgaactacaagtatggcaagttctttgtgactattttgtatgctttaagaatagttaagcaaaagtttagtgcctagatgcctagatatggaagaaaaattgattagatagtttcatcactttctgttggtgggaacttaaaacaaatcatgcagtagtttatcaaatatgttttgaacttgtatgtttcaagcactgttctaggtgctgaaattaagtggtgaacaaacatatcctaaggcttttcacaaaggtga

SEQ ID NO: 402677 - DNA, 544 bp, Homo sapiens
ctttgtaggaaatcctaaggaacctacaaaaaaataaaaaactgtctaggaccgatacatgagtttttaacaaggtttcagtttacaataccaacatacaaaaatcaattgtattttaatatactagcattgaacatgtggaaatcaaaataaaaaaataatggcaataccaaatgctggtaacgtaacagagaaactggatctcttgaacatttgtggtctaatataaaatggtagagtcactctggaagctccttcgggccagaccctgggcattgtatttaatttgaactacaagtatggcaagttctttgtgactattttgtatgctttaagaatagttaagcaaaagtttagtgcctagatgcctagatatggaagaaaaattgattagatagtttcatcactttctgttggtgggaacttaaaacaaatcatgcagtagtttatcaaatatgtwttgaacttgtatgtttcaagcactgttctaggtgctgaaattaagtggtgaacaaacatatcctaaggcttttcacaaaggtga

SEQ ID NO: 402678 - DNA, 549 bp, Homo sapiens
ggtggctcacacgtgcaatcccagcactttgggaggacaaagtgggcagatcacttgaggtcaggagttcgagaccagcctggccaacatggcaaaaccctgtctctaacaaaaatacaaaaacyaactgggcatggtggcgtgcacctgtaatccctgctacccagctactcgggaggctgaagcatgggaatagcttgaaccctggaggtggagactgcagtgagctgagattgtgccactgcactccagcctggctgacagagtgaaaccctgtcttaaaaaaaaaaaaaaaaaagaatgagatcatgtcctttgcaggaacatggatggatctggaggtcattatccttagcaaactaacgccacaacagaaaaccaaataccacatgttctcacttattagtgggagctaaatgataacacatggacacatggggggaacaatacacattggagcctaccagagggtgggggatggtaggagggagaggatcaggaaaaatcactaatgggtactaggcttaatacctgggtgactaaataata

SEQ ID NO: 402679 - DNA, 332 bp, Homo sapiens
tcctccctgccttgctcaccgtccagttgtccatatagcctcattcttcctggatgtgggacaagaacttaggactcactgaacagcaggagcaaagggagctgtaacacgttcctggccagcttgctgagctgtgggtggtgacatrcccctggactacaagagtgaagactggaaacccttctgggggcctagaccttggggttccctgagccagagctgctgtaacactttagcccttccaccctccacgggcgccaggtagccgccccacatggcaggaagcagtggtggggctgagccagcccagaagctgcaagccagaacagggc

SEQ ID NO: 402680 - DNA, 332 bp, Homo sapiens
tcctccctgccttgctcaccgtccagttgtccatatagcctcattcttcctggatgtgggacaagaacttaggactcactgaacagcaggagcaaagggagctgtaacacgttcctggccagcttgctgagctgtgggtggtgacatacccctgractacaagagtgaagactggaaacccttctgggggcctagaccttggggttccctgagccagagctgctgtaacactttagcccttccaccctccacgggcgccaggtagccgccccacatggcaggaagcagtggtggggctgagccagcccagaagctgcaagccagaacagggc

SEQ ID NO: 402681 - DNA, 332 bp, Homo sapiens
tcctccctgccttgctcaccgtccagttgtccatatagcctcattcttcctggatgtgggacaagaacttaggactcactgaacagcaggagcaaagggagctgtaacacgttcctggccagcttgctgagctgtgggtggtgacatacccctggactacaagagtgaagactggaaacccttctgggggcctagaccttggrgttccctgagccagagctgctgtaacactttagcccttccaccctccacgggcgccaggtagccgccccacatggcaggaagcagtggtggggctgagccagcccagaagctgcaagccagaacagggc

SEQ ID NO: 402682 - DNA, 332 bp, Homo sapiens
tcctccctgccttgctcaccgtccagttgtccatatagcctcattcttcctggatgtgggacaagaacttaggactcactgaacagcaggagcaaagggagctgtaacacgttcctggccagcttgctgagctgtgggtggtgacatacccctggactacaagagtgaagactggaaacccttctgggggcctagaccttggggttccctgagccagagctgctgtaacactttagcccttccaccctccacgggcgccaggtagccgccccacatggcaggaagcagtggtrgggctgagccagcccagaagctgcaagccagaacagggc

SEQ ID NO: 402683 - DNA, 519 bp, Homo sapiens
atttcattttgttgttaaaaatatgctgatctcaatccactgaactgatttcatgacccatgatatgcactatgaaactcacccggagcttgaaacacttctgtttcagtgaagtctggacaagagagagtgtcttgtgaacatgtggagagggcagcagaaaagcacctcaatttagaacaatgtcacaaaagaaaagtgagctccggggcttgggggatggaggtgcaactctcaaatgtcaataatcaataggataaacgtgtccctgactttcgaacagaggcccttgtgagggagttacatcattggtctgcctcaaaagaaactttattcagcatttcttgtcttgcatgtgaaaggaatgagagtgtttgaggttgcaggcaagcatttagatgttgaataatccctctaaaccattgtgcttacagctaaggcagcttcactaggccctgggtgcctgggtgtgaggctttgggstcagagaagggaccccctctgacagggccccgagaa

SEQ ID NO: 402684 - DNA, 607 bp, Homo sapiens
ggagttttgagcatttactcactgtctgacttccatacccttccttcagcatggttggtgcccaagttcagacagcctcaggttactttctccagaaaataaacttcctgtctgctgctgctgaacttagccactccttaaggaaggctttcatccagtcctctctcacccccactgatagaaatgcacttcctccagttggtaagggtttccgtgtgggaggagaggggtaccacagtgtaaataagatcatttctcagctgttgtcactgccagctaagggtgtcattttcttcatctgctaagtcaagtaccacttttctatttgatttccaacttccagtctcttcttcaatgctctctgtcttcgtaagatttacagtcattgtggtgggaaatccacgatgaacaaaggtcacaattttaaataaagaaaggatccatgtgaatgatgcttcatttgccctgtgctccacatggctcagcatggcrctggtccagtccatgaccttgctccagaagtcctgaccatcttggtattttcataatcacatcagtcagtaaaggtcgcaagaggctgagaattgtattttcaattgtccatcat

SEQ ID NO: 402685 - DNA, 605 bp, Homo sapiens
ttgctgttaaacatttgtgctttgcataatttctccaagataatgaaaacatcatttttaaaatgtataataccatttcrtgttttttatttatacttataatattatatgtgggccttgcaactgtagagaaagtcttatagcttatctatctatctatgccgatttatcctataatagaaaattcttcacattatttaattatacattaatttatttgttcagaaattagttgttgatctcttttgttagatactatagttattacaaagacagctggtaacaatatctgcccctgtgaatttatgatctcataagaataataatcaatgtacattcatgctttgtgcttattattcatagtccaaacctactacttatgcactgagatattggataagccatatgattttacttgaatagtttctcaggatgttattgtaagcattaaacaagaaacgttgcaagctgcttagtataattcctcaatgatcactatatatctatgttatagaatagataatagggatgtgagaaacatatgcaaccattccagtgccctatagtgaactggattttcccaccctaaacctcagaattacctg

SEQ ID NO: 402686 - DNA, 593 bp, Homo sapiens
atgtacaataaatgattaggttatctaatttgaaatccattataaatataatattttatattaaaatatattctaattagtttacctatacccagaaattttagaaccagttwgttgatatgtaaaaaacagattcctggcttttttgttaagattggtgttaaatctatagagccaattatggagaactaggaccttaaaaatattgtctttttatctttaaagacagtataactcttcctttatttatatctaaattgatttctttcattaatggtgtgtagtgtttattatatagacactcctttcattagctatatatctatttcatttttaaatactattataaatttttttaaaatttaaattcctattttttatggtgatatataggtatattatcaacttttgtatattgaccttgaattctgcaatctgttaaatataaactgtgaattatatgccgtaaaatcatgtattaatttgcttctcttttccttgtatgctttttttaaagggagaagcttaggttattgatttaagacttgtcttctctaatataaacacttaaagttataaatttccatctaagt

SEQ ID NO: 402687 - DNA, 593 bp, Homo sapiens
atgtacaataaatgattaggttatctaatttgaaatccattataaatataatattttatattaaaatatattctaattagtttacctatacccagaaattttagaaccagtttgttgatatgtaaaaaacagattcctggcttttttrttaagattggtgttaaatctatagagccaattatggagaactaggaccttaaaaatattgtctttttatctttaaagacagtataactcttcctttatttatatctaaattgatttctttcattaatggtgtgtagtgtttattatatagacactcctttcattagctatatatctatttcatttttaaatactattataaatttttttaaaatttaaattcctattttttatggtgatatataggtatattatcaacttttgtatattgaccttgaattctgcaatctgttaaatataaactgtgaattatatgccgtaaaatcatgtattaatttgcttctcttttccttgtatgctttttttaaagggagaagcttaggttattgatttaagacttgtcttctctaatataaacacttaaagttataaatttccatctaagt

SEQ ID NO: 402688 - DNA, 561 bp, Homo sapiens
agatcaatttgggagaatgttacaatttttataacatttcatccatgaatataggaagttttgatagggatttcactgaatctataggtcaatttgggagaatgttgcaatttttgtaacgtttcatccatgaatataggatttctctcaattaatgtagtttttctttactttcttgcaacaatcctttgtagttttaagagcaacatttttgcatggactttggtaaattcatatctatgtttttcttctttttgatactattacaaatgggcttacttttttatttcaattttggattgtttgtggcaaacatgaaaatacaatttatttttaatgtattsatcttgtatcttgcaacctcactggacttatttaatagttcttatatttgtttagttggatctttataatttttaaaatgcaagatgatgacatatgccaataaatagaattttatttctttttctgtctggatgacttttatttcattttcttgcctaattgctctgggtagtacctccagcacaatggtaaatagaagtgagagagtgaacatcc

SEQ ID NO: 402689 - DNA, 634 bp, Homo sapiens
aagccaagccacataccacaagtattataaaatacttatgaaatggatttgtacctggaatatataaatgaatcttattactcaacagtaagattaaacaactaaatttttaagtgagtaagagattcataaagatagttttaaaaagaacatatgtgaatgagtaataaacacatgaaaagatattaacatcactaggcttcagagagatgcaaattaaaatcacagtgaggtaaaattacacacccactagaacagtcaaagttaaatagactgactacaacaattttgagaaagatgcagaggaactacaattctcatacattgctaatgtgaatgtaaaattgtacagccactttggaaaaaartacagcaatatcttacagagttaaacaagtatctttatccatagacatttcattcgtacatgtgcattcaagataagtaaaaacataactctacccaaagatgtgtacaaaaatattcatgtcagtgttaattataacagatacaactcaaataccatcaattggtcatctagggttaactattactctgtgacagaaataaataattattaataatgcaacaccatacctcaatctgaaagtcattatgctaattataaatcaaa

SEQ ID NO: 402690 - DNA, 634 bp, Homo sapiens
aagccaagccacataccacaagtattataaaatacttatgaaatggatttgtacctggaatatataaatgaatcttattactcaacagtaagattaaacaactaaatttttaagtgagtaagagattcataaagatagttttaaaaagaacatatgtgaatgagtaataaacacatgaaaagatattaacatcactaggcttcagagagatgcaaattaaaatcacagtgaggtaaaattacacacccactagaacagtcaaagttaaatagactgactacaacaattttgagaaagatgcagaggaactacaattctcatacattgctaatgtgaatgtaaaattgtacagccactttggaaaaaagtacagcaatatcttacagagttaaacaagtatctttatccatagacatttcattcgtacatgtgcattcaagataagtaaaaacataactctacccaaagatgtgtacaaaaatattcatgtcagtgttaattataayagatacaactcaaataccatcaattggtcatctagggttaactattactctgtgacagaaataaataattattaataatgcaacaccatacctcaatctgaaagtcattatgctaattataaatcaaa

SEQ ID NO: 402691 - DNA, 551 bp, Homo sapiens
ttctttgcattgagttagaacatgcttttttagcaaggcaaagtttgttattacccaccttctgaagcctactttggtcaattcagacatctcagcctcagcccagttctgtgcccttgctggagagatgttgtggtaatttggcggagaagaggcacccagctttttgagttttcagcgtttttgcattgattctttctcaccttcatgggcttatctaccttcaatctttgaggttactgacctttgaataaggtttttagggtcttttttgttgatgttgttgctttctgtttgtttgttgtaacaatcaggccactcttccartaggtctgctgtggttagctgggggtccactccagaatgtagtcacctcagcccctcccacacctagatgtatcaccagggaaggctgcaaaaagcaaagatggcagcctgctccttcctctgggagccctgtcccaggagggcactgacctgatgcccattgaatgcttctgtaagaggtatctggagactctgtcaggaggtcccactaagtaagtcaggag

SEQ ID NO: 402692 - DNA, 546 bp, Homo sapiens
caaagcaaaactagacctgtaagagaaacaggctgctgtaatacagtcctaaaacgtcatccatatgacctggcaggtcttaccatattagagtatgggtggtaggaaaacatccccagtggaatttatggcaaattccaaaaaaaaaaaaaaaaaaaaagaatagcaatatagatccctagggccctggagcaaggccatttcatctgcagwattaaattctagaccaatcaaaacagcatctagcactgtattttgtttcataaagatgaaaaaaactaaccatgagacctcaaatgaccatatgactaaatctgctattcatgagcataggtttgaaaagacccagcatcattctgtaatagaatggaagacacatccaggatttgacatgagtagcgtcaaatactcatttgtacagataaactgtacaagcaaatgactcagaaacatttaatcaattaatgctgcattattacctcttccttagcccagaaaacaggcacagtgttctggagaaaaatgcatatgccatacttacggaaa

SEQ ID NO: 402693 - DNA, 546 bp, Homo sapiens
caaagcaaaactagacctgtaagagaaacaggctgctgtaatacagtcctaaaacgtcatccatatgacctggcaggtcttaccatattagagtatgggtggtaggaaaacatccccagtggaatttatggcaaattccaaaaaaaaaaaaaaaaaaaaagaatagcaatatagatccctagggccctggagcaaggccatttcatctgcagtattaaattctagaccaatcaaaacagcatctagcactgtattttgtttcataaagrtgaaaaaaactaaccatgagacctcaaatgaccatatgactaaatctgctattcatgagcataggtttgaaaagacccagcatcattctgtaatagaatggaagacacatccaggatttgacatgagtagcgtcaaatactcatttgtacagataaactgtacaagcaaatgactcagaaacatttaatcaattaatgctgcattattacctcttccttagcccagaaaacaggcacagtgttctggagaaaaatgcatatgccatacttacggaaa

SEQ ID NO: 402694 - DNA, 546 bp, Homo sapiens
caaagcaaaactagacctgtaagagaaacaggctgctgtaatacagtcctaaaacgtcatccatatgacctggcaggtcttaccatattagagtatgggtggtaggaaaacatccccagtggaatttatggcaaattccaaaaaaaaaaaaaaaaaaaaagaatagcaatatagatccctagggccctggagcaaggccatttcatctgcagtattaaattctagaccaatcaaaacagcatctagcactgtattttgtttcataaagatgaaaaaaactaaccatgagacctcaaatgaccatatgactaaatctgcyattcatgagcataggtttgaaaagacccagcatcattctgtaatagaatggaagacacatccaggatttgacatgagtagcgtcaaatactcatttgtacagataaactgtacaagcaaatgactcagaaacatttaatcaattaatgctgcattattacctcttccttagcccagaaaacaggcacagtgttctggagaaaaatgcatatgccatacttacggaaa

SEQ ID NO: 402695 - DNA, 546 bp, Homo sapiens
caaagcaaaactagacctgtaagagaaacaggctgctgtaatacagtcctaaaacgtcatccatatgacctggcaggtcttaccatattagagtatgggtggtaggaaaacatccccagtggaatttatggcaaattccaaaaaaaaaaaaaaaaaaaaagaatagcaatatagatccctagggccctggagcaaggccatttcatctgcagtattaaattctagaccaatcaaaacagcatctagcactgtattttgtttcataaagatgaaaaaaactaaccatgagacctcaaatgaccatatgactaaatctgctattcatgagcataggtttgaaaagacccagcatcattctgtaatagaatggaagacacatccaggatttgacatgagtagygtcaaatactcatttgtacagataaactgtacaagcaaatgactcagaaacatttaatcaattaatgctgcattattacctcttccttagcccagaaaacaggcacagtgttctggagaaaaatgcatatgccatacttacggaaa

SEQ ID NO: 402696 - DNA, 617 bp, Homo sapiens
tctagcactgtattttgtttcataaagatgaaaaaaactaaccatgagacctcaaatgaccatatgactaaatctgctattcatgagcataggtttgaaaagacccagcatcattctgtaatagaatggaagacacatccaggatttgacatgagtagcgtcaaatactcatttgtacagataaactgtacaagcaaatgactcagaaacatttaatcaattaatgctgcattattacctcttccttagcccagaaaacaggcacagtgttctggagaaaaatgcatatgccatacttayggaaatgtgcataaggtatgaagatatttggtttggggccataatcccaaaagaaacagtccaaatgctataatccagtatgttgaaatcctgaaagtctaaaatcttgaaaatcaaaatcctgaaagatcaaaatcctgaaaatataattctgaaaataataattccgaaacacttttaaaatatgttaatttgcatcttaaatggggatttatttgttaaacatacaaaaacacaatagaacacttcatagaccactttacacaataaaatagaaaataataacattatttttgcaagcataaacaggtatacta

SEQ ID NO: 402697 - DNA, 535 bp, Homo sapiens
gaacattttgaatctcaaaaactagagaatgaattaggtatatatgaaatatttaccataattggacatatgaatagctttaaygtacatcttataaaacatttcaaatggttgaaatcatacagaacatgttgtctgaacacaaaaaattgaaattagacaatatcaataagttaattagaaactcttcaaaagtttgcagattatgcatttctaagaaattcatgattcaaagaaaaaatcacattgtaaaccagaaaatatttgagctaaatagtaatataaatctgcatattcaaaggatatgggtcccacctaaagctatgcttaggcagatatttggtcttaaatgattaatgaaagaatagctgaaaagaaatgatttaggagttcatctcaagaagtcaaaataatagcaattttggtctcgatcgaggaaagataaagagccagtggtagctgaggtggcagaagaggtgaaaaaggaatactctggcatgccctacccttacaaagccaaacatacttatcacct

SEQ ID NO: 402698 - DNA, 535 bp, Homo sapiens
gaacattttgaatctcaaaaactagagaatgaattaggtatatatgaaatatttaccataattggacatatgaatagctttaatgtacatcttataaaacatttcaaatggttgaaatcatacagaacatgttgtctgaacacaaaaaattgaaattagacaatatcaataagttaattagaaactcttcaaaagtttgcagattatgcatttctaagaaattcatgattcaaagaaaaaatcacattgtaaaccagaaaatatttgagctaaatagtaatataaawctgcatattcaaaggatatgggtcccacctaaagctatgcttaggcagatatttggtcttaaatgattaatgaaagaatagctgaaaagaaatgatttaggagttcatctcaagaagtcaaaataatagcaattttggtctcgatcgaggaaagataaagagccagtggtagctgaggtggcagaagaggtgaaaaaggaatactctggcatgccctacccttacaaagccaaacatacttatcacct

SEQ ID NO: 402699 - DNA, 479 bp, Homo sapiens
ggcaaaaagaattaaaaataataagaactagaaaagaaataaaatcatcattattcaaatatattatgtttttatatgtataaamtccaaaataatctataaataagaatgaagaagtgagttactggatgtatattcaaaatgcaagagttaattgtatttttgtgtgccagcaaaaacaatgaaactttaaaatattcaatttacaaatcacatcaagatgtatctaaaacctaatggtaaatctaatagaaattgaatgagatgtattactatattcagccactctgtgtcttacgattggaaatgttaatttatttaaattcaaggtaattattaataagtaagcactttctactgccactttgttaagtgattttcagttgtttcaaagattatttattttgttatttcactcttccttgctgtcttcctttgtggtgaagtaagtgattttcttgaattttatgttttgatac

SEQ ID NO: 402700 - DNA, 479 bp, Homo sapiens
ggcaaaaagaattaaaaataataagaactagaaaagaaataaaatcatcattattcaaatatattatgtttttatatgtataaactccaaaakaatctataaataagaatgaagaagtgagttactggatgtatattcaaaatgcaagagttaattgtatttttgtgtgccagcaaaaacaatgaaactttaaaatattcaatttacaaatcacatcaagatgtatctaaaacctaatggtaaatctaatagaaattgaatgagatgtattactatattcagccactctgtgtcttacgattggaaatgttaatttatttaaattcaaggtaattattaataagtaagcactttctactgccactttgttaagtgattttcagttgtttcaaagattatttattttgttatttcactcttccttgctgtcttcctttgtggtgaagtaagtgattttcttgaattttatgttttgatac

SEQ ID NO: 402701 - DNA, 589 bp, Homo sapiens
ggaataggtaacaattttacaacaaaggaaatgcagcacttggcatatgtccagggtatccactctcrgcctatagaaaactgaaatggctttttgaagatgccgcttacaaaggctgttctgcaggatggaaatcatcttctaggatgtaatatatacctttcatcaatgaccactctatggtgatgttttcccttaagtagcatacatatttctagaagccaaggcattgaagtatgattggtaccatttaccattactcccagtaagccacttggataatttatcatttttgtccctgcaaatttaggctgtcttggtttagaggccctgaagtccaaagaaagaaggctttcataaaaggatgtagtaagaatcccattaaaattcaagctatcattacgagccactcactttgaactttttataacaaaagacaaatagtcaaggaagaatcagcattctgtcagggataattgaacttggtcagtagaaagaagagagttgtttttaaacagtggtgcaggaaatagcacgtgtggctcccaggcaatccactggggctttagttgataatgtcctcctcaat

SEQ ID NO: 402702 - DNA, 589 bp, Homo sapiens
ggaataggtaacaattttacaacaaaggaaatgcagcacttggcatatgtccagggtatccactctcagcctatagaaaactgaaatggctttttgaagatgccrcttacaaaggctgttctgcaggatggaaatcatcttctaggatgtaatatatacctttcatcaatgaccactctatggtgatgttttcccttaagtagcatacatatttctagaagccaaggcattgaagtatgattggtaccatttaccattactcccagtaagccacttggataatttatcatttttgtccctgcaaatttaggctgtcttggtttagaggccctgaagtccaaagaaagaaggctttcataaaaggatgtagtaagaatcccattaaaattcaagctatcattacgagccactcactttgaactttttataacaaaagacaaatagtcaaggaagaatcagcattctgtcagggataattgaacttggtcagtagaaagaagagagttgtttttaaacagtggtgcaggaaatagcacgtgtggctcccaggcaatccactggggctttagttgataatgtcctcctcaat

SEQ ID NO: 402703 - DNA, 507 bp, Homo sapiens
tttttcccaaattaggtgacyttaccaaaataagtaattagatctgagcagtgcaagaggtaaactatagtaaaggttgtggtgcccttgataccccttcaggaacaaggcactttattgccccaacttctgggacagcaggctgctgatggcttgcatttttgtccttgttcatgcatgaattgcccttggccaagggagctgtgtcacccaatctcatagtccctctccagttgaaaccaaatctaacagctggttgatgcagggatgcaaatgatcagcccccttgccttaatttgattgacagttctaaaggtatccaaactctagtgagatcaagtcaaacttcaccactgttccacttctccctctgccaactcctgtttccctctcttcctcacaggttttgtccccaagagcactctatagtaaacttccctatgcaaatctccaactatgagtttgtctctgagatgctctatctaacacagagaccaagcaccacct

SEQ ID NO: 402704 - DNA, 507 bp, Homo sapiens
tttttcccaaattaggtgactttaccaaaataagtaattagatctgagcagtgcaagaggtaaactatagtaaaggttgtggtgcccttgataccccttcaggaacaaggcactttattgccccaacttctgggacagcaggctgctgatggcttgcatttttgtccttgttcatgcatgaattgcccttggccaagggagctgtgtcacccaatctcatagtccctctccagttgaaaccaaatctaacarctggttgatgcagggatgcaaatgatcagcccccttgccttaatttgattgacagttctaaaggtatccaaactctagtgagatcaagtcaaacttcaccactgttccacttctccctctgccaactcctgtttccctctcttcctcacaggttttgtccccaagagcactctatagtaaacttccctatgcaaatctccaactatgagtttgtctctgagatgctctatctaacacagagaccaagcaccacct

SEQ ID NO: 402705 - DNA, 503 bp, Homo sapiens
agaagatacaatggctgagaatttttcaaaattcttgaaacactagaatctataaataaatatatgtcatgtactatataataaataaataattagaaatcgacatctcaaaacattctaacaaaagtgcagaaatcaattattaagattaaatcrggccaaatgaaaagagagatcacaggtgaagaaataacaattagactggcggaaatggtgagagaaaataaccattattctagaattgtgtccccagcagaactatcatccaaaaataaatacatgctttgtttatctcaactgaaatacctgtgttttgtttcatttttttttcctcattggcttgaagttgaattcctacttcttccaactctaccaatctttctcttaactccatttcctgctttagcataacatataacataatgaatctttgagaaaaacattttttatctagttatcttagtttgttctgttctgctgtaacagaataccaaatattgagt

SEQ ID NO: 402706 - DNA, 503 bp, Homo sapiens
agaagatacaatggctgagaatttttcaaaattcttgaaacactagaatctataaataaatatatgtcatgtactatataataaataaataattagaaatcgacatctcaaaacattctaacaaaagtgcagaaatcaattattaagattaaatcgggccaaatgaaaagagagatcacaggtgaagaaataacaattagactggcggaaatggtgagagaaaataaccattattctagaattgtgtccccagcagaactatcatccaaaaataaatacatgctttgtttatctcaactgaaatacctgtgttttgtttcatttttttttcctcattggcttgaagttgaattcctacttcttccaactctaccaatctttctcttaactccatttcctgctttagcataacatataacataaygaatctttgagaaaaacattttttatctagttatcttagtttgttctgttctgctgtaacagaataccaaatattgagt

SEQ ID NO: 402707 - DNA, 648 bp, Homo sapiens
ttcctacttcttccaactctaccaatctttctcttaactccatttcctgctttagcataacatataacataatgaatctttgagaaaaacattttttatctagttatcttagtttgttctgttctgctgtaacagaataccaaatattgagtaatttagaaaaaacaaaaactttatttctcacagttctggagactgagaagtcagagatcaaggtgtctacagcaatggtgtctggtgagcgctgctctctgcytccaagaccgtgccttgaatgttgcttcctccagagaggaaaatattgtgtcctcacatagcaagaagaagagggcaagggaggtgaaatacctctgccaagctcttttataacagtattaattcatttatgaggtcctagccttcatgagcaagtatctcccaaaagaccccacctcccaatactgctgcattggaaattaagtttccaacacatgaattttggaggatatattaagacaatggcacgagtcaagatacgtgtttcagaaatgtacagtatctctcttacccaataactgataacacagatttcattgtgatatagtacatgtggccctttcacatctgtgccctctgctactcacatcttacattcacccagttactttt

SEQ ID NO: 402708 - DNA, 648 bp, Homo sapiens
ttcctacttcttccaactctaccaatctttctcttaactccatttcctgctttagcataacatataacataatgaatctttgagaaaaacattttttatctagttatcttagtttgttctgttctgctgtaacagaataccaaatattgagtaatttagaaaaaacaaaaactttatttctcacagttctggagactgagaagtcagagatcaaggtgtctacagcaatggtgtctggtgagcgctgctctctgcttccaagaccrtgccttgaatgttgcttcctccagagaggaaaatattgtgtcctcacatagcaagaagaagagggcaagggaggtgaaatacctctgccaagctcttttataacagtattaattcatttatgaggtcctagccttcatgagcaagtatctcccaaaagaccccacctcccaatactgctgcattggaaattaagtttccaacacatgaattttggaggatatattaagacaatggcacgagtcaagatacgtgtttcagaaatgtacagtatctctcttacccaataactgataacacagatttcattgtgatatagtacatgtggccctttcacatctgtgccctctgctactcacatcttacattcacccagttactttt

SEQ ID NO: 402709 - DNA, 648 bp, Homo sapiens
ttcctacttcttccaactctaccaatctttctcttaactccatttcctgctttagcataacatataacataatgaatctttgagaaaaacattttttatctagttatcttagtttgttctgttctgctgtaacagaataccaaatattgagtaatttagaaaaaacaaaaactttatttctcacagttctggagactgagaagtcagagatcaaggtgtctacagcaatggtgtctggtgagcgctgctctctgcttccaagaccgtgccttgaatgttgcttcctccagagaggaaaatattgtgtcctcacatagcaagaagaagagggcaagggaggtgaaatacctctgccaagctcttttataacagtattaattcatttatgaggtcctagccttcatgagcaagtatctcccaaaagaccccacctcccaatactgctgcattggaaattaagtttccaacacatgaattttggaggatatattaagacaatggcacgagtcaagataygtgtttcagaaatgtacagtatctctcttacccaataactgataacacagatttcattgtgatatagtacatgtggccctttcacatctgtgccctctgctactcacatcttacattcacccagttactttt

SEQ ID NO: 402710 - DNA, 648 bp, Homo sapiens
ttcctacttcttccaactctaccaatctttctcttaactccatttcctgctttagcataacatataacataatgaatctttgagaaaaacattttttatctagttatcttagtttgttctgttctgctgtaacagaataccaaatattgagtaatttagaaaaaacaaaaactttatttctcacagttctggagactgagaagtcagagatcaaggtgtctacagcaatggtgtctggtgagcgctgctctctgcttccaagaccgtgccttgaatgttgcttcctccagagaggaaaatattgtgtcctcacatagcaagaagaagagggcaagggaggtgaaatacctctgccaagctcttttataacagtattaattcatttatgaggtcctagccttcatgagcaagtatctcccaaaagaccccacctcccaatactgctgcattggaaattaagtttccaacacatgaattttggaggatatattaagacaatggcacgagtcaagatacgtgtttcagaaatgtacagtatctctcttacccaataactgataacayagatttcattgtgatatagtacatgtggccctttcacatctgtgccctctgctactcacatcttacattcacccagttactttt

SEQ ID NO: 402711 - DNA, 562 bp, Homo sapiens
tttgccagttatcattttagaatcactgaagagattagtgttagctctaattattcttcaatttaataagcactaaagataaatgtgcacatttaaagggttcaagatcataacgttgcattaatattcatgcagtatatgtcaatgcataacttaccccatcccaaaatgacaaatgaatttctaggtgaacaggtgtctgctgcttttgaaggtatctttatctagttggtgactacagacatactgttatcaactaggcaagatattcctctttattttaaacacattgcattagtccatcttgtgttgctatcatggaatacctgaggctgggtaattaacaaagaaaagaggtttattttagttcatagttctgcaggctgtacaggaaggatagtaccagcaactgtttctggtgagggcctctggaagctttcagtcatggtggaaagtgaagggaggcaggcctttcacaaggtaagagaaggascaagagcactgctaggctgttttaaacaaccagctcacacgtgaactaatggagtgagaaaccattacc

SEQ ID NO: 402712 - DNA, 562 bp, Homo sapiens
tttgccagttatcattttagaatcactgaagagattagtgttagctctaattattcttcaatttaataagcactaaagataaatgtgcacatttaaagggttcaagatcataacgttgcattaatattcatgcagtatatgtcaatgcataacttaccccatcccaaaatgacaaatgaatttctaggtgaacaggtgtctgctgcttttgaaggtatctttatctagttggtgactacagacatactgttatcaactaggcaagatattcctctttattttaaacacattgcattagtccatcttgtgttgctatcatggaatacctgaggctgggtaattaacaaagaaaagaggtttattttagttcatagttctgcaggctgtacaggaaggatagtaccagcaactgtttctggtgagggcctctggaagctttcagtcatggtggaaagtgaagggaggcaggcctttcacaaggtaagagaaggagcaagagcrctgctaggctgttttaaacaaccagctcacacgtgaactaatggagtgagaaaccattacc

SEQ ID NO: 402713 - DNA, 590 bp, Homo sapiens
taatcacctcaagtattcatcatttatttgtgttatgaactgtattagtcagggttctctagagggacagaactcataatatatgtatatatgaaggggagtttattaaggattrttgactgacaggatcacaaggtgaagtcccacaataggctgtctgcaagctgaggagcaaggaagccagtctgagttccaaatcctcaaaagtagggaagccgacagtgcagcaaaagtctgtggccgaaagctcaagagcccctggtacatcctggtgtaagtccaagagtccaaaagctgaagaacttagagtccaatattggagagcaggacgcatccagcacaggagaaagataaaggccagaagacctttatctagactagcaagtctagtccttccattttcttctgcctgctttattctgtccgctctggcagctgattgtgcccacccagcttgagggtgggtcagcttttcccagtccactgactcaaatgttaatcttctttggcaacaccctcacagacacatgtagaaaccaaactttgaagccttcaatccaatcaaactgacactcaatattaaccagcac

SEQ ID NO: 402714 - DNA, 590 bp, Homo sapiens
taatcacctcaagtattcatcatttatttgtgttatgaactgtattagtcagggttctctagagggacagaactcataatatatgtatatatgaaggggagtttattaaggattgttgactgacaggatcacaaggtgaagtcccacaataggctgtctgcaagctgaggagcaaggaagccagtctgagttccaaatcctcaaaagtagggaagccgacagtgcagcaaaagtctgtggccgaaagctcaagagcccctggtacatcctggtgtaagtccaagagtccaaaagctgaagaacttagagtccaatattggagagcaggacgcatccagcacaggagaaagataaaggccagaagacctttatctagactagcaagtctagtccttccattttcttctgcctgctttattctgtccgctctggcagctgattgtgcccacccagcttgagggtgggtcagcttttcccagtccactgactcaaatgttaatcttctttggcaacaccctcacagacacatgtagaaaccaaactttgaagccttcaatccaatcaaaytgacactcaatattaaccagcac

SEQ ID NO: 402715 - DNA, 596 bp, Homo sapiens
tcattttcaccctgatgataaagacatacccaagactggacaatttaccaaaaaaaaaaaaaaaaaaaaaggctttaattggactcacagttccatgtgaccagggaggcctcacaatcatggcagaaggcaaagaggagcaagtcatatcttacatggatagcagcaggcaatgagagagcttttgcaggaaactcccattttttaaagccatcagatgtcttgagacttattcactatcacaagaacagcacaggaaagacctgctccctgattcgattatctcccaccagggccctcccacaacatgtgggaattatgggagcttcaagatgagatttrggtgtgaatacagaatcaaagcatatcacagtgacataatattcagtaatattcagaaaactgtactgtgtacttactgttaccagtgagttttgtgccttcagatgaattgctcattaatttttttttcaaattgaagatctctttttaacatttcctgtaaaatagatttggtgttgacaaaattcctcagactttgtttttgtctgggaaagtctttatttcttcttcatctgtgaagcatattttcactg

SEQ ID NO: 402716 - DNA, 605 bp, Homo sapiens
tgaatttataagtagaatgtagccacggaaatctaagctttgggattcagaggcttatgcattcatttttattcataattacatatgaaagctcttgtttttctaaagtatgccttcctgaggggacttacatrtaacaaaatgattgtgtataaaacaaggcaatacagagttagattactcttcatttcttattgataagaaggcagtctcacagcatgctggatttaagtaaacatcttaagaagtaaacaccttaaagtgaaaattgagctatcctctctttggtcctagagaatgaagggaaggactcagtcacatgcccaatttggatctaagaatcatctccaaaacatctgttttttcctaattgtccatactcagctagttgttcaaagcaatgtttaaagagagaagaaaaacatgaatttatttaaccacgattacacaagcagtgtatgcaaaacaaccacaaaacaattcacatgtaaataagcatgttaaattttagtaaaatgctcatatttttaaattggatgatgaaaaattcaatattatttattaatgtaaaattgaattacacaatttattttattttgttttgc

SEQ ID NO: 402717 - DNA, 605 bp, Homo sapiens
tgaatttataagtagaatgtagccacggaaatctaagctttgggattcagaggcttatgcattcatttttattcataattacatatgaaagctcttgtttttctaaagtatgccttcctgaggggacttacatataacaaaatgattgtgtataaaacaaggcaatacagagttagattactcttcatttcttattgataagaaggcagtctcacagcatgctggatttaagtaaacatcttaagaagtaaacaccttaaagtgaaaattgagctatcctctctttggtcctagagaatgaagggaaggactcagtcacatgcccaatttggatctaagaatcatctccaaaacatctgttttttcctaattgtccatactcagctagttgttcaaagcaatgtttaaagagagaagaaaaacatgaatttatttaaccacgattacacaagcagtgtatgcaamacaaccacaaaacaattcacatgtaaataagcatgttaaattttagtaaaatgctcatatttttaaattggatgatgaaaaattcaatattatttattaatgtaaaattgaattacacaatttattttattttgttttgc

SEQ ID NO: 402718 - DNA, 659 bp, Homo sapiens
aaataaacccatttttatatgtataaatatcctgtaaatatctgaactattakagtaaaagtccaaaattacaattctactcagatacaagagaaatgtaagcagtcatgtcgatgttttaaatatataaataaatttactcttgccattgtttgggtactctaggaagcatgctggaggatgagcttagtttgcaggatgtctgctagagaaaacccttgggatcaacacatgttgaatagaggggaaggaaacataattggtcagatgaagtcaacctgtgatagaggctcagcaacaacctcagatgattgcacagaaaattctgtagctaaattgaacattatagttgcccagggaaggccaaaatagctgggcctttggatatgacctgttcagacctcggaaaagcatgactttggaaaaggtagctctctgtagcaaagacagtcctggaaagattgagagttgaaggctgtctgtcaacagccctcatgacaattagagcaatgaggtcttccttctttgaaagggtatctgggtgatgcttaccacctctaatatttttctcattcttaaaggacatctaattgcaactatacagtttgctgtatattatgaagattatcgtgcagaaaaaaaagaaaaacagatccaga

SEQ ID NO: 402719 - DNA, 659 bp, Homo sapiens
aaataaacccatttttatatgtataaatatcctgtaaatatctgaactattagagtaaaagtccaaaattacaattctactcagatacaagagaaatgtaagcagtcrtgtcgatgttttaaatatataaataaatttactcttgccattgtttgggtactctaggaagcatgctggaggatgagcttagtttgcaggatgtctgctagagaaaacccttgggatcaacacatgttgaatagaggggaaggaaacataattggtcagatgaagtcaacctgtgatagaggctcagcaacaacctcagatgattgcacagaaaattctgtagctaaattgaacattatagttgcccagggaaggccaaaatagctgggcctttggatatgacctgttcagacctcggaaaagcatgactttggaaaaggtagctctctgtagcaaagacagtcctggaaagattgagagttgaaggctgtctgtcaacagccctcatgacaattagagcaatgaggtcttccttctttgaaagggtatctgggtgatgcttaccacctctaatatttttctcattcttaaaggacatctaattgcaactatacagtttgctgtatattatgaagattatcgtgcagaaaaaaaagaaaaacagatccaga

SEQ ID NO: 402720 - DNA, 558 bp, Homo sapiens
ttggccttctttttaaaattcttgtaatttttckgttagtatctttcctatacagaatcagtcaatactcacccactcaaaaatagagcaacaaagaaacttattgtgagtgtaactgcactaaattatttttgaaattccaaagaaccaatggctatactgatggctcatctcatgaatattttatatttctgcatttattcaagtgtttttaaatgtctttaataaagtttcaaattatacttcatgaagtattttcacatttttgttagtatgtttcatttatactccattgattacataactaatgaatttttttctattatattttctaattagttaatacaggtttaaaagaaaatcaacatgatttaaatgatgtccctgaactcaactaatttcctaagctattttctcaatttcatagcctacatattggttattttgatttttctgttaagattacactactgtctacaaataatgacacatacattcaacctttttatcttattcacttttcttgtcttaattcagtgactgtgatctgcaatgcta

SEQ ID NO: 402721 - DNA, 558 bp, Homo sapiens
ttggccttctttttaaaattcttgtaatttttcggttastatctttcctatacagaatcagtcaatactcacccactcaaaaatagagcaacaaagaaacttattgtgagtgtaactgcactaaattatttttgaaattccaaagaaccaatggctatactgatggctcatctcatgaatattttatatttctgcatttattcaagtgtttttaaatgtctttaataaagtttcaaattatacttcatgaagtattttcacatttttgttagtatgtttcatttatactccattgattacataactaatgaatttttttctattatattttctaattagttaatacaggtttaaaagaaaatcaacatgatttaaatgatgtccctgaactcaactaatttcctaagctattttctcaatttcatagcctacatattggttattttgatttttctgttaagattacactactgtctacaaataatgacacatacattcaacctttttatcttattcacttttcttgtcttaattcagtgactgtgatctgcaatgcta

SEQ ID NO: 402722 - DNA, 659 bp, Homo sapiens
aaataaacccatttttatatgtataaatatcctgtaaatatctgaactattagagtaaaagtccaaaattacaattctactcagatacaagagaaatgtaagcagtcatgtcgatgttttaaatatataaataaatttactcttgccattgtttgggtactctaggaagcatgctggaggatgagcttagtttgcaggatgtctgctagagaaaacccttgggatcaacacatgttgaatagaggggaaggaaacataattggtcagatgaagtcaacctgtgatagaggctcagcaacaacctcagatgattgcacagaaaattctgtagctaaattgaacattatagttgcccagggaaggccaaaatagctgggcctttggatatgacctgttcagacctcggaaaagcatgactttggaaaaggtagctctctgtagcaaagacagtcctggaaagattgagagttgaaggctgtctgtcaacagccctcatgacaattagagcaatgaggtcttccttctttgaaagggtatctgggtgatgcttacyacctctaatatttttctcattcttaaaggacatctaattgcaactatacagtttgctgtatattatgaagattatcgtgcagaaaaaaaagaaaaacagatccaga

SEQ ID NO: 402723 - DNA, 577 bp, Homo sapiens
cagcagtgtctaaataaattggctcctggtcatttgactccgattcagaactctttgatagcttctttttgttgttattgttgttgttgttttgttaatgacaaaattctccaggtacattttgggtatttctagatctggaatcagctacttcattttagtgagatatgatatttagaggcaacaatcagcactatgattggtcattgttttcagtgaccttttcagtgaaaaaaagcagggaatactagtttttgataagataattcataagctcacattggtatttagtttaaactcaggacttggaattttaacttaacttctttaatcttgtattaatttattttttgcattctgaaaatccctatctcaatgacactaacccagttccttttgtgcttcatcacatgctacaaacataacagtctcaaaataataccaccattataccaacacagtcattgatttgaaaayactttaagatttttgttttgcacttctttttgtccttatgtttacaccagctgggatgtggcaattttaacaaatccctttatacacagttacggtcagt

SEQ ID NO: 402724 - DNA, 607 bp, Homo sapiens
agagtaaaattaaaaattaactccaaggtaccacaattttcaaatgaacatatgaaaaagttaaataaatgctaaaaaaaattattacagcacatactgtatattaacaaaccaaatcattgtattgctcaatgctgttgagattttagtaaaactgctacaataatggatagcttgtggcaacccaaattgattcaactttcttgaatgcaattttttaaaacatttaagttgcgtaatattgatcgagtcatttgattcagtagtctcactgttagaaatgtgtttctaaaaattccacatttatgacactattgccacattgtttataaaagttaaaggttgatgacaaactgtccacagatagatagaggaatatttattcartaggatgatataattccataataatgagcattgtcagtagtgtgagttccgtaggtttctatttacagtataattatttagaaattttttaaaaggtttcttgactatatttttaaaccacaattcaatctaaaatggacctcaaatcctcagcaatctttgaaattagtcttggctctcactttagtgccaaattgcaatggtcccaaatacttgcaat

SEQ ID NO: 402725 - DNA, 490 bp, Homo sapiens
cctgctcattttcagtgtccatttgcctttttctacccctttactttatgtgagtccttatatgttaagcaagtctcctgaaggcsgcagctagttggttagtgagttcttatccattttgcagttctgtatcttttaagtggagcatttaggccatttacattcagtgtattgaaatgtgaggtacccttgctctttgtggctgtgtactttgttttttttattgtttgtttttgctttttaacttgtgtttttgttttataggtcctgtgcgatttatgctttaaagaggttctgttttgatgtgtttccaggatttgtttcaagatttagagctccttttagtagtgcttttagtgatggcttggtaatggcaaattctctcagcatttgtttgtctgaaaaagactgaacctttccttcatatataatgcttagtttcactggatacagaattcttggctgataattgttttgtttgaggaggctg

SEQ ID NO: 402726 - DNA, 490 bp, Homo sapiens
cctgctcattttcagtgtccatttgcctttttctacccctttactttatgtgagtccttatatgttaagcaagtctcctgaaggcggcagctagttggttagtgagktcttatccattttgcagttctgtatcttttaagtggagcatttaggccatttacattcagtgtattgaaatgtgaggtacccttgctctttgtggctgtgtactttgttttttttattgtttgtttttgctttttaacttgtgtttttgttttataggtcctgtgcgatttatgctttaaagaggttctgttttgatgtgtttccaggatttgtttcaagatttagagctccttttagtagtgcttttagtgatggcttggtaatggcaaattctctcagcatttgtttgtctgaaaaagactgaacctttccttcatatataatgcttagtttcactggatacagaattcttggctgataattgttttgtttgaggaggctg

SEQ ID NO: 402727 - DNA, 561 bp, Homo sapiens
gtctacctggctgtgggctggtactgggggttgtctggacagagtcctgtgatrtgaaccatctgtgggtctctaagctgtggataccggcggctgttccagtcaagatgttggggggtggggcagtgcaatggactccctgagggttcttagctttagtggtttaatgctctatttttgtgccagttggcctcctgccaggaggtagtgctttccagagagcatcagctataaaccaacttgttgcagttaacactacaatgactttctgggacaggcctcaactatccgagtaagtaccttcatctgccccagaaccatcaatggtttctcaatatcttatttcattacaaagttagtagtagatcttgcttttgaatccaacttcaggtaatctctcaaaaccactcagcccagcctcctggtgccaccatgcactcttctttttgctcactcgctcacgcacatgctgaactcactcaaaaaatgcgggcagtagtggcacctcaccccccttcctatttttttttttaattgaatcctgggctaccttaacaaata

SEQ ID NO: 402728 - DNA, 579 bp, Homo sapiens
ctaccgtgctggtaaaagcctatgctacagcaaataaaatagattaacactctgggggataatgaatacgttagtaaacccaaagagattaatccatttagaaaacaactaaaaacctggacataaggcaatacaagacatgagttgtgcatgtttacttgaagaacaagggaataggagcctctacaagtaaattccttactacctgattttagcctcaggagaaaggtcatcctgactgtgcacacaacagcaatagagtccaaatggaaaatgccaatttttctatcccagagaaccagaaaacagaaactaggaaaccagaaatgctggagtagataaattctgtgaagraaaattccaaagaggaaattcctaaactctgtcattttacatctctggttgatccttaaaccactcatgttgaacggactgaaagcaaccaagttaaaataaaattaaaaagtcagaaccaagactggatcacttgaccaaaggaagggcttacagttcaagcccagacaacaaaattacttgttaaagcaaagggacaaacacttattagacaaaactaacaga

SEQ ID NO: 402729 - DNA, 444 bp, Homo sapiens
taggaagagtcccttgcatgagacgaaaatatggtgaaaggactccrgtgaaattcagctataaggagatgaagccattgccagagacagttctgaaagtagagccatgagagaaattctatggcttctctcctcctctgctctttctaatcctcttccagtgactcccatttgtcaaatgtaactggaagccagtggatacaaaggtctagcaattgtaggttgcagggctcagtccctcagacaaaggacacattttaactgcctgctgcagtgaatacagggcatctattacaaaatccctcacttccattttccacaaatttcctatctaaattccagcctggatggccatttatcagtcccagctgattaatcagctatggaaactataaaccaaacatacctctcctgaatattcctctacaatcatgtcagcctagt

SEQ ID NO: 402730 - DNA, 444 bp, Homo sapiens
taggaagagtcccttgcatgagacgaaaatatggtgaaaggactccggtgaaattcagctataaggagatgaagccattgccagagacagttctgaaagtagagccatgagagaaattctatggcttctctcctcctctgctctttctaatcctcttccagwgactcccatttgtcaaatgtaactggaagccagtggatacaaaggtctagcaattgtaggttgcagggctcagtccctcagacaaaggacacattttaactgcctgctgcagtgaatacagggcatctattacaaaatccctcacttccattttccacaaatttcctatctaaattccagcctggatggccatttatcagtcccagctgattaatcagctatggaaactataaaccaaacatacctctcctgaatattcctctacaatcatgtcagcctagt

SEQ ID NO: 402731 - DNA, 444 bp, Homo sapiens
taggaagagtcccttgcatgagacgaaaatatggtgaaaggactccggtgaaattcagctataaggagatgaagccattgccagagacagttctgaaagtagagccatgagagaaattctatggcttctctcctcctctgctctttctaatcctcttccagtgactcccatttgtcaaatgtaactggaagccagtggatacaraggtctagcaattgtaggttgcagggctcagtccctcagacaaaggacacattttaactgcctgctgcagtgaatacagggcatctattacaaaatccctcacttccattttccacaaatttcctatctaaattccagcctggatggccatttatcagtcccagctgattaatcagctatggaaactataaaccaaacatacctctcctgaatattcctctacaatcatgtcagcctagt

SEQ ID NO: 402732 - DNA, 584 bp, Homo sapiens
gaatacagggcatctattacaaaatccctcacttccattttccacaaatttcctatctaaattccagcctggatggccatttatcagtcccagctgattaatcagctatggmaactataaaccaaacatacctctcctgaatattcctctacaatcatgtcagcctagtgaactccacatcacatactggtaagatggataaatcatccacgaagggaaccagaatagagagattggctctggagcaaattatcagaacaaggcttttgatgtagtgagaagaggaggagtatggaccttctgtggcagcaggagaatcctgcctctctattctcacaggcaaaatccagtgtaagaaaaggcagcaaggtttggtctttgtggagcctcccacttaagaggcccttccactgagactgcaatagaactatataaaaaaaccacagtgcacaagctgaatggaatcaatggcattccttccttttttcaacttcccaccaaccaataatttgatcccataatactggacagacttaacagattttcccagttcacacttccccttttgactcattttagcttgg

SEQ ID NO: 402733 - DNA, 584 bp, Homo sapiens
gaatacagggcatctattacaaaatccctcacttccattttccacaaatttcctatctaaattccagcctggatggccatttatcagtcccagctgattaatcagctatggaaactataaaccaaacatacctctcctgaatattcctctacaatcatgtcagcctagtgamctccacatcacatactggtaagatggataaatcatccacgaagggaaccagaatagagagattggctctggagcaaattatcagaacaaggcttttgatgtagtgagaagaggaggagtatggaccttctgtggcagcaggagaatcctgcctctctattctcacaggcaaaatccagtgtaagaaaaggcagcaaggtttggtctttgtggagcctcccacttaagaggcccttccactgagactgcaatagaactatataaaaaaaccacagtgcacaagctgaatggaatcaatggcattccttccttttttcaacttcccaccaaccaataatttgatcccataatactggacagacttaacagattttcccagttcacacttccccttttgactcattttagcttgg

SEQ ID NO: 402734 - DNA, 558 bp, Homo sapiens
aggacagatttactaattgaatagaattacatatagttgtrtttccattttgatctgcatatattcgcaagaattttcaataatcgaggagtattccattggcttccaactttgcctcatataatcctgaaggcattcttatgaagtagatcctgtcttctcttgaaaatatctgtatatatgaaagcttagaggggtgagggaatctggccaaggttatataccttgtaatttgcagaattaggtttaagccttaattctgtgctaccaaatccatgatatattcattttactatactgccttatattcacatactgttagaaggtaaatgatgtttgaatgtcaggaaaatataagaatactcccttccagggtcttggagtaggttggcatgtgggtgctggatgaatttctctctcttatgatggctagaggttgtctgatcctgtcgaaagctcttaaaagtaaattctcttggttcatttctgaaacagcaacaatcaatctcattagtatttcgttatctgtttgtagacagattgactgtgttaaccgtt

SEQ ID NO: 402735 - DNA, 558 bp, Homo sapiens
aggacagatttactaattgaatagaattacatatagttgtatttccattttgatctgcatatattcgcaagaattttcaataatcgaggagtattccattggcttccaactytgcctcatataatcctgaaggcattcttatgaagtagatcctgtcttctcttgaaaatatctgtatatatgaaagcttagaggggtgagggaatctggccaaggttatataccttgtaatttgcagaattaggtttaagccttaattctgtgctaccaaatccatgatatattcattttactatactgccttatattcacatactgttagaaggtaaatgatgtttgaatgtcaggaaaatataagaatactcccttccagggtcttggagtaggttggcatgtgggtgctggatgaatttctctctcttatgatggctagaggttgtctgatcctgtcgaaagctcttaaaagtaaattctcttggttcatttctgaaacagcaacaatcaatctcattagtatttcgttatctgtttgtagacagattgactgtgttaaccgtt

SEQ ID NO: 402736 - DNA, 558 bp, Homo sapiens
aggacagatttactaattgaatagaattacatatagttgtatttccattttgatctgcatatattcgcaagaattttcaataatcgaggagtattccattggcttccaactttgcctcatataatcctgaaggcattcttatgaagtagatcctgtcttctcttgaaaatatctgtatatatgaaagcttagaggggtgagggaatctggccaaggttatataccttgtaatttgcagaattaggtttaagccttaattctgtgctaccaaatccatgatatattcattttactatactgccttatattcacatactgttagaaggtaaatgatgtttgaatgtcaggaaaatataagaatactcccttccagggtcttggagtaggttggcatgtgggtgctggatgaatttctctctcttatgatggctagaggttgtctgatsctgtcgaaagctcttaaaagtaaattctcttggttcatttctgaaacagcaacaatcaatctcattagtatttcgttatctgtttgtagacagattgactgtgttaaccgtt

SEQ ID NO: 402737 - DNA, 588 bp, Homo sapiens
tagagtgcattctgggagttgggtaatatttgtagttgctgcattttggggatgtgttacaactggtgggaaagtgtgtgcttggctacatctgcagatgttaccaattagggccagtgccattttccacagctgtgggctctaaaactctcccacctgcaggctcaaaattatctaatccttaaaccagcgatagcctgggctgatggaatatttgcagctcttttcttattctgggtgggtgtccttaccagtctcctggctagacttccacttgggactctgacgtataattaccattccagtcatgttctgggccggggcatggagctgagcctgaccctgacccttataagggatcctaaatccctgaactggttcttggaccccaggaatgtcctctgctttggataactctcttagaaccacccactgatacagccagcaatgsgccaacttctatttgtacctaaaacatctgtcaactagagctgtgcctgccatgcttcctcagggcagatctcttgaacttgaatactggctcagattgaaatcaagagcaccacataccttgggcctggtaattta

SEQ ID NO: 402738 - DNA, 588 bp, Homo sapiens
tagagtgcattctgggagttgggtaatatttgtagttgctgcattttggggatgtgttacaactggtgggaaagtgtgtgcttggctacatctgcagatgttaccaattagggccagtgccattttccacagctgtgggctctaaaactctcccacctgcaggctcaaaattatctaatccttaaaccagcgatagcctgggctgatggaatatttgcagctcttttcttattctgggtgggtgtccttaccagtctcctggctagacttccacttgggactctgacgtataattaccattccagtcatgttctgggccggggcatggagctgagcctgaccctgacccttataagggatcctaaatccctgaactggttcttggaccccaggaatgtcctctgctttggataactctcttagaaccacccactgatacagccagcaatgcsccaacttctatttgtacctaaaacatctgtcaactagagctgtgcctgccatgcttcctcagggcagatctcttgaacttgaatactggctcagattgaaatcaagagcaccacataccttgggcctggtaattta

SEQ ID NO: 402739 - DNA, 647 bp, Homo sapiens
gggtgttcaggaaaactagctaatttacttttctataatatagagcagtgtgaatagaattactcttattgtcagagaccagatagtttttaggccagtgtgattgaagtatgccacaaagtctcctggctaaatgttctaaactccagtccactgatatgaatacaagtattactttagcaaccctaattttaagagtgtcaagaattaatttagccataaatagatactaatatccaagcatgaaattatatattgggctgttgaggtgagggttagggcttgagagaacaggacttggatgcaaagttttggtgggtcagagggagggaattgtcttgtgaggctcactgtgagcgttctaagcaatcaagcaaaggacaaagctttcagtgtttggaagcagacaaggccactgagagggggtgtaaggaatcagctraaagaaacgctatctaattcatacttctgttttcaggcttcccagaccccaagtgctagaaaaagctggcccctgtgtgtttagatggagcctgatttaacaaactttgctggaatcctttatacccagtgtgttctccttatgcaggggaagtctgtagctgatgtgtttgatttcattaggtgcagtctgtaatgcaatgatt

SEQ ID NO: 402740 - DNA, 647 bp, Homo sapiens
gggtgttcaggaaaactagctaatttacttttctataatatagagcagtgtgaatagaattactcttattgtcagagaccagatagtttttaggccagtgtgattgaagtatgccacaaagtctcctggctaaatgttctaaactccagtccactgatatgaatacaagtattactttagcaaccctaattttaagagtgtcaagaattaatttagccataaatagatactaatatccaagcatgaaattatatattgggctgttgaggtgagggttagggcttgagagaacaggacttggatgcaaagttttggtgggtcagagggagggaattgtcttgtgaggctcactgtgagcgttctaagcaatcaagcaaaggacaaagctttcagtgtttggaagcagacaaggccactgagagggggtgtaaggaatcagctgaaagaaacgctatctaattcatacttctgttttcaggcttcccagacmccaagtgctagaaaaagctggcccctgtgtgtttagatggagcctgatttaacaaactttgctggaatcctttatacccagtgtgttctccttatgcaggggaagtctgtagctgatgtgtttgatttcattaggtgcagtctgtaatgcaatgatt

SEQ ID NO: 402741 - DNA, 542 bp, Homo sapiens
gttttcagcaggaaggttaatttttacatgagggtactcatgtgccagaaatttaaaaaatgacatatatgtatttttaaagggtagttgtcaggttctaactgaaggccgaggggagttggtgggcaagtggtgggtagctgaaaaaacacttgaggaattgtagatagtttcaatatggctttactctctccctgggtgcaagtgagcctgggcatgagtgagcccaggcatgagccatatgtacaacattagcagggtaaatataccttttacagacaagagtggctctgagcaagcatgagctcacgtgggtgatcacctaatgtgcctcatgtggtgtggttacataatgagcrgagttgcacacctgtgctccaaactcactgagtcatctggatgggatgtctaccttggcctattcttgaccgcagcacatccattttccttacacttcacccactaggccgagggagacataggccttgaacacgcaggtctgacacacaggtcttacacataggctctggacacacaggtcc

SEQ ID NO: 402742 - DNA, 529 bp, Homo sapiens
agtatttcaaatagaagcattttcaggtaggtaactttaagtcatgaaagcgaaccaatatttaaatacacattaactgtgtaaatattttaggggaattgaaccagacccttatccatagctacagaaagataaaccaggaacctcatctcagacaaaaacaagcccttgagtaaagtgtaaattaaactcagtgcttgaggactccatacttgaccaatgagaggggaagcaggagctaaaarcagaagaaatatcactctgttgctcttttccaaaggttttggggattaacaatgctgcaatgattctaaatggctgtgcctcttggcaataagaaaaaagatgataatctctaccctgttcctcattcttgtccattcattaatgctacatttattcattcaacaaacaaatttgtcatggacagtcttctaggtgccaggtccactgaagtgaacagaaacaagtgtccagtcatggggacagataatctattgcacaaaacctgtcaattcactactctaat

SEQ ID NO: 402743 - DNA, 523 bp, Homo sapiens
aatctgtggttagctaatgtggctacagtacaggtgggaatgggacacctggtaagaaaagaggagggcagaaaggcagataaatccaggaggatttagartgcaatgttacgaactttgcattttcacctgagcactaagggaaaagactgaaaaatatgtagagaagtcaccctggtggcagggtgaagcctaagtgcccgcttgactgttctattatgaaattcattatttaagtgcaggttcttgctgttgtgctgtttattttactattctttctgcctacattagtacactttctcatatcatcccatcctaatcacagctgtttctcaaggcctagtaaaaatctcacttcctcattcagcaaaattcaagagatgttattgataacctgcaaagtcaaacatgtggagaatttcctgattatgccaactagtgaattatcttctaactcctataggagtttgttcatacccctcatatgacacttggaatttttttgtatcctcaagattctatc

SEQ ID NO: 402744 - DNA, 555 bp, Homo sapiens
tcttgtcggttgacagctcttcccatttctagcctgaactccatggaacattctctcacctacttggtttctgttcctctcttcgatagcacctttcccattgtctctctcttctctagctctggatagactctctgctcttaaattcaggaaactggatacactgtaaagatatccaataaagcatttgaaatttggctatgaacaaaagtctctagggaagtttttctaaagaagaaatgagctaatgccatctgcttatgccctcacggcgactactctgacatcccaagatgcttccctgtggcaccttttctcttcctgaagttagaattttgtctgagtctttatcttattgacctgggaactgaaatctgagtttccaagctcttcttacctttcctatcactgaagtcataagccagaaagaggcctgatggtccaccagatggtcctcaatatttggggtgagactctacattaaagcattcccatgacattgctataacttccccttgttcarttgtataacttccacttgtaaagataatctca

SEQ ID NO: 402745 - DNA, 571 bp, Homo sapiens
atcatatatgatatatttaatataaagtatatatttatatatatttacatttaccaaatacatatgtataaaattaccaaatatatatatggtaaatatttgtagtaagtcatattttatatarattttatatacatattatatatatatatttatatgtgccatatccttcaggggatattttagtacctaactggtatgcttgatctcatacaatatatacattatgcatctatatcagagtattttacacaaaatacacagaaataattataacattgttattcaatacatgtataatgaaattagggacacttttttgttaattttaacattcttgtcacaagataatatatcaggcagagagtatgtttcaggaatggaaactaaagacagagaacaagacagaaataaaaggataattcagtatctaaaatgtccagtttttaaaaaatgagagagtaaacaaaacagacaggcaactgcaacccatacacagagtaaattaaatagacaatagaaattgcctttgaatgggcccagatggtggtttaaccaaacaaaccaccaa

SEQ ID NO: 402746 - DNA, 558 bp, Homo sapiens
cagttctgtgttaaatagaagtggtgaaagtgagcatctttgtcttgttctagttctcagggggaatgctttcaactttttctcattcagtttaatgtttactgtgggtttgtcatagatggctcttattatcttaaggtatgtcccttctatgttgattttgctgagggttttaaccataaagygctgctggattttgtcaaatgctttttctccatctttgagataatcatgagatttttgtttttaattctgtttatgtggtatattacatttattgagtgtgttaaaccatccctgtgtcccttatatgaaacccacttgatcatggtggattatctttttcttaaatgctgttggattcaatttgctagtattttgttgaggattttagcatctatgttcatcagagataatggtctgtagtttttgttgttgtttgtttgttgttatatcattgtattgatattagggtgatattggcttcatagaatgattcagggaggattccttctttctctatcttttgaaatagtgccaataggattggtactaatt

SEQ ID NO: 402747 - DNA, 533 bp, Homo sapiens
gaattttctggtgactctaaagacgacttgacaaaggtttaactacartttggacctggaattgtaactaagaatttagtgggctgactgggggctgaggatgtctctgatttaagggcaaagtcacagtgcagaacaacacagaaaacttcctttaatctgtaatgaaaatatttttctttttcttacctacctaatatatttactccaagaccaattattagaatgtaaacaaagcatgttgagcacttttataaactttatgtagcattattagcacatcttttttttttttttcccaaaaatgtgctcgtttgcaggcaaacaatttgtagttggaaacacaaaatctgaccttttatttctgtaaaatacaactacaaacttttagggatgcatttttattaaaaaaaaaagtaagtgacaacagtcagtatctgatttactttgaatctaattttgaaaaatattaatatttaaataaaaaaaagatttgccagtctctaaaacctggaatacatgtaatttgactc

SEQ ID NO: 402748 - DNA, 474 bp, Homo sapiens
tttcacttttatcgaattattgaaatgtcacagttataaaaatgaaaaaaagattaatgattgccagaaattaaggaagggttgggggcatgagggaagcaggtgtgtttataaaaagacaacatgagagagactatttgttggaaatagtctgtatcttcacagaatcaatgtaaatatcttggttgttacattttaccgtaatgttggaaggtgttaccattgaaagaaactgggtaaaactggataaatgaaatctctctgtattatttcttacaaatacatgtgaatctacaatgatctcaaaataaaaattttaattaaaaaatgatgtattttgacagctccctgccagtctgagtcaagtaacactgaactaggaggtatgattaatyatgttatttaattctcataacaatatgtaggtaattagtatttttccctttcatgatgactacactggtgccctgaaaa

SEQ ID NO: 402749 - DNA, 583 bp, Homo sapiens
ttcctttaatcctacaacaaactcctagttggttttcccacatctggttttgtgttctttattttcttcttcatcctcagattgctaatcttttaaaaagacaagctgaatcttctcattcttttgctctgtggtatatcttaacattgttcaaaatattttctgtctttctctactagatatggagtagagacccaatggtgccataatagacatttaatatgagcaaaaaaaaaagatgtttgttttttaaaaaccaaaaaacattgtttttacaaccactttgggattcatttcttattacagcagacacttgcttgtgctttctgatctgactgacatatgtgccacattctctgacaactttttttgtatctgcgattgagtccaaaatacctagccttccaarcactacataaactagcctctgcaaactccaccaatcttacttctcatcacatttcttaccctaaatattctcaaaatgcatggaacagatgtttacactgttttctccttcatacactcgccattatgctgcattgtgtctacaatattccttacctcactatgagtcaaaatt

SEQ ID NO: 402750 - DNA, 311 bp, Homo sapiens
tttctctgcagtagctcctgttatgattccataataatattttataagtrgggaaaatgagtcacagagccactaagtgatatcttgctgcagtaaaaaaaaattacagtatctacatatgcaagataaacaatgaagcatcttattgtcaacctgggaatattaattttctagtttctccagcactggatttcagccaaacaaattacttgcttttcaagctgcaatacaactctgtggatcttagctccaataaagcagtggttcaattttctacagtatttacttattgaaatggacattgtgtaagg

SEQ ID NO: 402751 - DNA, 311 bp, Homo sapiens
tttctctgcagtagctcctgttatgattccataataatattttataagtggggaaaatgagtcacagagccactaagtgatakcttgctgcagtaaaaaaaaattacagtatctacatatgcaagataaacaatgaagcatcttattgtcaacctgggaatattaattttctagtttctccagcactggatttcagccaaacaaattacttgcttttcaagctgcaatacaactctgtggatcttagctccaataaagcagtggttcaattttctacagtatttacttattgaaatggacattgtgtaagg

SEQ ID NO: 402752 - DNA, 584 bp, Homo sapiens
gggttctcctgggccctcttgtccctgatagaggctcatacctgtggataatgcagtctttgaaagaaagcatgtcttgtgatcaagaaaactcgattcttgccatgtcatagtctttaaacaatcagttttataataccattcatgatgaatatgcgttttatttgacagaaggttttaaaaacctcaagactcccatgtttgatccaaattcagtgtcagctaaaattaaacagttattcaggaagaaaaaaaaatasccagttttctctggataataactcagctttttctctgacatctctttgcagtccacatttccactctgatttcagacccatttatctgggtggatttgactctcagtttgatccaaacactgctgcctcaaatccatttatcttcagctcacaaaggattatgttttctgtgtttagccaacaccacaacgactctgttggtagttgtggctttgctttgtaacatctttttgtattagttaactctgtgagcaacatcgtggaattaagatctttcagtgcttctaattggcagcaaacctttgtttttaattttatgctcta

SEQ ID NO: 402753 - DNA, 511 bp, Homo sapiens
actcctgaaacaaaaaggcttgtagttctgaatagttataccctcagccaaatactcttggccaaatacctattcactcattgaaaaaaatttgtatttacaaatgtgtgaatagaaattcaggatttaaaaaaaggtgtgtatatacttatwtcaatgaaaatatttaaggaaaccctgaaataactgaacattaattttggttatcaatatgtttgtacaaatcaaaaaatactaaggccagaattttcttccattggaaagcatgggtccacatttattggtagaatgtaacttatagttaaaaattttatattggaaagtctcctcctgggccactcattaaacaaagataaatggaaacagatttgtccttaaattataaccacccatgtgacataaaaccttgtcatatagttaactttctttgttttgtagtcccctgtccccactcttctctttaacttagcctctttctccgcaacctgtcggtactctgcccccacattgc

SEQ ID NO: 402754 - DNA, 587 bp, Homo sapiens
atctttacgtactcatcagtaaccaactttttaaaaatttcctgaatctcctctaaagacatttagttatttcacatattctgtccatttcatcttcctgaagcagtactccttctagtcagatttgactgccctctrttcttggagcacagctgttgtgtgagcccctcctttcacatatattcaaggattcccttcactgctatccacgtttgatttcctgtttcttgttatctcatatctctctttttcttagtttatatcctcatcttgatggagcacatccttcagtatttcctcggaatgcatgcatgggaggtcacttctttgaaaacctgtgtgtttgaaattatttttatctcatcccgactcttactgaaagtttggaaaggtatagaattctatgttgaaaatcatttttttttgagattttcaaagacatttgtgccgctgaaaatgactagagtaacacaaacaatgcaactgagtagtcttactttaaattcatggccaaaaacttcagatgagcagaggatcacactctatttctgtagtctatttattttcccactctcctagaagcttat

SEQ ID NO: 402755 - DNA, 617 bp, Homo sapiens
cttgtggggatgaatactccattttacataatgtgattattacacattgtgttcttgtatcaaaacatctcatgtacctcataaatatatatgccaactatgtacccgcaaaaattaaattaaaaattaacaaaacaaaaaatcacaaaaacaaatatatagtgattctttaactttttaagttttattttgccctcacaatgactctactgagtaaatattgtgattcttatgttcatgtaatgaaactaaggctctgagagcaataccttgtctaagattatgaaattgtcaaaaaatagtcatgatacaaacttargcttgtgtgatgcatgagaaactaaatataaaaatagaaaatgtcacgtatgacaatagatctcagtcccaccacctctgcagcaaccagcctgaagaaatcagaccataagctcttcagcaattatcccagaatcattaggacttggtaaatgactcctagcttccctatcctcctcactcccctctgtgtccaacttaggaccagccagagaaagccaaataggctcccaaaccagtcacataggatgctccacttctaatgtgcccactttcaactaacccataccaataatttc

SEQ ID NO: 402756 - DNA, 492 bp, Homo sapiens
ttgaataacatagggtatgggatcacaccctattccctatctgggagacagatgtcagtgactgacttgaataacatagggtatgggatcacaccctattccctatctgtcaaaggtcaaagttgcttaaaccagaccagaaaattataaccattctgcttttcttcttctcctcttctttcttcctctgataaccagcttcaatgattataattggtawgtaaaatggaaattacaatgattcaagttacataattcttaaagttatacaaactactaaattcttaaagttaaaatttctcaggtttaacactggagtaactttgggaatgaagttgataagtttgacagagaaatcctttaagaaaaatgatgcatattttatagtaattttaagcagaatatgtctcaaataatttaatttcaacctcataatctttaaaatattttgtgtactttactttccaaacttgatttgaattttacatttta

SEQ ID NO: 402757 - DNA, 498 bp, Homo sapiens
gtcaatgctgtgcacctaatgggccatcgttccctgatgagaccagacgaccaccaaatggcaagctgattacttttcactttgggggagatagtacgtttccccactaaggaagagatgcatatttcagatatggatttcccttccccgactaccatactgtgggctttcagaatgacttactcatcaccataatatgacacatggcattgtttytgatttttaaaaatcacattgtaatgaagaaaatatggcaacagactttcacagaattcccaagttgtagtgtatattccatcacccagattcacacagcttatagattagtagaatggcctattgaagactctgttaaggtaccagtggggagagaacacattgtgagactggggtgctgtcctttacattatagcttatatagcttataaactgtaattcaagcatatgcaatttataagctgctgccttacagtatattcttttttttttttttttttt

SEQ ID NO: 402758 - DNA, 583 bp, Homo sapiens
aaattagagtgatgttaatatacaatgatgataatttaataatttgtaaataatctgtagactgcaaagtgtcaaacatattacagtaacccctgccttcatccatggtggatgtgttccaaggcctccagcagatgcctataagtgtggatagtactgaacccaatatatactgttttttttcttttacatacacatctatgatacagtttatacattaggcacagtaagagattaacaacaagaactaataataacatagaataattataacactataccataataaaagttatatgcatgtggtctctctcaaaatatcttactgtaytgtaactaaaactgctaaaagaaaaactctggaaaaagggggcctattatcttgttccatatagtaggtttaattaatcataatatgagctaaatagtcactattcctttaagggttcacgtcattactttaattcataatcaatatatgtgttagacaaatacattgggaatcaaatggaaaacaaatataggacaaatatttacgattgacaaacactttatatcgatatgggaagcaaatgttaaaagt

SEQ ID NO: 402759 - DNA, 550 bp, Homo sapiens
ccagcctggccaacatggtgaaatcccgcctctactaaaatacaaaaattagccaggcgtggtgacatgtgcctgtcatcccagctactcaggaggctgagtcagtagaatcacttgaacttgggaggtggaggttgcactgagctgagtttgcatcactacactccagccttggcaacagagcgagaatccatctcaaaacaacaacaacaacaacaaaagtatttttgtatatatgagatattcttaatgttttatccctttactctaatttattttaaattgtaagatgtgcttacttactagtggagcatctgtgtttgttgatataaatccatttttctaaattctaattaattaamtaattaattaaagttttgtgattgataagtcttgtgtttcctttttttcttgttctaggaatttctcctaggaatttcatcagtctgtgttcttacttttaatttttaattttgctagttacggttttaaatagttttatgtgacaatttaaaatagtatttttgaatctgtgtttctgaacaccaaa

SEQ ID NO: 402760 - DNA, 550 bp, Homo sapiens
ccagcctggccaacatggtgaaatcccgcctctactaaaatacaaaaattagccaggcgtggtgacatgtgcctgtcatcccagctactcaggaggctgagtcagtagaatcacttgaacttgggaggtggaggttgcactgagctgagtttgcatcactacactccagccttggcaacagagcgagaatccatctcaaaacaacaacaacaacaacaaaagtatttttgtatatatgagatattcttaatgttttatccctttactctaatttattttaaattgtaagatgtgcttacttactagtggagcatctgtgtttgttgatataaatccatttttctaaattctaattaattaactaattaattaaagttttgtgattgatmagtcttgtgtttcctttttttcttgttctaggaatttctcctaggaatttcatcagtctgtgttcttacttttaatttttaattttgctagttacggttttaaatagttttatgtgacaatttaaaatagtatttttgaatctgtgtttctgaacaccaaa

SEQ ID NO: 402761 - DNA, 550 bp, Homo sapiens
ccagcctggccaacatggtgaaatcccgcctctactaaaatacaaaaattagccaggcgtggtgacatgtgcctgtcatcccagctactcaggaggctgagtcagtagaatcacttgaacttgggaggtggaggttgcactgagctgagtttgcatcactacactccagccttggcaacagagcgagaatccatctcaaaacaacaacaacaacaacaaaagtatttttgtatatatgagatattcttaatgttttatccctttactctaatttattttaaattgtaagatgtgcttacttactagtggagcatctgtgtttgttgatataaatccatttttctaaattctaattaattaactaattaattaaagttttgtgattgataagtcttgtgtttcctttttttcttgttctaggaatttctcctaggaatttcatcagtctgtgttcttacttttaatttttaattttgctagttacggttttaaatagttttatgtgacaatttaaaatagtwtttttgaatctgtgtttctgaacaccaaa

SEQ ID NO: 402762 - DNA, 557 bp, Homo sapiens
caggtatttatttatagcagtataataacaacctaacacagaaaattggtacaaagagtagagtgttgttataaatatatctgaaaaagtggaagcagcttcgtaactgggtaatggtcaaaggttggaagaatttagggggctcagaaggaaacatgaagatgaggcaaagtgtggagtttcttatagactgattaaatggttgtgatcagatgcttgtctatcaagatgaatagtgaagttcaggctgatgaggcctcagttagaaatgtagaacttatttgagactggagcaaaggtcactcttcttatgccttagcaaagaacttgggtatgatatgtttatgccttaggaatctggaaatttgaacttgtgtaggttatctggtggaagaaatttctaagcaccaaagcattcrcgacatggcctggctgcttctaacaacttacactcagatgtggggacaaagaaattacttaaatttggaagttatatttaaagagaaaagcagagggtaaaagtttgaaaaatttgtagcctggctatgtggtaggaa

SEQ ID NO: 402763 - DNA, 601 bp, Homo sapiens
ccagttttcacaactaggacagaatctagaggtgagaaaattttctgagtccctgattactcaaccaagatttcacttcttgatgcctagtaattgctaactgcagtttcccacatagaggtggtaaccagtccagagcttgagcactccaggctgtcacctggaaaggcaggcaggagtggagaaggaacatacaaattgggatgccctgcctgagtttctgggactcacagtactaatccacctgagtggtgtctgcagggcaaatgaaaacaagcagtcagcagcattagcctataggtcagagtgagccaacccttgcactgggccttcatttttttcctcatatttgccatgtctatgtcatgttctgaaggaattacttttcatattcacytctatactatttatctctatatttcagcaattacatatctgagatttctttcttattctgtgactgttatttttttaatgccatcttatttgaaatttatgaattaacaatcttcacaaatatctctcagaatagtagttttctttggactaggaccgtcagataaataaaggtataaataaagaagtaaatacataaaattta

SEQ ID NO: 402764 - DNA, 389 bp, Homo sapiens
tgcagaaaaactgtttaagatgaattattttttctctccaatatgccatgggacattttccctttcaatgttactgcagaaacctgtttaattgcaaaaatttttggaaaaatcactcactttgggtgaataattagtactgaatatgccttatcctgctctaaaccaccacagcttgtacgtttaaacccaagaataattccttttctctgatgctgattctctctaattgtttgaaggtgggaaggagagggaaggagtattggaagaataaayctcagcacatatagatcaaaagctaaaaataagcataataaataataattattatgataagaaaatagaaaattattgaaatataaaacaaaaatggtcaagtagaaatactt

SEQ ID NO: 402765 - DNA, 573 bp, Homo sapiens
ctcaactaagttttattttggggtcatgtaatttggcttgcattttattttattaaaattcagccatttcttaaaataaaaattataaagaaaatgtggtacaatacaccacggaatattatgcatccataaaaaggaacgagatcatgtctttgcagggaactggaagccattatcctcagcaaactaatgctggaacagaaaaccaaacactgcatgttctcagttacaagtggtagctgaacaaggagaacacatggacactgggaggggaagaacacacactgaggcctgttgtggggagggaaggggtgggaagagagcatcagggaaaatagctaatgcatgctgggcttaatacctagatgatgggttggtaggtgcagcaaatcaccatggcacacatttacctatgtaacaaacctgcacatcctgcacatgtaccccagaacttgaaataaaataaaatayaaaaataaaaaagtaaggaagttttatttatatagctctttatagattagttgatatttattgcagtgtaaaatgattcaacatacattttttatgcatgtg

SEQ ID NO: 402766 - DNA, 597 bp, Homo sapiens
taagcacttttagcagaactccaaggtaagttaaggcttatcacagaatgatttgggtgtgtggcttttgtttaatatagtgaatccctataagattatagggagacctatacaatttcagtgaaaattatattggtcaaaacacagtcagattgtaccaaaaataagagtcaacacaaacaacagtctttggattctcaaacttctacaagaaataattaggttgcaaaaactctgcagctgcaaatgtaggctatctttcattgaaaagaaaggctatatctatcaraggaactatagctacttagggtggaggtaaataatgaaggaaaaagatttataccttgcccccacttctattgctacagccttctttcctgcaacaaaatttacctgggggaggataataacattgtatgaataaagactgaagttttgggttttatatggatctgaataaatgaatttctgaagcaaaatctgttctgtgactcaaagtattcagtagactttctggtacataagaattgctgacaatttaatttattgtgcaaataagtatacttctgagagtgaattgggctttaataatgatta

SEQ ID NO: 402767 - DNA, 516 bp, Homo sapiens
accttgtcatgcatcctgggtacaactcggccacagtgaggtagatcaccaagtgggtttccggggtcccctattccaggccttgactcctgtatggcatttttacacccaacctggacaacaggagagcccactggcctggagggagtgattctggactgacaactataaccacaagctgacttaggagcctttgggtcttaaataaacatcggtgctctgatgttcaaaacggtgactctgtttggaggaaactcaataaaattcaagacagcataaacaagaaatacagaatcctattggataaatttaacagagagattgagataattaaaaagattcaagcagaaattctgaagattaaaaatgcaygtgacatattgaaatatgcatcagagtctcttagcaagagaattgatcaagcagaagaaagaattagtgagtttgaagacaagctatttgaaaacacacagacagaggaggcaaaagacaaaagaattaaaaaaaatgaagcat

SEQ ID NO: 402768 - DNA, 531 bp, Homo sapiens
cttgtcttttccccagggtatgttgttggtacctttgacaaaaatgagttcactgtagatgtatggatttatttctgtgttctctattgtgttccactggtctatgtgtctatttttatgccagtacaatgctgttttggttactatcrctctttagtatagttttaagtcaggtaatgtgctttttacaattctgttctattttttcttttttaatttatttatattatttatttattttaaaaatttttgtgggcacatagtaggtgtgtatatttatgggtacatgagatgttttgatatgggcatgcaatgtgaaataaccacatcatggagaatggagtacctatgccctcaagcatttatcctatgagttacaaacaatccaataacattttttaagttattttaaaatatgcaattaagttattgactatagttattctattgtggtatcaatagtaggtcttattcattctttctaacttttttattttctgttcattaactacccacactttcccctctcaa

SEQ ID NO: 402769 - DNA, 531 bp, Homo sapiens
cttgtcttttccccagggtatgttgttggtacctttgacaaaaatgagttcactgtagatgtatggatttatttctgtgttctctattgtgttccactggtctatgtgtctatttttatgccagtacaatgctgttttggttactatcgctctttagtatagttttaagtcaggtaatgtgctttttmcaattctgttctattttttcttttttaatttatttatattatttatttattttaaaaatttttgtgggcacatagtaggtgtgtatatttatgggtacatgagatgttttgatatgggcatgcaatgtgaaataaccacatcatggagaatggagtacctatgccctcaagcatttatcctatgagttacaaacaatccaataacattttttaagttattttaaaatatgcaattaagttattgactatagttattctattgtggtatcaatagtaggtcttattcattctttctaacttttttattttctgttcattaactacccacactttcccctctcaa

SEQ ID NO: 402770 - DNA, 547 bp, Homo sapiens
gtgttccactggtctatgtgtctatttttatgccagtacaatgctgttttggttactatcgctctttagtatagttttaagtcaggtaatgtgctttttacaattctgttctattttttcttttttaatttatttatattatttatttattttaaaaatttttgtgggcacatagtaggtgtgtatatttatgggtacatgagatgttttgatatgggcatgcaatgtgaaataaccacatcatggagaatggagtacctatgccctcaagcatttatcctatgagttacaaacaatccaataacattttttaagttattttaaaatatgcaattaagttattgactatagttattctattgyggtatcaatagtaggtcttattcattctttctaacttttttattttctgttcattaactacccacactttcccctctcaagttccccactacccttcccagcctctggtaaccatccttctactttctatgtccacaaattaaattgttttgatatttagatctcacaaataagtgaaacatgt

SEQ ID NO: 402771 - DNA, 559 bp, Homo sapiens
gttattgactatagttattctattgtggtatcaatagtaggtcttattcattctttctaacttttttattttctgttcattaactacccacactttcccctctcaagttccccactacccttcccagcctctggtaaccatccttctactttctatgtccacaaattaaattgttttgatatttagatctcacaaataagtgaaacatgtgatgcttgtcttcctgtgcctggcttatttcacttaatgtaatgatctccagttccatccatattgttgcaaatgactggatcgcattcttttttattgttaatagtactccattgtgtatttgtaccacatttgccttatttattcatctgttgatggacacttacattgcttctaaatattagctatcgtaaacagtgctacaaccaatatgggagtgcaggtacatcttcagtatactggcttgctttcttttgggtatayacccagcaataggattgctggatcatatgatagctgaattttagttttctgaggaacctctaaactgttctccatagtggttgtg

SEQ ID NO: 402772 - DNA, 577 bp, Homo sapiens
gctttatgtgaatgtgtgcacacacacatatatastaacctttaaatataaacatgatcattctatacatactattatattaaggcttttatcttatttattctttagaaatattttcatcgtttcctgcatatgaaaataccataatttatgcaaccaattcactattgatgggcacttaggtcattacagctttctgcaataaacatactgcaataaatatctctatgtatggatcatagggtgctttataggtagaaactttcaataccttcccaggaataaaatttctgcgacaaggggtatatggttttaagatgtcaataattaccattaaatttccttcaaagacttacaccacttttcaatgtcatcagcagtgaatagaaatacctattttccaagcacttgcaagttttttgctattgccaaacttttcaatctttgccagtctaagagaaacagccaactatgtggaaacaggagctttgtaagtgtacatttgaagtagaagctgaagattcttggcctgtgggaaaaaaatgaactattttcagtgtgattcaagtatcatgaa

SEQ ID NO: 402773 - DNA, 506 bp, Homo sapiens
atggctaatttctgtgatggtatattattcagttattaaatgattttgtgcaagtgttttaagtcttttatttatgctcacaattatattgctaggtgagcatattggcttaaaaataatacatataayagttataaaatagtacacataatacgaatgtaagtttttcctgccttctttgatttcatatacaatcaagcccaaggtctgtctatttatttatttatttatttatttatttatttatttatttatttctcatatcctttccctgttttctgtccctgcaaccactgaacttgtttagatgtttcccagtggaactattaagatagcttctttatcagtccttctatcttttatatctatcctaccaaagaacagtttttctatattagtgtgttctcatgctgctaataaagacatacccaagactgggtaatttatgaaggaaagaggtttaattgactcacagtgcagcatggctggggaggcctcaggaattt

SEQ ID NO: 402774 - DNA, 506 bp, Homo sapiens
atggctaatttctgtgatggtatattattcagttattaaatgattttgtgcaagtgttttaagtcttttatttatgctcacaattatattgctaggtgagcatattggcttaaaaataatacatataacagttataaaatagtacacataatacgaatgtaagtttttcctgccttctttgatttcatatacaatcaagcccaaggtctgtcyatttatttatttatttatttatttatttatttatttatttatttctcatatcctttccctgttttctgtccctgcaaccactgaacttgtttagatgtttcccagtggaactattaagatagcttctttatcagtccttctatcttttatatctatcctaccaaagaacagtttttctatattagtgtgttctcatgctgctaataaagacatacccaagactgggtaatttatgaaggaaagaggtttaattgactcacagtgcagcatggctggggaggcctcaggaattt

SEQ ID NO: 402775 - DNA, 659 bp, Homo sapiens
ctccttcttaaaattcttcagtggtttctatagcatgccagaaaatgtccaatctgctgagcacatatcatcccaaaatatttttgatctgaagactagctacctgtccctaggtgtctgtcccatcactgtgcttcttaatttccttctgtatcggtttcctagggctgccataacaaattactacaaatgtggtggcatcaaacaacagaaatttattctstcactgttctggaggccagaagttcaaaattaaggtgatttactcgggagactctgaagaagagttcagtccatgcttctctcctggcttctgatgactgccagcaactttggctttcctctgcttgaggctgcgtaactccagtctctgaatccgacgtcacttggctttcctttttcttcttctgtttgtcaaatctcccctaactttctcttataaggacaccagtcattggatttagggcccaccctaaatctagaatgatcttatcttgagaaccttaattatatgtgcaaaggccatatttctaaatcaggtcacactcaaagtactagtggttggacttgggtatatctttttgagaatgctattcaacccattgtaccttcacttcttattctttagtagtactggaatccgtatgatccccaaaacc

SEQ ID NO: 402776 - DNA, 620 bp, Homo sapiens
gacattgttcaatgaaacattgatgatcactgttatggttggagagataaggtttgatctacattttattttggcattggtatctaaaaccatgtgaaaacaaacttaatgtgttatcagttgagatttaaagcaaatcaattaacctcaaactagcatctagtcctttatttattcaataaatacttagtgaaagcctatgttccaagcagtcttctaggctcttggaagacagtagtgaacaaaaccaacaaattattgccttaatggagcttatatcttgataagagaaagagagagtgagtttgaagcttcagtattagataggggcatcagagggtgtgtaatgggaagatgctrtttgagcaggaggtgagggaggaagccatgtaggagcagcatgaagactggtactattctggtcagagggaacagcaactgcaagggcccaggggtgggatggggcctagtttacgctaagaacagcaaggaggctgcggtggcagaaaggagggaacgagggagagggaattaggagaggaggtctgacaggaaagaggaggactggtagcttgtttggagacatctcgaggacttaggttttctcagggaagcagagc

SEQ ID NO: 402777 - DNA, 620 bp, Homo sapiens
gacattgttcaatgaaacattgatgatcactgttatggttggagagataaggtttgatctacattttattttggcattggtatctaaaaccatgtgaaaacaaacttaatgtgttatcagttgagatttaaagcaaatcaattaacctcaaactagcatctagtcctttatttattcaataaatacttagtgaaagcctatgttccaagcagtcttctaggctcttggaagacagtagtgaacaaaaccaacaaattattgccttaatggagcttatatcttgataagagaaagagagagtgagtttgaagcttcagtattagataggggcatcagagggtgtgtaatgggaagatgctatttgagcaggaggtgagggaggaagccatgtaggagcagcatgaagactggtactattctggtcagagggaacagcaactgcaagggcccaggggtgggatggggcctagtttacgctaagaacagcaaggaggctgcgrtggcagaaaggagggaacgagggagagggaattaggagaggaggtctgacaggaaagaggaggactggtagcttgtttggagacatctcgaggacttaggttttctcagggaagcagagc

SEQ ID NO: 402778 - DNA, 586 bp, Homo sapiens
tttgtttgcttttgtttctctgtgctgagaacatattgctgaacttgtggcttgggggtcctgcgggttggaaaaccatggtaatttgtttcccttgttaggatttctcaycattccttggtgttgctgtaactaaatctagggtgtcttcccataatggtttgatcttggcttattctcaatgatgtaggtccagtggtagtctgtgtggatgattgaaaaacacagtaaatccatttagcctggtgattgtcatgcctctggcccataacgggaagtaattctggtcaccttatagtgggcttattccctttggccaatttttttagctccactatctgtaatgacttctcacaaatctaccaagcattttcctttctttaaccatttctttaaaggggaaggaagagatgtgatgaagcaccaccctgtgggaattggtgtttgggaaacttgtgcaagaaaatgctgacgttcaggctactgctactgttgtcagtaataaaaccctttgtctccaacccagttgtcttgtgtcttcagcaagtagagtacaatctgactcttcaaggttcttaaacttttg

SEQ ID NO: 402779 - DNA, 586 bp, Homo sapiens
tttgtttgcttttgtttctctgtgctgagaacatattgctgaacttgtggcttgggggtcctgcgggttggaaaaccatggtaatttgtttcccttgttaggatttctcaccattccttggtgttgctgtaactaaatctagggtgtcttcccataatggtttgatcttggcttattctcaatgatgtaggtccagtggtagtctgtgtggatgattgaaaaacacagtaaatccatttagcctggtgattgtcatgcctctggcccataacgggaagtaattctggtcaccttatagtgggcttattmcctttggccaatttttttagctccactatctgtaatgacttctcacaaatctaccaagcattttcctttctttaaccatttctttaaaggggaaggaagagatgtgatgaagcaccaccctgtgggaattggtgtttgggaaacttgtgcaagaaaatgctgacgttcaggctactgctactgttgtcagtaataaaaccctttgtctccaacccagttgtcttgtgtcttcagcaagtagagtacaatctgactcttcaaggttcttaaacttttg

SEQ ID NO: 402780 - DNA, 532 bp, Homo sapiens
gcccattggagttatcttgataccatgaacatccctgcttcccttcactctgccctagtattttctaaattgaatctttagtctaccttcacgcacttaatgcttttctctcctccctaccccaaacatcctttttgtataatcagggctcccagcatagaatctaaatgctgtgtcctatctgggtatgtccaacagtgaaaatatttccagatcccaggaaagctggagcaattactcttacttttcttagccatgctttcccagctacactattcaaagttgtgcttattcagggttgatagttaaaatatttaatgatgggamttgaagggacatccatgttcctactggcatctgcctactgaacatcaatcagtccaccatttaggacatagactactacagtctggcataaatattttgaattctcaataaaacaatagcgttccagaccccaagaaacagggtaaaatgaaagttttattttattttatatatttaaggtgtataatatgatgttttgatatat

SEQ ID NO: 402781 - DNA, 558 bp, Homo sapiens
tcaaaatatttgtcttcaggtttccaccaataaactcactaggcccatgtaaattctgaattgtgacctcagctcagctgagacctccactacaataaaatggatacttttctacaattgaagcagcaaggctgatatagaggaaagacccttgacacacggggtttcaaatctagtctctgtcacttaccacttgtgtaaccttaggcaggctacttaacgcctccaagtctttggttacttatccataaaatggatcagaatgtctattttatttgatggaggactataaaacagctcagtgcttgaaataaytgtatgtattcaacaagtattggctcgtttgttcttttgcaagcctccaagaattatgtagaggtgtagactttaacattgcaccctgcatctgaattgccatgggtgccacagaaactgacatcctcctctgtctgacacttggctttctttcaagtctgttcaagtcaagcaaagaagatttacattaggctatattttcattaaaatatcactccagatactaccacctttgaaaacccc

SEQ ID NO: 402782 - DNA, 560 bp, Homo sapiens
aagaatgagtaaagaaagaattattcttaaatgaatattttatttcaaacttgtacattttcattggtgccatctgtaattgagaggcactttgaaatgtcttaggaagctcagcaacctctggcagtttctctcatttcatctgtctttacatacaactatgacagaagtggattggcacattgctaaccgagttccctgaggacttcttgttgtggttgctgtttaagacattattcatgcctcattcaacaataatttttctgactaacaatcatttttctcaccatgtctcagcaacaagtcctatgactttcctctagtaatttttgtttgttgcatgttttaaatagaattttatgtttccaatttatgcttgtaagtgtgagtctgtgtgygcatatatgtgtgtgaatgcatgcatatttcaaggaatccaaagtgagattatacgaaaatcaggaagattttcaaaaagcaattttggatgcagactccagggtagaaagatattttataagaacaaatgatctacaaagttgcaaaaatttgaggcgtgc

SEQ ID NO: 402783 - DNA, 646 bp, Homo sapiens
ctatgcttttgatttatttgggtatctgggtgatttgttggctgcaggtctatgtgaatagatctttgttaaactctggagtaaaaatatgctgcccgtaggagccttgttgataataacgcttcaaatgcgttactcaccttgcaatcatcaaatgccacaagtgatagagaagccagatcaactgactcaacatttattccatccttaatatgttttctgtatggcagagactagaaagcttaaaaatacatttctcagacttcctttggagcagaagctccagatgtaatttaaatttaatcaatcagatgtactcaggagaggcttgaatgcagagcagggtgaagtggggaaagggagggtgtrgtggggtcatgcattttcctggtgcatggcctgactcaggaaccagcagttccagcagcagcttcctgatccctggagcctaactgggttactgtcttgattccccattttcctaactgaagctgaggtagaagtttccttgttgagccagttttgccgtgatgacctgcgaactgttctttgaggtccagcccagagcaagtttctccaaaacatctaacaattttggaagtacctcattcttagtactaaatctctttggttcacaatagtcaca

SEQ ID NO: 402784 - DNA, 646 bp, Homo sapiens
ctatgcttttgatttatttgggtatctgggtgatttgttggctgcaggtctatgtgaatagatctttgttaaactctggagtaaaaatatgctgcccgtaggagccttgttgataataacgcttcaaatgcgttactcaccttgcaatcatcaaatgccacaagtgatagagaagccagatcaactgactcaacatttattccatccttaatatgttttctgtatggcagagactagaaagcttaaaaatacatttctcagacttcctttggagcagaagctccagatgtaatttaaatttaatcaatcagatgtactcaggagaggcttgaatgcagagcagggtgaagtggggaaagggagggtgtagtggggtcatgcattttcctggtgcatggcctgactcaggaaccagcagttccagcagcagcttcctgatccctggagcctaacwgggttactgtcttgattccccattttcctaactgaagctgaggtagaagtttccttgttgagccagttttgccgtgatgacctgcgaactgttctttgaggtccagcccagagcaagtttctccaaaacatctaacaattttggaagtacctcattcttagtactaaatctctttggttcacaatagtcaca

SEQ ID NO: 402785 - DNA, 558 bp, Homo sapiens
tccacattactgaaaaaatatattaatgccatgaaaaatagtatgttctgaattttccaaagataagaaatgtgcctcgtcckaatataatttaacgggggaaaaggaaattatgttagcttcagttctcactggatatatctcagatctaatgtttaagataagaaagatgacagtttgagagaggctggtgactttcaaataatttacccagttgggagaactgctgttatgtttttgttgcatgtaaatgctgcaagatactgcctgtccctaaagctattcagcactcaagtgtggcaatagtgttagggctccttgccacatgtatctgcacatcttcccctcctcagcatatctcagtggtgagggctcagtttgctgaggcttttgcttcgggcccattggagtaaatttcccattttattatctgtggtctcttagggagagtgtaacagataatgagtcctgatgctgaagtatcccacatccactgtcatcgctaggcagagtgattgcacttcatagcagagtgcagtgatttttcagcaggcaaaa

SEQ ID NO: 402786 - DNA, 432 bp, Homo sapiens
gaaatatcaataataatggtagctaatttttattgagtaattactattcaaaatatttcatacatttaatcttcataactattatatagttatcatacttacattgcatgtgaggaaaaaaaaacaacagagtttaagtagcatgtcataaatcacacaactcytaagtggtgaagccatggtttgaactttctgacttcagagttgtcaatactaaccactatgtagaagagcattgcacaccaatatggcacatgtatacatatgtaacaaacctgcatgttgtgcacgtgtaccctaaaacttaaagtatttatatatatatatatgaagagcattgagcataatagcaaatagcacaagaacttgcagtcaaaagggcaattcagtgctactaaaataccaaattgagtagaggtaaaacagagaact

SEQ ID NO: 402787 - DNA, 631 bp, Homo sapiens
aaaggaacatgcccagtctcccaatctgtgggaaagaattataggcttctttttttcttttaacctatgtggctagaaaagacatgaaaattattttaattataaatttggatccttagcttatttcaactacatggtgaaaactagctggtagkatcttagtctgtctggttcacctgtaaattacagttgctaaacttctgagtcattttgcctttgaccctgtggagacaaccaaatcttaactaacagtcgcttagtaagctattcctgggcattatgtaagaagtccatatttaattaagaatatatataacattaaaaaaaactattctcccgtgttagtgaatttgaggtatactgaaattaaaataagctttctgtagaaggaattttttgtttttgcttcttttaatcaaaatagcagataaaatttattcattaatagaaagaatataatatttattgagaatcaaccatgggctaagcatatttctaggaacagaagcttttcagacaaggcttcagcctagtaaattgtgtatgatagtaggttcatataattagtaaaaataaagaaattattaacatagtttcaaatagcaataagcacaaagaatagctagtcact

SEQ ID NO: 402788 - DNA, 353 bp, Homo sapiens
aaatttatgagaaagctaatgcttttgtcctcatttagagttaggwgacctgggcataggaaagttaaatattttgaacaaggaaataaagctagtaaatgggaggagccagaattcaaacacaggcattctggttccagagtccaagttcttaccaccacactagaaaaaaatctagagctttctaaattttgttttcagcaatgagccccacctcaaatctgtatttcttatgacttttttttttctaagttttatgtaccaggtctaggcactcctctacatgacagcattatcgtaagatttctcaaagacttctctctttcaagttaatcatccccaattcctgctct

SEQ ID NO: 402789 - DNA, 540 bp, Homo sapiens
ctgtatttcttatgacttttttttttctaagttttatgtaccaggtctaggcactcctctacatgacagcattatcgtaagatttctcaaagacttctctctttcaagttaatcatccccaattcctgctctctttctttttttattttatttatttatttatttattttgagacagagtctcactctgtcacccaggctggagttaagtcttgcaatcttggctgactgcaacctccacctcccaggttcaagtgattctcatgcctcagcctcctgagcagctgggactacaggtgcctaccactacacccggctaatttttttgtatttttagtagagatagagttttgtcatgttgggcgggctgatctggtacccctgatctcaggtcacctgcctgccttggcctcccaaagtgctgagattacagacatgagccactgcccctggtcctctctttcaagttaatcatctctagatccatctccaaactcttcttcaatatgacrtatttacccaacctactccctaggctagt

SEQ ID NO: 402790 - DNA, 619 bp, Homo sapiens
acacctgggccgcccagggtggaaaaaggcttaaaggtgttcttaaaccacaaacaatagcatgagcaatctgtgccttaaggacatgctcctgctgcagttaactagcccaacccatccctttattttgaccaatgcctttgtttcccataagggatacttttagttaatatctatrgaaacaatgataatgactggcttgctgttaataaatatgtgggtaaatctctgttcgaggctctcaggtctgaaggctgtgagacccctgatttcccacttcacatctctatatttctgtgtgtgtgcctttaattcccctagcgccgctggtttagggtctctccgaccaagctggtctcggcagcgttctgtctttgaactcctgctctgccatattttttctcatgagatcccagtagaagttcatggtaggttggaaggtgaggaagcttgctagtgagtaaaacaagaactcaactaaatctgaagccctcagcagacacattagcccatattgtccaaaatttgtaaatattggagttgatttcatctaactctcttgtatggtgaccactccttcctcccatgttctgtcacaagtgagccagactgaatgttc

SEQ ID NO: 402791 - DNA, 545 bp, Homo sapiens
acaaaagaggatttctttgactagggaggaattaaaagaaggcaaagactgcaaatgagtaccactgttattgcaaaagtacacagagataaactcatcccttgagaagtgttccccaactgtataaagggattgaatgaaacaaaggagtcttaataataatgagcaataataggctcttacagctgacctttcccataaaatcccctaagggcttagtgcatgttgaatattataccaatttgaaatagtaaagaggattgttaggcatagaaaccatttcagttattgacaggacccataaactatgacagagagaatttttaaaggttctctagggattacaaagcaaatgccttcaggtattgtgtaggtaatgtaaatgagggaagctgtcctgctgtaagacaaatagaaatagtgaggtttgagggaccyatgtcaagattttcaaatctaaattgctttaaaaattgcttcagccaaagtaaatatatctgtaggctctagggttccctctccctgccatgtctacaacaacagca

SEQ ID NO: 402792 - DNA, 567 bp, Homo sapiens
ttgtggtcgtcctcctggtaaataatagccaggtcatagagcagatatgcgggccttgggaagcttctgaaacagccatttctaacagattctcccaacatccacccgctccaggatttgagtgccactggaaatcataaataaatctgcaataagaattgtgtacatgcttttattcatataaggtttacagtttatttttggatatttttatatacttttcctgactagctattttaaatgagcctgcaaaataccacaaaatcagtaaggtatggagcacgcctaraatcctgctttgtagactgtagtagttatttccatcataacacgcaaaagggacacactgcagctttgaacaaatctgccattatcactggcaaaattttacatcctttacaaatgataccaagtagatctgcttctcaggtagactacgatacacatttctggcatagaaatcagtcactgtgaacctttgaatcacattctgtctctgtcaggaagaattctaactgtcaggaatctgttactatttcgtaggcaaaatgaaaattgtatgattct

SEQ ID NO: 402793 - DNA, 619 bp, Homo sapiens
aagtagacaaactgggttaattctatggccagtagaaatacaacaatttgtgctttcctctgggacactaaacataattcttggatttgggtagaggtatgagattaaaatctgtgtttatttgaatcacaattctgatgctcaggagagagaggaaatacatgactcatttgttatgaccagtatctgagaagacaaaactcacaggctattttttattatctacagagtagatataagattgttttctgagacttcagctgcatggatttttgtactttggaagtaaataagagagagttgtagaaaacctcagagtttctgatgtttttcataatgagatccataaatattaagaattatatgactaattaattactttgayttagtccttgggtctgaatttatttttatagccataaaaagtaattatattatttgatatggcttggttttaaagtttacttctttgtacttcttttgaagctcctgtccaaattcttttaggactctgtgtattggcttggttttaacataaaattagttgaatgtacttaaatataaaataaatgaaatcccacatgctaatggcccttataaaaacataaaatccaagtaa

SEQ ID NO: 402794 - DNA, 567 bp, Homo sapiens
ttgtggtcgtcctcctggtaaataatagccaggtcatagagcagatatgcgggccttgggaagcttctgaaacagccatttctaacagattctcccaacatccacccgctccaggatttgagtgccactggaaatcataaataaatctgcaataagaattgtgtacatgcttttattcatataaggtttacagtttatttttggatatttttatatacttttcctgactagctattttaaatgagcctgcaaaataccacaaaatcagtaaggtatggagcacgcctagaatcctgctttgtagactgtagtagttatttccatcataacacrcaaaagggacacactgcagctttgaacaaatctgccattatcactggcaaaattttacatcctttacaaatgataccaagtagatctgcttctcaggtagactacgatacacatttctggcatagaaatcagtcactgtgaacctttgaatcacattctgtctctgtcaggaagaattctaactgtcaggaatctgttactatttcgtaggcaaaatgaaaattgtatgattct

SEQ ID NO: 402795 - DNA, 494 bp, Homo sapiens
tgccatttgtagaaactaacactgaaccatcaagattgcacaattccctaagtagatcaggttgattacactgggcttgttcctcatgtaggaaataatgatttgcctttacttaaattgacatctactctagatttggatttgccttttttttcagtactaccatttgaggccttctggaatgccagatttatttacatgagatcctgaataacatcattttagaccgaaagtctagttttattgtgaggtctataaaaatgtgtkcatagtcctagaatccacttgtcctaccacagacatctttcagatgctttcagcccaatagagaaatgtattgtctatcataagctcagctatgacaccagtgtggggttaaaatattacaatgttgggtgacagtctcataggatacaatatatgtattaatggtggatgatagatggtcccgtttctccagcatactagtacaggaacccaaggacaggtgtatg

SEQ ID NO: 402796 - DNA, 673 bp, Homo sapiens
tgactttctcttcttcaatttggatgctctttatttatttccttttcctgattgctctggctaggacttctactgctattttgaatagaagtggtgaaagtgggcatccttgtcttgttcctgttctcagggggattgctttcaacttttccccatttagtaagatgttggctgcgagtttgccatatatagcttttcttattttgatataagttccttctatgcctagtttgttgaggatttttatcataaggggatgctggattttatagaatgtttttctgcatctattgagatgattataaattttttgtttttaattcttgtttaagtaatgtatctttttattgacttgcatatgttaaactatgttggcacacctggtataaaatacacttgatcatggtgtattatttmtttgatgtgtggttgaattgggttagctagtattttgttgagtattttgttgtgtcgctattattcattttaaagaatttttaaatttccatatatatttccatgttcatcagaaatattgttttgttgttgttgatgttgttacatcccctcctagttttggtatcagggtgatactggcttcatataatgatttatggaggatttcctctttttcagtcttttaaaataattccaatagggctggtattaatta

SEQ ID NO: 402797 - DNA, 673 bp, Homo sapiens
tgactttctcttcttcaatttggatgctctttatttatttccttttcctgattgctctggctaggacttctactgctattttgaatagaagtggtgaaagtgggcatccttgtcttgttcctgttctcagggggattgctttcaacttttccccatttagtaagatgttggctgcgagtttgccatatatagcttttcttattttgatataagttccttctatgcctagtttgttgaggatttttatcataaggggatgctggattttatagaatgtttttctgcatctattgagatgattataaattttttgtttttaattcttgtttaagtaatgtatctttttattgacttgcatatgttaaactatgttggcacacctggtataaaatacacttgatcatggtgtattatttctttgatgtgtggttgaattgggttagctagtattttgttgagtattttgttgtgtcgctattattcattttaaagaatttttaaatttccatatatatttccatgttcatcagaaatattgttttgttgttgttgatgttgttacatcccctcctagttttggtatcagggtgatactggcttcatataatgatttatggargatttcctctttttcagtcttttaaaataattccaatagggctggtattaatta

SEQ ID NO: 402798 - DNA, 609 bp, Homo sapiens
tatctcattgatatgagatacaaagaactctttaaagttgacaatggaaagaacttaatagaaaaatgagcaaagaatataggtaattcactaataagctaatctaaatggcaaacaaacatgaaaaagaagcataagcttactgtaagtttataaaatataaattaatataacaataaagtatcactacattcattataatggcaaaaaatttaaaaatgacacatactgctgccatgggagagtggaaatataagttattgcaacctttttggaaagcaataagacagtatctgtttttgtcttttttcttagcaatcctgctcctaagaatgtatttcataatgataaaaatcaccagtgtaagaatattccctgtacttttgttcataatgtcaaaaaatggaaagaaaataaatactcatcaatwaagaggaatggcagaatattcactgtgaaatatttacataacaattaaaagaaatgaattggtctatacaacttgatgtggtgacatttctagaaggtactatcgagtgattaacaaaagatgcagaaaagtgtttcatgtgatagatagacagacagacagaagaaaagtggatgcat

SEQ ID NO: 402799 - DNA, 474 bp, Homo sapiens
aaactaataaagaaaaaaacatatgccatatagaaagcaaagagcaaatcagtagacaactcttgttagtggttgcattaaatgtaaatggataagcactcaaaaaaatatctattaccaaaayggataaaagactttattcaaactatatgctgtctacaagagacacaccttaaaacatgcaaattaatggaaagtaaaagagtggaagaagatacatcatgcgagagcaataaagtggctatattaatattaaaaacagacaaaataaagagtatgatgaaaaattgttactatgcacaaagaagaagcttttgtaataattaaaggaccaatatattggaaagacataataacaaaatatgcacctaacaacaaagaaaaatatgtggagcaaaaattgatgaaatttaagggagaaatagaaaattcaacagtaatagttagagtcttcaatatgccagtttcaataag

SEQ ID NO: 402800 - DNA, 553 bp, Homo sapiens
taaaactggagtcattatgttaagtgaaataagtcagacacagatagacaaactttgcatgttctcacttatttgtgggtgctaaaaatcaaagcagttgaattcatgcagacagggagtagaagaatggttaccaaagtctaggaagagtagtaggaggagtgggagggagaaggaagtgggaatggttaataggcaaaaatatgtagttatraagaacgaataagatctagtattttatagcataacagggtgactataatcaataattaattgtacatataaaaataactaaaagagtgtaattggatttttgtaacacaaaggataaatgcttgagggtagggataccccattgcctaggatgtgattattgcttactgcatgccagtatcaaagtatctcatgtgccccataaatgtatatacttactatatacccacaaaaataaaacaaaccaaagtatgttttctgaccacaacagaatgaaattagcgatcaaaaaacaaaggaaatttggaggattcacaaatatttgaaaattaagcaaaca

SEQ ID NO: 402801 - DNA, 452 bp, Homo sapiens
ccttagggggtgaaacctctctggttcaatacctgcatgttttcctagacttgtcttttaaagggccccatccgacaactgggttttcttttgcctgtctgtgtgtgtactgtgtgtaacgtctgtcaaaagagctctaattaatttggagtaaagaaagacaagtgmttggatctattattttttaaagggaagataaaatctgtggtacctttcagttcatgtgactttaatctttaagaaataaaaacagccctaaacactattggtaaaatgcaggttagatggaaggttttctaagtgttttgaggttacaaattgctttttgtgttctgagaactatttgacttgccagcttcacaactggtaaggcctggggacatgtggaactaaccatgcccttaattaagaaggcaaaccttggctgcagttagcacacaaagcaacttacc

SEQ ID NO: 402802 - DNA, 557 bp, Homo sapiens
tagtttgctcttgcttttctagttctttaagatgcatcctttggttatttatttcaagtttttcttctttttgatgtgggcacttatatctataagttactctctttgtactgctttcactgtatcccatatattttggtatgttgtgtttccattattatttgttttaagaaatttttcaatttccctcctaatttattcattgacccactggtcattcaagagcatattgtttagtttccatgtaattgtatagtttccaaaatttctcatttttgatttctagttttattccattgtgatcagagaagatgctagatattattttaatatttttgaatgttttatgactttttttggaacctaatatatrgtctatcctcataattgatccatgtatttgtgaagaagaatgtgtattctgcagctgttgaatgacacgttctgtaaatatctactacgttcatttgttccatagcatagatttagtttgatgtttctttgttgattttctgtctagaagagctgaccaaggctgacagtggggtgttgaagtc

SEQ ID NO: 402803 - DNA, 321 bp, Homo sapiens
tatgtcaagtattactctaagcattttaatatttttatttacttaatcttcacaataattctgtgaagtatatgctcttatcaccttcattttactgatgaggaaataggcaaagagaggctaagtaacttgcccaaggtcacagagcttgtaaatccaagaactgattcagactcctaggttggtacccttaaccagcacgcyacatcccctctctgacccaaacaagtaaattaaaaagagactacaaaaaaattgctattgtttagaaaagccatgcagttttctttctcttctccaatcttgcctaaattatatgga

SEQ ID NO: 402804 - DNA, 586 bp, Homo sapiens
tacattgttttttagacatagtgctgttgttcacttaatgaactacaacataatacaaatrtaacttttatatgtacagggaaaccaaaaactttgtgtgaatcactttattgtaatgtttgctttgttgcagtggtctggaactgaacccataatatctctgaggtacttctgtacagaatttgctccccaaagtgatcacaagtgactaaaatgtcatttagtcttcattttttattatcttctcaatccactggaaaacaccagcctgtatctattattagtaacagtagaaaaaaatgctcttttttttcattgctgggttgagagtttacatttctatgagggtctgacctctgttgataacatggatttcaacagattttcctttaatctatttgagcatttgttaaataagagagtggtgtagtagaaagaattacagtcatgccccacttaatgacaggaatccattctacgaaaggcattgttaggtgattttcttgtatacaaatgtcatcgagtgtacttccacaaacttatatggttatactgtactgcatacctaggctatatgggttagccg

SEQ ID NO: 402805 - DNA, 586 bp, Homo sapiens
tacattgttttttagacatagtgctgttgttcacttaatgaactacaacataatacaaatgtaacttttatatgtacagggaaaccaaaaactttgtgtgaatcactttattgtaatgtttgctttgytgcagtggtctggaactgaacccataatatctctgaggtacttctgtacagaatttgctccccaaagtgatcacaagtgactaaaatgtcatttagtcttcattttttattatcttctcaatccactggaaaacaccagcctgtatctattattagtaacagtagaaaaaaatgctcttttttttcattgctgggttgagagtttacatttctatgagggtctgacctctgttgataacatggatttcaacagattttcctttaatctatttgagcatttgttaaataagagagtggtgtagtagaaagaattacagtcatgccccacttaatgacaggaatccattctacgaaaggcattgttaggtgattttcttgtatacaaatgtcatcgagtgtacttccacaaacttatatggttatactgtactgcatacctaggctatatgggttagccg

SEQ ID NO: 402806 - DNA, 605 bp, Homo sapiens
gttccattagtaaattacctctgtccctcagcttcttcatctgtaaaataagcatgataatagcacctctttcataaagttgttgtgaggattaaatgacttcatgcattaaaagtacatagcccaggtgcggtagctctcagcaccttgggaggccgaggtgggtggatcacctgaggacaggaatttgagaccagcctggccaacatggtgaaaccctgtctctactgaaaatacaaaagttagccagccatggtggcaggcgcctgtaatcccagctactagggaggckgaggcaggagaattgtttgaacccaggaggcggaggttgcagtgagccaagattgcatcatggcactccagccggggcaacaagagtgagactctctctccagaaaaaaaaaaaaagtgcattgactaatccctggacctcagtacacactcagccagtgttagttatcagttttattccttctatcaactgttcaatgccttcctcatctccctgactctctatcaggttaattgggtaaaggtagggggaggaccaaagcgaaagagggaagataaaccctttcttggatttgttccttttaggttttgtc

SEQ ID NO: 402807 - DNA, 501 bp, Homo sapiens
tctgtaaaataagcatgataatagcacctctttcataaagttgttgtgaggattaaatgacttcatgcattaaaagtacatagcccaggtgcggtagctctcagcaccttgggaggccgaggtgggtggatcacctgaggacaggaatttgagaccagcctggccaacatggtgaaaccctgtctctactgaaaatacaaaagttagccagccatggtggcaggcgcctgtaatcccagctactagggaggcggaggcaggagaattgtttgaacccaggaggcggaggttgcagtgagccaagattgcatcatggcactccagccggggcaacaagagtgagactctctctccagaaaaaaaaaaaaagtkcattgactaatccctggacctcagtacacactcagccagtgttagttatcagttttattccttctatcaactgttcaatgccttcctcatctccctgactctctatcaggttaattgggtaaaggtagg

SEQ ID NO: 402808 - DNA, 464 bp, Homo sapiens
aactagggtattaccaaatttgcattcrcagtttatcaaagaggagagaaaatactttgcagttctctgtttattttaatattttgacagatgttacatgatttaacaccagttgctaagtaaatacctactatgtacaaggaaggcactatgcttggtattagggagagtaaatgaaccaggtaactgccacaggaaacttctaatttattaggaaaggaagatataaataactttattacatgttatttgaaataagaactttaagactggaataaacgcataactataggtatttggaggtgacaatttgctgtgtcatgagacagaaaatggttcaaaaggaagtcagaactaatattgttgcaagggaatatattgctagtttaaaacaagaaatgtgttttgtttgtttgtttatatttttccagcagccatgtgggtatttagggtcaaagcaggga

SEQ ID NO: 402809 - DNA, 616 bp, Homo sapiens
ccaactcatcaccagtgatttcttgggctctgcattagttttctattgctgctgcaacmaacagctacagactcagtggcttccatttctgtcttatagttctggttgccaaaagtcctaagaggatctcactgggctaaagtcaaggtgctggcggggctatgtcccttctggaggctcaagggatgaatcgggtccctgccttttctagcttctaggggctccagcttctaggtttgtggcctccttcctccatcctcaaagccagcaacagcaggtgaagtcctcgcccatcatgcatcactctcccttcttcctccttcaacttttttttttatatttagggggaacgagtaccggattcttacatagtcaaaaagctccttatagagaagctcggaactttcaatacaactttgccttttctgccattttaattttccatttaatttaaatgtattctctcatttgaccttcatactctgtggagaaatattcctatttcggcttgtattgacaagctgttttcacacagcccccacatcacccaaccaaccagcaagaaacagataaagaaactgaggcccagggaggctaagagtcctgccaggatcat

SEQ ID NO: 402810 - DNA, 616 bp, Homo sapiens
ccaactcatcaccagtgatttcttgggctctgcattagttttctattgctgctgcaaccaacagctacagactcagtggcttccatttctgtcttatagttctggttgccaaaagtcctaagaggatctcactgggctaaagtcaaggtgctggcggggctatgtcccttctggaggctcaagggatgaatcgggtccctgccttttctagcttctaggggctccagcttctaggtttgtggcctccttcctccatcctcaaagccagcaacagcaggtgaagtcctcgcccatcatgcatcactctcccttcttcctccttcaacttttttttttatatttagggggaacgagtaccggattcttacatagtcaaaaagctccttatagagaagctyggaactttcaatacaactttgccttttctgccattttaattttccatttaatttaaatgtattctctcatttgaccttcatactctgtggagaaatattcctatttcggcttgtattgacaagctgttttcacacagcccccacatcacccaaccaaccagcaagaaacagataaagaaactgaggcccagggaggctaagagtcctgccaggatcat

SEQ ID NO: 402811 - DNA, 616 bp, Homo sapiens
ccaactcatcaccagtgatttcttgggctctgcattagttttctattgctgctgcaaccaacagctacagactcagtggcttccatttctgtcttatagttctggttgccaaaagtcctaagaggatctcactgggctaaagtcaaggtgctggcggggctatgtcccttctggaggctcaagggatgaatcgggtccctgccttttctagcttctaggggctccagcttctaggtttgtggcctccttcctccatcctcaaagccagcaacagcaggtgaagtcctcgcccatcatgcatcactctcccttcttcctccttcaacttttttttttatatttagggggaacgagtaccggattcttacatagtcaaaaagctccttatagagaagctcggaactttcaatacaactttgccttttytgccattttaattttccatttaatttaaatgtattctctcatttgaccttcatactctgtggagaaatattcctatttcggcttgtattgacaagctgttttcacacagcccccacatcacccaaccaaccagcaagaaacagataaagaaactgaggcccagggaggctaagagtcctgccaggatcat

SEQ ID NO: 402812 - DNA, 594 bp, Homo sapiens
agtgatcgctccagcaaggtaacaggacagcttggtgatccttcttgccggccacaaaaggttatagccagaattccaccgaatgtggtctttctgtgtctctccccagatagtgaagctgcacaaacctgggggtgggggrtggggggtgctgacctcagtggggtgtcctggagaggcaggaaccagagtttacagggtgcagatcctactgaagcaaatggacgtggcatccgtgggcagagctggctgtggctggccttccagcctggatgtctcccccccccccgcctgggtgtcaccaaatgcacccagagaccccttctaaacctggggggatgtgctgacctcagtggggtttcctggagaggcaggaagctgggtttccagggtacatatcctactgaagcaaatggacgtggcatccttgggcagagccggctgtggctgggcttccagcctggacgtctcccccactgcctggggtgtcaccaaatgcacccagagacctctcttctgaaagcccattcatgggaagcctccaggtctcctcagcaggcagcatcacgtctgatttcactgcgttatcaggta

SEQ ID NO: 402813 - DNA, 594 bp, Homo sapiens
agtgatcgctccagcaaggtaacaggacagcttggtgatccttcttgccggccacaaaaggttatagccagaattccaccgaatgtggtctttctgtgtctctccccagatagtgaagctgcacaaacctgggggtggggggtggggggtgctgacctcagtggggtgtcctggagaggcaggaaccagrgtttacagggtgcagatcctactgaagcaaatggacgtggcatccgtgggcagagctggctgtggctggccttccagcctggatgtctcccccccccccgcctgggtgtcaccaaatgcacccagagaccccttctaaacctggggggatgtgctgacctcagtggggtttcctggagaggcaggaagctgggtttccagggtacatatcctactgaagcaaatggacgtggcatccttgggcagagccggctgtggctgggcttccagcctggacgtctcccccactgcctggggtgtcaccaaatgcacccagagacctctcttctgaaagcccattcatgggaagcctccaggtctcctcagcaggcagcatcacgtctgatttcactgcgttatcaggta

SEQ ID NO: 402814 - DNA, 594 bp, Homo sapiens
agtgatcgctccagcaaggtaacaggacagcttggtgatccttcttgccggccacaaaaggttatagccagaattccaccgaatgtggtctttctgtgtctctccccagatagtgaagctgcacaaacctgggggtggggggtggggggtgctgacctcagtggggtgtcctggagaggcaggaaccagagtttacagggtgcagatcctactgaagcaaatggacgtggcatccgtgggcagagctggctgtggctggccttccagcctggatgtctccmccccccccgcctgggtgtcaccaaatgcacccagagaccccttctaaacctggggggatgtgctgacctcagtggggtttcctggagaggcaggaagctgggtttccagggtacatatcctactgaagcaaatggacgtggcatccttgggcagagccggctgtggctgggcttccagcctggacgtctcccccactgcctggggtgtcaccaaatgcacccagagacctctcttctgaaagcccattcatgggaagcctccaggtctcctcagcaggcagcatcacgtctgatttcactgcgttatcaggta

SEQ ID NO: 402815 - DNA, 594 bp, Homo sapiens
agtgatcgctccagcaaggtaacaggacagcttggtgatccttcttgccggccacaaaaggttatagccagaattccaccgaatgtggtctttctgtgtctctccccagatagtgaagctgcacaaacctgggggtggggggtggggggtgctgacctcagtggggtgtcctggagaggcaggaaccagagtttacagggtgcagatcctactgaagcaaatggacgtggcatccgtgggcagagctggctgtggctggccttccagcctggatgtctcccccccccccgcctgggtgtcaccaratgcacccagagaccccttctaaacctggggggatgtgctgacctcagtggggtttcctggagaggcaggaagctgggtttccagggtacatatcctactgaagcaaatggacgtggcatccttgggcagagccggctgtggctgggcttccagcctggacgtctcccccactgcctggggtgtcaccaaatgcacccagagacctctcttctgaaagcccattcatgggaagcctccaggtctcctcagcaggcagcatcacgtctgatttcactgcgttatcaggta

SEQ ID NO: 402816 - DNA, 485 bp, Homo sapiens
aatgaggaattcaaactcgtagctgcctcaatattgaactttctaaagtttaattttttttaattaaaaaatattcatttgggttcaatatgtatggatctccagggcagaaatgtctctccaaaaagtgaaccactctgaaaatcaccgtcatttgggaaagggtgatgccccagctgtcttctgaaaaatagcagaggcttccggccagtggggtgtctctctctttccctgaggccgaaatgtcagggaatttttcttccccacccctaggagcccagtaaatgsagaatatttcagaaggatttgcacagggtcccggcttctgctatttatgagctccatggattcttggctcaggcttgtgatcagctcacctgctccagaatcacttcccatcttagcttctgggctaagacacctcaaaaccagcaaaggaaagtcctcactggtcaacgcgtccatcccaactcccccatctcccc

SEQ ID NO: 402817 - DNA, 521 bp, Homo sapiens
cagggcagggcaggaccagtgcagggccaatgcagggtgagggcaaggccagggcatggaagggcagggcaggaccaaggaagggccaggagagggccacggcagggtcacggccagaagaagggtatggctggggtcaggaatatggtaggacaagggctgggcccaggctgggacacgcagggcagagcatgatctrtgcaaggcacagccagagccaggccatagagatgggagggcaacaccaaggcagagtcagggtagatccagggctgagcagagtcagggcaggtccagagtagaggcagagctagggcccaagcagggccatggtagcaccagggcagaggagggcagggcaatgcaggactgggccatggcagtgcctggtcaactccggggcagggccagaagcaggacagggccagggccagtgctcaggccagggacagggcatgacaggaagtgccagagcagggctgggccaacgttggggcagggcaaatcagaccaggacactt

SEQ ID NO: 402818 - DNA, 521 bp, Homo sapiens
cagggcagggcaggaccagtgcagggccaatgcagggtgagggcaaggccagggcatggaagggcagggcaggaccaaggaagggccaggagagggccacggcagggtcacggccagaagaagggtatggctggggtcaggaatatggtaggacaagggctgggcccaggctgggacacgcagggcagagcatgatctatgcaaggcacrgccagagccaggccatagagatgggagggcaacaccaaggcagagtcagggtagatccagggctgagcagagtcagggcaggtccagagtagaggcagagctagggcccaagcagggccatggtagcaccagggcagaggagggcagggcaatgcaggactgggccatggcagtgcctggtcaactccggggcagggccagaagcaggacagggccagggccagtgctcaggccagggacagggcatgacaggaagtgccagagcagggctgggccaacgttggggcagggcaaatcagaccaggacactt

SEQ ID NO: 402819 - DNA, 521 bp, Homo sapiens
cagggcagggcaggaccagtgcagggccaatgcagggtgagggcaaggccagggcatggaagggcagggcaggaccaaggaagggccaggagagggccacggcagggtcacggccagaagaagggtatggctggggtcaggaatatggtaggacaagggctgggcccaggctgggacacgcagggcagagcatgatctatgcaaggcacagccagagccaggccatagagatgggagggcaacaccaaggcagagtcagggtagatccagggctgagcagagtcagggcaggtccagagtagaggcagagctagggcccaagcagggccatggtagcaccagggcagaggagggcagggcaatgcaggactgggccatggcagtgcctggtcaactccggggcagggccagaagcaggacagggccagggccagtgctcaggccagggacagggcatgacaggaagtgccagagcagggctggrccaacgttggggcagggcaaatcagaccaggacactt

SEQ ID NO: 402820 - DNA, 264 bp, Homo sapiens
catgacaggaagtgccagagcagggctgggccaacgttggggcagggcaaatcagaccaggacacytccaagtccatctctggccctgccttggccctggccccttcctggcctgaccttgtccctggccctgccctatccatgccctgtgtgtttgaccagtgttttgtaaccagaatcctacaagaaacttaaattagttctttttgtgcatttttagtagagatggggtttcacaatgttgcccaggctggttccaaactc

SEQ ID NO: 402821 - DNA, 264 bp, Homo sapiens
catgacaggaagtgccagagcagggctgggccaacgttggggcagggcaaatcagaccaggacacttccaagtccatctctggccctgccttggccctggccccttcctggcctgaccttgtccctggccctgccctatccatgccctgtgtgtttgaccagtgttttrtaaccagaatcctacaagaaacttaaattagttctttttgtgcatttttagtagagatggggtttcacaatgttgcccaggctggttccaaactc

SEQ ID NO: 402822 - DNA, 549 bp, Homo sapiens
caatgcctcacatattaacatattgataaaattatactcatagaacactactggaagcaaagatagtattagttaaaatttagtgattactgcaaatattattactattacaaacaatatagtatagacattactactactatagttatcttaaaaatctaaaataaaaattttacgtaatagcccawtgtaatctctcctgctctgtcctggctcagccctagtgccggctctgcccctagtcctactacatccctggccctgacccttccctggtccagccgctgccctggcccttcccatcttcaggccttaccatggccctaccctggtcctgaccctgccctggtctggtcctgaccctggccctaccccagagaaggggtatggcagagccagggaagggccagggcaaataagggacaggacacacccaaatccaggaaagcgccagggccatgacagagccagggcgagtccttggcagggccaggttccaggccagggccaggaaagggtcatggcagggtcactgtatggccaaggtcc

SEQ ID NO: 402823 - DNA, 549 bp, Homo sapiens
caatgcctcacatattaacatattgataaaattatactcatagaacactactggaagcaaagatagtattagttaaaatttagtgattactgcaaatattattactattacaaacaatatagtatagacattactactactatagttatcttaaaaatctaaaataaaaattttacgtaatagcccaatgtaatctctcctgctctgycctggctcagccctagtgccggctctgcccctagtcctactacatccctggccctgacccttccctggtccagccgctgccctggcccttcccatcttcaggccttaccatggccctaccctggtcctgaccctgccctggtctggtcctgaccctggccctaccccagagaaggggtatggcagagccagggaagggccagggcaaataagggacaggacacacccaaatccaggaaagcgccagggccatgacagagccagggcgagtccttggcagggccaggttccaggccagggccaggaaagggtcatggcagggtcactgtatggccaaggtcc

SEQ ID NO: 402824 - DNA, 549 bp, Homo sapiens
caatgcctcacatattaacatattgataaaattatactcatagaacactactggaagcaaagatagtattagttaaaatttagtgattactgcaaatattattactattacaaacaatatagtatagacattactactactatagttatcttaaaaatctaaaataaaaattttacgtaatagcccaatgtaatctctcctgctctgtcctggctcagccctagtgccggctctgcccctagtcctactacatccctggccctgacccttccctggtccagccgctgccctggcccttcccatcttcaggccttaccatggccctaccctggtcctgaccctgccctggtctggtcctgaccctggccctaccccagaraaggggtatggcagagccagggaagggccagggcaaataagggacaggacacacccaaatccaggaaagcgccagggccatgacagagccagggcgagtccttggcagggccaggttccaggccagggccaggaaagggtcatggcagggtcactgtatggccaaggtcc

SEQ ID NO: 402825 - DNA, 571 bp, Homo sapiens
ttagggccaggacagggtcaggaccagggctgggccagggcatggccttaagtagcgaagggccagggccagggtccatgccagtgccagcgctggtccagggcagacgcagggccatggccagatctaggacaaggctggggcagggccaaggtctgggtcagggtcagcagaaggccaggacagagccaggggagggacagggccatggtaagaccaggttacatcagggacaagacacctgcaaatccacttcagggccagggtcagggcagggccagttcagggccagggccaagacagggccagggctgccagggtcattggcagggcagggccatggcaggaccggggtcaggagcaggggtcaatgccaggccaaggccacasataggaccaggtctgtgctagggccagtgtgagggccaaggcagggtcagggcagggccaaagggagggcagggccagggcagggtggagcaggcccagggtagcacagggttaaggtagttcacgaccaaccagggcaggtctatggttggggccggggcagggccagagccagggcaca

SEQ ID NO: 402826 - DNA, 571 bp, Homo sapiens
ttagggccaggacagggtcaggaccagggctgggccagggcatggccttaagtagcgaagggccagggccagggtccatgccagtgccagcgctggtccagggcagacgcagggccatggccagatctaggacaaggctggggcagggccaaggtctgggtcagggtcagcagaaggccaggacagagccaggggagggacagggccatggtaagaccaggttacatcagggacaagacacctgcaaatccacttcagggccagggtcagggcagggccagttcagggccagggccaagacagggccagggctgccagggtcattggcagggcagggccatggcaggaccggggtcaggagcaggggtcaatgccaggccaaggccacacataggaccaggtctgtgctagggccagtgtgagggccaaggcagggtcagggcagggccaaagggagggcagggccagggcagggtggagcaggcccagggtagcacagggttaaggtagktcacgaccaaccagggcaggtctatggttggggccggggcagggccagagccagggcaca

SEQ ID NO: 402827 - DNA, 571 bp, Homo sapiens
ttagggccaggacagggtcaggaccagggctgggccagggcatggccttaagtagcgaagggccagggccagggtccatgccagtgccagcgctggtccagggcagacgcagggccatggccagatctaggacaaggctggggcagggccaaggtctgggtcagggtcagcagaaggccaggacagagccaggggagggacagggccatggtaagaccaggttacatcagggacaagacacctgcaaatccacttcagggccagggtcagggcagggccagttcagggccagggccaagacagggccagggctgccagggtcattggcagggcagggccatggcaggaccggggtcaggagcaggggtcaatgccaggccaaggccacacataggaccaggtctgtgctagggccagtgtgagggccaaggcagggtcagggcagggccaaagggagggcagggccagggcagggtggagcaggcccagggtagcacagggttaaggtagtkcacgaccaaccagggcaggtctatggttggggccggggcagggccagagccagggcaca

SEQ ID NO: 402828 - DNA, 571 bp, Homo sapiens
ttagggccaggacagggtcaggaccagggctgggccagggcatggccttaagtagcgaagggccagggccagggtccatgccagtgccagcgctggtccagggcagacgcagggccatggccagatctaggacaaggctggggcagggccaaggtctgggtcagggtcagcagaaggccaggacagagccaggggagggacagggccatggtaagaccaggttacatcagggacaagacacctgcaaatccacttcagggccagggtcagggcagggccagttcagggccagggccaagacagggccagggctgccagggtcattggcagggcagggccatggcaggaccggggtcaggagcaggggtcaatgccaggccaaggccacacataggaccaggtctgtgctagggccagtgtgagggccaaggcagggtcagggcagggccaaagggagggcagggccagggcagggtggagcaggcccagggtagcacagggttaaggtagttcacgaccaaccagggcaggtctatggytggggccggggcagggccagagccagggcaca

SEQ ID NO: 402829 - DNA, 535 bp, Homo sapiens
ggaccaggttcatctaagaaccagggacaaagccaggcccagagctgggccaggacaggtacctggcagggctagggtctgagacagggccacggcaggaccagggccacaaccaggtctgtgctatggccaggtccaacacagtgcccaggtaaggctagggtgaaggccaaggtagggccagggcagggtcaaagccaggctagggccaaggcagggccagggccggcaaggcagggccagraaagcatagggccagggcagggcggggccaggacagtgccaagacctgggcagggcagggccagggccacggcacggcctggggaagaccaggttcggggcaggagcaaaacaatggcaaggacagtgcaggttcttggcacagccagggtccaggacagtgtcagggcagggccaaggcagggtctgggccatggtaagaccagcaacagggctggggctaggccagtgacaggaccagagtcagggcaagggccagagcagtgcaaggccagggtagggccaggcattt

SEQ ID NO: 402830 - DNA, 575 bp, Homo sapiens
gggacaaagccaggcccagagctgggccaggacaggtacctggcagggctagggtctgagacagggccacggcaggaccagggccacaaccaggtctgtgctatggccaggtccaacacagtgcccaggtaaggctagggtgaaggccaaggtagggccagggcagggtcaaagccaggctagggccaaggcagggccagggccggcaaggcagggccaggaaagcatagggccagggcagggcrgggccaggacagtgccaagacctgggcagggcagggccagggccacggcacggcctggggaagaccaggttcggggcaggagcaaaacaatggcaaggacagtgcaggttcttggcacagccagggtccaggacagtgtcagggcagggccaaggcagggtctgggccatggtaagaccagcaacagggctggggctaggccagtgacaggaccagagtcagggcaagggccagagcagtgcaaggccagggtagggccaggcatttcagggtcagggccaggggagaaccagggcaagttctcaagcagggaagggccagggccaggac

SEQ ID NO: 402831 - DNA, 575 bp, Homo sapiens
gggacaaagccaggcccagagctgggccaggacaggtacctggcagggctagggtctgagacagggccacggcaggaccagggccacaaccaggtctgtgctatggccaggtccaacacagtgcccaggtaaggctagggtgaaggccaaggtagggccagggcagggtcaaagccaggctagggccaaggcagggccagggccggcaaggcagggccaggaaagcatagggccagggcagggcggggccaggacagtgccaagacctgggcagggcagggccagggccacggcacggcctggggaagaccaggttcrgggcaggagcaaaacaatggcaaggacagtgcaggttcttggcacagccagggtccaggacagtgtcagggcagggccaaggcagggtctgggccatggtaagaccagcaacagggctggggctaggccagtgacaggaccagagtcagggcaagggccagagcagtgcaaggccagggtagggccaggcatttcagggtcagggccaggggagaaccagggcaagttctcaagcagggaagggccagggccaggac

SEQ ID NO: 402832 - DNA, 480 bp, Homo sapiens
ccggcacccaggtcagggctccaggggaggccaggtgggcgaaggccaagaaggggctggggctggtcaggaagggctcctggtgaccagagcactttgcgtgagccagcgtgggaggaaggtgggctrgatgagccagggaggcgccgggaggggccttggcagaggcgaccccctccgtcacccccaggccactgaaccctgggtagcgagaaccgacaggggaggctgcagacagaggagtggaggctccccggctttgggggctctgagtagaagcatctagggggtccctcaagaggcccccaaacgcttccccatggtgagaaaagaaggcgcagagaggggcacggcgccggcgcagaggggcacacagcgagatttgctgtgagttcttttattgccccaagtgtacctcatcttggtagatttctattggctttaaaaatgtgtgtgttttgctgttggggagtggggtgt

SEQ ID NO: 402833 - DNA, 480 bp, Homo sapiens
ccggcacccaggtcagggctccaggggaggccaggtgggcgaaggccaagaaggggctggggctggtcaggaagggctcctggtgaccagagcactttgcgtgagccagcgtgggaggaaggtgggctagatgagccagggaggcgccgggaggggccttggcagaggcgaccccctccgtcacccscaggccactgaaccctgggtagcgagaaccgacaggggaggctgcagacagaggagtggaggctccccggctttgggggctctgagtagaagcatctagggggtccctcaagaggcccccaaacgcttccccatggtgagaaaagaaggcgcagagaggggcacggcgccggcgcagaggggcacacagcgagatttgctgtgagttcttttattgccccaagtgtacctcatcttggtagatttctattggctttaaaaatgtgtgtgttttgctgttggggagtggggtgt

SEQ ID NO: 402834 - DNA, 480 bp, Homo sapiens
ccggcacccaggtcagggctccaggggaggccaggtgggcgaaggccaagaaggggctggggctggtcaggaagggctcctggtgaccagagcactttgcgtgagccagcgtgggaggaaggtgggctagatgagccagggaggcgccgggaggggccttggcagaggcgaccccctccgtcacccccaggccactgaaccctgggtagcgagaaccgacaggggaggctgcagacagaggagtggaggctccccggctttgggggctctgagtagaagcatctagggggtccctcaagaggcccccaaacgcttccccatggtgagaaaagaaggcgcagagaggggcacggcgccggygcagaggggcacacagcgagatttgctgtgagttcttttattgccccaagtgtacctcatcttggtagatttctattggctttaaaaatgtgtgtgttttgctgttggggagtggggtgt

SEQ ID NO: 402835 - DNA, 562 bp, Homo sapiens
ctcagtcgttttgtttgctcagatcttttgatgatccggatgatcttttaatttatgcaggatgtttctctgcttgtgcaggctggtgggattggggactggagagaggataagtgtctgcttgcccaggactggcaaactgtcacttgccctggttgtgccttgccaggagctcccgtgcctgtctctgagagtgtcatgagcgcagcggtggtagttgtgtggtggatgcatttcccctgggttggggggtgggtggctggtcctagctctgtttgttgttgccgatgagacacagcacacttctgcttcctgatggatcttgtcggtcatttgacttcttcctggtctgggytcctgagctggccctccacaggccaagcaggaatggagctggctgctacaagagttccttcactagagggcatctctcctctctcctcccacacatgggagcacaagggtgggctttcctccgcccactgtgatccgcagcccggctttcccctcctcaccctctgctctcagacagacttgcttttcgctggtgtctgtgagaggt

SEQ ID NO: 402836 - DNA, 562 bp, Homo sapiens
ctcagtcgttttgtttgctcagatcttttgatgatccggatgatcttttaatttatgcaggatgtttctctgcttgtgcaggctggtgggattggggactggagagaggataagtgtctgcttgcccaggactggcaaactgtcacttgccctggttgtgccttgccaggagctcccgtgcctgtctctgagagtgtcatgagcgcagcggtggtagttgtgtggtggatgcatttcccctgggttggggggtgggtggctggtcctagctctgtttgttgttgccgatgagacacagcacacttctgcttcctgatggatcttgtcggtcatttgacttcttcctggtctgggttcctgagctggccctccacaggccaagcaggaatggagctggctgctacaagagttccttcactagagggcatctctcctctctcctcccacacatgggarcacaagggtgggctttcctccgcccactgtgatccgcagcccggctttcccctcctcaccctctgctctcagacagacttgcttttcgctggtgtctgtgagaggt

SEQ ID NO: 402837 - DNA, 571 bp, Homo sapiens
cctgtcttcctaatacactgtcttctgaccagtcttccagacaaatcaccggttgctatatatatatattttttaatagctaatatcttacactgatatatttatattatatataaataattttgtgctttatgtttatgctatatatacagatgtagttagytatttatgttatatataatataaacatgatgtatattcttatatttctctggggactcactgtcttcttaatacactgtcttctgaccaaattcttccagacaaatcagctgttgctatatatatatatatgctatatattttattgcatagaatatattatatattatatagcatagaatatattaattatataatatatgtgacatattacatattatatataatacattatattattatgctatatctcatatattatatatgcgatatatgtatatatattatacgtacacatatacacatacatacacacatgtatattttaatagctaatatcttacactggtatatttatattacatacgattatatacaaatatttttgtactttatgtttatgctgtat

SEQ ID NO: 402838 - DNA, 571 bp, Homo sapiens
cctgtcttcctaatacactgtcttctgaccagtcttccagacaaatcaccggttgctatatatatatattttttaatagctaatatcttacactgatatatttatattatatataaataattttgtgctttatgtttatgctatatatacagatgtagttagctatttatgttatatataatataaacatgatgtatattcttatatttctctggggactcactgtcttcttaatacactgtcttctgaccaaattcttccagacaaatcagctgttgctatatatatatatatgctatatattttattgcatagaatatattatatattatatagcatagaatatattaattatataatatatgtgacatattacatattatatataatacattatattattatgctatatctcatatattatatatgcgatatatgtatatatattatacgtacacatatacacatacatacacacatgtataytttaatagctaatatcttacactggtatatttatattacatacgattatatacaaatatttttgtactttatgtttatgctgtat

SEQ ID NO: 402839 - DNA, 571 bp, Homo sapiens
cctgtcttcctaatacactgtcttctgaccagtcttccagacaaatcaccggttgctatatatatatattttttaatagctaatatcttacactgatatatttatattatatataaataattttgtgctttatgtttatgctatatatacagatgtagttagctatttatgttatatataatataaacatgatgtatattcttatatttctctggggactcactgtcttcttaatacactgtcttctgaccaaattcttccagacaaatcagctgttgctatatatatatatatgctatatattttattgcatagaatatattatatattatatagcatagaatatattaattatataatatatgtgacatattacatattatatataatacattatattattatgctatatctcatatattatatatgcgatatatgtatatatattatacgtacacatatacacatacatacacacatgtatattttaatagctaatatcttacactggtatatttatattacataygattatatacaaatatttttgtactttatgtttatgctgtat

SEQ ID NO: 402840 - DNA, 519 bp, Homo sapiens
ttttggtgggtttttttttttttttgagacagagttttgctcttttcacccaggctggagggcaatggtgcgaatttggctcacagcaacctagcaacttttgcctcccaggttcaggtgattctcttgcctcagcctctcgagtggttaggactacaagcaygcaccaccatgcctggctaattttgtgtttttagtagagacatggttttgccatgttgaccaggctggtcttgaactcctgacctgaggtaatccacccatcttggcctcccaaagtgctgggtatgggcaagagccaccatacctggcctcagaagcagtttttaaaagcaaacacaatataacaccaaagttgaaaaatctgtgctcacccaaggatgccaggtttaataaattatttatagaatactgcatcaaaaataagacaataacccaaaatataccattaaagatgtatccactcctacaactggagataattaatctatctagtagcaaatgatacttcaatcagtt

SEQ ID NO: 402841 - DNA, 621 bp, Homo sapiens
agtgtttggttgaatttaagtactgtaagggaactttttagactgccctaggtggtatgtgaaacctgagggctttgtggttgtgccaaggggcttctgagtagagaagaagaagggataccagagaagatgagactcacccacagcccttctaascccagacctagcagagcatttcactgtccagaaataggagttgaaactgtggccttcagagcaatgttttaacctggctttagtattcttactagctgagtgaccttgggcactctgtccgtcaatttcctcatctgaaaaatggggataatactattaccttataaggttttttgtgaggtttaaatgagttaatgcacataaagctcttcaaaaagtgttcaactaataaatattagccattgtcattactgaggctatgtgcaaaattgtacttaataaaataatgcttctggtaagaggttgaagaccacatatgtagctctatggcctttattttatagttgagaaaactgaagctcagagctaagaactggacacagccagtgagcagcagagtcaggactaaatccctttctgctctgaatttttcaacaaatggtattaatcctcttctttgacctg

SEQ ID NO: 402842 - DNA, 621 bp, Homo sapiens
agtgtttggttgaatttaagtactgtaagggaactttttagactgccctaggtggtatgtgaaacctgagggctttgtggttgtgccaaggggcttctgagtagagaagaagaagggataccagagaagatgagactcacccacagcccttctaaccccagacctagcagagcatttcactgtccagaaataggagttgaaactgtggccttcagagcaatgttttaacctggctttagtattcttactagctgagtgaccttgggcactctgtccgtcaatttcctcatctgaaaaatggggataatactattaccttataaggttttttgtgaggtttaaatgagttaatgcacataaagctcttcraaaagtgttcaactaataaatattagccattgtcattactgaggctatgtgcaaaattgtacttaataaaataatgcttctggtaagaggttgaagaccacatatgtagctctatggcctttattttatagttgagaaaactgaagctcagagctaagaactggacacagccagtgagcagcagagtcaggactaaatccctttctgctctgaatttttcaacaaatggtattaatcctcttctttgacctg

SEQ ID NO: 402843 - DNA, 519 bp, Homo sapiens
ttttggtgggtttttttttttttttgagacagagttttgctcttttcacccaggctggagggcaatggtgcgaatttggctcacagcaacctagcaacttttgcctcccaggttcaggtgattctcttgcctcagcctctcgagtggttaggactacaagcatgcaccaccatgcctggctaattttgtgtttttagtagagacatggttttgccatgttgaccaggctggtcttgaactcctgacctgaggtaatccacccatcttggcctcccaaagtgctgggtatgggcaagagccaccatacctggcctcagaagcagtttttaaaagcaaacacaatataacaccaaagttgaaaaatctrtgctcacccaaggatgccaggtttaataaattatttatagaatactgcatcaaaaataagacaataacccaaaatataccattaaagatgtatccactcctacaactggagataattaatctatctagtagcaaatgatacttcaatcagtt

SEQ ID NO: 402844 - DNA, 604 bp, Homo sapiens
tcacttctctcagacacatctggcaacctgggcagcttttggggtgacactgcaggaccacaggagggactccttctctctggcattctgagaggtgaagggcttcacattccagtgatggaaatcttggcaacactagagaaaggagtgcagctcctacctaaccagtgagagaatattatacatgattttgtataatctgatttgaaacttgaaataatgcaacattttcttagttgaaaaacaacaaaaaatacataatttcaaagctgttcttgggggcgaggtgcggagcgtgaactgtctcccacttcagggggtaagcaggtagacaggaatgtcaccatccattgtctcgtgggtgtgaatcactgcttctagactcctgtgcttttgataattattgcaaagtcatttcaacttttgctgtgttatgatctttaaaacaaatagtgtattctactgcaggataggytaattgtcattaagaggtgattccagtggtattgttaaaaaaagtacacccacaatcagtaaatttagaaagaaagttaggtgagataaaatatcatgaagatttaaaaacaccaggaaataaatacca

SEQ ID NO: 402845 - DNA, 536 bp, Homo sapiens
cacttctccccactgagctgcatctggaattttagcagcttggagcaatgcaaaataatggtgcttaaactcagaccagcctcctcaattttgagctgggcaatccattacacatacattttaggcagaatgggatcctggtaaatttgctgtctgtgtatgtggcccacaaatttccattcattgaacagttgtcatttttaagagctgcagrgcaaaaaggttatttgttgactttttgttttttgcaaatgatattaccttgcaaaagagcttaccctgaaactgaaaagaatgattctgtgttaccatatgcttttataggcttagctcttgtctgtgggaagtttgcaagcattccctcctctgctccccattcatttataaagaaacctcccacatggtgctattaaaataaaaacttactcatatgcttagtcaatgccgagcagaatttctttcataggttccgtatgaatgagttctgaagtaacaggtttagaaaatgaaactgctcaaaaagaatatgaaaatga

SEQ ID NO: 402846 - DNA, 472 bp, Homo sapiens
gttggtgaggatatagagacattgctgatgtcattttaaaatggcatagctactttggaaaacagtctagcaattccttgaaaagttaaatgtagagtttccatatgacccagcaattccactcctaggtatatactcaagtgaaataaaaacacatgcccccgcaaaaacaaaacttgtacacgaatgttcattgcagcatttttcatgatagcccaaagtggaaacaacccaagtgtctacaaactgatgaacgaataaataaaatgcggcatattcataccaagaactatcctttggcaagacaaagaaatgaaatactgataaatgggacaattggggtaagctttgaaaatgtgctgagtraaaaaaagccagacacaaaaggccacatattgtatgactctgtttatctgaaacatccagaacaggcaaatctgtagagacagaaagtagattagttgtggcaggg

SEQ ID NO: 402847 - DNA, 497 bp, Homo sapiens
tggtaaaataataaggaatttaagagtttttatttcctttgtatttgtatgatttatttagttataaatttatataattaaatcttagcaacaatctgcatttaacaacctactcataaaaccagctcctaaaaatctggtaattattcatggtcaactgtcaagagtcagctccagcacactactgcaatgctgccaatttgaaaggtagcgaatgccatcccaatgtagttgtcatttttattgttattgttttacttgtttaaggacgatttgcatttccttttctgtgaaatatgtttctgtccttcgcacatttatctactgagttttattctcttgttgatttctaggagatccttatacatgaagctccttcygcatatcttttgtctgtgttataaactgcagtgttttttcccggtttgttatttatcttttgtgcttgcccatggcatttttctttttttctttttctttttttgccatgaagttgt

SEQ ID NO: 402848 - DNA, 567 bp, Homo sapiens
ttgaataactaggaacaacaggattaaatamattttttttctaatcacaatcaagtttcacatacttaagcaagtttcttatactctaagcagtctgtacaattcctgtatctccttggagttcattatattcaattttgtctttttcttttgagtcagattattatttaaaaaccctctctacttaatggtatcacaaatatgcataatatgttagagacaggcctggcacacttcagctaaaaagaagtatgcatagaggttataaaatatttatcaagataccatcactagttcagtggtggctaaccccaccacttttctgtgactagtattatttcctactggggagtttcttcacttgtgtttgacttcccatgtgggcattgtcttagtaattttgtgttgctgtaacagaatagcacagactaggtaatttataatgaatagatatttgtttgacttatggttctggaggctgggaagtccaatattgaggtactgcatcagataagggaagctctcatatggcaagaaagtttacaggggagagaaagagagggctga

SEQ ID NO: 402849 - DNA, 567 bp, Homo sapiens
ttgaataactaggaacaacaggattaaatacattttttttctaatcacaatcaagtttcacatacttaagcaagtttcttatactctaagcartctgtacaattcctgtatctccttggagttcattatattcaattttgtctttttcttttgagtcagattattatttaaaaaccctctctacttaatggtatcacaaatatgcataatatgttagagacaggcctggcacacttcagctaaaaagaagtatgcatagaggttataaaatatttatcaagataccatcactagttcagtggtggctaaccccaccacttttctgtgactagtattatttcctactggggagtttcttcacttgtgtttgacttcccatgtgggcattgtcttagtaattttgtgttgctgtaacagaatagcacagactaggtaatttataatgaatagatatttgtttgacttatggttctggaggctgggaagtccaatattgaggtactgcatcagataagggaagctctcatatggcaagaaagtttacaggggagagaaagagagggctga

SEQ ID NO: 402850 - DNA, 567 bp, Homo sapiens
ttgaataactaggaacaacaggattaaatacattttttttctaatcacaatcaagtttcacatacttaagcaagtttcttatactctaagcagtctgtacaattcctgtatctccttggagttcattatattcaattttgtctttttcttttgagtcagattattatttaaaaaccctctctacttaatggtatcacaaatatgcataatatgttagagacaggcctggcayacttcagctaaaaagaagtatgcatagaggttataaaatatttatcaagataccatcactagttcagtggtggctaaccccaccacttttctgtgactagtattatttcctactggggagtttcttcacttgtgtttgacttcccatgtgggcattgtcttagtaattttgtgttgctgtaacagaatagcacagactaggtaatttataatgaatagatatttgtttgacttatggttctggaggctgggaagtccaatattgaggtactgcatcagataagggaagctctcatatggcaagaaagtttacaggggagagaaagagagggctga

SEQ ID NO: 402851 - DNA, 565 bp, Homo sapiens
ggaagctctcatatggcaagaaagtttacaggggagagaaagagagggctgaccttgcttttataacaaatccactctcaaggtaaagaatccactccctcaayaatgacattaatccattcccgatggcagagccctcatgaaataataattgcttaaagatcctatttctcaacacagttgcactgggaaacaagttcccaatgcatgaactttggggaacacattcaaagcatagtaggcatgtactggcttagtcctgcattgctctctccatcagacttcaaggcccaaagctctaagaatgatgctggagtgtggtttgtgttcaagaaatattagttgagacaccacattcaaaggtatgaacccctcagatagactttcatctgcatctccaccatccctgacaatgcccattaacatttagtcagcagccacacatttccagcattacttgagaagctgtgcatgtggtctatgtggtgtagcctcagaatacggtcatgcagaaagttctaactcagtgtatctaaaagccacttgaccacttagagtgagcttt

SEQ ID NO: 402852 - DNA, 565 bp, Homo sapiens
ggaagctctcatatggcaagaaagtttacaggggagagaaagagagggctgaccttgcttttataacaaatccactctcaaggtaaagaatccactccctcaacaatgacattaatccattcccgatggcagagccctcatgaaataataattgcttaaagatcctatttctcaacacagttgcactgggaaasaagttcccaatgcatgaactttggggaacacattcaaagcatagtaggcatgtactggcttagtcctgcattgctctctccatcagacttcaaggcccaaagctctaagaatgatgctggagtgtggtttgtgttcaagaaatattagttgagacaccacattcaaaggtatgaacccctcagatagactttcatctgcatctccaccatccctgacaatgcccattaacatttagtcagcagccacacatttccagcattacttgagaagctgtgcatgtggtctatgtggtgtagcctcagaatacggtcatgcagaaagttctaactcagtgtatctaaaagccacttgaccacttagagtgagcttt

SEQ ID NO: 402853 - DNA, 565 bp, Homo sapiens
ggaagctctcatatggcaagaaagtttacaggggagagaaagagagggctgaccttgcttttataacaaatccactctcaaggtaaagaatccactccctcaacaatgacattaatccattcccgatggcagagccctcatgaaataataattgcttaaagatcctatttctcaacacagttgcactgggaaacaagttcccaatgcatgaactttggggaacacattcaaagcatagtaggcatgtactggcttagtcctgcattgctctctccatcagacttcaaggcccaaagctctaagaatgatgctggagtgtggtttgtgttcaagaaatattagttgagacaccacattcaaaggtatgaacccctcagatagactttcatctgcatctccaycatccctgacaatgcccattaacatttagtcagcagccacacatttccagcattacttgagaagctgtgcatgtggtctatgtggtgtagcctcagaatacggtcatgcagaaagttctaactcagtgtatctaaaagccacttgaccacttagagtgagcttt

SEQ ID NO: 402854 - DNA, 565 bp, Homo sapiens
ggaagctctcatatggcaagaaagtttacaggggagagaaagagagggctgaccttgcttttataacaaatccactctcaaggtaaagaatccactccctcaacaatgacattaatccattcccgatggcagagccctcatgaaataataattgcttaaagatcctatttctcaacacagttgcactgggaaacaagttcccaatgcatgaactttggggaacacattcaaagcatagtaggcatgtactggcttagtcctgcattgctctctccatcagacttcaaggcccaaagctctaagaatgatgctggagtgtggtttgtgttcaagaaatattagttgagacaccacattcaaaggtatgaacccctcagatagactttcatctgcatctccaccatccctgacaatgcccattaacatttagtcagcagccacacatttccagcattacttgagaagctgtgcatgtggtctatgtggtgtagcctcagaatacggtcatgcrgaaagttctaactcagtgtatctaaaagccacttgaccacttagagtgagcttt

SEQ ID NO: 402855 - DNA, 520 bp, Homo sapiens
tcaggtctgtcatggtcacaatgctctttgtccgtggggcatggagttgcccaatatattattgttttacagtctttagacacagtgtcttcgcttgacaggaggcacgttcctttatgttgtaggaaatgcactgaacctgaataactctacaggagagctctcatccccccttccaggtcgtccctgctctcagcctgcacctcccattttttgatcaagacagccttgaagttctttatgtctgtggaaggaaggagacggagcttgtttttcacttttgctgccatgattaattatttttaggaaagcattgtgtcttttgagagaggattgtaagtgctgggagaataaatggatcttagagtgagccktgtgtgctccagacttccccagcttgataaacagcttcctgaccagtggctgccagtccctggtctcactggacggacattggctgggggccaatgtctgagttgaatggcgaggactggacagtgcttcttcccagccagtgtgg

SEQ ID NO: 402856 - DNA, 520 bp, Homo sapiens
tcaggtctgtcatggtcacaatgctctttgtccgtggggcatggagttgcccaatatattattgttttacagtctttagacacagtgtcttcgcttgacaggaggcacgttcctttatgttgtaggaaatgcactgaacctgaataactctacaggagagctctcatccccccttccaggtcgtccctgctctcagcctgcacctcccattttttgatcaagacagccttgaagttctttatgtctgtggaaggaaggagacggagcttgtttttcacttttgctgccatgattaattatttttaggaaagcattgtgtcttttgagagaggattgtaagtgctgggagaataaatggatcttagagtgagccttgtgtgctccagacttccccagcttgataaacagcttcctgaccagtggctgscagtccctggtctcactggacggacattggctgggggccaatgtctgagttgaatggcgaggactggacagtgcttcttcccagccagtgtgg

SEQ ID NO: 402857 - DNA, 461 bp, Homo sapiens
ttcccaaacctcaattcttgacttctgtgcacccacaggctaaacaccacatggaarctgccaaggtttgggacttccaccctctgaagtcacagcccgagctgtatcttggcccctttcagccatggctggagtggctaggacacagtgcaccaagtccttaggctgcacacagcacagggaccctgggcccagcccaagaaaccactttttcctcctgggcctccaggcctgtgatggcaagaggggctgccatgaaggtgtctgacatggcctggagacattttccccaaggtcttggggattaacattaggcttcttgccgcttatgcaaatttctgcaggtggcttgaatttctccccagaaaatggatttttcttttctattgcacagtcaggctgcaaattttccaaacttttatgctgtgcttcgtttataaagctgaatgcctttaacagca

SEQ ID NO: 402858 - DNA, 461 bp, Homo sapiens
ttcccaaacctcaattcttgacttctgtgcacccacaggctaaacaccacatggaaactgccaaggtttgggacttccaccctctgaagtcacagcccgagctgtatcttggcccctttcagccatggctggagtggctaggacacagtgcaccaagtccttaggctgcacacagcacagggaccctgggcccagcccaagaaaccactttttcctcctgggcctccaggcctgtgatggcaagaggggctgccatgaaggtgtctgacatggcctggagacattttccccaaggtcttggggattaacattaggcttcttgccgcttatgcaaatttcygcaggtggcttgaatttctccccagaaaatggatttttcttttctattgcacagtcaggctgcaaattttccaaacttttatgctgtgcttcgtttataaagctgaatgcctttaacagca

SEQ ID NO: 402859 - DNA, 569 bp, Homo sapiens
ctttctgtcatggtatctgaaacactgcaaaaggacattgaagatctgggagggagagttgacaatcttcccaaataagatacagttatcttatttcaaataaaaaggaagcaaaattggcacaagtttgggtcaaatttctcctgtgccaagtctagaatcagcaggtagtgctgaaatcactgtcccacatcccagacatagtgagcattcttttaaggctccaggctcaagtgtgtgcaaacagagggaaattacacttgaaaaaaaagatcaaggaccgtgaattagatacaaccttggrcaacaaaagcagcaaccatgaaaggttgtatgtacttaagaagtcaaacacttctgggaaagctgtggggaagagagttggtatatgggaaaaaagtggtaaactcaaaacgccttttgtatggagaaaggcattggccagctttaaaggcactgcagcatcagttgagcaagtgcttttaataaattactctcttttgtagctctgtactttttctgatatggataagctatctagcatccaaagcaaactcatcttaaaccaa

SEQ ID NO: 402860 - DNA, 432 bp, Homo sapiens
tgtgtgtctattctttttcccaagcaacaaaaattataattcattaattttaattttattatttaagaatattcttaagagttgaaggaaaaataatatctgtacattatgggttacaatctaagtataaataatacataaatatattaaaacttacaaagaatatgttttggaatcgaatataccatgcttctgtgatgacagttatttcatgctggttgtcacaattttacatgaaaaactaatgaaaaaatgtttttaactgtttctaaaaataacagtttccaaaacagttttacattcgaaatatgaaaaagwtgtctttgtgttccttaatctgatgagattttcacactctgcacatgataattgttagatttttattgtgttgataaattgtatatcaaataaaaaatgttattacctcttaaa

SEQ ID NO: 402861 - DNA, 631 bp, Homo sapiens
tacagttatgcaaaacctgggtttttcataggtgtttttaatgttggtgtgaacagtggagccaaatagcatcttgtagcccctacgtgggcacgattctttcctgggcgacaccgtctgcatgccccatggtgacattcctgtgcgcttgctacagttggctagtaatcctggctttgaagaaggttttccagtkccaatcaccatgttcaagacaatgtgtgggccagtattctgggtcatgcgtcttccccaggagctttggttaaagtgagtttgaggaaaatatgggtgctctcagatgctcacagaccacgtggatgtgaaatttagacttttatttggatgataataaagacagactttaaatgttttcagagtaactggacagctctatctgtctcaataactgcaggcagttcaaattcagcaggaaactactcaggttcctcctagccctgccccattctttataacatggaaaccctgattccccccgccgaacactttccttcaggtagcaggatttttgcttcaccgtaaacacaccaggatcacggatgatgatagcatttattgcttggaataaaaagtgatttgcggccctgtaaataggacagcaaatagtttt

SEQ ID NO: 402862 - DNA, 631 bp, Homo sapiens
tacagttatgcaaaacctgggtttttcataggtgtttttaatgttggtgtgaacagtggagccaaatagcatcttgtagcccctacgtgggcacgattctttcctgggcgacaccgtctgcatgccccatggtgacattcctgtgcgcttgctacagttggctagtaatcctggctttgaagaaggttttccagtgccaatcaccatgttcaagacaatgtgtgggccagtattctgggtcatgcgtcttccccaggagctttggttaaagtgagtttgaggaaaatatgsgtgctctcagatgctcacagaccacgtggatgtgaaatttagacttttatttggatgataataaagacagactttaaatgttttcagagtaactggacagctctatctgtctcaataactgcaggcagttcaaattcagcaggaaactactcaggttcctcctagccctgccccattctttataacatggaaaccctgattccccccgccgaacactttccttcaggtagcaggatttttgcttcaccgtaaacacaccaggatcacggatgatgatagcatttattgcttggaataaaaagtgatttgcggccctgtaaataggacagcaaatagtttt

SEQ ID NO: 402863 - DNA, 573 bp, Homo sapiens
gacctaggagcattaatttttccctctcttccaattataattttcttgtttaacatcctagtaaagtttaygtcttctaaatttcatgtaaagatgatacggtctgtcataagtcttccaacccattctgtcttctgaccccacaaatgaatgcatcgtgccattgggccccttagttcaggtaccaaagatttttactcctcaaaggctagggaaggcctgcccccataaagtcagcaggaagcacttacagaaaagggactctgctcttctgcagtccccttaagattaaggaggagtatcgaatctctgagggagcaatgagataggaggtaggtgggactcaacccaggaccagattgaagactggctgacacaaggaagagacactggaagcacctgtccataacacatgcccaccagtgccatatcagtttaccattgccatggcaacacctgaaagttattgcccattttctagctatttctgaataacccactcctttattagcatgtcattaaaactggggataaatatgagtgcaaaactgcccctacgctactgctcttggc

SEQ ID NO: 402864 - DNA, 572 bp, Homo sapiens
cacagtcctcatttccaagaaaacaagcctgaaaagattatactggagcaagtctacaagtaatgatggtagtttttccttattgtcagtcctggggcaagaataacataaaagataacaaggtagaataaagattacataagaaagaaggacagcaacaggacatgggaactatttatagggtaacatttaaataatggatgatgagaagtaatgcgttagacagggatggatgggaatgattgaaggtctgagtactttagcacagattaagatcaaatcattaggattttaagagttgtrtacagttactgaagaaaatgccttagaatttaatttgactgtggataaaacattcttggattagatttaagactattttccatggtaagtatatttataatgatgatgactgtagtgctgaacatttaaacaatgaaaacaaaattaattgccacacacataatgtcctgaatactactgtaaatgttttatcttattttctttaaactgtctacagcactgtaaggcaggtaccactattgtcacagttacacagatatggaaaccga

SEQ ID NO: 402865 - DNA, 330 bp, Homo sapiens
ccaaggcggcgcaggatgctcagtgcagagaggaagaagcaggtggtatctgcagctggaagcccagctcccaccccagctgctttgcatgtccctcccagctgccctaccttccagggcccatatcaatgcctgggtcagagccctggggaggaactgctcagttaggacccagacggaaccatggaagccccagcacagcttctcttcctcctgctactctggctcccaggtgaggggaatatgaggtggttttgcacatcagtgaaaactccatcaggagttttctctgmtcagcaagaaatataattaaaattcaaagtagatcaa

SEQ ID NO: 402866 - DNA, 595 bp, Homo sapiens
attttgtctttttgggcctttccttattcagtaatactgtcagtttggctttttttgtaggtcaacttattgaactcagtattctgaaataatatgtttactatcttttgagaagcacttaaaatattagatttattgttactcttctgcctttattgggctggaagaataattgtttcactccacaaaaggcaagttgcggagaaaaacacatagacattcaaccgcaaagcagagaaacttgactattttctgcaattttaaagtgtatattgaataaaaccatctttttattttcttttttgctcactggcaaatattaacaacatcaagtgtattattataatgttatctagttaaaaatctcaaaaagttttcataattaccattttaaartatataaataggtgacctaatgttaatttttattgtctgagaccatgtctgttatttcactctttaaattcagttagtagtgcagaacctagcacttagtagatactcaaaaattatttgctgaataaaaaaaggttaaacatgtaatatatacaaaatgtactggaaaaaaatgcaccaaacaattttgttataccag

SEQ ID NO: 402867 - DNA, 553 bp, Homo sapiens
tccaaatgggacttattactggaatgtgttttaaaggatcatatcagatgaatgaaaggtatttgatccttcgtttccttaataataaaatgatggtttggaaaaataggctacagtctaaccacagtgctattattaggctttcttgttaaacataggtctaagcctaagtatgtcaatacaacaaatacttactgtttcatttctagtaatgaaaaaaaaaaaaaaaacaagtctttctggcataaggatgattttcatctggttattttgaaacatttttgtaaaataaatttccatctataaagaacatttttatttgtaaggaggggtatgtctctgtgcactggaagagagggaggactaaatcactgggaagtcttatgataaagaagccattggcttaaatcagcraagcaagccgtcccttggtttaaggtgtttttcctggccatcctgtcttgactagaactttacctacaccttcctttttggtttaggcaaattatagtatctaaaactaaagtctcagctctgtgtctttgacatataa

SEQ ID NO: 402868 - DNA, 338 bp, Homo sapiens
ttcaaacccttcccttggagacaaaacaaacatgacaaggaattctgaggtcaggggacaagaatcacaaagtgggagaytgaggaggcagtgtccttcctgcccttggtctactggctaagaaccttcctcagcctgacctttgcacattgcactttcagctctgtttgcaattttcctcctttagtgctgagggaatcccagtgttccatcctgaaatctataggttcctaatgggtggttaaaaaaaaacctcagcgagagaagcagaaaatgtttcctcttcctgaaaaactgtagaaaggcaggcaccattctgggtgaggacatggtccttg

SEQ ID NO: 402869 - DNA, 513 bp, Homo sapiens
tggtagacatacacaatggaatattattcagccataaacagaatgaaatcctgtcactggcagcaacatggatagaactggaggccattgtgttaaatgaaaaaagccatgcacagaaagacaaatacctcatgttttcattcatatgtgggagctcaaaaaagtggatctcataaagacagagagtaaattaatggttrccagaggccaggaagggtagcagggagggagggatgaagaggaaaaaagaaatataaatgtagttattaccactgaactctatacttaaaaatggtaaagatgatacattttatgtttattttttacccaataaaaaaataaaatgaaaaaatacgaacaaaaacaacttaactggaggacagaaaagaagacctaagttaaagaaggtctatggcattttgacacatgggaagactaatacctcaaaaaagttgattcttcctaaattactctatgcaattccagataactcccagtaagacggaacttgac

SEQ ID NO: 402870 - DNA, 605 bp, Homo sapiens
agataaaacagagcaacggagaaacctgtccatttcctttacattgctttggctgctttggaagttctgcttacccatcctcaaacctggaccacacttcatgatrtggcttattaaaaggggtctgctttataatatcaaaaattattatcaaagcacaataattcaaattgtgtggtattcacacaaggattgtcaaacagattaatggaacaaaacagagaccagaaatagatccacatataggtgggatctagatatatggtagacatgacatgataaatcagttggtaaaacattaatcagtaaatgatattggaacaattggcttttcatgtaagaaagacttaggtttctccctcatattatgtatataaacctaaaattccagatgaattaaagaccttaagtgagaaaagcaaacctttaaaacttgtaaaaaaaaaaaaatacaacattatgactttcacataaataatgatttctataacatgaaaagcatacccaaaaataaaaagatcgagaaatttgacattaaacttaaaagtttttgcacaataataaataccataaagtcaaaagataggtcacagctgagcacggtg

SEQ ID NO: 402871 - DNA, 605 bp, Homo sapiens
agataaaacagagcaacggagaaacctgtccatttcctttacattgctttggctgctttggaagttctgcttacccatcctcaaacctggaccacacttcatgatgtggcttattaaaaggggtctgctttataatatcaaaaattattatcaaagcacaataattcaaattgtgtggtattcacacaaggattgtcaaacagattaatggaacaaaacagagaccagaaatagatccacatataggtgggatctagatatatggtagacatgacatgataaatcagttggtaaaacaytaatcagtaaatgatattggaacaattggcttttcatgtaagaaagacttaggtttctccctcatattatgtatataaacctaaaattccagatgaattaaagaccttaagtgagaaaagcaaacctttaaaacttgtaaaaaaaaaaaaatacaacattatgactttcacataaataatgatttctataacatgaaaagcatacccaaaaataaaaagatcgagaaatttgacattaaacttaaaagtttttgcacaataataaataccataaagtcaaaagataggtcacagctgagcacggtg

SEQ ID NO: 402872 - DNA, 628 bp, Homo sapiens
atgatatttacatatctgtctttgctatcagactctggaacccttgaaagtccatgtttgattcactgccctatccaaggattggtgcatatagggtgctcatttggacatttaaattaaattggtcccataatkagaggcatttcctctgcacctctctttcagtttcttccccccagctttaaagggatagacatctgacacaaacattctccagcctagatcagaaaggaactgtagagtagtcattgttttggtatttgttccatggagttctacttatggaaaggactagaagtagcatatatgtgtgaagaattcataagagctgctcagctatgggacaaagggattcttggaaaactgagaagccaatgtattgttacaataatgcacagtgatgtacatgtatgcatctttgcactcactcatccacctattcactcattcagaatcagtatgcaacttatccaaatgtatcaagaataacccaggaatccaaatataatgtgctactttcaaccagaaagtgccaatataaactgccaatttcaaccagaggtactactgctcacctctagccttctgatatttaacccacacaattaactgaccagaatcttccaat

SEQ ID NO: 402873 - DNA, 628 bp, Homo sapiens
atgatatttacatatctgtctttgctatcagactctggaacccttgaaagtccatgtttgattcactgccctatccaaggattggtgcatatagggtgctcatttggacatttaaattaaattggtcccataattagaggcatttcctctgcacctctctttcagtttcttccccccagctttaaagggatagacatctgacacaaacattctccagcctagatcagaaaggaactgtagagtagtcattgttttggtatttgttccatggagttctacttatggaaaggactagaagtagcatatatgygtgaagaattcataagagctgctcagctatgggacaaagggattcttggaaaactgagaagccaatgtattgttacaataatgcacagtgatgtacatgtatgcatctttgcactcactcatccacctattcactcattcagaatcagtatgcaacttatccaaatgtatcaagaataacccaggaatccaaatataatgtgctactttcaaccagaaagtgccaatataaactgccaatttcaaccagaggtactactgctcacctctagccttctgatatttaacccacacaattaactgaccagaatcttccaat

SEQ ID NO: 402874 - DNA, 628 bp, Homo sapiens
atgatatttacatatctgtctttgctatcagactctggaacccttgaaagtccatgtttgattcactgccctatccaaggattggtgcatatagggtgctcatttggacatttaaattaaattggtcccataattagaggcatttcctctgcacctctctttcagtttcttccccccagctttaaagggatagacatctgacacaaacattctccagcctagatcagaaaggaactgtagagtagtcattgttttggtatttgttccatggagttctacttatggaaaggactagaagtagcatatatgtgtgaagaattcataagagctgctcagctatgggacmaagggattcttggaaaactgagaagccaatgtattgttacaataatgcacagtgatgtacatgtatgcatctttgcactcactcatccacctattcactcattcagaatcagtatgcaacttatccaaatgtatcaagaataacccaggaatccaaatataatgtgctactttcaaccagaaagtgccaatataaactgccaatttcaaccagaggtactactgctcacctctagccttctgatatttaacccacacaattaactgaccagaatcttccaat

SEQ ID NO: 402875 - DNA, 563 bp, Homo sapiens
gctgctcagctatgggacaaagggattcttggaaaactgagaagccaatgtattgttacaataatgcacagtgatgtmcatgtatgcatctttgcactcactcatccacctattcactcattcagaatcagtatgcaacttatccaaatgtatcaagaataacccaggaatccaaatataatgtgctactttcaaccagaaagtgccaatataaactgccaatttcaaccagaggtactactgctcacctctagccttctgatatttaacccacacaattaactgaccagaatcttccaatctaggaagagacaattatgattgttattagtggcttgtactttacagcagctggtttcaggaattagccagtctgtatggggtttacaaaggaccaaaagaccaaaaaggtatgtcccataaccacagttaagagcaaaaggagatattctaacaggaaagagcatcataaaatttaaacactataggggagaggttcaagatggctgaccagaggtacaggacacgaacttctgcaaaaagaacaaaaatagcaagtagat

SEQ ID NO: 402876 - DNA, 559 bp, Homo sapiens
cacctattcactcattcagaatcagtatgcaacttatccaaatgtatcaagaataacccaggaatccaaatataatgtgctactttcaaccagaaagtgccaatataaactgccaatttcaaccagaggtactactgctcacctctagccttctgatatttaacccacacaattaactgaccagaatcttccartctaggaagagacaattatgattgttattagtggcttgtactttacagcagctggtttcaggaattagccagtctgtatggggtttacaaaggaccaaaagaccaaaaaggtatgtcccataaccacagttaagagcaaaaggagatattctaacaggaaagagcatcataaaatttaaacactataggggagaggttcaagatggctgaccagaggtacaggacacgaacttctgcaaaaagaacaaaaatagcaagtagatagtcacactttaaatagaacatataagtaaagaagtcacaggaaacacctgaggcaatgaaggagaagcaggcaagtgacagcccagctgggatcccctgag

SEQ ID NO: 402877 - DNA, 615 bp, Homo sapiens
tcagtaggaccacaaattttcttcaagcaataaaatctggtattacctggactgtaatgcaaccagggactaacagtcctttacttccattatctctgcctatcttgatgctcctggttttgatatccctctgacctgacaacaactttgtgtcttggcccatgcctgccacatgccctgacctagmctgaccttgcctgtgccctgtctctgtatcactcaaatcttggcatgggaattgggtacctggcagtgttcctaataactctgattagttgattctggccccagccatgctataattactctcaaattcacatataatgtaggtttttatcacaattactttccaagttatataaaagagtgctttcttttagaacctttctgaaatgcataaaccttttcagagtttggaacctccagctatgtaatttataagctaagaattcatggagctctgaaattaaggccaagacttaaaaatctagaggagctacatattctttaaaagtctgtctccaactagaggaagactttgggaggtgagggcaagacaaccctctgtcaggaggtaagaacagtttcagtaaagagatggggtgccattatgaa

SEQ ID NO: 402878 - DNA, 615 bp, Homo sapiens
tcagtaggaccacaaattttcttcaagcaataaaatctggtattacctggactgtaatgcaaccagggactaacagtcctttacttccattatctctgcctatcttgatgctcctggttttgatatccctctgacctgacaacaactttgtgtcttggcccatgcctgccacatgccctgacctagcctgaccttgcctgtgccctgtctctgtatcactcaaatcttggcatgggaattgggtacctggcagtgttcctaataactctgattagttgattctggccccagccatgctataattactctcaaattcacatataatgtaggtttttatcacaattactttccaagttatataaaagagtgctttcttttagaacctttctgaaatgcataaaccttttcagagtttggaacctccagctatgtaatttataagctaagaattcatggwgctctgaaattaaggccaagacttaaaaatctagaggagctacatattctttaaaagtctgtctccaactagaggaagactttgggaggtgagggcaagacaaccctctgtcaggaggtaagaacagtttcagtaaagagatggggtgccattatgaa

SEQ ID NO: 402879 - DNA, 591 bp, Homo sapiens
ttagtacttttcccaggggagagagaagttggtagtttgagcaggatgcagggaagaatgcaagttcttaaaggatgggggaacacttggacaggtaaaggggaaggatatatatagagagggagacaacgaagacagaagagagaggaagcaatggaggaagcaagagggagtgggtcaggggcctaaaagggaggttgactttagaaagagagaaactctaagttgggaaagacacagmaaggttagataaaagtactcagaaaacttaggagaggaggcattgtgaggaaattcatgttgaatggcctttaaaaaaaaaaaaaaaacttagcaaggtttcagagttgggagtggattgtggactccaggggaatcgttaaatctttgagatattcactatgaggaatatgataaagggtcagttaaagatcgacatcatgattgcttaatagcatagaaaacccaggtagaatgcaactgaatagcatcctattgtagtgaagttaatcagtgtctaagataatgcatgtagagcattcaggacacttggcactagaaactctcagaaaatgcaccatcaccactgcc

SEQ ID NO: 402880 - DNA, 548 bp, Homo sapiens
cctggtcagcagagatttagtggatgaagatgaaactgacagctgggattcctaaaactcctgatagcctccatgtccttttataaagcaagatagaatcctttaacctgatttggagaacaaacaagtagaactaaaggagttctaagaaacgtattcatttcaggtattgcttattaaaccaggaattgcaaattccaaaagaagactatcttcccccagccagggactgagcagtttttacaaaaggatgcataaaatgttaaactctgtatgggattgggggccagccaacatgaggtgaattaggggaagcactagacacataaagcattccatcaaaaaaagaagctagtttcctaktcaaaagagtttggaaaacattggtgattctctaaaccaagtaagtttggagttttgtaatgcacacaagcctattaaaggttcttacaagagctagggttaaaaaaaagtttaattctatttgagcccacgtttccaagcttacttagccacagagacctttttgtttgtttgtttgggcccca

SEQ ID NO: 402881 - DNA, 587 bp, Homo sapiens
ccacctcttaatactatcacaaagccagcacctgaattttggaggagacacattcaaaccacagcaacaaggaaatgttaatgtgcaatggctccctcagttagattttaataatactgtgctcattagttagctactttctctcagttgattcctaccactgaggacaaatttctgtttgatagtagatgccctgatcagaactttcaaagttctgaggggaagggaatttctggggtctggcaattcagcaaaagcaaagagctttggcattttcaagttcatgcctttgggtaatttttttaatgtctggctcatttctttgattcgaaaatcaatttccattttgacaaacagtcatggtctgcttcttagtccaggcttaaatgcccagggacacatgaattgtatttcttcccatgatcctacttgccacccttccctgaattaaatccacaattctcatttgtatgcattcttctccctacaaggagaaggaatagakagtacccagccatcctctaacagaaatgaacaatctgttccacagtgcatgatcattacatgctcaggactataccagaact

SEQ ID NO: 402882 - DNA, 584 bp, Homo sapiens
tttattatttctttccttttactaatttggggtttggttcattctttctagttccttgagkggtgtcattaggttgtttatttgaagtctttctactccttttgattataggcatttactgctatacatttccctcttagtgttgctgttaccgtatcccatagatttgggtatgatgtatttccatttttgtgtgtttcaagaaattttaaaatttccttcttaatttcattgacccattggtcattcaggaacacattgtttaatttgtatgtgtttgtgtgttttccaaagttcctcctgttactgatttctagttgtattccattgtgatccattgtgatcagaaaatatacctgatgtaatttatattttttgaatttgttcagagttgttttttggcctaagctgtgattcattctggaaaatgtcctgtgtgctgataaaaagaatatgtattttgcagcagttgggcctattagatttagtgtggagtttaactctactttttctttgttgattttctctctgggtgatctttacattactgagaatggggtgctaaagttccctaccattattgt

SEQ ID NO: 402883 - DNA, 622 bp, Homo sapiens
tacttgggaggctgaggcaggagaatcacttgaacccgggaggcagagtttgcagtaaaagaaagaaactaaaggaatggagtggcctttatgcatcacacctggatgacaaaggatatataaaagagaatttggaagtgatttctggagaaaagggcaaactccactaaagtaggatcctgttgactgtgatgaaaacaagccataatgggtgagaaaatggcagaatgattagacctagcaaaggggccaaggtagtgtgggcagaataaaagatgaactaaaaagaaggaatggtttgacctagagaatccaattgtaaaatctataggccagagtgatttaaagaaagaatactagtgaaaactggtcaaaatattaaatcttgaataatatagctttatgtgcataagactatgtgcttttctagatagtcatttattcacttcattgaacatttttgcctacatatacctctactacaaacttgggggctagaagggatgaggamataaactttaaaatgcaagtcatatttactgccctttagtcctatagttgtctagttggaaaaacacataaaactgataaataatgtgataaataaaggggtaccaaatta

SEQ ID NO: 402884 - DNA, 591 bp, Homo sapiens
taggtaaagatagagattctttttacctcgttaaatcaatatagtatattaaaaatttaagggaatccactaaaataatataaatcaattatatagtttcaaaatgatagatgggggaaaagagaaacaataaagaaaatcaatacaatagaatatasacaaaaagaaaaggatcataaatagaaaataaaattaaatggtataaatgaatccaaaaatatcagaaataatgagtataaacagaataaactagcccattagaaagtctcaggataatttttttttaaatccaaatacatgtcatttacaagatacacttgaagcataatggctcatcaacattgaaaggagggagatttaataagatataagacaaatactaacaaaaatttagttatagtaaaactaaaataagactgtataatgacaaaggtaaccattcatcagtaataatagttctgtacttttaaaaattgaaagaattacaaggagaaatgaattaattaacaatcagcatggtgagaattatgtttaatacactttattttttagagtaattttagtttttcagaaaaattgagcagaaggtac

SEQ ID NO: 402885 - DNA, 570 bp, Homo sapiens
gagatttaataagatataagacaaatactaacaaaaatttagttatagtaaaactaaaataagactgtataatgacaaaggtaaccattcatcagtaataatagttctgtacttttaaaaattgaaagaattacaaggagaaatgaattaattaacaatcagcatggtgagaattatgtttaatacactttattttttagagtaattttagtttttcagaaaaattgagcagaaggtacagcaatttctcatatatcccctactttatatgtgcatagccttcccccattctcaatatcttccaccagagtggtacaactgaacctacattgacacatcactatcactcaaagtccatagtttatcttaaagttcaatcttggtgttgtacattctatgggtttagacaaatttataatgacatatatttaccactatagtatcatacagggtagtttcamtgagtatgagaatttttaataagtttaatttgatggtgatatgttgaaccttgccactcacaattaaagggtacacattccttccaagcatacattaattcaaaaattg

SEQ ID NO: 402886 - DNA, 411 bp, Homo sapiens
gttctaggtaagacgaaacagataaactctgccttgtctctcctattgaatgaagctacaaaatttgaacagaatgcatggagcagttatttgaggattctgagaagtaaataggagcaggtgaacagggaaaaaaaagaacgaaattctaagaatcacccaaccagtggtgaatttatcatttttttccctccatatcccttagcctggtctcaaggcatcctgaaaccaagaagtggatattgacatgggcagagaaaagctcatgcagaatacctctagtttgggctctagaagtataaaaaaaaaaggcttctttggtacagtagcaactgtcagctaaaactctaaagaaagggaaatttcctttcaatcaggggagcygtggtctcaaaaggtgaggtgaatccc

SEQ ID NO: 402887 - DNA, 575 bp, Homo sapiens
tgtagccatcagtggcaccattctcgcaaacagatggcatgctcacagcacctcacccacattacaacaattgggactcagaggactgttcaagatggaggcacttaaggaattagmatgtgaccataactatcgactgagttatagatactgtgattttctggccttaggaaaaggaccatgaataagataacattagtctcatgaccatcaaatggaataagccaaggcagcagaagacattttgttcacacatcaggaagtacctgctgactagctagattattaggaaaggcaataaactgccaaaataggtggcatggcatcctccataggtcattaaaaacagtaatatgatcttctaagatttcctgcccaggcataagtgggtagataagatgaccttttcagattttaaaatgaagattttatgagtattcagaagatgcagtgagggaaaattgctcttaggaacaaaaacaaattctttggaagaggaaatgattcatttaaagaccattttaagaacttcagctgattttcctagaaataccttggtttcagagtaatttgga

SEQ ID NO: 402888 - DNA, 575 bp, Homo sapiens
tgtagccatcagtggcaccattctcgcaaacagatggcatgctcacagcacctcacccacattacaacaattgggactcagaggactgttcaagatggaggcacttaaggaattagaatgtgaccataactatcgactgagttatagatactgtgattttctggccttaggaaaaggaccatgaataagataacattagtctcatgaccatcaaatggaataagccaaggcagcagaagacattttgttcacacatcaggaagtacctgctgactagctagattattaggaaaggcaataaactgccaaaataggtggcatggcatcctccataggtcattaaaaacagtaatatgatcttctaagatttcctgcccaggcataagtgggtagataagatgaccttttcagattttaaaatgaagattttatgagtattcagaagatgcagtgagggaaaattgctcttaggaacaaaaacaaattctttggaagaggaaatgattcayttaaagaccattttaagaacttcagctgattttcctagaaataccttggtttcagagtaatttgga

SEQ ID NO: 402889 - DNA, 581 bp, Homo sapiens
cttctaattttgtttaaggtttattttttttttctgtaagaatctgacattttaatacatttaaatctgtcaatttttccctttatggcttttgaattctatttcatgcttatgaatctcttttctgtctcaagattttaaaagtatgccttattttatcattgaagttttatatttagataatataaatattttgatttttagaaatttagatttctagttacactggaactttttctgattgattcaagtaggaatgtaattagacttcttaaatatgaataacctgttgtttcaayaccaggggacacatcctctattctctgtcacggtgtaggatagttcatcctttcctagtgatttggagtatctatcctacactaaaacgttacatacacatagatatgcttctctactttttattctgttctgtgattaaaatagtactatactgttttagttattttaaggtatattttcttaactgagaaggtaagtcctcattttccccccaaaatgtttctgcctatttttccacacttattcctccagaggcttttcattttaaaatatggtagtga

SEQ ID NO: 402890 - DNA, 581 bp, Homo sapiens
cttctaattttgtttaaggtttattttttttttctgtaagaatctgacattttaatacatttaaatctgtcaatttttccctttatggcttttgaattctatttcatgcttatgaatctcttttctgtctcaagattttaaaagtatgccttattttatcattgaagttttatatttagataatataaatattttgatttttagaaatttagatttctagttacactggaactttttctgattgattcaagtaggaatgtaattagacttcttaaatatgaataacctgttgtttcaacaccaggggacacatcctctattctctgtcacggtgtaggatagttcatcctttcctagtgatttgragtatctatcctacactaaaacgttacatacacatagatatgcttctctactttttattctgttctgtgattaaaatagtactatactgttttagttattttaaggtatattttcttaactgagaaggtaagtcctcattttccccccaaaatgtttctgcctatttttccacacttattcctccagaggcttttcattttaaaatatggtagtga

SEQ ID NO: 402891 - DNA, 581 bp, Homo sapiens
cttctaattttgtttaaggtttattttttttttctgtaagaatctgacattttaatacatttaaatctgtcaatttttccctttatggcttttgaattctatttcatgcttatgaatctcttttctgtctcaagattttaaaagtatgccttattttatcattgaagttttatatttagataatataaatattttgatttttagaaatttagatttctagttacactggaactttttctgattgattcaagtaggaatgtaattagacttcttaaatatgaataacctgttgtttcaacaccaggggacacatcctctattctctgtcacggtgtaggatagttcatcctttcctagtgatttggagtatctatcctacactaaaacgttacatacacatagatatgcttctctactttttattctgttctgtgattaaaatagtactatactrttttagttattttaaggtatattttcttaactgagaaggtaagtcctcattttccccccaaaatgtttctgcctatttttccacacttattcctccagaggcttttcattttaaaatatggtagtga

SEQ ID NO: 402892 - DNA, 581 bp, Homo sapiens
cttctaattttgtttaaggtttattttttttttctgtaagaatctgacattttaatacatttaaatctgtcaatttttccctttatggcttttgaattctatttcatgcttatgaatctcttttctgtctcaagattttaaaagtatgccttattttatcattgaagttttatatttagataatataaatattttgatttttagaaatttagatttctagttacactggaactttttctgattgattcaagtaggaatgtaattagacttcttaaatatgaataacctgttgtttcaacaccaggggacacatcctctattctctgtcacggtgtaggatagttcatcctttcctagtgatttggagtatctatcctacactaaaacgttacatacacatagatatgcttctctactttttattctgttctgtgattaaaatagtactatactgttttagttattttaaggtatattttcttaactgagarggtaagtcctcattttccccccaaaatgtttctgcctatttttccacacttattcctccagaggcttttcattttaaaatatggtagtga

SEQ ID NO: 402893 - DNA, 552 bp, Homo sapiens
  misc_feature (1)...(552): n = A,T,C or G
gaaacttgctctgggctggacctcaaagaacagttcgcaggtcatcacggcaaaactggctcaacaaggaaacttctacctcagcttcagttaggaaaatggggaatcaagacagtaacccwgttaggctccagggatcaggaagctgctgctggaactgctggttcctgagtcaggccatgcaccaggaaaatgcatgaccccactacaccctccctttccccacttcaccctgctctgcattcaagcctctcctgagtacatctgattgattaaatttaaattacatgctgagcttctgctccaaaggaagtctgagaaatgtatttttaagctttctagtctctgccatacagaaaacatattaaggatggaataaatgttgagtcagttgatctggcttctctatcacttgtggcatttgatgattgcaaggtgagtaacgcatttgaagcgttattatcaacaagnagctctacgaggcagcatatttttactccagagtgttaacaaagatctattcacatagacctgcagccaacaaatcaccca

SEQ ID NO: 402894 - DNA, 547 bp, Homo sapiens
aaaagattaaaggtacatagtgacatataaagtactcaggccagtgcctggcttatagcaagtattcaataaatattggctcttttcatttcttctaaaaaaaaaagaaatttcatttttagaaaagaaatttattgtaaaattctatcaaggatcatggcagcagtgaaggtgactgtgatatcagacaagccagtggcaatgtccagggagcaaggatggccctaaaaaagaggatgtaagtctgcctcactgrattcattcatttaatcaatcaatcaggcatttatttaccactctgtctctctattccaggaactgtgccaggcctatgacctcagagattattaagacactatccttccctccttctgtgagctcatatcctagtaggggaagcaatagataaatgaaaaatagtagtgttgttccaaagcataagaaatatcataatacagtcatgcatcacttaaagataggcatacattctgagaaatgcatgattaggcaattctgtccttgtgtgaacatcatagaatatacttac

SEQ ID NO: 402895 - DNA, 562 bp, Homo sapiens
ctacagaaggaagccaaatccctccatatggctttcaagaccttggtgaagttgtcacccactctccagctcagtattaactcacaatcagaactctgcctcatagactgtcttcaccagccaagctaattagttcatggagcagtagccccccatggctgctgcctatcttttgtgatgtggccctgctctgaagttaagcctcatctcctgacccctgctcccttacccatccttagcaatcagtgttctttaactgcccaggcccacaggaatctccacttcctttaaactcctaatgaaattattgtgtctaccaatttcttaggcactttaaactttcatataattccttaactcttcttgmgagtatcctttcctatcaattacactgcatctggcaaatccttgttgaaagctttcatatccttcacagacccaagcaccaaataggtgctcaataaatactctgaagtgaatttatgatgactaattattcatctatgtatttgatgaaatggcaatgggatagcagatttgaaatgggtaattcatcatttct

SEQ ID NO: 402896 - DNA, 459 bp, Homo sapiens
tgcccttttcttcatgattgttgccttgtggtcacaatatggtcactgcttctccagtaaaggaaaagcaaagggcatttatgcctgtacttcattagtcagaactatactacatggccacccaacctgcaaatgaagctgggaaattgagtgttttaaatggctcacattgctgcctcaaacaaaataaggaatctgtcagcaagaaagaagagaattaatactgggtggccattttacaatctttcacrcatactgattttccaaggaactgtttcatcctttctagagcagacacacaatttaatctaaaaagccagttgtttatttgtgatgacctgcgatggcagggaaatgaggaagtaaatctcactcttctagttaggctgtgctgcctcccacttacccactcaaacccacccattcctatcactctgaggctatgggttcaaggtttca

SEQ ID NO: 402897 - DNA, 553 bp, Homo sapiens
ggtcttttaaaaagatttgaactaaacatttaagagtagagatatttcattttttttttttttttgccccctacccctacccttccacrttttcagtttcttttataaactccagcaatactgggtatttctgcatgacaatggcaggatggagctaggtagtagctcagtttaagcatggcccctgtggacactgggctgtgtgatcccaggccctaggctaattataccttctgggctcagggttcatgtggctgtggattgaggatgtggctagcagatggcctcaaaagtcaggaagtgctgaaattttaagactattccggcctaaaaagcagaataaggggttggcaagtatggccaaagcagatgtcttttagtagtgtgaacaagaccaagaccacagaccgtagtgttcccaaaatacatgctgactgcagtcttttctggaggggatgggcagtccaaagttctgtgaggagaaagctgtgacctatacagtctagattctggagaagtcctctttgctctatttatgttacttctgggcatc

SEQ ID NO: 402898 - DNA, 553 bp, Homo sapiens
ggtcttttaaaaagatttgaactaaacatttaagagtagagatatttcattttttttttttttttgccccctacccctacccttccacattttcagtttcttttataaactccagcaatactgggtatttctgcatgacaatggcaggatggagctaggtagtagctcagtttaagcatggcccctgtggacactgggctgtgtgatcccaggccctaggctaattataccttctgggctcagggttcatgtggctgtggattgaggatgtggctagcagatggcctcaaaagtcaggaagtgctgaaattttaagactattccggcctaaaaagcagaataargggttggcaagtatggccaaagcagatgtcttttagtagtgtgaacaagaccaagaccacagaccgtagtgttcccaaaatacatgctgactgcagtcttttctggaggggatgggcagtccaaagttctgtgaggagaaagctgtgacctatacagtctagattctggagaagtcctctttgctctatttatgttacttctgggcatc

SEQ ID NO: 402899 - DNA, 634 bp, Homo sapiens
cctatacagtctagattctggagaagtcctctttgctctatttatgttacttctgggcatcatctttaatgggtgcaaaagtgacacatcccatcaatctaccatttttattcttygataaaaaaatggaattagtagtatagattaagccacttcttcgaactctagatccacatgtccaactgtctatttcctatccttgctgtttttgtcatataattcaagcattaagtgtccaaaatgaaactcattcttcccttccttccccacgagatctggttctttctggtgtttttatctcaaggaataggacttcctccattcagctataaaaaccaggaagctcttgctctttatctgctatcccctcaccctttatccaaacatgaatcccagtcaattttgccctaagtacctgttgaatcttcccactcctctctggctttcctgccatcagtcctctggcctccctccaaaagttttttcacatggcagtcatgggcacctttatgaaaccccaaactggtcatgtctttttcctgcctcaacacggttcaatagctttctattgctctcaagatccaagccccacattctttgcccacacttacatcctcacaaaggcttggcattt

SEQ ID NO: 402900 - DNA, 597 bp, Homo sapiens
tatgccctcctggagtttccagagtaacctacaaaatacatagaaaaagccatctcattgtaactggtaactttatgttattatcaggatgtcaagggcctccaggggagagaggagtataaagttttaagctttggacccaggtttatagagatcacagaagtctcttcgtccccaggaggaaccctctcctctattaggaggggagacttctgatgttaaaacttatgacagccaaggcaagtagtgcctccagactcctactgccccaggctttttacagtcaagaccttcatcaggcttctgaatatccaaattgcctaccttttacataccagaggggaacagggaggattaccaggatgtcttaacagagttatctgtrtgaacagaaagaatagagcatttatttgcagatttatagagcaatgaaataattctgctttataactaccaaatcccaggccatgggaaggatgtggataagatttcagaatggtttcaaaatcactttatgatttaaatggttcctactctgtggtttctacttctctgatgtacttttcagccctcacatccaaggtgccgatacaccat

SEQ ID NO: 402901 - DNA, 519 bp, Homo sapiens
aatatatctgggtgacttgtttccgtttcccagaagccttgggggtttataaaatataaggcaaaccttcttaattttcattcatttacccattgaataaatactcatcaatcrtgctgtgctggctctggaggtcacaatattgactaagactgcgcagtttacaattcagtttaaatgtcacgaggaggcaagtacagtgtgccagtggaggcttttggaagggccccgtgatggaataagcttgtccacaatttctttgacattcctctccagtgagaggaggtatatgtattccctttctttgaaactgggctgatcgtgaccgtgttgaccagtagaatatggcagaattggtgcttttctgaggctttaaagaagcagcagcatcctcacgtagaatgcttgttttaggggaagccagtgccgtgtcacacgtctgactatcctgagagccatctctaagcattcaagccatctcataaccatctcagctctggtgtgatgtcctaacgtgcc

SEQ ID NO: 402902 - DNA, 587 bp, Homo sapiens
atcctcaacaaaatgctagctaacagaatccaacagtatattaaaaagataatccaccatgttcaagtgggtttcatactagggatacagggatggtttaacatccacaagtcaacaaatgtgatacgctacataaacagaatttaaaaaaacccacatgattatctcaatagatgaagataaagcatttgacaaaatccagcattcctttatgattaaaaccctcagcaaaatcgacatagaagggacatgccttaaggtaataagagccatctatgacaaaccaacagacaacattacagtgaatgcagaaaagttgaaagcattccccctgtgaactggaacaagaaagacaaggatgcccaytttcaccacttctattcaacatagtgctggaagtcatagccagagcaatcagacaagagaaagaaataaagggcatccgaaccagtaaggaggaaatcaaactgttgctgtttgctgataacatgattgtttacctagaaaactctaaagactcctccaaaaagctcctagaactagtaaatgaattcaacaaagtttcgggatacaaaattaatgtacac

SEQ ID NO: 402903 - DNA, 623 bp, Homo sapiens
cttttgtctcctctgtgtattttcaaatagccggtcttsaagctcactgattttttttccctctgctttgtccattctgctgttaggagcttccaatgagtttttcagttcagaaaacgtatttctcagttccaagatttccatttgattttttaaaaatttcaatctctttgttaaattttctcaatacatttctgaattgcttttctgtgttatcttggagatcaccaagtttcctcaagactgctattatgaattcttgatcagagagctcacgaatcactgtcttgttagggtcagtgactgaacttttgttttgtccttttaggggaggtcatagttcccagtttgctttgtttcttgtggatgtatgacaatgtctttgcaataaaggattaattatttattctagttttctctggtttgttttgtttctttggatatatttgctcagcaaatactgttagatcactgctccctttttggttctaagccttgtgccttaagcccaggtttgctttgactctagttaatgagtggagcactgcctgtcctggatggggttaaatttcaaaggaattatcccagcagtgtgggaaggctggctaggggttcatgcccaa

SEQ ID NO: 402904 - DNA, 649 bp, Homo sapiens
ttgcttggcctctctttccccatatccttttctaagctagcttgaggttcctcacaacrtggtactctcaggatgtatctattcacatgggagctagcttcccctagaacaagtattctaagaaagaatattgctacttctttacagtctgggtgaagcatcacttccgtcatattttactggtaagcacagtgtcagaaccagcctagattcaaggggaggggacatagacatttcccctcaatggagaggagtatcagataatttgtggacaagttatgctatcacagggcccttcctacagcctccactggcacacagtacttgccttcccatgacatttaaactgaattgtaactgccttgtcttagtgaacattgtgacttccagaggccagcacagcaccattgataaatatgtgttcaatgagtaaatgaatgaatgaaaattaagaaggtttgctttacattttagatatccttaaggttctgacaaacaggaaacccttgaagccacgaagcttcatgaggaatcaaatctttcttgttgactgttacttcctctgtattggcacagtacctggcaggtatattacatcctcaatagctgtttgttgaatgaataagtgaaagaatgcatgtctatcaaa

SEQ ID NO: 402905 - DNA, 576 bp, Homo sapiens
gtctatgtatttataggccaactttaaaatgtaacttgcatatataaaggcatcaaatttcagaaattgttgtggaaactagatttgtggagtcgtggagaagtccttttgaatacagtgctatctgttgaaaagagctccaggctgtcagcttattgactaacctgttttgttgttgtcattttttgttgttgatacataaggattgtacatatttctggagtacatgtgatattttgatatgtgcataccatgtgtagtggtcaatagaatattattgagccttaaaaagaaagaaatcttgtcatttgcagcaatgtgaatggaaccagaagatactatgttaagtgaaataagccaaactttggtcatgatttccatcactcacagcagccctggagtaccagcacacttaaacagtgcaaccaggatcagtcaaacagaaccagaaccattttggtttatgttgttaaggatttttgcaaaactccctttagattcccatgsgtggagtgtgacttatggcttctcagattattcatttgttgaatggacttcagtgggttttctgtaagc

SEQ ID NO: 402906 - DNA, 585 bp, Homo sapiens
ctaagggcccagaagttagcaattagatttgagcaattctaacttggacagtttccatcagctatactctgtgggtgtctgtactagacagtgctctgctgatattgaggggagtctcaaaggagtagaagaggccagattctgggtctccatctagacstgctgtgtccaaaatgtagcccctagtcgtatgtggctattgtgcccctgaaatgtggctaaggctaccaaggaactaaatttttaacttaattataattcattttcatttaaaacggatatttgattccattattagaaaacttttaagtatgtttagaacaactttgggtctgtgggtcttttttagttataaattttgtgtactttaaatatagatcaactatttctgatttttctgatgaacatttagtgtaccaattaagatgtcctgtaagtataaaatgcacactgattttgaagactttagcacaaaaggttgtaaaatatctcaccaatgctttttatactgattacacattgagttaacattttggatatgttgggttaaaacattttaacagaattaatttcatttgtttattt

SEQ ID NO: 402907 - DNA, 585 bp, Homo sapiens
ctaagggcccagaagttagcaattagatttgagcaattctaacttggacagtttccatcagctatactctgtgggtgtctgtactagacagtgctctgctgatattgaggggagtctcaaaggagtagaagaggccagattctgggtctccatctagacctgctgtgtccaaaatgtagcccctagtcgtatgtggctattgtgcccctgaaatgtggctaaggctaccaaggaactaaatttttaacttaattataattcattttcatttaaaacggatatttgattccattattagaaaacttttaagtatgtttagaacaactttgggtctgtgggtcttttttagttataaattttgtrtactttaaatatagatcaactatttctgatttttctgatgaacatttagtgtaccaattaagatgtcctgtaagtataaaatgcacactgattttgaagactttagcacaaaaggttgtaaaatatctcaccaatgctttttatactgattacacattgagttaacattttggatatgttgggttaaaacattttaacagaattaatttcatttgtttattt

SEQ ID NO: 402908 - DNA, 585 bp, Homo sapiens
ctaagggcccagaagttagcaattagatttgagcaattctaacttggacagtttccatcagctatactctgtgggtgtctgtactagacagtgctctgctgatattgaggggagtctcaaaggagtagaagaggccagattctgggtctccatctagacctgctgtgtccaaaatgtagcccctagtcgtatgtggctattgtgcccctgaaatgtggctaaggctaccaaggaactaaatttttaacttaattataattcattttcatttaaaacggatatttgattccattattagaaaacttttaagtatgtttagaacaactttgggtctgtgggtcttttttagttataaattttgtgtactttaaatatagatcaactatttctgatttttctgatgaacatttagtgtaccaattaagatgtcctgtaagtataaaatgcacactgattttgaagactttagcacaaaaggttgtaaaatatctcaccaatgctttttatactgattacacattgarttaacattttggatatgttgggttaaaacattttaacagaattaatttcatttgtttattt

SEQ ID NO: 402909 - DNA, 581 bp, Homo sapiens
tttgaagactttagcacaaaaggttgtaaaatatctcaccaatgctttttatactgattacacattgagttaacattttggatatgttgggttaaaacattttaacagaattaatttcatttgtttatttttacattttaaatgtgattattaaaattttaaaattacatacatgcttattacatttctactaaaaagtgctgggagtctgtgctaggtatgcctattacctctgcactatccatatcctgttctaggtgaaaccacacagcacaatgcactgagaaccctggcttggtgatcccatctaattagaccagcactgggcaaccaggattgagaaccagtgttatgatatttgcttactcacttggtccctgatgcaggctttttctctatgggtataaataagacatcagaagagctctaccatccctcccaagaacttcttaagtagagccaaccaaattttctcacctaaggttttggaatcaagacacaagtcttgctggtaagaagctgttggacatgggactccaaggcratgagttagagatagcttcctgggaacccaaagcctt

SEQ ID NO: 402910 - DNA, 581 bp, Homo sapiens
tttgaagactttagcacaaaaggttgtaaaatatctcaccaatgctttttatactgattacacattgagttaacattttggatatgttgggttaaaacattttaacagaattaatttcatttgtttatttttacattttaaatgtgattattaaaattttaaaattacatacatgcttattacatttctactaaaaagtgctgggagtctgtgctaggtatgcctattacctctgcactatccatatcctgttctaggtgaaaccacacagcacaatgcactgagaaccctggcttggtgatcccatctaattagaccagcactgggcaaccaggattgagaaccagtgttatgatatttgcttactcacttggtccctgatgcaggctttttctctatgggtataaataagacatcagaagagctctaccatccctcccaagaacttcttaagtagagccaaccaaattttctcacctaaggttttggaatcaagacacaagtcttgctggtaagaagctgttggacatgggactccaaggcaatgarttagagatagcttcctgggaacccaaagcctt

SEQ ID NO: 402911 - DNA, 471 bp, Homo sapiens
aggcaaatctagtcaggaactatgagtcttttgtgggcacactactaccacactgcctctgctgtcttctctcaggttactatagtttcctacctgatgccattacctgctctctggaacaaccaaaactggaaagtggtctgtggcaccaaggggtgggataaccagcacagcactgccagacccctccaattgagtgtaatataaagtggaragagtagtaatgaaatacattgcaggacgtcctctcttcccccgcagctcagctacaattccatggaattgagcggggcatagaccagagggactggtaccacattacatgcagaatcatacctactcttgccccacctccatcaccaaaaccatgtaaatagtccaagcccttcatgcacatatatttctccctttaagatactttcctacccaaagtggctccccacacaaatagacctctacaaactgccttca

SEQ ID NO: 402912 - DNA, 623 bp, Homo sapiens
ttgggcacacagcagatgtaggtgaatgactagcaaagcaggactcctctgccctttattttgaagggagggtagaatccagctctgttgatggatggcatttcacctttcctctctactaactgaaatgtgaagcctgaagtttgcaagaagggatgaaaatgtgcataagagcagaaagggtctctgagaggtcgtatcaagattaatctcttccctctaaggttcaaaggtatccaaacatcaaaatatgtgggggaagacctagggtgccccaattgaggcctattagcagaaattatctaacaagtctcttgagataaaatcacaataaatctgtgccaagacattgtttttggatttgccaaaaagctaacctcagaccattgccaaaccatatatttgaacaacatatgtacttataactctcaggcaatgtgttgagctaattgaaaagtctggctagagaaactgttctcctgagtcaaggctctcattaggcacctgtccctgagtattactcaggacagatttttcttccaatccttttcacattctgccacacgtcagtcttccctcaaaccctgtgragtggccctcgcggtagtctgcctttctatgaa

SEQ ID NO: 402913 - DNA, 623 bp, Homo sapiens
ttgggcacacagcagatgtaggtgaatgactagcaaagcaggactcctctgccctttattttgaagggagggtagaatccagctctgttgatggatggcatttcacctttcctctctactaactgaaatgtgaagcctgaagtttgcaagaagggatgaaaatgtgcataagagcagaaagggtctctgagaggtcgtatcaagattaatctcttccctctaaggttcaaaggtatccaaacatcaaaatatgtgggggaagacctagggtgccccaattgaggcctattagcagaaattatctaacaagtctcttgagataaaatcacaataaatctgtgccaagacattgtttttggatttgccaaaaagctaacctcagaccattgccaaaccatatatttgaacaacatatgtacttataactctcaggcaatgtgttgagctaattgaaaagtctggctagagaaactgttctcctgagtcaaggctctcattaggcacctgtccctgagtattactcaggacagatttttcttccaatccttttcacattctgccacacgtcagtcttccctcaaaccctgtggastggccctcgcggtagtctgcctttctatgaa

SEQ ID NO: 402914 - DNA, 569 bp, Homo sapiens
gtctcctagtttccagttcagttgaccaaaaagagttaccagcaagagatcaaagygtataaagagactgagatcgaggtatttcctgactgattttttttttccctgctgggccacagattggccgtgactcttttcctctaccaaaggttatttctatagctagatatgtctctgggttccaataacaccacctcctctttccccttcagactaccattactggttttgagacacgtcttcacctattgttcatgtcctttaaccctatccacagtttttcaaatagaccctttattaagcatgcctcaatttccccatttaagagtgtcatatgtttccttctggggccctggtgtattgaggaatgtagctggatctcctatgcagtgtttagagaggacacgggtctcatggatgtaaaagacactgataaatttctccactaagacaaggtgatcttaatacacagacagctcctttgtcactgaggatatccacagagatgggagaagaaaaaacagaccaaaggcaggtgagcagccaacctagcaactggtgtttgttca

SEQ ID NO: 402915 - DNA, 560 bp, Homo sapiens
agaataagaatgtagtgaggttgaatgtaaatggggggaagttaactttatatttctcattttcccttaagcattcattactgctgacagtaaaaagtactygctaattataagcttctggtctcttctagtttaacacataatctctttcaggtaattggcctttctgggttcctttctccttcagttctcattctcttctccagacattagatagaaggtgatgctcgtgttatatcatggggtggggtgagatggaacagggggttgtggtgctctacttcttgcaatgggcttcagggctcatcacagctgcgcagaatgtgtgggttggtgtcacttctatgtggtcaaggtccattggtctgcgtgcggggatggcttgtgtctggatctgaacgctcagcaatggtggtctgcccgcagctctccacttcagagtcttctaactccttgactcagagacacccctgaggaactcttcaaccagtacctatagcagccctctgcggcacacagtaatctcctgacctcctccatgctagtgtggactctggaga

SEQ ID NO: 402916 - DNA, 618 bp, Homo sapiens
agcaaaggaacatacttcaaaatacgaagagccatctatgacaaatccacaaccaacattatactgaacaggcaaaagctggtaccatttccctggagaactggaacaagacaaggatgcctactctcaccactcctgttcaacatagtagaggaagtcctagccagagcaatcaggcagagaaagaaataaaagtcatccaaataggaaaataaaaagtcaaactatctctctttgctgatgatataattctatatatagaaaaccctaaagattctcccaaaaggctcctggaactgataaacattcagtaaagtttcaggatataaaattaatgtacaaaaattagtagcatttctatacatcagtgacattctagctgagaaccaactyaagaacacaatcccatttacaatagccagaaaaaatgaagtatctaggaatttatgtaaccaaggatgtgaaagatctctacaaggagaatgacaaaacactgctgaaagaaatcagagatgacacaaatatatggaaaaatatcctatgctcactgatttgaaaaatcaatattgttaaaatggtcatactgcccaaagcaacttacagattcaatgctatccc

SEQ ID NO: 402917 - DNA, 368 bp, Homo sapiens
atttccttaaagttaaacaggaattgagaattgtacctattgtttccctctaacatttgttataccttacctaaccaaacccacttcctaccctagggttatttgacagatttttcaaatatataggttctttcagcataaattattgttaataagaaaatgtgttttgttgagacagcctctgctttcttcttagattttaaattgccraattctaatttatagaatttgatgacattcctcctaaaagctggtcttttgtcttcaggccaaattatccaccattagtctctctccagagcacctatctcttaattctggcatgctctgttatcttgtttcccttgttgatggaaacatcatttttc

SEQ ID NO: 402918 - DNA, 583 bp, Homo sapiens
aaaaatactatcattagagagattgctaaatgaattacctggcgcaggggacttgattttcttggcgtaggtacctttctccacagaaggggcagtgatgttcaaaggcattctcagagaaagcatgtattagtctgaaatcactgctgtaacaaatcactgcaaacttagtggcttaaaacaacacaaatttattatcttgcagtttctgtaggacagaagtctggtacactttggtctgtttggacacccaaaaggccaaaarcaaggtgtcagcaggctgtattcctttctggaggctctaggagagaatctgttttcttgctcattcaagttgttggcagaattcagttccttcctgctataggactgagctccctgtctccttgctggctgttggctgaggtccattcccagcttttcacggctgtctgcatgtcttggcttatggccccctccatctccaaagtcagcactggcaggctgagtcgcatgctttgaattgctcctgctttttcttcatagcatctctctgacttcagctgacattagttctgtttaaagggctcatgttattatattg

SEQ ID NO: 402919 - DNA, 622 bp, Homo sapiens
ctcagaactctctcctacacttcagacttatataggttgaactatccaaaattgctattttcataggtcaaaagtgagtgacttcatatagttcaactcataagtcaattgcctagttgatatttctaatgagcatctctaatataacttatccaaaaccaaattggttctattgtgtcttcgcatctcaatacctggcaatcccatccttccttcactctagacaaaaaaccttagagtaatcattgactcctttctcttttagattatacatctaatccattaacaaatcaatcctgtctggccaacctgctaartatatccagaataagacaacttctcaccaccttcatgttattacctcagtctaagccaccatcattgattgtaagactttttgcagtaattctgtccatgtgcttcctttttccttttttcctcagcccccaatttagttcctgccagcagccagagagatcctataaaatgctaagtcagattgtgtctctcttctgcttaaaattttccactggtttcccatctcacaaagagtaaaagccaaagtcctacaattgcctgcaaaggcctatgccatatgtcatatgcaataaatatttggtaa

SEQ ID NO: 402920 - DNA, 510 bp, Homo sapiens
accaataattccagcactttgagaggctgaggtgggaggattgcttgagcttgggagtttgagactagcctgggcaacacagtgagaccctgtctctatttttaaaaaaagtaaaaaaagatctaaaaatttaactttttattttgaaataattagatatttccaggaagctgcaaagaaatgcctggtgggcctgttggcctgtgggtttcctgcaaggccktgggaaggccctgtcattggcagaaccccagatcgtgagggctttccttttaggctgctttctaagaggactcctccaagctcttggaggatggaagacgctcacccatggtgttcggcccctcagagcagggtggggcaggggagctggtgcctgtgcaggctgtggacatttgcatgactccctgtggtcagctaagagcaccactccttcctgaagcggggcctgaagtccctagtcagagcctctggttcaccttctgcaggcagggagaggggagtcaagtc

SEQ ID NO: 402921 - DNA, 575 bp, Homo sapiens
attcatcattctaggtgccattaagaacattggtgattcatgggaggaggtaaaaaaataaacattaacagsagtttgaaagaagctcattccagccctgatggacaactttgaaggggttcaagacttcagaggaggaagtagctacagatttgatggaaatagcaggagaactagaattacaagtggagcctgaagatgtgactgaattgctgcaatctcataaaacttggatggatgagaagttgcttcttatggacaagcaaacaaagtggcttcttgagatggaatctactcctggtgaagatgctgcgaacattgttgaaatgacaacaaaagatttagaatgttacataaacttactggtaaagcagcaataagcaactcagtcgatgaagggtttgggaggcttgattcctattttggaaaaagttctatggtgggtaaaattttatcaaacagcatcgaatgctagagtaaaatttttcatgaaaggaagagtcaattgacacggcaaacttattgtttgttttaaactaaataaaactgttgtcttattttaagaaattgcccta

SEQ ID NO: 402922 - DNA, 475 bp, Homo sapiens
aagcaggtgccagcaccatgcttccagtccagcttgctgaaccgtgagccaattaaacctctcttctttataaattaccmagcctgaggtttttcttaagagcaatgcaagaatggcctaatacactactcaaagcaatctgcagattgaaggcaacccctatcaatataccgacatctgctgggtagagtggctcatgcctgtaatcccagcacttggggaggccaaggcaggcggatcacctgaggtcaggagtttaagaccagcctgaccaacatggtgaaaccctgtctctactaaaaatacaaaaattagtgggacgaggtgccagtagtcccagatacttgggaggctgaggcaggagaactgcttgaacccaagagatggaggctgcagtaagccaagatcgtgctgctgcacttcatcctgggcaatagagtgagtcaatttgtaagaaaacacattattatctgtg

SEQ ID NO: 402923 - DNA, 475 bp, Homo sapiens
aagcaggtgccagcaccatgcttccagtccagcttgctgaaccgtgagccaattaaacctctcttctttataaattaccaagcctgaggtttttcttaagagcaatgcaagaatggcctaatacactactcaaagcaatctgcagattgaaggcaacccctatcaatataccgacatctgctgggtagagtggctcatgcctgtaatcccagcacttggggaggccaaggcaggcggatcacctgaggtcaggagttyaagaccagcctgaccaacatggtgaaaccctgtctctactaaaaatacaaaaattagtgggacgaggtgccagtagtcccagatacttgggaggctgaggcaggagaactgcttgaacccaagagatggaggctgcagtaagccaagatcgtgctgctgcacttcatcctgggcaatagagtgagtcaatttgtaagaaaacacattattatctgtg

SEQ ID NO: 402924 - DNA, 502 bp, Homo sapiens
aggaggcccatccccaaagagggtttgctgagcctctccacagccctgtaggaaggaggagtgaggaattaagggaggcaccagagttcaaaaggaggaggaggagaaagaaaaagatggactgagaaggagggggagagagaaagagaagagatggggagaaatagacagagaggaatgaagggagcgggggcaaagagaccagggaaaagcccaaacaagaagcaaaaggggggtaaaaagggccaaggtctccccacttcctcctccatctgtcctgtctctccctgggccttcatcttcaggggcagaacggaccagaacccctggtcctgaggggagggaggagctggggttgctccccgctcgaggctgcttccgccaccagcccccgccctggagctaatcagcggctgycatctccacagtgaggtcttggttaaggagatttagggccgggatcaataggaaatttaaaaatcgatgcagcgcgcagggcaaa

SEQ ID NO: 402925 - DNA, 572 bp, Homo sapiens
agggtgacatattgaaagtgctgtgacaaaaaaaaaaaaaatgcctgtcaaacaaattttacctggaaaagcttttcttcaaaaatgaagagacaggacaatagggcaactatagttaatatgaattcrttatatattttgaaaaagctagagagaggattatgaatgtttgaaacacaaagatgtgatgaatatttggggtgatggatattccatttatcttgattggataattacacattgcatgcatatataaaaaaaactcatgtgccccataaatatatgcagctattatatatcaataagcaatgacagagagataaagacttcttgattttacagaaaaagaaaagcttaggagtttattatcattatatctgctgaacaaaaaaatgctaaagggaatcattcaagcagaagcaaaaagatgttaattagtaacacaaaatcatatgaaaatataaaactcactggcaaagacaagaacataatcaaattcagaacactataattctataacggtggtgcataaatcacaacttcagcaaaatattaaagacaaaaacagtaaa

SEQ ID NO: 402926 - DNA, 572 bp, Homo sapiens
agggtgacatattgaaagtgctgtgacaaaaaaaaaaaaaatgcctgtcaaacaaattttacctggaaaagcttttcttcaaaaatgaagagacaggacaatagggcaactatagttaatatgaattcattatatattttgaaaaagctagagagaggattatgaatgtttgaaacacaaagatgtgatgaatatttggggtgatggatattccatttatcttgattggataattacacattgcatgcatatataaaaaaaactcatgtgccccataaatatatgcagctattatatatcaataagcaatgacagagagataaagacttcttgattttacagaaaaagaaaagcttaggagtttattatcattatatctgctgaacaaaaaaatgctaaagggaatcattcaagcagaarcaaaaagatgttaattagtaacacaaaatcatatgaaaatataaaactcactggcaaagacaagaacataatcaaattcagaacactataattctataacggtggtgcataaatcacaacttcagcaaaatattaaagacaaaaacagtaaa

SEQ ID NO: 402927 - DNA, 605 bp, Homo sapiens
ttttcttcaaaaatgaagagacaggacaatagggcaactatagttaatatgaattcattatatattttgaaaaagctagagagaggattatgaatgtttgaaacacaaagatgtgatgaatatttggggtgatggatattccatttatcttgattggataattacacattgcatgcatatataaaaaaaactcatgtgccccataaatatatgcagctattatatatcaataagcaatgacagagagataaagacttcttgattttacagaaaaagaaaagcttaggagtttattatcattatatctgctgaacaaaaaaatgctaaagggaatcattcaagcagaagcaaaaagatgttaattagtaacacaaaatcatatgaaaatataaaactcactggcaaagacaagaacataatcaaattcagaacactataattctataacggtggtgcataaatcacaacttcagcaaaatattaaagacaaaaayagtaaaataactacagctacaataatttgtaatgggacaaactatatataaaatgtaaattgtgtaaactaaaacaaaatatggaggctgaggtaagtaaaagtgtaggat

SEQ ID NO: 402928 - DNA, 555 bp, Homo sapiens
aggcatatacagaatataccatccaataccagcagaatacaygtgattcttaagtacacagagaacattccccaagataaatcgtgtttggtcacaaaataagttttaacaaattttaaaatattgaaattgcatgaagtgtattctctgaccacagaggtatgaaactagaaatcaataacaggtggaaagttggaaaattcaaaaacactagaaaattaaacaacatactctcaaccaattagtcaaagaagaaataatgagggaaataaaaaaacatattaaaacaaatgaaaatagaaacccaacataccaaaacctatgggttgaaaccaaagcagttctaataaggaattttatatcaattaatgcctactttaataaaaagggagaatcaccaataaacaatttactcttcaaagaactttaaaaaataagcccaaaatttgtaggtaggaggaaggaaataaagatcagagcaaaaataaatgaaatagagactaaaaaataataataggaaagatcaatgaaactaagagttgtttttcttgaaaa

SEQ ID NO: 402929 - DNA, 571 bp, Homo sapiens
taacattctcttatagttttttaaaaatttcttagagttcttaattcttaaaaaggtggcctcaaaccttccctatacatgacacaggaggaaaatcatacttacaattcagatcaacaaactacctttcagtagttagagatgttccccaaactcaaatttacgagtaagtgctggagcaggaacttgagctcctggtcaagttattttgtcccctacaaattgggtatcagtcaccttacacagagctagctgaatcaaggtttttttttttttttcttcaaagacaagaaatacatttaaaggcaacttttctgtctctstaacttccttgagctacatctttaggagaagcttttgctaaatcttgcctagcattttaaataaatgacttaactctattgaaagtgaagtgtaatttgtacacattttccatttagaaaatttctaacatgatacaaatgaatacttaaggaattaaacttagagaactaggagctttcagtctctgtgagtatttggaatcagaaaataaacaggaaaatttgtcacataatttaaactatcctaa

SEQ ID NO: 402930 - DNA, 591 bp, Homo sapiens
gtctctaattcttagaaaaaatattttgatacaaaagtaaaatatatagaatacaaatcatatgatcatacacatatatatgtatgatcatacatgaacatacatatgcatatacatatgtacttatttgtatatacatatgtacatatgtatatgcatgtgtatgtttgtgtgtgtatagccactgcatgcttctctctttggtttcttctgcagcacaggctgggccttaccatttgccatataaagcaaaaggacactatggaaaaagcaatgatatgaaagttcagtcccagtctttatttaacaatygaatggtagattggaaaagggctttagggttaatgttctgagtgaaaaagattcttgttgaaatccaggccatattagcaatgcaactttaaccttccacctctcaatttttccatctgtaaaatgataatatattaaacaagtctatgaataatatttgtataagaattaaatggtacaaaacaggaaaaaagcctttgaaaaatatgtgccacgcaatagacactcattaaaggtacgctattatcattgttattttaattatttttaaaagcataa

SEQ ID NO: 402931 - DNA, 569 bp, Homo sapiens
atccctgcatattcattttgtattaggccctgagaattacgtagctaaccctgtacccacccactccttccttttgggcagygaaagagccacacagtctggctacagccttctccaaaaagattcttatatgagtctaaatacttttttctcttcaccctttttttttttaatatccttaatctgtcttgaggtacaagagttgtggaattacttctaaaatgtattttggtttacaaacttcacatctattctatttgatctcttgttcaaatttccattttttacattctgttaaaaaatgtgaaagtattatttttttctgtctttaacacgtctcattttttagcttagctctacatctggggatgccgttgttatgtttttagttactgttggtgagctggaggttgaagccctgtcttgagaaggttatgttaaggaaaatcaatgtttgtcgttgatttctaattaaaattaacatagtaaccactcatgaagtcctaatgctgtgcattttcatattttaagtaacaataaaaatgctttaaagctgctgagctaaaatt

SEQ ID NO: 402932 - DNA, 621 bp, Homo sapiens
ctggaatgttggactttcagatttagatccttctcaagaaaagcagaaatttagaaaaaagacatagaagggcattaatgtaactattttattattctatttcttaaagtataaactgctgatggagtgaattagattttttcaaaaatcaagaaatatgaagttgaatataattctcattgattaatagctgtggttcagtaaactgttgtttcaaaatctacatatataaatattactacaaatatgtatcaaatacatatatatttatatctatctatatatctatatttaaatatgacttattacatttatcatatatacttatcaactatatatacttatttatatatttggtatatttatatcatatattatataacatatatttaatatcatatattatatatttaatataaagtatatatttatatatatttacatttaccaaatacatatgtataaaattaccaaatatatatatggtaaatatttgtagtaagtcatattttatatarattttatatacatattatatatatatatttatatgtgccatatccttcaggggatattttagtacctaactggtatgcttgatctcatacaatatatacatta

SEQ ID NO: 402933 - DNA, 476 bp, Homo sapiens
atttgtttaaaatattcaaaggcagcagggtgggcaagatggccaagtaagaacagctccagtctgcagctcccagcaaggtcaacgcagaaggtgggtgatttctgcatttccaattgaagtactaggctcatctcattgggactggttagacagtgggtgcagcccatggagggcgagccaaagcagagtgggaagttgccttacccaggaagcacaaggggttggggaaccccctcccctagccaagggaagccatgagggactgcctgaggaactgtgcactctggcctagatactacacttttcccacggtcttcacaaccacaacctacagaccaggagattcccttgggtgcctacaccaccagagccctgggtttcaagcagaaaactgggcagcctttagggcagacaccgagctagctgtaggagtttttttcataccccrgtggtgcctggaatggcaactagac

SEQ ID NO: 402934 - DNA, 610 bp, Homo sapiens
taattttactaatttggacttcgaattttagatctttaactttctttagaaaagatacacttttactctaaatagtagaaggtgaataacctaaatttacatatctagtttgcatctacaaagggtatctgttgtttttttcctgcccatcatttattaatccttttaatcagagcactctgatttttctttgaggaaccacaaatttctctctatgtatttctgcttgagataatgtcagctgctgaacccaggtatggctaattagattcatagtgaatacatcaaaaacattcaaatggtcaaattattataccaatgccatgctcagaaacttgttgcactttttaaggaaatggatactagattggtgcaaaagtaattgcggttttgccattactttcccaccaacctaatacatgtttacataatgttttctaagctgctaagattttataagactaacaatgttagtggwcatttctgtcacaacataggcagagcctgcctgagaacgaagccaaaccagaaaaagttggcccaagtaaatcctgtggcattacttgagcacctcaataaactttgcagggagccagtctatcattagact

SEQ ID NO: 402935 - DNA, 558 bp, Homo sapiens
tttacaatgttgtgcaacaattatctctctctacttccaaaacattttcatcattgcaaaaggacaccccatacataccaagctgtcactcaccactctcccctcccgccagccctggcaactaatctatttgttgtatctatctttttgcctactctgatatttttaagtctgtagttcagcgctagtattatattatattaatgttttcccttaattctattaatttaatatgggtatgacgtaacattacaggaagttgaatgaaaggtatatgggaacactgtattactttttaaactcttgtatkagtctgaaattatctcaaaatgaagattttttaaaatgaataaaataccatgtaaaatgtcggacagagcattggcctgggagttgagacacaatggtttgagtactacttccactactagttgcattatagttgtattgaagtcctttatgtaaataaatgataaaataagtaacaaaatgcttggtagtcaagcaaattaaactctctggacttcagttttttattaacaaatttgagggtctata

SEQ ID NO: 402936 - DNA, 558 bp, Homo sapiens
tttacaatgttgtgcaacaattatctctctctacttccaaaacattttcatcattgcaaaaggacaccccatacataccaagctgtcactcaccactctcccctcccgccagccctggcaactaatctatttgttgtatctatctttttgcctactctgatatttttaagtctgtagttcagcgctagtattatattatattaatgttttcccttaattctattaatttaatatgggtatgacgtaacattacaggaagttgaatgaaaggtatatgggaacactgtattactttttaaactcttgtattagtctgaaattatctcaaaatgaagattttttaaaatgaataaaataccatgtaaaatgtcggamagagcattggcctgggagttgagacacaatggtttgagtactacttccactactagttgcattatagttgtattgaagtcctttatgtaaataaatgataaaataagtaacaaaatgcttggtagtcaagcaaattaaactctctggacttcagttttttattaacaaatttgagggtctata

SEQ ID NO: 402937 - DNA, 558 bp, Homo sapiens
tttacaatgttgtgcaacaattatctctctctacttccaaaacattttcatcattgcaaaaggacaccccatacataccaagctgtcactcaccactctcccctcccgccagccctggcaactaatctatttgttgtatctatctttttgcctactctgatatttttaagtctgtagttcagcgctagtattatattatattaatgttttcccttaattctattaatttaatatgggtatgacgtaacattacaggaagttgaatgaaaggtatatgggaacactgtattactttttaaactcttgtattagtctgaaattatctcaaaatgaagattttttaaaatgaataaaataccatgtaaaatgtcggacagagcattggcctgggagttgagacacaatggtttgagtactacttccactactagttgcattatagttgtattgaagtcctttatgtaaataaatgataaaataagtaacaaratgcttggtagtcaagcaaattaaactctctggacttcagttttttattaacaaatttgagggtctata

SEQ ID NO: 402938 - DNA, 558 bp, Homo sapiens
tttacaatgttgtgcaacaattatctctctctacttccaaaacattttcatcattgcaaaaggacaccccatacataccaagctgtcactcaccactctcccctcccgccagccctggcaactaatctatttgttgtatctatctttttgcctactctgatatttttaagtctgtagttcagcgctagtattatattatattaatgttttcccttaattctattaatttaatatgggtatgacgtaacattacaggaagttgaatgaaaggtatatgggaacactgtattactttttaaactcttgtattagtctgaaattatctcaaaatgaagattttttaaaatgaataaaataccatgtaaaatgtcggacagagcattggcctgggagttgagacacaatggtttgagtactacttccactactagttgcattatagttgtattgaagtcctttatgtaaataaatgataaaataagtaacaaaatgcttgrtagtcaagcaaattaaactctctggacttcagttttttattaacaaatttgagggtctata

SEQ ID NO: 402939 - DNA, 620 bp, Homo sapiens
ttgtggtaaatgggagagcagaggcttggaccttaagagtctgagacagagcccttgctgtcaactattgcagagttctgctcacactgtgtggtgtttatggccccctaccctagactctttcacagtatttactgcacttcattgtagttttcagttggtgtgttttcacctctagatcatcagcttctcgagagaattaactccttcatactcaagtacaagatgtagcatacagagtatttaagaaaataaatagtgcatatgaacatttagcataaaacrtaatttgatgagaaagagttgaacagaaacatccagtagattgtctcatgggtgggagggtggctgtgatacttgctgtggggaataattgacaatactactcagaaagtaaccactaagaaatgctttcagagcaatcaaccttttatgtttctgtgtcttcattagattaaaaccttaagagagcagggaggttttcttatttaatttattttttagccttcattcctaatatagtacttggtacaaagtagtaatttaggtaatgcttgttggattcatctcaaattttaattagttctttctttttgccaaaaatggaatcagcctgttat

SEQ ID NO: 402940 - DNA, 590 bp, Homo sapiens
tgatagacttgtcttgtgggcttatttccagagttatgagcagattgcaggccacaattatactactagagtattctgggttttcctgtgttcttaagtttaccagtaggctttataccttcaaatattttcttttttcataatagtcccatatgatccttttttattttcaagggatacattgtaatgcctcctctttgcttcttttatttagaattttatttatttgagtcttctatgtttttttcttatttagcctaagtgttgacttattttgtttattaaataaactattaatttacttgtttttttaacaytttattctttattttatttacttctcctctagtatttataattcccttccttatcctcacttcaggcttcatttgtccttctttttctagttccgtgagctataaagttagattgcttatttgagatttttttttaaggaggcatttctcactacaacttttactcttcatattgcttttgctgaatcactaacatttgggtatgctatgtttccatttttatttgttaaactttagaagggaaaaaacacaatgggaaaaaatagtgtcgtc

SEQ ID NO: 402941 - DNA, 482 bp, Homo sapiens
gctcctgtcccaacttctttcttaattttctggtggagtttgtaaaggagtgctattatttcttcttaaggcagttgttaggattcaccagtggtgacaactgagactgggcttttttgtggtaagatgtttaattactaattcagtttatttacttgttataaatctattcagatttttccatgtcttaatgaatgagttttgataatttgtgtctttctgtgaatttgcccatttcatstaagttatcaaatttgttggcttaaagttgttattaatatgcccttatagtcctttacgtttctgcagagtcaatagtgatggccccatttttattcctaatttgatagttcatgttttgctgtttctctttgtcagtctagagtaagttttttctattttgtttatcttttcaaagaattaaattctcgtttcatcattttcctctgaaaagcaaataagtttatttgctgtttcattga

SEQ ID NO: 402942 - DNA, 589 bp, Homo sapiens
caaaaattattgatgatacggtttatttctggccagccttttctattccattggtctatatgtctgtctttatgccagtaccatactgtttagactactatagctttgtagtaagttttgaaatcagaaagtgtgagaaatccaagtttattatttttttcaagattgttttgactatttaggttcccttgagatttcacatgaattttaagatggatgtttctatttctggggaaaaaaaaagtcattgaaagtcgttgggattttgatagggattgcattgaatctatagatcacttgggtggtgtaccatcttaatattgtcccccagtccatgaasaatggatgccttttcatttatttgtaccttctttaatttctttcagcaatgtttgatagtttttggtgcacaagtcctttgtttccttgattaagtttatgtctacatattttatttttttgttgttgctattttaaattgaactgtctccttaggttttttttctcagattgttcattgttagtgtatagaaatacaactaacttgtgagttgattatgtatcctgcaactttaccgaatttattagt

SEQ ID NO: 402943 - DNA, 488 bp, Homo sapiens
gaccaacgtattagtcaaacttctattttaatactgtaaataaaatacacgattttaaaaattttcactatatatatttcttccatttatgtcatatgtaagttaaaagcttaraaaaatatttttaaaaataattcaccataaatatttgcatacatgctgactccattctccccacaaaagtgtcacaaaagccacaagtcatttctgttctttttaaaatcaagaatcttggcattatggaacaatatatatagttttattcattacagttcaatccagtagcagcctcaaggattttaaataatcccctaaaaatttcctggtcatgccagaagatgtggtcctaaaaagatgctaaggagcttaggcaatagaaggtgatcctcttcccaaattggggagaaatctgtatcatggcaaggaccatttaaacaattattaacccaggtttttaaaagttactcaaatgatatttttcacattat

SEQ ID NO: 402944 - DNA, 488 bp, Homo sapiens
gaccaacgtattagtcaaacttctattttaatactgtaaataaaatacacgattttaaaaattttcactatatatatttcttccatttatgtcatatgtaagttaaaagcttagaaaaatatttttaaaaataattcaccataaatatttgcatacatgctgactccattctccccacaaaagtgtcacaaaagccacaagtcatttctgttctttttaaaatcaagaatcttggcattatggaayaatatatatagttttattcattacagttcaatccagtagcagcctcaaggattttaaataatcccctaaaaatttcctggtcatgccagaagatgtggtcctaaaaagatgctaaggagcttaggcaatagaaggtgatcctcttcccaaattggggagaaatctgtatcatggcaaggaccatttaaacaattattaacccaggtttttaaaagttactcaaatgatatttttcacattat

SEQ ID NO: 402945 - DNA, 582 bp, Homo sapiens
gaaaaacacctaggaaagctccaccagagaatccttttccaccacaatgatactcctgctcattcctctcatcaaacaaaggcaattttgcaagtttagatgggaaatccatcttacagtcttgatttggctytgacttttttgtttcttaatattaaaatctgtaaaaggcatgcatttttcttcagtttataatgtaaaaaagacttaattgacatggttaaattcccaggacactcagttctttagggatgaactaaatggctggtatcatcacttacaaaggtgtcttgaacttgatggaacttatgttgagaaataaagtttatattttttatttgtatcttttaagtatgttttccatggactttttgaagtcttctcatgagtataaatccatgtaactaccatccagaccaagatacagaaagctcccttagtcaataatcctaccaaaggtaaccattactttagttctataattatagaagtgtgatcattttgtttctatgaactttatatcaatgtacatactttatacagaaggcactcttttgagtcttcttttgttcaatatcacat

SEQ ID NO: 402946 - DNA, 564 bp, Homo sapiens
cgagagtaaataaaaagtaggagacataaatcttgacattaagaagcttacataaagaaaataaatatataactataagtaactatactggttattggcaatgagtctcataagtgtagaggagggaggtagatagtgcggaaatccagagaagggagggataatcagagtctgcttcatgaagaaagtaagatttggtttgtgtgattattcctggacatgtgtccatgatgaaaagaatgtaataaacagagaaattgtggaaccaaaaatcagagctcgaaatacgaaataggagtcaaggaacagagagagtcatcccagcagggaaagcagactgagaaagatgacaatagaaaggctgagagtcagccttggggagtatttatatttggatgagctcaacctattttataaggctaacataatccttgatagcaaaacctgacaattgcagaaccagagaggagamtttcaagcacatctcactcatggatatagattcaaaaatcctaaacaaagtgttagaaaataagttgatttatttaaaaatgtatcataact

SEQ ID NO: 402947 - DNA, 573 bp, Homo sapiens
acttgttagctatataagtgggcaagatgcctaatctgcacattggtttggtttcctcatctgcataatgaagatagtaatatcagtcccgcttagagtgttctgttgataattgaatgagttactgtatctcatkgtacaatttaaaggttataaggtgataagtatgaatttattatgattactagtattaaagcttatgatctaatacagaagaaagaatatcttgcttaaaatgtatatgagctttttctgaggtgattttttttttaccagttatcaaaaaaatcactttggcctttgagttgttaggcccctggagttacttttcaattctttatttgttttccatgttcttcctttggaaagattttctgagtttcagaaactgttttccagatttgctaccacatactatccttggttttttgtccccaaagaccagccaaaatgtaggaatataattttctctgctttctttttgttagctgtctttccaaaatgagcataggttgtctattttttaagattttacaactaatcactaaaggggaaatagagtataataaatac

SEQ ID NO: 402948 - DNA, 644 bp, Homo sapiens
taaattcagtctagcttagaggtgaaagactccgcatttatcgtatctaagctgctgttcttgtgtcatttaacttgtgattggatatgtctattagagggggatttcaaactgtagtcattagtgctgttctttattgagacatctatttccacagctagactaaagaaaaatatatacaatccaactctaatgttccagctttatgagtctctggttgaaattgtaatttgcagttgagatacctgtcagcacattgatcctcggctagtgatagctaaaacaatagaaactctgttgmaaagaacacctatatctttaataatttacagaacagcattaaataaaggagtacatggaaaaaacacttccagctttattctctataaactttcacatctgtggcacaaacatttatgaaaactctgcttgttaaaccctcttgattgtactattgaaagtattattaaagatgtgtgtttaaatttgcagcgtcacactcgcagaatggaaaaagatattgtaggacaaatatctcagttaacataggtataaaatcaggaaaaaccgtgttatattatctctatatatttatatataaaaataaaccttgttatattatttatatgtattttatatcttta

SEQ ID NO: 402949 - DNA, 580 bp, Homo sapiens
gaataaagttgatcaagagaccaaataattgatttgcgccccgaccagaatgcacagccgtaataaagaagattggacagaactactgatctatatggaccttcagatttgattgaaaatctgccacattggcatcatcttccatcttattactaaaaaacatactgacattgttgactttattttctgctttamtaatcattgaataatagatgttatactacatagaaaacaaaattatttgacagatttcagcagtgaaatttttgggaaacctttatattgagttctgttgatatgtggtagtacctatctgcttgtagtatctgaagatttaataaggtctttaacagatacattctggtgagcttgatgtttacaaataccagttttatctggaatgcaacaaagatcttttccattgcattgatcttcagccgaagcattcagtgaaacaacaaaagcacattcaaagattttcccaaagctcacctaaatctttaggaagggctctgactgaatattgaatttctaaaaatactaatttcatattccttgcaaatagtgtcttaacttattg

SEQ ID NO: 402950 - DNA, 606 bp, Homo sapiens
tctggtgagcttgatgtttacaaataccagttttatctggaatgcaacaaagatcttttccattgcattgatcttcagccgaagcattcagtgaaacaacaaaagcacattcaaagattttcccaaagctcacctaaatctttaggaagggctctgactgaatattgaatttctaaaaatactaatttcatattccttgcaaatagtgtcttaacttattgtttacattaatacttaggctggagtttgtccattgatgaagatgctatgatgttagtatttcagttccttgaagtcatctttatttttcaagagctttccttttagcagtctaaayggttagaacatgccatccagctgggtacattgatccataaaaagcaaggtgtttacttagcagtgtaaagtatactaaaactagtaataactttaattcagaattttcagaatttagagtccctgaacaataatcctctctcaaaaagtaacatgttatcttaattattgtttacagatgaattgtatggcttaggatacgacttaaaacacattatcaagaaaggaaagcaaacttgggcagataaactttccttatgtttcttcaga

SEQ ID NO: 402951 - DNA, 484 bp, Homo sapiens
ttagaaggtatgaattagaaggtgttaataccaggaagcagagattattgagggtcaccttagagtctgcctgccacatggagggtcaaaactgggctttcatgcatggttatatagtggggacaccaggagactaaacattgctcagctcccccattcacatgccctgaggcattactgtggcagccctggacaaggaatggcctcttgcaaagtatctgtttmattttatatgaaaacaccacatgtagtaaaagtagccctgagtccaaaatgtacatacttagggagaacagcagctccctaagtaggaagggtttggagctggaaagttcacattccaggtaaaggcactcaatttctttctccctatctgtccacaaatttgtgaccttgtcagatataacatcttctaaataaaccagttgtttgggacaaatgcagctcaggcctcccagtgggacccctggtttttaactcgcag

SEQ ID NO: 402952 - DNA, 657 bp, Homo sapiens
tttgatcatgagattgcagcaattcagtcacatcttcaggctccacttctaattctatttttcttgttatttctaccatatctgcattcgcttcctcattaaagtcttgaactccccaaagtcattcatgagggytggaatcaacttcttctaaattcctgttaatgttgatattttgacctcctcccatgaatcacaaatgttcttaatggcatctggaatgctgaattccttccagaacgttttcaatttactttgccaaggcccatcagggaaatcactatctatggcagctatagccttatgaaatatatttcccaaataataagacttgaaagtcaaaattattccttgatccataggctacagaatggatattgtggcagcaggcatgaaaacaacattaatcttatgtacatctctatcagagctcttgggtgtctaggtacattgtcaatgagcagtaatattttaaagggaatctttttttctgggcagtaggtctcaagagttggcttaaaagattcagcaaaccatgcagtaaacagatgtgctgtcatccaggatttgttgccccatttaaagagcataggcagagtagatttagcataattcttaagggctttaggattttcagaatgctaaatgagcattggt

SEQ ID NO: 402953 - DNA, 529 bp, Homo sapiens
ggtttattcacaggatccctgggcaggaacccctagccaagtttccagcagtgcaagaatatcccctttggacttcccccattcaggaagggcagcactccaatcctttactgaagctgagccgaacccggacttatggtgccacctagagccaaacaggaggcagcaacctagcagtaaagaaccactaagcaaatatatccaggaaaaaacaaaacaagccatgtagagagggctggaataaataactaatacttcagtgcacagacacagacctacatcacagaacacaacagcaaacaaagaatcatgatctcccaaagaaacaaagcaaggaaacagtgactcatactaacaagatggcaatatatgagctctctgatcaagaattcaaaactttagttttaaagaaaatcagtgatttccaagacaacacaaagccaactcaggaatttatcataaaaatttaatgagattaaaataatttttaaaaaycaaacaaaaatataggaactgagaaatgtacatg

SEQ ID NO: 402954 - DNA, 583 bp, Homo sapiens
ctacaaggactgagattcactgtccagtttgacagagggtattgtttccccttgatcctttccaattccaataggattcctaaaattctgtgatttggactgtagcaactaacgtcatagtgaaatacatggtcttaaaaaaaaaaacaaaacccaactggctaactcttaaactaaactgaatttcttttcaggctaaaatcaatcaataaatatttgagtgccaaaaatatcactcataaaaatcattcttattatttgtattaaaatgataggtatgctaatgcttcacatatactatgtatttatattatatgactagatctcatatacaaaaattattttttcttgtgttttctacctaaagctcttcccaagtgtgatgtaaacttgtaataaataaagatatatttaactcctatattttctcttcttctcttctattgtaaaaagctttctgttttctccctgtgtgctacgagargcaatctgcttagagataaaaataatgactttgggattccagtcatgctgtgttcactaggcttgcatttggaatcaaaggcagagggttgtgccatta

SEQ ID NO: 402955 - DNA, 622 bp, Homo sapiens
gtaagtgtatgccctttagtactaatgttgtagtttacattttatttacttaacctgaataatatatctcaaatttttaaatgctttatgcttgcaatctctcttgcatcctattaacctggacaatatacaagaaaatttctcaagatagatacttaggtcgaaggagctctgaacttgaaaatccctaaaaaaatttagaaaagggaagtgactcctgaggtatggacaatgtccaccggcagaaaattgtggccaaaatcactatgatytggagtcaagaaataagaattctaacaccagctccgtcactacaggtagcacatccatgctgaattgatcaacctctctagaggtgtctaccctcctcccccagaaatgactgctaaaaaggtaatgaatacacctgtaatcctagcactttgggggaccaaggcaggggatcttttgatcctaggaattcaagaccagcctgggcaacatggcaaaaccccatctctacaaaaaatacctgggcgtggtggcacactcctatagtcctagctacttgggaggctgatgtaggaggatcacctgagcctatgaggttgagactgcagtgaaccatcagtgaaccatgatt

SEQ ID NO: 402956 - DNA, 581 bp, Homo sapiens
atgattgcctcactgtactccagcctcagtgacatagtaagaccttctctcaaaaaaaataaaataaaataaagaaaaataaaagaaagaaaggtaaggaacttaaatacaacatggaaagagcagagcattgataactacccagtggttactggggggactcttggcagcaaagagaacagagattcccttaggatgcatgcccacaaccaccatggtccaamcagggatccttctcatgatggcaagcttcattttgagcgtagttaatgtgctgatttttacagagagttgggcttgtaagcatctcgaaactatgtagcaacatgaagccagaatgcaaaggaccctcaaggactccagaaaccggcaccagcatctgactactgaggttggaccaacatttcagttgggaagggagttggagagtctcagtctgcagtagagagaggagctaattcatgtgcgtgacttttcacagcacactcatgagaaaacacttcctggaacctggccaaatcaaaattgctcacccacctcaaaaacaatgaagaagagggtaggctgagggactgggaaaa

SEQ ID NO: 402957 - DNA, 546 bp, Homo sapiens
tttctgtggtttcttcagtgattgcactaggtacatcctctccttactgagtttagtctaactaacaaagcagggattttgctactagactgtcttgtgtaatcaatctatatggckttgtctttccaacacccctttcttcctttggaaaagtatcccttcccactttcatttggttctggtaagactacaaattataaaaagacactttgccttacagcagagcatagggaatagaaagatggctgaggggtggtgctcatgagccagactgagcccaacagaatccttccccagaattttccaaagggagttgtctctctgcacttggattataaatcgtatgttactttcaaggttccaggggacatgtcaccagttatatgtttgaccctgagagaatgaagtcaactcacagctaaagaaatagaaaaaactctacttttgtggtcctcgcagctaatggaaaaagacagaaaatgaaataaataagcaagttttacagtgtactaactgctattgttattgcctcccaagacaatttcc

SEQ ID NO: 402958 - DNA, 554 bp, Homo sapiens
gctgaatgagtaaatgaatgaataactgagattatagtatgtttttgtgtttttcatttttcactttctaaaatgttaagccaaagtttattttttaaaaaaatttcaaagtgtcttttttttattattgtaaaaatacttaacataagatccatcctctgcacttaagtacagtatcaagcacaggcacagtgttgcacagcaggtctttggaacttactcatctaataggactgaaactattcctgttgaacaggaactccccacttcccctctctctagcccctggcaaacaccattccattccctgctcctctaagtttgattatttcatatacatcgtataagtggaagcattcagtatttgtccttttgtgactggcttatctcacttaggataatgttctctasattcatctatgttgtctcatatgacaggatttccttctttttaaggctgaataatatttcattaaatgcatatactgccttttctttatccattcatccactgatgaacatggaggctgtttctgtgttcaatataattgaaa

SEQ ID NO: 402959 - DNA, 591 bp, Homo sapiens
ataatccttgcctgcaaggggatctcaatctagttgaaatcttaaacaaatgatcagttacttattaattttsaagggcattatactggagatgagctatgaaaacagagattaaggggagacagactctgcaaatatgaaggcttgaaagtagaggtgcactgaaggatcaatgggcgttttccaaacaggcaaaggcagtcaataaaagtccaggcaggagaaaaatggcatgctaagacacaaaggcaagaaagaaattatctgtatgggttgcagtgggtggtttgatgtggctaaagcactggtgaagggatagaatttggaagcagccctctcttgtccaggccactattatctcacttgtttattgcagcaacctacttactcctcttcttgtctccaggattgctcctcatcaagttcatatttcacacagaaacaaagatccattcttgggataaatctggccatatcagtttcctacttaaaagataggccatatcactaacctatttctttcctacttaaaactttttcatggctcttatttgcctgcaaataaagttcagactccttatcctggtgtat

SEQ ID NO: 402960 - DNA, 589 bp, Homo sapiens
aattgtttttaaataacttaatcacatccctcagcaaagctctaaaatatttataggaatacaaaatgtgataacataataccactcacaatgaaattcaataaaaaattaccaggaatgcaaagaagaggaaaaatataacccataataaaaggaaaaaaacattgaaaactaacaccaaaattacagggaatagaatgatgaattaattaaaacagtttgaaattttattccrtatattcaaggagccaaaggaaagattgaacatatgaaattgaaaaatggaagatagaataaaaaaacacaaatttctagaaataaaaactataatatctgagattgaaaatatactgaatgggattaatagtaaattaatcattgcagaataaaaaattggtgaaattaaagtcatagcaatataaacaaagtgaaacacaaaaaattttttaaaatgaacagagctatggagcaatttcaagcaacctaataatatatgtgtaagtggaattctggaataacaggaagggagtgagagagaaaaaaatcagaaaaatatccaagcctaaccaaagcaaaccaaaccaaacca

SEQ ID NO: 402961 - DNA, 508 bp, Homo sapiens
cttgtcttggtccggatcttagagaaaaggctttcaaattttccaagttcagtattatgtcagctgtggatttgtcatagatggccttaattatttttaggtgtgttccttctatatccagtttgttgagggtttttatgataaaaggatgttgaattttattaaatgcttttttcattatctgtggaaatactaatttagtttctactcttgattctgtcagtatgaagtatcacatttattgatttgcatatgttgaaccatccttgtatccataggatgaattctacttgattattgtgaatgatcttttttaatgggttgttgagtttgagtttggtttgatagtattttgttgagaatttttrcatctatattcatctgcaatattgctgtatatgttttttttttttttttttgtcattttctgcttttgatatcaggaaaatgctggcctcatagaatgtgtttggaagtatttcttcctcttcaatgtttttgagtctga

SEQ ID NO: 402962 - DNA, 578 bp, Homo sapiens
aatgtttttttctaccctttcactttcagtctatatgtatctttgtaggtgaagtgggattcctgtaggcaatatatagttggctcttgtctctttagccactctgtctcttaattagagaattgactccatttatattttgtgttattattgataagtaaatacttactactgacattttgattcttgttttctggttgttttgaaactccccctttcttactgtcttcctttgtgattaagtgattttctctgggaatatattttaatctatcwctttttatttttagtaaatccatgatacgtttttccattgtggttatcatgaatctttcaaaaaatatcatataaatataactagatattttaaagagatgacaacttagatcacaaagaaaagaatagaaacaatgagaaaataaaaaattggtattttaactccatccccctacatttttactttttgttgtcttgatttacatatttttatattgcctatcacttaacatgttgctggaggtatattgtttttggtagatttgtctgtctggcttcataccagagttatgaatggattg

SEQ ID NO: 402963 - DNA, 578 bp, Homo sapiens
aatgtttttttctaccctttcactttcagtctatatgtatctttgtaggtgaagtgggattcctgtaggcaatatatagttggctcttgtctctttagccactctgtctcttaattagagaattgactccatttatattttgtgttattattgataagtaaatacttactactgacattttgattcttgttttctggttgttttgaaactccccctttcttactgtcttcctttgtgattaagtgattttctctgggaatatattttaatctatcactttttatttttagtaaatccatgatacgtttttccatygtggttatcatgaatctttcaaaaaatatcatataaatataactagatattttaaagagatgacaacttagatcacaaagaaaagaatagaaacaatgagaaaataaaaaattggtattttaactccatccccctacatttttactttttgttgtcttgatttacatatttttatattgcctatcacttaacatgttgctggaggtatattgtttttggtagatttgtctgtctggcttcataccagagttatgaatggattg

SEQ ID NO: 402964 - DNA, 578 bp, Homo sapiens
aatgtttttttctaccctttcactttcagtctatatgtatctttgtaggtgaagtgggattcctgtaggcaatatatagttggctcttgtctctttagccactctgtctcttaattagagaattgactccatttatattttgtgttattattgataagtaaatacttactactgacattttgattcttgttttctggttgttttgaaactccccctttcttactgtcttcctttgtgattaagtgattttctctgggaatatattttaatctatcactttttatttttagtaaatccatgatacgtttttccattgtggttatcatgaatctttcaaaaaatatcatataaatataactagatattttaaagagatgacaacttagatcacaaagaaaagaatagaaacaatgagaaaataaaaaattgrtattttaactccatccccctacatttttactttttgttgtcttgatttacatatttttatattgcctatcacttaacatgttgctggaggtatattgtttttggtagatttgtctgtctggcttcataccagagttatgaatggattg

SEQ ID NO: 402965 - DNA, 612 bp, Homo sapiens
ggataattccaaacaaatattatattttgaaaatataatttttttagggttcataaaatataaaatttaaagaattaagtttatagcaaaaagtgagaaagaaggtagatttcaatggagttaagtattctaatgaaatttccaagctgtcacaagaataaacataaaatctaaatagttttattactattagtgatataaattcataaataaaagctttcccaccaagaaaacttcaggctcawgtggctcctccagcaaattctaccagataagtattgaaggaatcttccacaaaattctctagaaaaaaggagaaacagcattctctacacagtttcataaatccagcaaaacctggatagcaaaatcagacaagggtattactaaaaagaaatattgaaggccagcttcctcaaggacttccatttctaaaatatgcaatttggacatgatatatttccctttttcatatattacagagttcacggtattcatatttagtttagaattttgcataggcatctactacaaagattttccatttgagattgggaacaagagaatacctactctcattgctttttcttaatcctgagaggtctagctagt

SEQ ID NO: 402966 - DNA, 612 bp, Homo sapiens
ggataattccaaacaaatattatattttgaaaatataatttttttagggttcataaaatataaaatttaaagaattaagtttatagcaaaaagtgagaaagaaggtagatttcaatggagttaagtattctaatgaaatttccaagctgtcacaagaataaacataaaatctaaatagttttattactattagtgatataaattcataaataaaagctttcccaccaagaaaacttcaggctcaagtggctcctccagcaaattctaccagataagtattgaaggaatcttccacaaaattctctagaaaaaaggagaaacagcattctctacacagtttcataaatccagcaaaacctggatagcaaaatcagacaagggtattactaaaaagaaatattgaaggccagcttcctcaaggacttccatttctaaaatatgcaatttggacatgatatatttccctttttcatatattacagagttcacrgtattcatatttagtttagaattttgcataggcatctactacaaagattttccatttgagattgggaacaagagaatacctactctcattgctttttcttaatcctgagaggtctagctagt

SEQ ID NO: 402967 - DNA, 612 bp, Homo sapiens
ggataattccaaacaaatattatattttgaaaatataatttttttagggttcataaaatataaaatttaaagaattaagtttatagcaaaaagtgagaaagaaggtagatttcaatggagttaagtattctaatgaaatttccaagctgtcacaagaataaacataaaatctaaatagttttattactattagtgatataaattcataaataaaagctttcccaccaagaaaacttcaggctcaagtggctcctccagcaaattctaccagataagtattgaaggaatcttccacaaaattctctagaaaaaaggagaaacagcattctctacacagtttcataaatccagcaaaacctggatagcaaaatcagacaagggtattactaaaaagaaatattgaaggccagcttcctcaaggacttccatttctaaaatatgcaatttggacatgatatatttccctttttcatatattacagagttcacggtattcatatttagtttagaattttgcatwggcatctactacaaagattttccatttgagattgggaacaagagaatacctactctcattgctttttcttaatcctgagaggtctagctagt

SEQ ID NO: 402968 - DNA, 569 bp, Homo sapiens
catgactgtggcgaatacatctcccgttacatgcatattattgcatggattctacactagggtttctcgaccttggcattgttcacattttgactttgttgtttggagctgttttgtgctttgtggtagcttctgctccccatttgtgacaagcaaaactgtttctggatgttgccaaatgtcccatggaaggcaaaattgttccaggtgagaaccactgttctataccataacctcgttggatagttatgactcccatggcacagaagaagagactgaaatgcaggtattcagaaggttgcccaaggtcccagaactagtgaatagcagacattgtctaaagcacgtatttctttaccattctgcctcttgttttgagrcttcaaagtctatctcagaatctttaagactgtaggaacttcataaacatttgttaaattaatcaaaaattagtgaacacaataaccctccacattaattctctagcctctagctctccatcaaagtaaataagcagaaagttaaggcttagtaacaggacccactgagattgaaagcagtcatatgca

SEQ ID NO: 402969 - DNA, 599 bp, Homo sapiens
tttaccatttttatgtcttcttttgagaaatgaccattaaagtctcttgcccactttttgatcagattattagattatttttcctatagagttgtttgagctccttatatattctagttattaatcccctgtcagagggatagtttgcaaatattttctcccattctatgggttgtctcttcacttcgttgactgtatcctttgctgtgcagattctttttaacttgatgtgatccaatttgtccgtttttgttttggttgcctgtgcgtgtgggtattactcaagaaatttttgcccaatccagtgtcctggagagttttccccaatgttttctttcagtagttccatagtttgaggtcttargtttgagtctttaatccattttgatttgatttttatatatagcaagaaagaggtctagtttcattcttttgcatatgaatatctagttttcccagcagcatttattgaagagactgtcctttccccaatgtatgctcttgacacctttgtcaaaataagttcactgtagatgtatggatttatcgctgggttgtctattctgtttcactgatctatgtgtctgcttttatgccac

SEQ ID NO: 402970 - DNA, 519 bp, Homo sapiens
caacaaatctgggctcaaattctagttctacctcttatttactagatgtgaaatttgggcacgttttctagcctctgagactaagtgcgatcacctgaggggtggggacgacagttgctgagagtggaatgagatgctgcttgcaacacgtctggcgcagggttgcccctctggctctgggcagtggccttttctcctgcccttctcgacactgagtagccccagacatcacggtgattcaggttcagggcaggttgggsaaagtatcaggagacagtgcctcggagtggtttggttttcttctgttctgtttctcattttgaaacttccatggaaagatttcatgatatgctggaaaatgtttacatttttgttgttttaaaattttatttaagatatgctttcaaattccctttttaaaccacaaggaaaggtggttgatatggtaactaagctttaagaagaaacatgcatttattaggaaaaaaaagcaacttttattccagtaaatgtaccatc

SEQ ID NO: 402971 - DNA, 514 bp, Homo sapiens
aaggtgcctgtccatagtatttttttcactatttatcaaactattttaacaagaattcactaaaacctgggctttactcaagcagcactaataaatgtcattaattatagaaaagcctaactccaaatttcacccttcattacctcacctcaaagtactaactattccagttgggaaaatctgactccaacatacacaatacagaaaataacacagaaatgaagtgtcccatcaagccactgccatgccaaatgacccagggactgagaagggaaaaggaagttgagcacaaatgtgtgtgatgccttctcctgacttttctagtttagatatcttctcctgtgcttagtcagttcagacactgggaatccttcttctgtcactcccagtttctctaggtatgttgtgaaatttctcaccatgcattcattttwaaaaaaaaaaaaaaaaaaaaaaaaaggaaatccctttaacaagtgaatttagaggccctacagttttcatctgttacaag

SEQ ID NO: 402972 - DNA, 613 bp, Homo sapiens
atggcctgcagacttcttcactcactggcctgggctccctgtcttctgtacccttaacgaggccctcaaagtccagaaagaaggcggtcaggctgcagtactgatgtacagtcagtgctcctggttttgcagggctatgattacaacacaaaatctcagggaaaaaaaaaatggcaagagaactctgcagtgtgtttcttagcagctaattggttccttgcgcttaggatcggcttccagatttatgctatggagccattccccccataacacggaggaaggtagatttgttcagtgtgggggcgtaggtgggagaatgactaagggaaaaattaaattgctgtgtgacacagaatataaccgctcttatatttcaagcagtcaagtgtcgaagttgaaaaaggcttaatacacatactagtttggcatgtggaatacaatgaacattgatattattaatacgggacagagcgtattggctgagctgaagaaaggcctctaatattttgagggcaaagtgrggctctactgcctttcctgcttgtgttaaagagcctccctggaaactgggccagtggactactgagattgagaaataggggccgattcaggt

SEQ ID NO: 402973 - DNA, 596 bp, Homo sapiens
gcttttgccctcaaatgccactcctcactggaagaactgatatgagaccaaggagatcaagattctacttctggttttgctactcactacttgccatcaggtgacctgmaggaaggtagtaagcttttaaaacctcagtttccttgtctacaaaaataggtattagaagtgttggaatataatgtttaaatctctcatgttgacatatccatgtattaaaagccaattcgtttctgactatcttttcaagaatgtttacataagctaatgtcaggcctctgagccggaactaagccattgtaacccctgtgacctgcatgtatacatccagatggcctgcaggaaccaagaagtctggagcagccgtgaaaccacaaaaatagtgaaacagtcagtttctgtcttaactgattaaccaaccttacgacattctaccattatgacttgttcctgccctaccctaactgatcaattgatcttatgacattcttctcctggacaatggatctcgtgatctccccaccatgtaccttgtgaccccctcccctgctgacaacagataatcactttcaactgtaactttccactgcctaccc

SEQ ID NO: 402974 - DNA, 596 bp, Homo sapiens
gcttttgccctcaaatgccactcctcactggaagaactgatatgagaccaaggagatcaagattctacttctggttttgctactcactacttgccatcaggtgacctgcaggaaggtagtaagcttttaaaacctcagtttccttgtctacaaaaataggtattagaagtgttggaatataatgtttaaatctctcatgttgacatatccatgtattaaaagccaattygtttctgactatcttttcaagaatgtttacataagctaatgtcaggcctctgagccggaactaagccattgtaacccctgtgacctgcatgtatacatccagatggcctgcaggaaccaagaagtctggagcagccgtgaaaccacaaaaatagtgaaacagtcagtttctgtcttaactgattaaccaaccttacgacattctaccattatgacttgttcctgccctaccctaactgatcaattgatcttatgacattcttctcctggacaatggatctcgtgatctccccaccatgtaccttgtgaccccctcccctgctgacaacagataatcactttcaactgtaactttccactgcctaccc

SEQ ID NO: 402975 - DNA, 463 bp, Homo sapiens
cctctaccagatcagtgtggagggaaaatatggagttggagcccgcacatagagtcccactggggcactgcctagtggagctgtgagaagagggctactgtcctccagacccccaaatggtagatccactgacagtttgacagtgtgcctagaaaasgcacaggcactcaatgccagcctgtgaaagcagccatgggggctgtactctgtagatccacaggggcaaagctacccaaggccttgggagcccaccctttgcatcagcatgccctggatgtgagacatggagtcaaaggtgattattttggagctttgaaattgaatgactgagctgctgagctctggacttgcatgaggtctgtggtccctttgttttggccaatttctccattttagaacaggagcatttacctaatgcatgtaaccccattgtatcttggaggtaactaacttgttttttatt

SEQ ID NO: 402976 - DNA, 463 bp, Homo sapiens
cctctaccagatcagtgtggagggaaaatatggagttggagcccgcacatagagtcccactggggcactgcctagtggagctgtgagaagagggctactgtcctccagacccccaaatggtagatccactgacagtttgacagtgtgcctagaaaacscacaggcactcaatgccagcctgtgaaagcagccatgggggctgtactctgtagatccacaggggcaaagctacccaaggccttgggagcccaccctttgcatcagcatgccctggatgtgagacatggagtcaaaggtgattattttggagctttgaaattgaatgactgagctgctgagctctggacttgcatgaggtctgtggtccctttgttttggccaatttctccattttagaacaggagcatttacctaatgcatgtaaccccattgtatcttggaggtaactaacttgttttttatt

SEQ ID NO: 402977 - DNA, 590 bp, Homo sapiens
taatatatatatatgaatgatagtatatacaaaagctgaaaagtgatttttctcactgtaactactgtaatgttgcacagcaatcttgcctagcagatggaccactgtgtaatggctcgctactaagccctgtttgataatttattgactcttccctgttgtctcagaagatgcctcatgtattcagatatggctaagtctmcaatctcagagtctgaggttatcttctttccagttgtcccagcaaagcagacagtggatcacatgcacaatgtttgttctgttcccaggcctattctcaactccctgtccataaggtgggccagattgtaacatcttccttccttgtcatctgtgaataacactagaaagcagaaacaacacgtgtgcttttttaggttcctgctggaaagaagtcatgtgctgactggaccaagggtgagaaggcccatggattttacctacatggaaagggtcagaaaattttaaatgaatgtattagctatctattgctacattttataattcctcaaaacgtagcagcttaaaacacacacatttgttgtctcatgattgtttcaggtcaggca

SEQ ID NO: 402978 - DNA, 590 bp, Homo sapiens
taatatatatatatgaatgatagtatatacaaaagctgaaaagtgatttttctcactgtaactactgtaatgttgcacagcaatcttgcctagcagatggaccactgtgtaatggctcgctactaagccctgtttgataatttattgactcttccctgttgtctcagaagatgcctcatgtattcagatatggctaagtctacaatctcagagtctgaggttatcttctttccagttgtcccagcaaagcagacagtggatcacatgcacaatgtttgttctgttcccaggcctattctcaactccctgtccataaggtgggccagattgtaacatcttccttccttgtcatctgtgaataacactagaaagcagaaacaacacgtgtgcttttttaggttcctgctggaaagaagtcatgtgctgactggaccaagggtgagaaggcccatggattttacctayatggaaagggtcagaaaattttaaatgaatgtattagctatctattgctacattttataattcctcaaaacgtagcagcttaaaacacacacatttgttgtctcatgattgtttcaggtcaggca

SEQ ID NO: 402979 - DNA, 554 bp, Homo sapiens
tgctgttattcatattgggacttctttgtataaatatttttttctctttctgctttcaaatttttttctttgtctctgtccttcaacatttttactatattgtgaatgcctttgtgtttrtcctacttggacattgttgattcttggttgtgttgatttttttaaaatcaaatatagaaagtttttgtgttttttttttaatgttgttgttctgttcccttcttttcttcttattattttgctactctcattatgtgtatgttggcatacttactgatgtcccacatttatctcaagctctgtttatttttccatagcttttgttccctgcattattccgattatataatatgacttcaagtttatcatttcttccttctgttagttaaaatgtactatgaaacccctcaaataaaattttcattttggttatttttcttttcaaaccaagaattcctatttagttcattttagtaatttctatcttctcatttgcatacttctgttgatggggcattcattccctttatagcttcatttacttctttttaatt

SEQ ID NO: 402980 - DNA, 593 bp, Homo sapiens
tttccttcttggcctttctccaagagcctccatgttgcacgatttcattgagtgacattcatatcaaaatttattttaatactgtcccctggagttgttagtgcacagtctttgtggttggaatatagctgccctgaccatcatctctctcattatcttcaacctctggcttagattttactgcattagaaatgtaaagagctaagtagctaagttagctaacmctaatgtactgcttttttgcttctaaatttttgttgatatcatttgtctactctagcttcctgcctagtctctttatccttatggatttctaccttgtatttttattaaaattttattgggatttaggcaaagtgcataagtgaagaatatgttcagttgttacatttaacacacagttggcattttttgacctgatgtatgccaggcgtggtgttggagctttgcatttgtctttgttcatctcatgatgttgaacatagagataccttctcaaagctgttattgcctcctatgtctgagtctaatatggggatttatgtgtcccatgagggggaaaaatgacttttcacttttaaagtagatttagt

SEQ ID NO: 402981 - DNA, 620 bp, Homo sapiens
gggtaatttataaagaaaaaggttgaattggctcacagttctgcaggctgtacaggaagaatggctgaggrggcctcaggaaacttacaatcgtggtggaagccaaaaagaaaggaggcacgtcttacatggccagagcaggaggaagagagagtgaaggggcaagttctacacactttcaaacaatcagatctcatgagaactcacttattatcatgagaacagcaagagaaaaacctgcccccaagtccaatcacctccctccaggtttctaccccaacattggggattacaattcaacatgagatttgggtgggaacacagagccaaatcatatcaaggtcataaaaagataccttaaaaacagaacaaagtggatctgtgtcaggggaatcttcacgaattggattagatttgatttgtgaaatgatatcttctctctttttatttatttatttatttttgaggcggagtctcaactgttgccaggttggagtgcagtggcactatcctctgcctcctgggttcaagcgattctcctgcctcaacctcccgagtagctgggactacaggcacacaccaccacgcccagctaacttttttgtgtttttagtagagat

SEQ ID NO: 402982 - DNA, 623 bp, Homo sapiens
ttgaaataaggcaatccttgagaaaaattaggtcaggttatgttttcctttttgccaccactcagagttctgatgtaaaatattgatgaactatagaagtggaaggcttgttatttgctgtttctattgagccacacactagtgctacacagagagtgtaatstaatagaccctataaaggaagcacgtcctctttttctacataggtaggttatcttacaataatagaatgcaaccagaaaaagatggaacatgataatgtcctactacatcaaggaagtttgatgactctagaattgataatggaatacataaatctcttcacctctaggtcttttgcttgatgacattgtgagcttacaaaatttgaaaaatatgcagttaccatgggaatgttgttgtggtttatagtttaaggaaaatgagttgctagaatgagcataagtctataacaaacactggcaagttctaaaggtcacatggatatttgaaccaatgtatttgtacaatttaagagaaaaactgcctgtttagctttagttttctcatatttatgggaagtgaaccagaggatacttttggcttcagttatatgtaattccagttagtgcaatcaggtttaa

SEQ ID NO: 402983 - DNA, 623 bp, Homo sapiens
ttgaaataaggcaatccttgagaaaaattaggtcaggttatgttttcctttttgccaccactcagagttctgatgtaaaatattgatgaactatagaagtggaaggcttgttatttgctgtttctattgagccacacactagtgctacacagagagtgtaatctaatagaccctataaaggaagcacgtcctctttttctacataggtaggttatcttacaataatagaatgcaaccagaaaaagatggaacatgataatgtcctactacatcaaggaagtttgatgactctagaattgataatggaatacataaatctcttcacctctaggtcttttgcttgatgacattgtgagcttacaaaatttgaaaaataygcagttaccatgggaatgttgttgtggtttatagtttaaggaaaatgagttgctagaatgagcataagtctataacaaacactggcaagttctaaaggtcacatggatatttgaaccaatgtatttgtacaatttaagagaaaaactgcctgtttagctttagttttctcatatttatgggaagtgaaccagaggatacttttggcttcagttatatgtaattccagttagtgcaatcaggtttaa

SEQ ID NO: 402984 - DNA, 509 bp, Homo sapiens
ttatgaaagatatcatacctgattataaaaacatagttctttgtagataacttaaactttctacttgattgtatcgttcttgaaggcggactgtcttactgatctctttcagatcccagttaatgcttagatgtataaatactagataaattaattaattaattaaaatatttacccaaagaatacttcagcataaatatattgtgattgatgataaaaggtagtgytaagataaattgtagcaatattcattttcttgctcagtccaatacagtttttaatgccttttcgttttcctaatttgatttatatattatttctataataaaatgtgatagaacagtttcttctgatatatgacagtatgtcattattctgaatattattcattttggtaaagagcttttttgttaaaaaatagttaaggaatgaaaacagggagaaatcaatgtgaccattatgttttgaaaaagaaaatatttcaatgctatatttttttcacttatatg

SEQ ID NO: 402985 - DNA, 600 bp, Homo sapiens
tttattatatatttgaatactgtaatactttctctttcttttttattttttctccacaccatgattctgtatctctcctttttaaactacataattttctgttaatattacatatttaactttttctgttttttgcatcattttagaagttttttagaaaattagcccttttggctgagtacagtggctcatgcctgtaatcccagcacttgaggaggccgaggcgggcagatcacctgaggtcaggagttcaagaccagcctggccaacatggtgaaacccagtctctactaaaaatacaaaaattaatcgggcatggtggtgcaagtgtgtagtcccagctactcaggagactgaagcaggagaatcgcttgagcccaggaggcagaagttgcagtgagctgaggtcacgccactgcactcyagcctgtatgacagagcaagactctgtctcaaaaaaataaaaaaataaaaaataaaaaataaataattgcccttttacagatttcatgcattttgtttcatatattagtaattcacttcttacataagtgttaacaattttgattagaagttcttagtcttctcatttctaactgc

SEQ ID NO: 402986 - DNA, 535 bp, Homo sapiens
tgatgacagcctcagtgatggtggctgcctctcccccaaggaactcagttgtcttaggcagtgtccagcctgaagccactggcctcaacccgattggattgcacagctctcagtttgggacccaaggccctggtggggtggactcacaaggagatctcctgatccacaggatgtacagatctgaagaaagaatgyggtttcccaggcagggcagcacagttactcactgcctcccttgtctgggtgtgagagttccccttatcctgtgtggcaccttggtcattgcaccaccctgcttttcctcactctgtgtgggtcacactaactgcctagtcagtcccagtgagagaacctggatacctcagttgatagagcaggattcacttactgtttttgttcttctcagtgggaactgcagactggagctgcttctaactggccatcttggctcctctcccctctgtttttttattgtagattcaggggtacatgtacaggtttattatgtgggtatattgcatgatgttaaagtttg

SEQ ID NO: 402987 - DNA, 624 bp, Homo sapiens
aaaaaaaaaacccacaaaaacaaaacaagcctgtaaccatgagtataatascttgcagtatgttctgtcagtccatatagtaaattattgacatgggaactgctttggaaaactacccccaaacttgcagctagtgtcagaagtgaagatggtcttatggagaacagtgtcctcgaacttcagtatggctaactctagataagaggcctaaatgattcttgcagtgtaatgagccgagcagatagtatcacattcttaggatgtgataaggccttcagacaaatatatgttttacctctgggaaagtaacttaacctctcaggtttcaatttcactatctgcaattttataataacaattgaggacctcatttcttttgaagaatatatgttaagaatttttgattgttgtaatggtaacatatctaggtactatatgataagaaacacaatgatactacttattttaaatgtgtgaccatctctaagaactggtacttgatattaaatgattttattcacttttacatagctttgtattataatttagatagtttcttctgtggtcagagcaaaatttccatttagtcatgaatttagtcaatttaaatattgcagagtcata

SEQ ID NO: 402988 - DNA, 587 bp, Homo sapiens
ggcaggttcttacggtcttggacagcaggtgtggcacgggtgatggcagtaccagtggcaggcccactctctggctcccaagtgctttgtaatggtgttggtggtggctgtgatgggctgggtaagccagtcttcaggcctgaaggtggcatgtgcaggtgagttgcagcaggttggatgtgctaccttatggtcttcagaagaagtgcttatgtgccaacactggtggaagagattgagtgatctccaggcccctgcatggcatgttcaggcacyggttcaggaatcagtatataaccccaccagagttaatgagatgcaaatgtaagtcactgcaaaataggactttcacctgagaagacttgaaatttgggctactggtgactgagaataaagccaatatagaaacaaataaacaacaacaacaaaacctcagagataaattgggtcttgatggcatcttttgagttcaaacccatccctggatttattataatgtaagccaaaaatttatctttcatgctcataacagtttgaattgtgttttcttacaaacaagtcatttctagctgataacaaaagttatc

SEQ ID NO: 402989 - DNA, 650 bp, Homo sapiens
agtatcaaagtttactagtaagttcaaagatacattgtttattctgatctgctcccttagtatttgttgagagaataactatatttcagcaggaaaaagaaatctgagcaggtttctgctgtatttcctcagatcacaaaactttctctatattttgtttctttttcccatttctrtttctaatactcaaagtgtttcccttcactctatttggtcattaatcaactttgtccatctatgcatgtcagaattgtctggatttttggattggagaaagtactcagcaatttataagtccaattcatatttctttgctacgagaaagttacacagcttgaatcacatgaagtacaactaaattcctaatgcagcatttttcatgtgaaaaaaagtaatgaattatttcacgtccaaaatccctgttgctagtcttgtgattgccaaaagccttaagtgacttcactaatggaagtctcaaggcgcttcttcctgctccttagctcaattagtgttatcctttgccttccaacagtgaaatacatttatttctggtccacacattatgtaaataacttctcttcatttgcagatggccttcatattgtcatgctggtttgtgtgtgtgtgtgtgtgtgtgtgtgtgtgtgtgt

SEQ ID NO: 402990 - DNA, 532 bp, Homo sapiens
acttacattttcttatgtgatcatcaaaatagctttattggtaagtacatgaaatatactatttttctggaaatggctgaacaagggggtacacttctaatttccatttttattttatttttttctttttattattatttttttttattttaagttctgggatacatgtacagaacgtgcaggtttgttacataggtatatatgtgccatggtggtttgctgcacctatcaaccaaaacacatatccttctatacttttgattttttatacatcaataactcacattttctgaaaccctaaggaaaaattggatttgcagctgcaaaracaaatttattactgagttaccccttatgtattaaaattgtatgccaccttgctgacagaattttactgaagtcttctaattttactaagttaacattatgtgatacaattttaaaaattacatttactagtatttccaaagctaacaaataatttaacaatattaaattaatattcattttatgtgtagctgaagatattttt

SEQ ID NO: 402991 - DNA, 557 bp, Homo sapiens
tgctgtaaaaaagtttactattcaatagacagtctagttatcatttgtttaacatcgctgagaaaagaatataggtaaaagcttatgtaggaactttttccatgaacttaagaatgagttaacaaaaatcactaagctattttacctttaaaaccctcattggtgtaatttgtgattgtgattggttaggcagagttcagcaaccataatagttattgaagtctgcacaaaaaatgttgctctaatatgtgcatgtattttgcttgtttagtgtatctacaaatacaccagttgtcataactaatcaatcagtttatctattaaaaggttttttaatgtgtttatttatggctagttctgtcaagtgtttgaaatactggaaatcagatyttctcactgaatataggaaggattgcagtttgaatataatcattaaatgactgaaatcacataaatcacattaatatatttttttctctttttaaccagttgaattaagcctcttttatcatgtatgtttctttaccccgctgctattaaacaaggcaatcctttta

SEQ ID NO: 402992 - DNA, 513 bp, Homo sapiens
aagggatagataatatcagaaataatgaagtcatttttgacgaaaagactagaattctatcaccaaaataaatgaaatattgtgagacaattctctattgggtctcacacttccacacctttgtaaagcaaaggcattggcaacttgcgttttgtactatcttttcaaggattgttgtatagcaaatagcttgggaagatagagataatttctcccttcagagcagaaggcagatttattgtccaaccagaataataaagataatgcttccctttagggcaaagttgtgcttgttgctaactgtggcattaggagatgggtgattcttaaactcaggatgctcagctatgacacaagctcactatatgcacagcacccaccygtgtctacccctacgttgtcccttgggatatgagagcagggggaagtgatttgcatatatgataagttcttgctgggagctgtatgcttcgatgaaagaagccatttgtctctgtcctaacagactacaaa
